United States Patent Application Publication US 2021/0199660 A1 - sequence listing, part 3

SEQ ID NO: 27988 - DNA, 120 bp, Artificial Sequence
  ENSG00000041353_23 (sequence is synthesized)
tgaaagctttcatgctgttagcccctgatgaaattctcagcattaactggccagctcctctgatttctgcagcatcgcaacaggttcgaagatgggttgtggctgggtattccctcccat

SEQ ID NO: 27989 - DNA, 120 bp, Artificial Sequence
  ENSG00000041353_24 (sequence is synthesized)
ggtgtttcctctgggatgctcttcattatctcaatgcctgtgccatgaagatagaaaactgtaagctaacatttaagatgtttcttctggaaggaaagtgagcaggaacaagttatattg

SEQ ID NO: 27990 - DNA, 120 bp, Artificial Sequence
  ENSG00000041353_25 (sequence is synthesized)
ccactgctgtggcaaattttggtgaacttttggggtcattatatcaattttttctttggattcaaattgtaatgtcccctgcatttccttaatagggaatgtgaaacctttataaaactc

SEQ ID NO: 27991 - DNA, 120 bp, Artificial Sequence
  ENSG00000041353_26 (sequence is synthesized)
taaaagtattctgttttgatatgtctttttgtttctattcattttcagttatatgattgatttacttatgccaagattctgtcactgtcagttatttaatgagtgttttttcagggtctg

SEQ ID NO: 27992 - DNA, 120 bp, Artificial Sequence
  ENSG00000041353_27 (sequence is synthesized)
ttttaagatcattatttgatagctgtagcatgaagcagaggttgatgatgcccataattgcaagactattcctgtaaaaataacaattattgggtaataacttcaagaggaatgagaagt

SEQ ID NO: 27993 - DNA, 120 bp, Artificial Sequence
  ENSG00000041353_28 (sequence is synthesized)
gacaaaattgatttaaaatattgttctacttataaataaatgcttgatataaaaaattttctccataaagtttgacatctgaccccagattctatgtaatcattattagaaattccttct

SEQ ID NO: 27994 - DNA, 120 bp, Artificial Sequence
  ENSG00000041353_29 (sequence is synthesized)
atttcaaattgttctggtgccataaagtatacagactactttaaagatttccaaatcccctaatttaccccacaacagcatgtaattttagccaagatatgtcctgttactaagtatctc

SEQ ID NO: 27995 - DNA, 120 bp, Artificial Sequence
  ENSG00000041353_30 (sequence is synthesized)
ccaatgctttagtaaaacgtatttaggagaaatgttgaaaatgtacatgaagctcctttctgatatagaaaccatttctggagtatttacactggtttgatgtttacattgctctaactc

SEQ ID NO: 27996 - DNA, 120 bp, Artificial Sequence
  ENSG00000041353_31 (sequence is synthesized)
ggtgcctcagatacctctgtgaccaaatttgtctccaaccacatagctcatttcctataatgttatatcataggaagccctcacagagacactaacacagctaaagatcttctgatatta

SEQ ID NO: 27997 - DNA, 120 bp, Artificial Sequence
  ENSG00000041353_32 (sequence is synthesized)
tcagcaagggatgcaaggactttattggaatctggagagtttaactgccttctcttggtctcctcacttacttcttatgaagttggcattacctgagactcttagctgtgattaggtaca

SEQ ID NO: 27998 - DNA, 120 bp, Artificial Sequence
  ENSG00000041353_33 (sequence is synthesized)
agcttaccttttagggtagaaaaagaaagatcatttgaaaaatgtatctaaaataatccagagaacataatgtttgtcttggtctgataatgataagaagtcaaggattggcagagaaaa

SEQ ID NO: 27999 - DNA, 120 bp, Artificial Sequence
  ENSG00000041353_34 (sequence is synthesized)
tactaaacgccaagagttgagcctgtgggtctctccataagagttttaaaactcttgccagttaccactttatccaatttgctatcattttcgtattatcagctatcgccctgtaaaata

SEQ ID NO: 28000 - DNA, 120 bp, Artificial Sequence
  ENSG00000041353_35 (sequence is synthesized)
ttcaaaactagctatttctaaagtaaacattttatctgttacttttaaccagataggtgtctttgtcatccttctactataaattgttctttgccaacctgtacaggtagatgaaccagg

SEQ ID NO: 28001 - DNA, 120 bp, Artificial Sequence
  ENSG00000041353_36 (sequence is synthesized)
cgagagttttaatcagccttttcttgtcccctttgtaagaaagagatgcttgccatagagaaggacatgagtacattaaaaataatttaatagccacaatatgatgttctttaagctgca

SEQ ID NO: 28002 - DNA, 120 bp, Artificial Sequence
  ENSG00000041353_37 (sequence is synthesized)
aattgagtacactgggaatcaacaaatttgatgaagcctgtctgtctcttcaccagtggagtgagtgcagcagttagaaagagaagcaatattgtgcaactggtgcagtggtgagttaat

SEQ ID NO: 28003 - DNA, 120 bp, Artificial Sequence
  ENSG00000041353_38 (sequence is synthesized)
catagtgtataaccttgtgttcatgaaacaggttgttcattgttctgcatctctcttcatttaaaaaggatacacaattctttcctcattgcatattacaccaaacgtttgagggaaaaa

SEQ ID NO: 28004 - DNA, 120 bp, Artificial Sequence
  ENSG00000041353_39 (sequence is synthesized)
tcctcattcgtaaaggattttggatgtataatctaaaactcaacaataaagaaataatattccaagtctctggtttcctaagatacataataactgtttataaagaaggtctaagagctg

SEQ ID NO: 28005 - DNA, 120 bp, Artificial Sequence
  ENSG00000041353_40 (sequence is synthesized)
atatttgccaaagtgatagaagagttgttttttcctctctactaccaagctttaagacattaaaagaagtctagtgtatttgaatattttagagaaagctttatcattttttaagatgcc

SEQ ID NO: 28006 - DNA, 120 bp, Artificial Sequence
  ENSG00000041353_41 (sequence is synthesized)
aagatgctgcctacgtttgcaaaagttgtctaagaattcaccatgagctatattttcttctggatctttgaccaaggtgatgtcagcttatttctggggaaggtgttgagctcttataca

SEQ ID NO: 28007 - DNA, 120 bp, Artificial Sequence
  ENSG00000041353_42 (sequence is synthesized)
tgaaaatggatataggctattctctgggatgagtgtcatttcaatgctttataaatccatgaagctgcttgtctcataaagtagaactgatacaaattttggttggatatatagagaatt

SEQ ID NO: 28008 - DNA, 120 bp, Artificial Sequence
  ENSG00000041353_43 (sequence is synthesized)
ttataaatgtattgccttagaatttctgggtggagacccaactacaatgacattgtcatgccagaactataaagataattagagttaaaagttgtttaaattgtgcccttaaatacagca

SEQ ID NO: 28009 - DNA, 120 bp, Artificial Sequence
  ENSG00000041353_44 (sequence is synthesized)
gaacctggagaaggtcatacttcaaaggtcgattttgagtccgaataaagaaagacctagtaacagatagtttttttttgttcattttcttctaccaagtagaggtttatgccctcagaa

SEQ ID NO: 28010 - DNA, 120 bp, Artificial Sequence
  ENSG00000041353_45 (sequence is synthesized)
ctaaactagtaaaaatatctgaacaaaaaacctttcgttgttggcataaaaatgtgatacacttagagacattttgtttattgcatataaatctaatttttccataaattagatttatga

SEQ ID NO: 28011 - DNA, 120 bp, Artificial Sequence
  ENSG00000041353_46 (sequence is synthesized)
tattttcataaagcacttgattagtttttcaaggcgtaccatcacaaagatgctttcctgcagagttctttgtatcaacagcctatggttgagatgttttctcatttcctgtagagagag

SEQ ID NO: 28012 - DNA, 120 bp, Artificial Sequence
  ENSG00000041353_47 (sequence is synthesized)
aataccactaacaaacaaacaaaaactttagtgccaaaatagtggaactattttgtcatcttttgagaaaaaaatatacaaagaagtcatcttttcattaagtggattccctggttcctt

SEQ ID NO: 28013 - DNA, 120 bp, Artificial Sequence
  ENSG00000041353_48 (sequence is synthesized)
tccagctggttgtggaagtaatggctaacatccttcagctgactttgtctacaaggattattagcaaattctgtaggagcaagcatgtctgaccttaacttaatggatcccttattcaat

SEQ ID NO: 28014 - DNA, 120 bp, Artificial Sequence
  ENSG00000041353_49 (sequence is synthesized)
cagtggcttctgtctttatgtctgttggcatatcaaaatggtttctgttcctagaaaagtaataacatatgcttatctttattctttttccaggtgattttgttttcaaatgctccttgt

SEQ ID NO: 28015 - DNA, 120 bp, Artificial Sequence
  ENSG00000041353_50 (sequence is synthesized)
gaaaacacctagtgttgtagaaaggaaagtggccagaaagaacaacttgggaccatgagtaggtcattaaatagcttagtgatttatcctcatatagggcttataaaccctgtatgtgtt

SEQ ID NO: 28016 - DNA, 120 bp, Artificial Sequence
  ENSG00000041353_51 (sequence is synthesized)
tatatgtgcttcacagagttcgtgtcaggctcaaaggagatatgtataagaaagtggtttgtaaattatgttccatttcataaatagacactattcacaaactaaaatctaataaaaaac

SEQ ID NO: 28017 - DNA, 120 bp, Artificial Sequence
  ENSG00000041353_52 (sequence is synthesized)
cacagttgtaatttaaactgcttgatataaaaagaggtatcatagcagggaaaacacactaattttcatacagtagaggtattgaaaactgaaaatgggaaggcaacttgaagtcattgt

SEQ ID NO: 28018 - DNA, 120 bp, Artificial Sequence
  ENSG00000041353_53 (sequence is synthesized)
atttgattgaaaatgtttaatacatctcattattgacaaaatatgtcatcttgtatttatttcaaggaaaccaatgaattctaggtagtatattacaagttggtcaaaatattccatgta

SEQ ID NO: 28019 - DNA, 120 bp, Artificial Sequence
  ENSG00000041353_54 (sequence is synthesized)
caaatagggcttctgtgtccatagccttgtaagagatactgattgtatctgaaattattttttaaaaaaataaattatcctgctttagttagtgtgttaaaagtagacgatgttctaata

SEQ ID NO: 28020 - DNA, 120 bp, Artificial Sequence
  ENSG00000041353_55 (sequence is synthesized)
taacactgaagtgcttcattgtatcccaacagtttaccttcaagtaatattatctttatttttaggctaagcacgtttgattattttgtctgtctcctatatagatctgttttgtctagt

SEQ ID NO: 28021 - DNA, 120 bp, Artificial Sequence
  ENSG00000041353_56 (sequence is synthesized)
gctatgaatgtaacttaaaactataaacttgaagtttttattctatatgccccttaatagactgtggttcctgacgcacactgttaggtcattattttgttgtaccaaagttctagtggc

SEQ ID NO: 28022 - DNA, 120 bp, Artificial Sequence
  ENSG00000041353_57 (sequence is synthesized)
ttcagaaatcatagcatccaatgattttttggtgtctggctatgaatactatggttgagaattgtattcagtgattgtttctgcacacttttcaaataaaaaatgaatttttatcaatta

SEQ ID NO: 28023 - DNA, 120 bp, Artificial Sequence
  ENSG00000041353_58 (sequence is synthesized)
ggccaactgcaagcaaatgcttattgtgaaaatccagatatagtattaattggcaacaaggcagacctaccagatcagagggaagtcaatgaacggcaagctcgggaactggctgacaaa

SEQ ID NO: 28024 - DNA, 120 bp, Artificial Sequence
  ENSG00000041353_59 (sequence is synthesized)
tttgctgttacacaggaagagagcaggcagcatcagtatcggctcagcatccttcccccttctgttcgattagaagctgatcgaagcaacagtgccataaagaaatgggctagatatttc

SEQ ID NO: 28025 - DNA, 120 bp, Artificial Sequence
  ENSG00000041357_0 (sequence is synthesized)
atattagcagcggttattcggtgagcggtggtggtttattcttccgtggagttaagggctccgtggacatctcaggtcttcagggtcttccatctggaactatataaagttcagaaaaca

SEQ ID NO: 28026 - DNA, 120 bp, Artificial Sequence
  ENSG00000041357_1 (sequence is synthesized)
tgtctcgaagatatgactccaggaccactatattttctccagaaggtcgcttataccaagttgaatatgccatggaagctattggacatgcaggcacctgtttgggaattttagcaaatg

SEQ ID NO: 28027 - DNA, 120 bp, Artificial Sequence
  ENSG00000041357_2 (sequence is synthesized)
atggtgttttgcttgcagcagagagacgcaacatccacaagcttcttgatgaagtctttttttctgaaaaaatttataaactcaatgaggacatggcttgcagtgtggcaggcataactt

SEQ ID NO: 28028 - DNA, 120 bp, Artificial Sequence
  ENSG00000041357_3 (sequence is synthesized)
ctgatgctaatgttctgactaatgaactaaggctcattgctcaaaggtatttattacagtatcaggagccaataccttgtgagcagttggttacagcgctgtgtgatatcaaacaagctt

SEQ ID NO: 28029 - DNA, 120 bp, Artificial Sequence
  ENSG00000041357_4 (sequence is synthesized)
atacacaatttggaggaaaacgtccctttggtgtttcattgctgtacattggctgggataagcactatggctttcagctctatcagagtgaccctagtggaaattacgggggatggaagg

SEQ ID NO: 28030 - DNA, 120 bp, Artificial Sequence
  ENSG00000041357_5 (sequence is synthesized)
ccacatgcattggaaataatagcgctgcagctgtgtcaatgttgaaacaagactataaagaaggagaaatgaccttgaagtcagcacttgctttagctatcaaagtactaaataagacca

SEQ ID NO: 28031 - DNA, 120 bp, Artificial Sequence
  ENSG00000041357_6 (sequence is synthesized)
tggatgttagtaaactctctgctgaaaaagtggaaattgcaacactaacaagagagaatggaaagacagtaatcagagttctcaaacaaaaagaagtggagcagttgatcaaaaaacatg

SEQ ID NO: 28032 - DNA, 120 bp, Artificial Sequence
  ENSG00000041357_7 (sequence is synthesized)
aggaagaagaagccaaagctgagcgtgagaagaaagaaaaagaacagaaagaaaaggataaatagaatcagagattttattactcatttggggcaccatttcagtgtaaaagcagtccta

SEQ ID NO: 28033 - DNA, 120 bp, Artificial Sequence
  ENSG00000041357_8 (sequence is synthesized)
ctcttccacactaggaaggctttactttttttaactggtgcagtgggaaaataggacattacatactgaattgggtccttgtcatttctgtccaattgaatactttattgtaacgatgat

SEQ ID NO: 28034 - DNA, 120 bp, Artificial Sequence
  ENSG00000041357_9 (sequence is synthesized)
ggttacccttcatggacgtcttaatcttccacacacatcccctttttttggaataaaatttggaaaatggaaatgaaggaataaattctctgtagcagtaattgttaaatatacaaaaac

SEQ ID NO: 28035 - DNA, 120 bp, Artificial Sequence
  ENSG00000041357_10 (sequence is synthesized)
tgacagggcgattactttttgcacattgtggcttacagtcctttcacaaagatgggcacgttcctcaggctggccagattattcgtctctgtctgcaggaattggtttgagaatgaacac

SEQ ID NO: 28036 - DNA, 120 bp, Artificial Sequence
  ENSG00000041357_11 (sequence is synthesized)
gtgagctgaacaaagccagaattgatgtgtgggtgtggatctcgcagctaggactgaggctgcccacaggcagcagctcaagctgcgcggaagatgaggtgtagaagttaaggccacaga

SEQ ID NO: 28037 - DNA, 120 bp, Artificial Sequence
  ENSG00000041357_12 (sequence is synthesized)
ggaaaagtggaaccaagagatgagaacagttacgtgttggctgaagggagctctgttgctggggtttgttcaacctgagttcccttggctatctgtggcttcatgacagaagtgatacag

SEQ ID NO: 28038 - DNA, 120 bp, Artificial Sequence
  ENSG00000041357_13 (sequence is synthesized)
ggcagtggtacttaatgcgtagccatggtgctttagcatcacctatgcagattctgatgtcccatcccagatctactgaattaaaatctctgagggtgaaacccagtaatctgttctaac

SEQ ID NO: 28039 - DNA, 120 bp, Artificial Sequence
  ENSG00000041357_14 (sequence is synthesized)
aagctctgcatgtgattcttaggaatgctaagtaaaactttaagaagtttttgttgcatattagaatcacctaggaagcttttgcagcttgtaagcatgctgtatcgattaactcaagct

SEQ ID NO: 28040 - DNA, 120 bp, Artificial Sequence
  ENSG00000041357_15 (sequence is synthesized)
ctgtggtggaacccagatattaacattgcttaaactcttcaggtgatttccatcagctagggtgagtgcattgagccatcatttacccttctctcagctgttgtcaaccaaatatgtgct

SEQ ID NO: 28041 - DNA, 120 bp, Artificial Sequence
  ENSG00000041357_16 (sequence is synthesized)
cccagtctaatttctcattgtagattttcttaatgcagctccctgcagttttctgtataggctaaagtatttacaagccctatttgcagcacttttttgaacttctaaattattctctta

SEQ ID NO: 28042 - DNA, 120 bp, Artificial Sequence
  ENSG00000041357_17 (sequence is synthesized)
ctctgtacagcaggttctcgttatttttggtagttatgttctaaagtcaccacaaaaactaacaaaatactgaactcttgcacctagagaaagtactgggttagggtcctacaagccact

SEQ ID NO: 28043 - DNA, 120 bp, Artificial Sequence
  ENSG00000041357_18 (sequence is synthesized)
ctacttaaagacacctttttaaatgtgtattgtggattcattaacatagaactcagccaacagctctttacgtgaatgtttttgttttgttttgttttttgagactgggtcttgctctgt

SEQ ID NO: 28044 - DNA, 120 bp, Artificial Sequence
  ENSG00000041357_19 (sequence is synthesized)
ctggagtgcagtggcgtgatcatatttcactgcaggctcaaacggtcttcctgccttgacctcccaaagtgttgacatcacagccctcttatgcttaggaacaacactaaacagtgtttt

SEQ ID NO: 28045 - DNA, 120 bp, Artificial Sequence
  ENSG00000041357_20 (sequence is synthesized)
cctcttatgcttaggaacaacactaaacagtgtttttttcatagagacggtgagcagggaaggtctcaccatgtttcccatgccggtctcaagctcctggactcaagcgatcctcctgcc

SEQ ID NO: 28046 - DNA, 120 bp, Artificial Sequence
  ENSG00000041357_21 (sequence is synthesized)
tgcttaggaacattaaacagcacttcagcactatacctgggtgccatttgaaatagtaaaatcactaagaaaaatgcaaaaataaacggcacaaggtagactgcaggaacacttacacgg

SEQ ID NO: 28047 - DNA, 120 bp, Artificial Sequence
  ENSG00000041357_22 (sequence is synthesized)
tgtgagagctgaaacaagaattcagagtgtcgccttgctcaacctcagatgggaacatgtgcacctgggtactcaaaattttcaccactctgcatgtcaacaaatgactaaaagtaccac

SEQ ID NO: 28048 - DNA, 120 bp, Artificial Sequence
  ENSG00000041357_23 (sequence is synthesized)
aagtattggtttgggggttacatgtacattttatgagaatgcaaattttgcaaattcacaagtacagaatcagcaagtagtgaagatgaatggcacgtcttcaccctccagtcttgctac

SEQ ID NO: 28049 - DNA, 120 bp, Artificial Sequence
  ENSG00000041357_24 (sequence is synthesized)
acccagaggttgaggtagtcaataaatcttattaactctgtctgcagaatttacccataatccagccactttccactgcaggaacgctggtccaattcaccattatctctgacttggact

SEQ ID NO: 28050 - DNA, 120 bp, Artificial Sequence
  ENSG00000041357_25 (sequence is synthesized)
attgcaacagcctcctaactggttccttgcctccacttcattccccacagtcaattctccagcagcagccacagtgatcctttcaaaatgtaaacggtactactgcacagttttggctca

SEQ ID NO: 28051 - DNA, 120 bp, Artificial Sequence
  ENSG00000041357_26 (sequence is synthesized)
aaaccctccaatggcttcccatcttgctcagtaagagtcaaattctttgtactggttcatgaggtatcctgtattctggccttgtgctaccttccatgtgcttccttcctcactcattca

SEQ ID NO: 28052 - DNA, 120 bp, Artificial Sequence
  ENSG00000041357_27 (sequence is synthesized)
tccaaatgagccttctcatcattccctgaatgtgccaagctcccctcacatcacttgccaatccctctgccttgggaatgctcttcctgggtatctattgcccactccctcatctccagg

SEQ ID NO: 28053 - DNA, 120 bp, Artificial Sequence
  ENSG00000041357_28 (sequence is synthesized)
tctctgcttgcatgtcaccttttttggggtacttctgtgaaggagcaatctctttcccctgcacactcacattttctattccctatacataccctgttgagtttttctccatagcactca

SEQ ID NO: 28054 - DNA, 120 bp, Artificial Sequence
  ENSG00000041357_29 (sequence is synthesized)
tcaccagctggcatatttgtttcttgtctctccccactggaatacagacttccagagcagtactttgttttcattcaatagtcgtgtctcggtacctagaacagaaactggcacgtgtta

SEQ ID NO: 28055 - DNA, 120 bp, Artificial Sequence
  ENSG00000041357_30 (sequence is synthesized)
ggcaacaaataagtactgatgaatgaataaataccctggatatgctggtgtgaaatcctaaaaaatacctgctttccatccagatcagtagcactggtggattttctgtatcctgactac

SEQ ID NO: 28056 - DNA, 120 bp, Artificial Sequence
  ENSG00000041357_31 (sequence is synthesized)
cccttcaacatttgcctaaagctaggacaacttcttcaaaggcaatagtgaataagagagcctggtatagtttgccgccacattaggaaagtcttcagaatttgaccctaacagcaggca

SEQ ID NO: 28057 - DNA, 120 bp, Artificial Sequence
  ENSG00000041357_32 (sequence is synthesized)
aatttcaacgtattcatctttttgttgaaataaattcatactgtgaggaaaagcaaaagataggaggtgaggcaaaagctactctttaactgtgagttttttttccttgcgatggggttt

SEQ ID NO: 28058 - DNA, 120 bp, Artificial Sequence
  ENSG00000041357_33 (sequence is synthesized)
ggctgcctagtctagattctcacgctagccccactttcgtctgctctgtggcatatttttaacctgagttgcaggacaggtggtttccagagtgttgcctgatgcatcccaaatgctgcc

SEQ ID NO: 28059 - DNA, 120 bp, Artificial Sequence
  ENSG00000041357_34 (sequence is synthesized)
ttagcaatacacatctgaacaggggcccatcactaatagcaagcatttcattaatctgagcaaaactcatgggttttcacagggaccctaccagctcagaagcacgttgatataaataag

SEQ ID NO: 28060 - DNA, 120 bp, Artificial Sequence
  ENSG00000041357_35 (sequence is synthesized)
tagaaaaccaaagacagctaagttttaaatcttgagtcaaaactttaaaatcaaagtcaaattgatttcattttggtgagctttcaaatcatgcttttaaaaataaattatgtaaaaaaa

SEQ ID NO: 28061 - DNA, 120 bp, Artificial Sequence
  ENSG00000041357_36 (sequence is synthesized)
gctgggattacaggcgtgagccattgtggcaagcctgtctttttattctttgttgctgaatcttcttgagattacattagcttcttggcgttaattttgttatcctattcataggtggta

SEQ ID NO: 28062 - DNA, 120 bp, Artificial Sequence
  ENSG00000041357_37 (sequence is synthesized)
ctattcataggtggtaatgataaatacatctattaaataacttaaagggtgcatttgtttatctttcatgttgagtgacatcgagtaaacatctcctacaaagataaaacttgtaggttt

SEQ ID NO: 28063 - DNA, 120 bp, Artificial Sequence
  ENSG00000041357_38 (sequence is synthesized)
ggcattagccactgcacctggcctagttttgatgtttctaaggagagctcacttttgcaaagattaaagtcattaaaaatctttgaattgaaaattacagatttttttcaaccaaactta

SEQ ID NO: 28064 - DNA, 120 bp, Artificial Sequence
  ENSG00000041357_39 (sequence is synthesized)
caaaatattatttactatgagaatattcagatgttgacttgttccctccccttcaaattacaaatgactgttaggttgtccccatggcatagattgcttttcagagaatattttccttag

SEQ ID NO: 28065 - DNA, 120 bp, Artificial Sequence
  ENSG00000041357_40 (sequence is synthesized)
tgtctcgaagatatgactccaggaccactatattttctccagaaggtaaaatagaaattgtttaatctgcctcaagtttaaaaataaatgtgttagacttttagaaaaaaaaattacaaa

SEQ ID NO: 28066 - DNA, 120 bp, Artificial Sequence
  ENSG00000041357_41 (sequence is synthesized)
ctttttttggtagttgcaaagttcatcctttttgtactttgaagcaattatcatcaccaggttgattataccatagaagagtgaaagtggaaatttgtttctagcttgcttcattgctga

SEQ ID NO: 28067 - DNA, 120 bp, Artificial Sequence
  ENSG00000041357_42 (sequence is synthesized)
agtgccaagcctggacgccggggcccgcgagggggcgggctgagggtgggggtctgtgggcaggaccgagagttggggtggcttccgtcctcaggagttcggaactatataaagttcaga

SEQ ID NO: 28068 - DNA, 120 bp, Artificial Sequence
  ENSG00000041357_43 (sequence is synthesized)
attcggtgagcggtggtggtttattcttccgtggagttaagggctccgtggacatctcaggtcttcagggtcttccatctggaactatataaagttcagaaaacatggtgagttaataca

SEQ ID NO: 28069 - DNA, 120 bp, Artificial Sequence
  ENSG00000041357_44 (sequence is synthesized)
catgccaataaacggttgcctgataaacagtattgcttgtactcagtttacagacttgagtgggaaaattgaaatagaaggaaagcagtgagaaggtgccttttttcttgtcagtttcct

SEQ ID NO: 28070 - DNA, 120 bp, Artificial Sequence
  ENSG00000041357_45 (sequence is synthesized)
gacccaagggttctcagccttatttctgcctctcccatctctgatttactttcattttctgtatcgatttctcaaaaaatactttcttgattctttcatcatcccttttcccaccctacc

SEQ ID NO: 28071 - DNA, 120 bp, Artificial Sequence
  ENSG00000041357_46 (sequence is synthesized)
cccggttcctctttccacattataatctatgactgcctctctcacctaactgccagtattagcttttcaggacaggaactggttttacacattttggtattccagcatctagcataatgc

SEQ ID NO: 28072 - DNA, 120 bp, Artificial Sequence
  ENSG00000041357_47 (sequence is synthesized)
ttagctctcccggaggtgccggtgaactcaaaatagtgctgtgcccggcgtcaggcgtggagacaacagaaagttgtgcttaaagctcgaatcagaaatccccggaactatataaagttc

SEQ ID NO: 28073 - DNA, 120 bp, Artificial Sequence
  ENSG00000041357_48 (sequence is synthesized)
tcggtgagcggtggtggtttattcttccgtggagttaagggctccgtggacatctcaggtcttcagggtcttccatctggtgagcctttggccccttggggcccgcggaagcttggccgc

SEQ ID NO: 28074 - DNA, 120 bp, Artificial Sequence
  ENSG00000041357_49 (sequence is synthesized)
tttcccattgggcgggggtcgtgaacgtcaagacagtcggtcccggcctgcagttgccgccgaggagccgtgggcacgatgactctgcaccgcctcctctgtgacggaccgaccgccggg

SEQ ID NO: 28075 - DNA, 120 bp, Artificial Sequence
  ENSG00000041357_50 (sequence is synthesized)
ccgccggccgccgtcgggggcttcccagtgccaagcctggacgccggggcccgcgagggggcgggctgagggtgggggtctgtgggcaggaccgagagttggggtggcttccgtcctcag

SEQ ID NO: 28076 - DNA, 120 bp, Artificial Sequence
  ENSG00000041357_51 (sequence is synthesized)
gtcctcaggagttcggtacgtgaaagttagctctcccggaggtgccggtgaactcaaaatagtgctgtgcccggcgtcaggcgtggagacaacagaaagttgtgcttaaagctcgaatca

SEQ ID NO: 28077 - DNA, 120 bp, Artificial Sequence
  ENSG00000041357_52 (sequence is synthesized)
gaaatccccggcgagtgtctctgtgtcctccctgcttctctgctctgtgccatccttactttgcaccattcctattgcaattacctcaaccagttcgctgccctcggtctctcaccagcc

SEQ ID NO: 28078 - DNA, 120 bp, Artificial Sequence
  ENSG00000041357_53 (sequence is synthesized)
agagtgatcatttaaaatgccaatcagttcctgtgggccttgggaatcattcagaggagccccattggctgagagataaaattctgtttttacctgggcacgcgggctctccaggatttg

SEQ ID NO: 28079 - DNA, 120 bp, Artificial Sequence
  ENSG00000041357_54 (sequence is synthesized)
attccagcttacctttccagtcttgattccctatattccagtatttggaaatgtgggccttggactgaggctttaccaaataacgctgaacacctagtattgccttttgcacgaatggta

SEQ ID NO: 28080 - DNA, 120 bp, Artificial Sequence
  ENSG00000041357_55 (sequence is synthesized)
ctgatggtgcccaagataactgcctccacccccaagttcaggacccagatcactctctggagaaggcctcagcctcttgccttggctttcaaggctctgcgtgatttggatactcgctta

SEQ ID NO: 28081 - DNA, 120 bp, Artificial Sequence
  ENSG00000041357_56 (sequence is synthesized)
gctcttatttatatatattttaaaagcatcagcagtttatctcatgcccactaaactatcctgcctccgtaccctttgttcatactttctgctctgtgtggaatgcccttctttcttccc

SEQ ID NO: 28082 - DNA, 120 bp, Artificial Sequence
  ENSG00000041515_0 (sequence is synthesized)
ctgcgctcggagactttcagtgaaagcagaggagagatttccaaaggttgtattttccttctggttggagcctctcatccacattgtggttgctttcagctatgtaacgtttttcgatcc

SEQ ID NO: 28083 - DNA, 120 bp, Artificial Sequence
  ENSG00000041515_1 (sequence is synthesized)
catgagatggaaatcgaccagtgcttgctagagtcccttccccttggccaacggcagcgtctagtgaagcgcatgcgctgtgagcaaatcaaagcctactatgagcgcgagaaggctttt

SEQ ID NO: 28084 - DNA, 120 bp, Artificial Sequence
  ENSG00000041515_2 (sequence is synthesized)
cagaagcaggaagggttcctgaaaaggctgaagcatgcgaagaatccgaaagttcacttcaacctcacggacatgctacaggacgcgattatccaccacaatgacaaagaagtgcttcgg

SEQ ID NO: 28085 - DNA, 120 bp, Artificial Sequence
  ENSG00000041515_3 (sequence is synthesized)
ctcctgaaggagggggcagacccccacaccctcgtctcctcgggagggtccctgctccatctgtgtgctcggtatgataatgccttcattgcagaaattctgattgacagaggagtcaac

SEQ ID NO: 28086 - DNA, 120 bp, Artificial Sequence
  ENSG00000041515_4 (sequence is synthesized)
gtcaaccaccaggatgaagacttctggacgcccatgcacattgcctgtgcctgcgataaccctgatattgtcctgcttcttgtattagctggagccaatgtccttctccaggatgtgaat

SEQ ID NO: 28087 - DNA, 120 bp, Artificial Sequence
  ENSG00000041515_5 (sequence is synthesized)
ggaaatatcccattagattatgctgtagaagggacagaatccagctctatcctgttgacctatctggatgaaaatggagtggatttgacctcactgcgccagatgaagcttcagagacca

SEQ ID NO: 28088 - DNA, 120 bp, Artificial Sequence
  ENSG00000041515_6 (sequence is synthesized)
atgagtatgttaacagatgtcaaacacttcttatcatctggaggaaatgtcaatgagaaaaacgatgaaggagtaaccctgttacacatggcgtgtgcgagtggctacaaggaggtggtg

SEQ ID NO: 28089 - DNA, 120 bp, Artificial Sequence
  ENSG00000041515_7 (sequence is synthesized)
tctcttatcctggaacatggtggagacctcaacatagtagatgatcagtactggactcccctccacttggcagccaaatatggccagacaaatctggtgaaacttctcctgatgcatcag

SEQ ID NO: 28090 - DNA, 120 bp, Artificial Sequence
  ENSG00000041515_8 (sequence is synthesized)
gcaaacccacacctcgtgaactgtaatgaggagaaggcgtcagatattgctgcctctgagtttattgaggaaatgctgctgaaagccgaaattgcctgggaagaaaaaatgaaagagcct

SEQ ID NO: 28091 - DNA, 120 bp, Artificial Sequence
  ENSG00000041515_9 (sequence is synthesized)
ttatctgcttctaccttagctcaagaagagccctatgaagagatcattcacgatcttcccgtactgtcgagtaagctcagtcccctggtgttaccaattgccaagcaagacagtttgttg

SEQ ID NO: 28092 - DNA, 120 bp, Artificial Sequence
  ENSG00000041515_10 (sequence is synthesized)
gaaaaagacattatgttcaaagatgcaacaaaaggtctgtgtaagcagcagtctcaggacagcatccctgaaaaccccatgatgagcggttccaccaaacccgagcaggtcaagctaatg

SEQ ID NO: 28093 - DNA, 120 bp, Artificial Sequence
  ENSG00000041515_11 (sequence is synthesized)
cctcctgccccaaacgatgacctggcaacgctcagcgagctcaatgatggcagcctgctctatgagattcagaagcgctttgggaacaatcagatctatacattcattggagacattctt

SEQ ID NO: 28094 - DNA, 120 bp, Artificial Sequence
  ENSG00000041515_12 (sequence is synthesized)
ttgcttgttaacccatacaaggagcttccaatttattcttccatggtgtcccagctgtatttcagctcctcagggaagctgtgttcctcgctgcctcctcacctcttctcctgtgtggag

SEQ ID NO: 28095 - DNA, 120 bp, Artificial Sequence
  ENSG00000041515_13 (sequence is synthesized)
agagcctttcaccagctcttccgggaacagcggcctcagtgtttcatcctcagtggagaaaggggatcaggaaagtctgaagccagcaaacaaatcataagacacctcacctgcagggct

SEQ ID NO: 28096 - DNA, 120 bp, Artificial Sequence
  ENSG00000041515_14 (sequence is synthesized)
ggcgccagcagggccacactggattccagattcaaacatgtcgtgtgcatcttagaagcctttggacatgccaagaccacacttaatgatttgtccagttgcttcatcaagtattttgaa

SEQ ID NO: 28097 - DNA, 120 bp, Artificial Sequence
  ENSG00000041515_15 (sequence is synthesized)
ctgcagttctgtgagaggaaacaacagctaaccggagccagaatttatacatatttgctagagaaatccagacttgtttcacaacctcttggccagagcaattttctcattttctacttg

SEQ ID NO: 28098 - DNA, 120 bp, Artificial Sequence
  ENSG00000041515_16 (sequence is synthesized)
ttgatggatgggttatctgctgaagaaaaatatggacttcatcttaataatttatgtgcacaccggtatttgaaccagaccatacaggatgatgcatccacaggggagcgttctctgaac

SEQ ID NO: 28099 - DNA, 120 bp, Artificial Sequence
  ENSG00000041515_17 (sequence is synthesized)
agggagaaattggctgttttgaaacgagccctgaatgtagttggcttcagcagcttggaggtggagaatctgttcgtaattctagcagcaatattgcaccttggagacattcggtttact

SEQ ID NO: 28100 - DNA, 120 bp, Artificial Sequence
  ENSG00000041515_18 (sequence is synthesized)
gccctgaatgaggggaactccgccttcgtttctgacctccagctcctggaacaagtggctggaatgttacaagtatcaacagatgaattggcatctgccttaacaactgatattcaatat

SEQ ID NO: 28101 - DNA, 120 bp, Artificial Sequence
  ENSG00000041515_19 (sequence is synthesized)
tttaaaggggatatgataatacgacgacataccatacagattgctgagtttttccgagacctcttggccaagtccctgtacagtcgtttgtttagctttttggtgaataccatgaattct

SEQ ID NO: 28102 - DNA, 120 bp, Artificial Sequence
  ENSG00000041515_20 (sequence is synthesized)
tgcctccacagtcaagatgaacagaaaagcatgcagacattggatattggaatattggacatttttggttttgaagagtttcaaaagaatgaatttgaacaactttgtgtcaacatgacc

SEQ ID NO: 28103 - DNA, 120 bp, Artificial Sequence
  ENSG00000041515_21 (sequence is synthesized)
aatgagaagatgcaccactatatcaatgaagtgctttttctccacgagcaagtggaatgtgtacaagagggagttaccatggaaacagcatattctcctggtaaccagaatggagttttg

SEQ ID NO: 28104 - DNA, 120 bp, Artificial Sequence
  ENSG00000041515_22 (sequence is synthesized)
gacttttttttccagaagccatctggatttctcaccttattggatgaagaaagtcaaatgatttggtcagtggaatcaaattttccaaaaaaactacaaagtctcctagaatcctcaaac

SEQ ID NO: 28105 - DNA, 120 bp, Artificial Sequence
  ENSG00000041515_23 (sequence is synthesized)
acaaatgcggtgtactcccccatgaaggatgggaatgggaatgttgccctcaaagaccacggtacagccttcaccatcatgcactacgcaggaagggtaatgtatgatgttgttggggcg

SEQ ID NO: 28106 - DNA, 120 bp, Artificial Sequence
  ENSG00000041515_24 (sequence is synthesized)
attgaaaaaaataaagactccctttcacagaatcttctatttgtaatgaaaactagtgaaaatgtcgtgatcaatcatttgttccagtcgaaattgtcacaaacaggatccctcgtatct

SEQ ID NO: 28107 - DNA, 120 bp, Artificial Sequence
  ENSG00000041515_25 (sequence is synthesized)
gcctatccttcctttaaattccgaggacataagtctgccctgctcagtaagaaaatgacagcttcttcaattattggagaaaacaagaattatctagaacttagtaagttattaaaaaag

SEQ ID NO: 28108 - DNA, 120 bp, Artificial Sequence
  ENSG00000041515_26 (sequence is synthesized)
aaaggaacttctacatttcttcaaagattggaacgaggagatccagtcaccatagcatcacaactcaggaaatcactaatggatattattggaaaacttcagaagtgcactccacacttc

SEQ ID NO: 28109 - DNA, 120 bp, Artificial Sequence
  ENSG00000041515_27 (sequence is synthesized)
attcattgcatcaggcccaataactcaaagctgccagatacttttgataatttttacgtgtctgctcagctacaatatattggggtcctggagatggtgaagatcttccgatatggatac

SEQ ID NO: 28110 - DNA, 120 bp, Artificial Sequence
  ENSG00000041515_28 (sequence is synthesized)
ttcctgtcaaggtataagccactggctgatacattcctgcgtgagaagaaggaacagtcagctgccgagcgatgtcgacttgttctccagcagtgtaaattacaaggctggcagatggga

SEQ ID NO: 28111 - DNA, 120 bp, Artificial Sequence
  ENSG00000041515_29 (sequence is synthesized)
gtccgaaaagtgtttctaaaatactggcatgctgaccaactcaatgatttgtgcctacagttgcagagaaaaattataacctgccaaaaagttatcagaggatttttagcacgccagcac

SEQ ID NO: 28112 - DNA, 120 bp, Artificial Sequence
  ENSG00000041515_30 (sequence is synthesized)
ctgcttcagagaataagcatcagacaacaagaggtgacttctatcaatagctttctgcagaacacagaggacatggggctgaaaacctacgatgccctggtcattcagaatgcttcagac

SEQ ID NO: 28113 - DNA, 120 bp, Artificial Sequence
  ENSG00000041515_31 (sequence is synthesized)
attgcccgggaaaatgaccggctccgtagtgaaatgaacgctccctaccataaagagaagttagaggtcaggaacatgcaagaggaaggaagcaaaagaaccgatgacaagagtggaccc

SEQ ID NO: 28114 - DNA, 120 bp, Artificial Sequence
  ENSG00000041515_32 (sequence is synthesized)
aggcatttccaccccagctccatgtcagtctgcgcggccgtggatggcctgggccagtgcctcgttggcccgtccatctggtctccttcgctgcactcggtgttcagcatggatgacagc

SEQ ID NO: 28115 - DNA, 120 bp, Artificial Sequence
  ENSG00000041515_33 (sequence is synthesized)
agcagcctcccgtctccacggaaacagcccccgcccaagccaaagagggaccccaacacccggctgagtgcttcctatgaggctgtgagcgcctgcctctccgcggccagggaagcggcc

SEQ ID NO: 28116 - DNA, 120 bp, Artificial Sequence
  ENSG00000041515_34 (sequence is synthesized)
aacgaagctctggcccggcccagaccgcacagcgacgactacagcaccatgaagaagattcctcctcgaaagcccaagcgcagccccaacaccaagctcagcggctcctacgaggagata

SEQ ID NO: 28117 - DNA, 120 bp, Artificial Sequence
  ENSG00000041515_35 (sequence is synthesized)
aggcccgcgggcgccccgggggcagcagcgcgcgttctgacccccgggactccgcagtgcgcgctgcccccggcggcgcctccgggtgacgaggacgacagcgagcctgtgtacatcgag

SEQ ID NO: 28118 - DNA, 120 bp, Artificial Sequence
  ENSG00000041515_36 (sequence is synthesized)
gacagcgagcctgtgtacatcgagatgctggggcacgcggccaggcccgatagcccggaccccggggagtccgtgtacgaggagatgaagtgttgcctgcccgacgacggcggcccgggc

SEQ ID NO: 28119 - DNA, 80 bp, Artificial Sequence
  ENSG00000041515_37 (sequence is synthesized)
gcgggctccttcctgctccacggcgcatcgccgcccctgctccaccgcgcgccggaggacgaggcggcggggcccccagg

SEQ ID NO: 28120 - DNA, 120 bp, Artificial Sequence
  ENSG00000041515_38 (sequence is synthesized)
ccgcaccggccgcccctgctggtgttccccccgacccccgtcacctgctcccccgcctccgacgagtcgcccctgacacccctggaggtgaagaagctgccagtcctggagaccaacctc

SEQ ID NO: 28121 - DNA, 120 bp, Artificial Sequence
  ENSG00000041515_39 (sequence is synthesized)
aagtaccccgtgcagccggaggggtcgagcccgctgtccccgcagtactccaagagccagaagggcgacggcgacaggcccgcgtcccccggcctggcgctgttcaacgggtccggccga

SEQ ID NO: 28122 - DNA, 80 bp, Artificial Sequence
  ENSG00000041515_40 (sequence is synthesized)
gccgccccccgcgccctacaggccctgcgcgcacttggccttcccgccggagcccgccccggtgaacgcggggaaagcgg

SEQ ID NO: 28123 - DNA, 120 bp, Artificial Sequence
  ENSG00000041515_41 (sequence is synthesized)
gcggggccgagcgcagaggcgcccaaggttcacccaaagccaaactctgcccccgtggccgggccctgcagctccttccccaagatcccatattcccccgtgaaggccaccagggcggac

SEQ ID NO: 28124 - DNA, 120 bp, Artificial Sequence
  ENSG00000041515_42 (sequence is synthesized)
gccaggaaggccggctccagtgcctcgccccccgcgccctacagccctcccagctccaggcctctcagcagccccctggacgagctcgccagcctcttcaactcggggaggagtgtgctt

SEQ ID NO: 28125 - DNA, 120 bp, Artificial Sequence
  ENSG00000041515_43 (sequence is synthesized)
cggaaatccgcggcgggaagaaaaatcagggaagcagaaggttttgaaactaacatgaacataagtagccgagatgaccctagtacgtcagaaattacttccgagactcaagacagaaat

SEQ ID NO: 28126 - DNA, 120 bp, Artificial Sequence
  ENSG00000041515_44 (sequence is synthesized)
gcaaataaccatggaattcagttatctaattcactatctagtgctataactgctgaaaatggaaattccatctcaaatggtttacctgaagaagatggatactcacggttgtctataagt

SEQ ID NO: 28127 - DNA, 120 bp, Artificial Sequence
  ENSG00000041515_45 (sequence is synthesized)
ggcacagggacttcgacatttcaaagacacagggacagtcacaccactcaggtaatccatcagctgaggctctcagagaatgaaagtgtggccctgcaggaactcttggactggaggaga

SEQ ID NO: 28128 - DNA, 120 bp, Artificial Sequence
  ENSG00000041515_46 (sequence is synthesized)
aagctctgtgaggaaggacaagactggcagcagatcctgcaccacgctgagcccagggtgcctcccccaccaccttgcaagaagcccagccttctgaagaagccggaaggggcctcctgc

SEQ ID NO: 28129 - DNA, 120 bp, Artificial Sequence
  ENSG00000041515_47 (sequence is synthesized)
aacaggctgccgtctgagctctgggacaccaccatttgatgtggcctgaactgcagacttacaaaatagaactgcctactgattccgggctgcaacaacagaaggctgccttctgacatg

SEQ ID NO: 28130 - DNA, 120 bp, Artificial Sequence
  ENSG00000041515_48 (sequence is synthesized)
aacagaaggctgccttctgacatgcgctggggcttctctccacgcatttagacaaaaaaagcacaggacacagacactaaatatatgagatcccgtgtgtgtgtgtgtgtgtttgtgtgt

SEQ ID NO: 28131 - DNA, 120 bp, Artificial Sequence
  ENSG00000041515_49 (sequence is synthesized)
atctcgtggtgatacactctgattttcaagctcctcatttacggctctgtgctacccctaggtagcaagagagaggctgggaaaagtgtggacgtggccagagcgagagagtagcggagg

SEQ ID NO: 28132 - DNA, 120 bp, Artificial Sequence
  ENSG00000041515_50 (sequence is synthesized)
aaaggagcaatccatgcacactctgtacagttgtttttctacggttcaacagtctgtttattgtacttccaatggttttattataatacagtatacgggacatatattttatttctttgt

SEQ ID NO: 28133 - DNA, 120 bp, Artificial Sequence
  ENSG00000041515_51 (sequence is synthesized)
agctacttgtgttttattggtattataaacctgataattatttacatgtttattactgtaattttataaatttatgcaattggtggtgcttcctttcttcaaaatacagattttaaaaaa

SEQ ID NO: 28134 - DNA, 120 bp, Artificial Sequence
  ENSG00000041515_52 (sequence is synthesized)
tcatttctagattatttttttcctccacagtccttttttttcacctaacgcacctaaatcttgaaactacattgttgttttagcttcgccagtgtcaccccttgcaaaactatgaattga

SEQ ID NO: 28135 - DNA, 120 bp, Artificial Sequence
  ENSG00000041515_53 (sequence is synthesized)
gccccatgttttaggtgttactcatggatgaggaggctgttctttcctatgccctgtatttctggataagtggattgtgtaccctttagttaaatttcacctcccgacttcagcatagat

SEQ ID NO: 28136 - DNA, 120 bp, Artificial Sequence
  ENSG00000041515_54 (sequence is synthesized)
cacaggaaatcacatggcacacggttaaacacgtatggcttcaaatccatagccggtggtgtaaaatgatcatattcattcaaaggcctacacagtacaaatgagcacgctgccatgtac

SEQ ID NO: 28137 - DNA, 120 bp, Artificial Sequence
  ENSG00000041515_55 (sequence is synthesized)
tggtttgagcagtaggggctgcatcgcacagcgctcgtcccccgggacttacactgcatgattccctcactgtatatcctcaaccctcccataatgcaaggccttgttcattgatgtgct

SEQ ID NO: 28138 - DNA, 120 bp, Artificial Sequence
  ENSG00000041515_56 (sequence is synthesized)
ttcgtcggctgtcggaaagttctgagcagtggctccagaccaccttgtcttgctacttggaactttttattcataccagcctttgaaaagttactgtgccaataaagaggtacaactgtg

SEQ ID NO: 28139 - DNA, 120 bp, Artificial Sequence
  ENSG00000041515_57 (sequence is synthesized)
accagtggtgcctcaagacccaccggggagaggcttatcttaactccagctgccgaatgagaatgagtttgaagctttttgcaggatcatggaacagagcctccatgcaatagtgcatcc

SEQ ID NO: 28140 - DNA, 120 bp, Artificial Sequence
  ENSG00000041515_58 (sequence is synthesized)
tgaggtaaactgttacctgagtaagggctttaagtaatgcatttcctgggaacgacagttgtgacagaagagaatgctggaacccgtagcaagattcctgtctgagatggaaagatgtct

SEQ ID NO: 28141 - DNA, 120 bp, Artificial Sequence
  ENSG00000041515_59 (sequence is synthesized)
agaagcttcagggaggtggctcaggcctaggctgcaagcagggaacaggtaccagcaaaatatgctaggaagcttctcgctgggaggctaatataaatgggtgggccatttgctaggata

SEQ ID NO: 28142 - DNA, 120 bp, Artificial Sequence
  ENSG00000041515_60 (sequence is synthesized)
caagagaaacttgccattgggctgctagggaaactcgcccagggacgtgcgcccctgggtctcccacacgccagtgacaaggagacctggggctctctggcaagaaccacaagaagcccc

SEQ ID NO: 28143 - DNA, 120 bp, Artificial Sequence
  ENSG00000041515_61 (sequence is synthesized)
ctccagggccctctactgacagacccaacaccgttccagctggtaaaggaggaccctccggaggcccagccccaggatcaagaaaacagagcaaaacatgggtcgacctggagttgatcc

SEQ ID NO: 28144 - DNA, 120 bp, Artificial Sequence
  ENSG00000041515_62 (sequence is synthesized)
ttaattgatgatgggcacaacatggagcctgaaatcatttatttcattttcaagtttcaggctttctgacagaggcaaagcacctagccataaattgcagaaatgcttcattgaccacgg

SEQ ID NO: 28145 - DNA, 120 bp, Artificial Sequence
  ENSG00000041515_63 (sequence is synthesized)
attaccatggtggggctggagccaatgtccttctccaggatgtgaatggaaatatcccattagattatgctgtagaagggacagaatccagctctatcctgttgacctatctggatgaaa

SEQ ID NO: 28146 - DNA, 120 bp, Artificial Sequence
  ENSG00000041515_64 (sequence is synthesized)
ctcggatttcctgtcaaggtaaattcttctgctcttaaaatcgtcgttctcgctgctgttcagtgcagtgtactgacactgacactattgtagcaagggtcttctgttgtcttttttggc

SEQ ID NO: 28147 - DNA, 120 bp, Artificial Sequence
  ENSG00000041515_65 (sequence is synthesized)
actgcttttgttgtttacttttttctatctccaataaacaaaatattctgggaaacaatgaaatacactgacaaagctcacataaaaaataattaaactgtactgaggacagtatcttgg

SEQ ID NO: 28148 - DNA, 120 bp, Artificial Sequence
  ENSG00000041515_66 (sequence is synthesized)
aaaccattctcatgttcctttcaaagtgtggctttccttggattaaagttttgtaaaatgattgcatgtgatatttactatttattatttaaaaggagaatgtatgtaagtgattatttc

SEQ ID NO: 28149 - DNA, 120 bp, Artificial Sequence
  ENSG00000041515_67 (sequence is synthesized)
agtgattatttccccttttatatatgaacaaaatattatttagatcagtggttggcaaactacactcatgggccagccaaatccagcctaccacctgtttttgtaaataaagttttattg

SEQ ID NO: 28150 - DNA, 120 bp, Artificial Sequence
  ENSG00000041515_68 (sequence is synthesized)
ttttgtatttatacaggaggtgtcagatttttttttttgtaaagggctagagaataaatattttagaccttgtgcaccataagatccttgttgcagttactcacctctgctgttataatg

SEQ ID NO: 28151 - DNA, 120 bp, Artificial Sequence
  ENSG00000041515_69 (sequence is synthesized)
tgaaaaacagctgtagacaatacaaatggatgtgactgtattctgataaaattttatttacaaaaacaggcagtgggccatgtttggctcaggagccatgattgctcactcactctatca

SEQ ID NO: 28152 - DNA, 120 bp, Artificial Sequence
  ENSG00000041515_70 (sequence is synthesized)
taaaagcaaaatatttgtggttgccatcatgttttatgaatctgtgaaatactttgatgcttgtacatatttattaaaagcaagtgtaattcataaataataatttttatttgcaggtac

SEQ ID NO: 28153 - DNA, 120 bp, Artificial Sequence
  ENSG00000041515_71 (sequence is synthesized)
tttgcttatagtatctaattcaattttcgtagcatcaaaaagctcccagttgaggaagatggtgaggtctgttgtagaatgtacacaagcagagctgagtctctgagaccactaaccagg

SEQ ID NO: 28154 - DNA, 120 bp, Artificial Sequence
  ENSG00000041515_72 (sequence is synthesized)
tacagtcagggagcttggagacagctcatagagacacacagcaaatacactcattagtgcctaagattagaagtaaagtctacttcactcaaaaggaggcagaaaaaaaaaaaaaaaaaa

SEQ ID NO: 28155 - DNA, 120 bp, Artificial Sequence
  ENSG00000041802_0 (sequence is synthesized)
gggaagcttcgtccagcggtcgtgttgccatgggccggaggagagccccggccggtgggtcgctgggacgggcccttatgcgccatcagactcagcggagccgaagccatcgtcacactg

SEQ ID NO: 28156 - DNA, 120 bp, Artificial Sequence
  ENSG00000041802_1 (sequence is synthesized)
actcctggttgcacacaagtgaactcaatgatggctatgattggggtcgtcttaatcttcagtcagtgactgaacagagctcccttgatgacttccttgctactgcagaacttgcaggaa

SEQ ID NO: 28157 - DNA, 120 bp, Artificial Sequence
  ENSG00000041802_2 (sequence is synthesized)
cagagtttgtagctgagaaacttaatattaagtttgtgcctgctgaggctagaactggactactgtctttcgaggagagccagagaattaagaagctccatgaagaaaacaaacagttct

SEQ ID NO: 28158 - DNA, 120 bp, Artificial Sequence
  ENSG00000041802_3 (sequence is synthesized)
tgtgtataccgaggagaccaaactggaaccaaaatactaccccagaagaactcaaacaagcagagaaagataactttctagaatggagacgtcagcttgtccggctagaagaggaacaga

SEQ ID NO: 28159 - DNA, 120 bp, Artificial Sequence
  ENSG00000041802_4 (sequence is synthesized)
agctgatattgactccatttgaacgaaatttggacttttggcgccagctctggagagtcattgagagaagtgatattgtggtccagatagtagatgctcgaaacccactcctgtttagat

SEQ ID NO: 28160 - DNA, 120 bp, Artificial Sequence
  ENSG00000041802_5 (sequence is synthesized)
gtgaggatttggaatgttatgtgaaagaaatggatgccaataaggagaacgtcattctgatcaacaaggcagacttgctgactgctgagcagcggagtgcctgggccatgtacttcgaaa

SEQ ID NO: 28161 - DNA, 120 bp, Artificial Sequence
  ENSG00000041802_6 (sequence is synthesized)
aagaagatgtgaaggttattttctggtcagctttggccggagccattcccctgaatggtgactctgaggaagaggcaaacagagatgatagacaaagcaacacaaccaagtttggacatt

SEQ ID NO: 28162 - DNA, 120 bp, Artificial Sequence
  ENSG00000041802_7 (sequence is synthesized)
ccagtttcgaccaggctgaaatttcccacagtgaatccgaacatctcccagctagggattctccttcacttagtgaaaatcccacaacggatgaagatgacagtgagtatgaggactgtc

SEQ ID NO: 28163 - DNA, 120 bp, Artificial Sequence
  ENSG00000041802_8 (sequence is synthesized)
cagaggaggaggaagacgactggcagacgtgctcagaagaagacggtcccaaggaagaggactgcagccaggactggaaggaaagctctactgcagattctgaggctcggagcaggaaaa

SEQ ID NO: 28164 - DNA, 120 bp, Artificial Sequence
  ENSG00000041802_9 (sequence is synthesized)
ccccacagaagaggcagatacacaattttagccatctggtatccaagcaggagttactggagctctttaaggagctacacactgggagaaaggtgaaagatgggcaacttacggtcggac

SEQ ID NO: 28165 - DNA, 120 bp, Artificial Sequence
  ENSG00000041802_10 (sequence is synthesized)
tggtgggctaccctaatgttggtaagagttcaacaatcaacaccatcatgggcaacaagaaagtatctgtgtctgccacacctggtcacacaaagcactttcagactctctatgtggagc

SEQ ID NO: 28166 - DNA, 120 bp, Artificial Sequence
  ENSG00000041802_11 (sequence is synthesized)
ctggcctctgcctgtgtgactgtcctggcttggtgatgccatcttttgtgtctaccaaggcagaaatgacttgcagcggaatcctcccaattgatcagatgagagatcatgttcctcctg

SEQ ID NO: 28167 - DNA, 120 bp, Artificial Sequence
  ENSG00000041802_12 (sequence is synthesized)
tatcactagtttgccagaatattccaagacatgttttagaagctacctatggcattaacatcataacgcctagagaggatgaagatccccaccgacctccaacatcggaagaactgttga

SEQ ID NO: 28168 - DNA, 120 bp, Artificial Sequence
  ENSG00000041802_13 (sequence is synthesized)
gccagaccagcctcgatctgcgcgctacatcctgaaggactatgtcagtggtaagctgctgtactgccatcctcctcctggaagagatcctgtaacttttcagcatcaacaccagcgact

SEQ ID NO: 28169 - DNA, 120 bp, Artificial Sequence
  ENSG00000041802_14 (sequence is synthesized)
cctagagaacaaaatgaacagtgatgaaataaaaatgcagctaggcagaaataaaaaagcaaagcagattgaaaatatcgttgacaaaacttttttccatcaagagaatgtgagggcttt

SEQ ID NO: 28170 - DNA, 120 bp, Artificial Sequence
  ENSG00000041802_15 (sequence is synthesized)
gaccaaaggagtccaggctgtgatgggttacaagcccgggagtggtgtagtgactgcatccactgcgagctctgagaacggggcggggaagccctggaaaaaacatggcaacagaaataa

SEQ ID NO: 28171 - DNA, 120 bp, Artificial Sequence
  ENSG00000041802_16 (sequence is synthesized)
aaaagaaaaaagtcgtagactctacaagcacctggatatgtgaggttgggctgcaacagaaatgtcatctgcattgtgcagatggaaaagagcagaagctgcctgttgcctgtggaaccg

SEQ ID NO: 28172 - DNA, 120 bp, Artificial Sequence
  ENSG00000041802_17 (sequence is synthesized)
tcccaagacactagcactgtagaacgggccctgctcttgcagagcacggctgcacccaacagtctccatgtcaagaccaagggcctcctggaaacaccaactctgacaaaaaggagtcat

SEQ ID NO: 28173 - DNA, 86 bp, Artificial Sequence
  ENSG00000041802_18 (sequence is synthesized)
gggcctcctggaaacaccaactctgacaaaaaggagtcatctgggagcccgagaatcctactcctggccgggcacagtggctcacg

SEQ ID NO: 28174 - DNA, 75 bp, Artificial Sequence
  ENSG00000041802_19 (sequence is synthesized)
accagggaggcagagtttgcagtgaatgcatcacaagaaaaaaaatttgcaagggatggttcacgagacacattt

SEQ ID NO: 28175 - DNA, 120 bp, Artificial Sequence
  ENSG00000041802_20 (sequence is synthesized)
agaaaaaaaatttgcaagggatggttcacgagacacatttgggacgaaggtgaaagagaaattccccattctgagtgtcctagttgggttcctccgactctaaacaagggacttgggttc

SEQ ID NO: 28176 - DNA, 120 bp, Artificial Sequence
  ENSG00000041802_21 (sequence is synthesized)
agttagtgtacagcgggggctcacgtccactaaggaacatgtagaatgtaaccaccgggtgacagggaagctgcggtatttactacctagcccccatcttcactggttattccacttatt

SEQ ID NO: 28177 - DNA, 120 bp, Artificial Sequence
  ENSG00000041802_22 (sequence is synthesized)
taaaatgtccagaataagcaaatctccatatagaggaagtagattagtggttgcttcgggatgggaggaatgggaagattgaggtctttcttttgcagtgataaaaatgtcctaaaattg

SEQ ID NO: 28178 - DNA, 120 bp, Artificial Sequence
  ENSG00000041802_23 (sequence is synthesized)
actgtagcgatggtcacacaactctgaatatgcttaagaccattgaattacacactttacgttggtgaattgtatggtatgtaaattatagttcaataacatagttacaaaagataatca

SEQ ID NO: 28179 - DNA, 120 bp, Artificial Sequence
  ENSG00000041802_24 (sequence is synthesized)
aaagcatgaaagcactgttgatgtggtttggatctgtgtcctcaccgagtctcatgttgaaatgtaagccccctggtgggaggcgatgggattatggggcagagtcctcacgaacggttt

SEQ ID NO: 28180 - DNA, 120 bp, Artificial Sequence
  ENSG00000041802_25 (sequence is synthesized)
agcaccacccgctcagtgctgttctcctgatattgagtcctcatcacatctggttgcttcaaagtgtgtggtgcctcccctctgtctccctcctgctctggccatataagatgtgcctgc

SEQ ID NO: 28181 - DNA, 89 bp, Artificial Sequence
  ENSG00000041802_26 (sequence is synthesized)
gtgcctgcttctccttcgccttctaaaagcaaaagctgctgtgcttcctgtaccatctacaggaccgtgagccaattaaacctcttttc

SEQ ID NO: 28182 - DNA, 120 bp, Artificial Sequence
  ENSG00000041802_27 (sequence is synthesized)
gagaagtgctggacacctgtagtccccactatatttgtgagggatttgaggggcttgccaccagctgcagaaagttatcttattgctgtactttcttatacgtgatggaagaagttggac

SEQ ID NO: 28183 - DNA, 120 bp, Artificial Sequence
  ENSG00000041802_28 (sequence is synthesized)
ttgccattcctgcttcagccgggcaacctaatgatattgtggtccagatagtagatgctcgaaacccactcctgtttagatgtgaggatttggaatgttatgtgaaagaaatggatgcca

SEQ ID NO: 28184 - DNA, 120 bp, Artificial Sequence
  ENSG00000041802_29 (sequence is synthesized)
gaattcatatggaaaagtcgtgggagcttaaggccttgtttaaaagggaaaaaacaactgagtctttttagattaatcaaaaactatcctcttcctttggagaggagagagtgtttgtca

SEQ ID NO: 28185 - DNA, 120 bp, Artificial Sequence
  ENSG00000041802_30 (sequence is synthesized)
gtgtgttgtgattattcaaatgtccatccgatcagcctcacccagtgtggaagatgcgatggaaaccactgtctgtagatggggcagtgagggaaggctgggaacaaggggatgaaattt

SEQ ID NO: 28186 - DNA, 120 bp, Artificial Sequence
  ENSG00000041802_31 (sequence is synthesized)
tctgtagcatctgctgttaacagcaaaacatataatattaaaatgtgcataacttggccatttgtcactggagatgtgtctgaataaatatacccacaccacaggagaaaaaagatgtct

SEQ ID NO: 28187 - DNA, 120 bp, Artificial Sequence
  ENSG00000041802_32 (sequence is synthesized)
caacaaacacagcatggatttcaaataattttctaaagtaaccagatgcttatgctagtcttgccaccatctatgtcatatctttgagtcttttgatagatgtactgttttactgtttgg

SEQ ID NO: 28188 - DNA, 120 bp, Artificial Sequence
  ENSG00000041802_33 (sequence is synthesized)
tagggcttcaggtttattttgggcatttgagggattcagatttgatgaagaattgaaaatactagtgatctgcacaagtttatactgtgagatagcatgagaacttcagaatagaacctc

SEQ ID NO: 28189 - DNA, 120 bp, Artificial Sequence
  ENSG00000041802_34 (sequence is synthesized)
aaagaccgacgcacaaattaagaatggaccattcttttaactcagtcatttatccaaactcgagacattcgccaggaaatctatcgaaaatttcccagaaccattttttcacttatattc

SEQ ID NO: 28190 - DNA, 120 bp, Artificial Sequence
  ENSG00000041802_35 (sequence is synthesized)
tataatactggtaaaatcgagacgtaaaaggagaacttgagaacaagtcattctgctttcccctctcaagtttgagcctgaactacttgggctcgcttatcgtcacttccggggatcgaa

SEQ ID NO: 28191 - DNA, 120 bp, Artificial Sequence
  ENSG00000041802_36 (sequence is synthesized)
ccatgggccggaggagagccccggccgcctgagtgctgcaaaattcggggtcaaaagtcagataagttttgcaggagggacgcctcagccgggttttgaaggatgagttggagtttctgc

SEQ ID NO: 28192 - DNA, 120 bp, Artificial Sequence
  ENSG00000041802_37 (sequence is synthesized)
caagctgagtagcaggccctcctcctggcaaggcccagaacacaaagttgcacacaagtgaactcaatgatggctatgattggggtcgtcttaatcttcagtcagtgactgaacagagct

SEQ ID NO: 28193 - DNA, 120 bp, Artificial Sequence
  ENSG00000041802_38 (sequence is synthesized)
ttttaggatatcagatataagtaaatattctcctggattatctagtgtttttaatgctaaacaatatatattctacaatgatacctaattttttaaaatccaagagtaagaatgcttagt

SEQ ID NO: 28194 - DNA, 120 bp, Artificial Sequence
  ENSG00000041880_0 (sequence is synthesized)
gtatccgggcccaaggtcaccgcgcgaccggcagatgcgtgctgcaggccccggccacatgagcagcgctacggacgcgactgccccggccttggatatgccagatcgagtgtccacccg

SEQ ID NO: 28195 - DNA, 120 bp, Artificial Sequence
  ENSG00000041880_1 (sequence is synthesized)
tccgtgggactggtcgcctgactcggcctgccccagcctctgcttcaccccactggtggccaaatagccgatgtctaatcccccacacaagctcatccccggcctctggcgattgttggg

SEQ ID NO: 28196 - DNA, 120 bp, Artificial Sequence
  ENSG00000041880_2 (sequence is synthesized)
aattctctccctaattcacgcctgaggctcatggagagttgctagacctgggactgccctgggaggcgcacacaaccaggccgggtggcagccaggacctctcccatgtccctgcttttc

SEQ ID NO: 28197 - DNA, 120 bp, Artificial Sequence
  ENSG00000041880_3 (sequence is synthesized)
ttggctcggtgactcggcccggcaaccatgccagggctgaactagctgacacagggggaggagccccgaagtggaagagagagagcctcctttcactttccctacccctcaggacacaca

SEQ ID NO: 28198 - DNA, 120 bp, Artificial Sequence
  ENSG00000041880_4 (sequence is synthesized)
ggacagccatggctccaaagccgaagccctgggtacagactgagggccctgagaagaagaagggccggcaggcaggaagggaggaggaccccttccgctccaccgctgaggccctcaagg

SEQ ID NO: 28199 - DNA, 120 bp, Artificial Sequence
  ENSG00000041880_5 (sequence is synthesized)
ccatacccgcagagaagcgcataatccgcgtggatccaacatgtccactcagcagcaaccccgggacccaggtgtatgaggactacaactgcaccctgaaccagaccaacatcgagaaca

SEQ ID NO: 28200 - DNA, 120 bp, Artificial Sequence
  ENSG00000041880_6 (sequence is synthesized)
acaacaacaagttctacatcatccagctgctccaagacagcaaccgcttcttcacctgctggaaccgctggggccgtgtgggagaggtcggccagtcaaagatcaaccacttcacaaggc

SEQ ID NO: 28201 - DNA, 120 bp, Artificial Sequence
  ENSG00000041880_7 (sequence is synthesized)
tagaagatgcaaagaaggactttgagaagaaatttcgggaaaagaccaagaacaactgggcagagcgggaccactttgtgtctcacccgggcaagtacacacttatcgaagtacaggcag

SEQ ID NO: 28202 - DNA, 120 bp, Artificial Sequence
  ENSG00000041880_8 (sequence is synthesized)
aggatgaggcccaggaagctgtggtgaaggtggacagaggcccagtgaggactgtgactaagcgggtgcagccctgctccctggacccagccacgcagaagctcatcactaacatcttca

SEQ ID NO: 28203 - DNA, 120 bp, Artificial Sequence
  ENSG00000041880_9 (sequence is synthesized)
gcaaggagatgttcaagaacaccatggccctcatggacctggatgtgaagaagatgcccctgggaaagctgagcaagcaacagattgcacggggtttcgaggccttggaggcgctggagg

SEQ ID NO: 28204 - DNA, 120 bp, Artificial Sequence
  ENSG00000041880_10 (sequence is synthesized)
cgcacaacttcggccacagccagcccccgcccatcaattcccctgagcttctgcaggccaagaaggacatgctgctggtgctggcggacatcgagctggcccaggccctgcaggcagtct

SEQ ID NO: 28205 - DNA, 120 bp, Artificial Sequence
  ENSG00000041880_11 (sequence is synthesized)
ctgagcaggagaagacggtggaggaggtgccacaccccctggaccgagactaccagcttctcaagtgccagctgcagctgctagactctggagcacctgagtacaaggtgatacagacct

SEQ ID NO: 28206 - DNA, 120 bp, Artificial Sequence
  ENSG00000041880_12 (sequence is synthesized)
acttagaacagactggcagcaaccacaggtgccctacacttcaacacatctggaaagtaaaccaagaaggggaggaagacagattccaggcccactccaaactgggtaatcggaagctgc

SEQ ID NO: 28207 - DNA, 120 bp, Artificial Sequence
  ENSG00000041880_13 (sequence is synthesized)
tgtggcatggcaccaacatggccgtggtggccgccatcctcactagtgggctccgcatcatgccacattctggtgggcgtgttggcaagggcatctactttgcctcagagaacagcaagt

SEQ ID NO: 28208 - DNA, 120 bp, Artificial Sequence
  ENSG00000041880_14 (sequence is synthesized)
cagctggatatgttattggcatgaagtgtggggcccaccatgtcggctacatgttcctgggtgaggtggccctgggcagagagcaccatatcaacacggacaaccccagcttgaagagcc

SEQ ID NO: 28209 - DNA, 120 bp, Artificial Sequence
  ENSG00000041880_15 (sequence is synthesized)
cacctcctggcttcgacagtgtcattgcccgaggccacaccgagcctgatccgacccaggacactgagttggagctggatggccagcaagtggtggtgccccagggccagcctgtgccct

SEQ ID NO: 28210 - DNA, 120 bp, Artificial Sequence
  ENSG00000041880_16 (sequence is synthesized)
gcccagagttcagcagctccacattctcccagagcgagtacctcatctaccaggagagccagtgtcgcctgcgctacctgctggaggtccacctctgagtgcccgccctgtcccccgggg

SEQ ID NO: 28211 - DNA, 120 bp, Artificial Sequence
  ENSG00000041880_17 (sequence is synthesized)
tcctgcaaggctggactgtgatcttcaatcatcctgcccatctctggtacccctatatcactcctttttttcaagaatacaatacgttgttgttaactatagtcaccatgctgtacaaga

SEQ ID NO: 28212 - DNA, 120 bp, Artificial Sequence
  ENSG00000041880_18 (sequence is synthesized)
tccctgaacttatgcctcctaactgaaattttgtattctttgacacatctgcccagtccctctcctcccagcccatggtaaccagcatttgactctttacttgtataagggcagctttta

SEQ ID NO: 28213 - DNA, 88 bp, Artificial Sequence
  ENSG00000041880_19 (sequence is synthesized)
accagcatttgactctttacttgtataagggcagcttttataggttccacatgtaagtgagatcatgcagcagcataatgtgcaccgg

SEQ ID NO: 28214 - DNA, 120 bp, Artificial Sequence
  ENSG00000041880_20 (sequence is synthesized)
ccttttcttgctggagcagcaaagccagaaggaataacatcgcagcagagaggggccccacaggtcagcaggaggcaggctgagctgcccaccggtgcctccctgtgtcttgcagttatt

SEQ ID NO: 28215 - DNA, 120 bp, Artificial Sequence
  ENSG00000041880_21 (sequence is synthesized)
tgggcaggccctggactgagggaggggactcgttggagagttcccgctggttgggctctgccactgcccagctgcgcagcctcagccacagaactcccctctggcctcaggctggctggt

SEQ ID NO: 28216 - DNA, 120 bp, Artificial Sequence
  ENSG00000041880_22 (sequence is synthesized)
ctgggtgaggggtgagaggcaggcagggtggcaggggcctcagggtggcagggctgtggggctgagtctccccactcccctgtccccctagatgtgaagaagatgcccctgggaaagctg

SEQ ID NO: 28217 - DNA, 120 bp, Artificial Sequence
  ENSG00000041982_0 (sequence is synthesized)
ggccacagcctgcctactgtcacccgcctctcccgcgcgcagatacacgcccccgcctccgtgggcacaaaggcagcgctgctggggaactcgggggaacgcgcacgtgggaaccgccgc

SEQ ID NO: 28218 - DNA, 120 bp, Artificial Sequence
  ENSG00000041982_1 (sequence is synthesized)
agctccacactccaggtacttcttccaaggacctaggtctctcgcccatcggaaagaaaataattctttcaagaagatcagggacaactgatttgaagtctactctgtgcttctaaatcc

SEQ ID NO: 28219 - DNA, 120 bp, Artificial Sequence
  ENSG00000041982_2 (sequence is synthesized)
ccaattctgctgaaagtgagataccctagagccctagagccccagcagcacccagccaaacccacctccaccatgggggccatgactcagctgttggcaggtgtctttcttgctttcctt

SEQ ID NO: 28220 - DNA, 120 bp, Artificial Sequence
  ENSG00000041982_3 (sequence is synthesized)
gccctcgctaccgaaggtggggtcctcaagaaagtcatccggcacaagcgacagagtggggtgaacgccaccctgccagaagagaaccagccagtggtgtttaaccacgtttacaacatc

SEQ ID NO: 28221 - DNA, 120 bp, Artificial Sequence
  ENSG00000041982_4 (sequence is synthesized)
aagctgccagtgggatcccagtgttcggtggatctggagtcagccagtggggagaaagacctggcaccgccttcagagcccagcgaaagctttcaggagcacacagtggatggggaaaac

SEQ ID NO: 28222 - DNA, 120 bp, Artificial Sequence
  ENSG00000041982_5 (sequence is synthesized)
cagattgtcttcacacatcgcatcaacatcccccgccgggcctgtggctgtgccgcagcccctgatgttaaggagctgctgagcagactggaggagctggagaacctggtgtcttccctg

SEQ ID NO: 28223 - DNA, 120 bp, Artificial Sequence
  ENSG00000041982_6 (sequence is synthesized)
agggagcaatgtactgcaggagcaggctgctgtctccagcctgccacaggccgcttggacaccaggcccttctgtagcggtcggggcaacttcagcactgaaggatgtggctgtgtctgc

SEQ ID NO: 28224 - DNA, 120 bp, Artificial Sequence
  ENSG00000041982_7 (sequence is synthesized)
gaacctggctggaaaggccccaactgctctgagcccgaatgtccaggcaactgtcaccttcgaggccggtgcattgatgggcagtgcatctgtgacgacggcttcacgggcgaggactgc

SEQ ID NO: 28225 - DNA, 120 bp, Artificial Sequence
  ENSG00000041982_8 (sequence is synthesized)
agccagctggcttgccccagcgactgcaatgaccagggcaagtgcgtaaatggagtctgcatctgtttcgaaggctacgccggggctgactgcagccgtgaaatctgcccagtgccctgc

SEQ ID NO: 28226 - DNA, 120 bp, Artificial Sequence
  ENSG00000041982_9 (sequence is synthesized)
agtgaggagcacggcacatgtgtagatggcttgtgtgtgtgccacgatggctttgcaggcgatgactgcaacaagcctctgtgtctcaacaattgctacaaccgtggacgatgcgtggag

SEQ ID NO: 28227 - DNA, 120 bp, Artificial Sequence
  ENSG00000041982_10 (sequence is synthesized)
aatgagtgcgtgtgtgatgagggtttcacgggcgaagactgcagtgagctcatctgccccaatgactgcttcgaccggggccgctgcatcaatggcacctgctactgcgaagaaggcttc

SEQ ID NO: 28228 - DNA, 120 bp, Artificial Sequence
  ENSG00000041982_11 (sequence is synthesized)
acaggtgaagactgcgggaaacccacctgcccacatgcctgccacacccagggccggtgtgaggaggggcagtgtgtatgtgatgagggctttgccggtgtggactgcagcgagaagagg

SEQ ID NO: 28229 - DNA, 120 bp, Artificial Sequence
  ENSG00000041982_12 (sequence is synthesized)
tgtcctgctgactgtcacaatcgtggccgctgtgtagacgggcggtgtgagtgtgatgatggtttcactggagctgactgtggggagctcaagtgtcccaatggctgcagtggccatggc

SEQ ID NO: 28230 - DNA, 120 bp, Artificial Sequence
  ENSG00000041982_13 (sequence is synthesized)
cgctgtgtcaatgggcagtgtgtgtgtgatgagggctatactggggaggactgcagccagctacggtgccccaatgactgtcacagtcggggccgctgtgtcgagggcaaatgtgtatgt

SEQ ID NO: 28231 - DNA, 120 bp, Artificial Sequence
  ENSG00000041982_14 (sequence is synthesized)
gagcaaggcttcaagggctatgactgcagtgacatgagctgccctaatgactgtcaccagcacggccgctgtgtgaatggcatgtgtgtttgtgatgacggctacacaggggaagactgc

SEQ ID NO: 28232 - DNA, 120 bp, Artificial Sequence
  ENSG00000041982_15 (sequence is synthesized)
cgggatcgccaatgccccagggactgcagcaacaggggcctctgtgtggacggacagtgcgtctgtgaggacggcttcaccggccctgactgtgcagaactctcctgtccaaatgactgc

SEQ ID NO: 28233 - DNA, 120 bp, Artificial Sequence
  ENSG00000041982_16 (sequence is synthesized)
catggccagggtcgctgtgtgaatgggcagtgcgtgtgccatgaaggatttatgggcaaagactgcaaggagcaaagatgtcccagtgactgtcatggccagggccgctgcgtggacggc

SEQ ID NO: 28234 - DNA, 120 bp, Artificial Sequence
  ENSG00000041982_17 (sequence is synthesized)
cagtgcatctgccacgagggcttcacaggcctggactgtggccagcactcctgccccagtgactgcaacaacttaggacaatgcgtctcgggccgctgcatctgcaacgagggctacagc

SEQ ID NO: 28235 - DNA, 120 bp, Artificial Sequence
  ENSG00000041982_18 (sequence is synthesized)
ggagaagactgctcagaggtgtctcctcccaaagacctcgttgtgacagaagtgacggaagagacggtcaacctggcctgggacaatgagatgcgggtcacagagtaccttgtcgtgtac

SEQ ID NO: 28236 - DNA, 120 bp, Artificial Sequence
  ENSG00000041982_19 (sequence is synthesized)
acgcccacccacgagggtggtctggaaatgcagttccgtgtgcctggggaccagacgtccaccatcatccaggagctggagcctggtgtggagtactttatccgtgtatttgccatcctg

SEQ ID NO: 28237 - DNA, 120 bp, Artificial Sequence
  ENSG00000041982_20 (sequence is synthesized)
gagaacaagaagagcattcctgtcagcgccagggtggccacgtacttacctgcacctgaaggcctgaaattcaagtccatcaaggagacatctgtggaagtggagtgggatcctctagac

SEQ ID NO: 28238 - DNA, 120 bp, Artificial Sequence
  ENSG00000041982_21 (sequence is synthesized)
attgcttttgaaacctgggagatcatcttccggaatatgaataaagaagatgagggagagatcaccaaaagcctgaggaggccagagacctcttaccggcaaactggtctagctcctggg

SEQ ID NO: 28239 - DNA, 120 bp, Artificial Sequence
  ENSG00000041982_22 (sequence is synthesized)
caagagtatgagatatctctgcacatagtgaaaaacaatacccggggccctggcctgaagagggtgaccaccacacgcttggatgcccccagccagatcgaggtgaaagatgtcacagac

SEQ ID NO: 28240 - DNA, 120 bp, Artificial Sequence
  ENSG00000041982_23 (sequence is synthesized)
accactgccttgatcacctggttcaagcccctggctgagatcgatggcattgagctgacctacggcatcaaagacgtgccaggagaccgtaccaccatcgatctcacagaggacgagaac

SEQ ID NO: 28241 - DNA, 120 bp, Artificial Sequence
  ENSG00000041982_24 (sequence is synthesized)
cagtactccatcgggaacctgaagcctgacactgagtacgaggtgtccctcatctcccgcagaggtgacatgtcaagcaacccagccaaagagaccttcacaacaggcctcgatgctccc

SEQ ID NO: 28242 - DNA, 120 bp, Artificial Sequence
  ENSG00000041982_25 (sequence is synthesized)
aggaatcttcgacgtgtttcccagacagataacagcatcaccctggaatggaggaatggcaaggcagctattgacagttacagaattaagtatgcccccatctctggaggggaccacgct

SEQ ID NO: 28243 - DNA, 120 bp, Artificial Sequence
  ENSG00000041982_26 (sequence is synthesized)
gaggttgatgttccaaagagccaacaagccacaaccaaaaccacactcacaggtctgaggccgggaactgaatatgggattggagtttctgctgtgaaggaagacaaggagagcaatcca

SEQ ID NO: 28244 - DNA, 120 bp, Artificial Sequence
  ENSG00000041982_27 (sequence is synthesized)
gcgaccatcaacgcagccacagagttggacacgcccaaggaccttcaggtttctgaaactgcagagaccagcctgaccctgctctggaagacaccgttggccaaatttgaccgctaccgc

SEQ ID NO: 28245 - DNA, 120 bp, Artificial Sequence
  ENSG00000041982_28 (sequence is synthesized)
ctcaattacagtctccccacaggccagtgggtgggagtgcagcttccaagaaacaccacttcctatgtcctgagaggcctggaaccaggacaggagtacaatgtcctcctgacagccgag

SEQ ID NO: 28246 - DNA, 120 bp, Artificial Sequence
  ENSG00000041982_29 (sequence is synthesized)
aaaggcagacacaagagcaagcccgcacgtgtgaaggcatccactgaacaagcccctgagctggaaaacctcaccgtgactgaggttggctgggatggcctcagactcaactggaccgca

SEQ ID NO: 28247 - DNA, 120 bp, Artificial Sequence
  ENSG00000041982_30 (sequence is synthesized)
gctgaccaggcctatgagcactttatcattcaggtgcaggaggccaacaaggtggaggcagctcggaacctcaccgtgcctggcagccttcgggctgtggacataccgggcctcaaggct

SEQ ID NO: 28248 - DNA, 120 bp, Artificial Sequence
  ENSG00000041982_31 (sequence is synthesized)
gctacgccttatacagtctccatctatggggtgatccagggctatagaacaccagtgctctctgctgaggcctccacaggggaaactcccaatttgggagaggtcgtggtggccgaggtg

SEQ ID NO: 28249 - DNA, 120 bp, Artificial Sequence
  ENSG00000041982_32 (sequence is synthesized)
ggctgggatgccctcaaactcaactggactgctccagaaggggcctatgagtactttttcattcaggtgcaggaggctgacacagtagaggcagcccagaacctcaccgtcccaggagga

SEQ ID NO: 28250 - DNA, 120 bp, Artificial Sequence
  ENSG00000041982_33 (sequence is synthesized)
ctgaggtccacagacctgcctgggctcaaagcagccactcattataccatcaccatccgcggggtcactcaggacttcagcacaacccctctctctgttgaagtcttgacagaggaggtt

SEQ ID NO: 28251 - DNA, 120 bp, Artificial Sequence
  ENSG00000041982_34 (sequence is synthesized)
ccagatatgggaaacctcacagtgaccgaggttagctgggatgctctcagactgaactggaccacgccagatggaacctatgaccagtttactattcaggtccaggaggctgaccaggtg

SEQ ID NO: 28252 - DNA, 120 bp, Artificial Sequence
  ENSG00000041982_35 (sequence is synthesized)
tcaggggccacagcactcgaccccttgctgtagaggtcgtcacagaggatctcccacagctgggagatttagccgtgtctgaggttggctgggatggcctcagactcaactggaccgcag

SEQ ID NO: 28253 - DNA, 120 bp, Artificial Sequence
  ENSG00000041982_36 (sequence is synthesized)
ctgacaatgcctatgagcactttgtcattcaggtgcaggaggtcaacaaagtggaggcagcccagaacctcacgttgcctggcagcctcagggctgtggacatcccgggcctcgaggctg

SEQ ID NO: 28254 - DNA, 120 bp, Artificial Sequence
  ENSG00000041982_37 (sequence is synthesized)
ccacgccttatagagtctccatctatggggtgatccggggctatagaacaccagtactctctgctgaggcctccacagccaaagaacctgaaattggaaacttaaatgtttctgacataa

SEQ ID NO: 28255 - DNA, 120 bp, Artificial Sequence
  ENSG00000041982_38 (sequence is synthesized)
ctcccgagagcttcaatctctcctggatggctaccgatgggatcttcgagacctttaccattgaaattattgattccaataggttgctggagactgtggaatataatatctctggtgctg

SEQ ID NO: 28256 - DNA, 120 bp, Artificial Sequence
  ENSG00000041982_39 (sequence is synthesized)
aacgaactgcccatatctcagggctaccccctagtactgattttattgtctacctctctggacttgctcccagcatccggaccaaaaccatcagtgccacagccacgacagaggccctgc

SEQ ID NO: 28257 - DNA, 120 bp, Artificial Sequence
  ENSG00000041982_40 (sequence is synthesized)
cccttctggaaaacctaaccatttccgacattaatccctacgggttcacagtttcctggatggcatcggagaatgcctttgacagctttctagtaacggtggtggattctgggaagctgc

SEQ ID NO: 28258 - DNA, 120 bp, Artificial Sequence
  ENSG00000041982_41 (sequence is synthesized)
tggacccccaggaattcacactttcaggaacccagaggaagctggagcttagaggcctcataactggcattggctatgaggttatggtctctggcttcacccaagggcatcaaaccaagc

SEQ ID NO: 28259 - DNA, 120 bp, Artificial Sequence
  ENSG00000041982_42 (sequence is synthesized)
ccttgagggctgagattgttacagaagccgaaccggaagttgacaaccttctggtttcagatgccaccccagacggtttccgtctgtcctggacagctgatgaaggggtcttcgacaatt

SEQ ID NO: 28260 - DNA, 120 bp, Artificial Sequence
  ENSG00000041982_43 (sequence is synthesized)
ttgttctcaaaatcagagataccaaaaagcagtctgagccactggaaataaccctacttgcccccgaacgtaccagggacataacaggtctcagagaggctactgaatacgaaattgaac

SEQ ID NO: 28261 - DNA, 120 bp, Artificial Sequence
  ENSG00000041982_44 (sequence is synthesized)
tctatggaataagcaaaggaaggcgatcccagacagtcagtgctatagcaacaacagccatgggctccccaaaggaagtcattttctcagacatcactgaaaattcggctactgtcagct

SEQ ID NO: 28262 - DNA, 120 bp, Artificial Sequence
  ENSG00000041982_45 (sequence is synthesized)
ggagggcacccacagcccaagtggagagcttccggattacctatgtgcccattacaggaggtacaccctccatggtaactgtggacggaaccaagactcagaccaggctggtgaaactca

SEQ ID NO: 28263 - DNA, 120 bp, Artificial Sequence
  ENSG00000041982_46 (sequence is synthesized)
tacctggcgtggagtaccttgtcagcatcatcgccatgaagggctttgaggaaagtgaacctgtctcagggtcattcaccacagctctggatggcccatctggcctggtgacagccaaca

SEQ ID NO: 28264 - DNA, 120 bp, Artificial Sequence
  ENSG00000041982_47 (sequence is synthesized)
tcactgactcagaagccttggccaggtggcagccagccattgccactgtggacagttatgtcatctcctacacaggcgagaaagtgccagaaattacacgcacggtgtccgggaacacag

SEQ ID NO: 28265 - DNA, 120 bp, Artificial Sequence
  ENSG00000041982_48 (sequence is synthesized)
tggagtatgctctgaccgacctcgagcctgccacggaatacacactgagaatctttgcagagaaagggccccagaagagctcaaccatcactgccaagttcacaacagacctcgattctc

SEQ ID NO: 28266 - DNA, 120 bp, Artificial Sequence
  ENSG00000041982_49 (sequence is synthesized)
caagagacttgactgctactgaggttcagtcggaaactgccctccttacctggcgacccccccgggcatcagtcaccggttacctgctggtctatgaatcagtggatggcacagtcaagg

SEQ ID NO: 28267 - DNA, 120 bp, Artificial Sequence
  ENSG00000041982_50 (sequence is synthesized)
aagtcattgtgggtccagataccacctcctacagcctggcagacctgagcccatccacccactacacagccaagatccaggcactcaatgggcccctgaggagcaatatgatccagacca

SEQ ID NO: 28268 - DNA, 120 bp, Artificial Sequence
  ENSG00000041982_51 (sequence is synthesized)
tcttcaccacaattggactcctgtaccccttccccaaggactgctcccaagcaatgctgaatggagacacgacctctggcctctacaccatttatctgaatggtgataaggctgaggcgc

SEQ ID NO: 28269 - DNA, 120 bp, Artificial Sequence
  ENSG00000041982_52 (sequence is synthesized)
tggaagtcttctgtgacatgacctctgatgggggtggatggattgtgttcctgagacgcaaaaacggacgcgagaacttctaccaaaactggaaggcatatgctgctggatttggggacc

SEQ ID NO: 28270 - DNA, 120 bp, Artificial Sequence
  ENSG00000041982_53 (sequence is synthesized)
gcagagaagaattctggcttgggctggacaacctgaacaaaatcacagcccaggggcagtacgagctccgggtggacctgcgggaccatggggagacagcctttgctgtctatgacaagt

SEQ ID NO: 28271 - DNA, 120 bp, Artificial Sequence
  ENSG00000041982_54 (sequence is synthesized)
tcagcgtgggagatgccaagactcgctacaagctgaaggtggaggggtacagtgggacagcaggtgactccatggcctaccacaatggcagatccttctccacctttgacaaggacacag

SEQ ID NO: 28272 - DNA, 120 bp, Artificial Sequence
  ENSG00000041982_55 (sequence is synthesized)
attcagccatcaccaactgtgctctgtcctacaaaggggctttctggtacaggaactgtcaccgtgtcaacctgatggggagatatggggacaataaccacagtcagggcgttaactggt

SEQ ID NO: 28273 - DNA, 120 bp, Artificial Sequence
  ENSG00000041982_56 (sequence is synthesized)
tccactggaagggccacgaacactcaatccagtttgctgagatgaagctgagaccaagcaacttcagaaatcttgaaggcaggcgcaaacgggcataaattccagggaccactgggtgag

SEQ ID NO: 28274 - DNA, 120 bp, Artificial Sequence
  ENSG00000041982_57 (sequence is synthesized)
agaggaataaggcccagagcgaggaaaggattttaccaaagcatcaatacaaccagcccaaccatcggtccacacctgggcatttggtgagagtcaaagctgaccatggatccctggggc

SEQ ID NO: 28275 - DNA, 120 bp, Artificial Sequence
  ENSG00000041982_58 (sequence is synthesized)
caacggcaacagcatgggcctcacctcctctgtgatttctttctttgcaccaaagacatcagtctccaacatgtttctgttttgttgtttgattcagcaaaaatctcccagtgacaacat

SEQ ID NO: 28276 - DNA, 120 bp, Artificial Sequence
  ENSG00000041982_59 (sequence is synthesized)
cgcaatagttttttacttctcttaggtggctctgggaatgggagaggggtaggatgtacaggggtagtttgttttagaaccagccgtattttacatgaagctgtataattaattgtcatt

SEQ ID NO: 28277 - DNA, 120 bp, Artificial Sequence
  ENSG00000041982_60 (sequence is synthesized)
atttttgttagcaaagattaaatgtgtcattggaagccatccctttttttacatttcatacaacagaaaccagaaaagcaatactgtttccattttaaggatatgattaatattattaat

SEQ ID NO: 28278 - DNA, 120 bp, Artificial Sequence
  ENSG00000041982_61 (sequence is synthesized)
ataataatgatgatgatgatgatgaaaactaaggatttttcaagagatctttctttccaaaacatttctggacagtacctgattgtattttttttttaaataaaagcacaagtacttttg

SEQ ID NO: 28279 - DNA, 120 bp, Artificial Sequence
  ENSG00000041982_62 (sequence is synthesized)
agtttgttattttgctttgaattgttgagtctgaatttcaccaaagccaatcatttgaacaaagcggggaatgttgggataggaaaggtaagtagggatagtggtcaagtgggaggggtg

SEQ ID NO: 28280 - DNA, 120 bp, Artificial Sequence
  ENSG00000041982_63 (sequence is synthesized)
gtgggaggggtggaaaggagactaaagactgggagagagggaagcactttttttaaataaagttgaacacacttgggaaaagcttacaggccaggcctgtaatcccaacactttgggagg

SEQ ID NO: 28281 - DNA, 90 bp, Artificial Sequence
  ENSG00000041982_64 (sequence is synthesized)
ttgagaccagcctgagcaacatagtgagaacttgtctctacagaaaaaaaaaaaaaaaaaaatttaattaggcaagcgtggtagtgcgca

SEQ ID NO: 28282 - DNA, 79 bp, Artificial Sequence
  ENSG00000041982_65 (sequence is synthesized)
taattaggcaagcgtggtagtgcgcaactggagcccaggagttagaggttacagtgagctatgatcacactactgcact

SEQ ID NO: 28283 - DNA, 120 bp, Artificial Sequence
  ENSG00000041982_66 (sequence is synthesized)
taaaaaaagaaaagaaaaaaaaagcttacaacttgagattcagcatcttgctcagtatttccaagactaatagattatggtttaaaagatgcttttatactcattttctaatgcaactcc

SEQ ID NO: 28284 - DNA, 120 bp, Artificial Sequence
  ENSG00000041982_67 (sequence is synthesized)
tagaaactctatgatatagttgaggtaagtattgttaccacacatgggctaagatccccagaggcagactgcctgagttcaattcttggctccaccattcccaagttccctaacctctct

SEQ ID NO: 28285 - DNA, 120 bp, Artificial Sequence
  ENSG00000041982_68 (sequence is synthesized)
atgcctcagtttcctcttctgtaaagtagggacactcatacttctcatttcagaacatttttgtgaagaataaattatgttatccatttgaggcccttagaatggtacccggtgtatatt

SEQ ID NO: 28286 - DNA, 120 bp, Artificial Sequence
  ENSG00000041982_69 (sequence is synthesized)
aagtgctagtacatgttagctatcatcattatcactttatatgagatggactggggttcatagaaacccaatgacttgattgtggctactactcaataaataatagaatttggatttaaa

SEQ ID NO: 28287 - DNA, 120 bp, Artificial Sequence
  ENSG00000041982_70 (sequence is synthesized)
gtagccaaacctcttcttagccacctcactgtctcaaacatgacctggggcagtgtgtccatctcgtgggaagctcaggagtctgcctttgatagctttcttatagaagttagtaattcc

SEQ ID NO: 28288 - DNA, 120 bp, Artificial Sequence
  ENSG00000041982_71 (sequence is synthesized)
gatcacccccatgagaccatggtgctgtctgtgcctggggtgtctcgcagctctgtcatcaccaacctcaaagcttcttctaattacactgcccaccttcatgggctgattggcgggcag

SEQ ID NO: 28289 - DNA, 120 bp, Artificial Sequence
  ENSG00000041982_72 (sequence is synthesized)
cgtgctcagaccctgatggtccaagcaaccacagaaccaaagccacagttgggcacgctaatctttagcaatattactccaaaaagcttcaacatgtcatggaccactcaagctgggctt

SEQ ID NO: 28290 - DNA, 120 bp, Artificial Sequence
  ENSG00000041982_73 (sequence is synthesized)
atgagtcccagcaattcacagtctcaggagatgcaaagcaagctcacatcacaggcttggtggagaacactggctatgacgtcagtgtggcaggaaccaccttggctggggatcccacca

SEQ ID NO: 28291 - DNA, 120 bp, Artificial Sequence
  ENSG00000041982_74 (sequence is synthesized)
cttggtctccccacggggaaggaaaagattttaagaggagggctttgtaagtggaaaaacagttcccactggccctaaacctagtatttaatgatccacgttccaggcaggaaaatattt

SEQ ID NO: 28292 - DNA, 120 bp, Artificial Sequence
  ENSG00000041982_75 (sequence is synthesized)
ttgaagaggcatattttttaggcaatttttcctagatgtttgttaggtttctatacattgagagctttttacaaactatagcaagcagggaaacagaggaaccatcctctctgtcaggac

SEQ ID NO: 28293 - DNA, 120 bp, Artificial Sequence
  ENSG00000041982_76 (sequence is synthesized)
gtctgctggagttcattttccccaaaaacggacccaccatgggcagacgcaccattagcacagtccccaaaggagatgcccaggactgtgggatggtcttgtgaaggtcgatgcacagat

SEQ ID NO: 28294 - DNA, 120 bp, Artificial Sequence
  ENSG00000041982_77 (sequence is synthesized)
gctttcttacaagaaaacatatccactggaccaaagcgcagcccccttcatgctgaagccacttcagtttgaaacgtaaaaaaaaataattctttcaagaagatcagggacaactgattt

SEQ ID NO: 28295 - DNA, 120 bp, Artificial Sequence
  ENSG00000041988_0 (sequence is synthesized)
gttgggggcagccaggcctggctcgagatgccgaagtcgtgcgcggcccggcagtgctgcaaccgctacagcagccgcaggaagcagctcaccttccaccggtttccgttcagccgcccg

SEQ ID NO: 28296 - DNA, 120 bp, Artificial Sequence
  ENSG00000041988_1 (sequence is synthesized)
gagctgctgaaggaatgggtgctgaacatcggccggggcaacttcaagcccaagcagcacacggtcatctgctccgagcacttccggccagagtgcttcagcgcctttggaaaccgcaag

SEQ ID NO: 28297 - DNA, 120 bp, Artificial Sequence
  ENSG00000041988_2 (sequence is synthesized)
aacctaaagcacaatgccgtgcccacggtgttcgcctttcaggaccccacacagcaggtgagggagaacacagaccctgccagtgagagaggaaatgccagctcttctcagaaagaaaag

SEQ ID NO: 28298 - DNA, 120 bp, Artificial Sequence
  ENSG00000041988_3 (sequence is synthesized)
acttcaccctgccgttcccaggtcctccctgaggcgggggccggagaggacagtcctgggagaaacatggacactgcacttgaagagcttcagttgcccccaaatgccgaaggccacgta

SEQ ID NO: 28299 - DNA, 120 bp, Artificial Sequence
  ENSG00000041988_4 (sequence is synthesized)
aaacaggcaatgttgtttaatgtagaaaatggaaccccagcttcacgtgaagccttgtggttgagtgaggagtgaaggatggggaggaggcctctggggaaggggttccctccctcctga

SEQ ID NO: 28300 - DNA, 120 bp, Artificial Sequence
  ENSG00000041988_5 (sequence is synthesized)
agatgaacacacaatacacggaagagcgccagcctctgctttcaggaaaggtttattgtggtgagtgccttctgtacagtcgactgcaaatgaaacgcagaggatgggtgcccagaagca

SEQ ID NO: 28301 - DNA, 120 bp, Artificial Sequence
  ENSG00000041988_6 (sequence is synthesized)
cctgcggcagaggcgcacgggaagcccggggcccaggctcatgcaacacgacgctcaccgcggctcgggccgtggggccgtcagagaaacctttttaaaaaatggagatgaatgttacag

SEQ ID NO: 28302 - DNA, 120 bp, Artificial Sequence
  ENSG00000041988_7 (sequence is synthesized)
aattggacaacccgaactgcttttcaaaaccagaggaaggaggttcttagccgttactcagataccagtgctggggagggaggcctgacttcagcaacagctgtgggtgggctggaggcc

SEQ ID NO: 28303 - DNA, 120 bp, Artificial Sequence
  ENSG00000041988_8 (sequence is synthesized)
gccccccgcgccagctgtctcagccaccacctgtgcggcgcttgctccgaggggtcagcaagagcaactgatggctgccacttccaggccccgagagacaggcctcacgtaactttactg

SEQ ID NO: 28304 - DNA, 120 bp, Artificial Sequence
  ENSG00000041988_9 (sequence is synthesized)
cagccgaggtccaggccgtggagggggtcctagctccgctgcattctgcatcccaagtgggcacgtggaggaagggtctgaaggaaggctccggagcacaggccctggtgttcctgtgag

SEQ ID NO: 28305 - DNA, 120 bp, Artificial Sequence
  ENSG00000041988_10 (sequence is synthesized)
gacgctggacctgcaggagcggggagctgcagtgccacctgctgggtaccacgggccgggcctggggtccacgcctttgggttgggtgtgtctgatgtcttgccaagcgcctggtcctgt

SEQ ID NO: 28306 - DNA, 120 bp, Artificial Sequence
  ENSG00000041988_11 (sequence is synthesized)
cctcttgagctgcccttgcccagcactgcactctggaggtgggtggtgcaggcggtggagggacacaggccagctcaagcccgctggtggcagggcgttttcccaccgggatacgggaag

SEQ ID NO: 28307 - DNA, 120 bp, Artificial Sequence
  ENSG00000041988_12 (sequence is synthesized)
ccacctgtgtcagggctaggccctgggatcgggagttacactaccctgtcccaagccgagggggccggtggaatgacttgagcagctctgggagtggggaaaaaagacgactaatttcca

SEQ ID NO: 28308 - DNA, 120 bp, Artificial Sequence
  ENSG00000041988_13 (sequence is synthesized)
aacccgtttgttctcagataaaaagcagttttataaacccgcaatctgctccagattcaagcagtaatatttcagcaagaggaggtggtcatgggaagccagcacagcagaggctccctg

SEQ ID NO: 28309 - DNA, 120 bp, Artificial Sequence
  ENSG00000041988_14 (sequence is synthesized)
accgggaggcctgcctgcttttcaggttgtttcccatgttcagcgtggactgcagaagtggctcacgctcctgtggtgagggcagggtgctccacagacacctccagacccagccaagaa

SEQ ID NO: 28310 - DNA, 120 bp, Artificial Sequence
  ENSG00000041988_15 (sequence is synthesized)
ctacagggcggcgggctgcggtcagcacgtgtgctcgggacacagcggagtcagggccagagcccttccctccaggaactgatccttgggaaaacagccatgggccaggctgcagtctgg

SEQ ID NO: 28311 - DNA, 120 bp, Artificial Sequence
  ENSG00000041988_16 (sequence is synthesized)
ttcccagtggggctgcctcagtcctacccccagcaccctcaaaagctggggtgtctgcatgtcccttcacataattgataatggtaccaccttctataataataatataaaataaaaaca

SEQ ID NO: 28312 - DNA, 120 bp, Artificial Sequence
  ENSG00000041988_17 (sequence is synthesized)
ttccagttgtccaagcctgtgagtggctatgcgtcctggttgggtgctcaaagcaaggaggtgaaaggcgaccagcattggcgaatggggtccctcccctctccgcaggccccgccgccg

SEQ ID NO: 28313 - DNA, 120 bp, Artificial Sequence
  ENSG00000041988_18 (sequence is synthesized)
ccctgcaggcctgagaaggacccccaacaagcagccatctgatcacagctatgcccttttggacttagattccctgaagaaaaaactcttcctcactctgaaggaaaatgaaaagctccg

SEQ ID NO: 28314 - DNA, 120 bp, Artificial Sequence
  ENSG00000041988_19 (sequence is synthesized)
gaagcgcttgcaggcccagaggctggtgatgcgaaggatgtccagccgcctccgtgcttgcaaagggcaccagggactccaggccagacttgggccagagcagcagagctgagccccaca

SEQ ID NO: 28315 - DNA, 120 bp, Artificial Sequence
  ENSG00000041988_20 (sequence is synthesized)
ggctccggacgcagaggtggcagtggcaccagggccggcagagctttggagctctggctgtggacatttttgtctgctgtggacactgagaaagttggccatgaggcctgcttggccggg

SEQ ID NO: 28316 - DNA, 120 bp, Artificial Sequence
  ENSG00000041988_21 (sequence is synthesized)
gatcgagacagtagccaagctccccggcgagagccccaatgccgtctgggggacgtttagaggcgtggcactaggagtgcacatctgtgagcatgacaagcttatcctcccatggtaaca

SEQ ID NO: 28317 - DNA, 120 bp, Artificial Sequence
  ENSG00000041988_22 (sequence is synthesized)
gaagtccaggctgaggctgattctggacgctgtcctttcagcacacgcagagcaaagatcgttggaagccccagtgtgggagatgctcctcagggaggaagccatgtgagggggctggct

SEQ ID NO: 28318 - DNA, 120 bp, Artificial Sequence
  ENSG00000041988_23 (sequence is synthesized)
ctgtggcgggtgagtggtcccctcctccatcagcctggacagccgctcggggttctaaggagtgactcctgtcccggcctggtgtgagtgggcagtgtaataaagtgtctttctatacgg

SEQ ID NO: 28319 - DNA, 120 bp, Artificial Sequence
  ENSG00000041988_24 (sequence is synthesized)
ggcagccaggcctggctcgagatgccgaagtcgtgcgcggcccggcagtgctgcaaccgctacagcagccgcaggaagcagctcaccttccaccgcaggtgagggagaacacagaccctg

SEQ ID NO: 28320 - DNA, 120 bp, Artificial Sequence
  ENSG00000041988_25 (sequence is synthesized)
gagaaacatggacactgcacttgaagagcttcagttgcccccaaatgccgaaggccacgtaaaacaggtaagactgagtgcaaaggtggtctgtggttggacacaagatgacttgctcca

SEQ ID NO: 28321 - DNA, 120 bp, Artificial Sequence
  ENSG00000041988_26 (sequence is synthesized)
cccaccatgagacctgtgtggccgaggcagggtgtgcagcctgggtttcagagctccccagtcaaattctccaccatggtgtgggcacatctggattttgggggagcagcccggagtgtc

SEQ ID NO: 28322 - DNA, 120 bp, Artificial Sequence
  ENSG00000041988_27 (sequence is synthesized)
tagctgccctggggttgtgctgtgtgcgtgtctggtggcctgctcaccatggcccgccttcctgctggtgatgcagctctaggctctcactcccctgtcctcaggtctcgccacggaggc

SEQ ID NO: 28323 - DNA, 120 bp, Artificial Sequence
  ENSG00000041988_28 (sequence is synthesized)
cggcaaaccttactgcatggctttcaaaatacatccaagtctgccctctcattaccacttcctgccaatgcctggtcccacagcagccagggtggacccaggttccatctcacctctgtc

SEQ ID NO: 28324 - DNA, 120 bp, Artificial Sequence
  ENSG00000041988_29 (sequence is synthesized)
tagagcctccagggactccccagctgctcagggccctgcgtcatgcagtccccactccctctcgctgtctcagctggacctgcgtgagtggccgttcctgctgtcccttctgaagcctgc

SEQ ID NO: 28325 - DNA, 120 bp, Artificial Sequence
  ENSG00000041988_30 (sequence is synthesized)
atcaccccttcagctgcctctcctcaccaccccagggcttccctctgtctgttctctggagcagctgtcatccccagaagacaccgtccacatctgtgtggctcatcactgtgcccccgc

SEQ ID NO: 28326 - DNA, 120 bp, Artificial Sequence
  ENSG00000041988_31 (sequence is synthesized)
tccagaatatcagctcttgggggccaggactgtctcattaccccccatccctagcacgaagaacagggcccggctcctggtaggctcctggcaaatgtagcatcggaagcagctcacttg

SEQ ID NO: 28327 - DNA, 120 bp, Artificial Sequence
  ENSG00000041988_32 (sequence is synthesized)
ggctctctggccatgctcgtggtctcgggtttcctattaagagtgctttaacagctgtgacagaagcttccagaaattagatgtgatttaataaaccgagaggactgaatgtccacagct

SEQ ID NO: 28328 - DNA, 120 bp, Artificial Sequence
  ENSG00000041988_33 (sequence is synthesized)
gcctttcaggaccccacacagaatctccatgagggcaggggctgccttccctgcttcaggccccacacccaggacgctgcctggcacagcccaggtgctcgggcaggtgagggagaacac

SEQ ID NO: 28329 - DNA, 120 bp, Artificial Sequence
  ENSG00000042062_0 (sequence is synthesized)
aacgttaaatttagatgttttacctctaaatgaggtgaaattgcaggttccctctggctggcggtggggaggagacgcagggcagctttggccagcagtgagcggacagacttagcggga

SEQ ID NO: 28330 - DNA, 120 bp, Artificial Sequence
  ENSG00000042062_1 (sequence is synthesized)
gtagactctgcttcctccagccacaccttggggacggaggcccaggacagtccccagtgtctgggagcatctggcttcctctccctgcacacaccagccgggtctgaacggcatcagttc

SEQ ID NO: 28331 - DNA, 120 bp, Artificial Sequence
  ENSG00000042062_2 (sequence is synthesized)
taagtgccaggccagagagaggcagcgagggacacggagtagaagaggctgtcctgtctgccaccaaaggtgaccaccatgtcggtgaggttgcggttcctgtcccctggggacacaggg

SEQ ID NO: 28332 - DNA, 120 bp, Artificial Sequence
  ENSG00000042062_3 (sequence is synthesized)
gccgtgggggtcgtgggccggagcgcctccttcgcaggcttcagcagtgcacagagccggaggatcgcaaagtccatcaacaggaactccgtgagatcgcgaatgcctgcaaaatcctcc

SEQ ID NO: 28333 - DNA, 120 bp, Artificial Sequence
  ENSG00000042062_4 (sequence is synthesized)
aagatgtacggcacgctgcggaaggggtcggtctgtgcagacccgaagccccagcaggtgaagaagatcttcgaagcattgaaaagaggcctcaaggagtatctgtgtgtgcagcaggct

SEQ ID NO: 28334 - DNA, 120 bp, Artificial Sequence
  ENSG00000042062_5 (sequence is synthesized)
gagctggaccacctgtctggacgccacaaagacaccaggaggaattccaggctggctttctattatgacctggacaagcaaacgcgctgtgtggaaaggcacattcggaagatggagttt

SEQ ID NO: 28335 - DNA, 120 bp, Artificial Sequence
  ENSG00000042062_6 (sequence is synthesized)
cacatcagcaaggtggatgagctgtacgaggactactgcatccagtgccgcctgcgcgacggcgcctccagcatgcagcgggccttcgcccggtgccccccgagccgcgcagcccgagag

SEQ ID NO: 28336 - DNA, 120 bp, Artificial Sequence
  ENSG00000042062_7 (sequence is synthesized)
agcctgcaggagctgggccgcagcctgcacgagtgcgccgaggacatgtggctcatcgagggggccctggaggttcacctgggcgagttccacatcaggatgaaaggcttggtgggctac

SEQ ID NO: 28337 - DNA, 120 bp, Artificial Sequence
  ENSG00000042062_8 (sequence is synthesized)
gcacgcctctgtcccggagaccactatgaggtgctcatgcgtctgggccgccagcgttggaagctcaagggtcggatcgagtcagatgacagccagacctgggacgaagaggagaaggcc

SEQ ID NO: 28338 - DNA, 120 bp, Artificial Sequence
  ENSG00000042062_9 (sequence is synthesized)
ttcatccccacgctgcatgagaacctggacatcaaggtgacggagttgcggggcctgggctcgctggctgtgggtgcagtgacgtgtgacatcgccgacttcttcacgacgcggccgcag

SEQ ID NO: 28339 - DNA, 120 bp, Artificial Sequence
  ENSG00000042062_10 (sequence is synthesized)
gtcatcgtggtggacatcacggagttgggtaccatcaagctgcagctggaggtgcagtggaacccgtttgatactgagagcttcctggtgtcacccagccccacgggcaagttttctatg

SEQ ID NO: 28340 - DNA, 120 bp, Artificial Sequence
  ENSG00000042062_11 (sequence is synthesized)
ggcagcaggaagggctccttgtacaactggacacccccgagcacccccagcttccgggagagatactacctgtctgtcctacagcagccaacacagcaggccttgctgctgggtggccca

SEQ ID NO: 28341 - DNA, 120 bp, Artificial Sequence
  ENSG00000042062_12 (sequence is synthesized)
agggccacctccatcctcagctacctgtctgacagcgacctccggggtcccagcctaagaagccagagtcaggagctgcctgagatggactccttcagctctgaggacccccgagacacg

SEQ ID NO: 28342 - DNA, 120 bp, Artificial Sequence
  ENSG00000042062_13 (sequence is synthesized)
gagaccagcacgtcggcgtccacctcagatgtgggcttcctgcccttgaccttcggtccccacgcctccattgaagaggaggctcgggaggaccccctgcccccaggtctcctgccagag

SEQ ID NO: 28343 - DNA, 120 bp, Artificial Sequence
  ENSG00000042062_14 (sequence is synthesized)
atggcccacctctctggaggcccgtttgcagagcagcctggctggaggaacttaggaggggagagccccagcctgccacagggctccctgttccacagcggcacagcctcgagtagccag

SEQ ID NO: 28344 - DNA, 120 bp, Artificial Sequence
  ENSG00000042062_15 (sequence is synthesized)
aacggccacgaggaaggggcaaccggggacagagaggacgggcctggcgtggccctcgaggggcctctgcaggaggtcctggagttgctgaggcccacggactccacccagccccagctc

SEQ ID NO: 28345 - DNA, 120 bp, Artificial Sequence
  ENSG00000042062_16 (sequence is synthesized)
cgggagctggagtaccaggtcctcggcttccgggaccggctgaagccctgcagagcacggcaggagcacacctcggccgagagcctgatggagtgcatcctggagagcttcgccttcctc

SEQ ID NO: 28346 - DNA, 120 bp, Artificial Sequence
  ENSG00000042062_17 (sequence is synthesized)
cgtcatcactgaaagcgtcatccagggaactcacagccggtgccccagagctggacgtgctgctgatggtacacctccaagtctgcaaagctctgctgcagaaactggcctcccctaatt

SEQ ID NO: 28347 - DNA, 120 bp, Artificial Sequence
  ENSG00000042062_18 (sequence is synthesized)
tatcaaggctggtccaggaatgcctcctggaagaagtggcacagcaaaagcacgttctggagacactttctgtccttgactttgagaaggtcggcaaggcaacatccattgaagagatca

SEQ ID NO: 28348 - DNA, 120 bp, Artificial Sequence
  ENSG00000042062_19 (sequence is synthesized)
tcccacaggcctcgcggacgaaggggtgcctgaagctgtggagagggtgcacagggcctggcagggtcctgtcctgccctgccacgacgctgctgaaccagctcaagaaaaccttccagc

SEQ ID NO: 28349 - DNA, 120 bp, Artificial Sequence
  ENSG00000042062_20 (sequence is synthesized)
acagagtcagagggaagtacccaggacagctggaaatagcgtgccgcaggctcctggagcaggtggtcagctgtggtgggctgctccccggagctgggctcccagaagaacagatcatta

SEQ ID NO: 28350 - DNA, 120 bp, Artificial Sequence
  ENSG00000042062_21 (sequence is synthesized)
cctggttccagtttcacagctacctgcagaggcagagcgtctctgacctggagaagcacttcacccagctcaccaaggaagtgacactcatcgaggagcttcactgtgcgggacaggcca

SEQ ID NO: 28351 - DNA, 120 bp, Artificial Sequence
  ENSG00000042062_22 (sequence is synthesized)
aggtggtccggaagctgcaggggaagcggctgggccagctccagcctctgccccagaccttaagagcctgggcgctgctccagctggacggcactccgagggtgtgcagggcggccagcg

SEQ ID NO: 28352 - DNA, 120 bp, Artificial Sequence
  ENSG00000042062_23 (sequence is synthesized)
ctcgcctggctggtgcagtcaggaacagaagcttccgggaaaaggctttgctgttctacaccaacgccctggcagagaacgacgcaaggctccagcaggccgcatgcctagcgctcaaac

SEQ ID NO: 28353 - DNA, 120 bp, Artificial Sequence
  ENSG00000042062_24 (sequence is synthesized)
acctcaagggcattgaaagcatcgaccagactgccagcctgtgccagtctgacctggaggccgtgcgggcggcagcccgggaaaccacactgtcgttcggtgaaaaaggacggttagctt

SEQ ID NO: 28354 - DNA, 120 bp, Artificial Sequence
  ENSG00000042062_25 (sequence is synthesized)
ttgagaagatggacaagctctgctcagaacaaagagaagtcttttgccaggaggcagatgttgaaatcacaatattttaaaaaatcctggctgatgagcacaaatctcacatcgtttttt

SEQ ID NO: 28355 - DNA, 120 bp, Artificial Sequence
  ENSG00000042062_26 (sequence is synthesized)
ttgctgctgcccagcctggacatagcctgcactctgggtaatggtgctgtgcactcctccaggagtgtgagctgcccagagctctacctgagactccggccattgacccagccccagggc

SEQ ID NO: 28356 - DNA, 120 bp, Artificial Sequence
  ENSG00000042062_27 (sequence is synthesized)
atgggctggtcttttgtacagaggcagaaaaaagcaaggcaaaggtacagcattccaggggctgcacggcctcaacagagcgctcaacttctggctgagggtctgtgtgaccttccccga

SEQ ID NO: 28357 - DNA, 120 bp, Artificial Sequence
  ENSG00000042062_28 (sequence is synthesized)
gatgcagagctgagccaaactaggtggccacctacaaaagggccaaggccaggcaagttgaggccctaaataaaaggctccaaggcaagtgtgtagaactccaggcctcgctgccggtca

SEQ ID NO: 28358 - DNA, 120 bp, Artificial Sequence
  ENSG00000042062_29 (sequence is synthesized)
gctgctcggcacttctgcgtcaagaggcactggggatgcagcaggctggcaggtggctggccctgctaatgcaagactgctcaggccatttcagcagcagccaggtgtcaccttggtgag

SEQ ID NO: 28359 - DNA, 120 bp, Artificial Sequence
  ENSG00000042062_30 (sequence is synthesized)
ctggggaaggtgggaaggcacaaagccagggtttctacaaccacactctcagcccgactgacttgctgcgagtgctggtggagctcacagacggcggctggtggatggtggactgtgaac

SEQ ID NO: 28360 - DNA, 120 bp, Artificial Sequence
  ENSG00000042062_31 (sequence is synthesized)
ctcactttccctatgttcagcagcacaaagggaagaagccaccacatcagcccaggagccctgagcagcacaggcagtagggccactcactttggccatccgcacccaaatgcaatcaat

SEQ ID NO: 28361 - DNA, 120 bp, Artificial Sequence
  ENSG00000042062_32 (sequence is synthesized)
caacccagcttcggaagctaccctaggatctcgtcaataaactgctaagaagccatcaactggcctaaagaaagagttcactgaagaacgcaattgctttaaagaaagaaaaattagttt

SEQ ID NO: 28362 - DNA, 120 bp, Artificial Sequence
  ENSG00000042062_33 (sequence is synthesized)
cctatttaagtcttaaaaaaaagcaaaccatgtcctgagatgtctgtgttaatagtgcagagagaacctagggtttgaggttgctgtagcaatggcattggagaactttaacttgaacat

SEQ ID NO: 28363 - DNA, 120 bp, Artificial Sequence
  ENSG00000042062_34 (sequence is synthesized)
tctcatcgatacttcctggacatattttgtgtttttaacttacttagtatttatttgccttgttcatatgttcaattttctgaaatttcaattaaactattggtgtttcactttttaccc

SEQ ID NO: 28364 - DNA, 120 bp, Artificial Sequence
  ENSG00000042062_35 (sequence is synthesized)
agagctgggagtgacactgacaagcaatcggccgcgtccagagcagcaggcggcatccggggggagcggggccggctggggggccccaggagggcttcctggaaccccagctccatggcc

SEQ ID NO: 28365 - DNA, 120 bp, Artificial Sequence
  ENSG00000042062_36 (sequence is synthesized)
gcctgcaccctgacacaggccagataagagtcccggctgcattatcagagcccggcagggcaccggcctccctgcaccagaaggaagactcggggcgcagcaggtcctcaaggcgatctt

SEQ ID NO: 28366 - DNA, 120 bp, Artificial Sequence
  ENSG00000042062_37 (sequence is synthesized)
cccagagagcgggaccagcggctggtggccagtgtggatggaatttgcagagccctagctcgagtccgggagtcccgggccagatgggagcagacgcttgctggcggcaatagggaaagt

SEQ ID NO: 28367 - DNA, 120 bp, Artificial Sequence
  ENSG00000042062_38 (sequence is synthesized)
gagtgcacctccttccagcagtgacccagtggccaccactcccaccgggtgacccgagctccacgtttcctgccagcctccccgtctgtttctcccactgtccttggctcagctcttgtc

SEQ ID NO: 28368 - DNA, 120 bp, Artificial Sequence
  ENSG00000042062_39 (sequence is synthesized)
actctatcgtgcacccttccccatgccatccccgcacatcccccacttgcctcagagccggtcctcagagaccacgaagtgggtgagatcaccccagcctgcccctgagccttctgctcc

SEQ ID NO: 28369 - DNA, 120 bp, Artificial Sequence
  ENSG00000042062_40 (sequence is synthesized)
gcctgcccctgagccttctgctccaaggaaccagcttttagtattattttttaaaccttaaaaataatcaccaagtatatagtagaagttctttgaggccaggcacagtggctcacgcct

SEQ ID NO: 28370 - DNA, 120 bp, Artificial Sequence
  ENSG00000042062_41 (sequence is synthesized)
agtcctggagttgcagcacactcttcagtcagctgtgtgactctaggcaaatgattcacatctctgagcctctgcttccctatctgcataggaggagggcactgcacggggttcagtgag

SEQ ID NO: 28371 - DNA, 120 bp, Artificial Sequence
  ENSG00000042062_42 (sequence is synthesized)
gtaaccccaggccacattcaaggtgcagaatgtgccgtcaaacagtagctgtgatcccagctgtgcctctgccccgtgggacctcccctcagaaggccaggttccttgtctgtaaggaga

SEQ ID NO: 28372 - DNA, 120 bp, Artificial Sequence
  ENSG00000042062_43 (sequence is synthesized)
ggctggtgacagcagcccctcccaggttgttgtggggactgcaggtggtggccctggtaagatgcttagagccaaagttgctcacgtgtcacatgggaatgcagggaagggacctcgcat

SEQ ID NO: 28373 - DNA, 120 bp, Artificial Sequence
  ENSG00000042062_44 (sequence is synthesized)
aaaaatagctttcttcattgtattagccctggcatctgtttttagggataaattaaacaccacagtatagatcttgtgactgtgtacacagggcccaaagatggaccgatcgtgtcctga

SEQ ID NO: 28374 - DNA, 120 bp, Artificial Sequence
  ENSG00000042062_45 (sequence is synthesized)
acgttgtttagagaaagatgggcacagcgtgccttactgtcggcacctggtggctgatggacccggaaccatggactccacttctgcttacccctccattcacagcctccttactctccc

SEQ ID NO: 28375 - DNA, 120 bp, Artificial Sequence
  ENSG00000042088_0 (sequence is synthesized)
gaaggggcgggatccgaggcaagcgttggttctgtgcgcctcagagttggagcacacagctgtattaaaaaggcaaatcgaaggccgggcgcggtgactcacgcctgtcatcctagcact

SEQ ID NO: 28376 - DNA, 84 bp, Artificial Sequence
  ENSG00000042088_1 (sequence is synthesized)
ttgagatcagccgaaaaattagccgagcgtgatggtggatgcctgtaatcctagctcctcgggaggctaaggagtataatgtct

SEQ ID NO: 28377 - DNA, 120 bp, Artificial Sequence
  ENSG00000042088_2 (sequence is synthesized)
gtaatcctagctcctcgggaggctaaggagtataatgtctcaggaaggcgattatgggaggtggaccatatctagtagtgatgaaagtgaggaagaaaagccaaaaccagacaagccatc

SEQ ID NO: 28378 - DNA, 120 bp, Artificial Sequence
  ENSG00000042088_3 (sequence is synthesized)
tacctcttctcttctctgtgccaggcaaggagcagcaaatgagcccaggtacacctgttccgaggcccagaaagctgcacacaagaggaaaatatcacctgtgaaattcagcaatacaga

SEQ ID NO: 28379 - DNA, 120 bp, Artificial Sequence
  ENSG00000042088_4 (sequence is synthesized)
ttcagttttacctcccaaaaggcagaaaagcggttcccaggaggacctcggctggtgtctgtccagcagtgatgatgagctgcaaccagaaatgccgcagaagcaggctgagaaagtggt

SEQ ID NO: 28380 - DNA, 120 bp, Artificial Sequence
  ENSG00000042088_5 (sequence is synthesized)
gatcaaaaaggagaaagacatctctgctcccaatgacggcactgcccaaagaactgaaaatcatggcgctcccgcctgccacaggctcaaagaggaggaagacgagtatgagacatcagg

SEQ ID NO: 28381 - DNA, 120 bp, Artificial Sequence
  ENSG00000042088_6 (sequence is synthesized)
ggagggccaggacatttgggacatgctggataaagggaaccccttccagttttacctcactagagtctctggagttaagccaaagtataactctggagccctccacatcaaggatatttt

SEQ ID NO: 28382 - DNA, 120 bp, Artificial Sequence
  ENSG00000042088_7 (sequence is synthesized)
atctcctttatttgggacgcttgtttcttcagctcagtttaactactgctttgacgtggactggctcgtaaaacagtatccaccagagttcaggaagaagccaatcctgcttgtgcatgg

SEQ ID NO: 28383 - DNA, 120 bp, Artificial Sequence
  ENSG00000042088_8 (sequence is synthesized)
tgataagcgagaggctaaggctcacctccatgcccaggccaagccttacgagaacatctctctctgccaggcaaagttggatattgcgtttggaacacaccacacgaaaatgatgctgct

SEQ ID NO: 28384 - DNA, 120 bp, Artificial Sequence
  ENSG00000042088_9 (sequence is synthesized)
gctctatgaagaaggcctccgggttgtcatacacacctccaacctcatccatgctgactggcaccagaaaactcaaggaatatggttgagccccttatacccacgaattgctgatggaac

SEQ ID NO: 28385 - DNA, 120 bp, Artificial Sequence
  ENSG00000042088_10 (sequence is synthesized)
ccacaaatctggagagtcgccaacacattttaaagctgatctcatcagttacttgatggcttataatgccccttctctcaaggagtggatagatgtcattcacaagcacgatctctctga

SEQ ID NO: 28386 - DNA, 120 bp, Artificial Sequence
  ENSG00000042088_11 (sequence is synthesized)
aacaaatgtttatcttattggttcaaccccaggacgctttcaaggaagtcaaaaagataattggggacattttagacttaagaagcttctgaaagaccatgcctcatccatgcctaacgc

SEQ ID NO: 28387 - DNA, 120 bp, Artificial Sequence
  ENSG00000042088_12 (sequence is synthesized)
agagtcctggcctgtcgtaggtcagttttcaagcgttggctccttgggagccgatgaatcaaagtggttatgttctgagtttaaagagagcatgctgacactggggaaggaaagcaagac

SEQ ID NO: 28388 - DNA, 120 bp, Artificial Sequence
  ENSG00000042088_13 (sequence is synthesized)
tccaggaaaaagctctgttcctctttacttgatctatccttctgtggaaaatgtgcggaccagtttagaaggatatcctgctgggggctctcttccctatagcatccagacagctgaaaa

SEQ ID NO: 28389 - DNA, 120 bp, Artificial Sequence
  ENSG00000042088_14 (sequence is synthesized)
acagaattggctgcattcctattttcacaaatggtcagctgagacttctggccgcagcaatgccatgccacatattaagacatatatgaggccttctccagacttcagtaaaattgcttg

SEQ ID NO: 28390 - DNA, 120 bp, Artificial Sequence
  ENSG00000042088_15 (sequence is synthesized)
tccttgtcacaagcgcaaatctgtccaaggctgcctggggagcattggagaagaatggcacccagctgatgatccgctcctacgagctcggggtccttttcctcccttcagcatttggtc

SEQ ID NO: 28391 - DNA, 120 bp, Artificial Sequence
  ENSG00000042088_16 (sequence is synthesized)
tagacagtttcaaagtgaaacagaagttcttcgctggcagccaggagccaatggccacctttcctgtgccatatgatttgcctccagaactgtatggaagtaaagatcggccatggatat

SEQ ID NO: 28392 - DNA, 120 bp, Artificial Sequence
  ENSG00000042088_17 (sequence is synthesized)
ggaacattccttatgtcaaagcaccggatacgcatgggaacatgtgggtgccctcctgagaatcttgaggcactgtgaaatttaagtgtaagacattgagccacaaacatggaatctctt

SEQ ID NO: 28393 - DNA, 120 bp, Artificial Sequence
  ENSG00000042088_18 (sequence is synthesized)
ctttgtactggatgtccacttcccttaaagtcttatttgcacccttacaaaatctttccaaaggtcactcttatgaatggatgttggttatacttttaatggacattaacattcctaata

SEQ ID NO: 28394 - DNA, 120 bp, Artificial Sequence
  ENSG00000042088_19 (sequence is synthesized)
aagtattagtttcttaattcacttttatatgttttggaaagaaaattagtgaacttctctatgttaaaaatacgtactgcttgagtatcccctgtctgaaatgcttgggaccagaagtgt

SEQ ID NO: 28395 - DNA, 120 bp, Artificial Sequence
  ENSG00000042088_20 (sequence is synthesized)
atgcttgggaccagaagtgtttcagcttttggatttttttgaattttggaatatttgcatagcataatgagatatcttgggaatgggacccaaatctaaacacaaaattcatttatgttt

SEQ ID NO: 28396 - DNA, 120 bp, Artificial Sequence
  ENSG00000042088_21 (sequence is synthesized)
taacctaaaggtgattttatatgatattttgagtaattttatgcatgaaacaaagttttgacaggcttttgaccgtgattcatcacatgagttcaggcatggaaattttcatttggagca

SEQ ID NO: 28397 - DNA, 120 bp, Artificial Sequence
  ENSG00000042088_22 (sequence is synthesized)
tcatgtcagcactcaaaaagttctggatcttggagcagttcagattttcagattagggatgctcaaatctatatagatataaaattatcctcacagtaacatagaatctcttggtgctgt

SEQ ID NO: 28398 - DNA, 120 bp, Artificial Sequence
  ENSG00000042088_23 (sequence is synthesized)
cagctgttgggaattgaagattgactttgtgcttccaccctccatccagaaaggcacccttcattccaccagaactttacccaggaagaacacgatcatttcctttttcaccgatgccct

SEQ ID NO: 28399 - DNA, 120 bp, Artificial Sequence
  ENSG00000042088_24 (sequence is synthesized)
ctctcagctttctgagtacgtctcttggggtcgctggaggtgatcctaggatctgtctctgagaccaatgtgctgtttcagccccctgcagctaagaattgtattgactgtcctcacagc

SEQ ID NO: 28400 - DNA, 120 bp, Artificial Sequence
  ENSG00000042088_25 (sequence is synthesized)
ggcttttcatagctttcagcttcagctttacgaggcttctcctctctccctggcaccctgctggctgcctcactgcttacagacaggtcccaccaaacccaaacacctgcctagggtaaa

SEQ ID NO: 28401 - DNA, 120 bp, Artificial Sequence
  ENSG00000042088_26 (sequence is synthesized)
tgggtctctcttctatccccagaaactttcagaggaagcagctcatagaaacatacaaaagcacacaagtattttgggaaaaaatcctaaaaggtgacttaatttgatgccttaaattca

SEQ ID NO: 28402 - DNA, 120 bp, Artificial Sequence
  ENSG00000042088_27 (sequence is synthesized)
caagtgaggaagctaaggcctagaaggttaaggatgtccccagggtcacacagtgagcggggctcagagcttgagtgtctttgtgctttgtgtacattgtgttctccctagggtgcttta

SEQ ID NO: 28403 - DNA, 120 bp, Artificial Sequence
  ENSG00000042088_28 (sequence is synthesized)
gaccctgtttgttttcttctgcatgaggctgatttccagtttgtcatcaacctctttatcttataatttaggatagagttgaacgttagtcttgaaagattttctaaagtagtctttcaa

SEQ ID NO: 28404 - DNA, 120 bp, Artificial Sequence
  ENSG00000042088_29 (sequence is synthesized)
actgttcctcagaggcctaggattttccaaaagtaccttaggaaccttgtaggctgcagtgggggtgtggcgatagagcaggaggcagggagacagggctgcagggcctcccaccttcca

SEQ ID NO: 28405 - DNA, 120 bp, Artificial Sequence
  ENSG00000042088_30 (sequence is synthesized)
acagacaggctctgctgtatctgttgtacatactgggattctgtaaaggacattatctggggtgttgtatgtatttttgtgtgttctgctttttttaaataaacttgaaaagctactgaa

SEQ ID NO: 28406 - DNA, 120 bp, Artificial Sequence
  ENSG00000042088_31 (sequence is synthesized)
gaaaaacaaacagagcccaggagaagcctttggtctcagtgggatcctggctcatggaaccctctggaagctcaagtttgcagagggccctttgccagcctgtctggggccttgtagcca

SEQ ID NO: 28407 - DNA, 120 bp, Artificial Sequence
  ENSG00000042088_32 (sequence is synthesized)
ctggttagtcttggaatccctttgcactcctataattactatacagatccttcctgacttacactggggctacatgctgataaacccctcatgaattgaaaatatcataagtcaaaaatg

SEQ ID NO: 28408 - DNA, 120 bp, Artificial Sequence
  ENSG00000042088_33 (sequence is synthesized)
catttaatgcgtcaaatctactgagcaccatagcttagtctagcctaccctaaacatgatcagacctcttaaattagtctacacttgggcaaaataaatcaaagactgttttataataaa

SEQ ID NO: 28409 - DNA, 120 bp, Artificial Sequence
  ENSG00000042088_34 (sequence is synthesized)
cttaactcgttgagcgcggctggaaatccaagcgcttctaggtgctggttcaatgcctggttcatgatttatttcattctctccctccatcttgcaataggttacttttaatcatttaga

SEQ ID NO: 28410 - DNA, 120 bp, Artificial Sequence
  ENSG00000042088_35 (sequence is synthesized)
tctatgacactatgctaaacgttataggagacaaaaagactgtgaacaaacaagaagaaccaaacgaaaagagccaagtccaggattctcgttcagatcagcaagtcattgggatcgagc

SEQ ID NO: 28411 - DNA, 120 bp, Artificial Sequence
  ENSG00000042088_36 (sequence is synthesized)
tcctagggcagctactacatctgttatgtcctcaagataatcccagcacctagcactgtgcctggcacaaagtagatcttcaatgaaagaacgaaacgagccgttatatttacacagatg

SEQ ID NO: 28412 - DNA, 120 bp, Artificial Sequence
  ENSG00000042088_37 (sequence is synthesized)
tatttcactcagtcctctggaagagatgcctagtgtgaaagagattccaagaataaataccataaacagcaccgagcccaaatcccacagcaaacatccttattaaaggcaaggaacgtg

SEQ ID NO: 28413 - DNA, 120 bp, Artificial Sequence
  ENSG00000042088_38 (sequence is synthesized)
gggcgagttccttttctcagaagattttacgagaacgcaactgttgcgaagaaggaacagacattcgaggttctgagtccaatgggaactcatttaactttttattttgcagcagatttc

SEQ ID NO: 28414 - DNA, 120 bp, Artificial Sequence
  ENSG00000042088_39 (sequence is synthesized)
aaagtctgcacccagcccctcccaggacacaggtctccttgcagctgcctttaacctaagcgtatcctctctccactttaaaccaaacgccgctgcatggagccctgggagcctgagcca

SEQ ID NO: 28415 - DNA, 120 bp, Artificial Sequence
  ENSG00000042088_40 (sequence is synthesized)
gggttatagctctatttgcactcgctgtttagctggtccgaatttcttgtcctgcgtccaagaataatgaggttaggctgacaaccgaaggggaaaagggcggaggagtataatgtctca

SEQ ID NO: 28416 - DNA, 120 bp, Artificial Sequence
  ENSG00000042088_41 (sequence is synthesized)
cgcggactcggtgcggtctctcgcgggctgcggtcgggcccgggatcctgctcctggccgagtcgcggtgcgcgggctgctggggtccggcagggctggaggcggaccgcgaggaagcgg

SEQ ID NO: 28417 - DNA, 120 bp, Artificial Sequence
  ENSG00000042088_42 (sequence is synthesized)
gccgggaagatggggcagggtcgcctcggccccggggcctcggtttcctccgatcacagcgcctcagggggcgcgcacgggcgctgcggagacctgtgtcctgccggggcgcggcgctag

SEQ ID NO: 28418 - DNA, 89 bp, Artificial Sequence
  ENSG00000042088_43 (sequence is synthesized)
cagcctgagcgggtaaatcggactccccttcttaaagccctcagtggggtcccattgatcattgcataaaatccaatttctttaacaag

SEQ ID NO: 28419 - DNA, 120 bp, Artificial Sequence
  ENSG00000042088_44 (sequence is synthesized)
tcccattgatcattgcataaaatccaatttctttaacaagtcttctcccctcacccgcttcggaccactgcctgccttgcctaagtcctttcttatgacctctttcccacctctgccggc

SEQ ID NO: 28420 - DNA, 120 bp, Artificial Sequence
  ENSG00000042088_45 (sequence is synthesized)
tgggttccctctacttgggaatgctcttcaccccatcatttagacagcaggttccttttggccctctgggtctcatttatatgttactttttaagtatattccaaaggtcacccctattt

SEQ ID NO: 28421 - DNA, 120 bp, Artificial Sequence
  ENSG00000042088_46 (sequence is synthesized)
tcggacgtttgtctagcaccatttccagaactcacctgtgagtgaatctctgatccaggaggagcctcactcagcctgggaactttgaggtgctattgcaaggggaggtcctccacgtct

SEQ ID NO: 28422 - DNA, 120 bp, Artificial Sequence
  ENSG00000042286_0 (sequence is synthesized)
agcgcctcgggtcagtaactcgggaagacgaccaagcgggagcgggagcgggagcgggagccggagcgagagcgcgcgggcgcggccgacagtgcctgatttgagatggggtcccaggtc

SEQ ID NO: 28423 - DNA, 120 bp, Artificial Sequence
  ENSG00000042286_1 (sequence is synthesized)
tcggtggaatcgggagctctgcacgtggtgattgtgggtgggggctttggcgggatcgcagcagccagccagctgcaggccctgaacgtccccttcatgctggtggacatgaaggactcc

SEQ ID NO: 28424 - DNA, 120 bp, Artificial Sequence
  ENSG00000042286_2 (sequence is synthesized)
ttccaccacaatgtggctgctctccgagcctccgtggagacagggttcgccaaaaagacattcatttcttactcggtgactttcaaggacaacttccggcaggggctagtagtggggata

SEQ ID NO: 28425 - DNA, 120 bp, Artificial Sequence
  ENSG00000042286_3 (sequence is synthesized)
gacctgaagaaccagatggtgctgctgcagggtggcgaggccctgcccttctctcatcttatcctggccacgggcagcactgggcccttcccgggcaagtttaatgaggtttccagccag

SEQ ID NO: 28426 - DNA, 120 bp, Artificial Sequence
  ENSG00000042286_4 (sequence is synthesized)
caggccgctatccaggcctatgaggacatggtgaggcaggtccagcgctcacggttcatcgtggtggtgggaggaggctcggctggagtggagatggcagcagagattaaaacagaatat

SEQ ID NO: 28427 - DNA, 120 bp, Artificial Sequence
  ENSG00000042286_5 (sequence is synthesized)
cctgagaaagaggtcactctcattcactcccaagtggccctggctgacaaggagctcctgccctccgtccggcaggaagtgaaggagatcctcctccggaagggcgtgcagctgctgctg

SEQ ID NO: 28428 - DNA, 120 bp, Artificial Sequence
  ENSG00000042286_6 (sequence is synthesized)
agtgagcgggtgagcaatctggaggagctgcctctcaatgagtatcgagagtacatcaaagtgcagacggacaaaggcacagaggtggccaccaacctggtgattctctgcaccggcatc

SEQ ID NO: 28429 - DNA, 120 bp, Artificial Sequence
  ENSG00000042286_7 (sequence is synthesized)
aagatcaacagctccgcctaccgcaaagcgtttgagagcagactagccagcagtggtgctctgagagtgaacgagcacctccaggtggagggccacagcaacgtctacgccattggtgac

SEQ ID NO: 28430 - DNA, 120 bp, Artificial Sequence
  ENSG00000042286_8 (sequence is synthesized)
tgtgccgacgtgaggacgcccaagatggcctatcttgccggcctccacgccaacatcgccgtggccaacatcgtcaactctgtgaagcagcggcctctccaggcctacaagccgggtgca

SEQ ID NO: 28431 - DNA, 120 bp, Artificial Sequence
  ENSG00000042286_9 (sequence is synthesized)
ctgacgttcctcctgtccatggggagaaatgacggtgtgggccaaatcagtggcttctatgtgggccggctcatggttcggctgaccaagagccgggacctgttcgtctctacgagctgg

SEQ ID NO: 28432 - DNA, 120 bp, Artificial Sequence
  ENSG00000042286_10 (sequence is synthesized)
aaaaccatgaggcagtctccaccttgatggagaggccaggcgggagaactaccgcagcaggtgggcgtacggactgcttggcgcatggcacccgcctggcaagtgctagaactaatgcta

SEQ ID NO: 28433 - DNA, 120 bp, Artificial Sequence
  ENSG00000042286_11 (sequence is synthesized)
ttcttctggaataagatgccaatgatgtggtggctagaaatgcaacttgtataaaacaaaaatgggagagagagaggtattaaacaaataccccccttagaggatactttctgggtttgg

SEQ ID NO: 28434 - DNA, 120 bp, Artificial Sequence
  ENSG00000042286_12 (sequence is synthesized)
aaggtgtgcttgctgtggtactgggtgagcggctcatgtgtgctggctgcatggtgctggggaggccacagccagcccttcctctgcacctgcctcctctgggatgtgcatgtgtgtgta

SEQ ID NO: 28435 - DNA, 120 bp, Artificial Sequence
  ENSG00000042286_13 (sequence is synthesized)
tgacgcgtgccatttagagctctcagagcagggcagattgctgggctctggtggccagtgtctgtctgtgagggcaggaaggagagctgcacattgagaacaaaggagggacctgaggtg

SEQ ID NO: 28436 - DNA, 120 bp, Artificial Sequence
  ENSG00000042286_14 (sequence is synthesized)
gagagaggcccagcaccccaaatctctgccatcacacggtcggggagcccatacattctgcaacaaccagggacttcacaggagccttgttttcaatttgctaacaggtgcataatccct

SEQ ID NO: 28437 - DNA, 120 bp, Artificial Sequence
  ENSG00000042286_15 (sequence is synthesized)
tttgctaacaggtgcataatccctgtgctccttaagcctcatggccttcctacatttccactttatttgtttgtttgtttatttatttttgagacagtctcgccctgtcacccaggctgg

SEQ ID NO: 28438 - DNA, 88 bp, Artificial Sequence
  ENSG00000042286_16 (sequence is synthesized)
tcaggtgatccattcgtcttggcctctcggccagcacatttccacttttagatcctactccataccacaggtttcatttaagaagaaa

SEQ ID NO: 28439 - DNA, 120 bp, Artificial Sequence
  ENSG00000042286_17 (sequence is synthesized)
tagatcctactccataccacaggtttcatttaagaagaaagagctagataaatgtgctcttctggttaccccaccctgacagagtgcatttttacacggctagcaggggttgagactgca

SEQ ID NO: 28440 - DNA, 120 bp, Artificial Sequence
  ENSG00000042286_18 (sequence is synthesized)
gcctggcctgccagccattggaggtgtttaaggaagggcagataatgtgactctttgcggggtgccatctgcttacccattagcgagcagagggggtttctgcgggtgacccccagcata

SEQ ID NO: 28441 - DNA, 120 bp, Artificial Sequence
  ENSG00000042286_19 (sequence is synthesized)
tttctaggttacttatgggcagatttgtaagtgacaaaactccagctgatgctgggaatggggagagggcccttgagggactttgtggttttgtgcttctggtttcctggccaaccccag

SEQ ID NO: 28442 - DNA, 120 bp, Artificial Sequence
  ENSG00000042286_20 (sequence is synthesized)
ggtcacttgtctggaggcccagctgggcactaatgtctgccaccgactatgttacagtgtataaatgattcctctatttgggagagatcttccaatccagaggagcccctcttggactgc

SEQ ID NO: 28443 - DNA, 120 bp, Artificial Sequence
  ENSG00000042286_21 (sequence is synthesized)
ctgggttaaatctgcatagcagaagtggttgatgagttcatctgaagaaattcaggccccacctccccaccctgcccctccctgctcccttttgatggtggcctctgggtactcgggcag

SEQ ID NO: 28444 - DNA, 120 bp, Artificial Sequence
  ENSG00000042286_22 (sequence is synthesized)
agtccttgggacaccagcctctctggggttctcaggccatcccgttggggctgtcgcccaggcctaagtgagtcgtgtgcctctattggaggatggctgttcccctggtggttgcatcca

SEQ ID NO: 28445 - DNA, 120 bp, Artificial Sequence
  ENSG00000042286_23 (sequence is synthesized)
agtatctgtctttctttatggaccacgaagggaagcccaccttcctggaggcaggaccttcggcctaagaaacacaggccctggtgctatctgacctggggtccagcgaggtgggaatcc

SEQ ID NO: 28446 - DNA, 120 bp, Artificial Sequence
  ENSG00000042286_24 (sequence is synthesized)
cagtgtgtgagcgacaggccttcttctattgacttacaatattctagaaggacctacgtgtggggacacagttttccaaactgaggaaaatgttgcaataaaagaatatgttgtaagaaa

SEQ ID NO: 28447 - DNA, 120 bp, Artificial Sequence
  ENSG00000042286_25 (sequence is synthesized)
ccagctctcatgtctctgagatgacatgggtgttttgtccagactgggatgacggcagctttggggcagcagaggaggcatttttcagatgttttcatcttcgaatgaacttggtgatct

SEQ ID NO: 28448 - DNA, 120 bp, Artificial Sequence
  ENSG00000042286_26 (sequence is synthesized)
ggatgtctgcagcaagtctcagcaatctctttatgaatcatcattattattatggttcagttcatggtctttcccagggcctgggtgctgatgcttccccactccacactcgagcctcaa

SEQ ID NO: 28449 - DNA, 120 bp, Artificial Sequence
  ENSG00000042286_27 (sequence is synthesized)
gtatatgtggacagccacagtacactgtgcagctggtttaggacaagtgtctattccagtggtcactgtccactgggggagggcgtgcagaggggttttctttgttaatgttcttgggtt

SEQ ID NO: 28450 - DNA, 120 bp, Artificial Sequence
  ENSG00000042286_28 (sequence is synthesized)
tccatgatgcaactgagaaatggtgattgtgcattatacccagtacccctgagactcctttctggcccccagattcctggacactgttgatctattgggtccagaagcctggagaaggcc

SEQ ID NO: 28451 - DNA, 120 bp, Artificial Sequence
  ENSG00000042286_29 (sequence is synthesized)
gggtaactgaagctggtagccagttcatgttgagaagcagaggactaggtctacactggcgccctctgcattcaggtcaagggccaaatgggaatgtgcagaaggcaaggggaatccacc

SEQ ID NO: 28452 - DNA, 120 bp, Artificial Sequence
  ENSG00000042286_30 (sequence is synthesized)
ctcctcactgaagccttttaagaaaaaagcatcctggagagaggtagtttctctctacagaagcattcccaagaaggaaaggagcaatgctagaatgagaataccacagctttgcaactc

SEQ ID NO: 28453 - DNA, 120 bp, Artificial Sequence
  ENSG00000042286_31 (sequence is synthesized)
ctaacgaatggcggaatctagagaagaggcatcaatggccaccagcatcacaccaatacagacaaccaggcacgacgcgcctcctcgggcacgagcactcgccactgaccaaggagtctt

SEQ ID NO: 28454 - DNA, 120 bp, Artificial Sequence
  ENSG00000042286_32 (sequence is synthesized)
ggcaaagttttcgaacctacacctcatgaaacctctagatccaaccaccaagttataaaaaagcaaagaaacatgttttatgatgccaggaggatataatcaacaaaatccggactgcat

SEQ ID NO: 28455 - DNA, 120 bp, Artificial Sequence
  ENSG00000042286_33 (sequence is synthesized)
gaaaccctataggacaaatggcccagcttcctcaacaaatgaattgcaaagaaataagaaagagatgaaggaggaacctatggtataagagactcatcaaccaactgcagtgcgtggact

SEQ ID NO: 28456 - DNA, 120 bp, Artificial Sequence
  ENSG00000042286_34 (sequence is synthesized)
gatttggatccgaaatcaaataaacaaattttctttctttcctttcttcctttctctctccccctccccctccttccctccctccttccttctctaccttcccttccttcctttctctct

SEQ ID NO: 28457 - DNA, 120 bp, Artificial Sequence
  ENSG00000042286_35 (sequence is synthesized)
ctctctccctctgcctctctctttctctctttttctttccctccctccctccctctctctctctctttttctttctttcctttcttaatttcttgacatggtctcactctgtgcactctg

SEQ ID NO: 28458 - DNA, 120 bp, Artificial Sequence
  ENSG00000042286_36 (sequence is synthesized)
ggccgttcggagaccagccccagcgtgccaggaccgtttccggggcctggccggggcgttgccgcggggtcggggaccagcacgagtgctgagtcacgccccgcccgggagcgcctcggg

SEQ ID NO: 28459 - DNA, 120 bp, Artificial Sequence
  ENSG00000042286_37 (sequence is synthesized)
gcttccctgtgttgtcccagacagcaagtagacatgcctggaagcactaattttaaacaagctttaatgttgacatcagtctgattgactgttggaatgcccatggcttgtataattata

SEQ ID NO: 28460 - DNA, 120 bp, Artificial Sequence
  ENSG00000042286_38 (sequence is synthesized)
agtgcccaaggatgcttgaagataattttccaggtggccctaggtgaggtgtaggttgtgacatgttggcatattggtagtcctctggcctgggtgtggcaggagggtactgaaagagtc

SEQ ID NO: 28461 - DNA, 120 bp, Artificial Sequence
  ENSG00000042286_39 (sequence is synthesized)
agttttaatagagtttggggttaaacatggggaagcctttttgggctatcccatacctggccactagaacaaactctccaagctggtgatggaaacatccccttagagctctttaaaaat

SEQ ID NO: 28462 - DNA, 120 bp, Artificial Sequence
  ENSG00000042304_0 (sequence is synthesized)
atggaagactatgccctgacgtttggaattaatcccttcattgccttgatgattcaacccatcgtgacgatgactgtggttgacaaccaaggactggggcttcctgttgacattcagcac

SEQ ID NO: 28463 - DNA, 120 bp, Artificial Sequence
  ENSG00000042304_1 (sequence is synthesized)
gagccttgggacccagggatgaggaaacttaccgtacagacatgcgggctgaccttcattcaccctgcgggccatggcctctgccatccaactgcagaggcttcagccgaaactctctcc

SEQ ID NO: 28464 - DNA, 120 bp, Artificial Sequence
  ENSG00000042304_2 (sequence is synthesized)
agcactgccctaaacagaccaagtgtgagggagggagcatgtaatgaaaagtccacagagaacaagaagccacaagattcggtgctctggagccattctagatggtttcaggggaactag

SEQ ID NO: 28465 - DNA, 120 bp, Artificial Sequence
  ENSG00000042304_3 (sequence is synthesized)
cctcccagcttccagaactgcttcacctgtagaactgccccctcccttgtgatggttctcagctggaagagcggggtcaggagagaagtgccagttcatccatcttacgctaagtattaa

SEQ ID NO: 28466 - DNA, 120 bp, Artificial Sequence
  ENSG00000042304_4 (sequence is synthesized)
acagatgagatcttccccgtttggacatactcctacctggtgctgctgctgcttgtgtttgtcctcaccgattacgtccgctacaagccagtcatcatcttgcaaggtattattagtttc

SEQ ID NO: 28467 - DNA, 120 bp, Artificial Sequence
  ENSG00000042304_5 (sequence is synthesized)
atcattacctgactgccgctcctgtttggccaaggagtgaagaccgtgcaggttgtagagttcttctacgggatggtcactgccgccgaggtggcttactacgcctacatatacagcgtg

SEQ ID NO: 28468 - DNA, 120 bp, Artificial Sequence
  ENSG00000042304_6 (sequence is synthesized)
gtcagccccgagcactaccagagagtgagcggctactgcaggagtgtcacgctggccacctacacagcagggtcggtgctggcccgactcttggtatccccggtgaacctgttgtacttt

SEQ ID NO: 28469 - DNA, 120 bp, Artificial Sequence
  ENSG00000042304_7 (sequence is synthesized)
tacctcaacgtcatatccttggcctctgtctccgtggccttccttttctcaccttttctaccaatgcccaaaaagagcatgtttttttcatgcaaaacccaaaaaagaaactcctcaaaa

SEQ ID NO: 28470 - DNA, 120 bp, Artificial Sequence
  ENSG00000042304_8 (sequence is synthesized)
cggaattattcactgtttcaggggacctggatgccagcagtggggcaccccaaagccaagcaatgtggctttgagagattttgtgcagtggtcccgggatttgcaggagtgctactcctc

SEQ ID NO: 28471 - DNA, 120 bp, Artificial Sequence
  ENSG00000042304_9 (sequence is synthesized)
gaagcatctcttttactgacccctgtggtgggctttttccacaacaggttttaaccagatgttaaactatgttcaaatcctatgggattacaaggcaccatctcaaaatatataatggag

SEQ ID NO: 28472 - DNA, 120 bp, Artificial Sequence
  ENSG00000042304_10 (sequence is synthesized)
cagtagaagcccttgaaacctttggggagccgtggcagccttcacagtggctacatcaaagtcatctgggatcttccgggtgagttgcccttggtgatcttctcaggagcagatggaggt

SEQ ID NO: 28473 - DNA, 120 bp, Artificial Sequence
  ENSG00000042304_11 (sequence is synthesized)
tctctatgtcccatgcatttcacaactaatatttgggtgcactatgctggtctcttgatattcaagtcaagttttatgctctttataaccatagccgtatttcagattggagttaatctg

SEQ ID NO: 28474 - DNA, 120 bp, Artificial Sequence
  ENSG00000042304_12 (sequence is synthesized)
tttgtgcacaatgcatcccatcccaaagacagtccacagcaggacttgctccatctctgaactggtcttacccccttaaacctgcctttatatctaggagtttctttattttattttatt

SEQ ID NO: 28475 - DNA, 120 bp, Artificial Sequence
  ENSG00000042304_13 (sequence is synthesized)
gcctatatctaggagtctcttgatgagcattggtcgacagaaagaagtctcttctaaaaattgttaatgcttttatagactactcatagtctgagtcataaaacatcatttgcctttcaa

SEQ ID NO: 28476 - DNA, 120 bp, Artificial Sequence
  ENSG00000042304_14 (sequence is synthesized)
tttataccttccaagtgaatatgattattgaggattatctaattattatctacgtttctctctagatataaaaaacaccatagatcctatacacacaaaaatggtttttctatcagaaat

SEQ ID NO: 28477 - DNA, 120 bp, Artificial Sequence
  ENSG00000042304_15 (sequence is synthesized)
ggactcactcgcctggcaaaaggacacagattagattattctaatctcaaggccccttaggcttatgaattcaaaaaaaaaaatagaagaaatgaacaaaaacttaaatcacagtttgtt

SEQ ID NO: 28478 - DNA, 120 bp, Artificial Sequence
  ENSG00000042304_16 (sequence is synthesized)
attaagtaatatctgaaatgaattagaaagaaaccataagccttaacaatactccaatcacagttaaattaatttagacagaaaagcaaatagcaattgacttgaaaataagaagtggag

SEQ ID NO: 28479 - DNA, 120 bp, Artificial Sequence
  ENSG00000042304_17 (sequence is synthesized)
ccgaaggtggatacaagaaatccaggagggctaagataaatcccaaatccaatgttcatcaatgcctacacattcagtacaacctgatggcattaattctgtggttggggaaatgtgaaa

SEQ ID NO: 28480 - DNA, 120 bp, Artificial Sequence
  ENSG00000042304_18 (sequence is synthesized)
gtgaaatcgataataccacagttctaaatgtgcactgttggctgaacttatggtgtggtggggggtggtaaaaattaggcttctaagaaaggatgggactctgccctccaggcaaggagt

SEQ ID NO: 28481 - DNA, 120 bp, Artificial Sequence
  ENSG00000042304_19 (sequence is synthesized)
aaatggccccagcagatggaaaactaaagcaaatgtaatcacctgcattttgaaaataggtgtgtttctgagaatttgtttgaattagttctttgtaaataaaacaggattttgaatgca

SEQ ID NO: 28482 - DNA, 76 bp, Artificial Sequence
  ENSG00000042304_20 (sequence is synthesized)
tattaggagccgtggcagccttcacagtggctacatcaaagtcatctgggatcttccggatttcagattggagtta

SEQ ID NO: 28483 - DNA, 120 bp, Artificial Sequence
  ENSG00000042304_21 (sequence is synthesized)
gctgtcacaacataagctatttatggagtttcaaaggtcttaatggatttatgaagatcttaaaaaggggcttcaagacacatctttgaagatgactgaaagattaggggaagaggccca

SEQ ID NO: 28484 - DNA, 120 bp, Artificial Sequence
  ENSG00000042304_22 (sequence is synthesized)
tgaggaaagctaaaagaagcatttttatctcaactagaaaaagctgaagagtaatttagtaataatcaccaagccggttatggagagagtggtagatataattgtctttactgaaggcac

SEQ ID NO: 28485 - DNA, 120 bp, Artificial Sequence
  ENSG00000042304_23 (sequence is synthesized)
atcccacggaatgttaaaatacattgcaccatcccatttgtctatttcttcagtctatctctgctaaaagagctttcagaaagaaactgtcaatagaaacctgggcttcctcagcagacc

SEQ ID NO: 28486 - DNA, 120 bp, Artificial Sequence
  ENSG00000042317_0 (sequence is synthesized)
actggacccagcccttagcaacggcctggcaacggtttccctgctgctgcagcccccgtcggctcctcttttccagtcctccactgccggggctgggcccggccgcgggaaggaccgaag

SEQ ID NO: 28487 - DNA, 120 bp, Artificial Sequence
  ENSG00000042317_1 (sequence is synthesized)
gggatacagcgtgtccctgcggcggctgcaagaggactaagcatggatggcagccggagagtcagagcaacctctgtccttcccagatatggtccaccgtgcctatttaaaggacacttg

SEQ ID NO: 28488 - DNA, 120 bp, Artificial Sequence
  ENSG00000042317_2 (sequence is synthesized)
agcaccaaaagtaatgctttttgcactgactcctcttctctcagactaagcactctccagctggtcaagaatcacatggctgttcactataataaaatcctttcagccaaagctgcagta

SEQ ID NO: 28489 - DNA, 120 bp, Artificial Sequence
  ENSG00000042317_3 (sequence is synthesized)
gactgctcggttccagtaagcgtgagtaccagcataaagtatgcagaccaacaacgaagagagaaactcaaaaaggaattagcacaatgtgaaaaagagttcaaattaactaaaactgca

SEQ ID NO: 28490 - DNA, 120 bp, Artificial Sequence
  ENSG00000042317_4 (sequence is synthesized)
atgcgagccaattataaaaataattccaagtcactttttaataccttacaaaagccctcaggcgaaccgcaaattgaggatgacatgttaaaagaagaaatgaatggattttcatccttt

SEQ ID NO: 28491 - DNA, 120 bp, Artificial Sequence
  ENSG00000042317_5 (sequence is synthesized)
gcaaggtcactagtaccctcttcagagagactacacctaagtctacataaatccagtaaagtcatcacaaatggtcctgagaagaactccagttcctccccgtccagtgtggattatgca

SEQ ID NO: 28492 - DNA, 120 bp, Artificial Sequence
  ENSG00000042317_6 (sequence is synthesized)
gcctccgggccccggaaactgagctctggagccctgtatggcagaaggcccagaagcacattcccaaattcccaccggtttcagttagtcatttcgaaagcacccagtggggatcttttg

SEQ ID NO: 28493 - DNA, 120 bp, Artificial Sequence
  ENSG00000042317_7 (sequence is synthesized)
gataaacattctgaactcttttctaacaaacaattgccattcactcctcgcactttaaaaacagaagcaaaatctttcctgtcacagtatcgctattatacacctgccaaaagaaaaaag

SEQ ID NO: 28494 - DNA, 120 bp, Artificial Sequence
  ENSG00000042317_8 (sequence is synthesized)
aaacatgacagattcagaaatgaacataaagcaggcatctaattgtgtgacatatgatgccaaagaaaaaatagctcctttacctttagaagggcatgactcaacatgggatgagattaa

SEQ ID NO: 28495 - DNA, 120 bp, Artificial Sequence
  ENSG00000042317_9 (sequence is synthesized)
ggatgatgctcttcagcattcctcaccaagggcaatgtgtcagtattccctgaagcccccttcaactcgtaaaatctactctgatgaagaagaactgttgtatctgagtttcattgaaga

SEQ ID NO: 28496 - DNA, 120 bp, Artificial Sequence
  ENSG00000042317_10 (sequence is synthesized)
tgtaacagatgaaattttgaaacttggtttattttcaaacaggtttttagaacgactgttcgagcgacatataaaacaaaataaacatttggaggaggaaaaaatgcgccacctgctgca

SEQ ID NO: 28497 - DNA, 120 bp, Artificial Sequence
  ENSG00000042317_11 (sequence is synthesized)
tgtcctgaaagtagacttaggctgcacatcggaggaaaactcggtaaagcaaaatgatgttgatatgttgaatgtatttgattttgaaaaggctgggaattcagaaccaaatgaattaaa

SEQ ID NO: 28498 - DNA, 120 bp, Artificial Sequence
  ENSG00000042317_12 (sequence is synthesized)
aaatgaaagtgaagtaacaattcagcaggaacgtcaacaataccaaaaggctttggatatgttattgtcggcaccaaaggatgagaacgagatattcccttcaccaactgaatttttcat

SEQ ID NO: 28499 - DNA, 120 bp, Artificial Sequence
  ENSG00000042317_13 (sequence is synthesized)
gcctatttataaatcaaagcattcagaaggggttataattcaacaggtgaatgatgaaacaaatcttgaaacttcaactttggatgaaaatcatccaagtatttcagacagtttaacaga

SEQ ID NO: 28500 - DNA, 120 bp, Artificial Sequence
  ENSG00000042317_14 (sequence is synthesized)
tcgggaaacttctgtgaatgtcattgaaggtgatagtgaccctgaaaaggttgagatttcaaatggattatgtggtcttaacacatcaccctcccaatctgttcagttctccagtgtcaa

SEQ ID NO: 28501 - DNA, 120 bp, Artificial Sequence
  ENSG00000042317_15 (sequence is synthesized)
aggcgacaataatcatgacatggagttatcaactcttaaaatcatggaaatgagcattgaggactgccctttggatgtttaatcttcattaataaatacctcaaatggccagtaactcaa

SEQ ID NO: 28502 - DNA, 120 bp, Artificial Sequence
  ENSG00000042317_16 (sequence is synthesized)
aacagttcatagggacagcacccccacaacagagaattatacaaccagcccaaaatgtcaatggacatttgggctgagaagtcttacatgacagaatgcttcctaccctgatctgacgtt

SEQ ID NO: 28503 - DNA, 120 bp, Artificial Sequence
  ENSG00000042317_17 (sequence is synthesized)
atttccaaggattcaaaggggacgtggatgccagatgagtccacctcctctccctgctcttcccgcagggacagagcctgccaggtgctggtgactcggatcctgacaggaggtcgctct

SEQ ID NO: 28504 - DNA, 120 bp, Artificial Sequence
  ENSG00000042317_18 (sequence is synthesized)
gcggaagactggcaggatcccagagcaacagactggggctcgatgccccttccccgccaggtctctccgtccgcaactgtcctcctagtaccgggtatcccgcaggcggggctgcggaac

SEQ ID NO: 28505 - DNA, 120 bp, Artificial Sequence
  ENSG00000042317_19 (sequence is synthesized)
atcggaggaaaactcgattccagatgctgctactactggtccgaaaacaaccccactggaagatgaataaagtggacacaacaaatagcatatgttctactatagaggtggccacatgaa

SEQ ID NO: 28506 - DNA, 120 bp, Artificial Sequence
  ENSG00000042317_20 (sequence is synthesized)
gagctctgcaagcccactgtgaaattgatagcaaatctttattcaagtgtattaattgacccacaaatatcctgattaatgaagctggctagtttggcaagatgcattctaactcttaaa

SEQ ID NO: 28507 - DNA, 120 bp, Artificial Sequence
  ENSG00000042317_21 (sequence is synthesized)
ctgcggcggctgcaagaggactaagcatggatggcagccggagaggtaaagggcagctgtcaggggctaccgccgcctcgcccctcgctccaggcggcgctcccagcctcgggtccgggc

SEQ ID NO: 28508 - DNA, 89 bp, Artificial Sequence
  ENSG00000042317_22 (sequence is synthesized)
tgctgcagtagactgctcggttccagtaagcgtgagtaccagcataaagtgtatttagcactgtaaacttgaattttgatgcagaccaa

SEQ ID NO: 28509 - DNA, 120 bp, Artificial Sequence
  ENSG00000042317_23 (sequence is synthesized)
cggaggaaaactcggtcaggattccagatgattaacattaactgttcttcagaggctgagaaaatcacttaagagaaataagtacctacctcttctgctgtcaccattgctataattgca

SEQ ID NO: 28510 - DNA, 120 bp, Artificial Sequence
  ENSG00000042317_24 (sequence is synthesized)
ggtattctgtaatggtccctgtgtggcaatataatcccattcgattccactgacagagacctgggattagaaaaggttaaaaaaattgatgtgtgggtataatatacataggtatgtatg

SEQ ID NO: 28511 - DNA, 120 bp, Artificial Sequence
  ENSG00000042317_25 (sequence is synthesized)
catgcattcatggtagtactaaaaaagtttttttaaaaaagtaaaaagtaaaaaagtagtaaactggattattcagcagaataaggaaagacttttcatcttttcccttgtgaatacaat

SEQ ID NO: 28512 - DNA, 120 bp, Artificial Sequence
  ENSG00000042317_26 (sequence is synthesized)
ttgcattactgacatttttataaacttaggtactgtgaatatacataatatctatgcaacctgtttaaccttgctgaatgtcagttctcatttatacaataaagatactgcctaccgtca

SEQ ID NO: 28513 - DNA, 120 bp, Artificial Sequence
  ENSG00000042317_27 (sequence is synthesized)
gctgtccttgtgatagtgagtgggttcttgcaagatctggttgtttaaaagtgtatgcccccacagccttcccctctcgttcttgccatatgaaatgcacattccctcttcgccttccac

SEQ ID NO: 28514 - DNA, 88 bp, Artificial Sequence
  ENSG00000042317_28 (sequence is synthesized)
tcttgccatatgaaatgcacattccctcttcgccttccaccacgagcaaaagcttcctgtggtctcccctgaagcagatgctggcatt

SEQ ID NO: 28515 - DNA, 120 bp, Artificial Sequence
  ENSG00000042317_29 (sequence is synthesized)
atttctaatagcaatgcaagaacagtctaacacactaggtctagatataacaaattcctttagcgtttgcttgtcaggaaagactttatttcttctttgtttgtgaagcttagtatttgg

SEQ ID NO: 28516 - DNA, 120 bp, Artificial Sequence
  ENSG00000042317_30 (sequence is synthesized)
tgattacatagtcataaataacatggttaagcatttgtaaccttcatatctctgtgaataactgctaagagttgctttcttatgcccttaggcttggccagtttgtcatatcttgttggc

SEQ ID NO: 28517 - DNA, 120 bp, Artificial Sequence
  ENSG00000042317_31 (sequence is synthesized)
tttttttttttttggtaactacacaaatctcactatattgtttgtattatttaaatagttaatccatttagaatttctataaattaaatgtgttagttaatatctagaggcacatgtgaa

SEQ ID NO: 28518 - DNA, 120 bp, Artificial Sequence
  ENSG00000042317_32 (sequence is synthesized)
tttttaaaatgtgttagtaactctttatataggaaaataaatggatttttatttacatatcataacattttaacaagaaaaatgttccatttattactctaacaagaccaaaaaaccaat

SEQ ID NO: 28519 - DNA, 120 bp, Artificial Sequence
  ENSG00000042317_33 (sequence is synthesized)
aaatttctcaaccttaaaacaagatgctggcctagggctaggagaggacttcttagttgaagctcctgcttctctggacaactttcctcttccttcttgcaaatgctttgcagagggact

SEQ ID NO: 28520 - DNA, 120 bp, Artificial Sequence
  ENSG00000042317_34 (sequence is synthesized)
tgcacctctgctgctggacctggtcaggagcaagaggaaatttaaaacattcctcgggagtgcttgctcccagtggattgcatttgattgcgccttgtccttcgttgctttctttttgtg

SEQ ID NO: 28521 - DNA, 120 bp, Artificial Sequence
  ENSG00000042317_35 (sequence is synthesized)
ttgtttaattctgcttgttttttactgctatggatgttgcagatatctgtgaaattttactctattaggtcatcacctttagtaaatatttatccttgcataatttgagaaggtagacat

SEQ ID NO: 28522 - DNA, 120 bp, Artificial Sequence
  ENSG00000042317_36 (sequence is synthesized)
ttggtaatggtagagatagatatttctaattaggtactaatgtttcttacagttttcagaataagtaaggaataatttttatgctatatattgccttccttttacagtgaagaagaactg

SEQ ID NO: 28523 - DNA, 120 bp, Artificial Sequence
  ENSG00000042317_37 (sequence is synthesized)
gccccttggggcgcttcctacccctggctgagtcgccagtgttgcctggagctgcccaggcctgcgcaaaggaagagggagagcctgcttgccagcctcgcagtcagagcaacctctgtc

SEQ ID NO: 28524 - DNA, 120 bp, Artificial Sequence
  ENSG00000042317_38 (sequence is synthesized)
tcttaacactgcttttgctgcatcccagaaattttggtctagaagtacttgtatgaatctgggtgctccagtgttgggtgcaaatatacctaggatagatgcagaccaacaacgaagaga

SEQ ID NO: 28525 - DNA, 120 bp, Artificial Sequence
  ENSG00000042317_39 (sequence is synthesized)
tactcaatttaaacctccagcttcacttctcattaaaatatatctatagcaaaaatgaataccttatatatatgagaggatttgtatttgtttggtttagtgtgatacaaactattgact

SEQ ID NO: 28526 - DNA, 120 bp, Artificial Sequence
  ENSG00000042317_40 (sequence is synthesized)
agactgaattaagctttaaatctgagttggggacagctgagactaaaaacatgacagattcagaaatgaacataaagcaggtaataagtatgaaatcttttggtattgctacatttgaat

SEQ ID NO: 28527 - DNA, 120 bp, Artificial Sequence
  ENSG00000042317_41 (sequence is synthesized)
tacagatgtttttcagtaaatagaatatgtacagctatttagactgtgaagaataatctgttggtggcacttatcatacatgatatagccagtatacagaaggtctgcctatttacaaat

SEQ ID NO: 28528 - DNA, 120 bp, Artificial Sequence
  ENSG00000042317_42 (sequence is synthesized)
ggttatagctctctctgaatggccaggtggatcctgccaaatctgggaagtcatttgttactaacatctttcctagatgattggttggctggctggacaaatggaaggatcagtaaaata

SEQ ID NO: 28529 - DNA, 120 bp, Artificial Sequence
  ENSG00000042317_43 (sequence is synthesized)
ccttaagtattgttttcaaagatgcagacctggattactagaggagccagcagagtagtgcagaagttgagtttttataccttttttttttttgtaaagaattgccacatattatataat

SEQ ID NO: 28530 - DNA, 120 bp, Artificial Sequence
  ENSG00000042317_44 (sequence is synthesized)
tggaaattatacattttataagaataagtagctgttattctcttatgtttgcctctgctttttctagaccatgaagctgtttattacagggtttatattttgaattcttagcatcatttc

SEQ ID NO: 28531 - DNA, 120 bp, Artificial Sequence
  ENSG00000042317_45 (sequence is synthesized)
ttttaaaatattgcaactttgagtctgattttgagataaattgttttatttttggagtttcagtcttgcacttgtgtcctgacttaaatttgttgcttataaaaatggtttgtctattaa

SEQ ID NO: 28532 - DNA, 120 bp, Artificial Sequence
  ENSG00000042317_46 (sequence is synthesized)
aatgtcaaacacagatccagagatagaagaataaaatataatcatactcaacttcccccttcccttctgaaaatgggtagaaggtggtagttttccatctcagctattaatcgctgtttg

SEQ ID NO: 28533 - DNA, 120 bp, Artificial Sequence
  ENSG00000042317_47 (sequence is synthesized)
ctgccacttaaggcccaaggacaaatcacttatcctctgagagctgaatttcctcatctagaaaaactgtacttaacttgcaggattattaggaggagtaaatgatgtaggcaaagtgcc

SEQ ID NO: 28534 - DNA, 120 bp, Artificial Sequence
  ENSG00000042317_48 (sequence is synthesized)
tagcctggtaagggcttaataaatgatagctattactagcttgaaatttttggaaagagttagctttgcagataactacgtaaacatgaaaaaatatttatttacaatcctgcaagaaaa

SEQ ID NO: 28535 - DNA, 120 bp, Artificial Sequence
  ENSG00000042317_49 (sequence is synthesized)
tgtgtgtccccatattccatagatagtgccatcagtacttgacttgaagaagccagtagagtattaactgcagtagatccatattttaacagcacctttaaaactgtaaagcactataca

SEQ ID NO: 28536 - DNA, 120 bp, Artificial Sequence
  ENSG00000042317_50 (sequence is synthesized)
taaattgtcattgtaaagattgaatctaatgatgtgagtaaatgcttggcacagtttgtggtgtgtagtaaggagtctataaaagtaagctgccattatttttgtttgttaatattattg

SEQ ID NO: 28537 - DNA, 120 bp, Artificial Sequence
  ENSG00000042317_51 (sequence is synthesized)
ttcatgctgccagcgctaccactgcttctacatatttgacatgttggcatttaaaacagatgagctatttgaatttctgaataatgagattttgttccctcaaacttacttaaaagttga

SEQ ID NO: 28538 - DNA, 120 bp, Artificial Sequence
  ENSG00000042317_52 (sequence is synthesized)
aaatttgcttcatttttccctttatatgtttatttgtggcaatttcttaatgtcatttaaatgccactcattaaaatacaagaaataagtcattttatctttaagtttaagaaaaaagtg

SEQ ID NO: 28539 - DNA, 120 bp, Artificial Sequence
  ENSG00000042317_53 (sequence is synthesized)
ctggatggatagaaaaattattctaaaatattctttgtcgtactgtataatttttatctactggatatctctgttcaatcacttaaaatttgctgtgttatattctgctttcgtaatgta

SEQ ID NO: 28540 - DNA, 120 bp, Artificial Sequence
  ENSG00000042429_0 (sequence is synthesized)
agttttgctccgaaagacttaccgaggagggagcttgcggtgcgttctgggaaagttgctgggccagctcctttgtttccagtctgagcgttgcgttcggtttcccgagggtcttctgag

SEQ ID NO: 28541 - DNA, 120 bp, Artificial Sequence
  ENSG00000042429_1 (sequence is synthesized)
gcaccgcggctgcgggcttctgagttcccggctctccgcagggaagcctcctcttcgtacctcgttttttggctcgtggggggtcctcccaccgctggccgacgcagccagcatgtccgg

SEQ ID NO: 28542 - DNA, 120 bp, Artificial Sequence
  ENSG00000042429_2 (sequence is synthesized)
ggtgcgcgcagtgcggatcagcatcgaatcggcctgcgagaagcaggtccatgaggtgggcctggatggcaccgagacgtacctgcccccgctgtccatgtcgcagaatctggcgcgtct

SEQ ID NO: 28543 - DNA, 120 bp, Artificial Sequence
  ENSG00000042429_3 (sequence is synthesized)
ggcccagcggatagacttcagccagggttcgggctccgaggaggaggaggcggcggggaccgagggcgacgcgcaggagtggccgggcgccgggtccagcgcagaccaggacgacgagga

SEQ ID NO: 28544 - DNA, 120 bp, Artificial Sequence
  ENSG00000042429_4 (sequence is synthesized)
aggagtggtaaaatttcagccttccctttggccttgggactcagtgaggaacaatttgagaagtgccctgacagagatgtgtgttctctatgatgttctcagtattgttagggataaaaa

SEQ ID NO: 28545 - DNA, 120 bp, Artificial Sequence
  ENSG00000042429_5 (sequence is synthesized)
atttatgactcttgatcctgtctctcaggatgcacttcctccaaaacagaatcctcagacgttgcaattgatatctaaaaagaagtcacttgctggagcagcacaaatcttattgaaggg

SEQ ID NO: 28546 - DNA, 120 bp, Artificial Sequence
  ENSG00000042429_6 (sequence is synthesized)
ggcagaaagactgactaaatcagttaccgaaaaccaagaaaacaagctacaaagagacttcaattctgagcttttgcgattacggcaacactggaaacttcgaaaagttggagataaaat

SEQ ID NO: 28547 - DNA, 120 bp, Artificial Sequence
  ENSG00000042429_7 (sequence is synthesized)
tctcggagatctgagctacagaagtgcaggatctctctttcctcatcatggtacatttgaagtaataaagaatacagatctcgatctggataaaaagatacctgaagattactgtcctct

SEQ ID NO: 28548 - DNA, 120 bp, Artificial Sequence
  ENSG00000042429_8 (sequence is synthesized)
tgatgtccaaattcctagtgatttagaggggtctgcatatatcaaggtttcaatacaaaaacaggctccagatataggtgacctcggcacagttaacctcttcaaacgacctttgcccaa

SEQ ID NO: 28549 - DNA, 120 bp, Artificial Sequence
  ENSG00000042429_9 (sequence is synthesized)
atccaaaccaggttccccacattggcagacaaaattagaagcggcacagaatgttctcttatgtaaagaaatttttgcacagctctctcgggaagctgttcaaattaaatcacaagtccc

SEQ ID NO: 28550 - DNA, 120 bp, Artificial Sequence
  ENSG00000042429_10 (sequence is synthesized)
tcacattgtggtgaaaaaccagattatctctcagccctttccgagcttgcagttatctatttctttgtgccattcctcaaatgataagaaatcccaaaaatttgctactgagaagcaatg

SEQ ID NO: 28551 - DNA, 120 bp, Artificial Sequence
  ENSG00000042429_11 (sequence is synthesized)
tccggaggaccacctttatgtcctagagcataatttgcatctactgattagagagtttcataaacagaccttgagttccatcatgatgcctcatccagcaagtgcaccttttggccacaa

SEQ ID NO: 28552 - DNA, 120 bp, Artificial Sequence
  ENSG00000042429_12 (sequence is synthesized)
gagaatgagactttcgggtcctcaagcttttgataaaaatgaaattaattcattacagtccagtgaagggcttctggaaaaaataattaaacaagcaaagcatatttttctaaggagtag

SEQ ID NO: 28553 - DNA, 120 bp, Artificial Sequence
  ENSG00000042429_13 (sequence is synthesized)
agctgctgcaaccattgacagcttagcaagccgaattgaggatcctcagatacaggctcattggtcaaatatcaatgatgtttatgaatctagtgtgaaagttttaatcacatcacaagg

SEQ ID NO: 28554 - DNA, 120 bp, Artificial Sequence
  ENSG00000042429_14 (sequence is synthesized)
ctatgaacaaatatgcaagtccattcaactgcaattgaatattggagttgagcagattcgagttgtacatagagatggaagagtaattacactgtcttatcaggagcaggagctacagga

SEQ ID NO: 28555 - DNA, 120 bp, Artificial Sequence
  ENSG00000042429_15 (sequence is synthesized)
ttttcttctgtctcagatgtcacagcaccaggtacatgcagttcagcaactcgccaaggttatgggctggcaagtactgagcttcagtaatcatgtgggacttggacctatagagagcat

SEQ ID NO: 28556 - DNA, 120 bp, Artificial Sequence
  ENSG00000042429_16 (sequence is synthesized)
tggtaatgcatctgccatcacggtggcctccccaagtggtgactatgctatttcagttcgtaatggacctgaaagtggcagcaagattatggttcagtttcctcgtaaccaatgtaaaga

SEQ ID NO: 28557 - DNA, 120 bp, Artificial Sequence
  ENSG00000042429_17 (sequence is synthesized)
ccttccaaaaagtgatgttttacaagataacaaatggagtcatcttcgtgggccattcaaagaagttcagtggaataaaatggaaggtcgaaattttgtttataaaatggagctgcttat

SEQ ID NO: 28558 - DNA, 120 bp, Artificial Sequence
  ENSG00000042429_18 (sequence is synthesized)
gtctgcacttagcccttgtctactatgattttttccagatgtttcctaaagaagtttccagaaactttgacttgaaatgtttgcagatcaactataagcacaaagaagagataacttcca

SEQ ID NO: 28559 - DNA, 120 bp, Artificial Sequence
  ENSG00000042429_19 (sequence is synthesized)
aaagagtgctgtttttaaaaataataattaggaaatgtttatttagcactttcaaacttttcactttataaatgacaagtgctttgaaatgcagaagtttatgtacagttgtatatacag

SEQ ID NO: 28560 - DNA, 120 bp, Artificial Sequence
  ENSG00000042429_20 (sequence is synthesized)
tatgacaagatgtaaaataatatgtttttcatgcagtttaaaatattactaacttaagggtttctatgtgctttttaaaatattccttctttgatgttgacatcaaataaagtatgtggt

SEQ ID NO: 28561 - DNA, 120 bp, Artificial Sequence
  ENSG00000042429_21 (sequence is synthesized)
actttttttttttgagatggtatctcactctgtagcccagtctggagtgcagtggtgtgatcatggttcactgcagtcttgacctcccaggcttaggtgatccttctgtctcagccttcc

SEQ ID NO: 28562 - DNA, 86 bp, Artificial Sequence
  ENSG00000042429_22 (sequence is synthesized)
ccacgcctggctaatttttgtattttttataaagacagggtttttccatgttgcccaggctggtttcgaactcggctcaagtgatc

SEQ ID NO: 28563 - DNA, 120 bp, Artificial Sequence
  ENSG00000042429_23 (sequence is synthesized)
aggcgtgagccaccatgcccagcctactctaaattattgataacctcttcctccagttgtctcctttaagctttcctgggtctaacctacataggtaatttaagaacatcctcagaaagg

SEQ ID NO: 28564 - DNA, 120 bp, Artificial Sequence
  ENSG00000042429_24 (sequence is synthesized)
aggtaatttaagaacatcctcagaaaggacagctgaaggcaataggaggcagattatctctttagggcgtcctcaagtttttttggtctgttctcccacttgattgacctcaccagttga

SEQ ID NO: 28565 - DNA, 120 bp, Artificial Sequence
  ENSG00000042429_25 (sequence is synthesized)
gacacctagtgtatggctcatgcccagccttccacctgggattctccagcctccacccagcagccctggattgctttctccaattaaggcctttccatcagctctctgctttttcaaagc

SEQ ID NO: 28566 - DNA, 120 bp, Artificial Sequence
  ENSG00000042429_26 (sequence is synthesized)
gaaaaaactaatggattagtgggttatcttttccaaggaacaggtttgcacttcttggaaaaagtgcctaaagtgtgcccattaatatgaggatagatttaggctcataagccttttggt

SEQ ID NO: 28567 - DNA, 120 bp, Artificial Sequence
  ENSG00000042429_27 (sequence is synthesized)
aacactgaaagtagtatcatataggcaagctctccttataagtaaggctttcaatttttaaaacagacatcctgctttaacaatttgtaagatgactgtgcagtaataaaagtcctttgt

SEQ ID NO: 28568 - DNA, 120 bp, Artificial Sequence
  ENSG00000042429_28 (sequence is synthesized)
atttctccaccgtgttttcattaaagaaaaatggagcttgtgggccacgatagaacaactttgtgcttttttccccttctgatcaagatcttgcatctttctatccatggaaattaaaat

SEQ ID NO: 28569 - DNA, 120 bp, Artificial Sequence
  ENSG00000042429_29 (sequence is synthesized)
aattggtatgaatttgcagttatttaaaaatcttgagtgcttcaaaaattattgttgcctgcaaaatttgccttggtcaataggctaatctgcacaattccactcacataaggagtcttt

SEQ ID NO: 28570 - DNA, 120 bp, Artificial Sequence
  ENSG00000042429_30 (sequence is synthesized)
tatgtgattttgaaggctcaggctagaagagtgagtctgagacttttgctgaatgaccagtttttgtttatataaacttctcccattgcagattgatactttggtaaactaataaaaatg

SEQ ID NO: 28571 - DNA, 120 bp, Artificial Sequence
  ENSG00000042429_31 (sequence is synthesized)
aattcctaaaatgaaattttgaaaagatacaaaataaaagccccatttatttgattataacttgattaaattgcatcaaatactagaatttatagacagagtctcactctgttccccagg

SEQ ID NO: 28572 - DNA, 80 bp, Artificial Sequence
  ENSG00000042429_32 (sequence is synthesized)
tactagaatttatagacagagtctcactctgttccccaggctggagtgcagcagcactgctctcatgcctcagcctcccg

SEQ ID NO: 28573 - DNA, 72 bp, Artificial Sequence
  ENSG00000042429_33 (sequence is synthesized)
actgggattacaggtgtgtgccaccacgaccgtctaatttttgtaattttgataagtgatccgcccacctcg

SEQ ID NO: 28574 - DNA, 120 bp, Artificial Sequence
  ENSG00000042429_34 (sequence is synthesized)
agtgcccagcccccccaaatataaacatttctgaatgctttattttttatttctctgcttgtcatgaatcagtaacaaatcatggaccaggaccacaccttgagtagaatggctgagaat

SEQ ID NO: 28575 - DNA, 120 bp, Artificial Sequence
  ENSG00000042429_35 (sequence is synthesized)
acatgtgcagatactaccgtctgttcttttaaaccccatctgagtagagtgggataactgaagactttacgttcttcatgtcttactttccctgtttggtacgtcgctgtagtgagtagc

SEQ ID NO: 28576 - DNA, 120 bp, Artificial Sequence
  ENSG00000042429_36 (sequence is synthesized)
cagtaccgacctaaagaattgtagaaactaaagcaaatgtgtgggaaaatggtagcttagttgctgtggtagcaattcttatgccttgtatttatttacattttctagtttaatgtttta

SEQ ID NO: 28577 - DNA, 120 bp, Artificial Sequence
  ENSG00000042429_37 (sequence is synthesized)
acctgaatttcctggagtttgaaggatgtgctatggaaacttgggagacagtttgaagaaaaccaattagcccctcaacaagtattaacaggttggcaaggagctgtgtttgaatcttgg

SEQ ID NO: 28578 - DNA, 120 bp, Artificial Sequence
  ENSG00000042429_38 (sequence is synthesized)
ctctgctactggcttgctgtatgaacttggcaaggattctctgtgaacttgtttccttatatataaatgaagatagaggtgcctcctctactaacctcagtggtgattgagaagtttcag

SEQ ID NO: 28579 - DNA, 120 bp, Artificial Sequence
  ENSG00000042429_39 (sequence is synthesized)
taacgttggtaataaatgttaaattctaaagtactacataaatataaagcattaagcaagtgtgcttctaagagtcaagccaattagaaaaaatggttgagacaccagctgtatttatta

SEQ ID NO: 28580 - DNA, 120 bp, Artificial Sequence
  ENSG00000042429_40 (sequence is synthesized)
ggagaaagcatttcagaatgtcctgtattcatatttgtatgatgttttatatatggtgaagatattgagtgtttttcatcagatttctttgctggaacaccatcaaatcaaagggataac

SEQ ID NO: 28581 - DNA, 80 bp, Artificial Sequence
  ENSG00000042429_41 (sequence is synthesized)
agatttctttgctggaacaccatcaaatcaaagggataacctgattatctcatgttgatcaggaattgtaattggccctt

SEQ ID NO: 28582 - DNA, 120 bp, Artificial Sequence
  ENSG00000042429_42 (sequence is synthesized)
tcttactctggcttagactggagtgcagtgcagtggtggagtcatagctcactgtaacctggaactgctgggttcaagtgatcttcctgccttagtcttttgagtagcagggactactcg

SEQ ID NO: 28583 - DNA, 120 bp, Artificial Sequence
  ENSG00000042429_43 (sequence is synthesized)
tgcacgccactgtgcccagcttattttttttttatttatagagactggttgtcgatatgttgctcaggtttgttttgaactcctggtatcaagcgatcgtccctccttgtcctcccaaag

SEQ ID NO: 28584 - DNA, 120 bp, Artificial Sequence
  ENSG00000042429_44 (sequence is synthesized)
tgttttgattacaggtgtgagccacttccaggcctttctttctctttccagtaaagtgctaaaaatcagataattagaaactgagggtttggttaatttaaatgatttatgctttggttc

SEQ ID NO: 28585 - DNA, 120 bp, Artificial Sequence
  ENSG00000042429_45 (sequence is synthesized)
taagtgttggctgttgattagtgtgtataagattactggctttggaattggattcccaggtttttggctctggatttagactcccaggttttgtatcccagtttatagctatgtgacctt

SEQ ID NO: 28586 - DNA, 120 bp, Artificial Sequence
  ENSG00000042429_46 (sequence is synthesized)
gggcaaattgcttaacattgctaaagttttttctgtttaaaaaatggaaataatagtgcctacctaataaggttaagattaaatgatatgttagtaagattaaatgatataattcatgaa

SEQ ID NO: 28587 - DNA, 120 bp, Artificial Sequence
  ENSG00000042429_47 (sequence is synthesized)
agctcttgttataatgcatgctgtataatgaacacttgataaatcttatttctcattggtattgatagttttctttttttggagtataaggatttgattgtgcaaaaaatctctagcttc

SEQ ID NO: 28588 - DNA, 120 bp, Artificial Sequence
  ENSG00000042429_48 (sequence is synthesized)
tcttgaatatgattataatttcattacagtaatgggtctagatgtgggtgtgtcccaagtcatttgttaccagggatcaagtactgacatttatgaatgatttatattaggtttataccg

SEQ ID NO: 28589 - DNA, 120 bp, Artificial Sequence
  ENSG00000042429_49 (sequence is synthesized)
tagaatatcgaatatccttctcactcatttcctgataagcttttctgagtggaagaaaatgaatagagttaaagggaataaacccatcatgaatcatgataatcaggggtgtgtgatgag

SEQ ID NO: 28590 - DNA, 120 bp, Artificial Sequence
  ENSG00000042429_50 (sequence is synthesized)
agtgtattgtaatgtcaagctgagaacctacacattcaagcagtatgaaagggttcttagagctacctctgcctttatttaaagtctgcctacacatagtggtagtttaaaaaagtagtt

SEQ ID NO: 28591 - DNA, 120 bp, Artificial Sequence
  ENSG00000042429_51 (sequence is synthesized)
aattgtgtaagaagaaaaaaaatttttttccagtagaaattaaattctgtttaatttctaatgcacattttacaacctgttggttaactggaagtactgataagctgtcctaggttttca

SEQ ID NO: 28592 - DNA, 120 bp, Artificial Sequence
  ENSG00000042429_52 (sequence is synthesized)
catagtttatgttaagatgaaggaccagttctgagactagcaagttttttttcccacatgtcatatttgtgaaggtttacaaaatctctagggtttacaacatctccagagttgttgtag

SEQ ID NO: 28593 - DNA, 120 bp, Artificial Sequence
  ENSG00000042429_53 (sequence is synthesized)
aaagtgaagaaaactagagaaagggagatcatataaaaaactataatgaccattatccataataaatgaagtagtttaatctcaagtccaaggggcagtatagaaagtgatgggtttgag

SEQ ID NO: 28594 - DNA, 120 bp, Artificial Sequence
  ENSG00000042429_54 (sequence is synthesized)
aatcccagcactttgggaggctgaagcgagagtatcacttcaggttgggagttcaataccagcctgggcaacatagcaagacccctgtctccacaaaaatagaaaattgagtgggtgtgt

SEQ ID NO: 28595 - DNA, 120 bp, Artificial Sequence
  ENSG00000042429_55 (sequence is synthesized)
aattgagtgggtgtgttggtatgtacctatagtcatagctattagggaggccgaggcaggagggttgcctgagcctgggtgttcaaggttacaatgagctataattggtcccactgtact

SEQ ID NO: 28596 - DNA, 120 bp, Artificial Sequence
  ENSG00000042429_56 (sequence is synthesized)
tcagcccagggtgacagagcaagataccatctctttttaaaaaaaaaaaaaaaaaaaaaaaggtgatgtgttctagtcccagctctacgacaaacttgctttgtgacatcagacaaattt

SEQ ID NO: 28597 - DNA, 120 bp, Artificial Sequence
  ENSG00000042429_57 (sequence is synthesized)
ctagccctttcttttcatatctaactgtattttccctaatttcttcatggagtttttaatgacccagtgaaatactgaattgtgagatatagggtaggtttttgaaatgctaatgcaaga

SEQ ID NO: 28598 - DNA, 120 bp, Artificial Sequence
  ENSG00000042429_58 (sequence is synthesized)
tactatttttttttcacattaaaaaaaatagtatcttgcattagcatttcaaaaacctaccctatatctcagaagcaataatcttatatactgatttgcttctttggtggccaagtaagt

SEQ ID NO: 28599 - DNA, 120 bp, Artificial Sequence
  ENSG00000042429_59 (sequence is synthesized)
aaaattcatttgttaggtatggcagctcttggctgattacatctaaattggctttggttactttaagcacacacacaaaaatatattagaacactattgagtaggtcccagaatcaatgg

SEQ ID NO: 28600 - DNA, 120 bp, Artificial Sequence
  ENSG00000042429_60 (sequence is synthesized)
gaggtctagagaacaaggcttgcaaatggatagggatcaaagctaggtatgagaaccatggccagaggaatggcactcatgctgtcccagcactactgccttcagcactggtgacaaaat

SEQ ID NO: 28601 - DNA, 120 bp, Artificial Sequence
  ENSG00000042429_61 (sequence is synthesized)
gcattctaaattgcccccattgtatcagtcagagtcttaacaagaaataggtggcagactcaggaggatctaaagatctatttacaaagaagtgggtgtaggtgagccaccagggatagt

SEQ ID NO: 28602 - DNA, 120 bp, Artificial Sequence
  ENSG00000042429_62 (sequence is synthesized)
gtggtaacctgctgctagtagtagtaaccaggtaaccaggccccagggacttagtggtcaccattcctaggccaaagttaagaggaaggacagattacaagaaccctaagggggagagtc

SEQ ID NO: 28603 - DNA, 120 bp, Artificial Sequence
  ENSG00000042429_63 (sequence is synthesized)
gtgtagaacagtccatcttgagaagcctagcagccagtcaagagatacaaccagcctagacaacctcacagggagggtgccaggggaataaataccctgacctcactcttccctgccatc

SEQ ID NO: 28604 - DNA, 120 bp, Artificial Sequence
  ENSG00000042429_64 (sequence is synthesized)
ctgctgtctcccattacctgaacccagcccaaagccagaggatgtaagaaggtattaatgtaaccacgtgtgtcagcctcccagggcagaaaataaggtaggcagtggatttgaaggggc

SEQ ID NO: 28605 - DNA, 120 bp, Artificial Sequence
  ENSG00000042429_65 (sequence is synthesized)
aaatgttacaccatattcagtgatctagatgagagtcttcagttggccaaatttatgtcatatgtctttgcttaagctgccagtgggcaggagaagcaagtatcaggcaactttagcttt

SEQ ID NO: 28606 - DNA, 120 bp, Artificial Sequence
  ENSG00000042429_66 (sequence is synthesized)
ggcagtggaaggtggagtcctattccctccccctaagttacgcacaggaggattcctcagacctaagatagggttgctgtagtagtcagtgagcaccccaacaaaagtttacttcatggt

SEQ ID NO: 28607 - DNA, 120 bp, Artificial Sequence
  ENSG00000042429_67 (sequence is synthesized)
ccctgtgagtacacccatttttatcaatactccattggaataaaacaatttggattttctgtggaattcttattatgttgatgtcattagactaagaagtgttttttttttttaaggtaa

SEQ ID NO: 28608 - DNA, 120 bp, Artificial Sequence
  ENSG00000042429_68 (sequence is synthesized)
ataaccaccccccacctttatctttctttcctttgttcaccattcctcacccttttcccccaaaacatatgttttttagtggggacttactttgtgattcagtgatgtggatgtgaagta

SEQ ID NO: 28609 - DNA, 120 bp, Artificial Sequence
  ENSG00000042429_69 (sequence is synthesized)
caatttttgacagtctctatagagactgaataggaaaaaaaagaatataccgtaatgtagtgttttcctaaacttttgtcatatgtattcagatcaccatttaaactagttaatgcataa

SEQ ID NO: 28610 - DNA, 120 bp, Artificial Sequence
  ENSG00000042429_70 (sequence is synthesized)
gaggggtctgcatatatcaaggtttcaatacaaaaacaggctccagatataggtgacctcggcacagttaacctcttcaaacgacctttgcccaaatccaaaccaggctagagtgcaatg

SEQ ID NO: 28611 - DNA, 64 bp, Artificial Sequence
  ENSG00000042429_71 (sequence is synthesized)
acgacctttgcccaaatccaaaccaggctagagtgcaatggcgcagtctcggctcaccgcaacg

SEQ ID NO: 28612 - DNA, 120 bp, Artificial Sequence
  ENSG00000042429_72 (sequence is synthesized)
atttatgactcttgatcctgtctctcaggatgcacttcctccaaaacaggtatttgtggactttaattgaataataaaattttatttattaaatcccaggacccttttttggctttgtgc

SEQ ID NO: 28613 - DNA, 120 bp, Artificial Sequence
  ENSG00000042429_73 (sequence is synthesized)
ctgttgttccattttcctttcttgcaaaattaagtccagatgaagatttaaagactaactggtctaaaacaaagccatacaactgcatttcctttatttttttattatatacctatgatc

SEQ ID NO: 28614 - DNA, 65 bp, Artificial Sequence
  ENSG00000042429_74 (sequence is synthesized)
tgtgaaaccttgtctctattaaaaataacaaaaataagccaggcgtggtggtgggcacctgtagt

SEQ ID NO: 28615 - DNA, 120 bp, Artificial Sequence
  ENSG00000042429_75 (sequence is synthesized)
ttaccaaatcttaacaaattcttatagcctgggtccttggtctgtgatatattacacaaaaatgtgatgatataatggctttggaatcaggtagacctggattcgaatcctgcctctgcc

SEQ ID NO: 28616 - DNA, 120 bp, Artificial Sequence
  ENSG00000042429_76 (sequence is synthesized)
ttcattaactgtgtgaccttaaattaagcaagttattttctcttaagtccctgtttttccatctaatccttccttccctttttttttaagggatggattagaaaagttaggcgaaattat

SEQ ID NO: 28617 - DNA, 120 bp, Artificial Sequence
  ENSG00000042429_77 (sequence is synthesized)
ggagcatattgagagctgggtagaattgctgctatttcataaacagtgtattcaatttttgaacatttgaagatgaaagagaagtagcaggaagatgagttggtgaatagtctgaaatca

SEQ ID NO: 28618 - DNA, 120 bp, Artificial Sequence
  ENSG00000042429_78 (sequence is synthesized)
ttgaggctacttgggtccttaaggaaaacaagtgtcaagaccataaccaaattagtcatggagaagaagtaatgactgttagaacccatttgtaaataaaattaattgaatagaattact

SEQ ID NO: 28619 - DNA, 120 bp, Artificial Sequence
  ENSG00000042429_79 (sequence is synthesized)
cacatagtaatagtttcagaatctagaaacattgtgctgggggactaatagagttccctaaatctgcattcttcattttatagagagaaaactaaagcttaaagagatttgtaatatgtt

SEQ ID NO: 28620 - DNA, 120 bp, Artificial Sequence
  ENSG00000042429_80 (sequence is synthesized)
caagttgctgtcaagccagtagttagggagccaagactagaactccagcacctaactcatagccccactgccttttctactattctgtgcttttcccagaagggagtctccaggaatttc

SEQ ID NO: 28621 - DNA, 120 bp, Artificial Sequence
  ENSG00000042429_81 (sequence is synthesized)
ttaatatctccaggaactcttttatttacgttccctaatacaatcaaaagattattttgatatgtttatgaagctttttatgtgatttttgactctcatacagccagaaaactgtattaa

SEQ ID NO: 28622 - DNA, 120 bp, Artificial Sequence
  ENSG00000042429_82 (sequence is synthesized)
actggttagtaaaatacacaaattatggtgattgtggatatttatatatgcatatgtgatacatagatagtgacttctgatcagttttccaaaaaattaggattcagtgaagtacattta

SEQ ID NO: 28623 - DNA, 120 bp, Artificial Sequence
  ENSG00000042429_83 (sequence is synthesized)
atattaacaatggcagggcacggtggcttatgcctgtaattccaacactttggggaaccaaagcaggaagccaggagtttgagactttcccaggcaacatagcaagaccctgtctctacc

SEQ ID NO: 28624 - DNA, 120 bp, Artificial Sequence
  ENSG00000042429_84 (sequence is synthesized)
agaggggtctgcatatatcaaggtatttgtcaaaatatttttcaagtaatttcttacgaatagcctgaagttaatttgttaactttttttgtttttgttgtcatataggtttcaatacaa

SEQ ID NO: 28625 - DNA, 120 bp, Artificial Sequence
  ENSG00000042429_85 (sequence is synthesized)
aggtagctcttagggtgtattgggagaataatgagagcaaagaaatagtgtgctatccatagtgacagccagtaaagcatgtaacacaaactatactgtggaatctgttctgtcctaaat

SEQ ID NO: 28626 - DNA, 120 bp, Artificial Sequence
  ENSG00000042429_86 (sequence is synthesized)
agtgtgacccttggatttttaagctacatattaaaaatttgcacttatgtagtcattattgtggtcaagagaaaagaaaatttgcactagcatagctatagttatttagcaacagttgct

SEQ ID NO: 28627 - DNA, 120 bp, Artificial Sequence
  ENSG00000042429_87 (sequence is synthesized)
gcaacagttgctttgagggagattttttcagggatcctgccttattatctaaatgagaggccaatttaaaaatgtttactcttaacgcctgtcatcccagcactatgggaggccgaggcg

SEQ ID NO: 28628 - DNA, 89 bp, Artificial Sequence
  ENSG00000042429_88 (sequence is synthesized)
atcccatttctactaaaacgagtttactcgtaatagtctcaaatttatagaaactggattttaattatattattcaaaagcaggtagac

SEQ ID NO: 28629 - DNA, 120 bp, Artificial Sequence
  ENSG00000042429_89 (sequence is synthesized)
ttcaaaagcaggtagacttgccctggagatcagtttgtatttagctttgcacttgttttttacataaattctaaggactgtcgtcttagaaggaagtaggttttagtggtgagaaattcc

SEQ ID NO: 28630 - DNA, 120 bp, Artificial Sequence
  ENSG00000042429_90 (sequence is synthesized)
atcctacttctcatgggagcagggaagactaactgtcttttacgcagtaagactgcctacctactcttattttaaaggaaaaaacaaattaatatatagctttttcaccagtctttagcc

SEQ ID NO: 28631 - DNA, 120 bp, Artificial Sequence
  ENSG00000042429_91 (sequence is synthesized)
agttcaagggcagcagccatattatgtgtcaacagaatttgaattgttaaaatacgtggtagcttattatattcatgaatagtttttttttttttttgagatgaagtttccgttttgttg

SEQ ID NO: 28632 - DNA, 120 bp, Artificial Sequence
  ENSG00000042429_92 (sequence is synthesized)
ggcgtgagccaccgcacccggccaaatagtaatcttgatatacagatgttaatcatgaggtctgatcttcaagtttagaatatatcttttgaaaatgaactatgattatactttatgaag

SEQ ID NO: 28633 - DNA, 120 bp, Artificial Sequence
  ENSG00000042429_93 (sequence is synthesized)
acagcctcccttgccccaccccaaaacctggttcagttgattgtgatgatgcaagagttgtttttaaaaagctccttaggaggttcagataggcagccgggtttgggaacctctaatcta

SEQ ID NO: 28634 - DNA, 120 bp, Artificial Sequence
  ENSG00000042429_94 (sequence is synthesized)
gggtatagtgaaagaactatttactgattgcatgcgttctatttatgagactcagtgaagaggattgttttacattttaaaacttgtaaaataaaaattaaagcttgagatccttttgtg

SEQ ID NO: 28635 - DNA, 120 bp, Artificial Sequence
  ENSG00000042429_95 (sequence is synthesized)
gttcaaaagcatgattgggctttcatgcttatgcatgagttgtgactccctcaaaccttattaggatgtcggcgcattacccatctgacatgagaaaaggaaaaaagttacagcttgaga

SEQ ID NO: 28636 - DNA, 120 bp, Artificial Sequence
  ENSG00000042429_96 (sequence is synthesized)
gcgacccttctctttacagtcttgcattatgtgtgacctagtagttgctagcatttttctccaaggttggattgttttcatatgtggttcaaatccattcctttcagtgtttctgtcaac

SEQ ID NO: 28637 - DNA, 120 bp, Artificial Sequence
  ENSG00000042429_97 (sequence is synthesized)
aatgagaagggaccattgggagtttggctttaacatttagttttaataattaaatatgggtaagagtaatttatctctgcaataaattagttaatgttgtatttacaccgaatgtttatt

SEQ ID NO: 28638 - DNA, 120 bp, Artificial Sequence
  ENSG00000042429_98 (sequence is synthesized)
tgatcatagctattatgcagagcaagagattattatttctctttctagtaattataataaatgtttagattggcagcacattttcctgagatagtctgaaaagtatcatcagcattgtta

SEQ ID NO: 28639 - DNA, 120 bp, Artificial Sequence
  ENSG00000042429_99 (sequence is synthesized)
ctcctgcagtcccaaagtttaatggataaaaactttaaaaaaaatatatactgctgtaaacatgggaagaaaaatatctgatcctaaaaatagtaaagggatggaacagagaggaatatc

SEQ ID NO: 28640 - DNA, 120 bp, Artificial Sequence
  ENSG00000042429_100 (sequence is synthesized)
agggatggaacagagaggaatatctaatgcaaggtactacttttttcacattaaaaaaatagtaacagtttttaaaatattctaaaataaataattaaaaataattttaaataaagtgtt

SEQ ID NO: 28641 - DNA, 81 bp, Artificial Sequence
  ENSG00000042429_101 (sequence is synthesized)
gagaagtattttattaagcaccttctacgagtgggcactttaataggcacttgtatgagtattacatagcttaaatttaca

SEQ ID NO: 28642 - DNA, 120 bp, Artificial Sequence
  ENSG00000042429_102 (sequence is synthesized)
tgctctgactactttaaaaatacagtcatgtgttgcataatgacagggacaggttctgagaaatgtgttgttaagaggatttcatcgtatgataatagagtgcacttacacagccctaga

SEQ ID NO: 28643 - DNA, 81 bp, Artificial Sequence
  ENSG00000042429_103 (sequence is synthesized)
ttcatcgtatgataatagagtgcacttacacagccctagatggtacagcctactacatgcacatctaggcttcatggcata

SEQ ID NO: 28644 - DNA, 120 bp, Artificial Sequence
  ENSG00000042429_104 (sequence is synthesized)
agttgactgaaatgttacgcagctcatgactgtatttgaaagagtgggtagttagaaatatttcctcacaggatcacagcttgtgaatctgcaagcttggtcattgctggatcttgattg

SEQ ID NO: 28645 - DNA, 120 bp, Artificial Sequence
  ENSG00000042429_105 (sequence is synthesized)
ctaggaatttcaaaatacccttttcctctttcccaaataatagttaaaacctcattaaaacctgaaattcttaattcagaataatctttccttcatccctttcagtcctgattttaagtg

SEQ ID NO: 28646 - DNA, 120 bp, Artificial Sequence
  ENSG00000042429_106 (sequence is synthesized)
gttgaggtttctttacatattaggcatgtattaacaattcattgaatgattgccttatcaaatgaatgtattgaaaaaaataggtgagtgtactaggcgtggtggctcacgcctgtaatc

SEQ ID NO: 28647 - DNA, 88 bp, Artificial Sequence
  ENSG00000042429_107 (sequence is synthesized)
agagaccttgtctttaaccgcctcccaaaaaaagctttgtgtttttcagtgctgcatgtggaaacaaacaaaaagatgatttcctgaa

SEQ ID NO: 28648 - DNA, 120 bp, Artificial Sequence
  ENSG00000042429_108 (sequence is synthesized)
gtgctgcatgtggaaacaaacaaaaagatgatttcctgaaattatagaggacatttgacattcctaggtcaaaactcaccttgcttaatctttgtggtacaaataataattcatgaatat

SEQ ID NO: 28649 - DNA, 120 bp, Artificial Sequence
  ENSG00000042429_109 (sequence is synthesized)
ttataccatcctcttatatagaagttagagtttttctcttgcatgttgaaactgaaaaagcacttttttacaagaatatttaagttggtagacaaagtttttgtattcacagtagaatgg

SEQ ID NO: 28650 - DNA, 120 bp, Artificial Sequence
  ENSG00000042429_110 (sequence is synthesized)
agttgtgggatttatccttgttatttctagtttggtaaactagagtgtattgatattttggtttttctccacagttcgtaatggacctgaaagtggcagcaagattatggttcagtttcc

SEQ ID NO: 28651 - DNA, 120 bp, Artificial Sequence
  ENSG00000042429_111 (sequence is synthesized)
aggacgacgaggaaggtaaggcctgcatccgctgcccgagtcccccggtctgggtcccagcacccgcgcgggcctccgcctctcccgcgatgggggtgatcttgtgcgtgcgagaacttt

SEQ ID NO: 28652 - DNA, 120 bp, Artificial Sequence
  ENSG00000042429_112 (sequence is synthesized)
acaggcgtgagccactgtgcccagcctttatttttttttattacaattttatgtagacaatcactaaaatgctttattctcaaatatttgctttaaaacaaagctagaaggaagagccat

SEQ ID NO: 28653 - DNA, 120 bp, Artificial Sequence
  ENSG00000042429_113 (sequence is synthesized)
aacaaagctagaaggaagagccattattaaatgtgagaggacataaagctgttttttcctgcattttgttcatctaggttattagggatttcaagtttcttggacatattacatgctgaa

SEQ ID NO: 28654 - DNA, 120 bp, Artificial Sequence
  ENSG00000042429_114 (sequence is synthesized)
attttagaagttgctttggaagagtgcagtgatgtgcttgttatttactggctattgtatgagtttctttatttgacctaagccaaattaatggagtatatatattctgacttgtttgct

SEQ ID NO: 28655 - DNA, 120 bp, Artificial Sequence
  ENSG00000042429_115 (sequence is synthesized)
gattatttcagtaagagaaggtaaagagttaacaaaaccgcttctctttctgtacgagaatttgctccttggttaacgctggctctcatcccttggaaacctgataaggaaagatgtcat

SEQ ID NO: 28656 - DNA, 120 bp, Artificial Sequence
  ENSG00000042429_116 (sequence is synthesized)
cagtattactaggcaacattgcttatagtaaaaatgatctcaaattggtaaaatgcatctgaaccaggagaaattttaaataaatgatgggaatgcctttggattttcctggatggtggt

SEQ ID NO: 28657 - DNA, 120 bp, Artificial Sequence
  ENSG00000042429_117 (sequence is synthesized)
gacttttaaaactgggcttggcttgtggaaaccatgcctatggagttgttacagaagcttatggctcctgttagggcagggcccacatatacccaattggatctcatctccttgcaacaa

SEQ ID NO: 28658 - DNA, 120 bp, Artificial Sequence
  ENSG00000042429_118 (sequence is synthesized)
aggtattctgctgctatatagacagttgcatggtctgctggcaagctgtggtcgcttcaaatgcttctgggtagactggtactcagtgtggtctatggtattctggggtgagtctgttta

SEQ ID NO: 28659 - DNA, 120 bp, Artificial Sequence
  ENSG00000042429_119 (sequence is synthesized)
ggtattctggggtgagtctgtttagttgaacctaagaagacacctgcatctcctccatggatgttggtgtgggttattaaaacttttttttttggccgggtgcagtggctcaggcctgta

SEQ ID NO: 28660 - DNA, 120 bp, Artificial Sequence
  ENSG00000042445_0 (sequence is synthesized)
acccgacccgacgccggcgtgatgtggcttccgctggtgctgctcctggctgtgctgctgctggccgtcctctgcaaagtttacttgggactattctctggcagctccccgaatcctttc

SEQ ID NO: 28661 - DNA, 120 bp, Artificial Sequence
  ENSG00000042445_1 (sequence is synthesized)
tccgaagatgtcaaacggcccccagcgcccctggtaactgacaaggaggccaggaagaaggttctcaaacaagctttttcagccaaccaagtgccggagaagctggatgtggtggtaatt

SEQ ID NO: 28662 - DNA, 120 bp, Artificial Sequence
  ENSG00000042445_2 (sequence is synthesized)
ggcagtggctttgggggcctggctgcagctgcaattctagctaaagctggcaagcgagtcctggtgctggaacaacataccaaggcagggggctgctgtcatacctttggaaagaatggc

SEQ ID NO: 28663 - DNA, 120 bp, Artificial Sequence
  ENSG00000042445_3 (sequence is synthesized)
cttgaatttgacacaggaatccattacattgggcgtatggaagagggcagcattggccgttttatcttggaccagatcactgaagggcagctggactgggctcccctgtcctctcctttt

SEQ ID NO: 28664 - DNA, 120 bp, Artificial Sequence
  ENSG00000042445_4 (sequence is synthesized)
gacatcatggtactggaagggcccaatggccgaaaggagtaccccatgtacagtggagagaaagcctacattcagggcctcaaggagaagtttccacaggaggaagctatcattgacaag

SEQ ID NO: 28665 - DNA, 120 bp, Artificial Sequence
  ENSG00000042445_5 (sequence is synthesized)
tatataaagctggttaaggtggtatccagtggagcccctcatgccatcctgttgaaattcctcccattgcccgtggttcagctcctcgacaggtgtgggctgctgactcgtttctctcca

SEQ ID NO: 28666 - DNA, 120 bp, Artificial Sequence
  ENSG00000042445_6 (sequence is synthesized)
ttccttcaagcatccacccagagcctggctgaggtcctgcagcagctgggggcctcctctgagctccaggcagtactcagctacatcttccccacttacggtgtcacccccaaccacagt

SEQ ID NO: 28667 - DNA, 120 bp, Artificial Sequence
  ENSG00000042445_7 (sequence is synthesized)
gccttttccatgcacgccctgctggtcaaccactacatgaaaggaggcttttatccccgagggggttccagtgaaattgccttccacaccatccctgtgattcagcgggctgggggcgct

SEQ ID NO: 28668 - DNA, 120 bp, Artificial Sequence
  ENSG00000042445_8 (sequence is synthesized)
gtcctcacaaaggccactgtgcagagtgtgttgctggactcagctgggaaagcctgtggtgtcagtgtgaagaaggggcatgagctggtgaacatctattgccccatcgtggtctccaac

SEQ ID NO: 28669 - DNA, 120 bp, Artificial Sequence
  ENSG00000042445_9 (sequence is synthesized)
gcaggactgttcaacacctatgaacacctactgccggggaacgcccgctgcctgccaggtgtgaagcagcaactggggacggtgcggcccggcttaggcatgacctctgttttcatctgc

SEQ ID NO: 28670 - DNA, 120 bp, Artificial Sequence
  ENSG00000042445_10 (sequence is synthesized)
ctgcgaggcaccaaggaagacctgcatctgccgtccaccaactactatgtttactatgacacggacatggaccaggcgatggagcgctacgtctccatgcccagggaagaggctgcggaa

SEQ ID NO: 28671 - DNA, 120 bp, Artificial Sequence
  ENSG00000042445_11 (sequence is synthesized)
cacatccctcttctcttcttcgctttcccatcagccaaagatccgacctgggaggaccgattcccaggccggtccaccatgatcatgctcatacccactgcctacgagtggtttgaggag

SEQ ID NO: 28672 - DNA, 120 bp, Artificial Sequence
  ENSG00000042445_12 (sequence is synthesized)
tggcaggcggagctgaagggaaagcggggcagtgactatgagaccttcaaaaactcctttgtggaagcctctatgtcagtggtcctgaaactgttcccacagctggaggggaaggtggag

SEQ ID NO: 28673 - DNA, 120 bp, Artificial Sequence
  ENSG00000042445_13 (sequence is synthesized)
ctcaccaaccagttctatctggctgctccccgaggtgcctgctacggggctgaccatgacctgggccgcctgcacccttgtgtgatggcctccttgagggcccagagccccatccccaac

SEQ ID NO: 28674 - DNA, 120 bp, Artificial Sequence
  ENSG00000042445_14 (sequence is synthesized)
ctctatctgacaggccaggatatcttcacctgtggactggtcggggccctgcaaggtgccctgctgtgcagcagcgccatcctgaagcggaacttgtactcagaccttaagaatcttgat

SEQ ID NO: 28675 - DNA, 120 bp, Artificial Sequence
  ENSG00000042445_15 (sequence is synthesized)
tctaggatccgggcacagaagaaaaagaattagttccatcagggaggagtcagaggaatttgcccaatggctggggcatctcccttgacttacccataatgtctttctgcattagttcct

SEQ ID NO: 28676 - DNA, 120 bp, Artificial Sequence
  ENSG00000042445_16 (sequence is synthesized)
tgcacgtataaagcactctaatttggttctgatgcctgaagagaggcctagtttaaatcacaattccgaatctggggcaatggaatcactgcttccagctggggcaggtgagatctttac

SEQ ID NO: 28677 - DNA, 120 bp, Artificial Sequence
  ENSG00000042445_17 (sequence is synthesized)
gccttttataacatgccatccctactaataggatattgacttggatagcttgatgtctcatgacgagcggcgctctgcatccctcacccatgcctcctaactcagtgatcaaagcgaata

SEQ ID NO: 28678 - DNA, 120 bp, Artificial Sequence
  ENSG00000042445_18 (sequence is synthesized)
ttccatctgtggatagaacccctggcagtgttgtcagctcaacctggtgggttcagttctgtcctgaggcttctgctctcattcatttagtgctacgctgcacagttctacactgtcaag

SEQ ID NO: 28679 - DNA, 120 bp, Artificial Sequence
  ENSG00000042445_19 (sequence is synthesized)
ggaaaagggagactaatgaggcttaactcaaaacctgggcgtggttttggttgccattccataggtttggagagctctagatctcttttgtgctgggttcagtggctcttcaggggacag

SEQ ID NO: 28680 - DNA, 120 bp, Artificial Sequence
  ENSG00000042445_20 (sequence is synthesized)
gaaatgcctgtgtctggccagtgtggttctggagctttggggtaacagcaggatccatcagttagtagggtgcatgtcagatgatcatatccaattcatatggaagtcccgggtctgtct

SEQ ID NO: 28681 - DNA, 120 bp, Artificial Sequence
  ENSG00000042445_21 (sequence is synthesized)
tccttatcatcggggtggcagctggttctcaatgtgccagcagggactcagtacctgagcctcaatcaagccttatccaccaaatacacagggaagggtgatgcagggaagggtgacatc

SEQ ID NO: 28682 - DNA, 120 bp, Artificial Sequence
  ENSG00000042445_22 (sequence is synthesized)
aggagtcagggcatggactggtaagatgaatactttgctgggctgaagcaggctgcagggcattccagccaagggcacagcaggggacagtgcagggaggtgtggggtaagggagggaag

SEQ ID NO: 28683 - DNA, 120 bp, Artificial Sequence
  ENSG00000042445_23 (sequence is synthesized)
tcacatcagaaaagggaaagccacggaatgtgtgtgaagcccagaaatggcatttgcagttaattagcacatgtgagggttagacaggtaggtgaatgcaagctcaaggtttggaaaaat

SEQ ID NO: 28684 - DNA, 120 bp, Artificial Sequence
  ENSG00000042445_24 (sequence is synthesized)
gacttttcagttatgtctttggtatcagacatacgaaaggtctctttgtagttcgtgttaatgtaacattaataaatttattgattccattgctttaacatttgaaatttattttggttt

SEQ ID NO: 28685 - DNA, 120 bp, Artificial Sequence
  ENSG00000042445_25 (sequence is synthesized)
tttgttcaagaaaacaaaactattattgtgatggcatttgcagaagctcagtaaaacactatatactgaataacaccaaaataagctttaaaaaaataaaattaagtaattataaagtta

SEQ ID NO: 28686 - DNA, 120 bp, Artificial Sequence
  ENSG00000042445_26 (sequence is synthesized)
acggctgccctctcatctctcaatctttcttctcgaccctgcctggctgactgatatggagcagtgtaaaccccaggccctctggagcttgtggatgagaagtctggccacctgctggac

SEQ ID NO: 28687 - DNA, 120 bp, Artificial Sequence
  ENSG00000042445_27 (sequence is synthesized)
ttgaagaggcttggagcagcccttgtggggtgatactgagcatttctgttgttttggaagtgccatcttctctctgggtactttttttctttgtttgtttcagacagagtctcacttcat

SEQ ID NO: 28688 - DNA, 120 bp, Artificial Sequence
  ENSG00000042445_28 (sequence is synthesized)
cacccaggctggagcgcagtggtgtgatcccagcttactgtaacctctgcctcctgagttcgtgattctcatgcctcagtctcccgagtggctgggattacactcagtaatcccaccaag

SEQ ID NO: 28689 - DNA, 120 bp, Artificial Sequence
  ENSG00000042445_29 (sequence is synthesized)
ccctcttgcaggttccccaatgtgtccccttctggagccaacctgctccgtgtgggtcatgcttctcctcttcttggccggccctctgattgtccttaagcaacaaggtgagaacgctac

SEQ ID NO: 28690 - DNA, 120 bp, Artificial Sequence
  ENSG00000042445_30 (sequence is synthesized)
ctctaacatcatcctaaccctagcatttaatgttggggaaactgaggcccatacagattaattacagtcctgaggccactcagctgaaaggggcagggctgagcagagtagctggtctga

SEQ ID NO: 28691 - DNA, 120 bp, Artificial Sequence
  ENSG00000042445_31 (sequence is synthesized)
tttgaaagctccgctcctcccacccttctgggctgagggggcttccagagaagaggcctcaggaagagaagcaggagagcaggcagcccacagggagcagagccgccgagccaacgcagc

SEQ ID NO: 28692 - DNA, 120 bp, Artificial Sequence
  ENSG00000042445_32 (sequence is synthesized)
taagaggtcccgccaccttcatgtaactggatctgaggaagggaggccgctgggaagaggggaccagtaacccagcaggggtgtgaagcagcaactggggacggtgcggcccggcttagg

SEQ ID NO: 28693 - DNA, 120 bp, Artificial Sequence
  ENSG00000042493_0 (sequence is synthesized)
gagaagccgggtggggcaggctggaaggaagacgaacctacgaagcagagatctgaagacagcatgtacacagccattccccagagtggctctccattcccaggctcagtgcaggatcca

SEQ ID NO: 28694 - DNA, 120 bp, Artificial Sequence
  ENSG00000042493_1 (sequence is synthesized)
ggcctgcatgtgtggcgggtggagaagctgaagccggtgcctgtggcgcaagagaaccagggcgtcttcttctcgggggactcctacctagtgctgcacaatggcccagaagaggtttcc

SEQ ID NO: 28695 - DNA, 120 bp, Artificial Sequence
  ENSG00000042493_2 (sequence is synthesized)
catctgcacctgtggataggccagcagtcatcccgggatgagcagggggcctgtgccgtgctggctgtgcacctcaacacgctgctgggagagcggcctgtgcagcaccgcgaggtgcag

SEQ ID NO: 28696 - DNA, 120 bp, Artificial Sequence
  ENSG00000042493_3 (sequence is synthesized)
ggcaatgagtctgacctcttcatgagctacttcccacggggcctcaagtaccaggaaggtggtgtggagtcagcatttcacaagacctccacaggagccccagctgccatcaagaaactc

SEQ ID NO: 28697 - DNA, 120 bp, Artificial Sequence
  ENSG00000042493_4 (sequence is synthesized)
taccaggtgaaggggaagaagaacatccgtgccaccgagcgggcactgaactgggacagcttcaacactggggactgcttcatcctggacctgggccagaacatcttcgcctggtgtggt

SEQ ID NO: 28698 - DNA, 120 bp, Artificial Sequence
  ENSG00000042493_5 (sequence is synthesized)
catccgggacagtgagcgacagggcaaggcccaggtggagattgtcactgatggggaggagcctgctgagatgatccaggtcctgggccccaagcctgctctgaaggagggcaaccctga

SEQ ID NO: 28699 - DNA, 120 bp, Artificial Sequence
  ENSG00000042493_6 (sequence is synthesized)
ggaagacctcacagctgacaaggcaaatgcccaggccgcagctctgtataaggtctctgatgccactggacagatgaacctgaccaaggtggctgactccagcccatttgcccttgaact

SEQ ID NO: 28700 - DNA, 120 bp, Artificial Sequence
  ENSG00000042493_7 (sequence is synthesized)
gctgatatctgatgactgctttgtgctggacaacgggctctgtggcaagatctatatctggaaggggcgaaaagcgaatgagaaggagcggcaggcagccctgcaggtggccgagggctt

SEQ ID NO: 28701 - DNA, 120 bp, Artificial Sequence
  ENSG00000042493_8 (sequence is synthesized)
catctcgcgcatgcagtacgccccgaacactcaggtggagattctgcctcagggccatgagagtcccatcttcaagcaatttttcaaggactggaaatgagggtgggcgtcttcctgccc

SEQ ID NO: 28702 - DNA, 120 bp, Artificial Sequence
  ENSG00000042493_9 (sequence is synthesized)
catgctcccctgccccccaccacctgcctgcttgcttctctggctgcctggtcagtgcagaggtgccccctgcagatgttcaataaaggagacaagtgctttcccagctcttttcctgca

SEQ ID NO: 28703 - DNA, 120 bp, Artificial Sequence
  ENSG00000042493_10 (sequence is synthesized)
tccagggggcggggggcggctgagacagcgcccagggcctcggagcaaggcgttggcaggcaagtaacagcatgtacacagccattccccagagtggctctccattcccaggctcagtgc

SEQ ID NO: 28704 - DNA, 120 bp, Artificial Sequence
  ENSG00000042493_11 (sequence is synthesized)
gactcaccgggggcggctcctggccgcgcacctccagggggcggggggcggctgagacagcgcccagggcctcggagcaaggcgttggcagatctgaagacagcatgtacacagccattc

SEQ ID NO: 28705 - DNA, 120 bp, Artificial Sequence
  ENSG00000042493_12 (sequence is synthesized)
gacaacgggctctgtggcaagatctatatctggaaggtttttcagaaaaggcttgatgaattcaagagggcgaaaagcgaatgagaaggagcggcaggcagccctgcaggtggccgaggg

SEQ ID NO: 28706 - DNA, 120 bp, Artificial Sequence
  ENSG00000042493_13 (sequence is synthesized)
gcgcttcggggtccggtcgccggggacctgggctccccatgtaggggtcgaacgggcttagccggttcgggggcgccccgctccctcctcttctcccacagccggggtcctctcttaggg

SEQ ID NO: 28707 - DNA, 120 bp, Artificial Sequence
  ENSG00000042493_14 (sequence is synthesized)
aggctttagcctagacagctgagtgtgaggaacagtgattcccattgatccttgttccctccgtgggtcacagagtccagaacttaagagccacccaagatctgaagacagcatgtacac

SEQ ID NO: 28708 - DNA, 120 bp, Artificial Sequence
  ENSG00000042493_15 (sequence is synthesized)
gggattggggtgatgagagggagtggggctgcctggaatttgcttttcaggtcttcactctcttgtctgctcctgggacctgggcagtgggcagcgaggcacagtgggagggacctaggg

SEQ ID NO: 28709 - DNA, 120 bp, Artificial Sequence
  ENSG00000042493_16 (sequence is synthesized)
aggaccagcctccccctcctcaggctgaggtgagggctggtgtgtggggggtgagatcaggcactgtccctcctccccaggtctctgatgccactggacagatgaacctgaccaaggtgg

SEQ ID NO: 28710 - DNA, 120 bp, Artificial Sequence
  ENSG00000042493_17 (sequence is synthesized)
cttacacgcgtcctggcgtgtggctctcctgcgtcctcgtttttctcgtgagccctggatctggacagtgggcccggcgcgaggccctcaactccggctgggctcccggtggcactttct

SEQ ID NO: 28711 - DNA, 120 bp, Artificial Sequence
  ENSG00000042493_18 (sequence is synthesized)
acagcgcccagggcctcggagcaaggcgttggcagatctgaagacagcatgtacacagccattccccagaggtaagctgcatgccccatctcctttcacaacttccccttctttacctcc

SEQ ID NO: 28712 - DNA, 120 bp, Artificial Sequence
  ENSG00000042493_19 (sequence is synthesized)
aagggctgcccctccccactgctctcctcatccccagactgcagtcgccaggcctgcccagggctgtgcttgggcaagtgggtccaggctgctgtcaaccctctctcttctcgcagtggc

SEQ ID NO: 28713 - DNA, 120 bp, Artificial Sequence
  ENSG00000042493_20 (sequence is synthesized)
gaaggttgggcccaggaaggggagggagggggctggtatggatcacaagggccttgccctgccctctcccacttgtcccaggccagcagtcatcccgggatgagcagggggcctgtgccg

SEQ ID NO: 28714 - DNA, 120 bp, Artificial Sequence
  ENSG00000042493_21 (sequence is synthesized)
gctcccctcttcaactttagcactttctaatgctgacatctgtgattctgtgacattccccacttagaggaagttcgtctgcggtttcactggatctgaagacagcatgtacacagccat

SEQ ID NO: 28715 - DNA, 120 bp, Artificial Sequence
  ENSG00000042753_0 (sequence is synthesized)
atctgactcgtttggtaggaaaaggactggctctgactcttcacccatcttcacccaggctggcccctttggtgaaactacaactcccaggggtctgtgcgcgagaaggcaggcgggttt

SEQ ID NO: 28716 - DNA, 120 bp, Artificial Sequence
  ENSG00000042753_1 (sequence is synthesized)
ttctaccggaagtccgctctagctctgggccctacaactgcaccctgagccggagctgcccagtcgccgcgggaccggggccgctggggtctggacgggggtcgccatgatccgctttat

SEQ ID NO: 28717 - DNA, 120 bp, Artificial Sequence
  ENSG00000042753_2 (sequence is synthesized)
cctcatccagaaccgggcaggcaagacgcgcctggccaagtggtacatgcagtttgatgatgatgagaaacagaagctgatcgaggaggtgcatgccgtggtcaccgtccgagacgccaa

SEQ ID NO: 28718 - DNA, 120 bp, Artificial Sequence
  ENSG00000042753_3 (sequence is synthesized)
acctggcttacctggaggccattcacaacttcgtggaggtcttaaacgaatatttccacaatgtctgtgaactggacctggtgttcaacttctacaaggtttacacggtcgtggacgaga

SEQ ID NO: 28719 - DNA, 120 bp, Artificial Sequence
  ENSG00000042753_4 (sequence is synthesized)
tgttcctggctggcgaaatccgagagaccagccagacgaaggtgctgaaacagctgctgatgctacagtccctggagtgagggcaggcgagccccaccccggccccggcccctcctggac

SEQ ID NO: 28720 - DNA, 120 bp, Artificial Sequence
  ENSG00000042753_5 (sequence is synthesized)
tcgcctgctcgcttccccttcccaggcccgtggccaacccagcagtccttccctcagctgcctaggaggaagggacccagctgggtctgggccacaagggaggagactgcaccccactgc

SEQ ID NO: 28721 - DNA, 120 bp, Artificial Sequence
  ENSG00000042753_6 (sequence is synthesized)
ctctgggccctggctgtgggcagaggccaccgtgtgtgtcccgagtaaccgtgccgttgtcgtgtgatgccataagcgtctgtgcgtggagtccccaataaacctgtggtcctgcctggc

SEQ ID NO: 28722 - DNA, 120 bp, Artificial Sequence
  ENSG00000042753_7 (sequence is synthesized)
gccatggtaacgggggagcgctacgccggggactggcggagggggggcccacgcgtaaatagccgaggctggatcgggcgctgacaagtcccttctctgccgcggatggtctggatccgc

SEQ ID NO: 28723 - DNA, 120 bp, Artificial Sequence
  ENSG00000042753_8 (sequence is synthesized)
tgcaccctgagccggagctgcccagtcgccgcgggaccggggccgctggggtctggacgggggtcgccatgttccggaactttaagatcatttaccgccgctatgctggcctctacttct

SEQ ID NO: 28724 - DNA, 120 bp, Artificial Sequence
  ENSG00000042753_9 (sequence is synthesized)
gtctctagagacaaggatctgattgcaggtggagaggggatgttgagacaggggcaggagactgcctgtgagagagggatgatctcaagaagagacctggcacaggaaaccaaaaggagg

SEQ ID NO: 28725 - DNA, 120 bp, Artificial Sequence
  ENSG00000042753_10 (sequence is synthesized)
ccatcctatatcattcactcaacctgctttgagcttgcttgcttcttcccttcctttacttgtacttttcattgtgaaaaatcataaacatacagattagtacaatgaaagaaaagtaga

SEQ ID NO: 28726 - DNA, 120 bp, Artificial Sequence
  ENSG00000042753_11 (sequence is synthesized)
ttggagattcgtatacctactacccagatttaatcagtattaatattttgcctttttgttctgcattgttattattaattttttttgcctacgattaaaaaagaatttttttttttggtc

SEQ ID NO: 28727 - DNA, 120 bp, Artificial Sequence
  ENSG00000042753_12 (sequence is synthesized)
gtgaatgttttggccccactctgtctggcacgttaggtcctggcaatctccgttgctgacagcctctctgttctgcagttccggaactttaagatcatttaccgccgctatgctggcctc

SEQ ID NO: 28728 - DNA, 120 bp, Artificial Sequence
  ENSG00000042781_0 (sequence is synthesized)
agttccaagagggccaccaagcagaccacgctctgagcttcaggtaaccaagtgtttgctctgcagaatactttacctgggcacccaagtcttccttccagcattcctgctgctacagcc

SEQ ID NO: 28729 - DNA, 120 bp, Artificial Sequence
  ENSG00000042781_1 (sequence is synthesized)
tatttgctgagtaaccaggggttacagcagcgttgccaggcaacgagggacagcggtcctgttgaagagccatttgtcacactgaggggactggttgaaatgcaataaagaaatgatacc

SEQ ID NO: 28730 - DNA, 120 bp, Artificial Sequence
  ENSG00000042781_2 (sequence is synthesized)
agcagctactcatgtcttcgccattgctaagaacgtcgttggtattaccttactctgagaacgtgtctgcagtttccagaaaatggagtatcgcaacatcacttaaagtaccctgcttca

SEQ ID NO: 28731 - DNA, 120 bp, Artificial Sequence
  ENSG00000042781_3 (sequence is synthesized)
aagtattgctggcaagtggcgtgggcctgattatttatttagaaatgctttatcaggaggagaatgcttttttgtaaacatgaattgcccagttctttcattgggctctggcttcttgtt

SEQ ID NO: 28732 - DNA, 120 bp, Artificial Sequence
  ENSG00000042781_4 (sequence is synthesized)
tcaggtcattgaaatgttgatctttgcctattttgcttcaatatccttgactgagtcacgaggtcttttcccaaggctggagaacgtgggagctttcaagaaagtttccatcgtgccaac

SEQ ID NO: 28733 - DNA, 120 bp, Artificial Sequence
  ENSG00000042781_5 (sequence is synthesized)
ccaagcagtatgtggactcccagaccgaagcactttttgtcacagctctgctgctgctgaaagtattcagttctgtacccagcggttttgtattcaggattgcccatacagatcttcaca

SEQ ID NO: 28734 - DNA, 120 bp, Artificial Sequence
  ENSG00000042781_6 (sequence is synthesized)
ccctacctacactgcccttttctcagcaggcctcagtagctgcatcacaccagacaagaatgatctgcatcctaacgcccatagcaattctgcaagttttatttttggaaatcacaagag

SEQ ID NO: 28735 - DNA, 120 bp, Artificial Sequence
  ENSG00000042781_7 (sequence is synthesized)
ctgcttttcttctcctccttctccaaagctgatggcatcatttaccttagctgtatggctgaaacctgagcaacaaggtgtaatgtgtgttatagaaaagacagtagatgggcagattgt

SEQ ID NO: 28736 - DNA, 120 bp, Artificial Sequence
  ENSG00000042781_8 (sequence is synthesized)
gttcaaacttacaatatctgagaaagagaccatgttttattatcgcacagtaaatggtttgcaacctccaataaaagtaatgacactggggagaattcttgtgaagaaatggattcatct

SEQ ID NO: 28737 - DNA, 120 bp, Artificial Sequence
  ENSG00000042781_9 (sequence is synthesized)
tagtgtgcaggtgcatcagacaaaaatcagcttctttatcaatggcgtggagaaggatcatacacctttcaatgcaagaactctaagtggttcaattacagattttgcatctggtactgt

SEQ ID NO: 28738 - DNA, 120 bp, Artificial Sequence
  ENSG00000042781_10 (sequence is synthesized)
gcaaataggacagagtttaaatggtttagagcagtttgtcggaagaatgcaagattttcgattataccaagtggcacttacaaacagagagattctggaagtcttctctggagatcttct

SEQ ID NO: 28739 - DNA, 120 bp, Artificial Sequence
  ENSG00000042781_11 (sequence is synthesized)
cagattgcatgcccaatcacattgccgttgccctggcagccacccgcgggtccaccctttggcacagcggtactgcattcctaatgatgcaggagacacagctgataatagagtgtcacg

SEQ ID NO: 28740 - DNA, 120 bp, Artificial Sequence
  ENSG00000042781_12 (sequence is synthesized)
gttgaatcctgaagcccatcctctctcttttgtcaatgataatgatgttggtacttcatgggtttcaaatgtgtttacaaacattacacagcttaatcaaggagtgactatttcagttga

SEQ ID NO: 28741 - DNA, 120 bp, Artificial Sequence
  ENSG00000042781_13 (sequence is synthesized)
tttggaaaatggacagtatcaggtgttttatattatcattcagttctttagtccacaaccaacggaaataaggattcaaaggaagaaggaaaatagtttagattgggaggactggcaata

SEQ ID NO: 28742 - DNA, 120 bp, Artificial Sequence
  ENSG00000042781_14 (sequence is synthesized)
ttttgccaggaattgtggtgcttttggaatgaaaaacaatggagatttggaaaaacctgattctgtcaactgtcttcagctttccaattttactccatattcccgtggcaatgtcacatt

SEQ ID NO: 28743 - DNA, 120 bp, Artificial Sequence
  ENSG00000042781_15 (sequence is synthesized)
tagcatcctgacacctggaccaaattatcgtcctggatacaataacttctataataccccatctcttcaagagttcgtaaaagccacgcaaataaggtttcattttcatgggcagtacta

SEQ ID NO: 28744 - DNA, 120 bp, Artificial Sequence
  ENSG00000042781_16 (sequence is synthesized)
tacaactgagactgctgttaacctcagacacagatattatgcagtggacgaaatcaccattagtgggagatgtcagtgccatggtcatgccgataactgcgacacaacaagccagccata

SEQ ID NO: 28745 - DNA, 120 bp, Artificial Sequence
  ENSG00000042781_17 (sequence is synthesized)
tagatgcctctgctcccaggagagcttcactgaaggacttcattgtgatcgctgcttgcctctttataatgacaagcctttccgccaaggtgatcaagtttacgctttcaattgtaaacc

SEQ ID NO: 28746 - DNA, 120 bp, Artificial Sequence
  ENSG00000042781_18 (sequence is synthesized)
ttgtcaatgcaacagccattccaaaagctgccattacaacatctctgtagacccatttccttttgagcacttcagagggggaggaggagtttgtgatgattgtgagcataacactacagg

SEQ ID NO: 28747 - DNA, 120 bp, Artificial Sequence
  ENSG00000042781_19 (sequence is synthesized)
aaggaactgtgagctgtgcaaggattactttttccgacaagttggtgcagatccttcggccatagatgtttgcaaaccctgtgactgtgatacagttggcactagaaatggtagcattct

SEQ ID NO: 28748 - DNA, 120 bp, Artificial Sequence
  ENSG00000042781_20 (sequence is synthesized)
ttgtgatcagattggaggacagtgtaattgtaagagacacgtgtctggcaggcagtgcaatcagtgccagaatggattctacaatctacaagagttggatcctgatggctgcagtccctg

SEQ ID NO: 28749 - DNA, 120 bp, Artificial Sequence
  ENSG00000042781_21 (sequence is synthesized)
taactgcaatacctctgggacagtggatggagatattacctgtcaccaaaattcaggccagtgcaagtgcaaagcaaacgttattgggcttaggtgtgatcattgcaattttggatttaa

SEQ ID NO: 28750 - DNA, 120 bp, Artificial Sequence
  ENSG00000042781_22 (sequence is synthesized)
atttctccgaagctttaatgatgttggatgtgagccctgccagtgtaacctccatggctcagtgaacaaattctgcaatcctcactctgggcagtgtgagtgcaaaaaagaagccaaagg

SEQ ID NO: 28751 - DNA, 120 bp, Artificial Sequence
  ENSG00000042781_23 (sequence is synthesized)
acttcagtgtgacacctgcagagaaaacttttatgggttagatgtcaccaattgtaaggcctgtgactgtgacacagctggatccctccctgggactgtctgtaatgctaagacagggca

SEQ ID NO: 28752 - DNA, 120 bp, Artificial Sequence
  ENSG00000042781_24 (sequence is synthesized)
gtgcatctgcaagcccaatgttgaagggagacagtgcaataaatgtttggagggaaacttctacctacggcaaaataattctttcctctgtctgccttgcaactgtgataagactgggac

SEQ ID NO: 28753 - DNA, 120 bp, Artificial Sequence
  ENSG00000042781_25 (sequence is synthesized)
aataaatggctctctgctgtgtaacaaatcaacaggacaatgtccttgcaaattaggggtaacaggtcttcgctgtaatcagtgtgagcctcacaggtacaatttgaccattgacaattt

SEQ ID NO: 28754 - DNA, 120 bp, Artificial Sequence
  ENSG00000042781_26 (sequence is synthesized)
tcaacactgccagatgtgtgagtgtgattccttggggacattacctgggaccatttgtgacccaatcagtggccagtgcctgtgtgtgcctaatcgtcaaggaagaaggtgtaatcagtg

SEQ ID NO: 28755 - DNA, 120 bp, Artificial Sequence
  ENSG00000042781_27 (sequence is synthesized)
tcaaccaggtttttatatttctccaggcaatgccactggctgcctgccatgctcatgccatacaactggtgcagttaatcacatctgtaatagcctgactggtcagtgtgtttgccaaga

SEQ ID NO: 28756 - DNA, 120 bp, Artificial Sequence
  ENSG00000042781_28 (sequence is synthesized)
tgcttccattgctgggcaacgttgtgaccaatgcaaagaccattactttggatttgatcctcagactggaagatgtcagccttgtaattgtcatctctcaggagccttgaatgaaacctg

SEQ ID NO: 28757 - DNA, 120 bp, Artificial Sequence
  ENSG00000042781_29 (sequence is synthesized)
tcacttggtcacaggccagtgtttctgtaaacaatttgtcactggctcaaagtgtgatgcttgtgttcccagtgcaagccacttggatgtcaacaatctattgggttgcagcaaaactcc

SEQ ID NO: 28758 - DNA, 120 bp, Artificial Sequence
  ENSG00000042781_30 (sequence is synthesized)
attccagcaacctccgcccagaggacaagttcaaagttcttctgctatcaatctctcctggagtccacctgattctccaaatgcccactggcttacttacagtttactcagggatggttt

SEQ ID NO: 28759 - DNA, 120 bp, Artificial Sequence
  ENSG00000042781_31 (sequence is synthesized)
tgaaatctacacaacagaggatcaatacccatacagtattcaatacttcttagacacagacctgttaccatataccaaatattcctattacattgagaccaccaatgtgcatggttcaac

SEQ ID NO: 28760 - DNA, 120 bp, Artificial Sequence
  ENSG00000042781_32 (sequence is synthesized)
aaggagtgtagctgtcacttacaagacaaaaccaggggtcccagagggaaacttgactttaagttatatcattcctattggctcagactctgtgacacttacctggacaacactctcaaa

SEQ ID NO: 28761 - DNA, 120 bp, Artificial Sequence
  ENSG00000042781_33 (sequence is synthesized)
tcaatctggtcccatagagaaatatattttgtcctgtgcccctttggctggtggtcagccatgtgtttcctacgaaggtcatgaaacctcagctaccatctggaatctggttccatttgc

SEQ ID NO: 28762 - DNA, 120 bp, Artificial Sequence
  ENSG00000042781_34 (sequence is synthesized)
caagtacgatttttctgtacaggcgtgtactagcgggggctgtttacacagcttgcccattacagtgaccacagcccaggcccctccccaaagactaagtccacctaagatgcagaaaat

SEQ ID NO: 28763 - DNA, 120 bp, Artificial Sequence
  ENSG00000042781_35 (sequence is synthesized)
cagttctacagaacttcatgtagaatggtctccaccagcggaactaaatggaataattataagatatgaactatacatgagaagactgagatctactaaagaaaccacatctgaggaaag

SEQ ID NO: 28764 - DNA, 120 bp, Artificial Sequence
  ENSG00000042781_36 (sequence is synthesized)
tcgagtttttcagagcagtggttggctcagtcctcattcatttgtagaatcggccaatgaaaatgcattaaaacctcctcaaacaatgacaaccatcactggcttggagccatacaccaa

SEQ ID NO: 28765 - DNA, 120 bp, Artificial Sequence
  ENSG00000042781_37 (sequence is synthesized)
gtatgagttcagagtcttagctgtgaatatggctggaagtgtgtcttctgcctgggtctcagaaagaacgggagaatcagcacctgtattcatgatccctccttcagtctttcccctctc

SEQ ID NO: 28766 - DNA, 120 bp, Artificial Sequence
  ENSG00000042781_38 (sequence is synthesized)
ttcgtactctctcaatatctcctgggagaagccagcagataatgttacaagaggaaaagttgtggggtatgacatcaatatgctttctgaacaatcacctcaacagtctattcccatggc

SEQ ID NO: 28767 - DNA, 120 bp, Artificial Sequence
  ENSG00000042781_39 (sequence is synthesized)
gttttcacagctgttgcacactgctaaatcccaagaactatcttacactgtagaaggactgaaaccttataggatatatgagtttactattactctctgcaattcagttggttgtgtgac

SEQ ID NO: 28768 - DNA, 120 bp, Artificial Sequence
  ENSG00000042781_40 (sequence is synthesized)
cagtgcttcgggagcaggacaaactttagcagcagcaccagcacaactgaggccacctctggttaaaggaatcaacagcacaacaatccatcttaggtggtttccacctgaagaactgaa

SEQ ID NO: 28769 - DNA, 120 bp, Artificial Sequence
  ENSG00000042781_41 (sequence is synthesized)
tggaccctctcctatatatcagctggaaaggagagagtcatctctaccagctctgatgaccacgatgatgaaaggaatccgtttcataggaaatgggtattgtaaatttcccagctccac

SEQ ID NO: 28770 - DNA, 120 bp, Artificial Sequence
  ENSG00000042781_42 (sequence is synthesized)
tcacccagtcaatacagacttcactggcattaaggccagctttcgaacaaaagtgcctgaaggtttgattgtctttgcagcatcacctggcaatcaggaagagtattttgcacttcagtt

SEQ ID NO: 28771 - DNA, 120 bp, Artificial Sequence
  ENSG00000042781_43 (sequence is synthesized)
gaagaagggacgtctttattttctttttgatcctcaggggtcaccagtggaagtaactacaactaatgatcatggcaaacaatatagtgatggaaaatggcatgaaataattgctattag

SEQ ID NO: 28772 - DNA, 120 bp, Artificial Sequence
  ENSG00000042781_44 (sequence is synthesized)
gcatcaggcttttggccaaatcactctggatgggatatatacaggttcctctgccatcctgaatggtagtactgttattggagataacacaggagtctttctgggagggctcccgcgaag

SEQ ID NO: 28773 - DNA, 120 bp, Artificial Sequence
  ENSG00000042781_45 (sequence is synthesized)
ttataccatcctcaggaaggatcctgagataatccaaaaaggttttgtgggctgtctcaaggatgtacattttatgaagaattacaatccgtcagctatttgggaacctctggattggca

SEQ ID NO: 28774 - DNA, 120 bp, Artificial Sequence
  ENSG00000042781_46 (sequence is synthesized)
gagttctgaagaacaaatcaacgtgtataacagctgggagggatgtcccgcttcattaaatgagggagctcagttcctaggagcagggttcctggaacttcatccatatatgtttcatgg

SEQ ID NO: 28775 - DNA, 120 bp, Artificial Sequence
  ENSG00000042781_47 (sequence is synthesized)
tggaatgaactttgagatttcctttaagttcagaactgaccaattaaatggattgcttcttttcgtttataacaaagatggacctgattttcttgctatggagctgaaaagtggaatatt

SEQ ID NO: 28776 - DNA, 120 bp, Artificial Sequence
  ENSG00000042781_48 (sequence is synthesized)
gaccttccggttaaataccagtcttgcctttacacaagtggatctattgctggggctatcctattgtaatggaaagtggaataaagtcattattaaaaaggaaggctctttcatatcagc

SEQ ID NO: 28777 - DNA, 120 bp, Artificial Sequence
  ENSG00000042781_49 (sequence is synthesized)
aagtgtgaatggactgatgaagcatgcatcggagtccggagaccagccactggtggtgaattcaccagtttatgtgggaggaatcccacaggaactgctgaactcttatcaacatttgtg

SEQ ID NO: 28778 - DNA, 120 bp, Artificial Sequence
  ENSG00000042781_50 (sequence is synthesized)
tttggaacaaggtttcggtggttgcatgaaggatgttaaatttacacggggtgctgtcgttaacttggcatctgtgtccagcggtgctgtcagagtcaatctggatggatgcctatcaac

SEQ ID NO: 28779 - DNA, 120 bp, Artificial Sequence
  ENSG00000042781_51 (sequence is synthesized)
tgacagtgctgttaactgcaggggaaatgactccatcctggtttaccagggaaaagagcagagtgtttacgagggtggtctccagccttttacagaatacctgtatcgagtgatagcctc

SEQ ID NO: 28780 - DNA, 120 bp, Artificial Sequence
  ENSG00000042781_52 (sequence is synthesized)
gcatgaaggaggttcagtatatagtgattggagtcgaggacgtacaacaggagcagctccacaaagtgtgccaactccctcaagagtccgcagcttaaatggatacagcattgaggtgac

SEQ ID NO: 28781 - DNA, 120 bp, Artificial Sequence
  ENSG00000042781_53 (sequence is synthesized)
ctgggatgaacctgttgtcagaggtgtaattgagaagtacattctgaaagcctatagtgaggacagcacccgtccaccccgcatgccctctgccagtgctgaatttgtcaatacaagcaa

SEQ ID NO: 28782 - DNA, 120 bp, Artificial Sequence
  ENSG00000042781_54 (sequence is synthesized)
cctcacaggcatattgacaggcttgctacccttcaaaaactatgcagtaaccctaactgcttgcactttggctggctgtactgagagctcacatgcattgaacatctctactccacaaga

SEQ ID NO: 28783 - DNA, 120 bp, Artificial Sequence
  ENSG00000042781_55 (sequence is synthesized)
agccccacaagaggttcagccaccagtagccaaatcccttcccagttctttgctgctctcctggaacccacccaaaaaggcaaatggtattataactcagtactgtttatacatggatgg

SEQ ID NO: 28784 - DNA, 120 bp, Artificial Sequence
  ENSG00000042781_56 (sequence is synthesized)
gaggctgatctattcaggcagtgaggagaactacatagtcacagatttagcagtatttacaccccaccagtttctactaagtgcatgcacacatgtgggctgtacaaacagttcctgggt

SEQ ID NO: 28785 - DNA, 120 bp, Artificial Sequence
  ENSG00000042781_57 (sequence is synthesized)
cctactgtacacagcacagctgccaccagaacacgtggattccccagttctgactgtcctggattctagaactatacacatacagtggaaacaaccaagaaaaataagtgggattctgga

SEQ ID NO: 28786 - DNA, 120 bp, Artificial Sequence
  ENSG00000042781_58 (sequence is synthesized)
acgctatgtattatatatgtcaaaccatacacatgattttacaatttggagtgtcatctataacagtacagaacttttccaggatcatatgctacaatacgttttacctggtaataaata

SEQ ID NO: 28787 - DNA, 120 bp, Artificial Sequence
  ENSG00000042781_59 (sequence is synthesized)
tctcatcaagctgggagcttgcacaggtggtgggtgcacagtgagtgaggccagtgaggccctaactgacgaggacatacccgaaggcgtgccagcccccaaagcccactcatattcacc

SEQ ID NO: 28788 - DNA, 120 bp, Artificial Sequence
  ENSG00000042781_60 (sequence is synthesized)
tgactcctttaatgtctcctggactgagcctgaatatccgaatggtgttatcacgagttatggattatatctagatggtatattaatccacaattcctcagaactcagctatcgtgctta

SEQ ID NO: 28789 - DNA, 120 bp, Artificial Sequence
  ENSG00000042781_61 (sequence is synthesized)
cggatttgctccttggagtttacattccttcagagtccaagcatgcacggccaaaggttgtgctctgggcccactggtggaaaatcgaactctagaagctcctcctgaaggaacagtaaa

SEQ ID NO: 28790 - DNA, 120 bp, Artificial Sequence
  ENSG00000042781_62 (sequence is synthesized)
tgtgtttgtcaaaacacagggatcccggaaagcccacgtgaggtgggaagcaccttttcgccctaatggactcttaacacactcagtccttttcactgggatattctatgtagacccagt

SEQ ID NO: 28791 - DNA, 120 bp, Artificial Sequence
  ENSG00000042781_63 (sequence is synthesized)
aggtaataactacacccttctgaatgtcacaaaagtcatgtacagcggagaagagacaaacctttgggtgctcatcgatgggctggttccttttaccaactatactgtacaagtgaatat

SEQ ID NO: 28792 - DNA, 120 bp, Artificial Sequence
  ENSG00000042781_64 (sequence is synthesized)
ttcaaatagccaaggcagcttgataactgatcctataacaattgcaatgcctccaggagctccagatggcgtgctgcctcccaggctttcatctgccactccaaccagtcttcaggttgt

SEQ ID NO: 28793 - DNA, 120 bp, Artificial Sequence
  ENSG00000042781_65 (sequence is synthesized)
ctggtctacaccagctcgtaataacgctcctggctctcccagataccaactccagatgaggtctggcgactccacccatggatttctagagttattttccaatccttctgcatcgttaag

SEQ ID NO: 28794 - DNA, 120 bp, Artificial Sequence
  ENSG00000042781_66 (sequence is synthesized)
ctatgaagtgagtgatctccaaccgtacacagagtatatgtttcggttggttgcctccaatggatttggcagtgcacatagttcttggattccattcatgaccgcagaggacaaacctgg

SEQ ID NO: 28795 - DNA, 120 bp, Artificial Sequence
  ENSG00000042781_67 (sequence is synthesized)
acctgtagttcctccgattcttctggatgtgaagtcaagaatgatgttggtcacctggcagcatcctagaaaatccaatggggttattacccattataacatttatctacatggccgtct

SEQ ID NO: 28796 - DNA, 120 bp, Artificial Sequence
  ENSG00000042781_68 (sequence is synthesized)
atacttgagaactcctggaaatgtcactaattgcacagtgatgcatttacacccatacactgcctataagtttcaggtagaagcctgcacttcaaaaggatgttccctttcaccagagtc

SEQ ID NO: 28797 - DNA, 120 bp, Artificial Sequence
  ENSG00000042781_69 (sequence is synthesized)
ccagactgtatggacactcccaggggcaccggaagggatcccaagtccagagctgttctctgatactccaacatctgtgattatatcttggcaaccccctacccaccccaatggcttggt

SEQ ID NO: 28798 - DNA, 120 bp, Artificial Sequence
  ENSG00000042781_70 (sequence is synthesized)
ggagaatttcacaattgagagaagagtcaaaggaaaggaagaagttactaccctggtgactctcccgaggagtcattccatgaggtttattgacaagacttctgctcttagcccatggac

SEQ ID NO: 28799 - DNA, 120 bp, Artificial Sequence
  ENSG00000042781_71 (sequence is synthesized)
aaaatatgaatatcgggtactgatgagcactcttcatggaggcacaaacagcagtgcttgggtagaagttaccacaagaccctcacgacctgctggggtgcagccacctgtggtgacagt

SEQ ID NO: 28800 - DNA, 120 bp, Artificial Sequence
  ENSG00000042781_72 (sequence is synthesized)
gctggaacccgatgcagtccaggtcacttggaaacccccactcatccagaacggagacatacttagctatgagattcacatgcctgaccctcacatcactttaaccaatgtgacttccgc

SEQ ID NO: 28801 - DNA, 120 bp, Artificial Sequence
  ENSG00000042781_73 (sequence is synthesized)
agtgttaagtcaaaaagttactcatctgattcctttcactaattattctgtcaccattgttgcttgctcagggggtaatgggtaccttggagggtgcacagagagtttacctacctatgt

SEQ ID NO: 28802 - DNA, 120 bp, Artificial Sequence
  ENSG00000042781_74 (sequence is synthesized)
taccactcaccccaccgtacctcagaatgttggcccattgtctgtgattccactaagtgaatcatatgttgtgatttcttggcaaccaccatccaagccaaatggacctaatttgagata

SEQ ID NO: 28803 - DNA, 120 bp, Artificial Sequence
  ENSG00000042781_75 (sequence is synthesized)
tgagcttctgagacgtaaaatccagcagccacttgcatcaaatcccccagaagatttaaatcggtggcacaatatttattcaggaactcagtggctttatgaagataagggtcttagcag

SEQ ID NO: 28804 - DNA, 120 bp, Artificial Sequence
  ENSG00000042781_76 (sequence is synthesized)
gtttacaacctatgaatatatgctcttcgtacacaacagtgtgggttttacaccgagccgagaagtgactgtgacaacgttagctggtcttccagagagaggagccaatctcactgcgag

SEQ ID NO: 28805 - DNA, 120 bp, Artificial Sequence
  ENSG00000042781_77 (sequence is synthesized)
tgtccttaaccacacagccatcgacgtgaggtgggctaaaccaactgttcaagacctacaaggtgaagttgaatattacacacttttttggagttctgctacctcaaacgactctctaaa

SEQ ID NO: 28806 - DNA, 120 bp, Artificial Sequence
  ENSG00000042781_78 (sequence is synthesized)
acagtgcaggacttcatgcaaccacttgcgatggggagcctcagggcatgcttcctccagaggttgtcatcatcaacagtacagctgtacgtgtcatctggacatctccttcaaacccaa

SEQ ID NO: 28807 - DNA, 120 bp, Artificial Sequence
  ENSG00000042781_79 (sequence is synthesized)
atggtgttgtcactgagtattctatctatgtaaataataagctctacaagactggaatgaatgtgcctgggtcgtttattctgagagacctgtctcccttcactatctatgacattcagg

SEQ ID NO: 28808 - DNA, 120 bp, Artificial Sequence
  ENSG00000042781_80 (sequence is synthesized)
ttgaagtctgcacaatatatgcctgcgtgaaaagcaatggaacccaaattaccactgtggaagacactccaagtgatataccaacacccacaattcgtggcatcacttcaagatctcttc

SEQ ID NO: 28809 - DNA, 120 bp, Artificial Sequence
  ENSG00000042781_81 (sequence is synthesized)
aaattgattgggtgtctccacggaagccaaatggcatcattcttggatatgatctcctatggaaaacatggtatccatgcgctaaaactcaaaagttagtgcaggatcagagtgatgagc

SEQ ID NO: 28810 - DNA, 120 bp, Artificial Sequence
  ENSG00000042781_82 (sequence is synthesized)
tctgcaaggcagtgaggtgtcaaaaacctgaatctatctgtggacacatttgctattcttctgaagctaaggtttgttgtaacggagtgctctataaccccaagcctggacatcgctgtt

SEQ ID NO: 28811 - DNA, 120 bp, Artificial Sequence
  ENSG00000042781_83 (sequence is synthesized)
gtgaagaaaagtatatcccgtttgttctgaattctactggagtttgttgtggtggccgaatacaggaggcacaaccaaatcatcagtgctgctctgggtattacgctagaattctaccag

SEQ ID NO: 28812 - DNA, 120 bp, Artificial Sequence
  ENSG00000042781_84 (sequence is synthesized)
gtgaagtatgctgtccagatgaacagcacaatcgggtttctgttggcattggtgattcctgctgtggcagaatgccgtactccacctcaggaaaccagatttgctgtgctgggaggcttc

SEQ ID NO: 28813 - DNA, 120 bp, Artificial Sequence
  ENSG00000042781_85 (sequence is synthesized)
atgatggccatggccagaagtgctgtggcagacagattgtgagcaacgatttagagtgttgtggtggagaagaaggagtggtgtacaatcgccttccaggtatgttctgttgtgggcagg

SEQ ID NO: 28814 - DNA, 120 bp, Artificial Sequence
  ENSG00000042781_86 (sequence is synthesized)
attatgtgaatatgtcagataccatatgctgctcagcttccagtggagagtctaaagcacatattaaaaagaatgacccggtgccagtaaaatgctgtgagactgaacttattccaaaga

SEQ ID NO: 28815 - DNA, 120 bp, Artificial Sequence
  ENSG00000042781_87 (sequence is synthesized)
gccagaaatgctgtaatggagttggatataatcctttgaaatatgtttgctctgacaagatttcaactggaatgatgatgaaggaaaccaaagagtgcaggatcctctgcccagcatcta

SEQ ID NO: 28816 - DNA, 120 bp, Artificial Sequence
  ENSG00000042781_88 (sequence is synthesized)
tggaagccacagaacattgtggcaggtgtgacttcaactttaccagccacatttgcactgtgataagagggtctcacaattccacagggaaggcatcaattgaagaaatgtgttcatctg

SEQ ID NO: 28817 - DNA, 120 bp, Artificial Sequence
  ENSG00000042781_89 (sequence is synthesized)
ccgaagaaaccattcatacagggagtgtaaacacgtactcttacacagatgtgaacctcaagccctacatgacatatgagtacaggatttctgcctggaacagctatgggcgaggactca

SEQ ID NO: 28818 - DNA, 120 bp, Artificial Sequence
  ENSG00000042781_90 (sequence is synthesized)
gcaaagctgtgagagccagaacaaaagaagatgtgcctcaaggagtgagtccccctacgtggaccaaaatagacaatcttgaagatacaattgtcttaaactggagaaaacctatacaat

SEQ ID NO: 28819 - DNA, 120 bp, Artificial Sequence
  ENSG00000042781_91 (sequence is synthesized)
caaatggtcctattatttactacatccttcttcgaaatggaattgaacgttttcggggaacatcactgagcttctctgataaagagggaattcaaccatttcaggaatattcatatcagc

SEQ ID NO: 28820 - DNA, 120 bp, Artificial Sequence
  ENSG00000042781_92 (sequence is synthesized)
tgaaagcttgcacggttgctggctgtgccaccagtagcaaggtagttgcagctactacccaaggagttccggagagcatcctgccaccaagcatcacagccctaagtgcagtggctctgc

SEQ ID NO: 28821 - DNA, 120 bp, Artificial Sequence
  ENSG00000042781_93 (sequence is synthesized)
atctgagctggagtgtccctgagaaatcaaacggcgtcattaaagagtaccagatcaggcaggttgggaaaggtctcatccacactgacaccactgacaggagacagcatacggtcacag

SEQ ID NO: 28822 - DNA, 120 bp, Artificial Sequence
  ENSG00000042781_94 (sequence is synthesized)
gtctccagccatacaccaactacagcttcactcttacagcttgtacatctgctgggtgcacttcaagcgagccttttctaggtcagacactgcaggcagctcctgaaggagtttgggtga

SEQ ID NO: 28823 - DNA, 120 bp, Artificial Sequence
  ENSG00000042781_95 (sequence is synthesized)
cacctcgacacattatcatcaattctacaacagtggaattatattggagtctgccagaaaagcccaatggcctcgtttctcaatatcaattgagtcgtaatggaaacttgcttttcctgg

SEQ ID NO: 28824 - DNA, 120 bp, Artificial Sequence
  ENSG00000042781_96 (sequence is synthesized)
gtggcagtgaggagcagaatttcactgataaaaacctggagcccaatagcagatacacttacaagttagaagtcaaaactggaggtggcagcagtgctagtgatgattacattgttcaaa

SEQ ID NO: 28825 - DNA, 120 bp, Artificial Sequence
  ENSG00000042781_97 (sequence is synthesized)
cacctatgtcaacaccagaagaaatctatcctccatataatatcacagtaattgggccttattctatatttgtagcttggataccaccagggatcctcatccccgaaattcctgtggagt

SEQ ID NO: 28826 - DNA, 120 bp, Artificial Sequence
  ENSG00000042781_98 (sequence is synthesized)
acaatgtcttactcaatgatggaagtgtaacacctctggccttctccgttggtcatcatcaatccacccttctggaaaatttgactccattcacacagtatgagataaggatacaagcat

SEQ ID NO: 28827 - DNA, 120 bp, Artificial Sequence
  ENSG00000042781_99 (sequence is synthesized)
gtcaaaatggaagttgtggagttagcagtaggatgtttgtcaaaacacctgaagcagccccaatggatcttaattctcctgttcttaaggcactggggtcagcttgcatagagattaagt

SEQ ID NO: 28828 - DNA, 120 bp, Artificial Sequence
  ENSG00000042781_100 (sequence is synthesized)
ggatgccacctgaaaaaccaaatggaatcatcatcaactactttatttacagacgccctgctggcattgaagaggagtctgttttatttgtctggtcagaaggagcccttgaatttatgg

SEQ ID NO: 28829 - DNA, 120 bp, Artificial Sequence
  ENSG00000042781_101 (sequence is synthesized)
atgaaggagacaccctgaggcctttcacactctacgaatatcgggtcagagcctgtaactccaagggttcagtggagagtctgtggtcattaacacaaactctggaagctccacctcaag

SEQ ID NO: 28830 - DNA, 120 bp, Artificial Sequence
  ENSG00000042781_102 (sequence is synthesized)
attttccagctccttgggctcaagccacgagtgctcattcagttctgttgaattggacaaagccagaatctcccaatggcattatctcccattaccgtgtggtctaccaggagagacccg

SEQ ID NO: 28831 - DNA, 120 bp, Artificial Sequence
  ENSG00000042781_103 (sequence is synthesized)
acgatcctacatttaacagccctaccgtgcatgctttcacagtgaagggaacaagccatcaagcccacctgtacgggttagaaccattcacaacatatcgcattggtgttgtggctgcaa

SEQ ID NO: 28832 - DNA, 120 bp, Artificial Sequence
  ENSG00000042781_104 (sequence is synthesized)
accatgcaggagaaattttaagcccttggactctgattcaaaccttagaatcttccccaagtggactgagaaactttatagtagaacagaaagagaatggccgggcattgctactacagt

SEQ ID NO: 28833 - DNA, 120 bp, Artificial Sequence
  ENSG00000042781_105 (sequence is synthesized)
ggtcagaacctatgagaaccaatggtgtgattaagacatacaacatcttcagtgacgggttcctggagtactctggtttgaatcgtcagtttctcttccgccgcctggatcctttcactc

SEQ ID NO: 28834 - DNA, 120 bp, Artificial Sequence
  ENSG00000042781_106 (sequence is synthesized)
tctacacactgaccctggaggcctgcaccagagcaggttgtgcacactcggcgcctcagcctctgtggacagatgaagcccctccagactctcagctggctcctactgtccactctgtga

SEQ ID NO: 28835 - DNA, 120 bp, Artificial Sequence
  ENSG00000042781_107 (sequence is synthesized)
agtccaccagtgttgagctgagctggtctgagcctgttaacccaaatggaaaaataattcgctatgaagtgattcgcagatgcttcgagggaaaagcttggggaaatcagacaatccagg

SEQ ID NO: 28836 - DNA, 120 bp, Artificial Sequence
  ENSG00000042781_108 (sequence is synthesized)
ccgacgagaaaattgttttcacagaatataacactgaaaggaatacatttatgtataatgacacaggtttgcaaccatggacgcagtgtgaatataaaatctacacttggaattcagctg

SEQ ID NO: 28837 - DNA, 120 bp, Artificial Sequence
  ENSG00000042781_109 (sequence is synthesized)
ggcatacctgtagctcttggaatgtggtgaggacattgcaagcacctccagaaggtctctctccacctgtgatatcctatgtttctatgaatccccaaaaactgctgatttcctggatcc

SEQ ID NO: 28838 - DNA, 120 bp, Artificial Sequence
  ENSG00000042781_110 (sequence is synthesized)
caccagaacagtctaatggtattatccagtcctataggcttcaaaggaatgaaatgctctatccttttagctttgatcctgtgactttcaattacactgatgaagagcttcttccttttt

SEQ ID NO: 28839 - DNA, 120 bp, Artificial Sequence
  ENSG00000042781_111 (sequence is synthesized)
ccacctatagctatgcactccaagcctgcacgagtggaggatgctccaccagcaaacccaccagcatcacaactctggaggctgctccatcagaagtcagccctccagatctttgggccg

SEQ ID NO: 28840 - DNA, 120 bp, Artificial Sequence
  ENSG00000042781_112 (sequence is synthesized)
tcagtgccactcaaatgaatgtatgttggtcaccgcccacagtgcaaaatggaaagattactaaatatttagttagatatgataataaagagtcccttgctggccagggcctgtgcctgc

SEQ ID NO: 28841 - DNA, 120 bp, Artificial Sequence
  ENSG00000042781_113 (sequence is synthesized)
tggtttcccacctgcagccttactctcagtataacttctcccttgtagcctgcacgaatggaggttgcacagctagtgtgtcaaaatctgcctggacaatggaggccctgccagagaaca

SEQ ID NO: 28842 - DNA, 120 bp, Artificial Sequence
  ENSG00000042781_114 (sequence is synthesized)
tggactctccaacattgcaagtcacaggctcagaatcaatagaaatcacctggaaacctccaagaaacccaaatggccagatcagaagttatgaacttaggagggatggaaccattgtat

SEQ ID NO: 28843 - DNA, 120 bp, Artificial Sequence
  ENSG00000042781_115 (sequence is synthesized)
atacaggcttggaaacacgctatcgtgattttactctcaccccaggtgtggagtatagctacacagtaactgccagcaacagccaagggggtattttgagtcctcttgtcaaagatcgaa

SEQ ID NO: 28844 - DNA, 120 bp, Artificial Sequence
  ENSG00000042781_116 (sequence is synthesized)
ccagcccctcagcaccctcagggatggaacctccaaaattgcaggccaggggtcctcaggagatcttagtgaactgggaccctccagtgagaacaaatggtgatatcatcaattataccc

SEQ ID NO: 28845 - DNA, 120 bp, Artificial Sequence
  ENSG00000042781_117 (sequence is synthesized)
tcttcatccgtgaactatttgaaagagaaactaaaatcatacacataaacacaactcataattcttttggtatgcagtcatatatagtaaaccagctgaagccatttcacaggtatgaaa

SEQ ID NO: 28846 - DNA, 120 bp, Artificial Sequence
  ENSG00000042781_118 (sequence is synthesized)
tacgaattcaagcgtgcaccaccctgggatgtgcatcaagtgactggacattcatacagacccctgagattgcacctttgatgcaaccccctccacatctggaggtacaaatggctccag

SEQ ID NO: 28847 - DNA, 120 bp, Artificial Sequence
  ENSG00000042781_119 (sequence is synthesized)
gaggattccagccaactgtttctcttttgtggacaggaccgctgcagccaaatggaaaagttttgtattacgaattatacagaagacaaatagcaactcagcctagaaaatccaatccag

SEQ ID NO: 28848 - DNA, 120 bp, Artificial Sequence
  ENSG00000042781_120 (sequence is synthesized)
tcctaatctataacggaagctcaacatcttttatagattccgaactattgcctttcacagagtatgagtatcaggtctgggcagtgaattctgcaggaaaagcccccagtagctggacat

SEQ ID NO: 28849 - DNA, 120 bp, Artificial Sequence
  ENSG00000042781_121 (sequence is synthesized)
ggtgcagaaccgggccagccccaccagaaggtctcagagcccccacgttccatgtgatctcttctacccaagcagtggtcaacatcagtgcccctgggaagcccaacgggatcgtcagtc

SEQ ID NO: 28850 - DNA, 120 bp, Artificial Sequence
  ENSG00000042781_122 (sequence is synthesized)
tctacaggctgttctccagcagcgcccatggggctgagacagtgctatccgaaggcatggccacccagcagactctccatggccttcaagccttcactaactactctattggagtagagg

SEQ ID NO: 28851 - DNA, 120 bp, Artificial Sequence
  ENSG00000042781_123 (sequence is synthesized)
cctgcacctgcttcaactgttgcagcaaaggaccgacagctgaactgagaacccatcctgccccaccctcaggactgtcctctccacaaatcgggacgctggcctcaaggacggcctcct

SEQ ID NO: 28852 - DNA, 120 bp, Artificial Sequence
  ENSG00000042781_124 (sequence is synthesized)
tccggtggagtccccccatgttccccaatggtgtcattcacagctatgaactccaattccacgtggcttgccctcctgactcagccctcccctgtactcccagccaaatagaaacaaagt

SEQ ID NO: 28853 - DNA, 120 bp, Artificial Sequence
  ENSG00000042781_125 (sequence is synthesized)
acacggggctggggcagaaagccagccttgggggtctccagccctacaccacatacaagctgagagtggtggcacacaacgaggtgggcagtacggcttccgagtggatcagtttcacca

SEQ ID NO: 28854 - DNA, 120 bp, Artificial Sequence
  ENSG00000042781_126 (sequence is synthesized)
cccaaaaagaattgcctcagtaccgagccccattttcggtggacagcaatttgtctgtggtgtgtgtgaactggagtgacaccttcctcctgaacggccaactgaaggagtacgtgttaa

SEQ ID NO: 28855 - DNA, 120 bp, Artificial Sequence
  ENSG00000042781_127 (sequence is synthesized)
ccgacggagggcgacgcgtgtacagcggcttggacaccaccctctacataccgagaacggcggacaaaaccttctttttccaggtcatctgcacgactgacgaaggaagtgttaagacgc

SEQ ID NO: 28856 - DNA, 120 bp, Artificial Sequence
  ENSG00000042781_128 (sequence is synthesized)
cgttgatccaatatgatacctctactggacttggcttggtcctaacaactcctgggaaaaagaagggatcgcggagcaaaagcacagagttctacagcgagctgtggttcatagtgttaa

SEQ ID NO: 28857 - DNA, 120 bp, Artificial Sequence
  ENSG00000042781_129 (sequence is synthesized)
tggcgatgctgggcttgatcttgttggccatttttctgtccctgatactacaaagaaaaatccacaaagagccatatatcagagaaagacctcccttggtacctcttcagaagaggatgt

SEQ ID NO: 28858 - DNA, 120 bp, Artificial Sequence
  ENSG00000042781_130 (sequence is synthesized)
ctccattgaatgtttacccaccgggggaaaaccatatggggttagccgataccaaaattccccggtctgggacacctgtgagtatccgcagcaaccggagtgcatgtgtcctgcgcatcc

SEQ ID NO: 28859 - DNA, 120 bp, Artificial Sequence
  ENSG00000042781_131 (sequence is synthesized)
cgagtcaaaaccaaaccagcctaacctactcccagggttctcttcaccgcagcgtcagccagctcatggacattcaagacaagaaagtcttgatggacaactcactgtgggaagccatca

SEQ ID NO: 28860 - DNA, 120 bp, Artificial Sequence
  ENSG00000042781_132 (sequence is synthesized)
tgggccacaacagtggactgtatgtggatgaagaggacctgatgaacgccatcaaggatttcagctcagtgactaaggaacgcaccacattcacagacacccacctgtaaaggatggaaa

SEQ ID NO: 28861 - DNA, 120 bp, Artificial Sequence
  ENSG00000042781_133 (sequence is synthesized)
cccagaagacgtaaccctggaatgcaaggtctgcacccatttcctcctgggttatcactcacacatcataaatgctgaaaagccattgtttattatcctataattctttaaagaaatgat

SEQ ID NO: 28862 - DNA, 120 bp, Artificial Sequence
  ENSG00000042781_134 (sequence is synthesized)
gactgtttttgaaagtgttccttcctaatagaggtctaagaaatgatatttttctcatcttaaatgagagagaatattcatatgaaaatacttgatttgctcttattttgtagaagacaa

SEQ ID NO: 28863 - DNA, 120 bp, Artificial Sequence
  ENSG00000042781_135 (sequence is synthesized)
agaagtatgtaattgtcacttggttctgtttggcagtgatgctcctggttaactgaataatcagtggcaatttcaagatggctcacagttgttagaagtagtaagttagttactggctca

SEQ ID NO: 28864 - DNA, 120 bp, Artificial Sequence
  ENSG00000042781_136 (sequence is synthesized)
aaaatgattctgttgaaaggatgtcactgctgttcatttctatctgccatttctgtcagggttgacacaatcctgcaagaatagttattctaatgatcacagctgctaaatgaatcccaa

SEQ ID NO: 28865 - DNA, 120 bp, Artificial Sequence
  ENSG00000042781_137 (sequence is synthesized)
actttgcaccaggtcgacaaacttttctgaaggttctatttatttaccatacatagggttacttaccaaactttttgacaaggctgaaggttctatttatttacaatacatagggttact

SEQ ID NO: 28866 - DNA, 120 bp, Artificial Sequence
  ENSG00000042781_138 (sequence is synthesized)
caccaaactttttgacaaggcaacacataacttacacataaatgtctctgttcttgcatttatgaattttccaaaaatctaaggagtaaacagcttatttatacattttgaggagaaaac

SEQ ID NO: 28867 - DNA, 120 bp, Artificial Sequence
  ENSG00000042781_139 (sequence is synthesized)
aaagtgtttcactaggaacacctctacttgaaccaatgtttttatttcatatattttatagttttgaaactagtttctcataaaattctgtcaattcactgaatatcagagaatactgac

SEQ ID NO: 28868 - DNA, 120 bp, Artificial Sequence
  ENSG00000042781_140 (sequence is synthesized)
atcttcaacctagcacatttcaaatggaaactactgttctatttgcaatattaggctgcgtgaaattttaaaaggaaaaatgtatctgttccttctagcattaacatatatacatgtaga

SEQ ID NO: 28869 - DNA, 120 bp, Artificial Sequence
  ENSG00000042781_141 (sequence is synthesized)
gacaagactatacctatgtgtatatatatgtatatcatgtatatattactctgcactatatcccttctttttggagaactagccattattttagccacagaatcagtaagaacagatgat

SEQ ID NO: 28870 - DNA, 120 bp, Artificial Sequence
  ENSG00000042781_142 (sequence is synthesized)
atgcaacagtaccaattacggttcaaaaatgtctgtcacctgctctagttggattacaaagtcattggtgaaagtcctatggcaagaaaaattttcttgcaaatcatccacataaaatca

SEQ ID NO: 28871 - DNA, 120 bp, Artificial Sequence
  ENSG00000042781_143 (sequence is synthesized)
gatatttaaatttgttcttcatggaaaacagagtaagaaaacctcttgtcttccttcatccttaaaggtctttgtgaccccaggaaaatattgactctgtctaacacacaatagtcacaa

SEQ ID NO: 28872 - DNA, 120 bp, Artificial Sequence
  ENSG00000042781_144 (sequence is synthesized)
tactttttgtgaatctacaaccagagacaggcaaaaacttgtaaagtaagggatagtcttacttattctgcctgaaaacaatgtattaccccagggcccaacagtaaaagattgtggact

SEQ ID NO: 28873 - DNA, 120 bp, Artificial Sequence
  ENSG00000042781_145 (sequence is synthesized)
ttttgggtattgagatttcatctagctctgtgagagagcagctcctcagactgaccaactcctagacaaagtttgccaaccataagtgtcaaaagcacaggccagtattaagcagaagtt

SEQ ID NO: 28874 - DNA, 120 bp, Artificial Sequence
  ENSG00000042781_146 (sequence is synthesized)
ctaccaccttattagaactgctataaacaaaagcatctgaaataattgtgcacatctggcagtgactgtagaaaatacgaaatatatatttctcgccaagtttttatactttctgaaatg

SEQ ID NO: 28875 - DNA, 120 bp, Artificial Sequence
  ENSG00000042781_147 (sequence is synthesized)
aaaacataggattgactagtttactggtttttattcccatatgccgattctgggacaataaagttgtttaaagctggcacaaataagcattaaccaaggctgtgtccaccttctgtgagc

SEQ ID NO: 28876 - DNA, 120 bp, Artificial Sequence
  ENSG00000042781_148 (sequence is synthesized)
tacttaaggtatataggaaaggagtggtcacaaacttgcatcctaatccttggtggactcttctaagaatacagtttgctagtcacaaagaatagtctacaaatatgctttgctaggttc

SEQ ID NO: 28877 - DNA, 120 bp, Artificial Sequence
  ENSG00000042781_149 (sequence is synthesized)
agaagattgagtttatcctgatttttgaaaaattaaccaggtatctttatcactgtgtatttttccaagcacagtataaaattttaacaacgcacaaaaaaatacagaactgcaggggat

SEQ ID NO: 28878 - DNA, 120 bp, Artificial Sequence
  ENSG00000042781_150 (sequence is synthesized)
tttatcttggatcattatccatttaatcatctaattagacatgaactcagttagctgaatcatttacattttgactccatagcttagggcagacagaagcctgtatggcttctgcccaga

SEQ ID NO: 28879 - DNA, 120 bp, Artificial Sequence
  ENSG00000042781_151 (sequence is synthesized)
actctgtcccctgctacatgtctaagtttacttgtatttatttcagagaagaactctaagatgttgctttgctactttaagtggtattgcgtgccaagcctctattatacaaaccatgca

SEQ ID NO: 28880 - DNA, 120 bp, Artificial Sequence
  ENSG00000042781_152 (sequence is synthesized)
gactcgcctctagagattctgattcggttgatctggggtgtgtggctgaggcatcagtactttttaaagcttccaggtgttctaatgttgagacccactgatgttccacaatctggaaga

SEQ ID NO: 28881 - DNA, 120 bp, Artificial Sequence
  ENSG00000042781_153 (sequence is synthesized)
aatcatgtacaggaataatatgctatgcacagggactatgctccttggctcaccccttctcccttataaacaatgagcagttcttgatgaacctctttaaatttaaatctcctgactcac

SEQ ID NO: 28882 - DNA, 120 bp, Artificial Sequence
  ENSG00000042781_154 (sequence is synthesized)
attttaccaattgtacatgccacattctcagcttacgaactaccatgttttgttattcttaatatcaactgtttggtaagagtacagttgtttttatacactctaagaaatgtgtttata

SEQ ID NO: 28883 - DNA, 120 bp, Artificial Sequence
  ENSG00000042781_155 (sequence is synthesized)
atctactgtaatttccactaaatggaacccaaatattaatgttatggtaccatatactgatgtaaaaatcatgctggcatccatgaacacaccggtaaataaaacatagtccaagtggaa

SEQ ID NO: 28884 - DNA, 120 bp, Artificial Sequence
  ENSG00000042781_156 (sequence is synthesized)
gaattcattaataaggaacttttaattatgtcacaaatgaatagttggtttccaatgcacaaatatcatgtaaactaatctaaagatggtttgcttaataaatatttgaatgtgacctaa

SEQ ID NO: 28885 - DNA, 120 bp, Artificial Sequence
  ENSG00000042781_157 (sequence is synthesized)
ataaacatctgtttctgcagatatgatgggtttgaaccagcactaaacattataattgctatcatttactatagctgatggtgtggtgtttacatgaatcattaagaggcttgcagtaaa

SEQ ID NO: 28886 - DNA, 120 bp, Artificial Sequence
  ENSG00000042781_158 (sequence is synthesized)
taggtagtgagagctagtgcctatttctttgactttaatggcacataaaattaattgcttgaaaataatctttcaaaatatatatttcttgatatctataaactcctgcagagataatcc

SEQ ID NO: 28887 - DNA, 120 bp, Artificial Sequence
  ENSG00000042781_159 (sequence is synthesized)
tacagacttcactggtaagtgtgtttgacattgctttatttaggagacacgaagctccaaaatgttttctatattttcatatccctttacaatgaatttttattatacctacttagagaa

SEQ ID NO: 28888 - DNA, 120 bp, Artificial Sequence
  ENSG00000042781_160 (sequence is synthesized)
atactaattcagccctttgatagcttttgcctgattgtttcagcatgtccatctttttagaattctggggaaaaaagtcaggtaagtgaaggaaaggaaaaataaaagatgaagatgaag

SEQ ID NO: 28889 - DNA, 120 bp, Artificial Sequence
  ENSG00000042781_161 (sequence is synthesized)
aagcagccttattggatcaaagtatgtgctttgtatttgtctttttgtgaagtatgtgccaggacatgtttcttgaaatattattcactgtgttctctgagcaaatgagtttgcaaaatg

SEQ ID NO: 28890 - DNA, 120 bp, Artificial Sequence
  ENSG00000042781_162 (sequence is synthesized)
ccctcatgctattggagattctcagtatgcaccccgttactgaaactccaaaaagcattgtaagaaagctattcaactttgcttagctaatcatgcctaacagatatttgatgtaatgtt

SEQ ID NO: 28891 - DNA, 120 bp, Artificial Sequence
  ENSG00000042781_163 (sequence is synthesized)
ttctttttctttctcttgctgtttccttcttctttttttcactgtgacaacttaatatctcatgttctatgaagaacattgtggggaaaactaatcccagggaaaagataacttctctaa

SEQ ID NO: 28892 - DNA, 120 bp, Artificial Sequence
  ENSG00000042781_164 (sequence is synthesized)
gccaggactatggtaaagcaagtgaggctcttgtttcggtcacaaaatttaaaggcactaaaaaactcagtgttaatgtaaattttaatgcaatatttttaaaaatgaaaatcaatgtga

SEQ ID NO: 28893 - DNA, 120 bp, Artificial Sequence
  ENSG00000042781_165 (sequence is synthesized)
aagcactataaaaatattatcaaaagcttaaataaagacagattgaactctgtaccagcacaatcctgcctcactggccttaccctcctcctggccttactagtaccgcaatattttgga

SEQ ID NO: 28894 - DNA, 120 bp, Artificial Sequence
  ENSG00000042781_166 (sequence is synthesized)
agtcccatgacctctgtgacttacagcttctaatagcatgatttcaatatagctgtaaaaaaactctacttatggtacaccatttttccaatttttaaaaaaatttacaaagtataagat

SEQ ID NO: 28895 - DNA, 120 bp, Artificial Sequence
  ENSG00000042781_167 (sequence is synthesized)
atatattattatgtaaactcataaagatgttcatttaatcatccatgagaaagtcattttggagcaaatagctagtctttaaaatattgcatatgtgaagacaatgaaatggaattcgag

SEQ ID NO: 28896 - DNA, 120 bp, Artificial Sequence
  ENSG00000042781_168 (sequence is synthesized)
ctataaaaatttgtattgttttatttttacttaaaatagtaaatagtttgcttttcattgagactggctgctgatgcaccttggtaatgaatcatgattatattctaactgagatatatt

SEQ ID NO: 28897 - DNA, 120 bp, Artificial Sequence
  ENSG00000042781_169 (sequence is synthesized)
gagattaatgcatgattaactactctctcagtacatcaaaatcattgcagagtattagaaattgaaccattgagctaaaaatgctcaacttctgctttatattcttaaaatggcaaaaaa

SEQ ID NO: 28898 - DNA, 120 bp, Artificial Sequence
  ENSG00000042813_0 (sequence is synthesized)
tgggcaggcgacggcggcgtgtggatggaggccttcgcccttggcccagcgcggcggggcaggcggcggacccgggccgccggctccctgctctctcgggccgccatcctcctctttatc

SEQ ID NO: 28899 - DNA, 120 bp, Artificial Sequence
  ENSG00000042813_1 (sequence is synthesized)
ctctcgggccgccatcctcctctttatctccgccttcctggtgcgggtgccctcatcagttggacacttggttcgattaccaagagcttttcgcttgaccaaagattcagtgaaaatagt

SEQ ID NO: 28900 - DNA, 120 bp, Artificial Sequence
  ENSG00000042813_2 (sequence is synthesized)
gggatcaacaagttttccagtgaaagcgtatgtcatgctccatcaaaagagtccacacgtgttatgtgtaacgcaacaactgcgaaatgctgaactgatagacccatcattccaatggta

SEQ ID NO: 28901 - DNA, 120 bp, Artificial Sequence
  ENSG00000042813_3 (sequence is synthesized)
tgggcctaaaggaaaagttgtttcagtagaaaaccgcactgcacaaataacatccacaggaagccttgtattccaaaattttgaggagagtatgagtggaatttatacatgtttcctcga

SEQ ID NO: 28902 - DNA, 120 bp, Artificial Sequence
  ENSG00000042813_4 (sequence is synthesized)
tgcaatagcatttataatatttcttttgagaagaaacttcttcagattttaagcaaactgcttcttgacctttcatgtgaaatttccttacttaagtctgaatgccatcgcgttaaaatg

SEQ ID NO: 28903 - DNA, 120 bp, Artificial Sequence
  ENSG00000042813_5 (sequence is synthesized)
caaagagctggtttgcaaaatgaattgttctttgcattttcagtttcatctctagacactgaaaaaggacccaagcgatgtacagaccataactgtgaaccttacaaaagactttttaag

SEQ ID NO: 28904 - DNA, 120 bp, Artificial Sequence
  ENSG00000042813_6 (sequence is synthesized)
gctaaaaatctcatagagagattttttaatcaacaagtagaaattcttggcagacgtgcagaacaattacctcaaatatactatattgaaggtactctccaaatggtttggattaatcgc

SEQ ID NO: 28905 - DNA, 120 bp, Artificial Sequence
  ENSG00000042813_7 (sequence is synthesized)
tgctttccaggatatggaatgaatgtccagcaacatccaaaatgtcctgagtgctgtgtgatctgcagccctggatcatataacccccgtgatggaattcattgccttcaatgcaatagc

SEQ ID NO: 28906 - DNA, 120 bp, Artificial Sequence
  ENSG00000042813_8 (sequence is synthesized)
agcctggtgtatggagcaaaaacgtgcttataagccattatcttcagttattcagtggtttattaaatgcaaagtatatatttgaaatattaacataataaattattatgccaaaattaa

SEQ ID NO: 28907 - DNA, 120 bp, Artificial Sequence
  ENSG00000042813_9 (sequence is synthesized)
tcctcctctttatctccgccttcctggtgcgggtgccctcatcaggtgagggtccgcgccgccctgccggctccgcagggacaaccgcagcttcccccactcttcgaattgccttttctt

SEQ ID NO: 28908 - DNA, 120 bp, Artificial Sequence
  ENSG00000042813_10 (sequence is synthesized)
atccgttttatatagagacaccttgctcactaatacgtgacaagaaaggcttattttttatggaagtcgtacaaagtcactctgcatttgcatagaggagtgaatgacaggaaattaagt

SEQ ID NO: 28909 - DNA, 120 bp, Artificial Sequence
  ENSG00000042813_11 (sequence is synthesized)
acatgtattttgtaaagagtaaaagacttactacatctccatctctaaaagcagtgtaatctaaagtttccaaatttcttaattgtataataaataatggattagaatacatgttctttc

SEQ ID NO: 28910 - DNA, 120 bp, Artificial Sequence
  ENSG00000042813_12 (sequence is synthesized)
ctttttgttccttatgtttgcttacttttttcctatatttaaaatctttaataatttaacttacaatgcatttttctgaggcatgaacagcaccccatcaacagcctgggaaagcagagg

SEQ ID NO: 28911 - DNA, 120 bp, Artificial Sequence
  ENSG00000042813_13 (sequence is synthesized)
agataagaggagatgaacaacaggagtgggatgagagcaaatcatggatttttagctactggcacaccagaatgagaccacacaaatatctgaaggcagaacaagtagttgggacttcca

SEQ ID NO: 28912 - DNA, 120 bp, Artificial Sequence
  ENSG00000042813_14 (sequence is synthesized)
ctatgatgttgaaaggaaatgaagaaaggagacagccttattttgttcctaatcctggtgggaaagcttcaagtttctcaacagacctcctgcagagcccctgtccatctccttgtgcct

SEQ ID NO: 28913 - DNA, 120 bp, Artificial Sequence
  ENSG00000042813_15 (sequence is synthesized)
tagattacagtttattacatacgtaggagagtggcttcttcccatttaaaccctggaaaatataattggctacaaatttcaagattttttcccaatttatggattaccttcaagttccat

SEQ ID NO: 28914 - DNA, 120 bp, Artificial Sequence
  ENSG00000042813_16 (sequence is synthesized)
acaactggcaccatctaccaacaagagtgagcatccaggaacctcgttagaaacttttctcagtggaaattaacttatcttcattccactttaagtgtgcaagacttgcaaataaaggtc

SEQ ID NO: 28915 - DNA, 120 bp, Artificial Sequence
  ENSG00000042813_17 (sequence is synthesized)
ttccttctaagaggaaggcaagagggtcaaaggcagaaaaaggaaatgcgctgacaaaaggagaacttgcagtgattttctttgaaaatcaaagaagaagccacatgccaaataatgaag

SEQ ID NO: 28916 - DNA, 120 bp, Artificial Sequence
  ENSG00000042813_18 (sequence is synthesized)
gcagccactacagctagaaatgacaaagaattggattccccctaaagctttcagaatgaatacagcttgatttttgcttagtaagactcattttggatttctgatctccagagccataag

SEQ ID NO: 28917 - DNA, 120 bp, Artificial Sequence
  ENSG00000042832_0 (sequence is synthesized)
aagcagtggtttctcctccttcctcccaggaagggccaggaaaatggccctggtcctggagatcttcaccctgctggcctccatctgctgggtgtcggccaatatcttcgagtaccaggt

SEQ ID NO: 28918 - DNA, 120 bp, Artificial Sequence
  ENSG00000042832_1 (sequence is synthesized)
ggatgcccagccccttcgtccctgtgagctgcagagggaaacggcctttctgaagcaagcagactacgtgccccagtgtgcagaggatggcagcttccagactgtccagtgccagaacga

SEQ ID NO: 28919 - DNA, 120 bp, Artificial Sequence
  ENSG00000042832_2 (sequence is synthesized)
cggccgctcctgctggtgtgtgggtgccaacggcagtgaagtgctgggcagcaggcagccaggacggcctgtggcttgtctgtcattttgtcagctacagaaacagcagatcttactgag

SEQ ID NO: 28920 - DNA, 120 bp, Artificial Sequence
  ENSG00000042832_3 (sequence is synthesized)
tggctacattaacagcacagacacctcctacctccctcagtgtcaggattcaggggactacgcgcctgttcagtgtgatgtgcagcaggtccagtgctggtgtgtggacgcagaggggat

SEQ ID NO: 28921 - DNA, 120 bp, Artificial Sequence
  ENSG00000042832_4 (sequence is synthesized)
ggaggtgtatgggacccgccagctggggaggccaaagcgatgtccaaggagctgtgaaataagaaatcgtcgtcttctccacggggtgggagataagtcaccaccccagtgttctgcgga

SEQ ID NO: 28922 - DNA, 120 bp, Artificial Sequence
  ENSG00000042832_5 (sequence is synthesized)
gggagagtttatgcctgtccagtgcaaatttgtcaacaccacagacatgatgatttttgatctggtccacagctacaacaggtttccagatgcatttgtgaccttcagttccttccagag

SEQ ID NO: 28923 - DNA, 120 bp, Artificial Sequence
  ENSG00000042832_6 (sequence is synthesized)
gaggttccctgaggtatctgggtattgccactgtgctgacagccaagggcgggaactggctgagacaggtttggagttgttactggatgaaatttatgacaccatttttgctggcctgga

SEQ ID NO: 28924 - DNA, 120 bp, Artificial Sequence
  ENSG00000042832_7 (sequence is synthesized)
ccttccttccaccttcactgaaaccaccctgtaccggatactgcagagacggttcctcgcagttcaatcagtcatctctggcagattccgatgccccacaaaatgtgaagtggagcggtt

SEQ ID NO: 28925 - DNA, 120 bp, Artificial Sequence
  ENSG00000042832_8 (sequence is synthesized)
tacagcaaccagctttggtcacccctatgttccaagctgccgccgaaatggcgactatcaggcggtgcagtgccagacggaagggccctgctggtgtgtggacgcccaggggaaggaaat

SEQ ID NO: 28926 - DNA, 120 bp, Artificial Sequence
  ENSG00000042832_9 (sequence is synthesized)
gcatggaacccggcagcaaggggagccgccatcttgtgctgaaggccaatcttgtgcctccgaaaggcagcaggccttgtccagactctactttgggacctcaggctacttcagccagca

SEQ ID NO: 28927 - DNA, 120 bp, Artificial Sequence
  ENSG00000042832_10 (sequence is synthesized)
cgacctgttctcttccccagagaaaagatgggcctctccaagagtagccagatttgccacatcctgcccacccacgatcaaggagctctttgtggactctgggcttctccgcccaatggt

SEQ ID NO: 28928 - DNA, 120 bp, Artificial Sequence
  ENSG00000042832_11 (sequence is synthesized)
ggagggacagagccaacagttttctgtctcagaaaatcttctcaaagaagccatccgagcaatttttccctcccgagggctggctcgtcttgcccttcagtttaccaccaacccaaagag

SEQ ID NO: 28929 - DNA, 120 bp, Artificial Sequence
  ENSG00000042832_12 (sequence is synthesized)
actccagcaaaacctttttggagggaaatttttggtgaatgttggccagtttaacttgtctggagcccttggcacaagaggcacatttaacttcagtcaatttttccagcaacttggtct

SEQ ID NO: 28930 - DNA, 120 bp, Artificial Sequence
  ENSG00000042832_13 (sequence is synthesized)
tgcaagcttcttgaatggagggagacaagaagatttggccaagccactctctgtgggattagattcaaattcttccacaggaacccctgaagctgctaagaaggatggtactatgaataa

SEQ ID NO: 28931 - DNA, 120 bp, Artificial Sequence
  ENSG00000042832_14 (sequence is synthesized)
gccaactgtgggcagctttggctttgaaattaacctacaagagaaccaaaatgccctcaaattccttgcttctctcctggagcttccagaattccttctcttcttgcaacatgctatctc

SEQ ID NO: 28932 - DNA, 120 bp, Artificial Sequence
  ENSG00000042832_15 (sequence is synthesized)
tgtgccagaagatgtggcaagagatttaggtgatgtgatggaaacggtactcagctcccagacctgtgagcagacacctgaaaggctatttgtcccatcatgcacgacagaaggaagcta

SEQ ID NO: 28933 - DNA, 120 bp, Artificial Sequence
  ENSG00000042832_16 (sequence is synthesized)
tgaggatgtccaatgcttttccggagagtgctggtgtgtgaattcctggggcaaagagcttccaggctcaagagtcagaggtggacagccaaggtgccccacagactgtgaaaagcaaag

SEQ ID NO: 28934 - DNA, 120 bp, Artificial Sequence
  ENSG00000042832_17 (sequence is synthesized)
ggctcgcatgcaaagcctcatgggcagccagcctgctggctccaccttgtttgtccctgcttgtactagtgagggacatttcctgcctgtccagtgcttcaactcagagtgctactgtgt

SEQ ID NO: 28935 - DNA, 120 bp, Artificial Sequence
  ENSG00000042832_18 (sequence is synthesized)
tgatgctgagggtcaggccattcctggaactcgaagtgcaatagggaagcccaagaaatgccccacgccctgtcaattacagtctgagcaagctttcctcaggacggtgcaggccctgct

SEQ ID NO: 28936 - DNA, 120 bp, Artificial Sequence
  ENSG00000042832_19 (sequence is synthesized)
ctctaactccagcatgctacccaccctttccgacacctacatcccacagtgcagcaccgatgggcagtggagacaagtgcaatgcaatgggcctcctgagcaggtcttcgagttgtacca

SEQ ID NO: 28937 - DNA, 120 bp, Artificial Sequence
  ENSG00000042832_20 (sequence is synthesized)
acgatgggaggctcagaacaagggccaggatctgacgcctgccaagctgctagtgaagatcatgagctacagagaagcagcttccggaaacttcagtctctttattcaaagtctgtatga

SEQ ID NO: 28938 - DNA, 120 bp, Artificial Sequence
  ENSG00000042832_21 (sequence is synthesized)
ggctggccagcaagatgtcttcccggtgctgtcacaatacccttctctgcaagatgtcccactagcagcactggaagggaaacggccccagcccagggagaatatcctcctggagcccta

SEQ ID NO: 28939 - DNA, 120 bp, Artificial Sequence
  ENSG00000042832_22 (sequence is synthesized)
cctcttctggcagatcttaaatggccaactcagccaatacccggggtcctactcagacttcagcactcctttggcacattttgatcttcggaactgctggtgtgtggatgaggctggcca

SEQ ID NO: 28940 - DNA, 120 bp, Artificial Sequence
  ENSG00000042832_23 (sequence is synthesized)
agaactggaaggaatgcggtctgagccaagcaagctcccaacatgtcctggctcctgtgaggaagcaaagctccgtgtactgcagttcattagggaaacggaagagattgtttcagcttc

SEQ ID NO: 28941 - DNA, 120 bp, Artificial Sequence
  ENSG00000042832_24 (sequence is synthesized)
caacagttctcggttccctctgggggagagtttcctggtggccaagggaatccggctgaggaatgaggacctcggccttcctccgctcttcccgccccgggaggctttcgcggagcagtt

SEQ ID NO: 28942 - DNA, 120 bp, Artificial Sequence
  ENSG00000042832_25 (sequence is synthesized)
tctgcgtgggagtgattacgccattcgcctggcggctcagtctaccttaagcttctatcagagacgccgcttttccccggacgactcggctggagcatccgcccttctgcggtcgggccc

SEQ ID NO: 28943 - DNA, 120 bp, Artificial Sequence
  ENSG00000042832_26 (sequence is synthesized)
ctacatgccacagtgtgatgcgtttggaagttgggagcctgtgcagtgccacgctgggactgggcactgctggtgtgtagatgagaaaggagggttcatccctggctcactgactgcccg

SEQ ID NO: 28944 - DNA, 120 bp, Artificial Sequence
  ENSG00000042832_27 (sequence is synthesized)
ctctctgcagattccacagtgcccgacaacctgcgagaaatctcgaaccagtgggctgctttccagttggaaacaggctagatcccaagaaaacccatctccaaaagacctgttcgtccc

SEQ ID NO: 28945 - DNA, 120 bp, Artificial Sequence
  ENSG00000042832_28 (sequence is synthesized)
agcctgcctagaaacaggagagtatgccaggctgcaggcatcgggggctggcacctggtgtgtggaccctgcatcaggagaagagttgcggcctggctcgagcagcagtgcccagtgccc

SEQ ID NO: 28946 - DNA, 120 bp, Artificial Sequence
  ENSG00000042832_29 (sequence is synthesized)
aagcctctgcaatgtgctcaagagtggagtcctctccaggagagtcagcccaggctatgtcccagcctgcagggcagaggatgggggcttttccccagtgcaatgtgaccaggcccaggg

SEQ ID NO: 28947 - DNA, 120 bp, Artificial Sequence
  ENSG00000042832_30 (sequence is synthesized)
cagctgctggtgtgtcatggacagcggagaagaggtgcctgggacgcgcgtgaccgggggccagcccgcctgtgagagcccgcggtgtccgctgccattcaacgcgtcggaggtggttgg

SEQ ID NO: 28948 - DNA, 120 bp, Artificial Sequence
  ENSG00000042832_31 (sequence is synthesized)
tggaacaatcctgtgtgagacaatctcgggccccacaggctctgccatgcagcagtgccaattgctgtgccgccagggctcctggagcgtgtttccaccagggccattgatatgtagcct

SEQ ID NO: 28949 - DNA, 120 bp, Artificial Sequence
  ENSG00000042832_32 (sequence is synthesized)
ggagagcggacgctgggagtcacagctgcctcagccccgggcctgccaacggccccagctgtggcagaccatccagacccaagggcactttcagctccagctcccgccgggcaagatgtg

SEQ ID NO: 28950 - DNA, 120 bp, Artificial Sequence
  ENSG00000042832_33 (sequence is synthesized)
cagtgctgactacgcggatttgctgcagactttccaggttttcatattggatgagctgacagcccgcggcttctgccagatccaggtgaagacttttggcaccctggtttccattcctgt

SEQ ID NO: 28951 - DNA, 120 bp, Artificial Sequence
  ENSG00000042832_34 (sequence is synthesized)
ctgcaacaactcctctgtgcaggtgggttgtctgaccagggagcgtttaggagtgaatgttacatggaaatcacggcttgaggacatcccagtggcttctcttcctgacttacatgacat

SEQ ID NO: 28952 - DNA, 120 bp, Artificial Sequence
  ENSG00000042832_35 (sequence is synthesized)
agtggctcattccagcttcatctggactccaagacgttcccagcggaaaccatccgcttcctccaaggggaccactttggcacctctcccaggacatggtttgggtgctcggaaggattc

SEQ ID NO: 28953 - DNA, 120 bp, Artificial Sequence
  ENSG00000042832_36 (sequence is synthesized)
taccaagtcttgacaagtgaggccagtcaggacggactgggatgcgttaagtgtcctgaaggaagctattcccaagatgaggaatgcattccttgtcctgttggattctaccaagaacag

SEQ ID NO: 28954 - DNA, 120 bp, Artificial Sequence
  ENSG00000042832_37 (sequence is synthesized)
gcagggagcttggcctgtgtcccatgtcctgtgggcagaacgaccatttctgctggagctttcagccagactcactgtgtcactgactgtcagaggaacgaagcaggcctgcaatgtgac

SEQ ID NO: 28955 - DNA, 120 bp, Artificial Sequence
  ENSG00000042832_38 (sequence is synthesized)
cagaatggccagtatcgagccagccagaaggacaggggcagtgggaaggccttctgtgtggacggcgaggggcggaggctgccatggtgggaaacagaggcccctcttgaggactcacag

SEQ ID NO: 28956 - DNA, 120 bp, Artificial Sequence
  ENSG00000042832_39 (sequence is synthesized)
tgtttgatgatgcagaagtttgagaaggttccagaatcaaaggtgatcttcgacgccaatgctcctgtggctgtcagatccaaagttcctgattctgagttccccgtgatgcagtgcttg

SEQ ID NO: 28957 - DNA, 120 bp, Artificial Sequence
  ENSG00000042832_40 (sequence is synthesized)
acagattgcacagaggacgaggcctgcagcttcttcaccgtgtccacgacggagccagagatttcctgtgatttctatgcttggacaagtgacaatgttgcctgcatgacttctgaccag

SEQ ID NO: 28958 - DNA, 120 bp, Artificial Sequence
  ENSG00000042832_41 (sequence is synthesized)
aaacgagatgcactggggaactcaaaggccaccagctttggaagtcttcgctgccaggtgaaagtgaggagccatggtcaagattctccagctgtgtatttgaaaaagggccaaggatcc

SEQ ID NO: 28959 - DNA, 120 bp, Artificial Sequence
  ENSG00000042832_42 (sequence is synthesized)
accacaacacttcagaaacgctttgaacccactggtttccaaaacatgctttctggattgtacaaccccattgtgttctcagcctcaggagccaatctaaccgatgctcacctcttctgt

SEQ ID NO: 28960 - DNA, 120 bp, Artificial Sequence
  ENSG00000042832_43 (sequence is synthesized)
cttcttgcatgcgaccgtgatctgtgttgcgatggcttcgtcctcacacaggttcaaggaggtgccatcatctgtgggttgctgagctcacccagtgtcctgctttgtaatgtcaaagac

SEQ ID NO: 28961 - DNA, 120 bp, Artificial Sequence
  ENSG00000042832_44 (sequence is synthesized)
tggatggatccctctgaagcctgggctaatgctacatgtcctggtgtgacatatgaccaggagagccaccaggtgatattgcgtcttggagaccaggagttcatcaagagtctgacaccc

SEQ ID NO: 28962 - DNA, 120 bp, Artificial Sequence
  ENSG00000042832_45 (sequence is synthesized)
ttagaaggaactcaagacacctttaccaattttcagcaggtttatctctggaaagattctgacatggggtctcggcctgagtctatgggatgtagaaaagacacagtgccaaggccagca

SEQ ID NO: 28963 - DNA, 120 bp, Artificial Sequence
  ENSG00000042832_46 (sequence is synthesized)
tctccaacagaagcaggtttgacaacagaacttttctcccctgtggacctcaaccaggtcattgtcaatggaaatcaatcactatccagccagaagcactggcttttcaagcacctgttt

SEQ ID NO: 28964 - DNA, 120 bp, Artificial Sequence
  ENSG00000042832_47 (sequence is synthesized)
tcagcccagcaggcaaacctatggtgcctttctcgttgtgtgcaggagcactctttctgtcagctcgcagagataacagagagtgcatccttgtacttcacctgcaccctctacccagag

SEQ ID NO: 28965 - DNA, 120 bp, Artificial Sequence
  ENSG00000042832_48 (sequence is synthesized)
gcacaggtgtgtgatgacatcatggagtccaatgcccagggctgcagactgatcctgcctcagatgccaaaggccctgttccggaagaaagttatactggaagataaagtgaagaacttt

SEQ ID NO: 28966 - DNA, 120 bp, Artificial Sequence
  ENSG00000042832_49 (sequence is synthesized)
tacactcgcctgccgttccaaaaactgatggggatatccattagaaataaagtgcccatgtctgaaaaatctatttctaatgggttctttgaatgtgaacgacggtgcgatgcggaccca

SEQ ID NO: 28967 - DNA, 120 bp, Artificial Sequence
  ENSG00000042832_50 (sequence is synthesized)
tgctgcactggctttggatttctaaatgtttcccagttaaaaggaggagaggtgacatgtctcactctgaacagcttgggaattcagatgtgcagtgaggagaatggaggagcctggcgc

SEQ ID NO: 28968 - DNA, 120 bp, Artificial Sequence
  ENSG00000042832_51 (sequence is synthesized)
attttggactgtggctctcctgacattgaagtccacacctatcccttcggatggtaccagaagcccattgctcaaaataatgctcccagtttttgccctttggttgttctgccttccctc

SEQ ID NO: 28969 - DNA, 120 bp, Artificial Sequence
  ENSG00000042832_52 (sequence is synthesized)
acagagaaagtgtctctggactcgtggcagtccctggccctctcttcagtggttgttgatccatccattaggcactttgatgttgcccatgtcagcactgctgccaccagcaatttctct

SEQ ID NO: 28970 - DNA, 120 bp, Artificial Sequence
  ENSG00000042832_53 (sequence is synthesized)
gctgtccgagacctctgtttgtcggaatgttcccaacatgaggcctgtctcatcaccactctgcaaacccaacctggggctgtgagatgtatgttctatgctgatactcaaagctgcaca

SEQ ID NO: 28971 - DNA, 120 bp, Artificial Sequence
  ENSG00000042832_54 (sequence is synthesized)
catagtctgcagggtcagaactgccgacttctgcttcgtgaagaggccacccacatctaccggaagccaggaatctctctgctcagctatgaggcatctgtaccttctgtgcccatttcc

SEQ ID NO: 28972 - DNA, 120 bp, Artificial Sequence
  ENSG00000042832_55 (sequence is synthesized)
acccatggccggctgctgggcaggtcccaggccatccaggtgggtacctcatggaagcaagtggaccagttccttggagttccatatgctgccccgcccctggcagagaggcgcttccag

SEQ ID NO: 28973 - DNA, 120 bp, Artificial Sequence
  ENSG00000042832_56 (sequence is synthesized)
gcaccagagcccttgaactggacaggctcctgggatgccagcaagccaagggccagctgctggcagccaggcaccagaacatccacgtctcctggagtcagtgaagattgtttgtatctc

SEQ ID NO: 28974 - DNA, 120 bp, Artificial Sequence
  ENSG00000042832_57 (sequence is synthesized)
aatgtgttcatccctcagaatgtggcccctaacgcgtctgtgctggtgttcttccacaacaccatggacagggaggagagtgaaggatggccggctatcgacggctccttcttggctgct

SEQ ID NO: 28975 - DNA, 120 bp, Artificial Sequence
  ENSG00000042832_58 (sequence is synthesized)
gttggcaacctcatcgtggtcactgccagctaccgagtgggtgtcttcggcttcctgagttctgggtccggagaggtgagtggcaactgggggctgctggaccaggtggcggctctgacc

SEQ ID NO: 28976 - DNA, 120 bp, Artificial Sequence
  ENSG00000042832_59 (sequence is synthesized)
tgggtgcagacccacatccgaggatttggcggggaccctcggcgcgtgtccctggcagcagaccgtggcggggctgatgtggccagcatccaccttctcacggccagggccaccaactcc

SEQ ID NO: 28977 - DNA, 120 bp, Artificial Sequence
  ENSG00000042832_60 (sequence is synthesized)
caacttttccggagagctgtgctgatgggaggctccgcactctccccggccgccgtcatcagccatgagagggctcagcagcaggcaattgctttggcaaaggaggtcagttgccccatg

SEQ ID NO: 28978 - DNA, 120 bp, Artificial Sequence
  ENSG00000042832_61 (sequence is synthesized)
tcatccagccaagaagtggtgtcctgcctccgccagaagcctgccaatgtcctcaatgatgcccagaccaagctcctggccgtgagtggccctttccactactggggtcctgtgatcgat

SEQ ID NO: 28979 - DNA, 120 bp, Artificial Sequence
  ENSG00000042832_62 (sequence is synthesized)
ggccacttcctccgtgagcctccagccagagcactgaagaggtctttatgggtagaggtcgatctgctcattgggagttctcaggacgacgggctcatcaacagagcaaaggctgtgaag

SEQ ID NO: 28980 - DNA, 120 bp, Artificial Sequence
  ENSG00000042832_63 (sequence is synthesized)
caatttgaggaaagtcgaggccggaccagtagcaaaacagccttttaccaggcactgcagaattctctgggtggcgaggactcagatgcccgcgtcgaggctgctgctacatggtattac

SEQ ID NO: 28981 - DNA, 120 bp, Artificial Sequence
  ENSG00000042832_64 (sequence is synthesized)
tctctggagcactccacggatgactatgcctccttctcccgggctctggagaatgccacccgggactactttatcatctgccctataatcgacatggccagtgcctgggcaaagagggcc

SEQ ID NO: 28982 - DNA, 120 bp, Artificial Sequence
  ENSG00000042832_65 (sequence is synthesized)
cgaggaaacgtcttcatgtaccatgctcctgaaaactacggccatggcagcctggagctgctggcggatgttcagtttgccttggggcttcccttctacccagcctacgaggggcagttt

SEQ ID NO: 28983 - DNA, 120 bp, Artificial Sequence
  ENSG00000042832_66 (sequence is synthesized)
tctctggaggagaagagcctgtcgctgaaaatcatgcagtacttttcccacttcatcagatcaggaaatcccaactacccttatgagttctcacggaaagtacccacatttgcaaccccc

SEQ ID NO: 28984 - DNA, 120 bp, Artificial Sequence
  ENSG00000042832_67 (sequence is synthesized)
tggcctgactttgtaccccgtgctggtggagagaactacaaggagttcagtgagctgctccccaatcgacagggcctgaagaaagccgactgctccttctggtccaagtacatctcgtct

SEQ ID NO: 28985 - DNA, 120 bp, Artificial Sequence
  ENSG00000042832_68 (sequence is synthesized)
ctgaagacatctgcagatggagccaagggcgggcagtcagcagagagtgaagaggaggagttgacggctggatctgggctaagagaagatctcctaagcctccaggaaccaggctctaag

SEQ ID NO: 28986 - DNA, 120 bp, Artificial Sequence
  ENSG00000042832_69 (sequence is synthesized)
acctacagcaagtgaccagcccttgagctccccaaaaacctcacccgaggctgcccactatggtcatctttttctctaaaatagccacttaccttcaataaagtatctacatgcggtgaa

SEQ ID NO: 28987 - DNA, 120 bp, Artificial Sequence
  ENSG00000042832_70 (sequence is synthesized)
ttccaaaaggcttggagaacataccaggtacctctcctctttccctttgtgtttgtcattttggcgaattactggaagatggtggttccagctgaaaggctttttggcaatttttaacag

SEQ ID NO: 28988 - DNA, 120 bp, Artificial Sequence
  ENSG00000042832_71 (sequence is synthesized)
ctgaaaataaaccttgaaataaacattttctcctttaactgatgtctgggaaggaagaaacaaaaaaagaaagagaagaaaggaaataaggaaggagggagggagagagtgaaggaggga

SEQ ID NO: 28989 - DNA, 120 bp, Artificial Sequence
  ENSG00000042832_72 (sequence is synthesized)
tctccaacagaagcaggttgtgtgcaggagcactctttctgtcagctcgcagagataacagagagtgcatccttgtacttcacctgcaccctctacccagaggcacaggtgtgtgatgac

SEQ ID NO: 28990 - DNA, 120 bp, Artificial Sequence
  ENSG00000042832_73 (sequence is synthesized)
atcactcgcattaattccagctcctatgaattaaacacatgtataagtggggtgagtaccagcaacatgcccactttgcagatgagaaaattgactcacgggaatgaaatgatttgtgga

SEQ ID NO: 28991 - DNA, 120 bp, Artificial Sequence
  ENSG00000042832_74 (sequence is synthesized)
aattatgtggctgattgaagcagagtaagacctaagtcgcgttctcccagttttcattttaaggattatttcgccctatcgagtaatgactagacacacacaatccggaggcaatgtcaa

SEQ ID NO: 28992 - DNA, 120 bp, Artificial Sequence
  ENSG00000042832_75 (sequence is synthesized)
cgagtgcaagtgggaagtgattcaggtgatgaaaggaaagacaaatttccctcatggatatttctttcttctcatttgcccagaaatcccaactacccttatgagttctcacggaaagta

SEQ ID NO: 28993 - DNA, 120 bp, Artificial Sequence
  ENSG00000042832_76 (sequence is synthesized)
aagtccgggaggtgagagggacccagctgaagaggatggagtgagggcttccgtataactggagtacctggtgtcatgggaagattcacatgtacctggccaaacgaacaactccatgtt

SEQ ID NO: 28994 - DNA, 120 bp, Artificial Sequence
  ENSG00000042832_77 (sequence is synthesized)
ctgtttcctcctcatctgtatatagggctaccaaagctaccttcctcgtaaggttatgtgaggaccaagtgaagtgataccaacagagacctagcacagccctaagcacatgttaggagg

SEQ ID NO: 28995 - DNA, 120 bp, Artificial Sequence
  ENSG00000042832_78 (sequence is synthesized)
attgcttttaaggagggcacatagttttaagagaaataggaaatggcttaatctaatacggcacgtaaaccaggtataagatgaagtggctacagtattcattctttcatccaaccagac

SEQ ID NO: 28996 - DNA, 120 bp, Artificial Sequence
  ENSG00000042832_79 (sequence is synthesized)
atttttgagcacatgtggctgtggccttggacattcacaggctagtgagaattccatgtgccagccactgcatgacagtgtggcaagggatgcaatgtggacaggtgtcggttgcagtga

SEQ ID NO: 28997 - DNA, 120 bp, Artificial Sequence
  ENSG00000042832_80 (sequence is synthesized)
tgggtttcctctgggggcttcctctttcggcctcggatcatattactttggcggtcctccagaccaacctctctggaccccattaattcaactgccttctagtgtgcccctctggccctt

SEQ ID NO: 28998 - DNA, 120 bp, Artificial Sequence
  ENSG00000042832_81 (sequence is synthesized)
caagctcaacctgtctgagaaccagtttatcatcattaacttccaacatgtttctcatcttgtgtcagacctcgttgcattttcagggagctcagggaatattaggaggctcatagatga

SEQ ID NO: 28999 - DNA, 120 bp, Artificial Sequence
  ENSG00000042832_82 (sequence is synthesized)
acattcagaatgccagtggagagagcactcactgaggcctctccccttcctcacccctttctcttccctttcccaacaggaatctctctgctcagctatgaggcatctgtaccttctgtg

SEQ ID NO: 29000 - DNA, 120 bp, Artificial Sequence
  ENSG00000042832_83 (sequence is synthesized)
agcactccacggatgactatgcctccttctcccgggctctggagaatgccacccggtaagctaagctgcaggagggtgcagattcctactgctatgttttggagcagactcagttggtgt

SEQ ID NO: 29001 - DNA, 120 bp, Artificial Sequence
  ENSG00000042832_84 (sequence is synthesized)
taatgcagcttgctagttaaggagccccccaggaggtgctggtgggagatggttctatctttgcagagttctcttcccagaggactttgccacaatctccgatcctcttaaagaaccatc

SEQ ID NO: 29002 - DNA, 120 bp, Artificial Sequence
  ENSG00000042832_85 (sequence is synthesized)
agccctttgcctctatatacaaattcatctgcacagccaagactgaaggttcccttgtgcagcaccctcacttcacaggttaggaaactgaggcctagagagacatcttcagtatcacac

SEQ ID NO: 29003 - DNA, 120 bp, Artificial Sequence
  ENSG00000042832_86 (sequence is synthesized)
tgcatgctgatatgctgttgaccaatccttatcttcccattgtgtgcagccccagaatgggtcctgggactcccaagcttggaggaaggatgcagaaccctgatgtggcactgaggactc

SEQ ID NO: 29004 - DNA, 120 bp, Artificial Sequence
  ENSG00000042832_87 (sequence is synthesized)
ggtttgctgggggcctgaaagacttttcctgcctgaaaggtttcagaatgtcacggtttaccccagccagcctgtgcaggtgtggaaaccgcctcttctatttcccagctattccatatt

SEQ ID NO: 29005 - DNA, 120 bp, Artificial Sequence
  ENSG00000042832_88 (sequence is synthesized)
ctgagcagctgaaagaaattcctcttggttttgattgcgggaagaagggtgaggatcctgaagacttttggatgccttggactcactgtttatttttgatgagtcctaagaaagtcatgt

SEQ ID NO: 29006 - DNA, 120 bp, Artificial Sequence
  ENSG00000042832_89 (sequence is synthesized)
gatctttttatacaataaatgggatgggtctgtgattatttgaacgttggagagagtgtcaggcatttgctgccggtttgacattctgcccttggatctgatacaaaaatgcttggaggc

SEQ ID NO: 29007 - DNA, 120 bp, Artificial Sequence
  ENSG00000042832_90 (sequence is synthesized)
actttccgcctgtttttcaaatgagggaggcaatggccagagcagaagctcacctgtcattacctgccagcaagcggcagacctctgcctgtggggtgcatgcagctctatagtgatgtg

SEQ ID NO: 29008 - DNA, 120 bp, Artificial Sequence
  ENSG00000042980_0 (sequence is synthesized)
actggagaggaggcagggacagacccagcagcacccacctgagcgagaagagcagacaccgtgctcctggaatcacccagcatgttgcaaggtctcctgccagtcagtctcctcctctct

SEQ ID NO: 29009 - DNA, 120 bp, Artificial Sequence
  ENSG00000042980_1 (sequence is synthesized)
gttgcagtaagtgctataaaagaactccctggggtgaagaagtatgaagtggtttatcctataagacttcatccactgcataaaagagaggccaaagagccagagcaacaggaacaattt

SEQ ID NO: 29010 - DNA, 120 bp, Artificial Sequence
  ENSG00000042980_2 (sequence is synthesized)
gaaactgaattaaagtataaaatgacaattaatggaaaaattgcagtgctttatttgaaaaaaaacaagaacctccttgcaccaggctacacggaaacatattataattccactggaaag

SEQ ID NO: 29011 - DNA, 120 bp, Artificial Sequence
  ENSG00000042980_3 (sequence is synthesized)
gagatcaccacaagcccacaaattatggatgattgttattatcaaggacatattcttaatgaaaaggtttctgacgctagcatcagcacatgtaggggtctaaggggctacttcagtcag

SEQ ID NO: 29012 - DNA, 120 bp, Artificial Sequence
  ENSG00000042980_4 (sequence is synthesized)
ggggatcaaagatactttattgaacctttaagccccatacatcgggatggacaggagcatgcactcttcaagtataaccctgatgaaaagaattatgacagcacctgtgggatggatggt

SEQ ID NO: 29013 - DNA, 120 bp, Artificial Sequence
  ENSG00000042980_5 (sequence is synthesized)
gtgttgtgggcccacgatttgcagcagaacattgccctacctgccaccaaactagtaaaattgaaagacaggaaggttcaggaacatgagaaatacatagaatattatttggtcctggat

SEQ ID NO: 29014 - DNA, 120 bp, Artificial Sequence
  ENSG00000042980_6 (sequence is synthesized)
aatggtgagtttaaaaggtacaatgagaatcaagatgagatcagaaagagggtatttgagatggctaattatgtcaacatgctttataaaaagctcaatactcatgtggccttagttggt

SEQ ID NO: 29015 - DNA, 120 bp, Artificial Sequence
  ENSG00000042980_7 (sequence is synthesized)
atggaaatctggactgacaaggataagataaagataaccccaaatgcaagcttcaccttggagaatttttctaaatggagggggagtgttctctcaagaagaaagcgtcatgatattgct

SEQ ID NO: 29016 - DNA, 120 bp, Artificial Sequence
  ENSG00000042980_8 (sequence is synthesized)
cagttaatcacagcaacagaacttgctggaacgactgtgggtcttgcatttatgtctacaatgtgttctccttattctgttggcgttgttcaggaccacagcgataatcttcttagagtt

SEQ ID NO: 29017 - DNA, 120 bp, Artificial Sequence
  ENSG00000042980_9 (sequence is synthesized)
gcagggacaatggcacatgaaatgggccacaactttggaatgtttcatgacgactattcttgcaagtgtccttctacaatatgtgtgatggacaaagcactgagcttctatatacccaca

SEQ ID NO: 29018 - DNA, 120 bp, Artificial Sequence
  ENSG00000042980_10 (sequence is synthesized)
gacttcagttcctgcagccgtctcagctatgacaagttttttgaagataaattatcaaattgcctctttaatgctccattgcctacagatatcatatccactccaatttgtgggaaccag

SEQ ID NO: 29019 - DNA, 120 bp, Artificial Sequence
  ENSG00000042980_11 (sequence is synthesized)
ttggtggaaatgggagaggactgtgattgtgggacatctgaggaatgtaccaatatttgctgtgatgctaagacatgtaaaatcaaagcaacttttcaatgtgcattaggagaatgttgt

SEQ ID NO: 29020 - DNA, 120 bp, Artificial Sequence
  ENSG00000042980_12 (sequence is synthesized)
gaaaaatgccaatttaaaaaggctgggatggtgtgcagaccagcaaaagatgagtgcgacctgcctgaaatgtgtaatggtaaatctggtaattgtcctgatgatagattccaagtcaat

SEQ ID NO: 29021 - DNA, 120 bp, Artificial Sequence
  ENSG00000042980_13 (sequence is synthesized)
ggcttcccttgccatcacgggaagggccactgcttgatggggacatgccccacactgcaggagcagtgcacagagctgtggggaccaggaactgaggttgcagataagtcatgttacaac

SEQ ID NO: 29022 - DNA, 120 bp, Artificial Sequence
  ENSG00000042980_14 (sequence is synthesized)
aggaatgaaggtgggtcaaagtacgggtactgtcgcagagtggatgacacactcattccctgcaaagcaaatgataccatgtgtgggaagttgttctgtcaaggtgggtcggataatttg

SEQ ID NO: 29023 - DNA, 120 bp, Artificial Sequence
  ENSG00000042980_15 (sequence is synthesized)
ccctggaaaggacggatagtgactttcctgacatgtaaaacatttgatcctgaagacacaagtcaagaaataggcatggtggccaatggaactaagtgtggcgataacaaggtttgcatt

SEQ ID NO: 29024 - DNA, 120 bp, Artificial Sequence
  ENSG00000042980_16 (sequence is synthesized)
aatgcagaatgtgtggatattgagaaagcctacaaatcaaccaattgctcatctaagtgcaaaggacatgctgtgtgtgaccatgagctccagtgtcaatgtgaggaaggatggatccct

SEQ ID NO: 29025 - DNA, 120 bp, Artificial Sequence
  ENSG00000042980_17 (sequence is synthesized)
cccgactgcgatgactcctcagtggtcttccacttctccattgtggttggggtgctgttcccaatggcggtcatttttgtggtggttgctatggtaatccggcaccagagctccagagaa

SEQ ID NO: 29026 - DNA, 120 bp, Artificial Sequence
  ENSG00000042980_18 (sequence is synthesized)
aagcagaagaaagatcagaggccactatctaccactggcaccaggccacacaaacagaagaggaaaccccagatggtaaaggctgttcaaccccaagagatgagtcagatgaagccccat

SEQ ID NO: 29027 - DNA, 120 bp, Artificial Sequence
  ENSG00000042980_19 (sequence is synthesized)
gtgtatgatctgccagtagaaggcaatgagcccccagcctcttttcataaagacacaaacgcacttccccctactgttttcaaggataatccagtgtctacacctaaggactcaaatcca

SEQ ID NO: 29028 - DNA, 120 bp, Artificial Sequence
  ENSG00000042980_20 (sequence is synthesized)
aaagcatgaagcaacagctaagcaagaactaatggctaaattatcaacttggaaaactggaaaatctggatggcagagaaatatactatctatctcaccagtatttgctctcgactcaag

SEQ ID NO: 29029 - DNA, 120 bp, Artificial Sequence
  ENSG00000042980_21 (sequence is synthesized)
aaggttaacattttctgattcatgttagactttgaagagactaaagaaaattttcaagaggaacatatgcctgagaacctttgcatgaatttaaaatttcaattatccattcttataaga

SEQ ID NO: 29030 - DNA, 120 bp, Artificial Sequence
  ENSG00000042980_22 (sequence is synthesized)
aggaagatgattgtaaagaaatatctccgaagttaaaatctgtaataggaattgattcattctctaatgaaaacaaaacataaaaacatcacactaatcttggaggaataagaaaaattg

SEQ ID NO: 29031 - DNA, 120 bp, Artificial Sequence
  ENSG00000042980_23 (sequence is synthesized)
tacatccattaaatgtacaattgattgcaacatcttgattgttttaaccattaacttgtcaaattacaatcacagttaagaaaatgatgtaaaattctgttttgtggatctctttcctag

SEQ ID NO: 29032 - DNA, 120 bp, Artificial Sequence
  ENSG00000042980_24 (sequence is synthesized)
attagcttctgaaatcattattagctatatcatttgaggttttctacaatttggtataactaagaatttaaaaatgttttatcatatatatttgtataattaattactggcatggttaaa

SEQ ID NO: 29033 - DNA, 120 bp, Artificial Sequence
  ENSG00000042980_25 (sequence is synthesized)
gtggttttcactttttaaatggagaaaatttcagttaaattaataggataaaccaggttgcgaactggtgacctgtaggccatgtttgcactgcaaatatatttggtctgaatgatattg

SEQ ID NO: 29034 - DNA, 120 bp, Artificial Sequence
  ENSG00000042980_26 (sequence is synthesized)
atattggacacatagtacttttacatgttttgaatgtattgctaatatttaaaaattgagagatcttgcataaacaatagattcccagctttgtcagatgtaatctaaaagtaatccgat

SEQ ID NO: 29035 - DNA, 120 bp, Artificial Sequence
  ENSG00000042980_27 (sequence is synthesized)
gctttgtcaacaacagacttacattgcccatagcaaccgtcagcttagttgatgggtaatgtagcaaacactattggtttcctaccaaataatcccctttttcctggcttttagaacaat

SEQ ID NO: 29036 - DNA, 120 bp, Artificial Sequence
  ENSG00000042980_28 (sequence is synthesized)
aattttgttcacctgcccacttctaggaaagaatatcctatctaatctatctatctcagggataaatccctatccttttaagtaagtcaagtcaattaaaataacctcatttttccttgc

SEQ ID NO: 29037 - DNA, 120 bp, Artificial Sequence
  ENSG00000042980_29 (sequence is synthesized)
aagacgacagaggaattatgttacaacacttctggaaaatttttcctcgtctctttttctggatatgggcatctgaatactctagctggtactgctgcgctccacacggtgattatgaag

SEQ ID NO: 29038 - DNA, 120 bp, Artificial Sequence
  ENSG00000042980_30 (sequence is synthesized)
gctgaaaaagatagatagagcagaaagatgaaaagaataaaacctggcctttcaatgatgtcatggaattggtagatcagtgactgctggagttacctcacactttcttggtactcctta

SEQ ID NO: 29039 - DNA, 120 bp, Artificial Sequence
  ENSG00000042980_31 (sequence is synthesized)
ttatatgagccatacattttccttgttgtttaagccattttgaattggattttctctcactttcaacagagatcatcctaactagtaaagtagctgtttccataatcagggaacatgctt

SEQ ID NO: 29040 - DNA, 120 bp, Artificial Sequence
  ENSG00000042980_32 (sequence is synthesized)
tagttcatcatcacagctacagtttttcttgtatttgtctgcttcacccatttctatcaatcacttacctggtccccacaggcctgtcgcttcatgaggaactttatggttcatttaccc

SEQ ID NO: 29041 - DNA, 120 bp, Artificial Sequence
  ENSG00000042980_33 (sequence is synthesized)
ttgcagtatgaggttctagataagcccactctggcctcaaaagtgaagctcagtcctcaggaaatccagagtccactgatcaaatcactgtcaaggatacaggctttttctccatgtggc

SEQ ID NO: 29042 - DNA, 120 bp, Artificial Sequence
  ENSG00000042980_34 (sequence is synthesized)
atttgcagaagaacaactttaaaagtagagctttatctgccctgtgaggtttcagaagaccctcccctgacccagaaataaatccctatttcctggaaagccattatgtactcgtgacca

SEQ ID NO: 29043 - DNA, 120 bp, Artificial Sequence
  ENSG00000042980_35 (sequence is synthesized)
acttgtgaacttttctgtgttgttgttgttgttttttaaatatctgtccccagtaatagattcacctaatccttttttatactgatggaatggaaatcttaaatctatgaatcctcaact

SEQ ID NO: 29044 - DNA, 120 bp, Artificial Sequence
  ENSG00000042980_36 (sequence is synthesized)
agccatgtaccataacccaagcaaaaactaaaccatacactctcaaaagcagtggcatgtgaacatgcctgcaagttcctaaatgatgtcactaggtccctgatgcagatgcatcatacg

SEQ ID NO: 29045 - DNA, 120 bp, Artificial Sequence
  ENSG00000042980_37 (sequence is synthesized)
tcctatttgaagagaagaaatgcagtacaatgacaggaaaaccattattttatcatagaactgcgaacccaagtcctacaatgtttccctttcagctcaactgcagaatagtttagaaca

SEQ ID NO: 29046 - DNA, 120 bp, Artificial Sequence
  ENSG00000042980_38 (sequence is synthesized)
gactttttgatttcacaatactgtttccacacttacttatatccgtaactttctaactttaagggaattccgcttatttgacatttaactacctcagatatgccaccaaacctgttttca

SEQ ID NO: 29047 - DNA, 120 bp, Artificial Sequence
  ENSG00000042980_39 (sequence is synthesized)
tcattagttatttttaccttgtctactttaaaacagtgaaattattaggttaaattatgtttttatccagttactctaagataccttagtgtttgtctacttattacaactcaccaaatt

SEQ ID NO: 29048 - DNA, 120 bp, Artificial Sequence
  ENSG00000042980_40 (sequence is synthesized)
actggttttatatggcctttgggaaggcttttagctttttataaaataatgaagtatgcatgaaaagaaagcaaattttagttggttgcagtcagagaatatggaaagggttattattat

SEQ ID NO: 29049 - DNA, 120 bp, Artificial Sequence
  ENSG00000042980_41 (sequence is synthesized)
aattaggattttattattcacattggaaatcactgctatgtgttaaggaattgaaggtggcctctggctagcagccattaagaaaatgagcccctgagttcaacgaccctcaaatgaagt

SEQ ID NO: 29050 - DNA, 120 bp, Artificial Sequence
  ENSG00000042980_42 (sequence is synthesized)
gaagtctaccaataaccactgaataagcttggaattttagattccttcccagctgaatcttgacttcagccttgtgagacaccctgaagtagaggatgcagctaaattttgtccagatta

SEQ ID NO: 29051 - DNA, 120 bp, Artificial Sequence
  ENSG00000042980_43 (sequence is synthesized)
cacacccacagaaactgtatgataattaatatgtgttgtttaaagttgttatggtttggagatatttgttatgcagcaatagatagctgatacaaggaagtagagaacaaacattttcta

SEQ ID NO: 29052 - DNA, 87 bp, Artificial Sequence
  ENSG00000042980_44 (sequence is synthesized)
agatagctgatacaaggaagtagagaacaaacattttctattagtctgttttcacatggctataaagaataccattaattgactcag

SEQ ID NO: 29053 - DNA, 77 bp, Artificial Sequence
  ENSG00000042980_45 (sequence is synthesized)
gcctcaggaaacttacaatcatgatgaaagaggaagcagaaacatctcatatgatggaagatgtgtttgagagctta

SEQ ID NO: 29054 - DNA, 120 bp, Artificial Sequence
  ENSG00000042980_46 (sequence is synthesized)
acccccatgatccaatcacctcccacctggtccctccctcaacatgtggagattatagcaattaaaaaaatgagatttggggggatggacacagagccaaaccatataatgttttaaatg

SEQ ID NO: 29055 - DNA, 120 bp, Artificial Sequence
  ENSG00000042980_47 (sequence is synthesized)
tttaaatgctccagataggtttaggtaaaattaactatatttaataggctttcatcactgcaaaactttttttcctttctttgtgtctctagtctcttccatttgttctcccttctttac

SEQ ID NO: 29056 - DNA, 120 bp, Artificial Sequence
  ENSG00000042980_48 (sequence is synthesized)
tagcaccgaggatttgcttgaaatctctgatagccagtattctcatttatcatattctttctcactttgtgtttccttggtaattttggataactccttaaatttatcttccaaattact

SEQ ID NO: 29057 - DNA, 120 bp, Artificial Sequence
  ENSG00000042980_49 (sequence is synthesized)
ggtttttatattctgtactgtcagtcctcctgttcactaatttcaaaatttatagttgtttctcttgtttacttatatagttgtttctcttgtttacttaataacattctcttctttcct

SEQ ID NO: 29058 - DNA, 120 bp, Artificial Sequence
  ENSG00000042980_50 (sequence is synthesized)
atcagtttaattttataaaggctaaccaattaactgtttttaacttatatttccagatattttaaaaattaaagcaaaatgtgtataaactttattactgcttcccacagtaaatatttt

SEQ ID NO: 29059 - DNA, 120 bp, Artificial Sequence
  ENSG00000042980_51 (sequence is synthesized)
tcagaagtacatgctttctcagccacttgactagtatgttccccatcattcaaagacaccattatttcctaagtgttatattgctatttttcagttggtgcatccaatattattatcagc

SEQ ID NO: 29060 - DNA, 120 bp, Artificial Sequence
  ENSG00000042980_52 (sequence is synthesized)
tttaatattgtttcatcatatgtcattgttcaaagaatccatctcttgagcgtaagctaaataatttgcatacactagcatctggatgtaatatggaaaaatatggaaatggttggggtg

SEQ ID NO: 29061 - DNA, 120 bp, Artificial Sequence
  ENSG00000042980_53 (sequence is synthesized)
ataagcaagtcttgcatattcttttctcctcaattttttttctccaaagtgggccaagccaagagtggcacagctgtgtggagatactgagctccaccttgtcagggaagatcccaactc

SEQ ID NO: 29062 - DNA, 120 bp, Artificial Sequence
  ENSG00000042980_54 (sequence is synthesized)
aggagaaaacacctctaacaaaatctgtagccacgttggcacatctgcccttgaattcactttgtctcttttgctgcttccataaaaaggctttcccttgacaatgttaggcacttttta

SEQ ID NO: 29063 - DNA, 120 bp, Artificial Sequence
  ENSG00000042980_55 (sequence is synthesized)
gcaactaggcctgggtggtctgctacaatgcccaacacttaatacagtatcactattactgttagtagtatgctaagcgaatactattgttataaaaaaaatcctaagcatgaaaattac

SEQ ID NO: 29064 - DNA, 120 bp, Artificial Sequence
  ENSG00000042980_56 (sequence is synthesized)
ggtatacaatttattgtgaaggcaacttcttgtgaacattaaacggtttatctccttcacctcatattaaagtccatactcttgggatatatctgacatctcaatattaaatgactaaga

SEQ ID NO: 29065 - DNA, 120 bp, Artificial Sequence
  ENSG00000042980_57 (sequence is synthesized)
tgactaagtcgtttatgttgctcccacctcacacaaagttaaaactatttgttactttaaatagtttgacaatgttattttaaaatctggacaaatcacaaatataaaatacttatttaa

SEQ ID NO: 29066 - DNA, 120 bp, Artificial Sequence
  ENSG00000042980_58 (sequence is synthesized)
tcactctgacattcatcacttcaggcttctgtgtgtggcatcgttcattgggaatgcagtaaggatggcctttactgaccagcctacttcagttctacctggataagtcttttctttttc

SEQ ID NO: 29067 - DNA, 120 bp, Artificial Sequence
  ENSG00000042980_59 (sequence is synthesized)
tctcttcaattctttaattagggttttacccacagacctaaaggtagtgtccttgccaggcaaataatagaagtgaaactgcatttgtaacattagtgcttttttcagcagtagccatta

SEQ ID NO: 29068 - DNA, 120 bp, Artificial Sequence
  ENSG00000042980_60 (sequence is synthesized)
accccaagaggtgaactatatagtctgggctgtgattaccatggccccactttgcgtttctctcacactcttatcctgactacctatctatcatttctacccagcagcgttttgcagtaa

SEQ ID NO: 29069 - DNA, 120 bp, Artificial Sequence
  ENSG00000042980_61 (sequence is synthesized)
cacattcagaaatgtctcctttgccttttgttaaaggcaaaagagtccctaaaatgccgaggctactttgccggggttcatgaaatgcaaacagaataaagagaacaaagaatgcacata

SEQ ID NO: 29070 - DNA, 120 bp, Artificial Sequence
  ENSG00000042980_62 (sequence is synthesized)
gcaattgacttccattttattgtcttttagtcctgttggcagtaaatgaatggcttgagtgagtgttgagcagtttaatctgcaccttcagggagacagttcttttagtaactccacctg

SEQ ID NO: 29071 - DNA, 120 bp, Artificial Sequence
  ENSG00000042980_63 (sequence is synthesized)
atgccttgcagtgtcaagggaggctcagctttgttctgacagcattatagtggagacttgggctttcttttggtggaattattctgcagccagttgtacaaataaatgagtaacctatct

SEQ ID NO: 29072 - DNA, 120 bp, Artificial Sequence
  ENSG00000042980_64 (sequence is synthesized)
gaaacaagctagaaattgatgtctcagatgcctccatgatgttaggaatccatgttttatcctctagctccatcatccacatgactttcatttccatgtgtttctctaggcctatgatag

SEQ ID NO: 29073 - DNA, 120 bp, Artificial Sequence
  ENSG00000042980_65 (sequence is synthesized)
cttctctagctatcatactccaatcagcaaaaaatgagaaaatgttgagaaatagaagataattcctcatttaaggccaccttctagaatttgtgcttaagattctgttttcttctcatg

SEQ ID NO: 29074 - DNA, 120 bp, Artificial Sequence
  ENSG00000042980_66 (sequence is synthesized)
taagggaaaatgagtgtaaagtacaactaagagtctcggctacagggaaaaataccatcagttaaatatccatagtcctagagcatttatgtaaaactgcaatttgaatcctgcaataca

SEQ ID NO: 29075 - DNA, 120 bp, Artificial Sequence
  ENSG00000042980_67 (sequence is synthesized)
ggtaggaggacaaatcctttcccctgtgcatgtgcgaaggaaaatcatttcagatgacagtgtttaaccatggtcaaaggaccattctgtcctatccttcttagaagctttgaactcaaa

SEQ ID NO: 29076 - DNA, 120 bp, Artificial Sequence
  ENSG00000042980_68 (sequence is synthesized)
atcatggaaaggttttaagatttgaggttggttttagggttgctagatttagcaagtaaaaataaggatggccccgttaaattttaacttaaaattaacaagttttttgttaattttttg

SEQ ID NO: 29077 - DNA, 120 bp, Artificial Sequence
  ENSG00000042980_69 (sequence is synthesized)
ttttttgtctcagcatcagtatatcccatgcaatatttgaggtgtgctcatactaaaattatttgtgtatctgaaattcaaattaaactgggtgtctttttcttttcatctggcaaccct

SEQ ID NO: 29078 - DNA, 120 bp, Artificial Sequence
  ENSG00000042980_70 (sequence is synthesized)
actaagatcataaacccttggaaatctgtgtgtgtgcgggtgtgtgtgtgtgtgtgtgtgcaggggtggcagaagtactgtgggatgggacagaaataagaaaagatggaaaaaagaaaa

SEQ ID NO: 29079 - DNA, 120 bp, Artificial Sequence
  ENSG00000042980_71 (sequence is synthesized)
ccgtctctgtttcccttcttctacatcagcctcctggcagagccaccttaaacaacatctgctagcctcttcacacagacctcaactttctcatctacgttcagagaagatgaagcttca

SEQ ID NO: 29080 - DNA, 120 bp, Artificial Sequence
  ENSG00000042980_72 (sequence is synthesized)
aatggtgagttttaaacagtttgctgggagatgtcactgggtttttcaatgaacgcacatgaagcatggaagcaaagtcaagacatttgagaccaatgtggctgactggctcccaaagga

SEQ ID NO: 29081 - DNA, 80 bp, Artificial Sequence
  ENSG00000043039_0 (sequence is synthesized)
gcgggtgggtctagacgcgcggcaggcgcgcccgctacccgctctcctccgcgcgccacccgagccccgccgcctcccca

SEQ ID NO: 29082 - DNA, 120 bp, Artificial Sequence
  ENSG00000043039_1 (sequence is synthesized)
cggccccagcgggccgggcactcgcagccgcgctcgggccggcggacgctcgcgccggctcaccatgcactgccacgccgagctgaggctgagctcgcccggccagctcaaagcagccag

SEQ ID NO: 29083 - DNA, 120 bp, Artificial Sequence
  ENSG00000043039_2 (sequence is synthesized)
ccaggcggcgctacaagactttcatgatcgacgagatcctctccaaggagacctgcgattactttgagaaactttccctctactccgtgtgcccgtcgctggtcgtgcgacccaagcccc

SEQ ID NO: 29084 - DNA, 120 bp, Artificial Sequence
  ENSG00000043039_3 (sequence is synthesized)
tgcattcctgtacgggctccccttccctgcgggcatatccgctcctctcggtgatcacccgccagcccactgtcatctcccacctggtccctgccaccccgggaatcgcccaggcactgt

SEQ ID NO: 29085 - DNA, 120 bp, Artificial Sequence
  ENSG00000043039_4 (sequence is synthesized)
cctgccaccaggtcaccgaggcggtctctgctgaggccccagggggcgaggccctagccagcagcgagtcagagacggaacagcccacgccccgacagaagaagccccgccggagtcgca

SEQ ID NO: 29086 - DNA, 120 bp, Artificial Sequence
  ENSG00000043039_5 (sequence is synthesized)
ccatcttcaccgagctgcagctcatgggcctggagaagaaattccagaagcagaagtatttgtcaaccccagacaggttggacttggctcagtctctgggactcactcagctgcaggtga

SEQ ID NO: 29087 - DNA, 120 bp, Artificial Sequence
  ENSG00000043039_6 (sequence is synthesized)
agacctggtatcagaatcgcaggatgaaatggaagaaaatggttcttaaaggtggacaggaagcacccacaaaacccaaaggtcgccccaagaagaactccatccccacatcagaagaga

SEQ ID NO: 29088 - DNA, 120 bp, Artificial Sequence
  ENSG00000043039_7 (sequence is synthesized)
atgtccccttagagatggcagagccaccagacccgccccaggagttgccaataccctcttcggaacccccaccattaagctaaagtaaaacccttttgagggaagagggagactggggag

SEQ ID NO: 29089 - DNA, 120 bp, Artificial Sequence
  ENSG00000043039_8 (sequence is synthesized)
aagggaaaagagagaaggcagggagagtagggagagaaaaccttccagcagcccagtaaactgcgggcgaagagatctacccgtctccctccctcccacagttaccattggccttgtcat

SEQ ID NO: 29090 - DNA, 120 bp, Artificial Sequence
  ENSG00000043039_9 (sequence is synthesized)
cgcaagcatttgacaaagacttgcttgtcttgggcctgtcacctcctgaaaggctgctttagctgtggatgcccttgattaagggagagagcgcctaggagctgcctgccccagctgggg

SEQ ID NO: 29091 - DNA, 120 bp, Artificial Sequence
  ENSG00000043039_10 (sequence is synthesized)
tgacggctgtagggctgggtctatgttgcaagccctatatcctagcatgcagtggaaagtgcttagctctctccctcctgacctctgggcagccagtcatcaaagcagagagacgtggcg

SEQ ID NO: 29092 - DNA, 120 bp, Artificial Sequence
  ENSG00000043039_11 (sequence is synthesized)
gcatgtgggcagcatgcccaggttccttgctgactcagcacttatttctgtagttttaaaaaagaatttaatgtttttggttgtatttttttgggggggtgagggtgggcaaaaacatgg

SEQ ID NO: 29093 - DNA, 120 bp, Artificial Sequence
  ENSG00000043039_12 (sequence is synthesized)
gggtagttctgagttgttagaaatgtttctgaatcaagtttgtttgaagacacgtgtgcctttgtacccattataagatggtcataagacccaagaactgataagctttggttttttttt

SEQ ID NO: 29094 - DNA, 120 bp, Artificial Sequence
  ENSG00000043039_13 (sequence is synthesized)
tgttttgttttgttttttgcttcatttacccattcatgcctagggttccattattggaaccctaagcttgtgggagttatttctatcctactgctcaaggtcatcaccaagatctgattt

SEQ ID NO: 29095 - DNA, 120 bp, Artificial Sequence
  ENSG00000043039_14 (sequence is synthesized)
ttcataaaaaacatttgtgaccttcggcataaatgggttaaggtgccatccctgaaactgcaatgcagatatgttcagataacttttattttttaattaaaaataaatctttcaaaagga

SEQ ID NO: 29096 - DNA, 120 bp, Artificial Sequence
  ENSG00000043039_15 (sequence is synthesized)
tcttaggcaactcacttaaccttcctggggcaatttactccctctgagatgagaaagttgaattaaataatccgaaagcatcctgtcaagctctgaaaaatgctatgcttcaaggtacac

SEQ ID NO: 29097 - DNA, 120 bp, Artificial Sequence
  ENSG00000043039_16 (sequence is synthesized)
agacttctcaggaagaattcatagctacaagcatgtctttttataaagaccacaggtggttctcaggaagtttgcatattacaaatctatttcgggtttctgaaatatgtgtctctagct

SEQ ID NO: 29098 - DNA, 120 bp, Artificial Sequence
  ENSG00000043039_17 (sequence is synthesized)
tttcctgactacttcttttcatctgcctggtcccatggaccaagaatttagggattccgaagggagagaggggaaagatctgcttaaaaccagaggacttgcaggaacctcttctgggcc

SEQ ID NO: 29099 - DNA, 120 bp, Artificial Sequence
  ENSG00000043039_18 (sequence is synthesized)
gtgggcttcatcttcccacacagagcagagcagacctctgtgcctgccctgcagctgtaggtcttgagttacctctccttccccttcctccatctgtacctccttaagagcagggccctc

SEQ ID NO: 29100 - DNA, 120 bp, Artificial Sequence
  ENSG00000043039_19 (sequence is synthesized)
aaattccagaagcagaagtatttgtcaaccccagacaggtgaggacgcagggaagggactctccgcagtgaaggcccctgggaacgggagacttgctcccattgtgggccgtggagccac

SEQ ID NO: 29101 - DNA, 120 bp, Artificial Sequence
  ENSG00000043039_20 (sequence is synthesized)
ctggagcctgcctgcggctaaacttaactcaccactttatctccatatttgaacttaactatttcagtatcataaacaaggtccagtttagcaaatggttgctcaggcggtcagctggga

SEQ ID NO: 29102 - DNA, 120 bp, Artificial Sequence
  ENSG00000043039_21 (sequence is synthesized)
aacaggcttggtttttaagccactcactcttaggattggaggcagcaggactagatttggaattgggattcatgatcttctcaatcttctccacagcctccagctgattccccactgact

SEQ ID NO: 29103 - DNA, 120 bp, Artificial Sequence
  ENSG00000043039_22 (sequence is synthesized)
cagtttgctggcctggctattgcttgggaaggactggagggatccagttgaggaggtcagacatgttagtgaatttgctggatgtcaagtcagaaccatttgactgagacccaggaggac

SEQ ID NO: 29104 - DNA, 120 bp, Artificial Sequence
  ENSG00000043039_23 (sequence is synthesized)
ctggctgagagccccttctttgaacccctctgagatccatgttggggaggctgtgacccttgctttcttggaggcctcaatgcctcacctccttttctttaatttactattttaactgaa

SEQ ID NO: 29105 - DNA, 120 bp, Artificial Sequence
  ENSG00000043039_24 (sequence is synthesized)
acatatgccagagtgtgtgtctgggccgggtattgtggcccacacctgtaatctcagcagtttgggagactgaggcagtaggatcgtttgaggctaggagtttgagagcagcctgggcaa

SEQ ID NO: 29106 - DNA, 120 bp, Artificial Sequence
  ENSG00000043039_25 (sequence is synthesized)
cgttgtgagaccccgtctctacaaaaattaaaatatgagccaggtgtgatggcatgcacctgtagtcccagccactcaagaggctaagatgggaggatcacttgaacccaggactttgag

SEQ ID NO: 29107 - DNA, 120 bp, Artificial Sequence
  ENSG00000043039_26 (sequence is synthesized)
actttgagactgcagtgaggtatgattgcatcagattgcatcgctgcactctaggcgagaccctgtctccttaaaaaaaaaaaaaaaatagccgggtgtgttggctcacgcctgtaatcc

SEQ ID NO: 29108 - DNA, 120 bp, Artificial Sequence
  ENSG00000043093_0 (sequence is synthesized)
attcgctgcggagccggaggaggaggggagaggcctggaggacaccaacatgaacaagttgaaatcatcgcagaaggataaagttcgtcagtttatgatcttcacacaatctagtgaaaa

SEQ ID NO: 29109 - DNA, 120 bp, Artificial Sequence
  ENSG00000043093_1 (sequence is synthesized)
aacagcagtaagttgtctttctcaaaatgactggaagttagatgttgcaacagataattttttccaaaatcctgaactttatatacgagagagtgtaaaaggatcattggacaggaagaa

SEQ ID NO: 29110 - DNA, 120 bp, Artificial Sequence
  ENSG00000043093_2 (sequence is synthesized)
gttagaacagctgtacaatagatacaaagaccctcaagatgagaataaaattggaatagatggcatacagcagttctgtgatgacctggcactcgatccagccagcattagtgtgttgat

SEQ ID NO: 29111 - DNA, 120 bp, Artificial Sequence
  ENSG00000043093_3 (sequence is synthesized)
tattgcgtggaagttcagagcagcaacacagtgcgagttctccaaacaggagttcatggatggcatgacagaattaggatgtgacagcatagaaaaactaaaggcccagatacccaagat

SEQ ID NO: 29112 - DNA, 120 bp, Artificial Sequence
  ENSG00000043093_4 (sequence is synthesized)
ggaacaagaattgaaagaaccaggacgatttaaggatttttaccagtttacttttaattttgcaaagaatccaggacaaaaaggattagatctagaaatggccattgcctactggaactt

SEQ ID NO: 29113 - DNA, 120 bp, Artificial Sequence
  ENSG00000043093_5 (sequence is synthesized)
agtgcttaatggaagatttaaattcttagacttatggaataaatttttgttggaacatcataaacgatcaataccaaaagacacttggaatcttcttttagacttcagtacgatgattgc

SEQ ID NO: 29114 - DNA, 120 bp, Artificial Sequence
  ENSG00000043093_6 (sequence is synthesized)
agatgacatgtctaattatgatgaagaaggagcatggcctgttcttattgatgactttgtggaatttgcacgccctcaaattgctgggacaaaaagtacaacagtgtagcactaaaggaa

SEQ ID NO: 29115 - DNA, 120 bp, Artificial Sequence
  ENSG00000043093_7 (sequence is synthesized)
ccttctagaatgtacatagtctgtacaataaatacaacagaaaattgcacagtcaatttctgctggctggactgaactgaagatcaatcctcacaattcagactgagggttgagacaaaa

SEQ ID NO: 29116 - DNA, 120 bp, Artificial Sequence
  ENSG00000043093_8 (sequence is synthesized)
ctttaaggatacatcttggaccatatcgtatttcattcttctaatggtggtttgggcttgtcttctagtctgggccgctctaaacatttataattccaacattgtggatttcatcttata

SEQ ID NO: 29117 - DNA, 120 bp, Artificial Sequence
  ENSG00000043093_9 (sequence is synthesized)
tctgtggaccatcctagtttattctcccataagtcttagaagctttatggtgattattttgaggttttcattctcgcataaagcacaatgctgtcttcatcagaaaacagttggcataag

SEQ ID NO: 29118 - DNA, 120 bp, Artificial Sequence
  ENSG00000043093_10 (sequence is synthesized)
aattaaacatatgaacatcacaaaacaatttataaaaacttcttaaatatacgctttgggctagttgcaaagactatgctaatagcacttccagtgagagtgatatatttaagtgtactg

SEQ ID NO: 29119 - DNA, 120 bp, Artificial Sequence
  ENSG00000043093_11 (sequence is synthesized)
gatctggaatggtgttttggtttggggggaattttttttttttcctggcaaatcacatgtgttgttgatgtgagtatctgatgaaaaaacaatgtcagaataaccgacatgaaaattttt

SEQ ID NO: 29120 - DNA, 120 bp, Artificial Sequence
  ENSG00000043093_12 (sequence is synthesized)
taggataacttggtgcctacctgaaaaatgtattgtgttttagactcttgatttcaaaaggttccacagaactagtctgcgcttaccttacccatgtttatatatagctgtcctacaggg

SEQ ID NO: 29121 - DNA, 120 bp, Artificial Sequence
  ENSG00000043093_13 (sequence is synthesized)
agcttttatttagaaaatgtctgcataatgttagattcttctcctgtctacattatgcactacataattggacttcattatgcttttgaaatgcttatctgcctgtcacataagttaaac

SEQ ID NO: 29122 - DNA, 120 bp, Artificial Sequence
  ENSG00000043093_14 (sequence is synthesized)
gcttatctgcctgtcacataagttaaactatttaatttgttttgaatgttttggattgctacacaatacaatattctaaatttaggcatgagggtttttttgttttgtttttactttttt

SEQ ID NO: 29123 - DNA, 120 bp, Artificial Sequence
  ENSG00000043093_15 (sequence is synthesized)
gaattctcttaatttataagaagatagttgcagttaaattttgaaaatggttgtaatgagccatgaagttcaatctttataatataggtactgctctttcagacaaatagtccattttcg

SEQ ID NO: 29124 - DNA, 120 bp, Artificial Sequence
  ENSG00000043093_16 (sequence is synthesized)
atgacttattattttgttgaaattgctttaactgctaatcactgtggttgccaaatatttacttcaggagcaaagattttcaaacaagcatacacgatgcaaaataccaatctggcttct

SEQ ID NO: 29125 - DNA, 120 bp, Artificial Sequence
  ENSG00000043093_17 (sequence is synthesized)
agtctctttactgttttcgtttcactcagattagctcagttttctcatcaaagcagaatgctatcttgtatgtatttttttcattacaagccccatgagctgcttttatgctgaaaatgg

SEQ ID NO: 29126 - DNA, 120 bp, Artificial Sequence
  ENSG00000043093_18 (sequence is synthesized)
tcatttccctgttcacttactgacatgtgaagaagggtttcttgctttcttaaacatttccgtaaggcaggctagaaatgtaatacttcaaatgtttgatgattatggtcttttgatagg

SEQ ID NO: 29127 - DNA, 120 bp, Artificial Sequence
  ENSG00000043093_19 (sequence is synthesized)
aatagattctgcttgggatatatatccaggcactctctaaggtctagggttgatattaacaaaggaatgtacttagaatagcagtacattttatgcaaatatggaaattattttaagaaa

SEQ ID NO: 29128 - DNA, 120 bp, Artificial Sequence
  ENSG00000043093_20 (sequence is synthesized)
caatgacatatcaaaactgctttttacatgattttgaaatagactagaaagctttccctatagacatattaatattccaatcataactttaattcaagaatgcagttttaccaaaagaaa

SEQ ID NO: 29129 - DNA, 120 bp, Artificial Sequence
  ENSG00000043093_21 (sequence is synthesized)
aatttgaaaatttctattcaggctactggaattggttattaaaagaaaaaggaaaaagaagaatcttgctgctttcagtatttcctgatttttttgtaaatataaagaggaacttcaatt

SEQ ID NO: 29130 - DNA, 120 bp, Artificial Sequence
  ENSG00000043093_22 (sequence is synthesized)
atgaaaaatttttaaaagatatatatatctatatatctatatatatgtactgttttgtttcctgtcttgaagattttgagttatggttattggtttcagattgattaattcacatatgct

SEQ ID NO: 29131 - DNA, 120 bp, Artificial Sequence
  ENSG00000043093_23 (sequence is synthesized)
gtgttttgaaatgagatcccattagcttttttttttttttttttttttcaatataaagtgttttctttaaaagtcatattggttcgtggcctagtgccttggattttacatatttttctt

SEQ ID NO: 29132 - DNA, 120 bp, Artificial Sequence
  ENSG00000043093_24 (sequence is synthesized)
tttaaatgcaaaaccttttcaacaaaatagtgtttgtcatcaggttggtactaaacatttataattactgtgtaattataaacaaaaatacataaagctttgaatataattatgtagcat

SEQ ID NO: 29133 - DNA, 120 bp, Artificial Sequence
  ENSG00000043093_25 (sequence is synthesized)
aaaagttaaggttgttcactatgatggcatcttagaattaaacaaaacttttactagggctgaaaagagaagactgatttaatgtggtgtgattattctgaagataaatgtctggctaca

SEQ ID NO: 29134 - DNA, 120 bp, Artificial Sequence
  ENSG00000043093_26 (sequence is synthesized)
gggaatattttgtactaaaaaatgattacacatatggctgtgtgtgtttgagtctgtgtctgtgagagagccagagagagtgagagagattgacagagaaagggagagacacacacacgc

SEQ ID NO: 29135 - DNA, 120 bp, Artificial Sequence
  ENSG00000043093_27 (sequence is synthesized)
cccttgaattgctttaactcctaagtgtttcagtcctcattccggtaaactccccatgctgattctttgttttaaactgaaccataggtacagtttcctttttgccaaatgtcaaaacag

SEQ ID NO: 29136 - DNA, 120 bp, Artificial Sequence
  ENSG00000043093_28 (sequence is synthesized)
gtacaaattttaaaatgtaatgctttttaaatagaaaaatgtataaaattagaagtgcccacatataaaaaatacttgagatgaagattatctttagtgaatatcatctgcatatctctg

SEQ ID NO: 29137 - DNA, 120 bp, Artificial Sequence
  ENSG00000043093_29 (sequence is synthesized)
taagttcaattgtgtttcttacagtccctgtcatattaccaacagaggcaataaaagctgcagtgaaattgccatgactaaatcttttcacatatttcagtgtattttttttatagattt

SEQ ID NO: 29138 - DNA, 120 bp, Artificial Sequence
  ENSG00000043093_30 (sequence is synthesized)
aaaatatacctgaaaacttttctaggaagaataattattcatggaaagagcattgtaatggcatgttttggggagaaaagacatgccaagtcttgtttactacatttaagatgtttacaa

SEQ ID NO: 29139 - DNA, 120 bp, Artificial Sequence
  ENSG00000043093_31 (sequence is synthesized)
ctatactgggctgctttattaacaatactgtacttgcataatatggcattataagtacatgtccttccttagacttttaaaaagttttaatgagagaaagtaaatttactcaacaaaata

SEQ ID NO: 29140 - DNA, 120 bp, Artificial Sequence
  ENSG00000043093_32 (sequence is synthesized)
gcaaggtacactattttttcctcagacttaaatgaatgaagtgttcatttattttttatttgatgataatcaagaagtgagtagtagtagctaacttaatgtacactttgcttaggtttt

SEQ ID NO: 29141 - DNA, 120 bp, Artificial Sequence
  ENSG00000043093_33 (sequence is synthesized)
taaacatgttactattaagactacgtattgtaaaccttctgtaattttcacatatgaatgacaggagaaagttaaacctaatcgaaggagttttggaataaaaaagtggtgctggggaaa

SEQ ID NO: 29142 - DNA, 120 bp, Artificial Sequence
  ENSG00000043093_34 (sequence is synthesized)
ttcaccatggttcacaaagtatgcctttgtaaaactgaatcaacttttagcaagaattaatttatgtagttttaaatgttaaattgtgtatatttaacagaaaatacttatctggcacct

SEQ ID NO: 29143 - DNA, 120 bp, Artificial Sequence
  ENSG00000043093_35 (sequence is synthesized)
tggcacctcagcagttttaatgttaccttatacttttaacagtatgatttatattgaatacttagatgttttcataagattttatcaaatttgataatgtaatgataaaatgttttttta

SEQ ID NO: 29144 - DNA, 120 bp, Artificial Sequence
  ENSG00000043093_36 (sequence is synthesized)
ctatttaacatataaatggggacacaaaacctgaattgtgatttctacataatgtgataattagggttcaaattatgactcatcatttaattgattataaatgagtatatttctgaactc

SEQ ID NO: 29145 - DNA, 120 bp, Artificial Sequence
  ENSG00000043093_37 (sequence is synthesized)
tttattgcctccatttttacaatcataatatagcaataatttctatttttatttcataggactgtggtgaagttatttatcatgacacctttatctttgatttctgagggaaaggggtgt

SEQ ID NO: 29146 - DNA, 120 bp, Artificial Sequence
  ENSG00000043093_38 (sequence is synthesized)
atattttgtagttaagataaatgagaaagttcctaatagtacaaatgcccttttccaggtttatctttgctatttgttgccatttttcttaaatatttgctttatttgtacccgatttct

SEQ ID NO: 29147 - DNA, 120 bp, Artificial Sequence
  ENSG00000043093_39 (sequence is synthesized)
ggaggcaaatagtgctgttttttcaaactcataatatagttacataaatgattttatcagagcattcttgctatcttattttctttcctacctgttgagtaagtagcatttcttgctcac

SEQ ID NO: 29148 - DNA, 120 bp, Artificial Sequence
  ENSG00000043093_40 (sequence is synthesized)
caactcatttatttgactaggttcagtgtttcctattaatgtgtttttttattttcctttggttgattttgaaaaatctgtcacaaataaggaagttatggtaaaagatgcacagccttt

SEQ ID NO: 29149 - DNA, 120 bp, Artificial Sequence
  ENSG00000043093_41 (sequence is synthesized)
gtagttagtggaattctcaataagtaatgtctttatggagttttaaagggaaattatttaaagggaatcatgttatagttgtccattttttaaattgagattttaaaagtgtttttaagt

SEQ ID NO: 29150 - DNA, 120 bp, Artificial Sequence
  ENSG00000043093_42 (sequence is synthesized)
atagcccaattttctatttacttacaagtgcttcatgattgttttcttttttattttttgccatcatgctgtgcagaaatcataatgtagcttgtaatacttcagagcattggtcttgaa

SEQ ID NO: 29151 - DNA, 120 bp, Artificial Sequence
  ENSG00000043093_43 (sequence is synthesized)
gctgtaacttggggctgctgtccttcatgaggtagggccatagcaggcaggccctttcccacttcctttatggcattctacttttatctgttgtaggctgttagtgtttcatattcgatt

SEQ ID NO: 29152 - DNA, 120 bp, Artificial Sequence
  ENSG00000043093_44 (sequence is synthesized)
tggtttggggaaaaatactcagttaaaaaaattttttttaatgattggctttagagggactgttacctctttggcatatctgtcagcggaatggaaagaaatggagtcagactgaaattc

SEQ ID NO: 29153 - DNA, 120 bp, Artificial Sequence
  ENSG00000043093_45 (sequence is synthesized)
atgccagcttaatcactgaaggcagcactgctttgaaaagaagaattttcaacccacatcgtaaaaacaaagcctgattggaaacaatgaagtgtttgaaacttaggggcagcatgtaag

SEQ ID NO: 29154 - DNA, 120 bp, Artificial Sequence
  ENSG00000043093_46 (sequence is synthesized)
tggcttaatgagcaaacaaacggaacatactcattttatatttaaaaagtacatatatattcaaatgcatgttcatatgaatattataattttatttcaggttatgaaatattctgagaa

SEQ ID NO: 29155 - DNA, 120 bp, Artificial Sequence
  ENSG00000043093_47 (sequence is synthesized)
aaccttatatctgatggaaaacttgggcaatacccaatacgaagcaagagatttttacaaaaagaaatactatagggcataaggttgggggaagaccaattaatgaaatggctaagggac

SEQ ID NO: 29156 - DNA, 120 bp, Artificial Sequence
  ENSG00000043093_48 (sequence is synthesized)
aatgctaattaaatcgttaacagtgattttgtcacataattacatgacttatagctaaaagagcaatatttaatcagtaagatttagagatgggtgtacttggaatcctttgaaagcagc

SEQ ID NO: 29157 - DNA, 120 bp, Artificial Sequence
  ENSG00000043093_49 (sequence is synthesized)
gtgtttagttttcaagcaaatgctaatgttcttaatcctaatagtatattagacttcgttgtgttgaatatatcaaatgaacgaactatgaaccagagctttaaaatagtgatttgtaag

SEQ ID NO: 29158 - DNA, 120 bp, Artificial Sequence
  ENSG00000043093_50 (sequence is synthesized)
actttgttacaatggtacttaaaaaattgctttgtataatttacacactgtaaaattcacccattgtacatgtacaattaattgtttttagtaaacttaagagttgtgcagtccaatttt

SEQ ID NO: 29159 - DNA, 120 bp, Artificial Sequence
  ENSG00000043093_51 (sequence is synthesized)
agaacatgtccatcagcccccaaaatttactcctgctgctctgcggttaatttgctcctgcctccagccccacgcagccacactgatctgctttctgtacagatttaccctttctagaaa

SEQ ID NO: 29160 - DNA, 120 bp, Artificial Sequence
  ENSG00000043093_52 (sequence is synthesized)
tttcacagaggtagaatcatgcagttagtcttttatatctggcatctttcacttagcatgtttttgaggttcatccatgttgcagcttatacctgcgtgtagttcctttagttgctgact

SEQ ID NO: 29161 - DNA, 120 bp, Artificial Sequence
  ENSG00000043093_53 (sequence is synthesized)
tagtgttcactgtttggatataccacattttgtttatccattcaccagttgatagacatttggctggcctacaattagtttttttaaattgcgaataataatgctatgaacattcataaa

SEQ ID NO: 29162 - DNA, 120 bp, Artificial Sequence
  ENSG00000043093_54 (sequence is synthesized)
tgtctttgtgtggacatgttttcatctcagattcctagttgtggaattgtcaggttgtgtggtaaatttatacctaacgtttttaaaaaaactgctgaactttttccaaagtggctgtac

SEQ ID NO: 29163 - DNA, 120 bp, Artificial Sequence
  ENSG00000043093_55 (sequence is synthesized)
ttctagaactattcctgccacagtgcatgcggactgccgtgtctgcacatccttgccaatacttgtcttttttattgcagccatcctggcgggtatttactttatgtgtgtgagttatac

SEQ ID NO: 29164 - DNA, 120 bp, Artificial Sequence
  ENSG00000043093_56 (sequence is synthesized)
ctaggcatcccaactcgtgtatcgattggatgtgcagtttgagtgagtttcaagtggcctcagcgattgctgtaaaattagttactctagtagacatgtactctcttggaggtagtattt

SEQ ID NO: 29165 - DNA, 120 bp, Artificial Sequence
  ENSG00000043093_57 (sequence is synthesized)
tctgtagtcagtgagggtaataataatacttccagtgggggttccagtccctcagtgatctctggtgagaagaaatgtgtcagcgaagagtggtgctgatggctggtgctttggctctgt

SEQ ID NO: 29166 - DNA, 120 bp, Artificial Sequence
  ENSG00000043093_58 (sequence is synthesized)
tattgtttgtaccaaggttgatacagctactcgactagcctatgactgactggtggtggtaattaaactttgtacagattactgtgtgcagatagttactgtcttaatattaagtttccc

SEQ ID NO: 29167 - DNA, 120 bp, Artificial Sequence
  ENSG00000043093_59 (sequence is synthesized)
agagattttacttttgagatagctgagaattaacgactcttggaatttataaaaatttagttgataccatttagttgctgccagctgcctgtgttcttatacataggagacatcggagtg

SEQ ID NO: 29168 - DNA, 120 bp, Artificial Sequence
  ENSG00000043093_60 (sequence is synthesized)
agtgctttttaaaaaattaatggcgtatgtcaggtatatgtaaaaggacaattgcataatgaactcatgttaacatgatcaatccatggccaatcttgatttatctaaatgccattcatc

SEQ ID NO: 29169 - DNA, 120 bp, Artificial Sequence
  ENSG00000043093_61 (sequence is synthesized)
tttgaacccctatttattttgaagcaaatcccagatagcaaatcatttcatttgtaaatatttcaatatgtatgtctaaaagataaggactgttaaataaaaccacaattctgttgttag

SEQ ID NO: 29170 - DNA, 120 bp, Artificial Sequence
  ENSG00000043093_62 (sequence is synthesized)
acttaactgttaacagtttgttagtgttaataactacccagcagtgttcaagttgtgcctttttttttttttttccaattcaagtcaggattcaaataagattcctacattgcatacatc

SEQ ID NO: 29171 - DNA, 120 bp, Artificial Sequence
  ENSG00000043093_63 (sequence is synthesized)
tcaaatgtcctacccagtggatccccacactctccactctttggcttcaaattcatttttttgaaaaaacaatgattgctttagcactttaaatttctatgcaatttcaaatgtaaggtg

SEQ ID NO: 29172 - DNA, 120 bp, Artificial Sequence
  ENSG00000043093_64 (sequence is synthesized)
ggtgaaattttgatgtacttaataaaaaaattctaacgaatatatttttcaagttaatgtagtatataagaagctattatatcaacagattttcctttaacttaaaaatacatcgtgact

SEQ ID NO: 29173 - DNA, 120 bp, Artificial Sequence
  ENSG00000043093_65 (sequence is synthesized)
attgctgggtctccactcctagctgttactgcaagtccatgcctctaccatgagggtggaggagttaagatcaacagatccacatgtaccttgaggtgacagactggctctgagtttcgc

SEQ ID NO: 29174 - DNA, 120 bp, Artificial Sequence
  ENSG00000043093_66 (sequence is synthesized)
ggtggtcttggacagtttctcattgctgggtctccactcctagctgttactgcaagtccatgcctctaccatgagggtggaggagttaagatcaacagatccacatgtaccttgaggtga

SEQ ID NO: 29175 - DNA, 120 bp, Artificial Sequence
  ENSG00000043093_67 (sequence is synthesized)
ttgctgggtctccactcctagctgttactgcaagtccatgcctctaccatgagggtggaggagttaagatcaacagatccacatgtaccttgaggtgacagactggctctggtgaatatt

SEQ ID NO: 29176 - DNA, 120 bp, Artificial Sequence
  ENSG00000043093_68 (sequence is synthesized)
cccattttcctttttagaagccgcccccagctgctcaacttatccgccgccgctcgtgcccgcttccagcctgcgtagacccggccgtggtcgtccggaaggaaccgcgtaggaaacgga

SEQ ID NO: 29177 - DNA, 120 bp, Artificial Sequence
  ENSG00000043093_69 (sequence is synthesized)
ggaggaggggagaggcctggaggacaccaacatgaacaagttgaaatcatcgcagaaggataaagttcgtcagtttatgatcttcacacaatctagtgaaaaaacagcaaccctcaagat

SEQ ID NO: 29178 - DNA, 120 bp, Artificial Sequence
  ENSG00000043093_70 (sequence is synthesized)
agggggcaacggccttgcccctgcccctctgccggctccattgtgtctggtcggggactggggtctggggttccggaacaagttgaaatcatcgcagaaggataaagttcgtcagtttat

SEQ ID NO: 29179 - DNA, 120 bp, Artificial Sequence
  ENSG00000043143_0 (sequence is synthesized)
ctctcttgctcgctcgctccctctctctcctgctggctgcctgttctaggaagccagcgcggagaggggggggatgcacagcacaggggagagagattgcgcatgttggtcagtcgtgtt

SEQ ID NO: 29180 - DNA, 120 bp, Artificial Sequence
  ENSG00000043143_1 (sequence is synthesized)
ttaaagagtacagtgcggggaggctgagaggggcgcatgcaacaacaacttttggaaggatggaagagaagaggcgaaaatactccatcagcagtgacaactctgacaccactgacagtc

SEQ ID NO: 29181 - DNA, 120 bp, Artificial Sequence
  ENSG00000043143_2 (sequence is synthesized)
atgcgacatctacatccgcatcaagatgctccaaactgcccagcagcaccaagtcgggctggccccgacagaacgaaaagaagccctccgaggttttccggacagacttgatcacagcca

SEQ ID NO: 29182 - DNA, 120 bp, Artificial Sequence
  ENSG00000043143_3 (sequence is synthesized)
tgaagatcccggactcataccagctcagcccggatgactactacatcctggcagacccatggcgacaggaatgggagaaaggtgtgcaggtgcctgccggggcagaggccatcccagagc

SEQ ID NO: 29183 - DNA, 120 bp, Artificial Sequence
  ENSG00000043143_4 (sequence is synthesized)
ccgtggtgaggatcctcccaccactggaaggcccccctgcccaggcatccccgagcagcaccatgcttggtgagggctcccagcctgattggccagggggcagccgctatgacttggacg

SEQ ID NO: 29184 - DNA, 120 bp, Artificial Sequence
  ENSG00000043143_5 (sequence is synthesized)
agattgatgcctactggctggagctcatcaactcggagcttaaggagatggagaggccggagctggacgagctgacattagagcgtgtgctggaggagctggagaccctgtgccaccaga

SEQ ID NO: 29185 - DNA, 120 bp, Artificial Sequence
  ENSG00000043143_6 (sequence is synthesized)
atatggccagggccattgagacgcaggaggggctgggcatcgagtacgacgaggatgttgtctgcgacgtgtgtcgctctcctgagggcgaggatggcaacgagatggtcttctgtgaca

SEQ ID NO: 29186 - DNA, 120 bp, Artificial Sequence
  ENSG00000043143_7 (sequence is synthesized)
agtgcaacgtctgtgtgcatcaggcatgctacgggatcctcaaggtgcccacgggcagctggctgtgccggacgtgtgccctgggtgtccagccaaagtgcctgctctgccccaagcgag

SEQ ID NO: 29187 - DNA, 120 bp, Artificial Sequence
  ENSG00000043143_8 (sequence is synthesized)
gaggagccttgaagcccactagaagtgggaccaagtgggtgcatgtcagctgtgccctatggattcctgaggtcagcatcggctgcccagagaagatggagcccatcaccaagatctcgc

SEQ ID NO: 29188 - DNA, 120 bp, Artificial Sequence
  ENSG00000043143_9 (sequence is synthesized)
atatcccagccagccgctgggctctgtcctgcagcctctgcaaggaatgcacaggcacctgcatccagtgttccatgccttcctgcgtcacagcgttccatgtcacatgcgcctttgacc

SEQ ID NO: 29189 - DNA, 120 bp, Artificial Sequence
  ENSG00000043143_10 (sequence is synthesized)
acggcctggaaatgcggactatattagcagacaacgatgaggtcaagttcaagtcattctgccaggagcacagtgacgggggcccacgtaatgagcccacatctgagcccacggaaccca

SEQ ID NO: 29190 - DNA, 120 bp, Artificial Sequence
  ENSG00000043143_11 (sequence is synthesized)
gccaggctggcgaggacctggaaaaggtgaccctgcgcaagcagcggctgcagcagctagaggaggacttctacgagctggtggagccggctgaggtggctgagcggctggacctggctg

SEQ ID NO: 29191 - DNA, 120 bp, Artificial Sequence
  ENSG00000043143_12 (sequence is synthesized)
aggcactggtcgacttcatctaccagtactggaagctgaagaggaaagccaatgccaaccagccgctgctgacccccaagaccgacgaggtggacaacctggcccagcaggagcaggacg

SEQ ID NO: 29192 - DNA, 120 bp, Artificial Sequence
  ENSG00000043143_13 (sequence is synthesized)
tcctctaccgccgcctgaagctcttcacccatctgcggcaggacctagagagggttagaaatctgtgctacatggtgacaaggcgcgagagaacgaaacacgccatctgcaaactccagg

SEQ ID NO: 29193 - DNA, 120 bp, Artificial Sequence
  ENSG00000043143_14 (sequence is synthesized)
agcagatattccacctgcagatgaaacttattgaacaggatctgtgtcgaggcctgtccacctcattccccatcgatggcaccttcttcaacagctggctggcacagtcggtgcagatca

SEQ ID NO: 29194 - DNA, 120 bp, Artificial Sequence
  ENSG00000043143_15 (sequence is synthesized)
cagcagagaacatggccatgagcgagtggccactgaacaatgggcaccgcgaggaccctgctccagggctgctgtcagaggaactgctgcaggacgaggagacactgctcagcttcatgc

SEQ ID NO: 29195 - DNA, 120 bp, Artificial Sequence
  ENSG00000043143_16 (sequence is synthesized)
gggacccctcgctgcgacctggtgaccctgctaggaaggcccgaggccgcacccgcctgcctgccaagaagaaaccaccaccaccaccaccgcaggacgggcctggttcacggacgactc

SEQ ID NO: 29196 - DNA, 120 bp, Artificial Sequence
  ENSG00000043143_17 (sequence is synthesized)
cagacaaagcccccaagaagacctggggccaggatgcaggcagtggcaaggggggtcaagggccacctaccaggaagccaccacgtcggacatcttctcacttgccgtccagccctgcag

SEQ ID NO: 29197 - DNA, 120 bp, Artificial Sequence
  ENSG00000043143_18 (sequence is synthesized)
ccggggactgtcccatcctagccacccctgaaagccccccgccactggcccctgagaccccggacgaggcagcctcagtagctgctgactcagatgtccaagtgcctggccctgcagcaa

SEQ ID NO: 29198 - DNA, 120 bp, Artificial Sequence
  ENSG00000043143_19 (sequence is synthesized)
gccctaagcctttgggccggctccggccaccccgcgagagcaaggtaacccggagattgccgggtgccaggcctgatgctgggatgggaccaccttcagctgtggctgagaggcccaagg

SEQ ID NO: 29199 - DNA, 120 bp, Artificial Sequence
  ENSG00000043143_20 (sequence is synthesized)
tcagcctgcattttgacactgagactgatggctacttctctgatggggagatgagcgactcagatgtagaggccgaggacggtggggtgcagcggggtccccgggaggcaggggcagagg

SEQ ID NO: 29200 - DNA, 120 bp, Artificial Sequence
  ENSG00000043143_21 (sequence is synthesized)
aggtggtccgcatgggcgtactggcctcctaactcacccccttccctgtcccaggccctgccctggtccccccacaaggcctcagcccagtcacaactgccatttccagtctctgctgag

SEQ ID NO: 29201 - DNA, 120 bp, Artificial Sequence
  ENSG00000043143_22 (sequence is synthesized)
tgtcccagaccctcgaggctgccactccgtcgtggttttatttttaatatagagagagttttgaattctacactgttgtctttcctctgtgctggcctaggacattaggattccttccac

SEQ ID NO: 29202 - DNA, 120 bp, Artificial Sequence
  ENSG00000043143_23 (sequence is synthesized)
ggctccggccgctaggaccctgccaggtcccgcgcaccatccctgccctgcccacgtggtattgctgggctcctggctagatgcaagcaaggtggacaagagctcaggactccagcccac

SEQ ID NO: 29203 - DNA, 120 bp, Artificial Sequence
  ENSG00000043143_24 (sequence is synthesized)
tgccactgggtgacacagactgtcgtttgggcattatttcatggcagatgggccagtccagggcctaccccgccttgcccccagatcccactggggtccatttggggggtcctgctacac

SEQ ID NO: 29204 - DNA, 120 bp, Artificial Sequence
  ENSG00000043143_25 (sequence is synthesized)
tccaccgatccccaaggaagtataataaacgatacccagccagagtctactcactgtcacaagcacaacgagtttatatgagaaagcactgagggggtgcagagggcccgctagttccag

SEQ ID NO: 29205 - DNA, 120 bp, Artificial Sequence
  ENSG00000043143_26 (sequence is synthesized)
agcggctctgggaaggggttcccagaatccctcctgagctgtgccatttactcaggggactcccaaacagccagctgccagtgcaggtggagggctgtaggggagggccagtgcccagac

SEQ ID NO: 29206 - DNA, 120 bp, Artificial Sequence
  ENSG00000043143_27 (sequence is synthesized)
agggtcatggggctcagaccagcccactgtagagaatcactctgaggctccaacttccttccttccttcggggccagtctcggccgaagtctggtcacgctcagacagagctgaccagac

SEQ ID NO: 29207 - DNA, 120 bp, Artificial Sequence
  ENSG00000043143_28 (sequence is synthesized)
cagaccgtttgccttttcaagtttcctagtcctgctacaagatgagcttcttccgtggtttccttttggaaactcctccttccaacaagcagtgggatcccggggcccagggcgggccgg

SEQ ID NO: 29208 - DNA, 120 bp, Artificial Sequence
  ENSG00000043143_29 (sequence is synthesized)
tgttggccgctggggctgttgtaagtcttgctggatgttcccctgttcctgagccttaacccctcgcacagccatccccccccccgtcctgccatccccccccgccgtcctgccttcccc

SEQ ID NO: 29209 - DNA, 120 bp, Artificial Sequence
  ENSG00000043143_30 (sequence is synthesized)
accccacccttaggtcccaggtagttgctctgaagagtttcagtagagtggccccagggtgatagctcagggaacaacaaaaaaggaattccgtgaaaacatttttttttctttgatgaa

SEQ ID NO: 29210 - DNA, 120 bp, Artificial Sequence
  ENSG00000043143_31 (sequence is synthesized)
ttactcctgggtcacttccaccactggtaaagccagaacttctccaaaaagaaccttgcaaaaagtccagtgaatcagtcgaatcattctgtggatgccaaagaatattttgaccataat

SEQ ID NO: 29211 - DNA, 120 bp, Artificial Sequence
  ENSG00000043143_32 (sequence is synthesized)
acagcacagcctggacctgacaacttgtcatttggacttttttttaaatggagttctttagcaacaaagtatagaaacatgttcattgcacacacccaaggagaagagctcaagcgcttg

SEQ ID NO: 29212 - DNA, 120 bp, Artificial Sequence
  ENSG00000043143_33 (sequence is synthesized)
gaagaggatgctttgctgctgctgaagtgtacctgggtgttagatttcagatcctgggctgagcccactgtgagctttcctaaactgtgagactcacagaggggaaagatactgacggtg

SEQ ID NO: 29213 - DNA, 120 bp, Artificial Sequence
  ENSG00000043143_34 (sequence is synthesized)
aaaccagcatggaaaacgtctttaccatgtggttccctcctccccaaatacataaagcaaataagcaggatggggaacagcttgaccttcatccacccctaactccaaaactatcaaggt

SEQ ID NO: 29214 - DNA, 120 bp, Artificial Sequence
  ENSG00000043143_35 (sequence is synthesized)
acgacagtggcattgtcatcgacactcaatttcatgtgaattttagcaaaacaggaaacaaagataatgactcagttcagaggatcggacaaatgtgtctagtccgggtggactcggagg

SEQ ID NO: 29215 - DNA, 120 bp, Artificial Sequence
  ENSG00000043143_36 (sequence is synthesized)
gagtggggtgggcttcaaggattctgggcgttgggatggcatgagctaccctgtagagtttagtctgcctgcccgccttggtagtagtgaccagtcagtgtcagcatcagtgtcccaacc

SEQ ID NO: 29216 - DNA, 120 bp, Artificial Sequence
  ENSG00000043143_37 (sequence is synthesized)
ccagtctctgtttactgcctttgaacagaacttcttccttccccatgctttgggtcacctcgggctgcaaccctgtctgtgccagattgcccggtctgaccctgcaggaagcaaagaggt

SEQ ID NO: 29217 - DNA, 120 bp, Artificial Sequence
  ENSG00000043143_38 (sequence is synthesized)
gagcttaaagaacaaccaaactctgccaggggtcccagaaagcccagggtccagcagtctcagcacttggccccttgccccttcacaccatcctggggcaggggctgggcctccctggtg

SEQ ID NO: 29218 - DNA, 120 bp, Artificial Sequence
  ENSG00000043143_39 (sequence is synthesized)
gcaggggtgggtggagaattagggagagggtgcaacgagtctggccccttgcctcgggctggctggtgttcttccaagagcctctgctcacattgttggcctctggattctggcccttct

SEQ ID NO: 29219 - DNA, 120 bp, Artificial Sequence
  ENSG00000043143_40 (sequence is synthesized)
tcattggctgttgctttggactggactgttgctgagcctgtgtcctgcagaacccagatgtctgttaggctggctggctgctgcgaggggaggggggtggcctttcatttggggtgccct

SEQ ID NO: 29220 - DNA, 120 bp, Artificial Sequence
  ENSG00000043143_41 (sequence is synthesized)
ttcactcccaggccaagccctggagcaatcttcttcaggcagctgtctccacctccaggatgtccagcaggctgcaaggagaaggatgccagccacccatcctcccccagttcccagcct

SEQ ID NO: 29221 - DNA, 120 bp, Artificial Sequence
  ENSG00000043143_42 (sequence is synthesized)
ttcccctgttggtcacagccgcttctgtctttttccggtctactgtccccagtgtagagggctttgctgtccctgagactgaggcaggttccttttccaggtcagaggtggaggtagatc

SEQ ID NO: 29222 - DNA, 120 bp, Artificial Sequence
  ENSG00000043143_43 (sequence is synthesized)
tttctctcaaccacatctgcctccacacacagctcctccgcagggaaggagaagctgctctgtaactcattctggctatcgtcccccttctcactgacctgaccgcccaccacctccttc

SEQ ID NO: 29223 - DNA, 120 bp, Artificial Sequence
  ENSG00000043143_44 (sequence is synthesized)
cccctcatcacatgacaaaggataatgtgcaagaaaagtatttttatgtatcataaatgtattttgaaacaaatgagaagaagaaaggtagaagggtttattttattaaatgagcctgac

SEQ ID NO: 29224 - DNA, 120 bp, Artificial Sequence
  ENSG00000043143_45 (sequence is synthesized)
ttagtgacagtgtgtgagcatttgcaatgtaagggcctcagcttccttggagaagccaccccaggtttccagacatagatgttgaattgtttgtggggggtgtgccaggccacgtctcgt

SEQ ID NO: 29225 - DNA, 120 bp, Artificial Sequence
  ENSG00000043143_46 (sequence is synthesized)
gtgtccgtatgcaggcatgcctgtgtatactgtgtatgggcacactgggactagctgggacaattcctagagattcaactgcccaattctaaccaacattggcagcggctgaacttggca

SEQ ID NO: 29226 - DNA, 120 bp, Artificial Sequence
  ENSG00000043143_47 (sequence is synthesized)
tttccttgctaactgccagatgtggccaacctttgtccatatgcaaaccactgaaaaatgatctggatttctatagcaaggcccttggggagggcactctcccatgcccttggcctcgct

SEQ ID NO: 29227 - DNA, 120 bp, Artificial Sequence
  ENSG00000043143_48 (sequence is synthesized)
ggccacattggccaatgagccagggctggagtctgagacctttggttgttctttaaggcacctcctgccactttctccctcagaggcacaaacactttgtgttccacgtcagtttgaggg

SEQ ID NO: 29228 - DNA, 120 bp, Artificial Sequence
  ENSG00000043143_49 (sequence is synthesized)
gacggtggggggatgatatgaatgtcacaggaggagacaccttctgtctttgtttcaaagaaagtgatgtgccatttgttaatatacaagagaaatattgaaaatatattgaaaagagca

SEQ ID NO: 29229 - DNA, 120 bp, Artificial Sequence
  ENSG00000043143_50 (sequence is synthesized)
attttaaattatttttggcttatgttgcaatatttattttcttgtattagaaaagattcctttgtagagaaaaaatgtatttttcattaacgcaaagacctatttctcctttttgtacat

SEQ ID NO: 29230 - DNA, 120 bp, Artificial Sequence
  ENSG00000043143_51 (sequence is synthesized)
tgtccatgtgcgcaacccttaacgagcaatagaatgtatggtcacctgggtgtggccagtgcccgctgtgccctgcatgattctgtgttgccgctgctgcatagttcccagccccatcct

SEQ ID NO: 29231 - DNA, 120 bp, Artificial Sequence
  ENSG00000043143_52 (sequence is synthesized)
gtcctgctcactcatgggggcttccagaccccggccccaccagggcttgtgtcatagggagccctttgcactcctcgtgtgttggcaaacgcagttaataaagcagtgttttctgtgctg

SEQ ID NO: 29232 - DNA, 120 bp, Artificial Sequence
  ENSG00000043143_53 (sequence is synthesized)
tttaaaaagaaacagaaacatacacagggggttggtgaatggtgccgaccgcggccatcgcagttggaggctattttttgggggggatggaagagaagaggcgaaaatactccatcagca

SEQ ID NO: 29233 - DNA, 120 bp, Artificial Sequence
  ENSG00000043143_54 (sequence is synthesized)
agagtgactcgaagaggaagggctgcgagggctccaagggcagcactgagaagaaagagaaagtgaaggcggggcctgactcagtcctggggcagctggcaggcctgtccacctcattcc

SEQ ID NO: 29234 - DNA, 120 bp, Artificial Sequence
  ENSG00000043143_55 (sequence is synthesized)
aacatacacagggggttggtgaatggtgccgaccgcggccatcgcagttggaggctattttttggggggggtgagtagcgtccatggagttactttgcgcccactcctagcggcaccggc

SEQ ID NO: 29235 - DNA, 80 bp, Artificial Sequence
  ENSG00000043143_56 (sequence is synthesized)
ccactcctagcggcaccggcttaggtcctgcgggccgaccgtccccggcggggggcgtggggcctgggacgccgcgggcc

SEQ ID NO: 29236 - DNA, 120 bp, Artificial Sequence
  ENSG00000043143_57 (sequence is synthesized)
cccaggagctcccggcttcgggagcatccttcccgcgccggtccctgcagcggcgcgtagccgagggcagcgcccgtcaggggggcaccgcggagcaagatggaagagaagaggcgaaaa

SEQ ID NO: 29237 - DNA, 120 bp, Artificial Sequence
  ENSG00000043143_58 (sequence is synthesized)
cccctctcccggcccggtgcacgcgggcgctgcacgcgggggcagcatgctcggctcctggggttggaggctctgcacaaattagacagtttttttggaggggcgggggacaccctttcc

SEQ ID NO: 29238 - DNA, 120 bp, Artificial Sequence
  ENSG00000043143_59 (sequence is synthesized)
tcctggggcagctgggtgagtgagggccatgctggcctgcagacacggcaggcttgaccatcaccacgcttgcagctctgtctgccctgcggaaggccagctgcacagagtaggagactg

SEQ ID NO: 29239 - DNA, 120 bp, Artificial Sequence
  ENSG00000043143_60 (sequence is synthesized)
aacagacccaaggccccgccaccgccggctagcagcccgacagcccgcccgcctggcgagcgcaggctcttcttccagaaactgcgaggatccgagcgtactgtttgtgcaccacaagat

SEQ ID NO: 29240 - DNA, 120 bp, Artificial Sequence
  ENSG00000043143_61 (sequence is synthesized)
tgttggagtaaggagttccatctgctgtgggtaggagagttgtgctgccaggaagatctcacctagcaatgattgccctgctggaggcccaggctaaggaagaggctgccctgccaagga

SEQ ID NO: 29241 - DNA, 120 bp, Artificial Sequence
  ENSG00000043143_62 (sequence is synthesized)
atcatagagttctgccctgggtcctcccagggagttgatgatctgtagatgtgactccttcccgagactcatggagccctggggggtgaagggaaccccagaggttttccggacagactt

SEQ ID NO: 29242 - DNA, 120 bp, Artificial Sequence
  ENSG00000043143_63 (sequence is synthesized)
caaggcccacgcagtcttaagcacatacacacagtcaactacacacactgacggcacactcacacattcacagacaatttaagattagtctcagatgagcacacactaacacactcatcc

SEQ ID NO: 29243 - DNA, 120 bp, Artificial Sequence
  ENSG00000043143_64 (sequence is synthesized)
agtggtgagcttgggagagtgaggaggaattccggcctttgagccatgcttgtttggtgtcaggagggacttgggattcaggggctcagccactgccctgtctgcccaccacctagtttc

SEQ ID NO: 29244 - DNA, 120 bp, Artificial Sequence
  ENSG00000043143_65 (sequence is synthesized)
agcagacaaacccccattttggagatccctggaggcaggctggggatgagaggaatgatgcagccccctgtgtcctgcccaggtcagcatcggctgcccagagaagatggagcccatcac

SEQ ID NO: 29245 - DNA, 120 bp, Artificial Sequence
  ENSG00000043143_66 (sequence is synthesized)
gtcccaaggagggtgtgtctttggatcctggtgggggtatgtgcgtggagccaagggccactggcccccactcctacccttcaccatccaattagtaggcccagacgggggcctgcaagg

SEQ ID NO: 29246 - DNA, 120 bp, Artificial Sequence
  ENSG00000043143_67 (sequence is synthesized)
gtcctgagttgtgcgtcactaggcagagagccagaggttggaatgtgggcatcaggcctgccctcagggagctttctggttgactaggccacagcagttcaggagctgattgcatgtgaa

SEQ ID NO: 29247 - DNA, 120 bp, Artificial Sequence
  ENSG00000043143_68 (sequence is synthesized)
caggtacagagaagaagtcctagtggctctctgctggtgctgaggcaggaagggccagaagctggtgagcttccctgaaccctggtgtgcctgggagtcagttccgaagaaggcagctgt

SEQ ID NO: 29248 - DNA, 120 bp, Artificial Sequence
  ENSG00000043143_69 (sequence is synthesized)
catgcgtttagtggatctggaaatcaaaggctgaaggaagcgctgacattgatcgtatctgttaattgtggatattgccagacacagggcccttcttggagcgtatacatgttaagaagg

SEQ ID NO: 29249 - DNA, 120 bp, Artificial Sequence
  ENSG00000043143_70 (sequence is synthesized)
gcaacacttagcccccaaaacagtaccccagtgttgcgtttacatgcagcagaaatagctggatggagagagattttgagccagggtctgccaatgccacttcagcctcagggctgagct

SEQ ID NO: 29250 - DNA, 120 bp, Artificial Sequence
  ENSG00000043143_71 (sequence is synthesized)
gggcctggagaggaaagctgctgagccaccgttggagcaaatgactgaggacctctgctgcccctacttctgccccagagctgagctgacctgattgtgctttggcatcaccacccactc

SEQ ID NO: 29251 - DNA, 120 bp, Artificial Sequence
  ENSG00000043143_72 (sequence is synthesized)
tggccccaacatctagccttgccaagttcaggtgctagtcatgaccatgtagagctcaccgtgtacccaaagactgtggcagcttcctggctgctggagctttccaggccccctatcttc

SEQ ID NO: 29252 - DNA, 120 bp, Artificial Sequence
  ENSG00000043143_73 (sequence is synthesized)
tgtttattcactcagccagcattaactgagcatggactggatagggttgctgcccttgtggaatgcaccatctggagagagagaggaatgtggtatcgcagacgctacagttgctgccag

SEQ ID NO: 29253 - DNA, 120 bp, Artificial Sequence
  ENSG00000043143_74 (sequence is synthesized)
tttagggatagaagtatcagggatgtcttcccagaagcagtgatgctccaacaacatctcaggcacttggctgtggccacatatcggctgcagaaggagaagcccatgcaaggcacccac

SEQ ID NO: 29254 - DNA, 120 bp, Artificial Sequence
  ENSG00000043143_75 (sequence is synthesized)
agttgaggaagcagagggtggcaagccacgagcagtgccctcaggcacaggattccagaagcatgggcaagagcctggagggtccacatccccacattggttctggggacatttgcaact

SEQ ID NO: 29255 - DNA, 120 bp, Artificial Sequence
  ENSG00000043143_76 (sequence is synthesized)
ccttgtcttgagtgtcaacaacaggcagctctttgttcagggcagggcagggtatttggagatgactggtttgccctgtccaaagctgctgctcacactgttgagaggcttgacgcctgg

SEQ ID NO: 29256 - DNA, 120 bp, Artificial Sequence
  ENSG00000043143_77 (sequence is synthesized)
ggtgggacatgggctgtgtgcatatcggcgaggctgtctggcctggcggctggacaaagcctcctagtggagatgatatttggcctgtgaactgaatcaggtgaaggataggagaagaaa

SEQ ID NO: 29257 - DNA, 120 bp, Artificial Sequence
  ENSG00000043143_78 (sequence is synthesized)
acagcatatttggagacttagtggccagagcatgtcttggcagagaaactggaaggaggctggaatggctgcaccaggcagaaggaagactcctaaagtggggatgacgggtaacctggg

SEQ ID NO: 29258 - DNA, 120 bp, Artificial Sequence
  ENSG00000043143_79 (sequence is synthesized)
tcacatgtgcgagatcttcttgtagcctgggggaggagcttacactgtcctgagagcagtggggagcctcaggagcctgcctccagagtatctaggcattagttacatgccatgttacag

SEQ ID NO: 29259 - DNA, 120 bp, Artificial Sequence
  ENSG00000043143_80 (sequence is synthesized)
atgagattgcccaggcacagtggctcatgcctaaaatcccagcactttgggagaccacagtgggaagatcacttgaagccaggagttccagaccagcctgtctctacaaaaaaaaaaaaa

SEQ ID NO: 29260 - DNA, 120 bp, Artificial Sequence
  ENSG00000043355_0 (sequence is synthesized)
ggactcttctcctcctccacctcctcctcctcctcccgcgccgccgcctcctcctcctcttcctctccgcgccttcgctacgcgcccggccgcccgaggcagatccaggcggcggcggag

SEQ ID NO: 29261 - DNA, 80 bp, Artificial Sequence
  ENSG00000043355_1 (sequence is synthesized)
cgccaccaccgccgcctgcgcctggagcccggtggccgccggacgcaccgcgcggatcgggagcgggagtcgaggcggcg

SEQ ID NO: 29262 - DNA, 120 bp, Artificial Sequence
  ENSG00000043355_2 (sequence is synthesized)
gcgctggccatgctcctggacgcgggtccgcagttcccggccatcggggtgggcagcttcgcgcgccaccatcaccactccgccgcggcggcggcggcggctgccgccgagatgcaggac

SEQ ID NO: 29263 - DNA, 120 bp, Artificial Sequence
  ENSG00000043355_3 (sequence is synthesized)
cggcggcggcggctgccgccgagatgcaggaccgtgaactgagcctggcggcggcgcagaacggcttcgttgactccgccgccgcgcacatgggagccttcaagctcaacccgggcgcgc

SEQ ID NO: 29264 - DNA, 120 bp, Artificial Sequence
  ENSG00000043355_4 (sequence is synthesized)
ccttcaagctcaacccgggcgcgcacgagctgtccccgggccagagctcggcgttcacgtcgcagggccccggcgcctaccccggctccgctgcggctgccgctgcggccgcagcgctcg

SEQ ID NO: 29265 - DNA, 120 bp, Artificial Sequence
  ENSG00000043355_5 (sequence is synthesized)
cctactctgggccgcccttcaactccacccgggacttcctgttccgcagccgcggcttcggggactcggcgccgggcggcgggcagcacgggctgttcgggccgggcgcgggcggcctgc

SEQ ID NO: 29266 - DNA, 120 bp, Artificial Sequence
  ENSG00000043355_6 (sequence is synthesized)
accacgcgcactcggacgcgcagggccacctcctcttcccgggcctgccagagcagcacgggccgcacggctcgcagaatgtgctcaacgggcagatgcgcctcgggctgcccggcgagg

SEQ ID NO: 29267 - DNA, 120 bp, Artificial Sequence
  ENSG00000043355_7 (sequence is synthesized)
tgttcgggcgctcggagcaataccgccaggtggccagcccgcggaccgacccctactcggcggcgcaactccacaaccagtacggccccatgaatatgaacatgggtatgaacatggcag

SEQ ID NO: 29268 - DNA, 120 bp, Artificial Sequence
  ENSG00000043355_8 (sequence is synthesized)
accaccaccaccaccaccaccaccaccccggtgcctttttccgctatatgcggcagcagtgcatcaagcaggagctaatctgcaagtggatcgaccccgagcaactgagcaatcccaaga

SEQ ID NO: 29269 - DNA, 120 bp, Artificial Sequence
  ENSG00000043355_9 (sequence is synthesized)
gcaatcccaagaagagctgcaacaaaactttcagcaccatgcacgagctggtgacacacgtctcggtggagcacgtcggcggcccggagcagagcaaccacgtctgcttctgggaggagt

SEQ ID NO: 29270 - DNA, 120 bp, Artificial Sequence
  ENSG00000043355_10 (sequence is synthesized)
gtccgcgcgagggcaagcccttcaaggccaaatacaaactggtcaaccacatccgcgtgcacacaggcgagaaacccttcccctgccccttcccgggctgtggcaaagtcttcgcgcgct

SEQ ID NO: 29271 - DNA, 120 bp, Artificial Sequence
  ENSG00000043355_11 (sequence is synthesized)
ccgagaacctcaagatccacaaaaggacccacacaggggagaagccgttccagtgtgagtttgagggctgcgaccggcgcttcgccaacagcagcgacaggaagaagcacatgcacgtcc

SEQ ID NO: 29272 - DNA, 120 bp, Artificial Sequence
  ENSG00000043355_12 (sequence is synthesized)
catgagtcctccccgcagggctctgaatcctccccggccgccagctccggctatgagtcgtccacgcccccggggctggtgtcccccagcgccgagccccagagcagctccaacctgtcc

SEQ ID NO: 29273 - DNA, 120 bp, Artificial Sequence
  ENSG00000043355_13 (sequence is synthesized)
agtggcgggggcggcggcggggcgggcggcgggggcggcggcagctctggcgggggcagcgggacagccgggggtcacagcggcctctcctccaacttcaatgaatggtacgtgtgacgg

SEQ ID NO: 29274 - DNA, 120 bp, Artificial Sequence
  ENSG00000043355_14 (sequence is synthesized)
gtcggggcctctctccctctccctgtccccaccccagcgcagcagccctccccgcagctagcagcgagggcaccttgtgatcatgttgttaaaattatgaatctgatttttatgatgatg

SEQ ID NO: 29275 - DNA, 120 bp, Artificial Sequence
  ENSG00000043355_15 (sequence is synthesized)
aaaattttaccagcagaaggattttttaaagttttttttttttttttaataataatctaggcatgaagagcaaaaatatcccttccggagtctttgaagctgaaaatataaaacaaataa

SEQ ID NO: 29276 - DNA, 120 bp, Artificial Sequence
  ENSG00000043355_16 (sequence is synthesized)
aaaataaaaaaataaaaacccacaaaaatgttgaaccaaacctccctgctaatctccatgcccacgttctttcccaccctgttcccagtcttctgacaaactgtgtacatagcggactcc

SEQ ID NO: 29277 - DNA, 120 bp, Artificial Sequence
  ENSG00000043355_17 (sequence is synthesized)
tcctttctcctccgaggtggttttaaaggctttttggtgtatagaagtttgtccatttgtaaaactccggattgcgttcctccccgccttccgccccttcccttccctaaagtgatgggc

SEQ ID NO: 29278 - DNA, 120 bp, Artificial Sequence
  ENSG00000043355_18 (sequence is synthesized)
tttctcttttctctttttagtttacccggtttctttttaagtaatgtggaagaaaatggtttattttgtattgtggtattgaatattgtgttcctttttatgaggcaacctgattgtaaa

SEQ ID NO: 29279 - DNA, 120 bp, Artificial Sequence
  ENSG00000043355_19 (sequence is synthesized)
cttcatgtaactatagactggaaaaaatgagccgtgccaaagtctcccttctgtttcttcagcacattgacccatagcacacacatacacaccaccaccaacaacgcttgtgaatgtatt

SEQ ID NO: 29280 - DNA, 120 bp, Artificial Sequence
  ENSG00000043355_20 (sequence is synthesized)
tttctgttagctgggtttacatgtgatgttttagtgcttttgcaagttcaatttgttagttcctgtatgaaagattgtgggggaaaaataaacgtcgtgccgttagctttttccgtaata

SEQ ID NO: 29281 - DNA, 120 bp, Artificial Sequence
  ENSG00000043355_21 (sequence is synthesized)
acacccttccttctgtaaatacccgttaccatatttatccatttgtaattaaattatggtattaacttgctacagaggaaacaatatttataaagaatgtttcttaactataaatatgta

SEQ ID NO: 29282 - DNA, 120 bp, Artificial Sequence
  ENSG00000043355_22 (sequence is synthesized)
caattgtgggcataaactgtttcagattttttatttgaaggttttaagtggtttgatcatttcttgtgatgttttgagagtaatgcatacagaaatataataaaatgtgttgaaactgca

SEQ ID NO: 29283 - DNA, 120 bp, Artificial Sequence
  ENSG00000043355_23 (sequence is synthesized)
tgaaaggctttgctgactcccccaaccctcgcccaccagcttgtgcctctccgcagtcactagatgctgccttatctctaatatttaccttttcttcaacttatttttttaaagacggga

SEQ ID NO: 29284 - DNA, 120 bp, Artificial Sequence
  ENSG00000043355_24 (sequence is synthesized)
tgatcttagttctgccgcagaggggatcggactggtttgagggacccagccccctcaggtccttctccctcgccgcggcccagccccctcgcagcctgagtgggggctctgcaggctctg

SEQ ID NO: 29285 - DNA, 120 bp, Artificial Sequence
  ENSG00000043462_0 (sequence is synthesized)
gggatctggctacgccagaaaagacatcggctccaacaggggtgttccacagggtagctgggagttggaagagccaagaacgcctccgagctctggatttgagcttctctgcccatgggt

SEQ ID NO: 29286 - DNA, 120 bp, Artificial Sequence
  ENSG00000043462_1 (sequence is synthesized)
gaagcgcccatgctcagcttgtgagcttcttcccgggagagcagccatggcactgaggaatgtgccctttcgctcagaggtcctgggctgggaccccgacagccttgctgactatttcaa

SEQ ID NO: 29287 - DNA, 120 bp, Artificial Sequence
  ENSG00000043462_2 (sequence is synthesized)
gaagctcaactataaggactgtgagaaggcagtgaagaagtaccacatcgatggggctcgcttcttgaacctgacagaaaatgacatccagaagttccccaagctccgggtgccgattct

SEQ ID NO: 29288 - DNA, 120 bp, Artificial Sequence
  ENSG00000043462_3 (sequence is synthesized)
cagtaagttaagtcaggaaatcaacaagaacgaagagaggaggagcatcttcacacgcaaaccccaagtcccgcggtttcctgaagagacagaaagccacgaagaggacaatgggggctg

SEQ ID NO: 29289 - DNA, 120 bp, Artificial Sequence
  ENSG00000043462_4 (sequence is synthesized)
gtcgtcctttgaagaagacgattatgaaagtcccaatgatgaccaggatggggaggatgatggagactatgagtcccccaatgaggaggaagaggcacccgtggaagatgacgcggatta

SEQ ID NO: 29290 - DNA, 120 bp, Artificial Sequence
  ENSG00000043462_5 (sequence is synthesized)
tgagccgccaccctccaatgacgaggaagctctgcagaactccatcctgcctgccaagcctttccccaactccaactccatgtacatcgaccggcccccctctgggaaaaccccccagca

SEQ ID NO: 29291 - DNA, 120 bp, Artificial Sequence
  ENSG00000043462_6 (sequence is synthesized)
gcctcctgtgcccccccagagaccgatggccgccctcccgcccccaccagccggccggaatcactcgccactgcccccaccccagaccaaccacgaagaacccagcagaagcagaaacca

SEQ ID NO: 29292 - DNA, 120 bp, Artificial Sequence
  ENSG00000043462_7 (sequence is synthesized)
caaaacggcaaagctccctgctccttcaatagacagaagcacgaaacctcccctagatcgttcattagctccgtttgatagagaacccttcacactaggaaagaaaccaccattttctga

SEQ ID NO: 29293 - DNA, 120 bp, Artificial Sequence
  ENSG00000043462_8 (sequence is synthesized)
caagccctcgattccagcgggaaggtcactcggggagcatttacccaagattcaaaagcctcctttaccaccgaccacggaaagacatgaaaggagcagccccctgccagggaagaagcc

SEQ ID NO: 29294 - DNA, 120 bp, Artificial Sequence
  ENSG00000043462_9 (sequence is synthesized)
acctgtgccaaagcatggatggggaccagacagaagagagaatgatgaagatgatgtgcatcagagacctttgccccagccagcactacttcctatgagctccaacactttcccttcaag

SEQ ID NO: 29295 - DNA, 120 bp, Artificial Sequence
  ENSG00000043462_10 (sequence is synthesized)
atctactaagccaagtcccatgaaccctctcccatcctctcacatgcctggagcattctcagaaagtaacagcagttttccacagagtgcctccctgccaccatacttctctcaaggccc

SEQ ID NO: 29296 - DNA, 120 bp, Artificial Sequence
  ENSG00000043462_11 (sequence is synthesized)
tagcaacagaccacctatcagagccgaaggcagaaacttccccttgccacttccaaacaaacctcggcccccatcccccgcggaggaagagaattcattaaatgaagagtggtacgtttc

SEQ ID NO: 29297 - DNA, 120 bp, Artificial Sequence
  ENSG00000043462_12 (sequence is synthesized)
ttatattacccgaccagaggcagaagctgctcttagaaagataaaccaggatggcacatttctggtcagagacagctctaaaaaaacaacaaccaatccatatgtcctcatggtgttgta

SEQ ID NO: 29298 - DNA, 120 bp, Artificial Sequence
  ENSG00000043462_13 (sequence is synthesized)
caaagataaagtttacaacatccagatccgttatcagaaggaaagtcaagtttacttgttgggaactggactccgagggaaagaggactttctgtctgtgtcagatattattgactactt

SEQ ID NO: 29299 - DNA, 120 bp, Artificial Sequence
  ENSG00000043462_14 (sequence is synthesized)
caggaaaatgccacttctgctcattgatgggaaaaaccgaggttccagataccagtgcacattaacgcatgctgcagggtacccatagcaagttatagccgagcaaatgaaccgtcctcc

SEQ ID NO: 29300 - DNA, 120 bp, Artificial Sequence
  ENSG00000043462_15 (sequence is synthesized)
tgcctctgttgccaacacgagatcaatcagccttggtcaatggacaaacacttaggactgaactgaacccctccccatgaacacaagggttttatcctttcctttaaaaacagtgtttga

SEQ ID NO: 29301 - DNA, 120 bp, Artificial Sequence
  ENSG00000043462_16 (sequence is synthesized)
aatgaagactgtcaactatcccataatttatttattcttcttcaatgtttgtaaagtgcatgagtcatgttcacacttgaagtctagtagtgcactgtaataattcattttttaaaagat

SEQ ID NO: 29302 - DNA, 120 bp, Artificial Sequence
  ENSG00000043462_17 (sequence is synthesized)
acacagctacagaaacaatttggggcaagttttaaaacactgaaacagtaatagttattggtgtcacataaaactgatttgttttttacagccaaacctctgtcagtcagaggcattcat

SEQ ID NO: 29303 - DNA, 120 bp, Artificial Sequence
  ENSG00000043462_18 (sequence is synthesized)
tagttttatacatgtaatttgaaaatcactaaacctcgttttctcagcagcaataatttaagaggcttcaaaaatataatttcactcttatttagtattttttcctgggggcatttttac

SEQ ID NO: 29304 - DNA, 120 bp, Artificial Sequence
  ENSG00000043462_19 (sequence is synthesized)
gtaatttttttatgaaaagacaaatgcatgttgagataacttctgggattaaaatagtcttttgctttacttttttggtttcctaaaacaactttattgacttttagtccatactgttat

SEQ ID NO: 29305 - DNA, 120 bp, Artificial Sequence
  ENSG00000043462_20 (sequence is synthesized)
atttttgtcttaaagaaaatttaaactacaaataccaaaagaaaacattttaaatttagggatgagactttggtgtatcgtgggtctaggtttaatgaacacatctggggttaagttggc

SEQ ID NO: 29306 - DNA, 120 bp, Artificial Sequence
  ENSG00000043462_21 (sequence is synthesized)
atttcttcacatctccacacccacaccaaccatcacagccccccaccaaccttctcccaaccccaaaagcattgtccagggatatagattttaccaaaggcttcctgggaagacgaggga

SEQ ID NO: 29307 - DNA, 120 bp, Artificial Sequence
  ENSG00000043462_22 (sequence is synthesized)
gcaacactttagattaaatgtgatcagactttcctattagatatggctcttctgtctcttgttatccccctgacagctctgccataaagtcccttctcctcatccttcccaaacaggctg

SEQ ID NO: 29308 - DNA, 120 bp, Artificial Sequence
  ENSG00000043462_23 (sequence is synthesized)
tataagtgctttgaggtaattaaactctttcctccagtttacaaatatcacttaacaaaaaatataggcattcagccagattaaaaaactggtattcagccaaatagtgacaatcagttg

SEQ ID NO: 29309 - DNA, 120 bp, Artificial Sequence
  ENSG00000043462_24 (sequence is synthesized)
ttcttcaagtttttccctttgggaccttggttgttattgcacaacttttattagcaacaatttttggcgtctctgcttaatctacaagttttcgaaatggaaaagagtatcttgcagctt

SEQ ID NO: 29310 - DNA, 120 bp, Artificial Sequence
  ENSG00000043462_25 (sequence is synthesized)
cattttcatgagctaataaaaggggtattggaaggaatctaagaagtcaccattttaaaactgatgatatgttaaaataaggagtatgcagaaggtagagacttttaactgatgataaaa

SEQ ID NO: 29311 - DNA, 120 bp, Artificial Sequence
  ENSG00000043462_26 (sequence is synthesized)
atggtgtttcacaaaatctcatccttaacaaccagaagttctcagtttagggtccaaaacttgggagtttaaggctgaaaaccctgcattcatttacacgtctacacaacgggctattca

SEQ ID NO: 29312 - DNA, 120 bp, Artificial Sequence
  ENSG00000043462_27 (sequence is synthesized)
gcaagtatttacttagtggctcttctgtgttaaacaagtgagctaggtacaaggtagtaaggatagcatacaccataggttctagtatcgagtaagctccacttgtcttgctttgccgta

SEQ ID NO: 29313 - DNA, 120 bp, Artificial Sequence
  ENSG00000043462_28 (sequence is synthesized)
ttctatctttacaattcaaaaatatctaaaatgaaggacctgatagatttcaaagcaactatttggtagcgaatcatgtttataaaacaaaccaaagctcattttaagtctattagtgga

SEQ ID NO: 29314 - DNA, 120 bp, Artificial Sequence
  ENSG00000043462_29 (sequence is synthesized)
aagtgccatcaggattaagatgttctgttccatggctatgactgaaatcaatgttgggaagctaatgttttcatgactagcattctctctctgttcaagcaccgacaactccttttggct

SEQ ID NO: 29315 - DNA, 120 bp, Artificial Sequence
  ENSG00000043462_30 (sequence is synthesized)
gggccttgcctcttttggccacagaccttctatatgaccccaggtgcatcagtcacagttgctcagaaccctgctcagtgataaacatcttactaaagctgggtcaatcagggtcactct

SEQ ID NO: 29316 - DNA, 120 bp, Artificial Sequence
  ENSG00000043462_31 (sequence is synthesized)
ctggaatgttaaacatgaagcctgagacaagatctctcttttatctggggtccccaaaggcaatgctgtacacttggagctgcctgctgccctgcaactactcccatttaccaattatct

SEQ ID NO: 29317 - DNA, 120 bp, Artificial Sequence
  ENSG00000043462_32 (sequence is synthesized)
ggaagaaccagtctacaatagaagacaacgaggccaacacacaaaaacacagtaaaagtatggacaaattagtgggatccctgaaatctattccaactatgtgcttccaagtcacatgac

SEQ ID NO: 29318 - DNA, 120 bp, Artificial Sequence
  ENSG00000043462_33 (sequence is synthesized)
tcaataaatgcttcagctggttgagttgtgcttggcgttcactaccaggagagttctgattaataaaaactcattccatcaattaataatttagtagctctctttcaacctgagccaaat

SEQ ID NO: 29319 - DNA, 120 bp, Artificial Sequence
  ENSG00000043462_34 (sequence is synthesized)
tcaagcataagctaaaggataagcagtgacccatggccaatttcctatgtcatacacttgccattagtgacgtaagttaagccattcttcaaaacattaaacagccttcaagaacatgaa

SEQ ID NO: 29320 - DNA, 120 bp, Artificial Sequence
  ENSG00000043462_35 (sequence is synthesized)
gtccagggcagctttgtgataaggagccaggatggagccaagtgaagcggggctctaacatgatgccagcacacccacccagggcccagaaaaggtgctctgcacagggccagacaggaa

SEQ ID NO: 29321 - DNA, 120 bp, Artificial Sequence
  ENSG00000043462_36 (sequence is synthesized)
atagttttggctttgggagccatgcactctctgtctcagctactcaactctgctactggagcacaaaagcagccacagacaatgagcaaacaaacaggcttggctttgcgcccataaacc

SEQ ID NO: 29322 - DNA, 120 bp, Artificial Sequence
  ENSG00000043462_37 (sequence is synthesized)
ttcatttgcaaacacagagggtaggctgcacgtggccctaggctgtactttgctgactgcacttcacccactgttaccaacccccacccactacccccccgtctccaaaaatggacactc

SEQ ID NO: 29323 - DNA, 120 bp, Artificial Sequence
  ENSG00000043462_38 (sequence is synthesized)
ctagaaatctactctcaagtagcttttctcatggacttaagtccccatcggtgacacggagggaaaagaacttcagaaccaactgttggccctgaaaagacctcaaagagggtgcaatcc

SEQ ID NO: 29324 - DNA, 120 bp, Artificial Sequence
  ENSG00000043462_39 (sequence is synthesized)
actccaactccatgtacatcggtaagggcccgtttccggattttctggcccgagcagcccaaaggcaagctcgccactgctgcatggaaggctgatgccccagcttgcccatgtagcaga

SEQ ID NO: 29325 - DNA, 120 bp, Artificial Sequence
  ENSG00000043462_40 (sequence is synthesized)
aagctctgggtctcgatatctgctcggcttcttaacagctatgtggctttgtacaagtaactctgtctctctgggcctcaatttcctcatctgtgaaataggataataaatgtacagacc

SEQ ID NO: 29326 - DNA, 120 bp, Artificial Sequence
  ENSG00000043462_41 (sequence is synthesized)
agaagtatgtttgtttagcagagatgttctgacaggctcaattaacttgcaataaaaggaacaaaggaaagtcattattgccaactcatggctatttaaagctatcctgatttggtatga

SEQ ID NO: 29327 - DNA, 120 bp, Artificial Sequence
  ENSG00000043462_42 (sequence is synthesized)
ggagaagggagtagtttaaaggagtccttaccaattaattctattttaatattagatctttacagtattaatattatgtagcaataatttattgaatggaaatttaaagtacaggacaat

SEQ ID NO: 29328 - DNA, 120 bp, Artificial Sequence
  ENSG00000043462_43 (sequence is synthesized)
caaaacagtagtttagcaaatatcagaaaaaagaaaagaaaagagaacatctgcattcaattttgctcaagggtctgatgaaggaaagactatctagagatcacagggttttaagaaggg

SEQ ID NO: 29329 - DNA, 120 bp, Artificial Sequence
  ENSG00000043462_44 (sequence is synthesized)
tgaatttcatggcatgtggatgttttctgactttggatgtggaaaagaaagtttagggaattaactcacaggaatactaggaagatatatcttgagttaaccaataaagtattttatttc

SEQ ID NO: 29330 - DNA, 120 bp, Artificial Sequence
  ENSG00000043462_45 (sequence is synthesized)
tcctggccttttatccactcaaccacccattatttattactgaacaaaagattccgtttttatcaggaggctttaacgagattgacttggaaatttctttgatacaatctctgttgcctt

SEQ ID NO: 29331 - DNA, 120 bp, Artificial Sequence
  ENSG00000043462_46 (sequence is synthesized)
tcttaataacaaaataactcatgacacatgggatatgtagctgtttggagaactgaatgttcgttgaatgacaggttttgcactcaagaagctgcaaagtgcaactgacatgtttgtcag

SEQ ID NO: 29332 - DNA, 120 bp, Artificial Sequence
  ENSG00000043462_47 (sequence is synthesized)
atccctagaggcttgtctactactcttacaagcaacaaaaatattgacttttactgctcccataataacaggaatttgtctttttaggatggcacatttctggtcagagacagctctaaa

SEQ ID NO: 29333 - DNA, 120 bp, Artificial Sequence
  ENSG00000043462_48 (sequence is synthesized)
atgctcactctgctgcctgcagaaaagagcttgcgtggcagagtctagaacagggagctcagataggaggctactgcggtagttcagtgaagaaatggacatggatgtttgtaggcagaa

SEQ ID NO: 29334 - DNA, 120 bp, Artificial Sequence
  ENSG00000043462_49 (sequence is synthesized)
catgaagatgaggaaaagtgagcagatccagacaggttttgggagtgccggctcttgctgatgtattggaagtgcttcctaacgtttggatctttatgcagccactgcccccaccccaga

SEQ ID NO: 29335 - DNA, 120 bp, Artificial Sequence
  ENSG00000043462_50 (sequence is synthesized)
caactctatgggtgatctgggagcagaggtgggaatggggagtagtgtgagtgggggctgggtcagttctatgtcattgtcggcttgaaataagaaagcaagtaggaaggatgagggcaa

SEQ ID NO: 29336 - DNA, 120 bp, Artificial Sequence
  ENSG00000043462_51 (sequence is synthesized)
gggcaggatgtggggaacagaagttacatgaagagctggaaaacagaagtcacagatccagcccagctggtgacctggatgctcttgccaaaaacaagcccaactctggccaatgttttc

SEQ ID NO: 29337 - DNA, 120 bp, Artificial Sequence
  ENSG00000043462_52 (sequence is synthesized)
aaaacttgtaaatcatttctgaaatttataaggtttccagctgacaattttctgccaagttaacatttcaaaaatgaaaaacaaaatcaatgtgtattttagagtatcatctagatctgc

SEQ ID NO: 29338 - DNA, 120 bp, Artificial Sequence
  ENSG00000043462_53 (sequence is synthesized)
gcccctttgtaaatggattctatggtggttaagtcatctagaaacaccctgggagcaaggttccatcctactacttcctaattacatctgatctgctttatttttgtgtcctctttatac

SEQ ID NO: 29339 - DNA, 120 bp, Artificial Sequence
  ENSG00000043462_54 (sequence is synthesized)
accttaaaagggaggcacagaactgtttttgccctactttttgatctgcatttgtcccctgaatcccaggggtctggaagatggtgtccaacgaggggaaggggttccctcccctgctct

SEQ ID NO: 29340 - DNA, 120 bp, Artificial Sequence
  ENSG00000043514_0 (sequence is synthesized)
agactgccataagatggcgtccgtggcggctgcacgagcagttcccgtgggcagtgggctcaggggcctgcaacggaccctacctcttgtagtgattctcggggccacgggcaccggcaa

SEQ ID NO: 29341 - DNA, 120 bp, Artificial Sequence
  ENSG00000043514_1 (sequence is synthesized)
atccacgctggcgttgcagctaggccagcggctcggcggtgagatcgtcagcgctgactccatgcaggtctatgaaggcctagacatcatcaccaacaaggtttctgcccaagagcagag

SEQ ID NO: 29342 - DNA, 120 bp, Artificial Sequence
  ENSG00000043514_2 (sequence is synthesized)
aatctgccggcaccacatgatcagctttgtggatcctcttgtgaccaattacacagtggtggacttcagaaatagagcaactgctctgattgaagatatatttgcccgagacaaaattcc

SEQ ID NO: 29343 - DNA, 120 bp, Artificial Sequence
  ENSG00000043514_3 (sequence is synthesized)
tattgttgtgggaggaaccaattattacattgaatctctgctctggaaagttcttgtcaataccaagccccaggagatgggcactgagaaagtgattgaccgaaaagtggagcttgaaaa

SEQ ID NO: 29344 - DNA, 120 bp, Artificial Sequence
  ENSG00000043514_4 (sequence is synthesized)
ggaggatggtcttgtacttcacaaacgcctaagccaggtggacccagaaatggctgccaagctgcatccacatgacaaacgcaaagtggccaggagcttgcaagtttttgaagaaacagg

SEQ ID NO: 29345 - DNA, 120 bp, Artificial Sequence
  ENSG00000043514_5 (sequence is synthesized)
aatctctcatagtgaatttctccatcgtcaacatacggaagaaggtggtggtccccttggaggtcctctgaagttctctaacccttgcatcctttggcttcatgctgaccaggcagttct

SEQ ID NO: 29346 - DNA, 120 bp, Artificial Sequence
  ENSG00000043514_6 (sequence is synthesized)
agatgagcgcttggataagagggtggatgacatgcttgctgctgggctcttggaggaactaagagattttcacagacgctataatcagaagaatgtttcggaaaatagccaggactatca

SEQ ID NO: 29347 - DNA, 120 bp, Artificial Sequence
  ENSG00000043514_7 (sequence is synthesized)
acatggtatcttccaatcaattggcttcaaggaatttcacgagtacctgatcactgagggaaaatgcacactggagactagtaaccagcttctaaagaaaggtattgaggctctgaaaca

SEQ ID NO: 29348 - DNA, 120 bp, Artificial Sequence
  ENSG00000043514_8 (sequence is synthesized)
agtaactaagagatatgcccggaaacaaaaccgatgggttaaaaaccgttttttgagcagacctggtcccattgtcccccctgtctatggcttagaggtatctgatgtctcgaagtggga

SEQ ID NO: 29349 - DNA, 120 bp, Artificial Sequence
  ENSG00000043514_9 (sequence is synthesized)
agagtctgttcttgaacctgctcttgaaatcgtgcaaagtttcatccagggccacaagcctacagccactccaataaagatgccatacaatgaagctgagaacaagagaagttatcacct

SEQ ID NO: 29350 - DNA, 120 bp, Artificial Sequence
  ENSG00000043514_10 (sequence is synthesized)
gtgtgacctctgtgatcgaatcatcattggggatcgcgaatgggcagcgcacataaaatccaaatcccacttgaaccaactgaagaaaagaagaagattggactcagatgctgtcaacac

SEQ ID NO: 29351 - DNA, 120 bp, Artificial Sequence
  ENSG00000043514_11 (sequence is synthesized)
catagaaagtcagagtgtttccccagaccataacaaagaacctaaagagaagggatccccagggcagaatgatcaagagctgaaatgcagcgtttaagagacatgtccagtggcctttgg

SEQ ID NO: 29352 - DNA, 120 bp, Artificial Sequence
  ENSG00000043514_12 (sequence is synthesized)
aaaggtggtggggatccagttcaggagggaggggtatgtttgtctcccagtctgggcaaaggagtgctatgcggaattctctgcatagcagaaaagctcccaccattttcttttgatgtg

SEQ ID NO: 29353 - DNA, 120 bp, Artificial Sequence
  ENSG00000043514_13 (sequence is synthesized)
gttttaaagtctcacgttctctataatagaaacagcaggtcttgtcagctccttgtgtggctgatgtgtctggaaatgatgtagttcaggaaagcattttttttttctttgaaccttaaa

SEQ ID NO: 29354 - DNA, 120 bp, Artificial Sequence
  ENSG00000043514_14 (sequence is synthesized)
ggttctattattaaaagcagcacagattccacatttttatacatgaggatcttctttgtggtgaataccaggattgactgcatccctttaaagaagttttatgtccctgactctggctaa

SEQ ID NO: 29355 - DNA, 120 bp, Artificial Sequence
  ENSG00000043514_15 (sequence is synthesized)
aattatctaatttccagatgcttttgtagatgactgaagtatttgtgagccacatattgggagttctagatttgagtgaatggcaggaaagggccatctccattgagatgattaagtgaa

SEQ ID NO: 29356 - DNA, 120 bp, Artificial Sequence
  ENSG00000043514_16 (sequence is synthesized)
ccaaactagttctcagaattctacagagaaggagggaatcagactgaggaagctgtgacataggacttgaagaccaaagactttgaaatttgcgagctgctcatgtgtgagttattatca

SEQ ID NO: 29357 - DNA, 120 bp, Artificial Sequence
  ENSG00000043514_17 (sequence is synthesized)
ctgctgtctttctattgagttacaaatctatatttttattgaagtttaaataaagaaaaaatttacaagagcctctttgatccttaaaaagatatacaagtccatgcctagtttatacac

SEQ ID NO: 29358 - DNA, 120 bp, Artificial Sequence
  ENSG00000043514_18 (sequence is synthesized)
agtatgctctgttatcaatgtgatagctttttctcaaatttgacactttttgtagatcatgctgtctgttcatttatgtagcgggtgtttatttaacacgttatagtccttgaagacatc

SEQ ID NO: 29359 - DNA, 120 bp, Artificial Sequence
  ENSG00000043514_19 (sequence is synthesized)
tagagagggtcttttattggagatctattacttccaattgaagccctctttctggagtgacctgagctgccagcaatgttaaacagatacttatttatatataacatcaaatatagcatt

SEQ ID NO: 29360 - DNA, 120 bp, Artificial Sequence
  ENSG00000043514_20 (sequence is synthesized)
tttagggtataattcagcagcattaactacattcacaatgttgtgcaatcgttgccactatttccaaaacgtttttgtcactccaaacaaactttgtgccctttaagcgttaactcccca

SEQ ID NO: 29361 - DNA, 120 bp, Artificial Sequence
  ENSG00000043514_21 (sequence is synthesized)
tttgtttgtgcagaatctactctatgagaggccctgaattaggctaaagggaatgcagagatgagatgtggttcttgccttcagggagcttataaataattgcatgtgtacacaaacacc

SEQ ID NO: 29362 - DNA, 120 bp, Artificial Sequence
  ENSG00000043514_22 (sequence is synthesized)
aatccaggcaagacagtatcaaaggccgtaagagctgtgtagaatttcagtttagaaggaagggaagggatcatggaaggaggagcatttctgctgcaccttgaaaagcaattcttgata

SEQ ID NO: 29363 - DNA, 120 bp, Artificial Sequence
  ENSG00000043514_23 (sequence is synthesized)
aatgttttgtttcctatgcatataagacttcatagaggagaaggtagagtaaaaaaactatctaacttgattgacctttttaaacagtgctgaattccagagcctcacccacttttaact

SEQ ID NO: 29364 - DNA, 120 bp, Artificial Sequence
  ENSG00000043514_24 (sequence is synthesized)
gatttgaatctcaaaaataaatttattctctgggcaaagaagtttattaactactttaggacctaacaaggtgggaagccacatcttcccggtgggagtggagatgagtacttactgtga

SEQ ID NO: 29365 - DNA, 120 bp, Artificial Sequence
  ENSG00000043514_25 (sequence is synthesized)
gccaagcagtgccaagtcgtttttatatgttatcttctcacacagccctgggagggagatgctgtttcctttgctgttaaccagggaggaaactaaggctcagcaatggagtacagctag

SEQ ID NO: 29366 - DNA, 120 bp, Artificial Sequence
  ENSG00000043514_26 (sequence is synthesized)
caagcggtagagctggaattgaggtgaggctggtagactcaagctattaagcactgtgttaagctggcagtttgtagggaagaacctttagtttctctgaaatattcttcgttcaagttg

SEQ ID NO: 29367 - DNA, 120 bp, Artificial Sequence
  ENSG00000043514_27 (sequence is synthesized)
ctaagtatgttttaaagcctaaaaaggtttcagtagacaagcaggaaaaactagttttaataattgtacgtcaaaaagcttttaatccttccatctgaaatacctggagcagtaacttct

SEQ ID NO: 29368 - DNA, 120 bp, Artificial Sequence
  ENSG00000043514_28 (sequence is synthesized)
cattgaactcattgttatctctatggcaattggaaatcaggccttttttaccaaaaaaaaagtgtctaatatttatgaagcacttactaagtgtaaggcagtgtggttgagcccactgtt

SEQ ID NO: 29369 - DNA, 120 bp, Artificial Sequence
  ENSG00000043514_29 (sequence is synthesized)
catattcttagaaattgtaaattcagccaaatgaaattcctttatcagcagcaaagagcctgggaaaggcagaacactcactagaaatctgcctggtgctctggtctgaagcattgccct

SEQ ID NO: 29370 - DNA, 120 bp, Artificial Sequence
  ENSG00000043514_30 (sequence is synthesized)
gagtagatttccccttttgtgcctgctcccctatgaatgacttcgctgttgagtgtagggaaggaaagtaatttgtcttgtggtggtcgtaaatgtagagatgaaagaattctttatctc

SEQ ID NO: 29371 - DNA, 120 bp, Artificial Sequence
  ENSG00000043514_31 (sequence is synthesized)
ttgtatggatggggaaactgaggcctaaaacatggatgttccagtcacagagcaaggcaaagctgggacaaaccttagatcacctttcttactctattactaaatctcataccaaatctc

SEQ ID NO: 29372 - DNA, 120 bp, Artificial Sequence
  ENSG00000043514_32 (sequence is synthesized)
atttgagagctgaaaagtaccatagagctttgggctatttgctcagcctggagtgagaatgaggaatgccattttgtaccatctggccatagcaatcccaaggcaagcagagccctccag

SEQ ID NO: 29373 - DNA, 120 bp, Artificial Sequence
  ENSG00000043514_33 (sequence is synthesized)
tccaggtatccagagcctccagtccatcacaccagcagtgctatctaaatggctttggcaattaattccaatactcagtgagctattaggttcatctgcttctgtcagtaaaaatcttga

SEQ ID NO: 29374 - DNA, 120 bp, Artificial Sequence
  ENSG00000043514_34 (sequence is synthesized)
ttaggctttagatacttctcacagttcaggcagtgctgttgtaagtgggtagaaagtactttgattctgaagagagatctagacttgaaaatactttgcttgattcttagggctaagcaa

SEQ ID NO: 29375 - DNA, 120 bp, Artificial Sequence
  ENSG00000043514_35 (sequence is synthesized)
gagaacagctcatctgtattccaggaatatggcttgatccttcctaactctcagtaattttttgtcctctcttagctctctttagttccaaagaggatttttttgcttaaaacaaaacaa

SEQ ID NO: 29376 - DNA, 79 bp, Artificial Sequence
  ENSG00000043514_36 (sequence is synthesized)
tttagttccaaagaggatttttttgcttaaaacaaaacaaaacacccagtataacattaaaaaataacagttaactgag

SEQ ID NO: 29377 - DNA, 120 bp, Artificial Sequence
  ENSG00000043514_37 (sequence is synthesized)
aggcaacatggtgagacccagtcagcacaaatatatacatacatacatacttacatatatatatatgtatgcatgccgggtatggtgggtcatgcctatagtcccagctacgtggaaggc

SEQ ID NO: 29378 - DNA, 90 bp, Artificial Sequence
  ENSG00000043514_38 (sequence is synthesized)
tatggtgggtcatgcctatagtcccagctacgtggaaggctcaggtaggaggatggcttgggcctgggagattgaggcttcagtgaaatg

SEQ ID NO: 29379 - DNA, 120 bp, Artificial Sequence
  ENSG00000043514_39 (sequence is synthesized)
acaaccccctcccccaaacacacatgcatgaaatcaaccttttatgaatgcagtgacttgtcaatatccctagcacctagacacagtcaaatatttgttgaatcaattgcatgaaagcat

SEQ ID NO: 29380 - DNA, 120 bp, Artificial Sequence
  ENSG00000043514_40 (sequence is synthesized)
aaaaactaagtaggtctctacataagtgatctgcttcaattgttaaatactttttaaccaggatgaagaaattttgggatagccaccagcaggaatttctgtatttgattatcacctact

SEQ ID NO: 29381 - DNA, 120 bp, Artificial Sequence
  ENSG00000043514_41 (sequence is synthesized)
tgggcagttaaggctgttttctaaaatgatggctaactggttatttgtaaagctactctgaatgcttacaaaggaagctgcatgtttgtattagttcaggtaaaaggctaagttgctata

SEQ ID NO: 29382 - DNA, 120 bp, Artificial Sequence
  ENSG00000043514_42 (sequence is synthesized)
caacggaccctacctcttgtagtgattctcggggccacgggcaccggcaaatccacgctggcgttgcagctaggccagcggctcggcggtgagatcgtcagcgctgactccatgcaggac

SEQ ID NO: 29383 - DNA, 120 bp, Artificial Sequence
  ENSG00000043514_43 (sequence is synthesized)
ggctcggcggtgagatcgtcagcgctgactccatgcagttttggattcctcagaaacttgaatcagaccaggaccctgttggcctcttgatccctttggggctctgcttgtctatgaagg

SEQ ID NO: 29384 - DNA, 120 bp, Artificial Sequence
  ENSG00000043514_44 (sequence is synthesized)
agttcttcagtttgcccagatgatgagagagatttggtaatagcagttagtggagattgatgtgttgttctagctcagcaggttgggaggccctgagttattgcttcagttcaactccct

SEQ ID NO: 29385 - DNA, 120 bp, Artificial Sequence
  ENSG00000043514_45 (sequence is synthesized)
ctacctcttgtagtgattctcggggccacgggcaccggcaaatccacgctggcgttgcagctaggccagcggctcggcggtgagatcgtcagcgctgactccatgcagagacagagtctc

SEQ ID NO: 29386 - DNA, 120 bp, Artificial Sequence
  ENSG00000043514_46 (sequence is synthesized)
cgctgactccatgcagagacagagtctcacaatgttgcccagctggtctcaaactttgggctccagtgatctgcctgcctcagccacccacggtgctgggattacaggcgtgagccacca

SEQ ID NO: 29387 - DNA, 120 bp, Artificial Sequence
  ENSG00000043514_47 (sequence is synthesized)
acttttctatatgctatgtgcctctcaatgatggaatgtccactagacagttgaatatacaggtctggcaccacaaaaagagaactagattgtggatatggattttgggagttatcagca

SEQ ID NO: 29388 - DNA, 120 bp, Artificial Sequence
  ENSG00000043514_48 (sequence is synthesized)
caacagtggttgtagaagccatgggtgtcacccagagaaagttcataatacaaaaaggcagatggatgccataaagactgccatttctcaatattgtttcctgacagatactgctaatag

SEQ ID NO: 29389 - DNA, 120 bp, Artificial Sequence
  ENSG00000043514_49 (sequence is synthesized)
atcagtggctggcctcagtaaagtagatggaggaaggcctagtgggataggaagaaaaacctggaaagaatggtgcccttgaagccccaaaggggagtgattatgaaggggagagagctc

SEQ ID NO: 29390 - DNA, 120 bp, Artificial Sequence
  ENSG00000043514_50 (sequence is synthesized)
aatagtatcagattgttgctttttccattacttgctttgagagcttagtagaaaagtgttatatttggcagtcagtgttcattaatgatctcagtaagatatccatagggcagtggaggg

SEQ ID NO: 29391 - DNA, 120 bp, Artificial Sequence
  ENSG00000043514_51 (sequence is synthesized)
cagcaagcagtgattatattgagccataatccaaggttgtggttttcaaggcaggtgtaatccattgaggcaagaaagtgattgaaggactttaggatctaatttgaaatgggaaggaca

SEQ ID NO: 29392 - DNA, 120 bp, Artificial Sequence
  ENSG00000043514_52 (sequence is synthesized)
taagtgaaaaggtggaagataacttgcagggaaggaaccaaaccagggggcagcttttccttttgcttgtagacagctatgttgggacatcacagccagcactcagagctctgggatctg

SEQ ID NO: 29393 - DNA, 120 bp, Artificial Sequence
  ENSG00000043514_53 (sequence is synthesized)
cccactgccacggacactgctgctgattagcacactcagggccaccctacagcaaggcagcccaaaaggatggagccttaaaaggatgggatctttggctgtacacgtctatgaaggcct

SEQ ID NO: 29394 - DNA, 120 bp, Artificial Sequence
  ENSG00000043514_54 (sequence is synthesized)
cctcagctcacccagaaaatgaattttagattctgggcctgttctaagattttggatctgacctaagggaagttctataacataaatgattatccagggatattttcttgggatgtcaca

SEQ ID NO: 29395 - DNA, 120 bp, Artificial Sequence
  ENSG00000043591_0 (sequence is synthesized)
agaaacatgctgaagtcccggcggctcttccagcagcggcagcggctccagcagcagcggcggcggcggcggcggcggcagcggcagcgacagcgctcggctcctgcgggaaaggcgccc

SEQ ID NO: 29396 - DNA, 80 bp, Artificial Sequence
  ENSG00000043591_1 (sequence is synthesized)
ccggccgcgacctccctctgcgcaccacgccgcccgggcttctggggtgttccccaaccacggcccagccctgccacacc

SEQ ID NO: 29397 - DNA, 120 bp, Artificial Sequence
  ENSG00000043591_2 (sequence is synthesized)
gttccccaaccacggcccagccctgccacaccccccgcccccggcctccgcagctcggcatgggcgcgggggtgctcgtcctgggcgcctccgagcccggtaacctgtcgtcggccgcac

SEQ ID NO: 29398 - DNA, 120 bp, Artificial Sequence
  ENSG00000043591_3 (sequence is synthesized)
ctgctggtgcccgcgtcgccgcccgcctcgttgctgcctcccgccagcgaaagccccgagccgctgtctcagcagtggacagcgggcatgggtctgctgatggcgctcatcgtgctgctc

SEQ ID NO: 29399 - DNA, 120 bp, Artificial Sequence
  ENSG00000043591_4 (sequence is synthesized)
atcgtggcgggcaatgtgctggtgatcgtggccatcgccaagacgccgcggctgcagacgctcaccaacctcttcatcatgtccctggccagcgccgacctggtcatggggctgctggtg

SEQ ID NO: 29400 - DNA, 120 bp, Artificial Sequence
  ENSG00000043591_5 (sequence is synthesized)
gtgccgttcggggccaccatcgtggtgtggggccgctgggagtacggctccttcttctgcgagctgtggacctcagtggacgtgctgtgcgtgacggccagcatcgagaccctgtgtgtc

SEQ ID NO: 29401 - DNA, 120 bp, Artificial Sequence
  ENSG00000043591_6 (sequence is synthesized)
attgccctggaccgctacctcgccatcacctcgcccttccgctaccagagcctgctgacgcgcgcgcgggcgcggggcctcgtgtgcaccgtgtgggccatctcggccctggtgtccttc

SEQ ID NO: 29402 - DNA, 120 bp, Artificial Sequence
  ENSG00000043591_7 (sequence is synthesized)
ctgcccatcctcatgcactggtggcgggcggagagcgacgaggcgcgccgctgctacaacgaccccaagtgctgcgacttcgtcaccaaccgggcctacgccatcgcctcgtccgtagtc

SEQ ID NO: 29403 - DNA, 120 bp, Artificial Sequence
  ENSG00000043591_8 (sequence is synthesized)
tccttctacgtgcccctgtgcatcatggccttcgtgtacctgcgggtgttccgcgaggcccagaagcaggtgaagaagatcgacagctgcgagcgccgtttcctcggcggcccagcgcgg

SEQ ID NO: 29404 - DNA, 80 bp, Artificial Sequence
  ENSG00000043591_9 (sequence is synthesized)
gccgccaccgccccgctggccaacgggcgtgcgggtaagcggcggccctcgcgcctcgtggccctgcgcgagcagaaggc

SEQ ID NO: 29405 - DNA, 120 bp, Artificial Sequence
  ENSG00000043591_10 (sequence is synthesized)
tcgcgcctcgtggccctgcgcgagcagaaggcgctcaagacgctgggcatcatcatgggcgtcttcacgctctgctggctgcccttcttcctggccaacgtggtgaaggccttccaccgc

SEQ ID NO: 29406 - DNA, 120 bp, Artificial Sequence
  ENSG00000043591_11 (sequence is synthesized)
gagctggtgcccgaccgcctcttcgtcttcttcaactggctgggctacgccaactcggccttcaaccccatcatctactgccgcagccccgacttccgcaaggccttccagggactgctc

SEQ ID NO: 29407 - DNA, 80 bp, Artificial Sequence
  ENSG00000043591_12 (sequence is synthesized)
ccggacccccgccatcgcccggggccgcctcggacgacgacgacgacgatgtcgtcggggccacgccgcccgcgcgcctg

SEQ ID NO: 29408 - DNA, 120 bp, Artificial Sequence
  ENSG00000043591_13 (sequence is synthesized)
cctgctggagccctgggccggctgcaacggcggggcggcggcggacagcgactcgagcctggacgagccgtgccgccccggcttcgcctcggaatccaaggtgtagggcccggcgcgggg

SEQ ID NO: 29409 - DNA, 120 bp, Artificial Sequence
  ENSG00000043591_14 (sequence is synthesized)
gactccgggcacggcttcccaggggaacgaggagatctgtgtttacttaagaccgatagcaggtgaactcgaagcccacaatcctcgtctgaatcatccgaggcaaagagaaaagccacg

SEQ ID NO: 29410 - DNA, 120 bp, Artificial Sequence
  ENSG00000043591_15 (sequence is synthesized)
ctgaatcatccgaggcaaagagaaaagccacggaccgttgcacaaaaaggaaagtttgggaagggatgggagagtggcttgctgatgttccttgttgttttttttttcttttcttttctt

SEQ ID NO: 29411 - DNA, 120 bp, Artificial Sequence
  ENSG00000043591_16 (sequence is synthesized)
gtttgtggtccggccttcttttgtgtgtgcgtgtgatgcatctttagatttttttcccccaccaggtggtttttgacactctctgagaggaccggagtggaagatgggtgggttagggga

SEQ ID NO: 29412 - DNA, 120 bp, Artificial Sequence
  ENSG00000043591_17 (sequence is synthesized)
agggagaagcattaggaggggattaaaatcgatcatcgtggctcccatccctttcccgggaacaggaacacactaccagccagagagaggagaatgacagtttgtcaagacatatttcct

SEQ ID NO: 29413 - DNA, 120 bp, Artificial Sequence
  ENSG00000043591_18 (sequence is synthesized)
tttgctttccagagaaatttcattttaatttctaagtaatgatttctgctgttatgaaagcaaagagaaaggatggaggcaaaataaaaaaaaatcacgtttcaagaaatgttaagctct

SEQ ID NO: 29414 - DNA, 120 bp, Artificial Sequence
  ENSG00000043591_19 (sequence is synthesized)
tcttggaacaagccccaccttgctttccttgtgtagggcaaacccgctgtcccccgcgcgcctgggtggtcaggctgagggatttctacctcacactgtgcatttgcacagcagatagaa

SEQ ID NO: 29415 - DNA, 120 bp, Artificial Sequence
  ENSG00000043591_20 (sequence is synthesized)
agacttgtttatattaaacagcttatttatgtatcaatattagttggaaggaccaggcgcagagcctctctctgtgacatgtgactctgtcaattgaagacaggacattaaaagagagcg

SEQ ID NO: 29416 - DNA, 120 bp, Artificial Sequence
  ENSG00000043591_21 (sequence is synthesized)
agagagagaaacagttcagattactgcacatgtggataaaaacaaaaacaaaaaaaaggagtggttcaaaatgccatttttgcacagtgttaggaattacaaaatccacagaagatgtta

SEQ ID NO: 29417 - DNA, 120 bp, Artificial Sequence
  ENSG00000043591_22 (sequence is synthesized)
cttgcacaaaaagaaattaaatattttttaaagggagaggggctgggcagatcttaaataaaattcaaactctacttctgttgtctagtatgttattgagctaatgattcattgggaaaa

SEQ ID NO: 29418 - DNA, 120 bp, Artificial Sequence
  ENSG00000043591_23 (sequence is synthesized)
tacctttttatactcctttatcatggtactgtaactgtatccatattataaatataattatcttaaggattttttatttttttttatgtccaagtgcccacgtgaatttgctggtgaaag

SEQ ID NO: 29419 - DNA, 120 bp, Artificial Sequence
  ENSG00000043591_24 (sequence is synthesized)
ttagcacttgtgtgtaaattctacttcctcttgtgtgttttaccaagtatttatactctggtgcaactaactactgtgtgaggaattggtccatgtgcaataaataccaatgaagcacaa

SEQ ID NO: 29420 - DNA, 120 bp, Artificial Sequence
  ENSG00000044012_0 (sequence is synthesized)
gggagacggtggacagcggcagggggaacccagggagcgcgatgggctgcagggctgcatcagggctcctgccaggagtggccgtggtcctcctgctgctgctgcagagcacacagtcag

SEQ ID NO: 29421 - DNA, 120 bp, Artificial Sequence
  ENSG00000044012_1 (sequence is synthesized)
tctacatccagtaccaaggcttccgggtccagctggaatccatgaagaagctgagtgacctggaggcacagtgggcacccagcccccgcctgcaggcccagagcctcctgcccgccgtgt

SEQ ID NO: 29422 - DNA, 120 bp, Artificial Sequence
  ENSG00000044012_2 (sequence is synthesized)
ccaccctgctctgcctcaggaccttcagcctgtctgcgcctcgcaggaggcttccagcatcttcaagaccctgaggaccatcgctaacgacgactgtgagctgtgtgtgaacgttgcgtg

SEQ ID NO: 29423 - DNA, 120 bp, Artificial Sequence
  ENSG00000044012_3 (sequence is synthesized)
taccggctgcctctgagatagccctgggtaccctgagcccaccagggacacctcgcccttcagcccaccaccctggcaggcttccatccccgtccatgctcaagatgggtccctggccac

SEQ ID NO: 29424 - DNA, 120 bp, Artificial Sequence
  ENSG00000044012_4 (sequence is synthesized)
catggtcatcaccacccttccagggcctgagcagctggatctggtacaaagcaatcggacatagagttggagggggaggcccctgaggcagcccagctcctgaataaagattctacaaca

SEQ ID NO: 29425 - DNA, 120 bp, Artificial Sequence
  ENSG00000044090_0 (sequence is synthesized)
gtcgccgccagcgtctgtgccgcgtcccttgctctgtgaaggacaggcctcgcgccaggaccccggtggacttctgaggtgccaggatggtgggagaactccgctacagggaattcaggg

SEQ ID NO: 29426 - DNA, 120 bp, Artificial Sequence
  ENSG00000044090_1 (sequence is synthesized)
tgcccctggggcccggcttacatgcctatcctgatgagctgatccgccagcgcgtgggccatgatgggcatcctgagtaccagatccgttggctcatcctgcggcgtggcgatgaggggg

SEQ ID NO: 29427 - DNA, 120 bp, Artificial Sequence
  ENSG00000044090_2 (sequence is synthesized)
acgggggctctggccaagtggactgcaaggctgagcacatcctgctgtggatgtccaaggatgagatctatgccaactgccacaagatgctgggcgaggatggccaggtcatcgggccct

SEQ ID NO: 29428 - DNA, 120 bp, Artificial Sequence
  ENSG00000044090_3 (sequence is synthesized)
cccaggagtctgcaggggaggttggggccctggacaaatctgtgctggaggagatggaaaccgacgtgaagtccctcattcagagagcccttcggcagctggaggagtgtgtgggcacta

SEQ ID NO: 29429 - DNA, 120 bp, Artificial Sequence
  ENSG00000044090_4 (sequence is synthesized)
tccctcctgctcctctacttcacactgtccacgtgctcagcgcctatgccagcattgagcccctcactggagtattcaaggacccaagggtcctggacttgctcatgcacatgttgagta

SEQ ID NO: 29430 - DNA, 120 bp, Artificial Sequence
  ENSG00000044090_5 (sequence is synthesized)
gtcctgattatcagattcgctggagtgcaggccggatgatacaagccctgtcctcccatgacgctgggacccggactcagatccttctgtcactgagccaacaagaagccattgagaaac

SEQ ID NO: 29431 - DNA, 120 bp, Artificial Sequence
  ENSG00000044090_6 (sequence is synthesized)
acctggattttgacagccgctgtgctctgctagcactgtttgcacaggccacgctctctgaacaccccatgtctttcgagggcattcagctaccacaggtcccaggaagggtgctcttct

SEQ ID NO: 29432 - DNA, 120 bp, Artificial Sequence
  ENSG00000044090_7 (sequence is synthesized)
ccctggtgaagcggtatttgcatgtcacctcgctcctggatcagctgaacgacagtgctgcggagccaggagcccagaacacctctgctcctgaggagttgagtggggagaggggtcaac

SEQ ID NO: 29433 - DNA, 120 bp, Artificial Sequence
  ENSG00000044090_8 (sequence is synthesized)
tggagctggagttcagtatggccatgggcaccctgatctcggagctggtgcaagccatgcgctgggaccaggcctcagacagaccaaggagctcagcacggtcccccggttccatcttcc

SEQ ID NO: 29434 - DNA, 120 bp, Artificial Sequence
  ENSG00000044090_9 (sequence is synthesized)
agcctcagctggcagatgtgagcccagggctccccgctgcccaggctcagccctccttcaggaggtcaagacgttttcgccctcgttctgagttcgcaagtggcaatacctatgctttgt

SEQ ID NO: 29435 - DNA, 120 bp, Artificial Sequence
  ENSG00000044090_10 (sequence is synthesized)
atgtgcgggacacactgcagccggggatgcgagtgcggatgctggatgattatgaggagatcagtgccggggatgagggcgagtttcggcagagcaacaacggtgtgcctcctgtgcagg

SEQ ID NO: 29436 - DNA, 120 bp, Artificial Sequence
  ENSG00000044090_11 (sequence is synthesized)
tattttgggagtcaacaggccgcacctattgggtgcactggcacatgctggagatcttgggctttgaggaagacattgaggacatggttgaggctgatgagtaccaaggggcagtggcca

SEQ ID NO: 29437 - DNA, 120 bp, Artificial Sequence
  ENSG00000044090_12 (sequence is synthesized)
gtagagtcctgggtagagccctgcctgcctggcgctggaggcccatgacagaactctatgctgtgccttatgtgctgcctgaggatgaggacactgaggagtgtgaacacctgaccctgg

SEQ ID NO: 29438 - DNA, 120 bp, Artificial Sequence
  ENSG00000044090_13 (sequence is synthesized)
ctgagtggtgggaactcctcttcttcatcaagaagctggatggacctgaccatcaggaggttctccagatcctccaggagaacctagatggggagattctggatgatgagatcctagctg

SEQ ID NO: 29439 - DNA, 120 bp, Artificial Sequence
  ENSG00000044090_14 (sequence is synthesized)
aactggccgtgcccatagaattggcccaggacttgctgctgactctgccacagcgactcaatgacagtgccctcagggacctgatcaactgccatgtctacaagaagtatgggcctgaag

SEQ ID NO: 29440 - DNA, 120 bp, Artificial Sequence
  ENSG00000044090_15 (sequence is synthesized)
ccctagcagggaaccaagcctacccatcccttctagaagcccaagaagatgtcctcctgctagacgcgcaggcccaggctaaggactcagaagatgcagccaaagtggaagcaaaagaac

SEQ ID NO: 29441 - DNA, 120 bp, Artificial Sequence
  ENSG00000044090_16 (sequence is synthesized)
ccccatctcagagtcccaacactcccctgcagcgtctggtggagggttatggtccagctgggaaaatcctcctggatctagagcaagccctcagctcagaggggacccaggagaacaagg

SEQ ID NO: 29442 - DNA, 120 bp, Artificial Sequence
  ENSG00000044090_17 (sequence is synthesized)
tcaagccactcctgctgcagctgcagcggcagccgcagcccttcctggcactgatgcagagcctggacactccggagactaacaggaccctgcacctgactgtgctgagaatcctgaagc

SEQ ID NO: 29443 - DNA, 120 bp, Artificial Sequence
  ENSG00000044090_18 (sequence is synthesized)
agctggtggacttccccgaggcactgctgctcccctggcacgaggccgtggatgcctgcatggcctgcctgcggtccccaaacactgatcgagaggtgctccaggaactgattttcttcc

SEQ ID NO: 29444 - DNA, 120 bp, Artificial Sequence
  ENSG00000044090_19 (sequence is synthesized)
tgcaccgcctgacctcagtgagcagggactatgccgtggtgctgaatcagctgggagcaagagacgctatctccaaggccctggaaaagcacctgggaaagctggagctggctcaggagc

SEQ ID NO: 29445 - DNA, 120 bp, Artificial Sequence
  ENSG00000044090_20 (sequence is synthesized)
tgcgggacatggtgttcaagtgtgagaagcatgcccacctctaccgcaaactcatcaccaacatcctgggaggctgcatccagatggtgctgggccagatcgaagaccacagacgaaccc

SEQ ID NO: 29446 - DNA, 120 bp, Artificial Sequence
  ENSG00000044090_21 (sequence is synthesized)
ggtggaggtgtcctccaacccgcaccgggccagcaagctgacggaccacaaccccaagacctattgggagtccaacggcagcgccggctcccactacatcaccctgcacatgcgccgggg

SEQ ID NO: 29447 - DNA, 120 bp, Artificial Sequence
  ENSG00000044090_22 (sequence is synthesized)
catcctcatcaggcaactgactctgcttgtggctagtgaggactcgagttacatgccggcccgagtggtggtgtgcgggggtgatagcactagctctcttcacacggaactcaactcggt

SEQ ID NO: 29448 - DNA, 120 bp, Artificial Sequence
  ENSG00000044090_23 (sequence is synthesized)
gaatgtgatgccctctgccagccgggtgatcctcctggagaacctgacccgcttctggcccatcatccagatccgcataaagcgctgccagcagggtggcattgatacgcgcattcgggg

SEQ ID NO: 29449 - DNA, 120 bp, Artificial Sequence
  ENSG00000044090_24 (sequence is synthesized)
gttagagatcctaggccccaagcccacgttctggccagtgttccgggagcagctctgtcgtcacacacgcctcttctacatggttcgggcacaggcctggagccaggacatggcagagga

SEQ ID NO: 29450 - DNA, 120 bp, Artificial Sequence
  ENSG00000044090_25 (sequence is synthesized)
ccgcaggagcctcctgcacctgagttctagactcaacggtgctctgcgccaggagcagaattttgctgaccgcttcctccctgatgacgaggctgcccaagctctgggcaagacctgctg

SEQ ID NO: 29451 - DNA, 120 bp, Artificial Sequence
  ENSG00000044090_26 (sequence is synthesized)
ggaggccctggtcagccccgtggtgcagaacatcacctcccctgatgaggatggcattagccccctgggttggctgctggaccagtacctggagtgtcaggaagctgtcttcaaccccca

SEQ ID NO: 29452 - DNA, 120 bp, Artificial Sequence
  ENSG00000044090_27 (sequence is synthesized)
gagccgcggcccagctttcttctcgcgggtgcgccgtctcactcacctgctggtgcatgtcgagccctgtgaggcaccccctcctgtggtggccactcctcggcccaaaggcagaaacag

SEQ ID NO: 29453 - DNA, 120 bp, Artificial Sequence
  ENSG00000044090_28 (sequence is synthesized)
aagccacgactggagctccttggctacccggggccttccaagcagcatcatgagaaacctgacgcgctgttggcgggccgtggtggagaagcaggtgaacaattttctgacctcatcctg

SEQ ID NO: 29454 - DNA, 120 bp, Artificial Sequence
  ENSG00000044090_29 (sequence is synthesized)
gcgggatgatgactttgtgccacgctactgtgagcactttaatattctgcagaactcaagctctgaactgtttgggcctcgggcagccttcttgctggcgctgcaaaatggctgtgcggg

SEQ ID NO: 29455 - DNA, 120 bp, Artificial Sequence
  ENSG00000044090_30 (sequence is synthesized)
agccttgctgaagctcccttttctcaaagctgcccacgtgagtgagcagttcgcccggcacattgaccagcagatccagggcagccggatcggtggagcccaggaaatggagaggctggc

SEQ ID NO: 29456 - DNA, 120 bp, Artificial Sequence
  ENSG00000044090_31 (sequence is synthesized)
acagctgcagcaatgcctgcaagctgtcctgattttctccggcttggagatagccaccacttttgagcattattaccagcactacatggcggaccgtctcctgggcgtggtctcgagctg

SEQ ID NO: 29457 - DNA, 120 bp, Artificial Sequence
  ENSG00000044090_32 (sequence is synthesized)
gctggagggggccgtgctggagcagatcggtccctgcttccccaaccgcctcccccagcagatgttgcagagcctgagcacctctaaggagctgcagcgccagttccacgtctaccagct

SEQ ID NO: 29458 - DNA, 120 bp, Artificial Sequence
  ENSG00000044090_33 (sequence is synthesized)
ccagcagctggatcaggaactcctgaagctggaggatacagagaagaaaatacaggtgggccttggggccagtggcaaggagcacaagagcgagaaggaagaggaagctggggcagcagc

SEQ ID NO: 29459 - DNA, 120 bp, Artificial Sequence
  ENSG00000044090_34 (sequence is synthesized)
agtggtggatgtggcggagggagaggaggaagaggaggagaatgaggacctctactatgaaggggcaatgccagaagtgtctgtgcttgtcctgtcccgacactcctggcctgttgcctc

SEQ ID NO: 29460 - DNA, 120 bp, Artificial Sequence
  ENSG00000044090_35 (sequence is synthesized)
aatctgccacacactgaaccccagaacctgcctgccctcctacctgaggggcactttgaacagatactccaacttctacaacaagagtcagagccaccctgcccttgagcgaggctcaca

SEQ ID NO: 29461 - DNA, 120 bp, Artificial Sequence
  ENSG00000044090_36 (sequence is synthesized)
gaggcgactgcagtggacgtggctgggctgggctgagctgcagtttgggaaccagaccctgcatgtgtccaccgtgcagatgtggctactgctgtatctcaacgacctgaaggcggtctc

SEQ ID NO: 29462 - DNA, 120 bp, Artificial Sequence
  ENSG00000044090_37 (sequence is synthesized)
tgtggagagtctgctggcgttctcagggctctccgcagacatgctcaatcaggcgattgggcccctcacctcttcaagaggccccctggaccttcacgagcaaaaggatataccaggagg

SEQ ID NO: 29463 - DNA, 120 bp, Artificial Sequence
  ENSG00000044090_38 (sequence is synthesized)
ggtcctcaagattcgagatggcagcaaggaacccaggtcgagatgggacattgtgcggctcatcccacctcagacgtacctgcaagctgagggtgaagacggccagaacttggagaagag

SEQ ID NO: 29464 - DNA, 120 bp, Artificial Sequence
  ENSG00000044090_39 (sequence is synthesized)
acggaatcttctgaactgcctcatcgtccgaatcctcaaggcccatggagatgaggggctgcacattgaccagcttgtctgtctggtgctggaggcttggcagaagggcccgtgtcctcc

SEQ ID NO: 29465 - DNA, 120 bp, Artificial Sequence
  ENSG00000044090_40 (sequence is synthesized)
caggggtttggtcagcagccttggtaaggggtctgcatgcagcagcactgacgtcctctcctgcatcctacacctcctgggcaagggcacgctgagacgccatgacgaccggccccaggt

SEQ ID NO: 29466 - DNA, 120 bp, Artificial Sequence
  ENSG00000044090_41 (sequence is synthesized)
gctgtcctatgcagtccctgtgactgtcatggagcctcacactgagtccctgaacccaggctcctcaggccccaacccacccctcaccttccataccctacagattcgctcccggggtgt

SEQ ID NO: 29467 - DNA, 120 bp, Artificial Sequence
  ENSG00000044090_42 (sequence is synthesized)
gccctatgcctcctgcactgccacccagagcttctctaccttccggtagccctagacttggggtcaggggaaggtagagctggagcttttacagaaataaaacccaagagtttgattata

SEQ ID NO: 29468 - DNA, 120 bp, Artificial Sequence
  ENSG00000044090_43 (sequence is synthesized)
aggaggtgctgcgtcgccaaggtggcatcctcggctccgccccggcgctctcccagggcccctagctttccgctgggtcgggcggaaatgagccgtggcttttggctggcggagccgctg

SEQ ID NO: 29469 - DNA, 120 bp, Artificial Sequence
  ENSG00000044090_44 (sequence is synthesized)
gcagggaccgggccccaccctgccccagtggctgccgactcacgcgggtgcagctctgttccgcggaggcacgccccctcccgtctctccgtctcgaccccctcgcggggcccaggtgcc

SEQ ID NO: 29470 - DNA, 120 bp, Artificial Sequence
  ENSG00000044090_45 (sequence is synthesized)
gaggaagggaaagcaggagaagggctgggtcggctcagggactcacaggacactgtggcaggagcctctgatctcatcaggacccggactcagatccttctgtcactgagccaacaagaa

SEQ ID NO: 29471 - DNA, 120 bp, Artificial Sequence
  ENSG00000044115_0 (sequence is synthesized)
ctcctcctagccggactggagggagacaaagcagcgcccgtctgcttcgggcctctggaatttagcgctcgcccagctagccgcagaaatgactgctgtccatgcaggcaacataaactt

SEQ ID NO: 29472 - DNA, 120 bp, Artificial Sequence
  ENSG00000044115_1 (sequence is synthesized)
caagtgggatcctaaaagtctagagatcaggactctggcagttgagagactgttggagcctcttgttacacaggttacaacccttgtaaacaccaatagtaaagggccctctaataagaa

SEQ ID NO: 29473 - DNA, 120 bp, Artificial Sequence
  ENSG00000044115_2 (sequence is synthesized)
gagaggtcgttctaagaaggcccatgttttggctgcatctgttgaacaagcaactgagaatttcttggagaagggggataaaattgcgaaggagagccagtttctcaaggaggagcttgt

SEQ ID NO: 29474 - DNA, 120 bp, Artificial Sequence
  ENSG00000044115_3 (sequence is synthesized)
ggctgctgtagaagatgttcgaaaacaaggtgatttgatgaaggctgctgcaggagagttcgcagatgatccctgctcttctgtgaagcgaggcaacatggttcgggcagctcgagcttt

SEQ ID NO: 29475 - DNA, 120 bp, Artificial Sequence
  ENSG00000044115_4 (sequence is synthesized)
gctctctgctgttacccggttgctgattttggctgacatggcagatgtctacaaattacttgttcagctgaaagttgtggaagatggtatcttgaagttgaggaatgctggcaatgaaca

SEQ ID NO: 29476 - DNA, 120 bp, Artificial Sequence
  ENSG00000044115_5 (sequence is synthesized)
agacttaggaatccagtataaagccctaaaacctgaagtggataagctgaacattatggcagccaaaagacaacaggaattgaaagatgttggccatcgtgatcagatggctgcagctag

SEQ ID NO: 29477 - DNA, 120 bp, Artificial Sequence
  ENSG00000044115_6 (sequence is synthesized)
aggaatcctgcagaagaacgttccgatcctctatactgcatcccaggcatgcctacagcaccctgatgtcgcagcctataaggccaacagggacctgatatacaagcagctgcagcaggc

SEQ ID NO: 29478 - DNA, 120 bp, Artificial Sequence
  ENSG00000044115_7 (sequence is synthesized)
ggtcacaggcatttccaatgcagcccaggccactgcctcagacgatgcctcacagcaccagggtggaggaggaggagaactggcatatgcactcaataactttgacaaacaaatcattgt

SEQ ID NO: 29479 - DNA, 120 bp, Artificial Sequence
  ENSG00000044115_8 (sequence is synthesized)
ggaccccttgagcttcagcgaggagcgctttaggccttccctggaggagcgtctggaaagcatcattagtggggctgccttgatggccgactcgtcctgcacgcgtgatgaccgtcgtga

SEQ ID NO: 29480 - DNA, 120 bp, Artificial Sequence
  ENSG00000044115_9 (sequence is synthesized)
gcgaattgtggcagagtgtaatgctgtccgccaggccctgcaggacctgctttcggagtacatgggcaatgctggacgtaaagaaagaagtgatgcactcaattctgcaatagataaaat

SEQ ID NO: 29481 - DNA, 120 bp, Artificial Sequence
  ENSG00000044115_10 (sequence is synthesized)
gaccaagaagaccagggacttgcgtagacagctccgcaaagctgtcatggaccacgtttcagattctttcctggaaaccaatgttccacttttggtattgattgaagctgcaaagaatgg

SEQ ID NO: 29482 - DNA, 120 bp, Artificial Sequence
  ENSG00000044115_11 (sequence is synthesized)
aaatgagaaagaagttaaggagtatgcccaagttttccgtgaacatgccaacaaattgattgaggttgccaacttggcctgttccatctcaaataatgaagaaggtgtaaagcttgttcg

SEQ ID NO: 29483 - DNA, 120 bp, Artificial Sequence
  ENSG00000044115_12 (sequence is synthesized)
aatgtctgcaagccagttagaagccctctgtcctcaggttattaatgctgcactggctttagcagcaaaaccacagagtaaactggcccaagagaacatggatctttttaaagaacaatg

SEQ ID NO: 29484 - DNA, 120 bp, Artificial Sequence
  ENSG00000044115_13 (sequence is synthesized)
ggaaaaacaagtccgtgttctcacagatgctgtcgatgacattacttccattgatgacttcttggctgtctcagagaatcacattttggaagatgtgaacaaatgtgtcattgctctcca

SEQ ID NO: 29485 - DNA, 120 bp, Artificial Sequence
  ENSG00000044115_14 (sequence is synthesized)
agagaaggatgtggatggcctggaccgcacagctggtgcaattcgaggccgggcagcccgggtcattcacgtagtcacctcagagatggacaactatgagccaggagtctacacagagaa

SEQ ID NO: 29486 - DNA, 120 bp, Artificial Sequence
  ENSG00000044115_15 (sequence is synthesized)
gtcatgccacgttttactgagcaagtagaagcagccgtggaagccctcagctcggaccctgcccagcccatggatgagaatgagtttatcgatgcttcccgcctggtatatgatggcatc

SEQ ID NO: 29487 - DNA, 120 bp, Artificial Sequence
  ENSG00000044115_16 (sequence is synthesized)
cgggacatcaggaaagcagtgctgatgataaggacccctgaggagttggatgactctgactttgagacagaagattttgatgtcagaagcaggacgagcgtccagacagaagacgatcag

SEQ ID NO: 29488 - DNA, 120 bp, Artificial Sequence
  ENSG00000044115_17 (sequence is synthesized)
ctgatagctggccagagtgcccgggcgatcatggctcagcttccccaggagcaaaaagcgaagattgcggaacaggtggccagcttccaggaagaaaagagcaagctggatgctgaagtg

SEQ ID NO: 29489 - DNA, 120 bp, Artificial Sequence
  ENSG00000044115_18 (sequence is synthesized)
tccaaatgggacgacagtggcaatgacatcattgtgctggccaagcagatgtgcatgattatgatggagatgacagactttacccgaggtaaaggaccactcaaaaatacatcggatgtc

SEQ ID NO: 29490 - DNA, 120 bp, Artificial Sequence
  ENSG00000044115_19 (sequence is synthesized)
atcagtgctgccaagaaaattgctgaggcaggatccaggatggacaagcttggccgcaccattgcagaccattgccccgactcggcttgcaagcaggacctgctggcctacctgcaacgc

SEQ ID NO: 29491 - DNA, 120 bp, Artificial Sequence
  ENSG00000044115_20 (sequence is synthesized)
atcgccctctactgccaccagctgaacatctgcagcaaggtcaaggccgaggtgcagaatctcggcggggagcttgttgtctctggggtggacagcgccatgtccctgatccaggcagcc

SEQ ID NO: 29492 - DNA, 120 bp, Artificial Sequence
  ENSG00000044115_21 (sequence is synthesized)
aagaacttgatgaatgctgtggtgcagacagtgaaggcatcctacgtcgcctctaccaaataccaaaagtcacagggtatggcttccctcaaccttcctgctgtgtcatggaagatgaag

SEQ ID NO: 29493 - DNA, 120 bp, Artificial Sequence
  ENSG00000044115_22 (sequence is synthesized)
gcaccagagaaaaagccattggtgaagagagagaaacaggatgagacacagaccaagattaaacgggcatctcagaagaagcacgtgaacccggtgcaggccctcagcgagttcaaagct

SEQ ID NO: 29494 - DNA, 120 bp, Artificial Sequence
  ENSG00000044115_23 (sequence is synthesized)
atggacagcatctaagtctgcccaggccggccgcccccacccctcggggctcctgaatatcagtcactgttcgtcactcaaatgaatttgctaaatacaacactgatactagattccaca

SEQ ID NO: 29495 - DNA, 120 bp, Artificial Sequence
  ENSG00000044115_24 (sequence is synthesized)
gggaaatgggcagactgaaccagtccaggtggtgaattttccaagaacatagtttaagttgattaaaaatgcttttagaatgcaggagcctacttctagctgtattttttgtatgcttaa

SEQ ID NO: 29496 - DNA, 120 bp, Artificial Sequence
  ENSG00000044115_25 (sequence is synthesized)
ataaaaataaaaattcataaccaaagagaatcccacattagcttgttagtaatgctctgaccaagccgagatgcccattctcttagtgatggcggcgttagggtttgagagaagggaatt

SEQ ID NO: 29497 - DNA, 120 bp, Artificial Sequence
  ENSG00000044115_26 (sequence is synthesized)
tggctcaacttcagttgagagggtgcagtccagacagcttgactgcttttaaatgaccaaagatgacctgtggtaagcaacctgggcatcttaggaagcagtccctggagaaggcatgtt

SEQ ID NO: 29498 - DNA, 120 bp, Artificial Sequence
  ENSG00000044115_27 (sequence is synthesized)
cccagaaaggtctctggagggacaaactcactcagtaaaacataatgtatcatgaagaaaactgattctctatgacatgaaatgaaaattttaatgcattgttataattactaatgtacg

SEQ ID NO: 29499 - DNA, 120 bp, Artificial Sequence
  ENSG00000044115_28 (sequence is synthesized)
ctgctgcaggacattaataaagttgcttttttaggctacagtgtctcgatgccataatcagaacacactttttttcctctttctcccagcttcaaatgcaaattcatcattgggctcact

SEQ ID NO: 29500 - DNA, 120 bp, Artificial Sequence
  ENSG00000044115_29 (sequence is synthesized)
tctaataactgcagtgtttcccgccttgggcttgcagcagaaaaacctgacaacatagtgtttgctaaggcagtaatttagactttaccttatttgtgattactgtagtgattgattgat

SEQ ID NO: 29501 - DNA, 120 bp, Artificial Sequence
  ENSG00000044115_30 (sequence is synthesized)
tgattactattaactacaaggtataatttactatcaccttatttaaattttatgaattaatttgaatgttttttacactaactaacttttcccaataaagtccactatgaaaccacgaca

SEQ ID NO: 29502 - DNA, 120 bp, Artificial Sequence
  ENSG00000044115_31 (sequence is synthesized)
accatgctttgtaacagcatcggggtcgttgcaggaccccctgattacaataaagcgagaaagaagaactcctgacttaaaaacatgatattccttcagtgtaggaagcagcagtgaggt

SEQ ID NO: 29503 - DNA, 120 bp, Artificial Sequence
  ENSG00000044115_32 (sequence is synthesized)
tgtaataaaggctgcattcaagaagacccatctgaacaatggcccaaggggctatacaaagaaagctgtttgcacaggatagaattaagagcatgtcagcattccgtctgcagttgagat

SEQ ID NO: 29504 - DNA, 120 bp, Artificial Sequence
  ENSG00000044115_33 (sequence is synthesized)
ttccgtgaacatgccaacaaattgattgaggtaagtgaattagcagtttcattgacttgtaggcaacttggtgaagtgtggtgagttttaatcacattatttaatcagttaaaatttgta

SEQ ID NO: 29505 - DNA, 120 bp, Artificial Sequence
  ENSG00000044115_34 (sequence is synthesized)
ggtgggtctccaagctcctcctggggctcaggcagcccagcctggtccattcagggtaagtttcatgggccacagcacttttgccactcatctctaaaaatggttcttattaatcccagc

SEQ ID NO: 29506 - DNA, 120 bp, Artificial Sequence
  ENSG00000044115_35 (sequence is synthesized)
gtgctctgtgtttctccctttgggtaaagctttctaggctggtcctaatctgggagcctctaaaactctgagatgtggagcgagacaggaactgggcaggggccacccttttctctttga

SEQ ID NO: 29507 - DNA, 120 bp, Artificial Sequence
  ENSG00000044115_36 (sequence is synthesized)
ccatccccaactgctttttttcttgctttactttactcacttgtcttccacctcagcctgcagtgagtggcttttgtcatcaggcattaataacgcaaagtgcctcagagcagaagagtt

SEQ ID NO: 29508 - DNA, 120 bp, Artificial Sequence
  ENSG00000044115_37 (sequence is synthesized)
aactatttgtttacttagctaaaaacatctggacttttctccatagccaggctcctgcttgctgagccggcttgttctcacctcgaggggcatgggcctccaccctgccgtttggggtga

SEQ ID NO: 29509 - DNA, 120 bp, Artificial Sequence
  ENSG00000044115_38 (sequence is synthesized)
ggggatccttggccagggtggtttccccgccgtcataggagggaagtcagtgggaggctcagaaggccttggctatacaaccagtgccatgcggcgcagtcagggtcccatggacgactt

SEQ ID NO: 29510 - DNA, 120 bp, Artificial Sequence
  ENSG00000044115_39 (sequence is synthesized)
ccatcagctcacccgcctccatccccaagcagagtgtaggcaagggctgtgactgcctcaggtaattgggtgattttgctccagcaagaggagaggaagcatgtgagtgccacactgaac

SEQ ID NO: 29511 - DNA, 120 bp, Artificial Sequence
  ENSG00000044115_40 (sequence is synthesized)
ctttcagaaacagccgtggggtcgggggtgcttgggccaggccaggatacttggtgttaagcctgctctctcttcagtgccccgactcggcttgcaagcaggacctgctggcctacctgc

SEQ ID NO: 29512 - DNA, 120 bp, Artificial Sequence
  ENSG00000044115_41 (sequence is synthesized)
tcgggccggcggtcccttcccccgcagggcccgagtatggggcccgggcgggcacggccggcgcttcccagcgctcgggaagtcggggggccgcctgggctggggaggagaaactatagg

SEQ ID NO: 29513 - DNA, 120 bp, Artificial Sequence
  ENSG00000044115_42 (sequence is synthesized)
gggctggggaggagaaactataggcccagcgccgccgccgcgtttcctcttggaaaagttttctcgcggtttccaaactttgttaccgcggcctcggcgcgcgcggcagccccgcgccgg

SEQ ID NO: 29514 - DNA, 120 bp, Artificial Sequence
  ENSG00000044115_43 (sequence is synthesized)
gcccctcggccgccttccttccctggggcggcttgtctgggagccgctttcccgggaagtgattgtcgtccggctccgaggcgttcctgccccctcccccttcccggccgctgagacttc

SEQ ID NO: 29515 - DNA, 120 bp, Artificial Sequence
  ENSG00000044115_44 (sequence is synthesized)
aaacactgtgaaaacctctgggtaattcactgcagcctcttcttcagtgctgaaaaaacattttatagtgacaactatacatcctttgtcccccagatggccagaaggtgaagatagagt

SEQ ID NO: 29516 - DNA, 120 bp, Artificial Sequence
  ENSG00000044115_45 (sequence is synthesized)
gatttaacaccagcctatgcaagacaaggtctcactgtgttgcccaggttggagtgcagtggcgtaacctcccaggctccattgatctccctccttagcctcccagatagctgggactac

SEQ ID NO: 29517 - DNA, 120 bp, Artificial Sequence
  ENSG00000044115_46 (sequence is synthesized)
agatggcccaaggggctatacaaagaaagctgtttgcacaggatagaattaagagcagcatgtcagcattccgtctgcagttgagatgttgattcctccttgtattgcacattgctgaaa

SEQ ID NO: 29518 - DNA, 120 bp, Artificial Sequence
  ENSG00000044115_47 (sequence is synthesized)
ggtcttaacttgttgatggcagatgggtggcttgttgcagagaagagctcctggagcagcatgagtgcatttactgaaaagcttttccgagaaacggcacaagaatggatttgcttatgt

SEQ ID NO: 29519 - DNA, 120 bp, Artificial Sequence
  ENSG00000044115_48 (sequence is synthesized)
ccatttcctcctcctagccggactggagggagacaaagcagcgcccgtctgcttcgggcctctggaatttagcgctcgcccagctagccgcaggaagaatgaagaatgagtgtaggagtt

SEQ ID NO: 29520 - DNA, 120 bp, Artificial Sequence
  ENSG00000044115_49 (sequence is synthesized)
acctatagtttctgcctaattatttaccaatctggacttttgaacaaacattttttttaaagacggggtctccgtcgcccgggctggagcgcagtgacacgatcatgactcactgcggct

SEQ ID NO: 29521 - DNA, 120 bp, Artificial Sequence
  ENSG00000044115_50 (sequence is synthesized)
tctgtctcctgggctcaagtgatccccccacctcggcttccgaagtagttgggactacaggcacgcgccaccacatccgtctaatttttgtatttttggtagagatggtgtctcgctgtc

SEQ ID NO: 29522 - DNA, 120 bp, Artificial Sequence
  ENSG00000044115_51 (sequence is synthesized)
cagcctcccaaagtgttgtgattacaggcctgagccagggtgcctgaccccatctggatatttattcagcgaaagaataattttttaatccacctaagagctcacagtgtaataggggag

SEQ ID NO: 29523 - DNA, 120 bp, Artificial Sequence
  ENSG00000044115_52 (sequence is synthesized)
agttccaggcagagggaacagccaaggcaagagcactgaggataccccaaaccaagacagatgtctcacaaaacacaagcagagatgtcagtcttcaggcctcgcatggagaagatgaaa

SEQ ID NO: 29524 - DNA, 120 bp, Artificial Sequence
  ENSG00000044115_53 (sequence is synthesized)
tgtcctcaggtaaagtacaactgacactggtgacagcataaccaaattaaattttgattcaagtggagatgaggtttattttgttaagttttgttttgtttttaggattttagatggaag

SEQ ID NO: 29525 - DNA, 120 bp, Artificial Sequence
  ENSG00000044115_54 (sequence is synthesized)
tcttggggacagatcactgacacagaacccacatagtttggaatattttttgtttaacattaagtgacatttgcacgggagattacatgttactcctggcccttcattgaaaatgcacag

SEQ ID NO: 29526 - DNA, 74 bp, Artificial Sequence
  ENSG00000044115_55 (sequence is synthesized)
tcccaaagtggatgggtcagttgagcccaggaatctgagaccagcctgggcaacatagcaaaacaccatctctt

SEQ ID NO: 29527 - DNA, 120 bp, Artificial Sequence
  ENSG00000044115_56 (sequence is synthesized)
ttctgaaacacaaatggacaaaaatgaaagaaaatcttgccttctacaggcaattaaaaagggaggtttttgcttttaaatgagaaaggaaaatacctttttggtactactgtcattcac

SEQ ID NO: 29528 - DNA, 120 bp, Artificial Sequence
  ENSG00000044115_57 (sequence is synthesized)
gtctcactgtgttgcccaggttggagtgcagtggcgtaacctcccaggctccattgatctccctccttagcctcccagatagctgggactacagcagcatgtcagcattccgtctgcagt

SEQ ID NO: 29529 - DNA, 120 bp, Artificial Sequence
  ENSG00000044115_58 (sequence is synthesized)
aggagggggttgggcagtcgctggcgctgccgctggtggtccctgtgcttgaagtgccggtggtatcggagtccatgcacccaaggcccagcacccagcaacattctctggcccagcaga

SEQ ID NO: 29530 - DNA, 120 bp, Artificial Sequence
  ENSG00000044115_59 (sequence is synthesized)
agcttgttgtctctgggaactgtgacacctgcggggcactgcaagggctgaaaggctggcctcctcccctttgctggccactcactgggtggacagcgccatgtccctgatccaggcagc

SEQ ID NO: 29531 - DNA, 120 bp, Artificial Sequence
  ENSG00000044115_60 (sequence is synthesized)
ctgccgattctgcatagagagatcatctaaatgggcagaagcctgcacaatttatgaagtgctgatttaacaccagcctatgcaaggctggacgtaaagaaagaagtgatgcactcaatt

SEQ ID NO: 29532 - DNA, 120 bp, Artificial Sequence
  ENSG00000044115_61 (sequence is synthesized)
gggcagtcgctggcgctgccgctggtggtccctgtgcttgaagtgccggtggtatcggagtccatgcacccaaggcccagcacccagcaacattctctggcccagcagaggggatacccc

SEQ ID NO: 29533 - DNA, 120 bp, Artificial Sequence
  ENSG00000044115_62 (sequence is synthesized)
gtactgggatagtccgcagggagttggaacgtaaatgcaaggtctgcagcttccgaaggccatagaagagctctgggtgcagagatgacagctgattaaaagacaggtccaaattttgca

SEQ ID NO: 29534 - DNA, 120 bp, Artificial Sequence
  ENSG00000044115_63 (sequence is synthesized)
ggagggaattttgtacttttagaggccaatattagtgtttttcccactatgaagctcctgtgtaattgctgtttaaatgttagaagaccatgcgcaaactcgagagctaagtttgggttg

SEQ ID NO: 29535 - DNA, 120 bp, Artificial Sequence
  ENSG00000044115_64 (sequence is synthesized)
ctttttgagtagttgttaacaggaatgaaaattcctaggatgccatcttctttacagacctacattcagaatttttgggttttggggtctttcttattttataggtggaagatggtatct

SEQ ID NO: 29536 - DNA, 120 bp, Artificial Sequence
  ENSG00000044115_65 (sequence is synthesized)
gtttgacagcttttctttgaagtaagatatttatggatgaggagttttctataacatgttggatctgagatgttttcactataaataccaaatatgtccttgactccttgatttttggga

SEQ ID NO: 29537 - DNA, 120 bp, Artificial Sequence
  ENSG00000044115_66 (sequence is synthesized)
tggctaagtggctctttcctctctccagcttattgagaaattttcaacttataaaaatcatacagtgaatacctaggaaatttatctgtattcatcaattaacatgtagatacatgtgta

SEQ ID NO: 29538 - DNA, 120 bp, Artificial Sequence
  ENSG00000044115_67 (sequence is synthesized)
ggtgtgtgtatatataaatgtatatgtatgtatggtatatacacaaacatccttttttcccccgaagcctttggaagaaagttgtagacattgtgatgcttcacctctaatattttagca

SEQ ID NO: 29539 - DNA, 120 bp, Artificial Sequence
  ENSG00000044115_68 (sequence is synthesized)
tgcctctccaaagaataatgaccttctataccactaaagtttcattatcccaagtaggtggctaattttgggcaaaagggaatgttgaaaacctgcctcctcaatatttatagttgtgaa

SEQ ID NO: 29540 - DNA, 120 bp, Artificial Sequence
  ENSG00000044446_0 (sequence is synthesized)
gctttccaaccggactttggggctagcgtttagaaaagtctcgacctcctccggcccggtcccatcccaagaaccgactaaggctgtgagtgtccgggaaccagacccgcttggaggcca

SEQ ID NO: 29541 - DNA, 120 bp, Artificial Sequence
  ENSG00000044446_1 (sequence is synthesized)
cagccccgacgtcccgcgcccacgcggcagatcgggcgctgcggcctgggagcctcggggagatgcggagcaggagcaattccggggtccgcttggacgggtacgcgcggctggtgcagc

SEQ ID NO: 29542 - DNA, 120 bp, Artificial Sequence
  ENSG00000044446_2 (sequence is synthesized)
aaaccatcctgtgttaccagaatcccgtcacggggctgctgtcagccagccatgagcagaaggatgcctgggtgcgggataacatctacagtatcctggccgtgtggggcctgggcatgg

SEQ ID NO: 29543 - DNA, 120 bp, Artificial Sequence
  ENSG00000044446_3 (sequence is synthesized)
cctaccgtaagaatgcagaccgcgatgaggacaaggccaaggcctacgagctggagcagaacgtggtgaagctgatgcgaggtcttctccagtgcatgatgagacaggtggccaaagtgg

SEQ ID NO: 29544 - DNA, 120 bp, Artificial Sequence
  ENSG00000044446_4 (sequence is synthesized)
agaagttcaaacacactcagagcaccaaggacagcctgcacgccaagtacaacaccgccacctgtggcacggtggtgggcgacgaccagtggggccacctccaggtggatgccacctctc

SEQ ID NO: 29545 - DNA, 120 bp, Artificial Sequence
  ENSG00000044446_5 (sequence is synthesized)
tcttcctcctgttcctggcccagatgaccgcctcaggcttacgtatcattttcactctcgatgaggtggccttcatacagaatcttgtcttttacatagaagctgcatataaagtcgctg

SEQ ID NO: 29546 - DNA, 120 bp, Artificial Sequence
  ENSG00000044446_6 (sequence is synthesized)
attatggaatgtgggagcgtggagataagactaatcagggcatcccggaattgaatgcaagctccgtaggaatggccaaggcagctcttgaggcaattgatgaactggacctttttggag

SEQ ID NO: 29547 - DNA, 120 bp, Artificial Sequence
  ENSG00000044446_7 (sequence is synthesized)
cccatggaggacgcaagtcagtgattcatgttctgccagatgaggtcgagcactgccagtctattctgttctccatgctgccaagagcgtcgacatctaaagaaattgatgctggacttc

SEQ ID NO: 29548 - DNA, 120 bp, Artificial Sequence
  ENSG00000044446_8 (sequence is synthesized)
tttccattatttccttcccggcctttgcagtggaagatgtaaaccttgtaaatgtgaccaaaaatgaaattatttctaagctccaggggcgttatggatgctgtcgcttccttcgagatg

SEQ ID NO: 29549 - DNA, 120 bp, Artificial Sequence
  ENSG00000044446_9 (sequence is synthesized)
gttataaaactccaagagaggaccctaatcgactgcattatgaccctgctgaactcaagctcttcgaaaacattgaatgtgagtggcctgtgttttggacatattttataatagatggag

SEQ ID NO: 29550 - DNA, 120 bp, Artificial Sequence
  ENSG00000044446_10 (sequence is synthesized)
tcttcagtggtgatgctgttcaggtccaagaataccgagaggccctggagggaatactcatcagaggcaagaatgggatccgcctggtgcctgaactctacgctgtcccgcctaacaagg

SEQ ID NO: 29551 - DNA, 120 bp, Artificial Sequence
  ENSG00000044446_11 (sequence is synthesized)
tagatgaagagtacaagaatcctcacacagtagaccgagttcctatggggaaggtgcctcatctgtggggccaatccttgtacatcctcagctcgctgttggcagagggattccttgccg

SEQ ID NO: 29552 - DNA, 120 bp, Artificial Sequence
  ENSG00000044446_12 (sequence is synthesized)
ctggtgaaatcgatcccttaaatagaagattttccacttcagtcaaacctgatgttgtagtacaagttactgttttggcagaaaacaatcacattaaggacttattgaggaaacacgggg

SEQ ID NO: 29553 - DNA, 120 bp, Artificial Sequence
  ENSG00000044446_13 (sequence is synthesized)
tgaacgtccagagtatcgcggacattcatccaattcaagtccagccgggccggattcttagtcacatatatgccaagcttggacggaataagaatatgaatttgagtgggcgaccgtatc

SEQ ID NO: 29554 - DNA, 120 bp, Artificial Sequence
  ENSG00000044446_14 (sequence is synthesized)
gacatattggtgtccttggaacctctaaactatatgtgattaggaaccaaatctttacttttacaccccagttcaccgaccagcatcacttctacctggccctcgacaatgagatgatcg

SEQ ID NO: 29555 - DNA, 120 bp, Artificial Sequence
  ENSG00000044446_15 (sequence is synthesized)
tggagatgctaaggatcgagctggcctacctgtgcacctgctggaggatgacgggcagacccacactcaccttccccatcagtcgcaccatgctcacaaatgatggctcagacattcatt

SEQ ID NO: 29556 - DNA, 120 bp, Artificial Sequence
  ENSG00000044446_16 (sequence is synthesized)
ctgctgtgctctccacaattagaaaactagaggatggatattttggaggagccagagtaaaattagggaacctttcggaatttctcaccacatcgttctacacatatctgacttttctgg

SEQ ID NO: 29557 - DNA, 120 bp, Artificial Sequence
  ENSG00000044446_17 (sequence is synthesized)
atccagactgtgatgagaagttgtttgacaatgccagcgaagggactttcagtcctgatagtgattcagatttggtaggatatctggaagacacctgtaatcaagaaagccaagacgaac

SEQ ID NO: 29558 - DNA, 120 bp, Artificial Sequence
  ENSG00000044446_18 (sequence is synthesized)
ttgaccattatatcaaccaccttctgcaaagcacatcgttgaggtcctatctgcctcctctttgtaagaacacagaagaccgccatgtcttcagtgctatccactccacgcgggacatac

SEQ ID NO: 29559 - DNA, 120 bp, Artificial Sequence
  ENSG00000044446_19 (sequence is synthesized)
tttctgtgatggcaaaagcaaagggtttggaagttccatttgttcccatgactttgccgactaaagttctaagtgcccaccgtaaatcactgaatcttgttgattctcctcagccactcc

SEQ ID NO: 29560 - DNA, 120 bp, Artificial Sequence
  ENSG00000044446_20 (sequence is synthesized)
tagaaaaggttcctgaaagtgactttcagtggcccagagatgaccatggtgacgtggactgtgagaagctggttgagcagctaaaagattgttcgaacctacaggaccaagcagacattc

SEQ ID NO: 29561 - DNA, 120 bp, Artificial Sequence
  ENSG00000044446_21 (sequence is synthesized)
cacaaatctctctggacagcacggggtcaccgttcaaaaccttcttggtgagctctatgggaaagccggcttgaaccaggagtggggtctgattcgctacatctcaggccttctcaggaa

SEQ ID NO: 29562 - DNA, 120 bp, Artificial Sequence
  ENSG00000044446_22 (sequence is synthesized)
gaaagtggaggtcctggctgaggcctgcacagacctgctttcgcaccagaagcagctcaccgtgggcctgccgcccgagccccgggagaagatcatctctgcgccccttcccccagagga

SEQ ID NO: 29563 - DNA, 120 bp, Artificial Sequence
  ENSG00000044446_23 (sequence is synthesized)
gctcacaaaactcatctacgaggccagtgggcaggacatcagcattgccgtcctcacgcaggagattgtggtttacctggccatgtatgtcagggcgcagcccagcctctttgtggagat

SEQ ID NO: 29564 - DNA, 120 bp, Artificial Sequence
  ENSG00000044446_24 (sequence is synthesized)
gctgagactccggattggactgatcattcaggtgatggccacggagctggcacggagcctgaactgctcaggagaagaggcttctgaaagtttgatgaacctcagccctttcgatatgaa

SEQ ID NO: 29565 - DNA, 120 bp, Artificial Sequence
  ENSG00000044446_25 (sequence is synthesized)
aaatctcctgcaccatattctaagtgggaaagagtttggcgttgaaagaagtgtgcgccctatccactcctccacatccagccctaccatctccatccacgaggtgggccataccggagt

SEQ ID NO: 29566 - DNA, 120 bp, Artificial Sequence
  ENSG00000044446_26 (sequence is synthesized)
caccaaaactgagaggagtggcattaacagactgaggagtgaaatgaaacagatgactaggcggtttagtgctgatgaacagttcttttctgtgggccaggccgcgtccagcagtgcgca

SEQ ID NO: 29567 - DNA, 120 bp, Artificial Sequence
  ENSG00000044446_27 (sequence is synthesized)
ttcctccaagtctgcgaggtccagcaccccatcctcgcccactggcacgtcatcctcagactcgggaggacatcacatcggctggggtgagcggcagggccagtggctgcgcaggagaag

SEQ ID NO: 29568 - DNA, 120 bp, Artificial Sequence
  ENSG00000044446_28 (sequence is synthesized)
gctggatggggccatcaacagggtccccgtgggattctaccagagggtgtggaagatcctccagaagtgccacggtctctccatcgatggttatgtcctcccatcctcgacgacccgaga

SEQ ID NO: 29569 - DNA, 120 bp, Artificial Sequence
  ENSG00000044446_29 (sequence is synthesized)
gatgaccccgcatgagatcaagtttgctgtccatgtcgaatcggtgctgaaccgcgtgccgcagcccgagtaccggcagctgctggtggaagccatcatggtgctgacgctgctctcgga

SEQ ID NO: 29570 - DNA, 120 bp, Artificial Sequence
  ENSG00000044446_30 (sequence is synthesized)
cacggagatgaccagcatcgggggcatcatccacgtggaccagatcgtgcagatggccagtcagctgttcttgcaggaccaggtgtcaattggtgccatggacaccctggagaaagacca

SEQ ID NO: 29571 - DNA, 120 bp, Artificial Sequence
  ENSG00000044446_31 (sequence is synthesized)
agccacaggaatctgccacttcttttatgacagcgctccgagtggggcttatgggacgatgacctacctaacaagagcagtggcttcttatttgcaggaattgttgcccaattcgggctg

SEQ ID NO: 29572 - DNA, 120 bp, Artificial Sequence
  ENSG00000044446_32 (sequence is synthesized)
ccagatgcaatagggtctcacctggaaacatgatcacactctcaatctgtcacgtgccccctagccttactgggaaccttctgtcccccaagatcccctgtgctatcaggaaagcatgtc

SEQ ID NO: 29573 - DNA, 120 bp, Artificial Sequence
  ENSG00000044446_33 (sequence is synthesized)
ccatcagaaacactctcggggggcaatggtagcactcaccctgaaactgatgtatgttaaagccacagagatagagctgaggagtcctgtgttcccccgcaaggagcaccccgggatcat

SEQ ID NO: 29574 - DNA, 120 bp, Artificial Sequence
  ENSG00000044446_34 (sequence is synthesized)
tttctaggttcatttctctggaacatttgctgtagcatctggtctcacggactctgaggaggaattggaaattggtctcttttgagtgcagagggaactgagacgccagcttaaattggc

SEQ ID NO: 29575 - DNA, 120 bp, Artificial Sequence
  ENSG00000044446_35 (sequence is synthesized)
tcttgcagagagttacagaaatagtttcgatgagctagtgacacatcctaaagatgcaaagatcctcctggcggcagtagccttgacaagggccacctcttcacaggatgcagtctgtct

SEQ ID NO: 29576 - DNA, 120 bp, Artificial Sequence
  ENSG00000044446_36 (sequence is synthesized)
gtgcaccaaactcttcaccaaatagaacacttgtgtctctctgtggaatgggggttttcttgtgccttgcttgctttcatagccttccattttattggcatggctgccttgatgtaacat

SEQ ID NO: 29577 - DNA, 120 bp, Artificial Sequence
  ENSG00000044446_37 (sequence is synthesized)
aattctctgtccccaagatttagaaaattcctcttcgttcaccttggctcatggtcttccagggtttttatcctggctgtctatgaactagggttttctcctgccttaggaaaaatactg

SEQ ID NO: 29578 - DNA, 120 bp, Artificial Sequence
  ENSG00000044446_38 (sequence is synthesized)
catcttctggaatctagaaaaaaaaaaaaaaaaagacaaggctcctcttatagccaggcaagcagttgtttagggctagacctgttgtccccgctcgcgtggggtgaacgccccgcagtg

SEQ ID NO: 29579 - DNA, 120 bp, Artificial Sequence
  ENSG00000044446_39 (sequence is synthesized)
gatactgtcctcctgtgctctgggcgaggcgtcatagggtgagcacaagtcagcagtgccatggaagtgaacaggcatgtccccgcagaaacaatgcttccctctgaaaaatagagccag

SEQ ID NO: 29580 - DNA, 120 bp, Artificial Sequence
  ENSG00000044446_40 (sequence is synthesized)
gctaggaacctgtaccctcttggtagaagcactttggtcttcactctcttgggtgggtgcagttggaggcaccgattggaggagagcaaggttgagtcaggtgtcagggtctggcaaatc

SEQ ID NO: 29581 - DNA, 120 bp, Artificial Sequence
  ENSG00000044446_41 (sequence is synthesized)
ttttgccaatgccctagcaatggagtttctctccgggcattgtcttaccttgggggaaggaaacaaaaccaatgggaaaacagtttctgtaaataataaaccttgaaagacaaatgctca

SEQ ID NO: 29582 - DNA, 120 bp, Artificial Sequence
  ENSG00000044446_42 (sequence is synthesized)
gggggtgccagggagctgggttggctggcatttatctctgttgaggctggagattctgtgtccaataggaaagaatatactcgaaccaagaaaatgtcatcacagatgatggggaaaaaa

SEQ ID NO: 29583 - DNA, 120 bp, Artificial Sequence
  ENSG00000044446_43 (sequence is synthesized)
caggagtagtgtccctgctgttcagcgatgtgactgagccccaccctcccagggtacctgccgtgttcagtcccaaggtgtacagaggtggagagcttccagtttagccccaggtcctgt

SEQ ID NO: 29584 - DNA, 120 bp, Artificial Sequence
  ENSG00000044446_44 (sequence is synthesized)
gtgccctgaaggcacaatctccctcacaccctggggccccactcccctcagccagccggctgttgcgcttcccatctgcctggggccgttcacgtctccccagctgttgtccctgggaac

SEQ ID NO: 29585 - DNA, 120 bp, Artificial Sequence
  ENSG00000044446_45 (sequence is synthesized)
tgtggtgcctgtacctgagcacaggagcacctccctgagcgcctgttgtcaaggaggggggcagcattctctgtacccccccagtgtctcccttctgcatcagcccgagagagtttatgc

SEQ ID NO: 29586 - DNA, 120 bp, Artificial Sequence
  ENSG00000044446_46 (sequence is synthesized)
agctccctgggctgcaccaggccctccctgtcttttcccttgaatggaaggacagtgtgcctcgcttaaaagctgtgcaaaccaagacatttttttccccccagaactattttttagttc

SEQ ID NO: 29587 - DNA, 120 bp, Artificial Sequence
  ENSG00000044446_47 (sequence is synthesized)
atttcacagtgggagagaagagaaaaaataatcccagtgacagcatacaacagcccccttcccaaagccatggcaccacttgctcaaggttctttctgtaacaggggcccctgtgcttca

SEQ ID NO: 29588 - DNA, 120 bp, Artificial Sequence
  ENSG00000044446_48 (sequence is synthesized)
tgggccccaaggtattcctcacggccaccgcagagggatgtgaggaggtcggagcaggccctgcccgagcagctggactcctgggacccaggcaggatcctgcaggggctcatggtgctt

SEQ ID NO: 29589 - DNA, 120 bp, Artificial Sequence
  ENSG00000044446_49 (sequence is synthesized)
gctccacttcccgcctctcttaagggggtgggagtgtccactgctgttctgccctcagcccactggggacgctccaggccggggtgctgggatttagaaggtggccagttagactagaac

SEQ ID NO: 29590 - DNA, 120 bp, Artificial Sequence
  ENSG00000044446_50 (sequence is synthesized)
aagctgttcctagaaaatttccccactcttcctggggcatcacatgcttccgctcggactcactggcgcaataccaagatatttctattatgaaaaagcattttgtgttgagctggcact

SEQ ID NO: 29591 - DNA, 120 bp, Artificial Sequence
  ENSG00000044446_51 (sequence is synthesized)
cgatatttatatacatgggtgtgcatgtgcatgtctgtgcatgtgctggaggcttttgtgattggtgcttattatagaaatctcaaaaatagatgcctgcaaaggcacagaagcatccct

SEQ ID NO: 29592 - DNA, 120 bp, Artificial Sequence
  ENSG00000044446_52 (sequence is synthesized)
tccccagcaggagccatgaaaatccccctttattatggcaccaaaggggcctcgcagccgcccgggcccagttgccaagtacaatgcggagcctcccgggaggactcggcagccccctag

SEQ ID NO: 29593 - DNA, 120 bp, Artificial Sequence
  ENSG00000044446_53 (sequence is synthesized)
ggcattgttcgggggagatctgaaagatgcctgctgggttccctagaattgttccatcgaaaacacagcctgtgggcagtgagaacaagctctctaaaaataactctgacagtctggcgt

SEQ ID NO: 29594 - DNA, 120 bp, Artificial Sequence
  ENSG00000044446_54 (sequence is synthesized)
gtcccagccctcatatgggtttccagggcagagggtgctgtgtgtgcatgcacgcctgtgtgtgcatgcatgtgcttatcccattctggaatctgactgaaatgcgctctattctgcctc

SEQ ID NO: 29595 - DNA, 120 bp, Artificial Sequence
  ENSG00000044446_55 (sequence is synthesized)
tgcatggactctgacctcttgtgctccttttgggctcattctaattgacaggccatttgtagctctgagctgtctagccccttcaccctcatatttggcaaaaatgtctttccagcattt

SEQ ID NO: 29596 - DNA, 120 bp, Artificial Sequence
  ENSG00000044446_56 (sequence is synthesized)
attggcatcagcctttttcttcacctgagactcagcatttctgggctagcaagctctttgcatttgccagacaccccttagaaccctggtgaaagaaaggagccaatctccatgccaccc

SEQ ID NO: 29597 - DNA, 120 bp, Artificial Sequence
  ENSG00000044446_57 (sequence is synthesized)
tggcctgccccatgggcagccttctcggcccttttctccaactaaaaacagtaatcgtccctaggtgatttgtcattctttttaacatggatttttttttagttttaccccacccaaagc

SEQ ID NO: 29598 - DNA, 120 bp, Artificial Sequence
  ENSG00000044446_58 (sequence is synthesized)
accatgcttcatgctggaaggaataatgaagaggaaagagaaaccagaaatggtccctgctccctggaagctgtagtcgatggggggaagggtagataaatcaggcgaggacaggctggc

SEQ ID NO: 29599 - DNA, 120 bp, Artificial Sequence
  ENSG00000044446_59 (sequence is synthesized)
tcctggaggcatactccagcctcctgctctgagggccactgccagcaggatccagggagtggccagaaaaggggcagcagtggcgctgagccccgagcccaggcactgctacggtcaccc

SEQ ID NO: 29600 - DNA, 120 bp, Artificial Sequence
  ENSG00000044446_60 (sequence is synthesized)
ttaagataaagcccagtgccaagaatagggaaagccggaaatgggattgcaaagggtgggtggatggaccctgatctgcgaggtcctcgccactaaacgcgggcttcactgtttgtcttc

SEQ ID NO: 29601 - DNA, 120 bp, Artificial Sequence
  ENSG00000044446_61 (sequence is synthesized)
ccccgtgtcatgtattgccttctctgtggttcctgtcctgtggaaacgtgtctgtcacttctctgtggcactgcagcaatgaagtgggcactatggagtttgtctccctgagccatggat

SEQ ID NO: 29602 - DNA, 120 bp, Artificial Sequence
  ENSG00000044446_62 (sequence is synthesized)
gcctgctccgagggcccgttgtcaccctcaaagctctcccactgcagtggcacaggcgccacgtgcgggtgacagctgcccctcatgggcacttagcgcacactaggtatgcctcagggg

SEQ ID NO: 29603 - DNA, 120 bp, Artificial Sequence
  ENSG00000044446_63 (sequence is synthesized)
cttctgtgtctccacgtggtgaaggcttccgggcagctctttataggatgcctgactgtgtccccactgtgcagatgagactgaggcccagaatcagtgttcatggcagggccagacggc

SEQ ID NO: 29604 - DNA, 120 bp, Artificial Sequence
  ENSG00000044446_64 (sequence is synthesized)
ctcgggtgtgtccttggcaccgctggcattgagtggggattagcactccggcagtctgacccccaagcccgtgctcgccctgttcggcctcctccttatgggttctagctttgggggtgg

SEQ ID NO: 29605 - DNA, 120 bp, Artificial Sequence
  ENSG00000044446_65 (sequence is synthesized)
gactgcctctcggggggcagggcagagtgcaacatggaatgaagtgatcaacccaaagtatgcgagtcatctcacatgaggaaacagacaaggtggactggaggaaccgtgttcctctct

SEQ ID NO: 29606 - DNA, 120 bp, Artificial Sequence
  ENSG00000044446_66 (sequence is synthesized)
ggcgagtggtgttctggcatttgtgcctaggtcgcagggccgcccttcgagatggcgcactttccctggggcacctgctgcgtggcttctgaggccccaagctgtctgtcttgcagaggt

SEQ ID NO: 29607 - DNA, 120 bp, Artificial Sequence
  ENSG00000044446_67 (sequence is synthesized)
ccccatcagtcgcaccatgctcagtaactccagggatttcagcaggctccctcctgccccaggggtggtttgggctcttacaaatgtttaaaatggctcccatggccagaactaagcact

SEQ ID NO: 29608 - DNA, 120 bp, Artificial Sequence
  ENSG00000044446_68 (sequence is synthesized)
gaaggggcttcttagcagtttggtttcttatctcgggaatcttctatgccagaaatattttaattagatggtgttgatgaaaatgtttcagtgcataacggaaaaaaagtctgcccagac

SEQ ID NO: 29609 - DNA, 120 bp, Artificial Sequence
  ENSG00000044459_0 (sequence is synthesized)
aacttgacccgttagcagccgcagccatggcggcgcgttcgcctccctcaccgcacccttcgcccccagcgcgacagctgggccccaggtccccacgtgttgggcggggagctgaagtac

SEQ ID NO: 29610 - DNA, 120 bp, Artificial Sequence
  ENSG00000044459_1 (sequence is synthesized)
acgcaatgcgcagcgaggcctcgggttttgccggcgcagcgcgggaggtggtcgcggacgaaagtgataaaatctgggtgggtgaagaagggtcagggggccggcgagggcctggggggg

SEQ ID NO: 29611 - DNA, 120 bp, Artificial Sequence
  ENSG00000044459_2 (sequence is synthesized)
cagctccggctcatgctcccctcctcagcgcgcccatggggtccagacggctagagggcatctcggtagaggaggcgatggtgacccggacgcagctgctggaggaagagctgagcagcc

SEQ ID NO: 29612 - DNA, 120 bp, Artificial Sequence
  ENSG00000044459_3 (sequence is synthesized)
taaaggaggagttggccctgtgtcaggctgataaagaatttgtatggtctttgtggaaacgtctccaggttacaaacccagatctcacacaagtggtcagtttggttgtggaaagagaaa

SEQ ID NO: 29613 - DNA, 120 bp, Artificial Sequence
  ENSG00000044459_4 (sequence is synthesized)
aacagaaatctgaagctaaagacagaaaagttctagaaattctgcaagtcaaggatgccaaaatacaagaatttgaacagagagagtcagtactgaaacaggaaataaatgaccttgtaa

SEQ ID NO: 29614 - DNA, 120 bp, Artificial Sequence
  ENSG00000044459_5 (sequence is synthesized)
aacggaaaattgcagtagatgaagaaaatgctttcttaaggaaagaattcagtgacttggagaagaaatttaaagataaaagtcaagaaattaaggacactaaggagtgtgtacagaaca

SEQ ID NO: 29615 - DNA, 120 bp, Artificial Sequence
  ENSG00000044459_6 (sequence is synthesized)
aagaagagcaaaacagactagttataaaaaatctggaggaggaaaacaagaaattaagtacccgctgcactgacctgctaaatgacctggagaaattgaggaagcaggaagcacatttga

SEQ ID NO: 29616 - DNA, 120 bp, Artificial Sequence
  ENSG00000044459_7 (sequence is synthesized)
gaaaagaaaaatatagcactgatgcaaaaataaagacctttgaagacaatttaattgaagcaaggaaagaagttgaagtatcacagagtaaatacaatgctctatcattacagttgagta

SEQ ID NO: 29617 - DNA, 120 bp, Artificial Sequence
  ENSG00000044459_8 (sequence is synthesized)
ataaacagactgaacttatccagaaggatatggatattaccctggtcaggaaggaactgcaggagctgcagaatctttacaaacagaacagtacacatacagcccagcaagcagagctga

SEQ ID NO: 29618 - DNA, 120 bp, Artificial Sequence
  ENSG00000044459_9 (sequence is synthesized)
tccagcagcttcaggttctcaatatggacacacaaaaagtactgagaaatcaggaagatgttcacacagctgaaagtatatcatatcaaaaactttacaatgagttacatatttgttttg

SEQ ID NO: 29619 - DNA, 120 bp, Artificial Sequence
  ENSG00000044459_10 (sequence is synthesized)
aaaccacaaaatcaaatgaagctatgctccggcaaagtgttactaatcttcaggatcagctattacaaaaagagcaagaaaatgctaagttaaaagaaaaacttcaggaatcacagggag

SEQ ID NO: 29620 - DNA, 120 bp, Artificial Sequence
  ENSG00000044459_11 (sequence is synthesized)
cacctcttcctttacctcaagaaagtgatccagactactcagcacaggtacctcatcgcccatccttatcaagcttagaaacgttaatggtttcacagaagtctgaaattgagtatttac

SEQ ID NO: 29621 - DNA, 120 bp, Artificial Sequence
  ENSG00000044459_12 (sequence is synthesized)
aggagaaactaaagatagcaaatgaaaaactgtcagaaaacatatctgccaacaagggtttctcccgaaagagcatcatgacaagtgctgaaggaaaacataaggaaccacctgtgaaac

SEQ ID NO: 29622 - DNA, 120 bp, Artificial Sequence
  ENSG00000044459_13 (sequence is synthesized)
gttcaaggtctttgtccccaaagagctctttcacagactcagaagagctacagaagctgagaaaagctgaaagaaagattgaaaacttagagaaggcactacaactaaagagccaagaaa

SEQ ID NO: 29623 - DNA, 120 bp, Artificial Sequence
  ENSG00000044459_14 (sequence is synthesized)
atgatgagctaagagatgcccatgaaaaacgcaaggaacggctacagatgttacagaccaactacagagcagtaaaagagcaattaaaacagtgggaagaaggcagtggcatgactgaaa

SEQ ID NO: 29624 - DNA, 120 bp, Artificial Sequence
  ENSG00000044459_15 (sequence is synthesized)
tcaggaaaataaagagagcagatccccaacaacttcgacaagaagattctgacgctgtgtggaatgaactggcatatttcaaaagggaaaaccaggagctaatgattcaaaagatgaatc

SEQ ID NO: 29625 - DNA, 120 bp, Artificial Sequence
  ENSG00000044459_16 (sequence is synthesized)
ttgaagaagaattagatgaacttaaagtacatatatctattgataaggcagcaatacaagaattgaatagatgtgtggcagagagaagagaagaacagctctttagatctggtgaagatg

SEQ ID NO: 29626 - DNA, 120 bp, Artificial Sequence
  ENSG00000044459_17 (sequence is synthesized)
atgaggtcaagaggagtactccagagaagaatggaaaagaaatgttggagcagacattacagaaggtcactgagttggaaaatcggctgaaatcttttgagaaaaggtcgagaaaattaa

SEQ ID NO: 29627 - DNA, 120 bp, Artificial Sequence
  ENSG00000044459_18 (sequence is synthesized)
aagaagggaataaaaaattaatgaaagaaaatgattttctgaaatccctcttaaaacagcaacaagaagatacagagaccagagaaaaagagctagaacagataataaaggggagtaaag

SEQ ID NO: 29628 - DNA, 120 bp, Artificial Sequence
  ENSG00000044459_19 (sequence is synthesized)
atgtagaaaaagaaaatactgaacttcaagtaaaaatcagtgagctggagacagaagtcacttccctgaggagacaagtggcagaagctaatgcattgagaaatgaaaatgaagagctga

SEQ ID NO: 29629 - DNA, 120 bp, Artificial Sequence
  ENSG00000044459_20 (sequence is synthesized)
tcaacccaatggagaaatcacaccagtcagcagacagagctaaatccgagatggccaccatgaaagtgagatctggacgatatgattgtaagacaactatgaccaaggttaaatttaaag

SEQ ID NO: 29630 - DNA, 120 bp, Artificial Sequence
  ENSG00000044459_21 (sequence is synthesized)
ctgcgaagaaaaattgctctgtgggtcgtcaccacactgttctcaatcattccatcaaggttatgagcaatgtgtttgagaacctcagcaaggacggctgggaggatgtgagtgaaagca

SEQ ID NO: 29631 - DNA, 120 bp, Artificial Sequence
  ENSG00000044459_22 (sequence is synthesized)
cagccaaacacaaggaaaagaaatagtacagacatatttaaatatagatggcaagaccccaaaggactattttcatgataagaatgccaaaaaaccaacttttcaaaagaagaattgcaa

SEQ ID NO: 29632 - DNA, 120 bp, Artificial Sequence
  ENSG00000044459_23 (sequence is synthesized)
gatgcaaaagagttcacatacagcagttcctactagagtcaacagagaaaagtacaaaaatataactgcccagaaatcaagtagcaatattattttattacgagaacggattatatcctt

SEQ ID NO: 29633 - DNA, 120 bp, Artificial Sequence
  ENSG00000044459_24 (sequence is synthesized)
gcaacaacaaaacagtgtacttcagaatgccaagaaaacagcagaattgtctgttaaagaatataaagaagttaatgaaaagctcctccatcaacagcaagtatccgatcaacgatttca

SEQ ID NO: 29634 - DNA, 120 bp, Artificial Sequence
  ENSG00000044459_25 (sequence is synthesized)
gacaagcaggcagacaataaagaagctaaatttggatttggctgggcttcggaaagaaaaagaagatttactaaagaaattggagtcctcatctgaaatcacaagtttggcagaagaaaa

SEQ ID NO: 29635 - DNA, 120 bp, Artificial Sequence
  ENSG00000044459_26 (sequence is synthesized)
ttcccaggtaacatttccacggatacaagttacatcacttagtccttcaaggagcatggatttggaaatgaagcaattgcagtataaactaaagaatgctactaatgaactcactaaaca

SEQ ID NO: 29636 - DNA, 120 bp, Artificial Sequence
  ENSG00000044459_27 (sequence is synthesized)
gtcatcaaatgtgaagactttgaaatttgaactcctagcaaaagaagaacacataaaggaaatgcatgaaaagatatctcgaatggagagggatataactatgaaaagacatttgataga

SEQ ID NO: 29637 - DNA, 120 bp, Artificial Sequence
  ENSG00000044459_28 (sequence is synthesized)
ggacttgaaatttcgacagaaagtaaatttggaaagtaacaagagttttagtgaaatgttacaaaatcttgataaaaaggtaaagacattaactgaagaatgttccaacaagaaggtatc

SEQ ID NO: 29638 - DNA, 120 bp, Artificial Sequence
  ENSG00000044459_29 (sequence is synthesized)
aattgattcactaaagcaaagacttaacgttgctgtaaaagaaaagtcacagtatgaacagatgtatcagaaatctaaagaggagttagaaaaaaaggatctcaagcttactctcctagt

SEQ ID NO: 29639 - DNA, 120 bp, Artificial Sequence
  ENSG00000044459_30 (sequence is synthesized)
atcaagaataagtgagactgaatctgcaatggcagaaattgaaacagcagcatctaagcagcttcaagaattagcattgcaaagtgaacaggtcctagaaggtgcacagaagacattgct

SEQ ID NO: 29640 - DNA, 120 bp, Artificial Sequence
  ENSG00000044459_31 (sequence is synthesized)
gttagccaatgaaaaagtagaagagttcaccacatttgtgaaggctttggccaaagagttgcaaaatgatgtccatgtggtaaggcgacaaataagagagcttaaaaaaatgaagaaaaa

SEQ ID NO: 29641 - DNA, 120 bp, Artificial Sequence
  ENSG00000044459_32 (sequence is synthesized)
cagggacgcctgtaaaacctcaacccataaagcccagaccttggcagcttctatcctgaacatttcacggtcagatttagaggaaatattagacacagaagatcaagtggaaattgaaaa

SEQ ID NO: 29642 - DNA, 120 bp, Artificial Sequence
  ENSG00000044459_33 (sequence is synthesized)
aacaaaaattgatgctgaaaatgacaaggaatggatgttgtacattcagaaacttcttgaaggacagcttccttttgcctcatatttactagaagcagtactggaaaaaataaatgaaaa

SEQ ID NO: 29643 - DNA, 120 bp, Artificial Sequence
  ENSG00000044459_34 (sequence is synthesized)
aaagaaactagttgaaggatatttcacaattatgaaagatattagatgatattaaaatggagagctttattgcaaatgtgaaaactttttatgtggtgtgattggaatacatgcattgca

SEQ ID NO: 29644 - DNA, 120 bp, Artificial Sequence
  ENSG00000044459_35 (sequence is synthesized)
atcctgacacggtatctgctccaactatcaatagtcaggttcaataccaaaataagaagtctctgaaaataattaattgctgaacaagtgaaactaattaagtacatagccatttaaaag

SEQ ID NO: 29645 - DNA, 120 bp, Artificial Sequence
  ENSG00000044459_36 (sequence is synthesized)
gaaatagtgtagcatctgatggtcgaatacaaatattgccacaaatcagtgcaaacttaaaaatgattttccttctagtgcattaaaagaaactgagcaggcttggtacacacaaattgg

SEQ ID NO: 29646 - DNA, 120 bp, Artificial Sequence
  ENSG00000044459_37 (sequence is synthesized)
cctgagcataagaagaaaaagtatcaactaaggatttaatgttttacgtttcatgaagaaactagactttttacataaaactgctatagatggccataagtggtccagggagcaacagat

SEQ ID NO: 29647 - DNA, 120 bp, Artificial Sequence
  ENSG00000044459_38 (sequence is synthesized)
ttgtagtatgagcaaatataaaatgaagcatcataacttgagcatttattgaaataaattgtgtggtccaattgaatctgttctcattgatgtgctggtttatgtaggagatactgtgta

SEQ ID NO: 29648 - DNA, 120 bp, Artificial Sequence
  ENSG00000044459_39 (sequence is synthesized)
tttctacaactctttggcaaaaacaaaaacattttcttcttctctctcttaacttcacaatactatacgttgtgtagtcatataaatttgcagggaaccacaaacccaatgtataaaatt

SEQ ID NO: 29649 - DNA, 120 bp, Artificial Sequence
  ENSG00000044459_40 (sequence is synthesized)
aggctctatttaacagaactactactgtggtcagctaatttaagttacattcttaaccatgatgtcatccttatttagattcctggacattcccacctcatttcacctcttcaccgtgtt

SEQ ID NO: 29650 - DNA, 120 bp, Artificial Sequence
  ENSG00000044459_41 (sequence is synthesized)
cctgccataccctttttggttcctctaattcaccatactggtgcctgcctcccacatttgcccttggtcttctctctttctagaatactctgcactcaactttcctcatggctggctcct

SEQ ID NO: 29651 - DNA, 120 bp, Artificial Sequence
  ENSG00000044459_42 (sequence is synthesized)
tgtcatcattcagctccaccttccccggtccctcagagacacattctctgaccagcttactattttatttcctcatagcacaaaattatctatctgttcatgtatttgttttcttgttta

SEQ ID NO: 29652 - DNA, 120 bp, Artificial Sequence
  ENSG00000044459_43 (sequence is synthesized)
ttttcttcttttccctctttagtatgtaggtcccatgagattaaggcaagggttggcagattatagcctgcagggcgaatctggcctgccacctgttttgtatggcccacaagctaagaa

SEQ ID NO: 29653 - DNA, 120 bp, Artificial Sequence
  ENSG00000044459_44 (sequence is synthesized)
tggtttttgccttattaaatggtttttaaaaaatcaaaaggagaataatattttgtagcatgtgaaaattatataaaattcaaattttggtgtctgttaataaagttttattggaacaca

SEQ ID NO: 29654 - DNA, 120 bp, Artificial Sequence
  ENSG00000044459_45 (sequence is synthesized)
aaatgtttatgtatgaacttatgaacatatatagaattcagattttttcaaatttcagcatttaatttttacttccttttacatgtgtttcctcaaaatttagaagtgaaggatggttca

SEQ ID NO: 29655 - DNA, 120 bp, Artificial Sequence
  ENSG00000044459_46 (sequence is synthesized)
atttgataacatttaaaattttttgaattttctttatggtaattagagctgaatcacttaaaatatagatacaaacttactctatagggtattatttttataaattggcattcagacagc

SEQ ID NO: 29656 - DNA, 120 bp, Artificial Sequence
  ENSG00000044459_47 (sequence is synthesized)
ttctgtgaaacatactaggagtatagtctcaaaactggaatggaattcctcggcctgctattacaagaaattattttgtcaagtatggcagactttcattgtaaaatttgtacattattt

SEQ ID NO: 29657 - DNA, 120 bp, Artificial Sequence
  ENSG00000044459_48 (sequence is synthesized)
ttcggcaaatcttcacaaatacaaaggggattgctgaggagggctttaggatcaatattttccaggatttttctctgtttattttgtgtgtttctgttcagtagtcttttactttacagt

SEQ ID NO: 29658 - DNA, 120 bp, Artificial Sequence
  ENSG00000044459_49 (sequence is synthesized)
tgttttaggagcctttcaagaaggtttacccaagtatttaggtgtgctaactgactcagcagcaataatttaatctactaattaaaaaaaatacctttattggccgggcatggtggctca

SEQ ID NO: 29659 - DNA, 120 bp, Artificial Sequence
  ENSG00000044459_50 (sequence is synthesized)
aaaaaaaaaaaaaaacctttactgaattcttcatatgttttgtgtagtgtgctaaattattttaataaataatgtagtttatatagtgttattctcatttaatgatagtagttgaggcaa

SEQ ID NO: 29660 - DNA, 120 bp, Artificial Sequence
  ENSG00000044459_51 (sequence is synthesized)
ttattctcatttaatgatagtagttgaggcaagtgaggcttagagaggttaaataatacacagttcatattatccctctagaattactggatttttacttctgatcttacttttctaaaa

SEQ ID NO: 29661 - DNA, 120 bp, Artificial Sequence
  ENSG00000044459_52 (sequence is synthesized)
aatcactgtgaaaatcgaatgtctataattaacatgaaattaattaccttaaaacttaaacacatatttttaaatgatgctttgtaacagtggttttcagtgtgtgttttgtgttgcctt

SEQ ID NO: 29662 - DNA, 120 bp, Artificial Sequence
  ENSG00000044459_53 (sequence is synthesized)
gcctttttgttttatggggtgacattgcccactgtgttttttgtttctaaagcacgttccattgctaaaatgatttgaaacactgtactttattaatacttgttaattgttattaatact

SEQ ID NO: 29663 - DNA, 120 bp, Artificial Sequence
  ENSG00000044459_54 (sequence is synthesized)
aattaattgttttctctttttcccccattgatgactttctgttgcttggaacattttttttctgttgcttgaaacatttttttcccctcttggcttccattgtactataattgggtggct

SEQ ID NO: 29664 - DNA, 120 bp, Artificial Sequence
  ENSG00000044459_55 (sequence is synthesized)
ttcttccttcagtttttagctgtccctttttaatttctttgtggtcctccccagtctccatgtcctgtaaagtgtgaaaatgttccaggcctcactcttaggatctctccttttttttct

SEQ ID NO: 29665 - DNA, 120 bp, Artificial Sequence
  ENSG00000044459_56 (sequence is synthesized)
gtttatcctcacaccctaggtgatttcatctaatcaccttgactttcaaagttacactgcaggttcaatatcccttatctgaagtgcttggaacctgaaacctgaagtgcttcacatttt

SEQ ID NO: 29666 - DNA, 120 bp, Artificial Sequence
  ENSG00000044459_57 (sequence is synthesized)
tagcttttgagattttggaatatttgcattacatttactggctgagcatcccaaatctgaaaaattgaaatctgaaatgctccaatgagcatttcctttgagcatcatactggtgctcaa

SEQ ID NO: 29667 - DNA, 120 bp, Artificial Sequence
  ENSG00000044459_58 (sequence is synthesized)
aaatgttttggattttggagcatttcagattttttgatttgtatgctctacctgtgtctataggctgatgattcccaaatttgtaaatttgtttatctaccttggatctcttctgtatac

SEQ ID NO: 29668 - DNA, 120 bp, Artificial Sequence
  ENSG00000044459_59 (sequence is synthesized)
tctaggaaagagtatatctaattgcctacttaatatctcttcacttggattcctaatgggcatctcatactgaacgtgttcaaaacaaagctattgccttttatgttttcagtacaggtg

SEQ ID NO: 29669 - DNA, 120 bp, Artificial Sequence
  ENSG00000044459_60 (sequence is synthesized)
cagaattcgactacttcccaccacccttgctgtcaccattctgtccaggccactatcacatattacctggattattgcagtaacttgccagtttctttgttctgatcttaagccttttga

SEQ ID NO: 29670 - DNA, 120 bp, Artificial Sequence
  ENSG00000044459_61 (sequence is synthesized)
cataggtgccaggatattattgccaaaactttgtgagtcaaatcagatcactgctctcttcaagtccctccagtggtttcccagaccattaaaaataaaaaacctaagttcttactacaa

SEQ ID NO: 29671 - DNA, 120 bp, Artificial Sequence
  ENSG00000044459_62 (sequence is synthesized)
cctgtgggactctacatgttccgactctacattacctctctgatctcatctttgccttcttttcttattcactccagcaacacaaaccatgtttttattccttgaacataacaggtattt

SEQ ID NO: 29672 - DNA, 120 bp, Artificial Sequence
  ENSG00000044459_63 (sequence is synthesized)
aacctttcaaggtaatactttcttccagtgcctgaaagctttcctgcccagttatctgcatagataccattttacttcctttattctacaactcttacagtttaaaattagttgatagca

SEQ ID NO: 29673 - DNA, 120 bp, Artificial Sequence
  ENSG00000044459_64 (sequence is synthesized)
gacattaaatggtagaagcaagaaaagaatgatgtatgttgtaatagtagtagagggaaatatgggagcataactgggggcctgttccaagactaaggataaagaaagctctccttgatg

SEQ ID NO: 29674 - DNA, 120 bp, Artificial Sequence
  ENSG00000044459_65 (sequence is synthesized)
gtgtcataccagtaatactttgctgagaagataagatatcaaagagacaaattaatttctgataacttttccaaatggactctagttcaaaccagaaattccctagtgtatgtctttact

SEQ ID NO: 29675 - DNA, 120 bp, Artificial Sequence
  ENSG00000044459_66 (sequence is synthesized)
aaattgggagaagtagagcttatatgcccctatttggcgaacttgccgtaacctaaattgtgatctggggtacattttgaaaccgtaaacacttttcttctaggattatgtttatccctt

SEQ ID NO: 29676 - DNA, 120 bp, Artificial Sequence
  ENSG00000044459_67 (sequence is synthesized)
ccaagaatcattatagaaaatgagagatgtaaatgatggggttatgttgtgtttgtgaatgatattgaggcagaataaaaataaaagagaacaaactgagatgtgctaacctaataattg

SEQ ID NO: 29677 - DNA, 120 bp, Artificial Sequence
  ENSG00000044459_68 (sequence is synthesized)
gcttacttttccttgtgtttagtctgttttttgtcatttctttctctagattgaatatcatttttcttttatttttgtttctcagagattaccttggggagtgtgggagtagggggcttc

SEQ ID NO: 29678 - DNA, 120 bp, Artificial Sequence
  ENSG00000044459_69 (sequence is synthesized)
actgatacttaagttgattctcactttgaaattgtacctcccactgtaatattttaattttgtagttgttttagatgcttgtagttgttcatacagttttcattagtatcctcaactaga

SEQ ID NO: 29679 - DNA, 120 bp, Artificial Sequence
  ENSG00000044459_70 (sequence is synthesized)
ctcaatttgaaaatattcttcttatttatttattctttataaattttgtctacagttagtagacattacaattgttttggtggctgtatgtagttattttaaaaaacaaagtcttttata

SEQ ID NO: 29680 - DNA, 120 bp, Artificial Sequence
  ENSG00000044459_71 (sequence is synthesized)
attccatctcccagaggcaaatactgtgaacattttgaatatttcacttttaaaaatgcatcttaacatatttgttagcacactagtatttttcactttaacattatattttaaaaaatc

SEQ ID NO: 29681 - DNA, 120 bp, Artificial Sequence
  ENSG00000044459_72 (sequence is synthesized)
ataacatataactattttagatggtcatataatttatttttctactgttggttatatatgttatttgttttactattgtaaataaagctgcaataaacatttctttgtcagttcagacta

SEQ ID NO: 29682 - DNA, 120 bp, Artificial Sequence
  ENSG00000044459_73 (sequence is synthesized)
caggcagacaataaagaccagaccagctttctccatgcagctctggccatgcgtattggccatgtgaagctaaatttggatttggctgggcttcggaaagaaaaagaagatttactaaag

SEQ ID NO: 29683 - DNA, 120 bp, Artificial Sequence
  ENSG00000044459_74 (sequence is synthesized)
aaattggagtcctcatctgaaatcacaagtttggcagaagaaaattcccagaatgctactaatgaactcactaaacagtcatcaaatgtgaagactttgaaatttgaactcctagcaaaa

SEQ ID NO: 29684 - DNA, 120 bp, Artificial Sequence
  ENSG00000044459_75 (sequence is synthesized)
agaaaatgtgagatccaacacatgaataatataaagatattccaaggtgaagatgaaagaagattgagaagacttggtagcagtagttctcaatgaagcaggactacagcagttctttaa

SEQ ID NO: 29685 - DNA, 120 bp, Artificial Sequence
  ENSG00000044459_76 (sequence is synthesized)
gaaggatgactctgaaaaaattagcagtgatagattgtaatgtttttgagaaagatatttcatactttttgagaattttagaaaggattagtgataagtaaacagaaaactgcacaaata

SEQ ID NO: 29686 - DNA, 120 bp, Artificial Sequence
  ENSG00000044459_77 (sequence is synthesized)
aaagtgacataatttttgttttttaaaaaaggtaaaagagctttattaacatttctctccattacattaattaacacaactactaaatcatcacttacttgcaggattccaaatgtgatg

SEQ ID NO: 29687 - DNA, 120 bp, Artificial Sequence
  ENSG00000044459_78 (sequence is synthesized)
ccatattgattgtaaggggtatgtgtaagtttcttgagagttcctactctagatgagttcactttaaaaaaattcttttcaatatcctgttctttctcatctctcagttttgcctcttat

SEQ ID NO: 29688 - DNA, 120 bp, Artificial Sequence
  ENSG00000044459_79 (sequence is synthesized)
gtttaatgtcagaaggaagggaaggtgcataggctgttaaggcctgatagaacctaaaaggcagaatataccaaaggtatttgtaggggcactagaatgcaagcaagacattttctgctc

SEQ ID NO: 29689 - DNA, 120 bp, Artificial Sequence
  ENSG00000044459_80 (sequence is synthesized)
tgatgttaacagttgtcagtaagtgaaaaattctacaatgaggtatagcatgtgtatcttcacggtgagattaatgcagtcagctaaacagtgaggttgttaataacagagtgatgcaat

SEQ ID NO: 29690 - DNA, 120 bp, Artificial Sequence
  ENSG00000044459_81 (sequence is synthesized)
ttttaactgttcagaaaaaacaaaaagttatatatgaaaggaagtgtcatcatagtacaccgtgttgcttagctgtgaaccatacataataagtattatgttaaaaaactagactaaaaa

SEQ ID NO: 29691 - DNA, 120 bp, Artificial Sequence
  ENSG00000044459_82 (sequence is synthesized)
tcaggatttacacctgccatgtaaacactggtcagacggcacagcccccagaagtgctggggtagtgtaccctgaggaaaactcacagagaggggctccctggcaagtgtgtaggtactc

SEQ ID NO: 29692 - DNA, 120 bp, Artificial Sequence
  ENSG00000044459_83 (sequence is synthesized)
cattgtcctcttccttctggggcagtataaagcagtctgacaagattacacatgtcagactctgggaaaattaccccgtcacttctggtatgatgagagactgggagacacattataaaa

SEQ ID NO: 29693 - DNA, 120 bp, Artificial Sequence
  ENSG00000044459_84 (sequence is synthesized)
tgtatataatagtttttgctattcaaatatgtttatttcctgagtgtgactagtaaaaagttagataataaggcatgttgagttattggaatcctcttttgattctatgtgttggttagc

SEQ ID NO: 29694 - DNA, 120 bp, Artificial Sequence
  ENSG00000044459_85 (sequence is synthesized)
agatagcaaatattataatagcaagggatactagccctctcaaacacacaaaagaaaatctgtctaaatgtgtttagatccaagcgctatcaatgttgggaggaaatgggtaagaaggaa

SEQ ID NO: 29695 - DNA, 120 bp, Artificial Sequence
  ENSG00000044459_86 (sequence is synthesized)
aaagattatgttcctgtctttcttgatgttagttagcaaagaaagtaaaaaaagaaaaaagttatatccccaaatttaagaaataagtaatatatgacctaatgaatacatttatggatg

SEQ ID NO: 29696 - DNA, 120 bp, Artificial Sequence
  ENSG00000044459_87 (sequence is synthesized)
gtacttgggactgcttttttggtggtggtggttgttttttggttatgtcttaataactgtgtttaagttgaaaaaataacatgtaacttggatgatattaagaattaaataaaaatatgt

SEQ ID NO: 29697 - DNA, 120 bp, Artificial Sequence
  ENSG00000044524_0 (sequence is synthesized)
agtgtcaaacttgacatcagcctgcgagcggagcatggtaacttctccagcaatcagagcgctccccctcacatcagtggcatgcttcatggagatatgctcctctcactgccctctgca

SEQ ID NO: 29698 - DNA, 120 bp, Artificial Sequence
  ENSG00000044524_1 (sequence is synthesized)
ccagcaacatggattgtcagctctccatcctcctccttctcagctgctctgttctcgacagcttcggggaactgattccgcagccttccaatgaagtcaatctactggattcaaaaacaa

SEQ ID NO: 29699 - DNA, 120 bp, Artificial Sequence
  ENSG00000044524_2 (sequence is synthesized)
ttcaaggggagctgggctggatctcttatccatcacatgggtgggaagagatcagtggtgtggatgaacattacacacccatcaggacttaccaggtgtgcaatgtcatggaccacagtc

SEQ ID NO: 29700 - DNA, 120 bp, Artificial Sequence
  ENSG00000044524_3 (sequence is synthesized)
aaaacaattggctgagaacaaactgggtccccaggaactcagctcagaagatttatgtggagctcaagttcactctacgagactgcaatagcattccattggttttaggaacttgcaagg

SEQ ID NO: 29701 - DNA, 120 bp, Artificial Sequence
  ENSG00000044524_4 (sequence is synthesized)
agacattcaacctgtactacatggagtctgatgatgatcatggggtgaaatttcgagagcatcagtttacaaagattgacaccattgcagctgatgaaagtttcactcaaatggatcttg

SEQ ID NO: 29702 - DNA, 120 bp, Artificial Sequence
  ENSG00000044524_5 (sequence is synthesized)
gggaccgtattctgaagctcaacactgagattagagaagtaggtcctgtcaacaagaagggattttatttggcatttcaagatgttggtgcttgtgttgccttggtgtctgtgagagtat

SEQ ID NO: 29703 - DNA, 120 bp, Artificial Sequence
  ENSG00000044524_6 (sequence is synthesized)
acttcaaaaagtgcccatttacagtgaagaatctggctatgtttccagacacggtacccatggactcccagtccctggtggaggttagagggtcttgtgtcaacaattctaaggaggaag

SEQ ID NO: 29704 - DNA, 120 bp, Artificial Sequence
  ENSG00000044524_7 (sequence is synthesized)
atcctccaaggatgtactgcagtacagaaggcgaatggcttgtacccattggcaagtgttcctgcaatgctggctatgaagaaagaggttttatgtgccaagcttgtcgaccaggtttct

SEQ ID NO: 29705 - DNA, 120 bp, Artificial Sequence
  ENSG00000044524_8 (sequence is synthesized)
acaaggcattggatggtaatatgaagtgtgctaagtgcccgcctcacagttctactcaggaagatggttcaatgaactgcaggtgtgagaataattacttccgggcagacaaagaccctc

SEQ ID NO: 29706 - DNA, 120 bp, Artificial Sequence
  ENSG00000044524_9 (sequence is synthesized)
catccatggcttgtacccgacctccatcttcaccaagaaatgttatctctaatataaacgagacctcagttatcctggactggagttggcccctggacacaggaggccggaaagatgtta

SEQ ID NO: 29707 - DNA, 120 bp, Artificial Sequence
  ENSG00000044524_10 (sequence is synthesized)
ccttcaacatcatatgtaaaaaatgtgggtggaatataaaacagtgtgagccatgcagcccaaatgtccgcttcctccctcgacagtttggactcaccaacaccacggtgacagtgacag

SEQ ID NO: 29708 - DNA, 120 bp, Artificial Sequence
  ENSG00000044524_11 (sequence is synthesized)
accttctggcacatactaactacacctttgagattgatgccgttaatggggtgtcagagctgagctccccaccaagacagtttgctgcggtcagcatcacaactaatcaggctgctccat

SEQ ID NO: 29709 - DNA, 120 bp, Artificial Sequence
  ENSG00000044524_12 (sequence is synthesized)
cacctgtcctgacgattaagaaagatcggacctccagaaatagcatctctttgtcctggcaagaacctgaacatcctaatgggatcatattggactacgaggtcaaatactatgaaaagc

SEQ ID NO: 29710 - DNA, 120 bp, Artificial Sequence
  ENSG00000044524_13 (sequence is synthesized)
aggaacaagaaacaagttataccattctgagggcaagaggcacaaatgttaccatcagtagcctcaagcctgacactatatacgtattccaaatccgagcccgaacagccgctggatatg

SEQ ID NO: 29711 - DNA, 120 bp, Artificial Sequence
  ENSG00000044524_14 (sequence is synthesized)
ggacgaacagccgcaagtttgagtttgaaactagtccagactctttctccatctctggtgaaagtagccaagtggtcatgatcgccatttcagcggcagtagcaattattctcctcactg

SEQ ID NO: 29712 - DNA, 120 bp, Artificial Sequence
  ENSG00000044524_15 (sequence is synthesized)
ttgtcatctatgttttgattgggaggttctgtggctataagtcaaaacatggggcagatgaaaaaagacttcattttggcaatgggcatttaaaacttccaggtctcaggacttatgttg

SEQ ID NO: 29713 - DNA, 120 bp, Artificial Sequence
  ENSG00000044524_16 (sequence is synthesized)
acccacatacatatgaagaccctacccaagctgttcatgagtttgccaaggaattggatgccaccaacatatccattgataaagttgttggagcaggtgaatttggagaggtgtgcagtg

SEQ ID NO: 29714 - DNA, 120 bp, Artificial Sequence
  ENSG00000044524_17 (sequence is synthesized)
gtcgcttaaaacttccttcaaaaaaagagatttcagtggccattaagaccctgaaagttggctacacagaaaagcagaggagagacttcctgggagaagcaagcattatgggacagtttg

SEQ ID NO: 29715 - DNA, 120 bp, Artificial Sequence
  ENSG00000044524_18 (sequence is synthesized)
accaccccaatatcattcgactggaaggagttgttaccaaaagtaagccagttatgattgtcacagaatacatggagaatggttccttggatagtttcctacgtaaacacgatgcccagt

SEQ ID NO: 29716 - DNA, 120 bp, Artificial Sequence
  ENSG00000044524_19 (sequence is synthesized)
ttactgtcattcagctagtggggatgcttcgagggatagcatctggcatgaagtacctgtcagacatgggctatgttcaccgagacctcgctgctcggaacatcttgatcaacagtaact

SEQ ID NO: 29717 - DNA, 120 bp, Artificial Sequence
  ENSG00000044524_20 (sequence is synthesized)
tggtgtgtaaggtttctgatttcggactttcgcgtgtcctggaggatgacccagaagctgcttatacaacaagaggagggaagatcccaatcaggtggacatcaccagaagctatagcct

SEQ ID NO: 29718 - DNA, 120 bp, Artificial Sequence
  ENSG00000044524_21 (sequence is synthesized)
accgcaagttcacgtcagccagcgatgtatggagttatgggattgttctctgggaggtgatgtcttatggagagagaccatactgggagatgtccaatcaggatgtaattaaagctgtag

SEQ ID NO: 29719 - DNA, 120 bp, Artificial Sequence
  ENSG00000044524_22 (sequence is synthesized)
atgagggctatcgactgccaccccccatggactgcccagctgccttgtatcagctgatgctggactgctggcagaaagacaggaacaacagacccaagtttgagcagattgttagtattc

SEQ ID NO: 29720 - DNA, 120 bp, Artificial Sequence
  ENSG00000044524_23 (sequence is synthesized)
ttctggaccaaagcaatgtggatatcactaccttccgcacaacaggtgactggcttaatggtgtctggacagcacactgcaaggaaatcttcacgggtgtggagtacagttcttgtgaca

SEQ ID NO: 29721 - DNA, 120 bp, Artificial Sequence
  ENSG00000044524_24 (sequence is synthesized)
caatagccaagatttccacagatgacatgaaaaaggttggtgtcaccgtggttgggccacagaagaagatcatcagtagcattaaagctctagaaacgcaatcaaagaatggcccagttc

SEQ ID NO: 29722 - DNA, 120 bp, Artificial Sequence
  ENSG00000044524_25 (sequence is synthesized)
ccgtgtaaagcacgggacggaagtgcttctggacggaagtggtggctgtggaaggcgtagcatcatcctgcagacagacaataattctggagatactggtggaagttccaagtccaataa

SEQ ID NO: 29723 - DNA, 120 bp, Artificial Sequence
  ENSG00000044524_26 (sequence is synthesized)
gacactcaaatatgagtacaaatgccttaaaatggaattgaaaaactctttattttcccctatcatttattggatgggtgggtggggtatttttttgtaattgcttttttaaatattagt

SEQ ID NO: 29724 - DNA, 120 bp, Artificial Sequence
  ENSG00000044524_27 (sequence is synthesized)
taatggattaaatttaattcttcagcgtaaaatggtgaagaactagcatatagccattgatcataaactgactatcataaaatcaaaacaagtgaaataacaaaatggacatggtggctt

SEQ ID NO: 29725 - DNA, 120 bp, Artificial Sequence
  ENSG00000044524_28 (sequence is synthesized)
tgtttaggtagagccacaaaagaaaagacttgtaatatttttatatacagaggaaatctgtaacaggtattttgtttcttttaaagcaagcaacacagaggaatttatacctcaaactat

SEQ ID NO: 29726 - DNA, 120 bp, Artificial Sequence
  ENSG00000044524_29 (sequence is synthesized)
ctggccatatttactaccttatcactgcattattctcttttatctgtttaaagcatatagagatgaagtttgtagttgttttaagtactacacatttttaaattgttagcttccttaagt

SEQ ID NO: 29727 - DNA, 120 bp, Artificial Sequence
  ENSG00000044524_30 (sequence is synthesized)
atatcatgtaaagaaatgtcttaatttttgaaaaaagtacatatttattttcttttgaattgtttttattgttttctatttatgccttgatgatttaatatggatttgttacagccaagt

SEQ ID NO: 29728 - DNA, 120 bp, Artificial Sequence
  ENSG00000044524_31 (sequence is synthesized)
gccaaatgctctctcaaattgtcagcaatttaactagacacagataataatgggtttctttcagattttttgaaccatccacttacatatatttttaaaaaatgaaatccttttcctgtt

SEQ ID NO: 29729 - DNA, 120 bp, Artificial Sequence
  ENSG00000044524_32 (sequence is synthesized)
catacactaaccaaatctctcaaatctgttatcccaatcattgttgcctctccgtttattataaactgtatgctcacaacttagtgtaatataccagcttgtatgcaatggattttcaac

SEQ ID NO: 29730 - DNA, 120 bp, Artificial Sequence
  ENSG00000044524_33 (sequence is synthesized)
cagataacatacctttcctgctctggtgcttagagactatcaactccctcctttagtgaaggagccgtgttagagcttccgagaatagctccactggagagaagtggaatcctatataga

SEQ ID NO: 29731 - DNA, 120 bp, Artificial Sequence
  ENSG00000044524_34 (sequence is synthesized)
atgctgcactaattgacaacacagcctataggccaatgcatgagtaaaaaaaaaaacaattactggctcactggctttgaaaagtcacttactattgttgctgaaacttgctgagctgtt

SEQ ID NO: 29732 - DNA, 120 bp, Artificial Sequence
  ENSG00000044524_35 (sequence is synthesized)
tatagagaatgatgataacagaacttttcctctgtatcactggtgtttaggtgaattaattaaacattgtgatcattagtaccaggtattattatctttaagagtcttccacttcaatgc

SEQ ID NO: 29733 - DNA, 120 bp, Artificial Sequence
  ENSG00000044524_36 (sequence is synthesized)
acatggtgcagttttggtgtgtaacttagaaggattgaacttctttgaatttactggacataacattttcagaatagttggtcatctagcaaccgcctcaaaatgtgtaagcaggagaga

SEQ ID NO: 29734 - DNA, 120 bp, Artificial Sequence
  ENSG00000044524_37 (sequence is synthesized)
aatttctcatcacagggatttagacttactattacataaaggctaactatgagcttgctcattaattttgaaaagatgtacctggtggatatctagctagtaatatattctgaagcaaca

SEQ ID NO: 29735 - DNA, 120 bp, Artificial Sequence
  ENSG00000044524_38 (sequence is synthesized)
ttttagctctattgatactctttctaatgctgatatgatcttgagtataagaaatgcatatgtcactagaatggataaaataatgctgcaaacttaatgttcttatgcaaaatggaacgc

SEQ ID NO: 29736 - DNA, 120 bp, Artificial Sequence
  ENSG00000044524_39 (sequence is synthesized)
taatgaaacacagcttacaatcgcaaatcaaaactcacaagtgctcatctgttgtagatttagtgtaataagacttagattgtgctccttcggatatgattgtttctcaaatcttggcaa

SEQ ID NO: 29737 - DNA, 120 bp, Artificial Sequence
  ENSG00000044524_40 (sequence is synthesized)
tattccttagtcaaatcaggctactagaattctgtattggatatataagagcatgaaatttttaaaaatacacttgtgattataaaattaatcacaaatttcacttatacctgctatcag

SEQ ID NO: 29738 - DNA, 120 bp, Artificial Sequence
  ENSG00000044524_41 (sequence is synthesized)
cagctagaaaacattttttttttaaatcaagtattttgtgtttggaatgttagaatgagatctgaatgtggtttcaatctaattttttcccagactactattttcttttttaggtactat

SEQ ID NO: 29739 - DNA, 120 bp, Artificial Sequence
  ENSG00000044524_42 (sequence is synthesized)
tctgagcatactcaacaaaacccatgcatttcataaactaatagaagttgaggattgttgaatctatttcacttattttggctgtggtttccatctgaaagtagaggttgtatacaccat

SEQ ID NO: 29740 - DNA, 120 bp, Artificial Sequence
  ENSG00000044524_43 (sequence is synthesized)
atactgttcttcattttattaatatttttctccttgacctctcataaatttactttacacaattcttaccctgtacatatgtaaacataagtgtacgattcttaaccatggagtagaggt

SEQ ID NO: 29741 - DNA, 120 bp, Artificial Sequence
  ENSG00000044524_44 (sequence is synthesized)
actagaatgcttacggccatctctttgtacaggaactgcattgactttcagtaaacataaagccacaactcctacatgatgttatgtaccatatgatctgttttgtatcttaaatttgat

SEQ ID NO: 29742 - DNA, 120 bp, Artificial Sequence
  ENSG00000044524_45 (sequence is synthesized)
ttacatatattatttatttctggtaactcactcagtttatgctgtgctaaatatcaatcaagccatgtataaatgtgatatgattggcaatatgtgtttactttaaacttgtcttttcaa

SEQ ID NO: 29743 - DNA, 120 bp, Artificial Sequence
  ENSG00000044524_46 (sequence is synthesized)
aatattactcagtttatgttgtacaatgtagatggcctcttactaatgtaaaatgatttgtagtggaaacatttatatttttataataaacataatgaaaatattttttacagattggaa

SEQ ID NO: 29744 - DNA, 120 bp, Artificial Sequence
  ENSG00000044524_47 (sequence is synthesized)
gaggagggggcagggatcttgcaaaagatgtctgatcgtttattctcactgtttctaagttttaaacaaatgtgatacatttaaggtatattgcttgggacattgcaatttgcagagccc

SEQ ID NO: 29745 - DNA, 120 bp, Artificial Sequence
  ENSG00000044524_48 (sequence is synthesized)
tgtgtctgtatacagtatttgtgtttgtgtgggtgtacattttgtgtttctttttttcttgtatgcaaatcaaacatattctaatgcctgaaatgcttctgttttttttttttagccata

SEQ ID NO: 29746 - DNA, 120 bp, Artificial Sequence
  ENSG00000044524_49 (sequence is synthesized)
aattgcttttgaggaacattatttaatatagtaacacacttccagtgtctgtcatttcagatattccaggttcattgcgtgattcaatgaaccacaaaaaagaaacttgctgatccatga

SEQ ID NO: 29747 - DNA, 120 bp, Artificial Sequence
  ENSG00000044524_50 (sequence is synthesized)
gaatcttaattttgttttaatccttaacacattcaatagcatatcacagagagaataaggattttctaaaatgtgttttatcacttcattcacattcagaagtaatttgaatagcctgtt

SEQ ID NO: 29748 - DNA, 120 bp, Artificial Sequence
  ENSG00000044524_51 (sequence is synthesized)
cctttaaccccaaatttggctaaaattggcctaaaactggcaaacatttttccagtaacttttctttttttcaaatgaattttcttcatacttaaaaaagccctttgctaaaatataatt

SEQ ID NO: 29749 - DNA, 120 bp, Artificial Sequence
  ENSG00000044524_52 (sequence is synthesized)
aaagccctttgctaaaatataattttcaaaaaggtaaaattatgtctatggcactaatataaaatgagtagaagttaatgattttacttaactcatttttttctttctttcttttttttt

SEQ ID NO: 29750 - DNA, 85 bp, Artificial Sequence
  ENSG00000044524_53 (sequence is synthesized)
cttgctctgtcacccaggctggagtacagcagagcgatctcggctcactgcaagctccccctcagcctcccgagtagctgggact

SEQ ID NO: 29751 - DNA, 120 bp, Artificial Sequence
  ENSG00000044574_0 (sequence is synthesized)
gacgccggccaagacagcacagacagattgacctattggggtgtttcgcgagtgtgagagggaagcgccgcggcctgtatttctagacctgcccttcgcctggttcgtggcgccttgtga

SEQ ID NO: 29752 - DNA, 120 bp, Artificial Sequence
  ENSG00000044574_1 (sequence is synthesized)
ccccgggcccctgccgcctgcaagtcggaaattgcgctgtgctcctgtgctacggcctgtggctggactgcctgctgctgcccaactggctggcaagatgaagctctccctggtggccgc

SEQ ID NO: 29753 - DNA, 120 bp, Artificial Sequence
  ENSG00000044574_2 (sequence is synthesized)
gatgctgctgctgctcagcgcggcgcgggccgaggaggaggacaagaaggaggacgtgggcacggtggtcggcatcgacctggggaccacctactcctgcgtcggcgtgttcaagaacgg

SEQ ID NO: 29754 - DNA, 120 bp, Artificial Sequence
  ENSG00000044574_3 (sequence is synthesized)
ccgcgtggagatcatcgccaacgatcagggcaaccgcatcacgccgtcctatgtcgccttcactcctgaaggggaacgtctgattggcgatgccgccaagaaccagctcacctccaaccc

SEQ ID NO: 29755 - DNA, 120 bp, Artificial Sequence
  ENSG00000044574_4 (sequence is synthesized)
cgagaacacggtctttgacgccaagcggctcatcggccgcacgtggaatgacccgtctgtgcagcaggacatcaagttcttgccgttcaaggtggttgaaaagaaaactaaaccatacat

SEQ ID NO: 29756 - DNA, 120 bp, Artificial Sequence
  ENSG00000044574_5 (sequence is synthesized)
tcaagttgatattggaggtgggcaaacaaagacatttgctcctgaagaaatttctgccatggttctcactaaaatgaaagaaaccgctgaggcttatttgggaaagaaggttacccatgc

SEQ ID NO: 29757 - DNA, 120 bp, Artificial Sequence
  ENSG00000044574_6 (sequence is synthesized)
agttgttactgtaccagcctattttaatgatgcccaacgccaagcaaccaaagacgctggaactattgctggcctaaatgttatgaggatcatcaacgagcctacggcagctgctattgc

SEQ ID NO: 29758 - DNA, 120 bp, Artificial Sequence
  ENSG00000044574_7 (sequence is synthesized)
ttatggcctggataagagggagggggagaagaacatcctggtgtttgacctgggtggcggaaccttcgatgtgtctcttctcaccattgacaatggtgtcttcgaagttgtggccactaa

SEQ ID NO: 29759 - DNA, 120 bp, Artificial Sequence
  ENSG00000044574_8 (sequence is synthesized)
tggagatactcatctgggtggagaagactttgaccagcgtgtcatggaacacttcatcaaactgtacaaaaagaagacgggcaaagatgtcaggaaagacaatagagctgtgcagaaact

SEQ ID NO: 29760 - DNA, 120 bp, Artificial Sequence
  ENSG00000044574_9 (sequence is synthesized)
ccggcgcgaggtagaaaaggccaaacgggccctgtcttctcagcatcaagcaagaattgaaattgagtccttctatgaaggagaagacttttctgagaccctgactcgggccaaatttga

SEQ ID NO: 29761 - DNA, 120 bp, Artificial Sequence
  ENSG00000044574_10 (sequence is synthesized)
agagctcaacatggatctgttccggtctactatgaagcccgtccagaaagtgttggaagattctgatttgaagaagtctgatattgatgaaattgttcttgttggtggctcgactcgaat

SEQ ID NO: 29762 - DNA, 120 bp, Artificial Sequence
  ENSG00000044574_11 (sequence is synthesized)
tccaaagattcagcaactggttaaagagttcttcaatggcaaggaaccatcccgtggcataaacccagatgaagctgtagcgtatggtgctgctgtccaggctggtgtgctctctggtga

SEQ ID NO: 29763 - DNA, 120 bp, Artificial Sequence
  ENSG00000044574_12 (sequence is synthesized)
tcaagatacaggtgacctggtactgcttgatgtatgtccccttacacttggtattgaaactgtgggaggtgtcatgaccaaactgattccaaggaacacagtggtgcctaccaagaagtc

SEQ ID NO: 29764 - DNA, 120 bp, Artificial Sequence
  ENSG00000044574_13 (sequence is synthesized)
tcagatcttttctacagcttctgataatcaaccaactgttacaatcaaggtctatgaaggtgaaagacccctgacaaaagacaatcatcttctgggtacatttgatctgactggaattcc

SEQ ID NO: 29765 - DNA, 120 bp, Artificial Sequence
  ENSG00000044574_14 (sequence is synthesized)
tcctgctcctcgtggggtcccacagattgaagtcacctttgagatagatgtgaatggtattcttcgagtgacagctgaagacaagggtacagggaacaaaaataagatcacaatcaccaa

SEQ ID NO: 29766 - DNA, 120 bp, Artificial Sequence
  ENSG00000044574_15 (sequence is synthesized)
tgaccagaatcgcctgacacctgaagaaatcgaaaggatggttaatgatgctgagaagtttgctgaggaagacaaaaagctcaaggagcgcattgatactagaaatgagttggaaagcta

SEQ ID NO: 29767 - DNA, 120 bp, Artificial Sequence
  ENSG00000044574_16 (sequence is synthesized)
aaaagctgtagaagaaaagattgaatggctggaaagccaccaagatgctgacattgaagacttcaaagctaagaagaaggaactggaagaaattgttcaaccaattatcagcaaactcta

SEQ ID NO: 29768 - DNA, 120 bp, Artificial Sequence
  ENSG00000044574_17 (sequence is synthesized)
tggaagtgcaggccctcccccaactggtgaagaggatacagcagaaaaagatgagttgtagacactgatctgctagtgctgtaatattgtaaatactggactcaggaacttttgttagga

SEQ ID NO: 29769 - DNA, 120 bp, Artificial Sequence
  ENSG00000044574_18 (sequence is synthesized)
aaaaattgaaagaacttaagtctcgaatgtaattggaatcttcacctcagagtggagttgaaactgctatagcctaagcggctgtttactgcttttcattagcagttgctcacatgtctt

SEQ ID NO: 29770 - DNA, 120 bp, Artificial Sequence
  ENSG00000044574_19 (sequence is synthesized)
tgggtgggggggagaagaagaattggccatcttaaaaagcgggtaaaaaacctgggttagggtgtgtgttcaccttcaaaatgttctatttaacaactgggtcatgtgcatctggtgtag

SEQ ID NO: 29771 - DNA, 120 bp, Artificial Sequence
  ENSG00000044574_20 (sequence is synthesized)
gaagttttttctaccataagtgacaccaataaatgtttgttatttacactggtctaatgtttgtgagaagcttctaattagatcaattacttattttaggaaatttaagactagatactc

SEQ ID NO: 29772 - DNA, 120 bp, Artificial Sequence
  ENSG00000044574_21 (sequence is synthesized)
gtgtgtggggtgaggggagggagtatttggtatgttgggataaggaaacacttctatttaatgcttccagggatttttttttttttttttaaccctcctgggcccaagtgatccttccac

SEQ ID NO: 29773 - DNA, 120 bp, Artificial Sequence
  ENSG00000044574_22 (sequence is synthesized)
ctcagtctcccagctaattgagaccacaggcttgttaccaccatgctcggcttttgcattaatctaagaaaaggggagagaagttaatccacatctttactcaggcaaggggcatttcac

SEQ ID NO: 29774 - DNA, 120 bp, Artificial Sequence
  ENSG00000044574_23 (sequence is synthesized)
agtgcccaagagtggggttttcttgaacatacttggtttcctatttccccttatctttctaaaactgcctttctggtggctttttttaaaattattactaatgatgcttttatagctgct

SEQ ID NO: 29775 - DNA, 120 bp, Artificial Sequence
  ENSG00000044574_24 (sequence is synthesized)
tggattctctgagaaatgatggggagtgagtgatcactggtattaactttatacacttggatttcatttgtaactttaggatgtaaaggtatattgtgaaccctagctgtgtcagaatct

SEQ ID NO: 29776 - DNA, 120 bp, Artificial Sequence
  ENSG00000044574_25 (sequence is synthesized)
ccatccctgaaatttctcattagtggtactggggtgggatcttggatggtgacattgaaactacactaaatcccctcactatgaatgggttgttaaaggcaatggtttgtgtcaaaactg

SEQ ID NO: 29777 - DNA, 120 bp, Artificial Sequence
  ENSG00000044574_26 (sequence is synthesized)
gtttaggattacttagattgtgttcctgaagaaaagagtccaggtaaatggtatgatcaataaaggacaggctggtgctaacataaaatccaatattgtaatcctagcactttgggaggc

SEQ ID NO: 29778 - DNA, 88 bp, Artificial Sequence
  ENSG00000044574_27 (sequence is synthesized)
agccgagatcacaccactgtactccagcccggcactccagcctggcgacagaatccaatactgcccaaggataggtattttatagatg

SEQ ID NO: 29779 - DNA, 120 bp, Artificial Sequence
  ENSG00000044574_28 (sequence is synthesized)
aagaatccaatactgcccaaggataggtattttatagatgggcaactggctgaaaggttaattctctagggctagtagaactggatcccaacaccaaactcttaattagacctaggcctc

SEQ ID NO: 29780 - DNA, 120 bp, Artificial Sequence
  ENSG00000044574_29 (sequence is synthesized)
agctgcactgcccgaaaagcatttgggcagaccctgagcagaatactggtctcaggccaagcccaatacagccattaaagatgacctacagtgctgtgtaccctggggcaatagggttaa

SEQ ID NO: 29781 - DNA, 120 bp, Artificial Sequence
  ENSG00000044574_30 (sequence is synthesized)
atggtagttagcaactagggctagtcttcccttacctcaaaggctctcactaccgtggaccacctagtctgtaactctttctgaggagctgttactgaatattaaaaagatagacttcaa

SEQ ID NO: 29782 - DNA, 120 bp, Artificial Sequence
  ENSG00000046604_0 (sequence is synthesized)
gagtgcgcgctcggggcaggcggcggcgcggagcggtgcggcggcgggaggcggaggcgagggtgcgatggcgcggagcccgggacgcgcgtacgccctgctgcttctcctgatctgctt

SEQ ID NO: 29783 - DNA, 120 bp, Artificial Sequence
  ENSG00000046604_1 (sequence is synthesized)
atctgctttaacgttggaagtggacttcacttacaggtcttaagcacaagaaatgaaaataagctgcttcctaaacatcctcatttagtgcggcaaaagcgcgcctggatcaccgccccc

SEQ ID NO: 29784 - DNA, 120 bp, Artificial Sequence
  ENSG00000046604_2 (sequence is synthesized)
gtggctcttcgggagggagaggatctgtccaagaagaatccaattgccaagatacattctgatcttgcagaagaaagaggactcaaaattacttacaaatacactggaaaagggattaca

SEQ ID NO: 29785 - DNA, 120 bp, Artificial Sequence
  ENSG00000046604_3 (sequence is synthesized)
gagccaccttttggtatatttgtctttaacaaagatactggagaactgaatgttaccagcattcttgatcgagaagaaacaccattttttctgctaacaggttacgctttggatgcaaga

SEQ ID NO: 29786 - DNA, 120 bp, Artificial Sequence
  ENSG00000046604_4 (sequence is synthesized)
ggaaacaatgtagagaaacccttagagctacgcattaaggttcttgatatcaatgacaacgaaccagtgttcacacaggatgtctttgttgggtctgttgaagagttgagtgcagcacat

SEQ ID NO: 29787 - DNA, 120 bp, Artificial Sequence
  ENSG00000046604_5 (sequence is synthesized)
actcttgtgatgaaaatcaatgcaacagatgcagatgagcccaataccctgaattcgaaaatttcctatagaatcgtatctctggagcctgcttatcctccagtgttctacctaaataaa

SEQ ID NO: 29788 - DNA, 120 bp, Artificial Sequence
  ENSG00000046604_6 (sequence is synthesized)
gatacaggagagatttatacaaccagtgttaccttggacagagaggaacacagcagctacactttgacagtagaagcaagagatggcaatggagaagttacagacaaacctgtaaaacaa

SEQ ID NO: 29789 - DNA, 120 bp, Artificial Sequence
  ENSG00000046604_7 (sequence is synthesized)
gctcaagttcagattcgtattttggatgtcaatgacaatatacctgtagtagaaaataaagtgcttgaagggatggttgaagaaaatcaagtcaacgtagaagttacgcgcataaaagtg

SEQ ID NO: 29790 - DNA, 120 bp, Artificial Sequence
  ENSG00000046604_8 (sequence is synthesized)
ttcgatgcagatgaaataggttctgataattggctggcaaattttacatttgcatcaggaaatgaaggaggttatttccacatagaaacagatgctcaaactaacgaaggaattgtgacc

SEQ ID NO: 29791 - DNA, 120 bp, Artificial Sequence
  ENSG00000046604_9 (sequence is synthesized)
cttattaaggaagtagattatgaagaaatgaagaatcttgacttcagtgttattgtcgctaataaagcagcttttcacaagtcgattaggagtaaatacaagcctacacccattcccatc

SEQ ID NO: 29792 - DNA, 120 bp, Artificial Sequence
  ENSG00000046604_10 (sequence is synthesized)
aaggtcaaagtgaaaaatgtgaaagaaggcattcattttaaaagcagcgtcatctcaatttatgttagcgagagcatggatagatcaagcaaaggccaaataattggaaattttcaagct

SEQ ID NO: 29793 - DNA, 120 bp, Artificial Sequence
  ENSG00000046604_11 (sequence is synthesized)
tttgatgaggacactggactaccagcccatgcaagatatgtaaaattagaagatagagataattggatctctgtggattctgtcacatctgaaattaaacttgcaaaacttcctgatttt

SEQ ID NO: 29794 - DNA, 120 bp, Artificial Sequence
  ENSG00000046604_12 (sequence is synthesized)
gaatctagatatgttcaaaatggcacatacactgtaaagattgtggccatatcagaagattatcctagaaaaaccatcactggcacagtccttatcaatgttgaagacatcaacgacaac

SEQ ID NO: 29795 - DNA, 120 bp, Artificial Sequence
  ENSG00000046604_13 (sequence is synthesized)
tgtcccacactgatagagcctgtgcagacaatctgtcacgatgcagagtatgtgaatgttactgcagaggacctggatggacacccaaacagtggccctttcagtttctccgtcattgac

SEQ ID NO: 29796 - DNA, 120 bp, Artificial Sequence
  ENSG00000046604_14 (sequence is synthesized)
aaaccacctggcatggcagaaaaatggaaaatagcacgccaagaaagtaccagtgtgctgctgcaacaaagtgagaaaaagcttgggagaagtgaaattcagttcctgatttcagacaat

SEQ ID NO: 29797 - DNA, 120 bp, Artificial Sequence
  ENSG00000046604_15 (sequence is synthesized)
cagggttttagttgtcctgaaaagcaggtccttacactcacagtttgtgagtgtctgcatggcagcggctgcagggaagcacagcatgactcctatgtgggcctgggacccgcagcaatt

SEQ ID NO: 29798 - DNA, 120 bp, Artificial Sequence
  ENSG00000046604_16 (sequence is synthesized)
gcgctcatgattttggcctttctgctcctgctattggtaccacttttactgctgatgtgccattgcggaaagggcgccaaaggctttacccccatacctggcaccatagagatgctgcat

SEQ ID NO: 29799 - DNA, 120 bp, Artificial Sequence
  ENSG00000046604_17 (sequence is synthesized)
ccttggaataatgaaggagcaccacctgaagacaaggtggtgccatcatttctgccagtggatcaagggggcagtctagtaggaagaaatggagtaggaggtatggccaaggaagccacg

SEQ ID NO: 29800 - DNA, 120 bp, Artificial Sequence
  ENSG00000046604_18 (sequence is synthesized)
atgaaaggaagtagctctgcttccattgtcaaagggcaacatgagatgtccgagatggatggaaggtgggaagaacacagaagcctgctttctggtagagctacccagtttacaggggcc

SEQ ID NO: 29801 - DNA, 120 bp, Artificial Sequence
  ENSG00000046604_19 (sequence is synthesized)
acaggcgctatcatgaccactgaaaccacgaagaccgcaagggccacaggggcttccagagacatggccggagctcaggcagctgctgttgcactgaacgaagaattcttaagaaattat

SEQ ID NO: 29802 - DNA, 120 bp, Artificial Sequence
  ENSG00000046604_20 (sequence is synthesized)
ttcactgataaagcggcctcttacactgaggaagatgaaaatcacacagccaaagattgccttctggtttattctcaggaagaaactgaatcgctgaatgcttctattggttgttgcagt

SEQ ID NO: 29803 - DNA, 120 bp, Artificial Sequence
  ENSG00000046604_21 (sequence is synthesized)
tttattgaaggagagctagatgaccgcttcttagatgatttgggacttaaattcaagacactagctgaagtttgcctgggtcaaaaaatagatataaataaggaaattgagcagagacaa

SEQ ID NO: 29804 - DNA, 120 bp, Artificial Sequence
  ENSG00000046604_22 (sequence is synthesized)
aaacctgccacagaaacaagtatgaacacagcttcacattcactctgtgagcaaactatggttaattcagagaatacctactcctctggcagtagcttcccagttccaaaatctttgcaa

SEQ ID NO: 29805 - DNA, 120 bp, Artificial Sequence
  ENSG00000046604_23 (sequence is synthesized)
aggcaggcgcaaaaggtagctacacctcttcctgacccaatggcttctagaaatgtgatagcaacagaaacttcctatgtcacagggtccactatgccaccaaccactgtgatcctgggt

SEQ ID NO: 29806 - DNA, 120 bp, Artificial Sequence
  ENSG00000046604_24 (sequence is synthesized)
cctagccagccacagagccttattgtgacagagagggtgtatgctccagcttctaccttggtagatcagccttatgctaatgaaggtacagttgtggtcactgaaagagtaatacagcct

SEQ ID NO: 29807 - DNA, 120 bp, Artificial Sequence
  ENSG00000046604_25 (sequence is synthesized)
catgggggtggatcgaatcctctggaaggcactcagcatcttcaagatgtaccttacgtcatggtgagggaaagagagagcttccttgcccccagctcaggtgtgcagcctactctggcc

SEQ ID NO: 29808 - DNA, 120 bp, Artificial Sequence
  ENSG00000046604_26 (sequence is synthesized)
atgcctaatatagcagtaggacagaatgtgacagtgacagaaagagttctagcacctgcttccactctgcaatccagttaccagattcccactgaaaattctatgacggctaggaacacc

SEQ ID NO: 29809 - DNA, 120 bp, Artificial Sequence
  ENSG00000046604_27 (sequence is synthesized)
acggtgtctggagctggagtccctggccctctgccagattttggtttagaggaatctggtcattctaattctaccataaccacatcttccaccagagttaccaagcatagcactgtacag

SEQ ID NO: 29810 - DNA, 120 bp, Artificial Sequence
  ENSG00000046604_28 (sequence is synthesized)
cattcttactcctaaacagcagtcagccacaaactgacccagagtttaattagcagtgactaatttcatgtttccaatgtacctgatttttcatgagccttacagacacacagagacaca

SEQ ID NO: 29811 - DNA, 120 bp, Artificial Sequence
  ENSG00000046604_29 (sequence is synthesized)
tacacattgatcttaaaatttttctcagtcactgatatgcaaaggaccacactgtctctgcttccaggagtattttagaaatgttccacaatttactgaagacatagagatgatgctgct

SEQ ID NO: 29812 - DNA, 120 bp, Artificial Sequence
  ENSG00000046604_30 (sequence is synthesized)
gcttaggtgccttttagcaagctatgcaaacaatcctgataaaacaagatacatagagagtcaatctggcttctgagaatttaccaagtgaacagagtacctagttcatcagccgtccag

SEQ ID NO: 29813 - DNA, 120 bp, Artificial Sequence
  ENSG00000046604_31 (sequence is synthesized)
taaagcaacccaggaaactgactgggtctctttgcctaccgtattaacattaaacattgatgttctgtattctgtactttactgcacccagcagactttcaacaactcattgatccaaag

SEQ ID NO: 29814 - DNA, 120 bp, Artificial Sequence
  ENSG00000046604_32 (sequence is synthesized)
atacatgcacagtctgagcaccagctatggtgctcataacttctttaagacttgaaccctttcaatctgtgtgattcattaaattggaccattgatgataagaatacacattgtatgttt

SEQ ID NO: 29815 - DNA, 120 bp, Artificial Sequence
  ENSG00000046604_33 (sequence is synthesized)
agaatacacattgtatgtttctgtgcacatgacagtgtgtgtgtgtgcacgtacatactgtatagtcttaaaaatagcattatactggccaggggtggtggctaacgcctgtaatcccag

SEQ ID NO: 29816 - DNA, 120 bp, Artificial Sequence
  ENSG00000046604_34 (sequence is synthesized)
aaaaggaaaaaaaaatagcattatacctcttccttgtctcaaccgccatgaaaattctgaacactccaaattcagttgaataatccaaaacaaaatttataagtataaaataattttact

SEQ ID NO: 29817 - DNA, 120 bp, Artificial Sequence
  ENSG00000046604_35 (sequence is synthesized)
tcttatagtaatagtatactttaaaaagcctcagggtatattatcttctaaacagctacaattcagtgcagctacattaaccaactatgttctctagttgagaacaactaggcctatttc

SEQ ID NO: 29818 - DNA, 120 bp, Artificial Sequence
  ENSG00000046604_36 (sequence is synthesized)
actgctgtgtagcctcagtgcctaacatgggtgccaaataaatattcgtagaattacactgaattgtaaaaaccattcgtttttgtttacaattgccaaaaatctcaaaaggccctgtat

SEQ ID NO: 29819 - DNA, 120 bp, Artificial Sequence
  ENSG00000046604_37 (sequence is synthesized)
ttatgtaattctttgaaattattattttattttgatttctcagttattgactggctgggtgtgacttagtacataagtactcaatattataaaaacctcaaataattgacttgattttac

SEQ ID NO: 29820 - DNA, 120 bp, Artificial Sequence
  ENSG00000046604_38 (sequence is synthesized)
acaacatccttcccttttctacaagttaatttttttacaaatcatttgggttatctcctaaataggttatattttattgcttctagaaacaatgtttcaaaatatatgtgcattatcagt

SEQ ID NO: 29821 - DNA, 120 bp, Artificial Sequence
  ENSG00000046604_39 (sequence is synthesized)
aataatttgtataaatatttcccacaacaattttcataattttcaaagactaatttcttgactgaagatattttgctagggaagtgaaactttaaaattttgtagattttaaaaaatatt

SEQ ID NO: 29822 - DNA, 120 bp, Artificial Sequence
  ENSG00000046604_40 (sequence is synthesized)
gttgaatggtgtcatgcaaaggatttatatagtgtgctcccactaactgtacagatcaggacacatatttttagacatctaagtctgtagcttaaatggaggttactcttccatcatcta

SEQ ID NO: 29823 - DNA, 120 bp, Artificial Sequence
  ENSG00000046604_41 (sequence is synthesized)
gaattgtttacttagtaattgttgtttcttttattattatagacttactatcagttttattttgccaagtatgcaacaggtatatcactagtatatgaaaatgtaaatatcacttgtgta

SEQ ID NO: 29824 - DNA, 120 bp, Artificial Sequence
  ENSG00000046604_42 (sequence is synthesized)
ctcaaacaaaagttggtcttaagcttccaccttgagcagccttggaaacctaacctgcctcttttagcataatcacattttctaaatgattttctttgttcctgaaaaagtgatttgtat

SEQ ID NO: 29825 - DNA, 120 bp, Artificial Sequence
  ENSG00000046604_43 (sequence is synthesized)
agtgatttgtattagttttacatttgttttttggaagattatatttgtatatgtatcatcataaaatatttaaataaaaagtatctttagagtgaccctttccccatagatttttatttc

SEQ ID NO: 29826 - DNA, 120 bp, Artificial Sequence
  ENSG00000046604_44 (sequence is synthesized)
tacaaggaatataactcagtttgttagggagagtgccttaaaggcaggtgtttcttggactttgttatttaattagatctgcttgcaataaaaaaagttgtcggttatctaaaattcaaa

SEQ ID NO: 29827 - DNA, 120 bp, Artificial Sequence
  ENSG00000046604_45 (sequence is synthesized)
ggtaagttaatatgttatgttgcccatctttaaactctctatcctttccagtttctcctctctttttcttttctaattttcttattttgttctgtattccttatccataggataactctt

SEQ ID NO: 29828 - DNA, 120 bp, Artificial Sequence
  ENSG00000046604_46 (sequence is synthesized)
ggaattactctcttttagggatgtgctgtccaatatgggccatgtgactattgagcacttaaaatgtgactggcccaaattgtaatgtgctgtatgcacgttgaatgtgtaatatatgca

SEQ ID NO: 29829 - DNA, 120 bp, Artificial Sequence
  ENSG00000046604_47 (sequence is synthesized)
tgcaccagatttgaaaaacttaatatgaaaaatgcaaaatatgaccttaatgttttttgtgatcattgcatgttaaaataatattttagatatcatagattaaataaaatatacttgttt

SEQ ID NO: 29830 - DNA, 120 bp, Artificial Sequence
  ENSG00000046647_0 (sequence is synthesized)
agtcgccccggcaacagccgcctccctcgcgtcccccactccccctctgtctctccaaggaaaactaggcccctgcgcggccaacgcccaggatccgcaagctgcgcgcccacgagctcc

SEQ ID NO: 29831 - DNA, 120 bp, Artificial Sequence
  ENSG00000046647_1 (sequence is synthesized)
accagcccattggagaaaagttactgttcagtccctgaaggcttgtgccataaaagagtgggagacattcccagggaggtgaggaatgaaagatcgaattaaagaccattaaagaccaaa

SEQ ID NO: 29832 - DNA, 120 bp, Artificial Sequence
  ENSG00000046647_2 (sequence is synthesized)
gggcatctaaatctgcagcaaccatcagctctcttttctttgagagtttcagcacccatttggactttcacaatcagagatggcagcggtaaaggcatcaacatcgaaagctaccaggcc

SEQ ID NO: 29833 - DNA, 120 bp, Artificial Sequence
  ENSG00000046647_3 (sequence is synthesized)
ttggtattctcatccggtatatgcaagatactggcaacattatcatcaagcaatggcttggatgcaaagccatcacaatgcctacaggaaggccgtggaatcctgtttcaatcttccatg

SEQ ID NO: 29834 - DNA, 120 bp, Artificial Sequence
  ENSG00000046647_4 (sequence is synthesized)
gtacttaccttctgcgcttcttccccaaagctcttacgataatgaggctgcgtatcctcagtccttctatgaccatcatgtggcctggcaggactacccctgcagttcttcacatttcag

SEQ ID NO: 29835 - DNA, 120 bp, Artificial Sequence
  ENSG00000046647_5 (sequence is synthesized)
aagatctgggcagcatccacgttacagcagtaggatccaggcatccacaaaagaagaccaagctttgtccaaagaggaagagatggagactgagtcagatgcagaggtagaatgtgacct

SEQ ID NO: 29836 - DNA, 120 bp, Artificial Sequence
  ENSG00000046647_6 (sequence is synthesized)
gagcaatatggaaatcactgaagagctccgccagtactttgcagagaccgagaggcatagagaagaacgacggcggcagcagcagctggatgcagagcgcctggacagctatgtgaacgc

SEQ ID NO: 29837 - DNA, 120 bp, Artificial Sequence
  ENSG00000046647_7 (sequence is synthesized)
accacgacctgtactgcaacacccgccggtcggtagaagccccaactgagaggcctggtgagcggcgccaggccgagatgaagcgtttgtacggggacagtgctgccaagatccaagcca

SEQ ID NO: 29838 - DNA, 120 bp, Artificial Sequence
  ENSG00000046647_8 (sequence is synthesized)
tggaggccgcggtgcagctgagctttgacaagcactgtgaccgaaagcagcccaagtactggccggtcatccccctgaagttctgagctcagggcacagggtacccagcctctccttctt

SEQ ID NO: 29839 - DNA, 120 bp, Artificial Sequence
  ENSG00000046647_9 (sequence is synthesized)
ccttttgggtacacgctctttatctctccttctgtacatttcttagggaaaggggactttgtactggggtacaggcatgttcaccacagtcccagtgggcctgtcacggggtggatgtac

SEQ ID NO: 29840 - DNA, 120 bp, Artificial Sequence
  ENSG00000046647_10 (sequence is synthesized)
tatgccagccacttggaggtctgcaggacatgttctgttgccaacatgataaattttctcctgacataaaataattttgcatatactatactggttttttatgttgttggtaacagttca

SEQ ID NO: 29841 - DNA, 120 bp, Artificial Sequence
  ENSG00000046647_11 (sequence is synthesized)
attcattaacgttcttgcctagagatactgcctggtgttttgcttttttatcttttcttgtctttaacctgtctgaactacacaaatgcctttaaaaaaccagatatcctctctgactct

SEQ ID NO: 29842 - DNA, 120 bp, Artificial Sequence
  ENSG00000046647_12 (sequence is synthesized)
agctccattagcccccactaaaaatgagccaagtgtgtagtgagacaaataccactacctgtagtggagagggatgcatgttctataaagggccagagagtgaatatctttggcactgca

SEQ ID NO: 29843 - DNA, 120 bp, Artificial Sequence
  ENSG00000046647_13 (sequence is synthesized)
agccacacggtcagtgttgtgactactcaaccctccctttgtagtgtgaaagcagctgtagacagtaagtaaacaaatgggtgtggctgtgttctaataaaactttatttataaaaacag

SEQ ID NO: 29844 - DNA, 120 bp, Artificial Sequence
  ENSG00000046647_14 (sequence is synthesized)
cagtcgccccggcaacagccgcctccctcgcgtcccccactccccctctgtctctccaaggaaaactaggcccctgcgcggccaacgcccaggatccgcaagctgcgcgcccacgagttt

SEQ ID NO: 29845 - DNA, 120 bp, Artificial Sequence
  ENSG00000046647_15 (sequence is synthesized)
gcagagaccgagaggcatagagaagaacgacatattcacaggtgcacaaaaccgatcagtgagatgatacgtgttaatggctgtagaaaagtggaaaggaacatgaaaatgcacttctgt

SEQ ID NO: 29846 - DNA, 120 bp, Artificial Sequence
  ENSG00000046647_16 (sequence is synthesized)
tgtaaaagtaaaaatggcggttgtccagtaacttcaggattacatttgtcatggggcaagggatgtgcgacgaagagagaagaccagtctgaaatggctccagttctgctggcatgtacc

SEQ ID NO: 29847 - DNA, 120 bp, Artificial Sequence
  ENSG00000046647_17 (sequence is synthesized)
tgtgttctgggtggttgctgacaagccagaaatgaggcattcatggcatacatcaagtttgtgctttccctcggttgtgctacaattattcattttggcaaaatagcagaaaatataatc

SEQ ID NO: 29848 - DNA, 120 bp, Artificial Sequence
  ENSG00000046647_18 (sequence is synthesized)
gagattcctaaatcattgcaggttaattgtgagaggggaccagtcccagaggctctcagctctgcagtgcttccgaatcactggacgactctttaagaattctgatccccgggcccccat

SEQ ID NO: 29849 - DNA, 120 bp, Artificial Sequence
  ENSG00000046647_19 (sequence is synthesized)
cccggaccaatgaaatcagaatctctaatagtggggccctggcatcggtagtttttaaagctgcccaggtgattctggggtgccgagaaccaccgtgttaagctccaccagcccattgga

SEQ ID NO: 29850 - DNA, 120 bp, Artificial Sequence
  ENSG00000046647_20 (sequence is synthesized)
atcttctgtgatagggttattattgcatgtacagagagattccttggaaccgcatatgactcaatctatctcactcagatttctcaccataccttcacttattttgctgcagtgtccagc

SEQ ID NO: 29851 - DNA, 120 bp, Artificial Sequence
  ENSG00000046651_0 (sequence is synthesized)
actggctgtgaggcggtcctgcctcgctgccttcagtccctagtgtctgggtccccgccctccagccgcctttgagtcgtgcctgggtcctcgcccttgcctcagaaccgcgaagaaagg

SEQ ID NO: 29852 - DNA, 120 bp, Artificial Sequence
  ENSG00000046651_1 (sequence is synthesized)
aagctcgcgtgtttgctagaaaacctagttgggagtgcgaggcagagaacgttcagcacctttgttcctcccgaaccctcgggacagaggcagggttctgagggcagggattccccctcg

SEQ ID NO: 29853 - DNA, 120 bp, Artificial Sequence
  ENSG00000046651_2 (sequence is synthesized)
tcttggccccaccgcccgggctgggcactaaactcgggccgcggcggggcgagcgaggcgggctccggagggagctgacgcctgatgatggcgcagtccaacatgtttaccgtggctgat

SEQ ID NO: 29854 - DNA, 120 bp, Artificial Sequence
  ENSG00000046651_3 (sequence is synthesized)
gtgttgagtcaagatgaactgcgcaaaaagctataccagacgtttaaggatcggggtatactggatacactcaagacacaacttcgaaaccagctaattcatgagttgatgcaccctgta

SEQ ID NO: 29855 - DNA, 120 bp, Artificial Sequence
  ENSG00000046651_4 (sequence is synthesized)
ttgagtggagaactgcagcctcggtccatttcagtagaagggagctccctcttaataggcgcctctaactctttagtggcagatcacttacaaagatgtggctatgaatattcactttct

SEQ ID NO: 29856 - DNA, 120 bp, Artificial Sequence
  ENSG00000046651_5 (sequence is synthesized)
gttttctttccagaaagtggtttggcaaaagaaaaggtatttactatgcaggatctattacaactcattaaaatcaaccctacttccagtctctacaaatcactggtttcaggatctgat

SEQ ID NO: 29857 - DNA, 120 bp, Artificial Sequence
  ENSG00000046651_6 (sequence is synthesized)
aaagaaaatcaaaaaggttttcttatgcattttttaaaagaattggcagaatatcatcaagctaaagagagttgtaatatggaaactcagacaagttcgacatttaacagagattctctg

SEQ ID NO: 29858 - DNA, 120 bp, Artificial Sequence
  ENSG00000046651_7 (sequence is synthesized)
gctgagaagcttcagcttattgatgatcagtttgcagatgcttaccctcagcgtatcaagttcgaatctttagaaataaagctaaatgagtataagagagaaatagaagagcaacttcgg

SEQ ID NO: 29859 - DNA, 120 bp, Artificial Sequence
  ENSG00000046651_8 (sequence is synthesized)
gcagaaatgtgtcaaaagttgaagttttttaaagataccgagatagcaaaaattaaaatggaagcaaaaaaaaagtatgaaaaggagttaaccatgttccagaatgattttgaaaaagct

SEQ ID NO: 29860 - DNA, 120 bp, Artificial Sequence
  ENSG00000046651_9 (sequence is synthesized)
tgtcaagcaaaatctgaagctctcgttcttcgggaaaagagtacccttgaaagaattcacaagcaccaagagattgaaacaaaagaaatttatgctcaaaggcaacttttactaaaagat

SEQ ID NO: 29861 - DNA, 120 bp, Artificial Sequence
  ENSG00000046651_10 (sequence is synthesized)
atggatttgctaagaggaagagaagcagagctgaagcaaagagttgaagcttttgaattgaaccagaagctccaggaagaaaaacataaaagcataactgaggcacttaggagacaggag

SEQ ID NO: 29862 - DNA, 120 bp, Artificial Sequence
  ENSG00000046651_11 (sequence is synthesized)
cagaatataaagagttttgaggagacctatgaccgaaagctcaagaatgaacttctaaagtatcaacttgaactgaaggatgactacatcattagaactaatcgactgattgaagatgaa

SEQ ID NO: 29863 - DNA, 120 bp, Artificial Sequence
  ENSG00000046651_12 (sequence is synthesized)
aggaagaataaagaaaaagctgttcatttgcaagaggagctcatagctattaattcaaaaaaggaggaactcaatcaatctgtaaatcgtgtgaaagaacttgagcttgaattagagtct

SEQ ID NO: 29864 - DNA, 120 bp, Artificial Sequence
  ENSG00000046651_13 (sequence is synthesized)
gtcaaagcccagtctttggcaataacaaaacaaaaccatatgctgaatgaaaaggttaaagagatgagtgattattcactactaaaagaagagaaactggagcttctggcacaaaataaa

SEQ ID NO: 29865 - DNA, 120 bp, Artificial Sequence
  ENSG00000046651_14 (sequence is synthesized)
ttacttaaacaacaactggaagagagtagaaatgaaaacctgcgtctcctaaaccgcctagctcagccggctcctgaacttgcagtctttcagaaagaactacggaaagccgaaaaggct

SEQ ID NO: 29866 - DNA, 120 bp, Artificial Sequence
  ENSG00000046651_15 (sequence is synthesized)
catgaggagttcgaaagctgcaggcaagctctgcacaaacaactgcaagacgaaattgagcattctgcacagctgaaggcccagattctaggttacaaagcttctgtaaagagtttaact

SEQ ID NO: 29867 - DNA, 120 bp, Artificial Sequence
  ENSG00000046651_16 (sequence is synthesized)
actcaggttgccgatttaaaattgcaactgaagcaaactcagacagccctagagaatgaagtgtactgcaatccaaagcagtctgtgatcgatcgttctgtcaatggattaataaatggc

SEQ ID NO: 29868 - DNA, 120 bp, Artificial Sequence
  ENSG00000046651_17 (sequence is synthesized)
aatgtggtgccttgcaatggtgagataagtggggatttcttgaacaatccttttaaacaggaaaacgttctagcacgtatggttgcatcaaggatcacaaattatccaactgcatgggtg

SEQ ID NO: 29869 - DNA, 120 bp, Artificial Sequence
  ENSG00000046651_18 (sequence is synthesized)
gagggtagttcccctgattctgaccttgagtttgtagccaatactaaggcaagggtcaaagagcttcagcaagaggccgaacgcttggaaaaggctttcagaagttaccatcggagagtc

SEQ ID NO: 29870 - DNA, 120 bp, Artificial Sequence
  ENSG00000046651_19 (sequence is synthesized)
attaaaaactctgccaaaagcccactagcagcaaagagcccaccatctctgcacttgctggaagccttcaaaaacattacttccagttccccggaaagacatatttttggagaggacaga

SEQ ID NO: 29871 - DNA, 120 bp, Artificial Sequence
  ENSG00000046651_20 (sequence is synthesized)
gttgtctctgagcagcctcaagtgggcacacttgaagaaaggaatgacgtcgtggaagcactgacaggcagtgcagcctcgaggctccgcgggggcacttcctccagacgcctctcttcc

SEQ ID NO: 29872 - DNA, 120 bp, Artificial Sequence
  ENSG00000046651_21 (sequence is synthesized)
acaccccttccaaaagcaaaaagaagcctcgaaagtgaaatgtatctggaaggtctgggcagatcacacattgcttcccccagtccttgtcctgacagaatgcccctaccatcacccact

SEQ ID NO: 29873 - DNA, 120 bp, Artificial Sequence
  ENSG00000046651_22 (sequence is synthesized)
gagtctaggcacagcctctccatccctcctgtctccagccctccggagcagaaagtgggtctttatcgaagacaaactgaacttcaagacaaaagtgaattttcagatgtggacaagcta

SEQ ID NO: 29874 - DNA, 120 bp, Artificial Sequence
  ENSG00000046651_23 (sequence is synthesized)
gcttttaaggataatgaggagtttgaatcatcttttgaatctgcagggaacatgccaaggcagttggaaatgggcgggctttctcctgccggggatatgtctcatgtggacgctgctgca

SEQ ID NO: 29875 - DNA, 120 bp, Artificial Sequence
  ENSG00000046651_24 (sequence is synthesized)
gctgctgtgcccctctcatatcagcacccaagtgtagatcagaaacaaattgaagaacaaaaggaagaagaaaaaatacgggaacagcaagtgaaagaacgaaggcagagagaagaaaga

SEQ ID NO: 29876 - DNA, 120 bp, Artificial Sequence
  ENSG00000046651_25 (sequence is synthesized)
aggcagagtaacctacaagaagttttagaaagggaacgaagagaactagaaaaactgtatcaggaaaggaagatgattgaagaatcactgaagattaaaataaaaaaggaattagaaatg

SEQ ID NO: 29877 - DNA, 120 bp, Artificial Sequence
  ENSG00000046651_26 (sequence is synthesized)
gaaaatgaattagaaatgagtaatcaagaaataaaagacaaatctgctcacagtgaaaatcctttagagaaatacatgaaaatcatccagcaggagcaagaccaggagtcggcagataag

SEQ ID NO: 29878 - DNA, 120 bp, Artificial Sequence
  ENSG00000046651_27 (sequence is synthesized)
agctcaaaaaagatggtccaagaaggctccctagtggacacgctgcaatctagtgacaaagtcgaaagtttaacaggcttttctcatgaagaactagacgactcttggtaaccatgtttg

SEQ ID NO: 29879 - DNA, 120 bp, Artificial Sequence
  ENSG00000046651_28 (sequence is synthesized)
ctgcccagcttctaacttacataccgtgagaagttacgtaacatttactcctttgtaaatgtttccctatcatcagacaaaactcaataaaaatgtgtgtaatccaatgtgggttttttt

SEQ ID NO: 29880 - DNA, 120 bp, Artificial Sequence
  ENSG00000046651_29 (sequence is synthesized)
ttccataattaattttgataccatagtgtgtgaaccaagaataatctagtcacgtgaaacctcttctccagtcatagtatttctcattcattataataaaagtaactggcttttaacctc

SEQ ID NO: 29881 - DNA, 120 bp, Artificial Sequence
  ENSG00000046651_30 (sequence is synthesized)
agaaagagcttgaaatttgctttattagcatagttataatcttatttaatctgaaggatgtttcttaatttcatattcagaaacatatcctaatttatcatttaaacactgatataaaaa

SEQ ID NO: 29882 - DNA, 120 bp, Artificial Sequence
  ENSG00000046651_31 (sequence is synthesized)
tatgtctacttagtaacctattttttcttaaggtatttactatgcaggatctattacaactcattaaaatcaaccctacttccagtctctacaaatcactggtttcaggatctgataaag

SEQ ID NO: 29883 - DNA, 120 bp, Artificial Sequence
  ENSG00000046651_32 (sequence is synthesized)
tgtactttttcctctaaaagaatgaagcaaatttttagggagaagagtaaaatttaatttgatttaaattatttgatttctgcaggtcatttcccctatatttccatttttgtaataact

SEQ ID NO: 29884 - DNA, 120 bp, Artificial Sequence
  ENSG00000046651_33 (sequence is synthesized)
tttagatattcaattaaaaaaactgtagacagtatcaaaggccctacagacaggctgaaagatactgtttgtaaaaatacccactgttgggaatatttctgcaaaaaaaaaaaaaaaaaa

SEQ ID NO: 29885 - DNA, 120 bp, Artificial Sequence
  ENSG00000046651_34 (sequence is synthesized)
gttttgaggagacctatgaccgaaagctcaagaatgaacttctaaacttccacaggctgcatggtgtctgcctggctttgggaatcctcatatgactttggcaggtgttggagtttggag

SEQ ID NO: 29886 - DNA, 120 bp, Artificial Sequence
  ENSG00000046651_35 (sequence is synthesized)
gctcttcgccacaggagtgcttctatttccttttggaaccaaaagggcagctggtaacagctgggaaagggaagtgaaactgtgaaaatgtgccttttggtattgctaatccggatataa

SEQ ID NO: 29887 - DNA, 120 bp, Artificial Sequence
  ENSG00000046651_36 (sequence is synthesized)
tgctcttggcagttggctctcaggactgtgcttagtccctgagcacaaaagttcttaccttggttgggggtgggcagatggtacaggtggattggaagtgaccgtctgattatcatttgg

SEQ ID NO: 29888 - DNA, 120 bp, Artificial Sequence
  ENSG00000046651_37 (sequence is synthesized)
gattgagtctgttgtgtgctgtgtaaatttaatttacccctttgctctttgtgtcagttgagaccaactgaaaagtgattgctttcagtaagtaaccttatgataacacgacgcttcatt

SEQ ID NO: 29889 - DNA, 120 bp, Artificial Sequence
  ENSG00000046651_38 (sequence is synthesized)
ttgtgtgattgagttttgggacccagtttataggatcaaggaagggttttactgggcattttatgttcaggggttatatccctggctttagtattgaggactttgaagtttacaagttgt

SEQ ID NO: 29890 - DNA, 120 bp, Artificial Sequence
  ENSG00000046651_39 (sequence is synthesized)
catgtttagcaccctcaggtgctcctgtgccatagataagctcctgcactgataacagtctttccagaaaaatgcctgaggagctcatatttagtcattctgattctcaggtatcaactt

SEQ ID NO: 29891 - DNA, 120 bp, Artificial Sequence
  ENSG00000046651_40 (sequence is synthesized)
atgatagcaatgacttcaattttaaaaattagtcctctggcatacaggctgtacttgaaggatcgggattaatattagtgcatttttaaaacacttaaaagttttacaaatgtatttgtg

SEQ ID NO: 29892 - DNA, 120 bp, Artificial Sequence
  ENSG00000046651_41 (sequence is synthesized)
gtggcagaattttttcctatacttaatatcccaatcgtaagctgctgaaatgggcttctagggaagtgaagttatgagtctgcaagtggatctggctaaccacccgtttcatttggaagc

SEQ ID NO: 29893 - DNA, 120 bp, Artificial Sequence
  ENSG00000046651_42 (sequence is synthesized)
tggggaaagaaagctttttctagaacccactggactgcttgtctcacgggacacaacttcgaaaccagctaattcatgagttgatgcaccctgtattgagtggagaactgcagcctcggt

SEQ ID NO: 29894 - DNA, 120 bp, Artificial Sequence
  ENSG00000046651_43 (sequence is synthesized)
acttaatcgccaagtctcttggtagtaatgttagcagaatataaataaattggagcacaagatattctggactgcccgcaaactagaccatctctactgaagttcagtatggttttctta

SEQ ID NO: 29895 - DNA, 120 bp, Artificial Sequence
  ENSG00000046653_0 (sequence is synthesized)
ggctagaagaaatgaggtggggagaaagagagagagagagagagatcgagattgagatcttaagaaagagagcaaggaggaagagcccggtggggagcaggtccttctcccccacccccc

SEQ ID NO: 29896 - DNA, 120 bp, Artificial Sequence
  ENSG00000046653_1 (sequence is synthesized)
tacccccaactcccactggagccgcattgagactgtaggcaccaccgggcgccgaatggctgttttctaactgggatcctcggtgacgtatggctgcctgccccttggcagctgtcttta

SEQ ID NO: 29897 - DNA, 120 bp, Artificial Sequence
  ENSG00000046653_2 (sequence is synthesized)
tggaccagtaggcagagcgaaattgacgctgacaagacttttgcatcttggaagggactgtaatctactgtagtgaagaacagagcctctcaatcagacgggtgtaaataagagacggag

SEQ ID NO: 29898 - DNA, 120 bp, Artificial Sequence
  ENSG00000046653_3 (sequence is synthesized)
gggagtccaaaagaaaaggaagaggaggaaaaacaagtgtgtgttggggggaacagggggaaaagcatttttggtggatggtatgaagccagccatggaaactgcagccgaggaaaatac

SEQ ID NO: 29899 - DNA, 120 bp, Artificial Sequence
  ENSG00000046653_4 (sequence is synthesized)
tgaacaaagccaagagagaaaaggctgctttgaatgctgcatcaagtgtctgggaggagtcccctacgcctccctggtggccaccatcctctgcttctccggggtggccttattctgcgg

SEQ ID NO: 29900 - DNA, 120 bp, Artificial Sequence
  ENSG00000046653_5 (sequence is synthesized)
ctgtgggcatgtggctctcgcaggcaccgtggcgattcttgagcaacacttctccaccaacgccagtgaccatgccttgctgagcgaggtgatacaactgatgcagtatgtcatctatgg

SEQ ID NO: 29901 - DNA, 120 bp, Artificial Sequence
  ENSG00000046653_6 (sequence is synthesized)
aattgcgtcctttttcttcttgtatgggatcattctgttggcagaaggcttttacaccacaagtgcagtgaaagaactgcacggtgagtttaaaacaaccgcttgtggccgatgcatcag

SEQ ID NO: 29902 - DNA, 120 bp, Artificial Sequence
  ENSG00000046653_7 (sequence is synthesized)
tggagtggcctggctgggtgtgtttggtttctcagcggtgcccgtgtttatgttctacaacatatggtcaacttgtgaagtcatcaagtcaccgcagaccaacgggaccacgggtgtgga

SEQ ID NO: 29903 - DNA, 120 bp, Artificial Sequence
  ENSG00000046653_8 (sequence is synthesized)
gcagatctgtgtggatatccgacaatacggtatcattccttggaatgctttccccggaaaaatatgtggctctgccctggagaacatctgcaacacaaacgagttctacatgtcctatca

SEQ ID NO: 29904 - DNA, 120 bp, Artificial Sequence
  ENSG00000046653_9 (sequence is synthesized)
cctgttcattgtggcctgtgcaggagctggtgccaccgtcattgccctgctgatctacatgatggctactacatataactatgcggttttgaagtttaagagtcgggaagattgctgcac

SEQ ID NO: 29905 - DNA, 120 bp, Artificial Sequence
  ENSG00000046653_10 (sequence is synthesized)
taaattctaaattgcataaggagttttagagagctatgctctgtagcatgaaatatcactgacactccagactaaagcagagtctaggtttctgcaattttgttacagtaatttgtaaat

SEQ ID NO: 29906 - DNA, 120 bp, Artificial Sequence
  ENSG00000046653_11 (sequence is synthesized)
agctttagtaaactcaccttgcatggtagattaataagatgacttactgtacatgaattacacaataatgagatctggtggctatttccacattttgaaaaggattcagttatttactga

SEQ ID NO: 29907 - DNA, 120 bp, Artificial Sequence
  ENSG00000046653_12 (sequence is synthesized)
cagtggtgagcatcctttttaaaataatgttctcatacttaaacattagagagcagtatctttaaatgaattattaacactttggaatacttacattttctgttatttttgattgcctga

SEQ ID NO: 29908 - DNA, 120 bp, Artificial Sequence
  ENSG00000046653_13 (sequence is synthesized)
taaccagtttcaatgatgaaaatgaaaacaagtgctgaagatgaaatggaagagaaccgttttaatctggattttgttttgtcacacctggaaaatactttgcaaatatgttctaaattg

SEQ ID NO: 29909 - DNA, 120 bp, Artificial Sequence
  ENSG00000046653_14 (sequence is synthesized)
attgaaaacaatttttttatgatcacatggttcactaccaaatgaccctcaaataagccagatgaaaatttgaagaaaaaggtcacccagttctctggaaaaaaaaaaaaaaaaaaaaaa

SEQ ID NO: 29910 - DNA, 120 bp, Artificial Sequence
  ENSG00000046653_15 (sequence is synthesized)
gagagaaaagtgaacagcagagctgaaatggaaattggcaggtaccactggatgtacccaggctcaaagaaccaccagtaccatcccgtgccaaccctgggggacagggctagccccttg

SEQ ID NO: 29911 - DNA, 120 bp, Artificial Sequence
  ENSG00000046653_16 (sequence is synthesized)
aaaatgcaggcttaccaggatatcaaagcaaaggaagaacaggaactgcaagatatccagtctcggtcaaaagaacaactcaattcttacacataaatgtttgccagagtgtttcggccg

SEQ ID NO: 29912 - DNA, 120 bp, Artificial Sequence
  ENSG00000046653_17 (sequence is synthesized)
acgtatttacagctctgacaaatcatcagacagctgctctgcagtacagatgtgtatcccaccaaactaatgtagatgtacaaacacttcactgtctgtctcaagctgctgggatgtatc

SEQ ID NO: 29913 - DNA, 120 bp, Artificial Sequence
  ENSG00000046653_18 (sequence is synthesized)
tctaggaaaaccttccagtgggtaaatctttttctttagaacaaatattggaggtttcatgttagccattttaaaaggcaacactttgacaaaatgatcgttcatactttgggaatttgt

SEQ ID NO: 29914 - DNA, 120 bp, Artificial Sequence
  ENSG00000046653_19 (sequence is synthesized)
ggataagaccgtaaattcacatatatgccatctgtcctcaagtgttatctacataggaaataaaatggaattgatgtaaagttccatttctgacagctgacatttattaaactttggatc

SEQ ID NO: 29915 - DNA, 120 bp, Artificial Sequence
  ENSG00000046653_20 (sequence is synthesized)
aaagataatgtgattcttatgattgatttctcaaactagcttttccctcccaagtccaggacccattaatttcctgagccaatcagaaatatatttttcaataatgctaaaattagctac

SEQ ID NO: 29916 - DNA, 120 bp, Artificial Sequence
  ENSG00000046653_21 (sequence is synthesized)
aattctgctgaccctactattaaagaatctggatgctggactcactgacaagctttccagaagcaattttataacagatttcattttaacaaaatactgatccaattttcattattcttg

SEQ ID NO: 29917 - DNA, 120 bp, Artificial Sequence
  ENSG00000046653_22 (sequence is synthesized)
agaaatgtcagctttgccttaatgagtatttgctttaaatttctaagaatttatatcataactagagacccaaatatctttcacagaattttgttccataaatgtttttcttaattatta

SEQ ID NO: 29918 - DNA, 120 bp, Artificial Sequence
  ENSG00000046653_23 (sequence is synthesized)
agaagtgttaccttattaaaatgaccaccattctaaaccatttttcagtggtctggatacgaagtttacagtttcataccaactatctaaaacctaattgcaaattgaccacagacctct

SEQ ID NO: 29919 - DNA, 120 bp, Artificial Sequence
  ENSG00000046653_24 (sequence is synthesized)
aacctcctacttttatagacttgaatacttaagtaatttaaattagggttggtatttcatttttttcttatctaaatcttagtttcctggaataataaagtttgatgttcagcaagagaa

SEQ ID NO: 29920 - DNA, 120 bp, Artificial Sequence
  ENSG00000046653_25 (sequence is synthesized)
ctgcttgagtttaagccattttcaaaagaaacttgccttttacattattgtgttccagaacattaagtgactgtaggtactgggtattagtgatggtaaactttgtgttgctctttatga

SEQ ID NO: 29921 - DNA, 120 bp, Artificial Sequence
  ENSG00000046653_26 (sequence is synthesized)
aatgatccatataactgttgggtgcatcagtgcttttcaaaggggctgcttactatagggttaactatgtatattcattgttaagagttaacttgtggtttggctgtttcctggatttta

SEQ ID NO: 29922 - DNA, 120 bp, Artificial Sequence
  ENSG00000046653_27 (sequence is synthesized)
taacatacatgtgcagaaatgtattcaaatgaaaggaagcatacctttatcaagatgctattaaaattgaacatcaagtataatatttcatttggattctcttttttggttaatgcctaa

SEQ ID NO: 29923 - DNA, 120 bp, Artificial Sequence
  ENSG00000046653_28 (sequence is synthesized)
aaatgcctatttgggatttttttttttttttaaattaagagaagctctcttctgtgtagaacagttgttccaaaatagcttagtgttttgttttcctgttgcatgacagatttaactatt

SEQ ID NO: 29924 - DNA, 120 bp, Artificial Sequence
  ENSG00000046653_29 (sequence is synthesized)
ctttccagcagtggaggtgctgtcagagtccagtgttctagaagaggcagtgtctaaagcctaattttacttttctaattctggtagctattaccaggaatttttgaaagttttgtttaa

SEQ ID NO: 29925 - DNA, 120 bp, Artificial Sequence
  ENSG00000046653_30 (sequence is synthesized)
gtagtctaatattttttatgtaaagagcattaaattttgctatgtataaatttttgtaacctaacagtgaatcaatattttctatcagtgccaagggcttcctgtagttctattcaagtg

SEQ ID NO: 29926 - DNA, 120 bp, Artificial Sequence
  ENSG00000046653_31 (sequence is synthesized)
ttacaataaatatttgtagataatagtcaatacttgtgtatgcttattttaaagatctatttaggtggaaatagttgtggatgtactaagagtaatgaaataaaattatagcttcattca

SEQ ID NO: 29927 - DNA, 120 bp, Artificial Sequence
  ENSG00000046653_32 (sequence is synthesized)
gaacatgttgtccattgggccagggttcagatgctggctttgccactaactgtgtatcctccgatgaggagcttaactcctcaatgcctgtgttttacttatgtgcaaaatgaggattct

SEQ ID NO: 29928 - DNA, 120 bp, Artificial Sequence
  ENSG00000046653_33 (sequence is synthesized)
cctgttcattgtggcctgtgcaggagctggtgccaccgtcattgccctggtgagtaatggccccaagaccaccctagtctagcctcctccctccagcttctaaatgacagatttcccttc

SEQ ID NO: 29929 - DNA, 120 bp, Artificial Sequence
  ENSG00000046653_34 (sequence is synthesized)
agcgcagcccgcagaagcccggtcagcgcacgtgcccgcgagacctgcaaacttgtgccaccggctctgcccgtccccggggagcccgaacgccccgcagccctcacccctcccgccagt

SEQ ID NO: 29930 - DNA, 120 bp, Artificial Sequence
  ENSG00000046653_35 (sequence is synthesized)
taactgtttcctcatagctagttctcaagctgcatgtaagattttaacgggaagagaaaataggcctggacctgaaggtctcaaatatgttgagaagaaagtatgaactataaggaactt

SEQ ID NO: 29931 - DNA, 120 bp, Artificial Sequence
  ENSG00000046653_36 (sequence is synthesized)
gagatgtagatttattttgcaggaaatacgaggaaaataggaaagaagtgtttgccgcatcaagtgtaaagaatgatactgaggatttttacattttatgaaatgaaataatggcattta

SEQ ID NO: 29932 - DNA, 120 bp, Artificial Sequence
  ENSG00000046653_37 (sequence is synthesized)
caaaatgaaaaatgtagtttcacaactaagttttgttaacagagactgcatgctttgcttatagttcttaattttggttttgacattcatttaattttttccatgttaaatatgtagttt

SEQ ID NO: 29933 - DNA, 120 bp, Artificial Sequence
  ENSG00000046653_38 (sequence is synthesized)
gctcccgaactttcgcattagtctttaaaattactctcaaaatggtattaaaaaaaaaaaaaaaagcaccctctcgtatttcatttttgctttttcttaacaatacctttggccattttt

SEQ ID NO: 29934 - DNA, 120 bp, Artificial Sequence
  ENSG00000046653_39 (sequence is synthesized)
ttccagttcactatgtttgtatactaacttttcttcagccttttaatgcgaagccaactagtagagcatgctttcaggatctgacagctctgctagtagagcgagtatttattaatacag

SEQ ID NO: 29935 - DNA, 120 bp, Artificial Sequence
  ENSG00000046653_40 (sequence is synthesized)
aattaaccttcgcccctttaaagtcaagtctgtctaatctaactagcgcctcgctttgccttctcacaatgctcactagccatcatgctcacccttctcttccagatccacttcctcatg

SEQ ID NO: 29936 - DNA, 120 bp, Artificial Sequence
  ENSG00000046653_41 (sequence is synthesized)
aaccatatgcttgcctgcatctaatgtgaaaccatccctgctccatgttcttagcatcctaggttcgtttccttcttggcactcaccgtggcttgaaatcacatggatttatgtgattat

SEQ ID NO: 29937 - DNA, 120 bp, Artificial Sequence
  ENSG00000046774_0 (sequence is synthesized)
gctttcccgacggccatcttgggaatctgacggatcgaaggcatttgtgaggaggcgcgaatcaagttagcggggggaagagtcttagacctggccagtcctcagggtgagggccctgag

SEQ ID NO: 29938 - DNA, 120 bp, Artificial Sequence
  ENSG00000046774_1 (sequence is synthesized)
gaagaactgagggacctcccaccatagagagaagaaaccccggcctgtactgcgctgccgtgagactggtgctccaggaaccaggtggtgacgaactgggtgtgaggcacacagcctaaa

SEQ ID NO: 29939 - DNA, 120 bp, Artificial Sequence
  ENSG00000046774_2 (sequence is synthesized)
gtcagcacagcagaggaggcccaggcagtgccaggagtcaaggcctgttggatctcatcatccatatccctgttgatacgtttacctgctgctcctgaagaagtcgtcatgcctcccgtt

SEQ ID NO: 29940 - DNA, 120 bp, Artificial Sequence
  ENSG00000046774_3 (sequence is synthesized)
ccaggcgttccattccgcaacgttgacaacgactccccgacctcagttgagttagaagactgggtagatgcacagcatcccacagatgaggaagaggaggaagcctcctccgcctcttcc

SEQ ID NO: 29941 - DNA, 120 bp, Artificial Sequence
  ENSG00000046774_4 (sequence is synthesized)
actttgtacttagtattttccccctcttctttctccacatcctcttctctgattcttggtggtcctgaggaggaggaggtgccctctggtgtgataccaaatcttaccgagagcattccc

SEQ ID NO: 29942 - DNA, 120 bp, Artificial Sequence
  ENSG00000046774_5 (sequence is synthesized)
agtagtcctccacagggtcctccacagggtccttcccagagtcctctgagctcctgctgctcctctttttcatggagctcattcagtgaggagtccagcagccagaaaggggaggataca

SEQ ID NO: 29943 - DNA, 120 bp, Artificial Sequence
  ENSG00000046774_6 (sequence is synthesized)
ggcacctgtcagggcctgccagacagtgagtcctctttcacatatacactagatgaaaaggtggccgagttagtggagttcctgctcctcaaatacgaagcagaggagcctgtaacagag

SEQ ID NO: 29944 - DNA, 120 bp, Artificial Sequence
  ENSG00000046774_7 (sequence is synthesized)
gcagagatgctgatgattgtcatcaagtacaaagattactttcctgtgatactcaagagagcccgtgagttcatggagcttctttttggccttgccctgatagaagtgggccctgaccac

SEQ ID NO: 29945 - DNA, 120 bp, Artificial Sequence
  ENSG00000046774_8 (sequence is synthesized)
cctgattattattctgagtgtgatcttcataaagggcaactgtgcctctgaggaggtcatctgggaagtgctgaatgcagtaggggtatatgctgggagggagcacttcgtctatgggga

SEQ ID NO: 29946 - DNA, 120 bp, Artificial Sequence
  ENSG00000046774_9 (sequence is synthesized)
gcctagggagctcctcactaaagtttgggtgcagggacattacctggagtatcgggaggtgccccacagttctcctccatattatgaattcctgtggggtccgagagcccattcagaaag

SEQ ID NO: 29947 - DNA, 120 bp, Artificial Sequence
  ENSG00000046774_10 (sequence is synthesized)
catcaagaagaaagtactagagtttttagccaagctgaacaacactgttcctagttcctttccatcctggtacaaggatgctttgaaagatgtggaagagagagtccaggccacaattga

SEQ ID NO: 29948 - DNA, 120 bp, Artificial Sequence
  ENSG00000046774_11 (sequence is synthesized)
taccgcagatgatgccactgtcatggccagtgaaagcctcagtgtcatgtccagcaacgtctccttttctgagtgaagtctaggatagtttcttccccttgtgtttgaacagggcagttt

SEQ ID NO: 29949 - DNA, 120 bp, Artificial Sequence
  ENSG00000046774_12 (sequence is synthesized)
aggttctaggtagtggagggccaggtggggctcgaggaacgtagtgttctttgcatttctgtcccatatgggtgatgtagagatttacctgtttttcagtattttctaaatgcttttcct

SEQ ID NO: 29950 - DNA, 120 bp, Artificial Sequence
  ENSG00000046774_13 (sequence is synthesized)
ttgaatagcaggtagttagcttcagagtgttaatttatgaatattagtcgcacatgtattgctctttatctggtttaagagtaacagtttgatattttgttaaaaaaatggaaatacctt

SEQ ID NO: 29951 - DNA, 120 bp, Artificial Sequence
  ENSG00000046774_14 (sequence is synthesized)
ctcccttattttgtgatctgtaacagggtagtgtggtattgtaataggcatttttttttttttttacaatgtgcaataactcagcagttaaatagtggaacaaaattgaagggtggtcag

SEQ ID NO: 29952 - DNA, 120 bp, Artificial Sequence
  ENSG00000046774_15 (sequence is synthesized)
tagtttcatttccttgtcctgcttattcttttgttcttgaaaattatatatacctggctttgcttagcttgttgaagaaagtagcagaaattaaatcttaataaaagaaagccccactga

SEQ ID NO: 29953 - DNA, 120 bp, Artificial Sequence
  ENSG00000046889_0 (sequence is synthesized)
agcttttgattaatgtccaagtcactgctgtggctgccgaagccgcttcccctccagccccggccgtgtgaggccagagcagcggggccgggcgcgcagggcctggccggagcccccact

SEQ ID NO: 29954 - DNA, 120 bp, Artificial Sequence
  ENSG00000046889_1 (sequence is synthesized)
cccaggagtttcctctgcagagccccgcgccccccgcgccgggatttcagcccgatcccctcctctccctgcgcccagcctctccccagcatgtaaagtcttctgtctctcctcggagtt

SEQ ID NO: 29955 - DNA, 120 bp, Artificial Sequence
  ENSG00000046889_2 (sequence is synthesized)
gaggcggcaactttccattctcgccgccgggggccgggcagcagcgggcgcgcgggtcagcgctcagcacggcgggcagcgccgcgctgcgcaccgccgccgaccatgagcgaggacagc

SEQ ID NO: 29956 - DNA, 120 bp, Artificial Sequence
  ENSG00000046889_3 (sequence is synthesized)
cagccgcggagacagccgcgccgagagcgccaaggacctggagaagcagcttcgcctgcgcgtgtgcgtgctcagcgagctccagaagaccgagcgggactatgtgggcacgctggagtt

SEQ ID NO: 29957 - DNA, 120 bp, Artificial Sequence
  ENSG00000046889_4 (sequence is synthesized)
cctggtgtcggcattcttacacagaatgaaccagtgtgcagcatcaaaagttgacaaaaatgtgacagaagaaacagtgaagatgttgttctcaaacattgaagacatccttgcagtaca

SEQ ID NO: 29958 - DNA, 120 bp, Artificial Sequence
  ENSG00000046889_5 (sequence is synthesized)
taaagaattcttaaaagtcgtggaagaatgcttacaccccgaacctaatgctcaacaagaagtgggaacctgctttcttcactttaaagacaagtttcgtatctatgatgaatattgtag

SEQ ID NO: 29959 - DNA, 120 bp, Artificial Sequence
  ENSG00000046889_6 (sequence is synthesized)
taaccatgagaaggcacaaaaattacttcttgaactcaacaaaataagaacaatccggacatttcttttgaactgcatgctgcttggaggacggaagaacacagatgttcccttggaagg

SEQ ID NO: 29960 - DNA, 120 bp, Artificial Sequence
  ENSG00000046889_7 (sequence is synthesized)
atatttagtaacaccaatacaaagaatatgcaagtaccctcttattttgaaggagttgctgaagcggactccacggaaacacagtgactatgcagcagtgatggaagccctccaagccat

SEQ ID NO: 29961 - DNA, 120 bp, Artificial Sequence
  ENSG00000046889_8 (sequence is synthesized)
gaaagctgtctgttccaacataaacgaggccaagagacagatggagaagttagaagttttagaggaatggcagtctcacattgaaggctgggaggggtccaacatcactgacacctgcac

SEQ ID NO: 29962 - DNA, 120 bp, Artificial Sequence
  ENSG00000046889_9 (sequence is synthesized)
tgaaatgctaatgtgtggagtcttactgaaaatttcttctggaaatattcaagaacgggtgttttttcttttcgataatcttttggtgtactgcaaaagaaaacacagacggttgaagaa

SEQ ID NO: 29963 - DNA, 120 bp, Artificial Sequence
  ENSG00000046889_10 (sequence is synthesized)
cagcaaggcatctacagatggacatcggtacctttttcgtggccggatcaacacggaggtgatggaagtggagaatgtggatgatggcaccgctgatttccatagcagtggacacattgt

SEQ ID NO: 29964 - DNA, 120 bp, Artificial Sequence
  ENSG00000046889_11 (sequence is synthesized)
tgttaatggatggaagatacataacacagcaaaaaataaatggtttgtttgtatggcaaaaacacctgaagagaagcatgaatggtttgaagctattttgaaagaaagagaacggcggaa

SEQ ID NO: 29965 - DNA, 120 bp, Artificial Sequence
  ENSG00000046889_12 (sequence is synthesized)
aggtttaaaattaggaatggagcaagatacctgggtcatgatctctgaacagggtgagaaactttataaaatgatgtgcagacaaggaaatctgatcaaagaccgaaagagaaaactgac

SEQ ID NO: 29966 - DNA, 120 bp, Artificial Sequence
  ENSG00000046889_13 (sequence is synthesized)
tacgttccctaaatgctttcttggaagcgaatttgtgtcatggctgttggaaattggagagattcacaggcctgaggaaggcgtgcacttgggacaagcattattagaaaatggaatcat

SEQ ID NO: 29967 - DNA, 120 bp, Artificial Sequence
  ENSG00000046889_14 (sequence is synthesized)
tcaccatgttactgataaacatcaattcaaaccagaacagatgttatatagatttcgctatgatgatggaacattttatccaagaaatgagatgcaggacgtgatttcaaagggtgtaag

SEQ ID NO: 29968 - DNA, 120 bp, Artificial Sequence
  ENSG00000046889_15 (sequence is synthesized)
attatattgtcgtcttcatagcctttttactccagtgataagagataaagattaccatttaaggacctacaaatctgtggtcatggccaacaaactgatagactggttaattgcacaggg

SEQ ID NO: 29969 - DNA, 120 bp, Artificial Sequence
  ENSG00000046889_16 (sequence is synthesized)
agattgccgcaccagagaagaggcaatgatatttggcgttggactctgtgacaatggatttatgcaccatgtccttgaaaaaagcgaattcaaagatgaacccctacttttccgtttttt

SEQ ID NO: 29970 - DNA, 120 bp, Artificial Sequence
  ENSG00000046889_17 (sequence is synthesized)
ttcggatgaggaaatggagggatcaaatatgaaacatcgacttatgaaacatgacttaaaagttgtggaaaatgttatagctaagtcattattgattaaatccaatgaaggcagctatgg

SEQ ID NO: 29971 - DNA, 120 bp, Artificial Sequence
  ENSG00000046889_18 (sequence is synthesized)
ctttggattagaagacaaaaataaagttccaataataaagttggtagaaaagggatctaatgctgagatggctggcatggaagtcgggaaaaagatttttgctattaatggtgacctagt

SEQ ID NO: 29972 - DNA, 120 bp, Artificial Sequence
  ENSG00000046889_19 (sequence is synthesized)
ttttatgagacctttcaatgaagtggattgcttcctgaaatcgtgtttaaacagcagaaaacctctaagagttcttgtgagcacaaagccaagagagacagtgaaaattccagattcagc

SEQ ID NO: 29973 - DNA, 120 bp, Artificial Sequence
  ENSG00000046889_20 (sequence is synthesized)
tgatggacttggcttccagatccggggatttggcccttctgttgtgcatgctgtaggaagaggaactgtggctgcagcagctggtcttcaccctggacagtgcattatcaaggtgaatgg

SEQ ID NO: 29974 - DNA, 120 bp, Artificial Sequence
  ENSG00000046889_21 (sequence is synthesized)
aatcaatgtcagcaaagagacacatgccagtgtcattgcacacgttacagcctgcaggaagtacaggcggccaacgaagcaagattccatacaatgggtttataatagcattgagagtgc

SEQ ID NO: 29975 - DNA, 120 bp, Artificial Sequence
  ENSG00000046889_22 (sequence is synthesized)
tcaagaagaccttcaaaaatctcactccaagccccctggagatgaagcaggggatgcttttgactgtaaagtagaagaggttattgacaaattcaacactatggccatcattgatgggaa

SEQ ID NO: 29976 - DNA, 120 bp, Artificial Sequence
  ENSG00000046889_23 (sequence is synthesized)
gaaggagcatgtgagtctgacagtggacaatgtccacctggaatatggtgtcgtgtatgagtacgacagcacagctggcatcaagtgcaatgtggtggaaaagatgattgagcccaaagg

SEQ ID NO: 29977 - DNA, 120 bp, Artificial Sequence
  ENSG00000046889_24 (sequence is synthesized)
tttcttcagcttaactgccaagattcttgaagccctggctaaaagtgatgagcattttgtacaaaactgtaccagcctaaattctctaaatgaagtgattcctactgaccttcagagtaa

SEQ ID NO: 29978 - DNA, 120 bp, Artificial Sequence
  ENSG00000046889_25 (sequence is synthesized)
attcagtgccctttgcagtgaaagaattgaacacctatgtcagagaatatccagttataaaaagttttctcgtgtactgaagaatagggcctggcctacttttaaacaggccaaatctaa

SEQ ID NO: 29979 - DNA, 120 bp, Artificial Sequence
  ENSG00000046889_26 (sequence is synthesized)
aatctccccactgcacagcagtgatttctgccctaccaactgccatgtcaatgtgatggaagtttcttatcccaaaacatcaacctctttgggaagtgcatttggtgttcagttggatag

SEQ ID NO: 29980 - DNA, 120 bp, Artificial Sequence
  ENSG00000046889_27 (sequence is synthesized)
caggaagcataattctcatgataaagaaaacaaatcttcggagcaagggaaactgagccctatggtgtacattcagcacaccatcacaaccatggcggccccttcaggtctgtctctggg

SEQ ID NO: 29981 - DNA, 120 bp, Artificial Sequence
  ENSG00000046889_28 (sequence is synthesized)
acagcaggatggccatggtctcaggtatctgctaaaagaagaagacttagaaacccaagacatctatcagaaactgctgggcaaacttcagactgcactgaaagaggtggagatgtgtgt

SEQ ID NO: 29982 - DNA, 120 bp, Artificial Sequence
  ENSG00000046889_29 (sequence is synthesized)
ttgtcaaatagatgaccttctgtcttcaataacatattctcctaaattagaacgtaagacatcagagggcataataccaacagacagtgacaatgagaagggagaaagaaacagcaaacg

SEQ ID NO: 29983 - DNA, 120 bp, Artificial Sequence
  ENSG00000046889_30 (sequence is synthesized)
ggtatgttttaatgtagcaggagatgaacaggaagattctggtcatgacaccatcagcaacagagactcttacagtgactgcaacagcaataggaattccatcgcctccttcaccagcat

SEQ ID NO: 29984 - DNA, 120 bp, Artificial Sequence
  ENSG00000046889_31 (sequence is synthesized)
ctgcagcagccagtgcagctcgtatttccacagtgatgaaatggactcaggtgatgaacttcccttaagtgttcgcatatctcatgataaacaggacaagatacatagttgccttgagca

SEQ ID NO: 29985 - DNA, 120 bp, Artificial Sequence
  ENSG00000046889_32 (sequence is synthesized)
tcttttcagccaggtggattcaattaccaatctcctaaaagggcaggctgttgtgagggcctttgaccaaaccaagtatctcactccaggccgaggattgcaagaatttcaacaggaaat

SEQ ID NO: 29986 - DNA, 120 bp, Artificial Sequence
  ENSG00000046889_33 (sequence is synthesized)
ggaaccaaagctgagttgtccaaaaaggctacggcttcatatcaagcaagatccttggaatcttcccagcagcgtccggactcttgctcagaacatcaggaaatttgttgaagaggtaaa

SEQ ID NO: 29987 - DNA, 120 bp, Artificial Sequence
  ENSG00000046889_34 (sequence is synthesized)
gtgtaggctactcctggctcttcttgaatattcagatagtgagacacagctccgtagagacatggttttctgccagactcttgtggccactgtctgtgccttctctgagcagctcatggc

SEQ ID NO: 29988 - DNA, 120 bp, Artificial Sequence
  ENSG00000046889_35 (sequence is synthesized)
ggccttgaaccagatgtttgacaacagcaaggaaaatgagatggaaacttgggaagccagcaggaggtggctggaccagatagcgaatgcaggtgttctttttcactttcagtcacttct

SEQ ID NO: 29989 - DNA, 120 bp, Artificial Sequence
  ENSG00000046889_36 (sequence is synthesized)
gtcaccaaacttgacagatgaacaagccatgttagaagatacactggttgcactatttgatttggaaaaggtttccttttactttaaaccatcagaagaggaacctctggttgcaaatgt

SEQ ID NO: 29990 - DNA, 120 bp, Artificial Sequence
  ENSG00000046889_37 (sequence is synthesized)
tcctcttacatatcaagcagaaggaagtcggcaagctctgaaagtttacttctacattgatagttatcattttgaacaacttcctcaacggctgaaaaatggaggagggtttaaaattca

SEQ ID NO: 29991 - DNA, 120 bp, Artificial Sequence
  ENSG00000046889_38 (sequence is synthesized)
tcctgttctttttgcacaagcactagagagcatggaaggatattattacagagacaatgtttctgtggaagaatttcaagctcagataaatgcagcctcactggaaaaggtcaaacagta

SEQ ID NO: 29992 - DNA, 120 bp, Artificial Sequence
  ENSG00000046889_39 (sequence is synthesized)
caaccagaagctcagggcattctacttggacaagtcaaattcaccaccaaactccacatccaaagctgcctatgtagataagctaatgaggcctctcaacgctttggatgaactttaccg

SEQ ID NO: 29993 - DNA, 120 bp, Artificial Sequence
  ENSG00000046889_40 (sequence is synthesized)
actggtagcctcgtttatcagatccaagcgcacagctgcctgtgcaaacacagcttgcagtgcttctggggttggactgctgtcagtttcctcggagctgtgcaacaggctgggcgcctg

SEQ ID NO: 29994 - DNA, 120 bp, Artificial Sequence
  ENSG00000046889_41 (sequence is synthesized)
ccacatcatcatgtgcagcagcggtgtgcatcggtgcaccctgagcgtgacgctggagcaagccatcattctggccagaagccacggactgccacctcgttacatcatgcaggctacaga

SEQ ID NO: 29995 - DNA, 120 bp, Artificial Sequence
  ENSG00000046889_42 (sequence is synthesized)
tgtgatgcggaagcagggagcaagagttcagaacacagcgaagaatttgggagtcagagaccggactccacagtctgcaccaaggctgtacaagctgtgcgagccacctcccccagctgg

SEQ ID NO: 29996 - DNA, 120 bp, Artificial Sequence
  ENSG00000046889_43 (sequence is synthesized)
agaagaatgaaaagaactcccaagaaaccaggcaggcagaagctcctgaatgctggactagacaaactacatgctggctaaacattctccactgaagatacatcaatgcttttttttttt

SEQ ID NO: 29997 - DNA, 120 bp, Artificial Sequence
  ENSG00000046889_44 (sequence is synthesized)
tttttttctgtaaatctttcttcccattgcaaacaagtagtgatcagtttatactttgatatttatgctggaaatggatagaagttcaatcagacagttcagcttcacgaactgatgtct

SEQ ID NO: 29998 - DNA, 120 bp, Artificial Sequence
  ENSG00000046889_45 (sequence is synthesized)
cttttagagtaaaatccatccctgggacataaagaaaaaaatattagagatttaaaaattaaccaccatgcctcctctcccattcattaaaatggttttattatgcttgttttcatcttt

SEQ ID NO: 29999 - DNA, 120 bp, Artificial Sequence
  ENSG00000046889_46 (sequence is synthesized)
cccaagtggacacatgtaataatggagagttcctcttgaagaaggccattattgaagaaacctggcgacatcttgcaaatcatcatgagaaatgttaaggacaatatagactgtgtgcta

SEQ ID NO: 30000 - DNA, 120 bp, Artificial Sequence
  ENSG00000046889_47 (sequence is synthesized)
tacattttcagtcccccatttgcaagagagaaagtcattaatgtgtaaaaggtggaaaagcatgctttactctttctcctaagggcttatttcttattagaggagaagaaagctgactaa

SEQ ID NO: 30001 - DNA, 120 bp, Artificial Sequence
  ENSG00000046889_48 (sequence is synthesized)
ggcctccagcaggactcactttcttctagctgcctttgggcatcctttattcttgtggacagctctagcaaatcaatgctatttttggtgtctgcaatgggcatggcttccttgggccat

SEQ ID NO: 30002 - DNA, 120 bp, Artificial Sequence
  ENSG00000046889_49 (sequence is synthesized)
gaatactgggtgctgtgccataatggccctggggatcagggaagtgccctggggatcagggaggggaaccaggatgaagaaggggactgtaagcctattttaaaactaaacctttaagtt

SEQ ID NO: 30003 - DNA, 120 bp, Artificial Sequence
  ENSG00000046889_50 (sequence is synthesized)
agatacctaaaactcttaattttatgaaggctctcatatgagaggtcagactcttcaaagaatacaccatcatgagaatttttctgttaagatatatgtataagatatgaaaataaggct

SEQ ID NO: 30004 - DNA, 120 bp, Artificial Sequence
  ENSG00000046889_51 (sequence is synthesized)
ttatttgtactttaaaaggaccattaggggacttgtaatttatggatgcacaaggtgtattctatccttattctaaagtatatgtaatgtttatcatttctacattgatgcaataacatt

SEQ ID NO: 30005 - DNA, 120 bp, Artificial Sequence
  ENSG00000046889_52 (sequence is synthesized)
gtttttagcatagtaaatacagtaatatttattttaaatccataattttcaaacaaaacactcatgattgtgataattatatgggtttacactaatttagtatgtgaaatgcttttcata

SEQ ID NO: 30006 - DNA, 120 bp, Artificial Sequence
  ENSG00000046889_53 (sequence is synthesized)
tatgtgaaatgcttttcatatctaaattatgtgcaaactattattaattttttttttattttttgaaactgagtctcactctgttacccagactggagtgcggtggtgcaatcttggctc

SEQ ID NO: 30007 - DNA, 83 bp, Artificial Sequence
  ENSG00000046889_54 (sequence is synthesized)
tcccggcccattattaaattttaatttatgaaatttgatcatggttttcaaactattattaaaacctttatcattaaccatta

SEQ ID NO: 30008 - DNA, 120 bp, Artificial Sequence
  ENSG00000046889_55 (sequence is synthesized)
gttttcaaactattattaaaacctttatcattaaccattatgtattgaataacaaaaataccatgttacatgtgtaggcaatatgtgtatactactaggtaaggtaataataattgttat

SEQ ID NO: 30009 - DNA, 120 bp, Artificial Sequence
  ENSG00000046889_56 (sequence is synthesized)
ttggcacagaagctctagagacttttgtgagaagtccatatacaatgaaaaacaaggaacctaacatcagagttttcaagaaaaagttgaacattttgaatttaataaagatatctttac

SEQ ID NO: 30010 - DNA, 120 bp, Artificial Sequence
  ENSG00000046889_57 (sequence is synthesized)
aaaaataaccttcaaggatttaacatttgtaggactaataaaggaacacagctgattagctagcaagtcctttcatattgtcatgactgttttctcatcaccatcctggaagcagtaatc

SEQ ID NO: 30011 - DNA, 120 bp, Artificial Sequence
  ENSG00000046889_58 (sequence is synthesized)
ctcattagaggcatgcaagggtcattaaaatgatttcagttgtactttgccatatttcatggggcaaattatcagctatattgtggtatttataagctaacatattttatatttttaagg

SEQ ID NO: 30012 - DNA, 120 bp, Artificial Sequence
  ENSG00000046889_59 (sequence is synthesized)
atctactttcttcataatagaatgtgcttcatattatttttagggttaaacataagtgtgtcgtctatcatgcttggtacttactaaatgctcaaaaattagtaatggtttatattaaca

SEQ ID NO: 30013 - DNA, 120 bp, Artificial Sequence
  ENSG00000046889_60 (sequence is synthesized)
tcagtcactctaacttctgatcgtaataaaaattgtagctaacacttattaagggattactacatgcccagtaatacctccaaatgctttgcctgtattctgttgttattgcttcactta

SEQ ID NO: 30014 - DNA, 120 bp, Artificial Sequence
  ENSG00000046889_61 (sequence is synthesized)
atcctcataataatgacgtgacatggtactctttttatcgcgcccatttttagagttgaggaaccaaagcaaagaataacccagtgacttgcacaaagtcacatgattgacaaggggtag

SEQ ID NO: 30015 - DNA, 120 bp, Artificial Sequence
  ENSG00000046889_62 (sequence is synthesized)
aaccaaaatttgaacccaggaagtctgccttcttaatgcattatgctacttttccttatcaatataagaactattgtaatattacgatgatttgtaagtaaatttggagttatgcggcat

SEQ ID NO: 30016 - DNA, 120 bp, Artificial Sequence
  ENSG00000046889_63 (sequence is synthesized)
gtgttgtcattaaattatacatcttgtattaaaaaacggtgaatggaaatatgtaaatgctttaattatatgaaaattatagtgtttcctggacattttacaactctggatgcacatttt

SEQ ID NO: 30017 - DNA, 120 bp, Artificial Sequence
  ENSG00000046889_64 (sequence is synthesized)
gaggtaactcaacagtgttgcaatctgaaaaactattttgtatcatgttcctcctcatcaaaaataacagttttagatagtacatctcatacaactttattataattccaacacagtggt

SEQ ID NO: 30018 - DNA, 120 bp, Artificial Sequence
  ENSG00000046889_65 (sequence is synthesized)
aagagtaaaaaacatacctaatggatgaatgaataatgacaattttttcaatgccatatgtacctccatgtgacattgggcattaaatggccttgaggttttaggatgtgtttaccttaa

SEQ ID NO: 30019 - DNA, 120 bp, Artificial Sequence
  ENSG00000046889_66 (sequence is synthesized)
tgctacatgctcctctataaccagtgcaccttcaaatactgctaaaacctgctaacttcttccaggttctgagcatggacaactcccaccgccccccaacctaaaagggaaggtcatgca

SEQ ID NO: 30020 - DNA, 120 bp, Artificial Sequence
  ENSG00000046889_67 (sequence is synthesized)
tagaaagtttggattttaacttagagcctgactcaaaaataattgtgaactaaaaattcatagtcaatactttttaagcattctattatctcctataattttttctaatattaattccaa

SEQ ID NO: 30021 - DNA, 120 bp, Artificial Sequence
  ENSG00000046889_68 (sequence is synthesized)
atattacaaaatttaatgtgatattaaagtatgaaaaatttgagaagattagaattttacatgtatttccattcctatttaaagagagaaaatggggagataatttctgtgctagtttta

SEQ ID NO: 30022 - DNA, 120 bp, Artificial Sequence
  ENSG00000046889_69 (sequence is synthesized)
cttatattggatatataatattgaatttatagtataagctttattttatcagttcgcaaatctgaagtctcatactgttttctgtctctttaaaacacattcttctggtggcttgggttc

SEQ ID NO: 30023 - DNA, 120 bp, Artificial Sequence
  ENSG00000046889_70 (sequence is synthesized)
attgtgcattcattggccactcttcttgcagcaaattttaaatcaatttaaaattaggtaaactttttatgatactataatatatatgacgttgaaatgacattggttctgagtctatta

SEQ ID NO: 30024 - DNA, 120 bp, Artificial Sequence
  ENSG00000046889_71 (sequence is synthesized)
atttaaattttgggatcattacattcagaatgaaatgaaattgaccttgatactaactttgagagccaaaaaaatgaatgggtaaacaaagcctaagggtcatgttaattaatttaacaa

SEQ ID NO: 30025 - DNA, 120 bp, Artificial Sequence
  ENSG00000046889_72 (sequence is synthesized)
aacacactattttcagtcctttgggcttgtacattttatagacaaaattagcatttattgatttggaagtgttcaattgagagtaaatgactctgtgttttgaaactaatacctttgcat

SEQ ID NO: 30026 - DNA, 120 bp, Artificial Sequence
  ENSG00000046889_73 (sequence is synthesized)
ttaaaatactgaagtattattttgttagttgaagtagatcttttcctgtgtagcatgatttaatgcagagcagttattcacttatacttctgaaaagccataatattgaaatttaaaatg

SEQ ID NO: 30027 - DNA, 120 bp, Artificial Sequence
  ENSG00000046889_74 (sequence is synthesized)
aatagtcttactttaaggtcacttttactttacattttactttaaaggtcgtttttagactttatgcactagtggtattgaaactaacctttaatatttgactaaattgcttgtgaattt

SEQ ID NO: 30028 - DNA, 120 bp, Artificial Sequence
  ENSG00000046889_75 (sequence is synthesized)
ttggaaactatgtttaatttttaaagacattgttatgtgaattatcttactaaattatcacttaagaactctctcatagcagtaatttcattaacacatatatatactaaccaatttgct

SEQ ID NO: 30029 - DNA, 120 bp, Artificial Sequence
  ENSG00000046889_76 (sequence is synthesized)
aaatgaattgtcggttgtcctgcttaagtactagggccaagctttgaaatgacttaaagtgatctgaattttgattgagaaaaataatctgtcttctatcgaatgtttgaacttttagtg

SEQ ID NO: 30030 - DNA, 120 bp, Artificial Sequence
  ENSG00000046889_77 (sequence is synthesized)
atgagcctcagcaaagtttcaccctgcatgaagcagaacaggtgggggaaaattacaagaggggtctgtaccaaaaatggccccaggatattccattgaacaaatattgaccattatctt

SEQ ID NO: 30031 - DNA, 120 bp, Artificial Sequence
  ENSG00000046889_78 (sequence is synthesized)
cctaggtgctacaactccatactagtcattacagttagtctttggtttcacaaaaatgttactgcttcaaaggcttggcattaacagtgatgtcagcattcatactgccaacagtctgct

SEQ ID NO: 30032 - DNA, 120 bp, Artificial Sequence
  ENSG00000046889_79 (sequence is synthesized)
ggtcatacatggaagactgttaaagtgtggtctgtgcatcattgagcaattgttatgtagacacaaggcctgcttcactcaggatagcttgctcctctcgctgagaagagatacctgaag

SEQ ID NO: 30033 - DNA, 120 bp, Artificial Sequence
  ENSG00000046889_80 (sequence is synthesized)
ctcgctgagaagagatacctgaagtctactaagtctactaaatgagatatatatgtgtatgtatatgcctatatatattattatatttactagtgtttgtgataatgttataaaaattaa

SEQ ID NO: 30034 - DNA, 120 bp, Artificial Sequence
  ENSG00000046889_81 (sequence is synthesized)
tgtacgacaaatcgagttgttcaatgtattgaatgaatgtcttactgtaagcatcagagctgtccaaccatgtgtaaatgtacctggtcttttgatcactgacactactttgctgttcaa

SEQ ID NO: 30035 - DNA, 120 bp, Artificial Sequence
  ENSG00000046889_82 (sequence is synthesized)
tctggaatcaactgacctggctctgccattgagaaataactaatttagaacaaaattgttaaattttaaaattgcatttctactagaaatagctttggagagttaattttaggtgcgaat

SEQ ID NO: 30036 - DNA, 120 bp, Artificial Sequence
  ENSG00000046889_83 (sequence is synthesized)
aacaggataaatgctatctgatcaagcattcatccgaaaaatgtttttgagaattcactttgtgcaaggcacagctgttggggctggtatatgtgtggacatgtttgatttgaaaacctt

SEQ ID NO: 30037 - DNA, 120 bp, Artificial Sequence
  ENSG00000046889_84 (sequence is synthesized)
cgtggtgtctctgtgtgttattgatcatctgtgtcttttgcttaaaatggcattatttgtaacacaaacctaatatcatatatacaaatatactgtatgtagccaagaacactaaattgg

SEQ ID NO: 30038 - DNA, 120 bp, Artificial Sequence
  ENSG00000046889_85 (sequence is synthesized)
taagacgctttagaaaatatgcatttgaatttgaatatctaatgcctcaagcaaatttattagagtttcagatgaatatatatttttgtaactggcaagtaaatgagtagaacagagctt

SEQ ID NO: 30039 - DNA, 120 bp, Artificial Sequence
  ENSG00000046889_86 (sequence is synthesized)
tggcaagtaaatgagtagaacagagctttttgcctaaaaatatttttataagtactcatttacatagtattcattattttaaatgacaaaatatcaaattggttctataaatagtaattg

SEQ ID NO: 30040 - DNA, 120 bp, Artificial Sequence
  ENSG00000046889_87 (sequence is synthesized)
atgaaatccaaaatttaatgataaatttcatctggatgtgttattataaaagtcatctttttttcctttgtaaaatatccatgtaacatagcttccattactccatattttatgtatggt

SEQ ID NO: 30041 - DNA, 120 bp, Artificial Sequence
  ENSG00000046889_88 (sequence is synthesized)
taaaattatcaaagtgcattatgtattttatattgtttatttttgtctgcatgaaagattggaatagtaaccgtgtatgataaatgttaataataataaagtgaaatgtagtatgaccaa

SEQ ID NO: 30042 - DNA, 120 bp, Artificial Sequence
  ENSG00000046889_89 (sequence is synthesized)
agtatttttttaagcaattgcatgacatctttgaattgtgttggaatccttgtgacagcagtttatattttaggatatgatattttacttcatttaataaatgagattttattgcatgat

SEQ ID NO: 30043 - DNA, 120 bp, Artificial Sequence
  ENSG00000046889_90 (sequence is synthesized)
aaggaaagataaaagacagaagagaagggtactatgttttcatgatgttttgctaatgattgtaacaaccttgggcagcactttatgtaaccagctgatttgattaataaaaggcttgca

SEQ ID NO: 30044 - DNA, 120 bp, Artificial Sequence
  ENSG00000046889_91 (sequence is synthesized)
cagcggtgtgcatcggtatgtgaccctcccgccttgcttgcctctttgttagatcacactttatttgatggtttttgtttacattttggcttcacaaaattaaaactggaaacattcaaa

SEQ ID NO: 30045 - DNA, 120 bp, Artificial Sequence
  ENSG00000046889_92 (sequence is synthesized)
acagcacggcatgctgtctgggagcacagttttgatcttcacagtgtaagcagcacatttccagtacctgtgactatggagttcctcctgctgcctcctcctctcttaggaatatcccag

SEQ ID NO: 30046 - DNA, 120 bp, Artificial Sequence
  ENSG00000046889_93 (sequence is synthesized)
gatggaagacagcactgcattcctgaggaccttccttctcaagaaatgctcttagcagagagggcccctgtctgattcttaccctttggaacagttcaggcacccttagacacagtacac

SEQ ID NO: 30047 - DNA, 120 bp, Artificial Sequence
  ENSG00000046889_94 (sequence is synthesized)
agcccttcctagcatgtgggcagggggacatcctgtattcacaggcatttgtattgagctacaagttggaaagccagtccccctagcaagagaatcttctgccagctctccccgattact

SEQ ID NO: 30048 - DNA, 120 bp, Artificial Sequence
  ENSG00000046889_95 (sequence is synthesized)
ccattaacacttcttgacatcaccctattcatttccttttcagcttgtaccaaaatttctaactatctggcttttacgtgcattatataattgtatatatacagtcatgcactgcataac

SEQ ID NO: 30049 - DNA, 120 bp, Artificial Sequence
  ENSG00000046889_96 (sequence is synthesized)
aaatggtggtcccataagattatactactacattttggctctactttttctatgttcagatagatgcacctattggtgtatttttcagaatacatccccgttgttaagcaatgcattact

SEQ ID NO: 30050 - DNA, 120 bp, Artificial Sequence
  ENSG00000046889_97 (sequence is synthesized)
gtattatatatatggcacatgtattatatatatggcacattgccgttacttttaatggcaaaaaccgcaatcacttttgctccaacctagtaattgcaataaacaattgttgtatatagc

SEQ ID NO: 30051 - DNA, 80 bp, Artificial Sequence
  ENSG00000047056_0 (sequence is synthesized)
actgcggaggagccgaacactgaccgcgccgtccccgccaggctcccgcgcggccggcaccgcggccctgagcgcaggcg

SEQ ID NO: 30052 - DNA, 120 bp, Artificial Sequence
  ENSG00000047056_1 (sequence is synthesized)
cgcagccctcccgccccggctgccgggctacggggcagatggactcggagcgccccgccggtgagtagctacgacccccgaggccacctcccgcgaaccgctcggcggcaggagtacgtg

SEQ ID NO: 30053 - DNA, 120 bp, Artificial Sequence
  ENSG00000047056_2 (sequence is synthesized)
agtacgtgaccaagggtgggggcgttggcccagcagccgaaggggtcttcagcgcgcccagacccctcggggctgcggggcggaagccggggcgtgacttccggcgccgccgggtgtggg

SEQ ID NO: 30054 - DNA, 120 bp, Artificial Sequence
  ENSG00000047056_3 (sequence is synthesized)
gtggggcggcttccggagaacccagcggcgcgggactggggcgggacttccggcgacaccggaagtgcattagcgccaggttggggttgtggggtcgcgtcagtgcggagacagcggtgt

SEQ ID NO: 30055 - DNA, 120 bp, Artificial Sequence
  ENSG00000047056_4 (sequence is synthesized)
cctgcgcgtcttcgggtcagtacggggggccgcgtcgtagggactcactggcggtgcgcgacctgggctggctccgggggtggcgggcgcagctgctgtgacagcttattgcaggagtga

SEQ ID NO: 30056 - DNA, 120 bp, Artificial Sequence
  ENSG00000047056_5 (sequence is synthesized)
ccaggacactacctcctagaagtaatgcccacagaaagcgcaagttgttcgactgctcgccaaacaaaacagaagcgcaaatcccatagcctttctatacgaagaactaacagctcggag

SEQ ID NO: 30057 - DNA, 120 bp, Artificial Sequence
  ENSG00000047056_6 (sequence is synthesized)
caggagaggacgggactgccaagagacatgttagaaggacaagattctaaactgccttcctcggttcgcagtacacttctggaactgtttggtcaaatagaaagagaatttgaaaacctt

SEQ ID NO: 30058 - DNA, 120 bp, Artificial Sequence
  ENSG00000047056_7 (sequence is synthesized)
tatatcgaaaacttagaattacgtagagaaatcgacactcttaatgaacgtttagctgctgaaggacaagcgattgatggagcagagctgagtaagggccaactcaaaacaaaagccagt

SEQ ID NO: 30059 - DNA, 120 bp, Artificial Sequence
  ENSG00000047056_8 (sequence is synthesized)
cacagcaccagccagctctcccagaaactgaagaccacttacaaggcttccaccagcaagattgtctccagctttaagaccacgacatcgagagctgcctgccagctcgtgaaggagtac

SEQ ID NO: 30060 - DNA, 120 bp, Artificial Sequence
  ENSG00000047056_9 (sequence is synthesized)
atcggccaccgggacggcatctgggatgtcagcgtggccaagacacagccagtggtgctcgggactgcatcagccgatcacacggctttgctgtggagcatagagacagggaagtgccta

SEQ ID NO: 30061 - DNA, 120 bp, Artificial Sequence
  ENSG00000047056_10 (sequence is synthesized)
gtcaagtacgcaggccacgtgggctcagtaaattctatcaaatttcatccctcagagcagttggctctcactgcttctggagatcagactgctcatatctggagatacgcggtgcagctg

SEQ ID NO: 30062 - DNA, 120 bp, Artificial Sequence
  ENSG00000047056_11 (sequence is synthesized)
ccgacaccccagcctgttgctgacactagtatatctggggaagatgaagtagagtgctctgacaaggacgagcccgacctcgatggggatgtgtccagcgactgccccaccatccgcgtc

SEQ ID NO: 30063 - DNA, 120 bp, Artificial Sequence
  ENSG00000047056_12 (sequence is synthesized)
ccactgacatccctcaagagccaccagggcgtggtcatcgcctccgactggctggttggggggaagcaggctgtgactgcctcctgggaccggacggcaaacctgtacgacgtggagacg

SEQ ID NO: 30064 - DNA, 120 bp, Artificial Sequence
  ENSG00000047056_13 (sequence is synthesized)
tccgagctcgttcactctctgacagggcacgaccaggagttgacgcactgctgcacacaccccacccagcggctcgtggtgacctcctcccgtgacacgactttccgcctctgggatttc

SEQ ID NO: 30065 - DNA, 120 bp, Artificial Sequence
  ENSG00000047056_14 (sequence is synthesized)
agggacccctccatccactcggtgaatgttttccagggacacacggacactgtgacttctgccgtgttcaccgtgggagacaacgtggtttcaggcagcgatgaccgcacggtgaaagtc

SEQ ID NO: 30066 - DNA, 120 bp, Artificial Sequence
  ENSG00000047056_15 (sequence is synthesized)
tgggacttgaaaaatatgagatcccccattgcaactattcgcacggactctgccattaacaggatcaatgtatgtgtcggccaaaaaatcatagccctcccccatgacaaccgacaagtg

SEQ ID NO: 30067 - DNA, 120 bp, Artificial Sequence
  ENSG00000047056_16 (sequence is synthesized)
agactgtttgatatgtcaggagtgcgcctggcgcggcttccccggagcagccgacagggccacaggagaatggtatgctgctcggcatggagtgaagaccaccccgtgtgcaatctgttc

SEQ ID NO: 30068 - DNA, 120 bp, Artificial Sequence
  ENSG00000047056_17 (sequence is synthesized)
acctgtgggtttgaccggcaagccattggttggaacatcaacatccctgcattgctacaagaaaaataaggacaccggcagcccttagtttcactgtttgccagcacagacctttgatgg

SEQ ID NO: 30069 - DNA, 120 bp, Artificial Sequence
  ENSG00000047056_18 (sequence is synthesized)
gtgcaggcttttctgcgtattaatcagccatttttgtgagagtttgaccctggaaagggtgctttgtatatgttcttttcacatagtgcccagcttgcatgaaatgtacagagaaatgtg

SEQ ID NO: 30070 - DNA, 120 bp, Artificial Sequence
  ENSG00000047056_19 (sequence is synthesized)
tggtcgtattttttacttttgtcttgtatatgtatgtatattgggtcctctgggcagtagaggcaaagctcacctcccatgtagcacatgaaatgcttgtgagttgttgacattggacag

SEQ ID NO: 30071 - DNA, 120 bp, Artificial Sequence
  ENSG00000047056_20 (sequence is synthesized)
gtgaacagtagggcattacatttgtgtgaattaaatgtgaacttctgtattacgttgcggcgtcggcagtcctgcgttccctggagtaactgtacgtatctgcctttgctgggaagactg

SEQ ID NO: 30072 - DNA, 120 bp, Artificial Sequence
  ENSG00000047056_21 (sequence is synthesized)
ctactctaatttctgttacagttctgcaaaggtaacctggagtttagaagttaaaaaaaagcatgggatgttggatttgcaccatttggagtttctttaggaaagaaaagttttctgctt

SEQ ID NO: 30073 - DNA, 120 bp, Artificial Sequence
  ENSG00000047056_22 (sequence is synthesized)
ttttatagaaaatcatttcagtctcccgaggtctcatgctagcaaattttgaaataggattctaatcactgatttcaaatattaagcaaaatgtaaagcactttaatttatagctatggt

SEQ ID NO: 30074 - DNA, 120 bp, Artificial Sequence
  ENSG00000047056_23 (sequence is synthesized)
tataaacaggttttagatgtttcaaatgacttgtccactgaatgtcacttgaccttgataagaggccgcctgcacacagagcccagttaattctccgcacctcggttgtgtgcttccgaa

SEQ ID NO: 30075 - DNA, 120 bp, Artificial Sequence
  ENSG00000047056_24 (sequence is synthesized)
tgggctcactcccgtggtggtgtttgagagccaacaacactacctcagagacgggtctttgggaaactttgggtctcactgttgcctggctggagcactttggtttatagctggaatact

SEQ ID NO: 30076 - DNA, 120 bp, Artificial Sequence
  ENSG00000047056_25 (sequence is synthesized)
gagttcagttcagaaggcaggaaagacagtcacaccgacgtgtcctgaaggtgtaggctctccacttaggcgcacaagctgacggctgcagccagcaggccccggtgacgagacacttcc

SEQ ID NO: 30077 - DNA, 120 bp, Artificial Sequence
  ENSG00000047056_26 (sequence is synthesized)
aggtcttgtggtggggacgcctctcagtgccagtcccgccactgctgagtgagcctggtgttcttgccttcttggaaattactgctcacctggtatctgtacgttaatgtttcttgctga

SEQ ID NO: 30078 - DNA, 120 bp, Artificial Sequence
  ENSG00000047056_27 (sequence is synthesized)
gttacagttttgataaagaggctctcatttcctgtgtcttgtatattcagtcctttcaatacgtccacctggaggctcaccacttggagagacacaggaaggtaatatttacagctgtca

SEQ ID NO: 30079 - DNA, 120 bp, Artificial Sequence
  ENSG00000047056_28 (sequence is synthesized)
tgtgacatccccaggtctttgtgttttgccctgttttacggtgaggtaggagggaacccatctggggaccggtaggtgcaggtgcagtaggacgtgggacttttggacccgtcctttggt

SEQ ID NO: 30080 - DNA, 120 bp, Artificial Sequence
  ENSG00000047056_29 (sequence is synthesized)
gcagctcgccagggatgagaggcacctccctacttgggtcttcaggagctggtccaaggagcttcgaatctaagtcatctagaatgaccctgaaatgactgacagccccgggcccaagaa

SEQ ID NO: 30081 - DNA, 120 bp, Artificial Sequence
  ENSG00000047056_30 (sequence is synthesized)
aaacccataaccacctcagatggatctgacgtggctaagggacaaacagcaaatatttcagtcattttgattttacaaataaaaaatgtgttgtgtttttgtccgacattatttcctgac

SEQ ID NO: 30082 - DNA, 120 bp, Artificial Sequence
  ENSG00000047056_31 (sequence is synthesized)
tgcactgttctgagaatggagtccacctggtccctctggttgattagaatctcaggtttcagctcctgctgtcctgagcgaacttgcctgatgcagggctgtgctgtgtccagatgttgc

SEQ ID NO: 30083 - DNA, 120 bp, Artificial Sequence
  ENSG00000047056_32 (sequence is synthesized)
tggggcctcactttttctcttggctggaggtccaattgccagagcctcccacactgcacatacaaaggtctgagcccagggcagcttctggggccactgcacaggccacctgcttgggtt

SEQ ID NO: 30084 - DNA, 120 bp, Artificial Sequence
  ENSG00000047056_33 (sequence is synthesized)
cctcggagtttaatttgaaagtctgggtgtcttaggatgatggttaggaacattgaaaaatggctgcaaatagccaaatcaaacttaagaaccagatctctgccagattaaacatttttg

SEQ ID NO: 30085 - DNA, 120 bp, Artificial Sequence
  ENSG00000047056_34 (sequence is synthesized)
aagcttttaaaagtcaatattcctagtggccactgagttccaggcacactggtgccctttactgccacagctgctcaccttgtctggcaaactggagggacctcagaaactggactcctg

SEQ ID NO: 30086 - DNA, 120 bp, Artificial Sequence
  ENSG00000047056_35 (sequence is synthesized)
catgtccttgggggcgcagccctgtggtgctcaggcagagctctcaggagccggggcaccttgctgttcgctgctgtgtcgtcttctaatgtgagctcatccactgctgctgcagcgtgg

SEQ ID NO: 30087 - DNA, 88 bp, Artificial Sequence
  ENSG00000047056_36 (sequence is synthesized)
gctaaattaagtcatactgtcaaccacacgtgatctcgtctgaaacagtgtttggaagtgggaacagttttgtcctgtatgctgatgt

SEQ ID NO: 30088 - DNA, 120 bp, Artificial Sequence
  ENSG00000047056_37 (sequence is synthesized)
tgtttggaagtgggaacagttttgtcctgtatgctgatgtgtccagaatttcatttaatgatagacggaaaatgtgtggttactgaaaactgtatatgatacagaatttcataagagcca

SEQ ID NO: 30089 - DNA, 120 bp, Artificial Sequence
  ENSG00000047056_38 (sequence is synthesized)
tgctgttgggcaaagcaactctttttcaaccactgctcatcagtttctgtagagacaaaaactctgtacatattttggaatctgaagaatcctatgtaaatcatttgttacttaagtctg

SEQ ID NO: 30090 - DNA, 120 bp, Artificial Sequence
  ENSG00000047056_39 (sequence is synthesized)
tgaaaaacatatttctttggaggaaaatgtatgcatttataagtgttccatggaatcagtttttattgtatcgatataattgtctctaagtgttgactgtcttcattgcaatatgaaatt

SEQ ID NO: 30091 - DNA, 120 bp, Artificial Sequence
  ENSG00000047056_40 (sequence is synthesized)
cattaaaatgtccatgttccataattactattataaaagctttgtgttattgggagtcttattatttttatagtttttcatgttttgctttggtgaaacattgtgaatgactatataaac

SEQ ID NO: 30092 - DNA, 120 bp, Artificial Sequence
  ENSG00000047056_41 (sequence is synthesized)
atcacgatgagctagaaattgaacaaatataatactggtcactcgaaaaatttttagacttaaaaagtcagttgtgttttgtgtctgtctcttatgctaacattaaacaatacataatta

SEQ ID NO: 30093 - DNA, 120 bp, Artificial Sequence
  ENSG00000047056_42 (sequence is synthesized)
agaacgatggcctttctgcggtgtctgcgaccgggaccaaggcggagcaaagtcgccgggggtgtggggtgttccacgctatgttgggagtgttcgctttcgagcttattgcaggagtga

SEQ ID NO: 30094 - DNA, 120 bp, Artificial Sequence
  ENSG00000047056_43 (sequence is synthesized)
gtgaatgtgtaggatgctgatgtctgcgaatctgagaatccatttatgatatctgtcatggacggaatgtttgtgtccccccaagttcagtgttgaaggcctcacccccggtatggttga

SEQ ID NO: 30095 - DNA, 120 bp, Artificial Sequence
  ENSG00000047056_44 (sequence is synthesized)
atttggagattgggcctctaaggtagtagttaaggttcagtgaggttgcgtgaggtcctcataagaggagacagtggagagctcacctgtgttctcaatctctctgtcactctccgtgtc

SEQ ID NO: 30096 - DNA, 120 bp, Artificial Sequence
  ENSG00000047056_45 (sequence is synthesized)
acgtaagagcagagccagagggcggccgtctttaaggatgagcccgcaccagaacctgaattggcttgatcttggacttccagcctccagcactgtgagaaaataaatgtctgtttttta

SEQ ID NO: 30097 - DNA, 120 bp, Artificial Sequence
  ENSG00000047056_46 (sequence is synthesized)
ggtctccaagccgcacggcctcgtcctctgctccacctttggcctgtgtctcccacgctcgctccctagacggagctcatttgttcaatgagcagtgattcggagtgggaccggtcagca

SEQ ID NO: 30098 - DNA, 120 bp, Artificial Sequence
  ENSG00000047056_47 (sequence is synthesized)
tggatttcttttaaattctctgctatagaccaagatatgttatgattacattgattgacagttgttgttggaatggattttttaaattctctgccatagacccagatgtgtagacatttg

SEQ ID NO: 30099 - DNA, 120 bp, Artificial Sequence
  ENSG00000047056_48 (sequence is synthesized)
ggcatgttctgtccaaccctactttctgtaacctctcttcgttccgttgcctgtagatgtggaatagagtagaatggactgtgtgtttctgatccactgggaagaaatcagttgtccttt

SEQ ID NO: 30100 - DNA, 120 bp, Artificial Sequence
  ENSG00000047056_49 (sequence is synthesized)
cacagcagaaggcgaagcgggagaaggcgtcatgtgatggaaacaggaaacagaagttctctgagggcaggggctttaccaggggtcctcactccagagttcctacctgctagattgagc

SEQ ID NO: 30101 - DNA, 120 bp, Artificial Sequence
  ENSG00000047188_0 (sequence is synthesized)
gctcctcgcctggccgtgatatcaatggcgcaggcttcacttctgctgtggcggtgactgaggcctttctggtgacctcagcccaacacaggccgtctccggagcttcccggtagtggcc

SEQ ID NO: 30102 - DNA, 120 bp, Artificial Sequence
  ENSG00000047188_1 (sequence is synthesized)
ccggattcccacggtctttgtcattggctgtcagctagcaggcctggccgctcccgtgcggagagaccatctcttcagggcaatgtccaggccgagcagcgtctccccgcggcagccggc

SEQ ID NO: 30103 - DNA, 120 bp, Artificial Sequence
  ENSG00000047188_2 (sequence is synthesized)
tcctggcggtggcggaggcggcggcccctcgccttgtggccctgggggcggcggccgggccaaggggctgaaggacattcgcattgatgaggaggtgaagatcgcagtcaatatcgcgct

SEQ ID NO: 30104 - DNA, 120 bp, Artificial Sequence
  ENSG00000047188_3 (sequence is synthesized)
ggagcgcttccgatacggggaccagagagaaatggaatttccttcttctttgaccagtactgaaagagcctttattcatcgactcagtcagtctcttggtttggtctctaaaagtaaagg

SEQ ID NO: 30105 - DNA, 120 bp, Artificial Sequence
  ENSG00000047188_4 (sequence is synthesized)
aaagggagcaaatagatacctaactgtgaagaagaaagatggatcagaaacagctcatgcaatgatgacctgtaatttgactcataatacaaaacatgctgttaggagcctaattcaaag

SEQ ID NO: 30106 - DNA, 120 bp, Artificial Sequence
  ENSG00000047188_5 (sequence is synthesized)
atttcctgtcaccaataaagagcgtacagaacttctgcctaaaacagaaagaggaaatgtgtttgcagttgaagctgaaaaccgggaaatgagcaagacaagtgggcgactcaacaatgg

SEQ ID NO: 30107 - DNA, 120 bp, Artificial Sequence
  ENSG00000047188_6 (sequence is synthesized)
catacctcagattccagtgaaaagaggagaatccgaatttgattcttttaggcagtctttaccagtgtttgagaaacaggaagaaattgttaaaataattaaggaaaataaagtagtttt

SEQ ID NO: 30108 - DNA, 120 bp, Artificial Sequence
  ENSG00000047188_7 (sequence is synthesized)
gattgtaggagaaactgggtctggaaagaccacacagattcctcagttccttttagatgattgctttaaaaatggtatcccctgccgtatattttgtactcaaccaagacgattggcagc

SEQ ID NO: 30109 - DNA, 120 bp, Artificial Sequence
  ENSG00000047188_8 (sequence is synthesized)
tatcgctgtggctgaaagagttgccgcagagagacgggaaaggattggtcaaacaattggttatcagatccgattagaaagcagggtttctccaaagacacttctgacattttgtactaa

SEQ ID NO: 30110 - DNA, 120 bp, Artificial Sequence
  ENSG00000047188_9 (sequence is synthesized)
tggggtattgcttcgtacattgatggcaggagatagtacgttgtcgactgtgacacatgttatcgtggatgaagtgcatgaaagggatcgatttagtgattttttacttacaaagttaag

SEQ ID NO: 30111 - DNA, 120 bp, Artificial Sequence
  ENSG00000047188_10 (sequence is synthesized)
agatttgttgcaaaagcacccaactttgaaactaattctttctagtgctgccttggatgtaaatctctttataagatattttggaagttgtccagtgatatatatacagggaagaccatt

SEQ ID NO: 30112 - DNA, 120 bp, Artificial Sequence
  ENSG00000047188_11 (sequence is synthesized)
tgaagtaaaagaaatgtttctggaagatattttaagaacaactggatatacaaacaaagaaatgttaaaatataaaaaggaaaaacagcaagaagagaaacaacaaaccacacttacaga

SEQ ID NO: 30113 - DNA, 120 bp, Artificial Sequence
  ENSG00000047188_12 (sequence is synthesized)
atggtactcagctcaagaaaatagtttcaagcctgaatctcagaggcagagaactgttctaaatgtgactgatgagtatgacttactggatgatggtggtgatgctgtcttcagtcagct

SEQ ID NO: 30114 - DNA, 120 bp, Artificial Sequence
  ENSG00000047188_13 (sequence is synthesized)
gactgaaaaagatgtgaattgccttgaaccatggttaataaaggaaatggatgcttgcctttctgatatatggctacataaagatattgatgcctttgctcaggtctttcatctcatttt

SEQ ID NO: 30115 - DNA, 120 bp, Artificial Sequence
  ENSG00000047188_14 (sequence is synthesized)
aactgaaaatgttagtgttgattacagacatagtgaaaccagtgcaacagctctgatggttgctgcaggacgtggctttgcaagtcaagtagaacagttaatcagtatgggagccaatgt

SEQ ID NO: 30116 - DNA, 120 bp, Artificial Sequence
  ENSG00000047188_15 (sequence is synthesized)
ccatagtaaagcatcaaatggctggatggcattggattgggctaaacactttgggcagactgaaattgtggatcttctagaatcttacagtgctacactggaatttggaaatctagatga

SEQ ID NO: 30117 - DNA, 120 bp, Artificial Sequence
  ENSG00000047188_16 (sequence is synthesized)
aagttctctggttcaaacaaatggaagtgacctcagtgctgaagacagagagctcctgaaagcttatcatcatagtttcgatgatgaaaaagtagacttggatttgatcatgcatcttct

SEQ ID NO: 30118 - DNA, 120 bp, Artificial Sequence
  ENSG00000047188_17 (sequence is synthesized)
atacaatatctgccatagttgtgatgctggtgcagtactaatttttctgcctggatatgacgaaattgttggactgagagatcgcatcctgtttgatgacaagcggtttgctgacagtac

SEQ ID NO: 30119 - DNA, 120 bp, Artificial Sequence
  ENSG00000047188_18 (sequence is synthesized)
acatagataccaagtctttatgcttcattcaaatatgcaaacatccgatcaaaagaaagtattaaaaaacccacctgcaggtgttcgaaaaataattctttccaccaatattgctgaaac

SEQ ID NO: 30120 - DNA, 120 bp, Artificial Sequence
  ENSG00000047188_19 (sequence is synthesized)
cagcatcacagtcaatgatgttgtctttgttattgattctggtaaggtgaaagagaaatcctttgatgctctgaattttgttacaatgttaaaaatggtatggatttccaaagctagtgc

SEQ ID NO: 30121 - DNA, 120 bp, Artificial Sequence
  ENSG00000047188_20 (sequence is synthesized)
catacagcggaaaggcagggcagggcgatgtagacctggaatttgttttcgtctgttcagtagactccgattccagaatatgttggaatttcagactccggaacttttgagaatgccatt

SEQ ID NO: 30122 - DNA, 120 bp, Artificial Sequence
  ENSG00000047188_21 (sequence is synthesized)
acaggaactttgcttacataccaagctgttagccccagttaattgtcccattgctgattttcttatgaaagctcctgaacctccaccagctttaattgtaagaaatgctgtacaaatgct

SEQ ID NO: 30123 - DNA, 120 bp, Artificial Sequence
  ENSG00000047188_22 (sequence is synthesized)
taagacaatagatgcaatggatacatgggaagatctgactgaacttgggtatcatttggctgacttgccagtagaaccacatcttggtaaaatggtcttgtgtgctgttgttttaaagtg

SEQ ID NO: 30124 - DNA, 120 bp, Artificial Sequence
  ENSG00000047188_23 (sequence is synthesized)
tctggaccccatccttacaattgcttgcacactagcttatcgagatccttttgtactacctactcaggcctctcaaaaacgtgcagctatgctttgtaggaaacgttttactgcaggagc

SEQ ID NO: 30125 - DNA, 120 bp, Artificial Sequence
  ENSG00000047188_24 (sequence is synthesized)
tttcagtgaccatatggcacttctcagagcattccaggcctggcaaaaagcacgaagtgatgggtgggagcgagccttttgtgaaaagaattttctttcacaggctactatggaaataat

SEQ ID NO: 30126 - DNA, 120 bp, Artificial Sequence
  ENSG00000047188_25 (sequence is synthesized)
cataggcatgagaacacagttgcttggtcaacttagagcatcaggttttgttagagcacgaggtggtggtgacattcgggacgttaacacaaactctgagaattgggctgtcgttaaagc

SEQ ID NO: 30127 - DNA, 120 bp, Artificial Sequence
  ENSG00000047188_26 (sequence is synthesized)
ggccaaaggagaaaaaagtacgatttcatcctgcttcagttctcagtcagcctcaatataaaaagattcctccagccaatggtcaagctgcagcaattaaggcactgcccacagattggc

SEQ ID NO: 30128 - DNA, 120 bp, Artificial Sequence
  ENSG00000047188_27 (sequence is synthesized)
ttatttatgatgaaatgaccagagcccatagaatagctaatattagatgttgttcagcagtgacgcctgtcactatattggtattctgtggaccagctagattggcaagtaatgctcttc

SEQ ID NO: 30129 - DNA, 120 bp, Artificial Sequence
  ENSG00000047188_28 (sequence is synthesized)
aggaaccttcatcctttagagtggatggcattcccaatgacagtagtgatagtgaaatggaggacaaaactacagctaatttggcagccttgaaacttgatgagtggctccatttcacac

SEQ ID NO: 30130 - DNA, 120 bp, Artificial Sequence
  ENSG00000047188_29 (sequence is synthesized)
tggagccagaggcagctagtttattgctgcagctcagacagaagtggcatagcttatttttacgccgaatgagagctccatctaaaccttggtctcaagttgatgaagctaccataagag

SEQ ID NO: 30131 - DNA, 120 bp, Artificial Sequence
  ENSG00000047188_30 (sequence is synthesized)
caattatagctgttttaagcactgaagaacagtctgcaggtttacaacaaccatctgggattggccaaaggccaaggcctatgtcttcagaagagcttcctttggcctcatcttggaggt

SEQ ID NO: 30132 - DNA, 120 bp, Artificial Sequence
  ENSG00000047188_31 (sequence is synthesized)
caaataatagtaggaaaagttcagcagatactgaattttctgatgagtgtactactgcagaaagagtactgatgaaatctccatctccagcattacacccacctcagaagtacaaagata

SEQ ID NO: 30133 - DNA, 120 bp, Artificial Sequence
  ENSG00000047188_32 (sequence is synthesized)
gaggaattttacatcctaaacgaggtactgaggaccgatcagatcagtcttctctgaaatctacagacagcagtagttacccaagtccttgtgctagtccttctcctccatcctcaggaa

SEQ ID NO: 30134 - DNA, 120 bp, Artificial Sequence
  ENSG00000047188_33 (sequence is synthesized)
agggctcaaaatctccttcgccaagaccaaacatgcctgttcgatacttcataatgaagagtagcaatttgagaaaccttgaaatttctcaacagaagggtatctggtctacaactccta

SEQ ID NO: 30135 - DNA, 120 bp, Artificial Sequence
  ENSG00000047188_34 (sequence is synthesized)
gtaatgaacggaagctaaatcgagccttttgggaaagcagcatagtttacttggtattttctgttcaaggatctggacatttccagggattttctaggatgtcttctgagattggaaggg

SEQ ID NO: 30136 - DNA, 120 bp, Artificial Sequence
  ENSG00000047188_35 (sequence is synthesized)
aaaagagtcaggactggggctctgctggactaggaggagtatttaaggtggagtggatacgaaaagaaagccttccctttcaatttgcacaccatttactcaatccatggaatgacaaca

SEQ ID NO: 30137 - DNA, 120 bp, Artificial Sequence
  ENSG00000047188_36 (sequence is synthesized)
agaaagtgcagataagcagggatgggcaggaactagaacctctggttggtgaacagttgctccagttatgggaacgtcttcccttgggagaaaaaaacacaactgattgacactcagaac

SEQ ID NO: 30138 - DNA, 120 bp, Artificial Sequence
  ENSG00000047188_37 (sequence is synthesized)
tcttagctgtggaagaacatcatgcctatttataaccactgaatgcactgactttcaaaaactgaggtggggtgtgtgttacgaatgggctttttaacacttttagagtgttgctttaga

SEQ ID NO: 30139 - DNA, 120 bp, Artificial Sequence
  ENSG00000047188_38 (sequence is synthesized)
actaccatcttcatatacaggagaaaggaagcatttaaatttttatagtgattatagagaatgattatatgatgtttgtaatgaataaaatagtagtttcattatttggcacaatagcag

SEQ ID NO: 30140 - DNA, 120 bp, Artificial Sequence
  ENSG00000047188_39 (sequence is synthesized)
tttattttaaacaaacaatttgaagttaaacatttcatttttaaaaacactgaattacagttcttattgatgactttttaatgcagagtaagttgtttaagaaaggcctgaatatatcag

SEQ ID NO: 30141 - DNA, 120 bp, Artificial Sequence
  ENSG00000047188_40 (sequence is synthesized)
aacatctgagcaccattttagaagagtcaactcttaagattatcattagaaaacaaatacgtcaacacctatgaaaagaagcggggaaaacaacaacaaggacaacaacaaaaaaccagt

SEQ ID NO: 30142 - DNA, 120 bp, Artificial Sequence
  ENSG00000047188_41 (sequence is synthesized)
gaaattctacaagtgtcccttttaaaaatagtgtgtgctaactaagggctattcattctgccatttttaacttgagacacatttaagaataaagttggatgttctttttctgtgattatg

SEQ ID NO: 30143 - DNA, 120 bp, Artificial Sequence
  ENSG00000047188_42 (sequence is synthesized)
aaatgcaataaaatctgaataaagggcaaagtttcttcctgatcagattagattaagtgcttagttttattcctaattctgccccttttaacctgatgtgtaccttactctttcctccct

SEQ ID NO: 30144 - DNA, 120 bp, Artificial Sequence
  ENSG00000047188_43 (sequence is synthesized)
ctcttcctcccttcctcctctccccgctcctttcctgcatttctccctccctccttccctcgtcacatctcttatatgagcacagtaattatgacctttttgttttggctacaacttgat

SEQ ID NO: 30145 - DNA, 120 bp, Artificial Sequence
  ENSG00000047188_44 (sequence is synthesized)
tgaaacaagttcaaaatttaaacaagttcatacaagtttttaaaaattctcaactggtagcttgcttgctgtgcgtcttccaaactaaagcctgcaagcgccacaattctaagtgccgcc

SEQ ID NO: 30146 - DNA, 120 bp, Artificial Sequence
  ENSG00000047188_45 (sequence is synthesized)
ttccattttttttcagtatgttttcactggcttatgttttcagatatgattttcctttttcgcatatatggtttaataaatgggggataattttttttttgtaaatccgtgcttgtgcca

SEQ ID NO: 30147 - DNA, 120 bp, Artificial Sequence
  ENSG00000047188_46 (sequence is synthesized)
agtctcatatttctttgccatctcagaattatctttttaccaccactgtttataaaatttccttagagactttttgaagggaaaatagagcaacagggaaaaatgaaagaaatgtcttgg

SEQ ID NO: 30148 - DNA, 120 bp, Artificial Sequence
  ENSG00000047188_47 (sequence is synthesized)
ttactgagctctaaatagacaggtttgatggcacttctcatgatacattttagttattcttataaaagcaaacaggcaaacatgagtgtaaattaaagacaaaaagaaaactctggtttt

SEQ ID NO: 30149 - DNA, 120 bp, Artificial Sequence
  ENSG00000047188_48 (sequence is synthesized)
atatttgagaacacgtgaaaaatcatgggtcaacataaaatcttgagaaccttctactttctctgggaaagcattatatagtggtgcattagtttagaaagtcagctatgattttgccta

SEQ ID NO: 30150 - DNA, 120 bp, Artificial Sequence
  ENSG00000047188_49 (sequence is synthesized)
tagttctagttattagctttggggttttcttgtactttaagacatacctgtaaattgaacctatttgaattatattccactgtatgtgtattatggctcttttcctattagagcaacttg

SEQ ID NO: 30151 - DNA, 120 bp, Artificial Sequence
  ENSG00000047188_50 (sequence is synthesized)
tgtttccctgataatgtgtacattttttaggcatgtacttaatagttcacaatgttctaaatttggaaggacttaaaaaaaaaacttgtttaaatttccatctgttttgtaatatctagc

SEQ ID NO: 30152 - DNA, 120 bp, Artificial Sequence
  ENSG00000047188_51 (sequence is synthesized)
tctatatgtaaatgatgggtttgttggtatttaaaatgaatacaacttgaatgtaattaaagtgctgttttttggaagcgataaactttaaatatacttattaaaatgaaattctattaa

SEQ ID NO: 30153 - DNA, 120 bp, Artificial Sequence
  ENSG00000047188_52 (sequence is synthesized)
catgcattaaaaataatgaaattagtagtaaattatatgaaatgtgaaataagtttgttggaaacagttgcaaactaatggaaactaatcaacacataggtgttttgcatatgtgatatt

SEQ ID NO: 30154 - DNA, 120 bp, Artificial Sequence
  ENSG00000047188_53 (sequence is synthesized)
ttattcaggaaaatgaattatttatcttagaatcatgtgcttttataatatttaaaaattacttttttataatctaagatccatgaaaagatagcaataaagtggaaagagttttctact

SEQ ID NO: 30155 - DNA, 120 bp, Artificial Sequence
  ENSG00000047188_54 (sequence is synthesized)
tgttcaacttaattcttctaagtattaaggtaatatgaattttaaactattgatatctgtgagttatttaataaggcaactctttgtcaggaaaaggtcaaaatatctaatttctagaat

SEQ ID NO: 30156 - DNA, 120 bp, Artificial Sequence
  ENSG00000047188_55 (sequence is synthesized)
tgggtctctcaaaaatatatagacattttaaaattatgtattttacttgatatatgtgaagtaacattttacctagataccctgggccatactggctatggccatttaaaagaacaacct

SEQ ID NO: 30157 - DNA, 120 bp, Artificial Sequence
  ENSG00000047188_56 (sequence is synthesized)
ccttataagccttatctagatatcaatactgctgattagcattcctatagaaaagtacttcactcagtgacacattgaatgccagttcttggtgtgagggatctagaagtgtacaaaaca

SEQ ID NO: 30158 - DNA, 120 bp, Artificial Sequence
  ENSG00000047188_57 (sequence is synthesized)
ggtaagatctcctccagaggatatacatttgattgaggggaggcatataataagtaaacaaatttactgtcatatgacaagatttctgttataatttagccaaattcttcttttcttctt

SEQ ID NO: 30159 - DNA, 120 bp, Artificial Sequence
  ENSG00000047188_58 (sequence is synthesized)
ttgcaattaaatgtggtggtgtttttgtttattttatgaatattaatgagataccgcatactgaattatttatgtaaaaaatatattttagtaatatgatagtggttacaataaatcatt

SEQ ID NO: 30160 - DNA, 120 bp, Artificial Sequence
  ENSG00000047188_59 (sequence is synthesized)
ggccatgattcagaagtgtttctggttataaaaacatttgttagaatcaaatttaagttattttataatcaggttttcaccttgttaaaattcataacaaaaaacattcttggttatgag

SEQ ID NO: 30161 - DNA, 120 bp, Artificial Sequence
  ENSG00000047188_60 (sequence is synthesized)
gctagttttggcaatactggtagaaaagtctctgtagtaagaatttgattttatagttaaactgaaaatagaaacaatggaaacataaaagatacgtaatgcttactgtttttcaaggat

SEQ ID NO: 30162 - DNA, 120 bp, Artificial Sequence
  ENSG00000047188_61 (sequence is synthesized)
caggtggggtttttagtaccttttttgatcagatttttgcatatttgaatgaaatataaaggcttaatatcatttaagcctttaaagaggaataaaacattggtttccatgttcttcaga

SEQ ID NO: 30163 - DNA, 120 bp, Artificial Sequence
  ENSG00000047188_62 (sequence is synthesized)
tattacattttagtaataatttaaccagtttccaaggaaagcttgtaaaatgtgtgctgaacctttctttctggtctagaccctgctgagaaaaaggggaagactaagaagtaatttttt

SEQ ID NO: 30164 - DNA, 120 bp, Artificial Sequence
  ENSG00000047188_63 (sequence is synthesized)
tacttagatacaccgtactttttgaaaatattgttctagaattttcttgagcattagttatttaggatgtaggaatatatttccataggagttattctgtggtagagttattcctaaacc

SEQ ID NO: 30165 - DNA, 120 bp, Artificial Sequence
  ENSG00000047188_64 (sequence is synthesized)
agcctatgaaaagttctgttagattcaagaaacgtgacatactaatatataatgcatgagtgtttcttgtatgctgattcaaaggaatcaataatttgagacaactgaggaaatgataat

SEQ ID NO: 30166 - DNA, 120 bp, Artificial Sequence
  ENSG00000047188_65 (sequence is synthesized)
tttattgggattggtaaccactttggttatgtaaggacaatgcactcattttaacagatgcatatttaaatatggaaggataaaatgacatgatgtgtgggatttacttttaaatatgta

SEQ ID NO: 30167 - DNA, 120 bp, Artificial Sequence
  ENSG00000047188_66 (sequence is synthesized)
agccaaaacagaaaggaagcaggaaagaaaaaacaaaataatgttagataaatcaactaggtgaaatgttcaaggaactaggtcagtggtactgtgagatgtcctacattctgaatttgt

SEQ ID NO: 30168 - DNA, 120 bp, Artificial Sequence
  ENSG00000047188_67 (sequence is synthesized)
gtcctacattctgaatttgtctctgtttttttcctggcactatttatttctataccctatgtatcttttattttttatttatttttatattttatttttgagacagtctcactgtgtcgc

SEQ ID NO: 30169 - DNA, 120 bp, Artificial Sequence
  ENSG00000047188_68 (sequence is synthesized)
taccctatgtatcttatataagctggtggttagctctcagggtttgatttgatccagtgttttaacaagaatattttataggtggtgttgtgaactttatattgcaatacatcaggaagt

SEQ ID NO: 30170 - DNA, 120 bp, Artificial Sequence
  ENSG00000047188_69 (sequence is synthesized)
acttaatgtctgtcccagaaagacccatactttaagaaagattatgaaattcctgactgcgatgtttgtggcatttattcatagaattttagaatataaaaatcttggagtttagatata

SEQ ID NO: 30171 - DNA, 120 bp, Artificial Sequence
  ENSG00000047188_70 (sequence is synthesized)
atccttttattttatttaacagataaggaaattaaagttccaataagttacgaggcttgctcaggatctcatacctagttagttgtaaatttagaactgccatagacatctatatttcct

SEQ ID NO: 30172 - DNA, 120 bp, Artificial Sequence
  ENSG00000047188_71 (sequence is synthesized)
gaccttagtatttttaaataatattccataaatcataagatcattgggactttggattgaaatggcatctgctttgtattataaacttatacataactgatctttgtatgacgaacttat

SEQ ID NO: 30173 - DNA, 120 bp, Artificial Sequence
  ENSG00000047188_72 (sequence is synthesized)
cagggatgggcaggtatacaatggcatttttttttttatttacttttgtttctgtttgttttctgttatccagtgctttaattgaggagaaaatgtaagagtacaaattttatattccat

SEQ ID NO: 30174 - DNA, 120 bp, Artificial Sequence
  ENSG00000047188_73 (sequence is synthesized)
atgcacatgggaaacaggggttcaggtttgtaaaaagatagtaaaaacctacttgtaaatgtgtctgattgctccttgcagtcagagtctcaagatgacaatagtatttaacttctcttt

SEQ ID NO: 30175 - DNA, 120 bp, Artificial Sequence
  ENSG00000047188_74 (sequence is synthesized)
ggctttaattatgtaaagtaaataacctttttatattctagtggcttgtttatttctattgtgttttgctttgtcttcatgatgctatttacatgcattttaagctagttaagatgatgg

SEQ ID NO: 30176 - DNA, 120 bp, Artificial Sequence
  ENSG00000047188_75 (sequence is synthesized)
atggaaattaatgtatattgaccaaatactatgctagctgctttagaagatataatttatttcttatgattaaattattagtccaattttatataggagaaaatagactcaaagattagt

SEQ ID NO: 30177 - DNA, 120 bp, Artificial Sequence
  ENSG00000047188_76 (sequence is synthesized)
cctaaggtcacacagctaataatttatctgaaccagtatgactcgtttcaaatcaccatgtaaaaagtgtttgggttcttcttaagtgcttatcataggttatcattccacaggagtact

SEQ ID NO: 30178 - DNA, 120 bp, Artificial Sequence
  ENSG00000047188_77 (sequence is synthesized)
ggagtactatgaagtgggattcttttcaattgtgtgagaataatttcatttttattctataataatgattttgaagaaatatgttagctagaaatcttagaagaaaaaatattttaataa

SEQ ID NO: 30179 - DNA, 120 bp, Artificial Sequence
  ENSG00000047188_78 (sequence is synthesized)
ataagaagatatagttgcttaagagagttccttggaaaaaaacccaacatcgaatatgctaggtttcacagtaaacctttggaagttccagctgagtgcttttgctgaatctctatgaaa

SEQ ID NO: 30180 - DNA, 120 bp, Artificial Sequence
  ENSG00000047188_79 (sequence is synthesized)
aacaaaatccattatttttaggtagaaacagttccaggactccatgggaatctgttgccattttgtcacaaaagttgagagattttgcagattaactgtaatcttaaatctggaagtcaa

SEQ ID NO: 30181 - DNA, 120 bp, Artificial Sequence
  ENSG00000047188_80 (sequence is synthesized)
ctccataaaccttaaagcaaagaattagaacaattcataccagatgattttagcatacgctggtaggaaaatgaaatttaaagtgattttcttacatttttatcagtgtaggttttggtc

SEQ ID NO: 30182 - DNA, 120 bp, Artificial Sequence
  ENSG00000047188_81 (sequence is synthesized)
attaaaaattttcactccagttctttttatgtttattttgacttctgatttatctaggaactagaacctctggttggtgaacagttgctccagttatgggaacgtcttcccttgggagaa

SEQ ID NO: 30183 - DNA, 120 bp, Artificial Sequence
  ENSG00000047188_82 (sequence is synthesized)
tgagtataaattaatgataaatattatttgatcataaagtcttagattttatagaaaattagaataaggcaaattcacgtcgaggaattcgtgtagtgatttgtagttacttgttgcctc

SEQ ID NO: 30184 - DNA, 120 bp, Artificial Sequence
  ENSG00000047188_83 (sequence is synthesized)
aacggcggcccaccgagtgatgggggtgcctccgaagagggagggaagacccgggccaccgtccggggcgggcctcagcggcggcacccgggtctggaacgcggctgttggccctgcggt

SEQ ID NO: 30185 - DNA, 120 bp, Artificial Sequence
  ENSG00000047188_84 (sequence is synthesized)
cagcggaaaggcaggtaatgtatatttaatgtatattcattcaattgcctgtaaaatggaaacgtttttatatgcattacacatttatcatatattccatgttcaataaaatagtagttt

SEQ ID NO: 30186 - DNA, 120 bp, Artificial Sequence
  ENSG00000047188_85 (sequence is synthesized)
tcatgttaaaatttttatattatttttgcaaagcaagccattttgatacttccttaaaagttgaatgtaggttatgttaaaattaaaaacttttgcctagttaaatgtacattcagatgt

SEQ ID NO: 30187 - DNA, 120 bp, Artificial Sequence
  ENSG00000047230_0 (sequence is synthesized)
agtgcgtccagagcggagggtgacgggagctgcctgtgctggaggaatcactttttaggcgcttgttttggaccattgcacaaacccgggtgcaaaccccaagctcaccagcgtgagtga

SEQ ID NO: 30188 - DNA, 120 bp, Artificial Sequence
  ENSG00000047230_1 (sequence is synthesized)
gctgggccagcagcagggaggagaggggaaggtgggcgaggagggcgccgcgcaccccgaggcccgtgtgggcggtgggaagatcccgggggcggctttggacagccccggcagcgaccc

SEQ ID NO: 30189 - DNA, 120 bp, Artificial Sequence
  ENSG00000047230_2 (sequence is synthesized)
cttccccagcccgacaggtgagcgccaggccagccgcggggtggagcccgccgtgcccaccggccaccctccccggtgctaccaccaccgcgcagattatatctgggtgttggcacccag

SEQ ID NO: 30190 - DNA, 120 bp, Artificial Sequence
  ENSG00000047230_3 (sequence is synthesized)
ccactattctgccaatgaagtacatcctggtcacgggtggggtcatctcaggcattggtaaagggatcattgccagcagcattggaacgattctaaaatcatgtggactccgagttactg

SEQ ID NO: 30191 - DNA, 120 bp, Artificial Sequence
  ENSG00000047230_4 (sequence is synthesized)
ccataaaaatcgacccctatattaacatcgatgctggcactttttcaccttatgaacacggtgaagtcttcgtcttaaatgatggtggagaagttgatttagaccttggaaattatgaaa

SEQ ID NO: 30192 - DNA, 120 bp, Artificial Sequence
  ENSG00000047230_5 (sequence is synthesized)
gatttttggatattaatctttataaagacaacaatatcaccacggggaagatatatcagcatgtgatcaataaagagaggcgtggtgattacctggggaaaacagtgcaagttgtccctc

SEQ ID NO: 30193 - DNA, 120 bp, Artificial Sequence
  ENSG00000047230_6 (sequence is synthesized)
acattactgatgctgtccaggagtgggttatgaatcaagccaaggtgccggtggatggtaataaggaagagccccaaatatgcgttattgagctgggaggcaccattggagacatcgaag

SEQ ID NO: 30194 - DNA, 120 bp, Artificial Sequence
  ENSG00000047230_7 (sequence is synthesized)
gaatgccgtttgtggaggcgtttagacaattccagtttaaggcgaaaagagagaatttctgtaatatccacgttagccttgtcccacagctcagtgctaccggagaacaaaaaaccaaac

SEQ ID NO: 30195 - DNA, 120 bp, Artificial Sequence
  ENSG00000047230_8 (sequence is synthesized)
ccacccaaaacagcgtccgcgcactgaggggtttaggcctgtctccagatctgattgtctgccgaagttcaacgcccattgagatggccgtgaaggagaagatttctatgttttgtcacg

SEQ ID NO: 30196 - DNA, 120 bp, Artificial Sequence
  ENSG00000047230_9 (sequence is synthesized)
tgaaccctgaacaggtcatatgtatccatgatgtttcttccacataccgagttcctgtgcttttagaggaacaaagcattgtgaaatattttaaggagagattgcacctgcccatcggtg

SEQ ID NO: 30197 - DNA, 120 bp, Artificial Sequence
  ENSG00000047230_10 (sequence is synthesized)
attctgcaagtaatttgctttttaagtggagaaatatggctgacaggtatgaaaggttacagaaaatatgctccatagccctggttggcaaatacaccaagctcagagactgctacgcct

SEQ ID NO: 30198 - DNA, 120 bp, Artificial Sequence
  ENSG00000047230_11 (sequence is synthesized)
ctgtgttcaaagccctggaacactcagccctggccatcaaccacaagttgaatctgatgtacatagactccattgatctggagaagatcactgaaaccgaggaccctgtgaaatttcatg

SEQ ID NO: 30199 - DNA, 120 bp, Artificial Sequence
  ENSG00000047230_12 (sequence is synthesized)
aagcttggcagaagctatgcaaagctgatggtattcttgtgcctggaggctttggaatcagaggaacattgggaaaactccaggcgatttcttgggcaaggacaaagaagattccttttc

SEQ ID NO: 30200 - DNA, 120 bp, Artificial Sequence
  ENSG00000047230_13 (sequence is synthesized)
tgggagtttgtcttgggatgcaactagcagtgatagagtttgcaagaaactgccttaacttgaaagatgctgattccacagagtttaggccaaatgccccagttcctctggtgattgata

SEQ ID NO: 30201 - DNA, 120 bp, Artificial Sequence
  ENSG00000047230_14 (sequence is synthesized)
tgcccgagcacaaccctggcaatttgggaggaacaatgagactgggaataagaagaactgttttcaaaactgaaaattcaatattaaggaaactttatggtgatgttccttttatagaag

SEQ ID NO: 30202 - DNA, 120 bp, Artificial Sequence
  ENSG00000047230_15 (sequence is synthesized)
aaagacacagacatcggttcgaggtaaaccctaacctgatcaaacaatttgagcagaatgacttaagttttgtaggtcaggatgttgatggagacaggatggaaatcattgaactggcaa

SEQ ID NO: 30203 - DNA, 120 bp, Artificial Sequence
  ENSG00000047230_16 (sequence is synthesized)
tacttgcaacagggttgcaaactgtcttccagtgatagatacagtgatgccagtgatgacagcttttcagagccaaggatagctgagttggaaataagctgaaatgaatacatgactggg

SEQ ID NO: 30204 - DNA, 120 bp, Artificial Sequence
  ENSG00000047230_17 (sequence is synthesized)
aataatggggactgcctgtgaggcctctgaaataattgaaggcaagatgaaggaactatctgaagaaatcactacactcttagagaatccctctgttctccagcaaacatgggatgtaaa

SEQ ID NO: 30205 - DNA, 120 bp, Artificial Sequence
  ENSG00000047230_18 (sequence is synthesized)
gcctcacagggaatctgataatacatacttctgtcaaccagaaccagaggggtagttttcttttccctccagaggcagcctttggtacttaaaatatctgtagctgattaaatttttccc

SEQ ID NO: 30206 - DNA, 120 bp, Artificial Sequence
  ENSG00000047230_19 (sequence is synthesized)
aacaacctcactggggagaaagtgtgttcatgttttgtccagcggatcaggatgttaggatgacgagcaagagtccaggtcactgtgcctttgctgtgttgtatggaaaggatggcaggg

SEQ ID NO: 30207 - DNA, 120 bp, Artificial Sequence
  ENSG00000047230_20 (sequence is synthesized)
aacatgctgtaagtaattttgagtaagaaaatgagtcactgtgttacctggaactcagccacagatttgtgtgtggtccaagatcattgcagtttctcaccctgtttatttcctggtaaa

SEQ ID NO: 30208 - DNA, 120 bp, Artificial Sequence
  ENSG00000047230_21 (sequence is synthesized)
agtaaaattgaataggtccaagacttgggggtggcaagtaaggctttgcctcaggcacaaaatttaagggggctccaaaaaactcaggaatcaagatcagcaatacagtctgagtatccc

SEQ ID NO: 30209 - DNA, 120 bp, Artificial Sequence
  ENSG00000047230_22 (sequence is synthesized)
ttatgtgaaatgcttggggctagaagtgttttgaatttcagattttggaatatttgcatatacatgcgatatcttggggatgagactcaagactaaacatgaaattcatttatgcttcat

SEQ ID NO: 30210 - DNA, 86 bp, Artificial Sequence
  ENSG00000047230_23 (sequence is synthesized)
cgactgcattttgactgtgatttctggcatgagatcagttatggaattttccacttctagcgtcatgttggcattcagaaattttg

SEQ ID NO: 30211 - DNA, 120 bp, Artificial Sequence
  ENSG00000047230_24 (sequence is synthesized)
ttttccacttctagcgtcatgttggcattcagaaattttgaaattttggagcattttggattttcagattagggatgctcaacctgtatatatattttttaatcgacgtgaaattcacgt

SEQ ID NO: 30212 - DNA, 120 bp, Artificial Sequence
  ENSG00000047230_25 (sequence is synthesized)
aacatagaattaaccattttgaagtgaacaatttggttgcattcactgatgttgagcaaccaccacctttaactatttccaaaacattttcatcactccaaaataaatgcctgtacacac

SEQ ID NO: 30213 - DNA, 120 bp, Artificial Sequence
  ENSG00000047230_26 (sequence is synthesized)
tagcagtcactccctatcttcccctccacctgtccgctggcaaccactgatctcctttttatttctgtggctttttctattctggatatttcatataagtggaattacacaatatatgtg

SEQ ID NO: 30214 - DNA, 120 bp, Artificial Sequence
  ENSG00000047230_27 (sequence is synthesized)
gtcttttgtgtctggcttcttctgagacagtaggaaggggggcttggctttggctcacccccactagagcattttttcatgcattcccactgatcacaaaacccatactactacctcatt

SEQ ID NO: 30215 - DNA, 120 bp, Artificial Sequence
  ENSG00000047230_28 (sequence is synthesized)
gacaccatacctgctaacctcgaggctttagtcatacaaagaaaatggcctttctgtattgttcttctgtgctctcataatgcttaaccatgtcttttacttaaacaattccaggaactg

SEQ ID NO: 30216 - DNA, 120 bp, Artificial Sequence
  ENSG00000047230_29 (sequence is synthesized)
gccttaggagatccaaatagggaaccaagattgcagagtgtcccatcttgggagggaatgctgaataattaattgatttacagccttgttgccgctggccagaccaccaggtggcccatt

SEQ ID NO: 30217 - DNA, 120 bp, Artificial Sequence
  ENSG00000047230_30 (sequence is synthesized)
actcgagatgatcatcacaaccagatgatgctaacctatatcctctacccttcgcgtgctttgtctgggaagtcttttggccccatgtcagtttctattgcattgagagcccaagagccc

SEQ ID NO: 30218 - DNA, 120 bp, Artificial Sequence
  ENSG00000047230_31 (sequence is synthesized)
ctggtcagtcaggcttccatttagcatggcgtttgcaaggtttacccatgttgtagcatgtgtcagaatttcattcctttctatggctgaataaaattccattgtatgaatataccacaa

SEQ ID NO: 30219 - DNA, 120 bp, Artificial Sequence
  ENSG00000047230_32 (sequence is synthesized)
aaaggcaggcattctctttccttttccttctctcctgagcgctcctgcagttcctggggcgtagtaggggatccacaagcgtttgtgaccagtgaagttctttacaagggtgagatctgc

SEQ ID NO: 30220 - DNA, 120 bp, Artificial Sequence
  ENSG00000047230_33 (sequence is synthesized)
acgggaggacccgagcgagggtctcggcttgccaggaagccggggttccccgggaagcgtggagttcacccgcgcactcgaagtgcctttgcaaaattatatctgggtgttggcacccag

SEQ ID NO: 30221 - DNA, 120 bp, Artificial Sequence
  ENSG00000047230_34 (sequence is synthesized)
tcctttgtccgctctctgatggcgccggctccctgcccagcgctgagtcgggtccggccgccagccccgcgctcgcagacctcggctgccgggtgtggcgcggggactggggaacgctgg

SEQ ID NO: 30222 - DNA, 120 bp, Artificial Sequence
  ENSG00000047230_35 (sequence is synthesized)
cccgtgcccagtgcggttggagcctgtcccgcgcgtccccgggacgcgcttcttcccgcctccgcccgcgccagcgcccgcacccggatccccacttctcccggccctcgggagccagga

SEQ ID NO: 30223 - DNA, 120 bp, Artificial Sequence
  ENSG00000047230_36 (sequence is synthesized)
gagccctgagatggcgttggcggaagtgaagccccgagcgggggtctgcgaggctggtgatcagcgccggtaacatggcctttctgtcctctccccggtcccagtgcaccccttaaacaa

SEQ ID NO: 30224 - DNA, 120 bp, Artificial Sequence
  ENSG00000047230_37 (sequence is synthesized)
cgacccccgcgttttccccgtactagatggttagggcgcatagtgccgaactacgctgctgctacagaatagcttttttgggggcaacataaaaaagaattgtatgtatggtttatatac

SEQ ID NO: 30225 - DNA, 120 bp, Artificial Sequence
  ENSG00000047230_38 (sequence is synthesized)
aacaaaatgtcccattttcagtgtgcaaatcgacgggatttgacaaattatacactcctgtaaccattatcccaaagtgaacattgaccatttccttcaccctgcaaagttccctggtac

SEQ ID NO: 30226 - DNA, 120 bp, Artificial Sequence
  ENSG00000047230_39 (sequence is synthesized)
ctcctttctgtcaatccaccccaggccccgcactcaaccccggttctgattgttatcatagcttagctttgactgttctagaacttcatagaacaagatcatcagattatatctgggtgt

SEQ ID NO: 30227 - DNA, 120 bp, Artificial Sequence
  ENSG00000047230_40 (sequence is synthesized)
ctgaaaattcaatattaataagcttgtcccttgggctggcctcagtagaacacactgaatgcccctccgcatttgatctgcgtgactccctgttcattgggctgttttgtgagttaccga

SEQ ID NO: 30228 - DNA, 120 bp, Artificial Sequence
  ENSG00000047230_41 (sequence is synthesized)
gaacttggactgggacttggactgattcacactcagttcttttgaatccacagttctctccattacatttgaaccggttccctgtttaatgtctgtttgcctggtcttagtgactcacaa

SEQ ID NO: 30229 - DNA, 120 bp, Artificial Sequence
  ENSG00000047230_42 (sequence is synthesized)
atgaacttccgagtaggagggcagttatgcacctcagaagcgtatttctctgttccctggcagccccagtgtggggagatggctcgccatttgatatttgctgatctttccactccccat

SEQ ID NO: 30230 - DNA, 120 bp, Artificial Sequence
  ENSG00000047230_43 (sequence is synthesized)
aaggttaattctaatttctgtggaactttttcataaattagcatattatataagaataacttattgtttaaaacaaactaaagcctttaattcaatttaataaatgtatcttgagtgccc

SEQ ID NO: 30231 - DNA, 120 bp, Artificial Sequence
  ENSG00000047230_44 (sequence is synthesized)
gaggccattgcatgtgattggactgacctcttcctgtggtgactagaaagtgctaaaagaatattctttagtattttctctcatactaaggggttaatatggaatgtgtttgaaattgca

SEQ ID NO: 30232 - DNA, 120 bp, Artificial Sequence
  ENSG00000047249_0 (sequence is synthesized)
cttctacctgtgcggccctcaacgtctccttggtgcgggacccgcttcactttcggctcccggagtctccctccactgctcagacctctggacctgacaggagacgcctacttggctctg

SEQ ID NO: 30233 - DNA, 120 bp, Artificial Sequence
  ENSG00000047249_1 (sequence is synthesized)
acgcggcgccccagcccggctgtgtccccggcgccccggaccaccctccctgccggctttgggtgcgttgtggggtcccgaggattcgcgagatttgttgaaagacattcaagattacga

SEQ ID NO: 30234 - DNA, 120 bp, Artificial Sequence
  ENSG00000047249_2 (sequence is synthesized)
agtttagatgaccaaaatggatatccgaggtgctgtggatgctgctgtccccaccaatattattgctgccaaggctgcagaagttcgtgcaaacaaagtcaactggcaatcctatcttca

SEQ ID NO: 30235 - DNA, 120 bp, Artificial Sequence
  ENSG00000047249_3 (sequence is synthesized)
gggacagatgatttctgctgaagattgtgagtttattcagaggtttgaaatgaaacgaagccctgaagagaagcaagagatgcttcaaactgaaggcagccagtgtgctaaaacatttat

SEQ ID NO: 30236 - DNA, 120 bp, Artificial Sequence
  ENSG00000047249_4 (sequence is synthesized)
aaatctgatgactcatatctgcaaagaacagaccgttcagtatatactaactatggtggatgatatgctgcaggaaaatcatcagcgtgttagcattttctttgactatgcaagatgtag

SEQ ID NO: 30237 - DNA, 120 bp, Artificial Sequence
  ENSG00000047249_5 (sequence is synthesized)
caagaacactgcgtggccctactttctgccaatgttgaatcgccaggatcccttcactgttcatatggcagcaagaattattgccaagttagcagcttggggaaaagaactgatggaagg

SEQ ID NO: 30238 - DNA, 120 bp, Artificial Sequence
  ENSG00000047249_6 (sequence is synthesized)
cagtgacttaaattactatttcaattggataaaaactcagctgagttcacagaaactgcgtggtagcggtgttgctgttgaaacaggaacagtctcttcaagtgatagttcgcagtatgt

SEQ ID NO: 30239 - DNA, 120 bp, Artificial Sequence
  ENSG00000047249_7 (sequence is synthesized)
gcagtgcgtggccgggtgtttgcagctgatgctccgggtcaatgagtaccgctttgcttgggtggaagcagatggggtaaattgcataatgggagtgttgagtaacaagtgtggctttca

SEQ ID NO: 30240 - DNA, 120 bp, Artificial Sequence
  ENSG00000047249_8 (sequence is synthesized)
tcattccagttctgtctgatatccttcaggagtctgtcaaagagaaagtaacaagaatcattcttgcagcatttcgtaactttttagaaaaatcaactgaaagagaaactcgccaagaat

SEQ ID NO: 30241 - DNA, 120 bp, Artificial Sequence
  ENSG00000047249_9 (sequence is synthesized)
atgccctggctatgattcagtgcaaagttctgaaacagttggagaacttggaacagcagaagtacgatgatgaagatatcagcgaagatatcaaatttcttttggaaaaacttggagaga

SEQ ID NO: 30242 - DNA, 120 bp, Artificial Sequence
  ENSG00000047249_10 (sequence is synthesized)
gtgtccaggaccttagttcatttgatgaatacagttcagaacttaaatctggaaggttggaatggagtcctgtgcacaaatctgagaaattttggagagagaatgctgtgaggttaaatg

SEQ ID NO: 30243 - DNA, 120 bp, Artificial Sequence
  ENSG00000047249_11 (sequence is synthesized)
agaagaattatgaactcttgaaaatcttgacaaaacttttggaagtgtcagatgatccccaagtcttagctgttgctgctcacgatgttggagaatatgtgcggcattatccacgaggca

SEQ ID NO: 30244 - DNA, 120 bp, Artificial Sequence
  ENSG00000047249_12 (sequence is synthesized)
aacgggtcatcgagcagctcggtgggaagcagctggtcatgaaccacatgcatcatgaagaccagcaggtccgctataatgctctgctggccgtgcagaagctcatggtgcacaactggg

SEQ ID NO: 30245 - DNA, 120 bp, Artificial Sequence
  ENSG00000047249_13 (sequence is synthesized)
aataccttggcaagcagctccagtccgagcagccccagaccgctgccgcccgaagctaagcctgcctctggccttcccctccgcctcaatgcagaaccagtagtgggagcactgtgttta

SEQ ID NO: 30246 - DNA, 120 bp, Artificial Sequence
  ENSG00000047249_14 (sequence is synthesized)
gagttaagagtgaacactgtttgattttacttggaatttcctctgttatatagcttttcccaatgctaatttccaaacaacaacaacaaaataacatgtttgcctgttaagttgtataaa

SEQ ID NO: 30247 - DNA, 120 bp, Artificial Sequence
  ENSG00000047249_15 (sequence is synthesized)
agtaggtgattctgtatttaaagaaaatattactgttacatatactgcttgcaatttctgtatttattgttctctggaaataaatatagttattaaaggattctcactccaaacatggcc

SEQ ID NO: 30248 - DNA, 120 bp, Artificial Sequence
  ENSG00000047249_16 (sequence is synthesized)
tctctctttacttggactttgaacaaaagtcaactgttgtctcttttcaaaccaaattgggagaattgttgcaaagtagtgaatggcaaataaatgttttaaaatctatcgctctatcaa

SEQ ID NO: 30249 - DNA, 120 bp, Artificial Sequence
  ENSG00000047249_17 (sequence is synthesized)
attcgcgaggtaaggccgccctcgcgttgtttggtctcaggctgcagaccaggtcaggcgactcttgcagtttctccagcttgcctggtgcgtgctggtgtctcgccgcttggtcctctc

SEQ ID NO: 30250 - DNA, 120 bp, Artificial Sequence
  ENSG00000047249_18 (sequence is synthesized)
agctgcttccgggcggaggtcctcggcctcccctaggcgaggcactaggtctgggggcggcgggtcttagcgtgcccgccacgctcgccgcctcccacctgccctggctggctggggccc

SEQ ID NO: 30251 - DNA, 120 bp, Artificial Sequence
  ENSG00000047249_19 (sequence is synthesized)
gacccttgcgtcgctccggggcccaagttacggactcgggaatccagttgtccgcaccgaacaagccccgccgcagcgcccgcccctcctcttgctgctttggagtctcccggcttccgc

SEQ ID NO: 30252 - DNA, 120 bp, Artificial Sequence
  ENSG00000047249_20 (sequence is synthesized)
agattgcttttcttccaggcctcaaccaggtttattaagcgaaattctggagcctttctcgcagggggaagaaacgtcaggggcgggcaggagagtggagggggaggggtaaaaagtata

SEQ ID NO: 30253 - DNA, 120 bp, Artificial Sequence
  ENSG00000047249_21 (sequence is synthesized)
ccttctccaggactgggccacggccctggatcgctgggggtgcgagtagttcagggacttaggtaattgtctagagacaccttgagctacgccaggacgggccgctgaggctgagcctcc

SEQ ID NO: 30254 - DNA, 120 bp, Artificial Sequence
  ENSG00000047249_22 (sequence is synthesized)
ttggctgcagagttccagcctggcccagttgaagcctgttttttcctgggccctgtcgttcgcgctgcccagggttgtttatacagcaaatcttcagatacagagattaagttccaaatt

SEQ ID NO: 30255 - DNA, 120 bp, Artificial Sequence
  ENSG00000047249_23 (sequence is synthesized)
aatgcagagagctgaggctagagaggcagccaggggccgatcgtgaagatgctgtgtgtgggtgtgtggttggaaggagtttggacttgatcctatcagtcagtgcttttcaagctgatt

SEQ ID NO: 30256 - DNA, 120 bp, Artificial Sequence
  ENSG00000047249_24 (sequence is synthesized)
tttaagctgtgaagcccatgattgatatgaagttagcatgtaaaacagatgaaaatgatagaatggaggtgggagtgtgtgtcccagagccctctttttgagaccattcaccattttcca

SEQ ID NO: 30257 - DNA, 120 bp, Artificial Sequence
  ENSG00000047249_25 (sequence is synthesized)
cctaaataatgtacttatctaaaatggagtaggttagcaaaggaactaacaaagcaaatgaaatcaagattgccacaatagtgagaattatgataaacccagttaaaaatgagtagtata

SEQ ID NO: 30258 - DNA, 73 bp, Artificial Sequence
  ENSG00000047249_26 (sequence is synthesized)
gtgagaattatgataaacccagttaaaaatgagtagtataggccggttgcagtggctcacgcctgtaatacat

SEQ ID NO: 30259 - DNA, 120 bp, Artificial Sequence
  ENSG00000047249_27 (sequence is synthesized)
ggtgatgaataaacattatataatgaacacttccccgtgtcatccaaaagtttagaaaaatcttagtgattataagtgacttccagttttcttgctaatttggaaagaacgttatattga

SEQ ID NO: 30260 - DNA, 120 bp, Artificial Sequence
  ENSG00000047249_28 (sequence is synthesized)
tgcttgggtggaagcagatggggtaaattgttcatttgatgaatacagttcagaacttaaatctggaaggttggaatggagtcctgtgcacaaatctgagaaattttggagagagaatgc

SEQ ID NO: 30261 - DNA, 120 bp, Artificial Sequence
  ENSG00000047249_29 (sequence is synthesized)
gtttaccttcatccttttctgtatttctgaatattttcttagaatatacacctggaagacaaatttctggaaaagaagttactgtttcagagtatgttaagttttaaaagttgcttaact

SEQ ID NO: 30262 - DNA, 120 bp, Artificial Sequence
  ENSG00000047249_30 (sequence is synthesized)
atgacatgggattacattattttcctgttgatttattaagtatttatatgtcctttgaaatttttttggcggtggcattctttttattttaatatataaggttttgttactttttgataa

SEQ ID NO: 30263 - DNA, 120 bp, Artificial Sequence
  ENSG00000047249_31 (sequence is synthesized)
acagtctttttacatacaaaatttattactgtttgccatatttatagcaaacatagtttccttttttactatttatctttgaagggttgtggagttttttcatatacagtggtttaaaat

SEQ ID NO: 30264 - DNA, 120 bp, Artificial Sequence
  ENSG00000047249_32 (sequence is synthesized)
gtttagttacatatattgatgttttacattctttcatggtaagtttattgtagaaaaataaaatactattaagcaaaagaaaaaagttattctacctaatatttctctgttcaaggtgac

SEQ ID NO: 30265 - DNA, 120 bp, Artificial Sequence
  ENSG00000047249_33 (sequence is synthesized)
ttgtttacacttagcgtatacctctctagatatttttctgtgcataaaataacttatacacttatttctacaaatgtgaactttttacaaaaaggggtgatatgtacatatctttgttct

SEQ ID NO: 30266 - DNA, 120 bp, Artificial Sequence
  ENSG00000047249_34 (sequence is synthesized)
tttcatttaactgtatattcttcccttccctactatgcctgtaaagatatttctgtggtatttaaaataattaatttattattatttcccatttatggaaagttccgttgtgtaattttc

SEQ ID NO: 30267 - DNA, 120 bp, Artificial Sequence
  ENSG00000047249_35 (sequence is synthesized)
catttaatggatgaaccataatgatctaaactaattctatactgttgcatattttggctacttccttttttttctgttttgaggcgaacagttagtaatctcataattaattcgagaagt

SEQ ID NO: 30268 - DNA, 120 bp, Artificial Sequence
  ENSG00000047315_0 (sequence is synthesized)
acttcgtctttagctcctggcgctgctggcttctgggcggtttttgtcttttgatttcaagagttaggagctcgagaaccgtttggcaatatgtacgacgcggatgaggatatgcaatat

SEQ ID NO: 30269 - DNA, 120 bp, Artificial Sequence
  ENSG00000047315_1 (sequence is synthesized)
gatgaggatgatgatgaaatcaccccggatttgtggcaagaagcatgctggattgtaatcagttcctattttgacgagaaaggcttggttagacaacagctggattcttttgatgagttt

SEQ ID NO: 30270 - DNA, 120 bp, Artificial Sequence
  ENSG00000047315_2 (sequence is synthesized)
attcagatgtctgttcaaagaattgtggaagacgctcctcctatagacctacaggctgaagctcagcatgctagtggagaagttgaagaaccgccacgatatttgctgaagtttgaacaa

SEQ ID NO: 30271 - DNA, 120 bp, Artificial Sequence
  ENSG00000047315_3 (sequence is synthesized)
atttatctttccaagcctacccattgggaaagagatggtgctccttcaccaatgatgcccaatgaagctagattaaggaatctcacgtattctgctccgctttatgttgatataacaaaa

SEQ ID NO: 30272 - DNA, 120 bp, Artificial Sequence
  ENSG00000047315_4 (sequence is synthesized)
acagtcattaaagaaggtgaagaacaacttcagactcagcatcagaaaacttttataggaaaaattccaattatgttgcggtcaacttactgccttttgaatggcttgacagatcgtgat

SEQ ID NO: 30273 - DNA, 120 bp, Artificial Sequence
  ENSG00000047315_5 (sequence is synthesized)
ctttgtgagttaaatgaatgccctttggatcctggtggctatttcattattaatggatcagaaaaggttctgattgcccaagagaaaatggcaacaaacacagtttatgtgtttgccaaa

SEQ ID NO: 30274 - DNA, 120 bp, Artificial Sequence
  ENSG00000047315_6 (sequence is synthesized)
aaggattctaaatatgcctacacaggagagtgtagatcatgtcttgagaattcttcccgacccaccagtactatatgggttagcatgctggcaagaggaggacagggtgccaagaagagt

SEQ ID NO: 30275 - DNA, 120 bp, Artificial Sequence
  ENSG00000047315_7 (sequence is synthesized)
gctattggtcagcgcattgtggcaactctaccatatatcaagcaagaagttcccatcattattgtgttcagagcattaggttttgtgtccgacagagatattttagaacatattatttat

SEQ ID NO: 30276 - DNA, 120 bp, Artificial Sequence
  ENSG00000047315_8 (sequence is synthesized)
gattttgaagatccagagatgatggaaatggttaaaccttctctcgatgaagcttttgtcatccaagaacagaatgttgcactaaatttcattggttcaagaggagcaaagcctggtgtt

SEQ ID NO: 30277 - DNA, 120 bp, Artificial Sequence
  ENSG00000047315_9 (sequence is synthesized)
actaaagagaaaagaattaaatatgcaaaggaagttttacaaaaagaaatgctccctcatgttggtgtcagtgatttttgtgagaccaaaaaagcctatttcttgggatacatggttcat

SEQ ID NO: 30278 - DNA, 120 bp, Artificial Sequence
  ENSG00000047315_10 (sequence is synthesized)
aggttacttctggcagctttgggtagaagagaactagatgacagagatcactatggaaacaagagattggatcttgctgggccgctgcttgcattcttatttagaggtatgtttaagaat

SEQ ID NO: 30279 - DNA, 120 bp, Artificial Sequence
  ENSG00000047315_11 (sequence is synthesized)
ttgcttaaagaagtgcggatctatgcacagaaatttattgatcgaggaaaggattttaacttggagttggcaattaaaacacggatcatatctgatggcctaaaatactctttagctact

SEQ ID NO: 30280 - DNA, 120 bp, Artificial Sequence
  ENSG00000047315_12 (sequence is synthesized)
ggaaactggggtgatcaaaagaaagctcatcaagccagagctggagtatctcaggtgttaaaccgcctgacttttgcgtctactctttctcacctgcgtcgtttaaattctcctattggt

SEQ ID NO: 30281 - DNA, 120 bp, Artificial Sequence
  ENSG00000047315_13 (sequence is synthesized)
agagacggcaagctagcaaaaccaagacagttgcataatacgttgtggggaatggtgtgtcctgccgagaccccagagggccatgctgtaggacttgtgaagaatttagccttgatggcg

SEQ ID NO: 30282 - DNA, 120 bp, Artificial Sequence
  ENSG00000047315_14 (sequence is synthesized)
tatatttcagttggatctcaaccatctccaattctggaatttttagaagaatggagtatggaaaatttagaagaaatttctcctgcagctattgctgatgcaaccaagatttttgttaat

SEQ ID NO: 30283 - DNA, 120 bp, Artificial Sequence
  ENSG00000047315_15 (sequence is synthesized)
tcagatggacatcattgtgtctgaagtttctatgatcagagatattcgagagagggagattcggatctatacggatgcaggccgtatttgtagaccacttctgattgtggaaaaacaaaa

SEQ ID NO: 30284 - DNA, 120 bp, Artificial Sequence
  ENSG00000047315_16 (sequence is synthesized)
gctacttttgaagaagaggcatattgaccaattgaaagagagagaatataacaactatagttggcaggatcttgtggccagtggggtagtggagtatattgataccctggaagaagaaac

SEQ ID NO: 30285 - DNA, 120 bp, Artificial Sequence
  ENSG00000047315_17 (sequence is synthesized)
agtgatgcttgcaatgactccagatgatttacaggagaaagaagtagcttattgttccacatatacacactgtgagattcatccctcaatgatccttggtgtctgtgcatctattattcc

SEQ ID NO: 30286 - DNA, 120 bp, Artificial Sequence
  ENSG00000047315_18 (sequence is synthesized)
ctttcctgatcataaccagtcccctagaaacacataccagtctgctatgggtaagcaggctatgggagtttacatcaccaacttccatgttcgcatggacacattggcccatgttctcta

SEQ ID NO: 30287 - DNA, 120 bp, Artificial Sequence
  ENSG00000047315_19 (sequence is synthesized)
ttatcctcaaaagccacttgtgactacacggtctatggaatatctacgatttagagagctgccagcaggcatcaactcaattgtggccattgcatcatacactggatataatcaggaaga

SEQ ID NO: 30288 - DNA, 120 bp, Artificial Sequence
  ENSG00000047315_20 (sequence is synthesized)
ctctgttatcatgaatcgttcagctgtagaccgcggcttcttcaggtctgttttctatcgctcatacaaagaacaggagtctaaaaaaggatttgatcaagaagaagtttttgagaagcc

SEQ ID NO: 30289 - DNA, 120 bp, Artificial Sequence
  ENSG00000047315_21 (sequence is synthesized)
tacacgtgaaacatgccagggcatgaggcatgccatttacgacaagctggatgatgatggtttgatagctccaggggttcgtgtatcaggagatgatgttattataggcaaaacagtcac

SEQ ID NO: 30290 - DNA, 120 bp, Artificial Sequence
  ENSG00000047315_22 (sequence is synthesized)
cttgcctgaaaatgaagatgaattggagagcaccaatagacgctataccaagagagactgtagcacttttctcagaactagcgagacgggcattgtggatcaggttatggtaactctcaa

SEQ ID NO: 30291 - DNA, 120 bp, Artificial Sequence
  ENSG00000047315_23 (sequence is synthesized)
tcaggaaggatataaattttgtaaaataagggtacgctctgttaggattccacagattggagacaaatttgctagtcgacatggtcaaaagggtacttgtggtattcagtatagacaaga

SEQ ID NO: 30292 - DNA, 120 bp, Artificial Sequence
  ENSG00000047315_24 (sequence is synthesized)
ggatatgcctttcacctgtgaaggtatcacccctgatatcatcatcaatccccatgccatcccctctcgtatgactattggtcacttaattgaatgccttcaagggaaggtatcggctaa

SEQ ID NO: 30293 - DNA, 120 bp, Artificial Sequence
  ENSG00000047315_25 (sequence is synthesized)
caagggtgaaattggtgatgccactccatttaatgatgctgttaacgtgcagaagatttctaatcttttatctgattatggctatcatctcagaggaaatgaggtcctgtacaatgggtt

SEQ ID NO: 30294 - DNA, 120 bp, Artificial Sequence
  ENSG00000047315_26 (sequence is synthesized)
cactggtcgaaaaatcacatcacaaatatttattggccccacttattaccagcgtttgaagcatatggtggatgataagattcactctcgtgctaggggacctattcagatcctcaatag

SEQ ID NO: 30295 - DNA, 120 bp, Artificial Sequence
  ENSG00000047315_27 (sequence is synthesized)
acagcccatggagggtagatctcgtgatggtggcctgcgttttggagaaatggaacgagattgtcagattgcccatggagcagcccagtttttaagggaaagattgtttgaggcatcaga

SEQ ID NO: 30296 - DNA, 120 bp, Artificial Sequence
  ENSG00000047315_28 (sequence is synthesized)
tccatatcaggttcatgtttgcaatctttgtggaataatggcgattgccaacaccaggacccatacatatgaatgcaggggctgccgcaataaaacccagatttctttggtgcgaatgcc

SEQ ID NO: 30297 - DNA, 120 bp, Artificial Sequence
  ENSG00000047315_29 (sequence is synthesized)
ttacgcatgcaaactattgtttcaggaacttatgtctatgagtattgcaccgcgaatgatgagtgtttagctattttacaggagtcaacaagataattaaatatcttggtgtcttgtttc

SEQ ID NO: 30298 - DNA, 120 bp, Artificial Sequence
  ENSG00000047315_30 (sequence is synthesized)
tattgtgtggctttttaaaaatgacaaatatgtactgtgttgtgataaaaagtattttatttgtttaatgatatgcatgcttttcttctgtaaatatataataaatttttgtagatagtc

SEQ ID NO: 30299 - DNA, 120 bp, Artificial Sequence
  ENSG00000047315_31 (sequence is synthesized)
actgagaacctacttaaagctatggcaaaggcactggaggattgagctaggtgggcagaaaagagcagtgtcgttatttgtgcaacaacattgaaaaacaagcagaaataaaacattgac

SEQ ID NO: 30300 - DNA, 120 bp, Artificial Sequence
  ENSG00000047315_32 (sequence is synthesized)
ggaacggatacgaccgcagattgcgggagctgtcctctcaatcagcccggcagcggcggcccacaatttacgcgtgtgcaaccctaaccccggcccaagcttgacctacaatttgcgcag

SEQ ID NO: 30301 - DNA, 120 bp, Artificial Sequence
  ENSG00000047315_33 (sequence is synthesized)
attgagctaggtgggcagaaaagagcagtgagtgttttgggttttttcactttcaggcttaacgcctcactgctagcacaagccgcccttaataaatcacacttaaaaaggagcttccgg

SEQ ID NO: 30302 - DNA, 66 bp, Artificial Sequence
  ENSG00000047315_34 (sequence is synthesized)
acacggtgtcgttatttgtgcaacaacattgaaaaacaagcagaaataaaacattgacggaacgga

SEQ ID NO: 30303 - DNA, 120 bp, Artificial Sequence
  ENSG00000047315_35 (sequence is synthesized)
agcacttttctcagaactagcgagacgggcattgtggatcaggttatggtaactctcaatcaggaaggatataaattttgtaaaataagggtgagtacaactttgttcatgtagctagtt

SEQ ID NO: 30304 - DNA, 120 bp, Artificial Sequence
  ENSG00000047315_36 (sequence is synthesized)
acttcgtctttagctcctggcgctgctggcttctgggcggtttttgtcttttgatttcaagagttaggagctcgagaaccgtttggcaatatgtacgacgcggatgaggagtctcgctct

SEQ ID NO: 30305 - DNA, 120 bp, Artificial Sequence
  ENSG00000047315_37 (sequence is synthesized)
ggagtgcagtggcgcgatctcagctcctgcgaggaggcggaccgcccattccgtgcccggtagccgcgagggaccggtggtagccgcgagggacgggcggcgggctcggtgctgtggcga

SEQ ID NO: 30306 - DNA, 120 bp, Artificial Sequence
  ENSG00000047315_38 (sequence is synthesized)
aaatgggctggtctattactgtgacattgggaagggaggggctaggttttttagaatatttgaaaatagaattgatagggtatgtttatagatgggtagaaggaggaacttggagacaaa

SEQ ID NO: 30307 - DNA, 120 bp, Artificial Sequence
  ENSG00000047315_39 (sequence is synthesized)
aatgattttgagatttccagattgagagaaaggtgatgctgcttatccacgacagaagacttaggaaagaggaagaaagtttgaattgtttaaggactgggggaagatggagatttataa

SEQ ID NO: 30308 - DNA, 120 bp, Artificial Sequence
  ENSG00000047315_40 (sequence is synthesized)
ataattaataatatagagcttgagttgtctgctttatattgccctaaatattatcttatttataaataaaatcttgcttagtatcctgtaagtattagtaatggatgtttgcatttttct

SEQ ID NO: 30309 - DNA, 120 bp, Artificial Sequence
  ENSG00000047315_41 (sequence is synthesized)
attagattcagaggcctcagtctggaaaaagtactgagatggattagtgatgtctgctatgatcagaggagtgtgagttggtagaatttaacttaacacttactgagtacttaatgaatg

SEQ ID NO: 30310 - DNA, 120 bp, Artificial Sequence
  ENSG00000047315_42 (sequence is synthesized)
ccaagtactgttctaggtgctgggatacaacagagaataaaacaattttaaaaaattccctgccttcatgaaactaatgtcctagtgtttgtttggagaccataaacagaatgtttatgt

SEQ ID NO: 30311 - DNA, 120 bp, Artificial Sequence
  ENSG00000047315_43 (sequence is synthesized)
ggtatgtttgaatatatttgccatccctgctgcaagtggcaggtaagttaaagtgtcaaacaacattattcagggaaagaatagagaaatggggaacagtttgatactcagtagattata

SEQ ID NO: 30312 - DNA, 120 bp, Artificial Sequence
  ENSG00000047315_44 (sequence is synthesized)
tgtaaaaatatgactttgcctcagtgtaatagtatgaatcacagaaatgtccagactttaaagattggctatttttttctaggtgttaaaccgcctgacttttgcgtctactctttctca

SEQ ID NO: 30313 - DNA, 120 bp, Artificial Sequence
  ENSG00000047315_45 (sequence is synthesized)
tgatgatgaaatcaccccggatttgtggcaagaagcatgctggattgtaatcaggtaactttggaccaaactgaattagcctgaaaaggcactttagatttcctgcttattcttcttgat

SEQ ID NO: 30314 - DNA, 120 bp, Artificial Sequence
  ENSG00000047315_46 (sequence is synthesized)
ttcagatctaaaagttacacaaagaattcatttaatcattttaaccagattccgaaaatgttaccctgtactacatttctttgtctttttctctttttgtatatatatatttttttctga

SEQ ID NO: 30315 - DNA, 120 bp, Artificial Sequence
  ENSG00000047315_47 (sequence is synthesized)
aacatgtgagagtaacttgcagatcatttgaccctgggaggttgaggttacagtgagcgaaggtcgcaccgctgcactccagtcttggtgatagagtgagaccctgtttccaaaaaaaaa

SEQ ID NO: 30316 - DNA, 120 bp, Artificial Sequence
  ENSG00000047315_48 (sequence is synthesized)
ctcgcgatttaagctctgagactgagaacctacttaaagctatggcaaaggcactggaggattgagctaggtgtcgttatttgtgcaacaacattgaaaaacaagcagaaataaaacatt

SEQ ID NO: 30317 - DNA, 120 bp, Artificial Sequence
  ENSG00000047315_49 (sequence is synthesized)
tagagactcctgtggccttctctctgacttggaactgattcatgtatgtggtttttaatctttgttggggattatgtgacattccgtgtctatttcctcacaggcatgaggcatgccatt

SEQ ID NO: 30318 - DNA, 120 bp, Artificial Sequence
  ENSG00000047346_0 (sequence is synthesized)
taaacttggccgcggttgccgcaggaaggctagccagagggtaattacacagcattttgaaagcgaagcagaagccgtagaatcagcggcgagcctgttgaaagaacccacaggtgcatt

SEQ ID NO: 30319 - DNA, 120 bp, Artificial Sequence
  ENSG00000047346_1 (sequence is synthesized)
tcacagcactctgggcgaaaattggatgtgaaaatgaagccagaccgagatactctggatgaatattttgaatatgatgcagaggagttcttggtctctttggccttgctgataacagaa

SEQ ID NO: 30320 - DNA, 120 bp, Artificial Sequence
  ENSG00000047346_2 (sequence is synthesized)
ggacgaacacctgaatgttctgtaaaaggtcgaacagaaagctttcattgccctccagcacagtcttgttacccagtaactaccaaacatgaatgtagtgacaagctggcccagtgccgc

SEQ ID NO: 30321 - DNA, 120 bp, Artificial Sequence
  ENSG00000047346_3 (sequence is synthesized)
caagccagacgaactaggtctgaggtcacattgttgtggaagaataaccttccaatcatggtggaaatgatgctactaccagactgctgctacagcgatgatgggcccaccacagaggga

SEQ ID NO: 30322 - DNA, 120 bp, Artificial Sequence
  ENSG00000047346_4 (sequence is synthesized)
attgatctaaatgatcctgcgattaagcaagatgcattattattagaaagatggatcttggagccagttcctcgacagaatggtgaccgatttattgaagagaagacgcttctgttggct

SEQ ID NO: 30323 - DNA, 120 bp, Artificial Sequence
  ENSG00000047346_5 (sequence is synthesized)
gtccgctcatttgtgtttttttctcagttaagtgcatggctgagtgtttctcatggtgctattccacgaaatattctctacagaatcagtgctgctgatgtagacctacagtggaatttt

SEQ ID NO: 30324 - DNA, 120 bp, Artificial Sequence
  ENSG00000047346_6 (sequence is synthesized)
tcacagactccaattgagcatgtgtttcctgttcccaatgtttctcacaatgttgccttgaaagtcagtgttcagtccttgcccagacaatctaattatccagttttgacgtgcagtatt

SEQ ID NO: 30325 - DNA, 120 bp, Artificial Sequence
  ENSG00000047346_7 (sequence is synthesized)
cacactaatattggcctttatgagaaaagaattcaacaacataaacttaaaactcatcagcaccataacccaaatgaagcagaacaatgtggtacaaacagttcacagcgtctgtgtagc

SEQ ID NO: 30326 - DNA, 120 bp, Artificial Sequence
  ENSG00000047346_8 (sequence is synthesized)
aaacaaacttggaccatggcacctgaaagtgtgttacatgcaaaaagtggcccaagtccagaatatactgcagctgtcaaaaatatcaaactatatccaggcactggcagtaaatctgac

SEQ ID NO: 30327 - DNA, 120 bp, Artificial Sequence
  ENSG00000047346_9 (sequence is synthesized)
catgggacatctcaagccaatattctaggctttagtggtataggtgatataaaatcacaagaaacatcagtgagaactttaaaatcattttcaatggttgattccagtatctctaaccgc

SEQ ID NO: 30328 - DNA, 120 bp, Artificial Sequence
  ENSG00000047346_10 (sequence is synthesized)
cagagtttctggcagtcagctggtgagactaaccctttaataggctctttaattcaggagcggcaagaaatcattgcaagaattgcccaacatttgattcattgtgatccaagcacttca

SEQ ID NO: 30329 - DNA, 120 bp, Artificial Sequence
  ENSG00000047346_11 (sequence is synthesized)
catgtttctggacgtccatttaatactcaagagtctagttcactccattcaaaacttttccgggtttcacaagaaaatgagaacgtgggaaaaggtaaagaagctttctccatgactttt

SEQ ID NO: 30330 - DNA, 120 bp, Artificial Sequence
  ENSG00000047346_12 (sequence is synthesized)
ggtagtccagagtttagttccccagaagacaccaatgaggggaaaattcgactaaaaccagaaactcctcgaagtgaaacttgtatttctaatgacttttattctcatatgcctgttgga

SEQ ID NO: 30331 - DNA, 120 bp, Artificial Sequence
  ENSG00000047346_13 (sequence is synthesized)
gagactaatcctttgataggctctttactccaggagcggcaagatgttattgcaaggattgctcaacacttggagcacattgatccaacagcatcacatatcccccggcagtcattcaac

SEQ ID NO: 30332 - DNA, 120 bp, Artificial Sequence
  ENSG00000047346_14 (sequence is synthesized)
atgcatgactccagttcggttgcatctaaagtgtttaggagttcatatgaagacaaaaatttgttgaagaaaaataaggatgagtcctcagtttccatttctcacacaaaatgttccttg

SEQ ID NO: 30333 - DNA, 120 bp, Artificial Sequence
  ENSG00000047346_15 (sequence is synthesized)
ttaggagacatcagtgatgggaaaaacttagtacctaataaatgttttacttcttttaaaaataatagtaaagaaaagtgttctttgaaacatcaaacaagaaatcagtgtcagaacaat

SEQ ID NO: 30334 - DNA, 120 bp, Artificial Sequence
  ENSG00000047346_16 (sequence is synthesized)
cctagtgaaatcatccaaagtacgtatcaggagacacagaacaaaagttctagtttatcaacttcctcaattttgtctcagcacaaagaaaataacttagatttgacaagcagattcaag

SEQ ID NO: 30335 - DNA, 120 bp, Artificial Sequence
  ENSG00000047346_17 (sequence is synthesized)
tggaattgataaacagtattcaaattgcaccactattgacaaacagatttgtacaaataagtataaggaaaaaataataaatgagaactataatccaaaattctttggcaatcttcagtc

SEQ ID NO: 30336 - DNA, 120 bp, Artificial Sequence
  ENSG00000047346_18 (sequence is synthesized)
tgatgattccaaaaaaaatgactcaaaaataaaagttactgtgttggaaatgtctgaatatttgaacaaatatgaaagcatgtcctcaaataaagactcaaaaaggcctaagacatgtga

SEQ ID NO: 30337 - DNA, 120 bp, Artificial Sequence
  ENSG00000047346_19 (sequence is synthesized)
gcaaaatactcaacttaatagcatagagaattatctcaataaagataatgaaggtttcaaatgtaaaaagtcagaccaattaaaaaatgaacaagataagcaagaagatccaactaatga

SEQ ID NO: 30338 - DNA, 120 bp, Artificial Sequence
  ENSG00000047346_20 (sequence is synthesized)
aaaatcccaaaactattctcagagaagaagtataaaagactgtttgtctacatgtgagcaaccaaaaaatacagaggtattgaggactacactgaaacattcaaatgtgtggcgaaaaca

SEQ ID NO: 30339 - DNA, 120 bp, Artificial Sequence
  ENSG00000047346_21 (sequence is synthesized)
taattttcattccttggatggaacttcaaccagagcctttcatcctcaaactggattgcctcttctttcaagccctgttcctcaaagaaaaacacaatcaggttgctttgatctggattc

SEQ ID NO: 30340 - DNA, 120 bp, Artificial Sequence
  ENSG00000047346_22 (sequence is synthesized)
ttcattactacatctgaaaagcttctcatctagaagtcctcgaccatgtttaaacattgaagatgatccagatattcatgaaaaaccatttttgagttctagtgctccacctataacaag

SEQ ID NO: 30341 - DNA, 120 bp, Artificial Sequence
  ENSG00000047346_23 (sequence is synthesized)
tcttagtctcctaggaaattttgaggaatctgtcttgaactatcgtttcgatcctctcggcattgttgatggttttactgccgaggtaggggcaagtggtgctttctgccccacacattt

SEQ ID NO: 30342 - DNA, 120 bp, Artificial Sequence
  ENSG00000047346_24 (sequence is synthesized)
gactcttccagttgaagtgtcattctacagtgtttcagatgacaatgctccctctccttatatgggtgtgattactttagagtcccttggtaaaaggggttatcgagtacctccttcagg

SEQ ID NO: 30343 - DNA, 120 bp, Artificial Sequence
  ENSG00000047346_25 (sequence is synthesized)
aacaatacaagtgaccttatttaatcctaataagactgtggtgaagatgtttgttgtgatatatgatttacgagatatgccagccaatcatcagacattcctacgacaaagaactttttc

SEQ ID NO: 30344 - DNA, 120 bp, Artificial Sequence
  ENSG00000047346_26 (sequence is synthesized)
tgtacctgttaaacaagaagtgaagagaagtgttaataaagagaacatccgacacacagaagaacggttattacgctacctcatacatctgaggttccagagttctaaatctggaaagat

SEQ ID NO: 30345 - DNA, 120 bp, Artificial Sequence
  ENSG00000047346_27 (sequence is synthesized)
ctacctccatagagacgtacggctcctgttctctagaaagtcaatggaggttgatagcggtgctgcatatgaactcaaatcttacactgaatcaccaacaaaccctcagttttcaccaag

SEQ ID NO: 30346 - DNA, 120 bp, Artificial Sequence
  ENSG00000047346_28 (sequence is synthesized)
atgttgataaggagtgatgatttaaagtatttactcagtacccaagtttgcaagtaaaaattagcatagaatggagtgtaccaaattaacaatcaggagagtggattctctcctgttatc

SEQ ID NO: 30347 - DNA, 120 bp, Artificial Sequence
  ENSG00000047346_29 (sequence is synthesized)
ctggaccagtttttatgaaaggattcctgaaatgaaatccatatattccatgtagactggaaaaactcatgtcctaatcctttttgtactgttgaaaccacttcattggacatgttgcaa

SEQ ID NO: 30348 - DNA, 120 bp, Artificial Sequence
  ENSG00000047346_30 (sequence is synthesized)
tagcaaaacccccagttagattagtgtttacacattttctcagttatttaatatttaatgttttccttaatactcaagtgatgtttgtctctagtgttctaatgtagcacaaatcctatg

SEQ ID NO: 30349 - DNA, 120 bp, Artificial Sequence
  ENSG00000047346_31 (sequence is synthesized)
taaaatcatactatgtatttttgacattaatgttgaaatcaaatatatgcacaagtctttaattttgtgtaatgtgttaagtgctgttcatttaagttattgaaaatgagaataaaatgt

SEQ ID NO: 30350 - DNA, 120 bp, Artificial Sequence
  ENSG00000047346_32 (sequence is synthesized)
tgagcttctttaaaagtaacacactatgcaagcatgtgtactttttatatctctcatgtttagtttttataacaccatatccaggttgctatctcacatagtagtcctttaacatattgt

SEQ ID NO: 30351 - DNA, 120 bp, Artificial Sequence
  ENSG00000047346_33 (sequence is synthesized)
attagcagtgcaatgtggactaagctgcttcactttccctttgcaagttcagatcatcatgcccattcatagccaggattccttatccccaaaacagttctatttttccttaatcactac

SEQ ID NO: 30352 - DNA, 120 bp, Artificial Sequence
  ENSG00000047346_34 (sequence is synthesized)
tatttttccttaatcactactatagagtctttacattaaattactgtcgtatgctagataattttctcaaattgttaaaagaatatgtactttggaaacaaattagtatttatattgtaa

SEQ ID NO: 30353 - DNA, 120 bp, Artificial Sequence
  ENSG00000047346_35 (sequence is synthesized)
gaaaaaccttacacggagggaagcgggatcagcacccaacgctgaacatttgttttaaccgctgcagacatctggatccctcagttactgatagtatagctattgatagccagaaggcaa

SEQ ID NO: 30354 - DNA, 120 bp, Artificial Sequence
  ENSG00000047346_36 (sequence is synthesized)
aaacagcagagaaagaactggccgagcgagggggacggggagccggggcgccagagctagagacagcgggcgggcaaggagctggcagaggcgctggcattttgaaagcgaagcagaagc

SEQ ID NO: 30355 - DNA, 120 bp, Artificial Sequence
  ENSG00000047346_37 (sequence is synthesized)
ctactgctgctgccgctgcctgtagactttcagatcatctccctcttctgtgtcagggaatgctcctggctggtgcggacacaacccaatagcattttgaaagcgaagcagaagccgtag

SEQ ID NO: 30356 - DNA, 120 bp, Artificial Sequence
  ENSG00000047346_38 (sequence is synthesized)
caacttaatgacaaatttaagtgctttgatgcagtacttgaaaatataaatcatttcctaacagctgaatacaaactaatatgccaaaatattacctcacaacttctttctaagctagtt

SEQ ID NO: 30357 - DNA, 120 bp, Artificial Sequence
  ENSG00000047346_39 (sequence is synthesized)
aaacagcagagaaagaactggccgagcgagggggacggggagccggggcgccagagctagagacagcgggcgggcaaggagctggcagaggcgctgggcaagagggccggccggggctac

SEQ ID NO: 30358 - DNA, 120 bp, Artificial Sequence
  ENSG00000047346_40 (sequence is synthesized)
ctcgggtgccagtcaggcagggcggaggggctgagcgcagggagcggagcgaggcggtggctgaggcgcgggtggatggccacaggggcgccggggagccgcttcgggctggtcgtctcg

SEQ ID NO: 30359 - DNA, 120 bp, Artificial Sequence
  ENSG00000047346_41 (sequence is synthesized)
ggggagccgcttcgggctggtcgtctcgggtccccacggtcacctgaggcagccgcgggggccgctgcgctccatactccgctcccgctggccctgcgcctctcggagcctggggtctga

SEQ ID NO: 30360 - DNA, 120 bp, Artificial Sequence
  ENSG00000047346_42 (sequence is synthesized)
agcagaggtcggccgagggagcggaggagccggccagctcgagagcgccatgaaaacaactctccagcggggagaggggcagacgcggcgctcgcattttgaaagcgaagcagaagccgt

SEQ ID NO: 30361 - DNA, 120 bp, Artificial Sequence
  ENSG00000047346_43 (sequence is synthesized)
agcaaagctattatgtttgaaataattgaactggaatattttaacccaataaggatgtattttgcttaagctactggaactattccttaaagttgctcctctgaacaaggagtaaaattt

SEQ ID NO: 30362 - DNA, 120 bp, Artificial Sequence
  ENSG00000047346_44 (sequence is synthesized)
ttgctcctctgaacaaggagtaaaatttatatatatgaaatttgtgactaaagattttgatttgttattggaccttatattattgtaaaacaaaaaattgaaccttttaaaaaataatat

SEQ ID NO: 30363 - DNA, 120 bp, Artificial Sequence
  ENSG00000047346_45 (sequence is synthesized)
attttagtccttgaaactgaattatattcagtggtattaccttgttgtttaaaatcttgtttgattattggcacaatcattctgaatcacatcaacaaatcactatttttaaagaataat

SEQ ID NO: 30364 - DNA, 120 bp, Artificial Sequence
  ENSG00000047346_46 (sequence is synthesized)
gcagttggtgccaggaagaggcctaacttaacagtagtttacttgcaaggtccgggtattagaatagggccagattaattttatttttgtctctttcagcattttgaaagcgaagcagaa

SEQ ID NO: 30365 - DNA, 120 bp, Artificial Sequence
  ENSG00000047346_47 (sequence is synthesized)
aatcattctctcacatacatatagaacttagccctttctcctgctactgctgctgcaacaactttggtaagtaacagtggggctgcagctttgtttggagttcccctgctctgccccagg

SEQ ID NO: 30366 - DNA, 120 bp, Artificial Sequence
  ENSG00000047346_48 (sequence is synthesized)
aatgaccatttggggacctccataaaaggaaagcattaataagctaatcaaggtgaatacttaagaaaaatagcatatgacagtttgcataacttcaataggactcttcaatacatattt

SEQ ID NO: 30367 - DNA, 120 bp, Artificial Sequence
  ENSG00000047346_49 (sequence is synthesized)
ccttctttttaataaaccaaattgagacgaacctgtttaaaaggagaccccaaatattagaattgctttcacaggaaaacttgggaaacaaaattattttatttctaataatttctaaaa

SEQ ID NO: 30368 - DNA, 120 bp, Artificial Sequence
  ENSG00000047346_50 (sequence is synthesized)
ttgatttaatgagatgaccacacaaagcagaaatatagtctgacagatgtcagggcagagaaggcatcattccttttggtctaggcattgatctcttttggctcaggagagtcctgctgt

SEQ ID NO: 30369 - DNA, 120 bp, Artificial Sequence
  ENSG00000047346_51 (sequence is synthesized)
ctcagaacagtccttcatcatccctggtctagggttctcagaagaataatctgatattaaggccagcttgaaattgagttaactctagatctgacccagcgtaatcctgcaagccctcaa

SEQ ID NO: 30370 - DNA, 120 bp, Artificial Sequence
  ENSG00000047346_52 (sequence is synthesized)
atctattacagagtttgcagactgaaagagagtctagctaaggcttgctcctcatacccaggatttgatctaatccaacaagcctttgtatgacctttgacctcagtgtgttcagtactt

SEQ ID NO: 30371 - DNA, 120 bp, Artificial Sequence
  ENSG00000047346_53 (sequence is synthesized)
tgtcagatcacttttactcatcatcattgttccaatactgcaaggaatctgtatatttgtttatttcatatcacacaggaatgaaacagaagtatgtaacatgtgtacgtgtgtgtatat

SEQ ID NO: 30372 - DNA, 120 bp, Artificial Sequence
  ENSG00000047346_54 (sequence is synthesized)
atatatatacacacatatatagtaatatttatataagtttgaggaggaattaccacaagaataccacaagtaaaccgatttcttgaagtaaaggagtgacagtgttctcttgccttcggc

SEQ ID NO: 30373 - DNA, 120 bp, Artificial Sequence
  ENSG00000047346_55 (sequence is synthesized)
tatgcagctcatgagaaagtgtgggtcagtggaaagctagctgtcagttgtgataataatgaatcataaactcggaggtaacacattcacctcttgtttggagactgccagctttagtgg

SEQ ID NO: 30374 - DNA, 120 bp, Artificial Sequence
  ENSG00000047346_56 (sequence is synthesized)
gcacaggctgtaaacacctcccccggagccggccgcggaggactggttgggagttggtagggtcgccccgggacagcccggaagagttcgtttggggctgggggctgggcgggaggaggt

SEQ ID NO: 30375 - DNA, 120 bp, Artificial Sequence
  ENSG00000047346_57 (sequence is synthesized)
gactcgggtttctgtgtaaacttggccgcggttgccgcaggaaggctagccagagggtaattacacaggtgaggcccggcggggcgggcggagggctcgggaggcgcaggggactggaag

SEQ ID NO: 30376 - DNA, 120 bp, Artificial Sequence
  ENSG00000047346_58 (sequence is synthesized)
agttggctgcgcccaggcaccaggtggaagaatttccataccagccctgcggaggtgcctctgtttccagaggcgtttttgtacgaagggcattttgaaagcgaagcagaagccgtagaa

SEQ ID NO: 30377 - DNA, 120 bp, Artificial Sequence
  ENSG00000047346_59 (sequence is synthesized)
agaccgagaaacgaggtctcactctgttgctcagcctggtcttaaactcatgtcctcaagcaatcttcctgtatcagcctcctaaagtctggaattacaagcatgagccaccatgcctgg

SEQ ID NO: 30378 - DNA, 120 bp, Artificial Sequence
  ENSG00000047346_60 (sequence is synthesized)
cctccactatccctttctgtttgtggtggtctcctatattttgagtttgaatgggaagggagcatgcatgtttgatggtttgttttgtttttgtgaatgaagaatgaaaatttattccca

SEQ ID NO: 30379 - DNA, 120 bp, Artificial Sequence
  ENSG00000047346_61 (sequence is synthesized)
ttaagtgcgagcttcaattgaggcactcagtttatgaggtcttactgatgtttcctctcttaggtgctgtagttaaaatcttgctggtctaaaatggtgaaaactattgaggtattcaaa

SEQ ID NO: 30380 - DNA, 120 bp, Artificial Sequence
  ENSG00000047346_62 (sequence is synthesized)
tgataagtactttataaactgaaattgcattgaaaacggagagctcttgacagaaaggttgactctagcatttatataaggaaaaagacaactattatctccctctacacagaaagctat

SEQ ID NO: 30381 - DNA, 120 bp, Artificial Sequence
  ENSG00000047346_63 (sequence is synthesized)
attcagtagttataggatttgtacattgtgaatccttagggatctctaaacatctgtgtctttagaagtagtgtcacctctagtaaaagagggccagtagaattgagtggtggcagcctg

SEQ ID NO: 30382 - DNA, 120 bp, Artificial Sequence
  ENSG00000047346_64 (sequence is synthesized)
tgatgtatatgaattttggctgtacgtctctagcgactattttctccaactctatttagtaaaattctacctaatttcagctattgtgcttccaaagtccatgtttgttgaatatgatat

SEQ ID NO: 30383 - DNA, 120 bp, Artificial Sequence
  ENSG00000047346_65 (sequence is synthesized)
ggtaaaaaccaatatctatttggagacagtggaggggatggtagtaattgagagacagtgtcagatggagcagtgactttacaatttttttgactgcaatccacaattagacatttcaca

SEQ ID NO: 30384 - DNA, 120 bp, Artificial Sequence
  ENSG00000047346_66 (sequence is synthesized)
ttgctcccccatgacaacatccctatcgacccctgcccaaaaacaagttatttaccaatcttgctataagcaatgatgactgattttttcttttttctactttatttaaaaagaaaatta

SEQ ID NO: 30385 - DNA, 120 bp, Artificial Sequence
  ENSG00000047346_67 (sequence is synthesized)
tagtctcaactctttatattaattttacacacattaattctacagattgttttagcacttagaactaaaagtgttcaagatttgattttgttaccttctctgtgtaagctaaagttgctg

SEQ ID NO: 30386 - DNA, 120 bp, Artificial Sequence
  ENSG00000047346_68 (sequence is synthesized)
acttttctgagtttccattttattgattaaaactgggatagtaatagtattttacaccattttataactttattagaatgacataatctgagtgaagtggttgtgccaggcacttactaa

SEQ ID NO: 30387 - DNA, 120 bp, Artificial Sequence
  ENSG00000047346_69 (sequence is synthesized)
catgctagagtttgaggtagccaaaagagtttagtcatatcacttggaagcaaaccaatgtgaaatagtttcaaataagcaaattttaaaaaatgttaaatgcaaagcaaacagtattaa

SEQ ID NO: 30388 - DNA, 120 bp, Artificial Sequence
  ENSG00000047346_70 (sequence is synthesized)
agctttggggacttaatgattgagtctccttacacctacacaagattggctaaatacacatacaactgtgtcactctaccagatttctgttaacattctccagaatttaaactgcagaat

SEQ ID NO: 30389 - DNA, 120 bp, Artificial Sequence
  ENSG00000047346_71 (sequence is synthesized)
cagtcatttgtatgactgtttgtctctattagcagaggtaatgacatgtatcagtgataggtaattgtggaaaaaaaaacagcacttggaattaaacctagagttggtgattcttacagg

SEQ ID NO: 30390 - DNA, 120 bp, Artificial Sequence
  ENSG00000047346_72 (sequence is synthesized)
gtaacccaacggctaccttaatttctatgattcagtttcttcatctacaaaatattatttcacaaagttgcagttgtcaaagggacaagtaaatatgggatccattgtcttcatggaaaa

SEQ ID NO: 30391 - DNA, 120 bp, Artificial Sequence
  ENSG00000047346_73 (sequence is synthesized)
acttttcataaaatgttattttattataataaaaaatgtgtgattggttttcaatttcagattgaatcaaacatagcattctttgtaatagcaggagattaacaacatcccagaatatat

SEQ ID NO: 30392 - DNA, 120 bp, Artificial Sequence
  ENSG00000047346_74 (sequence is synthesized)
ctttaaaagaagtatggataaagaaaaacccgtatgcacctctgcacacattttatgtaatagtggtgatactaatttacaaagacaaagtatataggatattaaaagtgaattcttaat

SEQ ID NO: 30393 - DNA, 120 bp, Artificial Sequence
  ENSG00000047346_75 (sequence is synthesized)
acctgatcttgattcttattaaatctgacttatgtgtatacaagatattattagatgaagtgtttgtccagtagcttagcttataaataacccccattctagctcattttaaacaatgta

SEQ ID NO: 30394 - DNA, 120 bp, Artificial Sequence
  ENSG00000047346_76 (sequence is synthesized)
gtatgaatgatgccaaaaacaggctagaacattttcttctttccaagatcttagatttggtaaacaagctactgctcctggaactaatctaggtcatcataacccaaaatcttttgaaat

SEQ ID NO: 30395 - DNA, 120 bp, Artificial Sequence
  ENSG00000047346_77 (sequence is synthesized)
atgagagtcccaattaagtctcttaggtactttttagcattttaattttaagaatgtgtttaactcttaaaacagtatattttggttgctgtttggccatttggtttatttgtaccttgt

SEQ ID NO: 30396 - DNA, 120 bp, Artificial Sequence
  ENSG00000047346_78 (sequence is synthesized)
tataatgaatgcaagtcagtgggtaatcattgcagcaaatatgattgctaggaatctcatgtaagtggaagtcaatataatgtatggcttaatttatccctgaactgacctaacatcaca

SEQ ID NO: 30397 - DNA, 120 bp, Artificial Sequence
  ENSG00000047346_79 (sequence is synthesized)
ttttgttttttaataaaaactggtttaatgatatgataaatttctgtattttccacaactgttaataatgttatattttaactattgcttagtcttcattacaaattattcagctgttaa

SEQ ID NO: 30398 - DNA, 120 bp, Artificial Sequence
  ENSG00000047346_80 (sequence is synthesized)
atgtgttgttcaatgtgacattatttaaaaacttaaaaaaaaatcagcttcacagaaatctttctttgatcaagagttgtctcattcccattgttattaatacagtatacaactaatgta

SEQ ID NO: 30399 - DNA, 80 bp, Artificial Sequence
  ENSG00000047365_0 (sequence is synthesized)
gaggaagcggcggccgaggcgaggcgcgggagcacctgagcaaggcgcgggcgccgggctcggcgtttccggagctgagc

SEQ ID NO: 30400 - DNA, 120 bp, Artificial Sequence
  ENSG00000047365_1 (sequence is synthesized)
cggccccactaacagcgccgcccgcgcggccgccgccaggcagcagaggcgactgcggacagccggcggggaccgggaaagaggaggcctggcgcctccggcagaggggcgaggaccgag

SEQ ID NO: 30401 - DNA, 120 bp, Artificial Sequence
  ENSG00000047365_2 (sequence is synthesized)
gcgaggaccgagcgcccaaggctgggagagacgccggcgctgagcttcccagcgccgcctcacctcgcttttcgaactccgcgacccgagcgcaaggcttaagcaggtaaagcagtcact

SEQ ID NO: 30402 - DNA, 120 bp, Artificial Sequence
  ENSG00000047365_3 (sequence is synthesized)
gtgaagaaaataacattttaagaaacttttctgtcacaattgatagaggaaaagccagtagagaagtacatcttcttgtgtgtgtgtctcatcgtgccactttttgtaactcagcttagt

SEQ ID NO: 30403 - DNA, 120 bp, Artificial Sequence
  ENSG00000047365_4 (sequence is synthesized)
aatgaagccaccattatgtcctcagtcagtgaagtaaatgtggatataaaagatttcctaatgagcattaatttggagcagtatctcttacatttccatgagtctggttttactactgtg

SEQ ID NO: 30404 - DNA, 120 bp, Artificial Sequence
  ENSG00000047365_5 (sequence is synthesized)
aaggactgtgcagcaataaatgacagcctgctgcagaaaattggaatatcacctacaggtcaccgtaggaggatacttaaacagttacagataatcttgtcaaaaatgcaagatattcca

SEQ ID NO: 30405 - DNA, 120 bp, Artificial Sequence
  ENSG00000047365_6 (sequence is synthesized)
atatatgcaaatgttcataaaactaagaagaatgatgacccttcaaaggattaccatgttccatcttctgatcagaatatctgcatagaactttccaattctggtagtgttcagacatct

SEQ ID NO: 30406 - DNA, 120 bp, Artificial Sequence
  ENSG00000047365_7 (sequence is synthesized)
agcccaccgcagttggagactgttagaaaaaatcttgaagacagtgatgcaagtgtggaaagaagccagtatcctcaatcagatgataagctgtctcctcctaaacgcgacttccccact

SEQ ID NO: 30407 - DNA, 120 bp, Artificial Sequence
  ENSG00000047365_8 (sequence is synthesized)
gcagaggaaccacacctgaatttgggttctttgaatgattctttatttggtagtgacaatattaaaatagaatcattgattacaaagaagactgtggatcacacagttgaagaacaacaa

SEQ ID NO: 30408 - DNA, 120 bp, Artificial Sequence
  ENSG00000047365_9 (sequence is synthesized)
acagaaaaagttaaattgatcacagaaaatctcagtaagctccctaatgcagactctgaatgcctttcttttgttggctgttcaacatcaggaacaaattctggaaatggaacaaatggt

SEQ ID NO: 30409 - DNA, 120 bp, Artificial Sequence
  ENSG00000047365_10 (sequence is synthesized)
ttattagaaggatcaccaccatccccattctttaagtttcaaggagaaatgattgtaaatgacttgtatgttccatcatcaccaatcctagcacctgtgagaagtcgtagcaagttggtt

SEQ ID NO: 30410 - DNA, 120 bp, Artificial Sequence
  ENSG00000047365_11 (sequence is synthesized)
tcaagaccatctcgatcttttctgctaagacatcgacctgtaccagagattccagggtcaacaaaaggagtttctgggagctatttccgtgaaagaagaaatgttgctacctcaactgaa

SEQ ID NO: 30411 - DNA, 120 bp, Artificial Sequence
  ENSG00000047365_12 (sequence is synthesized)
aaatctgtggcatggcaaaattcaaatgaggagaattcatcttccatctttccttatggagagacctttctcttccagagactagaaaattccaagaagcgatctataaagaatgaattt

SEQ ID NO: 30412 - DNA, 120 bp, Artificial Sequence
  ENSG00000047365_13 (sequence is synthesized)
ttgacccagggagaagcactcaaaggggaagcagctactgcaacaaactcttttatcatcaaatcaagcatatacgataacagaaaggagaaaataagcgaggacaaggtggaagatatt

SEQ ID NO: 30413 - DNA, 120 bp, Artificial Sequence
  ENSG00000047365_14 (sequence is synthesized)
tggatacctcgagaggacaaaaacaattttttgatagacactgcttctgaatcagaatactcaacagtagaagaatgctttcagagtttaagaagaaaaaattcaaaggcatctaaatct

SEQ ID NO: 30414 - DNA, 120 bp, Artificial Sequence
  ENSG00000047365_15 (sequence is synthesized)
aggactcaaaaagccttgattttggactccgttaataggcacagttatccgttaagctcaacaagtggaaatgctgattcatcagccgtttcttcacaggcaatatctccctatgcctgc

SEQ ID NO: 30415 - DNA, 120 bp, Artificial Sequence
  ENSG00000047365_16 (sequence is synthesized)
ttttatggagcatctgcaaagaaggttaaatcaggatggctggataaactctctcctcaaggaaaacgcatgtttcaaaagagatgggtgaaatttgatggccttagcatttcttactac

SEQ ID NO: 30416 - DNA, 120 bp, Artificial Sequence
  ENSG00000047365_17 (sequence is synthesized)
aataatgagaaggagatgtattcgaaaggaataattcccctttctgctatatcaacagtacgagttcaaggagacaacaaatttgaagttgttacaacacaaagaacttttgtttttaga

SEQ ID NO: 30417 - DNA, 120 bp, Artificial Sequence
  ENSG00000047365_18 (sequence is synthesized)
gtagaaaaagaagaggagagaaatgactggatcagcatactattaaatgcactgaaatcacaatcccttacctcgcagtctcaagctgttgttacacctgagaaatgtggatatcttgaa

SEQ ID NO: 30418 - DNA, 120 bp, Artificial Sequence
  ENSG00000047365_19 (sequence is synthesized)
ttgagaggctataaggcaaaaatttttactgtgttaagtggaaacagtgtgtggctttgcaaaaacgaacaggattttaagagtggacttggtattaccataattcctatgaatgtagca

SEQ ID NO: 30419 - DNA, 120 bp, Artificial Sequence
  ENSG00000047365_20 (sequence is synthesized)
aatgtaaagcaagtggaccgaactgtgaaacaatcttttgaaataatcactccctacaggagtttcagctttacagccgagactgaaaaggagaaacaagactggattgaagctgtgcag

SEQ ID NO: 30420 - DNA, 120 bp, Artificial Sequence
  ENSG00000047365_21 (sequence is synthesized)
caatcaatagcagaaactctctctgattatgaagtagctgagaagatttggttcaatgaatccaacaggagctgtgcagattgtaaagccccagatcctgactgggcatccatcaatctc

SEQ ID NO: 30421 - DNA, 120 bp, Artificial Sequence
  ENSG00000047365_22 (sequence is synthesized)
tgtgttgtcatctgtaagaagtgtgcaggacagcatagatctttaggaccaaaagattccaaggttagaagtctaaaaatggatgctagcatttggagcaatgaactcatcgagcttttt

SEQ ID NO: 30422 - DNA, 120 bp, Artificial Sequence
  ENSG00000047365_23 (sequence is synthesized)
attgtcattggaaacaaaagagcaaatgacttttgggctggtaatcttcaaaaggatgaagaattacatatggactcaccagtagaaaagagaaaaaactttattactcagaaatataaa

SEQ ID NO: 30423 - DNA, 120 bp, Artificial Sequence
  ENSG00000047365_24 (sequence is synthesized)
gaaggaaaattcagaaaaactcttttggcatctctcaccaaagaagaattaaataaggctctatgtgctgctgtagtgaaaccggatgttctagaaacaatggctttgctgttcagtgga

SEQ ID NO: 30424 - DNA, 120 bp, Artificial Sequence
  ENSG00000047365_25 (sequence is synthesized)
gcagatgtcatgtgtgccaccggagaccccgtgcatagcaccccctatctgctagccaagaaagctgggcaaagtctgcaaatggaatttctctaccataacaaattctcagatttccct

SEQ ID NO: 30425 - DNA, 120 bp, Artificial Sequence
  ENSG00000047365_26 (sequence is synthesized)
caacatgatattcattccgagggtgtattaagtcaagagtcttcccagtccacattcctctgtgactttttatatcaagctccttctgctgcttctaaactctcttcagagaaaaaactg

SEQ ID NO: 30426 - DNA, 120 bp, Artificial Sequence
  ENSG00000047365_27 (sequence is synthesized)
cttgaagagacaaataaaaaatggtgtgttttggaaggaggcttcttgagttactatgaaaatgataagtctaccacacctaatggcaccattaatatcaatgaagttatctgcctggct

SEQ ID NO: 30427 - DNA, 120 bp, Artificial Sequence
  ENSG00000047365_28 (sequence is synthesized)
atacacaaagaggacttctatttaaatactgggcccatctttatctttgagatctacttaccctccgaacgtgtgtttttatttggagctgaaacatctcaagctcaaagaaaatggaca

SEQ ID NO: 30428 - DNA, 120 bp, Artificial Sequence
  ENSG00000047365_29 (sequence is synthesized)
gaggcaatagccaagcattttgttcccttatttgctgaaaacttaacagaagctgactatgatttgattggtcaactcttctacaaagactgccatgccctggatcagtggagaaaaggc

SEQ ID NO: 30429 - DNA, 120 bp, Artificial Sequence
  ENSG00000047365_30 (sequence is synthesized)
tggtttgctatggacaaatccagcttgcatttttgccttcaaatgcaagaagttcagggagatagaatgcacttaagaagactgcaagagctaacaatcagcacaatggttcaaaatggg

SEQ ID NO: 30430 - DNA, 120 bp, Artificial Sequence
  ENSG00000047365_31 (sequence is synthesized)
tcacagtctggcatactgcaattgaaaaagcagcaggtacagatggtaatgctttacaagatcagcagctcagcaaaaatgacgttcccattatagtgaacagctgtatagcatttgtta

SEQ ID NO: 30431 - DNA, 120 bp, Artificial Sequence
  ENSG00000047365_32 (sequence is synthesized)
cacagtatggtttaggatgcaaatatatctatcaaaagaatggtgatcctttgcatataagtgaactcctggagagtttcaaaaaggatgcaagaagctttaaattgagggctggaaaac

SEQ ID NO: 30432 - DNA, 120 bp, Artificial Sequence
  ENSG00000047365_33 (sequence is synthesized)
atcagcttgaagatgtgacggctgtgttgaaaagttttctctctgacattgatgatgcactgcttactaaggagctctacccatattggatctctgctttagatacgcaagatgacaagg

SEQ ID NO: 30433 - DNA, 120 bp, Artificial Sequence
  ENSG00000047365_34 (sequence is synthesized)
aaagaattaaaaaatatggagcatttatacgttctcttccaggggtcaaccgagcaacactagcagctatcattgaacacctgtatagggttcagaaatgctcagaaatcaatcacatga

SEQ ID NO: 30434 - DNA, 120 bp, Artificial Sequence
  ENSG00000047365_35 (sequence is synthesized)
atgcccataatttggccttggtcttttcatcctgtttgtttcaaacgaagggacaaactagtgaagaagtgaatgtaattgaggacctaattaataattatgtagaaatatttgaggtta

SEQ ID NO: 30435 - DNA, 120 bp, Artificial Sequence
  ENSG00000047365_36 (sequence is synthesized)
aagaagatcaagtcaaacaaatggacatagaaaatagctttattaccaagtggaaagacacccaagtttcccaggctggagatttgttaattgaagtatatgtagaaaggaaggaacccg

SEQ ID NO: 30436 - DNA, 120 bp, Artificial Sequence
  ENSG00000047365_37 (sequence is synthesized)
actgtagtattataattcggatatctcctgtgatggaagcagaagaattaactaatgatatattagcgataaaaaatattattcctacaaaaggtgatatttgggccacatttgaagtca

SEQ ID NO: 30437 - DNA, 120 bp, Artificial Sequence
  ENSG00000047365_38 (sequence is synthesized)
ttgaaaatgaagagctagagcgtcctcttcactacaaggaaaatgtactggagcaggtgcttcggtggagttcattagctgaacctggctctgcttacctggtggtgaagagattcttaa

SEQ ID NO: 30438 - DNA, 120 bp, Artificial Sequence
  ENSG00000047365_39 (sequence is synthesized)
ccgctgacacaattaaacactgcagtgaccggagtacactgggaagcatcaaagaaggaatcttgaaaatcaaagaagaaccatccaaaatactatctggaaataagtttcaagaccggt

SEQ ID NO: 30439 - DNA, 120 bp, Artificial Sequence
  ENSG00000047365_40 (sequence is synthesized)
attttgttttacgagatgggtttctctttctttacaaggatgtgaagagtagtaaacatgacaagatgttttctctcagttccatgaagttttatcgtggagtgaaaaagaaaatgaagc

SEQ ID NO: 30440 - DNA, 120 bp, Artificial Sequence
  ENSG00000047365_41 (sequence is synthesized)
ctccaacaagctggggattgaccgcatattctgagaaacatcactggcacctgtgttgtgatagttcacgaactcagacggagtggatgaccagtatctttattgcccagcatgaatatg

SEQ ID NO: 30441 - DNA, 120 bp, Artificial Sequence
  ENSG00000047365_42 (sequence is synthesized)
atatatggccaccagctggaaaggaacgaaaacgttcaataaccaaaaatcccaaaattggaggtttgcctctgattcctatacagcatgaggggaatgcaaccttggcccggaaaaata

SEQ ID NO: 30442 - DNA, 120 bp, Artificial Sequence
  ENSG00000047365_43 (sequence is synthesized)
ttgagagtgcaagagcagaacttgaaaggctgcggctcagtgaaaagtgtgataaagagtccgtggactctagcttaaaggagagagcttccatggtggcccactgcctggagcacaagg

SEQ ID NO: 30443 - DNA, 120 bp, Artificial Sequence
  ENSG00000047365_44 (sequence is synthesized)
acgataaacttcgaaatcgaccccgaaaacatcggagtttcaactgcctggaggacacagagcctgaagccccacttgggcaaccaaaaggccataaaggcctaaagacattgaggaaga

SEQ ID NO: 30444 - DNA, 120 bp, Artificial Sequence
  ENSG00000047365_45 (sequence is synthesized)
ctgaggacaggaatagcaaagctactttggactctgatcataagttaccatcaagggtaattgaagaacttaatgtggttctacaacggtcaagaacccttccaaaagaattacaggatg

SEQ ID NO: 30445 - DNA, 120 bp, Artificial Sequence
  ENSG00000047365_46 (sequence is synthesized)
agcagattttgaagtaggaaataaaatgaattgctccccagattatttttttaatattgtatgcaatctttatgtgtaactccaaaactgaactataagataattcataagaatttgcct

SEQ ID NO: 30446 - DNA, 120 bp, Artificial Sequence
  ENSG00000047365_47 (sequence is synthesized)
attgataggcaaatttgtctatgcttaggcatttaaggagcatttaaaaatatgtatatatgtgactgaatgtaagattaactttattttggtctgaacaaaccttgtaaagttccattg

SEQ ID NO: 30447 - DNA, 120 bp, Artificial Sequence
  ENSG00000047365_48 (sequence is synthesized)
tattaacgtgtgtaagaagacattgggttacttaggtggtcagtccttttaaagtagttgtctgttaagtggtataatttatgagcagaaatctcaaactgtactgtattgtataaaatg

SEQ ID NO: 30448 - DNA, 120 bp, Artificial Sequence
  ENSG00000047365_49 (sequence is synthesized)
ctgtgtttaaatgaagcctaagaaactatctgtaacatattttgcactttgagaaaccttgtatattaaattaccatatgtttttaggtttacagaagttctaccttagggaaaagaaag

SEQ ID NO: 30449 - DNA, 120 bp, Artificial Sequence
  ENSG00000047365_50 (sequence is synthesized)
ggaagtaaattgaaaaaggggggagaatttattgtagtggctgcctaaaaaccactggagtttttaaaagaagcaaggagttaaatgtcctgcaaaacaaggaagtgagctaagattcat

SEQ ID NO: 30450 - DNA, 120 bp, Artificial Sequence
  ENSG00000047365_51 (sequence is synthesized)
tctagttcactaatgaccagaacttgtcaatgagaaaccacttgttaagaaaaagtccagtgtttatttctcaagagtaatattcggccaacagatgtaaataatagcactagccactct

SEQ ID NO: 30451 - DNA, 120 bp, Artificial Sequence
  ENSG00000047365_52 (sequence is synthesized)
tattaatatttatagtgttagaaaaccagccacattacagattcactacgtttgagctcattgttggtggctgctaagaggaaacttacactgcattggagaggttgtgtacacaggacc

SEQ ID NO: 30452 - DNA, 120 bp, Artificial Sequence
  ENSG00000047365_53 (sequence is synthesized)
tggcctggatgctgattgcactgtcattgtatgcaagcattttgtcttttttcagaatttctgactatacttttggtacgaacaaaattcatcaccacagggtcctgttgttttgtttga

SEQ ID NO: 30453 - DNA, 120 bp, Artificial Sequence
  ENSG00000047365_54 (sequence is synthesized)
tttttagatttttttaaattattattaaggttgtaatgtttttctccgagttgtcagaaataactggaagaatacaatatatggccattatggagccaggggctagttggtggtttacta

SEQ ID NO: 30454 - DNA, 120 bp, Artificial Sequence
  ENSG00000047365_55 (sequence is synthesized)
tacatttgggggctacctggtcacatttaatctaggtttttttttctttttttaagtaaaggtgtggtctcttccctgtacttatgaataaggacaaagccctatttttgtttccacata

SEQ ID NO: 30455 - DNA, 120 bp, Artificial Sequence
  ENSG00000047365_56 (sequence is synthesized)
aagatcagctactgaattggtgaatttcctgacagacaatgctatctaaccatagttcatgttaggggaagcatttttccatcagtttctttaaaattggattgtctggtgagttttgat

SEQ ID NO: 30456 - DNA, 120 bp, Artificial Sequence
  ENSG00000047365_57 (sequence is synthesized)
attaaacattatgtagctaagttttttttttttagcatttcttttttatttttcaatctatattcacaggcccatacttcagtcagtccaatcatagtacagtgatgtggtggtagatgc

SEQ ID NO: 30457 - DNA, 120 bp, Artificial Sequence
  ENSG00000047365_58 (sequence is synthesized)
tatgaatttcttcattgtaaaatacggatcatttgtattttggggtgataaaatagttcaccatgggtatgagatatttattctttaaatcaaagtaaattagaatttttaaaaagcaca

SEQ ID NO: 30458 - DNA, 120 bp, Artificial Sequence
  ENSG00000047365_59 (sequence is synthesized)
aaactgcaggacagtttatgaaataggtggcactattagggaatcttcctttaaagcaagaaatcatgttatttagaaagaaaaactaatcttaaacatactatttctaataaatattta

SEQ ID NO: 30459 - DNA, 120 bp, Artificial Sequence
  ENSG00000047365_60 (sequence is synthesized)
tatttttatgaaataaagaggtatgtggaaattaatatttggtgatgttggacagtggaaaagtatctagagtttttacctgccttatctgaattcttcttgaaacttgagcttaaactc

SEQ ID NO: 30460 - DNA, 120 bp, Artificial Sequence
  ENSG00000047365_61 (sequence is synthesized)
taatagctgtttccctttctattctgaacaactgtctccatttttcaagtgtgagagataagggctaatgatgacatctcatttattttgagtaaacattaaaattgttttacaagtcta

SEQ ID NO: 30461 - DNA, 120 bp, Artificial Sequence
  ENSG00000047365_62 (sequence is synthesized)
gtcccctggtgaaagcttgcattggttgctcaggcactgggaagctgtttttgtttggagtgtgcttatatgcgtcctgtaggaggacagctgaaaacctggtctccacctgctaatctg

SEQ ID NO: 30462 - DNA, 120 bp, Artificial Sequence
  ENSG00000047365_63 (sequence is synthesized)
gtgggcagacgccacagtgcagagaaacctggtatgcagaagatgaagacatagcacaacgtaagtcatgtcctatagatctatatcacctgtaaggcataatatcccagcatgtgcctc

SEQ ID NO: 30463 - DNA, 120 bp, Artificial Sequence
  ENSG00000047365_64 (sequence is synthesized)
accatgcaggcaagagtggaaaattgttagtatttagatttatgtatatggtaatatgatttaaacatgttttgttcacatatttctatctaatgaagttatcttcctgtcctaatgagg

SEQ ID NO: 30464 - DNA, 120 bp, Artificial Sequence
  ENSG00000047365_65 (sequence is synthesized)
tgggtaacaatgtgtctcactgtcactgttttggagattttgctgaacttggtgaacttgctctactctggcctggacagaaaagaaaagaaaagcttacacttcttggtttccttgttc

SEQ ID NO: 30465 - DNA, 120 bp, Artificial Sequence
  ENSG00000047365_66 (sequence is synthesized)
tgccttcctattgtgatgggaaaagacaacatagagtagaaattaacaaaggaatctctggagtgaggcattctgaaattttactgaagctctaaaacttaacagctatggaaatgggta

SEQ ID NO: 30466 - DNA, 120 bp, Artificial Sequence
  ENSG00000047365_67 (sequence is synthesized)
ggatccggatagacagctggacactccctccattcctctcccctacctttaaataagaagaagctgtagtgagtttcaggcaccaagttatttactcggtagagatcatgaatttgcccg

SEQ ID NO: 30467 - DNA, 120 bp, Artificial Sequence
  ENSG00000047365_68 (sequence is synthesized)
ggtgtctgtgctgccccgcaccctgcttgttaaccacgttaagacgactggcctgttaattaactttaattacgatcatttggcttccacctgcctgaacccgataccttacacgggaac

SEQ ID NO: 30468 - DNA, 120 bp, Artificial Sequence
  ENSG00000047365_69 (sequence is synthesized)
agaattaaataaggtattcaattaaacataacagcagacgtggattttaatgtctttttaatgatgtgccaagattcttgagaaaaagtaaaaaattttatactatctgacaaaattatt

SEQ ID NO: 30469 - DNA, 120 bp, Artificial Sequence
  ENSG00000047365_70 (sequence is synthesized)
aattttattttatttccttttgtgacattatttcagtggtttcccccttgtttcatttaaggattcattgtcaaaagagcataaattcttcctccataattgaagtttcctgctaactct

SEQ ID NO: 30470 - DNA, 120 bp, Artificial Sequence
  ENSG00000047365_71 (sequence is synthesized)
tgttgccacaatctgaggatttggaagcaaatgggatccagtaaagtgaagtctgaggactgatataatgtgggaagaaaggatgagaagagatgtagaggcagcttattatttcaaggc

SEQ ID NO: 30471 - DNA, 120 bp, Artificial Sequence
  ENSG00000047365_72 (sequence is synthesized)
agtgaggcattctgaaattttactgaagctctaaaacttaacagctatggaaatgggaaagagccgaggtcagaatgagaaacacatccccacaggatttctgaccatcagtaacatgaa

SEQ ID NO: 30472 - DNA, 120 bp, Artificial Sequence
  ENSG00000047365_73 (sequence is synthesized)
ttagctggtgtgcactctgctctgtaaccctggaatctcctttctactcggagggaaccagatgtacagcatgaagaagtatgccctttggaaatgtaaatgaatacagttaagaggcta

SEQ ID NO: 30473 - DNA, 120 bp, Artificial Sequence
  ENSG00000047365_74 (sequence is synthesized)
caccgccctttaaaggagttcttctgatctcttaggagctttacattttgaagaacatggatggatgagaaacttgatgtggattagagaaggactccttctgtcacccaggctgaggtg

SEQ ID NO: 30474 - DNA, 120 bp, Artificial Sequence
  ENSG00000047365_75 (sequence is synthesized)
tagagaaggactccttctgtcacccaggctgaggtgcaatggcctgatcacagttcactgcagccttgaattcttagactcaagctactcatccacctcagcctcccaagtagctgggac

SEQ ID NO: 30475 - DNA, 120 bp, Artificial Sequence
  ENSG00000047365_76 (sequence is synthesized)
aattttatttgttatctttttcaattttaatgaaaattttatacatatatatgtaacccatcagttaatatactttgcttgtatatgttatataaaaggtcacttcctcttgaatttgca

SEQ ID NO: 30476 - DNA, 120 bp, Artificial Sequence
  ENSG00000047365_77 (sequence is synthesized)
aatttgcaaaatagttgtttgcttagcacgaatgccaacaatatttttttaaatttaaagatagcctactctcatatagagcagatttttttaatatataaaaataattccaaattttat

SEQ ID NO: 30477 - DNA, 120 bp, Artificial Sequence
  ENSG00000047365_78 (sequence is synthesized)
tttattttctgttgcaaaggcaaataatcttggaagtctcttttaaaagttaaatcaatgccataatatactcaaattgtcacaaagaacagtctattgtaacaccctgtgatttactga

SEQ ID NO: 30478 - DNA, 120 bp, Artificial Sequence
  ENSG00000047365_79 (sequence is synthesized)
tagcaatgaagagtgtggactttggggccaggaatccttgcttcaattattagttctactacacactaaccacacgatcttaggctaatgtcttaacctcatttcctatctgcgtaattg

SEQ ID NO: 30479 - DNA, 120 bp, Artificial Sequence
  ENSG00000047365_80 (sequence is synthesized)
tctaagacactatttcttaaaaatcaagacagtgaaaacttcttccttagctgtccgtttttctgctacagtaggttcaaaattatttttcaggtagccctacccctgtataagctattc

SEQ ID NO: 30480 - DNA, 120 bp, Artificial Sequence
  ENSG00000047365_81 (sequence is synthesized)
atctgacctctctcagaggagctggaatagtcctctcttcagaacatgtccatgttgtggtccttggatcccctaacccttctcccttctcatctgtcagttaaggctttgcctttaaat

SEQ ID NO: 30481 - DNA, 120 bp, Artificial Sequence
  ENSG00000047365_82 (sequence is synthesized)
gctaacatagagctacattttaagagcccataattcaatatggaaacaaactccctggcacactctatttcttgaaagattatcaaagagaatcaacaattggaaggaagtgttgccgag

SEQ ID NO: 30482 - DNA, 120 bp, Artificial Sequence
  ENSG00000047365_83 (sequence is synthesized)
aagctagttgcatcaaatggtttctctacaggaacttttgtagaaattgcacttgcttgtaatgccactggtctaccctgagagactttttaagaaaaaagagatcctaaacctttgaag

SEQ ID NO: 30483 - DNA, 120 bp, Artificial Sequence
  ENSG00000047365_84 (sequence is synthesized)
atattcactccattacacagcatcttctttttgagaacccttaggacacaactttttttctgatactaatattagaaatactgtcactttactgtatttggtgtttgtcttaagggctat

SEQ ID NO: 30484 - DNA, 120 bp, Artificial Sequence
  ENSG00000047365_85 (sequence is synthesized)
gtgaaagacatgatttactagattttcttccctgagttttctgttaaacagcttagaggcaaaattgtggtcagtttatggcaaatgtatagaattgtataatataaaattttgactagc

SEQ ID NO: 30485 - DNA, 120 bp, Artificial Sequence
  ENSG00000047365_86 (sequence is synthesized)
ctcatttgtgggtggattttcatgttttatcttgtatttgcttacttttcttaccttactcaatttattctatttaggtgtattgtacatttcttataaagccacctgaatttgcttttg

SEQ ID NO: 30486 - DNA, 120 bp, Artificial Sequence
  ENSG00000047365_87 (sequence is synthesized)
tgcttttggaacaatgtgacttagtatttaataactatgtcacttatagtgaaaattataagcctcttcataattttataaagtaccatggtatgtaactaataaaaaagtaataattaa

SEQ ID NO: 30487 - DNA, 120 bp, Artificial Sequence
  ENSG00000047365_88 (sequence is synthesized)
tcaaaactgcccacaacctcaattcagctcagtcccattggatcaggatcatcagcctcctctttgccagaagatggaaaggtatgaactgttctaacagcaagcgctagagcagtggtc

SEQ ID NO: 30488 - DNA, 120 bp, Artificial Sequence
  ENSG00000047365_89 (sequence is synthesized)
tgaaaacaagtgaacagtattatgataaagagttcttccatggaagcggaattgctggtttggaggatatgtgcatatttattcctgagattttgtcttctcctatttggaacccatata

SEQ ID NO: 30489 - DNA, 120 bp, Artificial Sequence
  ENSG00000047365_90 (sequence is synthesized)
ccatatgtgaagaatcccagcctaccttgctggagaaagatataacttgtgaagaagaaaatggatgtcacagccaactgccagacatctgaataaggtcaccttggatcactgagcccc

SEQ ID NO: 30490 - DNA, 120 bp, Artificial Sequence
  ENSG00000047365_91 (sequence is synthesized)
tctggagtgtgatggcaaaatcatggttcactgcaaccactacctctcaggctcaaggggtcctcccacctcagccttcctagtagctgggaccacaggtgtatgccaccacacccagga

SEQ ID NO: 30491 - DNA, 120 bp, Artificial Sequence
  ENSG00000047365_92 (sequence is synthesized)
atggtgatggtattcttttatccactttgagagaaactttgagaatgtgaacagccacaaatttagaagtttctttttttgctttgctatatacatggacaataatcctgtaccttgcct

SEQ ID NO: 30492 - DNA, 120 bp, Artificial Sequence
  ENSG00000047365_93 (sequence is synthesized)
gtgatcttccagaacacagattgggtttgttatcagttatattgatgggttgtcctcagatggttgaagactgaggctgcagggatgattgaaatctgtaggcggaagagacaactgcaa

SEQ ID NO: 30493 - DNA, 120 bp, Artificial Sequence
  ENSG00000047365_94 (sequence is synthesized)
ttcctggaggtgttagaactctgcagtgttttggaggtctggtgctgccatttatatttctcttccctggaactctttcttcataacagattttgaactaaaaataaagaaaatctccca

SEQ ID NO: 30494 - DNA, 120 bp, Artificial Sequence
  ENSG00000047365_95 (sequence is synthesized)
acagccagatgacagtagaatggccgagcatttttatcctttgaattagatgtttttggttctttcgacaattggtttttgtcatcctttactcagcctaaccaataataaatgtcagat

SEQ ID NO: 30495 - DNA, 120 bp, Artificial Sequence
  ENSG00000047365_96 (sequence is synthesized)
atcatagcaaccaaacaatgaattgagacctggaggtcttgggttgtaatttaaattcacataaaccaggccttttgtgcctattgcctaattcatggcataattattattagccgcctt

SEQ ID NO: 30496 - DNA, 120 bp, Artificial Sequence
  ENSG00000047365_97 (sequence is synthesized)
aggataaaaggaatacagactttatcccatacatgaaattatcagactttcactcattttaatagctagaatcttattttctttccttaagatgtatattttcttttaatgaccaggctc

SEQ ID NO: 30497 - DNA, 120 bp, Artificial Sequence
  ENSG00000047410_0 (sequence is synthesized)
cttcggtcgcgggcggtgaggtgctgttgctgaaacgctgccgctgagggtggactcgatttcccagggtcccgccgcgggagtctccggcgggcgggcgcgcgcgagccaccgagcgag

SEQ ID NO: 30498 - DNA, 120 bp, Artificial Sequence
  ENSG00000047410_1 (sequence is synthesized)
gtgatagaggcggcggcccaggcgtctgggtcctgctggtcttcgcctttcttctccgcttctaccccgtcggccgctgccactggggtccctggccccaccgacatggcggcggtgttg

SEQ ID NO: 30499 - DNA, 120 bp, Artificial Sequence
  ENSG00000047410_2 (sequence is synthesized)
cagcaagtcctggagcgcacggagctgaacaagctgcccaagtctgtccagaacaaacttgaaaagttccttgctgatcagcaatccgagatcgatggcctgaaggggcggcatgagaaa

SEQ ID NO: 30500 - DNA, 120 bp, Artificial Sequence
  ENSG00000047410_3 (sequence is synthesized)
tttaaggtggagagcgaacaacagtattttgaaatagaaaagaggttgtcccacagtcaggagagacttgtgaatgaaacccgagagtgtcaaagcttgcggcttgagctagagaaactc

SEQ ID NO: 30501 - DNA, 120 bp, Artificial Sequence
  ENSG00000047410_4 (sequence is synthesized)
aacaatcaactgaaggcactaactgagaaaaacaaagaacttgaaattgctcaggatcgcaatattgccattcagagccaatttacaagaacaaaggaagaattagaagctgagaaaaga

SEQ ID NO: 30502 - DNA, 120 bp, Artificial Sequence
  ENSG00000047410_5 (sequence is synthesized)
gacttaattagaaccaatgagagactatctcaagaacttgaatacttaacagaggatgttaaacgtctgaatgaaaaacttaaagaaagcaatacaacaaagggtgaacttcagttaaaa

SEQ ID NO: 30503 - DNA, 120 bp, Artificial Sequence
  ENSG00000047410_6 (sequence is synthesized)
ttggatgaacttcaagcttctgatgtttctgttaagtatcgagaaaaacgcttggagcaagaaaaggaattgctacatagtcagaatacatggctgaatacagagttgaaaaccaaaact

SEQ ID NO: 30504 - DNA, 120 bp, Artificial Sequence
  ENSG00000047410_7 (sequence is synthesized)
gatgaacttctggctcttggaagagaaaaagggaatgagattctagagcttaaatgtaatcttgaaaataaaaaagaagaggtttctagactggaagaacaaatgaatggcttaaaaaca

SEQ ID NO: 30505 - DNA, 120 bp, Artificial Sequence
  ENSG00000047410_8 (sequence is synthesized)
tcaaatgaacatcttcaaaagcatgtggaggatctgttgaccaaattaaaagaggccaaggaacaacaggccagtatggaagagaaattccacaatgaattaaatgcccacataaaactt

SEQ ID NO: 30506 - DNA, 120 bp, Artificial Sequence
  ENSG00000047410_9 (sequence is synthesized)
tctaatttgtacaagagtgccgctgatgactcagaagcaaagagcaatgaactaacccgggcagtagaggaactacacaaacttttgaaagaagctggtgaagccaacaaagcaatacaa

SEQ ID NO: 30507 - DNA, 120 bp, Artificial Sequence
  ENSG00000047410_10 (sequence is synthesized)
gatcatcttctagaggtggagcaatccaaagatcaaatggaaaaagaaatgcttgagaaaatagggagattggagaaggaattagagaatgcaaatgaccttctttctgccacaaaacgt

SEQ ID NO: 30508 - DNA, 120 bp, Artificial Sequence
  ENSG00000047410_11 (sequence is synthesized)
aaaggagccatattgtctgaagaagagcttgccgccatgtctcctactgcagcagctgtagctaagatagtgaaacctgggatgaaactaactgagctctataatgcttatgtggaaact

SEQ ID NO: 30509 - DNA, 120 bp, Artificial Sequence
  ENSG00000047410_12 (sequence is synthesized)
caggatcagttgcttttggagaaactagagaacaaaagaattaataagtacctagatgaaatagtgaaagaagtggaagccaaagcaccaattttgaaacgccagcgtgaggaatatgaa

SEQ ID NO: 30510 - DNA, 120 bp, Artificial Sequence
  ENSG00000047410_13 (sequence is synthesized)
cgtgcacagaaagctgtagcaagtttatctgttaagcttgaacaagctatgaaggagattcagcgattgcaggaggacactgataaagccaacaagcaatcatctgtacttgagagagat

SEQ ID NO: 30511 - DNA, 120 bp, Artificial Sequence
  ENSG00000047410_14 (sequence is synthesized)
aatcgaagaatggaaatacaagtaaaagatctttcacaacagattagagtgcttttgatggaacttgaagaagcaaggggtaaccacgtaattcgtgatgaggaagtaagctctgctgat

SEQ ID NO: 30512 - DNA, 120 bp, Artificial Sequence
  ENSG00000047410_15 (sequence is synthesized)
ataagtagttcatctgaggtaatatcacagcatctagtatcttacagaaatattgaagagcttcaacaacaaaatcaacgtctcttagtggcccttagagagcttggggaaaccagagaa

SEQ ID NO: 30513 - DNA, 120 bp, Artificial Sequence
  ENSG00000047410_16 (sequence is synthesized)
agagaagaacaagaaacaacttcatccaaaatcactgagcttcagctcaaacttgagagtgcccttactgaactagaacaactccgcaaatcacgacagcatcaaatgcagcttgttgat

SEQ ID NO: 30514 - DNA, 120 bp, Artificial Sequence
  ENSG00000047410_17 (sequence is synthesized)
tccatagttcgtcagcgtgatatgtaccgtattttattgtcacaaacaacaggagttgccattccattacatgcttcaagcttagatgatgtttctcttgcatcaactccaaaacgtcca

SEQ ID NO: 30515 - DNA, 120 bp, Artificial Sequence
  ENSG00000047410_18 (sequence is synthesized)
agtacatcacagactgtttccactcctgctccagtacctgttattgaatcaacagaggctatagaggctaaggctgcccttaaacagttgcaggaaatttttgagaactacaaaaaagaa

SEQ ID NO: 30516 - DNA, 120 bp, Artificial Sequence
  ENSG00000047410_19 (sequence is synthesized)
aaagcagaaaatgaaaaaatacaaaatgagcagcttgagaaacttcaagaacaagttacagatttgcgatcacaaaataccaaaatttctacccagctagattttgcttctaaacgttat

SEQ ID NO: 30517 - DNA, 120 bp, Artificial Sequence
  ENSG00000047410_20 (sequence is synthesized)
gaaatgctgcaagataatgttgaaggatatcgtcgagaaataacatcacttcatgagagaaatcagaaactcactgccacaactcaaaagcaagaacagattatcaatacgatgactcaa

SEQ ID NO: 30518 - DNA, 120 bp, Artificial Sequence
  ENSG00000047410_21 (sequence is synthesized)
gatttgagaggagcaaatgagaagctagctgtcgcagaagtaagagcagaaaatttgaagaaggaaaaggaaatgcttaaattgtctgaagttcgtctttctcagcaaagagagtctttg

SEQ ID NO: 30519 - DNA, 120 bp, Artificial Sequence
  ENSG00000047410_22 (sequence is synthesized)
ttagctgaacaaagggggcaaaacttactgctaactaatctgcaaacaattcagggaatactggagcgatctgaaacagaaaccaaacaaaggcttagtagccagatagaaaaactggaa

SEQ ID NO: 30520 - DNA, 120 bp, Artificial Sequence
  ENSG00000047410_23 (sequence is synthesized)
catgagatctctcatctaaagaagaagttggaaaatgaggtggaacaaaggcatacacttactagaaatctagatgttcaacttttagatacaaagagacaactggatacagagacaaat

SEQ ID NO: 30521 - DNA, 120 bp, Artificial Sequence
  ENSG00000047410_24 (sequence is synthesized)
cttcatcttaacacaaaagaactattaaaaaatgctcaaaaagaaattgccacattgaaacagcacctcagtaatatggaagtccaagttgcttctcagtcttcacagagaactggtaaa

SEQ ID NO: 30522 - DNA, 120 bp, Artificial Sequence
  ENSG00000047410_25 (sequence is synthesized)
ggtcagcctagcaacaaagaagatgtggatgatcttgtgagtcagctaagacagacagaagagcaggtgaatgacttaaaggagagactcaaaacaagtacgagcaatgtggaacaatat

SEQ ID NO: 30523 - DNA, 120 bp, Artificial Sequence
  ENSG00000047410_26 (sequence is synthesized)
caagcaatggttactagtttagaagaatccctgaacaaggaaaaacaggtgacagaagaagtgcgtaagaatattgaagttcgtttaaaagagtcagctgaatttcagacacagttggaa

SEQ ID NO: 30524 - DNA, 120 bp, Artificial Sequence
  ENSG00000047410_27 (sequence is synthesized)
aagaagttgatggaagtagagaaggaaaaacaagaacttcaggatgataaaagaagagccatagagagcatggaacaacagttatctgaattgaagaaaacactttctagtgttcagaat

SEQ ID NO: 30525 - DNA, 120 bp, Artificial Sequence
  ENSG00000047410_28 (sequence is synthesized)
gaagtacaagaagctcttcagagagcaagcacagctttaagtaatgagcagcaagccagacgtgactgtcaggaacaagctaaaatagctgtggaagctcagaataagtatgagagagaa

SEQ ID NO: 30526 - DNA, 120 bp, Artificial Sequence
  ENSG00000047410_29 (sequence is synthesized)
ttgatgctgcatgctgctgatgttgaagctctacaagctgcgaaggagcaggtttcaaaaatggcatcagtccgtcagcatttggaagaaacaacacagaaagcagaatcacagttgttg

SEQ ID NO: 30527 - DNA, 120 bp, Artificial Sequence
  ENSG00000047410_30 (sequence is synthesized)
gagtgtaaagcatcttgggaggaaagagagagaatgttaaaggatgaagtttccaaatgtgtatgtcgctgtgaagatctggagaaacaaaacagattacttcatgatcagatcgaaaaa

SEQ ID NO: 30528 - DNA, 120 bp, Artificial Sequence
  ENSG00000047410_31 (sequence is synthesized)
ttaagtgacaaggtcgttgcctctgtgaaggaaggtgtacaaggtccactgaatgtatctctcagtgaagaaggaaaatctcaagaacaaattttggaaattctcagatttatacgacga

SEQ ID NO: 30529 - DNA, 120 bp, Artificial Sequence
  ENSG00000047410_32 (sequence is synthesized)
gaaaaagaaattgctgaaactaggtttgaggtggctcaggttgagagtctgcgttatcgacaaagggttgaacttttagaaagagagctgcaggaactgcaagatagtctaaatgctgaa

SEQ ID NO: 30530 - DNA, 120 bp, Artificial Sequence
  ENSG00000047410_33 (sequence is synthesized)
agggagaaagtccaggtaactgcaaaaacaatggctcagcatgaagaactgatgaagaaaactgaaacaatgaatgtagttatggagaccaataaaatgctaagagaagagaaggagaga

SEQ ID NO: 30531 - DNA, 120 bp, Artificial Sequence
  ENSG00000047410_34 (sequence is synthesized)
ctagaacaggatctacagcaaatgcaagcaaaggtgaggaaactggagttagatattttacccttacaagaagcaaatgctgagctgagtgagaaaagcggtatgttgcaggcagagaag

SEQ ID NO: 30532 - DNA, 120 bp, Artificial Sequence
  ENSG00000047410_35 (sequence is synthesized)
aagctcttagaagaggatgtcaaacgttggaaagcacgtaaccagcatctagtaagtcaacagaaagatccagatacagaagaatatcggaagctcctttctgaaaaggaagttcatact

SEQ ID NO: 30533 - DNA, 120 bp, Artificial Sequence
  ENSG00000047410_36 (sequence is synthesized)
aagcgtattcaacaattgacagaagaaattggtagacttaaagctgaaattgcaagatcaaatgcatctttgactaacaaccagaacttaattcagagtctgaaggaagatctaaataaa

SEQ ID NO: 30534 - DNA, 120 bp, Artificial Sequence
  ENSG00000047410_37 (sequence is synthesized)
gtaagaactgaaaaggaaaccatccagaaggacttagatgccaaaataattgatatccaagaaaaagtcaaaactattactcaagttaagaaaattggacgtaggtacaagactcaatat

SEQ ID NO: 30535 - DNA, 120 bp, Artificial Sequence
  ENSG00000047410_38 (sequence is synthesized)
gaagaacttaaagcacaacaggataaggttatggagacatcggctcagtcctctggagaccatcaggagcagcatgtttcagtccaggaaatgcaggaactcaaagaaacgctcaaccaa

SEQ ID NO: 30536 - DNA, 120 bp, Artificial Sequence
  ENSG00000047410_39 (sequence is synthesized)
gctgaaacaaaatcaaaatcacttgaaagtcaagtagagaatctgcagaagacattatctgaaaaagagacagaagcaagaaatctccaggaacagactgtgcaacttcagtctgaactt

SEQ ID NO: 30537 - DNA, 120 bp, Artificial Sequence
  ENSG00000047410_40 (sequence is synthesized)
caggaggagcagctccgacaacagataactgaaaaggaagaaaaaaccagaaaggctattgtagcagcaaagtcaaaaattgcacacttagctggtgtaaaagatcagctaactaaagaa

SEQ ID NO: 30538 - DNA, 120 bp, Artificial Sequence
  ENSG00000047410_41 (sequence is synthesized)
aatgaggagcttaaacaaaggaatggagccttagatcagcagaaagatgaattggatgttcgcattactgcgctaaagtcccaatatgaaggtcgaattagtcgcttggaaagagaactc

SEQ ID NO: 30539 - DNA, 120 bp, Artificial Sequence
  ENSG00000047410_42 (sequence is synthesized)
agggagcatcaagagagacaccttgagcagagagatgagcctcaagaaccttctaataaggtccctgaacagcagagacagatcacattgaaaacaactccagcttctggtgaaagagga

SEQ ID NO: 30540 - DNA, 120 bp, Artificial Sequence
  ENSG00000047410_43 (sequence is synthesized)
attgccagcacatcagacccaccaacagccaatatcaagccaactcctgttgtgtctactccaagtaaagtgacagctgcagctatggctggaaataagtcaacacccagggctagtatc

SEQ ID NO: 30541 - DNA, 120 bp, Artificial Sequence
  ENSG00000047410_44 (sequence is synthesized)
cgcccaatggttacacctgcaactgttacaaatcccactactaccccaacagctacagtgatgcccactacacaagtggaatcacaggaagctatgcagtcagaagggcctgtggaacat

SEQ ID NO: 30542 - DNA, 120 bp, Artificial Sequence
  ENSG00000047410_45 (sequence is synthesized)
gttccagtttttggaagcacaagtggatccgttcgttctactagtcctaatgtccagccttctatctctcaacctattttaactgttcagcaacaaacacaggctacagcttttgtgcaa

SEQ ID NO: 30543 - DNA, 120 bp, Artificial Sequence
  ENSG00000047410_46 (sequence is synthesized)
cccactcaacagagtcatcctcagattgagcctgccaatcaagagttatcttcaaacatagtagaggttgttcagagttcaccagttgagcggccttctacttccacagcagtatttggc

SEQ ID NO: 30544 - DNA, 120 bp, Artificial Sequence
  ENSG00000047410_47 (sequence is synthesized)
acagtttcggctacccccagttcttctttgccaaagcgtacacgtgaagaggaagaggatagcaccatagaagcatcagaccaagtctctgatgatacagtggaaatgcctcttccaaag

SEQ ID NO: 30545 - DNA, 120 bp, Artificial Sequence
  ENSG00000047410_48 (sequence is synthesized)
aagttgaaaagtgtcacacctgtaggaactgaggaagaagttatggcagaagaaagtactgatggagaggtagagactcaggtatacaaccaggattctcaagattccattggagaagga

SEQ ID NO: 30546 - DNA, 120 bp, Artificial Sequence
  ENSG00000047410_49 (sequence is synthesized)
gttacccagggagattatacacctatggaagacagtgaagaaacctctcagtctctacaaatagatcttgggccacttcaatcagatcagcagacgacaacttcatcccaggatggtcaa

SEQ ID NO: 30547 - DNA, 120 bp, Artificial Sequence
  ENSG00000047410_50 (sequence is synthesized)
ggcaaaggagatgatgtcattgtaattgacagtgatgatgaagaagaggatgatgatgaaaatgatggagaacatgaggattatgaagaggatgaggaagatgatgatgatgatgaagat

SEQ ID NO: 30548 - DNA, 120 bp, Artificial Sequence
  ENSG00000047410_51 (sequence is synthesized)
gacacagggatgggagatgagggtgaagatagtaatgaaggaactggtagtgccgatggcaatgatggttatgaagctgatgatgctgagggtggtgatgggactgatccaggtacagaa

SEQ ID NO: 30549 - DNA, 120 bp, Artificial Sequence
  ENSG00000047410_52 (sequence is synthesized)
acagaagaaagtatgggtggaggtgaaggtaatcacagagctgctgattctcaaaacagtggtgaaggaaatacaggtgctgcagaatcttctttttctcaggaggtttctagagaacaa

SEQ ID NO: 30550 - DNA, 120 bp, Artificial Sequence
  ENSG00000047410_53 (sequence is synthesized)
cagccatcatcagcatctgaaagacaggcccctcgagcacctcagtcaccgagacgcccaccacatccacttcccccaagactgaccattcatgccccacctcaggagttgggaccacca

SEQ ID NO: 30551 - DNA, 120 bp, Artificial Sequence
  ENSG00000047410_54 (sequence is synthesized)
gttcagagaattcagatgacccgaaggcagtctgtaggacgtggccttcagttgactccaggaataggtggcatgcaacagcatttttttgatgatgaagacagaacagttccaagtact

SEQ ID NO: 30552 - DNA, 120 bp, Artificial Sequence
  ENSG00000047410_55 (sequence is synthesized)
ccaactcttgtggtgccacatcgtactgatggatttgctgaagcaattcattcgccgcaggttgctggtgtccctagattccggtttgggccacctgaagatatgccacaaacaagttct

SEQ ID NO: 30553 - DNA, 120 bp, Artificial Sequence
  ENSG00000047410_56 (sequence is synthesized)
agtcactctgatcttggccagcttgcttctcaaggaggtttaggaatgtatgaaacacccctgttcctagctcatgaagaagagtcaggtggccgaagtgttcccactactccactacaa

SEQ ID NO: 30554 - DNA, 120 bp, Artificial Sequence
  ENSG00000047410_57 (sequence is synthesized)
gtagcagccccagtgactgtatttactgagagcaccacctctgatgcttcggaacatgcctctcaatctgttccaatggtgactacatccactggcactttatctacaacaaatgaaaca

SEQ ID NO: 30555 - DNA, 120 bp, Artificial Sequence
  ENSG00000047410_58 (sequence is synthesized)
gcaacaggtgatgatggagatgaagtatttgtggaggcagaatctgaaggtattagttcagaagcaggcctagaaattgatagccagcaggaagaagagccggttcaagcatctgatgag

SEQ ID NO: 30556 - DNA, 120 bp, Artificial Sequence
  ENSG00000047410_59 (sequence is synthesized)
tcagatctcccctccaccagccaggatcctccttctagctcatctgtagatactagtagtagtcaaccaaagcctttcagacgagtaagacttcagacaacattgagacaaggtgtccgt

SEQ ID NO: 30557 - DNA, 120 bp, Artificial Sequence
  ENSG00000047410_60 (sequence is synthesized)
ggtcgtcagtttaacagacagagaggtgtgagccatgcaatgggagggagaggaggaataaacagaggaaatattaattaaatggtctgtaaacaataacaactgtgaataagattatca

SEQ ID NO: 30558 - DNA, 120 bp, Artificial Sequence
  ENSG00000047410_61 (sequence is synthesized)
ttgtcaagtttaaaaacatttttatatataaactggtatactcatgtcaatattctttattaataaaatgtttttcagtgtcaaaatttattattcatttcttcattagttgactcctcc

SEQ ID NO: 30559 - DNA, 120 bp, Artificial Sequence
  ENSG00000047410_62 (sequence is synthesized)
cttcattagttgactcctcctttgctcatcagtctaaggacagttgtaccagactttggataaggtctgcccagaacgagtagtaattgctcttgctgttctactaggcacatcaatgtt

SEQ ID NO: 30560 - DNA, 120 bp, Artificial Sequence
  ENSG00000047410_63 (sequence is synthesized)
atagtattgatctaaatggaagagaaaacatttttttagttaaaaagaaaacaatgcccaaactaaaaaataacttatgttgactattatgctcaaagacaatgtttatcattttaatag

SEQ ID NO: 30561 - DNA, 120 bp, Artificial Sequence
  ENSG00000047410_64 (sequence is synthesized)
agatgtttttactaattaatttgaactttataacaaaaagaaaaacaattgcctagacttttcagcttttttgatgtttcaaaagattgacatttcaccatctttttgtaaaatcaggtt

SEQ ID NO: 30562 - DNA, 120 bp, Artificial Sequence
  ENSG00000047410_65 (sequence is synthesized)
cagctctcctttatgaagtaaacattaaagagtaaccaagtttgaaaaataatttacttggggttattccttttaaaaaatacatgccaatgtcattcatattatgaaattacaggcaga

SEQ ID NO: 30563 - DNA, 120 bp, Artificial Sequence
  ENSG00000047410_66 (sequence is synthesized)
ataacttagatttctgggcatttcaaagaaaagcatcctgagtaatataatttaattaataaaattagtttctcaggaacttctttctgatcttacagactctgcagtgatgcaaatcat

SEQ ID NO: 30564 - DNA, 120 bp, Artificial Sequence
  ENSG00000047410_67 (sequence is synthesized)
tataaccttgtgccaaacaaggtatctgttaaatgccacaaatgatagaagtaaaatactattgtcagtagcaagtttactctagtaactggatgttttatcgtaatctcatgaaggtta

SEQ ID NO: 30565 - DNA, 120 bp, Artificial Sequence
  ENSG00000047410_68 (sequence is synthesized)
gagcagaattgaattgcagtgccatcattttaattgaaattaaagcaaaagtcttaactcttttccacagcaattagaataagtaccgtagtgtaacttctcacattcagtcatcattgc

SEQ ID NO: 30566 - DNA, 120 bp, Artificial Sequence
  ENSG00000047410_69 (sequence is synthesized)
agccagcatttttactttatcttcatgttttcacaaatgatatcacctccttgggaaactgttagttaataccttacctttagaaaaggcatagtaatcatagccgtcaggttttctgat

SEQ ID NO: 30567 - DNA, 120 bp, Artificial Sequence
  ENSG00000047410_70 (sequence is synthesized)
gttgggcagtgatatagctgaggtaaccacatttggaagtcctctccacagtatactcactttaacttcattatgaaggacacctgtaagtggcatgtttaataaaagataccagattaa

SEQ ID NO: 30568 - DNA, 120 bp, Artificial Sequence
  ENSG00000047410_71 (sequence is synthesized)
aaggcaatgtactatcttggaaagagccagacatctgagttttaatctcagttttagccctctgatgtagaactattgagggttatagactggtatataatgttcttggtaagaagtact

SEQ ID NO: 30569 - DNA, 120 bp, Artificial Sequence
  ENSG00000047410_72 (sequence is synthesized)
tgataaatagtattggttataactaacaaacctgaacaaactgctttacttacccacaaggaaaaagaaagtattggtctttggttattcactaaggcaagtggatgagtttttcatcag

SEQ ID NO: 30570 - DNA, 120 bp, Artificial Sequence
  ENSG00000047410_73 (sequence is synthesized)
taagcttaaattattagggctgtttgatcagtatccatatttcataagccttactgtataagaaactgtattacatctacttatgtttaaggatttttttaacacaataaaaatgttacc

SEQ ID NO: 30571 - DNA, 120 bp, Artificial Sequence
  ENSG00000047410_74 (sequence is synthesized)
tttgtcttgataagccagtctggcaggtgaatattgaattctgatggtgtgtgtttgagaaggtcctatagcacgttcaaagcgacgtctcctaacctgtgtcgtttctccatacactgg

SEQ ID NO: 30572 - DNA, 120 bp, Artificial Sequence
  ENSG00000047410_75 (sequence is synthesized)
ataatttagagcaggccttcttccagggcacttctgtacaggttcctgtttataaatatactgctgaatgctgccacctgttatgtattagaatatcacatggaaaatgaaaattaattt

SEQ ID NO: 30573 - DNA, 120 bp, Artificial Sequence
  ENSG00000047410_76 (sequence is synthesized)
taataccctcagaaaaggtggaaaacaacttttacaatgtataggaaacagttttgttctcatttttcatataatatattgatattaataatggctattagtcaagggtattataaaaat

SEQ ID NO: 30574 - DNA, 120 bp, Artificial Sequence
  ENSG00000047410_77 (sequence is synthesized)
aattattaaactgaaatacttgttgaatgaatagatgcagcaaattacatagttatatatttaatttcaattgaaagtgacaagtgctcagtttggcagcacatatactaaaactggaat

SEQ ID NO: 30575 - DNA, 120 bp, Artificial Sequence
  ENSG00000047410_78 (sequence is synthesized)
gatacagagattagcatggcccttgtgcaaggatgacatgcacatttgtgaagcgaaagtaaatgacattctatcagtgacctgaaaactcaaatgaattgtgacttgcctgtgaagaaa

SEQ ID NO: 30576 - DNA, 120 bp, Artificial Sequence
  ENSG00000047410_79 (sequence is synthesized)
tgaaaataaaaattgagggcaataagaatactaccctcaatattgatttttttcactgaaaatatttgatttcagccattaaagatatcttttgacagtaaagtcaataataaatgaaaa

SEQ ID NO: 30577 - DNA, 120 bp, Artificial Sequence
  ENSG00000047410_80 (sequence is synthesized)
cttgttaaatcaaaagagaagcactcatttatatctctaccatttaacgtaatgtaaaatttaacttgaagtaagcattcttctaaacttgtaaattcattaagcatttgttaaacacta

SEQ ID NO: 30578 - DNA, 120 bp, Artificial Sequence
  ENSG00000047410_81 (sequence is synthesized)
atatagtatagtgcttaaaagtaaaggctctgtaaccaaactgcctggtttcagattctagcttcataccattagctgtggccttgggtacattgtttaacttccctgctcttagtttct

SEQ ID NO: 30579 - DNA, 120 bp, Artificial Sequence
  ENSG00000047410_82 (sequence is synthesized)
tcatctgtaatatttggataataatgaggtttaattgagtttgtgcacatgaagcatttagaagcatgtctggtatgtagtgggtgcttaataaattccagctatcttaatttattatag

SEQ ID NO: 30580 - DNA, 120 bp, Artificial Sequence
  ENSG00000047410_83 (sequence is synthesized)
ttatggattatacgtgtggatagtcattctaggataaagtgatttaaactgctacagaatatctttctcacccaaggagcaaaaagtagtaaaaactaacaaccaaaggaaaagaagctg

SEQ ID NO: 30581 - DNA, 120 bp, Artificial Sequence
  ENSG00000047410_84 (sequence is synthesized)
tggtagtgaaatggatgataataagacaagcttgactccttaccccacactaccacccaaagcttattgttgagttacttcattcttaggagctacagtaatatacccccacctctagaa

SEQ ID NO: 30582 - DNA, 120 bp, Artificial Sequence
  ENSG00000047410_85 (sequence is synthesized)
ggaaggaaattaagatcttaaaacatttatcttcttttaactgatgagtagtcaaaatgactgttaagaagaaaccattggacagggaaaagtaaataatgaattttatgggatttatgt

SEQ ID NO: 30583 - DNA, 120 bp, Artificial Sequence
  ENSG00000047410_86 (sequence is synthesized)
gttcagcaaaagctaaaggttccagaattatatcctgtttaattcaaatgtatctcaccatggaaataatagagcctccagttcaatagagttaatacttggaggaaaagggacagaatc

SEQ ID NO: 30584 - DNA, 120 bp, Artificial Sequence
  ENSG00000047410_87 (sequence is synthesized)
agagtctctaacaaagactgcatattgtttcagtcttttccgcttcattttttattcctttgggctatagaaagtaaatactagaaaatgcccgcctacgaatgagttcatagggggaaa

SEQ ID NO: 30585 - DNA, 120 bp, Artificial Sequence
  ENSG00000047410_88 (sequence is synthesized)
tccgtctcaaaaaaaaaaaaaaattataatagtaatgtaatgtctgtctaagcatgaacagtgtagcatggcaaccatgaaatatgctatagctttaaaaacagtgggggaagaaagtaa

SEQ ID NO: 30586 - DNA, 120 bp, Artificial Sequence
  ENSG00000047410_89 (sequence is synthesized)
tgggggaagaaagtaataccaagtgcagaagatggataattataacctatgagaaggaaaaaattcttcacagataattcagtaaaatttctcatggccaaagtgatgaaacaatggatc

SEQ ID NO: 30587 - DNA, 120 bp, Artificial Sequence
  ENSG00000047410_90 (sequence is synthesized)
aaaatgagagatttctgaacaagagggaataaactgaggattagaataacattttagaactaataaatttagtgcagcaaggaaaaaaagatacagaaaggtaaatagagatttggatta

SEQ ID NO: 30588 - DNA, 120 bp, Artificial Sequence
  ENSG00000047410_91 (sequence is synthesized)
atgtttttacctaatgttaatactttgttggtgggatttgtagcatcttttcacttttgtctttgtaattcttgtatttgtttaaagtctgcagttcgcatgcctcacagaaaagtaaac

SEQ ID NO: 30589 - DNA, 120 bp, Artificial Sequence
  ENSG00000047410_92 (sequence is synthesized)
gtgaactttcaaaaattttagttctaaaagttgaaacttaaatcctctttattttgtcatagggaggatttgagctcataggaacaggtagactttcaactattgttagatgttggtatg

SEQ ID NO: 30590 - DNA, 120 bp, Artificial Sequence
  ENSG00000047410_93 (sequence is synthesized)
ccttctgggcgccatagagagcgtggcggtatcccggagcctgccgtccggccctaccgggaccgatgccctctagtggctcagtgtccagaagccgccaacgaggacgatccatggcat

SEQ ID NO: 30591 - DNA, 120 bp, Artificial Sequence
  ENSG00000047410_94 (sequence is synthesized)
atttttattagccttttttgaattgaatatctctggtattttctaaactagaattgcacttaattctaatatataaatttatttattgaattggtaaaaagagattggcccctgttctag

SEQ ID NO: 30592 - DNA, 120 bp, Artificial Sequence
  ENSG00000047410_95 (sequence is synthesized)
ctttgtgactgttgtgctctcataaaaagtctactatatttatgattgttaggtgctgtcattatactcttttctgcctcattgggctgctgtaagatgcaaacattttgtaacccttac

SEQ ID NO: 30593 - DNA, 120 bp, Artificial Sequence
  ENSG00000047457_0 (sequence is synthesized)
acttcatttcttctcaggctccaagaaggggaaaaaaatgaagattttgatacttggtatttttctgtttttatgtagtaccccagcctgggcgaaagaaaagcattattacattggaat

SEQ ID NO: 30594 - DNA, 120 bp, Artificial Sequence
  ENSG00000047457_1 (sequence is synthesized)
tattgaaacgacttgggattatgcctctgaccatggggaaaagaaacttatttctgttgacacggaacattccaatatctatcttcaaaatggcccagatagaattgggagactatataa

SEQ ID NO: 30595 - DNA, 120 bp, Artificial Sequence
  ENSG00000047457_2 (sequence is synthesized)
gaaggccctttatcttcagtacacagatgaaacctttaggacaactatagaaaaaccggtctggcttgggtttttaggccctattatcaaagctgaaactggagataaagtttatgtaca

SEQ ID NO: 30596 - DNA, 120 bp, Artificial Sequence
  ENSG00000047457_3 (sequence is synthesized)
cttaaaaaaccttgcctctaggccctacacctttcattcacatggaataacttactataaggaacatgagggggccatctaccctgataacaccacagattttcaaagagcagatgacaa

SEQ ID NO: 30597 - DNA, 120 bp, Artificial Sequence
  ENSG00000047457_4 (sequence is synthesized)
agtatatccaggagagcagtatacatacatgttgcttgccactgaagaacaaagtcctggggaaggagatggcaattgtgtgactaggatttaccattcccacattgatgctccaaaaga

SEQ ID NO: 30598 - DNA, 120 bp, Artificial Sequence
  ENSG00000047457_5 (sequence is synthesized)
tattgcctcaggactcatcggacctttaataatctgtaaaaaagattctctagataaagaaaaagaaaaacatattgaccgagaatttgtggtgatgttttctgtggtggatgaaaattt

SEQ ID NO: 30599 - DNA, 120 bp, Artificial Sequence
  ENSG00000047457_6 (sequence is synthesized)
cagctggtacctagaagacaacattaaaacctactgctcagaaccagagaaagttgacaaagacaacgaagacttccaggagagtaacagaatgtattctgtgaatggatacacttttgg

SEQ ID NO: 30600 - DNA, 120 bp, Artificial Sequence
  ENSG00000047457_7 (sequence is synthesized)
aagtctcccaggactctccatgtgtgctgaagacagagtaaaatggtacctttttggtatgggtaatgaagttgatgtgcacgcagctttctttcacgggcaagcactgactaacaagaa

SEQ ID NO: 30601 - DNA, 120 bp, Artificial Sequence
  ENSG00000047457_8 (sequence is synthesized)
ctaccgtattgacacaatcaacctctttcctgctaccctgtttgatgcttatatggtggcccagaaccctggagaatggatgctcagctgtcagaatctaaaccatctgaaagccggttt

SEQ ID NO: 30602 - DNA, 120 bp, Artificial Sequence
  ENSG00000047457_9 (sequence is synthesized)
gcaagcctttttccaggtccaggagtgtaacaagtcttcatcaaaggataatatccgtgggaagcatgttagacactactacattgccgctgaggaaatcatctggaactatgctccctc

SEQ ID NO: 30603 - DNA, 120 bp, Artificial Sequence
  ENSG00000047457_10 (sequence is synthesized)
tggtatagacatcttcactaaagaaaacttaacagcacctggaagtgactcagcggtgttttttgaacaaggtaccacaagaattggaggctcttataaaaagctggtttatcgtgagta

SEQ ID NO: 30604 - DNA, 120 bp, Artificial Sequence
  ENSG00000047457_11 (sequence is synthesized)
cacagatgcctccttcacaaatcgaaaggagagaggccctgaagaagagcatcttggcatcctgggtcctgtcatttgggcagaggtgggagacaccatcagagtaaccttccataacaa

SEQ ID NO: 30605 - DNA, 120 bp, Artificial Sequence
  ENSG00000047457_12 (sequence is synthesized)
aggagcatatcccctcagtattgagccgattggggtgagattcaataagaacaacgagggcacatactattccccaaattacaacccccagagcagaagtgtgcctccttcagcctccca

SEQ ID NO: 30606 - DNA, 120 bp, Artificial Sequence
  ENSG00000047457_13 (sequence is synthesized)
tgtggcacccacagaaacattcacctatgaatggactgtccccaaagaagtaggacccactaatgcagatcctgtgtgtctagctaagatgtattattctgctgtggaacccactaaaga

SEQ ID NO: 30607 - DNA, 120 bp, Artificial Sequence
  ENSG00000047457_14 (sequence is synthesized)
tatattcactgggcttattgggccaatgaaaatatgcaagaaaggaagtttacatgcaaatgggagacagaaagatgtagacaaggaattctatttgtttcctacagtatttgatgagaa

SEQ ID NO: 30608 - DNA, 120 bp, Artificial Sequence
  ENSG00000047457_15 (sequence is synthesized)
tgagagtttactcctggaagataatattagaatgtttacaactgcacctgatcaggtggataaggaagatgaagactttcaggaatctaataaaatgcactccatgaatggattcatgta

SEQ ID NO: 30609 - DNA, 120 bp, Artificial Sequence
  ENSG00000047457_16 (sequence is synthesized)
tgggaatcagccgggtctcactatgtgcaaaggagattcggtcgtgtggtacttattcagcgccggaaatgaggccgatgtacatggaatatacttttcaggaaacacatatctgtggag

SEQ ID NO: 30610 - DNA, 120 bp, Artificial Sequence
  ENSG00000047457_17 (sequence is synthesized)
aggagaacggagagacacagcaaacctcttccctcaaacaagtcttacgctccacatgtggcctgacacagaggggacttttaatgttgaatgccttacaactgatcattacacaggcgg

SEQ ID NO: 30611 - DNA, 120 bp, Artificial Sequence
  ENSG00000047457_18 (sequence is synthesized)
atatactgtgaaccaatgcaggcggcagtctgaggattccaccttctacctgggagagaggacatactatatcgcagcagtggaggtggaatgggattattccccacaaagggagtggga

SEQ ID NO: 30612 - DNA, 120 bp, Artificial Sequence
  ENSG00000047457_19 (sequence is synthesized)
aaaggagctgcatcatttacaagagcagaatgtttcaaatgcatttttagataagggagagttttacataggctcaaagtacaagaaagttgtgtatcggcagtatactgatagcacatt

SEQ ID NO: 30613 - DNA, 120 bp, Artificial Sequence
  ENSG00000047457_20 (sequence is synthesized)
ccgtgttccagtggagagaaaagctgaagaagaacatctgggaattctaggtccacaacttcatgcagatgttggagacaaagtcaaaattatctttaaaaacatggccacaaggcccta

SEQ ID NO: 30614 - DNA, 120 bp, Artificial Sequence
  ENSG00000047457_21 (sequence is synthesized)
ctcaatacatgcccatggggtacaaacagagagttctacagttactccaacattaccaggtgaaactctcacttacgtatggaaaatcccagaaagatctggagctggaacagaggattc

SEQ ID NO: 30615 - DNA, 120 bp, Artificial Sequence
  ENSG00000047457_22 (sequence is synthesized)
tgcttgtattccatgggcttattattcaactgtggatcaagttaaggacctctacagtggattaattggccccctgattgtttgtcgaagaccttacttgaaagtattcaatcccagaag

SEQ ID NO: 30616 - DNA, 120 bp, Artificial Sequence
  ENSG00000047457_23 (sequence is synthesized)
gaaactggaatttgcccttctgtttctagtttttgatgagaatgaatcttggtacttagatgacaacatcaaaacatactctgatcaccccgagaaagtaaacaaagatgatgaggaatt

SEQ ID NO: 30617 - DNA, 120 bp, Artificial Sequence
  ENSG00000047457_24 (sequence is synthesized)
catagaaagcaataaaatgcatgctattaatggaagaatgtttggaaacctacaaggcctcacaatgcacgtgggagatgaagtcaactggtatctgatgggaatgggcaatgaaataga

SEQ ID NO: 30618 - DNA, 120 bp, Artificial Sequence
  ENSG00000047457_25 (sequence is synthesized)
cttacacactgtacattttcacggccatagcttccaatacaagcacaggggagtttatagttctgatgtctttgacattttccctggaacataccaaaccctagaaatgtttccaagaac

SEQ ID NO: 30619 - DNA, 120 bp, Artificial Sequence
  ENSG00000047457_26 (sequence is synthesized)
acctggaatttggttactccactgccatgtgaccgaccacattcatgctggaatggaaaccacttacaccgttctacaaaatgaagacaccaaatctggctgaatgaaataaattggtga

SEQ ID NO: 30620 - DNA, 120 bp, Artificial Sequence
  ENSG00000047457_27 (sequence is synthesized)
taagtggaaaaaagagaaaaaccaatgattcataacaatgtatgtgaaagtgtaaaatagaatgttactttggaatgactataaacattaaaagaagactggaagcatacaactttgtac

SEQ ID NO: 30621 - DNA, 120 bp, Artificial Sequence
  ENSG00000047457_28 (sequence is synthesized)
atttgtgggggaaaactattaattttttgcaaatggaaagatcaacagactatataatgatacatgactgacacttgtacactaggtaataaaactgattcatacagtctaatgatatca

SEQ ID NO: 30622 - DNA, 120 bp, Artificial Sequence
  ENSG00000047457_29 (sequence is synthesized)
ccgctgttagggttttataaaactgcatttaaaaaaagatctatgaccagatattctcctgggtgctcctcaaaggaacactattaaggttcattgaaatgttttcaatcattgccttcc

SEQ ID NO: 30623 - DNA, 120 bp, Artificial Sequence
  ENSG00000047457_30 (sequence is synthesized)
cattgatccttctaacatgctgttgacatcacacctaatattcagagggaatgggcaaggtatgagggaaggaaataaaaaataaaataaataaaatagaatgacacaaatttgagtttt

SEQ ID NO: 30624 - DNA, 120 bp, Artificial Sequence
  ENSG00000047457_31 (sequence is synthesized)
gtgaacccctgaacagatggtcttaaggacgttatctggaactggagaaaagcagagttgagagacaattctatagattaaatcctggtaaggacaaacattgccattagaagaaaagct

SEQ ID NO: 30625 - DNA, 120 bp, Artificial Sequence
  ENSG00000047457_32 (sequence is synthesized)
tcaaaatagacctgtggcagatgtcacatgagtagaatttctgcccagccttaactgcattcagaggataatatcaatgaactaaacttgaactaaaaattttttaaacaaaaagttata

SEQ ID NO: 30626 - DNA, 120 bp, Artificial Sequence
  ENSG00000047457_33 (sequence is synthesized)
aatgaagacacatggttgtgaatacaatgatgtatttctttattttcacatacactctagctaaaagagcaagagtacacatcaacaaaaatggaaacaaggctttggctgaaaaaaaca

SEQ ID NO: 30627 - DNA, 120 bp, Artificial Sequence
  ENSG00000047457_34 (sequence is synthesized)
tgcatttgacaaatcatgttaatagctagacaagaagaaagttagctttgtaaacttctacttcatttgattcagagaaacagagcatgagttttcttaaaagtaacaagaaaaggaaca

SEQ ID NO: 30628 - DNA, 120 bp, Artificial Sequence
  ENSG00000047457_35 (sequence is synthesized)
aaaaaaatgaggtttgaaatcttttaccatggcaaaacattaacatctttctcaaaaacatagagaaatctggaaaaatcaagaagataaaattctggaccagttagtgacattctttca

SEQ ID NO: 30629 - DNA, 120 bp, Artificial Sequence
  ENSG00000047457_36 (sequence is synthesized)
agcatacttgtaaaatgtttccttaaagtgttcttgggatgaaaatgattgtcatgtctccaacaacagtgaactgatgttgttccttggaataaaagtcaatccccaccttaaaaaatg

SEQ ID NO: 30630 - DNA, 120 bp, Artificial Sequence
  ENSG00000047457_37 (sequence is synthesized)
agcttaagtgctatgacaaacaggcaaaccagaatcaaggtacaggaggtttgtaggtagtcctgattgatgaattcattctcatcacatctttctttcacacccacttgatgtggatac

SEQ ID NO: 30631 - DNA, 120 bp, Artificial Sequence
  ENSG00000047457_38 (sequence is synthesized)
caaagacttattaggaatacaaaaaccacattttaccatttgtattaaacacagaaacgagctcgattttttaaaaacagatttatccattttttcaatatccctgagctgaacattaac

SEQ ID NO: 30632 - DNA, 120 bp, Artificial Sequence
  ENSG00000047457_39 (sequence is synthesized)
catccaccaatctaccaagttattttagtactgcatatgtaatgcttttaactaaacaaaatgtgaagagctttgctcattgattattttttcaataaacgattacaatagtgtcctgaa

SEQ ID NO: 30633 - DNA, 120 bp, Artificial Sequence
  ENSG00000047457_40 (sequence is synthesized)
tgtgtgtgtgtgtgtgtgtgtgtacaatataaaccaaatacaaccagatccattaacacttgatgaatttaggtgaaactctcacttacgtatggaaaatcccagaaagatctggagctg

SEQ ID NO: 30634 - DNA, 120 bp, Artificial Sequence
  ENSG00000047457_41 (sequence is synthesized)
aagccatatataaaagatataactaaaggaactactttgcctaaatacttcccccaatatgatgcatcaatatgaagcatttgtgaatctgctgccctgatttcttccttctctacctcc

SEQ ID NO: 30635 - DNA, 120 bp, Artificial Sequence
  ENSG00000047457_42 (sequence is synthesized)
aaacaggatttttttcctgctaaatggtgagggatactgctcatttcctgacagccagtacttgtaacagcaccagtcatttctaagttaatacaaatgtgtaattatacttaaagctga

SEQ ID NO: 30636 - DNA, 120 bp, Artificial Sequence
  ENSG00000047457_43 (sequence is synthesized)
atcagattgattatggacttctcaaaaaccaagctttccattcaccacaaataagcgtgttgctcctagtagttcttgccagagaacacagtcaaagaagataactatcttatacattct

SEQ ID NO: 30637 - DNA, 120 bp, Artificial Sequence
  ENSG00000047457_44 (sequence is synthesized)
attttcacggccatagcttccaatacaagcatcttctgagactcacaggagaatatggaatgtgatctacccaatcacagtcagtgtgattattttattccaaatatctaccaaggaatg

SEQ ID NO: 30638 - DNA, 120 bp, Artificial Sequence
  ENSG00000047457_45 (sequence is synthesized)
accaggagaataagatcctccgatgttcgcaatggtgtggtgtcaggaggctgcctcttagacaatctccagatgtactgtgatgtgagtttgaaaaagagttcctgaagtaccacatct

SEQ ID NO: 30639 - DNA, 120 bp, Artificial Sequence
  ENSG00000047457_46 (sequence is synthesized)
gggagacatgccactagctgagcttcccaaaagtctaccaagagctgaggaattgtatcttcatccttagcacaaagcaccttaaaaacagtaaaaggagcctctatattccagataaat

SEQ ID NO: 30640 - DNA, 120 bp, Artificial Sequence
  ENSG00000047457_47 (sequence is synthesized)
atagcactgataaagcgacagctgggctgaatatcacagcatcacatgggccacgcaatcaataatttaccattagcattagcgccatggcaaaagcaaatttagacatttttaaaagga

SEQ ID NO: 30641 - DNA, 120 bp, Artificial Sequence
  ENSG00000047457_48 (sequence is synthesized)
aacagattctaggatgtacaaataaagtttctacagatatagtcttttaattagtacttttatcttataaactgattatgtatgtctgttttttcaataaacaaacaaatgaaaaactca

SEQ ID NO: 30642 - DNA, 120 bp, Artificial Sequence
  ENSG00000047457_49 (sequence is synthesized)
gctccacatgtggcctgacacagagggtatatttacttaaagccaagtctctattggatggatttgtgtagttttggtttaaaatcctgtagcagaatgtgttgggtgataaacttatcc

SEQ ID NO: 30643 - DNA, 120 bp, Artificial Sequence
  ENSG00000047457_50 (sequence is synthesized)
cttccccaagcctctgaagtgcccttcctatctttgaaagagcaagtctaggccactatcagctgaagtatgtaccagataggtctgtttcctagttactgaggacaatgtggagtaaaa

SEQ ID NO: 30644 - DNA, 120 bp, Artificial Sequence
  ENSG00000047457_51 (sequence is synthesized)
gaacatggtgtggttttctccacttccataggctcctcaagatgatccctttttagattatggtccttttaaagatagctggaaaatcagactagaaggggaatgactcccataaatatt

SEQ ID NO: 30645 - DNA, 120 bp, Artificial Sequence
  ENSG00000047457_52 (sequence is synthesized)
ctgcacctaaacttttcatcatgtctctgtagcctagatgtagtgttggcttgttggttgcaagtgaatattctatgctagcattgtagccatgcaaattcagagacatctacagacctg

SEQ ID NO: 30646 - DNA, 120 bp, Artificial Sequence
  ENSG00000047457_53 (sequence is synthesized)
aggaaaggaagccaatgctgaagctgagggaattacacaaaatagtccagatacacacatgcagagattacgggaaaggtgccagccactggggaaaaatcacttggtatctgaagagaa

SEQ ID NO: 30647 - DNA, 120 bp, Artificial Sequence
  ENSG00000047457_54 (sequence is synthesized)
aaaagtatattaggaaaacacacttcaagctaagaagagattggttgcaaagttttttcaaattgtaatattgaagtacacacctcctagctttgtggtatggcaagtgggttatagcta

SEQ ID NO: 30648 - DNA, 120 bp, Artificial Sequence
  ENSG00000047457_55 (sequence is synthesized)
atttaaaattaacccaaaaaatgacaaaattttgtcttccagttcatcttaaaactaaattcctgaaaacaatcttgagtaccacaatttttaaaaactaattacactgacatttccagt

SEQ ID NO: 30649 - DNA, 120 bp, Artificial Sequence
  ENSG00000047578_0 (sequence is synthesized)
gagctcccggaaccgccgcctctagggatggacggtcagactctgcgaaaggccgagagaagctggtcctgctcacgagagaaaaaggagggttacgctaaggacatggtgacagacttt

SEQ ID NO: 30650 - DNA, 120 bp, Artificial Sequence
  ENSG00000047578_1 (sequence is synthesized)
gatgagaaacatgatgagtatttaatattgcttcagcagaggaaccggatattaaagcatttgaaaagcaaggaccccgtgcaattgaggctggagcacttggagcaaggtttctctgtc

SEQ ID NO: 30651 - DNA, 120 bp, Artificial Sequence
  ENSG00000047578_2 (sequence is synthesized)
tatgtcaacggtgccaattcggagctgaaatcatcaccgcggaaagctattcactctgacttctccagaagtgcctcccacacggaggggacacacgattatggacgaagaactctgttt

SEQ ID NO: 30652 - DNA, 120 bp, Artificial Sequence
  ENSG00000047578_3 (sequence is synthesized)
cgagaagctgaagaagccttaagacgcagttcacggacagcccccagtaaagtccagcgccgaggatggcaccagaaatctgtgcagatcagaacagaagctggcccacggctccacatc

SEQ ID NO: 30653 - DNA, 120 bp, Artificial Sequence
  ENSG00000047578_4 (sequence is synthesized)
gaacctcctgtggactattctgatgattttgagctgtgtggggatgtgactctccaggcaaacaacacttctgaggatcgtccgcaggagctgagaagaagcctggaacttagtgtaaat

SEQ ID NO: 30654 - DNA, 120 bp, Artificial Sequence
  ENSG00000047578_5 (sequence is synthesized)
ctacaaaggaaacaaaaggattgttccagcgatgagtatgactctattgaggaagacatactctctgagcctgagccagaggacccggcactggtgggccatcccagacatgaccgccct

SEQ ID NO: 30655 - DNA, 120 bp, Artificial Sequence
  ENSG00000047578_6 (sequence is synthesized)
ccttccagtggcgactggactcagaaagatgttcacggggaacaggagacagaaggacgctcttctccaggcccagacaccctcgtggtgctggaatttaacccagcttccaaaagtcat

SEQ ID NO: 30656 - DNA, 120 bp, Artificial Sequence
  ENSG00000047578_7 (sequence is synthesized)
aaaagggaaaggaatttgtctgcaaagcggaaggacaatgctgaggttttcgttcccaccaaacctgagccaaacctgactccccaagctcctgctgtattcccagaccaggagaggatg

SEQ ID NO: 30657 - DNA, 120 bp, Artificial Sequence
  ENSG00000047578_8 (sequence is synthesized)
tgctccagacctggaagccggcgagagagacccctgtctgcaacccgcaaaactctttgcgaggctgagtacccagaggaagatgcctctgctgtgctccaagccatccaggtggagaac

SEQ ID NO: 30658 - DNA, 120 bp, Artificial Sequence
  ENSG00000047578_9 (sequence is synthesized)
gcagccctgcagagggcgctcctcagcagaaaggccgagcagccagccagcccactgcaggatgcagaaggaccaccagcaaaaccatggaccagtctgctggaggagaaggaagagacc

SEQ ID NO: 30659 - DNA, 120 bp, Artificial Sequence
  ENSG00000047578_10 (sequence is synthesized)
cttgagctgcttcccatcaccacggcgactactactcaggagccggccggggcagcaggaggagccagggccatcaaccaggccatggacagaattgggcttctgggaagcagacaacag

SEQ ID NO: 30660 - DNA, 120 bp, Artificial Sequence
  ENSG00000047578_11 (sequence is synthesized)
cagaagcttctgaaagtcctccaggccgtcgaaagtgactctgcccatctcggcagggtggtttcaccaaccaaggagcaagtatcagacacagaggacaaacagagaatgagggcagac

SEQ ID NO: 30661 - DNA, 120 bp, Artificial Sequence
  ENSG00000047578_12 (sequence is synthesized)
gagatcaaagatgccatctacgtgaccatggagatcctgtccaactggggcaactcgtggtgggtgggtctcacagaagtcgagttctttgacttgaatgacacaaagctttatgtgtcg

SEQ ID NO: 30662 - DNA, 120 bp, Artificial Sequence
  ENSG00000047578_13 (sequence is synthesized)
ccccacgatgtggatatccggaacacagccacgcctggggagctgggccgcctcgtcaacaggaacttagctggcaagaaagactcctccccgtggacctgccccttccacccaccactc

SEQ ID NO: 30663 - DNA, 120 bp, Artificial Sequence
  ENSG00000047578_14 (sequence is synthesized)
cagctgttttttgttattcgaaacacaagacagctgggggacttccatctggccaagatcaaggttcggaattactggacagctgatggcgatcttgacattggtgccaagaacgtgaag

SEQ ID NO: 30664 - DNA, 120 bp, Artificial Sequence
  ENSG00000047578_15 (sequence is synthesized)
ctttacgtcaacagaaacctcatcttcaatggcaagttagacaaaggagatagggaggccccagctgaccacagcatcctggttgaccagaagaacgagaagagcgagcaactagaggag

SEQ ID NO: 30665 - DNA, 120 bp, Artificial Sequence
  ENSG00000047578_16 (sequence is synthesized)
gccatgaacgctcactcggaagaaagcaaaggcacccatgagatggctggtgccagcggggacaaggagcttggtctcggttgctcaccgccagctgaaacattagcggatgcaaagctt

SEQ ID NO: 30666 - DNA, 120 bp, Artificial Sequence
  ENSG00000047578_17 (sequence is synthesized)
tcttcacaaggaaatgtgtctggcaaaagaaagaattctactaattgcaggaaagacagtttgtcccagttagaggaatatttgagactgtcggcagtccccacttcgatgggtgacatg

SEQ ID NO: 30667 - DNA, 120 bp, Artificial Sequence
  ENSG00000047578_18 (sequence is synthesized)
cccagtgctcctgccacttccccacctgtgaagtgccctcctgtccatgaggagccctctctcatccaacaactggaaaacctcatgggcagaaaaatctgtgagccacccgggaaaacc

SEQ ID NO: 30668 - DNA, 120 bp, Artificial Sequence
  ENSG00000047578_19 (sequence is synthesized)
ccatcctggttacaaccttctcccaccggcaaggacaggaagcagggaggcaggaagccaaaacccctctggcttagtcccgagaagcccctggcctggaagggcaggctcccatcagac

SEQ ID NO: 30669 - DNA, 120 bp, Artificial Sequence
  ENSG00000047578_20 (sequence is synthesized)
gatgtcatcggtgagggtcctggagagaccgaggccagggataaaggcctacggcatgagccagggtgggggaccagccggagtgtcaacaccaaggagagaccccagagggcaaccacc

SEQ ID NO: 30670 - DNA, 120 bp, Artificial Sequence
  ENSG00000047578_21 (sequence is synthesized)
aaagtccacagtgatgactcagacatctttaaccagccccccaacagagagcgccctgctagtgggaggaggggctcaaggaaggatgctggcagcagtagtcatggggacgaccagcca

SEQ ID NO: 30671 - DNA, 120 bp, Artificial Sequence
  ENSG00000047578_22 (sequence is synthesized)
gccagcagagaagacacctggtcttccaggacgccgtcacggtcaaggtggcgcagtgagcaggagcacacacttcacgagtcatggagctccctcagtgccttcgaccgctcccaccgg

SEQ ID NO: 30672 - DNA, 120 bp, Artificial Sequence
  ENSG00000047578_23 (sequence is synthesized)
ggacgcatctccaacacggagctcccgggggacatcctggatgagctcctgcagcaaaagagcagccggcacagcgacttgcccccctccaagaagggggagcagccagggctgtcgaga

SEQ ID NO: 30673 - DNA, 120 bp, Artificial Sequence
  ENSG00000047578_24 (sequence is synthesized)
gggcaggatggctactctggagagacagacgctgggggtgactttaaaatccccgtcttgccttatggacagcgcttggtcattgacatcaagtctacctggggggacagacactatgtc

SEQ ID NO: 30674 - DNA, 120 bp, Artificial Sequence
  ENSG00000047578_25 (sequence is synthesized)
ggcctcaacggaatagaaatattcagttccaagggtgaaccggtgcagatttcaaacataaaagcagaccctcccgatatcaatattttaccagcctatgggaaagacccccgcgtggtc

SEQ ID NO: 30675 - DNA, 120 bp, Artificial Sequence
  ENSG00000047578_26 (sequence is synthesized)
accaacctcatcgacggggtgaacaggacccaggatgacatgcatgtctggctggcccccttcacgcggggcagatcccactccatcaccattgacttcacgcacccttgccacgttgcc

SEQ ID NO: 30676 - DNA, 120 bp, Artificial Sequence
  ENSG00000047578_27 (sequence is synthesized)
aaatctcggatacattccttccgaggcgtgaaggacatcacaatgctgttagacacccagtgcatctttgaaggagaaatcgccaaggcctctggaaccctggcgggagccccagagcac

SEQ ID NO: 30677 - DNA, 120 bp, Artificial Sequence
  ENSG00000047578_28 (sequence is synthesized)
tttggagacacgatcttattcacaaccgatgatgacattctcgaggccatattctattctgatgagatgtttgacctggatgtggggagcctggacagcctgcaggatgaagaggcaatg

SEQ ID NO: 30678 - DNA, 120 bp, Artificial Sequence
  ENSG00000047578_29 (sequence is synthesized)
aggaggcccagcacggccgacggcgagggggatgagcggcccttcacccaggctggcttgggggctgatgaacggatcccggagctagagctcccatccagttcccctgtcccccaagtc

SEQ ID NO: 30679 - DNA, 120 bp, Artificial Sequence
  ENSG00000047578_30 (sequence is synthesized)
accacgccagagccaggcatctaccacggaatctgccttcagctgaatttcactgcctcctggggagacttgcactacctggggctcactggcctggaagtggtgggcaaggagggccag

SEQ ID NO: 30680 - DNA, 120 bp, Artificial Sequence
  ENSG00000047578_31 (sequence is synthesized)
gcgctgcccatccacctgcaccagatctctgcttcccccagagacttaaatgagctccccgagtactctgacgactcccgggccctggacaagttaattgatggcaccaacatcaccatg

SEQ ID NO: 30681 - DNA, 120 bp, Artificial Sequence
  ENSG00000047578_32 (sequence is synthesized)
gaggatgagcatatgtggctgatccccttctcgccggggctggaccatgtggtcacgatccgcctggacagggccgaaagcatcgcaggcctgcgcttctggaactacaataaatctccc

SEQ ID NO: 30682 - DNA, 120 bp, Artificial Sequence
  ENSG00000047578_33 (sequence is synthesized)
gaggacacctatcgcggggccaagattgtccacgtctccctggatggcctgtgcgtctccccgccagagggctttctcatccggaaggggccaggcaactgccactttgattttgctcaa

SEQ ID NO: 30683 - DNA, 120 bp, Artificial Sequence
  ENSG00000047578_34 (sequence is synthesized)
gaaatcctcttcgtggactacctacgggctcagctgctgccccagccggccaggaggctggacatgagaagcctggagtgtgcaagcatggactacgaggcaccgctgatgccctgtggc

SEQ ID NO: 30684 - DNA, 120 bp, Artificial Sequence
  ENSG00000047578_35 (sequence is synthesized)
ttcattttccagtttcagcttctcaccagctggggcgacccctactacatcggcctcaccggcctggagctgtatgacgagcgaggagaaaaaatccccttgtcggaaaacaatattgcg

SEQ ID NO: 30685 - DNA, 120 bp, Artificial Sequence
  ENSG00000047578_36 (sequence is synthesized)
gccttccccgacagcgtgaactccctggagggtgtgggcggggacgtccgcaccccagacaagctcatcgaccaagtgaacgacaccagtgatggccggcacatgtggctggctcccatc

SEQ ID NO: 30686 - DNA, 120 bp, Artificial Sequence
  ENSG00000047578_37 (sequence is synthesized)
ctgccgggcctggtgaaccgggtttatgtgattttcgatctgcctaccaccgtgtcaatgatcaaactgtggaattatgcgaaaacaccccatcgaggggtgaaggagtttggcctcctg

SEQ ID NO: 30687 - DNA, 120 bp, Artificial Sequence
  ENSG00000047578_38 (sequence is synthesized)
gtggacgacctgcttgtgtacaatgggatcctggccatggtgagccacctggtggggggcatcctgcccacatgtgagcccaccgtgccctaccacaccatcctcttcaccgaggacagg

SEQ ID NO: 30688 - DNA, 120 bp, Artificial Sequence
  ENSG00000047578_39 (sequence is synthesized)
gacatccgccaccaggagaaacacaccaccatcagtaatcaggccgaggatcaagatgtccagatgatgaatgaaaaccaaatcattaccaacgcgaaacggaagcagagcgttgttgac

SEQ ID NO: 30689 - DNA, 120 bp, Artificial Sequence
  ENSG00000047578_40 (sequence is synthesized)
ccagccttacgtcccaaaacctgcatcagcgagaaggagacgagacgacggcgctgctgactggtgaaggagggagagctggtcctcccactatggtgggctccgtcagcagccccactc

SEQ ID NO: 30690 - DNA, 120 bp, Artificial Sequence
  ENSG00000047578_41 (sequence is synthesized)
agtgcctgcgtccctcaccctcagtcccaggagctggaagcgaaccacagtgttgaggggagcccgctgggaagaggggactcgggaggacagccctggatactaccagagtgacagatg

SEQ ID NO: 30691 - DNA, 120 bp, Artificial Sequence
  ENSG00000047578_42 (sequence is synthesized)
gctgtggctgcagggcaaagagatcccctgcagttctgggttggccacagggagcccaggacacccgccttcatgcctctgctgtgagacccagcaaagcagggcccatgaccactaggg

SEQ ID NO: 30692 - DNA, 120 bp, Artificial Sequence
  ENSG00000047578_43 (sequence is synthesized)
cctgggctgaccctgactcagaacaggacaatgacggggtggggaggcatcccatccagcctcagagggcccagagaatggctgagcaggacagtgggagaccagaccctaccccgcaac

SEQ ID NO: 30693 - DNA, 120 bp, Artificial Sequence
  ENSG00000047578_44 (sequence is synthesized)
tccagtaagcagggcactgcccagggagactgccttcagaaacctgagcttcagcggccaacaccccccatcccctgcgcatccttgtctcatttggggactggtggagctggctgagag

SEQ ID NO: 30694 - DNA, 120 bp, Artificial Sequence
  ENSG00000047578_45 (sequence is synthesized)
gttggggtagtttcctggttacaggggtccacaagaccctctctcatcccggtataggggcctctctcctctcatcgggcctgataagggattggccaaggctgtgtgcatcctgcagag

SEQ ID NO: 30695 - DNA, 120 bp, Artificial Sequence
  ENSG00000047578_46 (sequence is synthesized)
ggaaggaagtcagctgggccacccgccatccaccttggcaagagctgggcccactctggcaggccagggtatcatctgcgtgctgctgccgggccaggaagggtgggtgggtggccagca

SEQ ID NO: 30696 - DNA, 120 bp, Artificial Sequence
  ENSG00000047578_47 (sequence is synthesized)
ggctggcagctccagaccccagagggccagaagaactcaccccagtgccctctggatgcaggtgttggggaacactgaggacaatcccccatctcccctcacccttgagcaggccctccc

SEQ ID NO: 30697 - DNA, 120 bp, Artificial Sequence
  ENSG00000047578_48 (sequence is synthesized)
tgcactctctgccacatgtccctcctggtctgatcacggctgtgctcactgatgtggctgctttctgtctctgcccctgtgcccttggaggcaggcagtgaggtgctcctttcccaggcc

SEQ ID NO: 30698 - DNA, 120 bp, Artificial Sequence
  ENSG00000047578_49 (sequence is synthesized)
cccaccccttctcccccttcagccacttcccagcgagttggaaatgtgccttgcacccccagccgagtgaagcccagaacgcatctatatgcatcgatgtaacaagctcggatcagggac

SEQ ID NO: 30699 - DNA, 120 bp, Artificial Sequence
  ENSG00000047578_50 (sequence is synthesized)
ctaattggtttcccagtagtgggtaatttctcgttgcaaatattaatccgttgtttttctggcgcccagcccggcccgccgcagtactgtactcgaggtacgttcctatgcaaccgagag

SEQ ID NO: 30700 - DNA, 120 bp, Artificial Sequence
  ENSG00000047578_51 (sequence is synthesized)
ccccggcaaatacttcatgagcttagcagcctgggctcgagcagctatgcaaacgcgcttttcatttggagcacggggctgatgtgaagataagaattgtttctcctggagaaagatcca

SEQ ID NO: 30701 - DNA, 120 bp, Artificial Sequence
  ENSG00000047578_52 (sequence is synthesized)
tcatttctccagcttccaagcccccggcacctctgctcagctcccagatgtgacgagcacctcccgccagggggagtcaggggttgatcaaaccagctcttgtgacccaaaccagtgccg

SEQ ID NO: 30702 - DNA, 120 bp, Artificial Sequence
  ENSG00000047578_53 (sequence is synthesized)
ctgcattaaagggaggcccagctactccttcccagctgagatgtgggtacaggtcagatttgtcagggagatggcactaacacgacacaagctcactcccagaaccgcagctgatgttta

SEQ ID NO: 30703 - DNA, 120 bp, Artificial Sequence
  ENSG00000047578_54 (sequence is synthesized)
taataatcgtatgtactgtgcaatttaggaggggaaaaaaaggctgtacaagctttaactctaaaataaatttctatttttttcctcttgcaaaattaataaaagatgttattaagaata

SEQ ID NO: 30704 - DNA, 120 bp, Artificial Sequence
  ENSG00000047578_55 (sequence is synthesized)
tgtggccacttgggacagggtttcgctggacaatcgggtgggttggacactgtacagagacaccaggccatggggcaagtggaggctgaaaccagcctgcgctcagctccctggccctag

SEQ ID NO: 30705 - DNA, 120 bp, Artificial Sequence
  ENSG00000047578_56 (sequence is synthesized)
cagggccacctcactccagaggaggggcatctcttagcattttgccttccctgaggggcatttttgcatgcagacaccctatgtgttagctgtgaccatgaccctgacccaggaggtgta

SEQ ID NO: 30706 - DNA, 120 bp, Artificial Sequence
  ENSG00000047578_57 (sequence is synthesized)
gttggcacccagaaagtgtagaacaagaggacattagagcctgaagagacccaaggcatctgttggtgcagtgccccgagctgtctcttccaactccaccaaagagtagatgcacaggca

SEQ ID NO: 30707 - DNA, 120 bp, Artificial Sequence
  ENSG00000047578_58 (sequence is synthesized)
gagaaaacctgcatccactctgccccgggggtgggggcaggtgcacaggcccagggtaccaggtcttctgacttttcagaagaagtcggaaatctagagtcttacgtgaagtctccagat

SEQ ID NO: 30708 - DNA, 120 bp, Artificial Sequence
  ENSG00000047578_59 (sequence is synthesized)
tctcaaatgtgtgtaacgaattttctcatgttttaaaatatcacatgagccaaataaaacacttattgtgtatctggccagctggctgccagtttgtgacttctgagcaaatcccagggg

SEQ ID NO: 30709 - DNA, 120 bp, Artificial Sequence
  ENSG00000047578_60 (sequence is synthesized)
ttttctgctgggcctgttcctcacccttcttttccattgatccttccagccagttcctctcttcatccatgcgtgtccacatcagcccctccccgtcctggggaatcttcaagcccaagg

SEQ ID NO: 30710 - DNA, 120 bp, Artificial Sequence
  ENSG00000047578_61 (sequence is synthesized)
tcactgctgattgtgatctcctccctcctgcaccctgctaaccaggttcctggcagcctcacttcctgctctctcctgccccctgtgaatgtgacccgcttctactttatcttctgagac

SEQ ID NO: 30711 - DNA, 120 bp, Artificial Sequence
  ENSG00000047578_62 (sequence is synthesized)
aaaagatgtgacactgtcaggatcccctccccacctccccatcctcatctccaaaatgaagctggagcctctccgaatcctggtgtcagcccttccgggacctccccatgccatctctgg

SEQ ID NO: 30712 - DNA, 120 bp, Artificial Sequence
  ENSG00000047578_63 (sequence is synthesized)
agtccacctgcaggcacctgtgcaagccacaccttccacctaggatgcctccctgctccatctctgccttctgacgaccacctgtcgctggctaggttccctagacacagaccctgagat

SEQ ID NO: 30713 - DNA, 120 bp, Artificial Sequence
  ENSG00000047578_64 (sequence is synthesized)
ggagtttcctggggtgtgctcttgtcagggaagggtaggaggcaggattgggcagagggagaagctggtctgcggttcagccacttcaaggcctcagcctgctccacagggagctcggaa

SEQ ID NO: 30714 - DNA, 120 bp, Artificial Sequence
  ENSG00000047578_65 (sequence is synthesized)
cctgggatggccctttggggtcatcctgagttgagtgaggggccatgtctttatctgtatcaacatggcactggctatgggctgcccctggggaggggcatggctttttattttactttt

SEQ ID NO: 30715 - DNA, 82 bp, Artificial Sequence
  ENSG00000047578_66 (sequence is synthesized)
gctgcccctggggaggggcatggctttttattttactttttaatttgtatttatttattttgacacagttttactctgtcgc

SEQ ID NO: 30716 - DNA, 120 bp, Artificial Sequence
  ENSG00000047578_67 (sequence is synthesized)
gcttccggttcgagctcccggaaccgccgcctctagggatggacggtcagactctgcgaaaggccgagagaagctggtcctgctcacgagagaaaaaggaggtaaatgtgtccctggcga

SEQ ID NO: 30717 - DNA, 120 bp, Artificial Sequence
  ENSG00000047578_68 (sequence is synthesized)
tcttggggtcccaagcttgaatcctggagcaaatgatagtgagcaactagacttaccaacccagtgtcacttgtaataatcacttgtaataatcacttgtaataatcatctctgagtgta

SEQ ID NO: 30718 - DNA, 120 bp, Artificial Sequence
  ENSG00000047578_69 (sequence is synthesized)
tcagttaactttgtctgtgtaacaaatcatcccagattttagtggcttaaaacaacaaccatatatttagttctggatttggtgggttagcagtttgggcttatctgggcagttctgctg

SEQ ID NO: 30719 - DNA, 120 bp, Artificial Sequence
  ENSG00000047578_70 (sequence is synthesized)
atggatcccatcgtcaaaaaatggcggcattagcaggatctgagggtggaggttttggccttctgatgtcaaaaggcgaatcgggagacacggaaaccctcactgtgcatcctctataga

SEQ ID NO: 30720 - DNA, 120 bp, Artificial Sequence
  ENSG00000047578_71 (sequence is synthesized)
agcctcccaagtagctgggactccaggtgtgcacaccacacacagctagtttttttattttttgtagagataggctggtctcaaactcttgacctcaagtcatcctcccgcctcagcttc

SEQ ID NO: 30721 - DNA, 85 bp, Artificial Sequence
  ENSG00000047578_72 (sequence is synthesized)
tgattgaggaatttaaaagactactctggttgatttggagaatggatcagggggcagagggagccccgagagaggaggctcaagg

SEQ ID NO: 30722 - DNA, 120 bp, Artificial Sequence
  ENSG00000047578_73 (sequence is synthesized)
atcagggggcagagggagccccgagagaggaggctcaaggcatagaacagcctaagaacagcctcgctgaagatggtggtggcctggatgagggtgtcagtgctcttggggtgcacttta

SEQ ID NO: 30723 - DNA, 120 bp, Artificial Sequence
  ENSG00000047578_74 (sequence is synthesized)
ggtgggctcaactcatcctatgaccatttgcattttcagcaatgcctttttctggaaagaagttttcaaatgaatgcaaaagtgaagagattagttcagtaatgaggcgtgtatccatca

SEQ ID NO: 30724 - DNA, 120 bp, Artificial Sequence
  ENSG00000047578_75 (sequence is synthesized)
cctgcttcaataattacaaacattctgctattgttgtttcacgtatccccttaacatttgaaagtaaattgtagctatcacactatttcactcataaatccttcagtatacatctctaac

SEQ ID NO: 30725 - DNA, 120 bp, Artificial Sequence
  ENSG00000047578_76 (sequence is synthesized)
aaacaacacttctgaggatcgtccgcaggataccaaatctcccaccagtaccaagccctgtggttttaacttctcccttctgaatgcatgtggacattctgacccttcaagcagcgtgga

SEQ ID NO: 30726 - DNA, 120 bp, Artificial Sequence
  ENSG00000047578_77 (sequence is synthesized)
taaagtccagcgccgaggatggcaccaggtctggagactgtggccccagcccacgctttagaatacagagtgtgggtggctgtgggaatagaaatacaatcagagcatttaaaaccccca

SEQ ID NO: 30727 - DNA, 120 bp, Artificial Sequence
  ENSG00000047578_78 (sequence is synthesized)
gctccaggcagttgctgtcaccctcacattcctgttcctgttttctacaaagggactgtcagcctgagcatgcctgcccttgaccgtgaccctgctgtgtcttaggccaggagtgttgcc

SEQ ID NO: 30728 - DNA, 120 bp, Artificial Sequence
  ENSG00000047579_0 (sequence is synthesized)
cgaggaccagaccgggggcggggccggtagtgggagtgcggggcgcgcggtgacagcgcggggttggcggcgtgggacccagggggcgacagaggcagcagcagcccgaggcctgaggag

SEQ ID NO: 30729 - DNA, 120 bp, Artificial Sequence
  ENSG00000047579_1 (sequence is synthesized)
acagaggcagcagcagcccgaggcctgaggagaggagaccggcggcggcggcaatgctggagacccttcgcgagcggctgctgagcgtgcagcaggatttcacctccgggctgaagactt

SEQ ID NO: 30730 - DNA, 120 bp, Artificial Sequence
  ENSG00000047579_2 (sequence is synthesized)
taagtgacaagtcaagagaagcaaaagtgaaaagcaaacccaggactgttccatttttgccaaagtactctgctggattagaattacttagcaggtatgaggatacatgggctgcacttc

SEQ ID NO: 30731 - DNA, 120 bp, Artificial Sequence
  ENSG00000047579_3 (sequence is synthesized)
acagaagagccaaagactgtgcaagtgctggagagctggtggatagcgaggtggtcatgctttctgcgcactgggagaagaaaaagacaagcctcgtggagctgcaagagcagctccagc

SEQ ID NO: 30732 - DNA, 120 bp, Artificial Sequence
  ENSG00000047579_4 (sequence is synthesized)
agctcccagctttaatcgcagacttagaatccatgacagcaaatctgactcatttagaggcgagttttgaggaggtagagaacaacctgctgcatctggaagacttatgtgggcagtgtg

SEQ ID NO: 30733 - DNA, 120 bp, Artificial Sequence
  ENSG00000047579_5 (sequence is synthesized)
gctgaactagatgcagagcacgcccagaaggtcctggaaatggagcacacccagcaaatgaagctgaaggagcggcagaagttttttgaggaagccttccagcaggacatggagcagtac

SEQ ID NO: 30734 - DNA, 120 bp, Artificial Sequence
  ENSG00000047579_6 (sequence is synthesized)
ctgtccactggctacctgcagattgcagagcggcgagagcccataggcagcatgtcatccatggaagtgaacgtggacatgctggagcagatggacctgatggacatatcggaccaggag

SEQ ID NO: 30735 - DNA, 120 bp, Artificial Sequence
  ENSG00000047579_7 (sequence is synthesized)
gccctggacgtcttcctgaactctggaggagaagagaacactgtgctgtcccccgccttagggcctgaatccagtacctgtcagaatgagattaccctccaggttccaaatccctcagaa

SEQ ID NO: 30736 - DNA, 120 bp, Artificial Sequence
  ENSG00000047579_8 (sequence is synthesized)
ttaagagccaagccaccttcttcttcctccacctgcaccgactcggccacccgggacatcagtgagggtggggagtcccccgttgttcagtccgatgaggaggaagttcaggtggacact

SEQ ID NO: 30737 - DNA, 120 bp, Artificial Sequence
  ENSG00000047579_9 (sequence is synthesized)
gccctggccacatcacacactgacagagaggccactccggatggtggtgaggacagcgactcttaaattgggacatgggcgttgtctggccacactggaatccagttttggctgtatgcg

SEQ ID NO: 30738 - DNA, 120 bp, Artificial Sequence
  ENSG00000047579_10 (sequence is synthesized)
gaattccacctggaaagccaggttgttttatagaggttcttgatttttacataattgccaataatgtgtgagaaacttaaagaacagctaacaataaagtgtgaggacggtaaactgaga

SEQ ID NO: 30739 - DNA, 120 bp, Artificial Sequence
  ENSG00000047579_11 (sequence is synthesized)
tttgcacactagagcccctgagagcttgcattttgcttttatagaggcagtagattccaatgtatatctgcttaagccatcagcaaaaaactaataggcttactacaatttctttggaaa

SEQ ID NO: 30740 - DNA, 120 bp, Artificial Sequence
  ENSG00000047579_12 (sequence is synthesized)
aacctgcttctggcttcagcctcacttcctttgttctacatcccagaagatgcacgtgagggcagctgcctggtaactggaggcttcacttgaccagcactgagcttctgttcactcctt

SEQ ID NO: 30741 - DNA, 120 bp, Artificial Sequence
  ENSG00000047579_13 (sequence is synthesized)
tccgggtcactttcagctgacaaaccactggactgtcagtgtgtgccattagcctgtcacctggtggagaaacaactcatctccaagtgatgtcagtctcccagtagacccggacctcta

SEQ ID NO: 30742 - DNA, 120 bp, Artificial Sequence
  ENSG00000047579_14 (sequence is synthesized)
aggccagctgtacacgcagtcggggcaccagcccagtctgtaaacgcggcatgactccatccacttggagggtggatgcgagcagctgtttatacccatttcctctctcagtcccttttc

SEQ ID NO: 30743 - DNA, 120 bp, Artificial Sequence
  ENSG00000047579_15 (sequence is synthesized)
ctccaaaggtgagacgtgagaaccatctgccagtcacttacgcataaacccccaagctcacagccagctcctggctccctaaccccacggttccacacggctgtgtggcagctgcaacag

SEQ ID NO: 30744 - DNA, 120 bp, Artificial Sequence
  ENSG00000047579_16 (sequence is synthesized)
tggtgtggttccgtcatgaattcttctcaaagatttgacatgctccactccggtaactttggtgagttgagagctttcttgtttgttttccctcctttaccacccagaaatccatttgag

SEQ ID NO: 30745 - DNA, 120 bp, Artificial Sequence
  ENSG00000047579_17 (sequence is synthesized)
tctgctccttgtggttaaggactggcgtttgcagggaggtgcggactctcctgcggggctcacgggaaactcttccctcttcgtgcgacaggcatttaggggcgtgcctgccatgggcaa

SEQ ID NO: 30746 - DNA, 120 bp, Artificial Sequence
  ENSG00000047579_18 (sequence is synthesized)
tcacaaaattttgtttcacattcatgcagcaaatatgggctgaggtgccagacctgtacctgggcttggtgcgtttcaaatttcagaccagttctttgggctgggtcaaggcaaagctca

SEQ ID NO: 30747 - DNA, 120 bp, Artificial Sequence
  ENSG00000047579_19 (sequence is synthesized)
gtcgtcccagcagcacctcagccatctgtagaaggttctaccattaccacggtttcagcttcctctaaacttctcacccgcttctcctggcaatctgtcagaacggtgtcatcctgggga

SEQ ID NO: 30748 - DNA, 120 bp, Artificial Sequence
  ENSG00000047579_20 (sequence is synthesized)
agagaaggagcttgggtgcatttgccctcatcctgagaaggccagaatactggagaccagcgtgaaccctcacccagagtcaggggaagatttagaaacagtgacacctgcatatagaat

SEQ ID NO: 30749 - DNA, 120 bp, Artificial Sequence
  ENSG00000047579_21 (sequence is synthesized)
tttgattccttgaagagcctatttagttccataaaattggagaactgctgaaggtcagtaattccgactttctcagcagtggtgtctctgaattactgcaaagggtaaaaaaaaaaaaaa

SEQ ID NO: 30750 - DNA, 80 bp, Artificial Sequence
  ENSG00000047597_0 (sequence is synthesized)
ggctgcgcagagcgcgggagcggtttggggctgggcatgctgggagcccctcgggcaacggccgccgccgccacagccac

SEQ ID NO: 30751 - DNA, 120 bp, Artificial Sequence
  ENSG00000047597_1 (sequence is synthesized)
acagccgccgccactgcgtccgtccccggtgagcgccgctgacgcgcggagatgaaattcccggcctcggtgctggcgtccgtgttcctgttcgtggccgagacaacggcggcgctcagc

SEQ ID NO: 30752 - DNA, 120 bp, Artificial Sequence
  ENSG00000047597_2 (sequence is synthesized)
ctgagcagcacctaccgctcgggcggggaccgcatgtggcaggcgctgacgttgcttttctcgctactgccttgcgcgctcgtgcagctcacgcttctcttcgtacaccgcgacctcagc

SEQ ID NO: 30753 - DNA, 120 bp, Artificial Sequence
  ENSG00000047597_3 (sequence is synthesized)
cgcgaccgcccgctcgtactgctgctgcacctgctgcaacttgggccccttttcaggtgttttgaagtcttctgcatctactttcagtcaggcaacaatgaagagccttatgtcagtatc

SEQ ID NO: 30754 - DNA, 120 bp, Artificial Sequence
  ENSG00000047597_4 (sequence is synthesized)
accaagaagaggcaaatgccaaaaaatggcctctcagaggagattgagaaggaggtgggccaggcagaaggcaaactaatcacccaccgatcagcgttcagccgggcgtcggtgatccag

SEQ ID NO: 30755 - DNA, 120 bp, Artificial Sequence
  ENSG00000047597_5 (sequence is synthesized)
gctttcttgggctcagccccccagctgaccctacagctgtacataagtgtcatgcagcaggacgtcactgttggaagaagtctcctcatgaccatatccctgttgtccattgtgtatgga

SEQ ID NO: 30756 - DNA, 120 bp, Artificial Sequence
  ENSG00000047597_6 (sequence is synthesized)
gccttgcgctgcaacatcctagccatcaaaatcaagtacgatgagtatgaagtcaaagtgaagcctctggcctatgtctgtatcttcctgtggaggagctttgagattgccactcgagtt

SEQ ID NO: 30757 - DNA, 120 bp, Artificial Sequence
  ENSG00000047597_7 (sequence is synthesized)
gtagtcctggtcctctttacctccgtcctgaagacctgggtggtggttataatactcatcaacttcttcagtttcttcttgtacccctggatcctcttctggtgcagtggttccccattc

SEQ ID NO: 30758 - DNA, 120 bp, Artificial Sequence
  ENSG00000047597_8 (sequence is synthesized)
cctgagaacatagagaaggccctcagtagagtgggcaccaccattgtactatgctttctaactttactctatactggtatcaacatgttctgctggtctgctgtacagctgaaaattgac

SEQ ID NO: 30759 - DNA, 120 bp, Artificial Sequence
  ENSG00000047597_9 (sequence is synthesized)
agccctgacctcatcagcaagtcccataattggtaccagctactggtgtattacatgataagattcatcgagaatgccatcctcctcctcctgtggtatcttttcaagactgacatctat

SEQ ID NO: 30760 - DNA, 120 bp, Artificial Sequence
  ENSG00000047597_10 (sequence is synthesized)
atgtatgtgtgcgcacctctgttggtcctgcagctgctcattgggtactgcacagccattctcttcatgcttgtattctatcagttcttccacccttgcaaaaagctcttttcttccagt

SEQ ID NO: 30761 - DNA, 120 bp, Artificial Sequence
  ENSG00000047597_11 (sequence is synthesized)
gtttctgaaggctttcagaggtggctcaggtgtttttgctgggcctgcaggcagcaaaaaccctgtgagccgataggaaaggaagatctacagtcatccagagatagagatgagacacct

SEQ ID NO: 30762 - DNA, 120 bp, Artificial Sequence
  ENSG00000047597_12 (sequence is synthesized)
tctagcagtaaaacaagtcctgagcctggtcagttcttgaatgctgaagatctctgctctgcttaatgggacccaaggtctcagagcacaggcatattattttctgggtttgatactcgt

SEQ ID NO: 30763 - DNA, 120 bp, Artificial Sequence
  ENSG00000047597_13 (sequence is synthesized)
tattcatacaaataatgagccctacacagggaacaaggcaggaagttagctgttaactccttgtgagctgcttctctttatagagctcttgggtatgtagaactgtatgggaagaagcca

SEQ ID NO: 30764 - DNA, 120 bp, Artificial Sequence
  ENSG00000047597_14 (sequence is synthesized)
ggaaaacctctgagtgttgaaggggcaacccaaggcatcacagttcacaggtaaccatgttgtgttcttctaggcattactggccttttcactgacaagttacccctgaaatctgagttg

SEQ ID NO: 30765 - DNA, 120 bp, Artificial Sequence
  ENSG00000047597_15 (sequence is synthesized)
tactggttagattcattaggttgaatgaggagaggggcttacctgttctctagttttccagactgctggtttgggtaacctgaagttttatgatccctgaacatagttttcacccaagag

SEQ ID NO: 30766 - DNA, 120 bp, Artificial Sequence
  ENSG00000047597_16 (sequence is synthesized)
ctgtcctggtgaccaaaaaagattactagggttttgccatcagcaacatcattcctgtcagagctttcagggagggctgttcaagtttggtttttgaatagacagaggtttcattttcat

SEQ ID NO: 30767 - DNA, 120 bp, Artificial Sequence
  ENSG00000047597_17 (sequence is synthesized)
ctcattagggcttttttgtacatagccaactgtagccaccctggcatgctgtctctaattgattcaagggcctagatttggagactttgttccttagcatccatggatgcagaaatgagt

SEQ ID NO: 30768 - DNA, 120 bp, Artificial Sequence
  ENSG00000047597_18 (sequence is synthesized)
gataaatttggccatgaaagccctggaattttaggaaagttgtgattctttgatatgttgatgaaattctggatcaggaggggtgttaaaacatcaaaatgatggcgacttgtataagta

SEQ ID NO: 30769 - DNA, 120 bp, Artificial Sequence
  ENSG00000047597_19 (sequence is synthesized)
gaattcttaccatcttactcctgcctccccattccttgcctgtcaggaccattttagaagagttaccttggttaacttaagggttttttagaaaaccccacagaaatctctcacccagtt

SEQ ID NO: 30770 - DNA, 120 bp, Artificial Sequence
  ENSG00000047597_20 (sequence is synthesized)
caggtgtatagggaattttcattttcattatttcaaggaatagagttttcctcactaccacttgtaattagagattgacttcagaaactttttctaaattataaagacggaatgaccaga

SEQ ID NO: 30771 - DNA, 120 bp, Artificial Sequence
  ENSG00000047597_21 (sequence is synthesized)
catggaatgcaatttgacttggcataattgtgagttaatttgataaagatctccagttgtatcctctgacaccctttaatgttctatataatttttcctttaatcggagaccctatttgt

SEQ ID NO: 30772 - DNA, 120 bp, Artificial Sequence
  ENSG00000047597_22 (sequence is synthesized)
ttcattaaagaggattgggtagcatatcctcaattatcttggaaaaatgcgtagatctagtgccattatttctaccattaaaatcttgaaagcgaaatacttgaaaagaggtgaccataa

SEQ ID NO: 30773 - DNA, 120 bp, Artificial Sequence
  ENSG00000047597_23 (sequence is synthesized)
agatcacaccaatttagaatgaatattaaagtctgagaaatttacaaaagggactctatggactcgattttaccatatggaatagggatccacttctctgttaacctacaaaacgtattt

SEQ ID NO: 30774 - DNA, 120 bp, Artificial Sequence
  ENSG00000047597_24 (sequence is synthesized)
atctggccattgcacttcggataattttcatttttaattcctcttggtgtcaaatttttaagtaatttcatgcacacaggagaaaatgcaatttgataatcagtttccactacattcgga

SEQ ID NO: 30775 - DNA, 120 bp, Artificial Sequence
  ENSG00000047597_25 (sequence is synthesized)
ggtcaagaaagcagtatatattctttcacaaggcatccatactgtttaatatttatagagttcatagaaatacatcaataagctcctaaattatagagcctcaattttggtttttctcat

SEQ ID NO: 30776 - DNA, 120 bp, Artificial Sequence
  ENSG00000047597_26 (sequence is synthesized)
ttgaaatgtttttgatttatcaatatttgtggtttaactttgtgggggtgtccaggcagtagatcattttttgtctatttttaaccaaataagaataacactcaagactatgttctccat

SEQ ID NO: 30777 - DNA, 120 bp, Artificial Sequence
  ENSG00000047597_27 (sequence is synthesized)
cccaacacatcacttaccacttgcactattcttaataggcctaaaatagtgagcatatataatcaaaataatacttcatacaacatatacttccatgcactcttcatgtaatcacatatg

SEQ ID NO: 30778 - DNA, 120 bp, Artificial Sequence
  ENSG00000047597_28 (sequence is synthesized)
tgcatagatacacaatcgtattacataaaacacccttgaaaatatatgactttgaataaaataaagctaccatgttaatacatcattttttgtttcttcctaattaacaaaagggctcta

SEQ ID NO: 30779 - DNA, 120 bp, Artificial Sequence
  ENSG00000047597_29 (sequence is synthesized)
taatgattaggagagctgtaaggccattctttagtcattccaagtgtatatttgtatcacaccagttacttgtgttcattgacaccaaatattttcaagctttttgtgagaaagagattc

SEQ ID NO: 30780 - DNA, 120 bp, Artificial Sequence
  ENSG00000047597_30 (sequence is synthesized)
ttgccttgaggctctgcagtggcaaatggtaggggcaatagcgctcccttttcacctgaaatgccttcagctcaggccttgggagtgaggtgtgggagtagccaccagcctcccactgac

SEQ ID NO: 30781 - DNA, 120 bp, Artificial Sequence
  ENSG00000047597_31 (sequence is synthesized)
taggcatgttaggaattagacaaggatggagagactggttttttccagccttggtttggaagcttgtctcaaaaaccattacaaaatcttaaccttcaaatacattctaaatcactttaa

SEQ ID NO: 30782 - DNA, 120 bp, Artificial Sequence
  ENSG00000047597_32 (sequence is synthesized)
tttagaagataggtgagcaacttgagtgatcccaaaccaaactaacagtgctggtttgtccgacacccaaagcccacttcacacatttataaggacagagatttggtaactcatttgggt

SEQ ID NO: 30783 - DNA, 120 bp, Artificial Sequence
  ENSG00000047597_33 (sequence is synthesized)
attttgtcagttttaacccttaatatacaggtatcccagctttgggcacatgtatgtccattcactttcaggaaggggtgtcagtactttctttctgtgtggtgaaaacataagccatgg

SEQ ID NO: 30784 - DNA, 120 bp, Artificial Sequence
  ENSG00000047597_34 (sequence is synthesized)
tgaactgataatttttgtttttaaattatttatattactgaattggcaaaattacagttcacactgcagagctaggttgtcctattggcataaaacaaaccagcaacttttctcatgtgt

SEQ ID NO: 30785 - DNA, 120 bp, Artificial Sequence
  ENSG00000047597_35 (sequence is synthesized)
ttggagttaaaatgtgtttttcagttataatttcaatttttaaatttcttggtgctttgtctaattaattacatcccataacttgtcaggatagttgctccaactgaattgctatcattt

SEQ ID NO: 30786 - DNA, 120 bp, Artificial Sequence
  ENSG00000047597_36 (sequence is synthesized)
ggctggatgggggtgaagtatgtcttcaaaatatattgaagtaagttcatcaaacatgtttagacttcctctcattgctggagacagcccagtgtagagattggcacttccctgtccagc

SEQ ID NO: 30787 - DNA, 120 bp, Artificial Sequence
  ENSG00000047597_37 (sequence is synthesized)
actacaacttaattgctctatgcctcagtttccccataatacccttttccaacctacctcacaaggttatcagaaagatcaaattaaataatagatgtgaaaatgctttgaaaatgtttt

SEQ ID NO: 30788 - DNA, 120 bp, Artificial Sequence
  ENSG00000047597_38 (sequence is synthesized)
taagtgctatgcatatttatagagttattatagttattcaaatccataagcaggttatttttatttttttactgtttgaaaagaaataagtagtgtcattcatatgagttcctgagtgga

SEQ ID NO: 30789 - DNA, 120 bp, Artificial Sequence
  ENSG00000047597_39 (sequence is synthesized)
tatgcgaatctttggtcttctcgacaggtgccctttctcttaccactagttgcttacaaaaatagcacccaaacacatggcacttggaagaaaaagacccactgaatctgagaaagtact

SEQ ID NO: 30790 - DNA, 120 bp, Artificial Sequence
  ENSG00000047597_40 (sequence is synthesized)
ttctggtggcaaatgaatttatcattttagtatagttttcgataaaggatatagcaacatcttttgataattgtgctttacaacttgaatgctgattcaaggcattatttggatgtgagt

SEQ ID NO: 30791 - DNA, 120 bp, Artificial Sequence
  ENSG00000047597_41 (sequence is synthesized)
ttaatcttttcagccttgtaaatgggaaaatatatattaaaattgattgtcaaatacagcatttctttggaaaccaccttaaaacattagtgctatggttatgagtgtatgtgccagtac

SEQ ID NO: 30792 - DNA, 120 bp, Artificial Sequence
  ENSG00000047597_42 (sequence is synthesized)
ttaccagtcaatgcattgtggatatgagctttcgttgactgcttctctgcagtcgttgatgctaataaatattgtcctgtttcttcatataataaattaatttttcaatttctccttgta

SEQ ID NO: 30793 - DNA, 120 bp, Artificial Sequence
  ENSG00000047617_0 (sequence is synthesized)
ccaggctccttctctataaagtgggatctatcatgaccagcctaccttatcaatataggagagaaaatcttcatgcctgaagatatacccctgctccctggctccccacgccggctgagc

SEQ ID NO: 30794 - DNA, 120 bp, Artificial Sequence
  ENSG00000047617_1 (sequence is synthesized)
cctcaggcagggtccagagggggccagggccccaaacatggacagcagtgtctcaagatgccaggtccccgggccccaggtctgcagggcggttccaacagagatcctggccagccctgc

SEQ ID NO: 30795 - DNA, 120 bp, Artificial Sequence
  ENSG00000047617_2 (sequence is synthesized)
ggtggagagagcacccgcagcagctctgtcatcaacaactatctggatgccaatgagcctgtgtccttggaggcccgtcttagccgcatgcacttccatgacagtcagaggaaggtcgac

SEQ ID NO: 30796 - DNA, 120 bp, Artificial Sequence
  ENSG00000047617_3 (sequence is synthesized)
tatgtacttgcctaccactaccggaaacgcggggtgcacctggcccaaggcttccctggccactcgctggctatcgtctccaatggggagacaggcaaggagcctcatgctgggggccca

SEQ ID NO: 30797 - DNA, 120 bp, Artificial Sequence
  ENSG00000047617_4 (sequence is synthesized)
ggtgacattgagctgggaccgctcgatgccctggaggaggagaggaaggagcagcgggaggaatttgagcacaatctgatggaggctggactggagcttgagaaggacttggagaataaa

SEQ ID NO: 30798 - DNA, 120 bp, Artificial Sequence
  ENSG00000047617_5 (sequence is synthesized)
agccagggatccatctttgtccggatacacgccccgtggcaggtgctggccagagaggcagaattcttgaagatcaaagttcctaccaagaaagagatgtacgagatcaaagcaggaggc

SEQ ID NO: 30799 - DNA, 120 bp, Artificial Sequence
  ENSG00000047617_6 (sequence is synthesized)
agcattgcaaagaagttcagcgcggctctgcagaagctgagctcgcacctgcagccccgagttccagaacacagcaacaacaagatgaaaaacctctcctacccattctccagggagaag

SEQ ID NO: 30800 - DNA, 120 bp, Artificial Sequence
  ENSG00000047617_7 (sequence is synthesized)
atgtacctgtacaacatccaggaaaaggacaccttctttgataatgccacccgcagccgcattgtgcacgagatcctgaagcgcacagcctgctcccgagccaacaacacgatgggtatt

SEQ ID NO: 30801 - DNA, 120 bp, Artificial Sequence
  ENSG00000047617_8 (sequence is synthesized)
aactctctgatcgcaaacaatatctatgaggctgcctaccctcttcatgacggtgaatacgatagtccagaggacgatatgaatgacaggaagctgctatatcaagaatgggcgcgctat

SEQ ID NO: 30802 - DNA, 120 bp, Artificial Sequence
  ENSG00000047617_9 (sequence is synthesized)
ggagtgttctataagttccaacctattgacctcatcagaaagtattttggagaaaaaattggactgtattttgcctggctgggattatatacatcattcctcatcccatcttctgtaatt

SEQ ID NO: 30803 - DNA, 120 bp, Artificial Sequence
  ENSG00000047617_10 (sequence is synthesized)
ggagtgattgtgtttctttatggatgtgcaacaattgaagaagatattcccagcagagagatgtgtgaccagcagaatgccttcaccatgtgtcccctgtgtgacaagtcctgtgattac

SEQ ID NO: 30804 - DNA, 120 bp, Artificial Sequence
  ENSG00000047617_11 (sequence is synthesized)
tggaacctcagctcagcctgtgggaccgcgcaggccagccacctgtttgacaaccctgccaccgtcttcttctctatcttcatggctctgtgggctaccatgttcctggaaaactggaag

SEQ ID NO: 30805 - DNA, 120 bp, Artificial Sequence
  ENSG00000047617_12 (sequence is synthesized)
aggctacagatgcgactgggctacttttgggacctgactggcatagaagaggaagaagaacgtgcccaggaacattccaggcctgagtatgaaaccaaagttcgagagaaaatgctaaag

SEQ ID NO: 30806 - DNA, 120 bp, Artificial Sequence
  ENSG00000047617_13 (sequence is synthesized)
gagagcaaccagtctgctgtccagaaattggaaacaaacacgacggagtgtggcgatgaggatgatgaagataaactgacctggaaggatcgtttcccaggttacctgatgaactttgcc

SEQ ID NO: 30807 - DNA, 120 bp, Artificial Sequence
  ENSG00000047617_14 (sequence is synthesized)
tccatcttattcatgattgccctgacattctcaatcgtctttggggtgatagtgtatcgaataacaactgcagccgctctgtctctcaataaggctacacgctccaatgtccgggtgaca

SEQ ID NO: 30808 - DNA, 120 bp, Artificial Sequence
  ENSG00000047617_15 (sequence is synthesized)
gaagagcgcctgatcctcaaagctttcttgctcaagtttgtcaatgcctactcccccatcttctatgtggcctttttcaaagggaggtttgtgggcaggcctggaagctacgtctatgta

SEQ ID NO: 30809 - DNA, 120 bp, Artificial Sequence
  ENSG00000047617_16 (sequence is synthesized)
ttcgatggttaccgcatggaagagtgtgctccagggggctgtctcatggagctctgcattcagctcagcatcatcatgttggggaagcagttgatccagaacaacatctttgagattgga

SEQ ID NO: 30810 - DNA, 120 bp, Artificial Sequence
  ENSG00000047617_17 (sequence is synthesized)
gtcccgaagctaaagaaactatttcgaaagctgaaagatgagaccgaagctggagaaactgactctgcccattcgaaacatccagagcagtgggacctagactacagcttggaaccatac

SEQ ID NO: 30811 - DNA, 120 bp, Artificial Sequence
  ENSG00000047617_18 (sequence is synthesized)
acaggactgactccggagtacatggaaatgatcatccagtttggttttgtcaccctcttcgtggcctcctttcccctggcacctgtgtttgccctcctcaacaacgtcattgaagtgcgg

SEQ ID NO: 30812 - DNA, 120 bp, Artificial Sequence
  ENSG00000047617_19 (sequence is synthesized)
ctcgatgcaaagaagtttgttacagagctgagacggccggatgctgtaagaaccaaagatatcggaatctggtttgacattctctctggaattggcaagttctctgttatcagcaacgct

SEQ ID NO: 30813 - DNA, 120 bp, Artificial Sequence
  ENSG00000047617_20 (sequence is synthesized)
tttgtcattgcgatcacctccgactttatcccccgcctggtgtaccagtactcctacagtcacaatgggactctgcacggctttgtcaaccacaccctctcctttttcaacgtcagccag

SEQ ID NO: 30814 - DNA, 120 bp, Artificial Sequence
  ENSG00000047617_21 (sequence is synthesized)
ctgaaggaggggacgcagccagaaaactcacagtttgaccaggaggttcagttctgcaggtttaaggattaccgagagccgccatgggccccgaacccttatgagttttcgaaacagtac

SEQ ID NO: 30815 - DNA, 120 bp, Artificial Sequence
  ENSG00000047617_22 (sequence is synthesized)
tggtttattctgtccgcccgtctggcttttgtcataatcttccagaacctcgtgatgttcctgagcgtcctcgtggactggatgattccagacatccccacggacatcagcgaccagatc

SEQ ID NO: 30816 - DNA, 120 bp, Artificial Sequence
  ENSG00000047617_23 (sequence is synthesized)
aagaaagagaagagcttattagtggatttcttcctgaaagaggagcatgagaagctcaagctgatggatgagccggctctgaggagcccaggaggtggggatcgaagcaggagccgggca

SEQ ID NO: 30817 - DNA, 120 bp, Artificial Sequence
  ENSG00000047617_24 (sequence is synthesized)
gccagctcagcaccttcaggccaaagccagctgggcagcatgatgtcgtcaggctctcagcacaccaatgtgtgagcagttcagcctgcagcagaggagggcacggcagcagagacacgc

SEQ ID NO: 30818 - DNA, 120 bp, Artificial Sequence
  ENSG00000047617_25 (sequence is synthesized)
acatgcacgtaagcatgttcctacacccacatggcgtgctgtctgtctgcaggggcctggcttgatggggtcttgaagagggggcagtgtgtaaaaagaaagagcctgacagaatgagtg

SEQ ID NO: 30819 - DNA, 120 bp, Artificial Sequence
  ENSG00000047617_26 (sequence is synthesized)
taggaaggaagagaaatgatgctacatctcagaaacttcaagcttaagtttcttttaggtccccttttaagctgcatccttttgagggattggaaccccactggggtctctccaccccag

SEQ ID NO: 30820 - DNA, 120 bp, Artificial Sequence
  ENSG00000047617_27 (sequence is synthesized)
agtctcaggcaccgcgagcattcccatgtaccctggggcaccctcttgtacttcaccatcatttctgactttgaccagctgtaagagaaatgcagtcaggagcacagcatcccctactta

SEQ ID NO: 30821 - DNA, 120 bp, Artificial Sequence
  ENSG00000047617_28 (sequence is synthesized)
ctatcactacaagaaaactgagtcacttgcagtggggctgccacagtctcagcagatgcaaattaagttacaaggctgaatggtgcagccgctggacctgatagtaaggtgcaaaggtcc

SEQ ID NO: 30822 - DNA, 120 bp, Artificial Sequence
  ENSG00000047617_29 (sequence is synthesized)
aaacctgggcttgtctccacttcacgtcacaaaaacgtttggagctaaatgcagataaccatcattttatgaaagttcagatttaaaataataaaataaatggacacattctttataaag

SEQ ID NO: 30823 - DNA, 120 bp, Artificial Sequence
  ENSG00000047617_30 (sequence is synthesized)
gaggtggggtggatctgtagggatggcctcagggaatgtcatgtccctccctttccagggtgccatgaacatagggcagtaggagtgaggaggacagggtgccatggggactgatgttat

SEQ ID NO: 30824 - DNA, 120 bp, Artificial Sequence
  ENSG00000047617_31 (sequence is synthesized)
agagagggacaacgtgcgcaagtcgagtatggagatgacgctaccatgttcctggaaaactggaagaggctacagatgcgactgggctacttttgggacctgactggcatagaagaggaa

SEQ ID NO: 30825 - DNA, 120 bp, Artificial Sequence
  ENSG00000047617_32 (sequence is synthesized)
aagattccctatggccacccttgactttgatgtttattggtcgccattttagctcagagaataatggagcagggaaggagttttgttgttgccctcactcccagctgtggggcacatctg

SEQ ID NO: 30826 - DNA, 120 bp, Artificial Sequence
  ENSG00000047617_33 (sequence is synthesized)
tttctccagctgggagttggcttgttgaaagttaaagtttgaggtctgacgatagttggtgggatgaccagggatatccctctgcctctggtgaaactgctctgcaaagcactgggcccc

SEQ ID NO: 30827 - DNA, 120 bp, Artificial Sequence
  ENSG00000047617_34 (sequence is synthesized)
aaccagagaatatgcagatggtaccaaagccgcatctggcccctttgaaaccatgaggccagctcctccacaactgctataaagaaaagtcttcatcctaattaaacatctgggaaaaac

SEQ ID NO: 30828 - DNA, 120 bp, Artificial Sequence
  ENSG00000047617_35 (sequence is synthesized)
accagccttcccagtacattgttattttgctgtgagtagaattatttacagctttcatccctggtcatctgatctacagcttagcccattctctctggacccagaaggcttttgtagaat

SEQ ID NO: 30829 - DNA, 120 bp, Artificial Sequence
  ENSG00000047617_36 (sequence is synthesized)
acaagagaggcaagaactcgggcatgtgtttggacaacacgttggcatgtctccacccctcaactccatccaccccataacaggtgaaaatagcacatggcgtatgccttgaaggctaaa

SEQ ID NO: 30830 - DNA, 120 bp, Artificial Sequence
  ENSG00000047617_37 (sequence is synthesized)
ggaagagtgtgtgacttggtgaagcagctcccaagcacccaagatgcccaggagcctctggaagcagcagttggtccccagtgtcttcccctgaacccctaggaacatgtagggttcaag

SEQ ID NO: 30831 - DNA, 120 bp, Artificial Sequence
  ENSG00000047617_38 (sequence is synthesized)
agcatgatgtcgtcaggctctcagcacaccaatgtgtgagcagttcagcctgcagcagaggagggcacggcagcagagacacgcacatgcactcctgtgtgtgtgaatatattccacata

SEQ ID NO: 30832 - DNA, 120 bp, Artificial Sequence
  ENSG00000047617_39 (sequence is synthesized)
tcctcttgtggtcagaagttggctgcagtctttccaggcatcccatccagaaatgacaatgtccaaaggaagaatcttgcatctcttgtcaagaatgaagaaacaaccatggtctcccct

SEQ ID NO: 30833 - DNA, 120 bp, Artificial Sequence
  ENSG00000047617_40 (sequence is synthesized)
gaagagtaagccctctgaaagtggatagctgaacaatgtcaggttcttttaggagggtcaaaggagaaatggctgttggatatgcattaaataaactttgcttacaattctcatttagaa

SEQ ID NO: 30834 - DNA, 120 bp, Artificial Sequence
  ENSG00000047617_41 (sequence is synthesized)
ttagttgggactggtgcttttgcaggattagaaattcactccaacttactcaaataacaagagatttattttaagaaagcaagagacaagctcctgggtgtaggaaatgaaatataacca

SEQ ID NO: 30835 - DNA, 120 bp, Artificial Sequence
  ENSG00000047617_42 (sequence is synthesized)
aacaaaggaacattcttccagctgaactgcacactagcagggacttcacctacttcatctgcagttctcacaacagccatgcaacatttctcatcctccttattcagataaagaaggcag

SEQ ID NO: 30836 - DNA, 120 bp, Artificial Sequence
  ENSG00000047617_43 (sequence is synthesized)
cgggttaaggggacggaagaaaatgacggggcaaaaagcacctacttgctgtatttgaagaaggttaccagatacttccaccttgcgacattggccagaaatactgtttatggaaacacc

SEQ ID NO: 30837 - DNA, 120 bp, Artificial Sequence
  ENSG00000047617_44 (sequence is synthesized)
cttggaatttgacccttgccctcccaaccctacctcaaacttagaacatctgcacccacttaatggacatctgttacacacttgagccaacgaccctaaagaaagttaaaacagcattca

SEQ ID NO: 30838 - DNA, 120 bp, Artificial Sequence
  ENSG00000047617_45 (sequence is synthesized)
tcacagtttgaaaataaagacaaaggaataaaagccagggatccatctttgtccggatacacgccccgtggcaggtgctggccagagaggcagaattcttgaagatcaaagttcctacca

SEQ ID NO: 30839 - DNA, 120 bp, Artificial Sequence
  ENSG00000047617_46 (sequence is synthesized)
aagcagaaggcagagccctggggtgactcaggtgtgacgttgccaaggtgccaaagatgagaagtggcagagctggcaccaggacctggtctccgtgtttcccccactgccctgggctgg

SEQ ID NO: 30840 - DNA, 120 bp, Artificial Sequence
  ENSG00000047617_47 (sequence is synthesized)
gggaaagcacctctggaagggcagggatccagatgagcaggaaacactgtggacttcctttctctagaggcctctcagaatgaataaaagccagggatccatctttgtccggatacacgc

SEQ ID NO: 30841 - DNA, 120 bp, Artificial Sequence
  ENSG00000047621_0 (sequence is synthesized)
agtgcaggacgcgctgacagctcgagtgagcggactgcccaggacttcggaactagacgagttctgtagaaatcctgtcaaagaatatgaagaaaaacagagaaagattctgcaatagag

SEQ ID NO: 30842 - DNA, 120 bp, Artificial Sequence
  ENSG00000047621_1 (sequence is synthesized)
agagagaatttgtatataaatttaaagtaggaagtcagtgcttagaactgagagtgccactcaaatttcctgttcaagagaatgccagtcatttgcatggacgtctgatgctgctgcaca

SEQ ID NO: 30843 - DNA, 120 bp, Artificial Sequence
  ENSG00000047621_2 (sequence is synthesized)
gtttaccgtgctttatagaaaaagacttaaaagaagctctgactcagtttatagaagaagaatccctcagcgattatgatagagatgctgaagcatccctggcagctgtgaaatcaggtg

SEQ ID NO: 30844 - DNA, 120 bp, Artificial Sequence
  ENSG00000047621_3 (sequence is synthesized)
aagtagatttacatcagctggcgagtacatgggccaaagcttatgctgagaccacgttagagcatgcaaggcctgaagaacccagctgggatgaagattttgcagatgtgtaccatgact

SEQ ID NO: 30845 - DNA, 120 bp, Artificial Sequence
  ENSG00000047621_4 (sequence is synthesized)
taattcattctcctgcctctgaaactctcttaaatttggaacataattactttgttagtatctcagaactgattggtgaaagagatgtggagctgaaaaaattacgagagagacaaggta

SEQ ID NO: 30846 - DNA, 120 bp, Artificial Sequence
  ENSG00000047621_5 (sequence is synthesized)
ttgaaatggaaaaagtcatgcaggaattgggaaaatcactgacagatcaagatgtaaattcactggctgctcagcattttgaatcccagcaagacctagaaaataaatggtcgaatgaat

SEQ ID NO: 30847 - DNA, 120 bp, Artificial Sequence
  ENSG00000047621_6 (sequence is synthesized)
taaaacaatcaactgccatccaaaaacaagagtatcaagaatgggtaataaaacttcaccaagacctaaaaaaccccaacaacagctcccttagtgaggaaattaaagttcagccaagtc

SEQ ID NO: 30848 - DNA, 120 bp, Artificial Sequence
  ENSG00000047621_7 (sequence is synthesized)
agttcagagaatctgtagaagcaattggaaggatttatgaggaacagagaaagttagaagaaagttttaccattcacttaggagcccagttgaagaccatgcataatttgagattgctga

SEQ ID NO: 30849 - DNA, 120 bp, Artificial Sequence
  ENSG00000047621_8 (sequence is synthesized)
gagcagatatgctggacttctgtaagcataaaagaaatcatcgaagtggtgtgaaacttcatcggctccaaacagctctgtcactttattctacatctctctgtggcctggttttactag

SEQ ID NO: 30850 - DNA, 120 bp, Artificial Sequence
  ENSG00000047621_9 (sequence is synthesized)
tagataatcgaattaattcatatagtggtattaaaagagattttgccacagtttgccaagaatgcactgacttccatttcccccgaattgaagagcaattagaagttgtccaacaggtgg

SEQ ID NO: 30851 - DNA, 120 bp, Artificial Sequence
  ENSG00000047621_10 (sequence is synthesized)
tactttatgctagaacccagcgcaggagtaaattgaaagaatcacttgattctggaaaccaaaatggaggaaatgatgataagactaagaatgctgagaggaactatttaaatgttttac

SEQ ID NO: 30852 - DNA, 120 bp, Artificial Sequence
  ENSG00000047621_11 (sequence is synthesized)
ctggggaattttatattacacggcattctaatctctcagaaatccatgttgctttccatctctgtgtggatgaccatgtgaaatcgggaaacatcactgctcgtgatcctgccattatgg

SEQ ID NO: 30853 - DNA, 120 bp, Artificial Sequence
  ENSG00000047621_12 (sequence is synthesized)
gactccgaaatatactcaaagtttgctgtacccatgacatcacaacaataagcattcctctcttgctggtacatgatatgtcagaggaaatgactataccctggtgcttaaggagagcgg

SEQ ID NO: 30854 - DNA, 120 bp, Artificial Sequence
  ENSG00000047621_13 (sequence is synthesized)
aacttgtgttcaagtgtgtcaaaggtttcatgatggaaatggcttcatgggatggaggaatttctaggacagtgcaatttctagtaccacagagtatttctgaagaaatgttttatcaac

SEQ ID NO: 30855 - DNA, 120 bp, Artificial Sequence
  ENSG00000047621_14 (sequence is synthesized)
ttagtaacatgcttccccagatcttccgagtatcatcaacactcactctgacatccaagcactaaacccttatagattgacatgctggcagaagatgattgttaaactctccaggaactt

SEQ ID NO: 30856 - DNA, 120 bp, Artificial Sequence
  ENSG00000047621_15 (sequence is synthesized)
aatttatatactgcacaaactggtgatcaacccctaacttaaacacttaaagtctctttatgaatttctctttttttcttctctgtgttacctgtgaatattagtaatctaaaacttttt

SEQ ID NO: 30857 - DNA, 120 bp, Artificial Sequence
  ENSG00000047621_16 (sequence is synthesized)
atttatcacacatggacacttgggaaaggaaacttgattatatttacatggaggcatttgactttttcaagaggcttgactcgtctcaggtgcaatccttaattaaacatacaaacaaaa

SEQ ID NO: 30858 - DNA, 120 bp, Artificial Sequence
  ENSG00000047621_17 (sequence is synthesized)
ttttccttttactttctttgccaaaacaaaatgtaaaagcactgaaatatacattgcaagtacaaatttcctgtgaaaatctttttatagaaacacaaatgtataagacaaatgtgcttg

SEQ ID NO: 30859 - DNA, 120 bp, Artificial Sequence
  ENSG00000047621_18 (sequence is synthesized)
ttcttttaaattctcctgtttcagaatctctttttaatctactcctaaggatgtacaagttagagtcagaagacgttttggattttttccctctctctcatcctcccgctgtgcccttgc

SEQ ID NO: 30860 - DNA, 120 bp, Artificial Sequence
  ENSG00000047621_19 (sequence is synthesized)
acttgcatattaataacatttcatggactgggaaatagtgttcttttttgcaagcttgatgtcaagttagtctaaaccagcacctggcagtattttagtgctcatcaacattgtgacaat

SEQ ID NO: 30861 - DNA, 120 bp, Artificial Sequence
  ENSG00000047621_20 (sequence is synthesized)
cacacaaggaagatcatttctacatttctgtcctccctgcgttctcagcttgcttaaccattcctctacctcttgcatttttttgcggataaatgtatccccatttctgcttctctgttt

SEQ ID NO: 30862 - DNA, 120 bp, Artificial Sequence
  ENSG00000047621_21 (sequence is synthesized)
cccctccttttccattgtttttccttatggtactactttctcaggtgctacatatcatatatttgtcccatctataacatatttaaatgctataagtagtaactccattaaacaaaggca

SEQ ID NO: 30863 - DNA, 120 bp, Artificial Sequence
  ENSG00000047621_22 (sequence is synthesized)
tttacaaaagcacacaggtgtttagaaaagcaatagtttcatcaattccaagttatgtggatattgtaactggccacaagaatgaaatggagggcatttggtgtcataagatggcatgtc

SEQ ID NO: 30864 - DNA, 120 bp, Artificial Sequence
  ENSG00000047621_23 (sequence is synthesized)
ttgatgacaagaaacaaaacgcccttcattaatatgcctcagtgtaataactattatagaaactgttggcaagcagagtgctttcctataacagaatgtgtcttaattttctactcgagg

SEQ ID NO: 30865 - DNA, 120 bp, Artificial Sequence
  ENSG00000047621_24 (sequence is synthesized)
gaaaggtttgtccaggtaacaacactaaagacaaccctaagaacacccactccagcagtatgtccattagacactaaaactctccaaattatttgtcagggagcctggcgattctgccaa

SEQ ID NO: 30866 - DNA, 120 bp, Artificial Sequence
  ENSG00000047621_25 (sequence is synthesized)
gaaggcaggtgttttgcccttagagcctatacagttctcttggagaaattgtctttcaggcaccactgttaatcactgagactgattctaatgcaaagcagggaagacagaggcagaaac

SEQ ID NO: 30867 - DNA, 120 bp, Artificial Sequence
  ENSG00000047621_26 (sequence is synthesized)
caggagagtggtagatcagtgcagcccagatatcggaatggaggagcaaagtttcattcacggatgtttgttgaatgctgctgcccaactcttcctttgtcacctctaggctattccact

SEQ ID NO: 30868 - DNA, 120 bp, Artificial Sequence
  ENSG00000047621_27 (sequence is synthesized)
aagttacttataaactggtggctttaactgagggctgtgtaaaggtactatttggcatgtgaagtcaggataaatttatcgaatgtccgttttccacatgcaactgtgttacagaagtag

SEQ ID NO: 30869 - DNA, 120 bp, Artificial Sequence
  ENSG00000047621_28 (sequence is synthesized)
taaaattggaagaatcatgtttatggtgttaccactgatggaaacacacaaacaccaagctaataataaatatataacttaaaaagctaattatatgcactgaaatggtgggaattttag

SEQ ID NO: 30870 - DNA, 120 bp, Artificial Sequence
  ENSG00000047621_29 (sequence is synthesized)
tgatgcagtaattgaggagtctggagttttgtatttggaccaagaattatgagatgaggatctttttctgagtgttctaaagggcttcttgagggggagtggtttaaagcacttcatgaa

SEQ ID NO: 30871 - DNA, 120 bp, Artificial Sequence
  ENSG00000047621_30 (sequence is synthesized)
tgatgtgaagaaggtaccttgggctgagacagcattctaggtacagatggcactctgttcaaccaactgtggatggaaaatattctgaaaaaaaatacaataaaaattttaaaaatacaa

SEQ ID NO: 30872 - DNA, 120 bp, Artificial Sequence
  ENSG00000047621_31 (sequence is synthesized)
ggtgtggaaaaagtatgtcggcaagtcagctggtttcccagtgcaggacgcgctgacagctcgagtgagcggactgcccaggacttcggaactagacgagaaatcctgtcaaagaatatg

SEQ ID NO: 30873 - DNA, 120 bp, Artificial Sequence
  ENSG00000047621_32 (sequence is synthesized)
ggtgtggaaaaagtatgtcggcaagtcagctggtttcccagtgcaggacgcgctgacagctcgagtgagcggactgcccaggacttcggaactagacgagagaatgccagtcatttgcat

SEQ ID NO: 30874 - DNA, 65 bp, Artificial Sequence
  ENSG00000047621_33 (sequence is synthesized)
gggtctgaaaaacgcaatattcgggtgggagtgactcgattttccaggtgcgtccgtcacccctt

SEQ ID NO: 30875 - DNA, 120 bp, Artificial Sequence
  ENSG00000047621_34 (sequence is synthesized)
ccaggacctaaatattaggattctggaaaccaaaatggaggaaatgatgataagactaagaatgctgagaggaactatttaaatgttttacctggggaattttatattacacggcattct

SEQ ID NO: 30876 - DNA, 120 bp, Artificial Sequence
  ENSG00000047621_35 (sequence is synthesized)
atgctgaggtaagaaaataggtcagattgtaaatttcaaggatattctggattttggtgaaaatttttaaaatgctgtggtaatcctgaaatcgttataagatcctttttctccacatac

SEQ ID NO: 30877 - DNA, 120 bp, Artificial Sequence
  ENSG00000047621_36 (sequence is synthesized)
tagctgtatgtctttttaatttgctagtgaaagttcaagacaattttatgctgtgcttttaccaccttttgcattataggctttatgtggattatttggggggcaatggttattggttag

SEQ ID NO: 30878 - DNA, 120 bp, Artificial Sequence
  ENSG00000047621_37 (sequence is synthesized)
tttgaaatagaactttagttttatgttctagatacatacacctaaatacttaaatactatctttatttctttagtttccactccatgcagtaaacattggttgaatgccaaacactctct

SEQ ID NO: 30879 - DNA, 120 bp, Artificial Sequence
  ENSG00000047621_38 (sequence is synthesized)
ggaactacagaaaatacaagctgatgagatttttcttggcttgtagagctacacagaaaaaagagtgatggtaggaagcatggattttaatgtttgagaaagactgctccagcgttcagc

SEQ ID NO: 30880 - DNA, 120 bp, Artificial Sequence
  ENSG00000047634_0 (sequence is synthesized)
ggcgtcgcgggagctctctgatccactcaggggtcagggcatcactggtctcgcgtgcgcgtgaccaggcccggtttccggtgccaggacctttccgaagcgtcgagtggcctaacggtc

SEQ ID NO: 30881 - DNA, 120 bp, Artificial Sequence
  ENSG00000047634_1 (sequence is synthesized)
acagctgtcgcccatcggagaggcaggactactgcgagcagttttaccgcgacctccggaggccggcgtgacaggctctgtcactaaaataggagtagaggtttaccactcttaggtgac

SEQ ID NO: 30882 - DNA, 120 bp, Artificial Sequence
  ENSG00000047634_2 (sequence is synthesized)
taagcagtatcacaaataaaccctccagcaagtttaaaaataattaggtccaactcagaggaagtggagtttctcctgttgcacaaaaatgatgtctaacagctccagtgaaatcgatgt

SEQ ID NO: 30883 - DNA, 120 bp, Artificial Sequence
  ENSG00000047634_3 (sequence is synthesized)
gcaggaaccgaatattgtatctgacgcatcctgtaatactgaagagcaactgaagacagttgatgatgtccttattcattgccaggttatatatgatgctctgcaaaacctggataagaa

SEQ ID NO: 30884 - DNA, 120 bp, Artificial Sequence
  ENSG00000047634_4 (sequence is synthesized)
gattgatgtgattcgtagaaaggtttcaaaaatccaacgtttccatgcgagatccctgtggacaaatcataagcgatatggatataaaaagcattcttaccggcttgttaaaaagcttaa

SEQ ID NO: 30885 - DNA, 120 bp, Artificial Sequence
  ENSG00000047634_5 (sequence is synthesized)
actccagaaaatgaagaaaaatgaggtttacgagacattctcctaccctgaaagttacagccccactttaccagtgtcaaggcgtgagaataattccccgagcaaccttccaaggccatc

SEQ ID NO: 30886 - DNA, 120 bp, Artificial Sequence
  ENSG00000047634_6 (sequence is synthesized)
cttttgcatggaagaataccagcgagctgagctggaggaggacccgatcctcagccgcactccgagtccagtgcatccctcagatttctctgagcataattgtcagccgtattatgcatc

SEQ ID NO: 30887 - DNA, 120 bp, Artificial Sequence
  ENSG00000047634_7 (sequence is synthesized)
tgatggtgcaacgtatggttcttcttcagggctctgccttggcaaccctcgggctgacagcatccacaacacttactcaactgaccatgcttctgcagcaccaccttcagttacaaggtc

SEQ ID NO: 30888 - DNA, 120 bp, Artificial Sequence
  ENSG00000047634_8 (sequence is synthesized)
accagttgaaaatgacggttacatagaggaaggaagcatcactaagcacccttcaacctggtcggtggaagcagtggtcctatttctaaaacaaacagatcctcttgcattatgccctct

SEQ ID NO: 30889 - DNA, 120 bp, Artificial Sequence
  ENSG00000047634_9 (sequence is synthesized)
tgtcgacctcttcagaagccatgaaattgacgggaaggctctgctcctactcacgagtgacgtgttgctgaagcacttgggggtgaagctgggaacggctgtgaagctatgctactacat

SEQ ID NO: 30890 - DNA, 120 bp, Artificial Sequence
  ENSG00000047634_10 (sequence is synthesized)
tgaccgacttaaacaaggaaaatgctttgaaaattgaaaaaatccttgtgcaaatttagattgggccaacttctagaggcaccaatgccttcttagtgtggaatcatttttctgcccttt

SEQ ID NO: 30891 - DNA, 120 bp, Artificial Sequence
  ENSG00000047634_11 (sequence is synthesized)
tgttatagtccagtctacttctttaaaaaccatttaaactgctagatagtattagaatagtccaatagaaaattcattctttataggtctttaaaaattacttttattatattgtttaca

SEQ ID NO: 30892 - DNA, 120 bp, Artificial Sequence
  ENSG00000047634_12 (sequence is synthesized)
tcatgcaagaaacagaaaaaaaaaaaaaccctttgattctggttcatctcgatacagagaaccaaaacagctaagagaggtattatcagggttgacaactcctatgattgaatctatggg

SEQ ID NO: 30893 - DNA, 120 bp, Artificial Sequence
  ENSG00000047634_13 (sequence is synthesized)
aattattcctcagaagagaatttaaaggtgtacccatatatatctctttctggagtattttatctgtctgatgttgcagtattctacaagtttccagaaagagaatagccatataaatta

SEQ ID NO: 30894 - DNA, 120 bp, Artificial Sequence
  ENSG00000047634_14 (sequence is synthesized)
tccagaaagagaatagccatataaattattttcctttctgctattatttctctatatgttttatttattcagatttagagtaaaaaataagcatataaacttttattatgtgctcttaac

SEQ ID NO: 30895 - DNA, 120 bp, Artificial Sequence
  ENSG00000047634_15 (sequence is synthesized)
gaatggttattttatgcaagaaatattgtaccgcaagggtggtttggatgaagtctgactactttttttcaaacaaactattatattaaaactgtcatattttggctaagtttggaccta

SEQ ID NO: 30896 - DNA, 120 bp, Artificial Sequence
  ENSG00000047634_16 (sequence is synthesized)
taactacactttcattgtttgcatctctctatgaagatacgtctgtccaaacttttaaaaggcataactgtattttatgtgtttattctttatatagatagtattttatattttattctc

SEQ ID NO: 30897 - DNA, 120 bp, Artificial Sequence
  ENSG00000047634_17 (sequence is synthesized)
acccgaagtattcacacaatctttttaaaaaaaatttgaaatggcattttgtattgccacagaggtaggatgagccatatattagtgaaatgttttattttgtaaaatataaatggatta

SEQ ID NO: 30898 - DNA, 120 bp, Artificial Sequence
  ENSG00000047634_18 (sequence is synthesized)
tttgccatcattagtacctctcaacttactttttagaggacaagaaacaatctgtagattggtttccatacagggaagttctccgtcctatgcaatgtttctaattaatttgcttaattc

SEQ ID NO: 30899 - DNA, 120 bp, Artificial Sequence
  ENSG00000047634_19 (sequence is synthesized)
tgagccattaatcctgctacactttgaatgatacattaattcagactaatctttgggggctttattttgtaagttagaactttcaagggaaacatgttcaacactattattttgttataa

SEQ ID NO: 30900 - DNA, 120 bp, Artificial Sequence
  ENSG00000047634_20 (sequence is synthesized)
atttataactttgttattacattgtgtaacaaatataaggtttacgagctatgagaattggtgctatcaccattagctatttgctgtaatgtcaagaaaatgttcaccagatgcaagaat

SEQ ID NO: 30901 - DNA, 120 bp, Artificial Sequence
  ENSG00000047634_21 (sequence is synthesized)
gtaccttttctttttagaaagccaaatgtactttagacatgaatgcaactatttaaagaatagcttcatcaatgttattccttacatgtcataagattcttacttaaacttggtcttctt

SEQ ID NO: 30902 - DNA, 120 bp, Artificial Sequence
  ENSG00000047634_22 (sequence is synthesized)
tcaaattgtttgtatgaagatgctgtacccacttgaacagtcctcaggtgtttacataaatactatgttttacagttttcatattttaaaatattaataaagttaaatcacaatagttca

SEQ ID NO: 30903 - DNA, 120 bp, Artificial Sequence
  ENSG00000047634_23 (sequence is synthesized)
gggaatacacgatttggcttaggggccggggctctcctgaggagagagggtttgctttgcggggaagagcgagtcttgacttcgcagcctccaatttcagccgcggtgtggaggggggtg

SEQ ID NO: 30904 - DNA, 120 bp, Artificial Sequence
  ENSG00000047634_24 (sequence is synthesized)
ctttgggtggtccccacagcctttccggagtgcccgcgcgtgtaagcttttgagatttgacaatttgtgaagtgcttggtgctgactttcggggacgacaggatccttttacagtcattc

SEQ ID NO: 30905 - DNA, 120 bp, Artificial Sequence
  ENSG00000047634_25 (sequence is synthesized)
gattcttatttctagtcatgagcaatatggcccttcagttttgaaagatttattctaaattggccatggaagaattctggttttgtcactctctaaaattcaacccaaagtccaattcta

SEQ ID NO: 30906 - DNA, 120 bp, Artificial Sequence
  ENSG00000047634_26 (sequence is synthesized)
caaattgaaaatctgtctttgttctttttactgtgctatacttctactctaaatttagtttaattttatacagtgaaatgcatagatcataagtaaatttttgttatatattttaacagt

SEQ ID NO: 30907 - DNA, 120 bp, Artificial Sequence
  ENSG00000047634_27 (sequence is synthesized)
aatatataaagctcttgtgacaatttgtgtacaagtttctttgtgaacacacacttaaatttcttttgggtgaacagacagaagttgaattactaggtcatggagttcatgtgaatttaa

SEQ ID NO: 30908 - DNA, 120 bp, Artificial Sequence
  ENSG00000047634_28 (sequence is synthesized)
ctctgtgagaatctgccatacagtttttcaaagtggttgtgctgtttttacatttctgttatattcttctatatttcttcatccttcaagttgaatcagtatgtagattattaaactata

SEQ ID NO: 30909 - DNA, 120 bp, Artificial Sequence
  ENSG00000047634_29 (sequence is synthesized)
aataatttggcttaacagaaaacaccttttttttagtcacataaggacatagatattaatgctacctaagtagtctaggcaattctcttaactactgtcagtcctaatgtttttcaaaaa

SEQ ID NO: 30910 - DNA, 120 bp, Artificial Sequence
  ENSG00000047634_30 (sequence is synthesized)
tctttggagataatgttaactgcctatcaagagtcatttttctctgacataactatgtaaaagcactttgaaaagcataaggcactatacaagggtaagatagtatatttttaaaagtac

SEQ ID NO: 30911 - DNA, 120 bp, Artificial Sequence
  ENSG00000047634_31 (sequence is synthesized)
tgaactgtaacccaattccatatgtttttgtgatttctgtcatgtattttgaaacaaaaacatacatagctaccaagtatgtttattataaaattattcccatagttcataattcattct

SEQ ID NO: 30912 - DNA, 120 bp, Artificial Sequence
  ENSG00000047634_32 (sequence is synthesized)
tagaatgaagagttattatactgaagtgtaatggctatttactccttacttatttataccctgtcttatttttaaaagttttaaggtactttagagattaatgtatcaagaaaaataggt

SEQ ID NO: 30913 - DNA, 120 bp, Artificial Sequence
  ENSG00000047634_33 (sequence is synthesized)
gctcaaatgttttctgtcttgtccacagaggggcactgttggattatttagaaatcaaaaaacatgtaacatttatttctttgttcatggttagaaatatttgcttttaaagtatttctg

SEQ ID NO: 30914 - DNA, 120 bp, Artificial Sequence
  ENSG00000047634_34 (sequence is synthesized)
gtgctaaaggactagtctttctaccatgaagcatataaagggttaagctcagtgaaaactgttgtcttaagtgtagttgggttaatgagaacacagttctgcaaatacatcttttcatgt

SEQ ID NO: 30915 - DNA, 120 bp, Artificial Sequence
  ENSG00000047634_35 (sequence is synthesized)
agtcatagtatttacagtgagcaaaggtcctttgatatcacaaataggcctttgtaacagcctcttgaaagtgaaattaaaccctcaacttttcttttagttctgtctttcatcttccct

SEQ ID NO: 30916 - DNA, 120 bp, Artificial Sequence
  ENSG00000047634_36 (sequence is synthesized)
tttaatttgttggtaaattttcctcagataaaaacaagaatacctacttacgatgaagatgacaacactattctttatgcgtatgaaacaaaacctgaatttgtcaataaagtatgttaa

SEQ ID NO: 30917 - DNA, 120 bp, Artificial Sequence
  ENSG00000047634_37 (sequence is synthesized)
ttgctaattgccaaatatattaacatttgctgttttaaaggaaaagatgtaaattcctcgtatactatggagttcccgtaaactcacactcaagaaaatatctctcccctgaatttgtat

SEQ ID NO: 30918 - DNA, 120 bp, Artificial Sequence
  ENSG00000047634_38 (sequence is synthesized)
gcttgctttcatcagagaatgagcacttaaccaatttactttcccctttttcttatatagtagaaaattaagagcagttttgtactcactttcagtataaaactctaaacctggattctt

SEQ ID NO: 30919 - DNA, 120 bp, Artificial Sequence
  ENSG00000047634_39 (sequence is synthesized)
ctgatataataaattcttttcttgcccccttcctcaattgtcagtttttcattctcatattaatgtgaattttaaaaatctctgcttaatttaagacttctgaaaccccttgaaaagttg

SEQ ID NO: 30920 - DNA, 120 bp, Artificial Sequence
  ENSG00000047634_40 (sequence is synthesized)
acgtttccatgcgagatccctgtggacaaatcatgtaagtgttataaaaaacatttttacaactgtgataaacctctggtttgtaaagatgccaatgagctagaagtgagagagtaccag

SEQ ID NO: 30921 - DNA, 120 bp, Artificial Sequence
  ENSG00000047634_41 (sequence is synthesized)
tatctgtgtgagattagcaaggcatgtctatacttgtaacagtagatggagactaaactctgttgggagaacgctgaagtttaggtttgataatttatgatgctgcctatttttatgttt

SEQ ID NO: 30922 - DNA, 120 bp, Artificial Sequence
  ENSG00000047634_42 (sequence is synthesized)
ttataatgtgtaaaatacaattaaaatgtaggattgaagaattatataatcaaaagggaccatttatttttaataatgtaaagcaatgttgcatggaaaataagtattaatgtatttgct

SEQ ID NO: 30923 - DNA, 120 bp, Artificial Sequence
  ENSG00000047634_43 (sequence is synthesized)
tgctactaattttatttacttttttactcactgttggtttatgctgtgtttgtgtgatttcagaagcgatatggatataaaaagcattcttaccggcttgttaaaaagcttaaactccag

SEQ ID NO: 30924 - DNA, 120 bp, Artificial Sequence
  ENSG00000047644_0 (sequence is synthesized)
cgcggtccccacgcccccagctccttccgcgccgccgccgcgggcccgggagagcgccgagctgccgctgcccgccggctgggaggaggcgcgagactacgacggtcgcgtcttttacat

SEQ ID NO: 30925 - DNA, 120 bp, Artificial Sequence
  ENSG00000047644_1 (sequence is synthesized)
cgtcttttacattgaccacaacacgcgccagacgtcgtggatcgacccccgcgaccggataacaaagccattgacctttgccgattgtgttggggacgaacttcctttaggatgggaaac

SEQ ID NO: 30926 - DNA, 120 bp, Artificial Sequence
  ENSG00000047644_2 (sequence is synthesized)
cgtatatgataaacaaattggagtttattacatggaccacataaataaacttacccagattgaggatccaagagaacagtggaggcgagagcaagagcgcatgttgaaggaatatttaat

SEQ ID NO: 30927 - DNA, 120 bp, Artificial Sequence
  ENSG00000047644_3 (sequence is synthesized)
tgtagctcaggaggctctcaatgccaagaaagaaatctaccagattaagcagcagcggttcgagctggcccaggaggaataccagcagctgcacaaaatgtgtgaggatgacagccgctc

SEQ ID NO: 30928 - DNA, 120 bp, Artificial Sequence
  ENSG00000047644_4 (sequence is synthesized)
gtacgccagctcattctctggatattcaacaaatacaaagtatgacccacaccaaattaaagcagaaatagcaagtcgtcgggataggctttccagattaaaacgagagctgacccagat

SEQ ID NO: 30929 - DNA, 120 bp, Artificial Sequence
  ENSG00000047644_5 (sequence is synthesized)
gaagcaggaactgcagtacaaagaaaagggggtggagaccctgcaagagattgatcggaagatgtcaagtactcacaccagctacaaactggatgaggcgcaggctatcatgagtgagct

SEQ ID NO: 30930 - DNA, 120 bp, Artificial Sequence
  ENSG00000047644_6 (sequence is synthesized)
ccggaccatcaagaaggccatttgcacaggcgagaaggagaggcgggacctgatgcatagcctggccaagctgaccgatagcttcaagaacagctgctccgttaccgactctctagtgga

SEQ ID NO: 30931 - DNA, 120 bp, Artificial Sequence
  ENSG00000047644_7 (sequence is synthesized)
cttccctcaccatgtaggcgtgcctggcgatgctggtgtaccccagcagttctgcgatgccggctcccagactgatatcatcggggagtttgtctttgatgataaaacaagacttgtaga

SEQ ID NO: 30932 - DNA, 120 bp, Artificial Sequence
  ENSG00000047644_8 (sequence is synthesized)
ccgagtcagacttaattggcaatatgaagaagccagaaagagagtcgccaacatccagcagcagctggcccggcttgacaatgagtcctggccaagcacggccgaggctgacagggaccg

SEQ ID NO: 30933 - DNA, 120 bp, Artificial Sequence
  ENSG00000047644_9 (sequence is synthesized)
gctgcagctcatcaaggagaaggaggccctgctgcaggagcttcagctcatcattgcacagcgccgctctgcgggagatgtggcccggctggaggaggagcgggagcgcctagaggagga

SEQ ID NO: 30934 - DNA, 120 bp, Artificial Sequence
  ENSG00000047644_10 (sequence is synthesized)
gctgcggcgtgcacgggccacctccgcacagggcgccacggagaggattctgcttcaggaaaaaaggaattgtctacttatgcagctggaagaagccacccgcttaacatcctacctcca

SEQ ID NO: 30935 - DNA, 120 bp, Artificial Sequence
  ENSG00000047644_11 (sequence is synthesized)
gtcccagttaaaaagcctgtgtgccagcaccctgacggtgtcctcggggagcagccgcgggtccctagcctccagccgtgggtctctggcctccagccggggctccctgagctcggtcag

SEQ ID NO: 30936 - DNA, 120 bp, Artificial Sequence
  ENSG00000047644_12 (sequence is synthesized)
cttcacggacatctacggcctcccgcagtacgagaagcccgacgctgagggcagccagcttctacgcttcgacctcattcccttcgactctctggggcgagatgctcccttttcagagcc

SEQ ID NO: 30937 - DNA, 120 bp, Artificial Sequence
  ENSG00000047644_13 (sequence is synthesized)
cccaggcccctcgggcttccacaagcagaggcggtccctggacacgccccagtccctggcatcgctgtcctcccgctcctcgctgtcctcgctgtcgcccccaagctcgcccctggacac

SEQ ID NO: 30938 - DNA, 120 bp, Artificial Sequence
  ENSG00000047644_14 (sequence is synthesized)
gcccttcctccctgcctcacgggactcgccgctggcgcagctggcggacagctgtgaggggccaggcctgggcgccctagacagactgcgggcacacgcctcggctatgggggacgaaga

SEQ ID NO: 30939 - DNA, 120 bp, Artificial Sequence
  ENSG00000047644_15 (sequence is synthesized)
cttaccaggcatggcggcccttcagccacacggggtccccggggatggggaagggccgcacgagcgaggacccccaccagccagcgctcccgtgggtggaacagtgactcttcgagaaga

SEQ ID NO: 30940 - DNA, 120 bp, Artificial Sequence
  ENSG00000047644_16 (sequence is synthesized)
cagtgccaagaggttggagaggagggcacgccgcatctccgcatgtctgtcggattattcgctagccagcgacagtggggtgtttgaacctctaaccaaaaggaacgaagatgccgagga

SEQ ID NO: 30941 - DNA, 120 bp, Artificial Sequence
  ENSG00000047644_17 (sequence is synthesized)
gcctgcctacggagacacggccagtaacggagatccccagatccacgtgggactcctgcgcgacagtggcagcgagtgtctcctcgtgcacgtgctgcagctgaagaacccggcggggct

SEQ ID NO: 30942 - DNA, 120 bp, Artificial Sequence
  ENSG00000047644_18 (sequence is synthesized)
ggcggtgaaggaagactgcaaagtccacatccgagtctatttgcccccactggactcgggcacgcccaacacttactgctccaaggctctggagttccaagtgccgctggtgtttaacga

SEQ ID NO: 30943 - DNA, 120 bp, Artificial Sequence
  ENSG00000047644_19 (sequence is synthesized)
agtgttcagaatccccgtgcattccagcgcgttgacactgaagtcacttcagttatacgtgtgttcagtgactccgcagctgcaggaagaactgctgggcattgctcagattaacctggc

SEQ ID NO: 30944 - DNA, 120 bp, Artificial Sequence
  ENSG00000047644_20 (sequence is synthesized)
tgactatgacagtttgagtgagatgcagctgcgctggcattccgtgcaggtgttcaccagctctgaaccatcaaggacgcgggaggctgggtgtgcaggagagagctccgcccgggaccc

SEQ ID NO: 30945 - DNA, 120 bp, Artificial Sequence
  ENSG00000047644_21 (sequence is synthesized)
tgcacacaccatctccatctccggcaagacggatgcggtgacggtgctcctggccagaaccacggcacagctgcaggcggtggagagggaactggccgaggagcgggccaagctggagta

SEQ ID NO: 30946 - DNA, 120 bp, Artificial Sequence
  ENSG00000047644_22 (sequence is synthesized)
cacggaggaggaggtcctggagatggagcgcaaggaggagcaggccgaggccatatccgagcggagttggcaagcggactcggtggatagcggctgtagcaactgcacccagaccagccc

SEQ ID NO: 30947 - DNA, 120 bp, Artificial Sequence
  ENSG00000047644_23 (sequence is synthesized)
tccgtacccagagccctgttgcatgggtatcgactccatcctgggccacccatttgctgctcaggcagggccttacagccccgagaaatttcagccctcgcctcttaaggttgataagga

SEQ ID NO: 30948 - DNA, 120 bp, Artificial Sequence
  ENSG00000047644_24 (sequence is synthesized)
aaccaacacggaagatctctttctggaagaagcagccagcctcgtgaaggagcggcccagccgccgggcccgagggtcgccttttgttcggagtggcacgattgtccgttcccagacatt

SEQ ID NO: 30949 - DNA, 120 bp, Artificial Sequence
  ENSG00000047644_25 (sequence is synthesized)
ctcgcctggagcacgaagccagtatgtttgcagactttatcgtagtgacagcgacagttcaacgctgccccggaagtccccctttgtccgaaatactttggaaagacgaacccttcgcta

SEQ ID NO: 30950 - DNA, 120 bp, Artificial Sequence
  ENSG00000047644_26 (sequence is synthesized)
ccctggacttggagctggatctccaggcgtcgagaacacggcagaggcagctgaatgaggagctctgcgccctccgtgagctgcggcagcggttggaggacgcccagctccgtggccaga

SEQ ID NO: 30951 - DNA, 120 bp, Artificial Sequence
  ENSG00000047644_27 (sequence is synthesized)
ctgacctcccaccctgggtgcttcgggacgagcggctccgtggcctgctgcgggaggccgagcggcagacaagacagaccaaacttgactaccgtcatgagcaggcggctgagaagatgc

SEQ ID NO: 30952 - DNA, 120 bp, Artificial Sequence
  ENSG00000047644_28 (sequence is synthesized)
tgaagaaggcctccaaggagatctaccagctgcgtgggcagagccacaaagagcccatccaagtgcagacctttagggagaagatagcattcttcacaaggccaaggatcaacatacctc

SEQ ID NO: 30953 - DNA, 120 bp, Artificial Sequence
  ENSG00000047644_29 (sequence is synthesized)
ctctcccagccgacgacgtctgatggagtgcattgtgcacatgaagtatttatccacctgttttattttcatgaagttcttagactagctgaatttgtctttaaaatatttgtgcaaagc

SEQ ID NO: 30954 - DNA, 120 bp, Artificial Sequence
  ENSG00000047644_30 (sequence is synthesized)
tattaatatacacattttgtaaaaaaaaaaaaaaaacacgtatatctatacatatatattttataatagtgacggcaacagggcttggtttttccttgttgtgaaatcgacatctctgaa

SEQ ID NO: 30955 - DNA, 120 bp, Artificial Sequence
  ENSG00000047644_31 (sequence is synthesized)
gacaggttattttataaaagatcaactatcatgttaagaatgtacagtttttatgctgttttatttgacttaaaggctggaagacagaaacgaagtgagttcaggcaaattcactgtatt

SEQ ID NO: 30956 - DNA, 120 bp, Artificial Sequence
  ENSG00000047644_32 (sequence is synthesized)
gtaatttatttatagtacttttttttccttgaaggaaaatactgactttaagatgtattttaagactgaaattttgttctttagtacttttcatgcagtagaacggaacttggggctggt

SEQ ID NO: 30957 - DNA, 120 bp, Artificial Sequence
  ENSG00000047644_33 (sequence is synthesized)
ttggtttttgacacctgaaatgcgaacgctatgtgctaaatttgtcaccgtatcatatgtgcatttaccatgtatattgtacacattcactcccttgatgtcatgttaaaatgtcccctg

SEQ ID NO: 30958 - DNA, 120 bp, Artificial Sequence
  ENSG00000047644_34 (sequence is synthesized)
cagtggttcaatcgtgactcggaagcatgtgtgtgttgcagaggtcagtctctggcgtgggccgcacgccaaccgctcatttctgtgttgcctttggaagcatctttctgtgctcagcgt

SEQ ID NO: 30959 - DNA, 120 bp, Artificial Sequence
  ENSG00000047644_35 (sequence is synthesized)
gagtctgaagcaggcgccagggcctctggtgtacggggcttcagcctgcttgcttgtggtggctgtctgtggggcttcagcctgactgtccgtggtggctgtccatgctgcccgcctccc

SEQ ID NO: 30960 - DNA, 120 bp, Artificial Sequence
  ENSG00000047644_36 (sequence is synthesized)
cccaccccgccctgtccgactgtaacagaccaggagggtggcggaggaactcctgccacgccactgtgtcatgaaggaaagtgaaagggaacgaggaagtaggaatgcccacgctcgttg

SEQ ID NO: 30961 - DNA, 120 bp, Artificial Sequence
  ENSG00000047644_37 (sequence is synthesized)
actccgtgggtgaatacagcagttaggacatacacaccatcacctttgaaagtgcttgtttgggggagggaaggacatacgggtaactagaactacccagcgagtcgtccagaggagagg

SEQ ID NO: 30962 - DNA, 120 bp, Artificial Sequence
  ENSG00000047644_38 (sequence is synthesized)
atcaggtttgagtcaggaggctccctgtactggagtcgtcccactattcctcaagaaatcttagaaccagcttgtgaggaaaaacattttttaatgtaataaaaatatgccattattctt

SEQ ID NO: 30963 - DNA, 120 bp, Artificial Sequence
  ENSG00000047644_39 (sequence is synthesized)
tgaaatgccaaatgatataaatattttgcctaatacatatttattgtagatgaaatgcactcttctcgatgaggcctcgatttgaatcaatggggtgggccacaggaaatgtcagaggaa

SEQ ID NO: 30964 - DNA, 120 bp, Artificial Sequence
  ENSG00000047644_40 (sequence is synthesized)
ccagaactcagaactcttcctcctggacctttcttcccttcccttggaggtatccctttgaatcaggcctctctcttctcatcagtctgtagcttccccccttgtataacctgctttcct

SEQ ID NO: 30965 - DNA, 120 bp, Artificial Sequence
  ENSG00000047644_41 (sequence is synthesized)
ttttacatttattaaaagtggattttgtaaaagcatttcattgacacgcgacctatcacagacaatggaattcgtcagtggtggtaagactgaaatcctgatgcttttcacacttcttgt

SEQ ID NO: 30966 - DNA, 120 bp, Artificial Sequence
  ENSG00000047644_42 (sequence is synthesized)
ctcttgctatgtatttctgcctctagccttgccatgttttgccttttttttttctttttggccaattcctttttatatgtgcccacaacagaggtggggagacacggagcaccctgggtc

SEQ ID NO: 30967 - DNA, 120 bp, Artificial Sequence
  ENSG00000047644_43 (sequence is synthesized)
cttcccagcgctgctgggcaggccccgtctccaggccccagctgttgaaactttgaagggcaacaaacaaccatccacactgccggaccctaggctgttcagggaggcagctcatttcca

SEQ ID NO: 30968 - DNA, 120 bp, Artificial Sequence
  ENSG00000047644_44 (sequence is synthesized)
ccccggccccaggacacccagcctgtgccccacaaggatctctctaaatgggagggattgaggctacttttctgccaagccctattaagtagtaatgtggggaaacccactgtgtcagtg

SEQ ID NO: 30969 - DNA, 120 bp, Artificial Sequence
  ENSG00000047644_45 (sequence is synthesized)
caggaagccctagacaaatgttttcaaataaatttcactgcccagcctgcacagatttccatttgaagtacttcccatccaccctgacacccaaaggggtttttttgttttgttttgttt

SEQ ID NO: 30970 - DNA, 120 bp, Artificial Sequence
  ENSG00000047644_46 (sequence is synthesized)
atgataggcatgagccattgtgcctagcctattttgatttttttcttagagtcaaggtcttgctctgttgcccaggctgatcttggacttgcgagccaccatgcctggctgggtttttta

SEQ ID NO: 30971 - DNA, 120 bp, Artificial Sequence
  ENSG00000047644_47 (sequence is synthesized)
aaaatagaatctcactgatagcctgcaagaaacagatgcagtgcctgcttccgtatcagtccaaggagccctcgtgtttgccacctttacctttgaacctccccctgcctccctgcctgt

SEQ ID NO: 30972 - DNA, 120 bp, Artificial Sequence
  ENSG00000047644_48 (sequence is synthesized)
gtccgcttttgcagctcaatgcagccatgacaaggaaagaaaagacaaaggaaggccagagagccgcgcagttctctgcaggtgcagatgcaggcagtggaggtggcctgagcaggcaga

SEQ ID NO: 30973 - DNA, 120 bp, Artificial Sequence
  ENSG00000047644_49 (sequence is synthesized)
aggacaccaagcgccctatgttgcttgtcattcatgacgtggtcttggagcttctgactagttcagactgccacgccaaccccagaaaataccccacatgccagaaaagtgaagtcctag

SEQ ID NO: 30974 - DNA, 120 bp, Artificial Sequence
  ENSG00000047644_50 (sequence is synthesized)
gtgtttccatctatgtttcaatctgtccatctaccaggcctcgcgataaaaacaaaacaaaaaaacgctgccaggttttagaagcagttctggtctcaaaaccatcaggatcctgccacc

SEQ ID NO: 30975 - DNA, 120 bp, Artificial Sequence
  ENSG00000047644_51 (sequence is synthesized)
agggttcttttgaaatagtaccacatgtaaaagggaatttggctttcacttcatctaatcactgaattgtcaggctttgattgataattgtagaaataagtagccttctgttgtgggaat

SEQ ID NO: 30976 - DNA, 120 bp, Artificial Sequence
  ENSG00000047644_52 (sequence is synthesized)
aagttataatcagtattcatctctttgttttttgtcactcttttctctctaattgtgtcatttgtactgtttgaaaaatatttcttctataaaattaaactaacctgccttaagaacaga

SEQ ID NO: 30977 - DNA, 120 bp, Artificial Sequence
  ENSG00000047644_53 (sequence is synthesized)
acggtcgcgtcttttacattgaccacaacacgcgccagacgtcgtggatcgacccccgcgaccgcctcgcccatcccggtcccgggcgtctgcggcccactgccccggccctggttctgc

SEQ ID NO: 30978 - DNA, 120 bp, Artificial Sequence
  ENSG00000047644_54 (sequence is synthesized)
aggtgtccccagccccgcggtggcgagatgagctgtcaccttggatcacaaacgtgcgccccagctttggggtgcgggttccctgtctggcgggttcaggctggtttccatccaaaacct

SEQ ID NO: 30979 - DNA, 120 bp, Artificial Sequence
  ENSG00000047644_55 (sequence is synthesized)
tctgttcccaaactctagttgctctttagcgccttaaaactcgtgagttaaaactgtttgaaatagccttctgtactgcagccagaatgcaatatgattagtcccatatgcttttggaat

SEQ ID NO: 30980 - DNA, 120 bp, Artificial Sequence
  ENSG00000047644_56 (sequence is synthesized)
aaacgaaaaacaagaattgtattttaagtttcctttttgtgaaagatatgcatggggtacaaagctgtcttattcacgtataaaaacccaatcaagtaaaaactgattcttgtaaaagca

SEQ ID NO: 30981 - DNA, 120 bp, Artificial Sequence
  ENSG00000047648_0 (sequence is synthesized)
ctccccaggagacccggtatcagtggcgagctgccttctctcctcgccgcttgcaggtttggcgcctggaaaactcttcacgttctgctttctcctgctcctggctccgccccagctcca

SEQ ID NO: 30982 - DNA, 120 bp, Artificial Sequence
  ENSG00000047648_1 (sequence is synthesized)
gccccggcattcctccagctctacacgtcctggccgcccccttcccgctgcctctagagcgagcgtacggggtcatctccgcgtctgccctgggcccaaggctgggctgcgaatagcgtg

SEQ ID NO: 30983 - DNA, 120 bp, Artificial Sequence
  ENSG00000047648_2 (sequence is synthesized)
ttcctctccggcggaacacacacacccggccttggggctgtctcctgagctccctcctccacggagagcgctgagcgccgccgggaattccatcccaccgtgggcacgcagtctttggag

SEQ ID NO: 30984 - DNA, 120 bp, Artificial Sequence
  ENSG00000047648_3 (sequence is synthesized)
gtcccgggcgcagcacgctcggtgtccccacactgcagcaagacagagaccccgcgggaaccttgagcttggaacaacccttgagcctctgcagtcggaagagtgggcgcagcagcccag

SEQ ID NO: 30985 - DNA, 120 bp, Artificial Sequence
  ENSG00000047648_4 (sequence is synthesized)
cggaggccaggcgcgcaacctcgggcgccggggcaaggagagagtgcagggaggcgcagctcaggcgcccggctcaggagcgggaggaagttctcgcggcgccgggagcgcggtggacgc

SEQ ID NO: 30986 - DNA, 120 bp, Artificial Sequence
  ENSG00000047648_5 (sequence is synthesized)
gccctgggcgcacgcccaggcagccttctccctggccctcgggactgtcctcgggccgcaaggaggagcttgctggagtcttagaggccatccagagccagcgagcaggagcgctgcgtc

SEQ ID NO: 30987 - DNA, 120 bp, Artificial Sequence
  ENSG00000047648_6 (sequence is synthesized)
tcccgcctcagctaggaagggggagtggcgctggcaggctggagctgggaacccagcgagcgcctgaccttcctcctcctcttcctgaccctcttcgcgtcttgggctccggaggaaggt

SEQ ID NO: 30988 - DNA, 120 bp, Artificial Sequence
  ENSG00000047648_7 (sequence is synthesized)
tctagcggctgcaggaggtccccagacccattttcctagaaggctggtgatggatctgctgctcctgccgccgccggggcacttggagcgcaccggcggcgcgtgagctgggctttgctc

SEQ ID NO: 30989 - DNA, 120 bp, Artificial Sequence
  ENSG00000047648_8 (sequence is synthesized)
tccactgccctgggcaaaccccgggccagccccgcctggcacctttgcctgagtccctttcggttcccgacccaaagccaccagcgtccagggagggaggaggaggtggtcctcaggtgc

SEQ ID NO: 30990 - DNA, 120 bp, Artificial Sequence
  ENSG00000047648_9 (sequence is synthesized)
agccccgccgagatgtccgcgcagagcctgctccacagcgtcttctcctgttcctcgcccgcttcaagtagcgcggcctcggccaagggcttctccaagaggaagctgcgccagacccgc

SEQ ID NO: 30991 - DNA, 120 bp, Artificial Sequence
  ENSG00000047648_10 (sequence is synthesized)
agcctggacccggccctgatcggcggctgcgggagcgacgaggcgggcgcggagggcagtgcgcggggagccacggcgggccgcctctactccccatcactcccagccgagagtctcggc

SEQ ID NO: 30992 - DNA, 120 bp, Artificial Sequence
  ENSG00000047648_11 (sequence is synthesized)
cctcgcttggcgtcctcttcccggggtccgccccccagggccaccaggctaccgcctcctggacctctttgctcgtccttctccacacccagcaccccgcaggagaagtcaccatccggc

SEQ ID NO: 30993 - DNA, 120 bp, Artificial Sequence
  ENSG00000047648_12 (sequence is synthesized)
agctttcactttgactatgaggttcccctgggtcgcggcggcctcaagaagagcatggcctgggacctgccttctgtcctggccgggccagccagtagccgaagcgcttccagcatcctc

SEQ ID NO: 30994 - DNA, 120 bp, Artificial Sequence
  ENSG00000047648_13 (sequence is synthesized)
tgttcatccgggggaggccccaatggcatcttcgcttctcctaggaggtggctccagcagaggaagttccagtccccacccgacagtcgcgggcacccctacgtcgtgtggaaatccgag

SEQ ID NO: 30995 - DNA, 120 bp, Artificial Sequence
  ENSG00000047648_14 (sequence is synthesized)
ggtgatttcacctggaacagcatgtcaggccgcagtgtacggctgaggtcagtccccatccagagtctctcagagctggagagggcccggctgcaggaagtggctttttatcagttgcaa

SEQ ID NO: 30996 - DNA, 120 bp, Artificial Sequence
  ENSG00000047648_15 (sequence is synthesized)
caggactgtgacctgagctgtcagatcaccattcccaaagatggacaaaagagaaagaaatctttaagaaagaaactggattcactaggaaaggagaaaaacaaagacaaagaattcatc

SEQ ID NO: 30997 - DNA, 120 bp, Artificial Sequence
  ENSG00000047648_16 (sequence is synthesized)
ccacaggcatttggaatgcccttatcccaagtcattgcgaatgacagggcctataaactcaagcaggacttgcagagggacgagcagaaagatgcatctgactttgtggcttccctcctc

SEQ ID NO: 30998 - DNA, 120 bp, Artificial Sequence
  ENSG00000047648_17 (sequence is synthesized)
ccatttggaaataaaagacaaaacaaagaactctcaagcagtaactcatctctcagctcaacctcagaaacaccgaatgagtcaacgtccccaaacaccccggaaccggctcctcgggct

SEQ ID NO: 30999 - DNA, 120 bp, Artificial Sequence
  ENSG00000047648_18 (sequence is synthesized)
aggaggaggggtgccatgtcagtggattctatcaccgatcttgatgacaatcagtctcgactactagaagctttacaactttccttgcctgctgaggctcaaagtaaaaaggaaaaagcc

SEQ ID NO: 31000 - DNA, 120 bp, Artificial Sequence
  ENSG00000047648_19 (sequence is synthesized)
agagataagaaactcagtctgaatcctatttacagacaggtccctaggctggtggacagctgctgtcagcacctagaaaaacatggcctccagacagtggggatattccgagttggaagc

SEQ ID NO: 31001 - DNA, 120 bp, Artificial Sequence
  ENSG00000047648_20 (sequence is synthesized)
tcaaaaaagagagtgagacaattacgtgaggaatttgaccgtgggattgatgtctctctggaggaggagcacagtgttcatgatgtggcagccttgctgaaagagttcctgagggacatg

SEQ ID NO: 31002 - DNA, 120 bp, Artificial Sequence
  ENSG00000047648_21 (sequence is synthesized)
ccagacccccttctcaccagggagctgtacacagctttcatcaacactctcttgttggagccggaggaacagctgggcaccttgcagctcctcatataccttctacctccctgcaactgc

SEQ ID NO: 31003 - DNA, 120 bp, Artificial Sequence
  ENSG00000047648_22 (sequence is synthesized)
caacatcagcaaagatgggcaagaggtcactgggaataaaatgacatctctaaacttagccaccatatttggacccaacctgctgcacaagcagaagtcatcagacaaagaattctcagt

SEQ ID NO: 31004 - DNA, 120 bp, Artificial Sequence
  ENSG00000047648_23 (sequence is synthesized)
tcagagttcagcccgggctgaggagagcacggccatcatcgctgttgtgcaaaagatgattgaaaattatgaagccctgttcatggttcccccagatctccagaacgaagtgctgatcag

SEQ ID NO: 31005 - DNA, 120 bp, Artificial Sequence
  ENSG00000047648_24 (sequence is synthesized)
cctgttagagaccgatcctgatgtcgtggactatttactcagaagaaaggcttcccaatcatcaagccctgacatgctgcagtcggaagtttccttttccgtgggagggaggcattcatc

SEQ ID NO: 31006 - DNA, 120 bp, Artificial Sequence
  ENSG00000047648_25 (sequence is synthesized)
tacagactccaacaaggcctccagcggagacatctccccttatgacaacaactccccagtgctgtctgagcgctccctgctggctatgcaagaggacgcggccccggggggctcggagaa

SEQ ID NO: 31007 - DNA, 120 bp, Artificial Sequence
  ENSG00000047648_26 (sequence is synthesized)
gctttacagagtgccagggcagtttatgctggtgggccacttgtcgtcgtcaaagtcaagggaaagttctcctggaccaaggcttgggaaagatctgtcagaggagcctttcgatatctg

SEQ ID NO: 31008 - DNA, 120 bp, Artificial Sequence
  ENSG00000047648_27 (sequence is synthesized)
gggaacttggcattcaacattaaaaagcggatccaaagacccaggaatgacaggttcctctggagacatttttgaaagcagctccctaagagcggggccctgctccctttctcaagggaa

SEQ ID NO: 31009 - DNA, 120 bp, Artificial Sequence
  ENSG00000047648_28 (sequence is synthesized)
cctgtccccaaattggcctcggtggcaggggagccccgcagagctggacagcgacacgcagggggctcggaggactcaggccgcagcccccgcgacggagggcagggcccaccctgcggt

SEQ ID NO: 31010 - DNA, 120 bp, Artificial Sequence
  ENSG00000047648_29 (sequence is synthesized)
gtcgcgcgcctgcagcacgccccacgtccaggtggcagggaaagccgagcggcccacggccaggtcggagcagtacttgaccctgagcggcgcccacgacctcagcgagagtgagctgga

SEQ ID NO: 31011 - DNA, 120 bp, Artificial Sequence
  ENSG00000047648_30 (sequence is synthesized)
tgtggccgggctgcagagccgggccacacctcagtgccaaagaccccatgggagtgggagggatgacaagcggcccccgcctccatacccgggcccagggaagcccgcggcagcggcagc

SEQ ID NO: 31012 - DNA, 120 bp, Artificial Sequence
  ENSG00000047648_31 (sequence is synthesized)
ctggatccaggggcccccggaaggcgtggagacacccacggaccagggaggccaagcagccgagcgagagcagcaggtcacgcagaaaaaactgagcagcgccaactccctgccagcggg

SEQ ID NO: 31013 - DNA, 120 bp, Artificial Sequence
  ENSG00000047648_32 (sequence is synthesized)
cgagcaggacagtccgcgcctgggggacgctggctggctcgactggcagagagagcgctggcagatctgggagctcctgtcgaccgacaaccccgatgccctgcccgagacgctggtctg

SEQ ID NO: 31014 - DNA, 120 bp, Artificial Sequence
  ENSG00000047648_33 (sequence is synthesized)
agcccgcacccagccgagccccccctgccccgagccccccgccctccagcccaggggggaccgtgggtggtggccactggcacacttagtgttcttctttcacacttctcaaaagtgaca

SEQ ID NO: 31015 - DNA, 120 bp, Artificial Sequence
  ENSG00000047648_34 (sequence is synthesized)
caagagaaatccagttcacctacagaggtagagcactcacgcccccgccattgagaataaggttccattgcgtagccagccttaggaaaaacaaacagaacccaaaccagatggcaatgt

SEQ ID NO: 31016 - DNA, 120 bp, Artificial Sequence
  ENSG00000047648_35 (sequence is synthesized)
ccaatctaaaaacgtccctcttggctctataatataagatacaactcttgcttggtatagcctaaccgtatttatgtgtcttcggttttgactattgtgtattctgtaacagattatgta

SEQ ID NO: 31017 - DNA, 120 bp, Artificial Sequence
  ENSG00000047648_36 (sequence is synthesized)
taatcatatatgatatattcacaaagagaaaacaaaaggaacttttaaaaaaaaaatcacttcacttatattaagcaatgagatatactaaacaatgagattctatagaatgttctagaa

SEQ ID NO: 31018 - DNA, 120 bp, Artificial Sequence
  ENSG00000047648_37 (sequence is synthesized)
tgtgcacaagcgggtttctgtgcttttgccatagctttataactggggataacccttccttcgataccaaacactaacaagaggaagcagaatatgagaagccatatttttacataggag

SEQ ID NO: 31019 - DNA, 120 bp, Artificial Sequence
  ENSG00000047648_38 (sequence is synthesized)
tcagatacaaaaagaaaaatcactgaatgcttttagatattgaatacgttttcaggaaaatgctaaatctgatagattacgaaatatatttttagaacttgtttagaaaggattcagtta

SEQ ID NO: 31020 - DNA, 120 bp, Artificial Sequence
  ENSG00000047648_39 (sequence is synthesized)
accaaacaagaaaaaggcagtgcctcacaaagaaattaagaagttgtccgtcccacgttacatcaaattcagttttatataggccatatataatatatatttataatgtataatttttat

SEQ ID NO: 31021 - DNA, 120 bp, Artificial Sequence
  ENSG00000047648_40 (sequence is synthesized)
gtatttttcaaaactacaaactggaatccaactataaagtgtttaagaatctacacagaatattcaaattatagaacatgttttttccctttgccccataatcagtatttgccaaattac

SEQ ID NO: 31022 - DNA, 120 bp, Artificial Sequence
  ENSG00000047648_41 (sequence is synthesized)
atgcaattccttaaaaactaaatcacatttggtaaaaggcctacagctttgtacttacattgtgccaaaggctgaggaaatgttttctttcgtaattttatgtgtattgtaaaatgttct

SEQ ID NO: 31023 - DNA, 120 bp, Artificial Sequence
  ENSG00000047648_42 (sequence is synthesized)
accgtactttagtagtttgaagtttttcaagtgcataactatttttgaccagcagatggcgatacgcttcagtattttatgcaattttttttcacttctgaagggaaagtgtattataaa

SEQ ID NO: 31024 - DNA, 120 bp, Artificial Sequence
  ENSG00000047648_43 (sequence is synthesized)
aaaagattttttttttttttataaaacatgctactcttaattttcatgttggtgatgaaattcccagtggtgtttcttaaggttctatcttgtgccatgatgaataaaaagttaagcaaa

SEQ ID NO: 31025 - DNA, 120 bp, Artificial Sequence
  ENSG00000047648_44 (sequence is synthesized)
gcctgcctctgttctgaaaggacaggaacttctcaatgatccgatgaaaagattgcatatttttggtcccaagattcacagtagcggaggtctctggcaacaaaaggtatcgtgggagtc

SEQ ID NO: 31026 - DNA, 120 bp, Artificial Sequence
  ENSG00000047648_45 (sequence is synthesized)
acagctatgccagctgggccatttctcagacattcaatatgatctgccatttcaggatgcattttttaccaaaaaaataatttttttaaaacagactcaacttcctactgcaagcttagt

SEQ ID NO: 31027 - DNA, 120 bp, Artificial Sequence
  ENSG00000047648_46 (sequence is synthesized)
accaaggcttgggaaaggtaactggagcctggccagcaggcgctggccaaaacaagcgaccctcctcttgttgcatgtggcatggtgtggggctcttcggaccttctcttcgtctctccc

SEQ ID NO: 31028 - DNA, 120 bp, Artificial Sequence
  ENSG00000047648_47 (sequence is synthesized)
ttatttgatgtttctgtaattcaacctgcatttaccgagtacctgctgaacgcctactctaggaagaggaaggtatggcgagcccagtcgttggctgggagggtccctgcaggccacact

SEQ ID NO: 31029 - DNA, 120 bp, Artificial Sequence
  ENSG00000047648_48 (sequence is synthesized)
ccaagtctcagatatctgggaaataaacgcatgcccagaggagccactcctattcccagctgattctttttccctccagcatcctaggaactttatgtatactggatttgggttgcatat

SEQ ID NO: 31030 - DNA, 120 bp, Artificial Sequence
  ENSG00000047648_49 (sequence is synthesized)
ttgctagtctgaggtgccacccaattactgctgttacatttctaaagaaaacaagctgaacctactatatgtatgaagacaaccttccagaaccaaatagtgttagtatccaatgacaag

SEQ ID NO: 31031 - DNA, 120 bp, Artificial Sequence
  ENSG00000047648_50 (sequence is synthesized)
agagcactatactgggagtcacaaacctgctctgccactttcaacctgcaggatctccagtgagcgattgagcttcccagagtcccatttcctcctgctgtgaaaactcagaatgataac

SEQ ID NO: 31032 - DNA, 120 bp, Artificial Sequence
  ENSG00000047648_51 (sequence is synthesized)
ccggctccgcagcggcagcgggacgctgtgccaggggcgctttgcacagcactcggcacgcacggagcagggctcgcgcccaggggctgccccaggatggcagtgaagtgcggggaactc

SEQ ID NO: 31033 - DNA, 120 bp, Artificial Sequence
  ENSG00000047648_52 (sequence is synthesized)
tcaacaagttctgtgcttccggctgcagtgcaggcctgcccacagtaccctgccagcatgtttacgccctgacctggagggaccagctaaggatgttgtcagggccagttttgaggaggg

SEQ ID NO: 31034 - DNA, 120 bp, Artificial Sequence
  ENSG00000047648_53 (sequence is synthesized)
taatccatgtaaagccctcaacgcagcacttcaaatgtaatacgcactcgataatacttgctgtgtaatcttgtgtgcatttcttacctgctccttacgctagttgcatcgtctgtaaaa

SEQ ID NO: 31035 - DNA, 120 bp, Artificial Sequence
  ENSG00000047648_54 (sequence is synthesized)
tgatctgctgggaacctcctagggatgaagtgagataacgcatgtgaactgctgaacacgtggaggcacccagtagacgtctgctgctataaatcgtaattataatcccatcatgggatt

SEQ ID NO: 31036 - DNA, 120 bp, Artificial Sequence
  ENSG00000047648_55 (sequence is synthesized)
gtagtgaggattaaatgagatggtgaaaaagcctaatgtagtgccttactccataaatattgatggataagctaaggggatttatgagtgaatgcatgcatgaagaaatccagtgatacc

SEQ ID NO: 31037 - DNA, 120 bp, Artificial Sequence
  ENSG00000047648_56 (sequence is synthesized)
aatagcaaagtattcctgaggatagtacagaaactctattgttcctctagttctgtgttaatgtgtttagcacctataaagctgttgtcacccatcacccttctattcatttcctataac

SEQ ID NO: 31038 - DNA, 120 bp, Artificial Sequence
  ENSG00000047648_57 (sequence is synthesized)
atgcaaacttattattttatggttctggaggtgagaagtctaaaatgggtccacagggcctctttcccttctggacgtcctagggcacaatcgttttcttgccttttctagcttctagaa

SEQ ID NO: 31039 - DNA, 120 bp, Artificial Sequence
  ENSG00000047648_58 (sequence is synthesized)
gctgctgcattccttggctcgaggccccttcctccatcttttaagccaacagtctagcaacatcttctctcctacccctctcttataaggacccttgtaattatattggccccatccaga

SEQ ID NO: 31040 - DNA, 120 bp, Artificial Sequence
  ENSG00000047648_59 (sequence is synthesized)
taatccaggaaaatctccccatctcaagaaccataatttaatcacacctgcaaagcccttttcgaaaataacatctttgtagatttgtgggattatgacacagatatctttgggggggcc

SEQ ID NO: 31041 - DNA, 120 bp, Artificial Sequence
  ENSG00000047648_60 (sequence is synthesized)
cttattctgtctaccacgagcatgatatagaaagggcctttttgtaaatcccaagtagaatgaacacgctgaaaggtggatctgaattgtattctgttttgtatacaacaggatcttgaa

SEQ ID NO: 31042 - DNA, 120 bp, Artificial Sequence
  ENSG00000047648_61 (sequence is synthesized)
tacaatactttgcacagaagagatgttattaaaatgttcattgatttttaattttccttttgtgttatatacctttttatacactttttccctagatctgtcagaggagcctttcgatat

SEQ ID NO: 31043 - DNA, 120 bp, Artificial Sequence
  ENSG00000047648_62 (sequence is synthesized)
actcatttgtgcacttactcagggacacagcctgcctctgttctgaaaggacaggaacttctcaatgatccgatgaaaagattgcatatttttggtcccaagattcacagtagcggaggt

SEQ ID NO: 31044 - DNA, 120 bp, Artificial Sequence
  ENSG00000047648_63 (sequence is synthesized)
caggcaaaaagatctaaggctcattttcaagatttacccatgatcatggagcagcactataaatccaaagctactatagaagcattgaaaacaaatataaaaggttcaccttagtctcat

SEQ ID NO: 31045 - DNA, 120 bp, Artificial Sequence
  ENSG00000047648_64 (sequence is synthesized)
tttactgagtcacagtaaaccagacttacagaatcatctatttttaaggtgacaattgttcagatagtaccactgatcaatgatcccctaactttttctaaacattttatctaacagtgt

SEQ ID NO: 31046 - DNA, 120 bp, Artificial Sequence
  ENSG00000047648_65 (sequence is synthesized)
tttcagttttttaaaaaacctattactagctgtgatggttaattttatgtgtcaacctgactatgccacaggatgcccagacatttggtcaaacattatgctgggtgtgtctgtgagggt

SEQ ID NO: 31047 - DNA, 120 bp, Artificial Sequence
  ENSG00000047648_66 (sequence is synthesized)
gttttttgaatgtgagtaacattctaatcagtaggctaagtgaagcagactgccctccccactccgtgtgggtgggtcacatctgatcagctgcagacctgaatgacaaaaaggctgacc

SEQ ID NO: 31048 - DNA, 120 bp, Artificial Sequence
  ENSG00000047648_67 (sequence is synthesized)
cttccatgagtaagagggaaggccttctgcatgactgcttgagctgggacattggacttttcctgcctttggacttaaactgaaacatcagttcttcttgcatcttgagaccgctggctt

SEQ ID NO: 31049 - DNA, 120 bp, Artificial Sequence
  ENSG00000047648_68 (sequence is synthesized)
tcagaccagaagtgtgccatcggctctcctcggtctccagcttgctgactacagatcttgggactccacagctttatataattgtgtaagtcaattccctacaataaatatcttcctgcc

SEQ ID NO: 31050 - DNA, 120 bp, Artificial Sequence
  ENSG00000047648_69 (sequence is synthesized)
ccctgttcatggtaggtggcccttctgtggcaggacatcacagcaaactgcctattggtttcctctggaggcaggatgaaattctagtagaccaccctctggggtgcagtgctgctcact

SEQ ID NO: 31051 - DNA, 120 bp, Artificial Sequence
  ENSG00000047648_70 (sequence is synthesized)
gaattcattggaagtcaggcagtttcagcaggagtagaaatttgcacaactatgatgtcattttgagtttgtgactccatgtttaaacaaacatgccaaattataattttcattttgttg

SEQ ID NO: 31052 - DNA, 120 bp, Artificial Sequence
  ENSG00000047648_71 (sequence is synthesized)
tcctctaaaccatggtcacattttggagtcacttaattataaagcagtgtccttgctcaagacattaataaaacccttctttatggaattgtgtccctcatgaattcatgtattcataag

SEQ ID NO: 31053 - DNA, 120 bp, Artificial Sequence
  ENSG00000047662_0 (sequence is synthesized)
acacgaaacctgcactggctggggaactgcagactgatcgccagcggcacgtgcggggcgccgacgcctcgccgcagggtgcgggtgcccgcggagccagccagccagagaaccagcagg

SEQ ID NO: 31054 - DNA, 120 bp, Artificial Sequence
  ENSG00000047662_1 (sequence is synthesized)
agaggaaaaagggtgggcgcgcgggtgggcccgggaggcggagaccttcgggaagctggggccacgcggcggtgcaggcgacgggactgcagtgccacctctcccgagaaacccacacgc

SEQ ID NO: 31055 - DNA, 120 bp, Artificial Sequence
  ENSG00000047662_2 (sequence is synthesized)
tcgcacgcccgcgcgcgcacgcacgtgcacacggtgggcagggagaaaacgagagagtctgagtgctgggcgcgttttagcgatggcttctgctctcaacagcaaaattaacccgcccgg

SEQ ID NO: 31056 - DNA, 120 bp, Artificial Sequence
  ENSG00000047662_3 (sequence is synthesized)
cacttgccagggctccaaagccgacggtggcgccggctggagaatggactgtgatccccagatgcacgtgaaaatgtgcaagaagatcgcccagctcaccaaggtgatttatgccctgaa

SEQ ID NO: 31057 - DNA, 120 bp, Artificial Sequence
  ENSG00000047662_4 (sequence is synthesized)
cacccgccaggatgaggctgaggccagcatggaggcgctgcgggaagcgcaccaggaggagctccagaatgcggtggcagagaccaaggccaggctcctgcaggaacagggctgcgcaga

SEQ ID NO: 31058 - DNA, 120 bp, Artificial Sequence
  ENSG00000047662_5 (sequence is synthesized)
ggaggaagcccttctacagcgcatccaggccctggagagcgccctggagctgcaaaagaggctgacggaggaggcgctggctgagtcggcctcgtgcaggctggagacgaaggagagaga

SEQ ID NO: 31059 - DNA, 120 bp, Artificial Sequence
  ENSG00000047662_6 (sequence is synthesized)
gctgagggtggaggcagagcacgccgagcgagtcctcacgctctccagggaaatgctggagctcaaggctgactacgagaggaggctccagcacctgacgagccacgaggctaccccgca

SEQ ID NO: 31060 - DNA, 120 bp, Artificial Sequence
  ENSG00000047662_7 (sequence is synthesized)
gggccggctgccccaggagagccctgaaaccaagtcggagccaggccagggcccggagatgcaggaggtcctgctagaggtgcagcggctgcgagtggagaaccagcagctgagcaagga

SEQ ID NO: 31061 - DNA, 120 bp, Artificial Sequence
  ENSG00000047662_8 (sequence is synthesized)
ctacgcccgcaaggccgaggagctgcaggccacctacgagagggaaaacgaggccatccggcaggccatgcagcagtcggtgagccaggccctgtggcagtggcaggagaaggagtcgga

SEQ ID NO: 31062 - DNA, 120 bp, Artificial Sequence
  ENSG00000047662_9 (sequence is synthesized)
cctccgcaagaacttccaggtccaggagtcagccctgcaggctcaggtccggaagctggaaggagacctggagcacagaggccgcaagataagtgacctgaagaagtacgcccagaagct

SEQ ID NO: 31063 - DNA, 120 bp, Artificial Sequence
  ENSG00000047662_10 (sequence is synthesized)
gaaggagaggattcaggacctggatgtgcagcttaaggaggctcgacaggagaattcagagttgaaaggcactgcaaaaaaacttggggagaagctggctgttgccaaagacagaatgat

SEQ ID NO: 31064 - DNA, 120 bp, Artificial Sequence
  ENSG00000047662_11 (sequence is synthesized)
gctgcaggagtgtcgtgggacacagcagacagatgccatgaagactgagttagtttcagagaacaaagtcctgcgggaagagaatgacttggaagccggcaatcttcatcctcagcagga

SEQ ID NO: 31065 - DNA, 120 bp, Artificial Sequence
  ENSG00000047662_12 (sequence is synthesized)
tcaaagctgtctcaaggagtgcccttgcatgaaaggaggcacagatatgcagaccaagaaagaggcaagtgctgagacagaatatatgaagcaacaatatgaagaagaccttcgtaaaat

SEQ ID NO: 31066 - DNA, 120 bp, Artificial Sequence
  ENSG00000047662_13 (sequence is synthesized)
caaacatcagacagaagaggagaagaaacatctcaaagaccagctagtgaagcgactagaagacttggtaaagaagcacaccgtggaaatcaaatccgttcgctcgtccgtggaggctga

SEQ ID NO: 31067 - DNA, 120 bp, Artificial Sequence
  ENSG00000047662_14 (sequence is synthesized)
aagaaagaaactgcagagggaagtagaagcacagttggaggaagtgaggaagaaatcagaaaaggagataaagcagctggaagaagagaaagcagccctcaatgtgaagcttcagaattc

SEQ ID NO: 31068 - DNA, 120 bp, Artificial Sequence
  ENSG00000047662_15 (sequence is synthesized)
tctgcttgaggttttaaggctggaagaatttatccaacaaaataagacacgccccacaggagctgaggaaagtccccaggaattaggccgccagcactgcagcattctggagacccagga

SEQ ID NO: 31069 - DNA, 120 bp, Artificial Sequence
  ENSG00000047662_16 (sequence is synthesized)
tccatgcttgaagctggatgaaacttcgccgagaggagaggagtatcaagataagttagcagctgaagaaggaaccagcagtgatgaagaagaaaggaccaaagtgcttctcaaggaggg

SEQ ID NO: 31070 - DNA, 120 bp, Artificial Sequence
  ENSG00000047662_17 (sequence is synthesized)
aagtgacccacaacctccactgggctctttgttgaaggagaaaacatccaaaatccagcgtctagaggaggactggcaaagccagaaggccaaattgcaagcccaggtctcacagatgca

SEQ ID NO: 31071 - DNA, 120 bp, Artificial Sequence
  ENSG00000047662_18 (sequence is synthesized)
gcaggctctggagcagtgcaccagcaactacagggaggacctgcaggcactcaagcagctctcggacctggagagggagaagctgcagcgtgagctccaggagaccactcagcagaacca

SEQ ID NO: 31072 - DNA, 120 bp, Artificial Sequence
  ENSG00000047662_19 (sequence is synthesized)
cgccatgaaagcccagctcgaggcttcccaccagagagccctgcgcatgctggagaaggccagacatcaggaactcaaggccacagaggaacgcttgaagaaggaatccagccacagcct

SEQ ID NO: 31073 - DNA, 120 bp, Artificial Sequence
  ENSG00000047662_20 (sequence is synthesized)
ccagatccaacaccagacacaccgactggagctccaggccttggaggaaaaggccaggcaagagctgcaggaggagcgtgagaggatgcaggcacagcaggccctgctgctagagtcgct

SEQ ID NO: 31074 - DNA, 120 bp, Artificial Sequence
  ENSG00000047662_21 (sequence is synthesized)
cagacaggagctgtcggagcagcaagctgcctgttctgggcaccagaaggacttggaggcactgcaggccgagctgagggctctgggcagacagcaagccagcagccagtgtccaggaga

SEQ ID NO: 31075 - DNA, 120 bp, Artificial Sequence
  ENSG00000047662_22 (sequence is synthesized)
cagcaaggatcacataatcgccacagaggagcggggcggcccgggccaggccggctccccaccgggcgctgctgggcagggttccggcgagggatgcgggctctgggaggagaacgcgca

SEQ ID NO: 31076 - DNA, 120 bp, Artificial Sequence
  ENSG00000047662_23 (sequence is synthesized)
gctccaggacgcggtgcggcggctgcgcgcggaggtggagcagcatcagcaggaggcgcagaagctccgagaccagcgcaggttcctggaggagactcagcaagcccagcgggccaggga

SEQ ID NO: 31077 - DNA, 120 bp, Artificial Sequence
  ENSG00000047662_24 (sequence is synthesized)
ggtggagacactgcgccaggaacaccggaaggagatgcaggccatggtggcagatttcagtagtgcccaggcccagctccaggcccggctggctgccctggaagccgaactgaaagattc

SEQ ID NO: 31078 - DNA, 120 bp, Artificial Sequence
  ENSG00000047662_25 (sequence is synthesized)
cggagagaagccagggaagggagcgtccaggcccgaggaccttcagctcattggccgcctgcagacccgcctgaaggagagagaggacatcatcaagcagctcacggaagagagaagatt

SEQ ID NO: 31079 - DNA, 120 bp, Artificial Sequence
  ENSG00000047662_26 (sequence is synthesized)
tcactacgcagcattccccagtgccatgtcccaccggaatcggtctttctctttcaatcctcacccgggatatttgaccccttccatgaagaaaaagaaggtggaggacgtgcccagccg

SEQ ID NO: 31080 - DNA, 120 bp, Artificial Sequence
  ENSG00000047662_27 (sequence is synthesized)
cgtggtcagcgtgccgaacctcgcctcctatgcaaagaactttctgagtggcgatctgagttccaggattaatgcccctccaataactacatcacccagcttggacccaagccccagctg

SEQ ID NO: 31081 - DNA, 120 bp, Artificial Sequence
  ENSG00000047662_28 (sequence is synthesized)
acaaacccaaccagtctacagatgcaaaaactgccacaaggaccccagatggtgaaacggcccaagccaaagaagtccagcagaaacagggctctccgcaccaggaatggttcaccaagt

SEQ ID NO: 31082 - DNA, 120 bp, Artificial Sequence
  ENSG00000047662_29 (sequence is synthesized)
acttttctttctaagctaacctttgggatacatcacagaggatacttgaaaaacatttattttaaatcatccgattgaaggaatgaactaacaccaaccaaccaaataatatgcttatga

SEQ ID NO: 31083 - DNA, 120 bp, Artificial Sequence
  ENSG00000047662_30 (sequence is synthesized)
accaaccaaccaaataatatgcttatgatttatatatgatagctaaaacaaattttggcgttaacacttcatactgttctgccaggcacagcagctcacgcctgtaatcccatcactttg

SEQ ID NO: 31084 - DNA, 79 bp, Artificial Sequence
  ENSG00000047662_31 (sequence is synthesized)
gtgaaaccccatctctacaggtcccaggtacttgggggactgaggcgggaggatcacttgaacctaggaggcagaggtt

SEQ ID NO: 31085 - DNA, 78 bp, Artificial Sequence
  ENSG00000047662_32 (sequence is synthesized)
ggtcccaggtacttgggggactgaggcgggagtcgaactcctgcattccaaccagcctgggtgacagagggagaccct

SEQ ID NO: 31086 - DNA, 120 bp, Artificial Sequence
  ENSG00000047662_33 (sequence is synthesized)
aaaaaaaaaaaaaaaaaaaaaattgacattaaaccagtgttattaaaagtcatctataggaaaatgttattagcgttactaatgacccataccttgtatttctagtgtccataacatcat

SEQ ID NO: 31087 - DNA, 120 bp, Artificial Sequence
  ENSG00000047662_34 (sequence is synthesized)
actccattttgtggaacatcagactttgtgatttccatgatctatttcaaaagtggttgtacttgtccttaggatgctagtcaactccactggaaagctgtttctatgtaaaatgatgca

SEQ ID NO: 31088 - DNA, 120 bp, Artificial Sequence
  ENSG00000047662_35 (sequence is synthesized)
attccaaaatgcacatctaacctcaataggaagacaaataacagttaaacaggaaagccaactaaaaacaaaccaaacctaccagaaatggatggtagcatgcttggactgaatactttc

SEQ ID NO: 31089 - DNA, 120 bp, Artificial Sequence
  ENSG00000047662_36 (sequence is synthesized)
acttccttggtctaagacaagcagcagattatagatgggataacacccacctctaaaagggctttgcaaggattaagcaagataacataaattaacatgaattggaattaagtaccacaa

SEQ ID NO: 31090 - DNA, 120 bp, Artificial Sequence
  ENSG00000047662_37 (sequence is synthesized)
ggtttttctgtaaataaccaatcctagcccagttataggtctcagtgtaatgaccatagtgccaacatgatcacttgtgaaggtctctagattatctgttctttgaagtcaaagatcttc

SEQ ID NO: 31091 - DNA, 72 bp, Artificial Sequence
  ENSG00000047662_38 (sequence is synthesized)
tgggaggctgagatgggaggagtccatctctacaaaaaaataattagcccaaagaaaacccagctacttgga

SEQ ID NO: 31092 - DNA, 120 bp, Artificial Sequence
  ENSG00000047662_39 (sequence is synthesized)
gcctgggcaacacagcgagacctccatctctacaaaaaaataattagcccaaagaaaacccagctacttggaagtctgaggtaggacagcatgagcccaagagttcgagaccagcctggg

SEQ ID NO: 31093 - DNA, 120 bp, Artificial Sequence
  ENSG00000047662_40 (sequence is synthesized)
aaaaatatatatatatatcccctgaacctctggtctttgggtttgagccatttgcctcatggtgtgttgcttcttcactgcatgaattcccagtgggttaaaggaaccgcaatggctgtt

SEQ ID NO: 31094 - DNA, 120 bp, Artificial Sequence
  ENSG00000047662_41 (sequence is synthesized)
cacggtgctgaccttgctctcagtccacactgatttgtcttaccttctgacagagcaatgtgatttgacaagactcaataacaacttttagggggcaaaatattttttcagtctttggtg

SEQ ID NO: 31095 - DNA, 120 bp, Artificial Sequence
  ENSG00000047662_42 (sequence is synthesized)
ctggcccagaaggtggcccacaaaccaatgttaattctatgcattgtcaaatctttgctctttgaataaaactttgaataactgggcaataaaaatggttgacttgtattgattttccac

SEQ ID NO: 31096 - DNA, 120 bp, Artificial Sequence
  ENSG00000047662_43 (sequence is synthesized)
agaaaggtaaaattagatgaagacagcttagaaatagaaagttcagttcacattaacctcaatcacaccatcttaaaaaaaaaaaagctgattacatataactgtcaaacttacgtatta

SEQ ID NO: 31097 - DNA, 120 bp, Artificial Sequence
  ENSG00000047662_44 (sequence is synthesized)
aaggtaaatttactgcctaatcaaaacgaggctccaatgcatttttaaatgcaaacaaacacttgtcaccatacattaacacaccatactgtttttcactaccaaatattttttgtgagt

SEQ ID NO: 31098 - DNA, 120 bp, Artificial Sequence
  ENSG00000047662_45 (sequence is synthesized)
ttcccgcttagagtgtcttagttcgttcaggctgctctaacaaaatatcttacttatactggataatttataaacaatagaaatatgtcactcacagtcctagaggctaagtccaagatc

SEQ ID NO: 31099 - DNA, 120 bp, Artificial Sequence
  ENSG00000047662_46 (sequence is synthesized)
aaggcaccagcagatatggagtctggggagggcccattcttcagaaatgggtgcctgctacgtgtccttacatggtggaagaggcaagagcgcctccctgagcctcttttgtaagggtac

SEQ ID NO: 31100 - DNA, 120 bp, Artificial Sequence
  ENSG00000047662_47 (sequence is synthesized)
ttatcctactcatgagggtgaagccctcatgactccattgcttcccaaaagccccacctcttaatactattacattgacattaggttccaacatatgaattttggaagggacatcaacat

SEQ ID NO: 31101 - DNA, 120 bp, Artificial Sequence
  ENSG00000047662_48 (sequence is synthesized)
tcaggacatagcagtgaaccctgtaggactgctctttattttgtgctttcaaaaagactacatacaggtggttctatttttgtgtgttgaaacactttcccaggctgcactttgcatttc

SEQ ID NO: 31102 - DNA, 120 bp, Artificial Sequence
  ENSG00000047662_49 (sequence is synthesized)
tgtccttaaactcagcatgatccctgggcaaggagaaaattttactagttgagatcgtacataggttttgactcctttcttgctgcaggtgactgaaaagatctttcagtcttaaatttc

SEQ ID NO: 31103 - DNA, 120 bp, Artificial Sequence
  ENSG00000047662_50 (sequence is synthesized)
taaattctaccctgcaatgattatatctttgttaacaaaatctttgcatgcttccataattttttattgaggccatatgccttgggtattgaagtaaggcatttaaggacacaaacttaa

SEQ ID NO: 31104 - DNA, 120 bp, Artificial Sequence
  ENSG00000047662_51 (sequence is synthesized)
gctttttgtttgttattaccaaactgccattcagaaagtttctaacaatttacacccttaccagcagtaaatgaacctactgtgccctaacactattgacaaagaaatacaatttgatag

SEQ ID NO: 31105 - DNA, 120 bp, Artificial Sequence
  ENSG00000047662_52 (sequence is synthesized)
ataaaacattctattttagtttgcataatgattccatcaatctctcaacagcagagcggtctagagatgacagtgatggcgtagaggtgacagtgaagatgaagagaaattatccaattc

SEQ ID NO: 31106 - DNA, 120 bp, Artificial Sequence
  ENSG00000047662_53 (sequence is synthesized)
gggattaagttaagagagagaaaaaaacagtatttaatggtaaatctcttcaggctgtattatgacaggggtggaagagttaatatgttcctgcagcaaaactgaaaggaatactatctg

SEQ ID NO: 31107 - DNA, 120 bp, Artificial Sequence
  ENSG00000047662_54 (sequence is synthesized)
ttccacatgaaagcaaactgttttgtaattggggtaggtaaaaatggattcacccagtcaatggctgcacaccacatacctgagcccttaactgctctaacactgatgtaatatccaacc

SEQ ID NO: 31108 - DNA, 120 bp, Artificial Sequence
  ENSG00000047662_55 (sequence is synthesized)
caacatttgtgattgaggctacttggttaatttttctccaggatccatctggattctgcagatgaggctggcaaattaaatggaactatgatagggaccatcttactgtatctgtcagat

SEQ ID NO: 31109 - DNA, 120 bp, Artificial Sequence
  ENSG00000047849_0 (sequence is synthesized)
acccgctggtggcccggtccgcgtgtgcgccgactctcgcactctcctcgctccgggcgcccagactctgagagagagcgacggccatcatagaacagcgaaggcagtcgatcggcctgc

SEQ ID NO: 31110 - DNA, 120 bp, Artificial Sequence
  ENSG00000047849_1 (sequence is synthesized)
ggtccgcttcggcattcgcaggccgcaggcgggaggctagagcccccaggcgcacctcgccccaaccgcccgcggctcgggcagctctgcagagacgtcgtggcggcagggccagcaccc

SEQ ID NO: 31111 - DNA, 120 bp, Artificial Sequence
  ENSG00000047849_2 (sequence is synthesized)
attggtccgccacagccctccgccctccccctcgccacgcttattggccggagcggcggcgctcgccgggtaggcggtggcggcgtccctcccttgcgccggccctcaagaggcgacgag

SEQ ID NO: 31112 - DNA, 120 bp, Artificial Sequence
  ENSG00000047849_3 (sequence is synthesized)
gaagcggccgcctccctgcgccccgcccctccggctagctcgctggctcccggctcctcccgacgtctcctacctcctcacggctcttcccggcgctctcctggctcccttctgccccag

SEQ ID NO: 31113 - DNA, 120 bp, Artificial Sequence
  ENSG00000047849_4 (sequence is synthesized)
ctccgtctcggcggcggcgggcagttgcagtggtgcagaatggctgacctcagtcttgcagatgcattaacagaaccatctccagacattgagggagagataaagcgggacttcattgcc

SEQ ID NO: 31114 - DNA, 120 bp, Artificial Sequence
  ENSG00000047849_5 (sequence is synthesized)
acactagaggcagaggcctttgatgatgttgtgggagaaactgttggaaaaacagactatattcctctcctggatgttgatgagaaaaccgggaactcagagtcaaagaagaaaccgtgc

SEQ ID NO: 31115 - DNA, 120 bp, Artificial Sequence
  ENSG00000047849_6 (sequence is synthesized)
tcagaaactagccagattgaagatactccatcttctaaaccaacactcctagccaatggtggtcatggagtagaagggagcgatactacagggtctccaactgaattccttgaagagaaa

SEQ ID NO: 31116 - DNA, 120 bp, Artificial Sequence
  ENSG00000047849_7 (sequence is synthesized)
atggcctaccaggaatacccaaatagccagaactggccagaagataccaacttttgtttccaacctgagcaagtggtcgatcctatccagactgatccctttaagatgtaccatgatgat

SEQ ID NO: 31117 - DNA, 120 bp, Artificial Sequence
  ENSG00000047849_8 (sequence is synthesized)
gacctggcagatttggtctttccctccagtgcgacagctgatacttcaatatttgcaggacaaaatgatcccttgaaagacagttacggtatgtctccctgcaacacagctgttgtacct

SEQ ID NO: 31118 - DNA, 120 bp, Artificial Sequence
  ENSG00000047849_9 (sequence is synthesized)
caggggtggtctgtggaagccttaaactctccacactcagagtcctttgtttccccagaggctgttgcagaacctcctcagccaacggcagttcccttagagctagccaaggagatagaa

SEQ ID NO: 31119 - DNA, 120 bp, Artificial Sequence
  ENSG00000047849_10 (sequence is synthesized)
atggcatcagaagagaggccaccagcacaagcattggaaataatgatgggactgaagactactgacatggcaccatctaaagaaacagagatggccctcgccaaggacatggcactagct

SEQ ID NO: 31120 - DNA, 120 bp, Artificial Sequence
  ENSG00000047849_11 (sequence is synthesized)
acaaaaaccgaggtggcattggctaaagatatggaatcacccaccaaattagatgtgacactggccaaggacatgcagccatccatggaatcagatatggccctagtcaaggacatggaa

SEQ ID NO: 31121 - DNA, 120 bp, Artificial Sequence
  ENSG00000047849_12 (sequence is synthesized)
ctacccacagaaaaagaagtggccctggttaaggatgtcagatggcccacagaaacagatgtatcttcagccaagaatgtggtactgcccacagaaacagaggtagccccagccaaggat

SEQ ID NO: 31122 - DNA, 120 bp, Artificial Sequence
  ENSG00000047849_13 (sequence is synthesized)
gtgacactgttgaaagaaacagagagggcatctcctataaaaatggacttagccccttccaaggacatgggaccacccaaagaaaacaagaaagaaacagagagggcatctcctataaaa

SEQ ID NO: 31123 - DNA, 120 bp, Artificial Sequence
  ENSG00000047849_14 (sequence is synthesized)
atggacttggctccttccaaggacatgggaccacccaaagaaaacaagatagtcccagccaaggatttggtattactctcagaaatagaggtggcacaggctaatgacattatatcatcc

SEQ ID NO: 31124 - DNA, 120 bp, Artificial Sequence
  ENSG00000047849_15 (sequence is synthesized)
acagaaatatcctctgctgagaaggtggctttgtcctcagaaacagaggtagccctggccagggacatgacactgcccccggaaaccaacgtgatcttgaccaaggataaagcactacct

SEQ ID NO: 31125 - DNA, 120 bp, Artificial Sequence
  ENSG00000047849_16 (sequence is synthesized)
ttagaagcagaggtggccccagtcaaggacatggctcaactcccagaaacagaaatagccccggccaaggatgtggctccgtccacagtaaaagaagtgggcttgttgaaggacatgtct

SEQ ID NO: 31126 - DNA, 120 bp, Artificial Sequence
  ENSG00000047849_17 (sequence is synthesized)
ccactatcagaaacagaaatggctctgggcaaggatgtgactccacctccagaaacagaagtagttctcatcaagaacgtatgtctgcctccagaaatggaggtggccctgactgaggat

SEQ ID NO: 31127 - DNA, 120 bp, Artificial Sequence
  ENSG00000047849_18 (sequence is synthesized)
caggtcccagccctcaaaacagaagcacccctggctaaggatggggttctgaccctggccaacaatgtgactccagccaaagatgttccaccactctcagaaacagaggcaacaccagtt

SEQ ID NO: 31128 - DNA, 120 bp, Artificial Sequence
  ENSG00000047849_19 (sequence is synthesized)
ccaattaaagacatggaaattgcacaaacacaaaaaggaataagtgaggattcccatttagaatctctgcaggatgtggggcagtcagctgcacctactttcatgatttcaccagaaacc

SEQ ID NO: 31129 - DNA, 120 bp, Artificial Sequence
  ENSG00000047849_20 (sequence is synthesized)
gtcacaggaacggggaaaaagtgcagcttgccggccgaggaggattctgtgttagaaaaactaggggaaaggaaaccatgcaacagtcaaccttctgagctttcttcagagacctcagga

SEQ ID NO: 31130 - DNA, 120 bp, Artificial Sequence
  ENSG00000047849_21 (sequence is synthesized)
aagcctttggccaccactcaacctgcaaagacttcaacatcgaaagccaaaacacagcccacttctctccctaagcagccagctcccaccaccattggtgggttgaataaaaaacccatg

SEQ ID NO: 31131 - DNA, 120 bp, Artificial Sequence
  ENSG00000047849_22 (sequence is synthesized)
agccttgcttcaggcttagtgccagctgccccacccaaacgccctgccgtcgcctctgccaggccttccatcttaccttcaaaagacgtgaagccaaagcccattgcagatgcaaaggct

SEQ ID NO: 31132 - DNA, 120 bp, Artificial Sequence
  ENSG00000047849_23 (sequence is synthesized)
cctgagaagcgggcctcaccatccaagccagcttctgccccagcctccagatctgggtccaagagcactcagactgttgcaaaaaccacaacagctgctgctgttgcctcaactggccca

SEQ ID NO: 31133 - DNA, 120 bp, Artificial Sequence
  ENSG00000047849_24 (sequence is synthesized)
agcagtaggagcccctccacgctcctgcccaagaagcccactgccattaagactgagggaaaacctgcagaagtcaagaagatgactgcaaagtctgtaccagctgacttgagtcgccca

SEQ ID NO: 31134 - DNA, 120 bp, Artificial Sequence
  ENSG00000047849_25 (sequence is synthesized)
aagagcacctccaccagttccatgaagaaaaccaccactctcagtgggacagcccccgctgcaggggtggttcccagccgagtcaaggccacacccatgccctcccggccctccacaact

SEQ ID NO: 31135 - DNA, 120 bp, Artificial Sequence
  ENSG00000047849_26 (sequence is synthesized)
cctttcatagacaagaagcccacctcggccaaacccagctccaccaccccccggctcagccgcctggccaccaatacttctgctcctgatctgaagaatgtccgctccaaggttggctcc

SEQ ID NO: 31136 - DNA, 120 bp, Artificial Sequence
  ENSG00000047849_27 (sequence is synthesized)
acggaaaacatcaagcatcagcctggaggaggccgggccaaagtagagaaaaaaacagaggcagctgctacaacccgaaagcctgaatctaatgcagtcactaaaacagccggcccaatt

SEQ ID NO: 31137 - DNA, 120 bp, Artificial Sequence
  ENSG00000047849_28 (sequence is synthesized)
gcaagtgcacagaaacaacctgcggggaaagtccagatagtctccaaaaaagtgagctacagccatattcagtccaagtgtggttccaaggacaatattaagcatgtccctggaggtggt

SEQ ID NO: 31138 - DNA, 120 bp, Artificial Sequence
  ENSG00000047849_29 (sequence is synthesized)
aatgttcagattcagaacaagaaagtggacatctctaaggtctcctccaagtgtgggtctaaggctaacatcaagcacaagcctggtggaggagatgtcaagattgaaagtcagaagttg

SEQ ID NO: 31139 - DNA, 120 bp, Artificial Sequence
  ENSG00000047849_30 (sequence is synthesized)
aacttcaaggagaaggcccaggccaaggtgggatccctcgataatgtgggccacctacctgcaggaggtgctgtgaagactgagggcggtggcagcgaggctcctctgtgtccgggtccc

SEQ ID NO: 31140 - DNA, 120 bp, Artificial Sequence
  ENSG00000047849_31 (sequence is synthesized)
cctgctggggaggagccggccatctctgaggcagcgcctgaagctggcgcccccacttcagccagtggcctcaatggccaccccaccctgtcagggggtggtgaccaaagggaggcccag

SEQ ID NO: 31141 - DNA, 120 bp, Artificial Sequence
  ENSG00000047849_32 (sequence is synthesized)
accttggacagccagatccaggagacaagcatctaatgatgacattctggtctcgtcttccgtctcccccgtgttcccctcttgtctcccctgttcccctctcccttccctcctcccatg

SEQ ID NO: 31142 - DNA, 120 bp, Artificial Sequence
  ENSG00000047849_33 (sequence is synthesized)
tcactgcagattgagacctacaggctgacgttccgggcaaatgccagggcccgcaccgaccacggggccgacattgtctcccgccccccacacttccctggcggccccaactcgggctcc

SEQ ID NO: 31143 - DNA, 120 bp, Artificial Sequence
  ENSG00000047849_34 (sequence is synthesized)
cgggtccttggccccctttcccgggctgtccactagaccagtgagcgcttgggcgccgtgctgggcagcccgctaggctcgccttccctcctgctttgcgtgcccggggcagcagcagcc

SEQ ID NO: 31144 - DNA, 120 bp, Artificial Sequence
  ENSG00000047849_35 (sequence is synthesized)
ctgccccacacctcctctcactccccagcctgggcccatctccctgctttggtcttgccccatcactgcgccactgctccgtggaggaggttgggagggggttggggtggttgaggctaa

SEQ ID NO: 31145 - DNA, 120 bp, Artificial Sequence
  ENSG00000047849_36 (sequence is synthesized)
gttgggatctaggagaggagaaccagattctatcctcatctttttttggttctttggtccaaacccaaaagaaactgacatgccctcccttctccctggatctacctggagggaagagtg

SEQ ID NO: 31146 - DNA, 120 bp, Artificial Sequence
  ENSG00000047849_37 (sequence is synthesized)
gaggtggattccgagtggtgacaggacgctgaccgtggagcttaagccactgcctctccctctggtcccacaaatgggcgcccccccctccccatgcaggtggtgtcgggcccttcttgc

SEQ ID NO: 31147 - DNA, 120 bp, Artificial Sequence
  ENSG00000047849_38 (sequence is synthesized)
tgccctgccccaagttgggggtcagtgctgcctgtccccatgcttaacatacccgcctagctgctgtcacatttttcttgttttgtccttttatttttttctaataacctaaaaactggc

SEQ ID NO: 31148 - DNA, 120 bp, Artificial Sequence
  ENSG00000047849_39 (sequence is synthesized)
aaaatagttctgcaggttgaagccatgtctacatgaaagtcctcagtaagtgttagagggaacagggcggagatatccttatgccacccccgctggaggatgtgggcagcttagggccct

SEQ ID NO: 31149 - DNA, 120 bp, Artificial Sequence
  ENSG00000047849_40 (sequence is synthesized)
ggaggcggtgcggcagggaagaggggtgcagaggctgtggctggtgagccggtcaggcacacaaggggcccttggagcgtggactggttggttttgccattttgttgtgtgtatgctgct

SEQ ID NO: 31150 - DNA, 120 bp, Artificial Sequence
  ENSG00000047849_41 (sequence is synthesized)
tttcttttctaaccaagaggctggttttggcatctctgtcccattccctgggatctggtggtcagccctaggataaaaagccagggctggagaacaagaaagggccaggagatggaattc

SEQ ID NO: 31151 - DNA, 120 bp, Artificial Sequence
  ENSG00000047849_42 (sequence is synthesized)
aaataaaaggcatgagactaaggctatctgcttcccttatgccctgactggagaggggagggaggagaggcaaggcccacagagggcatcccagctaggccttgggatggctgcagtgag

SEQ ID NO: 31152 - DNA, 120 bp, Artificial Sequence
  ENSG00000047849_43 (sequence is synthesized)
gagaaatcccgggaactgtattgacacaaagattcttattgcacttgtattttttgtattaaagtttgcatggtttctaataaaggattcaaacataagtttgtagtgaaatggcctggg

SEQ ID NO: 31153 - DNA, 120 bp, Artificial Sequence
  ENSG00000047849_44 (sequence is synthesized)
agattccaagggcttctctggagggggattggctgcagtgtagatttgcctctgaggaggctgccccagacttggcctcctcatgccccctcctgacctctgcccttctctggtcctggc

SEQ ID NO: 31154 - DNA, 120 bp, Artificial Sequence
  ENSG00000047849_45 (sequence is synthesized)
atccctggagaaggtaggggtcttgacctaagtttagatttgatctccatgtgcagggaggctgtcctgggcctgacaggtcctccccctttctgaggtagcagtgccttgtggaggttt

SEQ ID NO: 31155 - DNA, 120 bp, Artificial Sequence
  ENSG00000047849_46 (sequence is synthesized)
gacaccatgtccctagctccccaagcacacaccaggaaactgcaggggctcacggaggaagtgctgcctgggccagggggaccagctttcctccgtagagaccatgtgcagaacacttct

SEQ ID NO: 31156 - DNA, 120 bp, Artificial Sequence
  ENSG00000047849_47 (sequence is synthesized)
gctgtgccaagaacatgagggagccagtgttttgtcagcaggaagaaagggcctgctgggatgaaagtgggaaggaaacagggttgcgtagtcaggagacacctcaggggcaacagcaca

SEQ ID NO: 31157 - DNA, 120 bp, Artificial Sequence
  ENSG00000047849_48 (sequence is synthesized)
ggcccagagtacctgctgcctccactgcgtctgtcctggggtcatgaggatgctgaggttgacgacaggttccaggtcctttcactcctttggccaaaggttgggggtaggtggcccaag

SEQ ID NO: 31158 - DNA, 120 bp, Artificial Sequence
  ENSG00000047849_49 (sequence is synthesized)
tggcgtgctctctaggtagacaacaggagtggtcagagttccctcaaaggatcctccactccagagcacctgagaaggccgggaccagaggccctgtgtgatgtgtactccgcagctgtt

SEQ ID NO: 31159 - DNA, 120 bp, Artificial Sequence
  ENSG00000047849_50 (sequence is synthesized)
tggggtgggacatttctgtacttctcgatttgcttatggctcagccattacctgtgtcagtccatgattctgttgtaacagttttaagagtaaataaataaagctgcctgatgtcccatc

SEQ ID NO: 31160 - DNA, 120 bp, Artificial Sequence
  ENSG00000047849_51 (sequence is synthesized)
cttagtgcttggattggcaccatactgtgttttaaattgcagatctaaacagagtgctagttcacgggaaattacattctcagattaaagtagcattttgttgtgcagaaagcagcaggt

SEQ ID NO: 31161 - DNA, 120 bp, Artificial Sequence
  ENSG00000047849_52 (sequence is synthesized)
tccttcctttctttcgctttcattcattcttcctttctttctttctttcacatttgtaagtgcatttaatactcaactgcttgaggagagaggggcattgagggagagatgaattttgtc

SEQ ID NO: 31162 - DNA, 120 bp, Artificial Sequence
  ENSG00000047849_53 (sequence is synthesized)
atgaatactggggaattggtgtgatgtcactgcaagctctgtgtgatcgtaggtggtattagagctccaggagcgaaagcagggagagcagtggaggagagacgatgtcgctctcagaca

SEQ ID NO: 31163 - DNA, 120 bp, Artificial Sequence
  ENSG00000047849_54 (sequence is synthesized)
agcagacagcctctctcactgccgcgtacggtcagctcagtaagggcaagcctgcagagtgccgaatggactccccaaaagaaatcagtcaagccggattcgaatggcagaggacagagg

SEQ ID NO: 31164 - DNA, 120 bp, Artificial Sequence
  ENSG00000047849_55 (sequence is synthesized)
gcaaactgaatgaaattgggctgaatgtcagcatggacgggcaaccaaaagatgggcttgtgaagaatgccagcttcctggagcagaacaagctctgcttttttgaggggaagctagaca

SEQ ID NO: 31165 - DNA, 120 bp, Artificial Sequence
  ENSG00000047849_56 (sequence is synthesized)
aagagctgagcattgaaatgcaggacaaggactgtcaagaagcctcaggtcaccttgagagcaggtatgtgatttcagagacctgccatcccttggaggggaactcggtacaccagaaga

SEQ ID NO: 31166 - DNA, 120 bp, Artificial Sequence
  ENSG00000047849_57 (sequence is synthesized)
cctccgagttccatctgggactcatagaggggccagacaaaaacaaaaccattccagttcaggggaaggtggcagggaagaatggactagagaccaagagccagtcagatctggatttcc

SEQ ID NO: 31167 - DNA, 120 bp, Artificial Sequence
  ENSG00000047849_58 (sequence is synthesized)
ctggggctgctgacatccctaccagatatgttaaggagcaggaaaccagtgtttggaaccccagctttcatccagtggctcaaggctctctgggctcaagggaagcaactccgggagaga

SEQ ID NO: 31168 - DNA, 120 bp, Artificial Sequence
  ENSG00000047849_59 (sequence is synthesized)
tggagaatagcatcacccctggctgcccagtgattggggtggtaaatgataactctgagcagctgaagtgtgagtccccactcctggtgtctctagcccacccagcccccattattgagc

SEQ ID NO: 31169 - DNA, 120 bp, Artificial Sequence
  ENSG00000047849_60 (sequence is synthesized)
attcacccaccaccattccgccaatcactatggtgttcacccaggaacatttgaatgcaagctgtcacatcagagaccatgataaggagttggagaaattgagttctaccgaggaggctg

SEQ ID NO: 31170 - DNA, 120 bp, Artificial Sequence
  ENSG00000047849_61 (sequence is synthesized)
tgctcaaccaagccccccagcagaaaaaggcagtgcgcagggccctgtctgaatgttctcacctctcagttcccccagctgtcaaccttgcagataagtaccctgaactccctgcccgag

SEQ ID NO: 31171 - DNA, 120 bp, Artificial Sequence
  ENSG00000047849_62 (sequence is synthesized)
aagagccttcttctggcctgctgcctccccctagtagcccaatgcctagtcctacacctgggaaactgggagctcctgctatgaagcgctccatgactgtgggtgaggaacagacagcta

SEQ ID NO: 31172 - DNA, 120 bp, Artificial Sequence
  ENSG00000047849_63 (sequence is synthesized)
gctacaaattgagccctgggaaactgcccatcttgtctactaaagagatacctcctttcatctgtgaggaaccagtggccaagaagagagaagaattggctcacttcagcaacagcagca

SEQ ID NO: 31173 - DNA, 120 bp, Artificial Sequence
  ENSG00000047849_64 (sequence is synthesized)
gcaactctgggaagaaggaactcggcactgctggattatatctccatagtaagctggagcagattcctgaaggaagcagcaaggaaaaagggcaggaagattttagtgaaactagaattg

SEQ ID NO: 31174 - DNA, 120 bp, Artificial Sequence
  ENSG00000047849_65 (sequence is synthesized)
gcccccacgtgatggaatagccaggccagaagaaggaaggcctgtggtgagtgggacaggaaatgacatcaccaccccaccgaacaaggagctcccaccaagcccagagaagaaaacaaa

SEQ ID NO: 31175 - DNA, 120 bp, Artificial Sequence
  ENSG00000047849_66 (sequence is synthesized)
ccctcccacacaagccaaacaagtttgcagacccagtgaccgcaggtcaacccggcccaagcctgccagggtccctcctgagctgctgggaggctctcctccatggaagactcttgatca

SEQ ID NO: 31176 - DNA, 120 bp, Artificial Sequence
  ENSG00000047849_67 (sequence is synthesized)
caggctgggccactgctctttgtctgagtcaggttgggtctctggttcatcctcctgtggtgggcctgggaaccaaagaaaaagtattcatgttgactcacttgaaccccagagggatct

SEQ ID NO: 31177 - DNA, 120 bp, Artificial Sequence
  ENSG00000047849_68 (sequence is synthesized)
tggcagggaggcctgggatatagaaagcacaccaataatgatgaagaaaaagaagaagaaaccaaagcaaaagagatattctcaaccacgggctggaggaccttcggatgatgacaatgc

SEQ ID NO: 31178 - DNA, 120 bp, Artificial Sequence
  ENSG00000047849_69 (sequence is synthesized)
agataagcctaaaggtcatccatttgcagctgacacacaaaaatcaggtgttctccccagccagcctaccactatgggtacagaatatggacttgtatctggagaaaacttgaaaaggga

SEQ ID NO: 31179 - DNA, 120 bp, Artificial Sequence
  ENSG00000047849_70 (sequence is synthesized)
atgtttagttaactccagtgcagccagactggtagctgagaactttgtctcagagagtctcagaattcctttatatccttctgaagaagcccccaaaactgcaataagttctcagtctaa

SEQ ID NO: 31180 - DNA, 120 bp, Artificial Sequence
  ENSG00000047849_71 (sequence is synthesized)
gctgagagtagaggaagagagcaaaagtaacaagtcagtactacaaaaccaagacaagaaattgctgaagcaacatgaatacaaaccacagcctgcaccccacctgaagactcctgtaga

SEQ ID NO: 31181 - DNA, 120 bp, Artificial Sequence
  ENSG00000047849_72 (sequence is synthesized)
taaaagccagtcagtaggccctctcaatctgaaaggacccctagcagaagtttctgcatacaatgtagaaacccctttggatatcagacttaaagagggttgctctcctttcttggacca

SEQ ID NO: 31182 - DNA, 120 bp, Artificial Sequence
  ENSG00000047849_73 (sequence is synthesized)
agaggttatgggtgtagtttcaaaacccacagcagcaaaagaaataccaaatttggtacccactttgatagcaagtaatccattagaatgtaatctaaaagaagggaataatgaaagtaa

SEQ ID NO: 31183 - DNA, 120 bp, Artificial Sequence
  ENSG00000047849_74 (sequence is synthesized)
aatgactaaactgcagaatgtcaaactgaaggagtttcctgaaggagctgaagaggataaagaactaaaaaaggaagcttttcccaacgaaagacaagagatcagcatctttacttctga

SEQ ID NO: 31184 - DNA, 120 bp, Artificial Sequence
  ENSG00000047849_75 (sequence is synthesized)
gcagctgcagggccaagtgttggtacaggtccctggggtagagaatgaaccatttaagagaatggcaggtgatggcaaaagcaggaagggaaggggaagttctgggaaaatgagaacaga

SEQ ID NO: 31185 - DNA, 120 bp, Artificial Sequence
  ENSG00000047849_76 (sequence is synthesized)
ttctgggaaggtaaaagcaaaatctgagctgccatttcttctggacagccagaaggacggaagggctgttctcataccgagtgagccagtctctaaaactgaaggaatgactactcagga

SEQ ID NO: 31186 - DNA, 120 bp, Artificial Sequence
  ENSG00000047849_77 (sequence is synthesized)
taagagtgaggagctggggctgaattcttcaaagcaaccaggcactaaggctgatctcacggaggcagtggtgatgggggagcctaaagagatgactcagcctaaggtggcaggcaccat

SEQ ID NO: 31187 - DNA, 120 bp, Artificial Sequence
  ENSG00000047849_78 (sequence is synthesized)
gcaggcattgattcctttggaaagtggatcaggcatgactcagacttctggtgttagcacagaaacaggagatgtagtcaaagatatgggtgtcaataaccagagcaaggaaggaaggtg

SEQ ID NO: 31188 - DNA, 120 bp, Artificial Sequence
  ENSG00000047849_79 (sequence is synthesized)
tccatggaaggatcatgaggcagctccctggatttctgaaaagcctaaaaagagaggcaatgaaggcaaaagcaaaaagtttaaaaataattattccacacagcctgctagaatggagag

SEQ ID NO: 31189 - DNA, 120 bp, Artificial Sequence
  ENSG00000047849_80 (sequence is synthesized)
gaaggaagaaatccttaacccaccttttgaagggaaggatggagatactggtagtattccccataaaagcaaggaaataggatttactttccccaaaatgcatgattcttcgttctcaca

SEQ ID NO: 31190 - DNA, 120 bp, Artificial Sequence
  ENSG00000047849_81 (sequence is synthesized)
tacaccagatacacccacagtggaagcagttgacaggaagggtggaaattttcaggttaattttgttgagcttgggactcttggggaaaacaagataagcacagtcaaggcttctactgt

SEQ ID NO: 31191 - DNA, 120 bp, Artificial Sequence
  ENSG00000047849_82 (sequence is synthesized)
tactgaaccacctgccaaggtgacagatgtgagctgccaagagcaaatccagggggcaggatttgttccttcagtagtatctgaggagaataagacagatgcagccaatagatacactgc

SEQ ID NO: 31192 - DNA, 120 bp, Artificial Sequence
  ENSG00000047849_83 (sequence is synthesized)
agtggctgacaaaccaagtaaaaggagtaatgatggaaaaagtaaaaaggttaaaaatagttctcctgagaagcacattctggagaataagatagatgcaacaaaaatacatgttcccat

SEQ ID NO: 31193 - DNA, 120 bp, Artificial Sequence
  ENSG00000047849_84 (sequence is synthesized)
ggaaaccacaggggaccagggaattgaaggaatggcctatatggacgaaaatagaaatattacatttacctgtcccagaacaccatcagagctgataaataaatcatctcctctagaggt

SEQ ID NO: 31194 - DNA, 120 bp, Artificial Sequence
  ENSG00000047849_85 (sequence is synthesized)
cctcaagtagtaaaggaaggtgattcctttccagataccttggcaaaaaatgggcaagagatagccccagcccagatttccaaatcattaatggtagataactacaccaaagatggagtc

SEQ ID NO: 31195 - DNA, 120 bp, Artificial Sequence
  ENSG00000047849_86 (sequence is synthesized)
ccaggtcaagaaagacccaagggtccctctgctgttgtgccctctacaagcacaggaggagttgctctacctattacaacagccatagaaacagttaacattcatggagatcactctctt

SEQ ID NO: 31196 - DNA, 120 bp, Artificial Sequence
  ENSG00000047849_87 (sequence is synthesized)
aagaataaagctgagcttgctgattccatgaaaaatgaagcagggatcgatgaagggcatgtgataggagaatctgagtcagtgcacagtggtgcgtctaagcattcagtagagaaagtc

SEQ ID NO: 31197 - DNA, 120 bp, Artificial Sequence
  ENSG00000047849_88 (sequence is synthesized)
acagagctagcaaaaggtcacctccttcctggagtgccagtagaagaccagagcctaccaggagaggccagagccctagaaggatatgcagatagaggtaatttcccagcacatccagtg

SEQ ID NO: 31198 - DNA, 120 bp, Artificial Sequence
  ENSG00000047849_89 (sequence is synthesized)
aatgaagagaaagagactaaagaagggtctgttgcagttcagattcctgacttactggaagacaaagcacaaaagctcagtttttgtgaggaccaaaatgctcaagatagaaattccaaa

SEQ ID NO: 31199 - DNA, 120 bp, Artificial Sequence
  ENSG00000047849_90 (sequence is synthesized)
ggttcagatagtttgaataagaaggtagatctgactcttttgtctccaaaaagtgaaaatgataaattgaaagaaattagtctggcttgtaaaatcacggaattggaaagcgtttccttg

SEQ ID NO: 31200 - DNA, 120 bp, Artificial Sequence
  ENSG00000047849_91 (sequence is synthesized)
ccaacaccagaaatccagtcagatttcttacatagcaaagtcgaagctcctccttcagaggtggcggatacgttagtaataatgactgcttccaagggtgttcgactcccagaacccaaa

SEQ ID NO: 31201 - DNA, 120 bp, Artificial Sequence
  ENSG00000047849_92 (sequence is synthesized)
gataagattttggagacacctcagaaaatgacagaaaaatctgaatcaaagacaccaggagaagggaaaaaggaagataaaagcagaatggcagaaccaatgaaaggctacatgagaccc

SEQ ID NO: 31202 - DNA, 120 bp, Artificial Sequence
  ENSG00000047849_93 (sequence is synthesized)
accaagtcccgaggacttactccacttttgccaaagtctacaatccaggaacaagagagacataagcaactgaagtccgctggaatagccaggccagaagaaggaaggcctgtggtgagt

SEQ ID NO: 31203 - DNA, 120 bp, Artificial Sequence
  ENSG00000047849_94 (sequence is synthesized)
ttttgcagagctttgcttttcattcctggacatgatgtagaagaaactgagggtagttcttcggggcctatttctgctgatgcctgagcaaacaacctgcttcctcttgtgctctgcagg

SEQ ID NO: 31204 - DNA, 120 bp, Artificial Sequence
  ENSG00000047849_95 (sequence is synthesized)
gtttgatggagcctcatttccctttgtgaacacaaagtgcaaaatgaattctttttaattttagtaatttttacaaaggttatctaatgtcttttatttcttgttttctttatgatttta

SEQ ID NO: 31205 - DNA, 120 bp, Artificial Sequence
  ENSG00000047849_96 (sequence is synthesized)
tcatttgattcattctcacatttttttcctttaaatatttttagttgacctttttcctttggttttcaaatgttcaacatgaatcagaatagtgtaacaccaaatgagaacatgtgtttt

SEQ ID NO: 31206 - DNA, 120 bp, Artificial Sequence
  ENSG00000047849_97 (sequence is synthesized)
cataaaggggttgaggccaccagtactgcagcgaatttccttttcttctccctcctccttccttctctgagcttgcttttagggaaggttaatcttacaggctacctatgtttctctcca

SEQ ID NO: 31207 - DNA, 120 bp, Artificial Sequence
  ENSG00000047849_98 (sequence is synthesized)
ccttactaaaatctaaataatgatagatattttaagtttttaaattgagtagttctgagtaatcctagaatatttttccaaattaaataatcctttattatttgcaagttgggccaaatt

SEQ ID NO: 31208 - DNA, 120 bp, Artificial Sequence
  ENSG00000047849_99 (sequence is synthesized)
tttttttttttggagacggactcttaacaatctaagattgtttcaacaggactttcttattcccattcctaattttttcaaactaattgcttaaatctagaaccagttgagattagtact

SEQ ID NO: 31209 - DNA, 120 bp, Artificial Sequence
  ENSG00000047849_100 (sequence is synthesized)
gtacaatggtatgctttgattgtatttatagaaatataacataaaacatggaccatgttttgaaatcttagaggaattctggtttaaaatctgaaatactttaaagttttctatcctttt

SEQ ID NO: 31210 - DNA, 120 bp, Artificial Sequence
  ENSG00000047849_101 (sequence is synthesized)
tgcagcttcttataacccccaaggtacagattatttcagcttaaaagaaataattggcaccatgttctgagaaagattttgagatatacattgttttttgtttttgagacagggtctcac

SEQ ID NO: 31211 - DNA, 62 bp, Artificial Sequence
  ENSG00000047849_102 (sequence is synthesized)
tttgtttttgagacagggtctcactcttgcctaggctggagtgcggtggcgcgatcttggct

SEQ ID NO: 31212 - DNA, 120 bp, Artificial Sequence
  ENSG00000047849_103 (sequence is synthesized)
gtgagacactgtgcctggccagatatacattgttttagatcccctgatacagaactacttttgagatggtaagattagaatatcatgaaagtttaaactgaatccttgcagcgacttccg

SEQ ID NO: 31213 - DNA, 120 bp, Artificial Sequence
  ENSG00000047849_104 (sequence is synthesized)
gaatttaggaagcattccctcttctacaggggtctggtcacaagggctggattctctgacaaaaatttcttctatggattctggacagaagacacttgagggtgatatgttttaaaggaa

SEQ ID NO: 31214 - DNA, 120 bp, Artificial Sequence
  ENSG00000047849_105 (sequence is synthesized)
agaggttatgcttatcttcttagcagttgataaaatattaaaactctcttgccatagagaatacaccatcaaagaaaacacaaccctttccctttggtgtacagttatttattaagttga

SEQ ID NO: 31215 - DNA, 120 bp, Artificial Sequence
  ENSG00000047849_106 (sequence is synthesized)
ttttggggtttctttcgccagggatcttttcaaaactggtagtagttatttttaaaaatcatgtttgacatctttctattgctcgtaaccagtccctgtagctgtctaagttatgggtgg

SEQ ID NO: 31216 - DNA, 120 bp, Artificial Sequence
  ENSG00000047849_107 (sequence is synthesized)
agaagcctgggtatgactttccgttgtgtacactcacacttcatgattgacatttatttattcttttatttccatttggttatgcttatttttgtttgaaatttgtttttttcaaatatg

SEQ ID NO: 31217 - DNA, 120 bp, Artificial Sequence
  ENSG00000047849_108 (sequence is synthesized)
tttcctttttgaacttacagaattgttgaaattttctactaacagccagctaaaatttggtatatgttagctctatctgtttcacttggacgtttcattttgaaagaaagaaattttatg

SEQ ID NO: 31218 - DNA, 120 bp, Artificial Sequence
  ENSG00000047849_109 (sequence is synthesized)
tttcacatatagttttatacaaagtagccagtcccataatgaaatgctgtattgccatagtggtcacacccaagtggtccagtatctcaatggtgaggcagccagactggtcagggctgc

SEQ ID NO: 31219 - DNA, 120 bp, Artificial Sequence
  ENSG00000047849_110 (sequence is synthesized)
tttgttgaaatgtgatgattttcatatgccttctttctctttctctctctctttttttttccttttttggcccaatgttgaagatgtagaactttgtttttaaataatgtttttataatt

SEQ ID NO: 31220 - DNA, 120 bp, Artificial Sequence
  ENSG00000047849_111 (sequence is synthesized)
tcattcgtatacctaagtttgtattttttgtgactttggacttcaacagtttgtatattgggacttctaatgtgattactgtactaaataaattccactaataaacatcttacattaaca

SEQ ID NO: 31221 - DNA, 120 bp, Artificial Sequence
  ENSG00000047849_112 (sequence is synthesized)
gcgagtgggtcactggggagacacagctggggaggggtgggaactatgcagttagggtcagggtcctcacaggtaggcacctgtcaccgcccctcagtctcttcaggagtcatgtcttca

SEQ ID NO: 31222 - DNA, 120 bp, Artificial Sequence
  ENSG00000047849_113 (sequence is synthesized)
attcatttggacagaaatgttgaaggcaggtgcctgatccaaaatgcatttagtcaggactgaacacaagctgcctggatagttcctattagagaactcagccctgaaaggtgactcatt

SEQ ID NO: 31223 - DNA, 120 bp, Artificial Sequence
  ENSG00000047849_114 (sequence is synthesized)
caaggccaaagtagagaaaaaaacagaggcagctgctacaacccgaaagcctgaatctaatgcagtcactaaaacagccggcccaattgcaagtgcacagaaacaacctgcggggaaagt

SEQ ID NO: 31224 - DNA, 120 bp, Artificial Sequence
  ENSG00000047849_115 (sequence is synthesized)
ggttatcttctactgccataatttttaaacggagtatcttctgctgttattgcttgaatcacgaatgaaatttcttttttctgagctgttattgtccttcctcatgtttggacatgctta

SEQ ID NO: 31225 - DNA, 120 bp, Artificial Sequence
  ENSG00000047849_116 (sequence is synthesized)
gaaaatatcttgtattctcatttaccacagtggcctaaaccaactttaaaatctcagcctttgaccctattatcttatatatctgtaaaaaatgttctgtagaggccgggcatggtggct

SEQ ID NO: 31226 - DNA, 66 bp, Artificial Sequence
  ENSG00000047849_117 (sequence is synthesized)
ggaggccaaggcgggcggatcacatcagtaaaattaactgggcgtggtgatgcatgcctgtaatcc

SEQ ID NO: 31227 - DNA, 120 bp, Artificial Sequence
  ENSG00000047849_118 (sequence is synthesized)
gtgcatgtgtcccttagactgcttctccacagggtcaggctctctgaatctgaggaatctaaaactgtcctccatcacaatgagaacttgggaggcttgtccacatttcagcagcacaac

SEQ ID NO: 31228 - DNA, 120 bp, Artificial Sequence
  ENSG00000047849_119 (sequence is synthesized)
cctgtggacttttttcagaatgaagtgctagttagtggtctgtctttgctaaaccttgtattttcaaaatgggcatgtaaaatgtttgcttagcataattcccactcaccctctcccctt

SEQ ID NO: 31229 - DNA, 120 bp, Artificial Sequence
  ENSG00000047932_0 (sequence is synthesized)
gggactgactgagtcttccgtgtgtcgccgccgttgccgcctcagcttcagcctcgttactcctgcggttctgtgactgtgctgctggcgttaacggcgcgaggtgaagggaggtgacgg

SEQ ID NO: 31230 - DNA, 120 bp, Artificial Sequence
  ENSG00000047932_1 (sequence is synthesized)
agtgtgcccgcgcgcgcgggggtcccctcagtcccagcagttcccttcgtgcgcggggggcggcgagggtcttcagcagtcgggagaggcccttgacggcgccatgtcggcgggcggtcc

SEQ ID NO: 31231 - DNA, 120 bp, Artificial Sequence
  ENSG00000047932_2 (sequence is synthesized)
atgcccagcagcagccggagggggcccagggggcgcctcctgctccgtgggggcccctggcggggtatccatgttccggtggctggaggtgctggagaaggagttcgacaaagcttttgt

SEQ ID NO: 31232 - DNA, 120 bp, Artificial Sequence
  ENSG00000047932_3 (sequence is synthesized)
ggatgtggatctgctcctgggagagatcgatccagaccaagcggacatcacttatgaggggcgacagaagatgaccagcctgagctcctgctttgcacagctttgccacaaagcccagtc

SEQ ID NO: 31233 - DNA, 120 bp, Artificial Sequence
  ENSG00000047932_4 (sequence is synthesized)
tgtgtctcaaatcaaccacaagctggaggcacagttggtggatctgaaatctgaactgacagaaacccaagcagagaaagttgttttggagaaagaagtacatgatcagcttttacagct

SEQ ID NO: 31234 - DNA, 120 bp, Artificial Sequence
  ENSG00000047932_5 (sequence is synthesized)
gcactctattcagctgcagcttcatgctaaaactggtcaaagtgctgactctggtaccattaaggcaaaattgtctggcccctctgtggaggagctggaaagagagcttgaggcaaacaa

SEQ ID NO: 31235 - DNA, 120 bp, Artificial Sequence
  ENSG00000047932_6 (sequence is synthesized)
aaaagaaaaaatgaaagaagcacaacttgaagctgaagtgaaattgttgagaaaagagaatgaagcccttcgtagacatatagctgttctccaggctgaagtatatggggcgagactagc

SEQ ID NO: 31236 - DNA, 120 bp, Artificial Sequence
  ENSG00000047932_7 (sequence is synthesized)
tgccaagtacttggataaggaactggcaggaagggtccaacagatacaattgctaggacgagatatgaagggacctgctcatgataagctttggaaccaattagaagctgaaatacattt

SEQ ID NO: 31237 - DNA, 120 bp, Artificial Sequence
  ENSG00000047932_8 (sequence is synthesized)
gcatcgtcacaaaactgtgatccgagcctgcagaggacgtaatgacttgaaacgaccaatgcaagcaccaccaggccatgatcaagattccctaaagaaaagccaaggtgttggtccaat

SEQ ID NO: 31238 - DNA, 120 bp, Artificial Sequence
  ENSG00000047932_9 (sequence is synthesized)
tagaaaagttctcctccttaaggaagatcatgaaggccttggcatttcaattacaggtgggaaagaacatggtgttccaatcctcatctctgagatccatccggggcaacctgctgatag

SEQ ID NO: 31239 - DNA, 120 bp, Artificial Sequence
  ENSG00000047932_10 (sequence is synthesized)
atgcggagggctgcacgttggggatgctattttggcagtcaacggagttaacctaagggacacaaagcataaagaagctgtaactattctttctcagcagagaggagagattgaatttga

SEQ ID NO: 31240 - DNA, 120 bp, Artificial Sequence
  ENSG00000047932_11 (sequence is synthesized)
agtagtttatgtggctcctgaagtggattctgatgatgaaaacgtagagtatgaagatgagagtggacatcgttaccgtttgtaccttgatgagttagaaggaggtggtaaccctggtgc

SEQ ID NO: 31241 - DNA, 120 bp, Artificial Sequence
  ENSG00000047932_12 (sequence is synthesized)
tagttgcaaagacacaagtggggaaatcaaagtattacaaggatttaataagaaggcagtaactgacacacatgaaaatggagacctgggcactgcaagtgaaactccgctagatgacgg

SEQ ID NO: 31242 - DNA, 120 bp, Artificial Sequence
  ENSG00000047932_13 (sequence is synthesized)
tgcttcaaaattagatgatctgcacactctgtatcataaaaaatcttattaaattgaccatatctccagacaagattgttaatcagactattctgaatttggggcactggggaagatggt

SEQ ID NO: 31243 - DNA, 120 bp, Artificial Sequence
  ENSG00000047932_14 (sequence is synthesized)
gacaaagactacaaaatcaggggaggctgtttgttgcctaaatgaaaggcgggtacctcagggcttcatgtgaacaattctcaatgcataaaacaccctgttttctgtggtagaccataa

SEQ ID NO: 31244 - DNA, 120 bp, Artificial Sequence
  ENSG00000047932_15 (sequence is synthesized)
ttagctattgcatgtaaagcaattttgattttcttgaacttgtaagcaccaaagcatgtgtttcccaaaggggtattactgggctcttaagtaccaaatgaaaccctactgttttacttg

SEQ ID NO: 31245 - DNA, 120 bp, Artificial Sequence
  ENSG00000047932_16 (sequence is synthesized)
gttccttttccctttagtaggaggacagtgctaactggaattttataaggagtaccctttaaaatacagagagtaagtgaattcatattttatattctagaatgttaactgtggtatttc

SEQ ID NO: 31246 - DNA, 120 bp, Artificial Sequence
  ENSG00000047932_17 (sequence is synthesized)
agaagacagagcttgactcaatgaattgtagaaatataggcttgacttaatttttgtaactgaaaggctttagacttaaaaaaatttattgtgcatcctaaaatctaaaccaattattaa

SEQ ID NO: 31247 - DNA, 120 bp, Artificial Sequence
  ENSG00000047932_18 (sequence is synthesized)
tgatcatttattgtaatgagtttgcatttcagctttattcaatgcagtacaaaatagttttctttaagcagtcttttatcaatcaatgctgcactagaaatagattctcaaaagttacta

SEQ ID NO: 31248 - DNA, 120 bp, Artificial Sequence
  ENSG00000047932_19 (sequence is synthesized)
atgagtgtaaaacatctgttctcaattatgttgatctgtgtgcgcagtactggagcatttacccattcatgttgagcctcaaatgcttgttttctggggtccacaaaagacagttttata

SEQ ID NO: 31249 - DNA, 120 bp, Artificial Sequence
  ENSG00000047932_20 (sequence is synthesized)
cattttgagttgttcataaagtttgtcttgtgatagtcctggcacttaaagacaaatttttctggtagtaaaagttcagatttattactatgtcatgaaacacagtacattcaaatcaaa

SEQ ID NO: 31250 - DNA, 120 bp, Artificial Sequence
  ENSG00000047932_21 (sequence is synthesized)
cggcagttttctttctaagtaaatgatttccagtcatctaaaaggtgggcaagatgagataaagacattttgatacagtaattgttttggttgggttttcatgtcagtttatgtttgact

SEQ ID NO: 31251 - DNA, 120 bp, Artificial Sequence
  ENSG00000047932_22 (sequence is synthesized)
aaagctctcttcatatgcaggtttataaatttgttaggtctgttgtcccatgattaaacatggagtgcctcctctctgatttaatattctgcaggtcattgtaacctgctaggcaaagtc

SEQ ID NO: 31252 - DNA, 120 bp, Artificial Sequence
  ENSG00000047932_23 (sequence is synthesized)
acaacattgcattaaagaggtgatagctttgctaatatcactgttttaaaggacgtacagttaaaggaatattaagtgggagaaagcctacaaggcttttagaatattatcagtatcttc

SEQ ID NO: 31253 - DNA, 120 bp, Artificial Sequence
  ENSG00000047932_24 (sequence is synthesized)
atttctggtattcagatgttatgtgataaaacacattttttttggctttcccagatacactatatatttgttcaagggtaaatctataaaatgtatatactttattttgtggttttgcta

SEQ ID NO: 31254 - DNA, 120 bp, Artificial Sequence
  ENSG00000047932_25 (sequence is synthesized)
tttataaatttaatgttttaactgttgctcatttatggtttgttttgggtggtggtgttcatctgtatatcaccatgttaatttgtaatggaagtgcacttcgtagtgtatattgttact

SEQ ID NO: 31255 - DNA, 120 bp, Artificial Sequence
  ENSG00000047932_26 (sequence is synthesized)
gacattaaaatactttatagcattgtctctgagcaaaagctagtatttaattgtacaaatgaataagcaagttacatgttattgtttgctcttgacagggtaggcctcttaaaagaaaaa

SEQ ID NO: 31256 - DNA, 120 bp, Artificial Sequence
  ENSG00000047932_27 (sequence is synthesized)
aaacaacttgttttttctttatgaatcccctatgccaaacacataccttccatgcatgacatgagatctgcaaactggattttagccaccgtatttatttagtcaaaaaaattgtccatt

SEQ ID NO: 31257 - DNA, 120 bp, Artificial Sequence
  ENSG00000047932_28 (sequence is synthesized)
gtagcagacccgaaaacctttttgctgtgacatgaaaccatgttattcttatcttcttaaaacacagcctgggatggaatggccatggcatttttttcagagaacatcctttatctgcta

SEQ ID NO: 31258 - DNA, 120 bp, Artificial Sequence
  ENSG00000047932_29 (sequence is synthesized)
tgactgaatccttaggaaatgtaagctataaccctttgattttcaagaactaccgaataagtgtatgaagaggtggttttttaaaacttcaagttggaatttttatgaggtcactgtgta

SEQ ID NO: 31259 - DNA, 120 bp, Artificial Sequence
  ENSG00000047932_30 (sequence is synthesized)
atttgaagaattgtgtgagattgtcatgatataaattccttttaaggactgataaatagaatgaaaagtttccaggtagtttaaaactccacaggtcagtttccttttcattcctgcttc

SEQ ID NO: 31260 - DNA, 120 bp, Artificial Sequence
  ENSG00000047932_31 (sequence is synthesized)
actgtggtttataagcctacgggagagcaccgttgctcagatgctactgtgagcttcctgtccggtgttagaaagtaactagttaaaagttcattttagaatgtatggtttttggggatg

SEQ ID NO: 31261 - DNA, 120 bp, Artificial Sequence
  ENSG00000047932_32 (sequence is synthesized)
aactaagaattagttattagttccaaaggactgagaaccaattttaatattttcacatttataggaaagaaattcatatgtccctgaaacttctaggacaaaaccaaacaagtaaggagg

SEQ ID NO: 31262 - DNA, 120 bp, Artificial Sequence
  ENSG00000047932_33 (sequence is synthesized)
gaactgttgcaaagccatttcatcgagaaggggacagaaggagaaatacacacatgtatacacaaacagaatggttgagaaaacgttttaataaaatgtgagggttgtatgtgtgcgtgt

SEQ ID NO: 31263 - DNA, 120 bp, Artificial Sequence
  ENSG00000047932_34 (sequence is synthesized)
atatatttacacttaacctctaaaattctcttctacagtatctctgttatgaatatgatggaaaagcaacattttggtggtgagactattgttaaaataaatttgagaaagacgaaaatt

SEQ ID NO: 31264 - DNA, 120 bp, Artificial Sequence
  ENSG00000047932_35 (sequence is synthesized)
ttgtgagtcttgataattacaagtcaacagctatcgaaagttagcacagcttgtctgtggtgctgtttttttccccactgcagtggacttatgctgttttcatgtttagaaacaaaaagg

SEQ ID NO: 31265 - DNA, 120 bp, Artificial Sequence
  ENSG00000047932_36 (sequence is synthesized)
tttcatgtgattcatgtgtaagatgcacagtatttgacatcctgattatgtaatccctattccatctatccagtcttacacttatggttggcctcaaatctattgcatttatgataatgt

SEQ ID NO: 31266 - DNA, 120 bp, Artificial Sequence
  ENSG00000047932_37 (sequence is synthesized)
attatatctagttgagtttaatatttttttattagcctgtaaataaagatggcatcttctacattaaaatgatattgatctcatttttttaaataaacattttgtttccttgacgttaaa

SEQ ID NO: 31267 - DNA, 120 bp, Artificial Sequence
  ENSG00000047936_0 (sequence is synthesized)
caagctttcaagcattcaaaggtctaaatgaaaaaggctaagtattatttcaaaaggcaagtatatcctaatatagcaaaacaaacaaagcaaaatccatcagctactcctccaattgaa

SEQ ID NO: 31268 - DNA, 120 bp, Artificial Sequence
  ENSG00000047936_1 (sequence is synthesized)
gtgatgaagcccaaataattcatatagcaaaatggagaaaattagaccggccatctaaaaatctgccattggtgaagtgatgaagaacatttactgtcttattccgaagcttgtcaattt

SEQ ID NO: 31269 - DNA, 120 bp, Artificial Sequence
  ENSG00000047936_2 (sequence is synthesized)
tgcaactcttggctgcctatggatttctgtggtgcagtgtacagttttaaatagctgcctaaagtcgtgtgtaactaatctgggccagcagcttgaccttggcacaccacataatctgag

SEQ ID NO: 31270 - DNA, 120 bp, Artificial Sequence
  ENSG00000047936_3 (sequence is synthesized)
tgaaccgtgtatccaaggatgtcacttttggaactctgtagatcagaaaaactgtgctttaaagtgtcgggagtcgtgtgaggttggctgtagcagcgcggaaggtgcatatgaagagga

SEQ ID NO: 31271 - DNA, 120 bp, Artificial Sequence
  ENSG00000047936_4 (sequence is synthesized)
agtactggaaaatgcagacctaccaactgctccctttgcttcttccattggaagccacaatatgacattacgatggaaatctgcaaacttctctggagtaaaatacatcattcagtggaa

SEQ ID NO: 31272 - DNA, 120 bp, Artificial Sequence
  ENSG00000047936_5 (sequence is synthesized)
atatgcacaacttctgggaagctggacttatactaagactgtgtccagaccgtcctatgtggtcaagcccctgcaccccttcactgagtacattttccgagtggtttggatcttcacagc

SEQ ID NO: 31273 - DNA, 120 bp, Artificial Sequence
  ENSG00000047936_6 (sequence is synthesized)
gcagctgcagctctactcccctccaagtcccagttacaggactcatcctcatggagttcctgaaactgcacctttgattaggaatattgagagctcaagtcccgacactgtggaagtcag

SEQ ID NO: 31274 - DNA, 120 bp, Artificial Sequence
  ENSG00000047936_7 (sequence is synthesized)
ctgggatccacctcaattcccaggtggacctattttgggttataacttaaggctgatcagcaaaaatcaaaaattagatgcagggacacagagaaccagtttccagttttactccacttt

SEQ ID NO: 31275 - DNA, 120 bp, Artificial Sequence
  ENSG00000047936_8 (sequence is synthesized)
accaaatactatctacaggttttctattgcagcagtaaatgaagttggtgagggtccagaagcagaatctagtattaccacttcatcttcagcagttcaacaagaggaacagtggctctt

SEQ ID NO: 31276 - DNA, 120 bp, Artificial Sequence
  ENSG00000047936_9 (sequence is synthesized)
tttatccagaaaaacttctctaagaaagagatctttaaaacatttagtagatgaagcacattgccttcggttggatgctatataccataatattacaggaatatctgttgatgtccacca

SEQ ID NO: 31277 - DNA, 120 bp, Artificial Sequence
  ENSG00000047936_10 (sequence is synthesized)
gcaaattgtttatttctctgaaggaactctcatatgggcgaagaaggctgccaacatgtctgatgtatctgacctgagaattttttacagaggttcaggattaatttcttctatctccat

SEQ ID NO: 31278 - DNA, 120 bp, Artificial Sequence
  ENSG00000047936_11 (sequence is synthesized)
agattggctttatcaaagaatgtatttcatcatggatgaactggtatgtgtctgtgatttagagaactgctcaaacatcgaggaaattactccaccctctattagtgcacctcaaaaaat

SEQ ID NO: 31279 - DNA, 120 bp, Artificial Sequence
  ENSG00000047936_12 (sequence is synthesized)
tgtggctgattcatacaatgggtatgtcttttacctcctgagagatggcatttatagagcagaccttcctgtaccatctggccggtgtgcagaagctgtgcgtattgtggagagttgcac

SEQ ID NO: 31280 - DNA, 120 bp, Artificial Sequence
  ENSG00000047936_13 (sequence is synthesized)
gttaaaggactttgcaatcaagccacaagccaagcgaatcatttacttcaatgacactgcccaagtcttcatgtcaacatttctggatggctctgcttcccatctcatcctacctcgcat

SEQ ID NO: 31281 - DNA, 120 bp, Artificial Sequence
  ENSG00000047936_14 (sequence is synthesized)
cccctttgctgatgtgaaaagttttgcttgtgaaaacaatgactttcttgtcacagatggcaaggtcattttccaacaggatgctttgtcttttaatgaattcatcgtgggatgtgacct

SEQ ID NO: 31282 - DNA, 120 bp, Artificial Sequence
  ENSG00000047936_15 (sequence is synthesized)
gagtcacatagaagaatttgggtttggtaacttggtcatctttggctcatcctcccagctgcaccctctgccaggccgcccgcaggagctttcggtgctgtttggctctcaccaggctct

SEQ ID NO: 31283 - DNA, 120 bp, Artificial Sequence
  ENSG00000047936_16 (sequence is synthesized)
tgttcaatggaagcctcctgcccttgccataggagccaatgtcatcctgatcagtgatattattgaactctttgaattaggcccttctgcctggcagaactggacctatgaggtgaaagt

SEQ ID NO: 31284 - DNA, 120 bp, Artificial Sequence
  ENSG00000047936_17 (sequence is synthesized)
atccacccaagaccctcctgaagtcactcatattttcttgaacataagtggaaccatgctgaatgtacctgagctgcagagtgctatgaaatacaaggtttctgtgagagcaagttctcc

SEQ ID NO: 31285 - DNA, 120 bp, Artificial Sequence
  ENSG00000047936_18 (sequence is synthesized)
aaagaggccaggcccctggtcagagccctcagtgggtactaccctggtgccagctagtgaaccaccatttatcatggctgtgaaagaagatgggctttggagtaaaccattaaatagctt

SEQ ID NO: 31286 - DNA, 120 bp, Artificial Sequence
  ENSG00000047936_19 (sequence is synthesized)
tggcccaggagagttcttatcctctgatataggaaatgtgtcagacatggattggtataacaacagcctctactacagtgacacgaaaggcgacgtttttgtgtggctgctgaatgggac

SEQ ID NO: 31287 - DNA, 120 bp, Artificial Sequence
  ENSG00000047936_20 (sequence is synthesized)
ggatatctcagagaattatcacctacccagcattgcaggagcaggggctttagcttttgagtggctgggtcactttctctactgggctggaaagacatatgtgatacaaaggcagtctgt

SEQ ID NO: 31288 - DNA, 120 bp, Artificial Sequence
  ENSG00000047936_21 (sequence is synthesized)
gttgacgggacacacagacattgttacccacgtgaagctattggtgaatgacatggtggtggattcagttggtggatatctctactggaccacactctattcagtggaaagcaccagact

SEQ ID NO: 31289 - DNA, 120 bp, Artificial Sequence
  ENSG00000047936_22 (sequence is synthesized)
aaatggggaaagttcccttgtactacagacacagccttggttttctgggaaaaaggtaattgctctaactttagacctcagtgatgggctcctgtattggttggttcaagacagtcaatg

SEQ ID NO: 31290 - DNA, 120 bp, Artificial Sequence
  ENSG00000047936_23 (sequence is synthesized)
tattcacctgtacacagctgttcttcggggacagagcactggggataccaccatcacagaatttgcagcctggagtacttctgaaatttcccagaatgcactgatgtactatagtggtcg

SEQ ID NO: 31291 - DNA, 120 bp, Artificial Sequence
  ENSG00000047936_24 (sequence is synthesized)
gctgttctggatcaatggctttaggattatcacaactcaagaaataggtcagaaaaccagtgtctctgttttggaaccagccagatttaatcagttcacaattattcagacatcccttaa

SEQ ID NO: 31292 - DNA, 120 bp, Artificial Sequence
  ENSG00000047936_25 (sequence is synthesized)
gcccctgccagggaacttttcctttacccctaaggttattccagattctgttcaagagtcttcatttaggattgaaggaaatgcttcaagttttcaaatcctgtggaatggtccccctgc

SEQ ID NO: 31293 - DNA, 120 bp, Artificial Sequence
  ENSG00000047936_26 (sequence is synthesized)
ggtagactggggtgtagttttctacagtgtagaatttagtgctcattctaagttcttggctagtgaacaacactctttacctgtatttactgtggaaggactggaaccttatgccttatt

SEQ ID NO: 31294 - DNA, 120 bp, Artificial Sequence
  ENSG00000047936_27 (sequence is synthesized)
taatctttctgtcactccttatacctactggggaaagggccccaaaacatctctgtcacttcgagcacctgaaacagttccatcagcaccagagaaccccagaatatttatattaccaag

SEQ ID NO: 31295 - DNA, 120 bp, Artificial Sequence
  ENSG00000047936_28 (sequence is synthesized)
tggaaaatgctgcaacaagaatgaagttgtggtggaatttaggtggaacaaacctaagcatgaaaatggggtgttaacaaaatttgaaattttctacaatatatccaatcaaagtattac

SEQ ID NO: 31296 - DNA, 120 bp, Artificial Sequence
  ENSG00000047936_29 (sequence is synthesized)
aaacaaaacatgtgaagactggattgctgtcaatgtcactccctcagtgatgtcttttcaacttgaaggcatgagtcccagatgctttattgccttccaggttagggcctttacatctaa

SEQ ID NO: 31297 - DNA, 120 bp, Artificial Sequence
  ENSG00000047936_30 (sequence is synthesized)
caagttgtgtggacgttttcagcagaaagagttatcagtgccgtttgctacacagctgataatgagatgggatattatgctgaaggggactcactctttcttctgcacttgcacaatcgc

SEQ ID NO: 31298 - DNA, 120 bp, Artificial Sequence
  ENSG00000047936_31 (sequence is synthesized)
tctagctctgagcttttccaagattcactggtttttgatatcacagttattacaattgactggatttcaaggcacctctactttgcactgaaagaatcacaaaatggaatgcaagtattt

SEQ ID NO: 31299 - DNA, 120 bp, Artificial Sequence
  ENSG00000047936_32 (sequence is synthesized)
gatgttgatcttgaacacaaggtgaaatatcccagagaggtgaagattcacaataggaattcaacaataatttctttttctgtatatcctcttttaagtcgcttgtattggacagaagtt

SEQ ID NO: 31300 - DNA, 120 bp, Artificial Sequence
  ENSG00000047936_33 (sequence is synthesized)
tccaattttggctaccagatgttctactacagtattatcagtcacaccttgcaccgaattctgcaacccacagctacaaaccaacaaaacaaaaggaatcaatgttcttgtaatgtgact

SEQ ID NO: 31301 - DNA, 120 bp, Artificial Sequence
  ENSG00000047936_34 (sequence is synthesized)
gaatttgagttaagtggagcaatggctattgatacctctaacctagagaaaccattgatatactttgccaaagcacaagagatctgggcaatggatctggaaggctgtcagtgttggaga

SEQ ID NO: 31302 - DNA, 120 bp, Artificial Sequence
  ENSG00000047936_35 (sequence is synthesized)
gttatcacagtacctgctatgctcgcaggaaaaacccttgttagcttaactgtggatggagatcttatatactggatcatcacagcaaaggacagcacacagatttatcaggcaaagaaa

SEQ ID NO: 31303 - DNA, 120 bp, Artificial Sequence
  ENSG00000047936_36 (sequence is synthesized)
ggaaatggggccatcgtttcccaggtgaaggccctaaggagtaggcatatcttggcttacagttcagttatgcagccttttccagataaagcgtttctgtctctagcttcagacactgtg

SEQ ID NO: 31304 - DNA, 120 bp, Artificial Sequence
  ENSG00000047936_37 (sequence is synthesized)
gaaccaactatacttaatgccactaacactagcctcacaatcagattacctctggccaagacaaacctcacatggtatggcatcaccagccctactccaacatacctggtttattatgca

SEQ ID NO: 31305 - DNA, 120 bp, Artificial Sequence
  ENSG00000047936_38 (sequence is synthesized)
gaagttaatgacaggaaaaacagctctgacttgaaatatagaattctggaatttcaggacagtatagctcttattgaagatttacaaccattttcaacatacatgatacagatagctgta

SEQ ID NO: 31306 - DNA, 120 bp, Artificial Sequence
  ENSG00000047936_39 (sequence is synthesized)
aaaaattattattcagatcctttggaacatttaccaccaggaaaagagatttggggaaaaactaaaaatggagtaccagaggcagtgcagctcattaatacaactgtgcggtcagacacc

SEQ ID NO: 31307 - DNA, 120 bp, Artificial Sequence
  ENSG00000047936_40 (sequence is synthesized)
agcctcattatatcttggagagaatctcacaagccaaatggacctaaagaatcagtccgttatcagttggcaatctcacacctggccctaattcctgaaactcctctaagacaaagtgaa

SEQ ID NO: 31308 - DNA, 120 bp, Artificial Sequence
  ENSG00000047936_41 (sequence is synthesized)
tttccaaatggaaggctcactctccttgttactagactgtctggtggaaatatttatgtgttaaaggttcttgcctgccactctgaggaaatgtggtgtacagagagtcatcctgtcact

SEQ ID NO: 31309 - DNA, 120 bp, Artificial Sequence
  ENSG00000047936_42 (sequence is synthesized)
gtggaaatgtttaacacaccagagaaaccttattccttggttccagagaacactagtttgcaatttaattggaaggctccattgaatgttaacctcatcagattttgggttgagctacag

SEQ ID NO: 31310 - DNA, 120 bp, Artificial Sequence
  ENSG00000047936_43 (sequence is synthesized)
aagtggaaatacaatgagttttaccatgttaaaacttcatgcagccaaggtcctgcttatgtctgtaatatcacaaatctacaaccttatacttcatataatgtcagagtagtggtggtt

SEQ ID NO: 31311 - DNA, 120 bp, Artificial Sequence
  ENSG00000047936_44 (sequence is synthesized)
tataagacgggagaaaatagcacctcacttccagaaagctttaagacaaaagctggagtcccaaataaaccaggcattcccaaattactagaagggagtaaaaattcaatacagtgggag

SEQ ID NO: 31312 - DNA, 120 bp, Artificial Sequence
  ENSG00000047936_45 (sequence is synthesized)
aaagctgaagataatggatgtagaattacatactatatccttgagataagaaagagcacttcaaataatttacagaaccagaatttaaggtggaagatgacatttaatggatcctgcagt

SEQ ID NO: 31313 - DNA, 120 bp, Artificial Sequence
  ENSG00000047936_46 (sequence is synthesized)
agtgtttgcacatggaagtccaaaaacctgaaaggaatatttcagttcagagtagtagctgcaaataatctagggtttggtgaatatagtggaatcagtgagaatattatattagttgga

SEQ ID NO: 31314 - DNA, 120 bp, Artificial Sequence
  ENSG00000047936_47 (sequence is synthesized)
gatgatttttggataccagaaacaagtttcatacttactattatagttggaatatttctggttgttacaatcccactgacctttgtctggcatagaagattaaagaatcaaaaaagtgcc

SEQ ID NO: 31315 - DNA, 120 bp, Artificial Sequence
  ENSG00000047936_48 (sequence is synthesized)
aaggaaggggtgacagtgcttataaacgaagacaaagagttggctgagctgcgaggtctggcagccggagtaggcctggctaatgcctgctatgcaatacatactcttccaacccaagag

SEQ ID NO: 31316 - DNA, 120 bp, Artificial Sequence
  ENSG00000047936_49 (sequence is synthesized)
gagattgaaaatcttcctgccttccctcgggaaaaactgactctgcgtctcttgctgggaagtggagcctttggagaagtgtatgaaggaacagcagtggacatcttaggagttggaagt

SEQ ID NO: 31317 - DNA, 120 bp, Artificial Sequence
  ENSG00000047936_50 (sequence is synthesized)
ggagaaatcaaagtagcagtgaagactttgaagaagggttccacagaccaggagaagattgaattcctgaaggaggcacatctgatgagcaaatttaatcatcccaacattctgaagcag

SEQ ID NO: 31318 - DNA, 120 bp, Artificial Sequence
  ENSG00000047936_51 (sequence is synthesized)
cttggagtttgtctgctgaatgaaccccaatacattatcctggaactgatggagggaggagaccttcttacttatttgcgtaaagcccggatggcaacgttttatggtcctttactcacc

SEQ ID NO: 31319 - DNA, 120 bp, Artificial Sequence
  ENSG00000047936_52 (sequence is synthesized)
ttggttgaccttgtagacctgtgtgtagatatttcaaaaggctgtgtctacttggaacggatgcatttcattcacagggatctggcagctagaaattgccttgtttccgtgaaagactat

SEQ ID NO: 31320 - DNA, 120 bp, Artificial Sequence
  ENSG00000047936_53 (sequence is synthesized)
accagtccacggatagtgaagattggagactttggactcgccagagacatctataaaaatgattactatagaaagagaggggaaggcctgctcccagttcggtggatggctccagaaagt

SEQ ID NO: 31321 - DNA, 120 bp, Artificial Sequence
  ENSG00000047936_54 (sequence is synthesized)
ttgatggatggaatcttcactactcaatctgatgtatggtcttttggaattctgatttgggagattttaactcttggtcatcagccttatccagctcattccaaccttgatgtgttaaac

SEQ ID NO: 31322 - DNA, 120 bp, Artificial Sequence
  ENSG00000047936_55 (sequence is synthesized)
tatgtgcaaacaggagggagactggagccaccaagaaattgtcctgatgatctgtggaatttaatgacccagtgctgggctcaagaacccgaccaaagacctacttttcatagaattcag

SEQ ID NO: 31323 - DNA, 120 bp, Artificial Sequence
  ENSG00000047936_56 (sequence is synthesized)
gaccaacttcagttattcagaaattttttcttaaatagcatttataagtccagagatgaagcaaacaacagtggagtcataaatgaaagctttgaaggtgaagatggcgatgtgatttgt

SEQ ID NO: 31324 - DNA, 120 bp, Artificial Sequence
  ENSG00000047936_57 (sequence is synthesized)
ttgaattcagatgacattatgccagttgctttaatggaaacgaagaaccgagaagggttaaactatatggtacttgctacagaatgtggccaaggtgaagaaaagtctgagggtcctcta

SEQ ID NO: 31325 - DNA, 120 bp, Artificial Sequence
  ENSG00000047936_58 (sequence is synthesized)
ggctcccaggaatctgaatcttgtggtctgaggaaagaagagaaggaaccacatgcagacaaagatttctgccaagaaaaacaagtggcttactgcccttctggcaagcctgaaggcctg

SEQ ID NO: 31326 - DNA, 120 bp, Artificial Sequence
  ENSG00000047936_59 (sequence is synthesized)
aactatgcctgtctcactcacagtggatatggagatgggtctgattaatagcgttgtttgggaaatagagagttgagataaacactctcattcagtagttactgaaagaaaactctgcta

SEQ ID NO: 31327 - DNA, 120 bp, Artificial Sequence
  ENSG00000047936_60 (sequence is synthesized)
gaatgataaatgtcatggtggtctataactccaaataaacaatgcaacgttcctgatttctaatcttggttctgagagccatttggtttcagttgtagcaatccccataccagctgcctg

SEQ ID NO: 31328 - DNA, 120 bp, Artificial Sequence
  ENSG00000047936_61 (sequence is synthesized)
ctgatgaacagcctcagacctggccagtacggggagcacgtgaaccataactggcttagaaggactgatttcatgccaacttgaggggagaattccaaattccaaagacactcctctcac

SEQ ID NO: 31329 - DNA, 120 bp, Artificial Sequence
  ENSG00000047936_62 (sequence is synthesized)
aggactatgaaaccatcttttaagaagttccaaggacaaaagtcacttccataattatagtcctggcaacttgatctttagatctatttttgcttcatctggctctggcattcccataac

SEQ ID NO: 31330 - DNA, 120 bp, Artificial Sequence
  ENSG00000047936_63 (sequence is synthesized)
cttaaaaaatgttcctgttcatactagagaattcccttggcccttatttctaattgaaacctccttgaagtttctgttgctgcttttcatgcagagtgaaatacattctaacctgcagaa

SEQ ID NO: 31331 - DNA, 120 bp, Artificial Sequence
  ENSG00000048028_0 (sequence is synthesized)
gcggcggctgcggcgggagaccggtgacccgcggctgggcgcctcggccatgactgcggagctgcagcaggacgacgcggccggcgcggcagacggccacggctcgagctgccaaatgct

SEQ ID NO: 31332 - DNA, 120 bp, Artificial Sequence
  ENSG00000048028_1 (sequence is synthesized)
ggctcgagctgccaaatgctgttaaatcaactgagagaaatcacaggcattcaggacccttcctttctccatgaagctctgaaggccagtaatggtgacattactcaggcagtcagcctt

SEQ ID NO: 31333 - DNA, 120 bp, Artificial Sequence
  ENSG00000048028_2 (sequence is synthesized)
ctcactgatgagagagttaaggagcccagtcaagacactgttgctacagaaccatctgaagtagaggggagtgctgccaacaaggaagtattagcaaaagttatagaccttactcatgat

SEQ ID NO: 31334 - DNA, 120 bp, Artificial Sequence
  ENSG00000048028_3 (sequence is synthesized)
aacaaagatgatcttcaggctgccattgctttgagtctactggagtctcccaaaattcaagctgatggaagagatcttaacaggatgcatgaagcaacctctgcagaaactaaacgctca

SEQ ID NO: 31335 - DNA, 120 bp, Artificial Sequence
  ENSG00000048028_4 (sequence is synthesized)
aagagaaaacgctgtgaagtctggggagaaaaccccaatcccaatgactggaggagagttgatggttggccagttgggctgaaaaatgttggcaatacatgttggtttagtgctgttatt

SEQ ID NO: 31336 - DNA, 120 bp, Artificial Sequence
  ENSG00000048028_5 (sequence is synthesized)
cagtctctctttcaattgcctgaatttcgaagacttgttctcagttatagtctgccacaaaatgtacttgaaaattgtcgaagtcatacagaaaagagaaatatcatgtttatgcaagag

SEQ ID NO: 31337 - DNA, 120 bp, Artificial Sequence
  ENSG00000048028_6 (sequence is synthesized)
cttcagtatttgtttgctctaatgatgggatcaaatagaaaatttgtagacccgtctgcagccctggatctattaaagggagcattccgatcatctgaggaacagcagcaagatgtgagt

SEQ ID NO: 31338 - DNA, 120 bp, Artificial Sequence
  ENSG00000048028_7 (sequence is synthesized)
gaattcacacacaagctcctggattggctagaggacgcattccagctagctgttaatgttaacagtcccaggaacaaatctgaaaatccaatggtgcagctgttctatggtactttcctg

SEQ ID NO: 31339 - DNA, 120 bp, Artificial Sequence
  ENSG00000048028_8 (sequence is synthesized)
actgaaggggttcgtgaaggaaaacccttttgtaacaatgagaccttcggccagtatcctcttcaggtaaacggttatcgcaacttagacgagtgtttggaaggggccatggtggagggt

SEQ ID NO: 31340 - DNA, 120 bp, Artificial Sequence
  ENSG00000048028_9 (sequence is synthesized)
gatgttgagcttcttccctccgatcactcggtgaagtatggacaagagcgttggtttacaaagctacctccagtgttgacctttgaactctcaagatttgagtttaatcagtcccttggg

SEQ ID NO: 31341 - DNA, 120 bp, Artificial Sequence
  ENSG00000048028_10 (sequence is synthesized)
cagccagagaaaattcacaataagctggaatttcctcagattatttatatggacaggtacatgtacaggagcaaggagcttattcgaaataagagagagtgtattcgaaagttgaaggag

SEQ ID NO: 31342 - DNA, 120 bp, Artificial Sequence
  ENSG00000048028_11 (sequence is synthesized)
gaaataaaaattctgcagcaaaaattggaaaggtatgtgaaatatggctcaggcccagctcggttcccgctcccggacatgctgaaatatgttattgaatttgctagtacaaaacctgcc

SEQ ID NO: 31343 - DNA, 120 bp, Artificial Sequence
  ENSG00000048028_12 (sequence is synthesized)
tcagaaagctgtccacctgaaagtgacacacatatgacattaccactttcttcagtgcactgctcggtttctgaccagacatccaaggaaagtacaagtacagaaagctcttctcaggat

SEQ ID NO: 31344 - DNA, 120 bp, Artificial Sequence
  ENSG00000048028_13 (sequence is synthesized)
gttgaaagtaccttttcttctcctgaagattctttacccaagtctaaaccactgacatcttctcggtcttccatggaaatgccttcacagccagctccacgaacagtcacagatgaggag

SEQ ID NO: 31345 - DNA, 120 bp, Artificial Sequence
  ENSG00000048028_14 (sequence is synthesized)
ataaattttgttaagacctgtcttcagagatggaggagtgagattgaacaagatatacaagatttaaagacttgtattgcaagtactactcagactattgaacagatgtactgcgatcct

SEQ ID NO: 31346 - DNA, 120 bp, Artificial Sequence
  ENSG00000048028_15 (sequence is synthesized)
ctccttcgtcaggtgccttatcgcttgcatgcagttcttgttcatgaaggacaagcaaatgctggacactattgggcctatatctataatcaaccccgacagagctggctcaagtacaat

SEQ ID NO: 31347 - DNA, 120 bp, Artificial Sequence
  ENSG00000048028_16 (sequence is synthesized)
gacatctctgttactgaatcttcctgggaagaagttgaaagagattcctatggaggcctgagaaatgttagtgcttactgtctgatgtacattaatgacaaactaccctacttcaatgca

SEQ ID NO: 31348 - DNA, 120 bp, Artificial Sequence
  ENSG00000048028_17 (sequence is synthesized)
gaggcagccccaactgaatcagatcaaatgtcagaagtggaagccctatctgtggaactcaagcattacattcaggaggataactggcggtttgagcaggaagtagaggagtgggaagaa

SEQ ID NO: 31349 - DNA, 120 bp, Artificial Sequence
  ENSG00000048028_18 (sequence is synthesized)
gagcagtcttgcaaaatccctcaaatggagtcctccaccaactcctcatcacaggactactctacatcacaagagccttcagtagcctcttctcatggggttcgctgcttgtcgtctgag

SEQ ID NO: 31350 - DNA, 120 bp, Artificial Sequence
  ENSG00000048028_19 (sequence is synthesized)
ccatgcaaggggtcatcctggccatagctaaagcccgtcagacctttgaccgagatgggtctgaagcagggctgattaaggcattccatgaagaatactccaggctctatcagcttgcca

SEQ ID NO: 31351 - DNA, 120 bp, Artificial Sequence
  ENSG00000048028_20 (sequence is synthesized)
aagagacccccacctctcacagtgatcctcgacttcagcatgtccttgtctactttttccaaaatgaagcacccaaaagggtagtagaacgaacccttctggaacagtttgcagataaaa

SEQ ID NO: 31352 - DNA, 120 bp, Artificial Sequence
  ENSG00000048028_21 (sequence is synthesized)
atcttagctatgatgaaagatcaatcagcattatgaaggtggctcaagcgaaactgaaggaaattggtccagatgacatgaatatggaagagtacaagaagtggcatgaagattatagtt

SEQ ID NO: 31353 - DNA, 120 bp, Artificial Sequence
  ENSG00000048028_22 (sequence is synthesized)
tgttccgaaaagtgtctgtgtatctcctaacaggcctagaactctatcaaaaaggaaagtaccaagaggcactttcctacctggtatatgcctaccagagcaatgctgccctgctgatga

SEQ ID NO: 31354 - DNA, 120 bp, Artificial Sequence
  ENSG00000048028_23 (sequence is synthesized)
aggggccccgccggggggtcaaagaatccgtgattgctttataccgaagaaaatgccttctggagctgaatgccaaagcagcttctctttttgaaacaaatgatgatcactccgtaactg

SEQ ID NO: 31355 - DNA, 120 bp, Artificial Sequence
  ENSG00000048028_24 (sequence is synthesized)
agggcattaatgtgatgaatgaactgatcatcccctgcattcaccttatcattaataatgacatttccaaggatgatctggatgccattgaggtcatgagaaaccattggtgctcttacc

SEQ ID NO: 31356 - DNA, 120 bp, Artificial Sequence
  ENSG00000048028_25 (sequence is synthesized)
ttgggcaagatattgcagaaaatctgcagctgtgcctaggggagtttctacccagacttctagatccttctgcagaaatcatcgtcttgaaagagcctccaactattcgacccaattctc

SEQ ID NO: 31357 - DNA, 120 bp, Artificial Sequence
  ENSG00000048028_26 (sequence is synthesized)
cctatgacctatgtagccgatttgcagctgtcatggagtcaattcagggagtttcaactgtgacagtgaaataagctcccacatgttcaaggcccattctggttcctggctgcctgcctc

SEQ ID NO: 31358 - DNA, 120 bp, Artificial Sequence
  ENSG00000048028_27 (sequence is synthesized)
ttgcacagaagttcgttgtcatagtgctcaccttgggaaaaggattaggtgggcacataagattccgatcagaccccaaccatgctgcatgtgtaaagaaggattgaaaataaaattgca

SEQ ID NO: 31359 - DNA, 120 bp, Artificial Sequence
  ENSG00000048028_28 (sequence is synthesized)
ctttttaggtacaaaatcataaaagctgtttcactagaaaaggcagaaagcagtgtattaaggtgttgaattacgccagaagacctgaaatgccttgtacctacaacaatgcttaggctt

SEQ ID NO: 31360 - DNA, 120 bp, Artificial Sequence
  ENSG00000048028_29 (sequence is synthesized)
ttctaagcctcttgccacttttaaaattatccttcaggcataaatatttttgacagcagaatagaagaatgattcatgagaacctgaaccagatgaacagctactagttattttatcaaa

SEQ ID NO: 31361 - DNA, 120 bp, Artificial Sequence
  ENSG00000048028_30 (sequence is synthesized)
tacagatgacatttaaaaattcttaactacaagagattagaaatataaaccttgcctggctcttgccaggagataacaaaatgggttgctgatgaactgcacccttttacatgtgggtag

SEQ ID NO: 31362 - DNA, 120 bp, Artificial Sequence
  ENSG00000048028_31 (sequence is synthesized)
aatataagctcacatggcagtgagatgttgaaaagtcaaaagagacctgtctctctcctttcttttctatctttaaaccagaaaacctcatactcagtcctcagtgaaagaaagtaaagt

SEQ ID NO: 31363 - DNA, 120 bp, Artificial Sequence
  ENSG00000048028_32 (sequence is synthesized)
attaaggactttagacagaagagcattgtgtaacttgactgaagatcatccattaatagttattaggcatttaggtaaaattttctaatacctaaaaattgtcaaaaacagtcaataggg

SEQ ID NO: 31364 - DNA, 120 bp, Artificial Sequence
  ENSG00000048028_33 (sequence is synthesized)
ctactgctggcccaaagaccatttaggtccacctcctcttttttgctctttttttttttctgtgacagtttcactgtgtcgcccaggctggcgttcagtggtgcaatctcagctcactgc

SEQ ID NO: 31365 - DNA, 120 bp, Artificial Sequence
  ENSG00000048028_34 (sequence is synthesized)
catattggccaggctgatctctaactcctggcctcaagtgatctatctgcctccctcagcctcccaaagtctgggattgcagacaagtcatcgtacccggccttcttttttgcccttaaa

SEQ ID NO: 31366 - DNA, 120 bp, Artificial Sequence
  ENSG00000048028_35 (sequence is synthesized)
aaaaaaaaaaaaaaaaaaaccagcatacatatgcaaaactatatatatatgtatatgtagagaaaaatacttcccattgatcatttttaaaaggcttctgattggatattgtgttttaac

SEQ ID NO: 31367 - DNA, 120 bp, Artificial Sequence
  ENSG00000048028_36 (sequence is synthesized)
ggcttctgattggatattgtgttttaaccaaattttaaagattaatggaatcatgaaagggaaaaaaattgatacaactatgcagattttataaatgtgcaataaaagtatttgttttac

SEQ ID NO: 31368 - DNA, 120 bp, Artificial Sequence
  ENSG00000048028_37 (sequence is synthesized)
gtgcatttctaaccagctatcaggaagttgctgaatttaaaatgttgtctctgtggagccagaagataggctttagatagtcatagtgatgtcttttttaaaaagtctctctctttgcct

SEQ ID NO: 31369 - DNA, 120 bp, Artificial Sequence
  ENSG00000048028_38 (sequence is synthesized)
tgtttgctctaatgatgggatcaaatagaaaatttgtagacccgtctgcagccctggatctattaaagggagcattccgatcatctgaggaacagcagcagcagtcccaggaacaaatct

SEQ ID NO: 31370 - DNA, 120 bp, Artificial Sequence
  ENSG00000048028_39 (sequence is synthesized)
aggaaagtacagaaagctcttctcaggatgttgaaagtaccttttcttctcctgaagattctttacccaagtctaaaccactgacatcttctcggtcttccatggaaatgccttcacagc

SEQ ID NO: 31371 - DNA, 120 bp, Artificial Sequence
  ENSG00000048028_40 (sequence is synthesized)
agaccggtgacccgcggctgggcgcctcggccatgactgcggagctgcagcaggacgacgcggccggcgcggcagacggccacggctcgatttttaaggagggggaggagctgcgtgatg

SEQ ID NO: 31372 - DNA, 120 bp, Artificial Sequence
  ENSG00000048028_41 (sequence is synthesized)
aatagaaagtctactgatgatgatctcctgttcccaatgtctaagaagattgaaatcaatataaggacttctgatctaagaatctggtgagagtgaaagaaccctggtttgagagaaaag

SEQ ID NO: 31373 - DNA, 120 bp, Artificial Sequence
  ENSG00000048028_42 (sequence is synthesized)
cggaatgttataacttaacaccacctcctcacccctcaagtactgcactttttcaagagaaaacgggaaatctgtgccagttgttcaaatacgagtttggagatgagaaactatatttgt

SEQ ID NO: 31374 - DNA, 120 bp, Artificial Sequence
  ENSG00000048028_43 (sequence is synthesized)
aattgatgggaaagtagtcaaggcatgtgctaatggtagatacaaaaatcaaatttgatagttttcttttaaacccaatgggaatccccctaagataaaagaataaacttaagatataaa

SEQ ID NO: 31375 - DNA, 120 bp, Artificial Sequence
  ENSG00000048028_44 (sequence is synthesized)
gggagaccggtgacccgcggctgggcgcctcggccatgactgcggagctgcagcaggacgacgcggccggcgcggcagacggccacggctcgattgaaatcaatataaggacttctgatc

SEQ ID NO: 31376 - DNA, 120 bp, Artificial Sequence
  ENSG00000048052_0 (sequence is synthesized)
atgcacagtatgatcagctcagtggatgtgaagtcagaagttcctgtgggcctggagcccatctcacctttagacctaaggacagacctcaggatgatgatgcccgtggtggaccctgtt

SEQ ID NO: 31377 - DNA, 120 bp, Artificial Sequence
  ENSG00000048052_1 (sequence is synthesized)
gtccgtgagaagcaattgcagcaggaattacttcttatccagcagcagcaacaaatccagaagcagcttctgatagcagagtttcagaaacagcatgagaacttgacacggcagcaccag

SEQ ID NO: 31378 - DNA, 120 bp, Artificial Sequence
  ENSG00000048052_2 (sequence is synthesized)
gctcagcttcaggagcatatcaagttgcaacaggaacttctagccataaaacagcaacaagaactcctagaaaaggagcagaaactggagcagcagaggcaagaacaggaagtagagagg

SEQ ID NO: 31379 - DNA, 120 bp, Artificial Sequence
  ENSG00000048052_3 (sequence is synthesized)
catcgcagagaacagcagcttcctcctctcagaggcaaagatagaggacgagaaagggcagtggcaagtacagaagtaaagcagaagcttcaagagttcctactgagtaaatcagcaacg

SEQ ID NO: 31380 - DNA, 120 bp, Artificial Sequence
  ENSG00000048052_4 (sequence is synthesized)
aaagacactccaactaatggaaaaaatcattccgtgagccgccatcccaagctctggtacacggctgcccaccacacatcattggatcaaagctctccaccccttagtggaacatctcca

SEQ ID NO: 31381 - DNA, 120 bp, Artificial Sequence
  ENSG00000048052_5 (sequence is synthesized)
tcctacaagtacacattaccaggagcacaagatgcaaaggatgatttcccccttcgaaaaactgcctctgagcccaacttgaaggtgcggtccaggttaaaacagaaagtggcagagagg

SEQ ID NO: 31382 - DNA, 120 bp, Artificial Sequence
  ENSG00000048052_6 (sequence is synthesized)
agaagcagccccttactcaggcggaaggatggaaatgttgtcacttcattcaagaagcgaatgtttgaggtgacagaatcctcagtcagtagcagttctccaggctctggtcccagttca

SEQ ID NO: 31383 - DNA, 120 bp, Artificial Sequence
  ENSG00000048052_7 (sequence is synthesized)
ccaaacaatgggccaactggaagtgttactgaaaatgagacttcggttttgccccctacccctcatgccgagcaaatggtttcacagcaacgcattctaattcatgaagattccatgaac

SEQ ID NO: 31384 - DNA, 120 bp, Artificial Sequence
  ENSG00000048052_8 (sequence is synthesized)
ctgctaagtctttatacctctccttctttgcccaacattaccttggggcttcccgcagtgccatcccagctcaatgcttcgaattcactcaaagaaaagcagaagtgtgagacgcagacg

SEQ ID NO: 31385 - DNA, 120 bp, Artificial Sequence
  ENSG00000048052_9 (sequence is synthesized)
cttaggcaaggtgttcctctgcctgggcagtatggaggcagcatcccggcatcttccagccaccctcatgttactttagagggaaagccacccaacagcagccaccaggctctcctgcag

SEQ ID NO: 31386 - DNA, 120 bp, Artificial Sequence
  ENSG00000048052_10 (sequence is synthesized)
catttattattgaaagaacaaatgcgacagcaaaagcttcttgtagctggtggagttcccttacatcctcagtctcccttggcaacaaaagagagaatttcacctggcattagaggtacc

SEQ ID NO: 31387 - DNA, 120 bp, Artificial Sequence
  ENSG00000048052_11 (sequence is synthesized)
cacaaattgccccgtcacagacccctgaaccgaacccagtctgcacctttgcctcagagcacgttggctcagctggtcattcaacagcaacaccagcaattcttggagaagcagaagcaa

SEQ ID NO: 31388 - DNA, 120 bp, Artificial Sequence
  ENSG00000048052_12 (sequence is synthesized)
taccagcagcagatccacatgaacaaactgctttcgaaatctattgaacaactgaagcaaccaggcagtcaccttgaggaagcagaggaagagcttcagggggaccaggcgatgcaggaa

SEQ ID NO: 31389 - DNA, 120 bp, Artificial Sequence
  ENSG00000048052_13 (sequence is synthesized)
aaggaggaaccagtggacagtgatgaagatgctcagatccaggaaatggaatctggggagcaggctgcttttatgcaacagcctttcctggaacccacgcacacacgtgcgctctctgtg

SEQ ID NO: 31390 - DNA, 120 bp, Artificial Sequence
  ENSG00000048052_14 (sequence is synthesized)
cgccaagctccgctggctgcggttggcatggatggattagagaaacaccgtctcgtctccaggactcactcttcccctgctgcctctgttttacctcacccagcaatggaccgccccctc

SEQ ID NO: 31391 - DNA, 120 bp, Artificial Sequence
  ENSG00000048052_15 (sequence is synthesized)
cagcctggctctgcaactggaattgcctatgaccccttgatgctgaaacaccagtgcgtttgtggcaattccaccacccaccctgagcatgctggacgaatacagagtatctggtcacga

SEQ ID NO: 31392 - DNA, 120 bp, Artificial Sequence
  ENSG00000048052_16 (sequence is synthesized)
ctgcaagaaactgggctgctaaataaatgtgagcgaattcaaggtcgaaaagccagcctggaggaaatacagcttgttcattctgaacatcactcactgttgtatggcaccaaccccctg

SEQ ID NO: 31393 - DNA, 120 bp, Artificial Sequence
  ENSG00000048052_17 (sequence is synthesized)
gacggacagaagctggaccccaggatactcctaggtgatgactctcaaaagtttttttcctcattaccttgtggtggacttggggtggacagtgacaccatttggaatgagctacactcg

SEQ ID NO: 31394 - DNA, 120 bp, Artificial Sequence
  ENSG00000048052_18 (sequence is synthesized)
tccggtgctgcacgcatggctgttggctgtgtcatcgagctggcttccaaagtggcctcaggagagctgaagaatgggtttgctgttgtgaggccccctggccatcacgctgaagaatcc

SEQ ID NO: 31395 - DNA, 120 bp, Artificial Sequence
  ENSG00000048052_19 (sequence is synthesized)
acagccatggggttctgcttttttaattcagttgcaattaccgccaaatacttgagagaccaactaaatataagcaagatattgattgtagatctggatgttcaccatggaaacggtacc

SEQ ID NO: 31396 - DNA, 120 bp, Artificial Sequence
  ENSG00000048052_20 (sequence is synthesized)
cagcaggccttttatgctgaccccagcatcctgtacatttcactccatcgctatgatgaagggaactttttccctggcagtggagccccaaatgaggttggaacaggccttggagaaggg

SEQ ID NO: 31397 - DNA, 120 bp, Artificial Sequence
  ENSG00000048052_21 (sequence is synthesized)
tacaatataaatattgcctggacaggtggccttgatcctcccatgggagatgttgagtaccttgaagcattcaggaccatcgtgaagcctgtggccaaagagtttgatccagacatggtc

SEQ ID NO: 31398 - DNA, 120 bp, Artificial Sequence
  ENSG00000048052_22 (sequence is synthesized)
ttagtatctgctggatttgatgcattggaaggccacacccctcctctaggagggtacaaagtgacggcaaaatgttttggtcatttgacgaagcaattgatgacattggctgatggacgt

SEQ ID NO: 31399 - DNA, 120 bp, Artificial Sequence
  ENSG00000048052_23 (sequence is synthesized)
gtggtgttggctctagaaggaggacatgatctcacagccatctgtgatgcatcagaagcctgtgtaaatgcccttctaggaaatgagctggagccacttgcagaagatattctccaccaa

SEQ ID NO: 31400 - DNA, 120 bp, Artificial Sequence
  ENSG00000048052_24 (sequence is synthesized)
agcccgaatatgaatgctgttatttctttacagaagatcattgaaattcaaagcaagtattggaagtcagtaaggatggtggctgtgccaaggggctgtgctctggctggtgctcagttg

SEQ ID NO: 31401 - DNA, 120 bp, Artificial Sequence
  ENSG00000048052_25 (sequence is synthesized)
caagaggagacagagaccgtttctgccctggcctccctaacagtggatgtggaacagccctttgctcaggaagacagcagaactgctggtgagcctatggaagaggagccagccttgtga

SEQ ID NO: 31402 - DNA, 120 bp, Artificial Sequence
  ENSG00000048052_26 (sequence is synthesized)
tctgatatttcctgtgtgtgacatcattgtgtatccccccaccccagtaccctcagacatgtcttgtctgctgcctgggtggcacagattcaatggaacataaacactgggcacaaaatt

SEQ ID NO: 31403 - DNA, 120 bp, Artificial Sequence
  ENSG00000048052_27 (sequence is synthesized)
ggggaagagaggcacagacacagataggagaagggcaccggctggagccacttgcaggactgagggtttttgcaacaaaaccctagcagcctgaagaactctaagccagatggggtggct

SEQ ID NO: 31404 - DNA, 120 bp, Artificial Sequence
  ENSG00000048052_28 (sequence is synthesized)
tccagcatgcttttaatatgctgggtgacccactcctagacaccaagtttgaactagaaacattcagtacagcactagatattgttaatttcagaagctatgacagccagtgaaattttg

SEQ ID NO: 31405 - DNA, 120 bp, Artificial Sequence
  ENSG00000048052_29 (sequence is synthesized)
ggcaaaacctgagacatagtcattcctgacattctgatcagctttttttggggtaatttgtttttcaaacagtcttaacttgtttacaagatttgcttttagctatgaacggatcgtaat

SEQ ID NO: 31406 - DNA, 120 bp, Artificial Sequence
  ENSG00000048052_30 (sequence is synthesized)
tccacccagaatgtaatgtttcttgtttgtttgttttgttttgttagggtttttttctcaactttaacacacagttcaactgttcctagtaaaagttcaagatggaggaactagcatgag

SEQ ID NO: 31407 - DNA, 120 bp, Artificial Sequence
  ENSG00000048052_31 (sequence is synthesized)
gcttttttcagtatctcgaagtccaaatgccaaaggaacctcacacactgtttgtaatggtgcaatattttatatcacttttttttaaacatccccaacatctttgtgttctcacacaca

SEQ ID NO: 31408 - DNA, 120 bp, Artificial Sequence
  ENSG00000048052_32 (sequence is synthesized)
ggcaatttgcaatgttgcaattgtgttggagaatgaagtccccccacctcccagccacacacacatcctttgttctcatgacagtaggtctgagcaaatgttccaccaagcattttcagt

SEQ ID NO: 31409 - DNA, 120 bp, Artificial Sequence
  ENSG00000048052_33 (sequence is synthesized)
gtctttgaaaagcacgtaacttttcaaaggtggtcttaatttgttgcatatctatcaaggacttattcactcacctttccttttctgccctctatcaattgatttcttcttacctttcat

SEQ ID NO: 31410 - DNA, 120 bp, Artificial Sequence
  ENSG00000048052_34 (sequence is synthesized)
cattcattccttcctttagaaaaactgaagattacccataatctcctcttattacttgagggccttgactatttagtttattttgtttactttacaggttaacacagttgttttgtctga

SEQ ID NO: 31411 - DNA, 120 bp, Artificial Sequence
  ENSG00000048052_35 (sequence is synthesized)
ttgcattttattaactgtgaagccgttgaaatgaatatcacttaagcaacgttgctaaatttctatgtgtttgaaatgtgttaatgaaggcactgcttatttgtagtcaccttgaactga

SEQ ID NO: 31412 - DNA, 120 bp, Artificial Sequence
  ENSG00000048052_36 (sequence is synthesized)
aaaaaaaaaacaaaaacaaaaaacagcctttaaacaagtttccttagtgtcaaaagttaaaaataaaggacatttatttctgagataaaaagtaacttactaaatataagtaggttatcc

SEQ ID NO: 31413 - DNA, 120 bp, Artificial Sequence
  ENSG00000048052_37 (sequence is synthesized)
aaagtaacttactaaatataagtaggttatcctcctacctcctaaaattcgatttcaacatataactcaaacacctaaacatattgaggtagaatatctcacagtatttaatatctgaca

SEQ ID NO: 31414 - DNA, 120 bp, Artificial Sequence
  ENSG00000048052_38 (sequence is synthesized)
gaaaccttaattaaaacaaggttttagggaaggccatgatatgaaagatatggaacaatatggttttagttagagaggactctaacctgtaaatcaaagatgaaagatttcactcaagta

SEQ ID NO: 31415 - DNA, 120 bp, Artificial Sequence
  ENSG00000048052_39 (sequence is synthesized)
gaattatataactccctttgttatacagtcagaccatatttttcatgcatttggtttttttaggattaccattttaattttaaagacttttattacatatacaaaaatggctcaatactt

SEQ ID NO: 31416 - DNA, 120 bp, Artificial Sequence
  ENSG00000048052_40 (sequence is synthesized)
ggtttaacttcttagaaatttgagacaccctttgaaataggaaatctgaaatggaatgtaacttagtattaggtaaaaattgctttcattgcgtaagggcaaattcagtctagattcata

SEQ ID NO: 31417 - DNA, 120 bp, Artificial Sequence
  ENSG00000048052_41 (sequence is synthesized)
gtagtaatcaattttttataaattttattttcatgagaaattcataccaatcatatttgctagcttatgttattttgcagtgattgcttgaggatatttacttaaaaaaatagtagagcc

SEQ ID NO: 31418 - DNA, 120 bp, Artificial Sequence
  ENSG00000048052_42 (sequence is synthesized)
aaaggcttaacaaaagactctcccccattttaaaaaggaaactcatgttttaattagaaaaataattgtgtagttttaaaatcaacttcataattataaatctctgtcattactttttag

SEQ ID NO: 31419 - DNA, 120 bp, Artificial Sequence
  ENSG00000048052_43 (sequence is synthesized)
tcctcccagatatttttttagttgttgaataagaaaataaaacagtgtaatgcaaacatgctaatttactaaagtttcctacaacagtttagccacatgtttatgccaagccattaatct

SEQ ID NO: 31420 - DNA, 120 bp, Artificial Sequence
  ENSG00000048052_44 (sequence is synthesized)
gataaagccaaatcactaggacatctccatggttatttagatttaaaacttgacacattaatgagttaatcacacatactcccatatgacaccatacccaattggttgcacttagagtct

SEQ ID NO: 31421 - DNA, 120 bp, Artificial Sequence
  ENSG00000048052_45 (sequence is synthesized)
ttaaaatacctggagaagcaaatgaactgtggagaggattatccacagcatgtagttgtaagaacagaatgccattgctttttgattataccattacaagatggagcatagccctgaggg

SEQ ID NO: 31422 - DNA, 120 bp, Artificial Sequence
  ENSG00000048052_46 (sequence is synthesized)
acagaatggaggctttccgaaaatatcaacacttcttttgaaatagaccagcactttttgaaagggtagtttcacttggtatagtttttcttcacttacccgtttaaattttattgctcg

SEQ ID NO: 31423 - DNA, 120 bp, Artificial Sequence
  ENSG00000048052_47 (sequence is synthesized)
cagttgttctgaatgagaggctagaagagtattatcaattttgcatctccttgtgatacttactttgaaggaaaatcacatacgctctctcatggtctcatggtatctcatacagggtga

SEQ ID NO: 31424 - DNA, 120 bp, Artificial Sequence
  ENSG00000048052_48 (sequence is synthesized)
ataaaaatgatttttgataaatctactagtaaataatactaggaatttaataagctgtcaaacgtaggtataaaaagaaggcttaaaaattaattttcccaattgtataatttggggctg

SEQ ID NO: 31425 - DNA, 120 bp, Artificial Sequence
  ENSG00000048052_49 (sequence is synthesized)
tatattaaactaaaaaacacagacagttttattaaatagtaaccaaaatggactcaaataaaaccagaggctatgttaccattgcttagtaaatggaaagaacattgtgagatgaactat

SEQ ID NO: 31426 - DNA, 120 bp, Artificial Sequence
  ENSG00000048052_50 (sequence is synthesized)
ctttaaatattgtaacaagtttataacatcaatagtggagacagaagtcagctttggagaaaatagagatatttatgaaaaaactactacaaatcacatttccattaccaatcctgggga

SEQ ID NO: 31427 - DNA, 120 bp, Artificial Sequence
  ENSG00000048052_51 (sequence is synthesized)
tggaaatattgccttcagtttttactccagccctatacgacactctcactaacctttcactgacaacatcatggccttgaaagcagggatctcctcccacaaaggcttcagaaattacag

SEQ ID NO: 31428 - DNA, 120 bp, Artificial Sequence
  ENSG00000048052_52 (sequence is synthesized)
gactggtctctcttaatagtttagtcctgctttatttccaaagggcaattataaagcctcgtggatttactgggtttctttacagactccatatggaagtaaaatagaatgatcatttgg

SEQ ID NO: 31429 - DNA, 120 bp, Artificial Sequence
  ENSG00000048052_53 (sequence is synthesized)
tagaatgatcatttggaaagtctcctgggaaaaaattcctcttcaatcagcattttaaaacttttttatttttgagtcagagttttgctcttggtgcccaggctggagtgcaatggcgca

SEQ ID NO: 31430 - DNA, 120 bp, Artificial Sequence
  ENSG00000048052_54 (sequence is synthesized)
aattaatttaaatatttcttactatttctctgtcgaatgtttactctcatcttatctcaatgaaagaagtattaaaagtcttatggccccaaaagaaacaagccaaactgtactgtctta

SEQ ID NO: 31431 - DNA, 120 bp, Artificial Sequence
  ENSG00000048052_55 (sequence is synthesized)
aaagtgattcattctgagcttgaaacgactctgtcagtgtttgacattgtcatttctagtggcatgtatcttaacattcttttcctgcttcaggaatgaaatcacttgtcctgctgagaa

SEQ ID NO: 31432 - DNA, 120 bp, Artificial Sequence
  ENSG00000048052_56 (sequence is synthesized)
aataaggggaaaacaagatagaagtaaaaaacaacacacctgttgaactattttcataaagatggcgttttcactttcaaaagaaatgaaaaccagatggtctatgctaagaagtgaagg

SEQ ID NO: 31433 - DNA, 120 bp, Artificial Sequence
  ENSG00000048052_57 (sequence is synthesized)
cattttgttgtcttcagaactgatcaacatggtcatgatcatcatcaaatttcttgtttccaaaggccactattgtagtacagtctccagcaggattttgtaccatgtgctgcctttgga

SEQ ID NO: 31434 - DNA, 120 bp, Artificial Sequence
  ENSG00000048052_58 (sequence is synthesized)
ataaagtattataatgtatcttgtcaccttcatcaacaccaccattaaatatgtaagttcctatatgtgactttttctgggcatatttgcatcaaaaatcacagtccttgcctccttgct

SEQ ID NO: 31435 - DNA, 120 bp, Artificial Sequence
  ENSG00000048052_59 (sequence is synthesized)
tgcttttactccatgaaacgcttcatgaagcagagcatgattgtcaagtgaccagaggatgacatttgtaagtgaacgtggtatactcacacatgctatactcatactacataacttagt

SEQ ID NO: 31436 - DNA, 120 bp, Artificial Sequence
  ENSG00000048052_60 (sequence is synthesized)
ttctccaaatcaactgcagtccgttttatctatgatattcctggcttcgtataatggttttgtaaaatacattaaatacaattaagtccgttattactatgctggaaataactaggtcag

SEQ ID NO: 31437 - DNA, 120 bp, Artificial Sequence
  ENSG00000048052_61 (sequence is synthesized)
acaatgaaaccttagacttttgattggggctgtttggacttgatccaatgataaggtaataaggttgttgcaatttctcaaagcatcttaattctcaaactgaaacatttagcaaataca

SEQ ID NO: 31438 - DNA, 120 bp, Artificial Sequence
  ENSG00000048052_62 (sequence is synthesized)
tggtgaatctggtgtaaacttacaatctaacaaataattttctttcaactcttctctttttctgcctaacaatctatacgaaattgccaatatctaagcaatcaaaagtttctgaaatct

SEQ ID NO: 31439 - DNA, 120 bp, Artificial Sequence
  ENSG00000048052_63 (sequence is synthesized)
ctgtttccttagtagaaatgaccttgacaacttattttctgagataccactaggcctactgtctttcatgccattttatataaacattttgatagatactctgtcttttgttttttatct

SEQ ID NO: 31440 - DNA, 120 bp, Artificial Sequence
  ENSG00000048052_64 (sequence is synthesized)
cttctcttttcaagagtcacttgactttttcaaatattcttaaaagatagatttagttattgtattttggtctacaattttggacttggcagtttgttttactaatgcagaattattctt

SEQ ID NO: 31441 - DNA, 120 bp, Artificial Sequence
  ENSG00000048052_65 (sequence is synthesized)
tttgtttcaaacatagtttgccatcatctggctactacctaatcatgttgtactagttattgtggaaagaaaattgtacatacatttccttgtcctttgggagatgtctttgagtcaaac

SEQ ID NO: 31442 - DNA, 120 bp, Artificial Sequence
  ENSG00000048052_66 (sequence is synthesized)
ccacaagcatgaactctcacctgaaagaaaactggaaaaggagaaactttaaatcagtatgttttgaaaggaagagatttccagactttttaaagcaaattggaatcgttttattttttt

SEQ ID NO: 31443 - DNA, 120 bp, Artificial Sequence
  ENSG00000048052_67 (sequence is synthesized)
gtttgggccttaggcacaatagaagcaaatgttgcaatattaaatataatagggagagttcactgtttcctgggacattgtggtcatgtccttaatccttcattgtgatgccccttcttg

SEQ ID NO: 31444 - DNA, 120 bp, Artificial Sequence
  ENSG00000048052_68 (sequence is synthesized)
gagttggcattttgtgacaattcatagagatcttgcagcaatatttggctattggttttattaacttaaaattcaacagaaatggagtaattaaaaaaaaaaacaaaaaacagagaagaa

SEQ ID NO: 31445 - DNA, 120 bp, Artificial Sequence
  ENSG00000048052_69 (sequence is synthesized)
ttgcaaaatctgaagtggaatggcacttccttgggtatgtaagggttgtttttagataaaactcccgatttgttcttcctacactttaatagtctcaaattctttctggggaagcaacgt

SEQ ID NO: 31446 - DNA, 120 bp, Artificial Sequence
  ENSG00000048052_70 (sequence is synthesized)
cagtgtctacctccacagtaactatgatataggaaattgtcctttcagtggtttctaggtataacaaacaagccgttaaaaatgagtgaccattttgtaggttacagcctcagcaatctg

SEQ ID NO: 31447 - DNA, 120 bp, Artificial Sequence
  ENSG00000048052_71 (sequence is synthesized)
tgtcatttgaaagcaaatatcctgatatttttaaataaggtgagcagggcaggcaggaaaccaatatttagtacttttgtgattaaacattctagaccaggcttgttgatatgtatgcca

SEQ ID NO: 31448 - DNA, 120 bp, Artificial Sequence
  ENSG00000048052_72 (sequence is synthesized)
atagcctagaatttttggcttagtgtaaaataaaaatgtcttttctattgtggtctgatatccgtttctgtaataagatcagtttgttgtcctctgtgcaccagtggttttgcccttaat

SEQ ID NO: 31449 - DNA, 120 bp, Artificial Sequence
  ENSG00000048052_73 (sequence is synthesized)
tttttttggctagcatcaccaagatctgtcatccagagctgctgagaaaaatacatgttgccaaacttttcttaaaattgtgctgccagtggtattttcccagatgtgaaaaataataat

SEQ ID NO: 31450 - DNA, 120 bp, Artificial Sequence
  ENSG00000048052_74 (sequence is synthesized)
ctaataaaggattaatatctaataacaataccattgttgaacatgctcatggaatgtccaccttcttctgattccttttttgtatttgaaaatgcaatggtgtgttccaaattattgttg

SEQ ID NO: 31451 - DNA, 120 bp, Artificial Sequence
  ENSG00000048052_75 (sequence is synthesized)
gtgttgttaatgtcatgactctcctttgaatagaataaaataaccccttttgttttgtgttttctactgaattagattttcctctagtcctatgtgaataaaaagctatttgaaataaaa

SEQ ID NO: 31452 - DNA, 120 bp, Artificial Sequence
  ENSG00000048052_76 (sequence is synthesized)
aatgagaggtgctggtgtcaggcctgtgtgtctgtgatgtgacagagcgggactgagctctctccagatccgaggcgcggttgtcaggagaggtggcctgcaacggagagctgaggatgc

SEQ ID NO: 31453 - DNA, 120 bp, Artificial Sequence
  ENSG00000048052_77 (sequence is synthesized)
agttcctgtgatgtggacttggagaattctctagtttctcctctgccaacccctcctggaccattgtcagcagttgaacgacaaaggctgtgaatctgcatcctagtcttagcagtccct

SEQ ID NO: 31454 - DNA, 120 bp, Artificial Sequence
  ENSG00000048052_78 (sequence is synthesized)
gtgaaagatgttgctttgtgttgtttcaaaccaagtaatttaatttatgaaggaacttttttttttttggacaaagattgcttaatgtaacaaattttgaattttgcattcgatagctaa

SEQ ID NO: 31455 - DNA, 120 bp, Artificial Sequence
  ENSG00000048052_79 (sequence is synthesized)
ttctctattgcttaacccagtttgcttcctggacaactgatttgatttgcattgtagtctgagcatgggactttaattcttctgcttccaaggtaacattcagattgaactttatgaagt

SEQ ID NO: 31456 - DNA, 120 bp, Artificial Sequence
  ENSG00000048052_80 (sequence is synthesized)
catgaagataatatatctgtttaaatactaataacacgatgttgcaggtagaagagtacaagttaagacaggatgccttaattaaagaagaggcctttactcctgttttcttccattctc

SEQ ID NO: 31457 - DNA, 120 bp, Artificial Sequence
  ENSG00000048052_81 (sequence is synthesized)
aagaatcttctttcacatgctaagaaactcctgactatacttctgaagtagtaattggaatgacagcttttctggctgaagtacaatttttttgttttaaaaatacaaatggtccctctc

SEQ ID NO: 31458 - DNA, 120 bp, Artificial Sequence
  ENSG00000048052_82 (sequence is synthesized)
attttctattcccagttctttcactcacatgctcacacttacagttatacagtgttcacacatacatttttcattgttttctcatttgaaataaaatgttatgagaaattttcaccataa

SEQ ID NO: 31459 - DNA, 120 bp, Artificial Sequence
  ENSG00000048052_83 (sequence is synthesized)
tgtaattaaagtcattatctgaacatgaaatgcattgcaggtttggtaaatggatatgatttcctatcagtttatatttctctatgatttgagttcagtgtttaaggattctacctaatg

SEQ ID NO: 31460 - DNA, 120 bp, Artificial Sequence
  ENSG00000048052_84 (sequence is synthesized)
cagatatatgtatatatctatatagaggtctttctatatactgatctctatatagatatcaatgtttcattgaaaatccactggtaaggaaatacctgttatactaaaattatgatacat

SEQ ID NO: 31461 - DNA, 120 bp, Artificial Sequence
  ENSG00000048052_85 (sequence is synthesized)
aatatctgagcagttaataggctttaaatttatcccaaagcctgctacaccaattacttctaaagaaaacaaattcactgttattttgagtttatgtgttgagatcagtgactgctggat

SEQ ID NO: 31462 - DNA, 120 bp, Artificial Sequence
  ENSG00000048052_86 (sequence is synthesized)
agtctcccagtctgatcaatgaagcattcgattagtttttgattttttgcaacatctagaatttaattttcacatcactgtacataatgtatcatactatagtcttgaacactgttaaag

SEQ ID NO: 31463 - DNA, 120 bp, Artificial Sequence
  ENSG00000048052_87 (sequence is synthesized)
gtagtctgccccttccttcctctctctttttttagttaagtagaaatgttctggtcaccatgccagtagtcctaggttattgtgtaggttgcaattgaacatattaggaatacaggtggt

SEQ ID NO: 31464 - DNA, 120 bp, Artificial Sequence
  ENSG00000048052_88 (sequence is synthesized)
aattggtttctttttctcgtgggtagacttaataattttctacgtattctgacaaagaaataaccccgaagcacgttcctatttcccacctgcttgtagtttccgggataacctaaactc

SEQ ID NO: 31465 - DNA, 120 bp, Artificial Sequence
  ENSG00000048052_89 (sequence is synthesized)
attctctacccacacaccttaagagattctgatacatcataaatagagggacatacatctttacatgaaaacgacatggaagattttctgagggacatgtgaatggtgaatttgcatgat

SEQ ID NO: 31466 - DNA, 120 bp, Artificial Sequence
  ENSG00000048052_90 (sequence is synthesized)
tgccccagctctgttcactcgcctagagtttcctcaacaagccctgctgcttctgtcttctgagctctgacccaccaagccatttcctctacttggagtgctttccttccctttctgctt

SEQ ID NO: 31467 - DNA, 120 bp, Artificial Sequence
  ENSG00000048052_91 (sequence is synthesized)
ttcccttctcaaaaccaagctaaaacattgcctgctctatgaaacttatcctatcaccctgttcagatgcacatgcctttcttctctacttttgtgacaccacatgcagatctgttcatc

SEQ ID NO: 31468 - DNA, 120 bp, Artificial Sequence
  ENSG00000048052_92 (sequence is synthesized)
agtgatgaatgtttcatgtagctgaagtaagagtgactggaatatgctgcagacaatttacgagagtgactcctgtttttcctcagatggggtggctggacgagagcagctcttggctca

SEQ ID NO: 31469 - DNA, 120 bp, Artificial Sequence
  ENSG00000048052_93 (sequence is synthesized)
gtgcatattcagtctgcttagggacagcagcttctgaatgaaattgcaaactattgcttctgatgaaagatgagactgagataagtaaaatgtagttgggggtgttttgcctttactatg

SEQ ID NO: 31470 - DNA, 120 bp, Artificial Sequence
  ENSG00000048052_94 (sequence is synthesized)
tgctgttatttctttacagaagatcattgaaattcaaagtatgtctttaaagttctcttaaaaattctaagcaggtaaaactaactaaaattatattgaaaattatagtacaaagaaaca

SEQ ID NO: 31471 - DNA, 120 bp, Artificial Sequence
  ENSG00000048052_95 (sequence is synthesized)
cttgagataattttgaggataattttgacagtggaaatgttttatgatatgaggaatataaaaatagatcatttaattcacagaatagttgaaggacacagcaaggtttctcctctgcca

SEQ ID NO: 31472 - DNA, 120 bp, Artificial Sequence
  ENSG00000048052_96 (sequence is synthesized)
aggtcttactgtgttgcccaggctggtatcaaactccagtgatcaagtggtcctcctacctcagcctcccaaacagatatgacagctgcatagattcaacctactatgaaaagccaaaac

SEQ ID NO: 31473 - DNA, 120 bp, Artificial Sequence
  ENSG00000048052_97 (sequence is synthesized)
atggaatattacactaattaaacggttacacaacagaacatggaatgtgcgacacttcatcttgggatgcaaatttttgtgctaaaaaaaactgagaaaaacaaaaagaaaaacatgtat

SEQ ID NO: 31474 - DNA, 120 bp, Artificial Sequence
  ENSG00000048052_98 (sequence is synthesized)
tttatcaatgggtaggtgggagaaccaggggaagactgtcagctacgattttctctagcctcaagaagactgagaccgagccaaactcctggccaacgtgctttgtggattcacagtgta

SEQ ID NO: 31475 - DNA, 120 bp, Artificial Sequence
  ENSG00000048052_99 (sequence is synthesized)
tcagctcaggtaagatcctctttcataactgagacgttttaggtttgaaagggggctggcttgggaaatgcagctaagaaaagcacctctcttaaggaaattgctgctttttcgtgttga

SEQ ID NO: 31476 - DNA, 120 bp, Artificial Sequence
  ENSG00000048052_100 (sequence is synthesized)
aaggagctgtgtactgattgtaagcctattctaataggactttaaaaatcaggtaagttcatattggggcttcagtttaaactgcagccccgctagcctgacgattttatatttactctg

SEQ ID NO: 31477 - DNA, 120 bp, Artificial Sequence
  ENSG00000048052_101 (sequence is synthesized)
cgcgcaccgagccggccgcgccgcgcccgccgctctcgccgctttcgccgcggtctcctcctctagcgcccgccgcggccggtaaatctcggctggaggagcagcggcggcccccgagtc

SEQ ID NO: 31478 - DNA, 120 bp, Artificial Sequence
  ENSG00000048052_102 (sequence is synthesized)
agtcaactttcattccctttttgcttctgcctcaccattctcttctcctcctcgaaagatggctgtttggagaagggggagaagttaagaggtcgccagcgcggagcgaaggagggcgcg

SEQ ID NO: 31479 - DNA, 120 bp, Artificial Sequence
  ENSG00000048052_103 (sequence is synthesized)
catgatgagctcacctgcacagcctgacctcatgtggaaccttgtaccatgggtgctattctgtggctgctgtaggatcttcccagatggggtggctggacgagagcagctcttggctca

SEQ ID NO: 31480 - DNA, 120 bp, Artificial Sequence
  ENSG00000048052_104 (sequence is synthesized)
agcactgctcattttacttttattttgtgtaatttgatgacactgtctatcaaaaaagagcaaatgaagcagatgcaaatgttagtgagaagtaatgtgcagcattatggtccaatcaga

SEQ ID NO: 31481 - DNA, 120 bp, Artificial Sequence
  ENSG00000048052_105 (sequence is synthesized)
tacaatattgtgtctacaattgcaaaaaacacagtaacaggatgaatattatctgatatcaagtcaaaatcagtttgaaaagaaggtgtatcatattttatattgtcactagaatctctt

SEQ ID NO: 31482 - DNA, 120 bp, Artificial Sequence
  ENSG00000048052_106 (sequence is synthesized)
aagtataattccataatgacatgggcatataccgtaacattctggcaaataacaattagaaaagataggtttaacaaaaaaatttacttgtatataatgcaccttcaggaggactatgtc

SEQ ID NO: 31483 - DNA, 120 bp, Artificial Sequence
  ENSG00000048052_107 (sequence is synthesized)
ctttgatgctataaaatacaaacaactttgaaggcaacagaagacactgtttattcaagtcagttctttgtcaggttcctgctgttctcctacagaaaagtgattctgtgagggtgaaca

SEQ ID NO: 31484 - DNA, 120 bp, Artificial Sequence
  ENSG00000048052_108 (sequence is synthesized)
ggaaatgccttgtggaaacaggaagtccaagtgattcatgtactgaggaatgtaggaaaaaaaatctgaggatagtgctttactctttctgtttttaaagggcactctatgaattgattt

SEQ ID NO: 31485 - DNA, 120 bp, Artificial Sequence
  ENSG00000048052_109 (sequence is synthesized)
attgtctaagaaaataacaccacaagtagggaaattgttacggaagcttttcactggaacatttccttcatattcccttttgatatgtttaccttgttttataggtttacttttgttaag

SEQ ID NO: 31486 - DNA, 120 bp, Artificial Sequence
  ENSG00000048052_110 (sequence is synthesized)
ctagttaaaggttcgttgtattaagacccctttaatatggataatccaaattgacctagaatctttgtgaggttttttctattaaaatatttatatttctaaatccgaggtatttcaagg

SEQ ID NO: 31487 - DNA, 120 bp, Artificial Sequence
  ENSG00000048052_111 (sequence is synthesized)
tgtagtatcctatttcaaaggagatatagcagttttgccaaatgtagacattgttcaactgtatgttattggcacgtgttgtttacattttgctgtgacatttaaaaatatttctttaaa

SEQ ID NO: 31488 - DNA, 120 bp, Artificial Sequence
  ENSG00000048052_112 (sequence is synthesized)
aatgttactgctaaagatacattatccttttttaaaaagtctccattcaaattaaattaacataactagaagttagaaagtttaaaagttttccacataatgaaagtccttctgataatt

SEQ ID NO: 31489 - DNA, 120 bp, Artificial Sequence
  ENSG00000048052_113 (sequence is synthesized)
tgacaaatagctataataggaacactccctatcaccaacatattttggttagtatattccttcatattaaaatgactttttgtcagttgttttgcattaaaaatatggcatgcctaagat

SEQ ID NO: 31490 - DNA, 120 bp, Artificial Sequence
  ENSG00000048052_114 (sequence is synthesized)
aaaattgtatattttttccatctcataaatattcattttcttcaaagtcttttttcaatctcataaaaaagggatagtgcatcttttaaaatacattttatttggggaggaacatgtggc

SEQ ID NO: 31491 - DNA, 120 bp, Artificial Sequence
  ENSG00000048052_115 (sequence is synthesized)
tgagcagacttttgtataatattacttcaaagatatgtaatcacaaacaaaaaaaactattttttataatgtcatttgagagagtttcatcagtacagttggtggacgttaattgtttga

SEQ ID NO: 31492 - DNA, 120 bp, Artificial Sequence
  ENSG00000048052_116 (sequence is synthesized)
atttgatagtctttgaatttaatcaagaaactacctggaaccagtgaaaaggaaagctggacttaaataatcttagaattaattgataaatgtctcttttaaaatctactgtatttatta

SEQ ID NO: 31493 - DNA, 120 bp, Artificial Sequence
  ENSG00000048052_117 (sequence is synthesized)
taatttacacccttgaaggtgatctcttgttttgtgttgtaaatatattgtttgtatgtttcccttcttgccttctgttataagtctcttcctttctcaaataaagttttttttaaaaga

SEQ ID NO: 31494 - DNA, 120 bp, Artificial Sequence
  ENSG00000048052_118 (sequence is synthesized)
aatattataacggatacagaaaagttcagaaggactgagctagtttgcgaaaccacagcacactttggcaaagagggaatgcacaacaaaacggatggggtggctggacgagagcagctc

SEQ ID NO: 31495 - DNA, 120 bp, Artificial Sequence
  ENSG00000048052_119 (sequence is synthesized)
gccccgtgcatgtttctgaagcctctaattgttagcagatggactgaaaaatcttgcgaggtactcccagaagcagatttatggcttcagagatcatatagcatttaaaaaaatgctctg

SEQ ID NO: 31496 - DNA, 120 bp, Artificial Sequence
  ENSG00000048052_120 (sequence is synthesized)
tgtcctttctgctttgcacacagatggggtggctggacgagagcagctcttggctcagcaaagaatgcacagtatgatcagctcagaggagtgggacccatgactgagctgggaaggcag

SEQ ID NO: 31497 - DNA, 120 bp, Artificial Sequence
  ENSG00000048052_121 (sequence is synthesized)
aacctgctcaagtttctattgggaagaaccaagaagcaggaggaatagatgttagctaggcactagcagtatttgctacaacgtggatattgttgaactatgggtgttgactttcttttc

SEQ ID NO: 31498 - DNA, 120 bp, Artificial Sequence
  ENSG00000048052_122 (sequence is synthesized)
atgaagataatatatctgtttaaatactaatgggaaagaagctttcagaagatcattaaatgcattaaaacctgcagatgtccacatgtctgtgcctctctttagcagcctgactccttt

SEQ ID NO: 31499 - DNA, 120 bp, Artificial Sequence
  ENSG00000048052_123 (sequence is synthesized)
gggtcagttattcttagcctcggtatttctatcttatggcatcgcaggtctaagattagcttgttaggcgttatcatgccatatgagttacctcctaatataactctacactggaatgat

SEQ ID NO: 31500 - DNA, 120 bp, Artificial Sequence
  ENSG00000048052_124 (sequence is synthesized)
gagtatacttagagtatggagctgacaaacattctctttccttctcctcctcctcctcctcattctgttgaattgctggtttctgtagtctattaggcttcttattaatagtaataaaat

SEQ ID NO: 31501 - DNA, 120 bp, Artificial Sequence
  ENSG00000048052_125 (sequence is synthesized)
gttcattcattaactctctcatgcctgcataccagctatagtaactgtctttgcccccaagttatgcagtctttataaagtcgttcagtagcagggcaatgagttgggaaaactgatatt

SEQ ID NO: 31502 - DNA, 120 bp, Artificial Sequence
  ENSG00000048052_126 (sequence is synthesized)
atctgtagcatcaggtactatttaaccagtgggagggactgataaaattagcaagttgactaaccacttcccttccttgtggctctttaatattataacggatacagaaaagttcagaag

SEQ ID NO: 31503 - DNA, 120 bp, Artificial Sequence
  ENSG00000048052_127 (sequence is synthesized)
gactgagctagtttgcgaaaccacagcacactttggcaaagagggaatgcacaacaaaacgggagtacctggtaaaatgctgtggtgtatggagacagttatgagaaactggagggagga

SEQ ID NO: 31504 - DNA, 120 bp, Artificial Sequence
  ENSG00000048052_128 (sequence is synthesized)
tgatagttgagatggggtggctggacgagagcagctcttggctcagcaaagaatgcacagtatgatcagctcagtggatgtgaagtcagaagttcctgtgggcctggagcccatctcacc

SEQ ID NO: 31505 - DNA, 120 bp, Artificial Sequence
  ENSG00000048052_129 (sequence is synthesized)
agggtacaaagtgacggcaaaataaactcctgtgctggaggtacaacagtttggaagtatacttggggaaagagaaaacacaagatggaaggaagatctctcttttcacatcgggagcac

SEQ ID NO: 31506 - DNA, 120 bp, Artificial Sequence
  ENSG00000048052_130 (sequence is synthesized)
gcataaatgagaaaaagctaattaaaactattaattatcagaaaattgaagataaagttgaagagcctataccaaccaaagttgaataaatggcaaaatataatatagatgagttactct

SEQ ID NO: 31507 - DNA, 120 bp, Artificial Sequence
  ENSG00000048052_131 (sequence is synthesized)
agctggccaagacggaagactaatgttattgtacataggctgttaccctgccagcccttcctcacagatttgctttctctctctgtccctcttcccctgcgacctcttccccttttaccc

SEQ ID NO: 31508 - DNA, 120 bp, Artificial Sequence
  ENSG00000048140_0 (sequence is synthesized)
ggcggggcccggtccagaggcggggacagcagggctccgggcaaggaggtctggatgctgagggcggtccctgaggggcgggcggggcccgaccggcgctctgtgtggccgaggccatga

SEQ ID NO: 31509 - DNA, 120 bp, Artificial Sequence
  ENSG00000048140_1 (sequence is synthesized)
cgggcggctctagcccagggcggcccgcggggcgctgggcctggctcccggctccggtttccgggccggcgggtggccgctcaccatgcccggcaagcaccagcatttccaggaacctga

SEQ ID NO: 31510 - DNA, 120 bp, Artificial Sequence
  ENSG00000048140_2 (sequence is synthesized)
gcaccagcatttccaggaacctgaggtcggctgctgcgggaaatacttcctgtttggcttcaacattgtcttctgggtgctgggagccctgttcctggctatcggcctctgggcctgggg

SEQ ID NO: 31511 - DNA, 120 bp, Artificial Sequence
  ENSG00000048140_3 (sequence is synthesized)
tgagaagggcgttctctcgaacatctcagcgctgacagatctgggaggccttgaccccgtgtggctgtttgtggtagttggaggcgtcatgtcggtgctgggctttgctggctgcattgg

SEQ ID NO: 31512 - DNA, 120 bp, Artificial Sequence
  ENSG00000048140_4 (sequence is synthesized)
ggccctccgggagaacaccttcctgctcaagtttttctccgtgttcctcggtctcatcttcttcctggagctggcaacagggatcctggcctttgtcttcaaggactggattcgagacca

SEQ ID NO: 31513 - DNA, 120 bp, Artificial Sequence
  ENSG00000048140_5 (sequence is synthesized)
gctcaacctcttcatcaacaacaacgtcaaggcctaccgggacgacattgacctccagaacctcattgactttgctcaggaatactggtcttgctgcggagcccgaggccccaatgactg

SEQ ID NO: 31514 - DNA, 120 bp, Artificial Sequence
  ENSG00000048140_6 (sequence is synthesized)
gaacctcaatatctacttcaactgcactgacttgaaccccagccgggagcgctgcggggtgcccttctcctgctgcgtcagggaccctgcggaggatgtcctcaacacccagtgtggcta

SEQ ID NO: 31515 - DNA, 120 bp, Artificial Sequence
  ENSG00000048140_7 (sequence is synthesized)
cgacgtccggctcaaactggtgagaggggagctggagcagcagggcttcatccacaccaaaggctgcgtgggccagtttgagaagtggctgcaggacaacctgattgtggtggcgggagt

SEQ ID NO: 31516 - DNA, 120 bp, Artificial Sequence
  ENSG00000048140_8 (sequence is synthesized)
cttcatgggcatcgccctcctccagatctttggcatctgcctggcccagaacctcgtgagtgacatcaaggcagtgaaagccaactggagcaaatggaatgatgactttgaaaaccactg

SEQ ID NO: 31517 - DNA, 120 bp, Artificial Sequence
  ENSG00000048140_9 (sequence is synthesized)
gcttacgcccaccatttccgaggtcctgtccacggcggggcctcagcagaactctctgactggggcccctggcccggccccacccagccgacatgttttctttggcctgggtggtttata

SEQ ID NO: 31518 - DNA, 120 bp, Artificial Sequence
  ENSG00000048140_10 (sequence is synthesized)
ttcacataaaagtccagatccacagcttctcttgaagaatgaccacctggctacgccggctcttcggtggcaacactacctgggacactgcctccccagtcaccaagggccccagctggc

SEQ ID NO: 31519 - DNA, 120 bp, Artificial Sequence
  ENSG00000048140_11 (sequence is synthesized)
ccgttctactcacctaagtgccgcctgacccttgtacactaggagctggcctcccacctctgcagggttattccctgcacctcgaggccgctgcgggccaatctggagtgaaacacgggg

SEQ ID NO: 31520 - DNA, 120 bp, Artificial Sequence
  ENSG00000048140_12 (sequence is synthesized)
acctgaaggatggagaggctggaccccgctttgaagagggtgcagcctgggaagggcggccttgctggggactgcggtgggagtagagtgcccaggagagggtctgaggggtgggatggg

SEQ ID NO: 31521 - DNA, 120 bp, Artificial Sequence
  ENSG00000048140_13 (sequence is synthesized)
ggtcaggacaattttgcaaaagaagtagctggaagccatgggactggcgggagcctgtttgggggatctggatggttgactcctaggagtcaagttcagcatcttcaccgtggctgcaga

SEQ ID NO: 31522 - DNA, 120 bp, Artificial Sequence
  ENSG00000048140_14 (sequence is synthesized)
gctgcctgatgggcactagagggcatgccagccccacactccctgggtctggcttcctcccgcaacctcactctagtagagcctgtgcctgcctactagcgctctggggttcggagagtt

SEQ ID NO: 31523 - DNA, 120 bp, Artificial Sequence
  ENSG00000048140_15 (sequence is synthesized)
tgggaatttctcagagccaactggctcaggcttgggaaggctggctgctgccctcagctccgcctcatcagctatgtgaaggggtgtgtgtggagtgatcctgccgccccctccctgggc

SEQ ID NO: 31524 - DNA, 120 bp, Artificial Sequence
  ENSG00000048140_16 (sequence is synthesized)
tcgtccagagatctcaaactccgatgcccctggggccacgtatgttgtataaatggatgaaacaggcccttgagttgggagcctgcttcactttgactttcccactgttgctggagacaa

SEQ ID NO: 31525 - DNA, 120 bp, Artificial Sequence
  ENSG00000048140_17 (sequence is synthesized)
agacatcgtgatgagagaaagttcgcacaatctagtcggtaacagccactttccttgagaccaagagagtgcggtggggatgggggggagagcacgggtccccgtctgacagtggccgct

SEQ ID NO: 31526 - DNA, 120 bp, Artificial Sequence
  ENSG00000048140_18 (sequence is synthesized)
gccatattcaggtgtagctaattgctctggtgtgggaatgcaggcctaatgacagaaatctggagaagccagaaatacagatttgtatgtgagatgtcctgattttttaagttgttggca

SEQ ID NO: 31527 - DNA, 120 bp, Artificial Sequence
  ENSG00000048140_19 (sequence is synthesized)
gaaattaattcagaaatcaaatctgcaggccaaacaaggtgcaggacccagctttggccccatgcccctgtaggtccctctgggacagtcaccgctggggtcctggctgctctgtcattg

SEQ ID NO: 31528 - DNA, 120 bp, Artificial Sequence
  ENSG00000048140_20 (sequence is synthesized)
agggatgctgggcactgctgccgggtggccagggtatggggcatgtgcccagcaatgtggctccttggccccgctggccagtgtcctgggcccctgacaggcgctggctgtgagtggttt

SEQ ID NO: 31529 - DNA, 120 bp, Artificial Sequence
  ENSG00000048140_21 (sequence is synthesized)
acctgtaggaggcgccttcctggcagacgaatgagggagcaagttccctgtgatgggaccatctccttacccacctgggctagcgggccccaggagagagacccaggagtgtcctcgtcc

SEQ ID NO: 31530 - DNA, 120 bp, Artificial Sequence
  ENSG00000048140_22 (sequence is synthesized)
gaggagagccagcccctgctgatccttatgggtccccatttgcctagtgccatagggccacggccttgggaaacagagggcatgggctccacgctagcagctcccaggccagggcctacg

SEQ ID NO: 31531 - DNA, 120 bp, Artificial Sequence
  ENSG00000048140_23 (sequence is synthesized)
acacacgggagaatggaggaaatgtgacataaaatatagatttctacttctgctaaaccttgggcccacggtattggctgcagctatgttgctgctgccccttcactggtacagaggctc

SEQ ID NO: 31532 - DNA, 120 bp, Artificial Sequence
  ENSG00000048140_24 (sequence is synthesized)
tctgtttgccattgttcccaacactctgtattttattatatctgtcagcccttatctctcatttatactatgtttggcctctgtgtatattagagtttagacccctgatggaaggtctgc

SEQ ID NO: 31533 - DNA, 120 bp, Artificial Sequence
  ENSG00000048140_25 (sequence is synthesized)
cctcaaacttacaaacttaaccccagtgaagagcagccagagaagagttcctgaaaccctatctgcctcccacctgcaccatctcgcccactcacccctaaccacaaacacacagtcaca

SEQ ID NO: 31534 - DNA, 120 bp, Artificial Sequence
  ENSG00000048140_26 (sequence is synthesized)
cactgtcacccacagtcacaaccacacctagtcacacactcgcaggcacacttgatcacacctacacctacacatggtcccacagtcacacatgagtcacacccgatcacacccacacac

SEQ ID NO: 31535 - DNA, 120 bp, Artificial Sequence
  ENSG00000048140_27 (sequence is synthesized)
ggcgacaggcccttggcaccattcaccaccaagagtcagctctggatccagaggtgaagcagagctggtgcctgcttcaagcagctctcaacccagggcagaggcagacatagccaggca

SEQ ID NO: 31536 - DNA, 120 bp, Artificial Sequence
  ENSG00000048140_28 (sequence is synthesized)
gttatgatgcagttcattcattcattcagcacaggattgttaagggcctaccatatgccggacccagagccaggccctgaggattcggcggggaagaaagctgggacctgtcctctcagg

SEQ ID NO: 31537 - DNA, 120 bp, Artificial Sequence
  ENSG00000048140_29 (sequence is synthesized)
gctggcagtcgggaagagacagatggtgaacaagcagaacaaacaaatgtgtgcatgtacatacgtgtgtatgcaaaattgtacattgtggtaagagtcaaaatgaagggtggagaatgg

SEQ ID NO: 31538 - DNA, 120 bp, Artificial Sequence
  ENSG00000048140_30 (sequence is synthesized)
gaaggcctctgcgtggagagcttgaagcctcccaaaggaggagaaggaagagaagggagagtgttctgtagcaggagcagctggcgctgagcaggtgccaggaggcaggtggaggctgag

SEQ ID NO: 31539 - DNA, 120 bp, Artificial Sequence
  ENSG00000048140_31 (sequence is synthesized)
ccctgccctgggaccagcacatgcagggcatgtggcaggcctgactcctccagctctctggctcggccacggggcctgcctgtgtctgctgccgagcttgagctcccccagccctgtggg

SEQ ID NO: 31540 - DNA, 120 bp, Artificial Sequence
  ENSG00000048140_32 (sequence is synthesized)
ctgctctccagcccctgcgctgctgctcagtgagggctgtgtgcacccgtgtgccccacaagaccatggttcatggcagatcccaaactcgccattgctcctgcctaggggacagcttag

SEQ ID NO: 31541 - DNA, 120 bp, Artificial Sequence
  ENSG00000048140_33 (sequence is synthesized)
ggtgttctgggtgggggtgatggggtgtgggatgatgccagccggcatggaggaaatggggtggcacggctatgggggtggcaggattcccctcctgtccctgcactgaagagaggaggg

SEQ ID NO: 31542 - DNA, 120 bp, Artificial Sequence
  ENSG00000048140_34 (sequence is synthesized)
tagaacctctggggcaagtgtgggaggcctgctgcagacatggggcccagcggtctctgctgccacagggcttggcccagcgcctgcctctcaggtagtctggaggaagccacagtcatt

SEQ ID NO: 31543 - DNA, 120 bp, Artificial Sequence
  ENSG00000048140_35 (sequence is synthesized)
gaaccagtatccttgtcccactccctccctttttctagcctctcttgggtcggggaagggggagctcagtgtcccctcccttgcacccctctgcctccaccagcctggaggttgggccca

SEQ ID NO: 31544 - DNA, 120 bp, Artificial Sequence
  ENSG00000048140_36 (sequence is synthesized)
ggcctgtgggggtggggaggtggccacccacttggctgtcccagccctgtcccagacagccctgtattcctgcagcctgggcttgttcccaaacagggtgaggctcctgggatgggcctg

SEQ ID NO: 31545 - DNA, 120 bp, Artificial Sequence
  ENSG00000048140_37 (sequence is synthesized)
aaggcagtgaaagccaactggtgaggccgccagaggccatggccacatgcctggcctacgcaggcctctggggggccccccaggaccctcctactatactcctgacgggcaaggctgcag

SEQ ID NO: 31546 - DNA, 120 bp, Artificial Sequence
  ENSG00000048140_38 (sequence is synthesized)
aggggttcgcctgaaccgctgtgctgtccacccacggaggaagttgctgtgcctccgcctgggcctcttgtcccatatgcgtgtgtacacacacatgcaggcacacgtgtgcacagggag

SEQ ID NO: 31547 - DNA, 120 bp, Artificial Sequence
  ENSG00000048140_39 (sequence is synthesized)
ccaccgtctcggctacatttggggtggtggactctccaggggactaggaagggcgcagctcagagggtgcaggccaagtggggtgggaggtgctgtgtggagggtcccccccgttccctg

SEQ ID NO: 31548 - DNA, 120 bp, Artificial Sequence
  ENSG00000048140_40 (sequence is synthesized)
ccccccagtgctgggacgcacctttctgtgcgtagctgtatggggcgcgttgcctgagccactgcctcacacagcttcagagcactcttttctatgagctgtaactttgagcctgccagg

SEQ ID NO: 31549 - DNA, 120 bp, Artificial Sequence
  ENSG00000048162_0 (sequence is synthesized)
acctatgggtaccaccgggttctcgcgggtcttgcgaacgaacttttccttgaaactctctggattcctgtaaacagtggggctcagcccctcaatgactggaggcttcgatggttcaaa

SEQ ID NO: 31550 - DNA, 120 bp, Artificial Sequence
  ENSG00000048162_1 (sequence is synthesized)
ggggacctccggaatcacagggccgggagtcgccatgtccgggccacagcagcaggagaaaatcgggactccgacctcagcctcccggtgaaggtcatgaaaggggcggggaaacgaata

SEQ ID NO: 31551 - DNA, 120 bp, Artificial Sequence
  ENSG00000048162_2 (sequence is synthesized)
aattgagccttgtacgcaggcgcaaatgctcgttgcatcctgggagtcgtagtgctcagcacggtagtgctacaaaaggactacatttccccaaatgcccgcaaagccttgtgcacgcct

SEQ ID NO: 31552 - DNA, 120 bp, Artificial Sequence
  ENSG00000048162_3 (sequence is synthesized)
tccggaaggagtttgttacacgaggtctgagagacagaggcagcgtgtttgagctgctggtgcggtggtcagcgcgatgcccaaggccaagggcaaaacccggaggcagaagtttggtta

SEQ ID NO: 31553 - DNA, 120 bp, Artificial Sequence
  ENSG00000048162_4 (sequence is synthesized)
cagtgtcaaccgaaagcgtctgaaccggaatgctcgacggaaggcagcgccgcggatcgaatgctcccacatccgacatgcctgggaccacgctaaatcggtacggcagaacctggccga

SEQ ID NO: 31554 - DNA, 120 bp, Artificial Sequence
  ENSG00000048162_5 (sequence is synthesized)
gccatggaggtggacatagaggagaggcctaaagagcttgtacggaagccctatgtgctgaatgacctggaggcagaagccagccttccagaaaagaaaggaaatactctgtctcgggac

SEQ ID NO: 31555 - DNA, 120 bp, Artificial Sequence
  ENSG00000048162_6 (sequence is synthesized)
ctcattgactatgtacgctacatggtagagaaccacggggaggactataaggccatggcccgtgatgagaagaattactatcaagataccccaaaacagattcggagtaagatcaacgtc

SEQ ID NO: 31556 - DNA, 120 bp, Artificial Sequence
  ENSG00000048162_7 (sequence is synthesized)
tataaacgcttttacccagcagagtggcaagacttcctcgattctttgcagaagaggaagatggaggtggagtgactggtttacatcacagctgccccaggctgaggcgtcccccggacc

SEQ ID NO: 31557 - DNA, 120 bp, Artificial Sequence
  ENSG00000048162_8 (sequence is synthesized)
agtgaagctggagccagggtgtaaggcaaggaggtgctgtgtggctccagaggagctggccaggtcccatggaatcagaaggttacacacacacgtgcacactccccgctctggggaagg

SEQ ID NO: 31558 - DNA, 120 bp, Artificial Sequence
  ENSG00000048162_9 (sequence is synthesized)
aactgttctcagaggctccaatttatattcatctgggggttcacggaaaagccagaacctgctgttttcagggtgggtgatgtaaatatagtgtgtacataataaagcaaatatatttta

SEQ ID NO: 31559 - DNA, 120 bp, Artificial Sequence
  ENSG00000048162_10 (sequence is synthesized)
atattcctttaggtcactgtcctgcactgtgggaagctgggaagggccctaagatgtcctcattttgcagatggagaaaccaagtttcagaggggagaagtgagctggttcaaagttcac

SEQ ID NO: 31560 - DNA, 120 bp, Artificial Sequence
  ENSG00000048162_11 (sequence is synthesized)
gatgtttagggaggatgtacccaggtgcctgggagaatagaagagaaaccagtaaatctctggcatgggtatggcttctcatgaatttaaggatgaactgatttttagggattccaccat

SEQ ID NO: 31561 - DNA, 120 bp, Artificial Sequence
  ENSG00000048162_12 (sequence is synthesized)
ctcaataaatgttccaatgacaaaatcgattttatgtatattaaggctatagagagtgaacgctaaaacggaggagagtaaaccctacaggaaagtgggaatactctagaattcttcatt

SEQ ID NO: 31562 - DNA, 120 bp, Artificial Sequence
  ENSG00000048162_13 (sequence is synthesized)
catccttccccttacctgtcagggagtttaagcagctcccctaaagataaaggatttgaatggccagacatttgatacagaattccttgagttcctgtcttttatctcagtggttctcat

SEQ ID NO: 31563 - DNA, 120 bp, Artificial Sequence
  ENSG00000048162_14 (sequence is synthesized)
aagaattactgcacaggattgtatataccaagccataggcacttactgtagtcaaagaggaacatttttaaaaattttaaaatgtggttaaaaaacacataaaagttaccatcctaacca

SEQ ID NO: 31564 - DNA, 120 bp, Artificial Sequence
  ENSG00000048162_15 (sequence is synthesized)
tttttaagtgcactgttcagtaaaggatattgactttgttgtgcaacaggtccctaaaaccttttcattttgcaaaactgaaactatacccattaaacaactccccatcttcctctacct

SEQ ID NO: 31565 - DNA, 120 bp, Artificial Sequence
  ENSG00000048162_16 (sequence is synthesized)
gtctgaaccggaatgctcgacggaaggcagcgccgcggatcgaatggtgagggggctggggttccgggtggccgtgggcctcggccgggacggtccgcgagatgacggatccgcgatgtc

SEQ ID NO: 31566 - DNA, 120 bp, Artificial Sequence
  ENSG00000048162_17 (sequence is synthesized)
aagaaagggaggcaaaagagactctaggaaatggatcccattgacagggatctaacttgaatgaatgcttatggcaaggatagactgagtgaccttggttccagtctcactcacagataa

SEQ ID NO: 31567 - DNA, 120 bp, Artificial Sequence
  ENSG00000048162_18 (sequence is synthesized)
atgttttgctcgcatggtgttttttggtttgtttttgttttcaagacagagtcttgctcagtcacccaggatggaagtctatttttggcttcctttaacagttgaaagatccggctacac

SEQ ID NO: 31568 - DNA, 120 bp, Artificial Sequence
  ENSG00000048162_19 (sequence is synthesized)
tggacccctgggcccaagtaggattagctggctatgatgggtcatgagctcctcagctggccccagctcctccctggcccgctggactctcaggccttcctggtcttttttttgagacag

SEQ ID NO: 31569 - DNA, 90 bp, Artificial Sequence
  ENSG00000048162_20 (sequence is synthesized)
tgagacagaatctcgctctgtcacccagggtggagttcagtggtgtgatcatggctcaccgcagcctcatcctcccgggctgaaacagtc

SEQ ID NO: 31570 - DNA, 120 bp, Artificial Sequence
  ENSG00000048162_21 (sequence is synthesized)
gaggcctaaagagcttgtacggaagccctatgtgctgaatgcccctggcaaccgtgtcaaagataattttgactatatacaatatgaggacctaacctctggatatgattcgactacttc

SEQ ID NO: 31571 - DNA, 120 bp, Artificial Sequence
  ENSG00000048342_0 (sequence is synthesized)
cttaggaacgggttgctaagctggtgtttttgctccaagacatggctgcagcttcccagggaggagcccaggggcatctccaacactcagcctttccctccggacccttttaaaagattc

SEQ ID NO: 31572 - DNA, 120 bp, Artificial Sequence
  ENSG00000048342_1 (sequence is synthesized)
aacagcaccgtctctctccacttccatcctagaatgcagaatctgcaaagtgccttttgtaaagtttcttaaggtaaatcagtccctaaccggactttaggctgcaacattgtcagggac

SEQ ID NO: 31573 - DNA, 120 bp, Artificial Sequence
  ENSG00000048342_2 (sequence is synthesized)
ccatcccagccaaaatgaatcccagggaagaaaaagtaaaaataattacagaggagttcattgaaaatgatgaggatgcagacatgggaagacagaataagaactcaaaggttcgaagac

SEQ ID NO: 31574 - DNA, 120 bp, Artificial Sequence
  ENSG00000048342_3 (sequence is synthesized)
agccaagaaagaaacagccaccaactgctgtccccaaggaaatggtgtccgaaaaatcccaccttggcaacccccaggagcctgtgcaggaggagcccaagacccgcctcctgagtatga

SEQ ID NO: 31575 - DNA, 120 bp, Artificial Sequence
  ENSG00000048342_4 (sequence is synthesized)
cagtccggagaggcccacggagcttacctccaattccttcaacttccagaacaggctttgcagaattttccatgaggggacgcatgagggagaaattgcaagcagcgaggtccaaagcag

SEQ ID NO: 31576 - DNA, 120 bp, Artificial Sequence
  ENSG00000048342_5 (sequence is synthesized)
aaagtgcattgctgcaggaaatccccactcctcggcccagacgcttacgaagtcccagtaagaaagaattggagactgaatttggcacagagccagggaaagaggtagaaaggactcaac

SEQ ID NO: 31577 - DNA, 120 bp, Artificial Sequence
  ENSG00000048342_6 (sequence is synthesized)
aagaagttgactcccaaagttactcaagagtcaagttccatgattctgcacgaaaaatcaagcctaaaccccaggttccacctggcttcccttctgcagaagaggcctataacttcttta

SEQ ID NO: 31578 - DNA, 120 bp, Artificial Sequence
  ENSG00000048342_7 (sequence is synthesized)
ctttcaactttgatcccgaaccagaaggatcagaggaaaaaccaaaagcaagacatagagcgggaactaatcaagaggaggaggaaggggaagaagaagaaccacctgcacaaggaggag

SEQ ID NO: 31579 - DNA, 120 bp, Artificial Sequence
  ENSG00000048342_8 (sequence is synthesized)
gaaaggaaatggatgaggaagaactgcttaatggtgatgatgccgaggacttcctattgggcttagatcacgtggctgacgattttgtagcagtcagacctgcagattatgaaagcatcc

SEQ ID NO: 31580 - DNA, 120 bp, Artificial Sequence
  ENSG00000048342_9 (sequence is synthesized)
atgatcggctgcagatggaaagagaaatgctcttcatacccagtaggcagacagtccctacatataaaaagcttcctgagaatgtacagcccaggttcctggaagatgaaggcctttaca

SEQ ID NO: 31581 - DNA, 120 bp, Artificial Sequence
  ENSG00000048342_10 (sequence is synthesized)
ccggggtaagaccagaggtggcacgcaccaatcagaacatcatggagaacagattgctgatgcaggaccccgaaagaagatggtttggagatgacggcaggatcctagctctgccaaacc

SEQ ID NO: 31582 - DNA, 120 bp, Artificial Sequence
  ENSG00000048342_11 (sequence is synthesized)
ccatcaagccatttccttcaaggccgccagtactaacacaggagcagagcattaaggcagagcttgaaacactgtataaaaaggctgtaaaatacgttcacagtagtcagcatgtgatca

SEQ ID NO: 31583 - DNA, 120 bp, Artificial Sequence
  ENSG00000048342_12 (sequence is synthesized)
gatctggagaccctcctggaaatttccaactggacattgatatttcagggttaatcttcactcatcatccctgttttagccgagagcatgttttggcagccaagctggcccagttatatg

SEQ ID NO: 31584 - DNA, 120 bp, Artificial Sequence
  ENSG00000048342_13 (sequence is synthesized)
accagtaccttgcaagacaccagagaaacaaggcgaaatttcttactgataagctccaagctttaagaaatgctgttcagactggccttgatccagaaaaacctcatcagtctctcgata

SEQ ID NO: 31585 - DNA, 120 bp, Artificial Sequence
  ENSG00000048342_14 (sequence is synthesized)
ccatccaaaaaaccatcaatgagtataaatctgaaattcgacaaacaagaaaattccgtgatgctgaacaagaaaaagatagaacattgcttaagactatcataaaagtttggaaagaga

SEQ ID NO: 31586 - DNA, 120 bp, Artificial Sequence
  ENSG00000048342_15 (sequence is synthesized)
tgaaatcccttcgagagttccagagatttacaaatactcccttgaaacttgttttgagaaaggaaaaagctgaccagaaagcagatgaagaagcatatgaagcagaaattcaagctgaaa

SEQ ID NO: 31587 - DNA, 120 bp, Artificial Sequence
  ENSG00000048342_16 (sequence is synthesized)
taagtgaactgttagaagagcacacggaggagtacgcacagaagatggaagaatacagaacgtcgttacaacagtggaaggcctggaggaaagtgcaaagggccaagaagaagaaaagga

SEQ ID NO: 31588 - DNA, 120 bp, Artificial Sequence
  ENSG00000048342_17 (sequence is synthesized)
aacaagcagcagaagaacatcccggtgatgagattgcagagccgtatcccgaggaggaccttgtgaagcccagccctccagagcccactgatcgggcagtgatagagcaggaggtgaggg

SEQ ID NO: 31589 - DNA, 120 bp, Artificial Sequence
  ENSG00000048342_18 (sequence is synthesized)
agagagcagcccagagcaggaggaggccttgggagcccacgctggtcccggagctaagcctggcaggaagcgtaacacccaatgaccagtgccccagagcggaggtctcgagaagggagg

SEQ ID NO: 31590 - DNA, 120 bp, Artificial Sequence
  ENSG00000048342_19 (sequence is synthesized)
atgtaaagaagcgctcagtgtacttaaaagtgctgttcaacaacaaggaggtgtccaggacagtcagtcggccactaggagcagacttccgagttcactttgggcagattttcaatttgc

SEQ ID NO: 31591 - DNA, 120 bp, Artificial Sequence
  ENSG00000048342_20 (sequence is synthesized)
aaatagtcaactggccggagagtttaacacttcaggtctatgaaactgtcggacacagtagtcccaccttgctagcagaagtgtttctgcctattcctgagactactgttgtcactggaa

SEQ ID NO: 31592 - DNA, 120 bp, Artificial Sequence
  ENSG00000048342_21 (sequence is synthesized)
gaagctgatggcagtaaccagctgactctgatgacctcagggaaagtgtctcatagtgtggcatgggccattggagaaaacgggatacctttaattcctccattgtcacagcagaacatc

SEQ ID NO: 31593 - DNA, 120 bp, Artificial Sequence
  ENSG00000048342_22 (sequence is synthesized)
ggatttcggagtgctttgaagaaagcagatgccatctcatctattggcacatcaggactgacagacatgaaaaaattggccaagtgggcagcagagtccaagctcgacccaaatgacccc

SEQ ID NO: 31594 - DNA, 120 bp, Artificial Sequence
  ENSG00000048342_23 (sequence is synthesized)
aacaatgcccctttgatgcagcttatctcggttgctaccagtggtgaatcctatgtccctgatttctttagactggagcagctgcaacaggagtttaactttgtttcagatcaagaatta

SEQ ID NO: 31595 - DNA, 120 bp, Artificial Sequence
  ENSG00000048342_24 (sequence is synthesized)
aatagatccaaacgatttaggcttcttcatcttagaagccaagaggtgccagaattccgaaattataagcaagttccagtctatgaccgagaaattatggaaaaggtattccaggactat

SEQ ID NO: 31596 - DNA, 120 bp, Artificial Sequence
  ENSG00000048342_25 (sequence is synthesized)
gagaaacggttacgagacagaaatgtaatagaaaccaaggaacacatagacacccatagggccatagtagccaagtacctccagcaggttagagaatcagtgataaatcgtttcttaatt

SEQ ID NO: 31597 - DNA, 120 bp, Artificial Sequence
  ENSG00000048342_26 (sequence is synthesized)
gcaaaacaatattttcttcttgctgatatgatagtagaagaagaagttcccaatatcagcattttgggcctaagccttttcaagctggcagaacaaaagcgaccactgcggccaaggaga

SEQ ID NO: 31598 - DNA, 120 bp, Artificial Sequence
  ENSG00000048342_27 (sequence is synthesized)
aaaggtcggaagaaggtgacagcccaaaacctgtctgatggagacataaagctgctggtgaacattgtgcgagcttacgacattccagtgaggaagccggcagtgagcaaattccagcag

SEQ ID NO: 31599 - DNA, 120 bp, Artificial Sequence
  ENSG00000048342_28 (sequence is synthesized)
ccgtcgaggtcttcaaggatgttcagtgaaaagcatgctgcttccccaagcacgtacagcccaacccacaatgctgactaccccctcggccaggttttagtacgtccctttgtagaagtc

SEQ ID NO: 31600 - DNA, 120 bp, Artificial Sequence
  ENSG00000048342_29 (sequence is synthesized)
tcttttcaacgaacagtttgccatacgactacggctgaaggaccaaaccctagctggaatgaagaactagaacttccatttagggctcctaatggagattatagcacagccagtctgcag

SEQ ID NO: 31601 - DNA, 120 bp, Artificial Sequence
  ENSG00000048342_30 (sequence is synthesized)
tcagtgaaagatgttgtgttcattaacatttttgatgaagtactgcatgatgtcttagaggatgaccgtgaaagaggaagtggaatccatactcgtattgagagacactggctgggatgt

SEQ ID NO: 31602 - DNA, 120 bp, Artificial Sequence
  ENSG00000048342_31 (sequence is synthesized)
gtgaaaatgccatttagcacaatatatttccaagcaaggattgatggaacatttaaaatagatattcccccagttcttctgggctacagtaaggagcgaaatatgattcttgagcggggt

SEQ ID NO: 31603 - DNA, 120 bp, Artificial Sequence
  ENSG00000048342_32 (sequence is synthesized)
tttgattctgtccgaagcttaagtgaaggctcctacattaccctctttattaccattgagccccagctggttcctggagagtccattcgagaaaagtttgagtctcaggaagatgagaaa

SEQ ID NO: 31604 - DNA, 120 bp, Artificial Sequence
  ENSG00000048342_33 (sequence is synthesized)
ttacttcaagcaactgagaagtttcaagctgaatgtgccttaaagtttccaaatcgtcagtgccttacaacagtaattgatataagcggaaaaactgtttttatcacacgttatctcaaa

SEQ ID NO: 31605 - DNA, 120 bp, Artificial Sequence
  ENSG00000048342_34 (sequence is synthesized)
cctttaaaccctcctcaggagctccttaatgtctaccccaataatctacaggcaactgcagaactggtggctcgatatgtgtccttgattcccttcttgcctgacactgtctcatttggt

SEQ ID NO: 31606 - DNA, 120 bp, Artificial Sequence
  ENSG00000048342_35 (sequence is synthesized)
ggtatctgtgacctctggagcacatctgatcaatttcttgatctcctggcaggggatgaagaagaacatgcagtactattgtgtaattactttctgtctctgggtaagaaggcctggctg

SEQ ID NO: 31607 - DNA, 120 bp, Artificial Sequence
  ENSG00000048342_36 (sequence is synthesized)
ttgatgggcaatgctattcctgagggtccaactgcctatgtgctaacttgggagcaaggtcgttatttaatatggaatccctgcagtggacatttttatggacaatttgatacattctgt

SEQ ID NO: 31608 - DNA, 120 bp, Artificial Sequence
  ENSG00000048342_37 (sequence is synthesized)
cccttgaaaaatgtgggctgtttaataggtcctgacaatatttggtttaatattcaacgatatgaatctccactaaggataaattttgatgtcaccaggcccaagctatggaaatctttc

SEQ ID NO: 31609 - DNA, 120 bp, Artificial Sequence
  ENSG00000048342_38 (sequence is synthesized)
ttttcaagaagccttccatatcctggcctttccagtgttcagcctgaagagctaatttaccagcgctcagacaaagcagctgcagctgagctacaagacaggattgaaaaaatactaaaa

SEQ ID NO: 31610 - DNA, 120 bp, Artificial Sequence
  ENSG00000048342_39 (sequence is synthesized)
gaaaaaatcatggactggaggccacgccatctgactcggtggaataggtattgtacctctactctgcgtcacttcttgcctctgttagaaaaaagtcaaggagaagatgtagaagatgac

SEQ ID NO: 31611 - DNA, 120 bp, Artificial Sequence
  ENSG00000048342_40 (sequence is synthesized)
cacagagcagaactgctaaaacagctgggagactacaggttctctggatttcctcttcacatgccttattctgaagtgaagcctttaattgacgctgtgtatagtactggagtacataat

SEQ ID NO: 31612 - DNA, 120 bp, Artificial Sequence
  ENSG00000048342_41 (sequence is synthesized)
attgatgttcctaatgttgaatttgctttagctgtatacatacacccataccccaaaaatgttttgtctgtttggatctatgttgcctctcttatacgcaacaggtaatttttttcactg

SEQ ID NO: 31613 - DNA, 120 bp, Artificial Sequence
  ENSG00000048342_42 (sequence is synthesized)
tactttctgtatcatgtaaaaactacacttaggatatgagaaaattttaaattatatgcatcacatcagaagaacatattattggcaaataataaaattatcaactgttttcaaactgtg

SEQ ID NO: 31614 - DNA, 74 bp, Artificial Sequence
  ENSG00000048342_43 (sequence is synthesized)
acggagagagctggttgttaaaaagagcctgggcaggccaggcacggaatcacctgaggttgggagttcaagac

SEQ ID NO: 31615 - DNA, 120 bp, Artificial Sequence
  ENSG00000048342_44 (sequence is synthesized)
gaggcagaagccaactcctttctcccgagcctgctggcagatcctcccccacctctccgcaggagttcccctcctaggctgggagcatcccgtgcagggtaaatcttttcaagccaccaa

SEQ ID NO: 31616 - DNA, 120 bp, Artificial Sequence
  ENSG00000048342_45 (sequence is synthesized)
gttttactattttattggtcaatagttattaggctttaattagctgcttctgtccactgccacctgagggacaggtgttatgtcctaacgtatgtgtaatgcctgggcattgaattacag

SEQ ID NO: 31617 - DNA, 120 bp, Artificial Sequence
  ENSG00000048342_46 (sequence is synthesized)
atgtctccagttccatgaggaatgtcctgccttatcttttggcccatttcattttaccagaaagactgttagttagctttgaatctaagaagtcatcagtctgaatgtcacctgcatact

SEQ ID NO: 31618 - DNA, 120 bp, Artificial Sequence
  ENSG00000048342_47 (sequence is synthesized)
gggagctagctctactctttgcaaatctataaaacccacgagctgcttcttacagtgtatctctgaaagttatttctggtgggttggggctgtctcagtacagcttttcttttttgttgt

SEQ ID NO: 31619 - DNA, 120 bp, Artificial Sequence
  ENSG00000048342_48 (sequence is synthesized)
tgttttttgtttttgagagagggtcttgctctgtcacctagctggagtgcagtggtgccatcacagcttgctgcagcctcgacctcttcagcccaatttgagtctcaggaagatgagaaa

SEQ ID NO: 31620 - DNA, 72 bp, Artificial Sequence
  ENSG00000048342_49 (sequence is synthesized)
atcggacaaacaaacaaaaaagagcctggaacctcctcccctctctcttgctccctctctcaccatgcgaca

SEQ ID NO: 31621 - DNA, 120 bp, Artificial Sequence
  ENSG00000048342_50 (sequence is synthesized)
ctcctcccctctctcttgctccctctctcaccatgcgacacacctgtttccccttccccttctgacataagtgaaagcttcctaaggcctcaccagaggcagatgctggcaccatgctta

SEQ ID NO: 31622 - DNA, 69 bp, Artificial Sequence
  ENSG00000048342_51 (sequence is synthesized)
cctaaggcctcaccagaggcagatgctggcaccatgcttattgcacagtctgcagaacacctttatagc

SEQ ID NO: 31623 - DNA, 120 bp, Artificial Sequence
  ENSG00000048342_52 (sequence is synthesized)
aattagaatggaaattaaatatgcagaaactcaaaggaagatgaaattgttagggaagacatatgtgttaacctagtgaggcttgaatcagatgtttggaagaaatgagggaggtttctg

SEQ ID NO: 31624 - DNA, 120 bp, Artificial Sequence
  ENSG00000048342_53 (sequence is synthesized)
aggctcctggtgaccttgccattgaggacacatatacttctccccctacacacgccttttcttcttccccagtacaatgaacattaggaattacctgctcattgtagggaaaatgaccac

SEQ ID NO: 31625 - DNA, 120 bp, Artificial Sequence
  ENSG00000048342_54 (sequence is synthesized)
ccttcaggcattgcttttcatgaaaagtggattagacaagaggagaagtggttacactttttaattgttacataattgttagactgttttccctatggcaaagttgggaaataagtaact

SEQ ID NO: 31626 - DNA, 120 bp, Artificial Sequence
  ENSG00000048342_55 (sequence is synthesized)
gttggaaactagaggcctttggaagcaagtagactcttagattggaaaaatgtggttctaatctaaaagcaatgatacaatgagagctgttatgaattaataaaaacagaaccaaaattt

SEQ ID NO: 31627 - DNA, 120 bp, Artificial Sequence
  ENSG00000048342_56 (sequence is synthesized)
gtaggcttttttgaaaaattattttattgggctatatcatacattaagaaaaatgtataaaacatggatacagttttaaaagtaattacaaacaaatatgcatgtaaccacttcccaggt

SEQ ID NO: 31628 - DNA, 120 bp, Artificial Sequence
  ENSG00000048342_57 (sequence is synthesized)
tctgcactggagaggagaactggggcagccttcagatacgtggtcactggacacagcccctgtgaggtccctgcccctgctgtggggtccacgtggactctctattccatctgctctggg

SEQ ID NO: 31629 - DNA, 120 bp, Artificial Sequence
  ENSG00000048342_58 (sequence is synthesized)
gcttctgctgaggctgatggcctggaacacttgaagggctcctcttcctctgtcctcttagcagtgtcagtggggtctgttatcctgcttcctgaatttcagctaatctctccatctcat

SEQ ID NO: 31630 - DNA, 120 bp, Artificial Sequence
  ENSG00000048342_59 (sequence is synthesized)
caccactcactgggatgtacaattatttgagccacttaaactatgtacatcatcacaactggaagaccattcaatttcagatatgtttaaatgataaagtctattatactatataccact

SEQ ID NO: 31631 - DNA, 120 bp, Artificial Sequence
  ENSG00000048342_60 (sequence is synthesized)
aaaaatgtgaaaaaatggccaatgacaactctatgatgccactgattgtaaaatacacacaatttttataatcaaaaaatgacaaaatgtatgcggcctatatgaacacttgctgtctct

SEQ ID NO: 31632 - DNA, 120 bp, Artificial Sequence
  ENSG00000048342_61 (sequence is synthesized)
cacccaatgaccagtgccccagccatggttctcaaagtatagccccagaatcagcagcatcagcatcactgaggacttgttagaaacataaactcaggccaggcatggtggctcatgcct

SEQ ID NO: 31633 - DNA, 120 bp, Artificial Sequence
  ENSG00000048342_62 (sequence is synthesized)
ggccaggagttggagaccagcctggggaacaaaatgagacctcacctctattgaataaataaataaataccccaaacatttttaatacctcacattgaaataaatatgtttaagaaagat

SEQ ID NO: 31634 - DNA, 120 bp, Artificial Sequence
  ENSG00000048342_63 (sequence is synthesized)
cattgaaataaatatgtttaagaaagattaataaaaactagccagataattaaagtcaaccaactaaacagaaatttaaaaaataattttaaaaaagaaagaaatgcaagctcacaagtt

SEQ ID NO: 31635 - DNA, 120 bp, Artificial Sequence
  ENSG00000048342_64 (sequence is synthesized)
ctacctgagacttactgaacctgaaaccctgaggtggggcctagaaaactgttctcacaaggtctccaagtgattctgatgcatgttatggtatatcatcattaattaaagggagtccat

SEQ ID NO: 31636 - DNA, 120 bp, Artificial Sequence
  ENSG00000048342_65 (sequence is synthesized)
taaaatcatcgataccacaaaatcccaggcttagttctccagtaaatagaagatctatcatgaatacagggactgttgtacactggaatcttcaatatcccaacgtgaaaaatgagaatt

SEQ ID NO: 31637 - DNA, 120 bp, Artificial Sequence
  ENSG00000048342_66 (sequence is synthesized)
caaataaagtcagtcagcctccgagttcattaaaacgtgggagttaattaggatgtcattataagacttctcacagtcttggtttcaaacttctgctaatgttctaatgattgatttatt

SEQ ID NO: 31638 - DNA, 120 bp, Artificial Sequence
  ENSG00000048342_67 (sequence is synthesized)
ctaatgattgatttattttaaaattatagctttttgtgcattttcatgtgttccctcaacttcacatattaagatattatacataaactattcccctgcactaagtaagcaattttcaag

SEQ ID NO: 31639 - DNA, 120 bp, Artificial Sequence
  ENSG00000048342_68 (sequence is synthesized)
gcacaagtaccataccctataattttaattttgacatgaatgttcaaaatatgtgatgacacagcatgctttctaaaaggaaaatttgggcttgatttggtaatcttttatgagtggagt

SEQ ID NO: 31640 - DNA, 120 bp, Artificial Sequence
  ENSG00000048342_69 (sequence is synthesized)
ctaagtcttcagtgtcttggatacttcttgcaaatttgctgtgaagtgtcctttattaaaaaaatgctgaagtaatttgagctatttcatctagaataagtctaaattatagacatgtaa

SEQ ID NO: 31641 - DNA, 120 bp, Artificial Sequence
  ENSG00000048342_70 (sequence is synthesized)
aaagttaaaactaccaccccctttaattactagagaatttctgtttggaatgatgaagaagctctgaaggtggatagtggtgatggttagacaacatagtaattgtatgtaatgccactg

SEQ ID NO: 31642 - DNA, 120 bp, Artificial Sequence
  ENSG00000048342_71 (sequence is synthesized)
aatcatacacttaaaaatggttaaagtgataaacattacgttatgttatatatattttccacaatggaacaatttttaataaactaccacccctcccccaaaaaaaacctaagcttgttt

SEQ ID NO: 31643 - DNA, 120 bp, Artificial Sequence
  ENSG00000048342_72 (sequence is synthesized)
caaattttgatgccctaaccttttcctttcctcaattagcttgaattgctattgacttaaccaataactggcattttttggtggatgtctatacacatatgtacaataaaattaaagacc

SEQ ID NO: 31644 - DNA, 120 bp, Artificial Sequence
  ENSG00000048342_73 (sequence is synthesized)
aggatggtaatgaggtgtgggtggagggctaggaggaaaaagctgatgtccctgcaagaaagaaagtggctgaggagaaacctgccaccaccaggagaatgacactccacgtctgagttg

SEQ ID NO: 31645 - DNA, 120 bp, Artificial Sequence
  ENSG00000048342_74 (sequence is synthesized)
aaatcccaagtactgaattcacatggctccctgtagctctgggttagaccctacaatgtggtaggaagaaccttgattaaacctgtttatttttcttttgtggaaaaaagaattaaataa

SEQ ID NO: 31646 - DNA, 120 bp, Artificial Sequence
  ENSG00000048392_0 (sequence is synthesized)
ggccgaagttaggcggagccccgaggcgggggaggcggggccgggccggcgcagggagagtcactcaatggacaggcgagaaagcaggaccggcgcggcggggcggggccggccgagtcc

SEQ ID NO: 31647 - DNA, 120 bp, Artificial Sequence
  ENSG00000048392_1 (sequence is synthesized)
gtccctagagctgggggcggggcggacccagcggaccagcggaccacctgggtgctgtcgtagttggaggtggcctgaggagctcagttccctcagcgcccgtagcttcggcggagtctg

SEQ ID NO: 31648 - DNA, 120 bp, Artificial Sequence
  ENSG00000048392_2 (sequence is synthesized)
cgcgatgggcgacccggaaaggccggaagcggccgggctggatcaggatgagagatcatcttcagacaccaacgaaagtgaaataaagtcaaatgaagagccactcctaagaaagagttc

SEQ ID NO: 31649 - DNA, 120 bp, Artificial Sequence
  ENSG00000048392_3 (sequence is synthesized)
tcgccggtttgtcatctttccaatccagtaccctgatatttggaaaatgtataaacaggcacaggcttccttctggacagcagaagaggtcgacttatcaaaggatctccctcactggaa

SEQ ID NO: 31650 - DNA, 120 bp, Artificial Sequence
  ENSG00000048392_4 (sequence is synthesized)
caagcttaaagcagatgagaagtacttcatctctcacatcttagccttttttgcagccagtgatggaattgtaaatgaaaatttggtggagcgctttagtcaggaggtgcaggttccaga

SEQ ID NO: 31651 - DNA, 120 bp, Artificial Sequence
  ENSG00000048392_5 (sequence is synthesized)
ggctcgctgtttctatggctttcaaattctcatcgagaatgttcactcagagatgtacagtttgctgatagacacttacatcagagatcccaagaaaagggaatttttatttaatgcaat

SEQ ID NO: 31652 - DNA, 120 bp, Artificial Sequence
  ENSG00000048392_6 (sequence is synthesized)
tgaaaccatgccctatgttaagaaaaaagcagattgggccttgcgatggatagcagatagaaaatctacttttggggaaagagtggtggcctttgctgctgtagaaggagttttcttctc

SEQ ID NO: 31653 - DNA, 120 bp, Artificial Sequence
  ENSG00000048392_7 (sequence is synthesized)
aggatcttttgctgctatattctggctaaagaagagaggtcttatgccaggactcactttttccaatgaactcatcagcagagatgaaggacttcactgtgactttgcttgcctgatgtt

SEQ ID NO: 31654 - DNA, 120 bp, Artificial Sequence
  ENSG00000048392_8 (sequence is synthesized)
ccaatacttagtaaataagccttcagaagaaagggtcagggagatcattgttgatgctgtcaaaattgagcaggagtttttaacagaagccttgccagttggcctcattggaatgaattg

SEQ ID NO: 31655 - DNA, 120 bp, Artificial Sequence
  ENSG00000048392_9 (sequence is synthesized)
cattttgatgaaacagtacattgagtttgtagctgacagattacttgtggaacttggattctcaaaggtttttcaggcagaaaatccttttgattttatggaaaacatttctttagaagg

SEQ ID NO: 31656 - DNA, 120 bp, Artificial Sequence
  ENSG00000048392_10 (sequence is synthesized)
aaaaacaaatttctttgagaaacgagtttcagagtatcagcgttttgcagttatggcagaaaccacagataacgtcttcaccttggatgcagatttttaaaaaacctctcgttttaaaac

SEQ ID NO: 31657 - DNA, 120 bp, Artificial Sequence
  ENSG00000048392_11 (sequence is synthesized)
tctataaacttgtcattggtaaatagtagtctattttcctctgcttaaaaaaaattttaagtatatcctttaaaggactgggggtttgctcaaaaggaaatccaaaacctattctaaaca

SEQ ID NO: 31658 - DNA, 120 bp, Artificial Sequence
  ENSG00000048392_12 (sequence is synthesized)
atttgcatttatataattttcctgtttaacaacaagagtgtgacctaaatgcttttgtcttgtcactgaaataaaagatggcattatgtggttaagagcatggggcgaggggtcagacat

SEQ ID NO: 31659 - DNA, 120 bp, Artificial Sequence
  ENSG00000048392_13 (sequence is synthesized)
gagtctaaggttctgcccttactccagtgtgtgacccttggcaagtcagttaatcttggtaaacctcggtgtacttatctttaaaatgggagtaatagtaggtcctaaattcatagagtg

SEQ ID NO: 31660 - DNA, 120 bp, Artificial Sequence
  ENSG00000048392_14 (sequence is synthesized)
gatattaggattaggatgcaaaaataaatgcttaaccaacactactactgttagcaccactactaattatcattcattgataatattaattgcaatgatgttgtaataaaatactctcat

SEQ ID NO: 31661 - DNA, 120 bp, Artificial Sequence
  ENSG00000048392_15 (sequence is synthesized)
ttccttaaaataattgtgattctaggtcctaggatctagaattagatctttgtatttttaatgcttaggggaagaatataagtatctccttaaaaagaacataattctcattcacgcaag

SEQ ID NO: 31662 - DNA, 120 bp, Artificial Sequence
  ENSG00000048392_16 (sequence is synthesized)
aataagttctttgaattccttagtatgtagtgaagaaaatttagttgttagttgctttgggaagcctacttatggagtggaaaccaggaggttatcatggtagttgaccttataagaaaa

SEQ ID NO: 31663 - DNA, 120 bp, Artificial Sequence
  ENSG00000048392_17 (sequence is synthesized)
atgattcttcttcagaaattaaaaacataactattgccagatttagctctggaatgtttagaatcaggctagaatagcattttccaaagaatattctaagagctattagctcctctagat

SEQ ID NO: 31664 - DNA, 120 bp, Artificial Sequence
  ENSG00000048392_18 (sequence is synthesized)
atttttttgggggaaaaaggggattctgtggtcagatgagtttgggaaatgctgaacacttcattcttctttagcaagtacagtcagtacatcaaagactgagcagttcagtggtacata

SEQ ID NO: 31665 - DNA, 120 bp, Artificial Sequence
  ENSG00000048392_19 (sequence is synthesized)
aatttatctcgccctgcatattcccaacatacttaacacagatgttttttacctgttaacatctcacccagctagtgttcctcagaacaaagattggaaaaagctggccgagaaccattt

SEQ ID NO: 31666 - DNA, 120 bp, Artificial Sequence
  ENSG00000048392_20 (sequence is synthesized)
aagggcttatggactgagaaagggagaacatggtagggattattgaatcatttcaaatttataccagcctgaatagtgtaccagcaattgacttaggctgtgtttctttatggttttaaa

SEQ ID NO: 31667 - DNA, 120 bp, Artificial Sequence
  ENSG00000048392_21 (sequence is synthesized)
actcttgagctgttataagagatagttcttttaatgtgactatgcaacatgatagccaatggtgagggaaaaggaggtttctctagaagagtctgatgaaaggccgggaaccaaggtttt

SEQ ID NO: 31668 - DNA, 120 bp, Artificial Sequence
  ENSG00000048392_22 (sequence is synthesized)
tgagaagtctgcccctatttatttttagtaagtatcaagaggtagcctgagcctagttagagttagacctgtctttggatgaagaagtcttaatactgaaatactgaatttttaatacat

SEQ ID NO: 31669 - DNA, 120 bp, Artificial Sequence
  ENSG00000048392_23 (sequence is synthesized)
tattatttggtattctgtataccccttcaagcagttgtttcccattcccaacaaactgtactttatacaattctggatgctaaaacttagagattttctctttgcataaattttggctcc

SEQ ID NO: 31670 - DNA, 120 bp, Artificial Sequence
  ENSG00000048392_24 (sequence is synthesized)
attctttccataacaatctaatcaaaactgggagttctcaagtgaatgcaaaaggagcaggccataactttatttgttagatacactgtcagaaacttgagatcttttggcctatgataa

SEQ ID NO: 31671 - DNA, 120 bp, Artificial Sequence
  ENSG00000048392_25 (sequence is synthesized)
taccattaatttttgcattgcttcagtttgccaagtgtttttacatcatctcatttgatctcaaaacagcttgacagagcaactgttattgaaatattacagatggaaagaatgaggctc

SEQ ID NO: 31672 - DNA, 120 bp, Artificial Sequence
  ENSG00000048392_26 (sequence is synthesized)
agggaagttaaatgacttggccaagatctgctcatcgtcactgtctgtacagtatttttttttagaggttgtaatgtctcagatttagtcctttaccatctatgttgatttgcttttgtc

SEQ ID NO: 31673 - DNA, 120 bp, Artificial Sequence
  ENSG00000048392_27 (sequence is synthesized)
tcctttaccatctatgttgatttgcttttgtctatttcctcattaattgaatatactttaaatatatatattaaagtatcaaaatatagagagacatttgaactgtattcaggtaatatg

SEQ ID NO: 31674 - DNA, 120 bp, Artificial Sequence
  ENSG00000048392_28 (sequence is synthesized)
cttaacatttaaaactgataatatctgtaatgacatcagaatgaaagaaaaaaaattgtacagtgtatattcctttgttttgaatccaaatctttttcataggtaatgacagatgcctta

SEQ ID NO: 31675 - DNA, 120 bp, Artificial Sequence
  ENSG00000048392_29 (sequence is synthesized)
atgtgaagcttatttataatagcaataaacctaactggatttggatgaagaagtcttaatactgacatactggatttttaatgcactggtttgttatttggtattctatctctttttcca

SEQ ID NO: 31676 - DNA, 120 bp, Artificial Sequence
  ENSG00000048392_30 (sequence is synthesized)
ggcctccaggttgcacatttatttattatgttcaatactttggttcttagttcttaaagaatcaagaagttgtgtaatcttttaaaaatattatcttgcagataaagaaaaaaattaaga

SEQ ID NO: 31677 - DNA, 120 bp, Artificial Sequence
  ENSG00000048392_31 (sequence is synthesized)
gtgtgtttacaactgttttctcttttttacagtacatgtatttaaatcattgctataataaagttaagttcattaggaatataaaaacttgcagttctatgatagattgcatttattaaa

SEQ ID NO: 31678 - DNA, 120 bp, Artificial Sequence
  ENSG00000048392_32 (sequence is synthesized)
aatgtttcattgtatcacatagaaatatggccaggaaggacttgagaagacagtttgatccattgcttttagacaggactgggttttgctgtccaattatatacaataatagtttttctt

SEQ ID NO: 31679 - DNA, 120 bp, Artificial Sequence
  ENSG00000048392_33 (sequence is synthesized)
acaactaagctggccccagccttgtcttgatattaatacatgaaatttttataattgtctcattgtctcatttagaaacatccatatttttctgctttttctattgccattttttatttg

SEQ ID NO: 31680 - DNA, 120 bp, Artificial Sequence
  ENSG00000048392_34 (sequence is synthesized)
tgcatgaattgattattgagaaaatgtagcagtttgcatatttaaaaattaatcattttgcattttacatttaaatatgctaacatcactgtcatagaattcccaaatttcatttgtaga

SEQ ID NO: 31681 - DNA, 120 bp, Artificial Sequence
  ENSG00000048392_35 (sequence is synthesized)
tactgaactaagggctaatgtcaggagctgatttttaatgataaagctgcagatgggctaaataaaagccaaattaatcctacaatcaggtattatgtttttaaaccaagttgagtgaat

SEQ ID NO: 31682 - DNA, 120 bp, Artificial Sequence
  ENSG00000048392_36 (sequence is synthesized)
tggtagtggacttgggaaatcttccccagcagaatctggatgaatggcacagaattgaaatctctttgtttcccaccatttccctttaagtgctctgctcctttgtaaaaagttaaagat

SEQ ID NO: 31683 - DNA, 120 bp, Artificial Sequence
  ENSG00000048392_37 (sequence is synthesized)
ttgaaagagaatctcatattcccgaggcattaggaagaaaggatttaatcccttcaatttggggcttaatcttgtttaaaaaaatgtaagtgaagatggaaggctggagagaatgattgc

SEQ ID NO: 31684 - DNA, 120 bp, Artificial Sequence
  ENSG00000048392_38 (sequence is synthesized)
tttttgtacagttaaataaggtcacaatattcttacatactttgttttacaactgtgttttcattttttcaaatgtctggccatttagcaaagttatttactatttactgtgtacataga

SEQ ID NO: 31685 - DNA, 120 bp, Artificial Sequence
  ENSG00000048392_39 (sequence is synthesized)
aagctttattatgtgtggtgtatctaaattttttttgctgaaatacattatggtcaatcaagccaagcctgcatgtacagaatttgtttttttttcaaataaattagttgttttcttatt

SEQ ID NO: 31686 - DNA, 120 bp, Artificial Sequence
  ENSG00000048392_40 (sequence is synthesized)
tttttggcttagtatgttgaaataaactatggtatcttcatcattttgtacatttcctttttgaggaaggtttctttataagtgcaagggctaccctaataaaggaatgtatatacttac

SEQ ID NO: 31687 - DNA, 120 bp, Artificial Sequence
  ENSG00000048392_41 (sequence is synthesized)
agattgcaagttgcaggaccgctgtaggaaatgttattcgccgcggtcaggacaggcctgtccgcccgccctcgccgcagcctggcttcgtcgttgcgagcgccggggaggccgtccccg

SEQ ID NO: 31688 - DNA, 120 bp, Artificial Sequence
  ENSG00000048392_42 (sequence is synthesized)
gggagggcggaggaaggagctgactttgggtttgcgtcccgctcgctgctctgccccggggccagccaaggacgacgcttggaggcctcaggccgggagatcatcttcagacaccaacga

SEQ ID NO: 31689 - DNA, 120 bp, Artificial Sequence
  ENSG00000048392_43 (sequence is synthesized)
gtagttggaggtggcctgaggagctcagttccctcagcgcccgtagcttcggcggagtctgcgcgatgggcgacccggaaaggccggaagcggccgggctggatcaggatgagatggagt

SEQ ID NO: 31690 - DNA, 120 bp, Artificial Sequence
  ENSG00000048405_0 (sequence is synthesized)
agtcagtcgctccctgtcgctgccggagagtctctgcttcccccttcctacgcgctccgcggcggtagctcgggctctccggaggagggggcgacagagtaaaagagaggctgacttaat

SEQ ID NO: 31691 - DNA, 120 bp, Artificial Sequence
  ENSG00000048405_1 (sequence is synthesized)
aaagtttcctgaaacaacaactaccaccgaaaaggcccaaggttgggggagacccccatttttctccgcccctctcctaaagcctgagggaccgttgcaggtggagcggcgctggtggga

SEQ ID NO: 31692 - DNA, 120 bp, Artificial Sequence
  ENSG00000048405_2 (sequence is synthesized)
cccgggttgcggcggcagccgttgccccggcgagggaagcctcaggtcctgcccgctccggttccggctccttcggtggtggcggcggcagctgctgccgggcggttcctcctgtcaact

SEQ ID NO: 31693 - DNA, 120 bp, Artificial Sequence
  ENSG00000048405_3 (sequence is synthesized)
gcctccgcccgcgcgcctcccgcctagccacacagcgcggaggacgccgtgagccgccgccgcagtcgtctcggcccgcggagggacgtggtgagctgtggcgcttccgcgtcagcgccg

SEQ ID NO: 31694 - DNA, 120 bp, Artificial Sequence
  ENSG00000048405_4 (sequence is synthesized)
tgtggcgcttccgcgtcagcgccggcggggactctttgggagcgcgtcgggcccgagtccgggttcccccgcgtggtcagcggaggctgcgccaggtggggcccgcagccgcctcccacg

SEQ ID NO: 31695 - DNA, 120 bp, Artificial Sequence
  ENSG00000048405_5 (sequence is synthesized)
gcctgccttccttccttccgcccgcccgccggcccgccctaagagttgaccacgccgcaatgaagagcttcttacagtgaaagcaaagtaggtcgagtccactgaaaatgcctttaaggg

SEQ ID NO: 31696 - DNA, 120 bp, Artificial Sequence
  ENSG00000048405_6 (sequence is synthesized)
acaaatactgtcagactgaccaccatcatcacggatgctgtgaaccagtttatatcctggaacctggagatcctcctttgttacagcaaccactacagacatccaaatctggtattcaac

SEQ ID NO: 31697 - DNA, 120 bp, Artificial Sequence
  ENSG00000048405_7 (sequence is synthesized)
aaataattgagtgctttcgatcaggaactaaacaacttaagcatattttattaaaagatgtggacactatttttgaatgtaagttatgccgcagtctcttcagaggattaccaaatttaa

SEQ ID NO: 31698 - DNA, 120 bp, Artificial Sequence
  ENSG00000048405_8 (sequence is synthesized)
ttacccataaaaaattctactgcccaccaagtctccagatggatgacaaccttcctgatgtaaatgataaacaaagccaagccataaatgatctcctagaagccatatatccaagtgtgg

SEQ ID NO: 31699 - DNA, 120 bp, Artificial Sequence
  ENSG00000048405_9 (sequence is synthesized)
acaaacgagaatatattattaagctagaacccatagaaactaatcaaaatgcagtatttcaatatatttcgaggactgataatcctattgaagtcacagagtcaagcagtactcctgaac

SEQ ID NO: 31700 - DNA, 120 bp, Artificial Sequence
  ENSG00000048405_10 (sequence is synthesized)
aaaccgaagttcagatacaggaaactagcactgaacagtcaaaaacagtaccggttacagatacagaggtggaaactgtagagccccctcctgttgagattgttacagatgaagttgcac

SEQ ID NO: 31701 - DNA, 120 bp, Artificial Sequence
  ENSG00000048405_11 (sequence is synthesized)
ctacatctgatgaacaacctcaggagtcgcaggctgacttggaaacttctgacaattctgattttggtcaccagttgatatgttgtctttgtagaaaagaattcaattctagacgaggtg

SEQ ID NO: 31702 - DNA, 120 bp, Artificial Sequence
  ENSG00000048405_12 (sequence is synthesized)
ttcgccgtcacattcgaaaagtacacaagaaaaagatggaagaactaaaaaagtacattgaaacacgaaagaatccaaaccaatcctctaaaggacgcagtaagaatgttctagttccat

SEQ ID NO: 31703 - DNA, 120 bp, Artificial Sequence
  ENSG00000048405_13 (sequence is synthesized)
taagtaggagttgtccagtatgttgtaaatcatttgctacaaaagcgaatgtaaggaggcattttgatgaagttcatagaggactaaggagggattcaattactcctgatatagcaacaa

SEQ ID NO: 31704 - DNA, 120 bp, Artificial Sequence
  ENSG00000048405_14 (sequence is synthesized)
agcctgggcaacctttgttcctggattctatttctcctaaaaaatcttttaagactcgaaaacaaaagtcttcttcaaaggctgaatacaatttaactgcatgcaaatgcctcctttgca

SEQ ID NO: 31705 - DNA, 120 bp, Artificial Sequence
  ENSG00000048405_15 (sequence is synthesized)
agaggaaatatagttcacaaataatgcttaaaagacatatgcaaattgtccacaagataactctttctggaacaaactctaaaagagaaaaaggccctaataatactgccaacagttcag

SEQ ID NO: 31706 - DNA, 120 bp, Artificial Sequence
  ENSG00000048405_16 (sequence is synthesized)
aaataaaagttaaagttgaaccagcagattctgtagaatcttcacccccttccattacccattctccacagaatgaattaaagggaacaaatcattcaaatgaaaaaaagaacacaccgg

SEQ ID NO: 31707 - DNA, 120 bp, Artificial Sequence
  ENSG00000048405_17 (sequence is synthesized)
cagcacagaaaaataaagttaaacaagactctgaaagccctaaatcaactagtccgtcggctgcaggtggccagcaaaaaaccagaaaaccaaaactttcagctggctttgactttaagc

SEQ ID NO: 31708 - DNA, 120 bp, Artificial Sequence
  ENSG00000048405_18 (sequence is synthesized)
cttccaaacagaacttgactaaacacatcgagttgcacacagatggaaataacatttatgttaaattctacaagtgtcctctttgcacttatgaaactcgtcggaaacgtgatgtgatac

SEQ ID NO: 31709 - DNA, 120 bp, Artificial Sequence
  ENSG00000048405_19 (sequence is synthesized)
gacatataactgtggttcataaaaagtcatctcgttatcttgggaaaataacagccagtttagagatcagagctataaaaaagcctattgattttgttctaaataaagtggcaaaaagag

SEQ ID NO: 31710 - DNA, 120 bp, Artificial Sequence
  ENSG00000048405_20 (sequence is synthesized)
gcccttcgagggatgaagcaaaacatagtgattcaaaacatgatggcacttctaactctcctagtaaaaagtatgaagtagctgacgtcggtattgaagtaaaagtcacaaaaaactttt

SEQ ID NO: 31711 - DNA, 120 bp, Artificial Sequence
  ENSG00000048405_21 (sequence is synthesized)
ctcttcacagatgcaataaatgtggaaaggcatttgccaaaaagacttaccttgaacatcataagaaaactcataaggcaaatgcttccaattcacctgaaggaaacaaaaccaaaggcc

SEQ ID NO: 31712 - DNA, 120 bp, Artificial Sequence
  ENSG00000048405_22 (sequence is synthesized)
gaagtacaagatctaaggctcttgtctgataacttcaagtgatgtacgaaaaggtttggagttcatttttgtggaaagactttaaattggtgttagaaccactaaacatcttcaaatggt

SEQ ID NO: 31713 - DNA, 120 bp, Artificial Sequence
  ENSG00000048405_23 (sequence is synthesized)
actatgaggaaaaaaagaaaaacatttttctaaatattcaactataactgctgttttctgactaaaataaccatctaaccacttgtttctaaggcactgcctattccagcactttcaagt

SEQ ID NO: 31714 - DNA, 120 bp, Artificial Sequence
  ENSG00000048405_24 (sequence is synthesized)
agctgtgatattacatgttgtcatcacagtccatcagctatccacccttgaccttgtgcatttggtcgacagtttctacaaaaatgttacaaattttgttttctaaacaatttgttgatt

SEQ ID NO: 31715 - DNA, 120 bp, Artificial Sequence
  ENSG00000048405_25 (sequence is synthesized)
aagtgatcaacaacctgaagaaaatatcaatttttaattgacaaagactttatatcttagtgattttagttttgtttctctttatttggcaacattttcatctgaattgtatagatatat

SEQ ID NO: 31716 - DNA, 120 bp, Artificial Sequence
  ENSG00000048405_26 (sequence is synthesized)
gattttctagtgagtgtatgttaggaacaaaagacaaaatagtatcaacacattataaatatttagcttactaaatatttgtaattatttttacatccatttatttctagcttgttctcc

SEQ ID NO: 31717 - DNA, 120 bp, Artificial Sequence
  ENSG00000048405_27 (sequence is synthesized)
agcacttcagtgtttgaaagtttcatcctaaaatatatactacaggaaagctgcagttcattttcatgcatggatcattacatttttcacttgtaaatgtaggtttttatgaaaattaaa

SEQ ID NO: 31718 - DNA, 120 bp, Artificial Sequence
  ENSG00000048405_28 (sequence is synthesized)
cattcccctatttttctttaaattttatacaaagcactttaatgatagatgcaaccttatttttcagttcctatttttttaaagaccacacatttactaatgttaatatgaaggtaataa

SEQ ID NO: 31719 - DNA, 120 bp, Artificial Sequence
  ENSG00000048405_29 (sequence is synthesized)
atagcttactgatattttatggatgcagacaatccatgcacaaccacttcttatgatactagtttatttccttaaatattgctacaaaaggaagatgcgggtgtaagccctgattttttt

SEQ ID NO: 31720 - DNA, 120 bp, Artificial Sequence
  ENSG00000048405_30 (sequence is synthesized)
ttctcccaagaaaaatcttaaaggaccactttagataatatttgattcctactgtaaaatttagaaaatgatgaattcttgtccatttttgtaatcaagattttaggaaaaacagaagta

SEQ ID NO: 31721 - DNA, 120 bp, Artificial Sequence
  ENSG00000048405_31 (sequence is synthesized)
catctatctttatgaaattttgggcaggtttttgtgtatcaatattttgtacttttagggaatattttattttttagttatttgtgtcaaattataattataaaaggtacagcagaaaat

SEQ ID NO: 31722 - DNA, 120 bp, Artificial Sequence
  ENSG00000048405_32 (sequence is synthesized)
ataccatgtttttatataggttcacacctgtacttaggagggaccctgtccatctatatactttttgtataaaattttaaaatgttaaagatccacaaggtcttaataaaatgattctat

SEQ ID NO: 31723 - DNA, 120 bp, Artificial Sequence
  ENSG00000048405_33 (sequence is synthesized)
agctagaaaaacatttaccttcccagtgctttgcactaaaatatactgtgaaaggaaactagaaagactgtaactattgctggaaatgttctatattgaatgtacatgctcttgttggaa

SEQ ID NO: 31724 - DNA, 120 bp, Artificial Sequence
  ENSG00000048405_34 (sequence is synthesized)
aaatgtactatatgtgatggaaataaaccagaatcgaagttatttcagctaaatgtgcttcagcaaaggtgcattggttgaaacttaaatgttttattatcaaatttaaacttattcagt

SEQ ID NO: 31725 - DNA, 120 bp, Artificial Sequence
  ENSG00000048405_35 (sequence is synthesized)
gactatgagcagctacacttgaattatattctgatagttttatttctaagaaatagagtaataatttctctttaatttaaaaacagatttactttcccacatattgaaaatttgtactta

SEQ ID NO: 31726 - DNA, 120 bp, Artificial Sequence
  ENSG00000048405_36 (sequence is synthesized)
tagatctaactttaataactaatagtataatatatttagggaactaaatgtgtaggtggtatttcatttataagccatcttcattagttgcacattattaaacctatatgtttgactttt

SEQ ID NO: 31727 - DNA, 120 bp, Artificial Sequence
  ENSG00000048405_37 (sequence is synthesized)
cggttcctcctgtcaactgcctccgcccgcgcgcctcccgcctagccacacagcgcggaggacgccgtgagccgccgccgcagtcgtctcggcccgcggagggacgtgccacgccgcaat

SEQ ID NO: 31728 - DNA, 120 bp, Artificial Sequence
  ENSG00000048405_38 (sequence is synthesized)
tacaagatctaaggctcttgtctgcctcgcgaagccgtcgtcccgcagcgccgccgccctgcgcccggccgcccccgggagccgctgcctgcccgcgggcgccgtcaccacgcgtcaggc

SEQ ID NO: 31729 - DNA, 80 bp, Artificial Sequence
  ENSG00000048405_39 (sequence is synthesized)
cggctccgtgagcgccgccgcctggccgccggcgggacctcgccctcgctccgcaccgccgtacctcaggcgcctcgccg

SEQ ID NO: 31730 - DNA, 120 bp, Artificial Sequence
  ENSG00000048405_40 (sequence is synthesized)
cggccgtctccacgggccgaccagccgtccgcagacccctgagtcctctgcctcgcctcaaacccctttcaccccttgccctcgccgtccctggtttgagccagaactctcccgcgaagc

SEQ ID NO: 31731 - DNA, 120 bp, Artificial Sequence
  ENSG00000048405_41 (sequence is synthesized)
cctctagaggaccacgtgccttagggacaggctgggggcggcctccgtgcgagtcgtggttgttcgcagagcagcacgtcctctgcctgccaaaatcccggcttctttgagaatcttgtc

SEQ ID NO: 31732 - DNA, 120 bp, Artificial Sequence
  ENSG00000048405_42 (sequence is synthesized)
tatagatttcctattcctagtgagttttgtcatgattagttcttcaaagactagctcctacttgaaccttcacctcaaatcctggcatcgacaaactagtttccccccgcccacctcccc

SEQ ID NO: 31733 - DNA, 120 bp, Artificial Sequence
  ENSG00000048405_43 (sequence is synthesized)
acccccccgccacaaccccaaatattgccatctgccagaagattgttttaataactgtccaaatcctcagtgactgtggggtgcttgacacaacttggagttgtgttatgcacaactgtg

SEQ ID NO: 31734 - DNA, 120 bp, Artificial Sequence
  ENSG00000048405_44 (sequence is synthesized)
gttgaacttgaactccaacatccagtcccctccttcctgtaacttcatctccagtaattatttctccccttcagaatcagtccttgctaccacagttctagaccatgtcatcattagaat

SEQ ID NO: 31735 - DNA, 120 bp, Artificial Sequence
  ENSG00000048405_45 (sequence is synthesized)
ccgcatcctctctacagtcttgtctgtggtgaccatggcctctcagatctcctgctccacggagcggaagtgactgacaggtccccctgccttcccaaggcatacactgctgggtttgca

SEQ ID NO: 31736 - DNA, 120 bp, Artificial Sequence
  ENSG00000048405_46 (sequence is synthesized)
ctgaagccatgcttctctggcactactcccagtcagtgagcgggcacagcacggggtgttggtggtggcacgttcatggaagatgtaggactcctctgatgagcaagtttggcttggaaa

SEQ ID NO: 31737 - DNA, 120 bp, Artificial Sequence
  ENSG00000048405_47 (sequence is synthesized)
cacctgagccggctggttgaaactttctgagaactatgctgcatgcagcctgaggctcttgggcccagttcccctctcctttcacaggtgtcagacctgtattatgatatgaagtctccc

SEQ ID NO: 31738 - DNA, 120 bp, Artificial Sequence
  ENSG00000048462_0 (sequence is synthesized)
attgttctcaacattctagctgctcttgctgcatttgctctggaattcttgtagagatattacttgtccttccaggctgttctttctgtagctcccttgttttctttttgtgatcatgtt

SEQ ID NO: 31739 - DNA, 120 bp, Artificial Sequence
  ENSG00000048462_1 (sequence is synthesized)
gcagatggctgggcagtgctcccaaaatgaatattttgacagtttgttgcatgcttgcataccttgtcaacttcgatgttcttctaatactcctcctctaacatgtcagcgttattgtaa

SEQ ID NO: 31740 - DNA, 120 bp, Artificial Sequence
  ENSG00000048462_2 (sequence is synthesized)
tgcaagtgtgaccaattcagtgaaaggaacgaatgcgattctctggacctgtttgggactgagcttaataatttctttggcagttttcgtgctaatgtttttgctaaggaagataaactc

SEQ ID NO: 31741 - DNA, 120 bp, Artificial Sequence
  ENSG00000048462_3 (sequence is synthesized)
ggctaacattgacctggaaaagagcaggactggtgatgaaattattcttccgagaggcctcgagtacacggtggaagaatgcacctgtgaagactgcatcaagagcaaaccgaaggtcga

SEQ ID NO: 31742 - DNA, 120 bp, Artificial Sequence
  ENSG00000048462_4 (sequence is synthesized)
ctctgaccattgctttccactcccagctatggaggaaggcgcaaccattcttgtcaccacgaaaacgaatgactattgcaagagcctgccagctgctttgagtgctacggagatagagaa

SEQ ID NO: 31743 - DNA, 120 bp, Artificial Sequence
  ENSG00000048462_5 (sequence is synthesized)
atcaatttctgctaggtaattaaccatttcgactcgagcagtgccactttaaaaatcttttgtcagaatagatgatgtgtcagatctctttaggatgactgtatttttcagttgccgata

SEQ ID NO: 31744 - DNA, 120 bp, Artificial Sequence
  ENSG00000048462_6 (sequence is synthesized)
cagctttttgtcctctaactgtggaaactctttatgttagatatatttctctaggttactgttgggagcttaatggtagaaacttccttggtttcatgattaaactcttttttttcctga

SEQ ID NO: 31745 - DNA, 120 bp, Artificial Sequence
  ENSG00000048462_7 (sequence is synthesized)
actgcagcctctgcctcttgggttcaaacaattctcccatctcagcctcctgagtaactgggactataggatcaggtctcctgggcatggctaacattgacctggaaaagagcaggactg

SEQ ID NO: 31746 - DNA, 120 bp, Artificial Sequence
  ENSG00000048471_0 (sequence is synthesized)
gtctggagctcggcagccgcagaagcggcagcggcggcggcgcggcgcaggcaccggcccggggagaggcaccatgagcggatcacagaacaatgacaaaagacaatttctgctggagcg

SEQ ID NO: 31747 - DNA, 120 bp, Artificial Sequence
  ENSG00000048471_1 (sequence is synthesized)
actgctggatgcagtgaaacagtgccagatccgctttggagggagaaaggagattgcctcggattccgacagcagggtcacctgtctgtgtgcccagtttgaagccgtcctgcagcatgg

SEQ ID NO: 31748 - DNA, 120 bp, Artificial Sequence
  ENSG00000048471_2 (sequence is synthesized)
cttgaagaggagtcgaggattggcactcacagcggcagcgatcaagcaggcagcgggctttgccagcaaaaccgaaacagagcccgtgttctggtactacgtgaaggaggtcctcaacaa

SEQ ID NO: 31749 - DNA, 120 bp, Artificial Sequence
  ENSG00000048471_3 (sequence is synthesized)
gcacgagctgcagcgcttctactccctgcgccacatcgcctcagacgtgggccggggtcgcgcctggctgcgctgtgccctcaacgaacactccctggagcgctacctgcacatgctcct

SEQ ID NO: 31750 - DNA, 120 bp, Artificial Sequence
  ENSG00000048471_4 (sequence is synthesized)
ggccgaccgctgcaggctgagcactttttatgaagactggtcttttgtgatggatgaagaaaggtccagtatgcttcctaccatggcagcaggtctgaactccatactctttgcgattaa

SEQ ID NO: 31751 - DNA, 120 bp, Artificial Sequence
  ENSG00000048471_5 (sequence is synthesized)
catcgacaacaaggatttgaacgggcagagtaagtttgctcccaccgtttcagacctcttaaaggagtcaacgcagaacgtgacctccttgctgaaggagtccacgcaaggagtgagcag

SEQ ID NO: 31752 - DNA, 120 bp, Artificial Sequence
  ENSG00000048471_6 (sequence is synthesized)
cctgttcagggagatcacagcctcctctgccgtctccatcctcatcaaacctgaacaggagaccgaccccttgcctgtcgtgtccaggaatgtcagtgctgatgccaaatgcaaaaagga

SEQ ID NO: 31753 - DNA, 120 bp, Artificial Sequence
  ENSG00000048471_7 (sequence is synthesized)
gcggaagaagaaaaagaaagtgaccaacataatctcatttgatgatgaggaagatgagcagaactctggggacgtgtttaaaaagacacctggggcaggggagagctcagaggacaactc

SEQ ID NO: 31754 - DNA, 120 bp, Artificial Sequence
  ENSG00000048471_8 (sequence is synthesized)
cgaccgctcctctgtcaatatcatgtccgcctttgaaagccccttcgggcctaactccaatggaagtcagagcagcaactcatggaaaattgattccctgtctttgaacggggagtttgg

SEQ ID NO: 31755 - DNA, 120 bp, Artificial Sequence
  ENSG00000048471_9 (sequence is synthesized)
gtaccagaagcttgatgtgaaaagcatcgatgatgaagatgtggatgaaaacgaagatgacgtgtatggaaactcatcaggaaggaagcacaggggccactcggagtcgcccgagaagcc

SEQ ID NO: 31756 - DNA, 120 bp, Artificial Sequence
  ENSG00000048471_10 (sequence is synthesized)
actggaagggaacacctgcctctcccagatgcacagctgggctccgctgaaggtgctgcacaatgactccgacatcctcttccctgtcagtggcgtgggctcctacagcccagcagatgc

SEQ ID NO: 31757 - DNA, 120 bp, Artificial Sequence
  ENSG00000048471_11 (sequence is synthesized)
ccccctcggaagcctggagaacgggacaggaccagaggaccacgttctcccagatcctggacttcggtacagtgtggaagccagctctccaggccacggaagtcctctgagcagcctgtt

SEQ ID NO: 31758 - DNA, 120 bp, Artificial Sequence
  ENSG00000048471_12 (sequence is synthesized)
accttctgcctcagtgccagagtccatgacaattagtgaactgcgccaggccactgtggccatgatgaacaggaaggatgagctggaggaggagaacagatcactgcgaaacctgctcga

SEQ ID NO: 31759 - DNA, 120 bp, Artificial Sequence
  ENSG00000048471_13 (sequence is synthesized)
cggtgagatggagcactcagccgcgctccggcaagaggtggacaccttgaaaaggaaggtggctgaacaggaggagcggcagggcatgaaggtccaggcgctggccagagagaacgaggt

SEQ ID NO: 31760 - DNA, 120 bp, Artificial Sequence
  ENSG00000048471_14 (sequence is synthesized)
gctcaaagtccaactgaagaaatatgtaggagctgtccagatgctgaaaagagaaggtcaaacagctgaagtgccaaatctttggagtgttgatggagaagttacagtagctgaacagaa

SEQ ID NO: 31761 - DNA, 120 bp, Artificial Sequence
  ENSG00000048471_15 (sequence is synthesized)
gccgggagaaattgctgaagaactcgcaagctcctacgaaagaaagctcatcgaggtggcagagatgcatggcgagctgattgagttcaacgagcgcctgcacagggccctggtagccaa

SEQ ID NO: 31762 - DNA, 120 bp, Artificial Sequence
  ENSG00000048471_16 (sequence is synthesized)
ggaagccctcgtgtcccagatgaggcaggagctcatcgatctccggggaccggtgcctggagatttgagtcaaacgtccgaagaccagagtttgtcggattttgaaatatcaaaccgggc

SEQ ID NO: 31763 - DNA, 120 bp, Artificial Sequence
  ENSG00000048471_17 (sequence is synthesized)
gctgatcaacgtctggatcccctcagtgtttctccggggcaaagcagcaaatgcattccacgtgtatcaggtctacatccggataaaagacgatgaatggaatatttatcgccggtatac

SEQ ID NO: 31764 - DNA, 120 bp, Artificial Sequence
  ENSG00000048471_18 (sequence is synthesized)
agagttcaggagtttgcaccacaagttacaaaacaagtaccctcaagtgagggcctacaacttcccacccaaaaaggccattggaaacaaggatgccaagtttgtggaggaacggagaaa

SEQ ID NO: 31765 - DNA, 120 bp, Artificial Sequence
  ENSG00000048471_19 (sequence is synthesized)
gcagctccagaattacctgcgcagcgtcatgaacaaagtcatccagatggtccccgagttcgctgccagccccaagaaggagaccctcatccagctgatgcccttcttcgtcgacatcac

SEQ ID NO: 31766 - DNA, 120 bp, Artificial Sequence
  ENSG00000048471_20 (sequence is synthesized)
cccgcccggagagcctgtgaacagccggcccaaagcagcttcccgcttccccaaactgtcccggggtcagccccgggagacccgcaacgtggagccccagagcggtgacctctgacctcg

SEQ ID NO: 31767 - DNA, 120 bp, Artificial Sequence
  ENSG00000048471_21 (sequence is synthesized)
acaaaaccgcagccacgggccctgtgcgtggcaccagctgcgtccaccccagccactgccgctggcccctcacctcagcgtgacaaccacgtccacctggtgatcctgagagcacacgat

SEQ ID NO: 31768 - DNA, 120 bp, Artificial Sequence
  ENSG00000048471_22 (sequence is synthesized)
tcccaacagttacacaacaccccgattaaactaatcagtcttcgagccgcatgataccgtgacccgagagaccaaggcagcacctcgctggagagactgggacacacagtccttctgctt

SEQ ID NO: 31769 - DNA, 120 bp, Artificial Sequence
  ENSG00000048471_23 (sequence is synthesized)
ctggggtctaccctgggctgcaagggctgttcctccacctttctgtagttcagggctggcaggagggtgggcaccaggtcaggctgggtgcgccatggttgagaggcaaaggtgatcccc

SEQ ID NO: 31770 - DNA, 120 bp, Artificial Sequence
  ENSG00000048471_24 (sequence is synthesized)
tatataggaaggttcatgcagagccagcctctccactctttcccacgtggggactagaatgactattagcctctccttttgctttttaaggttattacctggcctaacctagggatggct

SEQ ID NO: 31771 - DNA, 120 bp, Artificial Sequence
  ENSG00000048471_25 (sequence is synthesized)
ggctttgcgggggggggggggggggggggcatggttcctttcactgcattttccaccaacagtcattagacacctggcactgtcacagctcacttttccagagggatattcctgtggctt

SEQ ID NO: 31772 - DNA, 120 bp, Artificial Sequence
  ENSG00000048471_26 (sequence is synthesized)
tggcaaggagccattagtgatgtgcaacttgagttcagagaacttcccctacctcccccatggctggcttcaggaaggaccagtgccctccatagcctgaggccacctaggccctcgcca

SEQ ID NO: 31773 - DNA, 120 bp, Artificial Sequence
  ENSG00000048471_27 (sequence is synthesized)
ggcttggagtggggggactcagacatctggcccagccatcagcagcaacctagtaacccggcgtcatccagcgtgtccaaagtagcattggccctacagtcatgagagacttgggtcagg

SEQ ID NO: 31774 - DNA, 120 bp, Artificial Sequence
  ENSG00000048471_28 (sequence is synthesized)
gaaccactgcagaaggttccagggttttcaaaccaggctccatgactatgaagttggacccagtgtggacacttaacagatcatgtgtctctccactaaaaacattttccatcccgtctg

SEQ ID NO: 31775 - DNA, 120 bp, Artificial Sequence
  ENSG00000048471_29 (sequence is synthesized)
cccccgacattgtccttgataacagaactctgcatcccctaagacagagtcctctgttcctcccatgtcaggtggctctcagagtacagggaccttggcaggtggagaggaggatgggga

SEQ ID NO: 31776 - DNA, 120 bp, Artificial Sequence
  ENSG00000048471_30 (sequence is synthesized)
ccagcagctgggcagcccccagggctcctcctccagtgagctcacatcagagcacctcacagagcaatagccgtcctcagatgctcagcaaagttgtggcagtttgcatttctagggtaa

SEQ ID NO: 31777 - DNA, 120 bp, Artificial Sequence
  ENSG00000048471_31 (sequence is synthesized)
actaactaggaaggatgtcgtgaaatggactatgcaagagtaagtttgtgtgtttcgccttaatctgaggcagagacacagcagaacctgaggagaaaagcaggtggaaggtgacggtta

SEQ ID NO: 31778 - DNA, 120 bp, Artificial Sequence
  ENSG00000048471_32 (sequence is synthesized)
gatggtaagccatgggcttgtcctggaactgcttcaactcagtggcttaaaatgagaactgcccaggtgagcatggagcatctcctaggctcgaggacatctctggagaatcatctggaa

SEQ ID NO: 31779 - DNA, 120 bp, Artificial Sequence
  ENSG00000048471_33 (sequence is synthesized)
ggtttatactgtgccttcccctcgtagcaaaaaggaagattgttcatggcctttaaggaaggctgagatcactcacacacagcgcccccccaccccagagaaaccgagtcagcctacatg

SEQ ID NO: 31780 - DNA, 120 bp, Artificial Sequence
  ENSG00000048471_34 (sequence is synthesized)
cctggggccagataagccctgccccggtgagaccaaatgagctggagcatgtatggaggtgcggaccctgcagtcagtttgcgagtgtggaggacccgagacatcctgtaaaggcaactt

SEQ ID NO: 31781 - DNA, 120 bp, Artificial Sequence
  ENSG00000048471_35 (sequence is synthesized)
ggtctccctcccactcacctgccaacattgctgcaatacacatggtttatctgaaattccaaggccagagtgcacatcagctcacatgactggcaactctaaatagagagccctaatgga

SEQ ID NO: 31782 - DNA, 120 bp, Artificial Sequence
  ENSG00000048471_36 (sequence is synthesized)
ctgaggcaggaaacgtctaaaagctcaatctgctgtatgtcatgaccccttaggttgggtttatgccacatcggtcattttgaagtaggtgtttgatgccagctcagagactgtctcagg

SEQ ID NO: 31783 - DNA, 120 bp, Artificial Sequence
  ENSG00000048471_37 (sequence is synthesized)
agtgcctccctggcctgggtagctaccctggaggtcatctccctgttctctgttggataaaggaacctcccccatctgtgacattcccttgggcccaggcttatgacctgcaccttttct

SEQ ID NO: 31784 - DNA, 120 bp, Artificial Sequence
  ENSG00000048471_38 (sequence is synthesized)
gacacctgcccccaaagcacaggatgtgaattggtctctctccagataccccacgaggaagcaccttggacattctgcacatgataataatgcaacagtcccccattgctgagagatact

SEQ ID NO: 31785 - DNA, 120 bp, Artificial Sequence
  ENSG00000048471_39 (sequence is synthesized)
aacccgtgagaaacaagtatgctctcagctggtattgaactggtgggagaaactgcctcctacttttataatactgaattattcacaaaaaacctggtctgctctccaaaatgagagcat

SEQ ID NO: 31786 - DNA, 120 bp, Artificial Sequence
  ENSG00000048471_40 (sequence is synthesized)
gttcctgggagccacatggggaccatccccagctgcctgctcctggtacctcccccatgatcatgcacagaccgtagagtcgagtcatctcgcagatccagaccatctcctctcattctc

SEQ ID NO: 31787 - DNA, 120 bp, Artificial Sequence
  ENSG00000048471_41 (sequence is synthesized)
actctaaaaatgctggtggcccgcacatgacagcaactccccgaagccttccctttggaatcccatagaatgttctgcaatgattgggtccatcttgctgctcagaagaatcccgtcctg

SEQ ID NO: 31788 - DNA, 120 bp, Artificial Sequence
  ENSG00000048471_42 (sequence is synthesized)
ctctctagtgtggtgggatgaacttcaggcaacaaacaactggcagggttcccagttcctggagttatggagcagaaacacccaggcctagcagaattgtggctgaaacctggtgcccaa

SEQ ID NO: 31789 - DNA, 120 bp, Artificial Sequence
  ENSG00000048471_43 (sequence is synthesized)
attccacaccctggaaatgtgtcaactgcctgtcagcctggattcaattctgagggctaagccacgaccttatccatgagtggcgaagacacccctgaggaaaggattgcttgcacctca

SEQ ID NO: 31790 - DNA, 120 bp, Artificial Sequence
  ENSG00000048471_44 (sequence is synthesized)
catctgtcttcttctaagattactcggagattttcaaacaacatctgagaacagaagccccctcccctactcagagaggaacgagggtggcccacctctcaagggccttggattcctggg

SEQ ID NO: 31791 - DNA, 120 bp, Artificial Sequence
  ENSG00000048471_45 (sequence is synthesized)
accaccctttgctgggaggaagaatccacaccgaatccttctgtcttcatggcctgctgtgctgaaacagaacagcaggttccatctttcacatctttttttctcccccagatgaaagac

SEQ ID NO: 31792 - DNA, 120 bp, Artificial Sequence
  ENSG00000048471_46 (sequence is synthesized)
gactcaggaacggtagggctgggcagaggtgtctctccttgagagacaacaaaagcttctaagggagggagcttaaaggctgctagaaacctagcccaaccatccactcctgatctgaga

SEQ ID NO: 31793 - DNA, 120 bp, Artificial Sequence
  ENSG00000048471_47 (sequence is synthesized)
cagaaccttctccgccactcttcctgcaatcagtgtgaaattccagcttctttgattcccacttagcagtatgctccaatcacgttgctggcaaggcattttagagtttggagctgaggt

SEQ ID NO: 31794 - DNA, 120 bp, Artificial Sequence
  ENSG00000048471_48 (sequence is synthesized)
tcaaagccccctgcatttctctactggcaggccctggtgaaggaagacactttcagggaagaggctcttacagtctatggtggtagccatcttcacatccagtcaccagttgcatctagg

SEQ ID NO: 31795 - DNA, 120 bp, Artificial Sequence
  ENSG00000048471_49 (sequence is synthesized)
gagctgctggctataaaagggatcatccagtggagttgtaaacaagggaaccatcttgcaagatctaggaagaggaaggggagggatgtggactgggtctgatcacagcccttggccctg

SEQ ID NO: 31796 - DNA, 120 bp, Artificial Sequence
  ENSG00000048471_50 (sequence is synthesized)
cttcatactttggagcttattaagatcaattttgataaccatgtaatttcttagaaccatggcaggtagtattgtgctttaaaaaccagaggctcctgaaagtcgtttacaccaggtgga

SEQ ID NO: 31797 - DNA, 120 bp, Artificial Sequence
  ENSG00000048471_51 (sequence is synthesized)
ttgataccatggctgtagctgatgcaactaacaagtactggggccagtgatcacaatccaggttggaaacaggagtgaagcccaccagcctgcctggttgatggacagcaggctctgcct

SEQ ID NO: 31798 - DNA, 120 bp, Artificial Sequence
  ENSG00000048471_52 (sequence is synthesized)
tctggaggcggcttatatcccaacagcctgaggcagggctctgtggcccaggccggcagtggctgcctctcttggttctgcatggtacattttgccaaccctgaggaccagttcttgggg

SEQ ID NO: 31799 - DNA, 120 bp, Artificial Sequence
  ENSG00000048471_53 (sequence is synthesized)
ttccaggcctcggccttcctgctccacgtgctcaagcccccacagggggctgcgacaccatctggctcctcacagggaggtccagccatgttctctgggctcccagtgagccccctcccc

SEQ ID NO: 31800 - DNA, 120 bp, Artificial Sequence
  ENSG00000048471_54 (sequence is synthesized)
tccggctacccccagaatccatccttcattcctccaccaagctcctgtgtgagctgcagcacccacacgggggaagccctgcactccagcagcatcttccagccttggcacagaactgat

SEQ ID NO: 31801 - DNA, 120 bp, Artificial Sequence
  ENSG00000048471_55 (sequence is synthesized)
ggcaaaggaagggctgggttttcagcttctgggacccgaggaagaccccacctcactcctccttccccagtacatcagactggttaggaggcatcccagaaggggcagcctcatgcccag

SEQ ID NO: 31802 - DNA, 120 bp, Artificial Sequence
  ENSG00000048471_56 (sequence is synthesized)
gtttcagccctaaaggtaatgattgtcttgactctgccttggcatttcgctcggaatcacggcagacttggagtgtttcttcaaggcaggcatctgcttatgagcaaggtcaaagatttt

SEQ ID NO: 31803 - DNA, 120 bp, Artificial Sequence
  ENSG00000048471_57 (sequence is synthesized)
tcaaaatattgtgcattaattcattaaagctactgttaaatatttgctgtttttagattggcgtccgtgctaattctgcagttgtagcactgtatattttatctcatttctgtgccaaga

SEQ ID NO: 31804 - DNA, 120 bp, Artificial Sequence
  ENSG00000048471_58 (sequence is synthesized)
aagttcatctttatgtttttctaatacacaatcttgatcttgtttccaaaataaagcttcagctccttggtcaatagaagtaagggtgtagccatccagggtctcccggctctaggcaga

SEQ ID NO: 31805 - DNA, 120 bp, Artificial Sequence
  ENSG00000048471_59 (sequence is synthesized)
ccggatcccgcagttcatcccatggttgttgaaatgtacctcgatcagtcatctctggtattcctcactctagccatgagccattgccatcttatgggcccgatttgggtactctgaatt

SEQ ID NO: 31806 - DNA, 120 bp, Artificial Sequence
  ENSG00000048471_60 (sequence is synthesized)
atgtcatggagtagacagttacttctaaatcccagcaaccaagttgcgtatccttccttatagctagtttctatagagaagtgaaaaagaaatctggcttccttaataagatagttgagc

SEQ ID NO: 31807 - DNA, 120 bp, Artificial Sequence
  ENSG00000048471_61 (sequence is synthesized)
ctatgacattaaggagcagcgctgctggcggaagattctagattcactggtggtttaagaggcccagggatttagttcttactggtgcgtaagtgttttcccatcctaaccggaaaacca

SEQ ID NO: 31808 - DNA, 120 bp, Artificial Sequence
  ENSG00000048471_62 (sequence is synthesized)
ctcacccaggcttcccccacttcccctcaaattttctcagctctgccgctggtctccatgaacggcaaggggaaccaccactcattcactgtcagtgtaggtaagacagaggatgccctt

SEQ ID NO: 31809 - DNA, 120 bp, Artificial Sequence
  ENSG00000048471_63 (sequence is synthesized)
gcaaaaattgggactgaggacagtagcacacggaatggtggatcgtacatttgcacccagagctactaaacgctcagtgaccccagagaccattaatttcccggagtgaaggggatgggg

SEQ ID NO: 31810 - DNA, 120 bp, Artificial Sequence
  ENSG00000048471_64 (sequence is synthesized)
gtagagctaattggaatttttattatccaggactcatcctaagaagaatgttggcctctcttcatccctggcttagccgtcaggtagaacgcttactcacctgacaccgacttcttagag

SEQ ID NO: 31811 - DNA, 120 bp, Artificial Sequence
  ENSG00000048471_65 (sequence is synthesized)
aagcgagtcttttttgaatggaggagcgatggtaaccccactagggggcgcccatgatcggctcccagtgcacccccttaagggtaagcaggccacatatctagagtctgatagtctgtg

SEQ ID NO: 31812 - DNA, 120 bp, Artificial Sequence
  ENSG00000048471_66 (sequence is synthesized)
tgtacataaggtctagaagtctgtggaaacgccctgaaacctgtagtattatcttaactaccctcttatgttaaggtttacataataggatttttaaacaaatgtgtttaattttttaag

SEQ ID NO: 31813 - DNA, 120 bp, Artificial Sequence
  ENSG00000048471_67 (sequence is synthesized)
atctcttgtattaaaattttcttttggaataagctgtggaaattttgttacaacctggttgagatcaacctctttacaatgacacaaattgtgacattttataaattagatacttcagtg

SEQ ID NO: 31814 - DNA, 120 bp, Artificial Sequence
  ENSG00000048471_68 (sequence is synthesized)
ggtttcattttacggatgaagagactgaagctcagagggatccaacaacttgctcagggcgtcatagtaagaggcagagctaggatccaaatctaggaattctaggagcttgctttttgg

SEQ ID NO: 31815 - DNA, 120 bp, Artificial Sequence
  ENSG00000048471_69 (sequence is synthesized)
ctttttctttttatttattttttaatagtgggcagggcagtgatcgcgtgggacttggtggggtggtgtatgggcacagaaatccatgtcttaatagtagtcaaaacgtaatggtgttgt

SEQ ID NO: 31816 - DNA, 120 bp, Artificial Sequence
  ENSG00000048471_70 (sequence is synthesized)
ctggcatcttaatttaaatgaagtcatcttttgtgcagaattctcagagccacatggtacagtctcctctgggttcggggacctgtagcacactggtttatttcaccactgtggcgtgcc

SEQ ID NO: 31817 - DNA, 120 bp, Artificial Sequence
  ENSG00000048471_71 (sequence is synthesized)
agagagaaatcaacagttcctgatagtctcatttgagctcctggatccagtctttcctgaagctgtgtttcctctggacttttcatgtatgtgagccaataaattgctttcattccttga

SEQ ID NO: 31818 - DNA, 120 bp, Artificial Sequence
  ENSG00000048471_72 (sequence is synthesized)
gtgtttctccggggcaaagcagcaaatgcattccacgtgtatcagctatttaaaaatgtgaaaatcattcttagtctgtgggccgtatgaaaacagccagcaggccaggcgtccagcctg

SEQ ID NO: 31819 - DNA, 120 bp, Artificial Sequence
  ENSG00000048471_73 (sequence is synthesized)
cctaaatcctgccgggcctagggcctgcgtgggctttctctgtcatgctccttcctatggaagctgctcagtagatcctgctggggacatggcattgcggcactgagacatcagagcagg

SEQ ID NO: 31820 - DNA, 120 bp, Artificial Sequence
  ENSG00000048471_74 (sequence is synthesized)
gtcacctgtgtgctactagaggggcccacgctgttcctccctgactactctaccaacccctggccaaggcagcagagagagtctttgcgcagatactctgataaatcaaactacaatgga

SEQ ID NO: 31821 - DNA, 120 bp, Artificial Sequence
  ENSG00000048471_75 (sequence is synthesized)
tctcactgtttggaaatggccgcgatagttcacgtgaggagttctcatcctcttagcggcatccccatggcccagggtgcacgggggaattagcctctcgcggagtcatcacgcatcgac

SEQ ID NO: 31822 - DNA, 120 bp, Artificial Sequence
  ENSG00000048471_76 (sequence is synthesized)
tgaattccctggtgaaaactgagttagccagttgttcctaagatactcctgatgctgagagtgtgagcaggaggcgctgccccatccgcaagtcagtgtcccccaccccctgcggggtcc

SEQ ID NO: 31823 - DNA, 120 bp, Artificial Sequence
  ENSG00000048471_77 (sequence is synthesized)
acagcccaggcatctccggtccagtgtttcccaaacattcgcgtgccgaattgtaaaaagtgcacgttaatgcgagcctgtcggtgtgacatgaatctcagccatgctggttgccatcag

SEQ ID NO: 31824 - DNA, 120 bp, Artificial Sequence
  ENSG00000048471_78 (sequence is synthesized)
tcagcacggagagagaaaccttttgtgcctaattagcacgcagaacagaacacagggttcgatttatggacttttcaaaacgagaatttcagtgggagactgtggcaaatgacacagtgt

SEQ ID NO: 31825 - DNA, 120 bp, Artificial Sequence
  ENSG00000048471_79 (sequence is synthesized)
tgacactggaattttgactacatgttggtctagaccccagttgaaattaaacagctcttttaataaaagctctttggctttcctcactgttccaaatcccacagcccccttctccttctt

SEQ ID NO: 31826 - DNA, 120 bp, Artificial Sequence
  ENSG00000048471_80 (sequence is synthesized)
cctttttgagcaggatgggattacaggtcggaatgtacggattgtttcattttggggtaatgatggatcagccacagccaagccttacccgtgctgacgaatctccatgtgatcgtgtcc

SEQ ID NO: 31827 - DNA, 120 bp, Artificial Sequence
  ENSG00000048471_81 (sequence is synthesized)
tttctccatgtgctgcccacagaaagcagcgagactgctgtctcagctggaaagctgagcctgagagatttctggttaaaaaaaaataaaaaataaaaatctcctgcctaaggaaataaa

SEQ ID NO: 31828 - DNA, 63 bp, Artificial Sequence
  ENSG00000048471_82 (sequence is synthesized)
cactcacagcggcagcgatcaagcaggcagcgggctttgccagcaaaaccgaaacagatggag

SEQ ID NO: 31829 - DNA, 120 bp, Artificial Sequence
  ENSG00000048471_83 (sequence is synthesized)
tgagtagctgggactatagagcccgtgttctggtactacgtgaaggaggtcctcaacaagcacgagctgcagcgcttctactccctgcgccacatcgcctcagacgtgggccggggtcgc

SEQ ID NO: 31830 - DNA, 90 bp, Artificial Sequence
  ENSG00000048471_84 (sequence is synthesized)
aggtcccttgcacttttaatgagggggttaagttcactgttttctctttctatggtattgggtaaaataggtctgcaagctttatatttg

SEQ ID NO: 31831 - DNA, 120 bp, Artificial Sequence
  ENSG00000048471_85 (sequence is synthesized)
tatggtattgggtaaaataggtctgcaagctttatatttgcccagggtatcattcattcttcaggtgttgatttaggagtgttatttggaaggagtattatttgctcttcccctgagaac

SEQ ID NO: 31832 - DNA, 120 bp, Artificial Sequence
  ENSG00000048471_86 (sequence is synthesized)
tgaaagaggggaaaggagtacatttgagggcacttaatacaaagttaatgtcagaatgtgtgccttgaaattcttgctttatacatacatctgtcattttcatttcacagggttcacagg

SEQ ID NO: 31833 - DNA, 120 bp, Artificial Sequence
  ENSG00000048471_87 (sequence is synthesized)
gtttcacagtctgatgagactgtgcctgttattgttttttatttttactctggattttccttgcatctgacttgccactagcacaggaagctcaggacgaaggcagcgttaggagaatag

SEQ ID NO: 31834 - DNA, 120 bp, Artificial Sequence
  ENSG00000048471_88 (sequence is synthesized)
ttaggagaatagttgtggtatggtgacttctgtgtttatctgcaggggtgtgaatagccgtaacttgcctgcacctgctgccttaacagtggagttggccaggcgcagtggctcacacct

SEQ ID NO: 31835 - DNA, 120 bp, Artificial Sequence
  ENSG00000048540_0 (sequence is synthesized)
atatcctaatagattgagattcaaactgatgcagcacattttttacggggactactcagattgctgttatgaaatacaagtcagatttatgatctttttcatattgaacatgatatgcta

SEQ ID NO: 31836 - DNA, 120 bp, Artificial Sequence
  ENSG00000048540_1 (sequence is synthesized)
tgctaacgctgcatgtgacagtttaatcaaatccatttgttaccaggaagctaaaaggggccgctgggattttaggattacgggcagagttagggaagcatgtggctttgtcattcgcca

SEQ ID NO: 31837 - DNA, 120 bp, Artificial Sequence
  ENSG00000048540_2 (sequence is synthesized)
tcattttgcacactgcgaggggctccgtgtgtgcgccctgtcttgtctggccgtcctcatcccttcccccaccccctgccgccactccgacccgctcccaaagtggcttcacaatagtcg

SEQ ID NO: 31838 - DNA, 120 bp, Artificial Sequence
  ENSG00000048540_3 (sequence is synthesized)
gtcctcggcggtgtaggctgcgcaccaggtccacacttaagcgaaatcaaggagacccccttctacttctacctttgggtttggtgctcaatgcgaagctgctgcaactcagacacgcct

SEQ ID NO: 31839 - DNA, 120 bp, Artificial Sequence
  ENSG00000048540_4 (sequence is synthesized)
aagtcaactcatgcagaaaaaggagaaaagttttggtatacaaatgctctcagtccagccagacaccaagccgaaaggttgtgctggctgcaaccgaaagatcaaggaccggtatcttct

SEQ ID NO: 31840 - DNA, 120 bp, Artificial Sequence
  ENSG00000048540_5 (sequence is synthesized)
aaaggcactggacaaatactggcatgaagactgcctgaagtgtgcctgctgtgactgtcgcttgggagaggtgggctccaccctgtacactaaagctaatcttatcctttgtcgcagaga

SEQ ID NO: 31841 - DNA, 120 bp, Artificial Sequence
  ENSG00000048540_6 (sequence is synthesized)
ctatctgaggctctttggtgtaacgggaaactgcgctgcctgtagtaagctcatccctgcctttgagatggtgatgcgtgccaaggacaatgtttaccacctggactgctttgcatgtca

SEQ ID NO: 31842 - DNA, 120 bp, Artificial Sequence
  ENSG00000048540_7 (sequence is synthesized)
gctttgtaatcagagattttgtgttggagacaaatttttcctaaagaataacatgatcctttgccagacggactacgaggaaggtttaatgaaagaaggttatgcaccccaggttcgctg

SEQ ID NO: 31843 - DNA, 120 bp, Artificial Sequence
  ENSG00000048540_8 (sequence is synthesized)
atctatcaacatcaccccattaagaatacaaagcactacattcttttatcttttttgctccacatgtacataagaattgacacaggaacctactgaatagcgtagatataggaaggcagg

SEQ ID NO: 31844 - DNA, 120 bp, Artificial Sequence
  ENSG00000048540_9 (sequence is synthesized)
atggttatatggaataaaaggcggactgcatctgtatgtagtgaaattgccccagttcagagttgaatgtttattattaaagaaaaaagtaatgtacatatggctggatttttttgcttg

SEQ ID NO: 31845 - DNA, 120 bp, Artificial Sequence
  ENSG00000048540_10 (sequence is synthesized)
ctattcgtttttgtgtcacttggcatgagatgtttattttggactattgtatataatgtattgtaatatttgaagcacaaatgtaatacagttttattgtgttaccatttgtgttccatt

SEQ ID NO: 31846 - DNA, 120 bp, Artificial Sequence
  ENSG00000048540_11 (sequence is synthesized)
tgcttctttgtattgttgcatttagtacaatcagtgtttaaacttactgtatatttatgctttctgtatttaccagctattttaaatgagctgtaactttctagtaaagaattgaaaagc

SEQ ID NO: 31847 - DNA, 120 bp, Artificial Sequence
  ENSG00000048540_12 (sequence is synthesized)
aaatctcactaatgatacacagatagataaagcaagtctatcaacattaaaaatactaaaaaataaagacacacacagagcattttagtgacatccactacttattgccgctatgagtta

SEQ ID NO: 31848 - DNA, 120 bp, Artificial Sequence
  ENSG00000048540_13 (sequence is synthesized)
gagtctatcagtgttcttgttataaccccctattttcagggggttaaaaatcagctttaaaaaaatacataaaaatttcatcttaaagcactttcattttataccaacgtgaaaagtgcc

SEQ ID NO: 31849 - DNA, 120 bp, Artificial Sequence
  ENSG00000048540_14 (sequence is synthesized)
atttttagaataactttaaagcttaacaggtttccttttaatatcctttttttgtgtgctctttacttacacaatggctttgttttgctttttcagccacaccccttatgtgaactagtg

SEQ ID NO: 31850 - DNA, 120 bp, Artificial Sequence
  ENSG00000048540_15 (sequence is synthesized)
cttcttcttgtataaattctgcccagatctctccacaagagctgagggtttcataactttatggcttaataaatgtatgacactgaaaagatttgagtgtgaatctactgaaatcactat

SEQ ID NO: 31851 - DNA, 120 bp, Artificial Sequence
  ENSG00000048540_16 (sequence is synthesized)
aatgcacattgaagctatgatggtatttgagtagtgaggttacttttgatcggagcaacataatgctcatagaatcttctagaagaagagaaacaaagggattgataaaatgctgagaac

SEQ ID NO: 31852 - DNA, 120 bp, Artificial Sequence
  ENSG00000048540_17 (sequence is synthesized)
tagtgattatatatttttctgtatttacctgacatttattttaatgttcaaaaagtaaacactttaagtttgatgtgttttactctctcattgttttaagtaattgccaactcagaatac

SEQ ID NO: 31853 - DNA, 120 bp, Artificial Sequence
  ENSG00000048540_18 (sequence is synthesized)
atcattcttaggctgaaatttgtctttccattttttaaggtgaaatagtactaccttacgtgatagcatacaaagaagaaagctctagaaagagaaattatggagaatgattatttaaat

SEQ ID NO: 31854 - DNA, 120 bp, Artificial Sequence
  ENSG00000048540_19 (sequence is synthesized)
tacaattaaggaaatgagaatatgatcccctcttccgagttgcccacaaacttgcttctttgcttttgctccctgtaatagaactacttttcaacaaatctaattttgcacggcaccgtt

SEQ ID NO: 31855 - DNA, 120 bp, Artificial Sequence
  ENSG00000048540_20 (sequence is synthesized)
aaccatattttcactacagcaaacttagtgctatgggttttctttttctttgtttttttcttgatcacttgtataggaaacaatattttccagtgttatttgcatatatattttgtcctt

SEQ ID NO: 31856 - DNA, 120 bp, Artificial Sequence
  ENSG00000048540_21 (sequence is synthesized)
ccaatatatgcattacagatgaaaattaaatgttatacctgaattcttgggttggggccaaaatattaagctgaaaataatgctggtgtggatttgttttaaaacaaagctttattatga

SEQ ID NO: 31857 - DNA, 120 bp, Artificial Sequence
  ENSG00000048540_22 (sequence is synthesized)
acatgcatgtgaatctggatattgcctcttatttttaagaaaatggttctgtgaaaagtgaatgatatgtatttttccaaatgcttcatggttaggagtcttcaagttccatgttcccca

SEQ ID NO: 31858 - DNA, 120 bp, Artificial Sequence
  ENSG00000048540_23 (sequence is synthesized)
gatttgagatatactaaagaaagaaattcaaaagtagctatttggggcccacaaaaataactattattttagccttagagccttacacttgtttcatgaagagaaaggacttgcataacc

SEQ ID NO: 31859 - DNA, 120 bp, Artificial Sequence
  ENSG00000048540_24 (sequence is synthesized)
aaaataaacaaagcaagacaaattaaaaatatgtgggggagagatcagtgaaaagtggttttcttaatgcagccctgctggtccccattaacaattgcttgaaattcacatggatgtaaa

SEQ ID NO: 31860 - DNA, 120 bp, Artificial Sequence
  ENSG00000048540_25 (sequence is synthesized)
attataattgtcaggatcttattcagatgatcttttaaggtttaactggttttgcttttgtttatctatatgtcaaaatacttgtaaattgggaacaaacttctctcagcttcttgaagt

SEQ ID NO: 31861 - DNA, 120 bp, Artificial Sequence
  ENSG00000048540_26 (sequence is synthesized)
tgttcaactatccttgccactggaagaccaaacaaggttttcactgctttttcttttacataatatgctgagaattatttcttatgctttttactacaaacaaaattactcacctggatt

SEQ ID NO: 31862 - DNA, 120 bp, Artificial Sequence
  ENSG00000048540_27 (sequence is synthesized)
aaagattaaggccttaatctgtttagattatctttaatctccatgaaatcgtgaaataagacaagaatagtgtttcagctgtaggccattttacagctaattgcccataaattgtagcat

SEQ ID NO: 31863 - DNA, 120 bp, Artificial Sequence
  ENSG00000048540_28 (sequence is synthesized)
ttattgacctgaagtactaagctaattgtcttgactactcaaagcccctgaattgttgtcaactttcccctttgtgttgtgtagccctaacgtcatttagcttgttgtctgatgcctcca

SEQ ID NO: 31864 - DNA, 120 bp, Artificial Sequence
  ENSG00000048540_29 (sequence is synthesized)
gtaggacacctccgatggagctttgatttctgagcagcgaaagctcccttcctaagatgcatctcgcataggctgcctatgatgaaggaccgtgcacctccactccaacagagtgctgag

SEQ ID NO: 31865 - DNA, 120 bp, Artificial Sequence
  ENSG00000048540_30 (sequence is synthesized)
tttaaaagttgacctgtgtttgtaatttcactttcatcttgcttaataaatatctgctggattctttcattcacttttttacatttggatttatgtttttaataaaaggggtgttacact

SEQ ID NO: 31866 - DNA, 120 bp, Artificial Sequence
  ENSG00000048540_31 (sequence is synthesized)
ggacttgcggagcagcgacttcagagagttcatgaatggaagtcacagacagaccagcgactgcagccacctccaggcatttcttaaaggggagggttgtgtgctttttccagggtattc

SEQ ID NO: 31867 - DNA, 120 bp, Artificial Sequence
  ENSG00000048540_32 (sequence is synthesized)
tggtagcagtttgattctcttgcttttattttaatttccataattggtagcttcagaaatggctttggaaggcaatttgctttaaatgtagccacctattccaaaatgccctggttattt

SEQ ID NO: 31868 - DNA, 120 bp, Artificial Sequence
  ENSG00000048540_33 (sequence is synthesized)
taggaaccctacccttttcctccggagctctctcgcaggagttcttcttttggactggtccaggaggagaagcgctacaaagcagccactgtgcttactgaacggcctccccctgtatcg

SEQ ID NO: 31869 - DNA, 120 bp, Artificial Sequence
  ENSG00000048540_34 (sequence is synthesized)
ttgcacaccagtgatgactggatgccttttaaagtacttttgtaagtgtattttttgtttgcttgtttcatttccttactgccagcttatattcctgaaagaagttacctgtcagccttc

SEQ ID NO: 31870 - DNA, 120 bp, Artificial Sequence
  ENSG00000048540_35 (sequence is synthesized)
aaagcgttgccctgtgtgtgttactcaaattaatgcttaaggaatagccaacaaaccacaatatttaaagtatttcaatttggcttgcctgcacactcaggcagttggttatggcgctgc

SEQ ID NO: 31871 - DNA, 120 bp, Artificial Sequence
  ENSG00000048540_36 (sequence is synthesized)
ctgcacactcaggcagttggttatggcgctgcctatgttgaaactgccagttaatgtcaaggatgtatttggtcgaaatcagcattcaggttgatttacttattttttcttttttttctt

SEQ ID NO: 31872 - DNA, 120 bp, Artificial Sequence
  ENSG00000048540_37 (sequence is synthesized)
ggggaatgggggttgagcataacacaaagaaattgatcagccatttggcaaaatatcttaactatttttaaaaagttcaacttgaaaaaaatggactgtgtaaaagagtttaattgttgc

SEQ ID NO: 31873 - DNA, 120 bp, Artificial Sequence
  ENSG00000048540_38 (sequence is synthesized)
ctctaagttggacctgaatttagtcttctaaagttattcagctgtcttctctgtttcaggtgtgtcagaggaagtcaggtgcaaatccttggttaatatctattagtgcatttattgtag

SEQ ID NO: 31874 - DNA, 120 bp, Artificial Sequence
  ENSG00000048540_39 (sequence is synthesized)
agttttgaaaactttccccaagtgtagatacatcttcctctcgccccacctcatgacattctaaacgggaatctcaaaaatacaactaagcaattgaaccgcctcagacttgccagtagt

SEQ ID NO: 31875 - DNA, 120 bp, Artificial Sequence
  ENSG00000048540_40 (sequence is synthesized)
tttatggataataacaaagtaaagacctccatcattataggaaaatgacagccactctccaacctgtaaacatctgaatgctttcaggacaaggcaggtgttcttggttatggagctatg

SEQ ID NO: 31876 - DNA, 120 bp, Artificial Sequence
  ENSG00000048540_41 (sequence is synthesized)
aagcctactaaagcttgttttccagcattaagtactcaacacagaatttctgctgaaggaaaattattttgcttttcaggcaactttgtgacttacttcagctgcaaattacttatatta

SEQ ID NO: 31877 - DNA, 120 bp, Artificial Sequence
  ENSG00000048540_42 (sequence is synthesized)
ataaagtaggatctatcaaattagagaaatgatatatggcatcattgggattttcatatttaatacaatttatcatttttctggtctgacattaagcgatttatttggaattttttccct

SEQ ID NO: 31878 - DNA, 120 bp, Artificial Sequence
  ENSG00000048540_43 (sequence is synthesized)
tatgacaaaatttatcaatcaatggtaactcctttagtaccttggtcatttgatgaggtgttttctagggaatttggtcgttcttagtatataattcagctattttcagtcagatccaat

SEQ ID NO: 31879 - DNA, 120 bp, Artificial Sequence
  ENSG00000048540_44 (sequence is synthesized)
attaatggtagttacaagagggtgaaagcggtactgtttatcagattctactccttctcgctcttaggacggcctcatctgacagcctcctgactaattatggccacttgttactacttc

SEQ ID NO: 31880 - DNA, 120 bp, Artificial Sequence
  ENSG00000048540_45 (sequence is synthesized)
tctgtgttccaagtgcgtaaaacacatgcaaggtgccaacaatgagaagtcactctctccagccaggatttccctcattgtgttggcacaacgaatcaaaattaatgtacaatgttcatt

SEQ ID NO: 31881 - DNA, 120 bp, Artificial Sequence
  ENSG00000048540_46 (sequence is synthesized)
tttttagaactctccggtctttgaactttcctctttgaaataaaaatttctcttctgcccattgtgaattagagcctcatttccacataaagcatttgtatttgcttttagtgatttaat

SEQ ID NO: 31882 - DNA, 120 bp, Artificial Sequence
  ENSG00000048540_47 (sequence is synthesized)
actgctttttagttttgctttatctgtactaaccaatagtcatagctttttgactccttttgacttttacatttgtttgtaatttcagtatctcaagtggatttatgttaccatttcaaa

SEQ ID NO: 31883 - DNA, 120 bp, Artificial Sequence
  ENSG00000048540_48 (sequence is synthesized)
taaggagtttatatagcccgggcaatgttaaggtgttttaataaaccaaaggacaaaaattaagtaaacttgaaagaatgtcaactgaaatatctggggtttttgaaaacaaaaataaaa

SEQ ID NO: 31884 - DNA, 120 bp, Artificial Sequence
  ENSG00000048540_49 (sequence is synthesized)
atttgccaaggaaatacctatattgtgagtataacatgcttcttagctgtcaacatagcatcgagcaaagacagtaatcttagatttgttttgttttctttttccttgtggtagtaaaaa

SEQ ID NO: 31885 - DNA, 120 bp, Artificial Sequence
  ENSG00000048540_50 (sequence is synthesized)
tatatttgatagtctcaagtgttttgctaaaacgcatttatcaaaaatagttttcatatcagaagtttttgtatctctataagagtgtatgtggctttttgtagaataactttcagttac

SEQ ID NO: 31886 - DNA, 120 bp, Artificial Sequence
  ENSG00000048540_51 (sequence is synthesized)
ctcctgataggctcaaacttttaatggtggttaacttattaaaagtatataatattctttcaaatataaaccctggtcctgattgccaatatattcatttctcagagtacgatttccgct

SEQ ID NO: 31887 - DNA, 120 bp, Artificial Sequence
  ENSG00000048540_52 (sequence is synthesized)
taaattggtcattaccacattaatggccagttgttatgttaacagcctaacggttgttaacatttcaaactaagttgttaacagcaatcttgtcccttatttaaactgaaagtttgttgt

SEQ ID NO: 31888 - DNA, 120 bp, Artificial Sequence
  ENSG00000048540_53 (sequence is synthesized)
atataatgtgacttatttggcaacttcatcaacacttaaaattgcagaagtgaagtggagaattggtgtgtgtaaaacactgtgttacgtgttatagattatgccgcagatgtggtattt

SEQ ID NO: 31889 - DNA, 120 bp, Artificial Sequence
  ENSG00000048540_54 (sequence is synthesized)
agttttatgtggaaagcatgtgtctcagtgaaattgtgtagatgttcaactgcatatgtctctgattggcaaattaaaatagtctgattctgtatggtaaatcaacaaatatagtcaagc

SEQ ID NO: 31890 - DNA, 120 bp, Artificial Sequence
  ENSG00000048540_55 (sequence is synthesized)
agattttatttacaaattaatttctttgattagatacaaatagttgttcaaaaatgtttattaaatgcttactgtgtgagaggtatgatttcaggcaatgggtgaaattagctaaaggaa

SEQ ID NO: 31891 - DNA, 120 bp, Artificial Sequence
  ENSG00000048540_56 (sequence is synthesized)
aaaggaaggtacacctaaagttgccactatctaattgtttatttaattacatagaatctgtaatataatcagtgaacaagtaatattctgtggttattttcctgagctttaaaagtaatt

SEQ ID NO: 31892 - DNA, 120 bp, Artificial Sequence
  ENSG00000048540_57 (sequence is synthesized)
tttctcattttcctccaaattcagcatacttccattttgtattttatataaccaatgtttaatcacttaagttctattttaaaagttgttttatttttggccctttgatattatgtaatt

SEQ ID NO: 31893 - DNA, 120 bp, Artificial Sequence
  ENSG00000048540_58 (sequence is synthesized)
tctctgaggcaccaaactgaacataaataacttacatatttatatttcatgtctaaattattaagaacataagtaagaataaggaaagtaataaaatagtaatttgcctgtccacatata

SEQ ID NO: 31894 - DNA, 120 bp, Artificial Sequence
  ENSG00000048540_59 (sequence is synthesized)
agcagagaggtggggtagaacagtggggagctgtgcggatgggtgaagtgcatgtatgcctgcctagacgggccagaaaagccaaacttaagaaatctgcctatgtacagaacaagtcaa

SEQ ID NO: 31895 - DNA, 120 bp, Artificial Sequence
  ENSG00000048540_60 (sequence is synthesized)
aatgcatgcacatttggtgttttgtatccttctacatgcaagtttaaaactttatgcctaggagagcaaacataatgcagcagaagggtctctggactgtaagaaggccatttggctgga

SEQ ID NO: 31896 - DNA, 120 bp, Artificial Sequence
  ENSG00000048540_61 (sequence is synthesized)
ctctccttctctctctctctctcctccttgcttggcagtattacttgcttataagtgtgggggaaatggtaaaattgagaggaaaaggaagattggggaaaaaggaagaggatgggatgc

SEQ ID NO: 31897 - DNA, 120 bp, Artificial Sequence
  ENSG00000048540_62 (sequence is synthesized)
acttagagatctgggtgtttgtcccttaagaaaaaggtgacaaagtggttaatgtctttgcaggagaagcgctacaaagcagccactgtgcttactgaacggcctccccctgtatcgctt

SEQ ID NO: 31898 - DNA, 120 bp, Artificial Sequence
  ENSG00000048540_63 (sequence is synthesized)
gtgaccttttctttggctgtattatgtctggctgggaagggattgcattttgcagctgagagccggagcttccttcagctcggctcctcgcacgctgctggggagaagcgctacaaagca

SEQ ID NO: 31899 - DNA, 120 bp, Artificial Sequence
  ENSG00000048540_64 (sequence is synthesized)
gagaaaacacagctctgtcaatggactgaatgcaccattaaaactggcgtcactacaaaggttagagcagatctaactgtcaatacagtatacaaatgctctcagtccagccagacacca

SEQ ID NO: 31900 - DNA, 120 bp, Artificial Sequence
  ENSG00000048540_65 (sequence is synthesized)
aactttcactcgggctgcagctctactgagacggttttgtttaaatcatgtgaggcttcattatttttatgatgagacatgaaatagatgcaggcggaagatgttgatggaaggagggag

SEQ ID NO: 31901 - DNA, 120 bp, Artificial Sequence
  ENSG00000048540_66 (sequence is synthesized)
agcggctgcggcgcggaacgtctcaagtacgactcgagtggataatagtcaaagttcaccatgaactgcagtatttccacacccctgactcccggggagagaggggcagggagagtttgg

SEQ ID NO: 31902 - DNA, 120 bp, Artificial Sequence
  ENSG00000048540_67 (sequence is synthesized)
tctgggacgccacagaaatcgtaactgaacacccgcacacaaaagtaatctgtgaggtgtgttttaaagaaagaaacagctgaaaacttgaagacgtgtttagaaatatacatatataca

SEQ ID NO: 31903 - DNA, 120 bp, Artificial Sequence
  ENSG00000048540_68 (sequence is synthesized)
aatggtgcagaaactatggttctttgaccaagttagtcctgaaaacatgtttctcagtgctgttggctgtttttcattggagcgtgagaagcgctacaaagcagccactgtgcttactga

SEQ ID NO: 31904 - DNA, 120 bp, Artificial Sequence
  ENSG00000048540_69 (sequence is synthesized)
tttcatttgtgttgctgaatttcgaagagtgatggtgggagtgtgtgtggtgggggcagtatcaacctcatccttcccttgaccgagacctttcactgctcctggactttcagggtgtgc

SEQ ID NO: 31905 - DNA, 120 bp, Artificial Sequence
  ENSG00000048540_70 (sequence is synthesized)
tctcttgggcctcggtaacataatttgtaaaatgagggaatttggaattgatgatgtctgcagtactttatagtgcttaaaatgagttatttgataaatatgaggcattggatagttggt

SEQ ID NO: 31906 - DNA, 120 bp, Artificial Sequence
  ENSG00000048540_71 (sequence is synthesized)
atcatagatgcactttgctggcgctctgcactcctggccgctcaaaagcctttctgcttttccgctgcttttgtgtctttctgaaagaaccgaaatattattgttgtaactgctttgaaa

SEQ ID NO: 31907 - DNA, 120 bp, Artificial Sequence
  ENSG00000048540_72 (sequence is synthesized)
gactgctgcttaaaccaattaatcttgctagatgcaacaaatactgctacattctttgcaaaccatccctgtgtggctgcaaagacacaaccacaaaaggctggagcataaactccgcaa

SEQ ID NO: 31908 - DNA, 120 bp, Artificial Sequence
  ENSG00000048540_73 (sequence is synthesized)
gaggaagggaggaagggaggaaggagagtgtgtgtgtgatcccctgaaccaggcttgtgtggcggacttgcggagcagcgacttcagagagttcatgaatggaagtcacagacagaccag

SEQ ID NO: 31909 - DNA, 120 bp, Artificial Sequence
  ENSG00000048540_74 (sequence is synthesized)
cctgaagtgtgcctgctgtgactgtcgcttgggagagtttaattggcttataaaaattggtttgtgtatatgattacttctgctgacacatggcacttcctcttgttaagcatttgaaga

SEQ ID NO: 31910 - DNA, 120 bp, Artificial Sequence
  ENSG00000048540_75 (sequence is synthesized)
gttttgttgccttttaaagggagaggaaagcaaaccacaggctattttattatgagccttcaaaagggagggggtaaaaactagttatcaatgttgtgcctttattctttatgaagaaaa

SEQ ID NO: 31911 - DNA, 120 bp, Artificial Sequence
  ENSG00000048540_76 (sequence is synthesized)
acaaaatttagcttaaatactcatggggggggtgctttgattttttttttaaaactagagctagattaaaactgatggtgaagagaagaaaaaaagttttttgtagttcaacaattgaat

SEQ ID NO: 31912 - DNA, 120 bp, Artificial Sequence
  ENSG00000048540_77 (sequence is synthesized)
agtcctgaaaacatgtttctcagtgctgttggctgtttttcattggagcgtgtgagttttaaatagagaagcgctacaaagcagccactgtgcttactgaacggcctccccctgtatcgc

SEQ ID NO: 31913 - DNA, 120 bp, Artificial Sequence
  ENSG00000048544_0 (sequence is synthesized)
gggaccggcaagatggcggcgcggacagcgttcggtgctgtgtgccggcgcctctggcagggattggggaatttttctgtaaacacttctaagggcaatacagccaaaaatggtggcttg

SEQ ID NO: 31914 - DNA, 120 bp, Artificial Sequence
  ENSG00000048544_1 (sequence is synthesized)
cttctcagtaccaatatgaagtgggtacagttttcaaacctacacgttgatgttccaaaggatttgaccaaacctgtggtaacaatctctgatgaaccagacatattatataagcgcctc

SEQ ID NO: 31915 - DNA, 120 bp, Artificial Sequence
  ENSG00000048544_2 (sequence is synthesized)
tcggttttggtgaaaggtcacgataaggctgtattggacagttatgaatattttgctgtgcttgctgctaaagaacttggtatctctattaaagtacatgaacctccaaggaaaatagag

SEQ ID NO: 31916 - DNA, 120 bp, Artificial Sequence
  ENSG00000048544_3 (sequence is synthesized)
cgatttactcttctccaatcagtgcatatttacaagaagcacagagttcagtatgaaatgagaacactttacagatgtttagagttagaacatctaactggaagcacagcagatgtctac

SEQ ID NO: 31917 - DNA, 120 bp, Artificial Sequence
  ENSG00000048544_4 (sequence is synthesized)
ttggaatatattcagcgaaacttacctgaaggggttgccatggaagtaacaaagacacaattagaacagttaccagaacacatcaaggagccaatctgggaaacactatcagaagaaaaa

SEQ ID NO: 31918 - DNA, 120 bp, Artificial Sequence
  ENSG00000048544_5 (sequence is synthesized)
gaagaaagcaagtcataaagcctcagggaggccatttttgcctaaatttgaaatgagggtgggccagatgagtatgtttaagtggagagtgcttccagctgagatgatttgagtctgccc

SEQ ID NO: 31919 - DNA, 120 bp, Artificial Sequence
  ENSG00000048544_6 (sequence is synthesized)
taactgctccattgagttctcgtgccctcatcagctgagggcagggaatggaactttaatggaagaaccacttttatctattctttttattcattgtttcagttctgatttcagcaaaca

SEQ ID NO: 31920 - DNA, 120 bp, Artificial Sequence
  ENSG00000048544_7 (sequence is synthesized)
tgagcaaaccactttgactgaaagcagaaagagtgaaaattctattttgttacgctactggtgttcaattattagtttgtaccatttttaatttatgtcagttgatgcatctgaaaataa

SEQ ID NO: 31921 - DNA, 120 bp, Artificial Sequence
  ENSG00000048544_8 (sequence is synthesized)
attcagattgagcagttaaagtttttgctatttacctttgtgcaggctggcatatgctaatttgggggtggtaaccaaccgattttatctcatgtaagcattacattttgaagactgaat

SEQ ID NO: 31922 - DNA, 120 bp, Artificial Sequence
  ENSG00000048544_9 (sequence is synthesized)
atacttcacagcagatcaaacacatttatggcatgcactgacctcttcttggagcccagaactttatagagttgcctaccagggttactgtaatggaatttatgatcttaagaaattact

SEQ ID NO: 31923 - DNA, 120 bp, Artificial Sequence
  ENSG00000048544_10 (sequence is synthesized)
agttgtattatttatcctatgattcattcattcaataagcttttactgcataaactttacatccagcactgtagttaagtacccaaaattgaatagaaataatggcttttgaaaatcgca

SEQ ID NO: 31924 - DNA, 120 bp, Artificial Sequence
  ENSG00000048544_11 (sequence is synthesized)
agcgagacgccgtctcaaaaaaaaaaaaagaaaattgtgcaaagcataggtaaatatttttctttattaagcttctcactgagaagccctctttattttggtaaatgtcactctgtttgt

SEQ ID NO: 31925 - DNA, 120 bp, Artificial Sequence
  ENSG00000048544_12 (sequence is synthesized)
ctctttattttggtaaatgtcactctgtttgttaggagatgtctgcttttccatgaaatgaaatagtggctaaagccctgaaagaggcaagactacaatgggctgaaacagttggtatag

SEQ ID NO: 31926 - DNA, 120 bp, Artificial Sequence
  ENSG00000048544_13 (sequence is synthesized)
caaccccagagaagtgcttcattttctttttatagtagaagcaggtccatgtcttttgtggtttcctgcacatctttggagtagttatgacttctcagtttttccccccttaaactgcat

SEQ ID NO: 31927 - DNA, 120 bp, Artificial Sequence
  ENSG00000048544_14 (sequence is synthesized)
tgcctattcttttttcctgacatgctatcaggtatcagtgtgttgaatacatactgcttgtgtatcagacttacgttactgtcatcaccattaaaagaattgcagctttgtgccccatga

SEQ ID NO: 31928 - DNA, 120 bp, Artificial Sequence
  ENSG00000048545_0 (sequence is synthesized)
tgcttctctaagccttgttctattttcaactcttttctccagggtacagtctcccctggggctgcaaggatttagtggagactcttaacaccagttctctggcatctgtgagtttgagtg

SEQ ID NO: 31929 - DNA, 120 bp, Artificial Sequence
  ENSG00000048545_1 (sequence is synthesized)
tgggccatcatcttcttccttctgctctctccctctccacatttcccggtaccatctgatccatcaggcccttctttgctcaggcctgaaggactcaggcctgtgagagaggacggcccc

SEQ ID NO: 31930 - DNA, 120 bp, Artificial Sequence
  ENSG00000048545_2 (sequence is synthesized)
gttgtcggccaagacacctttgggcgaggagcagcgaacagggcctgtccatctcagacgtcagccccctgaaggcctgagcaatgggcaacgtgatggagggaaagtcagtggaggagc

SEQ ID NO: 31931 - DNA, 120 bp, Artificial Sequence
  ENSG00000048545_3 (sequence is synthesized)
tgagcagcaccgagtgccaccagtggtacaagaagttcatgactgagtgcccctctggccaactcaccctctatgagttccgccagttcttcggcctcaagaacctgagcccgtcggcca

SEQ ID NO: 31932 - DNA, 120 bp, Artificial Sequence
  ENSG00000048545_4 (sequence is synthesized)
gccagtacgtggaacagatgtttgagacttttgacttcaacaaggacggctacattgatttcatggagtacgtggcagcgctcagcttggtcctcaaggggaaggtggaacagaagctcc

SEQ ID NO: 31933 - DNA, 120 bp, Artificial Sequence
  ENSG00000048545_5 (sequence is synthesized)
gctggtacttcaagctctatgatgtagatggcaacggctgcattgaccgcgatgagctgctcaccatcatccaggccattcgcgccattaacccctgcagcgataccaccatgactgcag

SEQ ID NO: 31934 - DNA, 120 bp, Artificial Sequence
  ENSG00000048545_6 (sequence is synthesized)
cagtgttctccaagattgacgtcaacggggatggggaactctccctggaagagtttatagagggcgtccagaaggaccagatgctcctggacacactgacacgaagcctggaccttaccc

SEQ ID NO: 31935 - DNA, 120 bp, Artificial Sequence
  ENSG00000048545_7 (sequence is synthesized)
gcatcgtgcgcaggctccagaatggcgagcaagacgaggagggggctgacgaggccgctgaggcagccggctgagtgcaccgcccggctgcttctgcactagcgggtggggtggtatggt

SEQ ID NO: 31936 - DNA, 120 bp, Artificial Sequence
  ENSG00000048545_8 (sequence is synthesized)
ggtgcctgttggtggtgttcttgtcttaaccctagatagaatctaatgaactcagaggcttagctcgcctctttagggtccatggtggcagcagagaggcagaagtgggagtccagagcc

SEQ ID NO: 31937 - DNA, 120 bp, Artificial Sequence
  ENSG00000048545_9 (sequence is synthesized)
aggaacagtgaaggatggttcctggcccctctgagtgacagctggtggcagcactccttgctggggggcactgttcaacatccctctgccgtcgggtgaccccctagcccttctgactcc

SEQ ID NO: 31938 - DNA, 120 bp, Artificial Sequence
  ENSG00000048545_10 (sequence is synthesized)
tctcccagcttttcccagctttccccactgagcttctccagtccatgctcttctggacgtggactctctgaggcagaactgagcttttccaggcctcttatggaatcctgcagatccagt

SEQ ID NO: 31939 - DNA, 120 bp, Artificial Sequence
  ENSG00000048545_11 (sequence is synthesized)
ggctgcagcttcaatcccagtgctgcaatcacacatccattctgccctgggggaccctggagcctacttgtgcgctttgcatttcattgattgacgcctcccttcaacaagcatttactg

SEQ ID NO: 31940 - DNA, 120 bp, Artificial Sequence
  ENSG00000048545_12 (sequence is synthesized)
agcgcctactatgtactaatgctagatgttagatgtacaaagaagacagttttcatcctctaggaactcataggctaatggtgagacacacagacaaacatcattataataaaatatgct

SEQ ID NO: 31941 - DNA, 120 bp, Artificial Sequence
  ENSG00000048545_13 (sequence is synthesized)
agtatcctgccaagagtcctccctgaccaccagaagttccacctcaccatcaagaaaggccctggtccaggatgtgcaaggtgtgatgaaatcacagggctggggaaggtcagctcgggg

SEQ ID NO: 31942 - DNA, 120 bp, Artificial Sequence
  ENSG00000048545_14 (sequence is synthesized)
tcacaagaagcctgatgggcaggaaagagcatgaaagccccagccagcctcacatgtgcggctgggaggactcacagaaaccctctgtacccagtcatgggccaaagacaccgtcatgca

SEQ ID NO: 31943 - DNA, 120 bp, Artificial Sequence
  ENSG00000048545_15 (sequence is synthesized)
agggggtgaaggctccacactcgtcccggccccgggcgtggaagcaggacctcgagcagtctctggcagcagcctatgtgccggtcgttgtggactctaaggggcagaatccggacaagc

SEQ ID NO: 31944 - DNA, 120 bp, Artificial Sequence
  ENSG00000048545_16 (sequence is synthesized)
gcattgaccgcgatgagctgctcaccatcatccagtttcctcatcaataccaaaagacggccattcgcgccattaacccctgcagcgataccaccatgactgcagaggagttcaccgata

SEQ ID NO: 31945 - DNA, 120 bp, Artificial Sequence
  ENSG00000048649_0 (sequence is synthesized)
ttgttttcattccccctgtcacacgaggcagtggcaagcccgaaggggaggagagaagggggcggaaagagggcggaaagtgaaaggcgccgagggccgctctgtctcccgtctgactcg

SEQ ID NO: 31946 - DNA, 120 bp, Artificial Sequence
  ENSG00000048649_1 (sequence is synthesized)
gttctcgactgctccgggccgccgatgtattgtgggatcgcggagccgtccctgagacgctgggatccgcagaggagcccacttgagagcgcctcctgtcgtctgtaaggttgccttgcc

SEQ ID NO: 31947 - DNA, 120 bp, Artificial Sequence
  ENSG00000048649_2 (sequence is synthesized)
atccctcggcaccacaacttcccccgcccccccatcgcctcctcctccatcctccagttcaaaatggcgacggcggcggcagcggcggcggtgatggctcctccgggctgcccgggttcg

SEQ ID NO: 31948 - DNA, 120 bp, Artificial Sequence
  ENSG00000048649_3 (sequence is synthesized)
tgccccaacttcgccgtagtctgctccttcttggagcgctacgggccgctgctagacctgcctgagttgccgttccctgagctggagcgggtgctgcaggcgccgccgccggacgtcggc

SEQ ID NO: 31949 - DNA, 120 bp, Artificial Sequence
  ENSG00000048649_4 (sequence is synthesized)
aacggagaagtaccaaaagaattggtggagctccatttgaagctgatgaggaaaattggcaaatctgttactgcagacagatgggaaaaatatttgatcaagatatgccaagagtttaac

SEQ ID NO: 31950 - DNA, 120 bp, Artificial Sequence
  ENSG00000048649_5 (sequence is synthesized)
agtacctgggcatgggagatggagaagaagggctatcttgaaatgagtgttgaatgcaaactagcactcttaaagtacctctgtgagtgtcagtttgatgacaatctcaaattcaagaat

SEQ ID NO: 31951 - DNA, 120 bp, Artificial Sequence
  ENSG00000048649_6 (sequence is synthesized)
attattaatgaggaggatgccgatactatgcgtctccagccaattggtcgagacaaagatggcctcatgtactggtaccaattggatcaagatcacaatgtcagaatgtacatagaagaa

SEQ ID NO: 31952 - DNA, 120 bp, Artificial Sequence
  ENSG00000048649_7 (sequence is synthesized)
caagatgatcaagatggctcttcatggaaatgcattgtcagaaatcgaaacgagttggctgagactcttgcactcctgaaagcacaaattgatcctgtactattgaaaaactctagccaa

SEQ ID NO: 31953 - DNA, 120 bp, Artificial Sequence
  ENSG00000048649_8 (sequence is synthesized)
caagacaactcttctcgggaaagtcccagcttagaggatgaggagactaaaaaagaggaagaaacacctaaacaagaggaacagaaagaaagtgaaaagatgaaaagtgaggagcagcct

SEQ ID NO: 31954 - DNA, 120 bp, Artificial Sequence
  ENSG00000048649_9 (sequence is synthesized)
atggatttagaaaaccgttctacagccaatgttctagaagagactactgtgaaaaaagaaaaagaagatgaaaaggaacttgtgaaactgccagtcatagtgaagctagaaaaacctttg

SEQ ID NO: 31955 - DNA, 120 bp, Artificial Sequence
  ENSG00000048649_10 (sequence is synthesized)
ccagaaaatgaagaaaaaaagattatcaaagaagaaagtgattccttcaaggaaaatgtcaaacccattaaagttgaggtgaaggaatgtagagcagatcctaaagataccaaaagtagc

SEQ ID NO: 31956 - DNA, 120 bp, Artificial Sequence
  ENSG00000048649_11 (sequence is synthesized)
atggagaagccagtggcacaggagcctgaaaggatcgaatttggtggcaatattaaatcttctcacgaaattactgagaaatctactgaagaaactgagaaacttaaaaatgaccagcag

SEQ ID NO: 31957 - DNA, 120 bp, Artificial Sequence
  ENSG00000048649_12 (sequence is synthesized)
gccaagataccactaaaaaaacgagaaattaaactgagtgatgattttgacagtccagtcaagggacctttgtgtaaatcagttactccaacaaaagagtttttgaaagatgaaataaaa

SEQ ID NO: 31958 - DNA, 120 bp, Artificial Sequence
  ENSG00000048649_13 (sequence is synthesized)
caagaggaagagacttgtaaaaggatctctacaatcactgctttgggtcatgaagggaaacagctggtaaatggagaagttagtgatgaaagggtagctccaaattttaagacagaacca

SEQ ID NO: 31959 - DNA, 120 bp, Artificial Sequence
  ENSG00000048649_14 (sequence is synthesized)
atagagacaaagttttatgagacaaaggaagagagctatagcccctctaaggacagaaatatcatcacggagggaaatggaacagagtccttaaattctgtcataacaagtatgaaaaca

SEQ ID NO: 31960 - DNA, 120 bp, Artificial Sequence
  ENSG00000048649_15 (sequence is synthesized)
ggtgagcttgagaaagaaacagcccctttgaggaaagatgcagatagttcaatatcagtcttagagatccatagtcaaaaagcacaaatagaggaacccgatcctccagaaatggaaact

SEQ ID NO: 31961 - DNA, 120 bp, Artificial Sequence
  ENSG00000048649_16 (sequence is synthesized)
tctcttgattcttctgagatggcaaaagatctctcttcaaaaactgctttatcttccaccgagtcgtgtaccatgaaaggtgaagagaagtctcccaaaactaagaaggataagcgccca

SEQ ID NO: 31962 - DNA, 120 bp, Artificial Sequence
  ENSG00000048649_17 (sequence is synthesized)
ccaatcctagaatgtcttgaaaagttagagaagtccaaaaagacttttcttgataaggacgcacaaagattgagtccaataccagaagaagttccaaagagtactctagagtcagaaaag

SEQ ID NO: 31963 - DNA, 120 bp, Artificial Sequence
  ENSG00000048649_18 (sequence is synthesized)
cctggctctcctgaggcagctgaaacttctccaccatctaatatcattgaccactgtgagaaactagcctcagaaaaagaagtggtagaatgccagagtacaagtactgttggtggccag

SEQ ID NO: 31964 - DNA, 120 bp, Artificial Sequence
  ENSG00000048649_19 (sequence is synthesized)
tctgtgaaaaaagtagacctagaaaccctaaaagaggattctgagttcacaaaggtagaaatggataatctggacaatgcccagacctctggcatagaggagccttctgagacaaagggt

SEQ ID NO: 31965 - DNA, 120 bp, Artificial Sequence
  ENSG00000048649_20 (sequence is synthesized)
tctatgcaaaaaagcaaattcaaatataagttggttcctgaagaagaaaccactgcctcagaaaatacagagataacctctgaaaggcagaaagagggcatcaaattaacaatcaggata

SEQ ID NO: 31966 - DNA, 120 bp, Artificial Sequence
  ENSG00000048649_21 (sequence is synthesized)
tcaagtcggaaaaagaagcccgattctccccccaaagttctagaaccagaaaacaagcaagagaagacagaaaaggaagaggagaaaacaaatgtgggtcgtactttaagaagatctcca

SEQ ID NO: 31967 - DNA, 120 bp, Artificial Sequence
  ENSG00000048649_22 (sequence is synthesized)
agaatatctagacccactgcaaaagtggctgagatcagagatcagaaagctgataaaaaaagaggggaaggagaagatgaggtggaagaagagtcaacagctttgcaaaaaactgacaaa

SEQ ID NO: 31968 - DNA, 120 bp, Artificial Sequence
  ENSG00000048649_23 (sequence is synthesized)
aaggaaattttgaaaaaatcagagaaagatacaaattctaaagtaagcaaggtaaaacccaaaggcaaagttcgatggactggttctcggacacgtggcagatggaaatattccagcaat

SEQ ID NO: 31969 - DNA, 120 bp, Artificial Sequence
  ENSG00000048649_24 (sequence is synthesized)
gatgaaagtgaagggtctggcagtgaaaaatcatctgcagcttcagaagaggaggaagaaaaggaaagtgaagaagccatcctagcagatgatgatgaaccatgcaaaaaatgtggcctt

SEQ ID NO: 31970 - DNA, 120 bp, Artificial Sequence
  ENSG00000048649_25 (sequence is synthesized)
ccaaaccatcctgagctaattcttctgtgtgactcttgcgatagtggataccatactgcctgccttcgccctcctctgatgatcatcccagatggagaatggttctgcccaccttgccaa

SEQ ID NO: 31971 - DNA, 120 bp, Artificial Sequence
  ENSG00000048649_26 (sequence is synthesized)
cataaactgctctgtgaaaaattagaggaacagttgcaggatttggatgttgccttaaagaagaaagagcgtgccgaacgaagaaaagaacgcttggtgtatgttggtatcagtattgaa

SEQ ID NO: 31972 - DNA, 120 bp, Artificial Sequence
  ENSG00000048649_27 (sequence is synthesized)
aacatcattcctccacaagagccagacttttctgaagatcaagaagaaaagaaaaaagattcaaaaaaatccaaagcaaacttgcttgaaaggaggtcaacaagaacaaggaaatgtata

SEQ ID NO: 31973 - DNA, 120 bp, Artificial Sequence
  ENSG00000048649_28 (sequence is synthesized)
agctacagatttgatgagtttgatgaagcaattgatgaagctattgaagatgacatcaaagaagccgatggaggaggagttggccgaggaaaagatatctccaccatcacaggtcatcgt

SEQ ID NO: 31974 - DNA, 120 bp, Artificial Sequence
  ENSG00000048649_29 (sequence is synthesized)
gggaaagacatctctactattttggatgaagaaagaaaagaaaataaacgaccccagagggcagctgctgctcgaaggaagaaacgccggcgattaaatgatctggacagtgatagcaac

SEQ ID NO: 31975 - DNA, 120 bp, Artificial Sequence
  ENSG00000048649_30 (sequence is synthesized)
ctggatgaagaagagagcgaggatgaattcaagatcagtgatggatctcaagatgagtttgttgtgtctgatgaaaacccagatgaaagtgaagaagatccgccatctaatgatgacagt

SEQ ID NO: 31976 - DNA, 120 bp, Artificial Sequence
  ENSG00000048649_31 (sequence is synthesized)
gacactgacttttgtagccgtagactgaggcgacacccctctcggccaatgaggcagagcaggcgtttgcgaagaaagaccccaaagaaaaaatattccgatgatgatgaagaggaggaa

SEQ ID NO: 31977 - DNA, 120 bp, Artificial Sequence
  ENSG00000048649_32 (sequence is synthesized)
tctgaggagaatagtagagactctgaaagtgacttcagtgatgattttagtgatgattttgtagaaactcggcgaaggcggtcaaggagaaatcagaaaagacaaattaactacaaagaa

SEQ ID NO: 31978 - DNA, 120 bp, Artificial Sequence
  ENSG00000048649_33 (sequence is synthesized)
gactcagaaagtgacggttcccagaagagtttgcgacgtggtaaagaaataaggcgagtacacaagcgaagactttccagctcagagagtgaagagagctatttgtccaagaactctgaa

SEQ ID NO: 31979 - DNA, 120 bp, Artificial Sequence
  ENSG00000048649_34 (sequence is synthesized)
gatgatgagctagctaaagaatcaaagcggtcagttcgaaagcggggccgaagcacagacgagtattcagaagcagatgaggaggaggaggaagaggaaggcaaaccatcccgcaaacgg

SEQ ID NO: 31980 - DNA, 120 bp, Artificial Sequence
  ENSG00000048649_35 (sequence is synthesized)
ctacaccggattgagacggatgaggaggagagttgtgacaatgctcatggagatgcaaatcagcctgcccgtgacagccagcctagggtcctgccctcagaacaagagagcaccaagaag

SEQ ID NO: 31981 - DNA, 120 bp, Artificial Sequence
  ENSG00000048649_36 (sequence is synthesized)
ccctaccggatagaaagtgatgaggaagaggactttgaaaatgtaggcaaagtggggagcccattggactatagcttagtggacttaccttcaaccaatggacagagccctggcaaagcc

SEQ ID NO: 31982 - DNA, 120 bp, Artificial Sequence
  ENSG00000048649_37 (sequence is synthesized)
attgagaacttgattggcaagcctactgagaagtctcagacccccaaggacaacagcacagccagtgcaagcctagcctccaatgggacaagtggtgggcaggaggcaggagcaccagaa

SEQ ID NO: 31983 - DNA, 120 bp, Artificial Sequence
  ENSG00000048649_38 (sequence is synthesized)
gaggaggaagatgagcttttgagagtgactgaccttgttgattatgtctgtaacagtgaacagttataagactttttttccatttttgtgctaatttattccacggtagctctcacacca

SEQ ID NO: 31984 - DNA, 120 bp, Artificial Sequence
  ENSG00000048649_39 (sequence is synthesized)
gcgggccagttattaaaagctgtttaatttttcctagaaaactccactacagaatgacttttagaagaaaaatttcaacaaatcctgaagtctttctgtgaagtgaccagttctgaactt

SEQ ID NO: 31985 - DNA, 120 bp, Artificial Sequence
  ENSG00000048649_40 (sequence is synthesized)
tgaagataaataattgctgtaaattccttttgattttctttttccaggttcatggtccttggtaatttcattcatggaaaaaaatcttattataataacaacaaagatttgtatattttt

SEQ ID NO: 31986 - DNA, 120 bp, Artificial Sequence
  ENSG00000048649_41 (sequence is synthesized)
gactttatatttcctgagctctcctgactttgtgaaaaagggtggatgaaaatgcattccgaatctgtgagggcccaaaacagaatttaggggtgggtgaaagcacttgtgctttagctt

SEQ ID NO: 31987 - DNA, 120 bp, Artificial Sequence
  ENSG00000048649_42 (sequence is synthesized)
tttcatattaaatatatattatatttaaacattcatggcatagatgatgatttacagacaatttaaaagttcaagtctgtactgttacagtttgagaattgtagataacatcatacataa

SEQ ID NO: 31988 - DNA, 120 bp, Artificial Sequence
  ENSG00000048649_43 (sequence is synthesized)
gtcatttagtaacagcctttgtgaaatgaacttgtttactattggagataaccacacttaataaagaagagacagtgaaagtaccatcataattaacctaaatttttgttatagcagagt

SEQ ID NO: 31989 - DNA, 120 bp, Artificial Sequence
  ENSG00000048649_44 (sequence is synthesized)
ttcttgtttaaaaaaaaataaaatcatctgaaaagcatttgtacagtaaaatgtataatgaagctttgccaaccagactgtgctagcaacaaatttttttaaataagctttatgcagtgg

SEQ ID NO: 31990 - DNA, 120 bp, Artificial Sequence
  ENSG00000048649_45 (sequence is synthesized)
taataaggtggcctcaaatatattgtgtctgatggagagttattagtgaaatgaatgtggtctttcttaaggcctgggtggactgtaaactttgccaatagtataactcttgtcttctgg

SEQ ID NO: 31991 - DNA, 120 bp, Artificial Sequence
  ENSG00000048649_46 (sequence is synthesized)
ccacttgatgtttaaatatctgaaatatcattttgaaaaaaatacatctatatataacatacatgaagagatgctaagctgacagtgatattttagcacatttgaagactgggaagagat

SEQ ID NO: 31992 - DNA, 120 bp, Artificial Sequence
  ENSG00000048649_47 (sequence is synthesized)
tttcaggtgaattttaactggtctattcttgcccttagtatctacttcaaattgaagtctacaaacaaagcagttcctttgggaggtttttagtttgagttttagcgtgtgtgtgtgttt

SEQ ID NO: 31993 - DNA, 120 bp, Artificial Sequence
  ENSG00000048649_48 (sequence is synthesized)
tggaatttcctatctgcctggatatattagcagagtttgaatgtagttttggcctttggccattagacttctattaaaattcattaatagtcatacaaccaacatagagttgaatgagaa

SEQ ID NO: 31994 - DNA, 120 bp, Artificial Sequence
  ENSG00000048649_49 (sequence is synthesized)
ctgccgatgtaattaataggcatgacatccatttcaaacatctcaacactttaaagaaaagccctttgtttcaagaaaaaagggtttgtaactaactaaatacctaacatgtaattgaca

SEQ ID NO: 31995 - DNA, 120 bp, Artificial Sequence
  ENSG00000048649_50 (sequence is synthesized)
ctaaaatatgaactttgtcttatttagtttctgttatagctgtaaaatttcaggcagagccataacattgtacagagtgtagcacttgtgattaaacctagcctgttaaatcctgaaacc

SEQ ID NO: 31996 - DNA, 120 bp, Artificial Sequence
  ENSG00000048649_51 (sequence is synthesized)
ttcaaccattacttctgtgaatactttagccctgggatttgggtttttctgttccggtgttgtgtctgttgccggcaatggacacaccatatctgctgctggcccaaggaacgtcattaa

SEQ ID NO: 31997 - DNA, 120 bp, Artificial Sequence
  ENSG00000048649_52 (sequence is synthesized)
tttttctttccaaattaagtattatgtgctagtcagtgtatagtaaagcacttctcttttttattactaaaaagctggcattagatttgcattataaatacctctctaggaactttatac

SEQ ID NO: 31998 - DNA, 120 bp, Artificial Sequence
  ENSG00000048649_53 (sequence is synthesized)
tccttttccttcttcaacaggtattgcccttaaatcttatcttttggccttgaaagtttatagctattgtttttcagttgttcgttgttttgttttgtttcactttagttctgtagtacc

SEQ ID NO: 31999 - DNA, 120 bp, Artificial Sequence
  ENSG00000048649_54 (sequence is synthesized)
tgcccattaatatttttgctttgattctagcaatgtgtatgtatctgtataaaaaataaaataatgaaagcaacctaaaaataggatgcaccaatagcatgtggttccaagtaagttgtg

SEQ ID NO: 32000 - DNA, 120 bp, Artificial Sequence
  ENSG00000048649_55 (sequence is synthesized)
atttttattttgagacagtgttccactggaagggagggaagggcttacattcacagacagtaaagcagggctgtgtaaggagctacatttacttaacagtctcctttccagctaggtttg

SEQ ID NO: 32001 - DNA, 120 bp, Artificial Sequence
  ENSG00000048649_56 (sequence is synthesized)
ttttatttatttgcaagtcagctaagaattaaccttttaaaccatctaaaacaggcaagcaatataaagatttctactagtgcaaggtaagtggtttgaatatacaagtgccctttcctg

SEQ ID NO: 32002 - DNA, 120 bp, Artificial Sequence
  ENSG00000048649_57 (sequence is synthesized)
ccacccagtctcactaccgttttagtcctgcagctgggtaaagccactattgtgtggaaactctcccatgtgccctgtctctacctctggacacaccagctccttcttccacctattcta

SEQ ID NO: 32003 - DNA, 120 bp, Artificial Sequence
  ENSG00000048649_58 (sequence is synthesized)
ttcctcagttaagccaagtgatcagaagtagtattaaatgggtagataattttaacaggatgcctaatgtgaaataaggagttatttttactcttctactatagaaagcctaaggtaatt

SEQ ID NO: 32004 - DNA, 120 bp, Artificial Sequence
  ENSG00000048649_59 (sequence is synthesized)
cttaccatctcaaagactgagtattccatttaggtttggagaccacttgtgctgtgctgcctgatatttaccaaacttgaataagtgttcgtcaacttgatagtgaatgtaccccttctc

SEQ ID NO: 32005 - DNA, 120 bp, Artificial Sequence
  ENSG00000048649_60 (sequence is synthesized)
accttatattttgattaaatcaattaactataggtcatctaccaagaatgtaatccaagcggttgataaaacattattaggcagatagattattgattattaaattttgagcagtgcaaa

SEQ ID NO: 32006 - DNA, 120 bp, Artificial Sequence
  ENSG00000048649_61 (sequence is synthesized)
aacggttttgctgcttggagttcagattcagtccctcaaagagtttatgatcactgaaatacactctgaaggtattctgaagaagttaaaaaattttagaaaacgaaatgttctgtatac

SEQ ID NO: 32007 - DNA, 120 bp, Artificial Sequence
  ENSG00000048649_62 (sequence is synthesized)
aaagacaatacagtcactacgaactgcagaaagtataggaaagcagtaattgatgtagagtttagacagtcttggatcttttttagagcactaaccatggatttagactcaaaatagctg

SEQ ID NO: 32008 - DNA, 120 bp, Artificial Sequence
  ENSG00000048649_63 (sequence is synthesized)
ctacataatagagccctttaataatttaaaccccccttgttgaaatacaagttggactcccagtgtcaaactctagactgtagctaatgtattaaagggagatgtagattaatattcagt

SEQ ID NO: 32009 - DNA, 120 bp, Artificial Sequence
  ENSG00000048649_64 (sequence is synthesized)
atatttagtttgcaatttctgaaaaggtttgaaaactagtcagcttttcacacagcagaagctttgaactgaaatatgtgtgaaaaggacgcagactgaaaacgttttggttttgtacat

SEQ ID NO: 32010 - DNA, 120 bp, Artificial Sequence
  ENSG00000048649_65 (sequence is synthesized)
cagtgctgatgaaattagtgtaaaacattttccatcattggcacattactgcaaaatgatggcagagatattttcaagaatgtacatcaagttatatttccttgacatccttttttcaat

SEQ ID NO: 32011 - DNA, 120 bp, Artificial Sequence
  ENSG00000048649_66 (sequence is synthesized)
tggtcaaggttacagattcagaggataaagggtagtttcatttagaataaattcatgtctactggcaatctatatataaaagtgacctgcccaagaaccaaaaactttaaatgctaatga

SEQ ID NO: 32012 - DNA, 120 bp, Artificial Sequence
  ENSG00000048649_67 (sequence is synthesized)
agcttttgaaaaataatttttaaacaaattaattttaaaagggtgttacacgtacccagtttttactttttagttgatgaaacccatcctataatatacatttgagcaaagtacacatat

SEQ ID NO: 32013 - DNA, 120 bp, Artificial Sequence
  ENSG00000048649_68 (sequence is synthesized)
taagaaaaacatggacatttacttgtttaatagtcaaaatgatgaggaaatgttagctgtttttaagtgggactggtggggtgtcctttgtcacaaggaatgcttttttagcttgtttgt

SEQ ID NO: 32014 - DNA, 120 bp, Artificial Sequence
  ENSG00000048649_69 (sequence is synthesized)
gggcataagagatgttaaccctttgctgattctaccacacaactgtaaagaacctaatgaatctacaagtttaatattcagaaaaagctaggaactccgctctttaccagtacagtggaa

SEQ ID NO: 32015 - DNA, 120 bp, Artificial Sequence
  ENSG00000048649_70 (sequence is synthesized)
caggcccgttattcaaggtgatgcctcacagctatagaacaactattcaaagacccagagttaaatggtacatgtgtatatgtgtgtgtgtgtgtgcacacgcacacacttcagataagt

SEQ ID NO: 32016 - DNA, 120 bp, Artificial Sequence
  ENSG00000048649_71 (sequence is synthesized)
atcagaaaaaataaaaatgaatccatcattaacttgaaagaaataagatggctgcattgcaacagatacaaatattatgaacatcatttaattacagaaaatctagacaacagtttctcc

SEQ ID NO: 32017 - DNA, 120 bp, Artificial Sequence
  ENSG00000048649_72 (sequence is synthesized)
tgatgtttgacattctcaaaatatattcctcattctcgaagaagcagagaatgccaaggctgcatatctgctgtaatctacctagccctcttctgcttaatatgatccattattgaatct

SEQ ID NO: 32018 - DNA, 120 bp, Artificial Sequence
  ENSG00000048649_73 (sequence is synthesized)
tctcagattaaaatccattcctatatcatctacctttcccaaagtgtgtgcctgtaaacctaccttggaagtggcaagttaactgatttttttgtgtcatttttataccaatccttaagg

SEQ ID NO: 32019 - DNA, 120 bp, Artificial Sequence
  ENSG00000048649_74 (sequence is synthesized)
tcaaagccttttgctatcaatgtatttaaactgagttgctatatgttcactaatttgttttcaaaatgttttgctccaacttaaattatcttttaacatcttttgagtgccaagaattgc

SEQ ID NO: 32020 - DNA, 120 bp, Artificial Sequence
  ENSG00000048649_75 (sequence is synthesized)
taagtaactgtaatatgttgaagagagtaattgccaagcaagcagtcataagccaaaatgtaatgagcttagtatataaccactttagagtatacactcaccactttttgtattcattca

SEQ ID NO: 32021 - DNA, 120 bp, Artificial Sequence
  ENSG00000048649_76 (sequence is synthesized)
tgcaaaccctcctggaagtcgattagaagaggatccaatttgtggaccttttttcctccttttggacacctgagcacaattttttttttcctttcatatttataccactttggaaaattc

SEQ ID NO: 32022 - DNA, 120 bp, Artificial Sequence
  ENSG00000048649_77 (sequence is synthesized)
agtaaacccaattctggcacatcataatggtttcagttagtgaagatgtttattttaataactttaaaatatgactatcctatacataagttatataagagggcataacaatagatgagt

SEQ ID NO: 32023 - DNA, 120 bp, Artificial Sequence
  ENSG00000048649_78 (sequence is synthesized)
agaaatttataaaatttcttggatattttgaatgagaaaaaaacatttttaaaggaattttgttttttccttttttggccaaaccggtacaagttagaaagtgtgctaaggactgaatac

SEQ ID NO: 32024 - DNA, 120 bp, Artificial Sequence
  ENSG00000048649_79 (sequence is synthesized)
ttgcctcgtgctttttgccactggatgatgtaagttaagaatggaattgttaatcctaagtatatattttcttgactttcatcagtttctaaagaaatctaatttaagtgttttgcggtt

SEQ ID NO: 32025 - DNA, 120 bp, Artificial Sequence
  ENSG00000048649_80 (sequence is synthesized)
ttgtttgatctgtatttattgagttctggtcatagaccagcagcttgcacgtcatgctcatgaacagccagaacatagttattggggaacttcatggctcaaaaccttctgaatcattta

SEQ ID NO: 32026 - DNA, 120 bp, Artificial Sequence
  ENSG00000048649_81 (sequence is synthesized)
acttattttgtatgttgcaaaaaaaaaaaaaaagtttattttgcttgagagtcacctttttttaaaaaaaataactgtacagcttttaagggatgggaggtgggaaaataccctaaaata

SEQ ID NO: 32027 - DNA, 120 bp, Artificial Sequence
  ENSG00000048649_82 (sequence is synthesized)
ggatgtagattttttacaattgtgtttatgctagatcatctacaggtgcattatgtaattaaacctaaaattgtttaaaaatttgtgccatgtctttttcattctcctgccctttagcag

SEQ ID NO: 32028 - DNA, 120 bp, Artificial Sequence
  ENSG00000048649_83 (sequence is synthesized)
aattggtgcatgtcaactgctatgtggacaagccttgaaattagagtaacaagccctgtctccaaagctttaaggtcactgcatgaaaattgcacacacacacacacacacacacacatc

SEQ ID NO: 32029 - DNA, 120 bp, Artificial Sequence
  ENSG00000048649_84 (sequence is synthesized)
tagcttatattagtaaatggattttcaggatcagaacagctacagtagcccagatttggctgttaacagcatattcttacagcacatgatttttgtgatgcctaactagggtattctcaa

SEQ ID NO: 32030 - DNA, 120 bp, Artificial Sequence
  ENSG00000048649_85 (sequence is synthesized)
tgttagtctggtgttctattctctttcaaagtagcttcttgagatggtatctgttgtagcttgcccaaacctgccatgaggttgtgtgtacactttgaaagggtatgtcctatgctaaga

SEQ ID NO: 32031 - DNA, 120 bp, Artificial Sequence
  ENSG00000048649_86 (sequence is synthesized)
tggtggtagagcagggcttgattttaatctattcatataaaagaaggaaaaaactagaattggtctatttggttattcagtggacttaattccacaggaatagttgtctgctgaagcgtg

SEQ ID NO: 32032 - DNA, 120 bp, Artificial Sequence
  ENSG00000048649_87 (sequence is synthesized)
gcagcaagagaagtcaaattcaagtttcagttccttccttattcactaagtattttgaaatcttgtagaacttctgattctagcacagtcttttacatggcacattttaccatggtatat

SEQ ID NO: 32033 - DNA, 120 bp, Artificial Sequence
  ENSG00000048649_88 (sequence is synthesized)
tcacagcttcgtttaaatgtcagtactttttcccatctgataattttgccattctaatttctcacctttgtagtacaagtgtattcttgaaaataattaaattcatctaagtgtgtcata

SEQ ID NO: 32034 - DNA, 120 bp, Artificial Sequence
  ENSG00000048649_89 (sequence is synthesized)
atttcaatcaaagctatattcatgtgttgccagcgtcagttttttgctatcctcattcagaagggaagcctgcagatcatgagtttccatatgaagaatacaaattccacataaaaattt

SEQ ID NO: 32035 - DNA, 120 bp, Artificial Sequence
  ENSG00000048649_90 (sequence is synthesized)
ataaatggtatctttagaattttgatttaaagtaatagctggaattcagggactgatcagaatgcctcttgaattttccaacatgcttatatgaaatgctttattttcctatgcgttaaa

SEQ ID NO: 32036 - DNA, 120 bp, Artificial Sequence
  ENSG00000048649_91 (sequence is synthesized)
aaaaatattcctggaataggttctcagaatgttttatttggtttctaggagatgagatttaaagcagaagctccaagattggcataaaactaactcttgaggtaatcaggaccatgctgt

SEQ ID NO: 32037 - DNA, 120 bp, Artificial Sequence
  ENSG00000048649_92 (sequence is synthesized)
tagtcaaatagaagctggagtgctctctgtcacataatgtactgcatgtgtgtgggggtgggggggcagggaagatcagaaaactggaaatgtaattctgataacacgcaaagtaaattg

SEQ ID NO: 32038 - DNA, 120 bp, Artificial Sequence
  ENSG00000048649_93 (sequence is synthesized)
tgcattaaaagtatgggaattcttggtagcttaaagcttcaggggttaacttcagtgtatgaacacctagtgtgttagaattgcagtgcatagttgtttaaatacaatattccttgtaag

SEQ ID NO: 32039 - DNA, 120 bp, Artificial Sequence
  ENSG00000048649_94 (sequence is synthesized)
tgacaaccaaaatatgttgtggctggtgccagtatttttgttaatgaaatgttcagtgtctcactacagtctgatcagaactcttggtgttataagccaggcctaaagccattttatagc

SEQ ID NO: 32040 - DNA, 120 bp, Artificial Sequence
  ENSG00000048649_95 (sequence is synthesized)
tattggcctaattgtgtaactttttctttcaaaatgttttattataatacttctgtcatttctttcacttaatatgtcaattgtcataataaaaatttaaatttgaattatttagcatga

SEQ ID NO: 32041 - DNA, 120 bp, Artificial Sequence
  ENSG00000048649_96 (sequence is synthesized)
ctagcataaattgatattatgttttataatacacataatttttaattagtttactaaaagtaagactatggctccaaaatccacatgactgcaagtatgtgattctcttcttttgctact

SEQ ID NO: 32042 - DNA, 120 bp, Artificial Sequence
  ENSG00000048649_97 (sequence is synthesized)
acttagtagcagtcttgagtcctgaagttagatttcagaagtgttatatctcttttgtgcctaacactgtgctcaggacttttcatgtcttttctcatttaattcttaaaatcaccctga

SEQ ID NO: 32043 - DNA, 120 bp, Artificial Sequence
  ENSG00000048649_98 (sequence is synthesized)
tcacatcaagtaagaaactaataaggctcagggatgttgtcatttttactttagttcacatagtatgcatagacttatttagtggttcccctagactctgttatatagaacagaggtccc

SEQ ID NO: 32044 - DNA, 120 bp, Artificial Sequence
  ENSG00000048649_99 (sequence is synthesized)
caacccctgggccacagaccaatagtggtcatccccattcctctccttaccatgtgagctctgcttcctctgagatcagctgcggcatagattctcataggagtgcaaaccctatcgtga

SEQ ID NO: 32045 - DNA, 120 bp, Artificial Sequence
  ENSG00000048649_100 (sequence is synthesized)
aggttgtgcactccttatgagaatctactgactgatgatccgtcactatctcccatcacttccagatggggccatctagttgattcaaatgtaatgcatttgaatcatccccaaaccatc

SEQ ID NO: 32046 - DNA, 120 bp, Artificial Sequence
  ENSG00000048649_101 (sequence is synthesized)
tgaatcatccccaaaccatctccctcccacccaccacccccagtctgtggacaaattatcttccgcaaaactggtccctgatgccagaaaggttgaggaccactgatacagaaacatgcc

SEQ ID NO: 32047 - DNA, 120 bp, Artificial Sequence
  ENSG00000048649_102 (sequence is synthesized)
atctttttcgttcctcagaatttttgcatatatggtatcttctgcctggagtaccttcccaccagtttgttttcctagccaacttatttgtcctttaggtctcagctcaagtagtactgt

SEQ ID NO: 32048 - DNA, 120 bp, Artificial Sequence
  ENSG00000048649_103 (sequence is synthesized)
ctccttgagtccttctctcaggaagatgttccttcatggatttatgtttaaccctattttagaaactgtcatatggttttatattgaatgttcattatgtaccaggcgctgtttagtgct

SEQ ID NO: 32049 - DNA, 120 bp, Artificial Sequence
  ENSG00000048649_104 (sequence is synthesized)
tgctaaaaacgacagagccagcattcaaatccaggacttggtgaatccagtactttaaaatatcactgatgaaatgttcctcacatttgtcttttgtgtatattgtaagtttcttgaagg

SEQ ID NO: 32050 - DNA, 77 bp, Artificial Sequence
  ENSG00000048649_105 (sequence is synthesized)
tcacatttgtcttttgtgtatattgtaagtttcttgaaggcttcttttaatctttttttttttttttttatgtctcg

SEQ ID NO: 32051 - DNA, 88 bp, Artificial Sequence
  ENSG00000048649_106 (sequence is synthesized)
cttcttttaatcttttatgcatcagtattagatggatcaattaatcactgagacaattttagttttctttcccttgactgccagtaag

SEQ ID NO: 32052 - DNA, 120 bp, Artificial Sequence
  ENSG00000048649_107 (sequence is synthesized)
tgagacaattttagttttctttcccttgactgccagtaagcttaactttgttatatttatttattagttataatcattagctagttttctgatggaatttttaccttccctgttacatgg

SEQ ID NO: 32053 - DNA, 120 bp, Artificial Sequence
  ENSG00000048649_108 (sequence is synthesized)
ctcttacagtgctctcgtctttctccttgtggcatcattgtacatatgtattactgaaagctgtttcttttccttttgaagtaaatggaatataattaatataaaattctgtttaaatcc

SEQ ID NO: 32054 - DNA, 120 bp, Artificial Sequence
  ENSG00000048649_109 (sequence is synthesized)
agagcaagtatctggcatctgctaggccttgttgctttgctcatagcagacattaccaacctaagccttcctgctaagcctagacttagcagactacattattacacaaatcagtcagca

SEQ ID NO: 32055 - DNA, 120 bp, Artificial Sequence
  ENSG00000048649_110 (sequence is synthesized)
ttggcatctatttgtcatctattgttagtaattccctaagacagctgaactaagacctatagaatgagcagaaattttgttaggaaataaccagtagcttagccctactgtaatagaaag

SEQ ID NO: 32056 - DNA, 120 bp, Artificial Sequence
  ENSG00000048649_111 (sequence is synthesized)
taccttgagaaaatgacagtgagtggaggcctaacagtcatgtgttcaggaggttactgtgataatccaactgagcaataaggagacctgaattaaggttttggcactagggatggaaag

SEQ ID NO: 32057 - DNA, 120 bp, Artificial Sequence
  ENSG00000048649_112 (sequence is synthesized)
gagggggtggatgtaagagctatttggaaggtaaaatcaacaactattgataattgatagtgagagagaaagagagagaggtgtctaggaactgagcttaaccaagggcattcatttgtt

SEQ ID NO: 32058 - DNA, 120 bp, Artificial Sequence
  ENSG00000048649_113 (sequence is synthesized)
attgtgctgtatcttgcatttgctaacgtacattcatccgtagtagacaggacctcaaaaatctaggcggatgactttttactttgacagcggaattacccttctaaaaataaggaaacc

SEQ ID NO: 32059 - DNA, 81 bp, Artificial Sequence
  ENSG00000048649_114 (sequence is synthesized)
actttgacagcggaattacccttctaaaaataaggaaacccagctaggcacagtggctcacatggcttgagctcaggagtt

SEQ ID NO: 32060 - DNA, 120 bp, Artificial Sequence
  ENSG00000048649_115 (sequence is synthesized)
ctggtttatcaacttgacgagaatcatttcaaaattttaggaaaaaaatttatgtctcagtaaaactttgtttagaattaggtttttcagtagcaaggataaggtgaagggattaaaaat

SEQ ID NO: 32061 - DNA, 120 bp, Artificial Sequence
  ENSG00000048649_116 (sequence is synthesized)
gtacgtaaaattagtagtcaatgaattctggaatgcagtctgtataatcctattcagagattatgctatttactgaatatagctttggttgtgtttaaatctgcactagtattaggtgct

SEQ ID NO: 32062 - DNA, 120 bp, Artificial Sequence
  ENSG00000048649_117 (sequence is synthesized)
ccttaaaagttgaaaatatatagccaataaggtataaagaagaattgacagataaatctaaacagtttctttgtatagtactaacttctgaaatgttcagtggtggcatttgataaagta

SEQ ID NO: 32063 - DNA, 120 bp, Artificial Sequence
  ENSG00000048649_118 (sequence is synthesized)
agttgtaatatgatcacattgaggaatgttatataattattaaactcaatttttataaaaggcatcattttataaaagtatcataagaaagtgccaatgtttcaatgaataaattgaggc

SEQ ID NO: 32064 - DNA, 120 bp, Artificial Sequence
  ENSG00000048649_119 (sequence is synthesized)
aacatgataccaacttagtgaaaaatatacaagaccagaaggaagtaacctaaaatattactagtgattgcctctgggtaataggatatgggctttttgtctttctatatttttcatttt

SEQ ID NO: 32065 - DNA, 120 bp, Artificial Sequence
  ENSG00000048649_120 (sequence is synthesized)
cccactgccgtgttcctggtacctcagtgaaatgaagtgctcagttcttttaacagttgtcagtttttaaaacaaatatagtcttctggaaatgttttaggtagcattttcaattttatg

SEQ ID NO: 32066 - DNA, 120 bp, Artificial Sequence
  ENSG00000048649_121 (sequence is synthesized)
tttttaagccatctcttgaatttgaataaattatttgaactgcataaatatttgcaatccattgagaacaccaaaacaaaaagtaaaaagcagaaacctaaatttttctaaatttttttt

SEQ ID NO: 32067 - DNA, 120 bp, Artificial Sequence
  ENSG00000048649_122 (sequence is synthesized)
aatatctagaagttgtatctcaaagtttttgtaattttcttcattgtcagattttattttttactgtcaaatatccaatgacagaggccacctcttttaaaatagaaactttaaatggaa

SEQ ID NO: 32068 - DNA, 120 bp, Artificial Sequence
  ENSG00000048649_123 (sequence is synthesized)
atatacattatactaagtcttatattttatagccttgaaagtttctattcatgtaattaagctttttctgatttttagaggaacagaaagaaagtgaaaagatgaaaagtgaggagcagc

SEQ ID NO: 32069 - DNA, 120 bp, Artificial Sequence
  ENSG00000048649_124 (sequence is synthesized)
gctcttcatggaaatgcattgtcagaggaacagaaagaaagtgaaaagatgaaaagtgaggagcagcctatggatttagaaaaccgttctacagccaatgttctagaagagactactgtg

SEQ ID NO: 32070 - DNA, 120 bp, Artificial Sequence
  ENSG00000048649_125 (sequence is synthesized)
atccatctaaaacaaggattggcatactgtggcctgtgggccaaatccagcctcctttttgtttttgtactgcctgctaactaagaatgttttttatgtttttaaatgattggggggaaa

SEQ ID NO: 32071 - DNA, 120 bp, Artificial Sequence
  ENSG00000048649_126 (sequence is synthesized)
cataaaatccctggaaaaggtgtgtgctgacttcatcagaggagcagaggcaaagaatctccaagtgaaaggaccagttcgaatacctaccaagactttgagaatcactacagaaaaagt

SEQ ID NO: 32072 - DNA, 120 bp, Artificial Sequence
  ENSG00000048649_127 (sequence is synthesized)
ccttgtggtgaaggttctaagacgtgggatcctttccagatgagaatccacaagcgactcattgacttgcacagtccttctgagattgttaagcagattgcttccatcagtttgagccgg

SEQ ID NO: 32073 - DNA, 120 bp, Artificial Sequence
  ENSG00000048707_0 (sequence is synthesized)
ctgagcgccgcgggcctgcgccattgaggagcggcggggaggaaacgccgcgcagcgccgggctggggcgggcggcccgggacaccgacagatttttctgtgaccatgaaagagagaaat

SEQ ID NO: 32074 - DNA, 120 bp, Artificial Sequence
  ENSG00000048707_1 (sequence is synthesized)
aaagaatgatccatgatttctaaacaccttttcctgaggatatagtcatgttggaaggccttgtagcctgggttctcaatacctatttgggaaaatatgtcaataacctgaacactgacc

SEQ ID NO: 32075 - DNA, 120 bp, Artificial Sequence
  ENSG00000048707_2 (sequence is synthesized)
agctctcagttgcacttctcaaaggtgctgttgaattagaaaacttgccattaaagaaagatgccttgaaagaattggaattaccatttgaagtcaaagctggcttcattgggaaagtaa

SEQ ID NO: 32076 - DNA, 120 bp, Artificial Sequence
  ENSG00000048707_3 (sequence is synthesized)
cccttcagattcccttttatcgcccccatgtggacccttgggtgatctccatctccagccttcacttaattggagccccagagaaaatacaggatttcaatgatgaaaaggagaagctgt

SEQ ID NO: 32077 - DNA, 120 bp, Artificial Sequence
  ENSG00000048707_4 (sequence is synthesized)
tggaaagggaacgtaagaaagcactacttcaagccctggaggagaaatggaagaatgaccgccagcagaaaggggagtcctattggtattcagttaccgcctccgtagttacaaggattg

SEQ ID NO: 32078 - DNA, 120 bp, Artificial Sequence
  ENSG00000048707_5 (sequence is synthesized)
tggagaatattgaattaaaaattcaagatgtccatttacgctttgaagatggtgtcaccaatccctcccatccttttgcttttggcatctgcattaagaatgtgtccatgcaaaatgctg

SEQ ID NO: 32079 - DNA, 120 bp, Artificial Sequence
  ENSG00000048707_6 (sequence is synthesized)
tgaatgagcctgtacagaaactaatgcggaaaaagcaattagacgtagcagaatttagcatctattgggatgtcgattgcactttactgggggatttgcctcagatggagttacaggagg

SEQ ID NO: 32080 - DNA, 120 bp, Artificial Sequence
  ENSG00000048707_7 (sequence is synthesized)
ccatggccaggagcatggagagtcgcagccatcactacgtcctggagcctgtgtttgcatctgctcttttgaagagaaactgctccaagaagcccctgcggtctcggcacagtccccgta

SEQ ID NO: 32081 - DNA, 120 bp, Artificial Sequence
  ENSG00000048707_8 (sequence is synthesized)
ttgattgtgatattcagctggagaccattcccttgaaactctctcagctgcaataccggcaaatcatggaattcctcaaggagctggaacgaaaggagaggcaggtgaagttccgaaggt

SEQ ID NO: 32082 - DNA, 120 bp, Artificial Sequence
  ENSG00000048707_9 (sequence is synthesized)
ggaaacccaaggtggcgatatctaagaactgccgagaatggtggtattttgctttgaatgctaacttgtatgagatcagagagcagaggaaacgttgcacctgggactttatgttgcacc

SEQ ID NO: 32083 - DNA, 120 bp, Artificial Sequence
  ENSG00000048707_10 (sequence is synthesized)
gcgctcgtgatgctgtatcttacactgacaaatatttcaacaagttaaaaggaggcctgctgtccacagatgacaaggaggaaatgtgtcggattgaagaggaacagagctttgaggaat

SEQ ID NO: 32084 - DNA, 120 bp, Artificial Sequence
  ENSG00000048707_11 (sequence is synthesized)
tgaagattttgcgtgaactggttcatgatcgatttcacaaacaggaagaactagcagagagtctgcgggagcctcagtttgattctccaggagcctgtccgggagccccagaacccggtg

SEQ ID NO: 32085 - DNA, 120 bp, Artificial Sequence
  ENSG00000048707_12 (sequence is synthesized)
gaggcagtgggatgctgcagtatctccagtcctggtttcctggatggggtggctggtacgggcagcagaccccagaagggaatgtggttgagggactgtcagcagagcaacaggagcagt

SEQ ID NO: 32086 - DNA, 120 bp, Artificial Sequence
  ENSG00000048707_13 (sequence is synthesized)
ggattcctgaagagatcctgggcactgaggagttttttgaccccactgcagatgcctcgtgtatgaacacgtatacaaagcgagatcatgtctttgccaaactgaatttgcagttgcagc

SEQ ID NO: 32087 - DNA, 120 bp, Artificial Sequence
  ENSG00000048707_14 (sequence is synthesized)
gaggtacagtgactctgttacacaaggagcaaggaactcctcaaatgaatgaaagtgctttcatgcagctcgagttttcagatgtaaaacttctagcagagtctcttcctcgaagaaatt

SEQ ID NO: 32088 - DNA, 120 bp, Artificial Sequence
  ENSG00000048707_15 (sequence is synthesized)
cctcgttgctttcagtccggttgggtggactgtttcttcgagacctggctacagaaggaactatgtttcctcttctagtcttccctaatccacaaaaagaagttggcagagtctcacaat

SEQ ID NO: 32089 - DNA, 120 bp, Artificial Sequence
  ENSG00000048707_16 (sequence is synthesized)
cttttggtctacaaactacatctgcagacagaagtgatcattacccagctgcagatccagatggccccgtttttgagatgctgtatgagagaaatccggcgcacagccactttgagaggc

SEQ ID NO: 32090 - DNA, 120 bp, Artificial Sequence
  ENSG00000048707_17 (sequence is synthesized)
ggctcaatgtcagcacaaggcccttgaacatcatatacaatccgcaggccattaaaaaagtagcagactttttctacaagggaaaggttcatacctcaggttttggttatcagtctgaac

SEQ ID NO: 32091 - DNA, 120 bp, Artificial Sequence
  ENSG00000048707_18 (sequence is synthesized)
ttgagctgagagtggctgaagctgcccgaagacaatataacaagctgaagatgcagaccaaggcagaaatccggcaaactcttgatcgtttgctagtgggtgatttcattgaggagagta

SEQ ID NO: 32092 - DNA, 120 bp, Artificial Sequence
  ENSG00000048707_19 (sequence is synthesized)
aacgatggaccgtgcggctggatatttctgcccctcaggtgatatttcctgatgatttcaaattcaagaatcctgtgttagttgtcgtggatctaggaagaatgcttttgacgaacaccc

SEQ ID NO: 32093 - DNA, 120 bp, Artificial Sequence
  ENSG00000048707_20 (sequence is synthesized)
aagataactccaggaggaaaagtagggatgggtcagcatctgaagagacccagtttagtgatgatgaatataagacccccctggccacacctcctaacaccccacctcccgagtcaagca

SEQ ID NO: 32094 - DNA, 120 bp, Artificial Sequence
  ENSG00000048707_21 (sequence is synthesized)
gcagcaacggagagaaaacacctcccttttctggagttgagttcagtgaagaacagcttcaagcacatttaatgagcacaaagatgtatgagaggtactcgctgtcatttatggacctcc

SEQ ID NO: 32095 - DNA, 120 bp, Artificial Sequence
  ENSG00000048707_22 (sequence is synthesized)
agatcatggttggacgagtgaaagacaattggaagcatgtccaggatattgacgtgggaccaacacatgtggtagagaagttcaacgttcacctacagttagagcgtcgattgatttata

SEQ ID NO: 32096 - DNA, 120 bp, Artificial Sequence
  ENSG00000048707_23 (sequence is synthesized)
cttcagatcccaaatatccaggagccgtgctctcaggcaacttaccagacttaaaaatccacattaatgaagataaaatatctgcactaaagaattgctttgctctcctcaccaccccag

SEQ ID NO: 32097 - DNA, 120 bp, Artificial Sequence
  ENSG00000048707_24 (sequence is synthesized)
aaatgaaaacttctgacactcagattaaagaaaagatttttccccaggaggagcagcggggaagtttgcaagactccgtaatgaatttaacccagagcattgtgttgttggagcagcata

SEQ ID NO: 32098 - DNA, 120 bp, Artificial Sequence
  ENSG00000048707_25 (sequence is synthesized)
cccgcgaggttctggtggagtcgcagctcctcctggcggaatttaaagtgaactgtatgcagcttggtgttgagagcaatggccggtacatttctgtgctcaaggtgtttggtaccaatg

SEQ ID NO: 32099 - DNA, 120 bp, Artificial Sequence
  ENSG00000048707_26 (sequence is synthesized)
ctcactttgtgaagaggccttatgatgctgaagtctccctaactgttcatggtttgctcctggtggataccatgcagacatatggtgctgattttgaccttttgatggcttcacataaga

SEQ ID NO: 32100 - DNA, 120 bp, Artificial Sequence
  ENSG00000048707_27 (sequence is synthesized)
acttgagctttgatattccaacgggaagccttcgggatagcagggcccagtctcctgtctctggaccgaatgtggcccacttaactgatggagctacactgaacgaccgatcagctacta

SEQ ID NO: 32101 - DNA, 120 bp, Artificial Sequence
  ENSG00000048707_28 (sequence is synthesized)
gtgtttcacttgacaaaattcttaccaaagagcaagagtcccttattaagttggaatatcagtttgtgagttcagagtgcccatcgatgaatttagacagtactcttcaggtgatttccc

SEQ ID NO: 32102 - DNA, 120 bp, Artificial Sequence
  ENSG00000048707_29 (sequence is synthesized)
tacaggtgaataatttagatattatcctcaatccagagacgattgtggagctaattggttttcttcaaaaatcctttcccaaggaaaaagatgatttaagtcctcaacctttaatgactg

SEQ ID NO: 32103 - DNA, 120 bp, Artificial Sequence
  ENSG00000048707_30 (sequence is synthesized)
attttgaaagaagcttcagagaacaaggaacttaccagtctacatatgaacaaaacactgaggttgcagtggaaatccataggctgaacttactgcttcttcggacagtgggcatggcaa

SEQ ID NO: 32104 - DNA, 120 bp, Artificial Sequence
  ENSG00000048707_31 (sequence is synthesized)
atagagagaaatatggcagaaaaattgcaactgcaagtataggtggcaccaaagttaatgtctcaatgggtagcacgtttgacatgaatggttctcttggctgtttacagcttatggatt

SEQ ID NO: 32105 - DNA, 120 bp, Artificial Sequence
  ENSG00000048707_32 (sequence is synthesized)
tgacacaagataacgttaaaaaccagtatgttgtcagcattgggaattctgtaggctatgaaaatatcatcagtgatattggctactttgaatctgtgtttgtcagaatggaagatgcag

SEQ ID NO: 32106 - DNA, 120 bp, Artificial Sequence
  ENSG00000048707_33 (sequence is synthesized)
ccctcactgaagctttgagtttcacgtttgttgagagatctaaacaggagtgttttctcaacctgaagatggcttctttacattataaccactctgctaagtttttgaaggagttgacgt

SEQ ID NO: 32107 - DNA, 120 bp, Artificial Sequence
  ENSG00000048707_34 (sequence is synthesized)
tatccatggatgaactggaagaaaattttcgaggtatgctgaaaagcgcagccaccaaagtcaccacagtactagctaccaagactgccgagtatagcgagatggtatcgctctttgaaa

SEQ ID NO: 32108 - DNA, 120 bp, Artificial Sequence
  ENSG00000048707_35 (sequence is synthesized)
ctccaaggaagactcgggaaccctttatcttagaggaaaatgaaatatatgggtttgacctagcttcgtctcatttggacactgtaaagctaatcttgaacataaacattgaatcaccag

SEQ ID NO: 32109 - DNA, 120 bp, Artificial Sequence
  ENSG00000048707_36 (sequence is synthesized)
ttgtttctatccctcggaagccggggagtcctgagttgttggtgggacacttgggacagatattcatccagaattttgtggcgggagatgatgaatccagaagtgaccgtctgcaggtgg

SEQ ID NO: 32110 - DNA, 120 bp, Artificial Sequence
  ENSG00000048707_37 (sequence is synthesized)
aaatcaaggacattaaactgtattctttgaattgcacccagttggcaggtagagaagctgttgggtctgaaggaagccggatgttttgcccaccttccgggtctggcagtgccaacagtc

SEQ ID NO: 32111 - DNA, 120 bp, Artificial Sequence
  ENSG00000048707_38 (sequence is synthesized)
aggaggaagctcatttcacacgacatgatttctttgaatctttgcatagaggtcaagcttttcacatcctgaacaacaccaccattcagtttaaactggagaagatccctatagagagag

SEQ ID NO: 32112 - DNA, 120 bp, Artificial Sequence
  ENSG00000048707_39 (sequence is synthesized)
aatctgaattgactttttctcttagcccagatgacctgggaacttctagcatcatgaagattgaaggaaaatttgtcaatccagttcaggtggtgttagcaaagcatgtatatgagcagg

SEQ ID NO: 32113 - DNA, 120 bp, Artificial Sequence
  ENSG00000048707_40 (sequence is synthesized)
ttttacaaaccctggacaatctcgtgtacagtgaagatctgaataagtatccagccagtgctacctcctccccttgccctgattctcctctgcctcccctcagtacctgtggagaatctt

SEQ ID NO: 32114 - DNA, 120 bp, Artificial Sequence
  ENSG00000048707_41 (sequence is synthesized)
ctgttgaaaggaaggagaatggattgttcagccactccagcctttctaacacctctcagaagtcattgtcagtgaaggaagtcaaatcctttactcagattcaagccaccttttgtatat

SEQ ID NO: 32115 - DNA, 120 bp, Artificial Sequence
  ENSG00000048707_42 (sequence is synthesized)
cagagcttcaggttcagctaagtggagatctgactttgggggcccaaggtcttgtgagcttaaagtttcaggactttgaggtggaattcagtaaagaccatccccagactttatctattc

SEQ ID NO: 32116 - DNA, 120 bp, Artificial Sequence
  ENSG00000048707_43 (sequence is synthesized)
agattgccctgcattctctgctgatggaggacttattggagaagaatccagattctaaatataagaacctgatggtgtctcgaggagcccctaagccatctagtttagcacaaaaagaat

SEQ ID NO: 32117 - DNA, 120 bp, Artificial Sequence
  ENSG00000048707_44 (sequence is synthesized)
acctttctcagtcttgcccctcagtgtccaatgtggaatatcctgatatgcctcggtctctcccttcccacatggaagaagctcctaatgtcttccagttgtatcaaaggcccacctctg

SEQ ID NO: 32118 - DNA, 120 bp, Artificial Sequence
  ENSG00000048707_45 (sequence is synthesized)
cgtcccggaaaaagcaaaaggaagtccaagacaaggactatcccttgaccccacctccttctccaacagtggatgagcccaagatacttgttggaaagagtaaatttgatgattccttag

SEQ ID NO: 32119 - DNA, 120 bp, Artificial Sequence
  ENSG00000048707_46 (sequence is synthesized)
tccacatcaacatattcttggtagataagaaacatccagaattctcttccagttacaatcgagttaaccggagcattgatgttgattttaattgcttggatgtgctgatcacactgcaaa

SEQ ID NO: 32120 - DNA, 120 bp, Artificial Sequence
  ENSG00000048707_47 (sequence is synthesized)
cctgggttgtgatattagacttttttggaatcggctccactgcagacaaccacgcaatgaggctgcctcctgagggcattctgcacaacgtgaagttggagccacatgcctccatggagt

SEQ ID NO: 32121 - DNA, 120 bp, Artificial Sequence
  ENSG00000048707_48 (sequence is synthesized)
ctggacttcaggatccagtgaacaccaaactggatctcaaggttcattcactttctctagtgctgaataagaccaccagtgagcttgccaaagcaaatgtgtccaaattagtagcacacc

SEQ ID NO: 32122 - DNA, 120 bp, Artificial Sequence
  ENSG00000048707_49 (sequence is synthesized)
tggaaatgattgagggagacctggccttacagggcagcattgggagtctgtctctaagtgacctcacatgccatggagagttctacagagaacggttcactaccagtggtgaagaagcac

SEQ ID NO: 32123 - DNA, 120 bp, Artificial Sequence
  ENSG00000048707_50 (sequence is synthesized)
tcatcttccagacttttaaatacggacggcctgaccctctgctccggagagaacacgacattcgcgtgagcctccggatggcctctgtgcagtatgtgcatactcagcgtttccaggcag

SEQ ID NO: 32124 - DNA, 120 bp, Artificial Sequence
  ENSG00000048707_51 (sequence is synthesized)
aggtggtggccttcattcagcatttcactcagctgcaggatgtcttagggcgccagcgagctgctattgaggggcagacggtgagagatcaagcccagcgctgttcacgggttctcctgg

SEQ ID NO: 32125 - DNA, 120 bp, Artificial Sequence
  ENSG00000048707_52 (sequence is synthesized)
atattgaggctggtgctcccgttctcttgatcccagaaagttccagatcaaataatctgattgtagcaaatttggggaagttgaaagtcaaaaataagtttctgtttgctggttttcctg

SEQ ID NO: 32126 - DNA, 120 bp, Artificial Sequence
  ENSG00000048707_53 (sequence is synthesized)
gcaccttttccctacaagataaggaatctgtgccttcagcttccccaacgggtattcccaaacacagtctgaggaaaacgacaagcacggaggagcccaggggaacccattcccaggggc

SEQ ID NO: 32127 - DNA, 120 bp, Artificial Sequence
  ENSG00000048707_54 (sequence is synthesized)
agttcacgatgcctcttgctggaatgagcctaggaagcctgaagagtgagtttgtgcccagtacctccaccaagcagcaagggccgcaacccacactgtctgttggccaagagtccagta

SEQ ID NO: 32128 - DNA, 120 bp, Artificial Sequence
  ENSG00000048707_55 (sequence is synthesized)
gtccagaagaccatgtctgcctgctggattgcgttgtcgtggatctccaggacatggacatctttgctgcagagagacatccgagagaatactcgaaggcaccagaggatagtagtggag

SEQ ID NO: 32129 - DNA, 120 bp, Artificial Sequence
  ENSG00000048707_56 (sequence is synthesized)
atctgatcttcccttcctattttgtgcgacagacaggaggaagcctcttaaccgagccttgtaggctgaaattgcaggtggaaaggaatttggacaaagaaataagtcatactgtgccag

SEQ ID NO: 32130 - DNA, 120 bp, Artificial Sequence
  ENSG00000048707_57 (sequence is synthesized)
acatatctatccatggcaatctctcctcagtccactgctctctggatctgtataaatacaagctgatccgcggcttattagagaacaacctgggagaacccatagaggaatttatgcggc

SEQ ID NO: 32131 - DNA, 120 bp, Artificial Sequence
  ENSG00000048707_58 (sequence is synthesized)
cttatgatttacaagatccaagaattcatactgtcctgagtggagaagtgtacacctgtatgtgcttcctcattgatatggtgaatgtaagtctggagcttaaagatccaaaaagaaaag

SEQ ID NO: 32132 - DNA, 120 bp, Artificial Sequence
  ENSG00000048707_59 (sequence is synthesized)
aaggtgctgggtccctagccagatttgacttcaagaaatgcaaactgctctatgaaagtttttccaaccaaaccaagtccattaacttggtttcccattccatgatggcttttgacaccc

SEQ ID NO: 32133 - DNA, 120 bp, Artificial Sequence
  ENSG00000048707_60 (sequence is synthesized)
gttatgctgggcagaagaccagccctggcatgacgaatgtgttcagctgtatctttcagcccgctaagaacagcagcaccacccaagggtccattcagattgaactacatttcagatcta

SEQ ID NO: 32134 - DNA, 120 bp, Artificial Sequence
  ENSG00000048707_61 (sequence is synthesized)
ccaaggattcctcctgctttacagtagttctcaacaatctccgtgtgtttctcatatttgactggctactgttagtccatgattttctccacactcccagtgatattaagaaacaaaatc

SEQ ID NO: 32135 - DNA, 120 bp, Artificial Sequence
  ENSG00000048707_62 (sequence is synthesized)
atgttactccttctcgccaccgtaactctagcagcgaatctgctatagttcccaaaactgtgaagagtggagtagttaccaagcggtcttcccttcctgtgtccaatgaaaggcacctgg

SEQ ID NO: 32136 - DNA, 120 bp, Artificial Sequence
  ENSG00000048707_63 (sequence is synthesized)
aggtcaaggtcaatgtaacaggtacggagtttgtggtcattgaagatgtgtcctgcttcgacaccaatgccattattctgaaaggcaccacagtgctcacctataagccccggtttgttg

SEQ ID NO: 32137 - DNA, 120 bp, Artificial Sequence
  ENSG00000048707_64 (sequence is synthesized)
atcgccccttttcaggaagtttgtttggcattgaggtgttttcatgccgactagggaatgagcatgatacagctctttcaattgtggatcccgtacaaattcaaatggagttggtgggga

SEQ ID NO: 32138 - DNA, 120 bp, Artificial Sequence
  ENSG00000048707_65 (sequence is synthesized)
attcttcttatcaaaatagttcaggattgatggatgcattcaatagtgaagatttcccacctgtcctggagattcagttacaagccctggatatcagactctcctataatgatgttcagc

SEQ ID NO: 32139 - DNA, 120 bp, Artificial Sequence
  ENSG00000048707_66 (sequence is synthesized)
tgtttcttgccattgcaaaatccatcccagagcaagctaatgctgcagtgccagactcagtggccctggagtcagactccgttggcacttaccttccaggtgcatctcgcgttggagagg

SEQ ID NO: 32140 - DNA, 120 bp, Artificial Sequence
  ENSG00000048707_67 (sequence is synthesized)
aaatcagagaagggacaagacacaccttagatcctgtcttggagttacagctggctaggctgcaggagctgggattcagcatggatgattgtcgcaaagctcttttggcgtgtcaaggcc

SEQ ID NO: 32141 - DNA, 120 bp, Artificial Sequence
  ENSG00000048707_68 (sequence is synthesized)
ggaacctctgaagtctctttccttggcctccaccagccgagatagcccaggggctgtggcagcgccattgatctctggcgtggagatcaaagctgagagtgtgtgcatctgtttcatcga

SEQ ID NO: 32142 - DNA, 120 bp, Artificial Sequence
  ENSG00000048707_69 (sequence is synthesized)
tgactgcatggattgtgatgttcctctcgctgaactcaccttttcccgtctgaattttcttcagcgtgtaagaactagccctgaaggctatgcccacttcaccctttctggagattatta

SEQ ID NO: 32143 - DNA, 120 bp, Artificial Sequence
  ENSG00000048707_70 (sequence is synthesized)
taaccgtgctctttcaggctgggagccatttattgagccttggccatgctctgtatcctggcaacagcaggcagctagtcgtctccatcctcctcgactgaagctagaagccaaggccaa

SEQ ID NO: 32144 - DNA, 120 bp, Artificial Sequence
  ENSG00000048707_71 (sequence is synthesized)
acctcgtttggatatcaatatcacttctgtgctaattgaccagtatgtaagtaccaaggaatcgtggatggcagattactgtaaagatgacaaggacatagagtcagctaaatcagaaga

SEQ ID NO: 32145 - DNA, 120 bp, Artificial Sequence
  ENSG00000048707_72 (sequence is synthesized)
ctggatgggctcttcggtggatcctccatgttttggacaaagcctcccccttgtctaccttagaactaggagtacagccagtctgactaacctagagcaccagatctatgctagagcaga

SEQ ID NO: 32146 - DNA, 120 bp, Artificial Sequence
  ENSG00000048707_73 (sequence is synthesized)
ggtgaaaacccccaagcgccggcagccatttgtcccctttgctctgaggaaccacacggggtgcactttgtggtttgccaccctgaccaccacacccaccagagctgcactctctcacag

SEQ ID NO: 32147 - DNA, 120 bp, Artificial Sequence
  ENSG00000048707_74 (sequence is synthesized)
tgggagtccaggggtagttccagaagggaacggaacatttctcgatgatactcacaatgttagtgaatggcgagaagtccttacaggtgaagagattccctttgaatttgaagcaagagg

SEQ ID NO: 32148 - DNA, 120 bp, Artificial Sequence
  ENSG00000048707_75 (sequence is synthesized)
aaagttaagacacagacacacccatgacctccggattcatcaactgcaagtgagagtaaatggctgggagcaagtgagcccagtgtctgtggacaaagtcgggaccttttttcgatatgc

SEQ ID NO: 32149 - DNA, 120 bp, Artificial Sequence
  ENSG00000048707_76 (sequence is synthesized)
agcaccagataaaaattcatcttcctctacgattggcagcccaagcagcagaacaaatattatacatccccaggtttatttctcttcactcccaccagtgcgggtggtctttgcagtgac

SEQ ID NO: 32150 - DNA, 120 bp, Artificial Sequence
  ENSG00000048707_77 (sequence is synthesized)
tatggaaggcagtgcacggaaagtcatcactgtccggtcagccctcattgtgaggaacagacttgagacaccaatggaactaagactggatagcccatcagctccagacaagccagtggt

SEQ ID NO: 32151 - DNA, 120 bp, Artificial Sequence
  ENSG00000048707_78 (sequence is synthesized)
gcttcctgctatcatgccaggggattcgtttgctgtgcctttacacctcacttcttggcggctacaggcccggcccaaaggattgggtgtatttttctgtaaggctcccattcattggac

SEQ ID NO: 32152 - DNA, 120 bp, Artificial Sequence
  ENSG00000048707_79 (sequence is synthesized)
caatgtagtgaagactgcagaaattagtagcagtaaacgagagtgccactctatggacacagaaaaaagccgatttttcaggttttgtgtggctataaagaaagagaattatccagatta

SEQ ID NO: 32153 - DNA, 120 bp, Artificial Sequence
  ENSG00000048707_80 (sequence is synthesized)
tatgccctcaaacatattttctgacagtgcaaaacagattttcagacagcctgggcataccatatatctcctgccaactgtggtaatctgcaacttgctaccctgtgaacttgattttta

SEQ ID NO: 32154 - DNA, 120 bp, Artificial Sequence
  ENSG00000048707_81 (sequence is synthesized)
tgttaaaggaatgccaattaatgggacgctgaaacctggcaaggaggcagctctccatacagctgatacatcccagaacattgagctgggggtatcactggagaatttccccctctgtaa

SEQ ID NO: 32155 - DNA, 120 bp, Artificial Sequence
  ENSG00000048707_82 (sequence is synthesized)
agaattgctcattccacctggaacccaaaactatatggtgagaatgcgactctatgacgtcaaccgtcggcagctgaacctcaccatccggattgtgtgtcgagcagaaggatccttaaa

SEQ ID NO: 32156 - DNA, 120 bp, Artificial Sequence
  ENSG00000048707_83 (sequence is synthesized)
gatcttcatttctgctccatattggctgattaacaaaacagggttgccactgatcttcagacaggacaatgccaagacagatgctgcaggccagtttgaggagcatgagctggcccgtag

SEQ ID NO: 32157 - DNA, 120 bp, Artificial Sequence
  ENSG00000048707_84 (sequence is synthesized)
cctgagtcctctcttattctgctatgctgacaaagagcagccaaacctctgcacgatgagaatcggaagggggattcatccagaaggcatgccgggctggtgtcagggcttctccctgga

SEQ ID NO: 32158 - DNA, 120 bp, Artificial Sequence
  ENSG00000048707_85 (sequence is synthesized)
tggtggtagtggtgtccgagctttgaaagtcatccagcaaggaaaccgcccagggctgatctataacattggtattgatgtcaagaaaggccgaggtcgatacattgatacctgcatggt

SEQ ID NO: 32159 - DNA, 120 bp, Artificial Sequence
  ENSG00000048707_86 (sequence is synthesized)
catctttgccccccgttacctgttagataataaatcatctcacaagcttgcatttgcacagagggaatttgccaggggacagggaacagccaatcccgaaggttacatttccacccttcc

SEQ ID NO: 32160 - DNA, 120 bp, Artificial Sequence
  ENSG00000048707_87 (sequence is synthesized)
tggttccagtgtggtgttccactggcctcggaatgactatgatcagctattgtgtgtcagactgatggacgttcccaattgtatttggtctggaggctttgaagtcaacaagaataattc

SEQ ID NO: 32161 - DNA, 120 bp, Artificial Sequence
  ENSG00000048707_88 (sequence is synthesized)
cttccatatcaacatgagggataccttgggaaaatgcttcttcctacgagtggaaattactctccgaggagctacgtataggatctcatttagtgacacagatcagttacctcctccttt

SEQ ID NO: 32162 - DNA, 120 bp, Artificial Sequence
  ENSG00000048707_89 (sequence is synthesized)
ccgaattgacaacttttctaaggtcccggttgtctttactcagcatggcgtagctgaacccaggctccggactgaagtgaagcccatgacttcattggattatgcctgggacgaacccac

SEQ ID NO: 32163 - DNA, 120 bp, Artificial Sequence
  ENSG00000048707_90 (sequence is synthesized)
cttgccaccttttatcactctgactgttaaaggggcagggtcctctgagatcaactgcaacatgaatgatttccaggataatcggcagctttattatgaaaatttcatttacattgctgc

SEQ ID NO: 32164 - DNA, 120 bp, Artificial Sequence
  ENSG00000048707_91 (sequence is synthesized)
tacatatacattctctggcttgcaggagggaacaggcaggcctgtggcttccaacaaggccattacctgtgcggagctcgttttggatgtctcacccaagacacaaagagtcattttaaa

SEQ ID NO: 32165 - DNA, 120 bp, Artificial Sequence
  ENSG00000048707_92 (sequence is synthesized)
aaagaaggaaccaggaaagcgttctcagctgtggaggatgacaggaacaggaatgctggcccatgagggctcctcagttcctcacaatcccaataagccctcagccgcccgctccaccga

SEQ ID NO: 32166 - DNA, 120 bp, Artificial Sequence
  ENSG00000048707_93 (sequence is synthesized)
ggggtctgccatcttagatattgctggtctcgctgcagtgactgacaacagatacgagccactgatgctgagaaagcctgaccgcaggcgaagcacaactcagacgtggagtttccgaga

SEQ ID NO: 32167 - DNA, 120 bp, Artificial Sequence
  ENSG00000048707_94 (sequence is synthesized)
aggaaaactgacctgtgggttacatgggttggtcgtccaggccaaaggaggactttctggtttgtttgatggagctgaagttgttcttggtcctgacacttccatggagcttttggggcc

SEQ ID NO: 32168 - DNA, 120 bp, Artificial Sequence
  ENSG00000048707_95 (sequence is synthesized)
agttccacctgaacaacaatttattaatcaaaaaatgagacctggttctggaatgttatccatcagagtcatcccagatggaccaactagagcactccagataacagatttctgccaccg

SEQ ID NO: 32169 - DNA, 120 bp, Artificial Sequence
  ENSG00000048707_96 (sequence is synthesized)
gaaaagcagccgttcatatgaagtggatgaacttcctgtcaccgaacaagagctgcagaaattaaagaatccagatacagagcaggaattggaagtgcttgtgaggttagaaggtggaat

SEQ ID NO: 32170 - DNA, 120 bp, Artificial Sequence
  ENSG00000048707_97 (sequence is synthesized)
tgggttgtccttaattaataaagtcccagaagaactggtctttgcaagtcttacaggaatcaatgtgcactatacacagctggcaaccagtcacatgcttgaactcagcatacaggatgt

SEQ ID NO: 32171 - DNA, 120 bp, Artificial Sequence
  ENSG00000048707_98 (sequence is synthesized)
acaggtggacaatcagctcattggtaccacgcagcccttcatgctctatgtgactcccctgagcaatgagaatgaggtcatcgagaccggcccagctgtgcaagtcaacgcagtgaagtt

SEQ ID NO: 32172 - DNA, 120 bp, Artificial Sequence
  ENSG00000048707_99 (sequence is synthesized)
ccccagtaagagtgcactgaccaacatctacaagcatctgatgatcacagctcagagattcacagtgcaaattgaggagaaactgctcctcaagctgctaagtttctttggctacgatca

SEQ ID NO: 32173 - DNA, 120 bp, Artificial Sequence
  ENSG00000048707_100 (sequence is synthesized)
agcagaatcagaggtggaaaaatatgatgaaaacctccatgaaaagacagctgagcaaggtggaacaccaattcgatactactttgaaaatctcaaaatcagcattcctcagatcaagct

SEQ ID NO: 32174 - DNA, 120 bp, Artificial Sequence
  ENSG00000048707_101 (sequence is synthesized)
aagtgtgttcacctccaacaagctcccattggatcttaaggccctaaaaagcaccttggggtttcctttgatacggtttgaagacgctgtgattaatctagatccattcactcgggtaca

SEQ ID NO: 32175 - DNA, 120 bp, Artificial Sequence
  ENSG00000048707_102 (sequence is synthesized)
tccctatgagaccaaggagttcatcatcaatgatatcctcaaacatttccaggaggaactcctcagccaggcagctcgaatcctgggatcagtggattttcttggcaatcctatggggct

SEQ ID NO: 32176 - DNA, 120 bp, Artificial Sequence
  ENSG00000048707_103 (sequence is synthesized)
tttgaatgatgtttctgaaggggttactggactgataaaatatggaaatgtcgggggcctcatcagaaatgttacacacggagtatcaaactctgctgccaagtttgctggaacattatc

SEQ ID NO: 32177 - DNA, 120 bp, Artificial Sequence
  ENSG00000048707_104 (sequence is synthesized)
agatggcttagggaagacgatggacaatcggcatcagtcagagcgggagtacatcaggtaccatgcagccacaagtggtgaacaccttgtagccggcatccatggcctggctcatggtat

SEQ ID NO: 32178 - DNA, 120 bp, Artificial Sequence
  ENSG00000048707_105 (sequence is synthesized)
cattggtggactgaccagtgttataacttcgacagtggaaggtgtgaaaacagaagggggtgtcagcggtttcatatctggccttggaaaagggcttgttggcactgtaaccaagccagt

SEQ ID NO: 32179 - DNA, 120 bp, Artificial Sequence
  ENSG00000048707_106 (sequence is synthesized)
ggcaggcgccctggattttgcatcagaaacagcccaggcggtgagagacacagccacactcagcggccccaggactcaagcacagagggttcggaaaccgcgttgctgcacggggcccca

SEQ ID NO: 32180 - DNA, 120 bp, Artificial Sequence
  ENSG00000048707_107 (sequence is synthesized)
ggggctgcttccccgatattctgagagccaggcggaaggacaggagcagctcttcaaactcacagacaacatacaggacgaattcttcatcgctgtggagaacattgacagctactgcgt

SEQ ID NO: 32181 - DNA, 120 bp, Artificial Sequence
  ENSG00000048707_108 (sequence is synthesized)
gctcatctcctccaaagctgtttacttcctgaaaagtggagactacgtggatcgagaagccattttcctagaagtcaaatacgatgacctctaccactgccttgtctccaaagaccatgg

SEQ ID NO: 32182 - DNA, 120 bp, Artificial Sequence
  ENSG00000048707_109 (sequence is synthesized)
gaaggtgtatgtgcaggtgaccaagaaagccgtgagcacgagcagtggagtgtccatccccggcccctcccaccagaagcccatggtccatgtgaaatctgaggtccttgctgtcaagtt

SEQ ID NO: 32183 - DNA, 120 bp, Artificial Sequence
  ENSG00000048707_110 (sequence is synthesized)
gtcacaagaaataaactacgcaaagagcctctactatgaacagcagcttatgttaagactcagcgaaaaccgagagcagctggagctggactcctgaagccccgctgctgagatgggcgc

SEQ ID NO: 32184 - DNA, 120 bp, Artificial Sequence
  ENSG00000048707_111 (sequence is synthesized)
tcccgacacagcgcagacccaccaggaggaaagaggcccagctctcagctgacgatggaggcagaaccggagtcgggtttggggaagttgtcaaggaatgagggaaagtaaatcctcatg

SEQ ID NO: 32185 - DNA, 120 bp, Artificial Sequence
  ENSG00000048707_112 (sequence is synthesized)
aggaaaagtacaaatggaaatcgtattaatttgtgaggcagggagttattttagattatgggaaataatttttaaaggtattggttaaataacgtttaaaaacatgtactgagatgaatc

SEQ ID NO: 32186 - DNA, 120 bp, Artificial Sequence
  ENSG00000048707_113 (sequence is synthesized)
taatttttagattgccctgtattttgttaacatgtatatatgtacaacagtgtgtttgtaaatatataggaacgtttctgaacagggtctgtgctatgtgtaaaggtttgttaactgtaa

SEQ ID NO: 32187 - DNA, 120 bp, Artificial Sequence
  ENSG00000048707_114 (sequence is synthesized)
agtaatataaagttatattggatcttctattgcactaattctagatgtctaattcaggatactgtctatagaaaggcattcttaaaagttaaagaatgttacgtcttagttttggagact

SEQ ID NO: 32188 - DNA, 120 bp, Artificial Sequence
  ENSG00000048707_115 (sequence is synthesized)
aaagtattcccagtaaagtgggttgaggtgagggctgtggtcctgaaagggacgcctttgacatcgtggctgtccagttgggctgtgagctgtggcacccaggactggcgctggcccttc

SEQ ID NO: 32189 - DNA, 120 bp, Artificial Sequence
  ENSG00000048707_116 (sequence is synthesized)
agaaggatctaggagaggggcttgggagcccacttttaatttctcacccccattttacaaagagtgcttagattcttacaaattatgatgtaagttatccatttggctttttcctaacta

SEQ ID NO: 32190 - DNA, 120 bp, Artificial Sequence
  ENSG00000048707_117 (sequence is synthesized)
gtcttaccaaacttagggggaaacctgtgctccattaccacatgggtgcaagtcagcattgtaagttttctcaggttattattattagagaggttggaaacattggtaaactctgttgat

SEQ ID NO: 32191 - DNA, 120 bp, Artificial Sequence
  ENSG00000048707_118 (sequence is synthesized)
tgagaaggaaaaaaaaagtcccattgaactgttgcaacaaatcagaaatccacataaaagtgctctcctgcctgggcagcaacaaccaagaacaaagccccgggactgttttctttttaa

SEQ ID NO: 32192 - DNA, 120 bp, Artificial Sequence
  ENSG00000048707_119 (sequence is synthesized)
taaagccacaggcaggcatcgtagctccacagcccgaggggacacaggatggaaaccccaggatgagaagggagcagggagagttccagaaagggggatgaaataggagtattaaaaagc

SEQ ID NO: 32193 - DNA, 120 bp, Artificial Sequence
  ENSG00000048707_120 (sequence is synthesized)
tgcgttggtaagtttttcatggaaccaagatttgacaaaggcatctcttatccttggttttaaattcctgctgggagcaaggcctggtatgagcgccctgggtcttgtttttggtgtttc

SEQ ID NO: 32194 - DNA, 120 bp, Artificial Sequence
  ENSG00000048707_121 (sequence is synthesized)
gcttttctgtaaggattaagcagatagggagaagggaaaaggggcctcactttagaatgaatgagtcaccttgtgatttttaaatttttattttaataaagctaatcaatttctacaacc

SEQ ID NO: 32195 - DNA, 120 bp, Artificial Sequence
  ENSG00000048707_122 (sequence is synthesized)
ttgtcacatgtagctgagtctgggatgactcagtggatcagtggatgcgtggaaggttttggtgtttataactcatgacccaaatccttccaagacacaaatgaagctaatcttcttccc

SEQ ID NO: 32196 - DNA, 77 bp, Artificial Sequence
  ENSG00000048707_123 (sequence is synthesized)
atgcagagaggaaggaagggagctttagcacaagtagctacatagtgttcaaggatcagctttcttgaactccgagg

SEQ ID NO: 32197 - DNA, 120 bp, Artificial Sequence
  ENSG00000048707_124 (sequence is synthesized)
ctacatagtgttcaaggatcagctttcttgaactccgaggcttggttgcctttgctgaactccaagttagtggattgcagaatggaaacttggcttttgcggcactgggtgagttttagt

SEQ ID NO: 32198 - DNA, 120 bp, Artificial Sequence
  ENSG00000048707_125 (sequence is synthesized)
ttgtgtgtgtcttgctggggggtggtgatgattgtctcagcactcacgcactgcacaagatggcagcaggatacagcactgcacaagatggcagctcctctgcagcttcctcctcagcct

SEQ ID NO: 32199 - DNA, 120 bp, Artificial Sequence
  ENSG00000048707_126 (sequence is synthesized)
ccctccttgcacccccacaggtttggcttgtggtttttgtcatcagtaacctactgcctgagatcatgatctcttaaaagatgagactctcggaagggttgattgtatgcgtcagtgagc

SEQ ID NO: 32200 - DNA, 120 bp, Artificial Sequence
  ENSG00000048707_127 (sequence is synthesized)
cttctatcaccttctggaacaaagtcacttgaaatctcttgatgagattaaggagtttagtgttactaagaaaatctgctttgggccgcagcagtgctgggtgttctcagacctgactga

SEQ ID NO: 32201 - DNA, 120 bp, Artificial Sequence
  ENSG00000048707_128 (sequence is synthesized)
ggaagttagctgcgggctgccctgtgggctggtgcttcaggaggaatccagagaagtgttcagatgccccccttgggctcctttctaattttaatcagctctttaaatagctgcccatct

SEQ ID NO: 32202 - DNA, 120 bp, Artificial Sequence
  ENSG00000048707_129 (sequence is synthesized)
cctgtgattgcacaaccaagcactttgacatttgcaccttaggagaggcagatgttaaaatggaatccaaagaccacctagggcggggctgggtgggagatgggagggccaactgcgagc

SEQ ID NO: 32203 - DNA, 120 bp, Artificial Sequence
  ENSG00000048707_130 (sequence is synthesized)
tgctccacttctcagctctcccctgccctgcagccctgggccagacaaggccagaaggtttcaggggcatttgacatcccctcctggttctcaccaggaaaacatccaaagctttggagg

SEQ ID NO: 32204 - DNA, 120 bp, Artificial Sequence
  ENSG00000048707_131 (sequence is synthesized)
aaacaggccctgcccctggctccttaaatgccccgtctctttgtaaactgatattcagccagcaatgcctaagactttgttaagatcatttctactgcttttctttctgcttcaaacaca

SEQ ID NO: 32205 - DNA, 120 bp, Artificial Sequence
  ENSG00000048707_132 (sequence is synthesized)
cagttcgtctctgaggaaagtaaaataaatggaataagagtaaattgggtaaggagatatccaaagctacccagtcccttgacccagcacagttggccgacccgtgtcactccctggctg

SEQ ID NO: 32206 - DNA, 120 bp, Artificial Sequence
  ENSG00000048707_133 (sequence is synthesized)
tcgctgcttctctgtgctcactgaagggtgagccaggccagtgcttccccagcccctgggcctggtcactacacagtggaaaacagacaagcggccccttccccaaatcccaagagtgtc

SEQ ID NO: 32207 - DNA, 120 bp, Artificial Sequence
  ENSG00000048707_134 (sequence is synthesized)
ttgctgcttggtgggtgctcatcgcaatgttctgaaggctccagggccactttgtttgtaagtatgatctgggcctcaaaataccatagtagctgcttgataaaattctaaaaatatctg

SEQ ID NO: 32208 - DNA, 120 bp, Artificial Sequence
  ENSG00000048707_135 (sequence is synthesized)
gttctctattatgtaaacactattacagtcaccagtgtgtgaagactcttgagtctggttctcatatcagagtcatcatttttcttcctgtggaataaaatgccttgtggacttcccaaa

SEQ ID NO: 32209 - DNA, 120 bp, Artificial Sequence
  ENSG00000048707_136 (sequence is synthesized)
acagatgcagccacacttgaggtgccactgaagctatgtgaagagcctgctacccttcaaacagaccaggcccaagcaaggtgccaagccatgtgagagtgcccagtccactgtgtaaat

SEQ ID NO: 32210 - DNA, 120 bp, Artificial Sequence
  ENSG00000048707_137 (sequence is synthesized)
gtgacggcctttgatggtagtgtttgaaaagatacttagtagaaagttgcagagacccgggagcagccatttcacaaaagaaggcaaaaatacctttgagaagaaaggaatgtctgcctc

SEQ ID NO: 32211 - DNA, 120 bp, Artificial Sequence
  ENSG00000048707_138 (sequence is synthesized)
ctctcacactgcatgtaatagaaccagctgccattcagaacttgcccatctgaggtcataaaggaaagcctgcacgtttcttttcttcaaacagcttttcaggactggggagaggaagaa

SEQ ID NO: 32212 - DNA, 120 bp, Artificial Sequence
  ENSG00000048707_139 (sequence is synthesized)
acgctgtctagagagggtcaaggcacggtgatgtttctctctggagaagcaaagcagtctgcctccctccccccggccagaaacgggacaccttagtgctttcttcagagtagctctctg

SEQ ID NO: 32213 - DNA, 120 bp, Artificial Sequence
  ENSG00000048707_140 (sequence is synthesized)
atgcggaaaaagcaattagacgtagcagaatttagcatctattgggatgtcgattgcactttactgggggatttgcctcagatggagttacagagtgactaccagaaggaaagccattcg

SEQ ID NO: 32214 - DNA, 120 bp, Artificial Sequence
  ENSG00000048707_141 (sequence is synthesized)
ttatagtaataaccgcaggaacgagagccgccgctggtgggcagctcaccatccgccaggagcaggcttggcgggcactgttttatttggtcttcacagcagtcctctaaggactcaagc

SEQ ID NO: 32215 - DNA, 120 bp, Artificial Sequence
  ENSG00000048707_142 (sequence is synthesized)
ggtatcttccccagcagtcagtatatatggtctgtcttcttttgtcctgagatggtcaatctttggggtggaggaccattgcctgaaagtgttaacccttatttctgtggcagagccagt

SEQ ID NO: 32216 - DNA, 120 bp, Artificial Sequence
  ENSG00000048707_143 (sequence is synthesized)
gcactgaccaacatctacaagcatctgatgatcacagctcagagattcacagtgcaaattgaggagaaactgctcctcaagctgctaagtttctttggctacgatcaagcagaatcagat

SEQ ID NO: 32217 - DNA, 120 bp, Artificial Sequence
  ENSG00000048707_144 (sequence is synthesized)
agagtatttgggatcaagagcaagatcctgtctgtttaatgctgtgttttccactttgggttggaacgccagtgtttatttgtattcagacagccacttgggagcctgcctgccagaggt

SEQ ID NO: 32218 - DNA, 120 bp, Artificial Sequence
  ENSG00000048707_145 (sequence is synthesized)
gagcacaggagccctgaaatgagcgctgtgcctctcctgccctgtctgtagtcacgtagggctggagccaaacaactgcatgtggttctgagcgaattaggatttcaacaaaggaaccaa

SEQ ID NO: 32219 - DNA, 120 bp, Artificial Sequence
  ENSG00000048707_146 (sequence is synthesized)
ttcggtggatcctccatgttttggacaaagtaagagttttcactacatgtgtttaactaaatcacttttgacctacaaagcaatgcttcactgagaaattcaaatggaaccatcattctg

SEQ ID NO: 32220 - DNA, 120 bp, Artificial Sequence
  ENSG00000048707_147 (sequence is synthesized)
tcttctgtagttctgttttagtctttgcaggagacagttttctggcatgaactactgaacttataaatgtgggctgtaattccacctttgcgggggagaaaagatctgcaacacgtaatt

SEQ ID NO: 32221 - DNA, 120 bp, Artificial Sequence
  ENSG00000048707_148 (sequence is synthesized)
cctaaatcctggtaataatgcatatgaactggtgcacctgagaatgcatcaggatcagctgtggtttgtgttttactctgcaaaacattggttttctaattgatcggatttttttggcca

SEQ ID NO: 32222 - DNA, 120 bp, Artificial Sequence
  ENSG00000048707_149 (sequence is synthesized)
gatttttaaaagcatctaaaatggtcttctaaatctagagatagagggtttggacatattcttgaaaagagggcgagcaggagcccatgtggaaaaagttgttaaaaagggagccctgtg

SEQ ID NO: 32223 - DNA, 120 bp, Artificial Sequence
  ENSG00000048707_150 (sequence is synthesized)
ctgttcatagagtataaaagaattgaatgccctgcctcttgaagaaagaggagtcagcttgctctctattgatgatgctttctttccttatttaatgcctcgccagctctgttttcctca

SEQ ID NO: 32224 - DNA, 120 bp, Artificial Sequence
  ENSG00000048707_151 (sequence is synthesized)
gagctggggagatggtgatggacaactgcatggtcttagttgttccacaagccattgtcatccaaattcaactcagctccaactcttacaatgtggtttctttggggagtcttggctgga

SEQ ID NO: 32225 - DNA, 120 bp, Artificial Sequence
  ENSG00000048707_152 (sequence is synthesized)
cttcacatagctcatgaatacttaaatattccatctggtctgcaaacgtgtcatgggaagattgggtgttcttagtgtgtgaagtaattgtactggttcatctctcctcagggtgaataa

SEQ ID NO: 32226 - DNA, 120 bp, Artificial Sequence
  ENSG00000048707_153 (sequence is synthesized)
gtggactttctgtctgccttgtacttctagaaagagacacaaagaaatgtcagctgtgcttgttctctgttttcccaggctgttgcttctgagtctcaaggtcattacttaggagccagg

SEQ ID NO: 32227 - DNA, 120 bp, Artificial Sequence
  ENSG00000048707_154 (sequence is synthesized)
gcttttcagatattgtcagctttgattttagctcctcctccaaccttcccaatttgtgtgtcaagaaaatgtaacatagtctacccagaagactctaaataatctttgtaatatgtccaa

SEQ ID NO: 32228 - DNA, 120 bp, Artificial Sequence
  ENSG00000048707_155 (sequence is synthesized)
gagagtgtgtttctaaaacattattcatgcaggggcatcttcaattcagagtcaaactctagcaaggcctggtctgcaagattctgatgaaagattttcttgtccctctctttcttcttt

SEQ ID NO: 32229 - DNA, 120 bp, Artificial Sequence
  ENSG00000048707_156 (sequence is synthesized)
ccttcttccctccctgcctccctttcttccttcctttttaaaatttttgtccctctctctttctctatagttaaaaggcttcctcatctatattaaatgctggtgctgagttaaagcttg

SEQ ID NO: 32230 - DNA, 120 bp, Artificial Sequence
  ENSG00000048707_157 (sequence is synthesized)
ttatttatttaaagatttttatgattacttaggcttataaaagtgtaatctatctttttaataagacataacttgaatatgcataaatttccaaacctcttttcttattggaaattcctg

SEQ ID NO: 32231 - DNA, 120 bp, Artificial Sequence
  ENSG00000048707_158 (sequence is synthesized)
cctggatggtagtacagtacattccaggattgtattcttttagcaggcctactaaaatgatcattgggaatttattttgaaagtgagtagggttcaaccttgttgaactaatcataaact

SEQ ID NO: 32232 - DNA, 120 bp, Artificial Sequence
  ENSG00000048707_159 (sequence is synthesized)
ttcaggtcttattcaagaatagtaagtcatattcctacaaaagttatgctttttattcagactggccttaaaacaagctcttgggaatagcccttaacatgaaatttagcctaagggacc

SEQ ID NO: 32233 - DNA, 120 bp, Artificial Sequence
  ENSG00000048707_160 (sequence is synthesized)
tgctgctttctcactgtttctttatcaggggaaagaaaataccagcctccttttgacaaaattgttggctttgttcagtcagggctgagattttgcaggtaaacctgggcggtgtggcac

SEQ ID NO: 32234 - DNA, 120 bp, Artificial Sequence
  ENSG00000048707_161 (sequence is synthesized)
ttcattgaatttattagttttgtattccaaggacattttatgaaaatatcaaatattctgaaaacttccatgcttgatttagaatttaaataaacactatgagacaactccttggtagag

SEQ ID NO: 32235 - DNA, 120 bp, Artificial Sequence
  ENSG00000048707_162 (sequence is synthesized)
attgtttaaatttggaacacatactgactcttcccctgaatttttgagatcccctgagactggcattttacttctgtgttttaccagttggaatggagcaaccttcactaaaatctgtac

SEQ ID NO: 32236 - DNA, 120 bp, Artificial Sequence
  ENSG00000048707_163 (sequence is synthesized)
tgatggatttttgtaactttttaatgccatttaagaacataacacctttaaattaaaaatcttcaaaaggctcgtcattctgttcaagagaaggttcaatacatattcttctaattcagg

SEQ ID NO: 32237 - DNA, 120 bp, Artificial Sequence
  ENSG00000048707_164 (sequence is synthesized)
gtttcagagagaaaacggaaactgagggttaaggaaggtaaccaacttatccatgatcacatggccagaaaatggtagaggcaggattcaaagtcaaatgagggtctttaaccgctattt

SEQ ID NO: 32238 - DNA, 120 bp, Artificial Sequence
  ENSG00000048707_165 (sequence is synthesized)
gcaggaagaaagccatgctctaggaatctggggctctgccttttgccattttgtgttatgtaaatgaatcacattcttttccattgccttctgtgataggcatgggtgtctcttgtgtat

SEQ ID NO: 32239 - DNA, 120 bp, Artificial Sequence
  ENSG00000048707_166 (sequence is synthesized)
ttgcaacaaatcaaatttgctgaaatagggaaacaggtaattttctctgacctttggttatatcactttcattttatacatgaagaaactgaggggcagaaaggattttatttttgattt

SEQ ID NO: 32240 - DNA, 120 bp, Artificial Sequence
  ENSG00000048740_0 (sequence is synthesized)
aaaagggcggtggggcggggggcggggcagggagagggagagaaatccagcagacatctagctctgcctttctttcccagccacagccagggtagggctgataaggcgctgatgcgttga

SEQ ID NO: 32241 - DNA, 120 bp, Artificial Sequence
  ENSG00000048740_1 (sequence is synthesized)
tggcagccttgcagagctagacctgcacttaacttgcagctgcctcccgagcctccaagatgtccacgccctgggtgacaggcggcagggcgctgccccgtgctcccccggctctgctcg

SEQ ID NO: 32242 - DNA, 120 bp, Artificial Sequence
  ENSG00000048740_2 (sequence is synthesized)
acagcagcacgcagtgagagcctcgccgccgccgaggagcaactcatgtaacggcacagccaacaagatgaacggagctttggatcactcagaccaaccagacccagatgccattaagat

SEQ ID NO: 32243 - DNA, 120 bp, Artificial Sequence
  ENSG00000048740_3 (sequence is synthesized)
gtttgtcggacagatcccccggtcatggtcggaaaaggagctgaaagaactttttgagccttacggagccgtctaccagatcaacgtcctccgggaccggagtcagaaccctccgcagag

SEQ ID NO: 32244 - DNA, 120 bp, Artificial Sequence
  ENSG00000048740_4 (sequence is synthesized)
taaaggttgttgtttcgtaacattttatacaagaaaagctgcacttgaggcccagaatgcactgcacaatattaaaactttacctgggatgcatcatcccattcagatgaaacctgcaga

SEQ ID NO: 32245 - DNA, 120 bp, Artificial Sequence
  ENSG00000048740_5 (sequence is synthesized)
tagtgaaaagtccaacgctgtggaagacagaaaattgttcataggaatggtatcgaagaaatgtaatgagaacgacatcagggtgatgttctctccatttggccagatagaagaatgccg

SEQ ID NO: 32246 - DNA, 120 bp, Artificial Sequence
  ENSG00000048740_6 (sequence is synthesized)
gatcctccggggacctgatgggctgagtcgaggctgtgcgtttgtcacattttctacaagggcaatggcacagaatgcaatcaaagccatgcatcagtctcagaccatggagggctgctc

SEQ ID NO: 32247 - DNA, 120 bp, Artificial Sequence
  ENSG00000048740_7 (sequence is synthesized)
ttcacctatcgtggtgaagtttgctgacactcagaaggacaaagagcaaaggcgcctccagcagcagctcgctcagcagatgcagcagctcaacactgccacctgggggaacctgacagg

SEQ ID NO: 32248 - DNA, 120 bp, Artificial Sequence
  ENSG00000048740_8 (sequence is synthesized)
gctgggcggactgaccccacagtatctggcgctcctgcagcaggccacctcctccagcaacctgggtgcgttcagcggcattcaacaaatggcaggcatgaatgctttacagttgcagaa

SEQ ID NO: 32249 - DNA, 120 bp, Artificial Sequence
  ENSG00000048740_9 (sequence is synthesized)
cctggcgacgctggctgctgctgcagctgcggcccagacctcagccaccagcaccaatgcaaaccctctctctaccacgagcagcgccctgggagccctcacgagtcccgtggctgcttc

SEQ ID NO: 32250 - DNA, 120 bp, Artificial Sequence
  ENSG00000048740_10 (sequence is synthesized)
aacccccaactccactgctggtgcagccatgaactccttgacctctctcgggactctgcaaggactggctggagccactgttggactgaataatattaatgcactagcagttgctcaaat

SEQ ID NO: 32251 - DNA, 120 bp, Artificial Sequence
  ENSG00000048740_11 (sequence is synthesized)
gctctcaggtatggcggctctgaatggaggacttggcgccacaggcttgacgaatggcacggctggcaccatggacgccctcacccaggcctactcaggaattcaacagtacgcagccgc

SEQ ID NO: 32252 - DNA, 120 bp, Artificial Sequence
  ENSG00000048740_12 (sequence is synthesized)
cgcgctgcccactctgtacagccagagcctgctgcagcagcagagcgctgcaggcagccagaaggaaggtccagagggggcaaacctctttatttaccaccttccacaggaatttggaga

SEQ ID NO: 32253 - DNA, 120 bp, Artificial Sequence
  ENSG00000048740_13 (sequence is synthesized)
ccaggacattctgcagatgttcatgccttttggaaatgttatctctgctaaagtcttcattgacaaacagaccaatctgagcaagtgctttggttttgttagctacgacaatccagtctc

SEQ ID NO: 32254 - DNA, 120 bp, Artificial Sequence
  ENSG00000048740_14 (sequence is synthesized)
tgcacaagctgctatccaagctatgaatggctttcagatcggcatgaaacgcttgaaggtgcagctgaagcgttccaaaaacgacagcaaaccttactgatcctaaccccagaggctccc

SEQ ID NO: 32255 - DNA, 120 bp, Artificial Sequence
  ENSG00000048740_15 (sequence is synthesized)
tgctctcattttagctttcttagggtaagtcccacgagccagcctgtctcaacagggaaggcagaggaggaccacattgccaacttttaccaagagagacggttatttttacaataaggc

SEQ ID NO: 32256 - DNA, 120 bp, Artificial Sequence
  ENSG00000048740_16 (sequence is synthesized)
ctccatgtccccacccacttcccctacccagtttgccataattaaaacttgggctactttgtttctattgagtaattcctcctccagttgtgccactgtattctcctttgttttgcgatt

SEQ ID NO: 32257 - DNA, 120 bp, Artificial Sequence
  ENSG00000048740_17 (sequence is synthesized)
tgaatctccttttacctttttttttaatttttttcatttttgcttttttttaaagagaagcatatacacaaataaatggcatcttgagaatttaaaaggcaaacaaacaaacgctaatgt

SEQ ID NO: 32258 - DNA, 120 bp, Artificial Sequence
  ENSG00000048740_18 (sequence is synthesized)
gcaattctaactctgaaaccactggtgccccgagagcactgcctggagaattcacccctccttgcccggcgcccgcccccggagggagggcccggtgcttagaggttaacttggtggcct

SEQ ID NO: 32259 - DNA, 120 bp, Artificial Sequence
  ENSG00000048740_19 (sequence is synthesized)
aggagagggagaagccaggagaagcacttactccaaccacacgtctttccactacatcggcttgttttactaagtaggattttattttagggttcaaagaaacatgacatttattggtca

SEQ ID NO: 32260 - DNA, 120 bp, Artificial Sequence
  ENSG00000048740_20 (sequence is synthesized)
aaatattacactggttgtctattttgttattgttttattttagtttttagaaaggattaatgtacaaaaagatttagagatctgtttcttaaagctacagggtttaaaaaataaaaatga

SEQ ID NO: 32261 - DNA, 120 bp, Artificial Sequence
  ENSG00000048740_21 (sequence is synthesized)
atgagtgaaaatacttgatgtttcttgaaagataaatttaataataataaataaatacataaatacataaataaaaaagaaagccacaggcctgtaaattttatttgtaaaaaagcattt

SEQ ID NO: 32262 - DNA, 120 bp, Artificial Sequence
  ENSG00000048740_22 (sequence is synthesized)
ttttatacaaaatttttactgcctcagaaataatggaagttatttattgcctattgttaacttattgggtacctaaagagcagttctctgtctagctagaaccttctgaagtagtctcta

SEQ ID NO: 32263 - DNA, 120 bp, Artificial Sequence
  ENSG00000048740_23 (sequence is synthesized)
gaggaattgttctaggaatgggctttttttcaccgttgaaccctagacctgaagttcatgctttatcctctcgttgtttgtatctgtctgattattttgtttgtaacttccattatctag

SEQ ID NO: 32264 - DNA, 120 bp, Artificial Sequence
  ENSG00000048740_24 (sequence is synthesized)
tttacagttcagtcgtctgactttccccgtatgtcacatttgttgaaactggaccttctccccctgtccctcaccccaaaacacccggaatccatcccgtttcgctctctccagatggat

SEQ ID NO: 32265 - DNA, 120 bp, Artificial Sequence
  ENSG00000048740_25 (sequence is synthesized)
tctcttggggtttcattgtgctgtggataaggagtgtaagaaatgcaaattatgtgaatggctcggagactccctaatgacctaagatttgcattagtttttctcctgcacccttaaaag

SEQ ID NO: 32266 - DNA, 120 bp, Artificial Sequence
  ENSG00000048740_26 (sequence is synthesized)
tgattttgttgccgctgcatagattctgtgtaactttttactcttccttgttttttccctagacatcttcatgcccgttagttcatcgtttgcctagcatgtccctgtggcgtctcaaaa

SEQ ID NO: 32267 - DNA, 120 bp, Artificial Sequence
  ENSG00000048740_27 (sequence is synthesized)
aaaagtttcatcgtcccgtcattgtttctgatgtctttctgacctcacatcatatttggttctcctactgacctttgatctagtttgacctttgaaatttgcatgtgacctcatctagct

SEQ ID NO: 32268 - DNA, 120 bp, Artificial Sequence
  ENSG00000048740_28 (sequence is synthesized)
atgaattctgggaagtcaatgtgaaaaacattgctgcattcatgcaagactgaaatttattattagacaaattcattatagaaaaaacctgtggcaaaaacgtttctttcttattttttt

SEQ ID NO: 32269 - DNA, 120 bp, Artificial Sequence
  ENSG00000048740_29 (sequence is synthesized)
tcctaaaacagacttgaaagtattatacagggattggcattcttcccggtcactggtaacaatagcaatatgtgtccagggacacagaatgttggtttctaacagactacttccaaaaac

SEQ ID NO: 32270 - DNA, 120 bp, Artificial Sequence
  ENSG00000048740_30 (sequence is synthesized)
agtttgagaaaaaaactgtctgattttaagtctctagaggtctgtaatagtttttacatttttcaggcagtgtaaagttttttgataaggccattttaggtggctcactttctcattaag

SEQ ID NO: 32271 - DNA, 120 bp, Artificial Sequence
  ENSG00000048740_31 (sequence is synthesized)
atatatatatagaaccactttttgtagattagtataagaaaaatatttaccctgttttggggcaaatgctacctatttgtgtcaccttttgctgaactcacagttagacaatccatggtt

SEQ ID NO: 32272 - DNA, 120 bp, Artificial Sequence
  ENSG00000048740_32 (sequence is synthesized)
taatgcacatgaaattacctatattttatactgtttcaatgtacaggagaaaggttactgtaaactgtgttatgttggtgcttctgtgaattaagttgtggtttcatcatgagtcttaat

SEQ ID NO: 32273 - DNA, 89 bp, Artificial Sequence
  ENSG00000048740_33 (sequence is synthesized)
atacgttgtttgcttaaaaaaaatttcatgtgagggaaaaaaaaaaaacctattccagaataagttttgtgttggcttgtgaagcattg

SEQ ID NO: 32274 - DNA, 120 bp, Artificial Sequence
  ENSG00000048740_34 (sequence is synthesized)
ctattccagaataagttttgtgttggcttgtgaagcattgatgtcattttttttaattgtggactatttagatgtgtttgtgttcagcaaaatgtgatgtttttttcttttaaagaaaaa

SEQ ID NO: 32275 - DNA, 120 bp, Artificial Sequence
  ENSG00000048740_35 (sequence is synthesized)
aagtgaaaatatatagtgccaaattccaaaggtacttccttcctagagcttcagtgtgtttcttgtgagaagtaatttgataacatgggtattttattatgtgttttgtataaatcccta

SEQ ID NO: 32276 - DNA, 120 bp, Artificial Sequence
  ENSG00000048740_36 (sequence is synthesized)
atatttaaaaaaaaaaacaaaacaaaaaaaggttacaaagtttgttaacttgctatcctgtggtcttgttgcctgaaattgttattgtttgttatttctctctgatgttttttgtaagac

SEQ ID NO: 32277 - DNA, 120 bp, Artificial Sequence
  ENSG00000048740_37 (sequence is synthesized)
attgtataagtgcccatgtcccacttttttaaccactccgcacatcagtgctgtgaaggcaacctcaccatgtattttcttcataatctatggaaacctctaaggtgagaaagttttgaa

SEQ ID NO: 32278 - DNA, 120 bp, Artificial Sequence
  ENSG00000048740_38 (sequence is synthesized)
cttttaaccctttctacccagagctatctggaatgttgatgactttttatactgtcatgatttgagtttgttttggggtgtttccaatttggatttttttccctgcatctatcctctaag

SEQ ID NO: 32279 - DNA, 120 bp, Artificial Sequence
  ENSG00000048740_39 (sequence is synthesized)
ttgtttcggtttgactactttgttctttggttaagatccaaaagaaaacagaaaacaattccacgaggccaatctaaagggaaaaaatcctacactacttttactacttttgattatttc

SEQ ID NO: 32280 - DNA, 120 bp, Artificial Sequence
  ENSG00000048740_40 (sequence is synthesized)
tcatttttgggaaaagaattcctaatgtgctactagaattccttcttcagttttaacgagtaattggataaaccctgagggaaaacggaggtagattcagcacctaacaatcctgtatgc

SEQ ID NO: 32281 - DNA, 120 bp, Artificial Sequence
  ENSG00000048740_41 (sequence is synthesized)
ttttgagatcacgtttagtgctatgtcctagtctagaatattttcatataccttgcagtaaaacgactttgtggcaggacagtctcttgaggggttttgtttctgtttcctaaatactcc

SEQ ID NO: 32282 - DNA, 120 bp, Artificial Sequence
  ENSG00000048740_42 (sequence is synthesized)
taaataatatttctaatcagccattatgctggggcatctctgatcccagtaggtacctctgaatataccaggtgtctggagttagaagcccatagccctttcccagcctttttggttttt

SEQ ID NO: 32283 - DNA, 120 bp, Artificial Sequence
  ENSG00000048740_43 (sequence is synthesized)
ttaattgaacacatttcatctaagtaaagctcagttctttatcacaatttactgaccaaatacctagcaccagttcctgctgccactttttaaagtgccatatgactttctacgaacagg

SEQ ID NO: 32284 - DNA, 120 bp, Artificial Sequence
  ENSG00000048740_44 (sequence is synthesized)
taccttgctgtcttgacaaatcctaatgtcacgcctacagccccaacacaagctccagtcttcctcttcggcatgccctggaagcttcttggcctcagctccccttccccgctcagcacc

SEQ ID NO: 32285 - DNA, 120 bp, Artificial Sequence
  ENSG00000048740_45 (sequence is synthesized)
ctgttaggatcagtgtgtgtggatgggatagccctgggatggaaaggactagcctctactgatgcaaaaaaacaaaaagcaacacaaacgtttccttcttatagcacatgcacttcctta

SEQ ID NO: 32286 - DNA, 120 bp, Artificial Sequence
  ENSG00000048740_46 (sequence is synthesized)
caatgacatgatttgtattatcctcacatgtgtttactactgctggggccttccttcatcctctgagggctattttgtactttctgcagcaatcagcttaataacaacacttattgcacc

SEQ ID NO: 32287 - DNA, 120 bp, Artificial Sequence
  ENSG00000048740_47 (sequence is synthesized)
tgtctctctctgagaacacggtgtgtctcgacacgtaccacgtacgtggaaacacaagagcccaccacttgaatttctaagaccatttcattctgaaacttcttatcaattacctaaatc

SEQ ID NO: 32288 - DNA, 120 bp, Artificial Sequence
  ENSG00000048740_48 (sequence is synthesized)
tcaacgaaaaacaatttactgaagccgactcccctccccatctccctctcaacctcaacccacctgcatgcatctcccccagaggaaacactgagggtaggggacaggaggctcaggacg

SEQ ID NO: 32289 - DNA, 120 bp, Artificial Sequence
  ENSG00000048740_49 (sequence is synthesized)
cgccctctgaatcgagtgtttcttcttcacaagtcaccaagagaggacatgagggggaaagtcctttttgcccttctccaaaaaataaccttccacagagacaaactgtccttctatcca

SEQ ID NO: 32290 - DNA, 120 bp, Artificial Sequence
  ENSG00000048740_50 (sequence is synthesized)
cttttatcttttaataaatatcaaaaggaaaaagctgcaagggtgcaaagggcctgtgccagaagaaaacacacacagggaaaccgctttttttaatcaattgtagagaatagtcatttt

SEQ ID NO: 32291 - DNA, 120 bp, Artificial Sequence
  ENSG00000048740_51 (sequence is synthesized)
taatctaaattagagaattgtgatacaatggcagtcctcaaaggcgtaacgagttcatctttctttcaccataggggttatagttggcttgtgctactctggaatcattttactgtttgt

SEQ ID NO: 32292 - DNA, 120 bp, Artificial Sequence
  ENSG00000048740_52 (sequence is synthesized)
ttttattatcttaagtgctaattaaaaaaaaaataaaattttaaaaaaacctgtagtttcattacctttttgaataatgtcatacaaaaaatgtatttgtttttttgtgctgtgagaatt

SEQ ID NO: 32293 - DNA, 120 bp, Artificial Sequence
  ENSG00000048740_53 (sequence is synthesized)
gatgtttgtagattaataatcattttgtttagaattacaaaatagtttttaaatattgtctgagaaaagccaaagttaatgcaacctagtggaaactgtaagaccatttgagtattgttt

SEQ ID NO: 32294 - DNA, 120 bp, Artificial Sequence
  ENSG00000048740_54 (sequence is synthesized)
gttttattgatgcatttggattttgttgtttgatggaatttgagccaaaaaaaaaatacgcaggctttcctatttctacaactgattgtacttatgcattttgtaccagtggaacttttt

SEQ ID NO: 32295 - DNA, 120 bp, Artificial Sequence
  ENSG00000048740_55 (sequence is synthesized)
atactggagattaaaaaaaaaatggaaatttttgtggcttgctctggtgggcccctgacaatgactgatttcaagtttgatttcgggttgattgattgattgattgatagaaagaaagtt

SEQ ID NO: 32296 - DNA, 120 bp, Artificial Sequence
  ENSG00000048740_56 (sequence is synthesized)
gcttttcttttgagaattaaaaactttggcttgatttcttttttccctttgcttatatctagcattagaattttgtcttaaaataacagcggtaagtttcactttttattctgtattgtg

SEQ ID NO: 32297 - DNA, 120 bp, Artificial Sequence
  ENSG00000048740_57 (sequence is synthesized)
cagttacacaataaggtaattagatttagaagtactcagtcactttaagtggataaatgtattagttaaaactttagggtttgcttttttgctgtttagatcaaagttttttctgattct

SEQ ID NO: 32298 - DNA, 120 bp, Artificial Sequence
  ENSG00000048740_58 (sequence is synthesized)
tctgtcctcattgtgaacataaccgtgtagttgaaacagtcaaacttatttttgtaatgtatgttattgtgtgatgcagttttttgcttctgtctccaatattaaaccattttcctaata

SEQ ID NO: 32299 - DNA, 120 bp, Artificial Sequence
  ENSG00000048740_59 (sequence is synthesized)
attatatgttggtgatacatctgcacacctcactgtttcacgtatctgtttttttctctatgttgtgtaaaaagatacagtcgattccacttaagtgaatatctgatttggggaagagga

SEQ ID NO: 32300 - DNA, 120 bp, Artificial Sequence
  ENSG00000048740_60 (sequence is synthesized)
aactgcacagcagccacctttgatttatgtacaaccgcccacttgaactcctgcttccaagatttatacacttttttcctacagttcacctcagtaactgcctttggggttggatttgcc

SEQ ID NO: 32301 - DNA, 120 bp, Artificial Sequence
  ENSG00000048740_61 (sequence is synthesized)
aaggtgttttacggtcttttgaccacacaggttaatttccccttctctcccctccctcatgagtctatccacgcagttcttaacatacattccaaactgctgcggggtttcctctccaca

SEQ ID NO: 32302 - DNA, 120 bp, Artificial Sequence
  ENSG00000048740_62 (sequence is synthesized)
cccacgaggccaaacccgcatcattacagtccaactcttcttagacactaatcactttctaaaagaagtgagttctccagggaagaaaaatcaacttagccagtgaaaagggttaaactt

SEQ ID NO: 32303 - DNA, 120 bp, Artificial Sequence
  ENSG00000048740_63 (sequence is synthesized)
aagtctattatttgttgccctcaatcaaaagatatgtatagaaaagtcatttaaattatttatttctacaagctaattgaatccaggagcagctttaattattaacactaacggaagaga

SEQ ID NO: 32304 - DNA, 120 bp, Artificial Sequence
  ENSG00000048740_64 (sequence is synthesized)
aaagaagtatttccaagggctcaaatggaagctgtactcagtccggtggaggcagggggaggtaaagtttctcacactcaagtcgtcttcatagtttactgtccttttccaaacaaaagc

SEQ ID NO: 32305 - DNA, 120 bp, Artificial Sequence
  ENSG00000048740_65 (sequence is synthesized)
taataacgccatacgcatccacacactccctcctggatgaacctaagtctcgtccccactgtcaccccaaggccagttatcaaaaactgttccttctctgccctcaaagactgaagccgc

SEQ ID NO: 32306 - DNA, 120 bp, Artificial Sequence
  ENSG00000048740_66 (sequence is synthesized)
aggccctgttctgcctctgctcaggaatctgattgctcttaaagtgctcttacaagattccgtcgatgtttgctccctctgtcttatctctccttccagtattttcagacgcacaagctc

SEQ ID NO: 32307 - DNA, 120 bp, Artificial Sequence
  ENSG00000048740_67 (sequence is synthesized)
tgactcaggccacccagcacctggcagccttcctctgcgtgccagtgaaatctctcccagtaggtgctcaggctcttcaccctctcgttgcagcagcccctctggcccgagattgtattt

SEQ ID NO: 32308 - DNA, 120 bp, Artificial Sequence
  ENSG00000048740_68 (sequence is synthesized)
tctagtctgctcaagaacagaggggcctggcgaggtggaggaagggaggctccctccccggggctggccgcctcagtgatggtgatgccaccagctccagcctgcacggatggagctcac

SEQ ID NO: 32309 - DNA, 120 bp, Artificial Sequence
  ENSG00000048740_69 (sequence is synthesized)
ttcctaccatcacttctgctttcagtctcctcatagccttcggcagtctcctctgaaaacacactgcctacgttagtgggaaaggatggctaagggtgtgatttctttttattagggagg

SEQ ID NO: 32310 - DNA, 120 bp, Artificial Sequence
  ENSG00000048740_70 (sequence is synthesized)
tgggagggggatgttgggaggcatggggggtgattaaattatcatttccaaggtgcaagtgtttatttttcaaatctataagtacatagttccaccattttggcacaagacaaaatactc

SEQ ID NO: 32311 - DNA, 120 bp, Artificial Sequence
  ENSG00000048740_71 (sequence is synthesized)
atgctaagcaaaggaagagaaagacaaagccagtttttgttgcttttctaaagcaacaaataattctccaaagaaggggatgaaaatgctagttcctttaagcacttactgactgtaaag

SEQ ID NO: 32312 - DNA, 120 bp, Artificial Sequence
  ENSG00000048740_72 (sequence is synthesized)
ttggtccctgcttaaattcatacccatagttttgagtcggtatgacaccactgcagtgtgagcaaggtgaatccgtgtgccatgcatggaccaccttgggataccgcagcaccatcaaca

SEQ ID NO: 32313 - DNA, 120 bp, Artificial Sequence
  ENSG00000048740_73 (sequence is synthesized)
tccgccttgctgatggaagccacacacgctgcccagcccacagcagtcgcacgcagccgatgggctcggactcttagctggcaggctaggacacacagtgaacattaatgtactgtgaat

SEQ ID NO: 32314 - DNA, 120 bp, Artificial Sequence
  ENSG00000048740_74 (sequence is synthesized)
cgttcctgataagtgaataaaacattgtgaccaaacaatcagcttattcacttatcaggaatcgactgttctgctaatttgctgttgttgtttttcatctctgttgtagttcactatttt

SEQ ID NO: 32315 - DNA, 120 bp, Artificial Sequence
  ENSG00000048740_75 (sequence is synthesized)
tgctgtgttctgttttctcctctcatgcttgggcaaatcactgggaatattatcttcatgtgaccatgaaacgtttctattgagtgaaaatgatatcttaacaaaatctatgcacttgct

SEQ ID NO: 32316 - DNA, 120 bp, Artificial Sequence
  ENSG00000048740_76 (sequence is synthesized)
atcaggaacacaatactggatgtgtcttatatatattgaactatatagtactcgatttcttaaataaagcttaagaaaggactctgttgtgtgtaaagttaatgtgattatttttcaaag

SEQ ID NO: 32317 - DNA, 120 bp, Artificial Sequence
  ENSG00000048740_77 (sequence is synthesized)
cagtgtttctaaggggtatttttgttcttttaagtcttgagtgatacaggatatttttcattaaaattatatcactggctttatgacttaatattcaataaattgactttggaaacaaaa

SEQ ID NO: 32318 - DNA, 120 bp, Artificial Sequence
  ENSG00000048740_78 (sequence is synthesized)
gacggagctctggtggccggggggaaagagctcttcttaccaaattacccgctcatctgatttaatatttgcaaagatcctttcctaagtaacggcacagccaacaagatgaacggagct

SEQ ID NO: 32319 - DNA, 120 bp, Artificial Sequence
  ENSG00000048740_79 (sequence is synthesized)
gagaagtcaggaaaagtgcgtgtcagcccgggaaggagggagccgcggggcgccagggcccggcctgggtccagaatcctccgtctgttccccagcaccccatccccgcctcctcctctc

SEQ ID NO: 32320 - DNA, 120 bp, Artificial Sequence
  ENSG00000048740_80 (sequence is synthesized)
cggactcgccctcagccggctcctagacaatggtttccttggtctctgacttggatcctctgaaaaactggaaagttttaagacttttgtgattcgatcagatccttctgcgctcccaga

SEQ ID NO: 32321 - DNA, 120 bp, Artificial Sequence
  ENSG00000048740_81 (sequence is synthesized)
gttcaagcaggagtaagcaattcctttgacgatatttgggaacctcgctattcacaagagacggccacagagttagctgggagtctaccaagtaacggcacagccaacaagatgaacgga

SEQ ID NO: 32322 - DNA, 120 bp, Artificial Sequence
  ENSG00000048740_82 (sequence is synthesized)
attggcggagcgcgaggagagaatgtgacaagtgccggctcggcggccgccgggggaggccgcgcgcacctgtccctgcccgtctcgcgccgcccgcggccgctcggacgcgcgcagagc

SEQ ID NO: 32323 - DNA, 120 bp, Artificial Sequence
  ENSG00000048740_83 (sequence is synthesized)
gagccgccccccgccgctgccgccgcgtgcgcccgcgaacatgacttctgccttcaagctggatttcctcccggacatgatggtcgagggccgcctgctcgttcctgacagaattaacgg

SEQ ID NO: 32324 - DNA, 120 bp, Artificial Sequence
  ENSG00000048740_84 (sequence is synthesized)
cgactgtggcattgatgtttgagcatacttctgaactggcttttgttgagactatcagtatagaagcatgcgctgtcccaaatccgctgttactatgagaaatgaagagctgcttttaag

SEQ ID NO: 32325 - DNA, 120 bp, Artificial Sequence
  ENSG00000048740_85 (sequence is synthesized)
ttctccacagaaagtggtcagccagaaatgacccgaaaaaggatatgccacggggagaactaaaacttgggatggaggagcacatgctttgataggcaaaagctgtctacactcgttttg

SEQ ID NO: 32326 - DNA, 120 bp, Artificial Sequence
  ENSG00000048740_86 (sequence is synthesized)
cctcagaaaatccccaaccactctccacccccagattctcttcagtgtgtagcacagcgcgtgtgctcatccatggggttctgtggctggcagctcttttcaggtttccaggagtttggt

SEQ ID NO: 32327 - DNA, 120 bp, Artificial Sequence
  ENSG00000048740_87 (sequence is synthesized)
ttggtttggtttcggtcggttctgtcctgcgaggcagggtgttacggtgggaaaagttaatggactggaaggctggaagcctgaacccagctctgctgccaggcagctgtgggaagtcag

SEQ ID NO: 32328 - DNA, 120 bp, Artificial Sequence
  ENSG00000048740_88 (sequence is synthesized)
gcagatgctgctccctctctgggcttgggagtctccatttgagaatggaaagttctgggtcagatgattcttaaaggtagcctccagctccaaagtctaaagattcatgacaattaaata

SEQ ID NO: 32329 - DNA, 120 bp, Artificial Sequence
  ENSG00000048740_89 (sequence is synthesized)
agaggcttcaggcttgatctgtgtttgttcccaaagaaagccaaggaggacggtgttaataaagagagatttaagtgagagctgtgcttggaataaagtgggctacaaaaaggtcaaatt

SEQ ID NO: 32330 - DNA, 80 bp, Artificial Sequence
  ENSG00000048828_0 (sequence is synthesized)
ctcggcctcgcagcggcggcagcggcggcggcggcaggtccctccccagacatggccctgggaggcggcagcacatggcg

SEQ ID NO: 32331 - DNA, 80 bp, Artificial Sequence
  ENSG00000048828_1 (sequence is synthesized)
gccgccccccgcccgcacccgcgcccgcgcccccgccgccgccatgggcgtgcagggcttccaggactacatcgagaagc

SEQ ID NO: 32332 - DNA, 120 bp, Artificial Sequence
  ENSG00000048828_2 (sequence is synthesized)
cagggcttccaggactacatcgagaagcactgcccgagcgccgtggtgccggtggagctgcagaagctggcccggggcagcctggtgggcggcgggcggcagcggcccccgcagaccccg

SEQ ID NO: 32333 - DNA, 120 bp, Artificial Sequence
  ENSG00000048828_3 (sequence is synthesized)
ctgcgcctgctggtggacgccgacaactgcctgcaccgcctctacggcggcttctacaccgactgggtcagcggcggccagtggaaccacatgcttggctacctggcggcgctggccaag

SEQ ID NO: 32334 - DNA, 120 bp, Artificial Sequence
  ENSG00000048828_4 (sequence is synthesized)
gcctgcttcggcggcaacatcgagctcttcgtcttcttcaacggcgcgctcgagaaggcccggctgcacgagtgggtcaagcggcagggcaacgagcgccagacggcacagcagatcgtc

SEQ ID NO: 32335 - DNA, 120 bp, Artificial Sequence
  ENSG00000048828_5 (sequence is synthesized)
agccatgtccagaacaagggcaccccgccgccaaaggtctggttcctgccgcccgtctgcatggcccactgcatccgcctggcgctcatccgcttccacgtcaaggttgcacagagcatt

SEQ ID NO: 32336 - DNA, 120 bp, Artificial Sequence
  ENSG00000048828_6 (sequence is synthesized)
gaggatcaccatcaggaagtgattggtttctgcagagagaatggtttccatggcttggttgcgtatgactctgattatgcactgtgcaacatcccctactatttcagtgcccatgcccta

SEQ ID NO: 32337 - DNA, 120 bp, Artificial Sequence
  ENSG00000048828_7 (sequence is synthesized)
aaactgagccggaacgggaaaagtctcaccacaagccaatatctgatgcatgaagttgccaagcaactggacctgaatccaaatcgttttcctatttttgctgctctcttaggaaatcac

SEQ ID NO: 32338 - DNA, 120 bp, Artificial Sequence
  ENSG00000048828_8 (sequence is synthesized)
attctgcctgatgaagatctggcttcctttcactggagtttacttggtccagaacatccactagcctcactaaaggtccgggcccaccagctggtcttgccaccttgcgacgtagtgatc

SEQ ID NO: 32339 - DNA, 120 bp, Artificial Sequence
  ENSG00000048828_9 (sequence is synthesized)
aaagccgttgctgactatgtacgcaacattcaggacacctctgacttggatgccatagctaaagatgttttccagcattcacagtctagaacagatgacaaagttattcgatttaagaga

SEQ ID NO: 32340 - DNA, 120 bp, Artificial Sequence
  ENSG00000048828_10 (sequence is synthesized)
gcaattggatattattcagcgactagtaagcctatgtcatttcatccaccacattacttagcagccagacccggtccgtttggaatgcctgggatggtgccgccgcatgttcctcctcag

SEQ ID NO: 32341 - DNA, 120 bp, Artificial Sequence
  ENSG00000048828_11 (sequence is synthesized)
atgctcaacattccgcagacctctctgcaagcaaagcccgtggccccacaggtgcccagcccagggggcgccccgggccagggtccatacccgtacagcctctctgagccagcacctctc

SEQ ID NO: 32342 - DNA, 120 bp, Artificial Sequence
  ENSG00000048828_12 (sequence is synthesized)
actttggacacgagcgggaagaatctgacggagcagaacagctacagcaacattcctcacgaagggaagcacacgccgctgtatgagcggtcctcgcccatcaacccggcccagagcggc

SEQ ID NO: 32343 - DNA, 120 bp, Artificial Sequence
  ENSG00000048828_13 (sequence is synthesized)
agccccaaccacgtggattccgcctacttccctggctcttctacatcgtcatcttccgacaacgacgagggcagcggaggggcgacaaaccatatcagcgggaacaagattggctgggag

SEQ ID NO: 32344 - DNA, 120 bp, Artificial Sequence
  ENSG00000048828_14 (sequence is synthesized)
aagacgggaagccactcagagcctcaggcacgaggagacccaggagaccaaacaaaggcagaaggctcgtccactgcctcttcaggaagccaactagccgaaggcaagggaagccagatg

SEQ ID NO: 32345 - DNA, 120 bp, Artificial Sequence
  ENSG00000048828_15 (sequence is synthesized)
ggcactgtccagccaatcccgtgcctcctgtcgatgcccaccaggaaccacatggacatcaccacacctcccctgccccccgtcgcacctgaggtgctgagagtggccgagcacaggcac

SEQ ID NO: 32346 - DNA, 120 bp, Artificial Sequence
  ENSG00000048828_16 (sequence is synthesized)
aagaaggggctgatgtacccctacatcttccatgtcctgacgaagggtgaaatcaaaattgctgtttctattgaagatgaagccaacaaggacctgcctccggccgctctgctctatagg

SEQ ID NO: 32347 - DNA, 120 bp, Artificial Sequence
  ENSG00000048828_17 (sequence is synthesized)
ccagttcgtcagtatgtttacggagtcctgtttagtttggcagaaagcagaaagaaaactgagagacttgcttttagaaagaacagacttccaccagaattttcaccagtgatcattaaa

SEQ ID NO: 32348 - DNA, 120 bp, Artificial Sequence
  ENSG00000048828_18 (sequence is synthesized)
gaatgggcagcttacaaaggaaagtctcctcaaaccccggaactggttgaagctcttgccttcagggagtggacctgccccaacctgaagaggctgtggttgggtaaggcggtagaggac

SEQ ID NO: 32349 - DNA, 120 bp, Artificial Sequence
  ENSG00000048828_19 (sequence is synthesized)
aagaaccgcaggatgagggccttcctggcctgcatgaggtcggacaccccagccatgctcaaccctgccaacgtgcccactcacctcatggtgctctgctgcgtcttacggtacatggtg

SEQ ID NO: 32350 - DNA, 120 bp, Artificial Sequence
  ENSG00000048828_20 (sequence is synthesized)
cagtggccgggagcacgcatccttcggcgtcaggagctagatgccttcctggctcaggcgctgtcccccaaactctacgagcctgatcagctccaggagctcaagattgagaacctagat

SEQ ID NO: 32351 - DNA, 120 bp, Artificial Sequence
  ENSG00000048828_21 (sequence is synthesized)
ccccgaggaattcagctatcagctctcttcatgagtggagtagacatggccttgtttgcaaatgatgcatgcggacagccaatcccctgggaacactgttgtccttggatgtattttgat

SEQ ID NO: 32352 - DNA, 120 bp, Artificial Sequence
  ENSG00000048828_22 (sequence is synthesized)
gggaagctcttccaatccaaactcctcaaagccagccgggaaaagaccccactcattgacctctgtgatggtcaggctgatcaggctgccaaggtagagaagatgcgccagagcgtcctc

SEQ ID NO: 32353 - DNA, 120 bp, Artificial Sequence
  ENSG00000048828_23 (sequence is synthesized)
gaggggctcagcttctccaggcagagccacacgctccctttcccgccgccacctgccctgcccttctaccctgcctctgcgtacccccggcactttgggcctgtcccaccctctcagggc

SEQ ID NO: 32354 - DNA, 120 bp, Artificial Sequence
  ENSG00000048828_24 (sequence is synthesized)
aggggcagaggctttgcaggcgtctgtggctttggaggcccctatggggaaacggtagcaacaggcccttaccgtgccttccgtgtggcggcagcatcgggacactgcggagccttctca

SEQ ID NO: 32355 - DNA, 120 bp, Artificial Sequence
  ENSG00000048828_25 (sequence is synthesized)
ggcagtgacagcagcaggactagcaagtcccagggcggagtccaacctataccttctcagggaggcaaactagaaatagctggcactgtggttggccattgggctgggagcaggcggggc

SEQ ID NO: 32356 - DNA, 120 bp, Artificial Sequence
  ENSG00000048828_26 (sequence is synthesized)
cgtgggggccgggggcctttccccctgcaggtggtttctgtcggaggaccagctagagggcgtccaagaggagttatttccaccccagtgattagaacatttggaagaggtggaaggtac

SEQ ID NO: 32357 - DNA, 120 bp, Artificial Sequence
  ENSG00000048828_27 (sequence is synthesized)
tatggcagaggttacaaaaaccaggcagcaattcagggcagacctccttatgctgcttcagcagaagaagtggccaaagaacttaagtcaaaatctggggaatcgaagtcctctgctatg

SEQ ID NO: 32358 - DNA, 120 bp, Artificial Sequence
  ENSG00000048828_28 (sequence is synthesized)
tcttcagacgggtccctggctgaaaacggagtgatggccgaggagaagccggctccccagatgaacgggagcacgggtgacgccagggcccccagccactctgaaagtgccttgaataat

SEQ ID NO: 32359 - DNA, 120 bp, Artificial Sequence
  ENSG00000048828_29 (sequence is synthesized)
gactctaaaacgtgcaatacaaatcctcatttaaatgcactaagtacagacagcgcttgccgcagagaagctgctctggaggcagctgtcttaaataaagaagagtaaacttatttttta

SEQ ID NO: 32360 - DNA, 120 bp, Artificial Sequence
  ENSG00000048828_30 (sequence is synthesized)
tagagggtgaaggatgctggaagggtaaggatttaggaatatctggagagaaagagagcctgcagttatgtacattttgtcctttccgtaagagaaaaatgaggactttggaaattcaga

SEQ ID NO: 32361 - DNA, 120 bp, Artificial Sequence
  ENSG00000048828_31 (sequence is synthesized)
tccctctttgatatcagagatttaaacaacacatttttagttttaaccagttgtagtcaaaatgctacaataaaacaaaaaagagaaagaaaatgaagagcatttgactcccgcacttaa

SEQ ID NO: 32362 - DNA, 120 bp, Artificial Sequence
  ENSG00000048828_32 (sequence is synthesized)
aatgaagtacacataaagtttaaactggttatgacaaaagcctttagttgtgtttcttgaactataaagaaaacaaattttggcagtctttaagtatatatagcttaaaatataattttt

SEQ ID NO: 32363 - DNA, 120 bp, Artificial Sequence
  ENSG00000048828_33 (sequence is synthesized)
agcatttggcaccatatgtatgccattatatttgattttgcattactgtttcacaatgaagctttctttaaggctttgatttttatgattatgaaagaaataaggcacaaccacagtttt

SEQ ID NO: 32364 - DNA, 120 bp, Artificial Sequence
  ENSG00000048828_34 (sequence is synthesized)
tctttcttaaatttcatcactgttgatgtggttcttttgtgttaaaaaaaaaaagtgcaactatcaaaactaaaaaattatagagtaatattgccgttctgctgattttaaatatacaat

SEQ ID NO: 32365 - DNA, 120 bp, Artificial Sequence
  ENSG00000048828_35 (sequence is synthesized)
acatcatacatactttacaagcaagttaaatggagataaagttgaaatcatagaagatgcaaatgacctttcaaaatcaacacaatgtgttctgaaactttcgtgactaataccatgcat

SEQ ID NO: 32366 - DNA, 120 bp, Artificial Sequence
  ENSG00000048828_36 (sequence is synthesized)
ctgtgatcaatgaactatgtggttttgaatcggatgtagaccattagtactactacttgagctaaacttctgcatggttcataatttttaaagtgtgtagttaatatgcatgttatcgtc

SEQ ID NO: 32367 - DNA, 120 bp, Artificial Sequence
  ENSG00000048828_37 (sequence is synthesized)
ctttcttccattcttaacagtatgtgcccatttgcaaaacaaaaatgctaataatcagtaatagtcctataaaagatgttaactctgtttagtcattgactgatcttgctctaaccttaa

SEQ ID NO: 32368 - DNA, 120 bp, Artificial Sequence
  ENSG00000048828_38 (sequence is synthesized)
aattttgtgattattgacctctgttgcatttattctaaagccccccaaaaattatctagccgtttcgaatatcaacattaccctggtgtattcactgctgtatgcattattgttctttgt

SEQ ID NO: 32369 - DNA, 120 bp, Artificial Sequence
  ENSG00000048828_39 (sequence is synthesized)
tgctgttttatgccttcatattagcaaatatgaaattctgtgaaaaaaaaccctttgatcttaaaaaaaaaaaaaccaccccccccttctgtagcaggaaacaaattgcttgttcttgag

SEQ ID NO: 32370 - DNA, 120 bp, Artificial Sequence
  ENSG00000048828_40 (sequence is synthesized)
aactttcccatcaagaatttagtagaagcaggtatacttctatcattttgatgtttttgttaatgtttccaaacaatgtactttgaaatcagaatcacttcttatcgttttcatatactt

SEQ ID NO: 32371 - DNA, 120 bp, Artificial Sequence
  ENSG00000048828_41 (sequence is synthesized)
ctgatgctcttcatcacattagtgatcagaaatgaggtgtaattccccaacccctgcccgcaagagctaagtaggatcttactgtaagttgaagggagttttgccctaactcatggattg

SEQ ID NO: 32372 - DNA, 120 bp, Artificial Sequence
  ENSG00000048828_42 (sequence is synthesized)
tgcaagaatgaactgctgttgggtttgattgactgtcgatggattgtggtgtggtgtatctgaaggctattgaatgcaacttacaatgcttaataaaaatctttattcttttagtataaa

SEQ ID NO: 32373 - DNA, 120 bp, Artificial Sequence
  ENSG00000048828_43 (sequence is synthesized)
cttctgttatttgatgagtggccattcctatgggtgttttgtccttttgtccttttttgaaccatttttctgtcttactaatctacttgaaacaaagttcactttcccctttctaaacat

SEQ ID NO: 32374 - DNA, 120 bp, Artificial Sequence
  ENSG00000048828_44 (sequence is synthesized)
tgaatgaaagatgaacatttataactgtaaatagttttaaaataactcgtgaaaagtctcacttttttccttcaacttagtatagaatattttatacttctaatgaaataatgcatcaca

SEQ ID NO: 32375 - DNA, 120 bp, Artificial Sequence
  ENSG00000048828_45 (sequence is synthesized)
ttattttatgacttgtaattttattctttttacttcaatttcagaattttcttaaaccatatttgtgctgtaatgtcaggtttaattctgatgtcagatacaatatctggttcctttatc

SEQ ID NO: 32376 - DNA, 120 bp, Artificial Sequence
  ENSG00000048828_46 (sequence is synthesized)
atttgtgcttagaaaataatgtttccccctttgaatggctcatagtgcttcatgtgttttgacttgttcatgacctcattgagtgcagttttaatagtgctaagaacaaaaaatataata

SEQ ID NO: 32377 - DNA, 120 bp, Artificial Sequence
  ENSG00000048828_47 (sequence is synthesized)
caggattttgttaacatacgcatagtcagaaaatgaaactatcattttatacagtgtcataatttcactttattagtgtcttaatgtatgcttaaatatatacatatagtgtggcatcaa

SEQ ID NO: 32378 - DNA, 120 bp, Artificial Sequence
  ENSG00000048828_48 (sequence is synthesized)
ttattttttaatcttggtgtctcaaatgtatctatgtgtatttaaatttcctcagtgatttgtagtctttatgttggcacttttaatcttagccccacaatttaacaagttacctcagtt

SEQ ID NO: 32379 - DNA, 120 bp, Artificial Sequence
  ENSG00000048828_49 (sequence is synthesized)
actagattaatcctgcagaactggtttattgctatcatgtattattaacatgaatacctatatgaccatatataaccagacttttctgtctattctctacaacccatctgtggtttgtaa

SEQ ID NO: 32380 - DNA, 120 bp, Artificial Sequence
  ENSG00000048828_50 (sequence is synthesized)
aatggagtcaataaatgcaataatgaactcctgttctcaaatactcctgaggtggacttcaactgttaactgactaatccaaatattgcttacttttattaattaaaggacatggaaaac

SEQ ID NO: 32381 - DNA, 120 bp, Artificial Sequence
  ENSG00000048828_51 (sequence is synthesized)
atgtagccagtactatttgctcagatcctttaatttattttttagttgtaatgcctccaaatctcatctattatttgatatgggtatgcatttatagtatcacttttcagattatggttg

SEQ ID NO: 32382 - DNA, 120 bp, Artificial Sequence
  ENSG00000048828_52 (sequence is synthesized)
taaggtgaacattttatttttcaggttcaacataaattataaagggtaagtgaaaagtaattgttgtggggaaaacattttgctaagtttaaggaaccaaagttttgggaagacatcttt

SEQ ID NO: 32383 - DNA, 120 bp, Artificial Sequence
  ENSG00000048828_53 (sequence is synthesized)
caaaataaggtgtgaagaaacaacactcattcctcgtggggctgtttgaaatgtaaggtccccaggagctacctgttatgtccacactgctggatctgatgcgtggatagtcggttagat

SEQ ID NO: 32384 - DNA, 120 bp, Artificial Sequence
  ENSG00000048828_54 (sequence is synthesized)
ctatatgagggttgcaaattgtaccgacatgctttcttatttcttatgaatttcaagggcaaatactgataaaatgaccatggttgagaaaattgtcttttcacattttaaaatgctact

SEQ ID NO: 32385 - DNA, 120 bp, Artificial Sequence
  ENSG00000048828_55 (sequence is synthesized)
taagttttttcagtttatcctataagctgaatggctctggtattaattgcccaggctaagacatttacagtgagatgcatctttatggtaatgaagagaatttgcaaagcatcatattat

SEQ ID NO: 32386 - DNA, 120 bp, Artificial Sequence
  ENSG00000048828_56 (sequence is synthesized)
tgagataaatattccctagatgagagtgttagaacacatgtagctactggattaatgaatatgaaagtatggagggtaaggggaaagaccagtttttaaattaaacttatgtgaatgaaa

SEQ ID NO: 32387 - DNA, 120 bp, Artificial Sequence
  ENSG00000048828_57 (sequence is synthesized)
gaaacagcaaatattacaaaattattatttaaagcatatatatcaatgaacttcatagacattgaggtcataaatgcattgttgtgctctgagtataattaaataaaatttgttgcatga

SEQ ID NO: 32388 - DNA, 120 bp, Artificial Sequence
  ENSG00000048828_58 (sequence is synthesized)
gacatcaccacacctcccctgccccccgtcgcacctgaggtgctgagagtggccgagcacaggcacaagaaggggctgatgtacccctacatcttccatgtcctgacgaaggttcaacat

SEQ ID NO: 32389 - DNA, 120 bp, Artificial Sequence
  ENSG00000048828_59 (sequence is synthesized)
atccattgtttgttttcctcggtacctcgtaatctcttgtgcattttctaaagccttagaagaatcatgactgagttgaccccgagtgcctctgtgtaaaggaggtgggcccatcatcgg

SEQ ID NO: 32390 - DNA, 120 bp, Artificial Sequence
  ENSG00000048828_60 (sequence is synthesized)
ggcagtaggccagggtaaaggctcttagaaaaggaggagaagccacagactttcttcctcagtaacattccaataatgatgtttattcagtaaaataataaaacaggtttacactttaaa

SEQ ID NO: 32391 - DNA, 120 bp, Artificial Sequence
  ENSG00000048991_0 (sequence is synthesized)
cggtgtccgggctggtgatggggttaattccctttcgtaagactcttacttgcacccacccagccccgccgtcgccccgccgcgccgcgctccaaccgcctcctcctcctcagtaacgcg

SEQ ID NO: 32392 - DNA, 120 bp, Artificial Sequence
  ENSG00000048991_1 (sequence is synthesized)
ggccacggaaaggtatgatatatttgatccaagacagtccattccagtccgggaatctacagtggtgacaaggacatgggactcctcctgccagattacagatggttcactacagttgac

SEQ ID NO: 32393 - DNA, 120 bp, Artificial Sequence
  ENSG00000048991_2 (sequence is synthesized)
atcctggctgacaactgtgaaaaagaaccttggattattttattttatttttgtgggacaccacaatcccaaatccaaaggacgcatcaggcttcaagctccctgtagaattcgaaaata

SEQ ID NO: 32394 - DNA, 120 bp, Artificial Sequence
  ENSG00000048991_3 (sequence is synthesized)
accttttctaatgaggatgtctgatactgttactgtaaaagatgaaactgcaacaatgaaggatttggaggcagaagtgaaagatacaaccagagttgaaaatcttatcaaatcagaaaa

SEQ ID NO: 32395 - DNA, 120 bp, Artificial Sequence
  ENSG00000048991_4 (sequence is synthesized)
ctatgggaagattttggtagagaagaatgaacattgtattgagaacaatatagatttgcagcggccattgcagtcatttggacagacaggaaaaaggtctaagtcaagctcaaagttaaa

SEQ ID NO: 32396 - DNA, 120 bp, Artificial Sequence
  ENSG00000048991_5 (sequence is synthesized)
gctagttcggagccttgcagtgtgtgaagaatctccaccaccccctgcaccagagatatcacaggagaaccaggagaaaattcagatccagttaacacaatcatttgagaaagaagagaa

SEQ ID NO: 32397 - DNA, 120 bp, Artificial Sequence
  ENSG00000048991_6 (sequence is synthesized)
gccctcaaaagatgaagcagaaaaagaaaaggccagtgataagttgcccagaaaaatgttatcaagagattccagtcaagaatacactgattcaactggcatagatctacatgaattttt

SEQ ID NO: 32398 - DNA, 120 bp, Artificial Sequence
  ENSG00000048991_7 (sequence is synthesized)
agtaaatacattaaaaaacaatcccagggacagaatgatgctgctgaaattggaacaagaaattttagatttcattggtaataatgagtctccacgtaaaaaattccccccaatgacatc

SEQ ID NO: 32399 - DNA, 120 bp, Artificial Sequence
  ENSG00000048991_8 (sequence is synthesized)
ttaccataggatgctattacacagagtagccgcttactttggattagaccacaatgttgatcagagtgggaagtctgtcatagtaaacaaaactagcaatacaagaatacctgatcagaa

SEQ ID NO: 32400 - DNA, 120 bp, Artificial Sequence
  ENSG00000048991_9 (sequence is synthesized)
atttaatgaacatattaaggatgataaaggtgaagactttcagaaacgttatatcctcaagagagataactctagctttgacaaagatgataaccagatgagaatacgtttgaaagatga

SEQ ID NO: 32401 - DNA, 120 bp, Artificial Sequence
  ENSG00000048991_10 (sequence is synthesized)
cagaagaagcaaatctatagaagaaagagaagaagagtaccagagagccagagaccgaatattttcccaagattccctgtgttcccaagagaattacattattgacaaaagactccaaga

SEQ ID NO: 32402 - DNA, 120 bp, Artificial Sequence
  ENSG00000048991_11 (sequence is synthesized)
cgaggatgccagtagtacccagcagaggcgccagatatttagagttaataaagatgcttcagggagatctacaaatagccatcaaagcagcactgagaatgagttgaagtactcggaacc

SEQ ID NO: 32403 - DNA, 120 bp, Artificial Sequence
  ENSG00000048991_12 (sequence is synthesized)
acgaccctggagcagcacagattcagacagctctcttcgaaacctgaaacctgctgtaaccaaagccagcagcttcagtggaatctcagtcctgacaagaggtgatagttctggaagcag

SEQ ID NO: 32404 - DNA, 120 bp, Artificial Sequence
  ENSG00000048991_13 (sequence is synthesized)
caaaagcataggcaggctttcaaaaacaggttctgagtcttctggtagtgtagggtcatctacaggctctctttctcacatccagcagcctcttccaggtacagctctcagccagtcttc

SEQ ID NO: 32405 - DNA, 120 bp, Artificial Sequence
  ENSG00000048991_14 (sequence is synthesized)
tcatggcgcacctgtcgtctatccaactgtcagcactcatagttctctttcctttgatggtggcctaaatgggcaagtcgcatctcctagcactagcttctttttgcttcccttggaagc

SEQ ID NO: 32406 - DNA, 120 bp, Artificial Sequence
  ENSG00000048991_15 (sequence is synthesized)
ggcaggcataccacctggcagtattctgatcaacccacaaacaggtcagcccttcataaacccagatgggagtccagttgtgtataatcctcctatgactcaacaaccagttagatccca

SEQ ID NO: 32407 - DNA, 120 bp, Artificial Sequence
  ENSG00000048991_16 (sequence is synthesized)
agtgcctggacctccacagccacctctgccagccccacctcaacaaccagcagctaatcacattttctcacaggataacctagggtctcagtttagccacatgagtcttgctcgccagcc

SEQ ID NO: 32408 - DNA, 120 bp, Artificial Sequence
  ENSG00000048991_17 (sequence is synthesized)
atctgctgatggttctgaccctcatgccgccatgttccagtccactgtggttcttcagtctccacagcagtctggttatatcatgacagcagcccctccaccacatcctcctccaccgcc

SEQ ID NO: 32409 - DNA, 120 bp, Artificial Sequence
  ENSG00000048991_18 (sequence is synthesized)
accaccaccacctcctcctcctcccctaccacctgggcagccagtccctactgctggatatcctgcctctggtcatcctgtcagccagcctgtgctccagcagcagggatatattcagca

SEQ ID NO: 32410 - DNA, 120 bp, Artificial Sequence
  ENSG00000048991_19 (sequence is synthesized)
tacaattcacatctaaaccaaccactgccacaacctgcgcagcagacaggttatcaagttatacccaaccagcagcaaaactaccaaggaatagttggagttcagcaaccccagagtcag

SEQ ID NO: 32411 - DNA, 120 bp, Artificial Sequence
  ENSG00000048991_20 (sequence is synthesized)
agcctagtcagtggccaacccaacagcattggaaatcagattcaaggagtggtcatcccctatacttcagtgccaacatatcaggtttcactgcctcaaggttctcaaggaattccccat

SEQ ID NO: 32412 - DNA, 120 bp, Artificial Sequence
  ENSG00000048991_21 (sequence is synthesized)
cagacttatcaacagcctgttatgttccctaatcagtctaatcaaggatctatgcccacaacaggaatgcctgtttactatagtgtcattccacctggtcaacaaaacaatttaagctct

SEQ ID NO: 32413 - DNA, 120 bp, Artificial Sequence
  ENSG00000048991_22 (sequence is synthesized)
tcagtaggttacctgcaacatccaggatcagaacaagtacaatttcctcgaaccacttcaccatgcagttcccagcagcttcaaggccaccaatgtacagctggaccaccaccgccacct

SEQ ID NO: 32414 - DNA, 120 bp, Artificial Sequence
  ENSG00000048991_23 (sequence is synthesized)
ggtggggggatggtgatgatgcagctcagtgtaccaaacaatccacaatcttgtgcccactcacccccgcagtggaaacaaaacaaatattactgtgatcaccagagaggacagaagtgt

SEQ ID NO: 32415 - DNA, 120 bp, Artificial Sequence
  ENSG00000048991_24 (sequence is synthesized)
gtagaatttagcagtgtagacaatattgtccagcacagccctcaactcagtagccccattatttcaccagctcagtcgccagcaccagctcagctgtccaccctgaaaactgtacgtccc

SEQ ID NO: 32416 - DNA, 120 bp, Artificial Sequence
  ENSG00000048991_25 (sequence is synthesized)
tctggaccaccactttccatcatgccccaattttctagaccttttgtccccgggcaaggagattccaggtatccattacttggccagccactgcagtacaatcctcctgctgttctgcac

SEQ ID NO: 32417 - DNA, 120 bp, Artificial Sequence
  ENSG00000048991_26 (sequence is synthesized)
ggacacattccaaaccaacagggtcagcctggcagcaggcatggaaaccgaggaaggagacaagctaaaaaagctgcatccacagaccttggagcaggagaaacagttgttgggaaggtc

SEQ ID NO: 32418 - DNA, 120 bp, Artificial Sequence
  ENSG00000048991_27 (sequence is synthesized)
ttggaaattactgaactaccagatggaataactcgcatggaagctgaaaagctttttggggaactctttaaaattggcgccaagatccggtggctccgggacccccagtcccaaccacgt

SEQ ID NO: 32419 - DNA, 120 bp, Artificial Sequence
  ENSG00000048991_28 (sequence is synthesized)
cgtcaccccctctgctgtggcagtggggacaacactgccaaccctgaacgctctaaacccagtgacttggcctccacctacaccgtcttagccacattcccctccatttcagctgcacag

SEQ ID NO: 32420 - DNA, 120 bp, Artificial Sequence
  ENSG00000048991_29 (sequence is synthesized)
aatgcactgaagaaacaaattaactcagttaacaagtttaagctgagaacaagcaagaagcactatgactttcacattttggaaagggcaagttctcagtaacagccacctttggaccct

SEQ ID NO: 32421 - DNA, 120 bp, Artificial Sequence
  ENSG00000048991_30 (sequence is synthesized)
tcgcctttatggttcccctgccctctcccatctttgattggcttggtatttggagcttctgttaacattatagagactcctaggatgtgtgttcatggcattatagcttttgaagaaagg

SEQ ID NO: 32422 - DNA, 120 bp, Artificial Sequence
  ENSG00000048991_31 (sequence is synthesized)
ccagtgatccagcaaagggggaaaaatatgcatttcaccccacatgactaggaatccacatcagaatgatacagagttagcaggtttttctaaggaaatgccattcaaatgcctcctaac

SEQ ID NO: 32423 - DNA, 120 bp, Artificial Sequence
  ENSG00000048991_32 (sequence is synthesized)
ttttatagttattttgttttatatttctaaattcttgtatcagatccaaagctctattgtacagcaaattattcttcaaaatgattataaccagttgcaccctgtatttctttttgcagc

SEQ ID NO: 32424 - DNA, 120 bp, Artificial Sequence
  ENSG00000048991_33 (sequence is synthesized)
cagcacaatgtgacccaacttaaaatttgggggaaaaagaatgcaggagtgaaataaccaagtcaaaaccatgtactatctccttgggggttagggatgctaagaagagcccacaaatag

SEQ ID NO: 32425 - DNA, 120 bp, Artificial Sequence
  ENSG00000048991_34 (sequence is synthesized)
aggattactcttcccctgaatctctaaactcagaaacaattaccaaaaaatacataactcttccttgtagggccctttccttattcatttaggtagtgtgaacattaagtataaaataaa

SEQ ID NO: 32426 - DNA, 120 bp, Artificial Sequence
  ENSG00000048991_35 (sequence is synthesized)
ttatgttcttaatgcctcttaaaccacttacattcaaaggggaacagaaatcattctaagcaggaaaatacttccactttttttttttcaagtatctctctaataactaaatgccactta

SEQ ID NO: 32427 - DNA, 120 bp, Artificial Sequence
  ENSG00000048991_36 (sequence is synthesized)
tttgcattctccttgtggattttttgtcacctaaggaaatgcatttgatgagtgctggaaacttcttaagtgctttacagtttgttttcattgtttgcagcggatcactggacatcaaag

SEQ ID NO: 32428 - DNA, 120 bp, Artificial Sequence
  ENSG00000048991_37 (sequence is synthesized)
gcatttcagatattctgggtggtgactggctagagtgttactgacatcacaacatacagctgttgactttctattgtctgagtcctcctcggcaagtgctttagactgctctagcaggca

SEQ ID NO: 32429 - DNA, 120 bp, Artificial Sequence
  ENSG00000048991_38 (sequence is synthesized)
ctcccaatgccagactaatcagctggatgtgtgcagtgagctctatagaggagcaatgcagagcatcagtttacaggtactatggaaagaacatctccttaactctgtatgatgaagcaa

SEQ ID NO: 32430 - DNA, 120 bp, Artificial Sequence
  ENSG00000048991_39 (sequence is synthesized)
gtgatggggttaattccctttcgtaagactcttacttgcacccacccagccccgccgtcgccccgccgcgccgcgctccaaccgcctcctcctcctcagtaacgcgggagaaaattcaga

SEQ ID NO: 32431 - DNA, 88 bp, Artificial Sequence
  ENSG00000048991_40 (sequence is synthesized)
tttatgccaccatacttgtttcccctgttcatcttattttgaacaattagaaaactctggcaagtaagacagtctctcactccgtcac

SEQ ID NO: 32432 - DNA, 81 bp, Artificial Sequence
  ENSG00000048991_41 (sequence is synthesized)
ttattttttatttttttgagacagtctctcactccgtcacccagtctggaatatagttcaagcagttctcatgcctcagcc

SEQ ID NO: 32433 - DNA, 120 bp, Artificial Sequence
  ENSG00000048991_42 (sequence is synthesized)
acaggcatgaaccaccgtgcccggcctctggcaataaaataaaatattttattgactttcaggagattccaggtatccattacttggccagccactgcagtacaatcctcctgctgttct

SEQ ID NO: 32434 - DNA, 120 bp, Artificial Sequence
  ENSG00000048991_43 (sequence is synthesized)
tgttcagtactctacagccccttacccatccccgttcctgccagtctcacccacccagcaatactctgtgcaggataacctagggtctcagtttagccacatgagtcttgctcgccagcc

SEQ ID NO: 32435 - DNA, 120 bp, Artificial Sequence
  ENSG00000048991_44 (sequence is synthesized)
agccttgaatcagtggtgttatggatgtcaacaacccagtgtccactggggtgtctcaatggagcgggaagttggcgattacagggcagtaaattcaggcatctataaaagaatgagacc

SEQ ID NO: 32436 - DNA, 66 bp, Artificial Sequence
  ENSG00000048991_45 (sequence is synthesized)
ctcaacaaccagcagctaatcacattttctcacagacggagtctccctctgttggattcacgccat

SEQ ID NO: 32437 - DNA, 120 bp, Artificial Sequence
  ENSG00000048991_46 (sequence is synthesized)
ctaaggaaatctttgttttcaaatattagggtttttttttaattgtggttaaaggattttggacatgctttgtaaattgttagtaaaaggacctattttccacctgtattctaagttatt

SEQ ID NO: 32438 - DNA, 120 bp, Artificial Sequence
  ENSG00000048991_47 (sequence is synthesized)
tggctacaaatactaaatattcagtatatatttatgtttattttcatacaaaactcacttctcaaaattctaaaagggtaagttgacccttcgtgacatgcttactagctggttttggag

SEQ ID NO: 32439 - DNA, 120 bp, Artificial Sequence
  ENSG00000048991_48 (sequence is synthesized)
ccagttggattagcttgctgtgagtcttaacttggcttgtatcatgtaatatacttctttttatttgtatgtggctagtgcatttttattggctttctactttctcattccacccttttc

SEQ ID NO: 32440 - DNA, 120 bp, Artificial Sequence
  ENSG00000048991_49 (sequence is synthesized)
ctaattaccagtgctgtgagagttttgaactctcacagttaaattttgagtttaacctaagagctcttaaaggaaagacaaatagaatacaataaaactgcagacgaactattggcaaaa

SEQ ID NO: 32441 - DNA, 120 bp, Artificial Sequence
  ENSG00000048991_50 (sequence is synthesized)
acagccctcagggggttcctcagtcactcaacctgactgacaaaaaagatttgtgggcccgggggaagttaatgcttttaatgctgtgcatatataatgacttagagctagccactgaga

SEQ ID NO: 32442 - DNA, 120 bp, Artificial Sequence
  ENSG00000048991_51 (sequence is synthesized)
caagtaatagcatttctagtactattcatttctttggtaaggttttccagttatctattttctcagaatgaagggctaacacttttaaacaatttattttattttattttatttttttga

SEQ ID NO: 32443 - DNA, 120 bp, Artificial Sequence
  ENSG00000048991_52 (sequence is synthesized)
tttagtagagatggagtttcactgtgttgcctaggctgttctagaactcctgagctccggcgatccgcccacctcggcttcccataatgctaggattacaggcgcaagccatcgcacctg

SEQ ID NO: 32444 - DNA, 120 bp, Artificial Sequence
  ENSG00000048991_53 (sequence is synthesized)
tacaggcgcaagccatcgcacctggcccacaattttttttttaatatctcatcatttatcagtcaggaaacgaagcaaggcttgggctgagtgaattttctattctacagggtatccaaa

SEQ ID NO: 32445 - DNA, 120 bp, Artificial Sequence
  ENSG00000048991_54 (sequence is synthesized)
gaggtcctttgttggcatttaacaggccggtggacttggtctggagcatcccggattgcttctcgcacctgtctggcacctaggtaggcaaggctgcagtgctgggctcaggtagaacta

SEQ ID NO: 32446 - DNA, 120 bp, Artificial Sequence
  ENSG00000048991_55 (sequence is synthesized)
gaagcacctatttatggctcctccaacaaggtgggtccaaagtagtcagacttcttatgtggcagctcaggggtcccagagagaatgttccaagaaagccaagcaaagctgcaaggtttc

SEQ ID NO: 32447 - DNA, 120 bp, Artificial Sequence
  ENSG00000048991_56 (sequence is synthesized)
ttttgacataggcccagaagttccagaacgttacttcagctatcttcttttgatgacataagtcaataaagccaggccagaggatggggaattagaccctacctctcagtaggaaagaat

SEQ ID NO: 32448 - DNA, 120 bp, Artificial Sequence
  ENSG00000048991_57 (sequence is synthesized)
tagaccctacctctcagtaggaaagaatttgtagccacctttaagctaccacaaaaagttattcaaaaaaaaattgtttaggccgggagcgatggctgtaatcccagcactttgggagac

SEQ ID NO: 32449 - DNA, 89 bp, Artificial Sequence
  ENSG00000048991_58 (sequence is synthesized)
ccgcgctccaaccgcctcctcctcctcagtaacgcggtttcaacagtaagaaactaaatcactgccttgtacaataaaaagctctatgg

SEQ ID NO: 32450 - DNA, 120 bp, Artificial Sequence
  ENSG00000049089_0 (sequence is synthesized)
gaacagccagcgctggaggagcgccgggagactctgccgtcggtgcgtgcgcggacacgcacccgtcccccttggtctcgccgccagccatggccgccgctacggcctccccccgcagcc

SEQ ID NO: 32451 - DNA, 120 bp, Artificial Sequence
  ENSG00000049089_1 (sequence is synthesized)
tccttgttctcctccaggtggtagtgctcgctctggcgcagattagaggtccaccgggagagcggggccccccgggtcccccgggaccgccgggagtgcctggatccgacggcatcgacg

SEQ ID NO: 32452 - DNA, 120 bp, Artificial Sequence
  ENSG00000049089_2 (sequence is synthesized)
gtgacaatgggccccctggaaaagctggccctccgggacccaagggcgagcctggcaaagctgggccagatgggccagacgggaagcccgggattgatggtttaactggagccaaggggg

SEQ ID NO: 32453 - DNA, 120 bp, Artificial Sequence
  ENSG00000049089_3 (sequence is synthesized)
agcctggccccatggggatccctggagtcaagggccagcccgggcttcctggtcctcctggccttccgggccctggttttgctggacctcctgggcctcctggacctgttggcctccctg

SEQ ID NO: 32454 - DNA, 120 bp, Artificial Sequence
  ENSG00000049089_4 (sequence is synthesized)
gtgagattggaatccgaggccccaagggggaccctggaccagatggaccatcggggcccccaggaccccctgggaaacctggtcgcccgggaaccatccagggtctggaaggcagtgcgg

SEQ ID NO: 32455 - DNA, 120 bp, Artificial Sequence
  ENSG00000049089_5 (sequence is synthesized)
atttcctgtgtccaaccaactgtccacccggaatgaaaggtcccccagggctgcagggagtgaaggggcatgcgggcaaacgcgggattctgggtgatcctggccaccaggggaagccgg

SEQ ID NO: 32456 - DNA, 120 bp, Artificial Sequence
  ENSG00000049089_6 (sequence is synthesized)
gtcccaagggagatgtgggtgcctctggagagcaaggcatccctggaccaccgggtccccagggcatcaggggctacccaggcatggcagggcccaagggagagacgggccctcatggat

SEQ ID NO: 32457 - DNA, 120 bp, Artificial Sequence
  ENSG00000049089_7 (sequence is synthesized)
ataaaggcatggtgggcgctatcggtgccactgggccaccgggtgaggaaggtcctaggggaccgccaggccgagctggggagaagggtgacgagggcagcccaggtattcgtggacccc

SEQ ID NO: 32458 - DNA, 120 bp, Artificial Sequence
  ENSG00000049089_8 (sequence is synthesized)
aggggatcacaggcccgaaaggagcaacgggccccccaggcatcaacggcaaggatgggaccccaggcacgcctggcatgaagggcagtgcaggacaggcgggacagcccggaagtccag

SEQ ID NO: 32459 - DNA, 120 bp, Artificial Sequence
  ENSG00000049089_9 (sequence is synthesized)
gccaccagggcctagcgggtgtgccaggccagcctgggacaaaaggaggccctggagaccagggtgagccgggcccgcagggccttcctggattctctggtccccctgggaaagagggag

SEQ ID NO: 32460 - DNA, 120 bp, Artificial Sequence
  ENSG00000049089_10 (sequence is synthesized)
agccagggcctcgaggagaaattggtccccagggcatcatgggacagaagggtgaccaaggcgagaggggtccagtggggcaaccaggccctcagggaaggcagggccctaagggggagc

SEQ ID NO: 32461 - DNA, 120 bp, Artificial Sequence
  ENSG00000049089_11 (sequence is synthesized)
ggtgacccaggggtggccggcctccccggagagaaaggcgagaagggcgagtccggcgagccggggcccaagggacagcaaggagtacgtggagaacccggctaccctggccccagcggg

SEQ ID NO: 32462 - DNA, 120 bp, Artificial Sequence
  ENSG00000049089_12 (sequence is synthesized)
gatgcgggcgccccaggggttcagggctaccctggtccccccggccctcgaggactggccgggaaccgaggcgtgccaggacagcccgggagacagggcgtggagggccgggatgccact

SEQ ID NO: 32463 - DNA, 120 bp, Artificial Sequence
  ENSG00000049089_13 (sequence is synthesized)
gaccagcacatcgtggatgtggcgctgaagatgctgcaagagcaactggcagaggtcgccgtgagtgccaagcgggaagccctgggtgcggtgggcatgatgggtcctccaggacctcct

SEQ ID NO: 32464 - DNA, 120 bp, Artificial Sequence
  ENSG00000049089_14 (sequence is synthesized)
gggccccctgggtacccaggcaagcagggcccccatgggcaccctggccctcggggcgttcctggcatcgtgggagccgtgggtcagatcggcaacacggggcccaagggaaaacgtgga

SEQ ID NO: 32465 - DNA, 120 bp, Artificial Sequence
  ENSG00000049089_15 (sequence is synthesized)
gagaagggtgatccaggagaagtgggacgggggcaccccgggatgcctgggcccccagggatcccaggactccctggccggcctggccaggcaatcaacggcaaggatggagatcgaggg

SEQ ID NO: 32466 - DNA, 120 bp, Artificial Sequence
  ENSG00000049089_16 (sequence is synthesized)
tccccaggggctccaggagaggcaggtcgacctggcctgccaggccccgtggggctgccgggcttctgtgaacctgccgcctgccttggagcttcggcctatgcctctgcccgccttaca

SEQ ID NO: 32467 - DNA, 120 bp, Artificial Sequence
  ENSG00000049089_17 (sequence is synthesized)
gagcctggatccatcaaggggccttgagcatcaggcccagacagagcctggcaggcatcctggcgggaaggaccaggtcccctctgggtggacatgcacccatccccagtccaggaaacc

SEQ ID NO: 32468 - DNA, 120 bp, Artificial Sequence
  ENSG00000049089_18 (sequence is synthesized)
atctcccccaggaccttctgtctgggactcaggagtcctaaggaaaaggaattctaaaacatgggggaaggggaggtagagcactgatgggtgaaaaagtgaggccaacacacagggcaa

SEQ ID NO: 32469 - DNA, 120 bp, Artificial Sequence
  ENSG00000049089_19 (sequence is synthesized)
gtggtgtcgatggagtcgaagcgctgaaggaatagggcggctttccttccagcgagcatcattcggctgttaccaaaacaaacatcttaatctgcacctttctccactggccatcttgtc

SEQ ID NO: 32470 - DNA, 120 bp, Artificial Sequence
  ENSG00000049089_20 (sequence is synthesized)
cttgggtcagtgggacatgggcacctcgggaggcccgggccctgcccagctacagttccacccctcagcttgaggaccaatgactgaggtctatgccagttcctgatcccatctcactct

SEQ ID NO: 32471 - DNA, 120 bp, Artificial Sequence
  ENSG00000049089_21 (sequence is synthesized)
ctggacctaccaggtgactgctgctgggtgactcccctgaggcggctatacccttaagccagccccactacttccttccctgcctcccagctcagtatttaaacatcatctcccttctct

SEQ ID NO: 32472 - DNA, 120 bp, Artificial Sequence
  ENSG00000049089_22 (sequence is synthesized)
ttctcgcataactccccacccctttctccccgatccacccaggcctttctgtaaataaaagctcccaagttgggtacaaaccaggatattggagttactctatcctggagttaactagga

SEQ ID NO: 32473 - DNA, 120 bp, Artificial Sequence
  ENSG00000049089_23 (sequence is synthesized)
cgggggctgcgggcgcgcggagaggtccaccgggagagcggggccccccgggtcccccgggaccgccgggagtgcctggatccgacggcatcgacccctgacatgcggagcccgttatag

SEQ ID NO: 32474 - DNA, 120 bp, Artificial Sequence
  ENSG00000049089_24 (sequence is synthesized)
catcgacccctgacatgcggagcccgttatagccgccgacagacaaggagctgctgttcagtccgccggccgcagctcacagcgaggcctcatccccctcctctcctttcccctccttgt

SEQ ID NO: 32475 - DNA, 120 bp, Artificial Sequence
  ENSG00000049089_25 (sequence is synthesized)
tctccatctattccccaccgcgaccgcgcaagggcaaactggcacagtggaaggagtcgggcagatccagggcggactcctggcgccgccgcccactctcagtgaccatggacccttcac

SEQ ID NO: 32476 - DNA, 120 bp, Artificial Sequence
  ENSG00000049089_26 (sequence is synthesized)
gcacacagctccactaaagagctggaagaggccgatggagtattcatgagacggctgatccaggaaggactgtggcatattaatatggaaaaggcctgtttgtttgtgcttggagaggaa

SEQ ID NO: 32477 - DNA, 120 bp, Artificial Sequence
  ENSG00000049089_27 (sequence is synthesized)
ggagccagaggagaggggagcaaggtgggcgggagctggggagagcctgcagcaagatctgcagagcccgaggtgctctcggcctgggccctggagaggacgtagggagccccagcccac

SEQ ID NO: 32478 - DNA, 120 bp, Artificial Sequence
  ENSG00000049089_28 (sequence is synthesized)
ttgctggacctcctgtaagtcctcagggatggggcaggatccccagaactcccagggaaggaggggacaacagaaaggcttcgagggaatggccaccatgggaaggagccagcttgctgt

SEQ ID NO: 32479 - DNA, 120 bp, Artificial Sequence
  ENSG00000049089_29 (sequence is synthesized)
gatagtgtcaggaataagtggacctgccagagacccagggccagcccactctgggcctgtccactggctctgcaattctctggtccttaaagcctcagtctgtcagtctctctggggttg

SEQ ID NO: 32480 - DNA, 120 bp, Artificial Sequence
  ENSG00000049089_30 (sequence is synthesized)
ggggacttcggggtgcccggagatgtagtgcccctcgtcgccaataggcggcgccggcccgcaccacaaggacgccgtttgttctgcaaaaacctcaaaccagccctgacatgcggagcc

SEQ ID NO: 32481 - DNA, 120 bp, Artificial Sequence
  ENSG00000049130_0 (sequence is synthesized)
gcttcgctcgccgcctcgcgccgagactagaagcgctgcgggaagcagggacagtggagagggcgctgcgctcgggctacccaatgcgtggactatctgccgccgctgttcgtgcaatat

SEQ ID NO: 32482 - DNA, 120 bp, Artificial Sequence
  ENSG00000049130_1 (sequence is synthesized)
gctggagctccagaacagctaaacggagtcgccacaccactgtttgtgctggatcgcagcgctgcctttccttatgaagaagacacaaacttggattctcacttgcatttatcttcagct

SEQ ID NO: 32483 - DNA, 120 bp, Artificial Sequence
  ENSG00000049130_2 (sequence is synthesized)
gctcctatttaatcctctcgtcaaaactgaagggatctgcaggaatcgtgtgactaataatgtaaaagacgtcactaaattggtggcaaatcttccaaaagactacatgataaccctcaa

SEQ ID NO: 32484 - DNA, 120 bp, Artificial Sequence
  ENSG00000049130_3 (sequence is synthesized)
atatgtccccgggatggatgttttgccaagtcattgttggataagcgagatggtagtacaattgtcagacagcttgactgatcttctggacaagttttcaaatatttctgaaggcttgag

SEQ ID NO: 32485 - DNA, 120 bp, Artificial Sequence
  ENSG00000049130_4 (sequence is synthesized)
taattattccatcatagacaaacttgtgaatatagtggatgaccttgtggagtgcgtgaaagaaaactcatctaaggatctaaaaaaatcattcaagagcccagaacccaggctctttac

SEQ ID NO: 32486 - DNA, 120 bp, Artificial Sequence
  ENSG00000049130_5 (sequence is synthesized)
tcctgaagaattctttagaatttttaatagatccattgatgccttcaaggactttgtagtggcatctgaaactagtgattgtgtggtttcttcaacattaagtcctgagaaagattccag

SEQ ID NO: 32487 - DNA, 120 bp, Artificial Sequence
  ENSG00000049130_6 (sequence is synthesized)
agtcagtgtcacaaaaccatttatgttaccccctgttgcagccagctcccttaggaatgacagcagtagcagtaataggaaggccaaaaatccccctggagactccagcctacactgggc

SEQ ID NO: 32488 - DNA, 120 bp, Artificial Sequence
  ENSG00000049130_7 (sequence is synthesized)
agccatggcattgccagcattgttttctcttataattggctttgcttttggagccttatactggaagaagagacagccaagtcttacaagggcagttgaaaatatacaaattaatgaaga

SEQ ID NO: 32489 - DNA, 120 bp, Artificial Sequence
  ENSG00000049130_8 (sequence is synthesized)
ggataatgagataagtatgttgcaagagaaagagagagagtttcaagaagtgtaattgtggcttgtatcaacactgttactttcgtacattggctggtaacagttcatgtttgcttcata

SEQ ID NO: 32490 - DNA, 120 bp, Artificial Sequence
  ENSG00000049130_9 (sequence is synthesized)
aatgaagcagctttaaacaaattcatattctgtctggagtgacagaccacatctttatctgttcttgctacccatgactttatatggatgattcagaaattggaacagaatgttttactg

SEQ ID NO: 32491 - DNA, 120 bp, Artificial Sequence
  ENSG00000049130_10 (sequence is synthesized)
tgaaactggcactgaattaatcatctataaagaagaacttgcatggagcaggactctattttaaggactgcgggacttgggtctcatttagaacttgcagctgatgttggaagagaaagc

SEQ ID NO: 32492 - DNA, 120 bp, Artificial Sequence
  ENSG00000049130_11 (sequence is synthesized)
acgtgtctcagactgcatgtaccatttgcatggctccagaaatgtctaaatgctgaaaaaacacctagctttattcttcagatacaaactgcagcctgtagttatcctggtctctgcaag

SEQ ID NO: 32493 - DNA, 120 bp, Artificial Sequence
  ENSG00000049130_12 (sequence is synthesized)
tagatttcagcttggatagtgagggtaacaatttttctcaaagggatctggaaaaaatgtttaaaactcagtagtgtcagccactgtacagtgtagaaagcagtgggaactgtgattgga

SEQ ID NO: 32494 - DNA, 120 bp, Artificial Sequence
  ENSG00000049130_13 (sequence is synthesized)
tttggcaacatgtcagctttatagttgccgattagtgatatgggtctgatttcgatctcttcctgatgtaaaccatgctcacccatatcccactatacaaatgcaaatggttgcctggtt

SEQ ID NO: 32495 - DNA, 120 bp, Artificial Sequence
  ENSG00000049130_14 (sequence is synthesized)
ccatttatgcaagggagccagtactgaattatgccttggcagaggggagactccaaaagagtcatcgcaggaagaagttaagaacactgaacatcagaacagtctgccaagaaggacatt

SEQ ID NO: 32496 - DNA, 120 bp, Artificial Sequence
  ENSG00000049130_15 (sequence is synthesized)
ggcatcctgggaaagtccgccttttcccttgaccactatagggtgtataaatcgtgtttgcaaaatgtgttatgatgtgtttatattctaaaactattacagagctatgtaaagggactt

SEQ ID NO: 32497 - DNA, 120 bp, Artificial Sequence
  ENSG00000049130_16 (sequence is synthesized)
aggagaaaatgctgaatgtaagatggtcccatttcaatttccaccatgggagagcctaaaaataaattatgacatttagtatctaaggttagaaaaccacgcccacatgctaatatgggt

SEQ ID NO: 32498 - DNA, 120 bp, Artificial Sequence
  ENSG00000049130_17 (sequence is synthesized)
gttgaaaactaggttacttataatgcaaggaatcaggaaactttagttatttatagtataatcaccattatctgtttaaaggatccatttagttaaaatcgggcactctatattcattaa

SEQ ID NO: 32499 - DNA, 120 bp, Artificial Sequence
  ENSG00000049130_18 (sequence is synthesized)
ggtttatgaattaaaaagaaagctttatgtagttatgcatgtcagtttgctatttaaaatgtgtgacagtgtttgtcatattaagagtgaatttggcaggaattcccaagatggacattg

SEQ ID NO: 32500 - DNA, 120 bp, Artificial Sequence
  ENSG00000049130_19 (sequence is synthesized)
tgcttttaaactagaacttgtaagacattatgtgaatatcccttgccaattttttttataataagaaaacatctgactaaagtcaaagaatgatttcttatggtttattttgatgaaagt

SEQ ID NO: 32501 - DNA, 120 bp, Artificial Sequence
  ENSG00000049130_20 (sequence is synthesized)
tcttttaacatgtcttgaatgtacacataaaggaatccaaagctttccattctaacttaatctttgtgataacattattgccatgttctacaaccgtaagatgacagttttcaatgtagt

SEQ ID NO: 32502 - DNA, 120 bp, Artificial Sequence
  ENSG00000049130_21 (sequence is synthesized)
gacacaaaagggcatgaaaaactaactgctagctttcctttcatttcaaaagtccaagaatttctagtatatttggattttagcttctgttcaaagcaaatccagatgcaactccagtaa

SEQ ID NO: 32503 - DNA, 120 bp, Artificial Sequence
  ENSG00000049130_22 (sequence is synthesized)
cctacagtccctttcttctctaacatgctgtggttccttaaatatgagtaatttctctaagatataacccaggtgctttgagaagctgcattaaggtgttcaggccctcagatatcacat

SEQ ID NO: 32504 - DNA, 120 bp, Artificial Sequence
  ENSG00000049130_23 (sequence is synthesized)
ggtacacttgattagtaataaaaccagagatcaatttaaattgctgataggtcctgtctcagtgtgtggcattgactgttttcaggaaaatagatacagattaatatgagttatgcgtgt

SEQ ID NO: 32505 - DNA, 120 bp, Artificial Sequence
  ENSG00000049130_24 (sequence is synthesized)
aggttgtgtatagattgagaagatagatacttctcaatctagtagtttgatttatttaaccaatggtttcagtttgcttgagcatatgaaaatcctgcttaatgtgcttaagagtataat

SEQ ID NO: 32506 - DNA, 120 bp, Artificial Sequence
  ENSG00000049130_25 (sequence is synthesized)
aaatgtgtacttttgtcctcaaacctagtagctgggttttaacactcatggacatggtcttaatcaatggagttaaataaacaaattcagcaagttattaaatctgacatggtaggagag

SEQ ID NO: 32507 - DNA, 120 bp, Artificial Sequence
  ENSG00000049130_26 (sequence is synthesized)
gggagatgtgtcctgcttattaaatgtgttggtccattgaaagttacatggattgccaatttttaaaacactaaagttgaataaaatgcatgaacaatagaaaaatgctgaacattattt

SEQ ID NO: 32508 - DNA, 120 bp, Artificial Sequence
  ENSG00000049130_27 (sequence is synthesized)
tggatgctagctgcttggacattaactgtgttatttctgctttgagatgaaaatatatatttatctttgcttattttatcccagatgtgttctgaatatccttcttcataaatcatggaa

SEQ ID NO: 32509 - DNA, 120 bp, Artificial Sequence
  ENSG00000049130_28 (sequence is synthesized)
aactcactgctgagatagtaaaccatgaaatcgccttttcagttggtgccatgtatctgacagttccatcttggaaggtttcaaaattaccttttaaaatgatctcagaagtctgtagat

SEQ ID NO: 32510 - DNA, 120 bp, Artificial Sequence
  ENSG00000049130_29 (sequence is synthesized)
tctcaatgatactgaaagctttgcacctctttggtagaaaccaggtctatttagaaaatggctttatgataaatgttgcctcctgagtgataatgaagtgttcctggatattgtattgta

SEQ ID NO: 32511 - DNA, 120 bp, Artificial Sequence
  ENSG00000049130_30 (sequence is synthesized)
atttaatgtgcttaccacactgccacattttaatgagtcagagaaaaattaatttttcttcaatacaataatagaacaagtagcctattctcttaaaaagtatgtgaaaagaaaattatg

SEQ ID NO: 32512 - DNA, 120 bp, Artificial Sequence
  ENSG00000049130_31 (sequence is synthesized)
aaaaaatatgcatacctaatgaagtattggttttagtaagaattaaatacatttcattgagctttaaagtactttggagaaactttggggcacgttttcctactctaattcaactaaagt

SEQ ID NO: 32513 - DNA, 120 bp, Artificial Sequence
  ENSG00000049130_32 (sequence is synthesized)
tataaataaagagaaaaactcattcagaaatcatggattttaaaaatattttactgcagccaagttttcatttcaaaatgtaatttcagtttggagcttttaggcattatgtatatttaa

SEQ ID NO: 32514 - DNA, 120 bp, Artificial Sequence
  ENSG00000049130_33 (sequence is synthesized)
aaaatatattcttcaaaaatgcattttggcatggtgggatggatgttgcaaaagatatccggagcctccagtctgtcattaactgatatggtaaatcacctctcttctttgggtctcaat

SEQ ID NO: 32515 - DNA, 120 bp, Artificial Sequence
  ENSG00000049130_34 (sequence is synthesized)
tttttatttatctatatggtaaactcagagatcactccttaggggtgagtcctattgcaatatgaccgacaaagaagacaaaatagcattgaaactaacccatacaaaatatccaactct

SEQ ID NO: 32516 - DNA, 120 bp, Artificial Sequence
  ENSG00000049130_35 (sequence is synthesized)
ggattctgtgaataagtatcttgaccataaaaagtcattgctgttcttgtttctaatgtaaatagtgtccattagtaaaagtgaaattcagtcttaagtagggtgaattggatcaccatt

SEQ ID NO: 32517 - DNA, 120 bp, Artificial Sequence
  ENSG00000049130_36 (sequence is synthesized)
tacacaagagatggctttttcctttgcttgaataaacattttggatcacctccaaagaatgaaaaccagtagtacgttttagtcatattagtcaggatgagaaactataagatgtgtgta

SEQ ID NO: 32518 - DNA, 120 bp, Artificial Sequence
  ENSG00000049130_37 (sequence is synthesized)
acatttggaaatgcaccaaagtgagcgtttaaatcttctcattttattgaaaactaagagcagaaaatgtaaaatgctcatgaaggttttgaatgccaaaagatattttagaatcaattt

SEQ ID NO: 32519 - DNA, 120 bp, Artificial Sequence
  ENSG00000049130_38 (sequence is synthesized)
ataaaggggtaattcattaattacactttaaaattggaaagtgggataagaaatctaaagtaaaccagcttatctttgaaacaatattattttgaaattggctttaaaataaaaccattc

SEQ ID NO: 32520 - DNA, 120 bp, Artificial Sequence
  ENSG00000049130_39 (sequence is synthesized)
agattgaaattctaattagctcatttgtggagtttgatcacacaattcataatgttgctgctttccattaactagtcttgaaatgcctttgtttgtaaaaataaaataatggtactttca

SEQ ID NO: 32521 - DNA, 120 bp, Artificial Sequence
  ENSG00000049130_40 (sequence is synthesized)
ttttataacaaggtgtttttttcaagaaataatccatgctaaaatggatatttgtgatcctgaaatgtttactaagcattgtaaatttatttataactgccatctccaactacatcctta

SEQ ID NO: 32522 - DNA, 120 bp, Artificial Sequence
  ENSG00000049130_41 (sequence is synthesized)
tgatgtttttaacaataaaattaaaacaactgttaaactaaaaaccacaccgttttccagtacttgatctctgagctacaatactcactaaatataattttccaatcaaaatattctatt

SEQ ID NO: 32523 - DNA, 120 bp, Artificial Sequence
  ENSG00000049130_42 (sequence is synthesized)
ctatattctaagggttaatatgtgattatagtgtccacttgccaccatttttttaaatcaatggacttgaaaagtattaatttagatggatgcgcagatataccctcagttcagtcatag

SEQ ID NO: 32524 - DNA, 120 bp, Artificial Sequence
  ENSG00000049130_43 (sequence is synthesized)
attggagtttgcatataataatgtaaatgtatgtcgacactattctaaatagttctattatgactgaaatttaattaaataaaaaaggttgtaaaatgtgatgtgtatgtgtatatactg

SEQ ID NO: 32525 - DNA, 120 bp, Artificial Sequence
  ENSG00000049130_44 (sequence is synthesized)
tatgtgtactttttaaaataggtgtatgtcccaacccttttttatacaggtttgaatttaaaattacatgatatatacatatactttattgttctaaataaagaattttatgcactctca

SEQ ID NO: 32526 - DNA, 120 bp, Artificial Sequence
  ENSG00000049130_45 (sequence is synthesized)
aacagagggagctccgagccctctctggcgcgcgaggtatttcgtctgtccccgggggtgccaggtgagccccagcggatccgggagggtaagctgggactcctcgcgagcagtagctgc

SEQ ID NO: 32527 - DNA, 120 bp, Artificial Sequence
  ENSG00000049130_46 (sequence is synthesized)
agggtaccaagcttcgccctctgcgtccccgcgccttcgcggtctcccgccagtgcaggtccggggcccccaggcgagcggacaaggttggcctaatctgccaaacttctggggcattta

SEQ ID NO: 32528 - DNA, 120 bp, Artificial Sequence
  ENSG00000049130_47 (sequence is synthesized)
ccgtgctctggccgccctcccgattcttccctccgcgcccttgcctgcttctcgcctaccccgggctccggaagggaaggaggcgtgtccggagcaggcgggcgggaactgtataaaagc

SEQ ID NO: 32529 - DNA, 120 bp, Artificial Sequence
  ENSG00000049130_48 (sequence is synthesized)
ggatcgcagcgctgcctttccttatgaagaagacacaagtgagtagggcgcgcccgggagctcccaggctctccaggaaaaatcgcgcccggtgccccggggaagccggcgctccctggg

SEQ ID NO: 32530 - DNA, 120 bp, Artificial Sequence
  ENSG00000049130_49 (sequence is synthesized)
acttgcagctggggcgtgcagggctgtgcctgccgggtgagacaagaggatgcgggggaggccggcgtggtgtgtgatcccgagccgagccggacttggattctcacttgcatttatctt

SEQ ID NO: 32531 - DNA, 120 bp, Artificial Sequence
  ENSG00000049167_0 (sequence is synthesized)
gtcatggcgacgtccagtgctccagccggtgtgaggacacgatatgctggggtttttgtccgcacgccaaacgggtttggaggaccctcttcgccttcggagagcagagtcaacacggag

SEQ ID NO: 32532 - DNA, 120 bp, Artificial Sequence
  ENSG00000049167_1 (sequence is synthesized)
agttttgggactggaattaaataaagacagagatgttgaaagaatccacggcggtggaattaacacccttgacattgaacctgttgaagggagatacatgttatcaggtggttcagatgg

SEQ ID NO: 32533 - DNA, 120 bp, Artificial Sequence
  ENSG00000049167_2 (sequence is synthesized)
tgtgattgtactttatgaccttgagaactccagcagacaatcttattacacatgtaaagcagtgtgttccattggcagagatcatcctgatgttcacagatacagtgtggagactgtaca

SEQ ID NO: 32534 - DNA, 120 bp, Artificial Sequence
  ENSG00000049167_3 (sequence is synthesized)
gtggtatcctcatgacactggcatgttcacatcaagctcatttgataaaactctgaaagtatgggatacaaatacattacaaactgcagatgtatttaattttgaggaaacagtttatag

SEQ ID NO: 32535 - DNA, 120 bp, Artificial Sequence
  ENSG00000049167_4 (sequence is synthesized)
tcatcatatgtctccagtctccaccaagcactgtttggtagcagttggtactagaggacccaaagtacaactttgtgacttgaagtctggatcctgttctcacattctacagggtcacag

SEQ ID NO: 32536 - DNA, 120 bp, Artificial Sequence
  ENSG00000049167_5 (sequence is synthesized)
acaagaaatattagcagtttcctggtctccacgttatgactatatcttggcaacagcaagtgctgacagtagagtaaaattatgggatgtgagaagagcatcaggatgtttgattactct

SEQ ID NO: 32537 - DNA, 120 bp, Artificial Sequence
  ENSG00000049167_6 (sequence is synthesized)
tgatcaacataatgggaaaaagtcacaagctgttgaatcagcaaacactgctcataatgggaaagttaatggcttatgttttacaagtgatggacttcacctcctcactgttggtacaga

SEQ ID NO: 32538 - DNA, 120 bp, Artificial Sequence
  ENSG00000049167_7 (sequence is synthesized)
taatcgaatgaggctctggaatagttccaatggagaaaacacacttgtgaactatggaaaagtttgtaataacagtaaaaaaggattgaaattcactgtctcctgtggctgcagttcaga

SEQ ID NO: 32539 - DNA, 120 bp, Artificial Sequence
  ENSG00000049167_8 (sequence is synthesized)
tgctgtgtatttcagtcaaatttccaggaactttatagtggtagcagagactgcaacattctggcttgggttccatccttatatgaaccagttcctgatgatgatgagactacaacaaaa

SEQ ID NO: 32540 - DNA, 120 bp, Artificial Sequence
  ENSG00000049167_9 (sequence is synthesized)
tcacaattaaatccggcctttgaagatgcctggagcagcagtgatgaagaaggatgaatatcatctttagtacctttttgtctctgctgaaactttttaaatgagactgtgtttttttca

SEQ ID NO: 32541 - DNA, 120 bp, Artificial Sequence
  ENSG00000049167_10 (sequence is synthesized)
actgtatggtctattcctgacagctaaattagccctaaatgtgggtaatatttttcctcatgttttaaaatgaggttaatatttgcataaaatcctaaaacagacttctgtatagtttat

SEQ ID NO: 32542 - DNA, 120 bp, Artificial Sequence
  ENSG00000049167_11 (sequence is synthesized)
ttagtcaaaatgtgttccttgatcccagatgttgtggcctgggaaagccctcattgctacagtacaagtaacacaagtcgttgtacctcagttgtgaccttcagcagattttatgaacta

SEQ ID NO: 32543 - DNA, 120 bp, Artificial Sequence
  ENSG00000049167_12 (sequence is synthesized)
taagatgcagtctcagaggatcagcaagtggaggccatcagtattgactttctcttacttgctgtactatcagcctgctcgtttccacctttaagaatgattttgccaagaatgattata

SEQ ID NO: 32544 - DNA, 120 bp, Artificial Sequence
  ENSG00000049167_13 (sequence is synthesized)
tcaaaaatagtagttgaaatggtaacatcaaaattattttattctttcttcttcatgtattcacatttttcagtggtttcatttaattaaccatgctttatgttaaacattttggggctc

SEQ ID NO: 32545 - DNA, 120 bp, Artificial Sequence
  ENSG00000049167_14 (sequence is synthesized)
aatgtctcctactatccaaaatgtgcatcacaggaggcttttaactttgtgaaaatcccatgtttgctttattttattttaatgtcagaaggcagtttgcgctaatgcttgaactctttt

SEQ ID NO: 32546 - DNA, 120 bp, Artificial Sequence
  ENSG00000049167_15 (sequence is synthesized)
tctgtgaaactcattaaggtatgaccaaatcctgcctcattaattcaagcagaaaatatcctggcagggaatctggcttaaacatgaaatgctgtaataaaatttctatgttattgtctc

SEQ ID NO: 32547 - DNA, 120 bp, Artificial Sequence
  ENSG00000049167_16 (sequence is synthesized)
ccatctcaaaaaaaaaaaaaaaaagaatcatgtttctatgataacaggagtgaagaaggaaaaaggataagtggaagcaaatgtgtttgtaggtttgttgactgcagatgtatttaattt

SEQ ID NO: 32548 - DNA, 120 bp, Artificial Sequence
  ENSG00000049167_17 (sequence is synthesized)
ggattcgaacctatctgctttcaagctgatcatgatgatgaaacttagaaacaaaaatgaaaagccaggtaaagtttccaagggctgtaagaagcctgcaaaacaaaatgggaagaaagc

SEQ ID NO: 32549 - DNA, 120 bp, Artificial Sequence
  ENSG00000049167_18 (sequence is synthesized)
aacctccaaagtgccctctgctcctcagtttgttcactccaatgatcatgccaatcgagaggctgaaataaagaagagggttgaggagatgagggagaagcagcaagctgcccaggagca

SEQ ID NO: 32550 - DNA, 120 bp, Artificial Sequence
  ENSG00000049167_19 (sequence is synthesized)
agaaagacaaaaacgcaggtctatcaagagctactgtgaggatatcctaagacgccaggaggagtttcagtgtaaggaagaagttttgcaggaattaaatatgtttcctcagctggatga

SEQ ID NO: 32551 - DNA, 120 bp, Artificial Sequence
  ENSG00000049167_20 (sequence is synthesized)
cgaggccactatgaaggcttattacaaggagtccgtgaggtggtagaatactctgatgtgattctggaagtcctggatgccagagacccattaggctgctgctgctgcttccaaatgggg

SEQ ID NO: 32552 - DNA, 120 bp, Artificial Sequence
  ENSG00000049167_21 (sequence is synthesized)
gaggctatcctatgggcagaaggcaacaagaagctggtcctggtcttgaaaaagattgacctggaccccaaggaggttgtgaagtggctggattaccttcggaatgagttgccaactgtg

SEQ ID NO: 32553 - DNA, 120 bp, Artificial Sequence
  ENSG00000049167_22 (sequence is synthesized)
gctttcaaggccaggacccagcatcaggtcagctttggagctgaaaacctcatgagggttctggggaactattgctgccttggtgaaatgcgcacccacatccatatggacattgtaggc

SEQ ID NO: 32554 - DNA, 120 bp, Artificial Sequence
  ENSG00000049167_23 (sequence is synthesized)
cttcccaatattgggaaaagcagcctgattaaaagcctgaagcacagccatgcatgcagtgtgggagccattcctggggtcacgaaattcatgcaggaggtctacctggacaagttcatc

SEQ ID NO: 32555 - DNA, 120 bp, Artificial Sequence
  ENSG00000049167_24 (sequence is synthesized)
cggctgctggatgctccagccattgttccagggcccagctcagaggtgggcaccatcctgcataactgcatccacatctagagactggcagaccccatgaccccagtggagaccatcttg

SEQ ID NO: 32556 - DNA, 120 bp, Artificial Sequence
  ENSG00000049167_25 (sequence is synthesized)
actttctgacagcagtggcccaccatttggggaagaagagagacttacacagtcaggagcaggcagccaaaactgtcctagctgactgggtgagcgggaagatcagcttctatagaccac

SEQ ID NO: 32557 - DNA, 120 bp, Artificial Sequence
  ENSG00000049167_26 (sequence is synthesized)
caccacccactcacactctgcctgcccatctcagtgctgagaattaaggaaatgaccaagttctttgacatcgaggataccgagcaagtcaatgaagacaccatggaatgcttggccact

SEQ ID NO: 32558 - DNA, 120 bp, Artificial Sequence
  ENSG00000049167_27 (sequence is synthesized)
ggagaatctgatgagctattgggtgacacagacccactcaaaatggagatcaagttgctccattctccgatgatggaaatagcagatgccattgaagataaagctactgtatataagatt

SEQ ID NO: 32559 - DNA, 120 bp, Artificial Sequence
  ENSG00000049167_28 (sequence is synthesized)
ggagatctcactggttattgcaccaatccgaatcgtcatcagatggggtgggctaaactcaatgtagaccaccaccctaaaaaaaaacagtaaggtggatgtgtgcccagtggactgctg

SEQ ID NO: 32560 - DNA, 120 bp, Artificial Sequence
  ENSG00000049167_29 (sequence is synthesized)
ataaaaagaaacgttactaacagtgtattctttgtaagtgacatgactaatgtactttgtgctggttgttgagactcagcagggaaataaagatccttctgtgcattattcttataaaac

SEQ ID NO: 32561 - DNA, 120 bp, Artificial Sequence
  ENSG00000049167_30 (sequence is synthesized)
tgaaccattgaaaacacatttatatgaacaatgatcattggggaagctcaaacaatatgaaaaatagttctaactcaaaaccttgtgttatttctacattaaaaagactaatgcaactca

SEQ ID NO: 32562 - DNA, 120 bp, Artificial Sequence
  ENSG00000049167_31 (sequence is synthesized)
tgtgacccttagtaggaggtatgtctctacatcacacagtgggagcctgaatctagagatgcctggacattctttctcgccttctacacagcttggacacagagatcatcctgatgttca

SEQ ID NO: 32563 - DNA, 120 bp, Artificial Sequence
  ENSG00000049167_32 (sequence is synthesized)
acagcaagataagaggagagctaagaagctttcaattataagaatactccaggaatttgaatcagtaccacaatggacctagtaatcagtgttaaaagttggatatgttcaaatctaatc

SEQ ID NO: 32564 - DNA, 120 bp, Artificial Sequence
  ENSG00000049167_33 (sequence is synthesized)
tgtttcagaagagacttaaatcctcatactgatttcatttccttcacctggaaagaaagaaaaccaacttaagaatggtgctgacagtagagtaaaattatgggatgtgagaagagcatc

SEQ ID NO: 32565 - DNA, 120 bp, Artificial Sequence
  ENSG00000049167_34 (sequence is synthesized)
ctcaaggaaataaaatgtgagtcaaggattttatatccagccaaactgatttcagatacaaaaaggacggataaattgtcaacaacacaagaattcagagactgttgttctcattagcca

SEQ ID NO: 32566 - DNA, 120 bp, Artificial Sequence
  ENSG00000049167_35 (sequence is synthesized)
agaaacttccaagcttaccaacaaatgagcttaggagtaaaaacagacaatagaagaagactgacatctccaggcctaggtgcctttacgaactgcagatgtatttaattttgaggaaac

SEQ ID NO: 32567 - DNA, 120 bp, Artificial Sequence
  ENSG00000049167_36 (sequence is synthesized)
attttagtatgattatttgctgagatgtcatatatgttagatgtgaaagcagtacagtggttaagaagagctagactacttgagttcatatcctggctgtgctgctgacagctgtatgac

SEQ ID NO: 32568 - DNA, 120 bp, Artificial Sequence
  ENSG00000049167_37 (sequence is synthesized)
attgggcaaatgtccaaacctctgtgtgtctttctcatctgtaaatgggaataatgattatagtatggttgtgaggattaaatgagccaaaatatgtaaagtacctagtacagtacatag

SEQ ID NO: 32569 - DNA, 120 bp, Artificial Sequence
  ENSG00000049192_0 (sequence is synthesized)
agtgtgctctgcctccgaggaaaagctgccaaaattttctcctgctgcaattcaagttggctgggggccggtagtgagatctagggctacttcaacaaaactttgctgcccttcctgctc

SEQ ID NO: 32570 - DNA, 120 bp, Artificial Sequence
  ENSG00000049192_1 (sequence is synthesized)
ctcttgtcttcttttctcctgataccttttgatgctctgcacatgttatttgcatagcaaaggcactaagctttccaggaagagagggcaccacttccacccccaataagtcttttttcc

SEQ ID NO: 32571 - DNA, 120 bp, Artificial Sequence
  ENSG00000049192_2 (sequence is synthesized)
cgtcttttctttcttttcctttccttttttggggggtggggagggagagaaagggggtttgcaaaggcagcatctcagagtgatagcctagatgtattgaaggcatctcttattctgcca

SEQ ID NO: 32572 - DNA, 120 bp, Artificial Sequence
  ENSG00000049192_3 (sequence is synthesized)
aatcggaaagtcagttctctaaagcccgggttagccagaccatagggttttattctggctgcagaataactggctggtgtggctttgcaaaggggggcaaaaaataaaaaaataaaaaaa

SEQ ID NO: 32573 - DNA, 120 bp, Artificial Sequence
  ENSG00000049192_4 (sequence is synthesized)
attaaaaaaagttagagaggagagggagtacgtgagtcgtccagtgcaatctctattgtctgaaacttactttttatcagaatttgaagatgaaaacggttaaaaaatggccatacttta

SEQ ID NO: 32574 - DNA, 120 bp, Artificial Sequence
  ENSG00000049192_5 (sequence is synthesized)
gtaactaatcagcctaatgctttgcttatgaaaacttttaccatcattatttttttcattttggattgagaaaatgaatccagatatagaagaaagtgcaggatgttggataaaagtggc

SEQ ID NO: 32575 - DNA, 120 bp, Artificial Sequence
  ENSG00000049192_6 (sequence is synthesized)
tcttaaacagtggaacatccaataactaatttgcaagaagttttaaagaaataaaattgttatgcttcgattttggtatggtattgactctttagcacataggtagccctcaaaaaaatc

SEQ ID NO: 32576 - DNA, 120 bp, Artificial Sequence
  ENSG00000049192_7 (sequence is synthesized)
atccagttttctaaattatggaaattttgtggaagacgttgacctggattttgagcctcatcatggcttcatcggaatttcatagtgaccacaggctttcatacagttctcaagaggaat

SEQ ID NO: 32577 - DNA, 120 bp, Artificial Sequence
  ENSG00000049192_8 (sequence is synthesized)
tcctgacttatcttgaacactaccagctaactattccaataagggttgatcaaaatggagcatttctcagctttactgtgaaaaatgataaacactcaaggagaagacggagtatggacc

SEQ ID NO: 32578 - DNA, 120 bp, Artificial Sequence
  ENSG00000049192_9 (sequence is synthesized)
ctattgatccacagcaggcagtatctaagttattttttaaactttcagcctatggcaagcactttcatctaaacttgactctcaacacagattttgtgtccaaacattttacagtagaat

SEQ ID NO: 32579 - DNA, 120 bp, Artificial Sequence
  ENSG00000049192_10 (sequence is synthesized)
attgggggaaagatggaccccagtggaaacatgattttttagacaactgtcattacacaggatatttgcaagatcaacgtagtacaactaaagtggctttaagcaactgtgttgggttgc

SEQ ID NO: 32580 - DNA, 120 bp, Artificial Sequence
  ENSG00000049192_11 (sequence is synthesized)
atggtgttattgctacagaagatgaagagtattttatcgaacctttaaagaataccacagaggattccaagcattttagttatgaaaatggccaccctcatgttatttacaaaaagtctg

SEQ ID NO: 32581 - DNA, 120 bp, Artificial Sequence
  ENSG00000049192_12 (sequence is synthesized)
cccttcaacaacgacatctgtatgatcactctcattgtggggtttcggatttcacaagaagtggcaaaccttggtggctgaatgacacatccactgtttcttattcactaccaattaaca

SEQ ID NO: 32582 - DNA, 120 bp, Artificial Sequence
  ENSG00000049192_13 (sequence is synthesized)
acacacatatccaccacagacagaagagatcagtgagcattgaacggtttgtggagacattggtagtggcagacaaaatgatggtgggctaccatggccgcaaagacattgaacattaca

SEQ ID NO: 32583 - DNA, 120 bp, Artificial Sequence
  ENSG00000049192_14 (sequence is synthesized)
ttttgagtgtgatgaatattgttgccaaactttaccgtgattccagcctaggaaacgttgtgaatattatagtggcccgcttaattgttctcacagaagatcagccaaacttggagataa

SEQ ID NO: 32584 - DNA, 120 bp, Artificial Sequence
  ENSG00000049192_15 (sequence is synthesized)
accaccatgcagacaagtccctcgatagcttctgtaaatggcagaaatccattctctcccaccaaagtgatggaaacaccattccagaaaatgggattgcccaccacgataatgcagttc

SEQ ID NO: 32585 - DNA, 120 bp, Artificial Sequence
  ENSG00000049192_16 (sequence is synthesized)
ttattactagatatgatatctgcacttataaaaataagccctgtggaacactgggcttggcctctgtggctggaatgtgtgagcctgaaaggagctgcagcattaatgaagacattggcc

SEQ ID NO: 32586 - DNA, 120 bp, Artificial Sequence
  ENSG00000049192_17 (sequence is synthesized)
tgggttcagcttttaccattgcacatgagattggtcacaattttggtatgaaccatgatggaattggaaattcttgtgggacgaaaggtcatgaagcagcaaaacttatggcagctcaca

SEQ ID NO: 32587 - DNA, 120 bp, Artificial Sequence
  ENSG00000049192_18 (sequence is synthesized)
ttactgcgaataccaatcctttttcctggtctgcttgcagtcgagactacatcaccagctttctagattcaggccgtggtacttgccttgataatgagcctcccaagcgtgactttcttt

SEQ ID NO: 32588 - DNA, 120 bp, Artificial Sequence
  ENSG00000049192_19 (sequence is synthesized)
atccagctgtggccccaggtcaggtgtatgatgctgatgagcaatgtcgtttccagtatggagcaacctcccgccaatgtaaatatggggaagtgtgtagagagctctggtgtctcagca

SEQ ID NO: 32589 - DNA, 120 bp, Artificial Sequence
  ENSG00000049192_20 (sequence is synthesized)
aaagcaaccgctgtgtcaccaacagtattccagcagctgaggggacactgtgtcaaactgggaatattgaaaaagggtggtgttatcagggagattgtgttccttttggcacttggcccc

SEQ ID NO: 32590 - DNA, 120 bp, Artificial Sequence
  ENSG00000049192_21 (sequence is synthesized)
agagcatagatgggggctggggtccctggtcactatggggagagtgcagcaggacctgcgggggaggcgtctcctcatccctaagacactgtgacagtccagcaccttcaggaggtggaa

SEQ ID NO: 32591 - DNA, 120 bp, Artificial Sequence
  ENSG00000049192_22 (sequence is synthesized)
aatattgccttggggaaaggaaacggtatcgctcctgtaacacagatccatgccctttgggttcccgagattttcgagagaaacagtgtgcagactttgacaatatgcctttccgaggaa

SEQ ID NO: 32592 - DNA, 120 bp, Artificial Sequence
  ENSG00000049192_23 (sequence is synthesized)
agtattataactggaaaccctatactggaggtggggtaaaaccttgtgcattaaactgcttggctgaaggttataatttctacactgaacgtgctcctgcggtgatcgatgggacccagt

SEQ ID NO: 32593 - DNA, 120 bp, Artificial Sequence
  ENSG00000049192_24 (sequence is synthesized)
gcaatgcggattcactggatatctgcatcaatggagaatgcaagcacgtaggctgtgataatattttgggatctgatgctagggaagatagatgtcgagtctgtggaggggacggaagca

SEQ ID NO: 32594 - DNA, 120 bp, Artificial Sequence
  ENSG00000049192_25 (sequence is synthesized)
catgtgatgccattgaagggttcttcaatgattcactgcccaggggaggctacatggaagtggtgcagataccaagaggctctgttcacattgaagttagagaagttgccatgtcaaaga

SEQ ID NO: 32595 - DNA, 120 bp, Artificial Sequence
  ENSG00000049192_26 (sequence is synthesized)
actatattgctttaaaatctgaaggagatgattactatattaatggtgcctggactattgactggcctaggaaatttgatgttgctgggacagcttttcattacaagagaccaactgatg

SEQ ID NO: 32596 - DNA, 120 bp, Artificial Sequence
  ENSG00000049192_27 (sequence is synthesized)
aaccagaatccttggaagctctaggtcctacctcagaaaatctcatcgtcatggttctgcttcaagaacagaatttgggaattaggtataagttcaatgttcccatcactcgaactggca

SEQ ID NO: 32597 - DNA, 120 bp, Artificial Sequence
  ENSG00000049192_28 (sequence is synthesized)
gtggagataatgaagttggctttacatggaatcatcagccttggtcagaatgctcagctacttgtgctggaggtgtccaaagacaggaggtggtctgtaaaaggttggatgacaactcca

SEQ ID NO: 32598 - DNA, 120 bp, Artificial Sequence
  ENSG00000049192_29 (sequence is synthesized)
ttgtccagaacaattactgtgatcctgacagtaagccacctgaaaatcaaagagcctgcaacactgagccctgcccacctgagtggttcattggggattggttggaatgcagcaagactt

SEQ ID NO: 32599 - DNA, 120 bp, Artificial Sequence
  ENSG00000049192_30 (sequence is synthesized)
agagccctgcaacaaccagtcatgtccaccacagtgggtggctttggactggtctgagtgtactccaaaatgtggtccaggattcaagcatcggattgttctgtgcaagagcagtgacct

SEQ ID NO: 32600 - DNA, 120 bp, Artificial Sequence
  ENSG00000049192_31 (sequence is synthesized)
ttctaagacattcccagctgcacaatgtccagaggaaagcaaacctcctgtccgcatccgctgcagtttgggccgctgccctcctcctcgctgggtcacaggagactggggccagtgttc

SEQ ID NO: 32601 - DNA, 120 bp, Artificial Sequence
  ENSG00000049192_32 (sequence is synthesized)
tgctcagtgtggccttggacagcagatgagaactgtgcagtgtctctcctacaccggacaggcatctagtgactgtctagaaactgttcggcctccatcaatgcagcagtgtgaaagcaa

SEQ ID NO: 32602 - DNA, 120 bp, Artificial Sequence
  ENSG00000049192_33 (sequence is synthesized)
atgtgacagtacccccatttctaatactgaagagtgcaaagatgtgaataaagtggcttattgcccactggtgctgaagttcaagttctgcagtcgagcatacttcagacagatgtgttg

SEQ ID NO: 32603 - DNA, 120 bp, Artificial Sequence
  ENSG00000049192_34 (sequence is synthesized)
taagacctgccaaggacactgacccacagaaagccagagagagtgccttgtcatttcatcatggaaatgcatccatcaaagagagccacccagaggaagaggattgatgtccttgcaaat

SEQ ID NO: 32604 - DNA, 120 bp, Artificial Sequence
  ENSG00000049192_35 (sequence is synthesized)
gcattaccctgtggaaaacgtaaccactggtcagccctagctgacaaaatttcaatattattttagcttctgtgaagtgggatttattgatccaaagtgctggacacggtattaggaggg

SEQ ID NO: 32605 - DNA, 120 bp, Artificial Sequence
  ENSG00000049192_36 (sequence is synthesized)
aatgccagattggagagatccaaacaacacagggagacttgcttactgtggagcgtttgtgttctttcgagtaaatccaatagcctgtttacctccttggaccattaagataatttttat

SEQ ID NO: 32606 - DNA, 120 bp, Artificial Sequence
  ENSG00000049192_37 (sequence is synthesized)
tatggacttagcaatgacactgaatccatttgtatttaaaactgtttaaaatgtagctgttatgacttggtcaactatggaagtgaagaaggttcagaattcttaagtcatagcttaaaa

SEQ ID NO: 32607 - DNA, 120 bp, Artificial Sequence
  ENSG00000049192_38 (sequence is synthesized)
atatttactgtactttatctcactacaacagcaccacaatttaaattataaaacgggctttgaactataatttaaggagcaattataaatcaaaagtaatgaaagtttgtattatttttc

SEQ ID NO: 32608 - DNA, 120 bp, Artificial Sequence
  ENSG00000049192_39 (sequence is synthesized)
ttcattccacttaatttccttaggaataatcccctggttctgaacactgctgtgagccatatataaaactatattaaactgaacaataatgaggggcatagtttaaagcagtgcatcagt

SEQ ID NO: 32609 - DNA, 120 bp, Artificial Sequence
  ENSG00000049192_40 (sequence is synthesized)
tactgcagctgtgcaagtctataaactcagtgctgaaagactgtggccaacttgccattgtgcaagtaaagctgagatttccattaaaactttaagagaaaaacatttcaatttcatgca

SEQ ID NO: 32610 - DNA, 120 bp, Artificial Sequence
  ENSG00000049192_41 (sequence is synthesized)
gaaaccagacctggggtatggtacagaccaaaggaccaggccctttgctgccaccacacaggatgccttagttcttatttgagtccctccaactcacttgtgtttacatcctccccagcc

SEQ ID NO: 32611 - DNA, 120 bp, Artificial Sequence
  ENSG00000049192_42 (sequence is synthesized)
acagcacggcttctgccctttggattgctgcacgtgtgttgagcttactgagatgataccatgcaaaagatagactggctcggtaaccaggcagacccttttgcagtttgttgacaatta

SEQ ID NO: 32612 - DNA, 120 bp, Artificial Sequence
  ENSG00000049192_43 (sequence is synthesized)
cgatgagttccagatgtcccttctttgatatggtagaagggcatttatttatatgagagcaaatgtgtgtgtgtgtttgcgggcgcttttaagtgtgtggatagatgagtgtgcttgcac

SEQ ID NO: 32613 - DNA, 120 bp, Artificial Sequence
  ENSG00000049192_44 (sequence is synthesized)
ataatgtgctatttctgtgagttttaaagtaggcaagggataataaccaaagaagaaaatttcatgaagactagacatcataaagcataattttaatagtcactcaaccaagtatttttt

SEQ ID NO: 32614 - DNA, 120 bp, Artificial Sequence
  ENSG00000049192_45 (sequence is synthesized)
attttttatggatactctgaatggcaattaaatgtgaaacccagtttcttgggcaagtcaaattctggaatcacatccacctaaattaaaatgactagctcgtattttccccatcttcaa

SEQ ID NO: 32615 - DNA, 120 bp, Artificial Sequence
  ENSG00000049192_46 (sequence is synthesized)
gtttcacatcctggtcatcaaaagactcgacagcaagacttagaatgaaaaagggtacttgtttatattaatattttttacttgaacacgtgtagcttgcagcaggttcttgatgaatgt

SEQ ID NO: 32616 - DNA, 120 bp, Artificial Sequence
  ENSG00000049192_47 (sequence is synthesized)
gctttgtgtccaaaatgcctccccattgtacacaggtgtacaccatgcatgcaccaacacctaaaactcaaaactaaatggctattttgtaaggttaatactttcagttaaacagcatgt

SEQ ID NO: 32617 - DNA, 120 bp, Artificial Sequence
  ENSG00000049192_48 (sequence is synthesized)
ttgacttgattccatcatggtgctcttaaattacatgtcagtgcatcacatatatcatgatctaatgcagatgactaggctttttccaaaaggaagacagaccctcagacaccaaaagcc

SEQ ID NO: 32618 - DNA, 120 bp, Artificial Sequence
  ENSG00000049192_49 (sequence is synthesized)
aatctaaacaactcccaggtttgctgtggacaatcagcatggaatgttttctgcactctcagtcatgaccatctgtatcttgttacctgctttctctctcaacaccacagttctcaaccc

SEQ ID NO: 32619 - DNA, 120 bp, Artificial Sequence
  ENSG00000049192_50 (sequence is synthesized)
tgagccttccagagagagctattgatgatacaagaggaatcaccagggcccggatctaagatgcccttagaagaccagcccaagtgccgtcttagccattcagtgaagggcaaacagccc

SEQ ID NO: 32620 - DNA, 120 bp, Artificial Sequence
  ENSG00000049192_51 (sequence is synthesized)
atgggtagtatggcccgagcactgaattcccttgcgccttttcaaagaacagttaacttggtgctaatgtgccctggtgaaataaataaaagatgggcagtttctgtggcattttaggca

SEQ ID NO: 32621 - DNA, 120 bp, Artificial Sequence
  ENSG00000049192_52 (sequence is synthesized)
taggtttgcaatccagatctgattttctccaacataaatatcagctcatgttcttatttcaaaaagatttcttattaccgactaaaagctattttttacctcacctggaaactaccattg

SEQ ID NO: 32622 - DNA, 120 bp, Artificial Sequence
  ENSG00000049192_53 (sequence is synthesized)
tgagggccatcccccaggcactgcacagcaccttggctgatgctggaagaggagggcagtcagtgtcacttctgggatgtgccccagcactgagaacaaaatgcaggcatcccccggggc

SEQ ID NO: 32623 - DNA, 120 bp, Artificial Sequence
  ENSG00000049192_54 (sequence is synthesized)
agcatcagagtgcctttctagagggagccacgcacagaatgtaacaggatgaaacagtttcaagtaagccttgaattgaaacctgagtaggttaaaacaattctatttcatagcacatca

SEQ ID NO: 32624 - DNA, 120 bp, Artificial Sequence
  ENSG00000049192_55 (sequence is synthesized)
caatactgctgctactctgtagccacccccatggctacatgatgccctattcctaaataataacaatagcattgtcagtggaggctgggccaccatggcagaccttccaaaagtagtgag

SEQ ID NO: 32625 - DNA, 120 bp, Artificial Sequence
  ENSG00000049192_56 (sequence is synthesized)
ctacatagactacttagggaaccccagggaaactggtaccctacacctgggagcagtatctgccactgggataaagtcctactaaaaaaggaacggtaaatgtaccctaatgattaaacc

SEQ ID NO: 32626 - DNA, 120 bp, Artificial Sequence
  ENSG00000049192_57 (sequence is synthesized)
ccgtgagatacatatgatttccaaatagtccatttcattaggaacttttttgtttgaatgaatgtcacataggtatcctcagtaacacagaacgaaattacctttgtattattgtgatta

SEQ ID NO: 32627 - DNA, 120 bp, Artificial Sequence
  ENSG00000049192_58 (sequence is synthesized)
gttgttgcttattattttatactcagtaataatgtggtacactgttaatttttttgcttttgtaaattatattctaatttattgccatgtttcctaacacttgtcctacattcattctcc

SEQ ID NO: 32628 - DNA, 120 bp, Artificial Sequence
  ENSG00000049192_59 (sequence is synthesized)
tgcttgtaatgaaaatgaaaaaatcattgtaacacttgatggagtgaaattccacgccaggcacagaatttttttgacatagataatttagtaaaataaaaattcagcttataataatga

SEQ ID NO: 32629 - DNA, 120 bp, Artificial Sequence
  ENSG00000049192_60 (sequence is synthesized)
tttattcactattgtaataaatttggttctatgtaaagcctcattcagataatgagtatagagaaagcaaaatggtaatttatttttcactactgagaaagaatgtattacactattatt

SEQ ID NO: 32630 - DNA, 120 bp, Artificial Sequence
  ENSG00000049192_61 (sequence is synthesized)
agggcaagatggagaacaaaacacattctgagctatgctttgtgtttgttaaaaaagctaattggaaacatttcttgcaggtttgcttcaagctgtaatttagcaaaagaaactttgctt

SEQ ID NO: 32631 - DNA, 120 bp, Artificial Sequence
  ENSG00000049192_62 (sequence is synthesized)
tatatatttatgttttcttcattaatattgactctactagctcagaacttgaggcaattctgctgtcatactaaaatgtattttcatgctatccaagttaataaagttgtctgaatgtaa

SEQ ID NO: 32632 - DNA, 120 bp, Artificial Sequence
  ENSG00000049192_63 (sequence is synthesized)
attatattccatttgttttcaacctcatgtaatttgtgcagatttgttggtaaaatacatcttggcacaatgagtgtctctgctggtgcttctcccaagactatcttgaaggtgggctgt

SEQ ID NO: 32633 - DNA, 120 bp, Artificial Sequence
  ENSG00000049192_64 (sequence is synthesized)
ttgcctttcgtgaacacattcttggtaaagaacatcaaaagttttaaaaaagaaaatgagcaagaatcagacatcacagatgcaacttcttgtaatgggagatgagaatgtacggctgtg

SEQ ID NO: 32634 - DNA, 120 bp, Artificial Sequence
  ENSG00000049192_65 (sequence is synthesized)
atactctaggacattttgccagtaagttgtttgactatgtttaagacccctaagtttaggaaaacataaaaaatggttgcagaaggtgatcagcaagagccctgggtcagtgcaagcaat

SEQ ID NO: 32635 - DNA, 120 bp, Artificial Sequence
  ENSG00000049192_66 (sequence is synthesized)
aaaaaagactaactgctcaccactgtcatggaagctacaggatttaagtgtcatgagcttggtggatttaatagtttgccctgtcagtctttaaatttaaagggcttagttaaaggtgtc

SEQ ID NO: 32636 - DNA, 120 bp, Artificial Sequence
  ENSG00000049192_67 (sequence is synthesized)
ctttttcctggtctgcttgcagtcgagactacatcaccagctttctagaatttcttaaactcggtgattcaataagtggttcatgaatcgcccagaagccgtcctgattaaataataaag

SEQ ID NO: 32637 - DNA, 120 bp, Artificial Sequence
  ENSG00000049192_68 (sequence is synthesized)
ttttcatgggtgccttttccctacaatttactctattcctaatcctcctccctctagtggccaccaatgcaattctttacctctggctgggagagcaggacagttggcttccttcaaagc

SEQ ID NO: 32638 - DNA, 80 bp, Artificial Sequence
  ENSG00000049239_0 (sequence is synthesized)
gtcttgctgagcgcaaggcggtggaggcctgaggcctgaggcctggggcggggtggcggccgggctggccttggcctcgc

SEQ ID NO: 32639 - DNA, 120 bp, Artificial Sequence
  ENSG00000049239_1 (sequence is synthesized)
ggagtgtcgtgcggcgcgtggccgcgtgacacgcgcacttgtcggagtgacgggccctgcggaagaggaggtgcggcccagggcgcaggggagccctcgggagcgggcccggccctcagc

SEQ ID NO: 32640 - DNA, 120 bp, Artificial Sequence
  ENSG00000049239_2 (sequence is synthesized)
gccgccccggccgtgtcccggaggagcggcctgcgccgccgcgcgagaggaagcacccaggcatgtggaatatgctcatagtggcgatgtgcttggcccttctgggctgcctgcaagccc

SEQ ID NO: 32641 - DNA, 120 bp, Artificial Sequence
  ENSG00000049239_3 (sequence is synthesized)
aggagctccagggacatgtctccataatcctgctgggagcaactggggacctggctaagaagtacttatggcagggactgttccagctgtacctggatgaagcggggaggggtcacagtt

SEQ ID NO: 32642 - DNA, 120 bp, Artificial Sequence
  ENSG00000049239_4 (sequence is synthesized)
ttagcttccatggagctgctctgacagcccccaagcagggtcaagagctcatggccaaggccctggaatccctctcctgccccaaggacatggcacccagtcactgtgcagagcacaagg

SEQ ID NO: 32643 - DNA, 120 bp, Artificial Sequence
  ENSG00000049239_5 (sequence is synthesized)
atcagttcctgcagctgagccagtaccgccaactgaagacggccgaggactatcaggccctgaacaaggacatcgaggcacagctccagcacgcaggcctccgggaggctggcaggatct

SEQ ID NO: 32644 - DNA, 120 bp, Artificial Sequence
  ENSG00000049239_6 (sequence is synthesized)
tctacttctcagtgccacccttcgcctatgaagacattgcccgcaacatcaacagtagctgccggccaggcccgggcgcctggctgcgggttgtccttgagaaaccctttggccatgacc

SEQ ID NO: 32645 - DNA, 120 bp, Artificial Sequence
  ENSG00000049239_7 (sequence is synthesized)
acttctcagcccagcagctggccacagaactcgggacctttttccaggaggaggagatgtaccgggtggaccattacttaggcaagcaggctgtggcgcagatcctgcctttccgagacc

SEQ ID NO: 32646 - DNA, 120 bp, Artificial Sequence
  ENSG00000049239_8 (sequence is synthesized)
agaaccgcaaggctttggacggcctctggaaccggcaccatgtggagcgggtggagatcatcatgaaagagaccgtggatgctgaaggccgcaccagcttctatgaggagtacggtgtca

SEQ ID NO: 32647 - DNA, 120 bp, Artificial Sequence
  ENSG00000049239_9 (sequence is synthesized)
ttcgcgacgtcctccagaaccatctgacggaggtcctcaccctcgtggccatggagctgccccacaatgtcagcagtgcggaggctgtgctgcggcacaagcttcaggtcttccaggcgc

SEQ ID NO: 32648 - DNA, 120 bp, Artificial Sequence
  ENSG00000049239_10 (sequence is synthesized)
tgcggggcctgcagaggggcagtgccgtcgtgggccagtaccagtcttacagtgagcaggtgcgcagagagctgcagaagccagacagcttccacagcctgacgccgaccttcgcagccg

SEQ ID NO: 32649 - DNA, 120 bp, Artificial Sequence
  ENSG00000049239_11 (sequence is synthesized)
tcctagtgcacattgacaaccttcgctgggagggcgtgcctttcatcctgatgtctggcaaagccttggacgagagagtgggctacgctcggatcttgttcaagaaccaggcctgctgtg

SEQ ID NO: 32650 - DNA, 120 bp, Artificial Sequence
  ENSG00000049239_12 (sequence is synthesized)
tgcagagcgaaaagcactgggccgcggcgcagagccagtgcctgccccggcagctcgtcttccacatcggccatggcgacctgggcagccctgccgtgctggtcagcaggaacctgttca

SEQ ID NO: 32651 - DNA, 120 bp, Artificial Sequence
  ENSG00000049239_13 (sequence is synthesized)
ggccctccctgccctccagctggaaggaaatggagggaccacctgggctccgccttttcggcagccctctgtccgattactacgcctacagccctgtgcgggagcgggacgcccactccg

SEQ ID NO: 32652 - DNA, 120 bp, Artificial Sequence
  ENSG00000049239_14 (sequence is synthesized)
tcctcttatcccatatcttccatggccggaagaatttcttcatcaccacagagaacttgctggcctcctggaacttctggacccctctgctggagagcctggcccataaggccccacgcc

SEQ ID NO: 32653 - DNA, 120 bp, Artificial Sequence
  ENSG00000049239_15 (sequence is synthesized)
tctaccctggaggagctgagaatggccgtctgttggactttgagttcagtagcggccggttgttcttttcccagcagcagccggagcagctggtgccagggccagggccggccccaatgc

SEQ ID NO: 32654 - DNA, 120 bp, Artificial Sequence
  ENSG00000049239_16 (sequence is synthesized)
ccagtgacttccaggtcctcagggccaagtaccgagagagcccgctggtctccgcctggtccgaggagctgatctctaagctggctaatgacatcgaggccaccgctgtgcgagccgtgc

SEQ ID NO: 32655 - DNA, 120 bp, Artificial Sequence
  ENSG00000049239_17 (sequence is synthesized)
ggcgctttggccagttccacctggcactgtcggggggctcgagccccgtggccctgttccagcagctggccacggcgcactatggcttcccctgggcccacacgcacctgtggctggttg

SEQ ID NO: 32656 - DNA, 120 bp, Artificial Sequence
  ENSG00000049239_18 (sequence is synthesized)
acgagcgctgcgtcccactctcagacccggagtccaacttccagggcctgcaggcccacctgctgcagcacgtccggatcccctactacaacatccaccccatgcctgtgcacctgcagc

SEQ ID NO: 32657 - DNA, 120 bp, Artificial Sequence
  ENSG00000049239_19 (sequence is synthesized)
agcggctctgcgccgaggaggaccagggcgcccagatctatgccagggagatctcagccctggtggccaacagcagcttcgacctggtgctgctgggcatgggtgccgacgggcacacag

SEQ ID NO: 32658 - DNA, 120 bp, Artificial Sequence
  ENSG00000049239_20 (sequence is synthesized)
cctccctcttcccacagtcacccactggcctggatggcgagcagctggtcgtgctgaccacgagcccctcccagccacaccgccgcatgagccttagcctgcctctcatcaaccgcgcca

SEQ ID NO: 32659 - DNA, 120 bp, Artificial Sequence
  ENSG00000049239_21 (sequence is synthesized)
agaaggtggcagtcctggtcatgggcaggatgaagcgtgagatcaccacgctggtgagccgggtgggccatgagcccaagaagtggcccatctcgggtgtcctgccgcactccggccagc

SEQ ID NO: 32660 - DNA, 120 bp, Artificial Sequence
  ENSG00000049239_22 (sequence is synthesized)
tggtgtggtacatggactacgacgccttcctgggatgagggcgcctgtgccccttgcccgcttcgctcctgtgctttccttcgcccgtgtcttccctcccttctcggccccgccacctgc

SEQ ID NO: 32661 - DNA, 120 bp, Artificial Sequence
  ENSG00000049239_23 (sequence is synthesized)
ccagcgtgccctggctctccagaaccttctatcccacagtcaggccccagagagggcaggacaagccttgtcccgatgcctttgaccggcagctctgtgtattggtggatagatgcagaa

SEQ ID NO: 32662 - DNA, 120 bp, Artificial Sequence
  ENSG00000049239_24 (sequence is synthesized)
acaaggaagaaatggagtctgctcctgagaagcttcaaattcaggccaggagagaagtcttaagaaaagacctccagcagttacacattcatatcaaccagcacaacacgggatggcgcc

SEQ ID NO: 32663 - DNA, 120 bp, Artificial Sequence
  ENSG00000049239_25 (sequence is synthesized)
caaactccggcgttcacaagaggagacgtgacgtggtgggctgaggttaatcagggaaggtttcctgggggaggtgatccttgaactggctcccggggaacattcagagcatgattggta

SEQ ID NO: 32664 - DNA, 120 bp, Artificial Sequence
  ENSG00000049239_26 (sequence is synthesized)
gacagaagggtgcagaggcgcccaggggagtacattgccccgtgcaaagcaggggcattggggactgtcttgagaccctgagggggtcaagcccctccttccccagctgcccctccttct

SEQ ID NO: 32665 - DNA, 120 bp, Artificial Sequence
  ENSG00000049239_27 (sequence is synthesized)
agaacctctgcacatctagcctctggccctcctcttcactgcctccacctgctcccgcttgccatccctgtctcctccatcctggctgtgcagtaggaattccaggctcctccctgtgtc

SEQ ID NO: 32666 - DNA, 120 bp, Artificial Sequence
  ENSG00000049239_28 (sequence is synthesized)
tttgctgttcttcagactccatttatagagaatgagggctgataacaggaatacagtggcaaagactagactgtggaaagggttccagaaatcttttttcttttttaattaaaaaaaata

SEQ ID NO: 32667 - DNA, 120 bp, Artificial Sequence
  ENSG00000049239_29 (sequence is synthesized)
ccccagaaatctcagtgctgtttggagctccatttctcatttgatgacttgctctgcgtggggaggtggggtctcattcccccaacttcctcagggaggacccctgccctccgctgctcc

SEQ ID NO: 32668 - DNA, 120 bp, Artificial Sequence
  ENSG00000049239_30 (sequence is synthesized)
tctgtcctgctagccttcctccaggaagcacactgggtgcagataatcaggacattccagagatccccaatttaagagggtcatttccatctcaggggactcccggatgggtgtttccgc

SEQ ID NO: 32669 - DNA, 120 bp, Artificial Sequence
  ENSG00000049239_31 (sequence is synthesized)
tctcaatagcccctcttgttttaccaggaaagatccagttaaatcacccactgaggtgacagctcattagcggggagagagatggagcatcgagtgacactgggccatccaggcggctct

SEQ ID NO: 32670 - DNA, 120 bp, Artificial Sequence
  ENSG00000049239_32 (sequence is synthesized)
gctcccaccagacaggagctaggcctcactggcaggggggctgcccacagccttttcaggggctcgcttggcgggtgacggggccgcagccaggccttctctccctgccccttggtgacc

SEQ ID NO: 32671 - DNA, 120 bp, Artificial Sequence
  ENSG00000049239_33 (sequence is synthesized)
ccgtggcttcctgtctgctggcctctcctgctacttatcacttcaccacgaactctctgcctgagactggggaagtaagcgggtatcttctcagtgagcataggttggggactgtgatct

SEQ ID NO: 32672 - DNA, 120 bp, Artificial Sequence
  ENSG00000049239_34 (sequence is synthesized)
tgagaagccatgggccagcaatacctgcttttctgaagcccccaaggagggctctgacattctttttaaaaacaccacaaagcaaaattcccaggacatgtgtagttttgtttgttcagt

SEQ ID NO: 32673 - DNA, 120 bp, Artificial Sequence
  ENSG00000049239_35 (sequence is synthesized)
atcccacaacttaaggctgggagatggaactcttggttaaggtcgatttttctgtctggcttctccgcaccttccacttgctctctggatcaggcagatataaactttctagcgcatttt

SEQ ID NO: 32674 - DNA, 120 bp, Artificial Sequence
  ENSG00000049239_36 (sequence is synthesized)
gagagagggctttcttgggtgagggagcatggcaaagtcggtttctctctggactgtttacacttcaaggcggtggatttagaggaatcctggctttcattttcaatgccagtctgagac

SEQ ID NO: 32675 - DNA, 87 bp, Artificial Sequence
  ENSG00000049239_37 (sequence is synthesized)
tgccagtctgagacatgttcccaagccggggctcttgttcacaccacttactctggccaccaacaacaacccaggccagacagagca

SEQ ID NO: 32676 - DNA, 120 bp, Artificial Sequence
  ENSG00000049239_38 (sequence is synthesized)
cccagagagcgcccctcgttaggacagaaccacggtgcccagagccaggaagccgccctcctggcgcccagcatctgagcttctacacgtgatgggcgggctcaggagaggacagggagt

SEQ ID NO: 32677 - DNA, 120 bp, Artificial Sequence
  ENSG00000049239_39 (sequence is synthesized)
cgtggtggaagttccacagctggccgcgtgggggggcccttgcaccgcactgccgcctcctgactgcccctatccccgcagcccctgtgccggatttcatttccctcctctctcccaggg

SEQ ID NO: 32678 - DNA, 120 bp, Artificial Sequence
  ENSG00000049239_40 (sequence is synthesized)
tacctggccccagcactctcccatctgttcttcaggaaccgactcctctccagttgcaacaccagggagaaaggggcctccacatgcccaagtacccctgcaggatgaagggcaggccgg

SEQ ID NO: 32679 - DNA, 120 bp, Artificial Sequence
  ENSG00000049239_41 (sequence is synthesized)
cccttgatgtgccatttctgaataatagtcactgccgccgagtctaggatgtcctgttctaactcagccctgcctcggatgcaccaccgatctgtgcagagtgggtgtgggagtgtgggt

SEQ ID NO: 32680 - DNA, 120 bp, Artificial Sequence
  ENSG00000049239_42 (sequence is synthesized)
gagggtcgaaatgccaaaggtctactttccagaatcaagtgccttctgcaaatcatgttggaaaagtccaaacctggagatgtccctgtgcctccgcccctacccaccccttttccttca

SEQ ID NO: 32681 - DNA, 120 bp, Artificial Sequence
  ENSG00000049239_43 (sequence is synthesized)
gctgtgttaggaaggagaagttttcagaaccctctaggctggtggctttcaaacttcagaccatgatctgcagcaagaaacgtgccttccatcataaatcagtccatttgtttacaactg

SEQ ID NO: 32682 - DNA, 120 bp, Artificial Sequence
  ENSG00000049239_44 (sequence is synthesized)
tgttccaagcaggtttcataaagaaattcttaaccttagaacctcggatatcctctatgttttagttttcatttttttaaaatgcttcttaaaattcactaaattgggctaggtgtggct

SEQ ID NO: 32683 - DNA, 72 bp, Artificial Sequence
  ENSG00000049239_45 (sequence is synthesized)
ggatcacttgagcccagaaggtttaaaaccaggtatggtggtgccctcctgtggtcccagctactcgggagt

SEQ ID NO: 32684 - DNA, 89 bp, Artificial Sequence
  ENSG00000049239_46 (sequence is synthesized)
catagtgagaccccatctctacaaaaagttttaaaaccaggtatggtggtgccctcctgtggtcccagctactcgggagtactgaggct

SEQ ID NO: 32685 - DNA, 120 bp, Artificial Sequence
  ENSG00000049239_47 (sequence is synthesized)
aaaaaaaaaaaaaaaaaaggaaagagtgatgacaacagcccagggagcagccccgctcagaacccaagtcccaagttccagcactgtgttcccaggcaggctgtttgcctcttcctggtc

SEQ ID NO: 32686 - DNA, 120 bp, Artificial Sequence
  ENSG00000049239_48 (sequence is synthesized)
caggctgtttgcctcttcctggtctggaagcccttgggtcctatggtggcggcagctcccacagtccaggttccctggtggggaccaatgattccatccgcatggaagcccacgtgtgca

SEQ ID NO: 32687 - DNA, 120 bp, Artificial Sequence
  ENSG00000049239_49 (sequence is synthesized)
cttaggggcccataaatggcagaagggcccctcctttgggagaccttgtcagtcagcatctctagggcaaccgtgattgccatttgtagaggggaaggaatcaagggactttaagctaga

SEQ ID NO: 32688 - DNA, 120 bp, Artificial Sequence
  ENSG00000049239_50 (sequence is synthesized)
tcaaaatctggggacaaattctcctgctaactgcaagttaaaataggcccttcttactgaatttccctgtttgtttctctgcagacaatgctttagccctactcttgggcccccaagtta

SEQ ID NO: 32689 - DNA, 120 bp, Artificial Sequence
  ENSG00000049239_51 (sequence is synthesized)
gcagagtaatcaaagcttcctaccgtttggcctactattccagactagtccctcgaggggttcccttccaaaatatgcagggctcaggctcccaattccgggcctgtctgctttgcttgt

SEQ ID NO: 32690 - DNA, 120 bp, Artificial Sequence
  ENSG00000049239_52 (sequence is synthesized)
gtttctcctgtccctgttctcccggagggcccaggtggaactcacgacagggagggagacgcttcccaaaaacctgcagggctatttcccagaatttggttttcaagtacaaaacttttt

SEQ ID NO: 32691 - DNA, 120 bp, Artificial Sequence
  ENSG00000049239_53 (sequence is synthesized)
gtcctgtaagatatatgcagcctcacagaagcagcctctgcctccactttaccagctacgtttttatcttaagcacatggggctcccttagaacttactccactgatttaaaaaaaaaaa

SEQ ID NO: 32692 - DNA, 120 bp, Artificial Sequence
  ENSG00000049239_54 (sequence is synthesized)
actgcctggcagcatctcagtgtcagagtgagcacggcacaggaaaggcccgtggtgacgagggtgaggtggccacagtgaccggacgacaaatgagactctgcaaatgagactccagag

SEQ ID NO: 32693 - DNA, 120 bp, Artificial Sequence
  ENSG00000049239_55 (sequence is synthesized)
ggtgaagatctgcggtctccagacatcataggccatgtgacccactaggggccgcttacccctggccgtccgctggctgaactgaacgcattccctctctccgcaactctcccgtgaggc

SEQ ID NO: 32694 - DNA, 120 bp, Artificial Sequence
  ENSG00000049239_56 (sequence is synthesized)
tgcacccgtgtgggtagcactggaagcggcactgtttgcattgtacataggaaggaaggaagttcttccagcctcaccagcacctggcagcgagtcagagcctgtgagggcatccgaagc

SEQ ID NO: 32695 - DNA, 120 bp, Artificial Sequence
  ENSG00000049239_57 (sequence is synthesized)
agtgatgcagtgtcaacctcccagctggtgccactctgccctcgggggctccaagcattgtaactcagtcatgggagctgcctctttggaagtgcagatttattcctgtaataatcctgc

SEQ ID NO: 32696 - DNA, 120 bp, Artificial Sequence
  ENSG00000049239_58 (sequence is synthesized)
ctgcttttacctctcgtccactgaccagcaagtgtgagtcccggtgtcagtcggcacagtccagtgtccatctgcatttgctcatgcagagggggtgagttgggcactccctgttgttgg

SEQ ID NO: 32697 - DNA, 120 bp, Artificial Sequence
  ENSG00000049239_59 (sequence is synthesized)
ttttccttttgcagcacactgggcagtctccctataaaacaaaaaccccaccttctgtgccttctgctttagagcagagctccccctcccatttcctcagtcttccctgcaaaatctgtc

SEQ ID NO: 32698 - DNA, 120 bp, Artificial Sequence
  ENSG00000049239_60 (sequence is synthesized)
caccggggaaggcagcaggaaccctgggcagcgggtgttctgggaaggctagtgacagcagatgtcatccaggaacagccacacacggttctccaggccgccgtcagcagctcaaggtgg

SEQ ID NO: 32699 - DNA, 120 bp, Artificial Sequence
  ENSG00000049239_61 (sequence is synthesized)
ggtatgagtgagaagctgaggatctcgcagcttgttgctgagcaaggtgcaaccgggctcatgctgtcatcagcacaagacgggatggcaagggctttcagacgcatttccaagagtcca

SEQ ID NO: 32700 - DNA, 120 bp, Artificial Sequence
  ENSG00000049239_62 (sequence is synthesized)
gcaagccagggggaagatgatccctttgccgaagtgtaccctctagccaacttttgggagcgcttctgtttgcaaagcgctggggatgtgcctgtctctgtgtgacccacgaacgggaag

SEQ ID NO: 32701 - DNA, 120 bp, Artificial Sequence
  ENSG00000049239_63 (sequence is synthesized)
ggagagcactggagtaatgacacttctgctgctgctttgattctcaaggctgatctttaaaaccctcgccttgctgacaggtgctttaaaggcagtctgcatcttttcttcccttggtgt

SEQ ID NO: 32702 - DNA, 120 bp, Artificial Sequence
  ENSG00000049239_64 (sequence is synthesized)
gggagaggtaaacactttgatttgctgaaagctgtatggagtatatttgaacagctagtagttagctttgaaagtggaagtgtgaacagacactacttgtgtcgctttgggtccttcact

SEQ ID NO: 32703 - DNA, 120 bp, Artificial Sequence
  ENSG00000049239_65 (sequence is synthesized)
ttacccccacagaagtctagaggcgtctgttataaagcgttacggggcgcctgcatgcaggaggaaggacctgtattagctggaaatcatcaggaacccagcttgcctccatctctctga

SEQ ID NO: 32704 - DNA, 120 bp, Artificial Sequence
  ENSG00000049239_66 (sequence is synthesized)
gatgtgctgggtacagcctgcccctcctagttctgtccaccgggaagagccggctggcggcagatccccaggggcagagcccctgctggatcctgggagctcatctttacctgtgccgga

SEQ ID NO: 32705 - DNA, 120 bp, Artificial Sequence
  ENSG00000049239_67 (sequence is synthesized)
gtgggaactgtgattccagccgggcaggtcagagtggagcagtgctaagaggctgttgcaggagaactagacgggcggggcctgctgcatctggatcatgtttctgtgctctgccccgcg

SEQ ID NO: 32706 - DNA, 120 bp, Artificial Sequence
  ENSG00000049239_68 (sequence is synthesized)
ctagggactcagggtctgggcttctgccaggtgaggagcagagagactgttcccttgggtggagaggtgtgggcatgagagccacccattgccaagcagcaagaatgttcgtgctttttt

SEQ ID NO: 32707 - DNA, 120 bp, Artificial Sequence
  ENSG00000049239_69 (sequence is synthesized)
ttttccagagaggggaaccccactggtttttgtggaaacaatggaaacttacagatgcctgcctgggatgatgaggcacattcagaacaaatgcttttttttttttgagacagagtctcg

SEQ ID NO: 32708 - DNA, 120 bp, Artificial Sequence
  ENSG00000049239_70 (sequence is synthesized)
gccaccatgcctggccagaacaaatgcctttttaaaccttttaagaacatttttaaaatgtctttttctatgtcaaatgtaacgtttatttttttaaacaataaaattgatttgccaaaa

SEQ ID NO: 32709 - DNA, 120 bp, Artificial Sequence
  ENSG00000049239_71 (sequence is synthesized)
accagaaaacgctctgcggctagagcttcagcacaggctgggtctgctgtgccgggtctgtatggggacagctgcacgcctcttccgcttgtgtgagaacaaaggccggaacctggattc

SEQ ID NO: 32710 - DNA, 120 bp, Artificial Sequence
  ENSG00000049245_0 (sequence is synthesized)
gtcccacccatctccctggcctccggtcccaacttcgcttctctgctgaccctctctcgtcgccgctgccgccgccgcagctgccaaaatgtctacaggtccaactgctgccactggcag

SEQ ID NO: 32711 - DNA, 120 bp, Artificial Sequence
  ENSG00000049245_1 (sequence is synthesized)
taatcgaagacttcagcagacacaaaatcaagtagatgaggtggtggacataatgcgagttaacgtggacaaggttctggaaagagaccagaagctctctgagttagacgaccgtgcaga

SEQ ID NO: 32712 - DNA, 120 bp, Artificial Sequence
  ENSG00000049245_2 (sequence is synthesized)
cgcactgcaggcaggcgcttctcaatttgaaacgagcgcagccaagttgaagaggaaatattggtggaagaattgcaagatgtgggcaatcgggattactgttctggttatcttcatcat

SEQ ID NO: 32713 - DNA, 120 bp, Artificial Sequence
  ENSG00000049245_3 (sequence is synthesized)
catcatcatcgtgtgggttgtctcttcatgaagaaccagcggaactcaaaactgctgttcaagaaacctcttcaagacttttgacttagaacctgctatattatcaagcttacctactgt

SEQ ID NO: 32714 - DNA, 120 bp, Artificial Sequence
  ENSG00000049245_4 (sequence is synthesized)
tatctctaaaattttttttgtgttaatgtaaagttgaatttctaggaaacgtgcctttgttttttaatatgcactccaaattagaaggccggccccgtccacattttgcacagtgccttt

SEQ ID NO: 32715 - DNA, 120 bp, Artificial Sequence
  ENSG00000049245_5 (sequence is synthesized)
acagatttacgtatgggctgatgaagaggccttcttaagttccagagtgctataatctagatgtaatgttgtcactaattaattgccattactcccagttagttacccttgtcatttggc

SEQ ID NO: 32716 - DNA, 120 bp, Artificial Sequence
  ENSG00000049245_6 (sequence is synthesized)
attattttcagaaccacattttaaacctttgggtaatcagatttccaacttatgccttccagaaaaaaacactactgcctaacacaaatctgtgataacaacaggctgtgccttattttg

SEQ ID NO: 32717 - DNA, 120 bp, Artificial Sequence
  ENSG00000049245_7 (sequence is synthesized)
ataattttctgattccctagaagagaaccctctactttttgtaagcactactgactctcgctgtatttaagatgctggtgaagagcttttgctcttgcattagatttgaagatgtttaca

SEQ ID NO: 32718 - DNA, 120 bp, Artificial Sequence
  ENSG00000049245_8 (sequence is synthesized)
ttgttgttattgttatgtatcacttgctaaaaatattgttttaatcagagataacctctttaaaaaaatttttaaagaactatggctatgaccaaagcttctattttgccaaaaagttaa

SEQ ID NO: 32719 - DNA, 120 bp, Artificial Sequence
  ENSG00000049245_9 (sequence is synthesized)
taagtgtattcctgacagttaaattcagaaacgtgccaaatggaactcaaggtgccccttcagaattaaaatcattaccttgtgtgtgaaccttctacatcttcataggcctttcttcct

SEQ ID NO: 32720 - DNA, 120 bp, Artificial Sequence
  ENSG00000049245_10 (sequence is synthesized)
tttgaaaggctgtagacagtgtggctccccttctgattcagtattttgcatgggggttagagaaggtttgaggtagactctgaccgtctcataaaagagttctacccagcagttggcaga

SEQ ID NO: 32721 - DNA, 120 bp, Artificial Sequence
  ENSG00000049245_11 (sequence is synthesized)
ttatcagctgtggactccagcatgtttctgataattatgcaagcaacaattctgtagcctcaagtaagaccacctgtgaacttgatcattatctggcccaaatatgaagataaactataa

SEQ ID NO: 32722 - DNA, 120 bp, Artificial Sequence
  ENSG00000049245_12 (sequence is synthesized)
ctttggagtttgtttcctatttgtattcacattctgcttcctaaatcagttttctaaattatgcctgcaattaggcattggtcaggggtgaatggctcttttcacagagagtagccaacc

SEQ ID NO: 32723 - DNA, 120 bp, Artificial Sequence
  ENSG00000049245_13 (sequence is synthesized)
agagacctttgctttgatatcatcaactgcagagaatgctgttgatgggaatgctggaagcagaaactttgtcatcggaaaaacttttcttgtatgcatgagactcaacatcaggatcca

SEQ ID NO: 32724 - DNA, 120 bp, Artificial Sequence
  ENSG00000049245_14 (sequence is synthesized)
cagcttaaagatgggaattcaggtatgaaagaaaacaggcaaggaggcactgagggagaaagacacagactttatcgctctgtggctcattgttactggaatattctaaaactcttgttc

SEQ ID NO: 32725 - DNA, 120 bp, Artificial Sequence
  ENSG00000049245_15 (sequence is synthesized)
acatgctattatgacttataaagcagcaacagctgaggcgcaccaggacacagcttccatttctttaacgtctgttcccttaacatcgctgaaatgatttactgttgaagagatgccttg

SEQ ID NO: 32726 - DNA, 120 bp, Artificial Sequence
  ENSG00000049245_16 (sequence is synthesized)
cggtgtggccagctgtgaggagaaagcagctggcagtgttaggacattagtccaccttcagcgcagggtctctggccgggtctgactcagaaaccttggtactcgccccttggccacagt

SEQ ID NO: 32727 - DNA, 120 bp, Artificial Sequence
  ENSG00000049245_17 (sequence is synthesized)
gcccagacccatgtaacccactggctcctgcattaacccagaaatacctcgcttctatctgtgcacttagctgggaacttacccactgtaatcacctaaataaagtgtttataaacatga

SEQ ID NO: 32728 - DNA, 120 bp, Artificial Sequence
  ENSG00000049245_18 (sequence is synthesized)
cgcgccattgcactccagcccgggcaacaggagcgaaactccgtctctcaaaagagggggaaaaagaaagagtaccttcctaaaagaggaggcatttcttcaacacacctttccactcac

SEQ ID NO: 32729 - DNA, 120 bp, Artificial Sequence
  ENSG00000049245_19 (sequence is synthesized)
acacctttccactcacaccacccactccctgcatcccagtgttcctgactctgtttctgtaaattaatctatttttccatattggaaaaagggcattctgtaactgtttgtaactatgaa

SEQ ID NO: 32730 - DNA, 120 bp, Artificial Sequence
  ENSG00000049246_0 (sequence is synthesized)
ggaaaagctcctcggagatgagcgtgaccccctggctcgtggtggccgcctgttctcactaacgccatggcggggaccggagtgagaaaccggtgtctgtcactgactgcaaagtgagcg

SEQ ID NO: 32731 - DNA, 120 bp, Artificial Sequence
  ENSG00000049246_1 (sequence is synthesized)
agaagcaggctgcgggccgtcccagcacgacgtggagccccgcggagacctcgagatgccccgcggggaagctcctggccccgggagacggggggctaaggacgaggccctgggcgaaga

SEQ ID NO: 32732 - DNA, 120 bp, Artificial Sequence
  ENSG00000049246_2 (sequence is synthesized)
atcgggggagcggtggagccccgagttccatctgcagaggaaattggcggacagcagccacagtgaacagcaagatcgaaacagagtttctgaagaacttatcatggttgtccaagaaat

SEQ ID NO: 32733 - DNA, 120 bp, Artificial Sequence
  ENSG00000049246_3 (sequence is synthesized)
gaaaaaatacttcccctcggagagacgcaataaaccaagcactctagatgccctcaactatgctctccgctgtgtccacagcgttcaagcaaacagtgagtttttccagattctcagtca

SEQ ID NO: 32734 - DNA, 120 bp, Artificial Sequence
  ENSG00000049246_4 (sequence is synthesized)
gaatggagcacctcaggcagatgtgagcatgtacagtcttgaggagctggccactatcgcttcagaacacacttccaaaaacacagatacctttgtggcagtattttcatttctgtctgg

SEQ ID NO: 32735 - DNA, 120 bp, Artificial Sequence
  ENSG00000049246_5 (sequence is synthesized)
aaggttagtgcacatttctgaacaggctgctttgatcctgaatcgtaagaaagatgtcctggcgtcttctcactttgttgacctgcttgcacctcaagacatgagggtattctacgcgca

SEQ ID NO: 32736 - DNA, 120 bp, Artificial Sequence
  ENSG00000049246_6 (sequence is synthesized)
cactgccagagctcagcttcctttctggaacaactggacccaaagagctgcacggtatgaatgtgctccggtgaaaccttttttctgcaggatccgtggaggtgaagacagaaagcaaga

SEQ ID NO: 32737 - DNA, 120 bp, Artificial Sequence
  ENSG00000049246_7 (sequence is synthesized)
gaagtgtcactccccattccggatcatcccctatctgattcatgtacatcaccctgcccagccagaattggaatcggaaccttgctgtctcactgtggttgaaaagattcactctggtta

SEQ ID NO: 32738 - DNA, 120 bp, Artificial Sequence
  ENSG00000049246_8 (sequence is synthesized)
tgaagctcctcggatcccagtgaataaaagaatcttcaccaccacacacaccccagggtgtgtttttcttgaagtagatgaaaaagcagtgcctttgctgggttacctacctcaggacct

SEQ ID NO: 32739 - DNA, 120 bp, Artificial Sequence
  ENSG00000049246_9 (sequence is synthesized)
gattggaacatcgatcctaagctacctgcaccctgaagatcgttctctgatggttgccatacaccaaaaagttttgaagtatgcagggcatcctccctttgaacattctcccattcgatt

SEQ ID NO: 32740 - DNA, 120 bp, Artificial Sequence
  ENSG00000049246_10 (sequence is synthesized)
ttgtactcaaaacggagactacatcatactggattccagttggtccagctttgtgaatccctggagccggaagatttctttcatcattggtcggcataaagttcgaacgagcccactaaa

SEQ ID NO: 32741 - DNA, 120 bp, Artificial Sequence
  ENSG00000049246_11 (sequence is synthesized)
tgaggatgtttttgctaccaaaattaaaaagatgaacgataatgacaaagacataacagaattacaagaacaaatttacaaacttctcttacagccagttcacgtgagcgtgtccagcgg

SEQ ID NO: 32742 - DNA, 120 bp, Artificial Sequence
  ENSG00000049246_12 (sequence is synthesized)
ctacgggagcctggggagcagcgggtcgcaggagcagcttgtcagcatcgcctcctccagtgaggccagtgggcaccgtgtggaggagacgaaggcggagcagatgaccttgcagcaggt

SEQ ID NO: 32743 - DNA, 120 bp, Artificial Sequence
  ENSG00000049246_13 (sequence is synthesized)
ctatgccagtgtgaacaaaattaaaaatctgggtcagcagctctacattgagtcaatgaccaaatcatcattcaagccagtgacggggacacgcacagaaccgaatggtggtggtgaatg

SEQ ID NO: 32744 - DNA, 120 bp, Artificial Sequence
  ENSG00000049246_14 (sequence is synthesized)
taagacctttacttccttccaccaaacactgaaaaacaatagtgtgtacactgagccctgtgaggatttgaggaacgatgagcacagcccatcctatcaacagatcaactgtatcgacag

SEQ ID NO: 32745 - DNA, 120 bp, Artificial Sequence
  ENSG00000049246_15 (sequence is synthesized)
tgtcatcagatacctgaagagctacaacattccagctttgaaaagaaagtgtatctcctgtacaaatacaacttcttcctcctcagaagaagacaaacagaaccacaaggcagatgatgt

SEQ ID NO: 32746 - DNA, 120 bp, Artificial Sequence
  ENSG00000049246_16 (sequence is synthesized)
ccaagccttacaagctggtttgcaaatcccagccatacctaaatcagaaatgccaacaaatggacggtccatagacacaggaggaggagctccacagatcctgtccacggcgatgctgag

SEQ ID NO: 32747 - DNA, 120 bp, Artificial Sequence
  ENSG00000049246_17 (sequence is synthesized)
cttggggtcgggcataagccaatgcggttacagcagcaccattgtccatgtcccacccccagagacagccagggatgctaccctcttctgtgagccctggaccctgaacatgcagccagc

SEQ ID NO: 32748 - DNA, 120 bp, Artificial Sequence
  ENSG00000049246_18 (sequence is synthesized)
ccctttgacctcggaagaatttaaacacgtggggctcacagcggctgttctgtcagcgcacacccagaaggaagagcagaattatgttgataaattccgagaaaagatcctgtcatcacc

SEQ ID NO: 32749 - DNA, 120 bp, Artificial Sequence
  ENSG00000049246_19 (sequence is synthesized)
ctacagctcctatcttcagcaagaaagcaggagcaaagctaaatattcatattttcaaggagattctacttccaagcagacgcggtcggccggctgcaggaaagggaagcacaagcggaa

SEQ ID NO: 32750 - DNA, 120 bp, Artificial Sequence
  ENSG00000049246_20 (sequence is synthesized)
gaagctgccggagccgccagacagcagcagctcgaacaccggctctggtccccgcaggggagcgcatcagaacgcacagccctgctgcccctccgcggcctcctctccgcacacctcgag

SEQ ID NO: 32751 - DNA, 120 bp, Artificial Sequence
  ENSG00000049246_21 (sequence is synthesized)
cccgaccttcccacctgccgccatggtgcccagccaggccccttacctcgtcccagcttttcccctcccagccgcgacctcacccggaagagaatacgcagcccccggaactgcaccgga

SEQ ID NO: 32752 - DNA, 120 bp, Artificial Sequence
  ENSG00000049246_22 (sequence is synthesized)
aggcctgcatgggctgcccttgtccgagggcttgcagccttacccagctttcccttttccttacttggatacttttatgaccgttttcctgcctgacccccctgtctgtcctctgttgtc

SEQ ID NO: 32753 - DNA, 120 bp, Artificial Sequence
  ENSG00000049246_23 (sequence is synthesized)
gccatcgtttttgccatgtccattcctgggggcgacagcctcttctgcgatatcaccctcaatgtcgtcagcaatgagtccaactctggacccacccccttcagtcaccagccaaaggag

SEQ ID NO: 32754 - DNA, 120 bp, Artificial Sequence
  ENSG00000049246_24 (sequence is synthesized)
agaggaggaaaagtgggaggcacaaagcgaggggcacccgttcattacttcgagaagcagctcacccttgcagttaaacttacttcaggaagagatgcccagaccctctgaatctccaga

SEQ ID NO: 32755 - DNA, 120 bp, Artificial Sequence
  ENSG00000049246_25 (sequence is synthesized)
gtgcactgtccacggggtcacctcccagggagaatccatcccatcctactgccagcgctctgtccacaggatcgcctcccatgaagaatccatcccatcctactgccagcgctctgtcca

SEQ ID NO: 32756 - DNA, 120 bp, Artificial Sequence
  ENSG00000049246_26 (sequence is synthesized)
caggatcgcctcccatgaagaatccatcccatcctactgccagcacactgtccatgggattgcctcccagcaggactccatcccatcctactgccactgttctgtccacggggtcacctc

SEQ ID NO: 32757 - DNA, 120 bp, Artificial Sequence
  ENSG00000049246_27 (sequence is synthesized)
ccagcgaatccccatccagaactggttcagcagcatcaggaagcagcgacagcagtatataccttactagtagtgtttattcttctaaaatctcccaaaatgggcagcaatctcaggacg

SEQ ID NO: 32758 - DNA, 120 bp, Artificial Sequence
  ENSG00000049246_28 (sequence is synthesized)
tacagaaaaaagaaacatttcctaatgtcgccgaagagcccatctggagaatgatacggcagacacctgagcgcattctcatgacataccaggtacctgagagggttaaagaagttgtac

SEQ ID NO: 32759 - DNA, 120 bp, Artificial Sequence
  ENSG00000049246_29 (sequence is synthesized)
taaaagaagacctggaaaagctagaaagtatgaggcagcagcagccccagttttctcatgggcaaaaggaggagctggctaaggtgtataattggattcaaagccagactgtcactcaag

SEQ ID NO: 32760 - DNA, 120 bp, Artificial Sequence
  ENSG00000049246_30 (sequence is synthesized)
aaatcgacattcaagcctgtgtcacttgtgaaaatgaagattcagctgatggtgcggccacatcctgtggtcaggttctggtagaagacagctgttgagtgactgtgaggatgaaccttc

SEQ ID NO: 32761 - DNA, 120 bp, Artificial Sequence
  ENSG00000049246_31 (sequence is synthesized)
ataccctttccaagacgtgttacacagacagacctttttaagtcctggacttttaaatgaccatgaagttatcattgaatgttaagattttttcttcttgattttttaatacacgtaatc

SEQ ID NO: 32762 - DNA, 120 bp, Artificial Sequence
  ENSG00000049246_32 (sequence is synthesized)
tttttgaagcagacattgtatacagaatcttacttctctttgttcctgatatattaaaatggccagttaggctctttttgtagttgaattgtcttctaaagagattggatggcctctaaa

SEQ ID NO: 32763 - DNA, 120 bp, Artificial Sequence
  ENSG00000049246_33 (sequence is synthesized)
gaggtatgtgtatctttatttcagatgtcacccagagtaaattataattagaagtatagctagaatgagccccaaaccttagcctcatttattttgttctgttacataagtcattttccc

SEQ ID NO: 32764 - DNA, 120 bp, Artificial Sequence
  ENSG00000049246_34 (sequence is synthesized)
cttagagtgcttgaagaaatgccacctacaggttgtgtacttttcataatggtttccatgaatgtagtacgttcatacaggcttcattcaacctggcgttcccctccataattaagatga

SEQ ID NO: 32765 - DNA, 120 bp, Artificial Sequence
  ENSG00000049246_35 (sequence is synthesized)
aacattccggttttctcacaacacattagcacatactgtccattagcatatctgggataaccaggttttgggggttgagttttggccttcatccttgtagatccctttcctattgatttc

SEQ ID NO: 32766 - DNA, 120 bp, Artificial Sequence
  ENSG00000049246_36 (sequence is synthesized)
ccaccttccagtgaaattctgaaagtcttatcttaaaaatcgatccgcttaccatgggcctattcttgtaagtttcagttagcatttgcatgtgtaatattaaaatgaaagagcttctta

SEQ ID NO: 32767 - DNA, 120 bp, Artificial Sequence
  ENSG00000049246_37 (sequence is synthesized)
cccagtgctgttgcccttttgagtatttttgtttttaaaataatgattgtaaaatgttttacaagtaatgtaaaagctagtatcattcttacatacttctgtgtttaaattttcattctt

SEQ ID NO: 32768 - DNA, 120 bp, Artificial Sequence
  ENSG00000049246_38 (sequence is synthesized)
accaaaacagttaactctttctttccaatcaatttatacaaaagaggtcgctccagccctaccacaggtctgactggcactgccttttgtttgcccttgaacagggcagtgttgtgggga

SEQ ID NO: 32769 - DNA, 120 bp, Artificial Sequence
  ENSG00000049246_39 (sequence is synthesized)
ctgcaaaagagaaaacgtccaggcgagcccagttgtcctcgcccacagggtcctgcaggctccatcagtcaccgctttctatggcgtttgtagttgtgtcttttaagaagtgagtgtgat

SEQ ID NO: 32770 - DNA, 120 bp, Artificial Sequence
  ENSG00000049246_40 (sequence is synthesized)
tgtttacttgataaatcagctcactctctggtgctttttagagaagtccctgattccttcttaaacttggaatgatagatgaaattcacacccctgcagatcagaaaaaacaaatagaag

SEQ ID NO: 32771 - DNA, 120 bp, Artificial Sequence
  ENSG00000049246_41 (sequence is synthesized)
ttcacacccctgcagatcagaaaaaacaaatagaagaaaatgagggttacagtaacctgttgtctttatataacttgcaacaaactaatttatttttttttcctttttttgtttttggtt

SEQ ID NO: 32772 - DNA, 120 bp, Artificial Sequence
  ENSG00000049246_42 (sequence is synthesized)
gaagttttacagctttttgtaaatgcgtcctgataatgattaggaaaatcgaccttttcatccatgatgaccatcctcatagctcagatctcctttcaaagtagtggctttctggatggt

SEQ ID NO: 32773 - DNA, 120 bp, Artificial Sequence
  ENSG00000049246_43 (sequence is synthesized)
aattccatcttaaggtgtcagaactattttcaaatgctgcctttgacagttcttggaattttctgatattaagcagttccatgcaaatattcgtgttttataaatagctctcatagtctg

SEQ ID NO: 32774 - DNA, 120 bp, Artificial Sequence
  ENSG00000049246_44 (sequence is synthesized)
ctccatcttgatagttaagtgatttctgaagcgtttgtgtgtgtgttgatcaggttgtgtgatatttttgcttgatagagaatcaaatttgaaacaattaaccagccagtagattgtctg

SEQ ID NO: 32775 - DNA, 120 bp, Artificial Sequence
  ENSG00000049246_45 (sequence is synthesized)
tcagtgaccttctgtagtaataaagtttttgccactgtaaataaaaacagtatccgtagctatcaggatcattgcgcactcatatatgctaagccttctgttctctaatagaagcctttc

SEQ ID NO: 32776 - DNA, 120 bp, Artificial Sequence
  ENSG00000049246_46 (sequence is synthesized)
ttttccattgtttctggatatttgtattatccaaatgtgcttatttctttgccttagcacacgttttatggagtacttgttatactaggtttgatttgaaactggtgcttgtcgcagaac

SEQ ID NO: 32777 - DNA, 120 bp, Artificial Sequence
  ENSG00000049246_47 (sequence is synthesized)
tgtcagagcatgaggagcgctcctcctgtgggtggacgcattcacgcactcccaggttgcacctgctgctggcggtgagcagggggttcagcagcttgaccgatgccccccgagggggct

SEQ ID NO: 32778 - DNA, 120 bp, Artificial Sequence
  ENSG00000049246_48 (sequence is synthesized)
ctccccagcttaaactttgttgtttaaatttgttaactttttatattaatgactattgaaagtggtaataaaaatttatattataggcttcaatgttttcatgaatgttacccaaaaagc

SEQ ID NO: 32779 - DNA, 120 bp, Artificial Sequence
  ENSG00000049246_49 (sequence is synthesized)
tgtgttttctttggtcagaggtcaaaatttatgaaaaacaaaatgctgtatgaatggaaatcattttgcaattgagtgacacttcattgtaattcacagtgtaaatttaatccaaactga

SEQ ID NO: 32780 - DNA, 120 bp, Artificial Sequence
  ENSG00000049246_50 (sequence is synthesized)
aattttgtttcaactgaatttgtaattaactctgaatttgtttttaatcattagtaatatttcagttgggtatctttttaagtaaaaacaacaaataaactctgtacatgtaaaacgtga

SEQ ID NO: 32781 - DNA, 120 bp, Artificial Sequence
  ENSG00000049246_51 (sequence is synthesized)
cctttctggaacaactggacccaaagaggtaacaggaccaatgttcagatgtctatctttcctcatcaagatcagtttcattcttacaggaatagtacagaaattaacatattatttaga

SEQ ID NO: 32782 - DNA, 120 bp, Artificial Sequence
  ENSG00000049246_52 (sequence is synthesized)
aagttcgaacgtaagccagtcagttttcatattttctaaaacatctcttgtatcaaataatattccttagcttattgactgccctctgactcaattgacacataaactaaataaagcaca

SEQ ID NO: 32783 - DNA, 120 bp, Artificial Sequence
  ENSG00000049246_53 (sequence is synthesized)
tattttccaccaagaaaaaagcctttaccaacttgaaaaggaaatgatctagttatttttttaatgtatgcctcatgtgttagaaaatgtaaggtgtattaccaaccaagaagaagtgct

SEQ ID NO: 32784 - DNA, 120 bp, Artificial Sequence
  ENSG00000049246_54 (sequence is synthesized)
ttcctgacttgaagacctcaactgataacagatattttcatccattttggtttggaaaaaaaagtctgtaaaaagaaaatatcacctttggaaagtgatatttgaattaattgtatgcgt

SEQ ID NO: 32785 - DNA, 120 bp, Artificial Sequence
  ENSG00000049246_55 (sequence is synthesized)
tctaaaaattagcatattgtgaacagatttatttagaatttgttggtaccagtatactgtggcatggtgcaggaaactggattaaagtgattactgtgcttcagtcattatatcttcaaa

SEQ ID NO: 32786 - DNA, 120 bp, Artificial Sequence
  ENSG00000049246_56 (sequence is synthesized)
gtttgacagagtaatcttcatgtttggttgatacggtggagattacttattttaagtaacataattgttacttaaagattttgtaatagtggaacgtgcgcaatccctagtattataaca

SEQ ID NO: 32787 - DNA, 120 bp, Artificial Sequence
  ENSG00000049246_57 (sequence is synthesized)
gtgcttattttatggactggtgtgtacatagtactgtaggaggtgctatggagatttttaaaaatagcttaagaaaatatttgtcttttaagatatttaaaataaagctagagaggaaag

SEQ ID NO: 32788 - DNA, 120 bp, Artificial Sequence
  ENSG00000049246_58 (sequence is synthesized)
tatgccaatgctagcaaacacaaactgctgattataaataagtttcatttatgtgtaatggaaaaaattagagcagtgatgcttatgtaatgaggtttgtcaaggacagcttcttgaaga

SEQ ID NO: 32789 - DNA, 120 bp, Artificial Sequence
  ENSG00000049246_59 (sequence is synthesized)
aggtgaatcttcagtgtgtcttaaagcatagaatctgcgttgatgacgagaacaccgtccacccaggtgtatggcacagtttgcagagaagttatgtgccatacgtattttagtctgcat

SEQ ID NO: 32790 - DNA, 120 bp, Artificial Sequence
  ENSG00000049246_60 (sequence is synthesized)
agaataagctagtatattttttggcatagaaattgaaccttcagtaggtgaagtgcaggtcttaggagaagatttaagaagcatgttggagaaaattatttgaggagttttgttgcattt

SEQ ID NO: 32791 - DNA, 120 bp, Artificial Sequence
  ENSG00000049246_61 (sequence is synthesized)
atctgtttcacagatgatatgtcataaatattatttcattaccagcgtattgtatagtggtttagttgctatgaaggctctgtttcctttaagttaaaattaaatgtttttcctccttca

SEQ ID NO: 32792 - DNA, 120 bp, Artificial Sequence
  ENSG00000049247_0 (sequence is synthesized)
atggaaaccaacgtatttcatcttatgctctgcgtcacttctgctcggactcataaatccacgtctctttgctttggccacttcaactcatatccaagccttcctttaattcatgattta

SEQ ID NO: 32793 - DNA, 120 bp, Artificial Sequence
  ENSG00000049247_1 (sequence is synthesized)
gagctagaaagagcttcccttctacagatactgccagagatgctgggtgcagaaagaggggatattctcaggaaagcagactcaagtaccaacatttttaacccaagaggaaatttgaga

SEQ ID NO: 32794 - DNA, 120 bp, Artificial Sequence
  ENSG00000049247_2 (sequence is synthesized)
aagtttcaggatttctctggacaagatcctaacattttactgagtcatcttttggccagaatctggaaaccatacaagaaacgtgagactcctgattgcttctggaaatactgtgtctga

SEQ ID NO: 32795 - DNA, 120 bp, Artificial Sequence
  ENSG00000049247_3 (sequence is synthesized)
ccaagaaggaagccgtctatcttgtggcgatcatgtataagctggcctcctgctgtttgcttttcataggattcttaaatcctctcttatctcttcctctccttgactccagggaaatat

SEQ ID NO: 32796 - DNA, 120 bp, Artificial Sequence
  ENSG00000049247_4 (sequence is synthesized)
acacccatcttagaatatgaaaaataacacaatgcttgatttgaaaacagtgtggagaaaaactaggcaaactacaccctgttcattgttacctggaaaataaatcctctatgttttgca

SEQ ID NO: 32797 - DNA, 120 bp, Artificial Sequence
  ENSG00000049247_5 (sequence is synthesized)
tttaagaaggaatcagggacttctctaaaaagcaccagagagtgagctgatttatcaagtaaacaatcacactcacttcttaaaagacacaactacaaacgccatagaaagcggtgactg

SEQ ID NO: 32798 - DNA, 120 bp, Artificial Sequence
  ENSG00000049247_6 (sequence is synthesized)
atggagcctgcaggaccctgtgggcgaggacaactgggctcgcctggacgttttctcttttgcagtccccacaacactgccctgttcaagggcaaacaaaaggcagtgccagtcagacct

SEQ ID NO: 32799 - DNA, 120 bp, Artificial Sequence
  ENSG00000049247_7 (sequence is synthesized)
gtggtagggctggagcgacctcttttgtataaattgattggaaagaaagagttaactgttttggtaagaatgaaaatttaaacacagaagtatgtaagaatgatactagcttttacatta

SEQ ID NO: 32800 - DNA, 120 bp, Artificial Sequence
  ENSG00000049247_8 (sequence is synthesized)
cttgtaaaacattttacaatcattattttaaaaacaaaaatactcaaaagggcaacagcactgggtaagaagctctttcattttaatattacacatgcaaatgctaactgaaacttacaa

SEQ ID NO: 32801 - DNA, 120 bp, Artificial Sequence
  ENSG00000049247_9 (sequence is synthesized)
gaataggcccatggtaagcggatcgatttttaagataagactttcagaatttcactggaaggtgggaaatcaataggaaagggatctacaaggatgaaggccaaaactcaacccccaaaa

SEQ ID NO: 32802 - DNA, 120 bp, Artificial Sequence
  ENSG00000049247_10 (sequence is synthesized)
cctggttatcccagatatgctaatggacagtatgtgctaatgtgttgtgagaaaaccggaatgtttcatcttaattatggaggggaacgccaggttgaatgaagcctgtatgaacgtact

SEQ ID NO: 32803 - DNA, 120 bp, Artificial Sequence
  ENSG00000049247_11 (sequence is synthesized)
acattcatggaaaccattatgaaaagtacacaacctgtaggtggcatttcttcaagcactctaaggggaaaatgacttatgtaacagaacaaaataaatgaggctaaggtttggggctca

SEQ ID NO: 32804 - DNA, 120 bp, Artificial Sequence
  ENSG00000049249_0 (sequence is synthesized)
gtgtttgacctgaagtcctctcgagctgcagaagcctgaagaccaaggagtggaaagttctccggcagccctgagatctcaagagtgacatttgtgagaccagctaatttgattaaaatt

SEQ ID NO: 32805 - DNA, 120 bp, Artificial Sequence
  ENSG00000049249_1 (sequence is synthesized)
ctcttggaatcagctttgctagtatcatacctgtgccagatttcatcatgggaaacagctgttacaacatagtagccactctgttgctggtcctcaactttgagaggacaagatcattgc

SEQ ID NO: 32806 - DNA, 120 bp, Artificial Sequence
  ENSG00000049249_2 (sequence is synthesized)
aggatccttgtagtaactgcccagctggtacattctgtgataataacaggaatcagatttgcagtccctgtcctccaaatagtttctccagcgcaggtggacaaaggacctgtgacatat

SEQ ID NO: 32807 - DNA, 120 bp, Artificial Sequence
  ENSG00000049249_3 (sequence is synthesized)
gcaggcagtgtaaaggtgttttcaggaccaggaaggagtgttcctccaccagcaatgcagagtgtgactgcactccagggtttcactgcctgggggcaggatgcagcatgtgtgaacagg

SEQ ID NO: 32808 - DNA, 120 bp, Artificial Sequence
  ENSG00000049249_4 (sequence is synthesized)
attgtaaacaaggtcaagaactgacaaaaaaaggttgtaaagactgttgctttgggacatttaacgatcagaaacgtggcatctgtcgaccctggacaaactgttctttggatggaaagt

SEQ ID NO: 32809 - DNA, 120 bp, Artificial Sequence
  ENSG00000049249_5 (sequence is synthesized)
ctgtgcttgtgaatgggacgaaggagagggacgtggtctgtggaccatctccagccgacctctctccgggagcatcctctgtgaccccgcctgcccctgcgagagagccaggacactctc

SEQ ID NO: 32810 - DNA, 120 bp, Artificial Sequence
  ENSG00000049249_6 (sequence is synthesized)
cgcagatcatctccttctttcttgcgctgacgtcgactgcgttgctcttcctgctgttcttcctcacgctccgtttctctgttgttaaacggggcagaaagaaactcctgtatatattca

SEQ ID NO: 32811 - DNA, 120 bp, Artificial Sequence
  ENSG00000049249_7 (sequence is synthesized)
aacaaccatttatgagaccagtacaaactactcaagaggaagatggctgtagctgccgatttccagaagaagaagaaggaggatgtgaactgtgaaatggaagtcaatagggctgttggg

SEQ ID NO: 32812 - DNA, 120 bp, Artificial Sequence
  ENSG00000049249_8 (sequence is synthesized)
ttcttgaaaagaagcaaggaaatatgagtcatccgctatcacagctttcaaaagcaagaacaccatcctacataatacccaggattcccccaacacacgttcttttctaaatgccaatga

SEQ ID NO: 32813 - DNA, 62 bp, Artificial Sequence
  ENSG00000049249_9 (sequence is synthesized)
aggattcccccaacacacgttcttttctaaatgccaatgagttggcctttaaaaatgcacca

SEQ ID NO: 32814 - DNA, 120 bp, Artificial Sequence
  ENSG00000049249_10 (sequence is synthesized)
cctcagtctcctgagtagctggaactacaaggaagggccaccacacctgactaacttttttgttttttgtttggtaaagatggcatttcaccatgttgtacaggctggtctcaaactcct

SEQ ID NO: 32815 - DNA, 120 bp, Artificial Sequence
  ENSG00000049249_11 (sequence is synthesized)
cccaaagtgctgggattacagacatgaactgccaggcccggccaaaataatgcaccacttttaacagaacagacagatgaggacagagctggtgataaaaaaaaaaaaaaaaaagcattt

SEQ ID NO: 32816 - DNA, 120 bp, Artificial Sequence
  ENSG00000049249_12 (sequence is synthesized)
tgataaaaaaaaaaaaaaaaaagcattttctagataccacttaacaggtttgagctagtttttttgaaatccaaagaaaattatagtttaaattcaattacatagtccagtggtccaact

SEQ ID NO: 32817 - DNA, 120 bp, Artificial Sequence
  ENSG00000049249_13 (sequence is synthesized)
ataattataatcaaaatcaatgcaggtttgttttttggtgctaatatgacatatgacaataagccacgaggtgcagtaagtacccgactaaagtttccgtgggttctgtcatgtaacacg

SEQ ID NO: 32818 - DNA, 120 bp, Artificial Sequence
  ENSG00000049249_14 (sequence is synthesized)
acatgctccaccgtcaggggggagtatgagcagagtgcctgagtttagggtcaaggacaaaaaacctcaggcctggaggaagttttggaaagagttcaagtgtctgtatatcctatggtc

SEQ ID NO: 32819 - DNA, 120 bp, Artificial Sequence
  ENSG00000049249_15 (sequence is synthesized)
ttctccatcctcacaccttctgcctttgtcctgctcccttttaagccaggttacattctaaaaattcttaacttttaacataatattttataccaaagccaataaatgaactgcatatga

SEQ ID NO: 32820 - DNA, 120 bp, Artificial Sequence
  ENSG00000049249_16 (sequence is synthesized)
attaacacctgtgagctcattgtcctaccacagcactagagtgggggccgccaaactcccatggccaaacctggtgcaccatttgcctttgtttgtctgttggtttgcttgagacagtct

SEQ ID NO: 32821 - DNA, 83 bp, Artificial Sequence
  ENSG00000049249_17 (sequence is synthesized)
ttgtctgttggtttgcagtggctattcacaggcacaatcatagcacactttagccttaaactcctgggctcaagtgatccacc

SEQ ID NO: 32822 - DNA, 120 bp, Artificial Sequence
  ENSG00000049249_18 (sequence is synthesized)
ccaagtagctgggattacaggtgcaaacctggcatgcctgccattgtttggcttatgatctaaggatagctttttaaattttattcattttatttttttttgagacagtgtctcactctg

SEQ ID NO: 32823 - DNA, 120 bp, Artificial Sequence
  ENSG00000049249_19 (sequence is synthesized)
ttcttacacttttgtatgacatgcctattgcaagcttgcgtgcctctgtcccatgttattttactctgggatttaggtggagggagcagcttctatttggaacattggccatcgcatggc

SEQ ID NO: 32824 - DNA, 120 bp, Artificial Sequence
  ENSG00000049249_20 (sequence is synthesized)
aaatgggtatctgtcacttctgctcctatttagttggttctactataacctttagagcaaatcctgcagccaagccaggcatcaatagggcagaaaagtatattctgtaaataggggtga

SEQ ID NO: 32825 - DNA, 120 bp, Artificial Sequence
  ENSG00000049249_21 (sequence is synthesized)
gtcatgtaagtatcccattgatccacatccttgctaccctctggtactatcaggtgcccttaattttgccaagccagtgggtatagaatgagatctcactgtggtcttagtttgcatttg

SEQ ID NO: 32826 - DNA, 120 bp, Artificial Sequence
  ENSG00000049249_22 (sequence is synthesized)
cttggttactgatgagcaccttgtcaaatatttatataccatttgtgtttatttttttaaataaaatgcttgctcatgcttttttgcccatttgcaaaaaaacttggggccgggtgcagt

SEQ ID NO: 32827 - DNA, 64 bp, Artificial Sequence
  ENSG00000049249_23 (sequence is synthesized)
cagtggctcatgcctgtagtcccagctggcaacatggcgaaaccctgtctttacaaaaaataca

SEQ ID NO: 32828 - DNA, 83 bp, Artificial Sequence
  ENSG00000049249_24 (sequence is synthesized)
tcagtaggttcgcccgcatcactacacttcagcctgggcaacagagaaaaaccttttctcagaaacaaacaaacccaaatgtg

SEQ ID NO: 32829 - DNA, 120 bp, Artificial Sequence
  ENSG00000049249_25 (sequence is synthesized)
gagaaaaaccttttctcagaaacaaacaaacccaaatgtggttgtttgtcctgattcctaaaaggtctttatgtattctagataataatctttggtcagttatatgtgttaaaaaatatc

SEQ ID NO: 32830 - DNA, 76 bp, Artificial Sequence
  ENSG00000049249_26 (sequence is synthesized)
gtaatcccagcactttgcggggctgaggtgggtggatcatctgaggtcaagagttcatgtacaaaacttagctggg

SEQ ID NO: 32831 - DNA, 120 bp, Artificial Sequence
  ENSG00000049249_27 (sequence is synthesized)
acacagtgaaaccccatctctactaaacatgtacaaaacttagctgggtatggtggcgggtgcctgtaaccccagctgctccagaggctgtggcagaagaatcgcttgaacccaggaggc

SEQ ID NO: 32832 - DNA, 120 bp, Artificial Sequence
  ENSG00000049249_28 (sequence is synthesized)
caagattgtgccattgcactccagactgggtgacaagagtgaaattctgcctatctatctatctatctatctatatctatatatatatatatatatatcctttgtaatttatttttccct

SEQ ID NO: 32833 - DNA, 120 bp, Artificial Sequence
  ENSG00000049249_29 (sequence is synthesized)
atatatcctttgtaatttatttttccctttttaaaattttttataaaattcttttttatttttatttttagcagaggtgaggtttctgaggtttcattatgttgcccaggctggtcttga

SEQ ID NO: 32834 - DNA, 120 bp, Artificial Sequence
  ENSG00000049249_30 (sequence is synthesized)
tcagccttccaaagtgctggaattgcagacatgagccaccgcgcccctcctgtttttctctaattaatggtgtctttctttgtctttctggtaataagcaaaaagttcttcatttgattt

SEQ ID NO: 32835 - DNA, 120 bp, Artificial Sequence
  ENSG00000049249_31 (sequence is synthesized)
ggttaaatttataactgttttctcatatggttaacattttttcttgcctggctaaagaaatccttttctgcccaatactataaagaggtttgcccacattttattccaaaagttttaagt

SEQ ID NO: 32836 - DNA, 120 bp, Artificial Sequence
  ENSG00000049249_32 (sequence is synthesized)
tttgtctttcatcttgaagtctaatgtatcaggaactggcttttgtgcctgttgggaggtagtgatccaattccatgtcttgcatgtaggtaaccactggtccctgcgccatgtattcaa

SEQ ID NO: 32837 - DNA, 120 bp, Artificial Sequence
  ENSG00000049249_33 (sequence is synthesized)
tacgtcgtctttctcctgcgggtctgcaatctcacctaccatccatcaagtttccatagggccatgggtctgcttctgggctccctgttctgttccattgtcaatttgtctatcctgtgc

SEQ ID NO: 32838 - DNA, 120 bp, Artificial Sequence
  ENSG00000049249_34 (sequence is synthesized)
cagtatcacactgtgtttattacaatagctttgtaacagctctcgatatccggtaggacatctccctccaccttctttttctacttcagaagtgtcttagctaggtcaggcacggtggct

SEQ ID NO: 32839 - DNA, 120 bp, Artificial Sequence
  ENSG00000049249_35 (sequence is synthesized)
tgggtgacagagcgaaactctgtctcaggaaaaaaaagaaaagagatgtcttggttattcttggttctttattattcaatataaattttagaagctgaatttgaaaagatttggattgga

SEQ ID NO: 32840 - DNA, 120 bp, Artificial Sequence
  ENSG00000049249_36 (sequence is synthesized)
atttcattaaatctacaggtcaatttagggagagttgataattttacagaattgagtcatctggtgttccaataagaataagagaacaattattggctgtacaattcttgccaaatagta

SEQ ID NO: 32841 - DNA, 120 bp, Artificial Sequence
  ENSG00000049249_37 (sequence is synthesized)
ggcaaagcaaagcttaggaagtatactggtgccatttcaggaacaaagctaggtgcgaatatttttgtctttctgaatcatgatgctgtaagttctaaagtgatttctcctcttggcttt

SEQ ID NO: 32842 - DNA, 120 bp, Artificial Sequence
  ENSG00000049249_38 (sequence is synthesized)
ggacacatggtgtttaattacctactgctgactatccacaaacagaaagagactggtcatgccccacagggttggggtatccaagataatggagcgaggctctcatgtgtcctaggttac

SEQ ID NO: 32843 - DNA, 120 bp, Artificial Sequence
  ENSG00000049249_39 (sequence is synthesized)
acaccgaaaatccacagtttattctgtgaagaaaggaggctatgtttatgatacagactgtgatatttttatcatagcctattctggtatcatgtgcaaaagctataaatgaaaaacaca

SEQ ID NO: 32844 - DNA, 120 bp, Artificial Sequence
  ENSG00000049249_40 (sequence is synthesized)
ggaacttggcatgtgagtcattgctccccctaaatgacaattaataaggaaggaacattgagacagaataaaatgatccccttctgggtttaatttagaaagttccataattaggtttaa

SEQ ID NO: 32845 - DNA, 120 bp, Artificial Sequence
  ENSG00000049249_41 (sequence is synthesized)
tagaaataaatgtaaatttctatgattaaaaataaattagcacatttagggatacacaaattataaatcattttctaaatgctaaaaacaagctcaggtttttttcagaagaaagtttta

SEQ ID NO: 32846 - DNA, 120 bp, Artificial Sequence
  ENSG00000049249_42 (sequence is synthesized)
attttttttctttagtggaagatatcactctgacggaaagttttgatgtgaggggcggatgactataaagtgggcatcttcccccacaggaagatgtttccatctgtgggtgagaggtgc

SEQ ID NO: 32847 - DNA, 120 bp, Artificial Sequence
  ENSG00000049249_43 (sequence is synthesized)
ccaccgcagctagggcaggttacatgtgccctgtgtgtggtaggacttggagagtgatctttatcaacgtttttatttaaaagactatctaataaaacacaaaactatgatgttcacagg

SEQ ID NO: 32848 - DNA, 120 bp, Artificial Sequence
  ENSG00000049249_44 (sequence is synthesized)
tgctgctgaattgaaactagagctatgattgggatatggctaatattttatggtttagtgattcatgcttaagattcatgcttttttagctaatgtagaaaataaagaaaatagttctta

SEQ ID NO: 32849 - DNA, 120 bp, Artificial Sequence
  ENSG00000049283_0 (sequence is synthesized)
ggagtgctgcctggcgctggctaggaggcaaacgcacgcgggaagagctgctacccattccagggaccctgccgctgcccctctgaggggtctgcacctcctgggagcaggtgggtctct

SEQ ID NO: 32850 - DNA, 120 bp, Artificial Sequence
  ENSG00000049283_1 (sequence is synthesized)
gggacgagggtccatggtggatggctctggagacgctcccgaggctgtgccgtcccgctgctgcacaggtcggagggtcaccgcagaggctactcgggctggggctggggccgagggagc

SEQ ID NO: 32851 - DNA, 120 bp, Artificial Sequence
  ENSG00000049283_2 (sequence is synthesized)
ccgcactggagccccatgtggaacccaaggatgcagctgctctgctaacacggcagcccatccttcaagactgtgacctcgccacagtggccctcagccctccacctccggcgggggcga

SEQ ID NO: 32852 - DNA, 120 bp, Artificial Sequence
  ENSG00000049283_3 (sequence is synthesized)
gggccacccacctccaagtctccagccatgacgacctccgcactccggcgccaggtgaagaacatcgtgcacaactactccgaggcagaaatcaaggtgcgcgaggccaccagcaatgac

SEQ ID NO: 32853 - DNA, 120 bp, Artificial Sequence
  ENSG00000049283_4 (sequence is synthesized)
ccctggggcccccctagttcgctcatgtccgagatcgctgacctgaccttcaacacagtggccttcaccgaagtcatgggcatgctgtggcggcggctcaatgacagcggcaagaactgg

SEQ ID NO: 32854 - DNA, 120 bp, Artificial Sequence
  ENSG00000049283_5 (sequence is synthesized)
cggcacgtgtacaaggctctaacattgctggactacctgctcaagacgggctccgagcgggtggcccaccagtgccgcgagaacctctacaccatccagacactcaaggacttccagtac

SEQ ID NO: 32855 - DNA, 120 bp, Artificial Sequence
  ENSG00000049283_6 (sequence is synthesized)
atcgaccgcgacggcaaggaccagggcgtcaacgtgcgcgagaaggtcaagcaggtgatggccctgctcaaggatgaggagcggctgcggcaggagcgaacccacgccctcaagaccaag

SEQ ID NO: 32856 - DNA, 120 bp, Artificial Sequence
  ENSG00000049283_7 (sequence is synthesized)
gagcgcatggcactggagggcatcggcattggcagtgggcagctgggcttcagccgccgctacggcgaggactacagccgctcccggggctccccgtcctcctacaactcctcctcttcg

SEQ ID NO: 32857 - DNA, 120 bp, Artificial Sequence
  ENSG00000049283_8 (sequence is synthesized)
tcaccccgctatacctccgacctggagcaggcccggcctcagacgtcaggggaagaggaactgcagctgcagctggccctcgccatgagccgtgaggaggcagagaagcctgtcccccca

SEQ ID NO: 32858 - DNA, 120 bp, Artificial Sequence
  ENSG00000049283_9 (sequence is synthesized)
gcctcccacagggacgaggacctgcagctgcagctggctctgcgcctgagccggcaggagcacgagaaggaggtgaggtcctggcagggtgatggctcccccatggccaatggtgcaggg

SEQ ID NO: 32859 - DNA, 120 bp, Artificial Sequence
  ENSG00000049283_10 (sequence is synthesized)
gccgtggtccaccatcagcgggacagagagcctgagagagaagagagaaaggaggaggagaagctaaaaaccagccagtcctccatcctggacttggctgacatcttcgtacctgccctg

SEQ ID NO: 32860 - DNA, 120 bp, Artificial Sequence
  ENSG00000049283_11 (sequence is synthesized)
gccccgccctccacacactgctctgctgacccatgggacatcccaggttttaggccgaacacagaggccagtggatcctcctgggggccttctgcagacccctggtctccgatcccctca

SEQ ID NO: 32861 - DNA, 120 bp, Artificial Sequence
  ENSG00000049283_12 (sequence is synthesized)
ggaaccgtcctgtcccgaagccagccctgggatctgactcccatgctctcctcctctgagccctggggcaggaccccagtgctgcctgctgggccccccaccacagacccctgggccctg

SEQ ID NO: 32862 - DNA, 120 bp, Artificial Sequence
  ENSG00000049283_13 (sequence is synthesized)
aactctccccaccacaaactccccagcactggggctgacccttggggagcctccctggagacctccgacacacctggtggtgcctcgacctttgacccatttgccaaacctccagaatcc

SEQ ID NO: 32863 - DNA, 120 bp, Artificial Sequence
  ENSG00000049283_14 (sequence is synthesized)
acagagaccaaggaggggctggagcaggccctgccctctgggaagcccagcagccctgtggagctggacctgtttggagaccccagccccagttccaagcaaaatggcacgaaggagcca

SEQ ID NO: 32864 - DNA, 120 bp, Artificial Sequence
  ENSG00000049283_15 (sequence is synthesized)
gatgccctggacctgggcatactaggggaagcactaacccagccaagcaaagaggcccgagcttgccggactcccgagtccttcctgggtccctcagcttcctccttggtcaaccttgac

SEQ ID NO: 32865 - DNA, 120 bp, Artificial Sequence
  ENSG00000049283_16 (sequence is synthesized)
cccttcctgacaggtctcagcgctccgtcccccaccaacccgttcggcgcgggcgagccgggcaggccgacgctaaaccagatgcgcaccggctcgccggcgctgggcctggcaggcggg

SEQ ID NO: 32866 - DNA, 120 bp, Artificial Sequence
  ENSG00000049283_17 (sequence is synthesized)
cctgtgggggcgcccctgggctccatgacctacagcgcctctctgcccctcccgctcagcagcgtgccagctggcttgaccctccccgcctcggttagcgtcttcccgcaggccggagcc

SEQ ID NO: 32867 - DNA, 120 bp, Artificial Sequence
  ENSG00000049283_18 (sequence is synthesized)
ggttagcgtcttcccgcaggccggagccttcgcaccgcagccgctgctgcccacgccgagctcagccgggccgcggcccccgcccccgcagaccggcaccaaccccttcctctgagcccc

SEQ ID NO: 32868 - DNA, 120 bp, Artificial Sequence
  ENSG00000049283_19 (sequence is synthesized)
gacgctccgcggccccgcctccggacccggggctgggcggggcgccggtgctagtggaacgccgagccagtggcggctggtatcccgcggcggctctggaagctggacgcggaccacggc

SEQ ID NO: 32869 - DNA, 120 bp, Artificial Sequence
  ENSG00000049283_20 (sequence is synthesized)
cggcccgggagctagaaactgaacgcccgcataataaagactggaaccctcgttctcagctctcaccaagtggactttttgcggggtgtggcggccgggtctcgaccacagcgtggatca

SEQ ID NO: 32870 - DNA, 120 bp, Artificial Sequence
  ENSG00000049283_21 (sequence is synthesized)
ccggctgtttaggaaactgcagctgcacaacgtggggtgcaaaactgccccgcttcctttacagctcttctcaaccctcacctccatcccccgtcacccaggcaccttcgcttccagatg

SEQ ID NO: 32871 - DNA, 120 bp, Artificial Sequence
  ENSG00000049283_22 (sequence is synthesized)
ctgccaggctgtcactcaattcggtcatttcattcatttatcacacatgggcactggggttgggctaacagcaagagacaataggcctttgttcctatttattgggtactgcttacgtgc

SEQ ID NO: 32872 - DNA, 120 bp, Artificial Sequence
  ENSG00000049283_23 (sequence is synthesized)
taagcagatcagtttatttaatgcttgcaacgactctctgaggtagaaaatattgttaattccgttcaggatcccggctacataatctgtggggctcaatacaaaataaaaatgtagggg

SEQ ID NO: 32873 - DNA, 120 bp, Artificial Sequence
  ENSG00000049283_24 (sequence is synthesized)
ctccttgttcaaaatcgtatgaagaatttcaaaacagggacaacagagcatgaaaccaagcgcaaagcccactgcagtgcgattgcacaggtatctcaccttgcagccggcactactccc

SEQ ID NO: 32874 - DNA, 120 bp, Artificial Sequence
  ENSG00000049283_25 (sequence is synthesized)
atttttcaggcaaggaaaccgtggctcagagaggttgaatggcatgctcaaagtcacaaagctggcatggggcggggctggaactcaagagtcagacagtctggctccaaggcctggaga

SEQ ID NO: 32875 - DNA, 120 bp, Artificial Sequence
  ENSG00000049283_26 (sequence is synthesized)
tcccaggctgggccccagatttaattcagcaaatattgactgactgctgtggacaaagtgctgggctcaccttggagggatccaacctccaggagctcgagcgcagcagggtagacaagc

SEQ ID NO: 32876 - DNA, 120 bp, Artificial Sequence
  ENSG00000049283_27 (sequence is synthesized)
caggggcacgtgatgcggctgtggcagaagccaagtgcaggagctcccaggctcctttgttttactgagtcaccttaaatgtaactctgccctctcccttgcttcgccaaggctagcgag

SEQ ID NO: 32877 - DNA, 120 bp, Artificial Sequence
  ENSG00000049283_28 (sequence is synthesized)
aaactcagtcttagccacacaggaggaatcggaccccttctgggggtttatgtggagtctgggaaaccaagggtggggtgaggcctggtactcaatccaggaggggcccctatgaccacc

SEQ ID NO: 32878 - DNA, 120 bp, Artificial Sequence
  ENSG00000049283_29 (sequence is synthesized)
ctcgcctgtttttcttctcaatgctccctgatcactggaccactggacactgatgtgtcctcagtgcttggggtctggctctgcaggcagcctgcagccagcctccatccccctttcagg

SEQ ID NO: 32879 - DNA, 120 bp, Artificial Sequence
  ENSG00000049283_30 (sequence is synthesized)
gacaaatggccttccaccagagtcggtgagtggagaggcacaatgccactccccttcctgaggtgggggtaggggaagggagtcccacaatgcagttacaaacaggatggacaagaacac

SEQ ID NO: 32880 - DNA, 120 bp, Artificial Sequence
  ENSG00000049283_31 (sequence is synthesized)
ctgctcaggagtcagacttacagggttcaaagttctgctccaaggtttgaccctaacaagaatcacttagtaataagtggttatgctctgtgaccttgagtaaattacttaccctctcca

SEQ ID NO: 32881 - DNA, 120 bp, Artificial Sequence
  ENSG00000049283_32 (sequence is synthesized)
tcaagtgatcctcttgccttggcctcctgaagtcctggaattacaggcgtgagccactgcaccgggcccatttaatactctgagccccacctttcccatctgtggatggaggtaatgata

SEQ ID NO: 32882 - DNA, 120 bp, Artificial Sequence
  ENSG00000049283_33 (sequence is synthesized)
atagcatctttggggtgtggctgtgaagatagatagatgagcatgcaaagctccaagtgcctgctgaattccccatgtggaacccaaggatgcagctgctctgctaacacggcagcccat

SEQ ID NO: 32883 - DNA, 120 bp, Artificial Sequence
  ENSG00000049283_34 (sequence is synthesized)
atttcccatcttgactctgccacccccagccacgggttggggaggtgaaggcaggtctgagtcactagcaagggggagggcaggagttaaacaagttgtggccgtggcattcccacagaa

SEQ ID NO: 32884 - DNA, 120 bp, Artificial Sequence
  ENSG00000049283_35 (sequence is synthesized)
acagccccatgtggaacccaaggatgcagctgctctgctaacacggcagcccatccttcaagactgtgacctcgccacagtggccctcagccctccacctccggcgggggcgagggccac

SEQ ID NO: 32885 - DNA, 120 bp, Artificial Sequence
  ENSG00000049283_36 (sequence is synthesized)
gtgctgcctggcgctggctaggaggcaaacgcacgcgggaagagctgctacccattccagggaccctgccgctgcccctctgaggggtctgcacctcctgggagcagtggcctgaccatg

SEQ ID NO: 32886 - DNA, 120 bp, Artificial Sequence
  ENSG00000049283_37 (sequence is synthesized)
tccaagtgcctgctgaattgtaagtgaaataagaacgtgtgccgctgaaggctgtccctggaggcagggacactctggccaggcctcatttagttggtcagtggctgagtgacccatgag

SEQ ID NO: 32887 - DNA, 120 bp, Artificial Sequence
  ENSG00000049323_0 (sequence is synthesized)
cgggttgtgggctctctcttttcccctcttgctcctttcttttctttttttctgtttttttaaaccttccaaggcaagttcatggatactaagctgatgtgtttgttgttctttttctcc

SEQ ID NO: 32888 - DNA, 120 bp, Artificial Sequence
  ENSG00000049323_1 (sequence is synthesized)
ctgcctccgctcctagtgagtaaccacactggccgcatcaaggtggtctttactccgagcatctgtaaagtgacctgcaccaagggcagctgtcagaacagctgtgagaaggggaacacc

SEQ ID NO: 32889 - DNA, 120 bp, Artificial Sequence
  ENSG00000049323_2 (sequence is synthesized)
accactctcattagtgagaatggtcatgctgccgacaccctgacggccacgaacttccgagtggtaatttgccatcttccatgtatgaatggtggccagtgcagttcaagggacaaatgt

SEQ ID NO: 32890 - DNA, 120 bp, Artificial Sequence
  ENSG00000049323_3 (sequence is synthesized)
cagtgccctccaaatttcacaggaaaactttgtcagatcccagtccatggtgccagcgtgcctaaactttatcagcattcccagcagccaggcaaggcgttggggacgcatgtcatccat

SEQ ID NO: 32891 - DNA, 120 bp, Artificial Sequence
  ENSG00000049323_4 (sequence is synthesized)
tcaacacataccttgcctctgaccgtgactagccagcaaggagtcaaagtgaaatttcctcctaacatagtcaatatccatgtgaaacatcctcctgaagcttccgtccagatacatcag

SEQ ID NO: 32892 - DNA, 120 bp, Artificial Sequence
  ENSG00000049323_5 (sequence is synthesized)
gtttcaagaattgatggcccaacaggccagaagacaaaagaagctcaaccaggccaatcccaagtctcgtaccaagggcttcctgtccagaagacccagaccatacattccacatactcc

SEQ ID NO: 32893 - DNA, 120 bp, Artificial Sequence
  ENSG00000049323_6 (sequence is synthesized)
caccagcaggtcattcctcacgtctaccccgtggctgctaagacacagcttggccggtgcttccaggaaaccattgggtcacagtgtggcaaagcgctccctggcctttcaaagcaagag

SEQ ID NO: 32894 - DNA, 120 bp, Artificial Sequence
  ENSG00000049323_7 (sequence is synthesized)
gactgctgtggaactgtgggtacctcctggggctttaacaaatgccagaaatgccccaagaaaccatcttatcatggatacaaccaaatgatggaatgcctaccgggttataagcgggtt

SEQ ID NO: 32895 - DNA, 120 bp, Artificial Sequence
  ENSG00000049323_8 (sequence is synthesized)
aacaacaccttttgccaagatattaatgaatgtcagctacaaggtgtatgccctaatggtgagtgtttgaataccatgggcagctatcgatgtacctgcaaaataggatttgggccggat

SEQ ID NO: 32896 - DNA, 120 bp, Artificial Sequence
  ENSG00000049323_9 (sequence is synthesized)
cctaccttttcaagttgtgttcctgatccccctgtgatctcggaagagaaagggccctgttaccgacttgtcagttctggaagacagtgtatgcaccctctgtctgttcacctcaccaag

SEQ ID NO: 32897 - DNA, 120 bp, Artificial Sequence
  ENSG00000049323_10 (sequence is synthesized)
cagctctgctgttgtagtgtgggcaaggcctggggcccacactgtgagaaatgtccccttccaggcacagctgcttttaaggaaatctgtcctggtggaatgggttatacggtttctggc

SEQ ID NO: 32898 - DNA, 120 bp, Artificial Sequence
  ENSG00000049323_11 (sequence is synthesized)
gttcatagacgcaggccaatccatcaccatgtaggtaaaggacctgtatttgtcaagccaaagaacactcaacctgttgctaaaagtactcatcctccacctctcccagccaaggaagag

SEQ ID NO: 32899 - DNA, 120 bp, Artificial Sequence
  ENSG00000049323_12 (sequence is synthesized)
ccagtggaggccctgaccttctcccgggaacacgggccaggagtggcggagccagaagtggcaactgcaccccctgaaaaggaaataccttcattggatcaagagaaaaccaaacttgag

SEQ ID NO: 32900 - DNA, 120 bp, Artificial Sequence
  ENSG00000049323_13 (sequence is synthesized)
cctggtcaaccccagctgtctccaggcatttccactattcatctgcatccacagtttccagtagtgattgaaaaaacatcacctcctgtgcctgttgaagtagctcctgaagcttctacg

SEQ ID NO: 32901 - DNA, 120 bp, Artificial Sequence
  ENSG00000049323_14 (sequence is synthesized)
tctagtgccagccaagtgattgctcctactcaagtgacagaaatcaatgaatgtactgtgaaccctgatatctgtggagcaggacactgcattaacctaccagtgagatatacctgtata

SEQ ID NO: 32902 - DNA, 120 bp, Artificial Sequence
  ENSG00000049323_15 (sequence is synthesized)
tgctacgagggctacaggttcagtgaacaacagaggaaatgtgtggatattgatgagtgtactcaggtccaacacctctgctcccagggccgctgtgaaaacaccgagggaagtttcttg

SEQ ID NO: 32903 - DNA, 120 bp, Artificial Sequence
  ENSG00000049323_16 (sequence is synthesized)
tgcatttgcccagcaggatttatggccagtgaggagggtactaactgcatagatgttgacgaatgcctgaggccggacgtctgtggggaggggcactgtgtcaatactgtgggggccttc

SEQ ID NO: 32904 - DNA, 120 bp, Artificial Sequence
  ENSG00000049323_17 (sequence is synthesized)
cggtgtgaatactgtgacagcgggtaccgcatgactcagagaggccgttgtgaggatattgatgaatgtttgaatccaagcacttgtccagatgagcagtgtgtgaattctcctggatct

SEQ ID NO: 32905 - DNA, 120 bp, Artificial Sequence
  ENSG00000049323_18 (sequence is synthesized)
taccagtgcgttccctgcacagaaggattccgaggctggaatggacagtgccttgatgtggacgagtgcctggaaccaaacgtctgcgcaaatggtgattgttccaaccttgaaggctcc

SEQ ID NO: 32906 - DNA, 120 bp, Artificial Sequence
  ENSG00000049323_19 (sequence is synthesized)
tacatgtgttcatgccacaaaggctatacccggactccggaccacaagcactgtagagatattgatgaatgtcagcaagggaatctatgtgtaaacgggcagtgcaaaaataccgagggc

SEQ ID NO: 32907 - DNA, 120 bp, Artificial Sequence
  ENSG00000049323_20 (sequence is synthesized)
tccttcaggtgcacctgtggacaggggtaccagctgtcggcagctaaagaccagtgtgaagacattgatgaatgccagcaccgtcatctctgtgctcatgggcagtgcaggaacactgag

SEQ ID NO: 32908 - DNA, 120 bp, Artificial Sequence
  ENSG00000049323_21 (sequence is synthesized)
tggagaccactgtgaagatatcaatgaatgcttggaggacaagagtgtttgccagagaggagactgcattaatactgcagggtcctatgattgtacttgtccggatggatttcagctaga

SEQ ID NO: 32909 - DNA, 120 bp, Artificial Sequence
  ENSG00000049323_22 (sequence is synthesized)
tgacaataaaacatgtcaagatattaatgaatgtgaacatccagggctctgtggtccgcaaggggagtgcctaaacacagagggttctttccattgtgtctgccagcagggtttctcaat

SEQ ID NO: 32910 - DNA, 120 bp, Artificial Sequence
  ENSG00000049323_23 (sequence is synthesized)
ctctgcagatggccgtacgtgtgaagatattgatgaatgtgtaaacaacactgtttgtgacagtcacgggttttgtgacaatacagctggctccttccgctgcctctgttatcagggctt

SEQ ID NO: 32911 - DNA, 120 bp, Artificial Sequence
  ENSG00000049323_24 (sequence is synthesized)
tcaagccccacaggatgggcaagggtgtgtggatgtgaatgaatgtgaactgctcagtggggtgtgtggtgaagccttctgtgaaaacgtggaagggtccttcctgtgcgtgtgtgctga

SEQ ID NO: 32912 - DNA, 120 bp, Artificial Sequence
  ENSG00000049323_25 (sequence is synthesized)
tgaaaaccaagagtacagccccatgactgggcagtgccgctcccggacctccacagatttagatgtagatgtagatcaacccaaagaagaaaagaaagaatgctactataatctcaatga

SEQ ID NO: 32913 - DNA, 120 bp, Artificial Sequence
  ENSG00000049323_26 (sequence is synthesized)
cgccagtctctgtgataatgtgttggcccccaatgtcacgaaacaagaatgctgctgtacatcaggcgtgggatggggagataactgcgaaatcttcccctgcccggtcttgggaactgc

SEQ ID NO: 32914 - DNA, 120 bp, Artificial Sequence
  ENSG00000049323_27 (sequence is synthesized)
tgagttcactgaaatgtgtcccaaagggaaaggttttgtgcctgctggagaatcatcttctgaagctggtggtgagaactataaagatgcagatgaatgcctactttttggacaagaaat

SEQ ID NO: 32915 - DNA, 120 bp, Artificial Sequence
  ENSG00000049323_28 (sequence is synthesized)
ctgcaaaaatggtttctgtttgaacactcggcctgggtatgaatgctactgtaagcaagggacgtactatgatcctgtgaaactgcagtgctttgatatggatgaatgtcaagaccccag

SEQ ID NO: 32916 - DNA, 120 bp, Artificial Sequence
  ENSG00000049323_29 (sequence is synthesized)
tagttgtattgatggccagtgtgttaatacagagggctcttacaactgcttctgtactcaccccatggtcctggatgcgtcagaaaaaagatgtatacgaccggctgagtcaaacgaaca

SEQ ID NO: 32917 - DNA, 120 bp, Artificial Sequence
  ENSG00000049323_30 (sequence is synthesized)
aatagaagaaactgatgtctaccaagatttgtgctgggaacatctgagtgatgaatacgtgtgtagccggcctcttgtgggcaagcagacaacgtacactgagtgctgctgtctgtatgg

SEQ ID NO: 32918 - DNA, 120 bp, Artificial Sequence
  ENSG00000049323_31 (sequence is synthesized)
agaggcctggggcatgcagtgtgccctctgccccctgaaggattcagatgactatgctcagctgtgtaacatccccgtgacgggacgccggcagccatatggacgggacgccttggttga

SEQ ID NO: 32919 - DNA, 120 bp, Artificial Sequence
  ENSG00000049323_32 (sequence is synthesized)
cttcagtgaacagtatactccagaagccgatccctacttcatccaagaccgttttctaaatagctttgaggagttacaggctgaggaatgcggcatcctcaatggatgtgaaaatggtcg

SEQ ID NO: 32920 - DNA, 120 bp, Artificial Sequence
  ENSG00000049323_33 (sequence is synthesized)
ctgtgtgagggtccaggaaggttacacctgcgattgctttgatgggtatcacttggatacggccaagatgacctgtgtcgatgtaaatgaatgcgatgagttgaacaaccggatgtctct

SEQ ID NO: 32921 - DNA, 120 bp, Artificial Sequence
  ENSG00000049323_34 (sequence is synthesized)
ctgcaagaatgccaagtgcattaacaccgatggttcctacaagtgtttgtgtctgccaggctacgtgccttctgacaagccaaactactgcactccgttgaataccgccttgaatttaga

SEQ ID NO: 32922 - DNA, 120 bp, Artificial Sequence
  ENSG00000049323_35 (sequence is synthesized)
gaaagacagtgacctggagtgaaacagaatctacataacctaagcccatatactctgcactgtgtaaaggaaaagggagaaatgtattatacttgagacattgcacctaccccggaaggc

SEQ ID NO: 32923 - DNA, 120 bp, Artificial Sequence
  ENSG00000049323_36 (sequence is synthesized)
tggaaatacagaaacagcatggaattgcaagtcctctgaagacaatgagaggatttaggatgagcccgataggtgtggcagaccaaatggacatttctctaaaaaaccagtatatatagt

SEQ ID NO: 32924 - DNA, 120 bp, Artificial Sequence
  ENSG00000049323_37 (sequence is synthesized)
ctgttcatatgtaaaattcaatggaagagaggtggaacagtgctgttattttaaacagaaggttgtattattatgttgttttgtttttttactattgcttgattaaatttggcatttaaa

SEQ ID NO: 32925 - DNA, 120 bp, Artificial Sequence
  ENSG00000049323_38 (sequence is synthesized)
tagtggtggaaatattttatataattttcattttttggttgtgcagttccttggctactgtttttcttttacttcagttttttaaaaatctcaaatgaaaaagtcttcgatacaatattg

SEQ ID NO: 32926 - DNA, 120 bp, Artificial Sequence
  ENSG00000049323_39 (sequence is synthesized)
ttaagctgtattataagtattgttacacagggttatgcaattcccggcctggagcatttttgaaattcaaattgtctgtcctgtggagcaggcagtgattttgttccaaaactttgtata

SEQ ID NO: 32927 - DNA, 120 bp, Artificial Sequence
  ENSG00000049323_40 (sequence is synthesized)
cacatttggagaaaagtactttatattttcagtgttttgtctgattttaatgtccgttcttagccaagctgctagcaggtgttaattggatccctttccttcactgaaatggaagagttt

SEQ ID NO: 32928 - DNA, 120 bp, Artificial Sequence
  ENSG00000049323_41 (sequence is synthesized)
ataagcttacgttagtattgtaatatgtaaagtaagcccaacaaaaatttttaaaaatttgatgatccccaatatatctaccattgtatgttaaataaatcaccatttttgtagaaaaaa

SEQ ID NO: 32929 - DNA, 120 bp, Artificial Sequence
  ENSG00000049323_42 (sequence is synthesized)
gtacatgtgtataagttgtatcccactctccccacttttatcttttccagtggtcttctgttaatgtagtgtcttttacaagttaatcattaaatttgttagatcttgttatgggctaaa

SEQ ID NO: 32930 - DNA, 120 bp, Artificial Sequence
  ENSG00000049323_43 (sequence is synthesized)
attatttactttggctccaatgcttggcttcttctttcaagttgtttgccttcagtgtttacagaagtggattcccacaaccaaggaaagggtggttaatgagtcagtctggaagtgcta

SEQ ID NO: 32931 - DNA, 120 bp, Artificial Sequence
  ENSG00000049323_44 (sequence is synthesized)
tttttgttatcgtggactagagtcagctcaccataattagtgatattttgtgaaagcaacgcagagcacctaggcagtgccatttccttggctcttctcagtatgtgcagggaacacacc

SEQ ID NO: 32932 - DNA, 80 bp, Artificial Sequence
  ENSG00000049323_45 (sequence is synthesized)
ggagtgtcccgcgcgctctcgctcgctctcggccaccctcgccgggccccgctgcggcgcgcgctgcaacccccggccgg

SEQ ID NO: 32933 - DNA, 120 bp, Artificial Sequence
  ENSG00000049323_46 (sequence is synthesized)
cctccccgctccccgggctccgcgctccccacccccacgccctcctcctgctcccagccacaatcggccggggtctggggccgctcagctgcccgcagagcctcctccctcgccaccgac

SEQ ID NO: 32934 - DNA, 120 bp, Artificial Sequence
  ENSG00000049323_47 (sequence is synthesized)
cgacttggtctcctcccgcctttcccgggctctcggcagctctcgggggagcccgaacgcgcggggaaaggcgagccgcacggccgggggagggggccggaccgcgcgcgaccggtcgcg

SEQ ID NO: 32935 - DNA, 120 bp, Artificial Sequence
  ENSG00000049323_48 (sequence is synthesized)
ctggggcccgcgatggcgggggcctggctcaggtgggggctcctgctctgggcagggctcctcgcgtcctcggcgcacggccggctgcggaggatcacctacgtggtgcacccgggcccc

SEQ ID NO: 32936 - DNA, 120 bp, Artificial Sequence
  ENSG00000049323_49 (sequence is synthesized)
ggcctggcagccggcgccttgcccctgagcgggcccccgcgttcgcggacattcaacgtcgcgctcaacgccaggtacagccgcagctcggcggctgccggcgcccccagccgtgcctcc

SEQ ID NO: 32937 - DNA, 80 bp, Artificial Sequence
  ENSG00000049323_50 (sequence is synthesized)
ctcccccggggtcccctcggagaggacccggcgcacgagcaagccgggcggcgcggccctgcaggggctcagaccgccgc

SEQ ID NO: 32938 - DNA, 120 bp, Artificial Sequence
  ENSG00000049323_51 (sequence is synthesized)
cagctccaccccaatcccggcggccacccggcagccgccccgttcaccaaacaaggcaggcaagttgtgcgctccaaggtgccgcaggagacccagagcggcggaggctctaggctgcag

SEQ ID NO: 32939 - DNA, 120 bp, Artificial Sequence
  ENSG00000049323_52 (sequence is synthesized)
gttcaccagaagcagcagctgcagggggtcaatgtctgtggagggcggtgctgtcatggctggagtaaggcccctggctcccagaggtgcaccaaacctagctgtgttccgccatgtcag

SEQ ID NO: 32940 - DNA, 120 bp, Artificial Sequence
  ENSG00000049323_53 (sequence is synthesized)
aatggagggatgtgtctccggccacaactctgtgtgtgtaaaccagggaccaagggcaaagcctgtgaaacaatagctgcccaggacacctcgtcaccagtctttggagggcagagtcct

SEQ ID NO: 32941 - DNA, 120 bp, Artificial Sequence
  ENSG00000049323_54 (sequence is synthesized)
ggggctgcttcctcgtggggccctcctgagcaagcagcaaagcatacttcatctaagaaggcagacactctaccaagagtcagccctgtggcccagatgaccttaaccctcaagccgaag

SEQ ID NO: 32942 - DNA, 120 bp, Artificial Sequence
  ENSG00000049323_55 (sequence is synthesized)
ccttcagtgggactcccccagcagatacattctcaagtgactcctctttcttcccagagtgtggtgattcaccatggccagacccaggaatacgtgctcaagcccaagtactttccagcc

SEQ ID NO: 32943 - DNA, 120 bp, Artificial Sequence
  ENSG00000049323_56 (sequence is synthesized)
ctgtttgaggagctgaagcctcgttgacaccagggctgacctgcccggctctaagcagggctaaataactcccacatagctgaaggaaggagggcccttccctgatttcccgtgacttgg

SEQ ID NO: 32944 - DNA, 120 bp, Artificial Sequence
  ENSG00000049323_57 (sequence is synthesized)
agaagtgtcagcatctggtcgtagttaatgaaccacaatgaagaggcaaactctgtcaacatgaattgtctttaagtgtagcatggcagcttctatagcaataaaaatggcaccactggc

SEQ ID NO: 32945 - DNA, 80 bp, Artificial Sequence
  ENSG00000049449_0 (sequence is synthesized)
agccccgcgcccaccaccccagctggcgacgtggctccgcggccccggcttcccccggcagctcagcgaccaatgggcgc

SEQ ID NO: 32946 - DNA, 120 bp, Artificial Sequence
  ENSG00000049449_1 (sequence is synthesized)
ccaggcgcgcccctctgctccggctcggggcgggcactggcggagggactggccagtcccctcctccgcgccggccccaaccctgtcgctgccgccgcgctccgagtccccattcccgag

SEQ ID NO: 32947 - DNA, 120 bp, Artificial Sequence
  ENSG00000049449_2 (sequence is synthesized)
cgctgttgtcgctcgctcagcgtctccctctcggccgccctctcctcgggacgatggcgcgcggtggccgcggccgccgcctggggttagccctggggctgctgctggcgctggtgctgg

SEQ ID NO: 32948 - DNA, 120 bp, Artificial Sequence
  ENSG00000049449_3 (sequence is synthesized)
cgccgcgggttctgcgggccaagcccacggtgcgcaaagagcgcgtggtgcggcccgactcggagctgggcgagcggccccctgaggacaaccagagcttccagtacgaccacgaggcct

SEQ ID NO: 32949 - DNA, 120 bp, Artificial Sequence
  ENSG00000049449_4 (sequence is synthesized)
tcctgggcaaggaggactccaagaccttcgaccagctcaccccggacgagagcaaggagaggctagggaagattgttgatcgaatcgacaatgatggggatggctttgtcactactgagg

SEQ ID NO: 32950 - DNA, 120 bp, Artificial Sequence
  ENSG00000049449_5 (sequence is synthesized)
agctgaaaacctggatcaaacgggtgcagaaaagatacatctttgataatgtcgccaaagtctggaaggattatgatagggacaaggatgataaaatttcctgggaagaatacaaacaag

SEQ ID NO: 32951 - DNA, 120 bp, Artificial Sequence
  ENSG00000049449_6 (sequence is synthesized)
ccacctatggttactacctaggaaaccccgcagagtttcatgattcttcagatcatcacacctttaaaaagatgctgccacgtgatgagagaagattcaaagctgcagacctcaatggtg

SEQ ID NO: 32952 - DNA, 120 bp, Artificial Sequence
  ENSG00000049449_7 (sequence is synthesized)
acctgacagctactcgggaggagttcactgcctttctgcatcctgaagagtttgaacatatgaaggaaattgtggttttggaaaccctggaggacatcgacaagaacggggatgggtttg

SEQ ID NO: 32953 - DNA, 120 bp, Artificial Sequence
  ENSG00000049449_8 (sequence is synthesized)
tggatcaggatgagtatattgcggatatgttttcccatgaggagaatggccctgagccagactgggttttatcagaacgggagcagtttaacgaattccgggatctgaacaaggacggga

SEQ ID NO: 32954 - DNA, 120 bp, Artificial Sequence
  ENSG00000049449_9 (sequence is synthesized)
agttagacaaagatgagattcgccactggatcctccctcaagattatgatcatgcacaggctgaggccaggcatctggtatatgaatcagacaaaaacaaggatgagaagctaactaaag

SEQ ID NO: 32955 - DNA, 120 bp, Artificial Sequence
  ENSG00000049449_10 (sequence is synthesized)
cggggaagatctcacaaaaaatcatgatgagctttgatagacactcaccagaatatggcagactgtcataggcattctgttattgtcttggattgttgctacaattgtctaatttacagc

SEQ ID NO: 32956 - DNA, 120 bp, Artificial Sequence
  ENSG00000049449_11 (sequence is synthesized)
agttgtgatcccacaaaaagcaagtttatacctcagattggggtataaaaattgtttttcgctcagtatttactggaaaatggacatcactagtctttcagtaagatttctctcaaaaca

SEQ ID NO: 32957 - DNA, 120 bp, Artificial Sequence
  ENSG00000049449_12 (sequence is synthesized)
cgtgaaaaccttggtaaattgcaattctttctggggatatattggtacaacatgacttaaaacttttttttttctattaaaacttaaaggggaacaaaacttgaaaaagccctgttcttc

SEQ ID NO: 32958 - DNA, 120 bp, Artificial Sequence
  ENSG00000049449_13 (sequence is synthesized)
agaaggtgagtgggttgagggaggcagtaatatgaagtgactgctgtgtattttaactaccagattttttatatttgccactgttaaatagttggaaaggggaaattctgattaagcgaa

SEQ ID NO: 32959 - DNA, 120 bp, Artificial Sequence
  ENSG00000049449_14 (sequence is synthesized)
agtggtatcatcctaggtaagcttatttcagaacaagtctaatatttcagattctttcttttcgactttatactctgagttattacttactgtaagtggtgtatatgaaacctccatgca

SEQ ID NO: 32960 - DNA, 120 bp, Artificial Sequence
  ENSG00000049449_15 (sequence is synthesized)
ttttccagtatggatctgctaatatgcacagtaaatccatgtctttgtttgtttttctattaaaaagcaatcaagaaagataatgtgaaaaagaaaggaatttagaggtagggaaaagat

SEQ ID NO: 32961 - DNA, 120 bp, Artificial Sequence
  ENSG00000049449_16 (sequence is synthesized)
gaatgtcagacatttgaagaactatagtaaaatgataaacactaaatatacttgagaaaactttcttaatatgccaatgaggtaggcctgatctttgaaatagtgaataggaatacaatg

SEQ ID NO: 32962 - DNA, 120 bp, Artificial Sequence
  ENSG00000049449_17 (sequence is synthesized)
catttcctcagtgatcactgattagaatgagttggtgggatccttgggaagccaaacggagcggagttctggatcatgtcccatccagtccagtgaatccacgacccgcagacctgtccc

SEQ ID NO: 32963 - DNA, 120 bp, Artificial Sequence
  ENSG00000049449_18 (sequence is synthesized)
cccgcaacagcttataccatggaatgaggacaaggtgatactctgagctgtggactgaactggcagacacaacctgtacagattgaaatttcaccttgtaaggaggaagtgaatgaaata

SEQ ID NO: 32964 - DNA, 120 bp, Artificial Sequence
  ENSG00000049449_19 (sequence is synthesized)
aaggatccccctaaggattttctactgtgtcctgtggtgtttgacttcacagatgctatttgtgacattattcatatagcataaaacagtggggttggatcccatgaataacattataaa

SEQ ID NO: 32965 - DNA, 120 bp, Artificial Sequence
  ENSG00000049449_20 (sequence is synthesized)
ggttctggggttttttttcatccaattactagaatgttcagaatagactcatatttactaatttaataaatgtatgtacttaatgcctttacttttctaggtcattttaactataaaatc

SEQ ID NO: 32966 - DNA, 120 bp, Artificial Sequence
  ENSG00000049449_21 (sequence is synthesized)
gtgctgtgtccaccatctggtgtcttcttgctttacgtttcaagtctttgtatccatggtggtgggatttaaaaaaaaaaatcacttatcttttgatttacatacagtttccactttttg

SEQ ID NO: 32967 - DNA, 120 bp, Artificial Sequence
  ENSG00000049449_22 (sequence is synthesized)
ccttggacctaagccagaagacatgagttctcaccccagttttaccaaatactggctgtgtaatcttagaagttattccatttctctgggcctcagtttccgttactccaaaatgagggt

SEQ ID NO: 32968 - DNA, 120 bp, Artificial Sequence
  ENSG00000049449_23 (sequence is synthesized)
gctggactacagcagggaagattaataggtttcatcttacagatcagctctgatccgttgataatggccatcaccagagcacagtgctgagaattctgagagcacctctaggtttatcag

SEQ ID NO: 32969 - DNA, 120 bp, Artificial Sequence
  ENSG00000049449_24 (sequence is synthesized)
gacagaggggcacgatccattagcagtgtctgccatcagcactggttgggggaaagcacatcaaccttggaaggataaacttgaagattccttccagcctccttggatcattgattctgt

SEQ ID NO: 32970 - DNA, 120 bp, Artificial Sequence
  ENSG00000049449_25 (sequence is synthesized)
tgtagttgtatgtgcattttggattgtgcaggtgtttgatcttttgctggaccagcatcacacaagccttgataatataacagccttgtgcctgtgtgtgggtttctttttttttttttt

SEQ ID NO: 32971 - DNA, 120 bp, Artificial Sequence
  ENSG00000049449_26 (sequence is synthesized)
ggagatcgccgccgccgcgccccggccggggtggtttctcgcggggaggcgagaacgtggcagcggccgcgggagccaggacggcgagggcccgccccctcccccaggttgcatcagaag

SEQ ID NO: 32972 - DNA, 120 bp, Artificial Sequence
  ENSG00000049449_27 (sequence is synthesized)
cgccccctcccccaggttgcatcagaagggaggggagagtgcacaaaagaagagtttgtccacagtggcctgaagattgttgatcgaatcgacaatgatggggatggctttgtcactact

SEQ ID NO: 32973 - DNA, 120 bp, Artificial Sequence
  ENSG00000049449_28 (sequence is synthesized)
ggaaaccctggaggacatcgacaagaacggggatgggtttgtggatcaggatgagtatattgacaaggaaacttcaggctcagtcactgaactaagtcaaaagccgggatttatcttttg

SEQ ID NO: 32974 - DNA, 120 bp, Artificial Sequence
  ENSG00000049449_29 (sequence is synthesized)
tctttacagtgaatagggagagggaggtggaggcgttgcgcttgaaaatcgaatacctagtgactcacaggcagaggaaacccaatgtattgactcgtcatttcacttctcggggaggct

SEQ ID NO: 32975 - DNA, 120 bp, Artificial Sequence
  ENSG00000049449_30 (sequence is synthesized)
tctcttcaagcggcaccaagtggaaagtgtgtggtggggggtggtagtaggaagagcactggaattaggaaccctaccttcaccaattagctgtgtgaccctggggtaatcatgtaatgg

SEQ ID NO: 32976 - DNA, 120 bp, Artificial Sequence
  ENSG00000049449_31 (sequence is synthesized)
cttcaaacctcagcttcctcatctgtaaaatgggggaaaaaaagtgagcccatttttacaggattcgatgaagctcgaattagctaatacatattacaactctttctcaaaaacaatgta

SEQ ID NO: 32977 - DNA, 120 bp, Artificial Sequence
  ENSG00000049449_32 (sequence is synthesized)
gacatgtcagttaggggtctaccttgtagtcaagggtcttgtctttttttttccttcacttactacctgcttcattcaccacctgacatttccaagctctgcttccgtgacagagaaact

SEQ ID NO: 32978 - DNA, 120 bp, Artificial Sequence
  ENSG00000049449_33 (sequence is synthesized)
gcctgcagggtatctctcttttccaagagctactgacacacacacaatgcaaaaacgtttcctttttcttttccttgccattttgtacaatggggataatgacccatcttgtagaattgt

SEQ ID NO: 32979 - DNA, 120 bp, Artificial Sequence
  ENSG00000049449_34 (sequence is synthesized)
tataaggatgaaatataatgacaagtgaaagccctttggaaatgatataaacaatagtactaaacacagtggctaagactctgggttgaaagcagagtgaccatgttcctgtgcagcctc

SEQ ID NO: 32980 - DNA, 120 bp, Artificial Sequence
  ENSG00000049449_35 (sequence is synthesized)
cagctcatatgagctgtgggtcattgggtaagactttacctcattgttttcatctgtaaaatgggaattataacagcactcactttgtaaggctgttatgtgaaaatcaaatgaaaactg

SEQ ID NO: 32981 - DNA, 120 bp, Artificial Sequence
  ENSG00000049449_36 (sequence is synthesized)
tgtgtagaacactttatacagtatctggaccatagtgttcaatgttagtcattattattagttttcgcttatgtagtgccagtttgggttgtagagggcttttacatcaaaatggcacat

SEQ ID NO: 32982 - DNA, 120 bp, Artificial Sequence
  ENSG00000049449_37 (sequence is synthesized)
gttctttctactccaccacatggccttcatcatgaataaattactgcatcattatccccaagaagctgcctaccagctgtttgagttaggtctctggattggttgtcgcctttcctaaag

SEQ ID NO: 32983 - DNA, 120 bp, Artificial Sequence
  ENSG00000049540_0 (sequence is synthesized)
gcatttctccccgagatggcgggtctgacggcggcggccccgcggcccggagtcctcctgctcctgctgtccatcctccacccctctcggcctggaggggtccctggggccattcctggt

SEQ ID NO: 32984 - DNA, 120 bp, Artificial Sequence
  ENSG00000049540_1 (sequence is synthesized)
ggagttcctggaggagtcttttatccaggggctggtctcggagcccttggaggaggagcgctggggcctggaggcaaacctcttaagccagttcccggagggcttgcgggtgctggcctt

SEQ ID NO: 32985 - DNA, 120 bp, Artificial Sequence
  ENSG00000049540_2 (sequence is synthesized)
ggggcagggctcggcgccttccccgcagttacctttccgggggctctggtgcctggtggagtggctgacgctgctgcagcctataaagctgctaaggctggcgctgggcttggtggtgtc

SEQ ID NO: 32986 - DNA, 120 bp, Artificial Sequence
  ENSG00000049540_3 (sequence is synthesized)
ccaggagttggtggcttaggagtgtctgcaggtgcggtggttcctcagcctggagccggagtgaagcctgggaaagtgccgggtgtggggctgccaggtgtatacccaggtggcgtgctc

SEQ ID NO: 32987 - DNA, 120 bp, Artificial Sequence
  ENSG00000049540_4 (sequence is synthesized)
ccaggagctcggttccccggtgtgggggtgctccctggagttcccactggagcaggagttaagcccaaggctccaggtgtaggtggagcttttgctggaatcccaggagttggacccttt

SEQ ID NO: 32988 - DNA, 120 bp, Artificial Sequence
  ENSG00000049540_5 (sequence is synthesized)
gggggaccgcaacctggagtcccactggggtatcccatcaaggcccccaagctgcctggtggctatggactgccctacaccacagggaaactgccctatggctatgggcccggaggagtg

SEQ ID NO: 32989 - DNA, 120 bp, Artificial Sequence
  ENSG00000049540_6 (sequence is synthesized)
gctggtgcagcgggcaaggctggttacccaacagggacaggggttggcccccaggcagcagcagcagcggcagctaaagcagcagcaaagttcggtgctggagcagccggagtcctccct

SEQ ID NO: 32990 - DNA, 120 bp, Artificial Sequence
  ENSG00000049540_7 (sequence is synthesized)
ggtgttggaggggctggtgttcctggcgtgcctggggcaattcctggaattggaggcatcgcaggcgttgggactccagctgcagctgcagctgcagcagcagccgctaaggcagccaag

SEQ ID NO: 32991 - DNA, 120 bp, Artificial Sequence
  ENSG00000049540_8 (sequence is synthesized)
tatggagctgctgcaggcttagtgcctggtgggccaggctttggcccgggagtagttggtgtcccaggagctggcgttccaggtgttggtgtcccaggagctgggattccagttgtccca

SEQ ID NO: 32992 - DNA, 120 bp, Artificial Sequence
  ENSG00000049540_9 (sequence is synthesized)
ggtgctgggatcccaggtgctgcggttccaggggttgtgtcaccagaagcagctgctaaggcagctgcaaaggcagccaaatacggggccaggcccggagtcggagttggaggcattcct

SEQ ID NO: 32993 - DNA, 120 bp, Artificial Sequence
  ENSG00000049540_10 (sequence is synthesized)
acttacggggttggagctgggggctttcccggctttggtgtcggagtcggaggtatccctggagtcgcaggtgtccctggtgtcggaggtgttcccggagtcggaggtgtcccgggagtt

SEQ ID NO: 32994 - DNA, 120 bp, Artificial Sequence
  ENSG00000049540_11 (sequence is synthesized)
ggcatttcccccgaagctcaggcagcagctgccgccaaggctgccaagtacggagtggggaccccagcagctgcagctgctaaagcagccgccaaagccgcccagtttgggttagttcct

SEQ ID NO: 32995 - DNA, 120 bp, Artificial Sequence
  ENSG00000049540_12 (sequence is synthesized)
ggtgtcggcgtggctcctggagttggcgtggctcctggtgtcggtgtggctcctggagttggcttggctcctggagttggcgtggctcctggagttggtgtggctcctggcgttggcgtg

SEQ ID NO: 32996 - DNA, 120 bp, Artificial Sequence
  ENSG00000049540_13 (sequence is synthesized)
gctcccggcattggccctggtggagttgcagctgcagcaaaatccgctgccaaggtggctgccaaagcccagctccgagctgcagctgggcttggtgctggcatccctggacttggagtt

SEQ ID NO: 32997 - DNA, 120 bp, Artificial Sequence
  ENSG00000049540_14 (sequence is synthesized)
ttcctggacttggagttggtgctggtgttcctggcttcggggcagtacctggagccctggctgccgctaaagcagccaaatatggagcagcagtgcctggggtccttggagggctcgggg

SEQ ID NO: 32998 - DNA, 120 bp, Artificial Sequence
  ENSG00000049540_15 (sequence is synthesized)
ctctcggtggagtaggcatcccaggcggtgtggtgggagccggacccgccgccgccgctgccgcagccaaagctgctgccaaagccgcccagtttggcctagtgggagccgctgggctcg

SEQ ID NO: 32999 - DNA, 120 bp, Artificial Sequence
  ENSG00000049540_16 (sequence is synthesized)
gaggactcggagtcggagggcttggagttccaggtgttgggggccttggaggtatacctccagctgcagccgctaaagcagctaaatacggtgctgctggccttggaggtgtcctagggg

SEQ ID NO: 33000 - DNA, 120 bp, Artificial Sequence
  ENSG00000049540_17 (sequence is synthesized)
gtgccgggcagttcccacttggaggagtggcagcaagacctggcttcggattgtctcccattttcccaggtggggcctgcctggggaaagcttgtggccggaagagaaaatgagcttcct

SEQ ID NO: 33001 - DNA, 120 bp, Artificial Sequence
  ENSG00000049540_18 (sequence is synthesized)
aggacccctgactcacgacctcatcaacgttggtgctactgcttggtggagaatgtaaaccctttgtaaccccatcccatgcccctccgactccccaccccaggagggaacgggcaggcc

SEQ ID NO: 33002 - DNA, 120 bp, Artificial Sequence
  ENSG00000049540_19 (sequence is synthesized)
gggcggccttgcagatccacagggcaaggaaacaagaggggagcggccaagtgccccgaccaggaggccccctacttcagaggcaagggccatgtggtcctggccccccaccccatccct

SEQ ID NO: 33003 - DNA, 120 bp, Artificial Sequence
  ENSG00000049540_20 (sequence is synthesized)
tcccacctaggagctccccctccacacagcctccatctccaggggaacttggtgctacacgctggtgctcttatcttcctggggggagggaggagggaagggtggcccctcggggaaccc

SEQ ID NO: 33004 - DNA, 120 bp, Artificial Sequence
  ENSG00000049540_21 (sequence is synthesized)
cctacctggggctcctctaaagatggtgcagacacttcctgggcagtcccagctccccctgcccaccaggacccaccgttggctgccatccagttggtacccaagcacctgaagcctcaa

SEQ ID NO: 33005 - DNA, 120 bp, Artificial Sequence
  ENSG00000049540_22 (sequence is synthesized)
agctggattcgctctagcatccctcctctcctgggtccacttggccgtctcctccccaccgatcgctgttccccacatctggggcgcttttgggttggaaaaccaccccacactgggaat

SEQ ID NO: 33006 - DNA, 120 bp, Artificial Sequence
  ENSG00000049540_23 (sequence is synthesized)
agccaccttgcccttgtagaatccatccgcccatccgtccattcatccatcggtccgtccatccatgtccccagttgaccgcccggcaccactagctggctgggtgcacccaccatcaac

SEQ ID NO: 33007 - DNA, 120 bp, Artificial Sequence
  ENSG00000049540_24 (sequence is synthesized)
ctggttgacctgtcatggccgcctgtgccctgcctccacccccatcctacactcccccagggcgtgcggggctgtgcagactggggtgccaggcatctcctccccacccggggtgtcccc

SEQ ID NO: 33008 - DNA, 120 bp, Artificial Sequence
  ENSG00000049540_25 (sequence is synthesized)
acatgcagtactgtataccccccatccctccctcggtccactgaacttcagagcagttcccattcctgccccgcccatctttttgtgtctcgctgtgatagatcaataaatattttattt

SEQ ID NO: 33009 - DNA, 120 bp, Artificial Sequence
  ENSG00000049540_26 (sequence is synthesized)
tttgtcctggatatttggggattatttttgattgttgatattctcttttggttttattgttgtggttcattgaaaaaaaaagataatttttttttctgatccggggagctgtatccccag

SEQ ID NO: 33010 - DNA, 120 bp, Artificial Sequence
  ENSG00000049540_27 (sequence is synthesized)
tagaaaaaacattttaatcactctaatataactctggatgaaacacacctttttttttaataagaaaagagaattaactgcttcagaaatgactaataaatgaaaaacctttaaaggaaa

SEQ ID NO: 33011 - DNA, 120 bp, Artificial Sequence
  ENSG00000049540_28 (sequence is synthesized)
gtccctggacttggagttggtgctggtgttcctggacttggagttggtgctggtgttcctggcttcggggcaggtgcagatgagggagttaggcggagcctgtcccctgagctcagggaa

SEQ ID NO: 33012 - DNA, 120 bp, Artificial Sequence
  ENSG00000049540_29 (sequence is synthesized)
cctcccttctgcttcctctcccgagggctgtcctggcagaggcccccctcgctctttctggcgggaacagggccagcagcgaaagaacagtcgcagagggaaagcgggaaagagatgggg

SEQ ID NO: 33013 - DNA, 120 bp, Artificial Sequence
  ENSG00000049540_30 (sequence is synthesized)
gaaagtgtgtgtgtgtgagtgtgtgcttgtgtgcatgtgtgtgcgtgtgtgtgtcaaggaaaaaagctcgcagtccagcagcccgggcctgggaggcttgtgagccgggcctttcgtaat

SEQ ID NO: 33014 - DNA, 120 bp, Artificial Sequence
  ENSG00000049540_31 (sequence is synthesized)
tgtcccctccccgcggccccctcccccaggcctcccccctctcccgccctcccgcccgccctctctccctccctctttccctcacagccgacgaggcaacaattaggctttggggataaa

SEQ ID NO: 33015 - DNA, 120 bp, Artificial Sequence
  ENSG00000049540_32 (sequence is synthesized)
atgggacaaggaaactaggaacaggacaaggaagccaacgggcaggaggaaggagggaggtgtggacaccgattagcctcccaaggatgagtaggccggggccaggtcccagggcttcca

SEQ ID NO: 33016 - DNA, 120 bp, Artificial Sequence
  ENSG00000049540_33 (sequence is synthesized)
ggaacaagaggctggaagcagctccatgtcctccctgtgtgagggcgtctagcatctaccctacatgtgcatgtgtgttcacccagctgtccagagactcctctctgcaaaggagaggct

SEQ ID NO: 33017 - DNA, 120 bp, Artificial Sequence
  ENSG00000049540_34 (sequence is synthesized)
gagagagagagaaagaaagaaagaaagagaaaggaaggaaagaaaagaaaagaaaaagaaagagatcacattcctccagctcactgattcaaatcctagagctctttagggaccctctta

SEQ ID NO: 33018 - DNA, 120 bp, Artificial Sequence
  ENSG00000049540_35 (sequence is synthesized)
atcctagagctctttagggaccctcttagtctctccacatctctctgatgagtaggatccatgcagaggaaatgtcaacccacctgcaatcctgcattcaggaccaactgtcacttccat

SEQ ID NO: 33019 - DNA, 120 bp, Artificial Sequence
  ENSG00000049540_36 (sequence is synthesized)
tgggacatgccacaagccctctggcttccgtggggccctccgctttgcaaagaaccttccctcaactcaggcttgggagccgggtgggtgggattgtcagttgcaatctactggggctca

SEQ ID NO: 33020 - DNA, 120 bp, Artificial Sequence
  ENSG00000049540_37 (sequence is synthesized)
ccgggtcagtgcggaatccctggggctggaggacagagggcagggaggggcagagggcagggaggaacagagccctctccatgccactgcacttggggaggaagggcagggcctggcttc

SEQ ID NO: 33021 - DNA, 86 bp, Artificial Sequence
  ENSG00000049540_38 (sequence is synthesized)
tacttgggaggctgaggcgggagaatcgccagaacctgggaggcagaggttgcggtgagttgagatcaccccattccaccgaaaaa

SEQ ID NO: 33022 - DNA, 120 bp, Artificial Sequence
  ENSG00000049540_39 (sequence is synthesized)
gaactggccattccttgggcctcctggccccttggtgctgtctggcccagtgtccacagttccagggctgtagtgacagctttttatcattacaggtgtaggtggagcttttgctggaat

SEQ ID NO: 33023 - DNA, 120 bp, Artificial Sequence
  ENSG00000049540_40 (sequence is synthesized)
gttagccagaggtgggctggcccagccatgtaaacaggctccaggagacggagataaatccacacaccgaagagtttgcagatgacttccgaaactcgtgggaggagggttgtggccacc

SEQ ID NO: 33024 - DNA, 120 bp, Artificial Sequence
  ENSG00000049540_41 (sequence is synthesized)
ccacgtctgtccctggctgcccctgtcgggcacagaggctgtgtggggctgccaggtgtatacccaggtggcgtgctcccaggagctcggttccccggtgtgggggtgctccctggagtt

SEQ ID NO: 33025 - DNA, 120 bp, Artificial Sequence
  ENSG00000049540_42 (sequence is synthesized)
agcctgggaaagtgccgggtgtaggtggagcttttgctggaatcccaggagttggaccctttgggggaccgcaacctggagtcccactggggtatcccatcaaggcccccaagctgcctg

SEQ ID NO: 33026 - DNA, 120 bp, Artificial Sequence
  ENSG00000049540_43 (sequence is synthesized)
cccttctgtgccaggtgcggtggttcctcagcctggagccggagtgaagcctgggaaagtgccgggtcagtgcggaatccctggggctggaggacagagggcagggaggggcagagggca

SEQ ID NO: 33027 - DNA, 89 bp, Artificial Sequence
  ENSG00000049540_44 (sequence is synthesized)
ctcacgcctgtaatcccaacaatttgggaggctaaaactgagaccccatctttccaaaaagtatttaaaaattatctaggcatggtggc

SEQ ID NO: 33028 - DNA, 89 bp, Artificial Sequence
  ENSG00000049540_45 (sequence is synthesized)
ggagtttgagaccagcctgagcaacatactgagaccccatctttccaaaaagtatttaaaaattatctcacctgcaaggctgaggtgag

SEQ ID NO: 33029 - DNA, 120 bp, Artificial Sequence
  ENSG00000049540_46 (sequence is synthesized)
agttcctggaggagtcttttatccaggtaacgtacatgaaacttccacacacccaggtcatgcggatgatgctgatgtccataatagatgcacattttgacactacagaaggtaggaaca

SEQ ID NO: 33030 - DNA, 120 bp, Artificial Sequence
  ENSG00000049540_47 (sequence is synthesized)
agatggccacagggcaaggacctcaccctctgtggctgtgttttcaggcgttgggactccagctgcagctgcagctgcagcagcagccgctaaggcagccaagtatggtgagtgcctccc

SEQ ID NO: 33031 - DNA, 120 bp, Artificial Sequence
  ENSG00000049540_48 (sequence is synthesized)
ggggtggcaagtccacggctcgggcccctgcatagacctcggagaccctagccgcaaagccagatggacttggcctttgttccttcccaaatatgcattgttcatgcctccttacctttg

SEQ ID NO: 33032 - DNA, 120 bp, Artificial Sequence
  ENSG00000049540_49 (sequence is synthesized)
ccccttctgatcactctacctgagatgccatctctattgttttgccctgattaactcagcagagggaggggaccctgcagaggggacatggctcctcccactccatcccctccagggcca

SEQ ID NO: 33033 - DNA, 120 bp, Artificial Sequence
  ENSG00000049541_0 (sequence is synthesized)
aagaggaggcgcgagaatggaggtggaggccgtctgtggtggcgcgggcgaggtggaggcccaggactctgaccctgcccctgccttcagcaaggcccccggcagcgccggccactacga

SEQ ID NO: 33034 - DNA, 120 bp, Artificial Sequence
  ENSG00000049541_1 (sequence is synthesized)
actgccgtgggttgaaaaatataggccagtaaagctgaatgaaattgtcgggaatgaagacaccgtgagcaggctagaggtctttgcaagggaaggaaatgtgcccaacatcatcattgc

SEQ ID NO: 33035 - DNA, 120 bp, Artificial Sequence
  ENSG00000049541_2 (sequence is synthesized)
gggccctccaggaaccggcaagaccacaagcattctgtgcttggcccgggccctgctgggcccagcactcaaagatgccatgttggaactcaatgcttcaaatgacaggggcattgacgt

SEQ ID NO: 33036 - DNA, 120 bp, Artificial Sequence
  ENSG00000049541_3 (sequence is synthesized)
tgtgaggaataaaattaaaatgtttgctcaacaaaaagtcactcttcccaaaggccgacataagatcatcattctggatgaagcagacagcatgaccgacggagcccagcaagccttgag

SEQ ID NO: 33037 - DNA, 120 bp, Artificial Sequence
  ENSG00000049541_4 (sequence is synthesized)
gagaaccatggaaatctactctaaaaccactcgcttcgcccttgcttgtaatgcttcggataagatcatcgagcccattcagtcccgctgtgcagtcctccggtacacaaagctgaccga

SEQ ID NO: 33038 - DNA, 120 bp, Artificial Sequence
  ENSG00000049541_5 (sequence is synthesized)
cgcccagatcctcaccaggctgatgaatgttatcgagaaggagagggtaccctacactgatgacggcctagaagccatcatcttcacggcccagggagacatgaggcaggcgctgaacaa

SEQ ID NO: 33039 - DNA, 120 bp, Artificial Sequence
  ENSG00000049541_6 (sequence is synthesized)
cctgcagtccaccttctcaggatttggcttcattaacagtgagaacgtgttcaaggtctgtgacgagccccacccactgctggtaaaggagatgatccagcactgtgtgaatgccaacat

SEQ ID NO: 33040 - DNA, 120 bp, Artificial Sequence
  ENSG00000049541_7 (sequence is synthesized)
aagcctacaagattcttgctcacttgtggcatctgggctactcaccagaagatatcattggcaacatctttcgagtgtgtaaaactttccaaatggcagaatacctgaaactggagttta

SEQ ID NO: 33041 - DNA, 120 bp, Artificial Sequence
  ENSG00000049541_8 (sequence is synthesized)
tcaaggaaattggatacactcacatgaaaatagcggaaggagtgaactctcttttgcagatggcaggcctcctggcaaggctgtgtcagaagacaatggccccggtggccagttagagca

SEQ ID NO: 33042 - DNA, 120 bp, Artificial Sequence
  ENSG00000049541_9 (sequence is synthesized)
gagacttcactgactgacttacaggtgccctattctgaggtacaggagccgcggctttctgatgggggaaaatgccgccttaggctggagccaacatgactgtcctttaaactccagtgg

SEQ ID NO: 33043 - DNA, 120 bp, Artificial Sequence
  ENSG00000049541_10 (sequence is synthesized)
attgcactccagcctgggcgacagagtctccatctggggaaaaaaattaaataaataaactcccgtgacttgcatgtttgcttctgggacgtctgtgccccgcaagtgtttgagtttggc

SEQ ID NO: 33044 - DNA, 120 bp, Artificial Sequence
  ENSG00000049541_11 (sequence is synthesized)
tggcctccaccccattgatgcggtgacggggcggaaaggcgcagagaagctgagggcggtctctgatctgtgtgtgggttgacattttagctaataaagccttgcagtgtttgttggcaa

SEQ ID NO: 33045 - DNA, 120 bp, Artificial Sequence
  ENSG00000049541_12 (sequence is synthesized)
ctaataggaaattggatacactcacatgaaaatagcggaaggagtgaactctcttttgcagatggcaggcctcctggcaaggctgtgtcagaagacaatggccccggtggccagttagag

SEQ ID NO: 33046 - DNA, 120 bp, Artificial Sequence
  ENSG00000049541_13 (sequence is synthesized)
ccgtgagcaggctagagtcatccagaagcaagttttaaccggttttaatgatcattttcgccgtaggtctttgcaagggaaggaaatgtgcccaacatcatcattgcggggtcagaggtg

SEQ ID NO: 33047 - DNA, 120 bp, Artificial Sequence
  ENSG00000049541_14 (sequence is synthesized)
tggaggccgtctgtggtggcgcgggcgaggtggaggcccaggactctgaccctgcccctgccttcagcaaggcccccggcagcgccggccactacgaactgccgtggtctttgcaaggga

SEQ ID NO: 33048 - DNA, 120 bp, Artificial Sequence
  ENSG00000049541_15 (sequence is synthesized)
gcgagaatggaggtggaggccgtctgtggtggcgcgggcgaggtggaggcccaggactctgaccctgcccctgccttcagcaaggcccccggcagcgccggccactacgaactgccgtga

SEQ ID NO: 33049 - DNA, 89 bp, Artificial Sequence
  ENSG00000049541_16 (sequence is synthesized)
tgccgtgatggagtcacacttttctgctcactacaacctgcatctccctggttcaatcaattctgcctcagccttcctagtagctggga

SEQ ID NO: 33050 - DNA, 120 bp, Artificial Sequence
  ENSG00000049618_0 (sequence is synthesized)
atggcccataacgcgggcgccgcggccgccgccggcacccacagcgccaagagcggcggctccgaggcggctctcaaggagggtggaagcgccgccgcgctgtcctcctcctcctcctcc

SEQ ID NO: 33051 - DNA, 120 bp, Artificial Sequence
  ENSG00000049618_1 (sequence is synthesized)
tccgcggcggcagcggcggcatcctcttcctcctcgtcgggcccgggctcggccatggagacggggctgctccccaaccacaaactgaaaaccgttggcgaagcccccgccgcgccgccc

SEQ ID NO: 33052 - DNA, 120 bp, Artificial Sequence
  ENSG00000049618_2 (sequence is synthesized)
caccagcagcaccaccaccaccaccatgcccaccaccaccaccaccatgcccaccacctccaccaccaccacgcactacagcagcagctaaaccagttccagcagcagcagcagcagcag

SEQ ID NO: 33053 - DNA, 120 bp, Artificial Sequence
  ENSG00000049618_3 (sequence is synthesized)
caacagcagcagcagcagcagcagcaacagcaacatcccatttccaacaacaacagcttgggcggcgcgggcggcggcgcgcctcagcccggccccgacatggagcagccgcaacatgga

SEQ ID NO: 33054 - DNA, 120 bp, Artificial Sequence
  ENSG00000049618_4 (sequence is synthesized)
ccgcaacatggaggcgccaaggacagtgctgcgggcggccaggccgaccccccgggcccgccgctgctgagcaagccgggcgacgaggacgacgcgccgcccaagatgggggagccggcg

SEQ ID NO: 33055 - DNA, 120 bp, Artificial Sequence
  ENSG00000049618_5 (sequence is synthesized)
gagcacccgggcttgggcgccctgggcacgcagcagccgccggtcgccgtgcccgggggcggcggcggcccggcggccgtcccggagtttaataattactatggcagcgctgcccctgcg

SEQ ID NO: 33056 - DNA, 120 bp, Artificial Sequence
  ENSG00000049618_6 (sequence is synthesized)
agcggcggccccggcggccgcgctgggccttgctttgatcaacatggcggacaacaaagccccgggatggggatgatgcactccgcctccgccgccgccgccggggcccccggcagcatg

SEQ ID NO: 33057 - DNA, 120 bp, Artificial Sequence
  ENSG00000049618_7 (sequence is synthesized)
gaccccctgcagaactcccacgaagggtaccccaacagccagtgcaaccattatccgggctacagccggcccggcgcgggcggcggcggcggcggcggcggcggaggaggaggaggcagc

SEQ ID NO: 33058 - DNA, 120 bp, Artificial Sequence
  ENSG00000049618_8 (sequence is synthesized)
cagcggaggaggaggaggaggaggaggagcaggagcaggaggagcaggagcgggagctgtggcggcggcggccgcggcggcggcggcagcagcaggaggcggcggcggcggcggctatgg

SEQ ID NO: 33059 - DNA, 80 bp, Artificial Sequence
  ENSG00000049618_9 (sequence is synthesized)
tcgtccgcggggtacggggtgctgagctccccccggcagcagggcggcggcatgatgatgggccccgggggcggcggggc

SEQ ID NO: 33060 - DNA, 120 bp, Artificial Sequence
  ENSG00000049618_10 (sequence is synthesized)
ggcttccagcgcttcgccggccagaaccagcacccgtcgggggccaccccgaccctcaatcagctgctcacctcgcccagccccatgatgcggagctacggcggcagctaccccgagtac

SEQ ID NO: 33061 - DNA, 80 bp, Artificial Sequence
  ENSG00000049618_11 (sequence is synthesized)
ggggcggcggcgggcggccagcaggcggccgcgggcatgggcttgggcaaggacatgggcgcccagtacgccgctgccag

SEQ ID NO: 33062 - DNA, 120 bp, Artificial Sequence
  ENSG00000049618_12 (sequence is synthesized)
gcccagtacgccgctgccagcccggcctgggcggccgcgcaacaaaggagtcacccggcgatgagccccggcacccccggaccgaccatgggcagatcccagggcagcccaatggatcca

SEQ ID NO: 33063 - DNA, 120 bp, Artificial Sequence
  ENSG00000049618_13 (sequence is synthesized)
atggtgatgaagagacctcagttgtatggcatgggcagtaaccctcattctcagcctcagcagagcagtccgtacccaggaggttcctatggccctccaggcccacagcggtatccaatt

SEQ ID NO: 33064 - DNA, 120 bp, Artificial Sequence
  ENSG00000049618_14 (sequence is synthesized)
ggcatccagggtcggactcccggggccatggccggaatgcagtaccctcagcagcagatgccacctcagtatggacagcaaggtgtgagtggttactgccagcagggccaacagccatat

SEQ ID NO: 33065 - DNA, 120 bp, Artificial Sequence
  ENSG00000049618_15 (sequence is synthesized)
tacagccagcagccgcagcccccgcacctcccaccccaggcgcagtatctgccgtcccagtcccagcagaggtaccagccgcagcaggacatgtctcaggaaggctatggaactagatct

SEQ ID NO: 33066 - DNA, 120 bp, Artificial Sequence
  ENSG00000049618_16 (sequence is synthesized)
caacctcctctggcccccggaaaacctaaccatgaagacttgaacttaatacagcaagaaagaccatcaagtttaccagatctgtctggctccattgatgacctccccacgggaacggaa

SEQ ID NO: 33067 - DNA, 120 bp, Artificial Sequence
  ENSG00000049618_17 (sequence is synthesized)
gcaactttgagctcagcagtcagtgcatccgggtccacgagcagccaaggggatcagagcaacccggcgcagtcgcctttctccccacatgcgtcccctcatctctccagcatcccgggg

SEQ ID NO: 33068 - DNA, 120 bp, Artificial Sequence
  ENSG00000049618_18 (sequence is synthesized)
ggcccatctccctctcctgttggctctcctgtaggaagcaaccagtctcgatctggcccaatctctcctgcaagtatcccaggtagtcagatgcctccgcagccacccgggagccagtca

SEQ ID NO: 33069 - DNA, 120 bp, Artificial Sequence
  ENSG00000049618_19 (sequence is synthesized)
gaatccagttcccatcccgccttgagccagtcaccaatgccacaggaaagaggttttatggcaggcacacaaagaaaccctcagatggctcagtatggacctcaacagacaggaccatcc

SEQ ID NO: 33070 - DNA, 120 bp, Artificial Sequence
  ENSG00000049618_20 (sequence is synthesized)
atgtcgcctcatccttctcctgggggccagatgcatgctggaatcagtagctttcagcagagtaactcaagtgggacttacggtccacagatgagccagtatggaccacaaggtaactac

SEQ ID NO: 33071 - DNA, 120 bp, Artificial Sequence
  ENSG00000049618_21 (sequence is synthesized)
tccagacccccagcgtatagtggggtgcccagtgcaagctacagcggcccagggcccggtatgggtatcagtgccaacaaccagatgcatggacaagggccaagccagccatgtggtgct

SEQ ID NO: 33072 - DNA, 120 bp, Artificial Sequence
  ENSG00000049618_22 (sequence is synthesized)
gtgcccctgggacgaatgccatcagctgggatgcagaacagaccatttcctggaaatatgagcagcatgacccccagttctcctggcatgtctcagcagggagggccaggaatggggccg

SEQ ID NO: 33073 - DNA, 120 bp, Artificial Sequence
  ENSG00000049618_23 (sequence is synthesized)
ccaatgccaactgtgaaccgtaaggcacaggaggcagccgcagcagtgatgcaggctgctgcgaactcagcacaaagcaggcaaggcagtttccccggcatgaaccagagtggacttatg

SEQ ID NO: 33074 - DNA, 120 bp, Artificial Sequence
  ENSG00000049618_24 (sequence is synthesized)
gcttccagctctccctacagccagcccatgaacaacagctctagcctgatgaacacgcaggcgccgccctacagcatggcgcccgccatggtgaacagctcggcagcatctgtgggtctt

SEQ ID NO: 33075 - DNA, 120 bp, Artificial Sequence
  ENSG00000049618_25 (sequence is synthesized)
gcagatatgatgtctcctggtgaatccaaactgcccctgcctctcaaagcagacggcaaagaagaaggcactccacagcccgagagcaagtcaaagaagtccagctcctccaccactact

SEQ ID NO: 33076 - DNA, 120 bp, Artificial Sequence
  ENSG00000049618_26 (sequence is synthesized)
ggggagaagatcacgaaggtgtacgagctggggaatgagccagagagaaagctctgggtcgaccgatacctcaccttcatggaagagagaggctctcctgtctcaagtctgcctgccgtg

SEQ ID NO: 33077 - DNA, 120 bp, Artificial Sequence
  ENSG00000049618_27 (sequence is synthesized)
ggcaagaagcccctggacctgttccgactctacgtctgcgtcaaagagatcgggggtttggcccaggttaataaaaacaagaagtggcgtgagctggcaaccaacctaaacgttggcacc

SEQ ID NO: 33078 - DNA, 120 bp, Artificial Sequence
  ENSG00000049618_28 (sequence is synthesized)
tcaagcagtgcagcgagctccctgaaaaagcagtatattcagtacctgtttgcctttgagtgcaagatcgaacgtggggaggagcccccgccggaagtcttcagcaccggggacaccaaa

SEQ ID NO: 33079 - DNA, 120 bp, Artificial Sequence
  ENSG00000049618_29 (sequence is synthesized)
aagcagcccaagctccagccgccatctcctgctaactcgggatccttgcaaggcccacagaccccccagtcaactggcagcaattccatggcagaggttccaggtgacctgaagccacct

SEQ ID NO: 33080 - DNA, 120 bp, Artificial Sequence
  ENSG00000049618_30 (sequence is synthesized)
accccagcctccacccctcacggccagatgactccaatgcaaggtggaagaagcagtacaatcagtgtgcacgacccattctcagatgtgagtgattcatccttcccgaaacggaactcc

SEQ ID NO: 33081 - DNA, 120 bp, Artificial Sequence
  ENSG00000049618_31 (sequence is synthesized)
atgactccaaacgccccctaccagcagggcatgagcatgcccgatgtgatgggcaggatgccctatgagcccaacaaggacccctttgggggaatgagaaaagtgcctggaagcagcgag

SEQ ID NO: 33082 - DNA, 120 bp, Artificial Sequence
  ENSG00000049618_32 (sequence is synthesized)
ccctttatgacgcaaggacagatgcccaacagcagcatgcaggacatgtacaaccaaagtccctccggagcaatgtctaacctgggcatggggcagcgccagcagtttccctatggagcc

SEQ ID NO: 33083 - DNA, 120 bp, Artificial Sequence
  ENSG00000049618_33 (sequence is synthesized)
ggccaaggccctccctcgggacagccgccgtatggagggcaccagcccggcctgtacccacagcagccgaattacaaacgccatatggacggcatgtacgggcccccagccaagcgccac

SEQ ID NO: 33084 - DNA, 120 bp, Artificial Sequence
  ENSG00000049618_34 (sequence is synthesized)
gagggcgacatgtacaacatgcagtacagcagccagcagcaggagatgtacaaccagtatggaggctcctactcgggcccggaccgcaggcccatccagggccagtacccgtatccctac

SEQ ID NO: 33085 - DNA, 120 bp, Artificial Sequence
  ENSG00000049618_35 (sequence is synthesized)
agcagggagaggatgcagggcccggggcagatccagacacacggaatcccgcctcagatgatgggcggcccgctgcagtcgtcctccagtgaggggcctcagcagaatatgtgggcagca

SEQ ID NO: 33086 - DNA, 120 bp, Artificial Sequence
  ENSG00000049618_36 (sequence is synthesized)
cgcaatgatatgccttatccctaccagaacaggcagggccctggcggccctacacaggcgcccccttacccaggcatgaaccgcacagacgatatgatggtacccgatcagaggataaat

SEQ ID NO: 33087 - DNA, 120 bp, Artificial Sequence
  ENSG00000049618_37 (sequence is synthesized)
catgagagccagtggccttctcacgtcagccagcgtcagccttatatgtcgtcctcagcctccatgcagcccatcacacgcccaccacagccgtcctaccagacgccaccgtcactgcca

SEQ ID NO: 33088 - DNA, 120 bp, Artificial Sequence
  ENSG00000049618_38 (sequence is synthesized)
aatcacatctccagggcgcccagcccagcgtccttccagcgctccctggagaaccgcatgtctccaagcaagtctccttttctgccgtctatgaagatgcagaaggtcatgcccacggtc

SEQ ID NO: 33089 - DNA, 120 bp, Artificial Sequence
  ENSG00000049618_39 (sequence is synthesized)
cccacatcccaggtcaccgggccaccaccccaaccacccccaatcagaagggagatcacctttcctcctggctcagtagaagcatcacaaccagtcttgaaacaaaggcgaaagattacc

SEQ ID NO: 33090 - DNA, 120 bp, Artificial Sequence
  ENSG00000049618_40 (sequence is synthesized)
tccaaagatatcgttactcctgaggcgtggcgtgtgatgatgtcccttaaatcaggtcttttggctgagagtacgtgggctttggacactattaatattcttctgtatgatgacagcact

SEQ ID NO: 33091 - DNA, 120 bp, Artificial Sequence
  ENSG00000049618_41 (sequence is synthesized)
gttgctactttcaatctctcccagttgtctggatttctcgaacttttagtcgagtactttagaaaatgcctgattgacatttttggaattcttatggaatatgaagtgggagaccccagc

SEQ ID NO: 33092 - DNA, 120 bp, Artificial Sequence
  ENSG00000049618_42 (sequence is synthesized)
caaaaagcacttgatcacaacgcagcaaggaaggatgacagccagtccttggcagacgattctgggaaagaggaggaagatgctgaatgtattgatgacgacgaggaagacgaggaggat

SEQ ID NO: 33093 - DNA, 120 bp, Artificial Sequence
  ENSG00000049618_43 (sequence is synthesized)
gaggaggaagacagcgagaagacagaaagcgatgaaaagagcagcatcgctctgactgccccggacgccgctgcagacccaaaggagaagcccaagcaagccagtaagttcgacaagctg

SEQ ID NO: 33094 - DNA, 120 bp, Artificial Sequence
  ENSG00000049618_44 (sequence is synthesized)
ccaataaagatagtcaaaaagaacaacctgtttgttgttgaccgatctgacaagttggggcgtgtgcaggagttcaatagtggccttctgcactggcagctcggcgggggtgacaccacc

SEQ ID NO: 33095 - DNA, 120 bp, Artificial Sequence
  ENSG00000049618_45 (sequence is synthesized)
gagcacattcagactcactttgagagcaagatggaaattcctcctcgcaggcgcccacctccccccttaagctccgcaggtagaaagaaagagcaagaaggcaaaggcgactctgaagag

SEQ ID NO: 33096 - DNA, 120 bp, Artificial Sequence
  ENSG00000049618_46 (sequence is synthesized)
cagcaagagaaaagcatcatagcaaccatcgatgacgtcctctctgctcggccaggggcattgcctgaagacgcaaaccctgggccccagaccgaaagcagtaagtttccctttggtatc

SEQ ID NO: 33097 - DNA, 120 bp, Artificial Sequence
  ENSG00000049618_47 (sequence is synthesized)
cagcaagccaaaagtcaccggaacatcaagctgctggaggacgagcccaggagccgagacgagactcctctgtgtaccatcgcgcactggcaggactcgctggctaagcgatgcatctgt

SEQ ID NO: 33098 - DNA, 120 bp, Artificial Sequence
  ENSG00000049618_48 (sequence is synthesized)
gtgtccaatattgtccgtagcttgtcattcgtgcctggcaatgatgccgaaatgtccaaacatccaggcctggtgctgatcctggggaagctgattcttcttcaccacgagcatccagag

SEQ ID NO: 33099 - DNA, 120 bp, Artificial Sequence
  ENSG00000049618_49 (sequence is synthesized)
agaaagcgagcaccgcagacctatgagaaagaggaggatgaggacaagggggtggcctgcagcaaagatgagtggtggtgggactgcctcgaggtcttgagggataacacgttggtcacg

SEQ ID NO: 33100 - DNA, 120 bp, Artificial Sequence
  ENSG00000049618_50 (sequence is synthesized)
ttggccaacatttccgggcagctagacttgtctgcttacacggaaagcatctgcttgccaattttggatggcttgctgcactggatggtgtgcccgtctgcagaggcacaagatcccttt

SEQ ID NO: 33101 - DNA, 120 bp, Artificial Sequence
  ENSG00000049618_51 (sequence is synthesized)
ccaactgtgggacccaactcggtcctgtcgcctcagagacttgtgctggagaccctctgtaaactcagtatccaggacaataatgtggacctgatcttggccactcctccatttagtcgt

SEQ ID NO: 33102 - DNA, 120 bp, Artificial Sequence
  ENSG00000049618_52 (sequence is synthesized)
caggagaaattctatgctacattagttaggtacgttggggatcgcaaaaacccagtctgtcgagaaatgtccatggcgcttttatcgaaccttgcccaaggggacgcactagcagcaagg

SEQ ID NO: 33103 - DNA, 120 bp, Artificial Sequence
  ENSG00000049618_53 (sequence is synthesized)
gccatagctgtgcagaaaggaagcattggaaacttgataagcttcctagaggatggggtcacgatggcccagtaccagcagagccagcacaacctcatgcacatgcagcccccgcccctg

SEQ ID NO: 33104 - DNA, 120 bp, Artificial Sequence
  ENSG00000049618_54 (sequence is synthesized)
gaaccacctagcgtagacatgatgtgcagggcggccaaggctttgctagccatggccagagtggacgaaaaccgctcggaattccttttgcacgagggccggttgctggatatctcgata

SEQ ID NO: 33105 - DNA, 120 bp, Artificial Sequence
  ENSG00000049618_55 (sequence is synthesized)
tcagctgtcctgaactctctggttgcatctgtcatctgtgatgtactgtttcagattgggcagttatgacataagtgagaaggcaagcatgtgtgagtgaagattagagggtcacatata

SEQ ID NO: 33106 - DNA, 120 bp, Artificial Sequence
  ENSG00000049618_56 (sequence is synthesized)
actggctgttttctgttcttgtttatccagcgtaggaagaaggaaaagaaaatctttgctcctctgccccattcactatttaccaattgggaattaaagaaataattaatttgaacagtt

SEQ ID NO: 33107 - DNA, 120 bp, Artificial Sequence
  ENSG00000049618_57 (sequence is synthesized)
atgaaattaatatttgctgtctgtgtgtataagtacatcctttggggttttttttttctcttttttttaaccaaagttgctgtctagtgcattcaaaggtcactttttgttcttcacaga

SEQ ID NO: 33108 - DNA, 120 bp, Artificial Sequence
  ENSG00000049618_58 (sequence is synthesized)
tctttttaatgttctttcccatgttgtattgcatttttgggggaagcaaattgactttaaagaaaaaagttgtggcaaaagatgctaagatgcgaaaatttcaccacactgagtcaaaaa

SEQ ID NO: 33109 - DNA, 120 bp, Artificial Sequence
  ENSG00000049618_59 (sequence is synthesized)
ggtgaaaaattatccatttcctatgcgttttactcctcagagaatgaaaaaaactgcatcccatcacccaaagttctgtgcaatagaaatttctacagatacaggtataggggctcaagg

SEQ ID NO: 33110 - DNA, 120 bp, Artificial Sequence
  ENSG00000049618_60 (sequence is synthesized)
aggtatgtcggtcagtagtcaaaactatgaaatgatactggtttctccacaggaatatggttccattaggctgggagcaaaaacaatgttttttaagattgagaatacatacctgacaac

SEQ ID NO: 33111 - DNA, 120 bp, Artificial Sequence
  ENSG00000049618_61 (sequence is synthesized)
gatccggaaactgctcctcaccactcccgtcatgcctgctgtcggcgtttgaccttccacgtgacagttcttcacaattcctttcatcattttttaaatattttttttactgcctatggg

SEQ ID NO: 33112 - DNA, 81 bp, Artificial Sequence
  ENSG00000049618_62 (sequence is synthesized)
ctttcatcattttttaaatattttttttactgcctatgggctgtgatgtatatagaagttgtacattaaacatacccaaag

SEQ ID NO: 33113 - DNA, 120 bp, Artificial Sequence
  ENSG00000049618_63 (sequence is synthesized)
tctttttcatgatgtggtaactacgaagtgatggtagatttaaataattttttatttttattttatatattttttcattagggccatatctccaaaaaaagaaagaaaaaatacaaaaaa

SEQ ID NO: 33114 - DNA, 120 bp, Artificial Sequence
  ENSG00000049618_64 (sequence is synthesized)
gtttctgtatgtataaagtcatgctcgatttcaggagagcagctgatcacaatttgcttcatgaatcaaggtgtggaaatggttatatatggattgatttagaaaatggttaccagtaca

SEQ ID NO: 33115 - DNA, 120 bp, Artificial Sequence
  ENSG00000049618_65 (sequence is synthesized)
gtcaaaaaagagaaaatgaaaaaaatacaactaaaaggaagaaacacaacttcaaagatttttcagtgatgagaatccacatttgtatttcaagataatgtagtttaaaaaaaaaaaaaa

SEQ ID NO: 33116 - DNA, 120 bp, Artificial Sequence
  ENSG00000049618_66 (sequence is synthesized)
cacttggtcaaacaaataaccactgctgcagtggaaatgaactaaaatagtttttatggaaagctgaagaatgaaataattttggaaaactatactctaccaaaaccttggaagaagttg

SEQ ID NO: 33117 - DNA, 120 bp, Artificial Sequence
  ENSG00000049618_67 (sequence is synthesized)
tgggaattacgccgatggcccgaaatcaaggcagaggcgaacgttctgaaaattacataactcctgggagagaccgtgcttttgcagattgcctaaatattttctttctccgtcggctcc

SEQ ID NO: 33118 - DNA, 120 bp, Artificial Sequence
  ENSG00000049618_68 (sequence is synthesized)
ttgtaacctctgaggccaatagacaactttgtttcccagcccttctccctcttttgtctgctcgtcagactcgttttccacctttgtatcgttccttttagacgtgaaaacaaacatgcg

SEQ ID NO: 33119 - DNA, 120 bp, Artificial Sequence
  ENSG00000049618_69 (sequence is synthesized)
tgaaaacaaacatgcgaacgcccggttggcaaggagacagcggcccggggggaaagtgcaggttccggccgccccacgccgccgcgctccgagcggccgccgagccgccccggccccggc

SEQ ID NO: 33120 - DNA, 120 bp, Artificial Sequence
  ENSG00000049618_70 (sequence is synthesized)
gcccaagcccggctgggtcccgcgaggctgcgccggggcgggcggcggcggcccggggacgagtccagtccgcgttttgcgagtgcgcgggagtaatgcgagcgaagtggataatagttg

SEQ ID NO: 33121 - DNA, 120 bp, Artificial Sequence
  ENSG00000049618_71 (sequence is synthesized)
ctcgagctcgcccgctgcctctcaagccatgctgggcccgataggctcagctagtcgtgtatttacccatatccgggctagagaggaaaagagaaaagtttcatttaaacctgaactaaa

SEQ ID NO: 33122 - DNA, 120 bp, Artificial Sequence
  ENSG00000049618_72 (sequence is synthesized)
aactttcaccatgaaagcacacagcaggagcaggcccagagcgtaaggcgtgcccggcccggcgctccggcggggcctgcggagggggagggggtcgcggcttcccggcgggccgcgtgg

SEQ ID NO: 33123 - DNA, 120 bp, Artificial Sequence
  ENSG00000049618_73 (sequence is synthesized)
ggtcgcggcttcccggcgggccgcgtggatgcgcacaggaggggccgcggcctgaaaagtgggggttattgtctccccccgccccccgcccggcctcgccacgccgcggcgatcatggcc

SEQ ID NO: 33124 - DNA, 120 bp, Artificial Sequence
  ENSG00000049618_74 (sequence is synthesized)
ccatggccggaatgcagtaccctcagcagcaggactctggagatgccacatggaaagaaacattctggttgatgccacctcagtatggacagcaaggtgtgagtggttactgccagcagg

SEQ ID NO: 33125 - DNA, 120 bp, Artificial Sequence
  ENSG00000049618_75 (sequence is synthesized)
ttccacatgttaagaataaatgtacattaaatcttgttaagcactgtgatgggtgttcttgaatactgttctagtttccttaaagtggtttcctagtaatcaagttatttacaagaaata

SEQ ID NO: 33126 - DNA, 120 bp, Artificial Sequence
  ENSG00000049618_76 (sequence is synthesized)
ggggaatgcagcagtgtattcacattataaaaccctacatttggaagagacctttaggggttacctactttagagtggggagcaacagtttgattttctcaaattacttagctaattagt

SEQ ID NO: 33127 - DNA, 120 bp, Artificial Sequence
  ENSG00000049618_77 (sequence is synthesized)
ctttctttgaagcaattaactctaacgacattgaggtatgatcattttcagtatttatgggaggtggctgctgacccacttgaggtgagatctcagaagcttaactggcctgaaaatgta

SEQ ID NO: 33128 - DNA, 120 bp, Artificial Sequence
  ENSG00000049618_78 (sequence is synthesized)
acattctgccttttactaactccatcttagtttaatcaaagttcaatctattccttgtttcttctgtgtgcctcagagttattttgcatttagtttactccaccgtgtataatatttata

SEQ ID NO: 33129 - DNA, 120 bp, Artificial Sequence
  ENSG00000049618_79 (sequence is synthesized)
ctgtgcaatgttaaaaaagaatctgttatattgtatgtggtgtacatagtgcaaagtgatgatttctatttcagggcatattatggttctcatattccttcctacctggtgcacagtagc

SEQ ID NO: 33130 - DNA, 120 bp, Artificial Sequence
  ENSG00000049618_80 (sequence is synthesized)
tttttaatactagtcacttctaatttaaactttctcttcctgggtcattgactgttactgtgtaataatcgatttctttgaaactgctgcataattatgctgttagtggacctctacctc

SEQ ID NO: 33131 - DNA, 120 bp, Artificial Sequence
  ENSG00000049618_81 (sequence is synthesized)
ttctcttccctctcccaatcacagtatactcagaatccccagcccctcgcatacattgtgtcggttcacattactcacagtaatatatggaagagttagacaagaacatgcagttacagt

SEQ ID NO: 33132 - DNA, 120 bp, Artificial Sequence
  ENSG00000049618_82 (sequence is synthesized)
cattgtgagacgtgactctccagtgtcacgaggaaaaaaatcatcttttctgcaaacagtctctcatctgtcaactcccacattactgagtcaaacagtcttcttacataacaatgcaac

SEQ ID NO: 33133 - DNA, 120 bp, Artificial Sequence
  ENSG00000049618_83 (sequence is synthesized)
caaatatatgttgaattaaagacccatttataattctgctttaaatacatctgcttgctaagaacagatttcagtgctccaagcttcaaatatggagatttgtaagagggaattcaatat

SEQ ID NO: 33134 - DNA, 120 bp, Artificial Sequence
  ENSG00000049618_84 (sequence is synthesized)
tattctaatttctctcttacagagtacaaataaaaggtgtatacaaactccgaacatatccagtattccaattcctttgtcaatcagaagagtaaaataattaacaaaagactgttgtta

SEQ ID NO: 33135 - DNA, 120 bp, Artificial Sequence
  ENSG00000049618_85 (sequence is synthesized)
tggtttgcattgtaaccgatacgcagagtctgaccgttgggcaacaagtttttctatcctgatgcgcaacacagtctctagagactaatccaggaagactttagcctcctttccatattc

SEQ ID NO: 33136 - DNA, 120 bp, Artificial Sequence
  ENSG00000049618_86 (sequence is synthesized)
tcacccccgaatcaagatttacagaagcccacgaagaatttacagcctgcttgagatcatcttgcctataaactgagttattgctttgtcctaaaaattagtcggtttttttttttctat

SEQ ID NO: 33137 - DNA, 90 bp, Artificial Sequence
  ENSG00000049618_87 (sequence is synthesized)
ttgctttgtcctaaaaattagtcggtttttttttttctatgaggcttttcagaaatttacaggatgcccagactttacatgtgtggtgca

SEQ ID NO: 33138 - DNA, 120 bp, Artificial Sequence
  ENSG00000049618_88 (sequence is synthesized)
gtgtaatagctgcttcttggagccaagtgcatgctcatcaaccttccttgctgggaaaaccaactcacagcattttttaaaagccgagaaacgcctaggcttgtaaagtttcatctcctg

SEQ ID NO: 33139 - DNA, 120 bp, Artificial Sequence
  ENSG00000049618_89 (sequence is synthesized)
cctgtgctttcctgttcttaattaaatgctgaagagtcttgtcgggatattacttttcatcctgtctctgccatggagactttgggatcactgggtggtctcttggtcacttgcaggtgt

SEQ ID NO: 33140 - DNA, 120 bp, Artificial Sequence
  ENSG00000049618_90 (sequence is synthesized)
tttaggtaggatgttgcaatctgcaatctaggaacatttgacgactttttcaagttgaagtcttggcctcggaggatgcagcctttggactcaaggatctgtctggctccattgatgacc

SEQ ID NO: 33141 - DNA, 120 bp, Artificial Sequence
  ENSG00000049618_91 (sequence is synthesized)
tccccaatgtcccccagctctgctagcatctcctcatttcatggagatgaaagtgatagcattagcagcccaggctggccaaagactccatcaagccctaagtccagctcctccaccact

SEQ ID NO: 33142 - DNA, 120 bp, Artificial Sequence
  ENSG00000049618_92 (sequence is synthesized)
gacactgcctgccttttccagagtattgctttcaggaactcttgctctgcaacattccagagatccagcgctgcccactctgatctgagcaggacaagaatctactggtagcacacatgc

SEQ ID NO: 33143 - DNA, 120 bp, Artificial Sequence
  ENSG00000049618_93 (sequence is synthesized)
atagtgagattgctctacaaagggcagcttcccctcactgtctgtcagtaaaagaccaaaaggcatatgcaacatgttgtgatttaggttgaagtcttggcctcggaggatgcagccttt

SEQ ID NO: 33144 - DNA, 120 bp, Artificial Sequence
  ENSG00000049618_94 (sequence is synthesized)
gcttgtactcctaagatgaaacatgagtagccaaaactttgaaaaattttttaaaggtatgctctttacgtaagaagagcttgactacaatggtggactcttttgacgcttttgccacct

SEQ ID NO: 33145 - DNA, 120 bp, Artificial Sequence
  ENSG00000049618_95 (sequence is synthesized)
tgctatcatttctgtttttagggcaatctctacaccactgtgcagttaaaatctctcccccatctcgttactaacagtcagagaattgacattgtgtgacagttatctgcttcaaatcag

SEQ ID NO: 33146 - DNA, 120 bp, Artificial Sequence
  ENSG00000049618_96 (sequence is synthesized)
agaatactcttgacctctttgcaagagtgaagagaagtctgacagggcgtaagacaaaactaacaagactaagtcaccaagaccgccttgtaggtctgcaccaccctggggacgggcgac

SEQ ID NO: 33147 - DNA, 120 bp, Artificial Sequence
  ENSG00000049618_97 (sequence is synthesized)
tgcatgctagggacacgtgcagctgatctaagtgcccatcctcctctgtaacgtaaaaagcccaaccaacaagaagtggaagtctgatgtctactgtggcattttaatgtagggaaattg

SEQ ID NO: 33148 - DNA, 120 bp, Artificial Sequence
  ENSG00000049618_98 (sequence is synthesized)
gtatgtttttaatagaacctaattaccaaagttaaagagtagggtcggggagagttttggaagtgctttctcccatattcattatatcagaaaatttaggtcaaagaagtttttttaaaa

SEQ ID NO: 33149 - DNA, 120 bp, Artificial Sequence
  ENSG00000049618_99 (sequence is synthesized)
aacattcccacactgcccatttgtttttcatttcttaacctttgggtttttatgtgaggttactaagtagtgttaatagtcagaagttaattttgcttgcttttgtaattcctgttctta

SEQ ID NO: 33150 - DNA, 120 bp, Artificial Sequence
  ENSG00000049618_100 (sequence is synthesized)
tttcaagttccccctttcttgcttatattcctctatataaataataacctggaacacttgacatgattaaaaatgtgtaatttacttgcagaacttgtaatatttggaattgtaaagggg

SEQ ID NO: 33151 - DNA, 120 bp, Artificial Sequence
  ENSG00000049618_101 (sequence is synthesized)
tgtattaaagagttacctagcaatagaattcagcctttctctccaggaaataatctgttttacacaaacatgaaaagttatagccccaccccttacataaatgcattagtagaaatgact

SEQ ID NO: 33152 - DNA, 120 bp, Artificial Sequence
  ENSG00000049618_102 (sequence is synthesized)
ccctctctctcccctctcctcctcttaggctccaccagtgaatctgcctaaacggcccgagaaggtggatcagttggcgaaagtgggaatcatactacttttctgcttctcagaaacttg

SEQ ID NO: 33153 - DNA, 120 bp, Artificial Sequence
  ENSG00000049618_103 (sequence is synthesized)
ctccatctatttaagacttgagaattacattatattttatgtaaattatttttattcaatctgtgtttgtataacaagtggacatatttcaagtattattggagattgttaaatatgcac

SEQ ID NO: 33154 - DNA, 120 bp, Artificial Sequence
  ENSG00000049618_104 (sequence is synthesized)
actaagttctctttctctttgggaattattagtattggaagatcctcaaattctctccatttggtagtggtggagacaaacatttcgaattcacatttcaggggaaatcgctggaagggc

SEQ ID NO: 33155 - DNA, 120 bp, Artificial Sequence
  ENSG00000049618_105 (sequence is synthesized)
agagcaaggggggtttgaagtactttttacatttagggaaacacctctaaatgtatgctcggaagtagctgcttcataaatgctctgtgcagattgtctctattgggaaactgttttaaa

SEQ ID NO: 33156 - DNA, 120 bp, Artificial Sequence
  ENSG00000049618_106 (sequence is synthesized)
tgtttcatgatgtttagttattttaacccattttataatctccacagtagcgttcttaaaagtcatgcctgatgattgcagtggatgagtagccaatgtgtggaaaatatcaagagtgtc

SEQ ID NO: 33157 - DNA, 120 bp, Artificial Sequence
  ENSG00000049618_107 (sequence is synthesized)
tgagactgtgcatatctcccatgatcttagactcttcaagacccttgaaccccctcctcaggttccgtaactacctaaagacaatgagtaccactttttacataaagtgatgtgtatttc

SEQ ID NO: 33158 - DNA, 120 bp, Artificial Sequence
  ENSG00000049618_108 (sequence is synthesized)
cagcgacctgttactctctgtcacatgttaaaatggatctcacgggaggattccctccttcagagactgcagggcgtggcttagccagtgtgtatcccgtgatgccccgtgatgcgttag

SEQ ID NO: 33159 - DNA, 120 bp, Artificial Sequence
  ENSG00000049618_109 (sequence is synthesized)
gattacattttttcatttcttctgccttccacctcctttctggcctctctgtctttgaaagttcatgtccctgtgtccggcggaacagccagtgagaggctgggctcgcctcctgtctga

SEQ ID NO: 33160 - DNA, 120 bp, Artificial Sequence
  ENSG00000049618_110 (sequence is synthesized)
gcttctgcgtcgttgatttctaggacctaattgaagggtgacattccatgataatttctcttgaaagatttatgaaagaggaacacatagaaactagtggtaaaaatgaaggtttttaaa

SEQ ID NO: 33161 - DNA, 120 bp, Artificial Sequence
  ENSG00000049618_111 (sequence is synthesized)
taaataaaatagcccttcctgatgctgcgttgagtgcttctccatcacagtttggtggatgttttacattcgagatgaaagtgaaaagcttgcaaacagcctgttagctggaagcctctt

SEQ ID NO: 33162 - DNA, 120 bp, Artificial Sequence
  ENSG00000049618_112 (sequence is synthesized)
ctttccctaatttccctaaccagtgctggcccaggtaacagaatattgggttgtgacatactatgttttgtctgacttgctggaataaaattacttgagagcattgaaaccacacaatca

SEQ ID NO: 33163 - DNA, 120 bp, Artificial Sequence
  ENSG00000049618_113 (sequence is synthesized)
gttttcacctaatatcagcagcgctcattttccccgtcttcctttggaccccagagccacagaaacaaccaacaacaagcagatggcccagtgccctgcctcagaagatttatgtattcc

SEQ ID NO: 33164 - DNA, 120 bp, Artificial Sequence
  ENSG00000049618_114 (sequence is synthesized)
taaggaatagccagcttaatggagattcacagagagggtttctttctattcttattattcagataattcagctattcgttattccgtacagaggaaatctgttcagtgaaaggccgtcca

SEQ ID NO: 33165 - DNA, 120 bp, Artificial Sequence
  ENSG00000049618_115 (sequence is synthesized)
tcctcacgatcttttgtatggggtggtagtgtatttttttactgcattgtacattttgaaacattgaatttttaataatttaaacatttatccagttttcctctacacgttgatctgatt

SEQ ID NO: 33166 - DNA, 120 bp, Artificial Sequence
  ENSG00000049618_116 (sequence is synthesized)
ttatcccaccttgattaagtgaaatgcataacagaggaggactggccatttcacattggctgtgcacctagcagcaggtacacgtgaatctgctgttactgcgttctgatctctcagaga

SEQ ID NO: 33167 - DNA, 120 bp, Artificial Sequence
  ENSG00000049618_117 (sequence is synthesized)
gacaggagtgacgcagagcgttacagcacagcccctgtgagcgttgggatgcgtctacctgactgcacaagagaagggccagaaatggtgggatcaccatcactccagtctccttggttt

SEQ ID NO: 33168 - DNA, 120 bp, Artificial Sequence
  ENSG00000049618_118 (sequence is synthesized)
gggcccatggagataaattaccagtgataacagcaaagcatttctccatcaaaatatacttttggagaaagcgaggacagcacaaatgatggccaggtctggtggtggaattttctgaac

SEQ ID NO: 33169 - DNA, 120 bp, Artificial Sequence
  ENSG00000049618_119 (sequence is synthesized)
ctcagcagccagtgcaaccagcattccagcaattctcttcaccgagttcaaacaactgtgttgtagacagtgtacggggccaaaaaaaaatcctcctgtgtagtgacaaattgttacagg

SEQ ID NO: 33170 - DNA, 120 bp, Artificial Sequence
  ENSG00000049618_120 (sequence is synthesized)
cttcagtgagcaagtaattatttaaatggagtcagtgtgagtataaatgtgacaactatttcttcacttaaaatgccaagggaaggaggatggtaagcagtgggaatttttccttctaaa

SEQ ID NO: 33171 - DNA, 120 bp, Artificial Sequence
  ENSG00000049618_121 (sequence is synthesized)
gagcttttttggttttgttttgtttcaattatttagattaaaaggttagaattatgtattactgtggacaaaattacaaatcactgtaatacaatacatgtgtgattggttaggttttac

SEQ ID NO: 33172 - DNA, 120 bp, Artificial Sequence
  ENSG00000049618_122 (sequence is synthesized)
ttatttgtgttgaattttataatattcattagtcatttgcacttgtctgcatataaaccgtcatcttaaagtggacatctaaattccaaaaactttatctcccatctgtggttctaagtt

SEQ ID NO: 33173 - DNA, 120 bp, Artificial Sequence
  ENSG00000049618_123 (sequence is synthesized)
tgcctcaccagacgctactctacaaaatgtagggcatttctcctactgccacctataaatagcacaggagcggccatatgtgctgctggaaccaggctttctcacagagagccctgggca

SEQ ID NO: 33174 - DNA, 120 bp, Artificial Sequence
  ENSG00000049618_124 (sequence is synthesized)
cattccagaagtgagtccttctgctaacctagcaccactcagtcccaaacatgaagtgtcccgttaatgccctgccagtacagggtatcccagctccagcaggcctttacgaagaaaaag

SEQ ID NO: 33175 - DNA, 120 bp, Artificial Sequence
  ENSG00000049618_125 (sequence is synthesized)
gcaatcacactaccacaaaaactgagaacctcctacctctggacttcctgcagtgcttgttaaaactaccgattctggggctcccttcagaattcttgaggtgggtccaggaatccgcat

SEQ ID NO: 33176 - DNA, 120 bp, Artificial Sequence
  ENSG00000049618_126 (sequence is synthesized)
ccctgaccacttccgcaggtagttttcatgcatgcaagctcaagtttgagaagcgccaatgtggaggtattttgctcaacagtctcctggcagatctgctgccagctttgtggggcatta

SEQ ID NO: 33177 - DNA, 120 bp, Artificial Sequence
  ENSG00000049618_127 (sequence is synthesized)
gggcaatctgcggagccttttttaaagctttttttttttttcttggcacataacgctacatgtgtcccgccttggttgagccagcactttcatttgcagaatgtagaatgggccctgttc

SEQ ID NO: 33178 - DNA, 120 bp, Artificial Sequence
  ENSG00000049618_128 (sequence is synthesized)
atcaaacctcaggtttattttcatttgaaataggcctggtttctggttcttcccactcatgtataaggctcatcattctctcccgtctctctccttccctctcttcctcactctgactct

SEQ ID NO: 33179 - DNA, 120 bp, Artificial Sequence
  ENSG00000049618_129 (sequence is synthesized)
tcacatctggttggtgcctcactcgcagcccctgcagcccagtgttgcgcagatggttttcacagtggggttctgtagaaattcagctgttattccctggatagctacactgattcctta

SEQ ID NO: 33180 - DNA, 120 bp, Artificial Sequence
  ENSG00000049618_130 (sequence is synthesized)
ctctagtcttgttcttccactaaaaagaaatctaaacccatatttttaacctgaaaatgtctgctgtatctgcaatgaatgtggagaaatcagttgttctatggtgaacctttgatgcta

SEQ ID NO: 33181 - DNA, 120 bp, Artificial Sequence
  ENSG00000049618_131 (sequence is synthesized)
aagcctaaatagaattgattggatttctgagcctagtgctagaaaatgtggtgttgactctggagctgctgtgggcctctgacctgggcattgagctgctgtaagggttgatgaccacag

SEQ ID NO: 33182 - DNA, 120 bp, Artificial Sequence
  ENSG00000049618_132 (sequence is synthesized)
gctctcagacagactgaaaggatcccagcacaactgcaaagtaatcagaaatcctttccttccaaaatttatttttaattatattgtttttgaagccatctgctgtgattgtcttccctt

SEQ ID NO: 33183 - DNA, 120 bp, Artificial Sequence
  ENSG00000049618_133 (sequence is synthesized)
attgttgactagactacgtgcaatagataaggttttcaaaagaaacactgtgaaatgtcaaataattttgcaaactatagattatttgcacttatgaaattgagaaggcactaaatcctc

SEQ ID NO: 33184 - DNA, 120 bp, Artificial Sequence
  ENSG00000049618_134 (sequence is synthesized)
taggacctaggtagaaaatacgcacacccagtatttgcctccaactcctgattagtaatttaaacatttgccttatttccacttgttgcctactcttttgaaggtataataattttgaaa

SEQ ID NO: 33185 - DNA, 120 bp, Artificial Sequence
  ENSG00000049618_135 (sequence is synthesized)
aaataatattgatataagttgaccttcataggtttgggtcttaagcacacagaatgactgcccttttttttagataaaaaaggattttgccagaatgcggtgctgtttgcatttcagaaa

SEQ ID NO: 33186 - DNA, 120 bp, Artificial Sequence
  ENSG00000049618_136 (sequence is synthesized)
ttaatatgctccccattacaatttcttttttcttttcttccttcaagggaaatgcaagggcctcctgcttcactctgtaacttgtgttggcaggagtacagtctgacgaatcacacatat

SEQ ID NO: 33187 - DNA, 120 bp, Artificial Sequence
  ENSG00000049618_137 (sequence is synthesized)
ctccacagcccgagagcaagtcaaaggtacttccttcgcctctgcacgcggtgtgaggtctgcctagcaaaaagctgccatgtcgttctctcttcactggtgttggccgacacttttttt

SEQ ID NO: 33188 - DNA, 120 bp, Artificial Sequence
  ENSG00000049618_138 (sequence is synthesized)
tcatttggtctcctctgcatgccttcattttgtgcaacatgtttgtagtcttcttttctttccccagccccttcatggtgtggatctgaaagttactagttcttatggcattaactcacg

SEQ ID NO: 33189 - DNA, 120 bp, Artificial Sequence
  ENSG00000049618_139 (sequence is synthesized)
gccagtctggggctggcggacgccccatgttttcttcccagcaccccaactatggcaactctcaggctcccatggtgcaccagcctgaccagtacgggcaaggcagtttccccggcatga

SEQ ID NO: 33190 - DNA, 120 bp, Artificial Sequence
  ENSG00000049618_140 (sequence is synthesized)
ccaaggcagacccggctctgaatcatcttcctgtcctttattaaaaattatgttctggtggaaaaaaaattagttttgagaaaatgcataactgtaacctaatctaactccatctctccc

SEQ ID NO: 33191 - DNA, 120 bp, Artificial Sequence
  ENSG00000049618_141 (sequence is synthesized)
tccctgtcatttgtgttctgaacctttcaagaaagcactctgccactttgttaaggcttattcaggagaaggattttatcaatcatttaatccttctagttggcacgtgcatggtatttt

SEQ ID NO: 33192 - DNA, 120 bp, Artificial Sequence
  ENSG00000049618_142 (sequence is synthesized)
tatcttgacctttgttttgttttgttttaatggtaagtgctactttgtgaaaacattgttgcctttgactgtgttattctatttaaactagcttataagtagatattcacttcagttgca

SEQ ID NO: 33193 - DNA, 120 bp, Artificial Sequence
  ENSG00000049618_143 (sequence is synthesized)
gtatattaaaatactaattggaatcatgtactttaaatatatcaagcagtttctagtttaaattagtctcattaaatactcctttaggttactgggttatatatttcagcttacagaatt

SEQ ID NO: 33194 - DNA, 120 bp, Artificial Sequence
  ENSG00000049618_144 (sequence is synthesized)
gcaccagcctgaccagtacggtaattctcatgtgcaagggattaattaggcccagatcctcctctcaggaggcttccatacctagaagaaccaagacatgcgtaaattattttaacatac

SEQ ID NO: 33195 - DNA, 120 bp, Artificial Sequence
  ENSG00000049618_145 (sequence is synthesized)
gacacaggaggcagtggaaggaaagcctcctggtctcgtccagccccgagagcgcgtgcagggggctccaggcacacacaggcgtctgggggtcgcaggcagaggcaccctggtcttcag

SEQ ID NO: 33196 - DNA, 120 bp, Artificial Sequence
  ENSG00000049618_146 (sequence is synthesized)
aagcctctcgattcactgccacccacacagcaggtggcctctccgattccagtcccatcattagggaaagtgtctggaaacatttttgttgttaaaggaaaataaaattattcccaacta

SEQ ID NO: 33197 - DNA, 120 bp, Artificial Sequence
  ENSG00000049618_147 (sequence is synthesized)
gggtggtctcttggtcacttgcaggtgttttaggtaggatgttgcaatctgcaatctaggaacatttgacgactttttcaagtaagctaaacaacacatgaaactatagtagattaacca

SEQ ID NO: 33198 - DNA, 120 bp, Artificial Sequence
  ENSG00000049618_148 (sequence is synthesized)
agacatgcatttaatccaactagtagcaatcagcgacggccactttggttttacactttttgttcactctgtgaactatataatttgaccataaattctaatttgttctcttgttgataa

SEQ ID NO: 33199 - DNA, 120 bp, Artificial Sequence
  ENSG00000049618_149 (sequence is synthesized)
ttcttatgcagataacttataacttatgtgtgtatttttatcagactcaaagcaacttaattttggaattctgcaaatttaattgatgatccattataacaacgtagggttagggttagg

SEQ ID NO: 33200 - DNA, 120 bp, Artificial Sequence
  ENSG00000049618_150 (sequence is synthesized)
gtcagttttcggtgttgatgtagagacagaatccaaaagtattttgaaatgtttaagagaaatggccttgaagagttctgaatattaacattcttctgtttttatgccttgtagtgttta

SEQ ID NO: 33201 - DNA, 120 bp, Artificial Sequence
  ENSG00000049618_151 (sequence is synthesized)
ccgcacgtgtgaatatgcatagaaattttcatgtagcaatttctgtgtttgtgatctgtatacagattttataaaaataatagcagggacatttctgaccttgatcattgttgttaactg

SEQ ID NO: 33202 - DNA, 120 bp, Artificial Sequence
  ENSG00000049618_152 (sequence is synthesized)
atgacatttgccagttacagtttaaattaagttgaatttattatttaggtgtttcataagaaggagtgagttgcatactaggatatactcttgtattccatatcctctcctcactccggc

SEQ ID NO: 33203 - DNA, 120 bp, Artificial Sequence
  ENSG00000049618_153 (sequence is synthesized)
gcttcctaacaggaagagcaaatgcattgtgaggataaacactgattggttactatctgtagagcaggattagcagctctttttagattttgagctgcaatctcttttaatagtgcttaa

SEQ ID NO: 33204 - DNA, 120 bp, Artificial Sequence
  ENSG00000049618_154 (sequence is synthesized)
attgatgcaggtcagtgaattttgtgtttacaggcttttaactccctagctttgtgaatactgaatttatggaaaagcttaattttctctgtatctcagaagggatatgtacaattaaaa

SEQ ID NO: 33205 - DNA, 120 bp, Artificial Sequence
  ENSG00000049618_155 (sequence is synthesized)
aagaaaacaatacaaattattttacataaactggagcaatttggaaacagtgtaataagggttgagtaaaagatttctccccatcgtcgtggcatattctactgttacacttacctgcca

SEQ ID NO: 33206 - DNA, 120 bp, Artificial Sequence
  ENSG00000049618_156 (sequence is synthesized)
acccaaataaatatcaacaaggcatatctatttgggagtcacttatgacttctgcccctccaacagtaatttctatttgctgcaaacatttgccaagtttacggcaaattttgaagttaa

SEQ ID NO: 33207 - DNA, 120 bp, Artificial Sequence
  ENSG00000049618_157 (sequence is synthesized)
actttgcctacctaatataatgagtgtgtggttcctatgctcccctaggtttgccaaaggtagtcttgatgtaaataatacattcaagtgagatgtcaagcaagtgtatggcttgacaga

SEQ ID NO: 33208 - DNA, 120 bp, Artificial Sequence
  ENSG00000049618_158 (sequence is synthesized)
ttttgcatgtagattgtagctagttatctcaggttatttattctttaaactttcaccaatttacccattttaaaaatagtgaatttgtattaaaaatagttggtaacataaaccatggca

SEQ ID NO: 33209 - DNA, 120 bp, Artificial Sequence
  ENSG00000049618_159 (sequence is synthesized)
ttcagcctacatttcatatgagatttatctgcctgtgcagagatgttacttaacttgaaggcctctttgtggaagaaagatttgtcttccaacattttgcgtcagcagtgctgaagtgcc

SEQ ID NO: 33210 - DNA, 120 bp, Artificial Sequence
  ENSG00000049618_160 (sequence is synthesized)
actctgtggaagttgcttcttatggccttcctgccacaaaaatgatatgtggtttaactctttcaggaactggggtcatttcatcccaaacgctgaccaaggttgtttataaactcttag

SEQ ID NO: 33211 - DNA, 120 bp, Artificial Sequence
  ENSG00000049618_161 (sequence is synthesized)
aaaaacataacataaatgaatcttactgccaagtgacaagtttctttttatgtttggttgtaaattatttcagaaacctcatttttgtttaaaaagcagatttgtatgaacaaaattgag

SEQ ID NO: 33212 - DNA, 120 bp, Artificial Sequence
  ENSG00000049618_162 (sequence is synthesized)
tgaacaaattgagtccatttaatattaaaatgttgaaagggcttacttggtgtagatgtttcaaacatcaaaaatctagcttttcggggctggatgcagtggctcatgcctttaatccca

SEQ ID NO: 33213 - DNA, 72 bp, Artificial Sequence
  ENSG00000049618_163 (sequence is synthesized)
gaaatcacttgaacctggaggcagaggttacagtgaaccttgactgcaccagtggactccagtgttggcaac

SEQ ID NO: 33214 - DNA, 120 bp, Artificial Sequence
  ENSG00000049618_164 (sequence is synthesized)
taatacagcaagaaagaccatcaagtttaccagttgaagtcttggcctcggaggatgcagcctttggactcaagtgttgagaaaaattcagaagaggacaggatgcagaaggcaagaaga

SEQ ID NO: 33215 - DNA, 120 bp, Artificial Sequence
  ENSG00000049618_165 (sequence is synthesized)
ggcaggtgcactccacacaagggcacaccttggaaggtcccatcacactctgcagactgatggactgccgtggtgctcctaaacaatctcacgtggtgacacatcctaagagcaaaaagt

SEQ ID NO: 33216 - DNA, 120 bp, Artificial Sequence
  ENSG00000049618_166 (sequence is synthesized)
gagctcagtaggacaaatggactgcaggttatagttttaggatactctttcctctccatttcattactttaagacttctacaatttccaaatgaaacaggaactttaaaagcatcagttc

SEQ ID NO: 33217 - DNA, 120 bp, Artificial Sequence
  ENSG00000049618_167 (sequence is synthesized)
acaaataattgtcttaaaaattataattatctttgaaaggaaaaaaaatacaacaacaaaacaaacaaacattaagcatgtaactcttagaaggagaccattgacaagattgttgaggag

SEQ ID NO: 33218 - DNA, 120 bp, Artificial Sequence
  ENSG00000049618_168 (sequence is synthesized)
ttattccgggcacaggcgctacctgtacctgaagcagtggtattcattgtttcctgataattggtcctattccacaaagttgccagcagtgaaagaataacaatttattttaaagtctgt

SEQ ID NO: 33219 - DNA, 120 bp, Artificial Sequence
  ENSG00000049618_169 (sequence is synthesized)
gtaaattattgataggcatgtgacttctgtttcttctgagaatcttcaggttcaagatgccagcttctgtgacccatttaactagaagttcctatgtctgaatttatttgttcgtctttt

SEQ ID NO: 33220 - DNA, 120 bp, Artificial Sequence
  ENSG00000049618_170 (sequence is synthesized)
tgttattatcaaaaggccatgctatgaaaatctgactttagacttttgctttttcccacttacccaaaatcggatttttcagaagttttcctcagctatcttattcaggtatttacagac

SEQ ID NO: 33221 - DNA, 120 bp, Artificial Sequence
  ENSG00000049618_171 (sequence is synthesized)
ttgctaaatggggaccataaagaaaatcttagtaaaaatattaggttgatcaaatgtgcaaagtatgcatatgagcagaattttttctttgtccaacttgatcttatcatttccttattg

SEQ ID NO: 33222 - DNA, 120 bp, Artificial Sequence
  ENSG00000049618_172 (sequence is synthesized)
tatatgtcttcattaagttttaacatctattctgaaaatactaatgtgatttcatgctactgctattcatctgtttcccatcttttaaataggatttgttgttcaccttcgagtgggcat

SEQ ID NO: 33223 - DNA, 120 bp, Artificial Sequence
  ENSG00000049618_173 (sequence is synthesized)
aagttaatcttctcttcattcagttgtgctgtagctatgtgttaaaatctccagggtccccttttgttttatttcctttacaaaaaaagcttcagcatttatacagttggtaaattctca

SEQ ID NO: 33224 - DNA, 120 bp, Artificial Sequence
  ENSG00000049618_174 (sequence is synthesized)
agtacaaagaaggaagtgaaaatcctcccaaatctgatcacctcaaataactactgttaatattttattcagcaccagtctatacctgttaggcatttaaaaaggcacgtatatacaagt

SEQ ID NO: 33225 - DNA, 120 bp, Artificial Sequence
  ENSG00000049618_175 (sequence is synthesized)
gtattttgtatgtataaataagcctgcatgctcatataatctttataatgtttattttctgttgttacttgattttcgttcaatcttttcaataaaattgtactgtttatattaatatga

SEQ ID NO: 33226 - DNA, 120 bp, Artificial Sequence
  ENSG00000049618_176 (sequence is synthesized)
agattgatgttaaagagaattagggggcattgcacggattttctgctttaatttttattgtttctttaatcacaggtataattttttttttcttttaaagatggaaaggtgagcttctta

SEQ ID NO: 33227 - DNA, 120 bp, Artificial Sequence
  ENSG00000049618_177 (sequence is synthesized)
aagtggacagaatacctgtttggtagaagggcagcaggaccagctgtatttgataggtgcactgtgtcataaatttgcagcaggttataacagatgtaagctctgaagtgaacttggcat

SEQ ID NO: 33228 - DNA, 120 bp, Artificial Sequence
  ENSG00000049618_178 (sequence is synthesized)
gagatctgaaaccacaaaagtttctcgttacagctatggcctccatttaaaatcggaaatgatcacgcttaactgtccttgagagcatttgtttaaagtcaatatttaacttaacactcc

SEQ ID NO: 33229 - DNA, 120 bp, Artificial Sequence
  ENSG00000049618_179 (sequence is synthesized)
aacaaccaaattaggataggagagcatcaggccatgcacatttgtgcttgaactaatgcctgagttgatgagcactgaccgtccaacactgttaatcactgcagttgttatcaaccagcc

SEQ ID NO: 33230 - DNA, 120 bp, Artificial Sequence
  ENSG00000049618_180 (sequence is synthesized)
ttaatcaatgtagagttatctgggataatattcactgtagtctttagtgtgtgtacacacacatacctctatttcttatgagagaacagtgactgtgtgtgtatgtgtatatgggataga

SEQ ID NO: 33231 - DNA, 120 bp, Artificial Sequence
  ENSG00000049618_181 (sequence is synthesized)
tgacagtagtaacattaaattgttcagaatgaatattagctggccaatgggaagaaatcaaaatgtaacattaagttgtgactggagtcagcattggaaacacagttggttgcaatggga

SEQ ID NO: 33232 - DNA, 120 bp, Artificial Sequence
  ENSG00000049618_182 (sequence is synthesized)
cataaccctgctttccaggaggacttgacatcttcttttcattaaaaagatattcaagatttagaaattttatattctatacatttatagaatgtataaatatatatagaaggagagaga

SEQ ID NO: 33233 - DNA, 120 bp, Artificial Sequence
  ENSG00000049618_183 (sequence is synthesized)
gcagtttaatgaacccccatgtacctgtcagtcagctaaaatagttatgaactcatggctaaacttacttcttagtctatgctctctcatttctgcctctctccaggttattttgaagca

SEQ ID NO: 33234 - DNA, 120 bp, Artificial Sequence
  ENSG00000049618_184 (sequence is synthesized)
gtcatgtaaaagcctactacttttaatgagcttaaacccctcctttgttcagaggtaggcttcaggtagcttccagcataatagctagaagagaggagcactgaagtttggggaaaatgc

SEQ ID NO: 33235 - DNA, 120 bp, Artificial Sequence
  ENSG00000049618_185 (sequence is synthesized)
ccgagtccactgggctatagacttttaaagaaatatttagaaataaaaaatggaaaaaggtcattttccctatagtatacaaacaactctctactttgagtgcaaaaactaaaacactta

SEQ ID NO: 33236 - DNA, 120 bp, Artificial Sequence
  ENSG00000049618_186 (sequence is synthesized)
atttccttgcttctaaggaaataagaccagaatcttctacttctttcttctctcatttaagccctcattatcagcctagaaaggcaatttttcaattgctagaaagtttattaataaggt

SEQ ID NO: 33237 - DNA, 120 bp, Artificial Sequence
  ENSG00000049618_187 (sequence is synthesized)
cataaacattgtacgagttctgtgttaacagaaaataagtatttaaaaactgtatactgcatttgctagagtaatgcgctttcatccttatgttaggtgaactgttgttgatcacatatt

SEQ ID NO: 33238 - DNA, 120 bp, Artificial Sequence
  ENSG00000049618_188 (sequence is synthesized)
tgcataaccagaattgctttattaactttcccttttcccctggaaaaaaaagggaaaatgcccttggaacattgtgccttcagcacactaaaagcagttctttctagttggtgctggggg

SEQ ID NO: 33239 - DNA, 120 bp, Artificial Sequence
  ENSG00000049618_189 (sequence is synthesized)
cttcccctgacttcttaaaaattgttccaactctactttcaagaaactgacagtaggatatgaaggtatagctgatttccagaacatctaccgggaaagaatccttgttagaatccttgt

SEQ ID NO: 33240 - DNA, 120 bp, Artificial Sequence
  ENSG00000049618_190 (sequence is synthesized)
tacttactctttagagttcctaaacatggtggggggtgttgggagagagggcagttgctaatcgtgaagtgtattggttttttcttggtacagttgcttaaaggaaaccaaacttgttct

SEQ ID NO: 33241 - DNA, 120 bp, Artificial Sequence
  ENSG00000049618_191 (sequence is synthesized)
tgtagtcagtggttctctcatagtggtttttgcctttcagctagagtcataaataactgaaatgtaaaattgcattttatgaaacattttaatttatttatcataggctaaattgatttg

SEQ ID NO: 33242 - DNA, 120 bp, Artificial Sequence
  ENSG00000049618_192 (sequence is synthesized)
tttttaattttcagtgttcatgagctaccacattgctgaaattatcttctccaaaagatatatagagaacataaattagggtgacctatggtacctgagacaaaaataaccataaaatcc

SEQ ID NO: 33243 - DNA, 120 bp, Artificial Sequence
  ENSG00000049618_193 (sequence is synthesized)
taagaataacaaccataaaaatcccggcaagcaagtctcagataaataatagaagagaacagagtcactttgggcaaaagagtctataaaatccatgttcccactcttctaataatgagt

SEQ ID NO: 33244 - DNA, 120 bp, Artificial Sequence
  ENSG00000049618_194 (sequence is synthesized)
acattgtctctaaatcaggaacagaaaggtaaagaacagcaaggcactccctcagtgataagattagagatatgagaataaaaagtaagttttcgtgtagatagtctaagcaaggaagca

SEQ ID NO: 33245 - DNA, 120 bp, Artificial Sequence
  ENSG00000049618_195 (sequence is synthesized)
gcaaataaggaacatgctaaacatcggtttagtttatactgtaaaattcaggaagttcgctggacctgaagggtagtttatctttcatggtccagccaaaaagggagacaaacgtgtgac

SEQ ID NO: 33246 - DNA, 120 bp, Artificial Sequence
  ENSG00000049618_196 (sequence is synthesized)
aatgatggaaaggtattgacgggtctcaggatctttaccctcctcggtcatatctgatgtcatgacattgtacctgttctttctttcttctcctcctcctcctctccagttgtctggatt

SEQ ID NO: 33247 - DNA, 120 bp, Artificial Sequence
  ENSG00000049618_197 (sequence is synthesized)
agaggccagaggctctaacaagtgcttacagggtgcctgcctgctcaaccggtattcctctgacacctattagccaacagcccaaactaggagcttggcaccattcccaaaatgggtgtt

SEQ ID NO: 33248 - DNA, 120 bp, Artificial Sequence
  ENSG00000049618_198 (sequence is synthesized)
cccatccctggtgctaacagttggcgtgcagctgcctctcagagggcctttgtcggaggggtgcgcagtaaaagccacacagagctgcttgagggagtcagggttccagaaatggattgt

SEQ ID NO: 33249 - DNA, 120 bp, Artificial Sequence
  ENSG00000049618_199 (sequence is synthesized)
ggtagactgggtagttcttcgctctgtgtgtcatgttgtcagctaggatattgaggtggccgccatcatctgggagccaggctgagagctctgctgggctctgatgtctctcaagtggct

SEQ ID NO: 33250 - DNA, 120 bp, Artificial Sequence
  ENSG00000049618_200 (sequence is synthesized)
gatgtcatccccaggctctactgggacctcaactggagctgttggctgcagcctcctccatggggcctttccatgtagtttcttaggtgcctataacatggcagatggatttcaagaggg

SEQ ID NO: 33251 - DNA, 120 bp, Artificial Sequence
  ENSG00000049618_201 (sequence is synthesized)
agcactccaagaggacaggtcccgggagcaagcagttaaaaacttttgcttgcatctcacttgctggagccctcttaggcaatgctaatcacatgaccaaacccaaaggcatcatgggag

SEQ ID NO: 33252 - DNA, 120 bp, Artificial Sequence
  ENSG00000049618_202 (sequence is synthesized)
gggtttcccaggctgcgaatgctgggagatgcacttctttgggggttgccaaagcacagcctcccatagcaggtaaagcaggtattggcaaagcttataccagcttaatgttctcaacaa

SEQ ID NO: 33253 - DNA, 120 bp, Artificial Sequence
  ENSG00000049618_203 (sequence is synthesized)
aagcatgtgagagtgtgcgggttctcacccccttactaagaatgatcattgtccatcattttaacattggccaatcagatggaagggggaaggcctcattactgtttaccttggattcat

SEQ ID NO: 33254 - DNA, 120 bp, Artificial Sequence
  ENSG00000049618_204 (sequence is synthesized)
tccattattagtgaactcacacatcttttcatatgttgattgaccatttgtttttcttttgtgaatgttcatttatgtgtttgcccatttttaatttgattgttgcttttcctgttgatt

SEQ ID NO: 33255 - DNA, 120 bp, Artificial Sequence
  ENSG00000049618_205 (sequence is synthesized)
tttttaaatttccttgtgtattagagaaaagctatttaattatgtcacgtgatttctttctatctctgttttcacatctacaaaatagaaagtaacttcaaaactggttctaccacaggt

SEQ ID NO: 33256 - DNA, 120 bp, Artificial Sequence
  ENSG00000049618_206 (sequence is synthesized)
tgatgtgagatcaaatagataaaacaggtgaaagcacattgcaaaggaaaatacttgatgctggcattggcccctctctaccagcctaacaaaatgtatctactcatgaaatcttaacca

SEQ ID NO: 33257 - DNA, 120 bp, Artificial Sequence
  ENSG00000049618_207 (sequence is synthesized)
gcttttgcttcacataacataaaagtaactatcataggatggagaaaggtagcaatactgtataacgatgaaaatttatattaaaatgtttaatttgccttcaggctagtttctggactg

SEQ ID NO: 33258 - DNA, 120 bp, Artificial Sequence
  ENSG00000049618_208 (sequence is synthesized)
aacacaatttccttcaggctctgagctgatgctaatttgcatgtactacctacttgtcactccatcctgtgttagaaatagttgtatttcatcccatcttgagctattcttaactcctta

SEQ ID NO: 33259 - DNA, 120 bp, Artificial Sequence
  ENSG00000049618_209 (sequence is synthesized)
ataatttttttaatccttattttggagtgaatcagtggctgaatgttaaggttttcaccttttttcttatgggagaagggaactaactttgtatacatattttatgtcctccttacaacc

SEQ ID NO: 33260 - DNA, 120 bp, Artificial Sequence
  ENSG00000049618_210 (sequence is synthesized)
atttcatgagataatattactggcctcattttatagacaagaaaataggggccaggtgatgactcatgcctgtaattctagcacctcaagaggttgaggaaggcaggcagatcacttgag

SEQ ID NO: 33261 - DNA, 120 bp, Artificial Sequence
  ENSG00000049618_211 (sequence is synthesized)
cccaggagttcgaggctacagtaagctacgatttcaccactgcagttgcaacattgcacctcttatcactaggtgatacagcgagaccctctctctaaaaaacataataaaaatgttgaa

SEQ ID NO: 33262 - DNA, 120 bp, Artificial Sequence
  ENSG00000049618_212 (sequence is synthesized)
aagaaatgaaattaaactcagaggtaacttacccaagtaaggaatggatctgggcctgtattagttttctatgttgttatataacaagttaccacaaacttagcagcttaaaacaacata

SEQ ID NO: 33263 - DNA, 120 bp, Artificial Sequence
  ENSG00000049618_213 (sequence is synthesized)
aatgtatgatcctccagtgtctgtggatcaggaatctggcacagtgtgactgggcctctgctcagggtcccacaggctaaaatcaaggtgtctgccagcactgtgagctctttgaaggct

SEQ ID NO: 33264 - DNA, 120 bp, Artificial Sequence
  ENSG00000049618_214 (sequence is synthesized)
cagggtcctcgtccgagtttatttaagtcattggcagaattcacttgcttgtgtttgtgaggctgcagtcccgttttcttgttgactatcttctgcccaccttccctaacacgtgatccc

SEQ ID NO: 33265 - DNA, 120 bp, Artificial Sequence
  ENSG00000049618_215 (sequence is synthesized)
cctccacagcatgccagttgcttcttcaaggccagcaggaaaatatctctgacttgcttcctctctaagctctagatccaaacttaaagggctacctggacaatctcccttctgtttaaa

SEQ ID NO: 33266 - DNA, 120 bp, Artificial Sequence
  ENSG00000049618_216 (sequence is synthesized)
ctcacaatcggctgattagtaactataatcacatctgttaagccccttttgccatgtaacatacataacataatcatgggagtgataccatcgtattcataggtcccacccacactgaag

SEQ ID NO: 33267 - DNA, 120 bp, Artificial Sequence
  ENSG00000049618_217 (sequence is synthesized)
gggaggggctcatggaaggtgcccaccgggcagggggtgctggatcttcggggccatcttagatttctgcccccacagagcacatcttggctccacaacttatgctctttcaatagtatt

SEQ ID NO: 33268 - DNA, 83 bp, Artificial Sequence
  ENSG00000049618_218 (sequence is synthesized)
cacatcttggctccacaacttatgctctttcaatagtattatggtctatcatattaagaaaaagtactgttgcaaggctgagg

SEQ ID NO: 33269 - DNA, 78 bp, Artificial Sequence
  ENSG00000049618_219 (sequence is synthesized)
gtccaaagacaatagagatgactagaagggatggatgggcctttgactttcagaaatgcctaaatgtatgcattttat

SEQ ID NO: 33270 - DNA, 120 bp, Artificial Sequence
  ENSG00000049618_220 (sequence is synthesized)
attgcctcttgagtcctagacttggaagtggcacagcatgattgctgctgcagcagtctcttgacccaggttgaagtcttggcctcggaggatgcagcctttggactcaaggatctgtct

SEQ ID NO: 33271 - DNA, 120 bp, Artificial Sequence
  ENSG00000049618_221 (sequence is synthesized)
cgagacccacctcctgggaggcctttcttcttcacttgctgcctcgatgtcagatgctggcctctgagcatacccacgtgtccttggggtccgcctctgacgttagccctggtccgggat

SEQ ID NO: 33272 - DNA, 120 bp, Artificial Sequence
  ENSG00000049618_222 (sequence is synthesized)
ccgcttctgccccgggagaggcagcggccttccacatggctcccttcccctcagcactctgcagagtcctccctcctgtgtttctcatcatcactctcgtcacctcatgacatgttcttg

SEQ ID NO: 33273 - DNA, 120 bp, Artificial Sequence
  ENSG00000049618_223 (sequence is synthesized)
atttctttacttgcctgtttcctgccaccaggacataagctcttgtcttcattcactgctgaatccccagcatttagcacagagcctggcatgtaagaggcccttaataactctttctta

SEQ ID NO: 33274 - DNA, 120 bp, Artificial Sequence
  ENSG00000049618_224 (sequence is synthesized)
aatgaatgaattttgctaaggcagagtaatccagagtcactgatactccgtcccctcctgccttgaagcttgaccagtattgggttgaccattcgatgcctaagagcagtacctggtata

SEQ ID NO: 33275 - DNA, 120 bp, Artificial Sequence
  ENSG00000049618_225 (sequence is synthesized)
ttatccttgtggagtgagactaaggataatttttgtctgtttctgtgcttccatattttctgcattgagcgtgcattactttgtaattaaaaaggaagacaataattgttgtaacataaa

SEQ ID NO: 33276 - DNA, 120 bp, Artificial Sequence
  ENSG00000049618_226 (sequence is synthesized)
gaagtaggagagccggtggccgaagtgcccactcatgacctggccttgctagtggaggtggcaaccagagaagctggagagcgcctcctgatccacagggaacttcagtaaatccttttg

SEQ ID NO: 33277 - DNA, 75 bp, Artificial Sequence
  ENSG00000049618_227 (sequence is synthesized)
caagaaagaccatcaagtttaccaagagggtctcgctcttttgcccaggctggaatgcagtggtgcagtcatggc

SEQ ID NO: 33278 - DNA, 120 bp, Artificial Sequence
  ENSG00000049618_228 (sequence is synthesized)
ctcaagcaatccactcatgtcagcctcccaaagtattgggattacaagtgagagccactgcacctggccagtactttattttcatacagagactgagagtaagacttcatttccaaataa

SEQ ID NO: 33279 - DNA, 120 bp, Artificial Sequence
  ENSG00000049618_229 (sequence is synthesized)
aagtaggttattaaatattgctttatatatttttaaagttcttacagaaagaaagcttccatatactctagaccattttgagattctttcaggctgtgactcttaaggtcagctacattt

SEQ ID NO: 33280 - DNA, 120 bp, Artificial Sequence
  ENSG00000049618_230 (sequence is synthesized)
ttattgacagcaatcctggaagaaaagtaaagagaagtgagaatataatgttgtgattctgttaaaatcactcaaaatgcttgaaattgataatactttttggcatgtttctttctaaaa

SEQ ID NO: 33281 - DNA, 120 bp, Artificial Sequence
  ENSG00000049618_231 (sequence is synthesized)
tcaatgtgataatatccgctgcattgataaacatagttagcaagcatttttgtacttagcgtttgtgtataaaatgtaaaggaaggttttttaattcagagaaggtgctcatgtttgaaa

SEQ ID NO: 33282 - DNA, 120 bp, Artificial Sequence
  ENSG00000049618_232 (sequence is synthesized)
gacaatatatggatctggaagaagtaaaagtaaatctttaaactctaattgcaaggctgtctgctcatatttaattgacacacgtttaaacattggttgtaatggattgtttgccattta

SEQ ID NO: 33283 - DNA, 120 bp, Artificial Sequence
  ENSG00000049618_233 (sequence is synthesized)
actgacattaacgacctcagttaactcatgtttttatattacattggctgtttattttttgttaatttccctttagtgttcagcttcccatacattaaaagttttgctttttataaacaa

SEQ ID NO: 33284 - DNA, 120 bp, Artificial Sequence
  ENSG00000049618_234 (sequence is synthesized)
gttctactttatattatgacatgattgagaagtttctagacttcaggtttattttgtggtcaatttttcaaggtttaccttttaggagctctgtagtcctggataagtctatttcatgtg

SEQ ID NO: 33285 - DNA, 120 bp, Artificial Sequence
  ENSG00000049618_235 (sequence is synthesized)
tatatatctctgttgcagagtgtagacatcagttggaaggttttatgcggctggtcgattttgtgtgcaggtggttattgctgttgtacagttgagctttctttaggctgttgctttttg

SEQ ID NO: 33286 - DNA, 120 bp, Artificial Sequence
  ENSG00000049618_236 (sequence is synthesized)
gcagcgatacagaacagaggtgtccttagaggagtcaaaacttaaaagaaatttgcactttgcaaaggatacaaatgatgagataaaatacctgatagtaatttgaatttcttctaggac

SEQ ID NO: 33287 - DNA, 90 bp, Artificial Sequence
  ENSG00000049618_237 (sequence is synthesized)
agataaaatacctgatagtaatttgaatttcttctaggactttctatttatgtaatgagaaatcacccaaaagaaggtagtttgaaattt

SEQ ID NO: 33288 - DNA, 120 bp, Artificial Sequence
  ENSG00000049618_238 (sequence is synthesized)
agctgtttatttccaccaataaatagtatatggtgattggggtttctatttataagagtagtggctattatatggggtatcatgttgatgctcataaatagttcatatctacttaatttg

SEQ ID NO: 33289 - DNA, 120 bp, Artificial Sequence
  ENSG00000049618_239 (sequence is synthesized)
tgctcataaatagttcatatctacttaatttgccttcttttatagagaacctaatttaaaggaagtcttctttattaactaaaagaataaatctgcaggaggctgaggcaggagaatcac

SEQ ID NO: 33290 - DNA, 78 bp, Artificial Sequence
  ENSG00000049618_240 (sequence is synthesized)
taccaataaatatttttacatttatttgaagaattgttgtcattgcctagtttctatggagaaggtttgttttaagat

SEQ ID NO: 33291 - DNA, 120 bp, Artificial Sequence
  ENSG00000049618_241 (sequence is synthesized)
gtcattgcctagtttctatggagaaggtttgttttaagatgggaattcagtatagccatgattttaattggaatttcaactatgtttgcattaacttagatttattacttctaaacattt

SEQ ID NO: 33292 - DNA, 120 bp, Artificial Sequence
  ENSG00000049618_242 (sequence is synthesized)
gagaacagacatttgtagtgaatgttaaacatgacatttgacatgcgtaccataccatatacattttaatgtatatgcagatttagagaaggtaagtgatgaccacaggatgtctactgt

SEQ ID NO: 33293 - DNA, 120 bp, Artificial Sequence
  ENSG00000049618_243 (sequence is synthesized)
ctttgaatctgatggatatatttttgaaactctaatttttataccttttacttttatgtgagagagggtgaaatcttattgtggtgtttttccccccccctttagtagtgttaatgtatt

SEQ ID NO: 33294 - DNA, 120 bp, Artificial Sequence
  ENSG00000049618_244 (sequence is synthesized)
tgttgtctaggtatttggttttgaaggagggaaataggtaatggattttgtgttgtatgctgctaaactttctgtagcagatagttcgcagcttggtaagcatgtagtgtgtacgtgtgt

SEQ ID NO: 33295 - DNA, 120 bp, Artificial Sequence
  ENSG00000049618_245 (sequence is synthesized)
gagagagagagaaggagagagacagaggcatgcatgctgtcgataaatactacatttgccaagtatttggaaattagcttttgtggttctatgaaatttaaatagatgcatgggaagcag

SEQ ID NO: 33296 - DNA, 120 bp, Artificial Sequence
  ENSG00000049618_246 (sequence is synthesized)
gtaaacagtgaattccacttttttcagcagttttttagtggttttggagaggttcgaccttgtagatttgtcattggctgatgattttgtactgtgacacaggttggtaaatttgtcata

SEQ ID NO: 33297 - DNA, 120 bp, Artificial Sequence
  ENSG00000049618_247 (sequence is synthesized)
aatggatgcagattttctgcatagctataaaaatagtttgtggtaaactgctttcttcatatctactcagaaacttcagcatcactcactagtgcgtgccttttgccatggatctgtgtt

SEQ ID NO: 33298 - DNA, 120 bp, Artificial Sequence
  ENSG00000049618_248 (sequence is synthesized)
ggattggatggttgacattcagctaactctacagtgttattagggatggcatgaagtattgtagtttcagataactgactgaagagtttggtctgggataggagcttttaagttgattgc

SEQ ID NO: 33299 - DNA, 120 bp, Artificial Sequence
  ENSG00000049618_249 (sequence is synthesized)
tggaagagtggatgaaggcatttaggagatgaacgaatatagtcatcaactgtttaaatgttttctgaattgttctatttctgtcttgttatgtatgtataacagctatcttccttaacc

SEQ ID NO: 33300 - DNA, 120 bp, Artificial Sequence
  ENSG00000049618_250 (sequence is synthesized)
tttatcttgcctacttcccaaaagtatttaaagttgtccataatgtaagttttttttttaatgaaataccccaattggtattttctttccgtttttgtaactcacagataaataagatgc

SEQ ID NO: 33301 - DNA, 120 bp, Artificial Sequence
  ENSG00000049618_251 (sequence is synthesized)
tggttgactcaatagtacttcaaacacatttcaataatctttagagagcagagtttccaggttttatgttaagtatgtagaagattcagttactgaataaaggacaaactgtaagataac

SEQ ID NO: 33302 - DNA, 120 bp, Artificial Sequence
  ENSG00000049618_252 (sequence is synthesized)
ctgctacacctaaaacccccaatctgttaggatgaaatttggctgtagttaaatgaaatttattgcaccacttttttttttttccacgagggctttgcatgtgtaaaaactttctgtatg

SEQ ID NO: 33303 - DNA, 120 bp, Artificial Sequence
  ENSG00000049618_253 (sequence is synthesized)
gggcttacaaatattttaatttatgtggatacttataataagttgcacacagctaaggtcattgtggtttcagggaatgatttgttgatactctgttacggctctaatagtctgtatttt

SEQ ID NO: 33304 - DNA, 120 bp, Artificial Sequence
  ENSG00000049618_254 (sequence is synthesized)
acaatgttacttttattagatactgtagtcctctaacttggctgggttgattctggagagcccatgaagctgtatttgttatcacatctgaatttgctgttggatcctttgtagatttac

SEQ ID NO: 33305 - DNA, 120 bp, Artificial Sequence
  ENSG00000049618_255 (sequence is synthesized)
tgttgtgctatggttttccttttcaggtgtcagggatataaattttgtcttttcacctacagtcaatccatgatatttgaaacctgtagttttgtaatttggaattaagtatattgtgtt

SEQ ID NO: 33306 - DNA, 120 bp, Artificial Sequence
  ENSG00000049618_256 (sequence is synthesized)
atctgtaccatttatgaaatgcaacatagtgattctaatgtgtaattattctgttcattttatgtaatgacgatgacaagaatgcctctcaagtagtaatttcttagtctttttgcttac

SEQ ID NO: 33307 - DNA, 120 bp, Artificial Sequence
  ENSG00000049618_257 (sequence is synthesized)
agataggtttgtaatgtttctgcatgtgatattttctacctgtatcctaagtagatttttctttagcatgtttgttacaatgtaacaactttgcattataagaaatcaaggcatttccaa

SEQ ID NO: 33308 - DNA, 120 bp, Artificial Sequence
  ENSG00000049618_258 (sequence is synthesized)
tatctttatgctacatctatactttgatccctcagcaagttgtcctcactgttgtgtgaacctgtttttctatatttgcatgccattaaattcttgatgaccttcagtaggcaatgcagt

SEQ ID NO: 33309 - DNA, 120 bp, Artificial Sequence
  ENSG00000049618_259 (sequence is synthesized)
tatgttttccagctaacttagatagaccttcacatcatctgcagaaggcaaatgattgataaattaataacttgttctctcgttatcttggagccatgaccagtcatatttactttttgc

SEQ ID NO: 33310 - DNA, 120 bp, Artificial Sequence
  ENSG00000049618_260 (sequence is synthesized)
ttagtggactcagacctaagcactgaacaaatcctccttaatatcgtccacttatttctatacctcttagtcgtacagcatttccctgtttagttgtattagtttatacatccttggtat

SEQ ID NO: 33311 - DNA, 120 bp, Artificial Sequence
  ENSG00000049618_261 (sequence is synthesized)
tactgttattgataaatcttaacattgaagagctctctttcttagactattatcacttaaaatttgagcacatttagctttcacgacctctaatattggtatgaaataaacctagcattt

SEQ ID NO: 33312 - DNA, 120 bp, Artificial Sequence
  ENSG00000049618_262 (sequence is synthesized)
aagctaaagacacagtggaatgtctaaaagatgctgtcagttacttattttcttgtttcataaacattggatatccctcaatttatattccaagatagccctcaaatatgatttaataca

SEQ ID NO: 33313 - DNA, 120 bp, Artificial Sequence
  ENSG00000049618_263 (sequence is synthesized)
tcccctatttcactagaagcttttcatggtatttattatgtcctattcagtaaatattttcctcaaaaatttctataaaaattattttaaaataaattatttcctcattttcagaatttt

SEQ ID NO: 33314 - DNA, 120 bp, Artificial Sequence
  ENSG00000049618_264 (sequence is synthesized)
taattgctaagggatctgttaggtggcattgaatggctctcggggcacctgtgctctctgtgctggtgctgctgagtgattaaatgggtggatgtctgcatcgccaggtgggtgttattc

SEQ ID NO: 33315 - DNA, 120 bp, Artificial Sequence
  ENSG00000049618_265 (sequence is synthesized)
ttaaaatgattctattttaccaagtgacatttggatttactttggtaaccatagctttaggaaaagaagtggacactttggataattaagctaaaaataccctaaaagcattctgttctt

SEQ ID NO: 33316 - DNA, 120 bp, Artificial Sequence
  ENSG00000049618_266 (sequence is synthesized)
agtaatacatcttttttacttataaaaaattaattgacagaaatggtaatcataagttcagtaattatattacagatgggtagttaataaaatattcgtaaacatgtataaagggaagta

SEQ ID NO: 33317 - DNA, 120 bp, Artificial Sequence
  ENSG00000049618_267 (sequence is synthesized)
aacatgaaaaaggaaaaagttttattttcttataaaacactatataagcactttcttatagtgcttttccctccagggatctgaagagttgttaatattcctcagtttaaaaataactaa

SEQ ID NO: 33318 - DNA, 120 bp, Artificial Sequence
  ENSG00000049618_268 (sequence is synthesized)
tttgttttattcttcagagaggcatgctgctagctttgtatttcagataggaggttcattattctgtttacctaagatatagaatacaatcagtttggaatacaatcagtttggcagtca

SEQ ID NO: 33319 - DNA, 120 bp, Artificial Sequence
  ENSG00000049618_269 (sequence is synthesized)
tactctaagagcgtttgaaaatggactgctttgttaggactttgtgaaatatttctataaatattggctgttctagaaggctcatcaggtcattaaaaacctctttgtgaccctttcttc

SEQ ID NO: 33320 - DNA, 120 bp, Artificial Sequence
  ENSG00000049618_270 (sequence is synthesized)
cttaaataggaaatatctaaagaggttggcatgaaaacggtttgatctttctgagttaactaaaaatccctgaatgtgttgaatagtgcttatggcacttttgttgagtttgcaattaga

SEQ ID NO: 33321 - DNA, 120 bp, Artificial Sequence
  ENSG00000049618_271 (sequence is synthesized)
cggaaatattgggctttagataaaacatatgttttttggctctttgtgaaaggaaggaggtagtaaatgctggtcgttctttgaaatagagggtgttaaacaggatattggaagcctgaa

SEQ ID NO: 33322 - DNA, 120 bp, Artificial Sequence
  ENSG00000049618_272 (sequence is synthesized)
agagaatggttggaaaacttttattaccaagaatattcttggggcttggctattagccgcagagcatgcagcgttctgcctttaattcaagaagaatactctgtttgtgttggtttttgt

SEQ ID NO: 33323 - DNA, 120 bp, Artificial Sequence
  ENSG00000049618_273 (sequence is synthesized)
ttcttaatctttaatgacacttacgttggttagtggcaaaaggtcatgtgttttggaagcatgtttgaatattgctgacattcatatggatgttctaagcatgtagatttgataatactg

SEQ ID NO: 33324 - DNA, 120 bp, Artificial Sequence
  ENSG00000049618_274 (sequence is synthesized)
tgaatgattggaaactaccgggaaaagctttttaactgggttcagctttttgctagttctcagtccaacccagctagaaatgtaaattgctaagaccatctgaacctgtgagctggcagg

SEQ ID NO: 33325 - DNA, 120 bp, Artificial Sequence
  ENSG00000049618_275 (sequence is synthesized)
ttttggcaaaagttaaaatctaccaggtaagaattaggtgtatggctattgaatgaagtattttgaaacctttttatttgaggttgatttaaatggttgtcattaaaaggttaagagtgg

SEQ ID NO: 33326 - DNA, 120 bp, Artificial Sequence
  ENSG00000049618_276 (sequence is synthesized)
agctgtcttccgttgattgatccttctcaaatccttatgaacattaaaaaaattataagttaatgaaggaaaacccatatctgtcatcaggcttatctcagtgttcaggcatggatgatg

SEQ ID NO: 33327 - DNA, 120 bp, Artificial Sequence
  ENSG00000049618_277 (sequence is synthesized)
cctgtgtgttgctgaagacttaagctgtttattatcagtattctcaaaatgttattaggctatgttgagttttagagtttcagagaaaatactttataaaatggaagcctcctgtgccag

SEQ ID NO: 33328 - DNA, 120 bp, Artificial Sequence
  ENSG00000049618_278 (sequence is synthesized)
ggaggaagaggaggttctctgaaggatggtgccctgtcccccagaacagctacaggcataccttatcatctgcatcgtttcaaaaccaaaggtacagatgcattttgatgtcttggggaa

SEQ ID NO: 33329 - DNA, 120 bp, Artificial Sequence
  ENSG00000049618_279 (sequence is synthesized)
gttttaaagggaacatgcaatacttcagcttcttaggattcatcaagttcttgaacataattttcatcactggtctgttctatctggagatatcagttatttttggattaagattaagag

SEQ ID NO: 33330 - DNA, 120 bp, Artificial Sequence
  ENSG00000049618_280 (sequence is synthesized)
catttcaggaccttgctggaaaacctgaatttagaaaatatgatagtgactctgacagatgtttattttccaaaatggattatttctttaggatgtgatatcctgtgattttattcccta

SEQ ID NO: 33331 - DNA, 120 bp, Artificial Sequence
  ENSG00000049618_281 (sequence is synthesized)
ggatattttcatgatattgatagtcattttgaaaatagaggataatgcttgaacttgaacaaggtaggaagcaggaaggtatgtctgtctccttctttcaaaacaatcttccatttaaat

SEQ ID NO: 33332 - DNA, 120 bp, Artificial Sequence
  ENSG00000049618_282 (sequence is synthesized)
atttgttctgtaaatgaaaattcaataaaaccttaacagtttggaattcttccaggaaaaaacaggctaaatataatggaaagtctgaataaattaatattgagaaagaactatagtttg

SEQ ID NO: 33333 - DNA, 120 bp, Artificial Sequence
  ENSG00000049618_283 (sequence is synthesized)
cttttaaataattcagatgtttgtgtgcaaagtgtttctaagttgacatactcagttcccgttaaaataaaattctgaattcgtcatagctgagatatttgcttagtggtaatgttttaa

SEQ ID NO: 33334 - DNA, 120 bp, Artificial Sequence
  ENSG00000049618_284 (sequence is synthesized)
ttttaagaatttgtttaattttttaaaatacatttcaactaagcatgcccctgaaaactttttcatatagtattctgaagatttccatttaaaatatgggggaaatgaatttcaacccat

SEQ ID NO: 33335 - DNA, 120 bp, Artificial Sequence
  ENSG00000049618_285 (sequence is synthesized)
tttataggagtgtcaattagttcctaaaaaattaatgaaggagtatgaaggagtactataaaaaaatagacactagacaaaattggagattaagagaggctgaagcataactgatttgca

SEQ ID NO: 33336 - DNA, 120 bp, Artificial Sequence
  ENSG00000049618_286 (sequence is synthesized)
ggatattggttttgataatagaaggataaggatgatctatagttgataaatgaggctcattaagtaagagatgataaatgcagatattcctggctaatagaaaagtcagcatacaaattt

SEQ ID NO: 33337 - DNA, 120 bp, Artificial Sequence
  ENSG00000049618_287 (sequence is synthesized)
tgccataacaagtgagggatgggcaggctttgaccagcttgcagctcttccagtgacctctgtgaggccacggagctcttctgtggtctggatgcctgggccacagaggcagcgtggacc

SEQ ID NO: 33338 - DNA, 120 bp, Artificial Sequence
  ENSG00000049618_288 (sequence is synthesized)
ccatgggcctcaggccagcagaagggggagccagagtgggtctcagggagtctagagccacctagagcagagcttacaaggagctccacaatggtgcagaggccagggcaggactgcagc

SEQ ID NO: 33339 - DNA, 120 bp, Artificial Sequence
  ENSG00000049618_289 (sequence is synthesized)
tcctgcaagtgtaactttttattttttatgctaaaaagaaaaaaaaaaaaacacatgactctaatgttctgaggtccctcttctcaccctagcctgcacttctggttttggcatggcagt

SEQ ID NO: 33340 - DNA, 120 bp, Artificial Sequence
  ENSG00000049618_290 (sequence is synthesized)
gcctgccatgttgggctagatgccaccatcttcacccacccatcctcctcctcctattgcttctcctgggcattgggatctgctgcctccagctcctgcaggcaatggccagtgtgaggc

SEQ ID NO: 33341 - DNA, 120 bp, Artificial Sequence
  ENSG00000049618_291 (sequence is synthesized)
gttgaatgcattctactttatattatccaagttaggtgggaaatagcttttaatttacagattttcacttcgcaggtaactctgaaggcacacatctgttttatataacaagggatatat

SEQ ID NO: 33342 - DNA, 120 bp, Artificial Sequence
  ENSG00000049618_292 (sequence is synthesized)
aaccagcaggagctcatagtagcatttgtagactggttatttgcttttatgtttctttgggactggaagtaacaatttttaatgttaactgtcagtttaggagaggaaataaatacatgt

SEQ ID NO: 33343 - DNA, 120 bp, Artificial Sequence
  ENSG00000049618_293 (sequence is synthesized)
agagaaggttctacctgagccaaaatttcccattcttccctcacaatgtaggattttagaggtgtctctcttgttttctcatctttttcttttgccttctctaaattgttgtaaaataac

SEQ ID NO: 33344 - DNA, 120 bp, Artificial Sequence
  ENSG00000049618_294 (sequence is synthesized)
tgaatggtcttgttttcctttgtttgggtcaagaaattttagcggaaaattgttactgtgtgaaagaagattattgactcaacaagccttcaattttccgtgaataacactcccaccccc

SEQ ID NO: 33345 - DNA, 120 bp, Artificial Sequence
  ENSG00000049618_295 (sequence is synthesized)
tagcttcaggaacatgccgtgcgtgcattctattttaaaatatagactgtaatttaaaacaggcattttgatgccccactgaactttgtttaagcctggaataaaagaggagaaaaaagc

SEQ ID NO: 33346 - DNA, 120 bp, Artificial Sequence
  ENSG00000049618_296 (sequence is synthesized)
tgtaagccacaaaaaagtgactaagctttctcaactacttttcttcataatgcattctttaaaaaaaaaaaaaaagcatgttggtacgattgtctctttccacaggaccgaaattgtacc

SEQ ID NO: 33347 - DNA, 120 bp, Artificial Sequence
  ENSG00000049618_297 (sequence is synthesized)
caattttagatcatggtgtgcacatctttctacttggttcgtgattgagataccatttacatttttcagtgcacaggtttgtatttgttgctgtctgtatgcatgcatctgtgcatatgg

SEQ ID NO: 33348 - DNA, 120 bp, Artificial Sequence
  ENSG00000049618_298 (sequence is synthesized)
tacgtgttcattgcatgtgagaatattctaaaattacgtatatcatttttagcactcacttactaatagctaattttttagagctcttgatttaacctgattattagactgaaatgaaat

SEQ ID NO: 33349 - DNA, 120 bp, Artificial Sequence
  ENSG00000049618_299 (sequence is synthesized)
aaatatttaactacaattttatttaccatcgggtcattgtaaaaattgtgatttgaaagtagtttatattacttgccttttttcctcctcacaaaaatgaaaataaacagcttataatga

SEQ ID NO: 33350 - DNA, 120 bp, Artificial Sequence
  ENSG00000049618_300 (sequence is synthesized)
cggcgctgcagtcactggcccaggaaagcccaggcgcctggcctgggaggttccgggaaggtggtttcacagtcaggccaacagggaacttgggacttttgagaggtggggggttcctgt

SEQ ID NO: 33351 - DNA, 120 bp, Artificial Sequence
  ENSG00000049618_301 (sequence is synthesized)
gtcgttttgtttatttaattggacgcccactggcagtgttaagggatgagagaattaaatctgggatatggccatttctggttgacacttggaaggcaccccttcttttgctttacctta

SEQ ID NO: 33352 - DNA, 120 bp, Artificial Sequence
  ENSG00000049618_302 (sequence is synthesized)
atcaaaacaggctttcgaattctaagccatatacgtttattgcttatacaagtattcaaaaagattccatctacctctacacaaaataaagatcccccagtggccagtttgaatacatgt

SEQ ID NO: 33353 - DNA, 120 bp, Artificial Sequence
  ENSG00000049618_303 (sequence is synthesized)
gcacttctaggaaatgccaccctacaggttcgacagctcgagctcccccgccctctttcggaaatcctcagatttgaactttagtaaaatgaagcctgggcttcgtttctaatgtcccct

SEQ ID NO: 33354 - DNA, 120 bp, Artificial Sequence
  ENSG00000049618_304 (sequence is synthesized)
acccagcaagttctcacttctagggaatttaacaagctgtcgtggtaaggatccacacggccttgttttggaaacaggtggtcttttgcagccttgttctggaagtcaggggtcttagga

SEQ ID NO: 33355 - DNA, 120 bp, Artificial Sequence
  ENSG00000049618_305 (sequence is synthesized)
atgggtgcagcgctggccaccaacacgctcgcaggccgagccacatcagtgacgcctgctggctcccttccctctcctccccactgacagagaccctcccattcctttcagctcccctgc

SEQ ID NO: 33356 - DNA, 120 bp, Artificial Sequence
  ENSG00000049618_306 (sequence is synthesized)
cgttctaccgtttggctttcagatttgaaatgacaaaatcatatattctgataaatgcaatagtagagaggggaagaaattggcaccttagtgctgggtggtgaccttactccagtagat

SEQ ID NO: 33357 - DNA, 120 bp, Artificial Sequence
  ENSG00000049618_307 (sequence is synthesized)
ccgaccattctcttatctgtgtctgcctcgcagtcagcgaccttcagcacattagcctcactgttcctggtccctgtctatgagatgtggctgcacccaccgctcctgtacacagcttgt

SEQ ID NO: 33358 - DNA, 120 bp, Artificial Sequence
  ENSG00000049618_308 (sequence is synthesized)
tctgagcgtggctggcagcccatgtttcctgagcacttccagtgtgctgggcccttttctaagtgctatcatttcattttcacatcagccctgtgacattgatactattttaaaatccat

SEQ ID NO: 33359 - DNA, 120 bp, Artificial Sequence
  ENSG00000049618_309 (sequence is synthesized)
gagaaaatgaaggtctcgtggaatctaagtacttgcccaaagccaactagctggggagtagaaggtcttatctggggcatctggtgctacagtatacacgatacccaccagacacctctg

SEQ ID NO: 33360 - DNA, 120 bp, Artificial Sequence
  ENSG00000049618_310 (sequence is synthesized)
gctgtattgaaaatacctttgtaatatgtgaaatgtttacacatagaagccagagaaagaggtcatttcatttttaatgatttcctctagctgctgtctggatggcaaagctgatatcca

SEQ ID NO: 33361 - DNA, 120 bp, Artificial Sequence
  ENSG00000049618_311 (sequence is synthesized)
aggttgctaatcaagggatctcacataaatacgttttaggcccaaagtgcacttgtagtgaatatacctagaattacatctgtaggctctaaaaacaagtagaaatcctcgctaacctca

SEQ ID NO: 33362 - DNA, 120 bp, Artificial Sequence
  ENSG00000049618_312 (sequence is synthesized)
tccttaaagattcaaaggctttaccaactcaggtgtcccttaaaaactgggaaatctaattttaaaaatctcacaacattacatccagttcacagagtaaaacaagctgcctgtgaacag

SEQ ID NO: 33363 - DNA, 120 bp, Artificial Sequence
  ENSG00000049618_313 (sequence is synthesized)
ctctgaaactatttttccaaaataaaaacccagtggggcgtagggaccaaagtggtgatgtctgtaaagatctaagggtacattttatttgccaggaaagaactcgtgtcactgaatggg

SEQ ID NO: 33364 - DNA, 120 bp, Artificial Sequence
  ENSG00000049618_314 (sequence is synthesized)
ctgcacttgtgtatggagaatagctctcccagtgtgcatcagcttcaggacgggggccctgctgaggcgtatagatccttcagaaagtggagggcctgttctcttaacagccagccgttc

SEQ ID NO: 33365 - DNA, 120 bp, Artificial Sequence
  ENSG00000049618_315 (sequence is synthesized)
ccttttccccttttttaaactgtcatttttatggcaacattatcattttaactacacaaaagagcttggattgcaaatggactcctggtatacattcttctcagtagtccagatggagcc

SEQ ID NO: 33366 - DNA, 120 bp, Artificial Sequence
  ENSG00000049618_316 (sequence is synthesized)
tcgtcagattgcgttcatactgtggtagcaggccccgtctgaggcccatcctggtgttgagaggctggatgctagcagggagctccaggagacgttccgctggctgtttataaccagatc

SEQ ID NO: 33367 - DNA, 120 bp, Artificial Sequence
  ENSG00000049618_317 (sequence is synthesized)
ctgaacacaaagcttccagcctggtgctagaggccagggagacctgaaaatgtctcacttcagggcttagggtaacatggaataaatatatttgccattgaacaaattatttaggttaaa

SEQ ID NO: 33368 - DNA, 120 bp, Artificial Sequence
  ENSG00000049618_318 (sequence is synthesized)
tgcttgcttgtttatttgttttgtaagactttttcttcattatttatccatgaaagggttttctttataaataataatattagtgacaaaatgaataaagtttgcgtgcatcaaagaagt

SEQ ID NO: 33369 - DNA, 120 bp, Artificial Sequence
  ENSG00000049618_319 (sequence is synthesized)
tgatttctggtaatgaaaaagctgttataaagaagcacctctatacaaagcatgcgagtgtgttaactgggtccaaactccttcacacagtgactttttaaaaatgtctgatccattatg

SEQ ID NO: 33370 - DNA, 120 bp, Artificial Sequence
  ENSG00000049618_320 (sequence is synthesized)
ccatttatatgggaactaatagcagccattgactgaatgataagtttggcccctgacctgtattttgcatgttctatctatttcaaaactgcctacctgaaagaagtaaatactcaattt

SEQ ID NO: 33371 - DNA, 120 bp, Artificial Sequence
  ENSG00000049618_321 (sequence is synthesized)
gggtatggtttagtgtaacatcagccctgctttatttttaacccatttgtctgaaattaataaaaacgtacaagttgttagtatgtgaatgaatttttagtttaataatgtgtacctatg

SEQ ID NO: 33372 - DNA, 120 bp, Artificial Sequence
  ENSG00000049618_322 (sequence is synthesized)
ttagaatcagttgagatagaacaattgtattctgcacaagactgctgataatcttgaaattaagtgttgatttttgtatgatatataaattataacaaaaatgtcacggatgtatcaggg

SEQ ID NO: 33373 - DNA, 120 bp, Artificial Sequence
  ENSG00000049618_323 (sequence is synthesized)
aattttgtaagcctcaatgttcttctgaccctagaagtgggcctttagtttcctactaaagaaattctgtaccattagagagaaaaaaaaaatggtgctgaagcaacctttattttacat

SEQ ID NO: 33374 - DNA, 120 bp, Artificial Sequence
  ENSG00000049618_324 (sequence is synthesized)
agttcatgtcttacatgcctatagtgctttcaggcgataaggcgtacgtgagtttgcttacctatgcacctccttatcattaatttttttaaaggatattatgttttcttatcagacgga

SEQ ID NO: 33375 - DNA, 120 bp, Artificial Sequence
  ENSG00000049618_325 (sequence is synthesized)
agaaataaaagcccttccaacaaatatggagaggagggaggatgctttcttgtaggttgggtgaagtgtggtcaaagtacagttcaaggcccaaagaatgtgtgtgtccacatagcacca

SEQ ID NO: 33376 - DNA, 120 bp, Artificial Sequence
  ENSG00000049618_326 (sequence is synthesized)
catatgactgtagtctggtatttggtctagctgtgtaaaaataactgtgaatgactcaactagggtatcagtcccaatgtgtgtgtgtggcggttggcggtggggggttgtgtgtgttaa

SEQ ID NO: 33377 - DNA, 120 bp, Artificial Sequence
  ENSG00000049618_327 (sequence is synthesized)
tactggttattccctgatatttaatagtaagattttaaacccagagcaagaccctgtcttaataaatggtaagatcttagaactggagcagacctaaaagtttctatggcccagtcacct

SEQ ID NO: 33378 - DNA, 120 bp, Artificial Sequence
  ENSG00000049618_328 (sequence is synthesized)
aaagcaactggggagtgtagcggttaggtgtgacttcccttattctcaggagctagttagtgccagtcccagaaaaaaagaatatgggcttttccagaaacctttggagagaagtggccc

SEQ ID NO: 33379 - DNA, 120 bp, Artificial Sequence
  ENSG00000049618_329 (sequence is synthesized)
cacatctgccagtgctcttgacctttagctcagtcctgcctgtcatccctgccgtgcatttcttaactgccttgcagagaccttaagcccacccatatttacctctgtcttcattatccc

SEQ ID NO: 33380 - DNA, 120 bp, Artificial Sequence
  ENSG00000049618_330 (sequence is synthesized)
gtctcaggaaggctatggaactagatctcaacctcctctggcccccggaaaacctaaccatgaagacttgaacttaatacagcaagaaagaccatcaagtttaccagttgaagtcttggc

SEQ ID NO: 33381 - DNA, 120 bp, Artificial Sequence
  ENSG00000049618_331 (sequence is synthesized)
gcaggctgctgcgaactcagcacaaagcaggtacgccacccaggagcacgccccgggcaggtacgctgtgtgtctacccgtgaccacgtgactgcgcacatagctgcattgttccctggg

SEQ ID NO: 33382 - DNA, 120 bp, Artificial Sequence
  ENSG00000049618_332 (sequence is synthesized)
gtcacacagagcagtagaatgtcactgtgcttggccgttctttttgtgttaaatatattctgtagcatcgaggtcagagaactaagtgacaaaccatgttttatgatacatgaggaagga

SEQ ID NO: 33383 - DNA, 120 bp, Artificial Sequence
  ENSG00000049618_333 (sequence is synthesized)
atgtgagcggtgagcacatcagtcgtgggaggtgatttgaaatgcctgtgaatagtcattgcagcagcaaaccagatctggttgcacagggaagtgtctgcgtggtaccaattgaagcag

SEQ ID NO: 33384 - DNA, 120 bp, Artificial Sequence
  ENSG00000049618_334 (sequence is synthesized)
tgacttttaagcaggaaatacgcttaggaacgatttaaaatctaaaacattcaaaaggaacacactccccacctttttttcaccctaccacaagaatcttcctaaaatacaaacttcgta

SEQ ID NO: 33385 - DNA, 120 bp, Artificial Sequence
  ENSG00000049618_335 (sequence is synthesized)
tgtatacatacgtgtattgtgtgtttgtctaaatgtatatgtgtgagatttatatacttgacattcttatgttatattttatttttccaggcatatctatctgtccaaaccaaaatgtgg

SEQ ID NO: 33386 - DNA, 120 bp, Artificial Sequence
  ENSG00000049618_336 (sequence is synthesized)
tttaaaaagcaaatataatattttagaaagtttgagttgataaaaggctttagctacaattacttactcatttttaatcccgacttaaaaattaattttgaagtaaatacttgacctgga

SEQ ID NO: 33387 - DNA, 120 bp, Artificial Sequence
  ENSG00000049618_337 (sequence is synthesized)
taaaaataacataattaaaaatttataaggcaaaggtgaatatgttttaaaagcacatgtaaatatgttttaaagcaacatactttgaaagatgtgtatcttaatgatatcttcagaagc

SEQ ID NO: 33388 - DNA, 120 bp, Artificial Sequence
  ENSG00000049618_338 (sequence is synthesized)
aaagtagaagattccgatttttgtcaaagggaagcaaaagctaaggtgtgtgtgcgtgtgtgcatgtgtgtgcgtgtgtttttaaatgtgtcttttgttacttttcctctgaagctgcta

SEQ ID NO: 33389 - DNA, 120 bp, Artificial Sequence
  ENSG00000049618_339 (sequence is synthesized)
tctggggaatgtgggacccctccagtcttattgttttttccaaataataataaatttcccttgaggaaataaaatgaaaatcaatcattatctttctttctgtctccacattacaattac

SEQ ID NO: 33390 - DNA, 120 bp, Artificial Sequence
  ENSG00000049618_340 (sequence is synthesized)
ttaaaatcttctgaactccagcagtctagccctctgccgaacctacacaggctttagggaatatttttgtaaacctgtctgtgaaaactggtttggctgttgaaattgaagttctaattc

SEQ ID NO: 33391 - DNA, 120 bp, Artificial Sequence
  ENSG00000049618_341 (sequence is synthesized)
tttaaatgaattgtccattgttgcaactcataaagcgcaagttattttctttttttaagtagaaagtatttgattgcatttggcacgcagcctttggagggacctcagaagatagccaca

SEQ ID NO: 33392 - DNA, 120 bp, Artificial Sequence
  ENSG00000049618_342 (sequence is synthesized)
gagagccaggcctgattttgtgtggttacaaagctacgcgtgccccctctctgagtcagtgtttatgtcatcctgtagcaatcaatatataaatacacatccatgcattgccattttccg

SEQ ID NO: 33393 - DNA, 120 bp, Artificial Sequence
  ENSG00000049618_343 (sequence is synthesized)
tttctaatgcgtagaccattccaaagccttgccttcaacttactgcccattttagctcaccaggagtttaaatgggggctgtatatcttcttgtttgcttttaccaaagtcaaagctata

SEQ ID NO: 33394 - DNA, 120 bp, Artificial Sequence
  ENSG00000049618_344 (sequence is synthesized)
ctttaaaatggtaaatggagattagaattgagaatattacttttctctgcctgtccccaccctttcgttggaggcattttctgtaccccccacccctcaggcagcggcaggatgcagggt

SEQ ID NO: 33395 - DNA, 120 bp, Artificial Sequence
  ENSG00000049618_345 (sequence is synthesized)
attcaacttgcctccatggtctgtaagccccgcacctatgtgtgggggtgacagatatacagggctcatgcttgtgcatcagaacaaatcccaagaagctgttcttctgttccactttag

SEQ ID NO: 33396 - DNA, 120 bp, Artificial Sequence
  ENSG00000049618_346 (sequence is synthesized)
ccagtacgggtaggtagcaacacaccccgacttgctgcgggacctgggcgttttctctgaaactgttaacgatcgtgccgtctggccgcgaaaggaacacccaaaccaagaaagcgaaac

SEQ ID NO: 33397 - DNA, 120 bp, Artificial Sequence
  ENSG00000049618_347 (sequence is synthesized)
acctaacagaaaatccatctccaagggggttgtccttctgtccatttttgttggtgtgtttgtttcgttttcctttcgtattaacagtactgtggccgttcggtggaaacccgcatgcgt

SEQ ID NO: 33398 - DNA, 120 bp, Artificial Sequence
  ENSG00000049618_348 (sequence is synthesized)
cctcaggccctgtctgtgcatggctttcggcatggctgctttccttcatgcctgagagggaaatagaaactttgatctgtgtcgaagacatgatgtcaccacctctggcgtcatttcccc

SEQ ID NO: 33399 - DNA, 120 bp, Artificial Sequence
  ENSG00000049618_349 (sequence is synthesized)
cattgttgtcattgttttgtctaggaacctgtgttgtgcagcgctgttctcatgactatattatcactcctgctgctacagtgagcggctgccatacccacccccaaattaagagcacag

SEQ ID NO: 33400 - DNA, 120 bp, Artificial Sequence
  ENSG00000049618_350 (sequence is synthesized)
catctcatttgacaagagactcactgcagttgagctgacaggctattcataggacttaggaggagtttcattatatcaccaccaagcaaatgtctgtgccaaaaacttctattatttttt

SEQ ID NO: 33401 - DNA, 120 bp, Artificial Sequence
  ENSG00000049618_351 (sequence is synthesized)
ctccagcgagtatcagaatattgaagtcaccaggaaaatacaacaaaataatccaacagataattttctgtctaaacacagtgttgccatattattctcaatttcaacacaggaattaca

SEQ ID NO: 33402 - DNA, 120 bp, Artificial Sequence
  ENSG00000049618_352 (sequence is synthesized)
tacagcaacaaaaagtatctcttctttcctactacaaaactgtgtaatatcaggttctgtcaccatgtttaggttagtaaatgctcttaaagtctattactattgagtgaattgctaaaa

SEQ ID NO: 33403 - DNA, 120 bp, Artificial Sequence
  ENSG00000049618_353 (sequence is synthesized)
aaaataattattgctatcatcctgggcagacttaatcatgtttggtagttagttttagtagagacatgccccatctttggttaaaatcaaacagggaactatcacctagctttgtttaaa

SEQ ID NO: 33404 - DNA, 120 bp, Artificial Sequence
  ENSG00000049618_354 (sequence is synthesized)
cagtaaacttatagaactatgctttcactactggttatgaatgcctgacagagctttttagtagttttatattcagtttacatttatttagacagaacaaatgataattttggaatcgag

SEQ ID NO: 33405 - DNA, 120 bp, Artificial Sequence
  ENSG00000049618_355 (sequence is synthesized)
agttctaaagtctgtaaacatggccctaaatgtggaccaacaaatatagaatcctgtaaacatcatccccaaagtgaaataacaaatatagaatgaggtaaacatggttattcttgggaa

SEQ ID NO: 33406 - DNA, 120 bp, Artificial Sequence
  ENSG00000049618_356 (sequence is synthesized)
attggcttttcctctttcttactttcttgtggtaccttcaaggtcaattcatgagtcagtaggaagataacagtcggaggaagcaagcattcatcatctgcagctaatccataggatctg

SEQ ID NO: 33407 - DNA, 120 bp, Artificial Sequence
  ENSG00000049618_357 (sequence is synthesized)
tccttttaccaactccagaggcctctttagacccacaaagctagtttgactgtgccttgccaaaccacattaagcagctgtgtaaaatgaatttaaatggcatgcatcagagtgaaatct

SEQ ID NO: 33408 - DNA, 120 bp, Artificial Sequence
  ENSG00000049618_358 (sequence is synthesized)
cttccactggggcagaaaatcgatgttagctaaccagcacgaggagatcaaatctgtatttcagccagcagcatccagatagcttccttagagtacaacacctcctccttaattaaaaat

SEQ ID NO: 33409 - DNA, 80 bp, Artificial Sequence
  ENSG00000049656_0 (sequence is synthesized)
cgaatcccgcggcgccaggtgggagcggggccggagcatgcggggcggccggcggtctgcggcgcgcggcgcattcgttc

SEQ ID NO: 33410 - DNA, 80 bp, Artificial Sequence
  ENSG00000049656_1 (sequence is synthesized)
gcgcattcgttcccccgcggcggtggcggtggcgcgcggcggctctccagtgagcggcggagcccggagcggcgggctgg

SEQ ID NO: 33411 - DNA, 120 bp, Artificial Sequence
  ENSG00000049656_2 (sequence is synthesized)
gccgggcgcggggccgccatgtggagcggccgcagctccttcaccagcttggtggtgggcgtgttcgtggtctacgtggtgcacacctgctgggtcatgtacggcatcgtctacacccgc

SEQ ID NO: 33412 - DNA, 120 bp, Artificial Sequence
  ENSG00000049656_3 (sequence is synthesized)
ccgtgctccggcgacgccaactgcatccagccctacctggcgcggcggcccaagctgcagctgagcgtgtacaccacgacgaggtcccacctgggtgctgagaacaacatcgacctggtc

SEQ ID NO: 33413 - DNA, 120 bp, Artificial Sequence
  ENSG00000049656_4 (sequence is synthesized)
ttgaatgtggaagactttgatgtggagtccaaatttgaaaggacagttaatgtttctgtaccaaagaaaacgagaaacaatgggacgctgtatgcctacatcttcctccatcacgctggg

SEQ ID NO: 33414 - DNA, 120 bp, Artificial Sequence
  ENSG00000049656_5 (sequence is synthesized)
gtcctgccgtggcacgacgggaagcaggtgcacctggtcagtcctctgaccacctacatggtccccaagccagaagaaatcaacctgctcaccggggagtctgatacacagcagatcgag

SEQ ID NO: 33415 - DNA, 120 bp, Artificial Sequence
  ENSG00000049656_6 (sequence is synthesized)
gcggagaagaagccgacgagtgccctggatgagccagtgtcccactggcgaccgcggctggcgctgaacgtgatggcggacaactttgtctttgacgggtcctccctgcctgccgatgtg

SEQ ID NO: 33416 - DNA, 120 bp, Artificial Sequence
  ENSG00000049656_7 (sequence is synthesized)
catcggtacatgaagatgatccagctggggaaaaccgtgcattacctgcccatcctgttcatcgaccagctcagcaaccgcgtgaaggacctgatggtcataaaccgctccaccaccgag

SEQ ID NO: 33417 - DNA, 120 bp, Artificial Sequence
  ENSG00000049656_8 (sequence is synthesized)
ctgcccctcaccgtgtcctacgacaaggtctcactggggcggctgcgcttctggatccacatgcaggacgccgtgtactccctgcagcagttcgggttttcagagaaagatgctgatgag

SEQ ID NO: 33418 - DNA, 120 bp, Artificial Sequence
  ENSG00000049656_9 (sequence is synthesized)
gtgaaaggaatttttgtagataccaacttatacttcctggcgctgaccttctttgtcgcagcgttccatcttctctttgatttcctggcctttaaaaatgacatcagtttctggaagaag

SEQ ID NO: 33419 - DNA, 120 bp, Artificial Sequence
  ENSG00000049656_10 (sequence is synthesized)
gagcctgctggtgctggtcccggcgggtgttggagccgccattgagctgtggaaagtgaagaaggcattgaagatgactattttttggagaggcctgatgcccgaatttcagtttggcac

SEQ ID NO: 33420 - DNA, 120 bp, Artificial Sequence
  ENSG00000049656_11 (sequence is synthesized)
ttacagcgaatctgagaggaaaaccgaggagtacgatactcaggccatgaagtacttgtcatacctgctgtaccctctctgtgtcgggggtgctgtctattcactcctgaatatcaaata

SEQ ID NO: 33421 - DNA, 120 bp, Artificial Sequence
  ENSG00000049656_12 (sequence is synthesized)
taagagctggtactcctggttaatcaacagcttcgtcaacggggtctatgcctttggtttcctcttcatgctgccccagctctttgtgaactacaagttgaagtcagtggcacatctgcc

SEQ ID NO: 33422 - DNA, 120 bp, Artificial Sequence
  ENSG00000049656_13 (sequence is synthesized)
ctggaaggccttcacctacaaggctttcaacaccttcattgatgacgtctttgccttcatcatcaccatgcccacgtctcaccggctggcctgcttccgggacgacgtggtgtttctggt

SEQ ID NO: 33423 - DNA, 120 bp, Artificial Sequence
  ENSG00000049656_14 (sequence is synthesized)
ctacctgtaccagcggtggctttatcctgtggataaacgcagagtgaacgagtttggggagtcctacgaggagaaggccacgcgggcgccccacacggactgaaggccgcccgggctgcc

SEQ ID NO: 33424 - DNA, 120 bp, Artificial Sequence
  ENSG00000049656_15 (sequence is synthesized)
gccagccaagtgcaacttgaattgtcaatgagtatttttggaagcatttggaggaattcctagacattgcgttttctgtgttgccaaaatcccttcggacatttctcagacatctcccaa

SEQ ID NO: 33425 - DNA, 120 bp, Artificial Sequence
  ENSG00000049656_16 (sequence is synthesized)
gttcccatcacgtcagatttggagctggtagcgcttacgatgcccccacgtgtgaacatctgtcttggtcacagagctgggtgctgccggtcaccttgagctgtggtggctcccggcaca

SEQ ID NO: 33426 - DNA, 120 bp, Artificial Sequence
  ENSG00000049656_17 (sequence is synthesized)
cgagtgtccggggttcggccatgtcctcacgcgggcaggggtgggagccctcacaggcaagggggctgttggatttccatttcaggtggttttctaagtgctccttatgtgaatttcaaa

SEQ ID NO: 33427 - DNA, 120 bp, Artificial Sequence
  ENSG00000049656_18 (sequence is synthesized)
cacgtatggaattcattccgcatggactctgggatcaaaggctctttcctcttttgtttgagagttggttgttttaaagcttaatgtatgtttctattttaaaataaatttttctggctg

SEQ ID NO: 33428 - DNA, 120 bp, Artificial Sequence
  ENSG00000049656_19 (sequence is synthesized)
tggcatttttcttgacctggtataatgaaagtatttcggatatttgagtttaacccttttccagaaagtaatacatgatatggatttatttatgcattaaaagagcaaatttaaagagcc

SEQ ID NO: 33429 - DNA, 120 bp, Artificial Sequence
  ENSG00000049656_20 (sequence is synthesized)
agtgcatcctgggattgctccgtgtcagtgcgcagagggccctgggttctgctgtacggccgtgtccctgtaattcccccgctcctagtggccgtggaggcattttcccacctgtggcca

SEQ ID NO: 33430 - DNA, 120 bp, Artificial Sequence
  ENSG00000049656_21 (sequence is synthesized)
tcacttcctggggagcgggtctcacaagcgtgcatatgttgtcaggctctctgcttccgtttggggaggctgtgccctggggtcattgtgactgagaagcagttgagggtggtgctgggg

SEQ ID NO: 33431 - DNA, 120 bp, Artificial Sequence
  ENSG00000049656_22 (sequence is synthesized)
ttctggaagaagaagaagagcatgatcggcatgtccaccaaggcaggtaggccccccgagcgtggccctgctcagatactctgccccagggagctcactggagcctgcggtagagggctg

SEQ ID NO: 33432 - DNA, 120 bp, Artificial Sequence
  ENSG00000049656_23 (sequence is synthesized)
cctgcctcactgctggctgcagacacagccccgggtgtgtgcttggctcttgagaagcctctgagaccaggcaccgtaaagcccagggagccgttgcggcaattgtggtgggaccatcag

SEQ ID NO: 33433 - DNA, 120 bp, Artificial Sequence
  ENSG00000049656_24 (sequence is synthesized)
aggctgcacggctcagggcctccagcggctgcacagctcagggcctggctgcggactctggcgtgcatggggtctgggtctgggctgtggagagtgagatgcatggacctctcgagcctt

SEQ ID NO: 33434 - DNA, 120 bp, Artificial Sequence
  ENSG00000049656_25 (sequence is synthesized)
cccggctgctcatgggcgctgagcagggctggggcctcacatcccctgtcttggttccctcgccccgtcctcccgccggtgttccttccccgaccagcgcaggcctgggcgtgtggggcc

SEQ ID NO: 33435 - DNA, 120 bp, Artificial Sequence
  ENSG00000049656_26 (sequence is synthesized)
tgccaggtgatggcagttaataggcccgtggtgctgtgcccagcagtgacaggcagtgtgcagctgttaggtagggcagtcagggacccctgaggccaggcagcccaggcaggaggcctg

SEQ ID NO: 33436 - DNA, 120 bp, Artificial Sequence
  ENSG00000049656_27 (sequence is synthesized)
ccaagatctgggaccagtgttcctggccaagggtgcctgccgtggtttaaggggcccaagtgagtgaggggtcctcctgaccttgcaggggtggaggttgtcacagtggggtggggagcg

SEQ ID NO: 33437 - DNA, 120 bp, Artificial Sequence
  ENSG00000049656_28 (sequence is synthesized)
gcggtctggacaggggcgagtggttgatgggtgtgaggacgaggagtgggtgtgtcctgttggttaggagtgaggagcatttggctccagtatcagacccgaacaagttgtttttctcgc

SEQ ID NO: 33438 - DNA, 120 bp, Artificial Sequence
  ENSG00000049656_29 (sequence is synthesized)
atggaaaagacgcccaagcaggtggccctggctgcctgggggccgtgccgtgttctgcgttgttgtctcctaaccctaatgcctttcctggcgtcctgggttggagtggccagcagacag

SEQ ID NO: 33439 - DNA, 120 bp, Artificial Sequence
  ENSG00000049656_30 (sequence is synthesized)
tggctgtggccttgaccactgtttgtcctgtggctccatggatctgcttcccctgcttgccctcagggcttgcaggaggaggaagacgtgttgaataagctggagtggttcttaaggtac

SEQ ID NO: 33440 - DNA, 120 bp, Artificial Sequence
  ENSG00000049656_31 (sequence is synthesized)
agctggggaggaaacaaatccagacttgaaaagccacgcacttatcacagaactggcataagacacgcccggaagcaaagctgtgctggccccgtcatccgacctctgcccacgttccat

SEQ ID NO: 33441 - DNA, 120 bp, Artificial Sequence
  ENSG00000049656_32 (sequence is synthesized)
gctcatttgcaagtgtggctcagacacgtgtttgtggagctggtgtggggccagctgttcagttcagcagccttccaaacactttcctagctgctgaatgcttcattgttctttttaaac

SEQ ID NO: 33442 - DNA, 120 bp, Artificial Sequence
  ENSG00000049656_33 (sequence is synthesized)
ggggtgacgtggactggggagtacctgaagcttcttgggcgtggtgggttgggatgggggactgggggtatgtgtgtgacttggggaacacaggtggggtctgccctgcaccccctccca

SEQ ID NO: 33443 - DNA, 120 bp, Artificial Sequence
  ENSG00000049656_34 (sequence is synthesized)
gtcaggggagcctccgtggtggaggcagcactggtttctgatcgcagccactctcttcgcctgaggattccccggtcatatacctagttctgaccgtcttcagtgcagacggcagcactt

SEQ ID NO: 33444 - DNA, 120 bp, Artificial Sequence
  ENSG00000049656_35 (sequence is synthesized)
ctgggcctgagccggcctctgggaggaaggatgctggctggccagcacgtgtgcttcgttttggcaccttgtccagaggcgctcccgaggctggtgctgactggggtccgtacagtcctg

SEQ ID NO: 33445 - DNA, 120 bp, Artificial Sequence
  ENSG00000049656_36 (sequence is synthesized)
gcagtcctgaagtgagtgagcccctgccctgagctggtggctgccccagtgcctgggcgcccataaggcccctaggcagatgagggctggggcagagctggagttgaatctcagtgccca

SEQ ID NO: 33446 - DNA, 120 bp, Artificial Sequence
  ENSG00000049656_37 (sequence is synthesized)
cggatggaccttgattgaggcggggccctcagcagtcacaggctgagattttccatgctgtgggcaggggggtcaggaagcccagcacacgcagcgcagccactgtgttccaccttgccc

SEQ ID NO: 33447 - DNA, 120 bp, Artificial Sequence
  ENSG00000049656_38 (sequence is synthesized)
catggctcccggccggctggttcggagcagtgttggctgtgcctgtgtgctctgcagtgttctcactgaagcggtggcactgaaaactgagccacctgagcaaggaacagcagtgaggcc

SEQ ID NO: 33448 - DNA, 120 bp, Artificial Sequence
  ENSG00000049656_39 (sequence is synthesized)
gcgttgcccccatcaggcttgtgggacccagggccagggtgaggcgggaaggatccatgcggatccccgtcctctgggtcctctcctcgcctggtagggacctgagcgccctctgtagtg

SEQ ID NO: 33449 - DNA, 120 bp, Artificial Sequence
  ENSG00000049656_40 (sequence is synthesized)
agtcacagtgccgtgcccggctctggcacccgtcctgagctccgtgggtgatgccttccaagcatttagccatgaggtggcggctctcagagcggtcccaaaactggctccagggctgcc

SEQ ID NO: 33450 - DNA, 120 bp, Artificial Sequence
  ENSG00000049656_41 (sequence is synthesized)
cgagtggcaggcagaagtaggtgggggcttatttgggtgcaggcagagtggcgtaaagaactgccctcacatgctgtttttgttgtccgctgggcggtggctgtgcagcccacctgacca

SEQ ID NO: 33451 - DNA, 120 bp, Artificial Sequence
  ENSG00000049656_42 (sequence is synthesized)
ctcaaacccctgggcttaggtggtcctttggccttggccttgcagtagctgggatcacaggcatgggccaccatgcccagcccttgcgtttttagcacagttgagagatgaggctgccct

SEQ ID NO: 33452 - DNA, 120 bp, Artificial Sequence
  ENSG00000049656_43 (sequence is synthesized)
gagtgggcacaacccgagagcaggggtgcccagccaggcccatgatccaggggaatccagagcctccaattgcctgggggcctttccagcagttcaagtcaaagcttctctttgatttcc

SEQ ID NO: 33453 - DNA, 120 bp, Artificial Sequence
  ENSG00000049656_44 (sequence is synthesized)
gtgcgatgccctgcctgtgcccctcacgccgccccctgcagagcagccctgccaccctgagcgctgtagctcgttctgtctgtccctgtcggggtgagctccatgcagtgtgtttacaga

SEQ ID NO: 33454 - DNA, 120 bp, Artificial Sequence
  ENSG00000049656_45 (sequence is synthesized)
gctgctgctgaacggaatgacggctttcaccgcaccctgcgcctgtttatccatttgagggaaaagataatttgcaggtggtggtttttcctgtcttgcctaaacttgggttccagttgc

SEQ ID NO: 33455 - DNA, 120 bp, Artificial Sequence
  ENSG00000049656_46 (sequence is synthesized)
ccatgatatgtcctggcaagaaactgttccagctctgtctcctcactgtgctttagaaatgctcgtttctatgtgaattattgatgagccactgaaagcaaatgtctctccttaagcgat

SEQ ID NO: 33456 - DNA, 120 bp, Artificial Sequence
  ENSG00000049656_47 (sequence is synthesized)
ttatttacctattcacagtcattgctattgagcagaacagagaccgtagcatggctaatccatacttggcgctagcctcgaagtgtccagccagcagtgtggacctgcagggcacaatgt

SEQ ID NO: 33457 - DNA, 80 bp, Artificial Sequence
  ENSG00000049759_0 (sequence is synthesized)
gagagcgggggcccggacggcgctagcgaggaggcgggcgagccgggtccccgggagcgcagaggaggctcggagggggg

SEQ ID NO: 33458 - DNA, 80 bp, Artificial Sequence
  ENSG00000049759_1 (sequence is synthesized)
gcagtgagaggcgccggggctgccgcccggtgctcggcgcgctctcgggagccgcccgcccgctggtcccgcagccttcc

SEQ ID NO: 33459 - DNA, 120 bp, Artificial Sequence
  ENSG00000049759_2 (sequence is synthesized)
ggcagcgtccagggcgcgctctcgggcaccctcacctgccggcgcccggccgcttacccggcagggcgtgcgcagggtagggtgcgggaccggggggacctggaggcagaggggagaacc

SEQ ID NO: 33460 - DNA, 120 bp, Artificial Sequence
  ENSG00000049759_3 (sequence is synthesized)
gaggggagaaccggccgtccgcgccgcagcacagccgctgggagcgcctcagaccccgcgcggggcgccggctccatggcgaccgggctcggggagccggtctatggactttccgaagac

SEQ ID NO: 33461 - DNA, 120 bp, Artificial Sequence
  ENSG00000049759_4 (sequence is synthesized)
gagggagagtcccgtattctcagagtaaaagttgtttctggaattgatctcgccaaaaaggacatctttggagccagtgatccgtatgtgaaactttcattgtacgtagcggatgagaat

SEQ ID NO: 33462 - DNA, 120 bp, Artificial Sequence
  ENSG00000049759_5 (sequence is synthesized)
agagaacttgctttggtccagacaaaaacaattaaaaagacactgaacccaaaatggaatgaagaattttatttcagggtaaacccatctaatcacagactcctatttgaagtatttgac

SEQ ID NO: 33463 - DNA, 120 bp, Artificial Sequence
  ENSG00000049759_6 (sequence is synthesized)
gaaaatagactgacacgagacgacttcctgggccaggtggacgtgccccttagtcaccttccgacagaagatccaaccatggagcgaccctatacatttaaggactttctcctcagacca

SEQ ID NO: 33464 - DNA, 120 bp, Artificial Sequence
  ENSG00000049759_7 (sequence is synthesized)
agaagtcataagtctcgagttaagggatttttgcgattgaaaatggcctatatgccaaaaaatggaggtcaagatgaagaaaacagtgaccagagggatgacatggagcatggatgggaa

SEQ ID NO: 33465 - DNA, 120 bp, Artificial Sequence
  ENSG00000049759_8 (sequence is synthesized)
gttgttgactcaaatgactcggcttctcagcaccaagaggaacttcctcctcctcctctgcctcccgggtgggaagaaaaagtggacaatttaggccgaacttactatgtcaaccacaac

SEQ ID NO: 33466 - DNA, 120 bp, Artificial Sequence
  ENSG00000049759_9 (sequence is synthesized)
aaccggaccactcagtggcacagaccaagcctgatggacgtgtcctcggagtcggacaataacatcagacagatcaaccaggaggcagcacaccggcgcttccgctcccgcaggcacatc

SEQ ID NO: 33467 - DNA, 120 bp, Artificial Sequence
  ENSG00000049759_10 (sequence is synthesized)
agcgaagacttggagcccgagccctcggagggcggggatgtccccgagccttgggagaccatttcagaggaagtgaatatcgctggagactctctcggtctggctctgcccccaccaccg

SEQ ID NO: 33468 - DNA, 120 bp, Artificial Sequence
  ENSG00000049759_11 (sequence is synthesized)
gcctccccaggatctcggaccagccctcaggagctgtcagaggaactaagcagaaggcttcagatcactccagactccaatggggaacagttcagctctttgattcaaagagaaccctcc

SEQ ID NO: 33469 - DNA, 120 bp, Artificial Sequence
  ENSG00000049759_12 (sequence is synthesized)
tcaaggttgaggtcatgcagtgtcaccgacgcagttgcagaacagggccatctaccaccgcccagtgccccagctgggagagcgcgttcatcaactgtcacgggtggtgaggaaccaacg

SEQ ID NO: 33470 - DNA, 120 bp, Artificial Sequence
  ENSG00000049759_13 (sequence is synthesized)
ccatcagtggcctatgtacataccacgccgggtctgccttcaggctgggaagaaagaaaagatgctaaggggcgcacatactatgtcaatcataacaatcgaaccacaacttggactcga

SEQ ID NO: 33471 - DNA, 120 bp, Artificial Sequence
  ENSG00000049759_14 (sequence is synthesized)
cctatcatgcagcttgcagaagatggtgcgtccggatcagccacaaacagtaacaaccatctaatcgagcctcagatccgccggcctcgtagcctcagctcgccaacagtaactttatct

SEQ ID NO: 33472 - DNA, 120 bp, Artificial Sequence
  ENSG00000049759_15 (sequence is synthesized)
gccccgctggagggtgccaaggactcacccgtacgtcgggctgtgaaagacaccctttccaacccacagtccccacagccatcaccttacaactcccccaaaccacaacacaaagtcaca

SEQ ID NO: 33473 - DNA, 120 bp, Artificial Sequence
  ENSG00000049759_16 (sequence is synthesized)
cagagcttcttgccacccggctgggaaatgaggatagcgccaaacggccggcccttcttcattgatcataacacaaagactacaacctgggaagatccacgtttgaaatttccagtacat

SEQ ID NO: 33474 - DNA, 120 bp, Artificial Sequence
  ENSG00000049759_17 (sequence is synthesized)
atgcggtcaaagacatctttaaaccccaatgaccttggcccccttcctcctggctgggaagaaagaattcacttggatggccgaacgttttatattgatcataatagcaaaattactcag

SEQ ID NO: 33475 - DNA, 120 bp, Artificial Sequence
  ENSG00000049759_18 (sequence is synthesized)
tgggaagacccaagactgcagaacccagctattactggtccggctgtcccttactccagagaatttaagcagaaatatgactacttcaggaagaaattaaagaaacctgctgatatcccc

SEQ ID NO: 33476 - DNA, 120 bp, Artificial Sequence
  ENSG00000049759_19 (sequence is synthesized)
aataggtttgaaatgaaacttcacagaaataacatatttgaagagtcctatcggagaattatgtccgtgaaaagaccagatgtcctaaaagctagactgtggattgagtttgaatcagag

SEQ ID NO: 33477 - DNA, 120 bp, Artificial Sequence
  ENSG00000049759_20 (sequence is synthesized)
aaaggtcttgactatgggggtgtggccagagaatggttcttcttactgtccaaagagatgttcaacccctactacggcctctttgagtactctgccacggacaactacacccttcagatc

SEQ ID NO: 33478 - DNA, 120 bp, Artificial Sequence
  ENSG00000049759_21 (sequence is synthesized)
aaccctaattcaggcctctgtaatgaggatcatttgtcctacttcacttttattggaagagttgctggtctggccgtatttcatgggaagctcttagatggtttcttcattagaccattt

SEQ ID NO: 33479 - DNA, 120 bp, Artificial Sequence
  ENSG00000049759_22 (sequence is synthesized)
tacaagatgatgttgggaaagcagataaccctgaatgacatggaatctgtggatagtgaatattacaactctttgaaatggatcctggagaatgaccctactgagctggacctcatgttc

SEQ ID NO: 33480 - DNA, 120 bp, Artificial Sequence
  ENSG00000049759_23 (sequence is synthesized)
tgcatagacgaagaaaactttggacagacatatcaagtggatttgaagcccaatgggtcagaaataatggtcacaaatgaaaacaaaagggaatatatcgacttagtcatccagtggaga

SEQ ID NO: 33481 - DNA, 120 bp, Artificial Sequence
  ENSG00000049759_24 (sequence is synthesized)
tttgtgaacagggtccagaagcagatgaacgccttcttggagggattcacagaactacttcctattgatttgattaaaatttttgatgaaaatgagctggagttgctcatgtgcggcctc

SEQ ID NO: 33482 - DNA, 120 bp, Artificial Sequence
  ENSG00000049759_25 (sequence is synthesized)
ggtgatgtggatgtgaatgactggagacagcattctatttacaagaacggctactgcccaaaccaccccgtcattcagtggttctggaaggctgtgctactcatggacgccgaaaagcgt

SEQ ID NO: 33483 - DNA, 120 bp, Artificial Sequence
  ENSG00000049759_26 (sequence is synthesized)
atccggttactgcagtttgtcacagggacatcgcgagtacctatgaatggatttgccgaactttatggttccaatggtcctcagctgtttacaatagagcaatggggcagtcctgagaaa

SEQ ID NO: 33484 - DNA, 120 bp, Artificial Sequence
  ENSG00000049759_27 (sequence is synthesized)
ctgcccagagctcacacatgctttaatcgccttgacttacctccatatgaaacctttgaagatttacgagagaaacttctcatggccgtggaaaatgctcaaggatttgaaggggtggat

SEQ ID NO: 33485 - DNA, 120 bp, Artificial Sequence
  ENSG00000049759_28 (sequence is synthesized)
taagcaccctgtgcctcgggggtggttgttcttcaagcaagttctgcttgcacttttgcatttgcctaacagacttttgcagaggcgatggcagagagcagctgcaggcatggtccctgg

SEQ ID NO: 33486 - DNA, 120 bp, Artificial Sequence
  ENSG00000049759_29 (sequence is synthesized)
agccgagccttcaccacgcactcgtccaagttcggatgcgggaacctggtcccagcttgagttcctgcctttcccaccacaaattatcaactggttgatgtgtacactaattacatttca

SEQ ID NO: 33487 - DNA, 120 bp, Artificial Sequence
  ENSG00000049759_30 (sequence is synthesized)
ggaggacttaatgctatttatgttgtgcctctgcaggcaaagcccttaataaatattttacatcctttctaatgacaatgaatggaattaatcactcaacaggtatagtattacgactca

SEQ ID NO: 33488 - DNA, 120 bp, Artificial Sequence
  ENSG00000049759_31 (sequence is synthesized)
tgtttactttttaaaatgatttagaccgattttcagattttatttcgttatgattaaagatgtctcatgtacttggaaaagtgagcattttttttttttttgtatttcactttcatacca

SEQ ID NO: 33489 - DNA, 120 bp, Artificial Sequence
  ENSG00000049759_32 (sequence is synthesized)
ggcttaatgtcaatgacatttttatttttgaagtactctgacacctccaccctctactttattagaattggaaggcaaatttttgtccaaaaacctacagacaagtactttgagagaatt

SEQ ID NO: 33490 - DNA, 120 bp, Artificial Sequence
  ENSG00000049759_33 (sequence is synthesized)
tccaatataatattagacataatgataattttttccatactcagaatgaaaaactggatattacgtttttgttttggggtttttttgtacaaatttagctaatagctacaggctgagaga

SEQ ID NO: 33491 - DNA, 120 bp, Artificial Sequence
  ENSG00000049759_34 (sequence is synthesized)
attgtaacatagcatgacaaattttgtgttgacttgaaaggaatcacaccattattccttagaagtaattacatgtgttctaacacatttgagacagggttggactcccatttctcatcc

SEQ ID NO: 33492 - DNA, 120 bp, Artificial Sequence
  ENSG00000049759_35 (sequence is synthesized)
tgtggaaaccagatctgtttagtctcctgtttgtatgcgtttgctaatggtagctaaataaccagtttttgttgtaaatgcaccaattctgaaggcactttatgtactacatggaggtca

SEQ ID NO: 33493 - DNA, 120 bp, Artificial Sequence
  ENSG00000049759_36 (sequence is synthesized)
tatctggttttgtttttatttttttatcatgaacattaaatgtgatgatgatttcttttccctgcacacatctttccggtgcaatatctatcaattgtgaatctggctgctggtgtataa

SEQ ID NO: 33494 - DNA, 120 bp, Artificial Sequence
  ENSG00000049759_37 (sequence is synthesized)
aaacctggatgtaaagctgagcctacagacctgtcctcaccaactgttttgtgatttctactcaactacaaagatttatttaatgtactcttaatctaactgagttttgttaccaatgac

SEQ ID NO: 33495 - DNA, 120 bp, Artificial Sequence
  ENSG00000049759_38 (sequence is synthesized)
ctgttgcatgcttcaataccgtgtactgcctgagttgtgcctcttgtgtgctagattaaaagtgagacagagacttgacttgatcctctgagctcaagctattgagctggtagtggcaga

SEQ ID NO: 33496 - DNA, 120 bp, Artificial Sequence
  ENSG00000049759_39 (sequence is synthesized)
ggactgagggtacctgcacagtttgattcttttccacgtgtaagtctccattgcagaattgtcgtgctttgagaaaacacctgaggcagtgtgggagttgaacgaccctgctgtcctttt

SEQ ID NO: 33497 - DNA, 120 bp, Artificial Sequence
  ENSG00000049759_40 (sequence is synthesized)
taacctgtgttgtcctagaccctgtcggggcagtcaggggacactagagatttgatctcatgcgagtcatcaataggacaaaaaagttgtggtttggggaggtctgtttgttacataaaa

SEQ ID NO: 33498 - DNA, 120 bp, Artificial Sequence
  ENSG00000049759_41 (sequence is synthesized)
aggacctttcggtgtaagaaattgccgtttttaccctgccctggctggcatgtgagaagccatggaaggttgtggttgtaaatgagttgtctaaaggggtgcagaggcctgaggtttcta

SEQ ID NO: 33499 - DNA, 120 bp, Artificial Sequence
  ENSG00000049759_42 (sequence is synthesized)
tctaaaagaaggtagatttctacagagctgagtgttggttcctttttcttattggttgaaaattacctggtagtgatcagaaaacttagatgctatgtaactaaaaaaaaaaaaaaaaaa

SEQ ID NO: 33500 - DNA, 120 bp, Artificial Sequence
  ENSG00000049759_43 (sequence is synthesized)
aaaaaaaaaaaaaaattcccgctcatgagttttgactattggtgagatgttttccgctacagttaacatgacaaatgtctcagtggcaaaaatcccctttttgtaagcccccatagtcta

SEQ ID NO: 33501 - DNA, 120 bp, Artificial Sequence
  ENSG00000049759_44 (sequence is synthesized)
gaggcagttttctttttaagaatcatgccagagcctgagtcgagcagtatgctttcttggtttttgagagtaattgtgtaattgtagagggagaaatccaattctaacctaagaactggg

SEQ ID NO: 33502 - DNA, 120 bp, Artificial Sequence
  ENSG00000049759_45 (sequence is synthesized)
attcttctgtcatcttgtaaaccgtatattgaaaaaaacagaatgtcactaaatgcatattaagtcaagtattggaaagtataaaagaaaaatcattctgacaatttctaagccagaagc

SEQ ID NO: 33503 - DNA, 120 bp, Artificial Sequence
  ENSG00000049759_46 (sequence is synthesized)
aaacaagaattactgaaatctaccccatgaatacttggaaggcagtaattgtgagtgacacctcagttcatcaaccccttaataatatcagcttaattttaatgacaactaaatatgctg

SEQ ID NO: 33504 - DNA, 120 bp, Artificial Sequence
  ENSG00000049759_47 (sequence is synthesized)
aagtgaggatttagtattttttaaaaaagcaaaacaaggttcagtagtcctcagcaattctccaagtttctctctttgcctaaaatggtcatagatcttgatttctctgaatcgtgatga

SEQ ID NO: 33505 - DNA, 120 bp, Artificial Sequence
  ENSG00000049759_48 (sequence is synthesized)
ccacacccagtcatcttcacagcataattgcaggtggcagtaaagagagtgtgctgggtaaggagcagttgctgggtcattccttgggccccgacctgcccggggagtagccctggggga

SEQ ID NO: 33506 - DNA, 120 bp, Artificial Sequence
  ENSG00000049759_49 (sequence is synthesized)
gagagggcagtgttgcctatcccagaggtcccagcagtcacactgctctgcaggccgggctctctttatagccagagaaatcaccttaatgcagtctctttagttgtctgctgaagctgt

SEQ ID NO: 33507 - DNA, 120 bp, Artificial Sequence
  ENSG00000049759_50 (sequence is synthesized)
agttattatgggccacttacatgaggctgagaagtacgtgccggagctcacacactgcctgttgcggttctcttaacatcagttatcacagctgcctgtgggtcccgggtatttccattc

SEQ ID NO: 33508 - DNA, 120 bp, Artificial Sequence
  ENSG00000049759_51 (sequence is synthesized)
ctgccccttgttggcccgaggaaggatgtggaaagagcacctggtgggatgaaggtccaacagcctgtgcctctccactgctggccctggagccggcagcagtgaggcattcattgtctg

SEQ ID NO: 33509 - DNA, 120 bp, Artificial Sequence
  ENSG00000049759_52 (sequence is synthesized)
tgttgcggtgtattcccagcttcagtgctcttttcctttttgcctgaaatgtttatgcttctctgcagccagtcctctaacaaatctcaagaacaaaggtaagacacttggtttttgttt

SEQ ID NO: 33510 - DNA, 120 bp, Artificial Sequence
  ENSG00000049759_53 (sequence is synthesized)
ccaggacccttcagaaggtgacatcagatattccctaaattcagacaatgagggatacagagcgacttggcatgtattatttctcccatgtaaggacaaagggacagattattattgtta

SEQ ID NO: 33511 - DNA, 69 bp, Artificial Sequence
  ENSG00000049759_54 (sequence is synthesized)
ttctcccatgtaaggacaaagggacagattattattgttatttctgagacagagtcttgctctgtagct

SEQ ID NO: 33512 - DNA, 120 bp, Artificial Sequence
  ENSG00000049759_55 (sequence is synthesized)
acaagcatgagccaccgcacccggcctcacagtgacagattctgagaaacagcatgcaaaacatttgaaccattttctacatctcccattgttgcatagagagtgtgcaccgctgctatc

SEQ ID NO: 33513 - DNA, 120 bp, Artificial Sequence
  ENSG00000049759_56 (sequence is synthesized)
gagtgtgcaccgctgctatcttgccagatccacactggtcctcccgaaagccaggttcatacacagcaactttttaattattctaacagttacccattaacagtcgactcctgtatttct

SEQ ID NO: 33514 - DNA, 120 bp, Artificial Sequence
  ENSG00000049759_57 (sequence is synthesized)
gagagtcttgtactcacctctgaaatttaaaaacgtataaagagagcctgggttaatcagttctgcagcccctacgtgacactgtgctagttctccttcttctgtctcctccttaccctg

SEQ ID NO: 33515 - DNA, 120 bp, Artificial Sequence
  ENSG00000049759_58 (sequence is synthesized)
gccctgcacccctgtacttaagagggagaggtgggaggtgctgtctggtatcatttgctgcctcgccagtagagggtgccgctgtgcagggtaactgcccgcctgctcccttcctgacct

SEQ ID NO: 33516 - DNA, 120 bp, Artificial Sequence
  ENSG00000049759_59 (sequence is synthesized)
cccctgaccccgaagatcactacctctgtcattcaggcattggggtacatcctgataagtcgtgtcagaactgccaatttcaggactgagatgtgtttttaaaaaacaaatccttataaa

SEQ ID NO: 33517 - DNA, 120 bp, Artificial Sequence
  ENSG00000049759_60 (sequence is synthesized)
ctccactttgtactttagattttaaaactggggaaaaatgtgatattctttggaccacttttttaatttatataagccttaatgaacagtgtctatacatttgcatacacacacccccac

SEQ ID NO: 33518 - DNA, 120 bp, Artificial Sequence
  ENSG00000049759_61 (sequence is synthesized)
cccagagtgttctcagtatgtcagagaaagtgccacagcattaggacgggagcttggagaacgttttctagaaaagggttagcttcctgttggcatgaaattttccaagcaaacctcatt

SEQ ID NO: 33519 - DNA, 120 bp, Artificial Sequence
  ENSG00000049759_62 (sequence is synthesized)
aaacatctgttgtttgttaaagatgttccactgaaagcaacgcatgtttcaaaggcacgtctttccgttcgttggttttctgtgtgtaaggagtagcattgctgttggcgcctaacctcg

SEQ ID NO: 33520 - DNA, 120 bp, Artificial Sequence
  ENSG00000049759_63 (sequence is synthesized)
cgtgcactgcattctcaaccccgtaccagtgcatcatcagaagccttcctcgtgaccataactctgtgtctgcagatatgtgttcccgtgtaagccagttttccccttttactcagactg

SEQ ID NO: 33521 - DNA, 120 bp, Artificial Sequence
  ENSG00000049759_64 (sequence is synthesized)
atttcacctagattgtcacggtttccttcatgttaactttgcgtgactttgttcttcctttactactctgtatgtaatatatatacatatatacgtacatatgctgtccaaatatatttg

SEQ ID NO: 33522 - DNA, 120 bp, Artificial Sequence
  ENSG00000049759_65 (sequence is synthesized)
tatatatttgtatagcatttttacacctttattgagtaatctggtttcgaaaggaggtgagagtttagtcccttctgcagttttctccaagctgtgtcctgtgaatttcaacccttggag

SEQ ID NO: 33523 - DNA, 120 bp, Artificial Sequence
  ENSG00000049759_66 (sequence is synthesized)
cctaagaaaaccctaggaagatgatgttaatttgctgtcatttcctaattcaggatctatcatcaaatgaaacatgaaaaaaacagtgacttttaaggtgaaaagagtttcaagcattcc

SEQ ID NO: 33524 - DNA, 120 bp, Artificial Sequence
  ENSG00000049759_67 (sequence is synthesized)
aaataaattatcaatgtttcataactttttattataaacccacctcctaataggaagccaagtactatttgatacagtggtaaaaaccaaactaccttgaatttttttaaggcaacttat

SEQ ID NO: 33525 - DNA, 120 bp, Artificial Sequence
  ENSG00000049759_68 (sequence is synthesized)
gaataatgctcattttcacagtcagaatagctttaaaatatggttgaatttgatacacacaggaagttttcttgaagaacaatcctttcgcttttcttttttcttgagagatctaaagag

SEQ ID NO: 33526 - DNA, 120 bp, Artificial Sequence
  ENSG00000049759_69 (sequence is synthesized)
aaactgtagattgttttcctgacagcaaaagactaatgtgacaaaatgaagtcattgtaaagaagcgatgcaacttgtcaaatatttaataaagaattatggaagctggaacattttcta

SEQ ID NO: 33527 - DNA, 120 bp, Artificial Sequence
  ENSG00000049759_70 (sequence is synthesized)
acttggcattgggactggcattaaaaatctgttttgcaaacaggagccagtcttttgattagcagggaggatgcctgcgagggacggaggccattgttccctgtgttaggcgttgttgct

SEQ ID NO: 33528 - DNA, 120 bp, Artificial Sequence
  ENSG00000049759_71 (sequence is synthesized)
ggttcagtttctaggcgagtgggggctgtctagaaggctcaccaggaaggcagctgggaaacttggttgcctgctggatgtggagccaggaccaaagccggcgactggggctattgcaat

SEQ ID NO: 33529 - DNA, 120 bp, Artificial Sequence
  ENSG00000049759_72 (sequence is synthesized)
atcagtataagtagcgagctgggcgcattccttctcagttgtgttaaaacttgctggtattcccccggtatcagcagaggtgtgtacgggcactgctttaaaactgggaaggaggaagac

SEQ ID NO: 33530 - DNA, 120 bp, Artificial Sequence
  ENSG00000049759_73 (sequence is synthesized)
gaggccagggagccggagggtcaccaaggtagatttccagcagcgctagtccagctgaacactttccagccttgtttttcagcagctttgaggaaaagtatagtgatccgtatgtgaaac

SEQ ID NO: 33531 - DNA, 120 bp, Artificial Sequence
  ENSG00000049759_74 (sequence is synthesized)
attttatttcatttgagatttcagactttgtcgcttgttctttctgtagaagttttttcatagaagtatgttgtttcaaaagcaaccttcaaatagtagacttagcttggatgagaatct

SEQ ID NO: 33532 - DNA, 120 bp, Artificial Sequence
  ENSG00000049759_75 (sequence is synthesized)
aaaagtctttgagtccaacaaccaagcaggtcccctgtccaggaagtaccttatagctgatgtttgagtatccctgcagatgggaactcactacctcctgaagcaccttacttctaccct

SEQ ID NO: 33533 - DNA, 120 bp, Artificial Sequence
  ENSG00000049759_76 (sequence is synthesized)
tggaatagtaacagagattaaaatgtccttccttaatttgaggtgaaatctgccttcttgtccattttacacacactaaccttccttccaccatgcaagctgagagagagccaggttgag

SEQ ID NO: 33534 - DNA, 120 bp, Artificial Sequence
  ENSG00000049759_77 (sequence is synthesized)
tgcacttgctcttcactggctaggttccagttgctctgtacctttcctaaagtgtggtgaccagaatttggcacagtgagggaaggttccagagccctttagtgttatcgggggcacaga

SEQ ID NO: 33535 - DNA, 120 bp, Artificial Sequence
  ENSG00000049759_78 (sequence is synthesized)
gcttgggctttggagtcgctcagatcttgagttgatatgcacttctttgtccttgagcaaatgattgaaccttcttggactctcagttcctcattaataaaatgaagatgaaacaagatg

SEQ ID NO: 33536 - DNA, 120 bp, Artificial Sequence
  ENSG00000049759_79 (sequence is synthesized)
agatggactgtgcacatttcctgatgggggctggtatgtgctggtgcccagtgcaaagtggctgctggcagaatggtgagtcaccagtacctgctcccttcactgagtgcttcctgtgtg

SEQ ID NO: 33537 - DNA, 120 bp, Artificial Sequence
  ENSG00000049759_80 (sequence is synthesized)
cctggcaccattgctcagggctttacatggacttactcatttcattttcactgcagcctagagcgtaaggagagtcccgtattctcagagtaaaagttgtttctggaattgatctcgcca

SEQ ID NO: 33538 - DNA, 120 bp, Artificial Sequence
  ENSG00000049759_81 (sequence is synthesized)
ttttgctcttatccaatcatgcctggaatgccgcttgccacttgggttatttctgctatctgtcgctcccggtgccgcagtgctaacagtttggcagatgggacactttttcttggaatt

SEQ ID NO: 33539 - DNA, 120 bp, Artificial Sequence
  ENSG00000049759_82 (sequence is synthesized)
tgtgtctttggtttgtgacttctggcagtgtcgggcctgttgttgccgcttgccctagccctcctggcccccctggtcaccatggcccatcggcttcggtttcattttggctctggtcgc

SEQ ID NO: 33540 - DNA, 120 bp, Artificial Sequence
  ENSG00000049759_83 (sequence is synthesized)
agcaacacagcccccgaatcagacatcctagaccaggagagagaagacgacttcttcatggcattccacaccctaccgcggagaagcagcccgcaccccttcgcccagaacggaggggag

SEQ ID NO: 33541 - DNA, 120 bp, Artificial Sequence
  ENSG00000049759_84 (sequence is synthesized)
gacggcggcggaggcctgcagggaggcgtgggtgcgcttaagcggagctcgtccatgttcatcccgcagctcttgaccagcatcgacgcccgccccacgtgcagctcctccgtgcagatc

SEQ ID NO: 33542 - DNA, 120 bp, Artificial Sequence
  ENSG00000049759_85 (sequence is synthesized)
gatctccctgcagcgcaaggccacggacggggccacggacgggtgcgggccgcccgagggcgccgacgatgggcctccatgcgcaacgcccgaccccagggaccaggcctccgccactgc

SEQ ID NO: 33543 - DNA, 120 bp, Artificial Sequence
  ENSG00000049759_86 (sequence is synthesized)
caccacgagggcctcgccccagagtggctcccgggagccctcgccgagggacacccccgggagctcccctccgagggcagcccgggacccagggctccaggtcaacggcacgtgcggccg

SEQ ID NO: 33544 - DNA, 80 bp, Artificial Sequence
  ENSG00000049759_87 (sequence is synthesized)
gtgcggtgctccggccccgtggactgcgcggaggaggctgccccgggcctgcgcatccagcaccgcgcctccagcgccga

SEQ ID NO: 33545 - DNA, 120 bp, Artificial Sequence
  ENSG00000049759_88 (sequence is synthesized)
cagggcggcccggccgcggcagagcccaggcgctggtccctgcagcacgttccagatgcttctggaagctctgggaagcggtgttttgtcttccagttgcagcagccccaacaaggcgct

SEQ ID NO: 33546 - DNA, 120 bp, Artificial Sequence
  ENSG00000049759_89 (sequence is synthesized)
tcggggccaggcagcgacctcaactttggcttcacgggcacaaagggggacaggttggtgaggtatcctcgcattcggctggagaggagcacctcgtaccccacgcagccccgaagcgag

SEQ ID NO: 33547 - DNA, 120 bp, Artificial Sequence
  ENSG00000049759_90 (sequence is synthesized)
cgagggagccccacggaagatcggggagccctggaggcatcgcctcgagctggcaggatggctcctgaaatccgcaggacgaactccgcggagaggactccgcagggccaggggtgcaca

SEQ ID NO: 33548 - DNA, 120 bp, Artificial Sequence
  ENSG00000049759_91 (sequence is synthesized)
tttaagatcaggcaggatcagaacgcggggcagcagcattttagaattcttgtaacccgggggccggaagaagctccccagaatcccgaggagaaaagcgccaaaagccctgtttccacg

SEQ ID NO: 33549 - DNA, 120 bp, Artificial Sequence
  ENSG00000049759_92 (sequence is synthesized)
cacttctgcccagcagcactgccagtgacagtctgagagtggtaatatctcttagtctttgactcaaaaggtctcatttgacctctctgaagttcagctgatgatagaaatcttggttaa

SEQ ID NO: 33550 - DNA, 120 bp, Artificial Sequence
  ENSG00000049759_93 (sequence is synthesized)
agacattcctaaacaaaggggctgcttgggttgacgtattgtggggggtgggggtgaggacagctgcatttcatcctaggttcttttaaaaaatgttttaataacatgattatttgtaaa

SEQ ID NO: 33551 - DNA, 120 bp, Artificial Sequence
  ENSG00000049759_94 (sequence is synthesized)
aactcccccgaaaaaacgattttaagagtgttttgggaagtgcagctggataaatgaaacacgttaatgtcactgttgtttgtgctttatttacattggcagtgagtgtcagaatctacc

SEQ ID NO: 33552 - DNA, 120 bp, Artificial Sequence
  ENSG00000049759_95 (sequence is synthesized)
tagagcacatcttgccacttttgtccacaggagtcactactaatcatcataactgatgtctagtgtgaaagtgaagcttggaatgtaaacagagtccgagtgtgtgttggcatgtgactg

SEQ ID NO: 33553 - DNA, 120 bp, Artificial Sequence
  ENSG00000049759_96 (sequence is synthesized)
gattcactcctgcatgttgctagaagggaatttggggctgtataggaaatagcaagaggtgatgaagacaccttttattatctatttattgccatgtcgctggtagtatttagttccaca

SEQ ID NO: 33554 - DNA, 120 bp, Artificial Sequence
  ENSG00000049759_97 (sequence is synthesized)
cacattgtatttcacaagatgagtctcagccgtcttcctttttcaactttctcctaccagtgaaaaaataagccagggcagttctgatgacttcacatttcattggtatttgtttttcat

SEQ ID NO: 33555 - DNA, 120 bp, Artificial Sequence
  ENSG00000049759_98 (sequence is synthesized)
aattagtatgtgtaagaaaaaccaatggaagattttagcaggctctgaaagtagaatgcccgctgaagcaaacggcagggttgttcttccaaggcgtattaaatatgggtacacttagtt

SEQ ID NO: 33556 - DNA, 120 bp, Artificial Sequence
  ENSG00000049759_99 (sequence is synthesized)
tgcagacttggtgtgctgcagaatatcacatatgaagatattttgaccgctatttagaagagtgacctcataaatcttttagcaaagtagacacacatacctaccacatttcttaaaagt

SEQ ID NO: 33557 - DNA, 120 bp, Artificial Sequence
  ENSG00000049759_100 (sequence is synthesized)
agattcgtattttgatttgagattgttgaaaagcatggtatgtttggagtgcacttagttatgtcccatctcataaagactgttgagctctctgcactgctgatgatgaagcattgcatg

SEQ ID NO: 33558 - DNA, 120 bp, Artificial Sequence
  ENSG00000049759_101 (sequence is synthesized)
cacttggcttgttttagatgtttgcctacagcagtccaagtggcattaccagtaaagccacctggattcccataataatgcagatatgtaagatacacagattattttagaaccccatct

SEQ ID NO: 33559 - DNA, 120 bp, Artificial Sequence
  ENSG00000049759_102 (sequence is synthesized)
ttgcctttgttgttttgtttttgttttgttttgttttgtttcattttataaaatgatgtcttctagggaacgtgtctacaatctgaaatcccatctcataacctggcttccccttgtgat

SEQ ID NO: 33560 - DNA, 120 bp, Artificial Sequence
  ENSG00000049759_103 (sequence is synthesized)
gacaaatcttaaatactgtatatttataattggcttagggggaactggtaagcctcgaacacagaaacatgagcttggtgccatcagagagtttgctttttatatcatttattttggcct

SEQ ID NO: 33561 - DNA, 120 bp, Artificial Sequence
  ENSG00000049759_104 (sequence is synthesized)
attggcagaagaagaaagagacggacattgtgatcactcagtctcttagattagagaggccagctagtattgtggccataaaaaacctactcagttttcagagtcaactgtctaggtctt

SEQ ID NO: 33562 - DNA, 120 bp, Artificial Sequence
  ENSG00000049759_105 (sequence is synthesized)
acattgcaatataaataagattaagttctgcctgcctgcatgacagcagcatgtgccatgggtcacgtggggggtataatgaccttctgcctctgttcataggctgtgctactcatggac

SEQ ID NO: 33563 - DNA, 120 bp, Artificial Sequence
  ENSG00000049759_106 (sequence is synthesized)
tgctaatttccagtcatcagttgactttttgggctttcatttacaatcatctgggctgctgcaaaaagagtttttcctgtgtaaatttatttacaatataaatgagatgtttttaaattt

SEQ ID NO: 33564 - DNA, 120 bp, Artificial Sequence
  ENSG00000049759_107 (sequence is synthesized)
acccgggactgcggagaagccggatcgtttccccctggaactttctctctcatgattgtgtggatcagcaggcgctcagaagcctgtgcgtgcttatcccggcgggaatgggggacacgc

SEQ ID NO: 33565 - DNA, 120 bp, Artificial Sequence
  ENSG00000049759_108 (sequence is synthesized)
tgcgtgtgtccctcccctcgttttgcaaagtctacggccaggattgtggatttcggagcctcggtgggggaggtgttcaaggctggtggcaggtgctcctggaaacttggggaggaagct

SEQ ID NO: 33566 - DNA, 120 bp, Artificial Sequence
  ENSG00000049759_109 (sequence is synthesized)
tgcagccctgccattttttcctcccgaggattcaaagcccggcacctccagggtgggtggggagaggaaagcttaattgatctcttttattaataaagcgactgaataagccacgcctcc

SEQ ID NO: 33567 - DNA, 120 bp, Artificial Sequence
  ENSG00000049759_110 (sequence is synthesized)
cagcaaaaataatcagctgtagttgccttgtccatcagagggcagttctggaacatgcctagtaagtagaggccactgagcagagctgggatcatggccctatgcaccaggcgaggcaaa

SEQ ID NO: 33568 - DNA, 120 bp, Artificial Sequence
  ENSG00000049759_111 (sequence is synthesized)
ttgccacaacaagtagaaacaaggtttgcagtagccctctggacagcagaaacctgcttacactaccagactggccaagtatcctctgctgcatccccatccacccccaccgtggcagcc

SEQ ID NO: 33569 - DNA, 120 bp, Artificial Sequence
  ENSG00000049759_112 (sequence is synthesized)
aaatgggggtcttggccacaaggtggccgtaagcatctacttgggcctgtagaacgacgtctcattgaacttgaagtggtttatgttgagtgaggaaaaatgtcagaaggcaacagggtt

SEQ ID NO: 33570 - DNA, 120 bp, Artificial Sequence
  ENSG00000049759_113 (sequence is synthesized)
gtagcaaaaggtagtttagtgattgtctagttcagcttcttggtgttgacatagttgagtaacagccattttaaaaacaaaggaatatctcgccctttgttgtgtcgagagaaacagggg

SEQ ID NO: 33571 - DNA, 120 bp, Artificial Sequence
  ENSG00000049759_114 (sequence is synthesized)
aaagactgtctgttgagaagccgttggtgggactcggccatttgccccgtccatagccagtgagtgtttcccatacactggccttctatacttttatctcaaaacagaaagttcaagatc

SEQ ID NO: 33572 - DNA, 120 bp, Artificial Sequence
  ENSG00000049759_115 (sequence is synthesized)
gatgatgtctatagaaatcatatacctcaagcctttcctctgataggtgggaaactgaggcagagagcagctgggtttacccagcaaggttttggcacggtcaggcctaggaactttatt

SEQ ID NO: 33573 - DNA, 120 bp, Artificial Sequence
  ENSG00000049759_116 (sequence is synthesized)
tccaggcttctggcttagttctgtttccatttcattctggtacctttgcataaatatcttccatttgtccacaggaaacctcccctgatggagagttgcataataggaacggcaaacctt

SEQ ID NO: 33574 - DNA, 120 bp, Artificial Sequence
  ENSG00000049759_117 (sequence is synthesized)
agactaaatgctaagtcgaagacccagttgtgccttagcgtatgtctgccattcttaggcctctgggcagatgaggtgatttgtcatcactggaattgatcaacctggaggagagtcata

SEQ ID NO: 33575 - DNA, 120 bp, Artificial Sequence
  ENSG00000049759_118 (sequence is synthesized)
gatgcttttagatattcagaggaataacctctcaggaggagaagcagccagggtaatgcacagatgctgctggagcgtgagagaatccacaggtcccatgcgtaagactagaggggtagg

SEQ ID NO: 33576 - DNA, 120 bp, Artificial Sequence
  ENSG00000049759_119 (sequence is synthesized)
gaggacgactgtggcatttttatatccgatacgacatgccgtggcttgcgcaaggttcgaattgagctgccctcgtgactgctgcctctgtgatctgctatggcaggtggagcctggaac

SEQ ID NO: 33577 - DNA, 120 bp, Artificial Sequence
  ENSG00000049759_120 (sequence is synthesized)
aggtgtctgccttcctctgttgttatgatttgctagcttaccttcgcggcacagtgaccacatgctggcactgagggtggtcatttctcagtgtgtgatctcgcacctttcacatcctgc

SEQ ID NO: 33578 - DNA, 120 bp, Artificial Sequence
  ENSG00000049759_121 (sequence is synthesized)
aggggaaacagaccatctgcatctagacctgcctctctctccgctccccacttcagacgagctcttcctgcctggaatctgcttctgctccattgctgttgaacttttttttggtcgtga

SEQ ID NO: 33579 - DNA, 120 bp, Artificial Sequence
  ENSG00000049759_122 (sequence is synthesized)
gatctcgccaaaaaggacatctttggagccagcttctgctccattgctgttgaacttttttttggtcgtgacatcagaaaaataaccaagttgatccgtatgtgaaactttcattgtacg

SEQ ID NO: 33580 - DNA, 120 bp, Artificial Sequence
  ENSG00000049759_123 (sequence is synthesized)
tttccagagaggaacaaccgtgtagactgctttcctgggagtcaagttaaaacttctctcctgtgaccttgtcacccggcagtggaaagttacccttggctgcagccacgacttccgcat

SEQ ID NO: 33581 - DNA, 120 bp, Artificial Sequence
  ENSG00000049759_124 (sequence is synthesized)
gaggcagttttaatatttcgtgtagtggtgaatatacgctgtttttaaaaataagattagctcctttgtgctacagagctgcacacgtttcttattttaagcttctcatttggggattgt

SEQ ID NO: 33582 - DNA, 120 bp, Artificial Sequence
  ENSG00000049759_125 (sequence is synthesized)
agtcccacataattttattaggaatactatcaggctttggttaagtgcatttaacttgaccatttagaagatatttttgacttttagtgtttgtactcctgataagtttttccatttcat

SEQ ID NO: 33583 - DNA, 120 bp, Artificial Sequence
  ENSG00000049759_126 (sequence is synthesized)
tagaatgcttggttaaagtaatttggttggaagatcatcaaagaagccacaggaattgcatgagactgtgtgtgtgattcctggatgtgcccagggcccttctcttttctgtatctcccc

SEQ ID NO: 33584 - DNA, 120 bp, Artificial Sequence
  ENSG00000049759_127 (sequence is synthesized)
taccacatttttcacagggggttagacttttcttgtccccagaatgcaccatgaccctttctctgccaccaggggctctcctcacacaatgaacaagtttccgtaattccaagggaacat

SEQ ID NO: 33585 - DNA, 120 bp, Artificial Sequence
  ENSG00000049759_128 (sequence is synthesized)
gaggtctcctgtgtaaaggcaaattatacccccaccccggaggaatcagtctgtgatcccagtttgaaaactactgatccacatgattgtgaaccaagcaagatcatttggacaaatcta

SEQ ID NO: 33586 - DNA, 120 bp, Artificial Sequence
  ENSG00000049759_129 (sequence is synthesized)
acttccgtgttccccacatttgaatttgctcccgattcgagagaggcaggcatccgcggcagcagcttccaacccagacaggcttaagccgcgcgagggtgcccgggtgggtggctgcgc

SEQ ID NO: 33587 - DNA, 120 bp, Artificial Sequence
  ENSG00000049759_130 (sequence is synthesized)
agggccctacctgggcgggagcggctgcagagccctgtccacgcggtgcctccccagcacggcacctcccactccaggctgttggttacctggccgggagctggcggagaccaggatttc

SEQ ID NO: 33588 - DNA, 120 bp, Artificial Sequence
  ENSG00000049759_131 (sequence is synthesized)
tcctcgccgccgttgctgttgttaggggaaacagaccatctgcatctagacctgcctctctctccgctccccacttcagacgagctcttcctgcctggaatctgtgatccgtatgtgaaa

SEQ ID NO: 33589 - DNA, 120 bp, Artificial Sequence
  ENSG00000049759_132 (sequence is synthesized)
atcactgcctagtcctctctcgaccagccacgctcggctcttattgggagagtcccgtattctcagagtaaaagttgtttctggaattgatctcgccaaaaaggacatctttggagccag

SEQ ID NO: 33590 - DNA, 120 bp, Artificial Sequence
  ENSG00000049759_133 (sequence is synthesized)
cagggagctgaacttcccatgttgacgttgaattctagagtatgcttatgctgattcttgagaaattgggagagtcccgtattctcagagtaaaagttgtttctggaattgatctcgcca

SEQ ID NO: 33591 - DNA, 120 bp, Artificial Sequence
  ENSG00000049759_134 (sequence is synthesized)
aggactgatgctggctttggggtctgttagagcttggactgctgggggagggaagaggcaaactgagccagcagccccgtggtggctcctctgtaactgtagcagacagctagacttgaa

SEQ ID NO: 33592 - DNA, 120 bp, Artificial Sequence
  ENSG00000049759_135 (sequence is synthesized)
tgaagttggtccctacaaaagcacactggccttccttgaccacctcgtgaaagtgacttttatttgagggactggtcctccaatgcgtaaatagaaatggggggcttctcagggcagaaa

SEQ ID NO: 33593 - DNA, 120 bp, Artificial Sequence
  ENSG00000049759_136 (sequence is synthesized)
gcgctcaggtctggctcccctttcgagaggtgaattttacaacccaagaagcattactcagcagggagggagagtcccgtattctcagagtaaaagttgtttctggaattgatctcgcca

SEQ ID NO: 33594 - DNA, 120 bp, Artificial Sequence
  ENSG00000049759_137 (sequence is synthesized)
accgatgaggtggaaccaaagctgttcagcagaagagagcaaccacagagcagcctgttgggtggagggcttgagggttcctaaaatccgaggactttctgtgatccgtatgtgaaactt

SEQ ID NO: 33595 - DNA, 120 bp, Artificial Sequence
  ENSG00000049768_0 (sequence is synthesized)
aaaatttccgtttaagtctcataatcaagaaaaggagaaacacagagagagagaaaaaaaaaactatgagaacccctccccaccccgtgattatcagcgcacacactcatcgaaaaaaat

SEQ ID NO: 33596 - DNA, 120 bp, Artificial Sequence
  ENSG00000049768_1 (sequence is synthesized)
ttggattattagaagagagaggtctgcggcttccacaccgtacagcgtggtttttcttctcggtataaaagcaaagttgtttttgatacgtgacagtttcccacaagccaggctgatcct

SEQ ID NO: 33597 - DNA, 120 bp, Artificial Sequence
  ENSG00000049768_2 (sequence is synthesized)
tttctgtcagtccacttcaccaagcctgcccttggacaaggacccgatgcccaaccccaggcctggcaagccctcggccccttccttggcccttggcccatccccaggagcctcgcccag

SEQ ID NO: 33598 - DNA, 120 bp, Artificial Sequence
  ENSG00000049768_3 (sequence is synthesized)
ctggagggctgcacccaaagcctcagacctgctgggggcccggggcccagggggaaccttccagggccgagatcttcgaggcggggcccatgcctcctcttcttccttgaaccccatgcc

SEQ ID NO: 33599 - DNA, 120 bp, Artificial Sequence
  ENSG00000049768_4 (sequence is synthesized)
accatcgcagctgcagctgcccacactgcccctagtcatggtggcaccctccggggcacggctgggccccttgccccacttacaggcactcctccaggacaggccacatttcatgcacca

SEQ ID NO: 33600 - DNA, 120 bp, Artificial Sequence
  ENSG00000049768_5 (sequence is synthesized)
gctctcaacggtggatgcccacgcccggacccctgtgctgcaggtgcaccccctggagagcccagccatgatcagcctcacaccacccaccaccgccactggggtcttctccctcaaggc

SEQ ID NO: 33601 - DNA, 120 bp, Artificial Sequence
  ENSG00000049768_6 (sequence is synthesized)
ccggcctggcctcccacctgggatcaacgtggccagcctggaatgggtgtccagggagccggcactgctctgcaccttcccaaatcccagtgcacccaggaaggacagcaccctttcggc

SEQ ID NO: 33602 - DNA, 120 bp, Artificial Sequence
  ENSG00000049768_7 (sequence is synthesized)
tgtgccccagagctcctacccactgctggcaaatggtgtctgcaagtggcccggatgtgagaaggtcttcgaagagccagaggacttcctcaagcactgccaggcggaccatcttctgga

SEQ ID NO: 33603 - DNA, 120 bp, Artificial Sequence
  ENSG00000049768_8 (sequence is synthesized)
tgagaagggcagggcacaatgtctcctccagagagagatggtacagtctctggagcagcagctggtgctggagaaggagaagctgagtgccatgcaggcccacctggctgggaaaatggc

SEQ ID NO: 33604 - DNA, 120 bp, Artificial Sequence
  ENSG00000049768_9 (sequence is synthesized)
actgaccaaggcttcatctgtggcatcatccgacaagggctcctgctgcatcgtagctgctggcagccaaggccctgtcgtcccagcctggtctggcccccgggaggcccctgacagcct

SEQ ID NO: 33605 - DNA, 120 bp, Artificial Sequence
  ENSG00000049768_10 (sequence is synthesized)
agttccacaacatgcgaccccctttcacctacgccacgctcatccgctgggccatcctggaggctccagagaagcagcggacactcaatgagatctaccactggttcacacgcatgtttg

SEQ ID NO: 33606 - DNA, 120 bp, Artificial Sequence
  ENSG00000049768_11 (sequence is synthesized)
ccttcttcagaaaccatcctgccacctggaagaacgccatccgccacaacctgagtctgcacaagtgctttgtgcgggtggagagcgagaagggggctgtgtggaccgtggatgagctgg

SEQ ID NO: 33607 - DNA, 120 bp, Artificial Sequence
  ENSG00000049768_12 (sequence is synthesized)
agttccgcaagaaacggagccagaggcccagcaggtgttccaaccctacacctggcccctgacctcaagatcaaggaaaggaggatggacgaacaggggccaaactggtgggaggcagag

SEQ ID NO: 33608 - DNA, 120 bp, Artificial Sequence
  ENSG00000049768_13 (sequence is synthesized)
gtggtgggggcagggatgataggccctggatgtgcccacagggaccaagaagtgaggtttccactgtcttgcctgccagggcccctgttcccccgctggcagccaccccctcccccatca

SEQ ID NO: 33609 - DNA, 120 bp, Artificial Sequence
  ENSG00000049768_14 (sequence is synthesized)
tatcctttgccccaaggctgctcagaggggccccggtcctggccccagcccccacctccgccccagacacaccccccagtcgagccctgcagccaaacagagccttcacaaccagccaca

SEQ ID NO: 33610 - DNA, 120 bp, Artificial Sequence
  ENSG00000049768_15 (sequence is synthesized)
cagagcctgcctcagctgctcgcacagattacttcagggctggaaaagtcacacagacacacaaaatgtcacaatcctgtccctcactcaacacaaaccccaaaacacagagagcctgcc

SEQ ID NO: 33611 - DNA, 120 bp, Artificial Sequence
  ENSG00000049768_16 (sequence is synthesized)
tcagtacactcaaacaacctcaaagctgcatcatcacacaatcacacacaagcacagccctgacaacccacacaccccaaggcacgcacccacagccagcctcagggcccacaggggcac

SEQ ID NO: 33612 - DNA, 120 bp, Artificial Sequence
  ENSG00000049768_17 (sequence is synthesized)
tgtcaacacaggggtgtgcccagaggcctacacagaagcagcgtcagtaccctcaggatctgaggtcccaacacgtgctcgctcacacacacggcctgttagaattcacctgtgtatctc

SEQ ID NO: 33613 - DNA, 120 bp, Artificial Sequence
  ENSG00000049768_18 (sequence is synthesized)
acgcatatgcacacgcacagccccccagtgggtctcttgagtcccgtgcagacacacacagccacacacactgccttgccaaaaataccccgtgtctcccctgccactcacctcactccc

SEQ ID NO: 33614 - DNA, 120 bp, Artificial Sequence
  ENSG00000049768_19 (sequence is synthesized)
attccctgagccctgatccatgcctcagcttagactgcagaggaactactcatttatttgggatccaaggcccccaacccacagtaccgtccccaataaactgcagccgagctccccaca

SEQ ID NO: 33615 - DNA, 120 bp, Artificial Sequence
  ENSG00000049768_20 (sequence is synthesized)
gggctgcgcgggacgtagcgcgctgggtggtcgcaaaaggaagcccagccgtcgtgtgaggcccgcacgtgcaccgccttctcgaaggagcggttcagcacgcgtaccaacccgcgcagc

SEQ ID NO: 33616 - DNA, 120 bp, Artificial Sequence
  ENSG00000049768_21 (sequence is synthesized)
caggcacccacaccccggcacccccggggaccgctccgggaggcggcagcagcgcctccagctccaccatgacgcgccccaagcgctccagacggcccggcgcgggcggcagcgaaaatg

SEQ ID NO: 33617 - DNA, 120 bp, Artificial Sequence
  ENSG00000049768_22 (sequence is synthesized)
tttccagaagggtctgaagccagtcttgtagagggctggagtggttgttggacgactagaaccctgggctttgcagggtgctgggagctggaagtcttcaccatggcctgtcaggagaag

SEQ ID NO: 33618 - DNA, 120 bp, Artificial Sequence
  ENSG00000049768_23 (sequence is synthesized)
ttcttcagaaaccatcctgccacctggaaggtgagctcctctgaggtggcggtgactgggatggcctcaagtgccatcgcagctcaaagtgggcaggcctgggtctgggctcataggcac

SEQ ID NO: 33619 - DNA, 80 bp, Artificial Sequence
  ENSG00000049769_0 (sequence is synthesized)
cgccgccggtgccgtcggtgccgccgccgccgccgatatggcgcgtacggcccctgtggagcccccgctgcggcattccg

SEQ ID NO: 33620 - DNA, 80 bp, Artificial Sequence
  ENSG00000049769_1 (sequence is synthesized)
cgaggcggcggtggccccgcggagggtgctgttcgccgacgaggccttggggctgccgctggcgcagttgcgccgctacc

SEQ ID NO: 33621 - DNA, 120 bp, Artificial Sequence
  ENSG00000049769_2 (sequence is synthesized)
gtggggcgggcccggggcgggcaagatggcggcggcggccgggcaagatggcggcggcggcggcggggccgacgaggacgacgatggcgaggatggggatgaaggggaggaggaagagga

SEQ ID NO: 33622 - DNA, 120 bp, Artificial Sequence
  ENSG00000049769_3 (sequence is synthesized)
aggaggcttgccccgagccctcaccgctgtgccccgtccccgctggcggggggttttacctggtccccacattttcgctgccgcccgcgccgggccgtctggagcgcttggggcgcgtca

SEQ ID NO: 33623 - DNA, 120 bp, Artificial Sequence
  ENSG00000049769_4 (sequence is synthesized)
ctggaggcgctgctgccgcctcccggagcggtccccgggggtgccggggtgtgggtgcctgggggccgcccgccggtgctgcgcgggttggtacgcgtgctgaaccgctccttcgagaag

SEQ ID NO: 33624 - DNA, 120 bp, Artificial Sequence
  ENSG00000049769_5 (sequence is synthesized)
tcgagaaggcggtgcacgtgcgggcctcacacgacggctgggcttccttttgcgaccacccagcgcgctacgtcccgcgcagcccgccgtgggcaggagcgggaggaacaggagcaggag

SEQ ID NO: 33625 - DNA, 120 bp, Artificial Sequence
  ENSG00000049769_6 (sequence is synthesized)
atcccatcctggatccggggctcggcctgggtcccggccaggcatccgcctcctcgcccgacgacggcggccgcaccgaccgctttgccttccagctgccctttgctgagggcgcgggcg

SEQ ID NO: 33626 - DNA, 120 bp, Artificial Sequence
  ENSG00000049769_7 (sequence is synthesized)
atggggcgcgcctcgacttcgtggtgcgctatgagacccctgagggcactttctgggccaacaaccacggccgcaactacacagtcctgctccggatcgcacccgctcccacacccactg

SEQ ID NO: 33627 - DNA, 120 bp, Artificial Sequence
  ENSG00000049769_8 (sequence is synthesized)
atgccgaagggctgccccagcagcagcagctgccgcagctggagccacagcccgagtgccagggtcccgtggaggctgaggccaggcagctgaagagctgcatgaagccggtgaggcgca

SEQ ID NO: 33628 - DNA, 120 bp, Artificial Sequence
  ENSG00000049769_9 (sequence is synthesized)
ggcctgccgaggaggaactgaagacgaagaacatggatgataacacctttgccatggcagagcatcctgatgtccaggagtcagtgggtccactggtagcccccacccctctccgtccat

SEQ ID NO: 33629 - DNA, 120 bp, Artificial Sequence
  ENSG00000049769_10 (sequence is synthesized)
ggccccagatgacacttcaggtttctgacgttccgatgactggcaaccccgcagaagaaggtgatgtccccagaagcagtccacctgtggcttttacagaggtcctccaggcaccggcca

SEQ ID NO: 33630 - DNA, 120 bp, Artificial Sequence
  ENSG00000049769_11 (sequence is synthesized)
tcaggattcccccctcctcccctctctgtggcctgggtggctcccccagagaccaggcctcagggcccgatgcgagcgagggggccaccgggcctttcctggagcccagtcagcagcagg

SEQ ID NO: 33631 - DNA, 120 bp, Artificial Sequence
  ENSG00000049769_12 (sequence is synthesized)
cagaggccacatggggagtatcgagtgagaatggaggggggctggaggctgtgagtgggtcagaggagctgctcggtgaggacaccatcgaccaggagctggagcagctctacctgtctc

SEQ ID NO: 33632 - DNA, 120 bp, Artificial Sequence
  ENSG00000049769_13 (sequence is synthesized)
acctgagccgcctacgggctgctgtggctgcgggtggggcagggggtggtggggagggctccacagatggagggatgtcccccagccatcccctgggcatactgacggaccgcgacctga

SEQ ID NO: 33633 - DNA, 120 bp, Artificial Sequence
  ENSG00000049769_14 (sequence is synthesized)
atgatgaaggggagggtgaagaggggctctctgtcacaccctccagcccagaaggggacagccccaaggaatcgcctccagaaatcctctccggggcccgttctgtggtagccacgatgg

SEQ ID NO: 33634 - DNA, 120 bp, Artificial Sequence
  ENSG00000049769_15 (sequence is synthesized)
gagatgtgtggctcccatgggcagagggctcaggatgtgacggccctgtggttctgggtacagagggtcagttcattggggatcctgagaaagggatgggcaaggacaccagctctttgc

SEQ ID NO: 33635 - DNA, 120 bp, Artificial Sequence
  ENSG00000049769_16 (sequence is synthesized)
acatgaatagggtgatagctggggtgactgagtccctgggggaggccgggacagaagcccagatagaggtcaccagtgagtgggcaggcagcttggatcccatatctggcaaggagccag

SEQ ID NO: 33636 - DNA, 120 bp, Artificial Sequence
  ENSG00000049769_17 (sequence is synthesized)
cctctcccgtccttctgcaggggcaaaatcccaccctcctcagtcccttgggggccgaagtctgtctctctagtgtagccaggcctcatgtgagctcccaggatgaaaaggatgcaggcc

SEQ ID NO: 33637 - DNA, 120 bp, Artificial Sequence
  ENSG00000049769_18 (sequence is synthesized)
caagccttgaacccccaaagaagtctcccaccctagcagtccctgcagaatgtgtgtgtgcactgcctcctcagctccgggggcccttgacccagactctgggggtcctggccgggctag

SEQ ID NO: 33638 - DNA, 120 bp, Artificial Sequence
  ENSG00000049769_19 (sequence is synthesized)
tggtggtccctgtggctctgaacagcggtgtgtccctcctggtgcttgcgctgtgcctctctctggcttggttctcataggctctgcttgtgggatcagcagaggcttaagatgggatac

SEQ ID NO: 33639 - DNA, 120 bp, Artificial Sequence
  ENSG00000049769_20 (sequence is synthesized)
atggcctgtgcagtgaggggacctgggtcctttgcttctgagaatgctcaactgaaagagaggccttctcatccccaagctctccagtcaacacagggctccctgtggtgacaccagtgg

SEQ ID NO: 33640 - DNA, 120 bp, Artificial Sequence
  ENSG00000049769_21 (sequence is synthesized)
agatgagggaacgggtagatggtgtgagtgaggggaacttttagagtggaactgggcatgtcctccgcctaccccccgagcctgtatttatttttgtataattctctggatgagggagag

SEQ ID NO: 33641 - DNA, 120 bp, Artificial Sequence
  ENSG00000049769_22 (sequence is synthesized)
tggtcgtgagctggtcttggggcacaattacccagagatatatttattaacagccaacctgtgcaacctgctggagctttatttttaatttaatttatatagagtacctattattatatg

SEQ ID NO: 33642 - DNA, 120 bp, Artificial Sequence
  ENSG00000049769_23 (sequence is synthesized)
ccacaatagagctctatgagaaacagtgtcttgcggtgtagtgttctcctgtttgggcatgagtgtgcagggtggtcactttctgtgggaggatcacagtggggagttgggggtgggacg

SEQ ID NO: 33643 - DNA, 120 bp, Artificial Sequence
  ENSG00000049769_24 (sequence is synthesized)
tggtcgcctgctgctgcttcaacatgtctttccttgaagatgtgtgtctcctcgtctcgtggtcctaatccatatggttctttgtcttttccacattctgcctgtgggaccctacaggtg

SEQ ID NO: 33644 - DNA, 120 bp, Artificial Sequence
  ENSG00000049769_25 (sequence is synthesized)
tgtatttggatggtggtggtgggagccagggaggaagagtggcagccacatgagggtttggtgtcagtcacatggttgcagtggtagctgtggtctcctgtggatgtggggacatcagtt

SEQ ID NO: 33645 - DNA, 120 bp, Artificial Sequence
  ENSG00000049769_26 (sequence is synthesized)
gtgaatcagccacaaggttttgaggttactgaaaaaacagcctttgacaccagcagggagaccccttagtccctgagataaggaaggcctcagaaaggaaagaggagttaatgtactgca

SEQ ID NO: 33646 - DNA, 120 bp, Artificial Sequence
  ENSG00000049769_27 (sequence is synthesized)
gtacttggtagcacagttgctgtccacagacatcacatttctactaaaaacaggaagcccagaagctttgaaagaaagatatatatttattgcatgcaaataaaaaactgctcaacaaaa

SEQ ID NO: 33647 - DNA, 120 bp, Artificial Sequence
  ENSG00000049769_28 (sequence is synthesized)
gctggaattacaggtgtaagccaccacgcccagccgaaaagatgggttcttctatcttttctctttccatagccaggaatgtatcctaaagaaatgatacaagtgtcgataaaactatgc

SEQ ID NO: 33648 - DNA, 120 bp, Artificial Sequence
  ENSG00000049769_29 (sequence is synthesized)
cctaaagaaatgatacaagtgtcgataaaactatgcccaatgctgtttgctggtttgctttgcaacctctaaatgaaagaacttagctgctcagtaggaagggaatggtatgatatgagt

SEQ ID NO: 33649 - DNA, 120 bp, Artificial Sequence
  ENSG00000049769_30 (sequence is synthesized)
attaagcagccatttgaaatgtttgcaaaagtgtataatgatgtttcttactgttaaatggacaaagctagctgtgaaattatgtctgtagaatctaaatgatttcgtagaatatctgga

SEQ ID NO: 33650 - DNA, 120 bp, Artificial Sequence
  ENSG00000049769_31 (sequence is synthesized)
aggaaattttccagaatggtaacagtagttgtctctggctgatgtgtgattgtttttcttgcttctttagactttcctgtattttgcgaattttctataatgaggctgtaggacttttag

SEQ ID NO: 33651 - DNA, 120 bp, Artificial Sequence
  ENSG00000049769_32 (sequence is synthesized)
gatgaggggataaacaaaggcagcagaagagaaaacagcagctgtcaggtgaaggtgggctagcacagaggctcagaaggtgccagtgggtggcagaagtgacctctcagggtattatta

SEQ ID NO: 33652 - DNA, 120 bp, Artificial Sequence
  ENSG00000049769_33 (sequence is synthesized)
gatccatgtactctctcctctgccctgcaggcctgccgaggaggaactgaagacgaagaacatggatgataacacctttgccatggagcatcctgatgtccaggagtcagtgggtccact

SEQ ID NO: 33653 - DNA, 83 bp, Artificial Sequence
  ENSG00000049769_34 (sequence is synthesized)
actggtagcccccacccctctccgtccatggccccagatgacacttcaggtgaaaagcaatcacggagttaaaagaagacaag

SEQ ID NO: 33654 - DNA, 79 bp, Artificial Sequence
  ENSG00000049769_35 (sequence is synthesized)
ttccttcctctggagctcttgtatatgaggtgaaaagcaatcacggagttaaaagaagacaagctgaaatgatgcaggc

SEQ ID NO: 33655 - DNA, 120 bp, Artificial Sequence
  ENSG00000049860_0 (sequence is synthesized)
agaccgggcggaaagcagccgagcggccatggagctgtgcgggctggggctgccccggccgcccatgctgctggcgctgctgttggcgacactgctggcggcgatgttggcgctgctgac

SEQ ID NO: 33656 - DNA, 120 bp, Artificial Sequence
  ENSG00000049860_1 (sequence is synthesized)
tcaggtggcgctggtggtgcaggtggcggaggcggctcgggccccgagcgtctcggccaagccggggccggcgctgtggcccctgccgctcttggtgaagatgaccccgaacctgctgca

SEQ ID NO: 33657 - DNA, 120 bp, Artificial Sequence
  ENSG00000049860_2 (sequence is synthesized)
tctcgccccggagaacttctacatcagccacagccccaattccacggcgggcccctcctgcaccctgctggaggaagcgtttcgacgatatcatggctatatttttggtttctacaagtg

SEQ ID NO: 33658 - DNA, 120 bp, Artificial Sequence
  ENSG00000049860_3 (sequence is synthesized)
gcatcatgaacctgctgaattccaggctaaaacccaggttcagcaacttcttgtctcaatcacccttcagtcagagtgtgatgctttccccaacatatcttcagatgagtcttatacttt

SEQ ID NO: 33659 - DNA, 120 bp, Artificial Sequence
  ENSG00000049860_4 (sequence is synthesized)
acttgtgaaagaaccagtggctgtccttaaggccaacagagtttggggagcattacgaggtttagagacctttagccagttagtttatcaagattcttatggaactttcaccatcaatga

SEQ ID NO: 33660 - DNA, 120 bp, Artificial Sequence
  ENSG00000049860_5 (sequence is synthesized)
atccaccattattgattctccaaggttttctcacagaggaattttgattgatacatccagacattatctgccagttaagattattcttaaaactctggatgccatggcttttaataagtt

SEQ ID NO: 33661 - DNA, 120 bp, Artificial Sequence
  ENSG00000049860_6 (sequence is synthesized)
taatgttcttcactggcacatagttgatgaccagtctttcccatatcagagcatcacttttcctgagttaagcaataaaggaagctattctttgtctcatgtttatacaccaaatgatgt

SEQ ID NO: 33662 - DNA, 120 bp, Artificial Sequence
  ENSG00000049860_7 (sequence is synthesized)
tgaatatgccagattacgaggaattcgagtcctgccagaatttgatacccctgggcatacactatcttggggaaaaggtcagaaagacctcctgactccatgttacagtagacaaaacaa

SEQ ID NO: 33663 - DNA, 120 bp, Artificial Sequence
  ENSG00000049860_8 (sequence is synthesized)
gttggactcttttggacctataaaccctactctgaatacaacatacagcttccttactacatttttcaaagaaattagtgaggtgtttccagatcaattcattcatttgggaggagatga

SEQ ID NO: 33664 - DNA, 120 bp, Artificial Sequence
  ENSG00000049860_9 (sequence is synthesized)
agtggaatttaaatgttgggaatcaaatccaaaaattcaagatttcatgaggcaaaaaggctttggcacagattttaagaaactagaatctttctacattcaaaaggttttggatattat

SEQ ID NO: 33665 - DNA, 120 bp, Artificial Sequence
  ENSG00000049860_10 (sequence is synthesized)
tgcaaccataaacaagggatccattgtctggcaggaggtttttgatgataaagcaaagcttgcgccgggcacaatagttgaagtatggaaagacagcgcatatcctgaggaactcagtag

SEQ ID NO: 33666 - DNA, 120 bp, Artificial Sequence
  ENSG00000049860_11 (sequence is synthesized)
agtcacagcatctggcttccctgtaatcctttctgctccttggtacttagatttgattagctatggacaagattggaggaaatactataaagtggaacctcttgattttggcggtactca

SEQ ID NO: 33667 - DNA, 120 bp, Artificial Sequence
  ENSG00000049860_12 (sequence is synthesized)
gaaacagaaacaacttttcattggtggagaagcttgtctatggggagaatatgtggatgcaactaacctcactccaagattatggcctcgggcaagtgctgttggtgagagactctggag

SEQ ID NO: 33668 - DNA, 120 bp, Artificial Sequence
  ENSG00000049860_13 (sequence is synthesized)
ttccaaagatgtcagagatatggatgacgcctatgacagactgacaaggcaccgctgcaggatggtcgaacgtggaatagctgcacaacctctttatgctggatattgtaaccatgagaa

SEQ ID NO: 33669 - DNA, 120 bp, Artificial Sequence
  ENSG00000049860_14 (sequence is synthesized)
catgtaaaaaatggaggggaaaaaggccacagcaatctgtactacaatcaactttattttgaaatcatgtaaaataagatattagactgttttttgaataaaatatttttattgattgaa

SEQ ID NO: 33670 - DNA, 120 bp, Artificial Sequence
  ENSG00000049860_15 (sequence is synthesized)
taacttcatagatgaacagcatgattcaggttactgattgtctattcattggcatataatatcccctgaattaagaagaatatgtacttttcagttacaaagtacctaccataatttctg

SEQ ID NO: 33671 - DNA, 120 bp, Artificial Sequence
  ENSG00000049860_16 (sequence is synthesized)
ctaagggaacaaatccaataacaactttgttgtcctggcgagtctgaatttcctgaatgtttcctcttctttgtgccagatctgccaggacagggctgagataatctctagctactgtaa

SEQ ID NO: 33672 - DNA, 120 bp, Artificial Sequence
  ENSG00000049860_17 (sequence is synthesized)
cctcaagattcatcagaggctccaaaacttgcttatcagctttcttcagagcctaaagaaattaaagaatgttaacttatctttcataaataaaaacttaaaataaatacagcctagagc

SEQ ID NO: 33673 - DNA, 120 bp, Artificial Sequence
  ENSG00000049860_18 (sequence is synthesized)
gtatccttagctcggctcctcgcttccccagcggctcgccccagacattgcaccgcggaggggaggccggtcgacctctccggcgatgcccggcttctgcctgctgtgggagggcagcgg

SEQ ID NO: 33674 - DNA, 120 bp, Artificial Sequence
  ENSG00000049860_19 (sequence is synthesized)
cgggcaccgtgatctccgcaccgagaagagctccccttgccctctagtcgaagctcccgagtgctcggagcacgctcacccctcgcgaacacacccctgcagccgaagcagcccctgaag

SEQ ID NO: 33675 - DNA, 120 bp, Artificial Sequence
  ENSG00000049860_20 (sequence is synthesized)
cccgcagcgcctgcaacaggtccggggcagtgggggaaacttacagcagtggcgactggccgcaacgcacaactgagttctagcgacggtcacgggcaaggaggcgacgaaccggtcgtc

SEQ ID NO: 33676 - DNA, 120 bp, Artificial Sequence
  ENSG00000049860_21 (sequence is synthesized)
tcagcccagggaagcggtggcgaatgccccggagaaaggagggccagccggggagaggactgcgccccgaacgatggctcgcggaccggctaccgatggcgttcgcctccgtctgtcgtc

SEQ ID NO: 33677 - DNA, 120 bp, Artificial Sequence
  ENSG00000049860_22 (sequence is synthesized)
tgtgagtgtattatatcccaggtgctcgctgacggacttaagtgccaaaaactgactccatgctaggaaccactgagttctcaaccagtgagtttatgattcctattttaaaaataacct

SEQ ID NO: 33678 - DNA, 120 bp, Artificial Sequence
  ENSG00000049860_23 (sequence is synthesized)
ttaaagtctgattataaaagtagtacatagtctttgtggaaaatttattaagtacagtaagtgcagaagaagaaataaatcactcataatcccagcagatagaattaatcactgtcattt

SEQ ID NO: 33679 - DNA, 120 bp, Artificial Sequence
  ENSG00000049860_24 (sequence is synthesized)
taggtgtatttttttgcagagtaaaacatgtaaacattttacatagacataaatacaaacatgataagcattgacatgaaaatggcagtaattctgtacatgtgcttcttgtatttttgt

SEQ ID NO: 33680 - DNA, 120 bp, Artificial Sequence
  ENSG00000049860_25 (sequence is synthesized)
attgtattgtactctgtctacaaaaacattgggtatagtttcattacaagtttgtagcttaaatgtttgttcttatggatagaatcaaagtgtaaaaatcagatgtttatggtttttaat

SEQ ID NO: 33681 - DNA, 120 bp, Artificial Sequence
  ENSG00000049860_26 (sequence is synthesized)
ttttttggctgtgacttagcattttacatccataaaactttttttgttattgttataacggttactgtaattgttactgtgaatataaacaatcttggggaagtgtaaatcgaaatttaa

SEQ ID NO: 33682 - DNA, 120 bp, Artificial Sequence
  ENSG00000049860_27 (sequence is synthesized)
caaggtagaagccctgaataattctcaaattacatatggttaagataatatatttatcaagttgtccaacagtgtatttgttttaaacataattgtttggaaatccataaatgactattt

SEQ ID NO: 33683 - DNA, 120 bp, Artificial Sequence
  ENSG00000049860_28 (sequence is synthesized)
ttctctctgagaaactacatgaagtagggaattttagaggtgagagtgttttcttagaaaataatggtagtctcagttaacagtgttcaaattgactgtatcatggaccaatggatctgg

SEQ ID NO: 33684 - DNA, 120 bp, Artificial Sequence
  ENSG00000049860_29 (sequence is synthesized)
gagggaccctcagtgtcccctagtttaatacccctgtaatacaaagaaggtacctgacatccagagaaatgatgtgccttgtgtaaagttgtggttaggaagggacagagccaggactct

SEQ ID NO: 33685 - DNA, 120 bp, Artificial Sequence
  ENSG00000049860_30 (sequence is synthesized)
aaattctgtcctccggccataattccaaaactttctccaatgttaggtatgtaggctaaaatgtgctaacagcacttgtgtttttgtttccttttgttttactttttattatggcaaatt

SEQ ID NO: 33686 - DNA, 120 bp, Artificial Sequence
  ENSG00000049860_31 (sequence is synthesized)
tcaaacatatacagatacagaatagtttaatgaactcccatgttctcatcatgccagttcaaacatgaatacatggtcaaccttgtatcacttaaactcctgcggacaagccctgcccca

SEQ ID NO: 33687 - DNA, 120 bp, Artificial Sequence
  ENSG00000049860_32 (sequence is synthesized)
gaatacaacatacagcttccttactacatttttcaaagaaattagtgaggtgtttccagatcaattcattcatttgggaggagatgaagtggaatttaaatgttgggttttggatattat

SEQ ID NO: 33688 - DNA, 120 bp, Artificial Sequence
  ENSG00000049860_33 (sequence is synthesized)
tgccaagaggtagaaattaaaggtaggcatggtggtcacagtccactaaaaaactagtattccaacttctattccctggcacactactaaataggcaaccagggatttaaaaaatggttt

SEQ ID NO: 33689 - DNA, 120 bp, Artificial Sequence
  ENSG00000049860_34 (sequence is synthesized)
ctggtgtccaggtaagtttgcataaaaccaaaataaaactgtttaatactggcccactacattaatctatggtgctaacacgtgctgtgaaccgtgggtcagggctggggataaagtttg

SEQ ID NO: 33690 - DNA, 120 bp, Artificial Sequence
  ENSG00000049860_35 (sequence is synthesized)
caaccatttttttggggggtgggggaagaggaggggccatcttttttgtgccacaaccattagcatctcccaaggtcctgctaaccacgggcaagaaatgttgccctaggataaagatgg

SEQ ID NO: 33691 - DNA, 120 bp, Artificial Sequence
  ENSG00000049860_36 (sequence is synthesized)
ttttgtaaaagtttatttagtaatgtgctttattttttacattttctctacatcctttgcctaagtgtagatgtgaaaaatcactaaaggaggcaatacccactgcttgctttaaatcag

SEQ ID NO: 33692 - DNA, 120 bp, Artificial Sequence
  ENSG00000049860_37 (sequence is synthesized)
gactgacaaggcaccgctgcaggatggtcgagtaagaaatctattaagtccagtgtgatttttaaccttcttattcagtgttagtttcttttgctataaatagaaatgtatgttacctaa

SEQ ID NO: 33693 - DNA, 120 bp, Artificial Sequence
  ENSG00000049860_38 (sequence is synthesized)
gcaggacatccaaatggagatgtacaggaggcagttagagaaataggtcatgtgcttgggagaaaataatagtccagaaatatcaatgacatgtttaggaaacttattgtgtgtcattga

SEQ ID NO: 33694 - DNA, 120 bp, Artificial Sequence
  ENSG00000049883_0 (sequence is synthesized)
agtagttggtatggtccgagacagtatggctgctgcatttcggccctcgaatcgagttctcctgcaggcgctgcagattttggtgtatcctggggtgggaggctccggctctgtcagctg

SEQ ID NO: 33695 - DNA, 120 bp, Artificial Sequence
  ENSG00000049883_1 (sequence is synthesized)
ccgctgccctctcggagctaaaagatacctacttacagataatgtggtgaaattaaaagaatttcaacaaaagaaagtggctgttgcatgtaatctttctggcactaaagaaacgtattt

SEQ ID NO: 33696 - DNA, 120 bp, Artificial Sequence
  ENSG00000049883_2 (sequence is synthesized)
tagaaacttgaaaaagaaactgacccagaacaagctcatcttgaagggggagttgataaccttactacatttgtgtgagtctcgggaccatgtggaactggctaaaaatgtcatttacag

SEQ ID NO: 33697 - DNA, 120 bp, Artificial Sequence
  ENSG00000049883_3 (sequence is synthesized)
gtaccatgcagagaacaaaaatttcactttgggggagtataaatttggaccgctttttgtgaggttgtgttacgagttggatctcgaggaatctgcagtggagctcatgaaagaccagca

SEQ ID NO: 33698 - DNA, 120 bp, Artificial Sequence
  ENSG00000049883_4 (sequence is synthesized)
tttacgaggtttcttctcagactccacatcattcaatattttgatggatatgttatttatcaaaggcaaatataaaagtgctttgcaagtattgatagagatgaaaaaccaagatgtgaa

SEQ ID NO: 33699 - DNA, 120 bp, Artificial Sequence
  ENSG00000049883_5 (sequence is synthesized)
gttcaccaaagatacctatgttcttgcttttgcaatttgctacaaactgaatagccctgagtctttcaaaatctgtactacattaagagaagaagctctactcaaaggagaaattctctc

SEQ ID NO: 33700 - DNA, 120 bp, Artificial Sequence
  ENSG00000049883_6 (sequence is synthesized)
caggagagcatcctgtttcgctgtggcattagctctgaatcagaatgagatggcaaaagctgtgtccattttttctcaaatcatgaatccagaaagcatagcctgcattaatttaaatat

SEQ ID NO: 33701 - DNA, 120 bp, Artificial Sequence
  ENSG00000049883_7 (sequence is synthesized)
tataatccatatccagtcaaatatgttggaaaacctgataaagactctaaaaaatgctgcagaaggaaatttatcaaaatttgtgaaaagacatgtgttctcggaggaagtgctggccaa

SEQ ID NO: 33702 - DNA, 120 bp, Artificial Sequence
  ENSG00000049883_8 (sequence is synthesized)
agtgagggaaaaagtgaaggatgtgcctgcccttgtggccaaatttgatgagatctatgggacactgcacatcactggccaggtcaccactgattctttggatgctgtgctctgccacac

SEQ ID NO: 33703 - DNA, 120 bp, Artificial Sequence
  ENSG00000049883_9 (sequence is synthesized)
ccccagggacaggaaatctcacacgttgctattaaacaagaggatggtcagccgtcgcaccttccagccactcagccagtccctgttggctgagtaaccctggtttcagtccacctatgg

SEQ ID NO: 33704 - DNA, 120 bp, Artificial Sequence
  ENSG00000049883_10 (sequence is synthesized)
atctgaggggcctgcttctagtgagttattacctttcctaagaagccaggtatcgcacttcagcagacagtgtgctgacacttggtcttctcctgaaattcccaaattcactgaatggta

SEQ ID NO: 33705 - DNA, 120 bp, Artificial Sequence
  ENSG00000049883_11 (sequence is synthesized)
ccatgccgatctctgagaagttatgttgcaccactgtgaaggtctagatgcaagcttggctccctcagaaaggcgcttcccttttgcatggctgaggatccttgaaggaacctggtcagt

SEQ ID NO: 33706 - DNA, 120 bp, Artificial Sequence
  ENSG00000049883_12 (sequence is synthesized)
ctccggttcagcttccgacaccagagtggaacccagtaagcaccatcaggaatgaatttcactacaagtgtggataactctgattttcaaaggagtagttacttgcaaattacatccttg

SEQ ID NO: 33707 - DNA, 120 bp, Artificial Sequence
  ENSG00000049883_13 (sequence is synthesized)
ctgaattcaggaggtatgaaaccctattttaccatgttagaaaacagcccaggattttctcattgctctgccatcatatatgtctatgacttgagcccttatttttccatctgcaaaaca

SEQ ID NO: 33708 - DNA, 120 bp, Artificial Sequence
  ENSG00000049883_14 (sequence is synthesized)
ataatgcctatgtgtctttgcatatagatttgaaatcttcattcaaggtttagtaggatcatattttctcaaaaataagagaaataaggttcataaggaaacttgctgggattgtggttg

SEQ ID NO: 33709 - DNA, 120 bp, Artificial Sequence
  ENSG00000049883_15 (sequence is synthesized)
ttttgttttctcagcagcacaaacaaaaccagaatttagcctttaggactgctgagtaagccaaatttaaatgactactgctttgttcatgggtaagccatgtgcttttcaaaataagtg

SEQ ID NO: 33710 - DNA, 120 bp, Artificial Sequence
  ENSG00000049883_16 (sequence is synthesized)
ccactaaaaaccacataatgctttggtttctatgtggataataaatatttagtcctatagtttatcttatttgttaatgatttttctctcttgaatgcctcatattaaaaaaaaatgtgc

SEQ ID NO: 33711 - DNA, 120 bp, Artificial Sequence
  ENSG00000049883_17 (sequence is synthesized)
catgagagcagttcaaagctgcttcatacttatggtctcaaatatagtatgtgttgaattttaccgtgtctggtcaccagtgagcagaagatacacagtgaccccacctcacttgctcct

SEQ ID NO: 33712 - DNA, 120 bp, Artificial Sequence
  ENSG00000049883_18 (sequence is synthesized)
tttgtttcagaaagcccagagggttgctcagacctcaggagctgtctgccaagattgctgcagactcttcattgccacctccaaaactaagactgttcacttggttgttgttctaaggca

SEQ ID NO: 33713 - DNA, 120 bp, Artificial Sequence
  ENSG00000049883_19 (sequence is synthesized)
aggattatagagtcagaaattgtagactaggagaagtcttctgagtctcctaattaattccttcatctttcaggttaaggaaacgatccatgcaagagaggcccaatctcaactgtagac

SEQ ID NO: 33714 - DNA, 120 bp, Artificial Sequence
  ENSG00000049883_20 (sequence is synthesized)
tgtgtcccagtaagagagtcacagcttcaggtgtttgctgaatccaggtctgagatcacaatcccacctgaggacaggatccgcatatgagagtcgcacattggtataattgatttgtgg

SEQ ID NO: 33715 - DNA, 120 bp, Artificial Sequence
  ENSG00000049883_21 (sequence is synthesized)
tagagctgagattagaatccagattcctagtctagtatccttcccactgtaccacattatctcttttcagaggggaaaaaggagcagctcttaagaaacagaatactaagggcccccatt

SEQ ID NO: 33716 - DNA, 120 bp, Artificial Sequence
  ENSG00000049883_22 (sequence is synthesized)
actgtgtggccctgggcatcctcagtttcctcatttggtaaatggggataatggtaccgacctcttaggcttggtgtgaggatgaaatgagatagggaatataaagcaagcagatagtgg

SEQ ID NO: 33717 - DNA, 120 bp, Artificial Sequence
  ENSG00000049883_23 (sequence is synthesized)
ctggcacatagtacatgcaatatgtttgaaactagttaaggaattataaaaacaaatgagttcttccttctgctcaaaaatattgaatttcttgtccttgtgctctgtgaaacattgaac

SEQ ID NO: 33718 - DNA, 120 bp, Artificial Sequence
  ENSG00000049883_24 (sequence is synthesized)
agccccatttagagaaacaaattctctgccctcatagaatcctaattgtttctgtatgtgtctggtgttttgcacatgcaaaaaaaaaaaaaaaagtgcttggatttctccactttcagt

SEQ ID NO: 33719 - DNA, 120 bp, Artificial Sequence
  ENSG00000049883_25 (sequence is synthesized)
cttagggaataatagggcatgcttcctgtccccccagcttacttttcatcttctccaactctcacagttcaaatggctccagtgctgtgggtgagtgtggccttggttgttagctaacaa

SEQ ID NO: 33720 - DNA, 120 bp, Artificial Sequence
  ENSG00000049883_26 (sequence is synthesized)
ccattcattagcgaaataaccaaattttgtgagcagtaaatagcaacaagcttcccaatccctgctgcccagccgactggaaaaactggtccattccacctgttcccagaaacctcagta

SEQ ID NO: 33721 - DNA, 120 bp, Artificial Sequence
  ENSG00000049883_27 (sequence is synthesized)
cagaggtagctatatgcataatgttcaccccaaagtaatagatgattttaaagtcttaaaagtccaataaaacagtgttcagtataggttatgataggcatttcattctttaaaactcag

SEQ ID NO: 33722 - DNA, 120 bp, Artificial Sequence
  ENSG00000049883_28 (sequence is synthesized)
taattcctttgaaaaaatgatgtttctttataagcagtagtttgcctacatcatttacttgtttttttctgctttggggtttttttttttttgagacacaatttcactctgtcgcccagg

SEQ ID NO: 33723 - DNA, 78 bp, Artificial Sequence
  ENSG00000049883_29 (sequence is synthesized)
gcctcctgggttcaagcaattctcatgccccagcctcccaagtagctgggaatacagttgtgtgccaccacactggct

SEQ ID NO: 33724 - DNA, 120 bp, Artificial Sequence
  ENSG00000049883_30 (sequence is synthesized)
gccaccgcacctggcctacttatcctgttaatgaaaatatttgattggacagaacatcttattccttaactctgttatgtgcttttgtagattgtttttacttactgtagatatctgttg

SEQ ID NO: 33725 - DNA, 120 bp, Artificial Sequence
  ENSG00000049883_31 (sequence is synthesized)
ctccagagtcccagaaatcagtatgatgagttcagcacagttactagaaggagacaaaaagatatcttcttaattaggtgatatcagggatagttctggttattgattgctgtgtggaaa

SEQ ID NO: 33726 - DNA, 120 bp, Artificial Sequence
  ENSG00000049883_32 (sequence is synthesized)
acactccaaaactcagtgactttaaacaacaccagtcattgtgttatttctcattatcctaagtactgactgggctcagccagacagttcttattcgggttctcatgcagttatagtcat

SEQ ID NO: 33727 - DNA, 120 bp, Artificial Sequence
  ENSG00000049883_33 (sequence is synthesized)
catcagattgtggccgcgactggcataatctcaaaggcttccttagtatttctggcagttgatgctaggacctcagctagtgctggggctggaacatgtctacacatagcttccccacag

SEQ ID NO: 33728 - DNA, 120 bp, Artificial Sequence
  ENSG00000049883_34 (sequence is synthesized)
catggtggctaggtactaggagtgactgtcccaagaggaccaggcagaagcagttacattttatgacctagtctcagaagtctcataacatcacttccactaaagtcccaagccccccca

SEQ ID NO: 33729 - DNA, 120 bp, Artificial Sequence
  ENSG00000049883_35 (sequence is synthesized)
gattcaaatggagggagcatatatcccatctcagtggtaggaatttcaaagaataaattctgtgaaactgtagtagatagtctgttttctcccctgtttaaaacctcctgaggacctcac

SEQ ID NO: 33730 - DNA, 120 bp, Artificial Sequence
  ENSG00000049883_36 (sequence is synthesized)
atgcttctggataaagctcaggctcttcaacatggtttagaaggtccttcctaatctggcccacatttgtccatccagctccaactcttgctactctacgcccctcttcccctcttgtgg

SEQ ID NO: 33731 - DNA, 120 bp, Artificial Sequence
  ENSG00000049883_37 (sequence is synthesized)
aatggctaattcctactcatcattcaggtcttggcttagacatcttttcatctgagaaggctttctggtctagtctcacctggttaggtgaactccccatgtgccccatgtacctcattt

SEQ ID NO: 33732 - DNA, 120 bp, Artificial Sequence
  ENSG00000049883_38 (sequence is synthesized)
atcaaagtgcttatcatatgcctgtcactgtctgttttcttcactagactcaggtgccatgtctgtcctttctgctctgtttgctgggtgcctagcatggtaggggatgtatcagaggat

SEQ ID NO: 33733 - DNA, 120 bp, Artificial Sequence
  ENSG00000049883_39 (sequence is synthesized)
tagtacttatttaactcaccagctcatttaactatattgtataacaatgttggtggtcatattggtcccccatggacagcttttcgtctctaataccatacactcagtgcagggtctgaa

SEQ ID NO: 33734 - DNA, 120 bp, Artificial Sequence
  ENSG00000049883_40 (sequence is synthesized)
tgtccccccaaactcatatgttgaactccaaatccccaaggtgttggtattagatgatgtagcctttgggaaggaattagggtggtgccctcatgaatgggatttgtgtcattataaaac

SEQ ID NO: 33735 - DNA, 120 bp, Artificial Sequence
  ENSG00000049883_41 (sequence is synthesized)
aagcccaaagaaatttggtcaccccttcctttaagcgaggtcatggcaaaaagacgctgtctatgaaccagaaaatgggctctcactagacaccaaatgctggtgtcttgttcttggatt

SEQ ID NO: 33736 - DNA, 120 bp, Artificial Sequence
  ENSG00000049883_42 (sequence is synthesized)
tcccagccttcagaactgtgagaaatatatttctgttatttataagccacccagtttttggtattttgttatagcagcctgaagagactaagacagccagtcccaaccttccacatttag

SEQ ID NO: 33737 - DNA, 120 bp, Artificial Sequence
  ENSG00000049883_43 (sequence is synthesized)
acctgactccaagttttgctcagcccactgtgtatcccttcctcctcccaaccaaagtgtccccactctttctctattctgttctgcctattattcaaggtctaacttgtgtcacttttt

SEQ ID NO: 33738 - DNA, 120 bp, Artificial Sequence
  ENSG00000049883_44 (sequence is synthesized)
caatgaggcatttgcaagctctttaaattctcaaggattctccattaattcaccatatctattttgagaatctacaaaggacaaggcactacgaaagactctacatgccacagggaaaag

SEQ ID NO: 33739 - DNA, 120 bp, Artificial Sequence
  ENSG00000049883_45 (sequence is synthesized)
cctactgaagaatggacttggttgtgaaataaaacaatcctgggcaatatttgttgatagttttgttgaggatgattcaggaaataaatacaaacttttaactactcataatgaatattg

SEQ ID NO: 33740 - DNA, 120 bp, Artificial Sequence
  ENSG00000049883_46 (sequence is synthesized)
ttgggatattataatgaggaggtaaggatttacctgctacaatttgggtaggcaaaaatgtaggcttctctgtttctttgcagtgaactaaaacttcttatgaactctggttatactgaa

SEQ ID NO: 33741 - DNA, 120 bp, Artificial Sequence
  ENSG00000049883_47 (sequence is synthesized)
aacaggagtcatgggagacttgatcttgcttaaaggatattttagtctttgatttctttgaggtaaatgttcaatctttttgcgtatcttcctcctaccttttcatagccaagatgacag

SEQ ID NO: 33742 - DNA, 120 bp, Artificial Sequence
  ENSG00000049883_48 (sequence is synthesized)
ctgaacaggctctcatcttaaacctgaacaggcatcagaatcacttggagagcttgttaaaatacagattgatgggccccacccccagaatatctgattccatacatatgagtcagggcc

SEQ ID NO: 33743 - DNA, 120 bp, Artificial Sequence
  ENSG00000049883_49 (sequence is synthesized)
caagaatttgcattacaaatgcattctcagatgatgcctttgctagtctgggcaacacactttaagaatagttggtataacagaaagcttgtgtgtcttgtgtgtctatgtggacaggag

SEQ ID NO: 33744 - DNA, 120 bp, Artificial Sequence
  ENSG00000049883_50 (sequence is synthesized)
ttgtgggcttcagattcatcctctgtgtcctctggtctcagttgtgaggagggggaagagtgggaagtctggccttgtctctggactcctgagtaaataatgtgctgatgcagtgttggg

SEQ ID NO: 33745 - DNA, 120 bp, Artificial Sequence
  ENSG00000049883_51 (sequence is synthesized)
cccagcaggccttttagagggtcatgccagcacccactgctgaggtctgtagtctctaccatctgccctacacataataagtacccttcctctgctattctctcttgctgaccccaagcc

SEQ ID NO: 33746 - DNA, 120 bp, Artificial Sequence
  ENSG00000049883_52 (sequence is synthesized)
caccaatgaattaattgaatcaagagttccaaggcattaggttaaagacattgaaaaatatatccatttattttttcaaatatacataaagaaatccatacaaactaaggccaattgtgg

SEQ ID NO: 33747 - DNA, 120 bp, Artificial Sequence
  ENSG00000049883_53 (sequence is synthesized)
caaaactacatgagacttgactaaaataacccacaattcaaatttccttcataacatttctacctataaatttgattcagagaaattacacttcatagataaactagccataaaaaagat

SEQ ID NO: 33748 - DNA, 120 bp, Artificial Sequence
  ENSG00000049883_54 (sequence is synthesized)
tacagcggcaaaagctatcatcagtaatatttgatatgcataagaaaccgtgaggaaccaaatcatggtaaaattgattctaaggaaatggttgcacaaaaataaaagtgaaatggtatt

SEQ ID NO: 33749 - DNA, 120 bp, Artificial Sequence
  ENSG00000049883_55 (sequence is synthesized)
ttttaaaaggaagtggttcaactgtattgcatagaaaatgaatcaaggaattacattggcttaaatggcattagctcaaaaaagtgttctcaaaaattaatggaaattggtgtattctga

SEQ ID NO: 33750 - DNA, 120 bp, Artificial Sequence
  ENSG00000049883_56 (sequence is synthesized)
ttgagatatgttttattcaataacatggagtcaaaacaagaagattttttaaatgtcctctgttcccatggagcttgcattctgcaagagcaacagacatcaaaaagataactgggcaaa

SEQ ID NO: 33751 - DNA, 120 bp, Artificial Sequence
  ENSG00000049883_57 (sequence is synthesized)
tgaccacatgattgcagttgggataagtgctaagtctagggtaatcttcatatcaccctgtggcatgtataaaggaagaccttttgctggtgttttgtaaaaccagttgtctgtgtcatt

SEQ ID NO: 33752 - DNA, 120 bp, Artificial Sequence
  ENSG00000049883_58 (sequence is synthesized)
tattttaacatgtaaagtacactgccttgtattgttacagatctttttctccatatccggtctctcctgaagaacagagtattctacatttgttttatatgaccccaaggtgcttatgta

SEQ ID NO: 33753 - DNA, 120 bp, Artificial Sequence
  ENSG00000049883_59 (sequence is synthesized)
gcatattatttatacatctaatgaggtcttaatattttttgaaagagtgatttcattaattaacggcagattttagttaatatgtacagtctgccacaatatactttaggcatttcacag

SEQ ID NO: 33754 - DNA, 120 bp, Artificial Sequence
  ENSG00000049883_60 (sequence is synthesized)
ttttctcataaactggttgctgtttctgtcccggttttacacatgacagagccaagacacagacaagtagaatgacttgcctgtgcgggggtcctgggttggccagtgcattcatgtact

SEQ ID NO: 33755 - DNA, 120 bp, Artificial Sequence
  ENSG00000049883_61 (sequence is synthesized)
ggaccagggcccctgtatcttgcagtaatgtatccgtgggcgtttccccccagacattcgaagcacacagctaatctgagaaagaagtgatttggcgaggggttgggggagtaggcggtg

SEQ ID NO: 33756 - DNA, 120 bp, Artificial Sequence
  ENSG00000049883_62 (sequence is synthesized)
ggcacaacggttccaggtgactttcaagttgctaatgaaagaggatcaaagcgctgctgaactgctcacctccccgcttggcctgccttgcccagctgactttcttccaagggcctcaga

SEQ ID NO: 33757 - DNA, 120 bp, Artificial Sequence
  ENSG00000049883_63 (sequence is synthesized)
ggcagcattaccacaggcattaaagatggggatggggaaagaaggcccagagggaaagggaaccacatgcttacctgctaatcactgccctgcagctgaaacactgcagagctggctgct

SEQ ID NO: 33758 - DNA, 120 bp, Artificial Sequence
  ENSG00000049883_64 (sequence is synthesized)
ctgggataggagaggaaggcctcatttaatcaggagaagaaagagaaccaggggcctctgagatggcctgcaaggcatcacggtctgtgaactggtctgtgaactgcgggcctgcctgga

SEQ ID NO: 33759 - DNA, 120 bp, Artificial Sequence
  ENSG00000049883_65 (sequence is synthesized)
aatgcattgtcagagtagagtgatgctttctttgtaaatcccttgtcttccctgattcctttttcctgactgaatcaggccaagatgctcacccagaagagcacagcatcaccctgtctt

SEQ ID NO: 33760 - DNA, 120 bp, Artificial Sequence
  ENSG00000049883_66 (sequence is synthesized)
tcaatccccaaagtagcccttacccctagacagcaacatcatctgttacaattgacagcatgaaggaaggcataacccctgcaaagtgactgccctacaactcaatttgattttgaatcc

SEQ ID NO: 33761 - DNA, 120 bp, Artificial Sequence
  ENSG00000049883_67 (sequence is synthesized)
gcaagtgcaagtctcattcctggtaactaatagtaacagaatctgctgatgtattctaccgcatcccagggagactcatgtagccatgaagactgaagaggattaagttaaccttccatt

SEQ ID NO: 33762 - DNA, 120 bp, Artificial Sequence
  ENSG00000049883_68 (sequence is synthesized)
ttatagctgcaaattactgggttgatgtcaggtagggtgaggagtatgttccggttatagctggtagcaagatggctgcatgcatcatgaggctttggcctaaaaagcttgtcattatat

SEQ ID NO: 33763 - DNA, 120 bp, Artificial Sequence
  ENSG00000049883_69 (sequence is synthesized)
aaaaaagctatagagagcagagaaaatgtcatttccaatttagaagatcataatcgatttttaacacattggtccttaggtgatacagaattcaacaaaaacggggcttataaaaagcca

SEQ ID NO: 33764 - DNA, 120 bp, Artificial Sequence
  ENSG00000049883_70 (sequence is synthesized)
ggcttataaaaagccagggttcataaaattacaaagattatagacaaaaatagataacatataagacttaccagctgggcaaggtagctcaagtttgtaatcccagcacttagggaggcc

SEQ ID NO: 33765 - DNA, 62 bp, Artificial Sequence
  ENSG00000049883_71 (sequence is synthesized)
tctgtaatttcagctactcaggaggttgagacgggagaattgcttgaacctgggagacggag

SEQ ID NO: 33766 - DNA, 120 bp, Artificial Sequence
  ENSG00000049883_72 (sequence is synthesized)
attgcttgaacctgggagacggaggttacagtgagcctagactgcgccattgcactctagcctaggcgacaagagcgaaactatgtttcaaataataataataataataagacttaccat

SEQ ID NO: 33767 - DNA, 120 bp, Artificial Sequence
  ENSG00000049883_73 (sequence is synthesized)
aagacttaccatttgccaggtcctgtgcaaagcactttatctcatttgatccctgggaaaccccataaagtactattatgccatttctcagataaagaaactgaagctcagagacgttta

SEQ ID NO: 33768 - DNA, 120 bp, Artificial Sequence
  ENSG00000049883_74 (sequence is synthesized)
gttgcttgcctgtggatataacactagagagcgggagagcacagtatttgaacccaggaggtctgatgctggaggtcatgtttttaaccttatctctgtattgcctgcccaagtgctggc

SEQ ID NO: 33769 - DNA, 120 bp, Artificial Sequence
  ENSG00000049883_75 (sequence is synthesized)
tgtgtgcatgtattctcaataatccctggccaacttcctgctttgctgtcagtagcagagctgaagaacttacaatagacggcagagggcgtccagagtcactatttttaaaaggtgcta

SEQ ID NO: 33770 - DNA, 120 bp, Artificial Sequence
  ENSG00000049883_76 (sequence is synthesized)
gttttcaaaagcatttctggaattcagagagaacagaggtccacatagcaggctagacaggaaaggtagctgtagatagactttagggagtatatagaatattgccttcacgcaggttaa

SEQ ID NO: 33771 - DNA, 120 bp, Artificial Sequence
  ENSG00000049883_77 (sequence is synthesized)
gaaatatttagtgttgaaaggatacttttaaaagagagaaagcagtaaagttgatcctctgcagaaagtagaccaatgtaagtatcatgcaatgtgtccatgtgcgtgtacacgtgagca

SEQ ID NO: 33772 - DNA, 120 bp, Artificial Sequence
  ENSG00000049883_78 (sequence is synthesized)
cacatgcacacacacattagatgttttgtgagaaaacatacactcagtttcttatgaaagaaaaaggatggtcatttgtctcacttgggaaagggtttcctcccaaattgagaaggaaaa

SEQ ID NO: 33773 - DNA, 120 bp, Artificial Sequence
  ENSG00000049883_79 (sequence is synthesized)
tccccccaattaactgtttgcctttattaactaaaatcacatttgtgtgtgaaagaagtaaaaaggaattaggatcttggttattttgattgtctctctacccttccagattcatcaaat

SEQ ID NO: 33774 - DNA, 120 bp, Artificial Sequence
  ENSG00000049883_80 (sequence is synthesized)
gatagtcaaccttactgtctcttcctgccatcatcaggaatgactaaatcttggagcgttctccatttaagtgagggaaatgttggattcccggtgtatttatcactgcccatctctaag

SEQ ID NO: 33775 - DNA, 120 bp, Artificial Sequence
  ENSG00000049883_81 (sequence is synthesized)
aataggtcaaagatgaaattcccattatcatgaaactttaatatatattgagacttcacagagcactaactatactggggctgggatggggattctgatgagagatatccctgacagaga

SEQ ID NO: 33776 - DNA, 120 bp, Artificial Sequence
  ENSG00000049883_82 (sequence is synthesized)
ccagagctcaggaggaagaaaggacagatgcccttgttcaagatgacttcttcatgggcatcgatagatacattcttgaaaaccacccaaagtacctagaggagaccctagtgcaactgt

SEQ ID NO: 33777 - DNA, 120 bp, Artificial Sequence
  ENSG00000049883_83 (sequence is synthesized)
gcattgtacaacaactgatgaggtaaaagaaacaaactgttaatgactctaaacaatgtggcccacagagttggtatggtttggccacaccagctcagggataaaggtactagaaaaaat

SEQ ID NO: 33778 - DNA, 120 bp, Artificial Sequence
  ENSG00000049883_84 (sequence is synthesized)
cttggggaaaatcctattgtacatattccttacataatgtctgtgatttacctcacttatcaaatgaaaaaaacccaaaacacctggttgatggccatttggtcaaacacctctaggagt

SEQ ID NO: 33779 - DNA, 120 bp, Artificial Sequence
  ENSG00000049883_85 (sequence is synthesized)
ctggagttgagtggccagaactcagtctttctttacatgctgtgttaagcaggcttttatctcattcaggtgttagaagtggagggaggaacacagttaggctgtgttctactgcactgc

SEQ ID NO: 33780 - DNA, 120 bp, Artificial Sequence
  ENSG00000049883_86 (sequence is synthesized)
atagggaggcagggtatcacccaggcacaacgcccactttgcaagtaaataatcagtagcatgaagctcacttctgcaggacccaccatgacaaagtggagagctgggcggttaaccagt

SEQ ID NO: 33781 - DNA, 120 bp, Artificial Sequence
  ENSG00000049883_87 (sequence is synthesized)
gaaccaattgagtggctctgggctcctatacccctttcattccacagcctgtgatacacccttagagtcaaaatatcaaattcagtgggccatgagtcttgcccaaaagtataaatcttt

SEQ ID NO: 33782 - DNA, 120 bp, Artificial Sequence
  ENSG00000049883_88 (sequence is synthesized)
ttttcatatggactatttgggtctattttcaaaaatccctttttcttctctaaactatctcaattccacatttcactttgcaggtgtagacatgacttttaggttgttgatgatttaatg

SEQ ID NO: 33783 - DNA, 120 bp, Artificial Sequence
  ENSG00000049883_89 (sequence is synthesized)
ctattgaaatgttcttatatgcaaaacacctagatagatgcagagtgtgggacaaagacaaccagcacattgctaagcccaagtagcaaatttcctgaccccattttaaaggttctgaga

SEQ ID NO: 33784 - DNA, 120 bp, Artificial Sequence
  ENSG00000049883_90 (sequence is synthesized)
cagataggcggaataggtccccctgtctttgagtagaagagttggcaagcaagctggactaaatgggccatgtgcaattttgctgtctgttcacatttcaaataaactaatgtgttatga

SEQ ID NO: 33785 - DNA, 120 bp, Artificial Sequence
  ENSG00000049883_91 (sequence is synthesized)
ccgctgccctctcggaggtatccgcggctttagcctagggaaggaggggagggatgggagagaagggagtgttagatcccagctagcatctctgtggagcagccacagctcctaagtcac

SEQ ID NO: 33786 - DNA, 120 bp, Artificial Sequence
  ENSG00000049883_92 (sequence is synthesized)
tcactggcctggagcgcaccctcgccctctagttgcacgtgggtgcagtggtgaccactgggggtcgtggatacccccagtgcctgcaaatcgaaggactgctggggtattgaccttggg

SEQ ID NO: 33787 - DNA, 120 bp, Artificial Sequence
  ENSG00000049883_93 (sequence is synthesized)
gaaggactgctggggtattgaccttggggctgtagtgctccctcagatggggcgacgttcgtcttcaggaacatccctcccgccttgggtgacttttatttatttatttatttatttttg

SEQ ID NO: 33788 - DNA, 120 bp, Artificial Sequence
  ENSG00000049883_94 (sequence is synthesized)
taaatatcccagattttacttatgctaaaattgtgaagcagcttttaaaacattagttcttcctgtttgacttgatagtttatttcaacatttagttaattgctaaatgactttgaggaa

SEQ ID NO: 33789 - DNA, 120 bp, Artificial Sequence
  ENSG00000049883_95 (sequence is synthesized)
tagcttttattttgttgaaatacacttttctgtagatggtgctgaacagatgagagctttgggggccaacagtagaggaactctaacactgcgatccactcttcacttttggcaggtgct

SEQ ID NO: 33790 - DNA, 120 bp, Artificial Sequence
  ENSG00000049883_96 (sequence is synthesized)
tggctgctgcatttcggccctcgaatcgagttctcctgcaggcgctgcagattttggtgtatcctggggtgggaggctccggctctgtcagctgccgctgccctctcggagacaacaccc

SEQ ID NO: 33791 - DNA, 120 bp, Artificial Sequence
  ENSG00000050030_0 (sequence is synthesized)
aaaaccagtagcatcagcagcagcagcagcagccgccgccgccaccaccgccgccacagcagtagcattagcggcagtagcagcatttagcaatagctttaacagctatagcgacagtag

SEQ ID NO: 33792 - DNA, 120 bp, Artificial Sequence
  ENSG00000050030_1 (sequence is synthesized)
cagccgccctcctctctccctctcgcggacggccgcagccaccgcacagagcgggctccaggcgccgagcgcgcagcccgctcgctaggtagctccagccggggcgagcgacagtgtaag

SEQ ID NO: 33793 - DNA, 120 bp, Artificial Sequence
  ENSG00000050030_2 (sequence is synthesized)
cgaagcacggacccttggagcagccgggcagccgcggaggctctgagtttcagggccagagcccgacagctctgactccatctagcgcggcggcggcggagcctgagggagcgagcgagg

SEQ ID NO: 33794 - DNA, 120 bp, Artificial Sequence
  ENSG00000050030_3 (sequence is synthesized)
agagaggcgcgtccacctggcgggcccagcgtatggagctgaggcagaggcggcggcggcggcggcagcagtagcagcggcggtggcggctaaggcagctcgaacagctgcggcgacggc

SEQ ID NO: 33795 - DNA, 120 bp, Artificial Sequence
  ENSG00000050030_4 (sequence is synthesized)
gacagcccagccttgactgcgaccgcgctagctacagcgcctgctgcctgagcccgccagcgacgtgcgcctcgggagtcggcctgtgaggttggacagcatttggacttggaatgaaac

SEQ ID NO: 33796 - DNA, 120 bp, Artificial Sequence
  ENSG00000050030_5 (sequence is synthesized)
aataagaggttatattcatggataaccaacaagataaggctattgttgcctcagccaacggagaaaacactctgattaatggggtcaaagaaaatgactcagaggaccaggatgtggcaa

SEQ ID NO: 33797 - DNA, 120 bp, Artificial Sequence
  ENSG00000050030_6 (sequence is synthesized)
tgaagtcatttgcagctctagaagctgctgcacctatccagcctacaccggtggcacaaaaagagaccctgatgtatcccagaggtctcctgcctctaccctctaagaagccctgtatgc

SEQ ID NO: 33798 - DNA, 120 bp, Artificial Sequence
  ENSG00000050030_7 (sequence is synthesized)
agagcccgccctctcctttgggcctgattgaagcacccgaacatgctgctaatagtgcttctgtgaatgccatctccctcacatctggcattgcaaaaggcctgaacacatggtcacttc

SEQ ID NO: 33799 - DNA, 120 bp, Artificial Sequence
  ENSG00000050030_8 (sequence is synthesized)
ccaatgaatgtgagaaagctccatttgccataatggagcctgcaggcatgtcagctctgaatggggactgtctcatgcagccaagtcggacttgcttaggctgcttcatggaatccaagg

SEQ ID NO: 33800 - DNA, 120 bp, Artificial Sequence
  ENSG00000050030_9 (sequence is synthesized)
atgcagtagatcctgagccagggatcagtctgaaagttggtgatctaaatagggattatgaaacgtgtgcagtctctgatatagggattcagtgtattaatgctggagaaaatatgaaat

SEQ ID NO: 33801 - DNA, 120 bp, Artificial Sequence
  ENSG00000050030_10 (sequence is synthesized)
atggagagcagctgctctcagaccagctcctaggcttccccctgcataagtcaagggcaggagacagacgagaaactgagaaacctgacattgacttggaggatccggctcagaaaagct

SEQ ID NO: 33802 - DNA, 120 bp, Artificial Sequence
  ENSG00000050030_11 (sequence is synthesized)
attatgaggcattactgttagacaagtgcaatacagaagaagctttgcttgcaaattccaatcaggattggggttacttcgagacttttattagtgaaagtaagattgaactgcttgacc

SEQ ID NO: 33803 - DNA, 120 bp, Artificial Sequence
  ENSG00000050030_12 (sequence is synthesized)
tctgttccaaaaatgagctgtctgtcaacctattctctgaagaagatgtggataactacatgtttgatgatgatgaatcaacactaggcagtgatgtctgctccctgaaaattcgatatg

SEQ ID NO: 33804 - DNA, 120 bp, Artificial Sequence
  ENSG00000050030_13 (sequence is synthesized)
aatcctttcaggacaatgttcgagacaagactactcttttgatgcaggaagatgcccaattcaacttttttcccagcgtctttactacctgccccaagcgagagtctaagagtggggccc

SEQ ID NO: 33805 - DNA, 120 bp, Artificial Sequence
  ENSG00000050030_14 (sequence is synthesized)
tgaagcagagcagtgatttttcccaattcaaggtccctgatgtgagcatcatctggggggaggaagataaaaacttggacaagaagaaaggcaaagaggaaggacaggaagacaaaggtg

SEQ ID NO: 33806 - DNA, 120 bp, Artificial Sequence
  ENSG00000050030_15 (sequence is synthesized)
tagagaagaaagatggaaaggataatggagaaaagcctgccttaaataaaccatgcagtgggactgaagtagagcaacttaagaatccaaagcagggccatcttgctaattccctggaga

SEQ ID NO: 33807 - DNA, 120 bp, Artificial Sequence
  ENSG00000050030_16 (sequence is synthesized)
catcagggagtttcagtgatgatagttccttcattgagatctcatatgatgctatgggtgagatcaaggactgtagtcgctatatggctcgggacactaattctggcagctcctcctccc

SEQ ID NO: 33808 - DNA, 120 bp, Artificial Sequence
  ENSG00000050030_17 (sequence is synthesized)
aacagaactatgggctgcgagccaagagaaaagtcagatacagtgaagattatctatatgatgttgactcactagagggtgaaaaagtaaatgagaggaaggaatggctgccagttggtt

SEQ ID NO: 33809 - DNA, 120 bp, Artificial Sequence
  ENSG00000050030_18 (sequence is synthesized)
ccaaagaggaagatgatgatgaatggtgtcccaaaaagagaagaaaagtaacccgtaaggagccccctgttattatcaaatatatcatcattaatcgctttaaaggtgagaagaacatgc

SEQ ID NO: 33810 - DNA, 120 bp, Artificial Sequence
  ENSG00000050030_19 (sequence is synthesized)
tggtgaagttgggtaaggtggatgccagtgagacaacagtgaatttgagtgagaatcagctcaacaaatatgccaagctggcacccttgaaaggcttctggcaaaagaagaagaagcaga

SEQ ID NO: 33811 - DNA, 120 bp, Artificial Sequence
  ENSG00000050030_20 (sequence is synthesized)
gaaacaccaacacggactccatcaagacacctttttcccaaaagcaaagctttgaaccaggtagctttgaggtgtcatttctgccacctgctcgcaaacgaaaatctaaacttggcaaca

SEQ ID NO: 33812 - DNA, 120 bp, Artificial Sequence
  ENSG00000050030_21 (sequence is synthesized)
ggcacaggattcaaagaatcccatccattgaaatttcagcaagtagtaaacagatttcattatgtaatgatcagaggcacgctagtaatcataaagaagatggaggcctaaaaggtacac

SEQ ID NO: 33813 - DNA, 120 bp, Artificial Sequence
  ENSG00000050030_22 (sequence is synthesized)
tgaagtcagcacctctgggtgctcctagctgtgcaaatggatcacatttaaatgacatcacaggccctgactcagtgaaagtcaaagcccaagacacagagtttaaggggccagagagga

SEQ ID NO: 33814 - DNA, 120 bp, Artificial Sequence
  ENSG00000050030_23 (sequence is synthesized)
aagtgctcaataaaatcaaatttaaaagtgaagctaggttaaaatctaagaaagtcaaagctgctgggcaagaaagcaagccaattgttcaaatgagccctctcttggaaaaccaatcct

SEQ ID NO: 33815 - DNA, 120 bp, Artificial Sequence
  ENSG00000050030_24 (sequence is synthesized)
caaaggctaatttaaagaatgaagttattcctgggacatcaaacagttcccgtctatctgaatttcatgaggcaaaggctgctaagagttccacttttctaccaacgacatgctcttctg

SEQ ID NO: 33816 - DNA, 120 bp, Artificial Sequence
  ENSG00000050030_25 (sequence is synthesized)
aaatgcctttatcatctgctaatgttaccactaatatacctgttatcccgggagggtatctgcagacattgttagatgcttctgacttgtcaaataacactagtatctcatacttcagcc

SEQ ID NO: 33817 - DNA, 120 bp, Artificial Sequence
  ENSG00000050030_26 (sequence is synthesized)
accattctccagagcaaaatgaaggcagcctcactcaaaccgaaaaatcatttgtacccctccagcctacccaggactgtgtgctcacctcatcctctgactctgagctgcagcagtcat

SEQ ID NO: 33818 - DNA, 120 bp, Artificial Sequence
  ENSG00000050030_27 (sequence is synthesized)
ctcataacttcaaaatggaatcaagcaactatagaaatgtgtggcccaacaaggctacttctggcacccaggaattcatggctgaagtctcaagggagatagccccaacccaatccagtg

SEQ ID NO: 33819 - DNA, 120 bp, Artificial Sequence
  ENSG00000050030_28 (sequence is synthesized)
aatttggagcctcccaagtagtctccatggaaaataacctcacacctacaacatacaatccaatctgtctcaatagtggtggcagtaattgcaacaaggtcctgtatgactccatgcaag

SEQ ID NO: 33820 - DNA, 120 bp, Artificial Sequence
  ENSG00000050030_29 (sequence is synthesized)
atacccaactcccatctgatgactcttaccaattatgtcactttaataatggagagatctgctttcctttccagcaggggccagtcaatatggatgatggtcggctctttagctttgatt

SEQ ID NO: 33821 - DNA, 120 bp, Artificial Sequence
  ENSG00000050030_30 (sequence is synthesized)
caatggccccactctctgtcagctcaagtaattattgctccttaagcttgaagtcctgtgaaaaggatggcgatgatgatatcactgatgacttcctggcccattgcagccctaagctgg

SEQ ID NO: 33822 - DNA, 120 bp, Artificial Sequence
  ENSG00000050030_31 (sequence is synthesized)
tgatccagcaaagcattgatgagatagcaccactaaaggagtccactgacctcctggatatatccaacttcacccctgacaaattccgccactcttccctttcagagatgtccccaccgg

SEQ ID NO: 33823 - DNA, 120 bp, Artificial Sequence
  ENSG00000050030_32 (sequence is synthesized)
acacccctagtctttcccctcaaattaccagatgtgagagtatgaagacactaggaacactaaaggggttccaagagggtgtcccaggaccattggacagtgtggaaaaaatcaagtggg

SEQ ID NO: 33824 - DNA, 120 bp, Artificial Sequence
  ENSG00000050030_33 (sequence is synthesized)
actgcagtaccctttcacggcaggtccaaatggaggatggatttactttaaataatcaccagtttcagttccatatgttcaatgatgaggattctgtcagcctgctccaaaaaaaccctt

SEQ ID NO: 33825 - DNA, 120 bp, Artificial Sequence
  ENSG00000050030_34 (sequence is synthesized)
gcctgtcaacatttaatgatccatctggtcaaattagtaccaacaacaaagtgtcaaaatcaagaaagaaaagttcacccagcaagagtggggctatgaaccaaagctcttctcagaaaa

SEQ ID NO: 33826 - DNA, 120 bp, Artificial Sequence
  ENSG00000050030_35 (sequence is synthesized)
acaccaggaaaaaatccctcaaaggtaacaacaaggggattgaaaaaccacctggcaaaaactcccgccaggtccctaagtccacaaagaaagggaaatacatggctgccatcaatggag

SEQ ID NO: 33827 - DNA, 120 bp, Artificial Sequence
  ENSG00000050030_36 (sequence is synthesized)
agaaaatgcaaattggcattggccgtgggggaagccaaaccaacaccatatcctccactgggaagacattggctgaatgtatccaacatggtggccctatggcctctatgaagatgccaa

SEQ ID NO: 33828 - DNA, 120 bp, Artificial Sequence
  ENSG00000050030_37 (sequence is synthesized)
gtcaaaagggactttctggagattgggccttggggaaggagagcagcccaggctggagtgatatgagcatgggcaccaacaccaacagccttctggatgatgaccaacgggaatttcagg

SEQ ID NO: 33829 - DNA, 120 bp, Artificial Sequence
  ENSG00000050030_38 (sequence is synthesized)
agccttcctatatcttgtccaacattgcctctggtatggcagatgtgcagagattcatgatggcctccatagagcccctttgggaacccatggagcaccatggggatcccaacatattct

SEQ ID NO: 33830 - DNA, 120 bp, Artificial Sequence
  ENSG00000050030_39 (sequence is synthesized)
actcccctgagtccaatagtctaaaattaaaaaccctcaaaatattggctgggacaccacaggagtctaagaaaaagatcaacagtgggtcccaaggagccactaagaatcacaggtcaa

SEQ ID NO: 33831 - DNA, 120 bp, Artificial Sequence
  ENSG00000050030_40 (sequence is synthesized)
tcaagggtgtgagcaaaagcaatgggaaaacagcaataggtgatcctggtcgtgcaaacatgcctggttataacgaggactctcgctctaccttctttgataaaaagtatagtaacatga

SEQ ID NO: 33832 - DNA, 120 bp, Artificial Sequence
  ENSG00000050030_41 (sequence is synthesized)
gcactttaggcaataacggaccgacacacaaaaagttgtatcgtcacaaatccagctccaaggccctgagagatgagaaatgtaagggaaagcacatggagcgagaacaggtccacaagg

SEQ ID NO: 33833 - DNA, 120 bp, Artificial Sequence
  ENSG00000050030_42 (sequence is synthesized)
atgagtctgggacagcttcttttgaaaaactgagggattccgactacaatctcctaaaagcagaaacaaccttttgggttttacctgtgtttgaagaagagactcgcattttccagaaag

SEQ ID NO: 33834 - DNA, 120 bp, Artificial Sequence
  ENSG00000050030_43 (sequence is synthesized)
acatttgatgtttgtgttttatttctttcaaaatatgccttgtggtatgtatgttgacatgtaagtgcttaaagaaaagaattttaaattgtgggaatacgtctttggagcaaactttaa

SEQ ID NO: 33835 - DNA, 120 bp, Artificial Sequence
  ENSG00000050030_44 (sequence is synthesized)
tctcatgttctatgtaaaagacttaaaaagtcatacagttgcacaagtagtttatgcactatttacccacaaggaaaaaattgaaaacattgtgccaaactacaaacaagtgactgtact

SEQ ID NO: 33836 - DNA, 120 bp, Artificial Sequence
  ENSG00000050030_45 (sequence is synthesized)
gtatatatttttacttctatatcaacatttggttgtatttggggaagttgtccctgttaatttactagaaacattccagtgattcttgctattaaccacccccacttatgtggatagcac

SEQ ID NO: 33837 - DNA, 120 bp, Artificial Sequence
  ENSG00000050030_46 (sequence is synthesized)
ctgtagatcatggtggaaaaatatgttgtgttacacaatttaccaaaattaaaggatactgtttgaaatgtgccaaattttcttacctcatctcacagattcacccacagtttaaagctc

SEQ ID NO: 33838 - DNA, 120 bp, Artificial Sequence
  ENSG00000050030_47 (sequence is synthesized)
tcttacctcatctcacagattcacccacagtttaaagctcattaattatttttaaatggatatatacacacccaaacatatatatgtatatgtttgtgtgtgtgtgtgtgtgtgtatata

SEQ ID NO: 33839 - DNA, 120 bp, Artificial Sequence
  ENSG00000050030_48 (sequence is synthesized)
taagggttaaaattttggaaaagtctgaaggccacaacagctaagtccatcagggacccaagtatatgcatttacagaacgttttacaaggaaacaaaacagctgctttcaaagtttgtt

SEQ ID NO: 33840 - DNA, 120 bp, Artificial Sequence
  ENSG00000050030_49 (sequence is synthesized)
tgttttctaaaagcaaaatctgtagctgaaaattatttaaagtgcaaagttatattgctgatactttatatctcagttttatatattttataatagtctgggataaattataaaaatagc

SEQ ID NO: 33841 - DNA, 120 bp, Artificial Sequence
  ENSG00000050030_50 (sequence is synthesized)
aaatcaacactaatgataaatgaagtatatagaatgcttttatttaaatagtttcctaaatgttttattccagttttgtcaaaagtgcactcatatcatggctttagtgttctttcagtg

SEQ ID NO: 33842 - DNA, 120 bp, Artificial Sequence
  ENSG00000050030_51 (sequence is synthesized)
tttaatcttgcaatgccaatgtcatttaaagaaaatgttaaggcatcccagttcaaccaaatttttcttcttatgagtaaagtacatttactatcagataagatgaacaatttgtggcaa

SEQ ID NO: 33843 - DNA, 120 bp, Artificial Sequence
  ENSG00000050030_52 (sequence is synthesized)
caactgatttgggccatatacccttagtctgaggataaccaatatttgatgccacacactaaacttaaatctcaattttaagtacaaatttttaaatcacattttttattcagtactccc

SEQ ID NO: 33844 - DNA, 120 bp, Artificial Sequence
  ENSG00000050030_53 (sequence is synthesized)
cctactttttaaaaaaaatttcacagccccaacattcctcactactactttttcttcccttttattcaccacttgacttctaacatttgatctcttttctttgcacaattgaaggcctgt

SEQ ID NO: 33845 - DNA, 120 bp, Artificial Sequence
  ENSG00000050030_54 (sequence is synthesized)
gcatctgatgactgatgcattatggcacagatgagataatggatgtgagagcgctttgtagatcataaagtgctatacagatataggggattaatattattaatattgttagttgttgtc

SEQ ID NO: 33846 - DNA, 120 bp, Artificial Sequence
  ENSG00000050030_55 (sequence is synthesized)
gttgttactattcttattaatattgttactaacctattaacttgtgaatatataggctggggtgggagggtggagaataagtgggaagggaaaaaggggatttaacaaaaaaagggaaga

SEQ ID NO: 33847 - DNA, 120 bp, Artificial Sequence
  ENSG00000050030_56 (sequence is synthesized)
tgtttcaaaaggaaaattttaagcaaaatatgaacctacctagtcaatgccacctaaatgtattcacaaacagagaagcaacatttgaaagtagtcagagagaaatggaaggaagcctgt

SEQ ID NO: 33848 - DNA, 120 bp, Artificial Sequence
  ENSG00000050030_57 (sequence is synthesized)
catgtatataagtatatacacttcccggtccatgattcctttcaccagcctgctctattccttacagctgggtcgtaaaatgaacaagcctgtgttcttgatcatgtgtgttcccagcgt

SEQ ID NO: 33849 - DNA, 120 bp, Artificial Sequence
  ENSG00000050030_58 (sequence is synthesized)
cagtctcttgtgtctgtggggatgagtgggtgaggagcattctgtgaggctggtacaggcccattcctaggctttaatgctctgtttgcagtgagccctggaaaattacttagtggaaag

SEQ ID NO: 33850 - DNA, 120 bp, Artificial Sequence
  ENSG00000050030_59 (sequence is synthesized)
gcaccagatgaaacatgtctcctgccccatagctaccattcaaaagggaaaataaccaaactggaaaaccttcttctatttctctattctgatagctagctgtactaaatgctatggcca

SEQ ID NO: 33851 - DNA, 120 bp, Artificial Sequence
  ENSG00000050030_60 (sequence is synthesized)
gtccctagaaactggtctttgttttgtttttgtttttgtttttgatttttctgttttgcagctgaattttggcttggaatcaccaactctgcctgtattgtgatccccaagactccagac

SEQ ID NO: 33852 - DNA, 120 bp, Artificial Sequence
  ENSG00000050030_61 (sequence is synthesized)
ctcagagtcacctgctggcttagaggagtggagtgctttctatgtaatgaaaaggtggcaattaatgaaaaaataaagaaaatgttccattaatacaatgtgtttttataaaagtaaata

SEQ ID NO: 33853 - DNA, 120 bp, Artificial Sequence
  ENSG00000050030_62 (sequence is synthesized)
tgggagcagttgtcccagttttttttcggtatcagttcagctttggagaatggggtgtgagtggggtaggacagcctgaaactgttggaaacaatttccttgtgagaacttgctatcata

SEQ ID NO: 33854 - DNA, 120 bp, Artificial Sequence
  ENSG00000050030_63 (sequence is synthesized)
agtcctttggaatggatattctttcagttgctcctatggagcccattaagggccaattctagggcatagttcatccctttctccaaagagaattgttattttaaagtacctttttaattg

SEQ ID NO: 33855 - DNA, 120 bp, Artificial Sequence
  ENSG00000050030_64 (sequence is synthesized)
gcctgcagtgtattatatgtttttaatatataaattagtgacgcataaccagtcactttgtactgaaacataaaaagaaacagagtttgagaaatgagcaataggccgaggcagaagatg

SEQ ID NO: 33856 - DNA, 120 bp, Artificial Sequence
  ENSG00000050030_65 (sequence is synthesized)
tttattctcttaattgcatttaatattcctctcagtacattgtgttctgagatgttcatcatttagcattttgttggtcctgtctctgctctcacagttctttttcttcctgtcataacc

SEQ ID NO: 33857 - DNA, 120 bp, Artificial Sequence
  ENSG00000050030_66 (sequence is synthesized)
agctgccttagtagagtataaaaatagtgttttgccctatcactggtatctcaagtcagaaatatatattatccttggtctgaaattcctgattaccgctcccttctaaccttccccctc

SEQ ID NO: 33858 - DNA, 120 bp, Artificial Sequence
  ENSG00000050030_67 (sequence is synthesized)
tgagaagctgtttcctattaatgcctccctaacagagtcccatttaatctttactttcctggaaatggtaacctcccttattcttcttacttaatctcagaccttggtcttagaattttt

SEQ ID NO: 33859 - DNA, 120 bp, Artificial Sequence
  ENSG00000050030_68 (sequence is synthesized)
cttttatggtctcatatcccacctgcccaaattgtcagggctcaacaatcttaggctgctttcttctggaagttcagaaggaaaccttcccattcttaattgcctttaattgctttggct

SEQ ID NO: 33860 - DNA, 120 bp, Artificial Sequence
  ENSG00000050030_69 (sequence is synthesized)
attttcaaatctaattttttaattaaattttttttaatttttatagagtaggggtacaaggacagttgtgttacatggatatattgcttagtgttgaaatctgggcttttagtgtaccca

SEQ ID NO: 33861 - DNA, 120 bp, Artificial Sequence
  ENSG00000050030_70 (sequence is synthesized)
tcaccgaaatagtgtacattgtacccaataggtggtatttcatccctcaaatataattttaaacacacactcgtgcccacatggacaaattatatcacatgactgaggaaacttagaaat

SEQ ID NO: 33862 - DNA, 120 bp, Artificial Sequence
  ENSG00000050030_71 (sequence is synthesized)
tccttttccctgaagatctgttaagaataggtctcatctcctgccctggttaggtgctatattatatggagaagggtattgagactttgggggtcatgtttgggctgtgataactggctt

SEQ ID NO: 33863 - DNA, 120 bp, Artificial Sequence
  ENSG00000050030_72 (sequence is synthesized)
gaaccagtgaccatcctttctgcctcgccaaggtctcttataccagcttcttcacatatgctgcttcctcccagctttcccttctgacttcttgttactctgcaactatgtgtcaaggcc

SEQ ID NO: 33864 - DNA, 120 bp, Artificial Sequence
  ENSG00000050030_73 (sequence is synthesized)
ttaccttttcctgatgttttcaaacctcctgcattactttgatcatcacttcttcagccatctcactgaagtccttggtgctagctgggcttttgtgacaactttcaccttctctgaact

SEQ ID NO: 33865 - DNA, 120 bp, Artificial Sequence
  ENSG00000050030_74 (sequence is synthesized)
ttttccttgctgggaagcatctgcgtgtgtgagggggctacggagggaagtgtgtgtgtgtgtaagagagaggcaaaaggatgcttcaaaagctataaacaactctagcaagcatcctaa

SEQ ID NO: 33866 - DNA, 120 bp, Artificial Sequence
  ENSG00000050030_75 (sequence is synthesized)
gtcctatgtgaggttttgcagttctagtgaatttctgttttagtaggtttcaattagcatttactgcctaaaggagaaaaaccatatccaaggaccttttagccatgcttgctattacca

SEQ ID NO: 33867 - DNA, 120 bp, Artificial Sequence
  ENSG00000050030_76 (sequence is synthesized)
agctggaccagtgtgatgtagatccaacatgtcttcagcttacagatgctctcagaacagttccaagaattgaagagagctaagtttttatgctgaagaggagaatggagcactagctag

SEQ ID NO: 33868 - DNA, 120 bp, Artificial Sequence
  ENSG00000050030_77 (sequence is synthesized)
tcctaactattgctagaaatagaaatgtttattttctcctttattattgagaaattatctaatttaaggagtaaccattttcatttagggatttttttaatgactgcccatcactacaga

SEQ ID NO: 33869 - DNA, 120 bp, Artificial Sequence
  ENSG00000050030_78 (sequence is synthesized)
aatatgttctttttataaaataaaactaatgtgaggttggtttgttttctaatcataaaattcactaagcctatagttacatttagaagatttagtaccaaaatcaaacttttagtaaca

SEQ ID NO: 33870 - DNA, 120 bp, Artificial Sequence
  ENSG00000050030_79 (sequence is synthesized)
aacaggaatcttgtcaacacaatgtaggccagggattttgtaaaggtttctcaaagacccaaataagggagaaaaaaattttagttgggctgtttaacttgggaaacactgtcatcagct

SEQ ID NO: 33871 - DNA, 120 bp, Artificial Sequence
  ENSG00000050030_80 (sequence is synthesized)
tgagggtcctcagccagcatgtgattattttgatgacaggactcaggctaccctttaaggcacattttttactcagcattaaacactagctacagtcgtgaagcagagctcccattgcag

SEQ ID NO: 33872 - DNA, 120 bp, Artificial Sequence
  ENSG00000050030_81 (sequence is synthesized)
ctacatacttgagatgtactcttggtttcagaatcgtaactaagaggtaaggcattggagaaggacaatgtaaaagacagaggtttagaacaaagtttatggtgtgaatgaggctttcaa

SEQ ID NO: 33873 - DNA, 120 bp, Artificial Sequence
  ENSG00000050030_82 (sequence is synthesized)
aatcagtatctgggtaaattgatactaaagacactgaagaaacactcatccacataagatggaaaggatgtctgtccatctaacaagctcaggggtttctgagtctcagaatgacatccc

SEQ ID NO: 33874 - DNA, 120 bp, Artificial Sequence
  ENSG00000050030_83 (sequence is synthesized)
atttcaaaaagaagaaaagagatattgaaatcattctgcctgtttgagagatgactggttatttacagcacaaaaaaaggcttagaatgaaaactagaagaggccttttgtttttcactc

SEQ ID NO: 33875 - DNA, 120 bp, Artificial Sequence
  ENSG00000050030_84 (sequence is synthesized)
ccagtgaggagagtagaaatcttaagatgctctactgggctacctgtagcactgactggagtttgctgcctacagagttttgaatgtactagtccttagtttccatagaactgaatgcac

SEQ ID NO: 33876 - DNA, 120 bp, Artificial Sequence
  ENSG00000050030_85 (sequence is synthesized)
ctctttagtaagttgctgatttatggtgctaaagaaaatgattattcccatttttttcttcttccccaagccccttaagcatttaagaaaatttaaaataaaagcgttagaggccctttt

SEQ ID NO: 33877 - DNA, 120 bp, Artificial Sequence
  ENSG00000050030_86 (sequence is synthesized)
tatgaatgtaacctaagtttctgtttgacatatgacactgcaacttaaaaatgttaggaaattatttgcctttttttttcttttagagttaagctttataaataatctgtagaatcaatt

SEQ ID NO: 33878 - DNA, 120 bp, Artificial Sequence
  ENSG00000050030_87 (sequence is synthesized)
gaagtttaaagcttaaggatcactcttaagacgtctacaaaatcttgtatatttttaagtgtgccaatttgtaacatattttgtaagtgtatatttttcttagaaaagtgctgtgaagtg

SEQ ID NO: 33879 - DNA, 120 bp, Artificial Sequence
  ENSG00000050030_88 (sequence is synthesized)
tctgtatgtgagagttttcctttttctgcaccactaggtgctaataaaaggatatttacttcaaagtttctggttttagaaaccacaatacaaagaaaaaaaatacacttttgttggaaa

SEQ ID NO: 33880 - DNA, 120 bp, Artificial Sequence
  ENSG00000050030_89 (sequence is synthesized)
ttttgtaacacaaaacatgttgtgaaagagtgtagtgatcttgtgcaaaaaaaatgaacatttgtgagcttcttgctgttttatagattttcttgtaaattattcttgtaacacttctgg

SEQ ID NO: 33881 - DNA, 120 bp, Artificial Sequence
  ENSG00000050030_90 (sequence is synthesized)
ttttgttgttcttgttgcgaaggtttcaaatatttgtgactgaatgtacggtgaaactgtcataatgttacctagctgagttttgttattgtttatgaaataaataaaaagaaaagttta

SEQ ID NO: 33882 - DNA, 120 bp, Artificial Sequence
  ENSG00000050030_91 (sequence is synthesized)
aaatactgctttagaatcatatgtattagaaatcaaaccatttctaattaaatctatgtcccaaataaaacgttctttatcatctagagcagtgtttctcaaactatctgtggtgaggga

SEQ ID NO: 33883 - DNA, 120 bp, Artificial Sequence
  ENSG00000050030_92 (sequence is synthesized)
ccaatagtttttgcaatccatcacagaccaatactattataaaacacaacaaaaatgaatttctaagaaagttaaatggaaaaaagatatgcaaaataaaagcccaaatgtattagattt

SEQ ID NO: 33884 - DNA, 120 bp, Artificial Sequence
  ENSG00000050030_93 (sequence is synthesized)
aacatgtaaaattacatttcgagataaacataacataaggggaaagaaacgaattgcaaaaagttggtaccctgtttgagacaagtccactcatcaatgtcaaattgccatagaaggttc

SEQ ID NO: 33885 - DNA, 120 bp, Artificial Sequence
  ENSG00000050030_94 (sequence is synthesized)
taatcatactttgaataatactttgactagaccagcagcattgccatcatctgggaacttgttaggaatgcgaaattccaagccctacaccaattctgctgaatgagaatctgaatttta

SEQ ID NO: 33886 - DNA, 120 bp, Artificial Sequence
  ENSG00000050030_95 (sequence is synthesized)
acaagatccctaggtgttttgtgtgcatgttaaagtttgagaagcactgggctagagttttgtgtaggggattcttttgcccctcaaattgaggaatcatcttctagtgtgtccagtctt

SEQ ID NO: 33887 - DNA, 120 bp, Artificial Sequence
  ENSG00000050030_96 (sequence is synthesized)
caaagaccttaaaacaaattgtgtctttgttttgtgatccagatggaatctgcagagatgcagtcctctcaaagtgttaaagctgtttattgaaagtaataaatgctgatttgcctggta

SEQ ID NO: 33888 - DNA, 120 bp, Artificial Sequence
  ENSG00000050030_97 (sequence is synthesized)
ggtaatactgcaccagtatggctgagatgatgcacccttagctctcctactacctactaagcccgcagtccctcattttttccctcttgaaagcaaaaatttgcatgaaagaaactgtcc

SEQ ID NO: 33889 - DNA, 120 bp, Artificial Sequence
  ENSG00000050130_0 (sequence is synthesized)
gtggcccggatgttcggtgcagctgccagatccgctgatctagtgcttctcgaaaaaaaccttcaggcggcccatggctgtcgatattcaaccagcatgccttggactttattgtgggaa

SEQ ID NO: 33890 - DNA, 120 bp, Artificial Sequence
  ENSG00000050130_1 (sequence is synthesized)
gaccctattatttaaaaatggctcaactgaaatatatggagaatgtggggtatgcccaagaggacagagaacgaatgcacagaaatattgtcagccttgcacagaatctcctgaacttta

SEQ ID NO: 33891 - DNA, 120 bp, Artificial Sequence
  ENSG00000050130_2 (sequence is synthesized)
tgattggctctatcttggatttatggcaatgcttcctctggttttacattggttcttcattgaatggtactcggggaaaaagagttccagcgcacttttccaacacatcactgcattatt

SEQ ID NO: 33892 - DNA, 120 bp, Artificial Sequence
  ENSG00000050130_3 (sequence is synthesized)
tgaatgcagcatggcagctattatcaccttacttgtgagtgatccagttggtgttctttatattcgttcatgtcgagtattgatgctttctgactggtacacgatgctttacaacccaag

SEQ ID NO: 33893 - DNA, 120 bp, Artificial Sequence
  ENSG00000050130_4 (sequence is synthesized)
tccagattacgttaccacagtacactgtactcatgaagccgtctacccactatataccattgtatttatctattacgcattctgcttggtattaatgatgctgctccgacctcttctggt

SEQ ID NO: 33894 - DNA, 120 bp, Artificial Sequence
  ENSG00000050130_5 (sequence is synthesized)
gaagaagattgcatgtgggttagggaaatctgatcgatttaaaagtatttatgctgcactttacttcttcccaattttaaccgtgcttcaggcagttggtggaggccttttatattacgc

SEQ ID NO: 33895 - DNA, 120 bp, Artificial Sequence
  ENSG00000050130_6 (sequence is synthesized)
cttcccatacattatattagtgttatctttggttactctggctgtgtacatgtctgcttctgaaatagagaactgctatgatcttctggtcagaaagaaaagacttattgttctcttcag

SEQ ID NO: 33896 - DNA, 120 bp, Artificial Sequence
  ENSG00000050130_7 (sequence is synthesized)
ccactggttacttcatgcctatggaataatctccatttccagagtggataaacttgagcaagatttgccccttttggctttggtacctacaccagcccttttttacttgttcactgcaaa

SEQ ID NO: 33897 - DNA, 120 bp, Artificial Sequence
  ENSG00000050130_8 (sequence is synthesized)
atttaccgaaccttcaaggatactctcagaaggagccaatggacactgagtgtagacatgtgaaatgccaaaaacctgagaagtgctcctaataaaaaagtaaatcaatcttaacagtgt

SEQ ID NO: 33898 - DNA, 120 bp, Artificial Sequence
  ENSG00000050130_9 (sequence is synthesized)
gttttgtttatggttagacttacagacttggaaaatgcaaaactctgtaatactctgttacacagggtaatattatctgctacactggaaggccgctaggaagcccttgcttctctcaac

SEQ ID NO: 33899 - DNA, 120 bp, Artificial Sequence
  ENSG00000050130_10 (sequence is synthesized)
agttcagctgttctttagggcaaaatcatgtttctgtgtacctagcaatgtgttcccattttattaagaaaagctttaacacgtgtaatctgcagtccttaacagtggcgtaattgtact

SEQ ID NO: 33900 - DNA, 120 bp, Artificial Sequence
  ENSG00000050130_11 (sequence is synthesized)
tacctgttgtgtttcagtttgtttttcacctataatgaattgtaaaaacaaacatacttgtggggtctgatagcaaacatagaaatgatgtatattgttttttgttatctatttattttc

SEQ ID NO: 33901 - DNA, 120 bp, Artificial Sequence
  ENSG00000050130_12 (sequence is synthesized)
atcaatacagtattttgatgtattgcaaaaatagataataatttatataacaggttttctgtttatagattggttcaagatttgtttggattattgttcctgtaaagaaaacaataataa

SEQ ID NO: 33902 - DNA, 120 bp, Artificial Sequence
  ENSG00000050130_13 (sequence is synthesized)
aaagcttacctacataaaatttcaatgttttgacacttaattgttgtttggcacaatagtatggaagtaattcaaactggtaaatagtttcctctcatatctcgggtatatatacatacc

SEQ ID NO: 33903 - DNA, 120 bp, Artificial Sequence
  ENSG00000050130_14 (sequence is synthesized)
atattttattgatccagagatacttatttcactttgtgacatctctgaattaggatgcatcttacaactgatggcttattagatttaatgaaatacagaagatacacagaataaaaaggg

SEQ ID NO: 33904 - DNA, 120 bp, Artificial Sequence
  ENSG00000050130_15 (sequence is synthesized)
ttttcctgtggttggtttgtggtttgtgataggtgttctgtgatgtttatgctttgaaggccttaagactcatggttgcaaccatggaagcaaaatgaaatttttagctcttaacctaac

SEQ ID NO: 33905 - DNA, 120 bp, Artificial Sequence
  ENSG00000050130_16 (sequence is synthesized)
aacctgaccatgtttatccatttttattgtttagaagtttatttactgatacttggtggaggttgtgtgaattagttaaattttaaatgtttaagacttctattaacagctgcaaaatat

SEQ ID NO: 33906 - DNA, 120 bp, Artificial Sequence
  ENSG00000050130_17 (sequence is synthesized)
gaaagtaagtgcactcacttttcctgtagtagtctgtcttttgaattcacagcagttgtatccttgagttactttgttaatgtatttttctcagtacatttaaccactgggaaatgaacc

SEQ ID NO: 33907 - DNA, 120 bp, Artificial Sequence
  ENSG00000050130_18 (sequence is synthesized)
cttgtacgaatgtgtttcttcttctctgtaggaataaaaaataaatataaaaattttatttgtattgcacacatttggggggttattagtgttcattaaaattctgagttgcccaaagaa

SEQ ID NO: 33908 - DNA, 120 bp, Artificial Sequence
  ENSG00000050130_19 (sequence is synthesized)
gggaggcggagccgccgagctcgctgtggcccggatgttcggtgcagctgccagatccgctgatctagtgcttctcgaaaaaaaccttcaggcggcccatggatttatagcgcccgtcac

SEQ ID NO: 33909 - DNA, 120 bp, Artificial Sequence
  ENSG00000050130_20 (sequence is synthesized)
aaagggcaggaccgctgcaaaaaaatggaatcttaaaactttagccatcgttcgctaaaggaaatgaaaggagaaattcaacagtcgcttggagcctgggttttgcttactgtcgatatt

SEQ ID NO: 33910 - DNA, 120 bp, Artificial Sequence
  ENSG00000050130_21 (sequence is synthesized)
tattgtccataaagtttttattggaacacagccgtgcccattcatgtatgtattctctatggctgctttcccactacaactgcagagctgggtaatcgagacagagaaatgcagggctga

SEQ ID NO: 33911 - DNA, 120 bp, Artificial Sequence
  ENSG00000050130_22 (sequence is synthesized)
aactatttactatcttgccctttccagaaaaagcttgctggccactgcctcagaaccttaggttgtaagtctcacagaactggttgagaaaggatttgactctaaggaaaattactattt

SEQ ID NO: 33912 - DNA, 120 bp, Artificial Sequence
  ENSG00000050130_23 (sequence is synthesized)
gatccgctgatctagtgcttctcgaaaaaaaccttcaggcggcccatgggtgagtggtcgccaagatcccgggaagcgtttctggtagtcccgactactttcctacacggctggcctcgg

SEQ ID NO: 33913 - DNA, 120 bp, Artificial Sequence
  ENSG00000050130_24 (sequence is synthesized)
gctcggctctttgtaggcggccttcggttggcggcgcaggctcgccccttgaccccgcccgccctcgggccgggctccgcactcctgcggggttggggtggtctgtccgcaacgggctac

SEQ ID NO: 33914 - DNA, 120 bp, Artificial Sequence
  ENSG00000050130_25 (sequence is synthesized)
taggggaggcgcgctgtctgcggcgaaatgccaggtctttgttgtttggtccgaaatgtctcttcagtcccttagtttaatgtcgagggaacacttgcttgagggttgacttcggaattg

SEQ ID NO: 33915 - DNA, 120 bp, Artificial Sequence
  ENSG00000050130_26 (sequence is synthesized)
ctctgtctcaaaaaaaaaataaaataaggaaatataaaagaatatggaggcattaatatagtcattgttcatgttggcattttgatgtctatattattttttaaaacatttaataatttt

SEQ ID NO: 33916 - DNA, 120 bp, Artificial Sequence
  ENSG00000050130_27 (sequence is synthesized)
ataataatttctaatttatgatttggtaccgtgtcttgtacagtaagttgaacatcatgaatccagaacatttatctgcagttattcttatataatgttaataactaggtttttcattga

SEQ ID NO: 33917 - DNA, 120 bp, Artificial Sequence
  ENSG00000050130_28 (sequence is synthesized)
atgttagtcaactattttagtaacttagtaaaaggaatcttctaagagcattgtacaaatatagcacatacaatatagatttctttttattttacttatgccctcttttttatttctaaa

SEQ ID NO: 33918 - DNA, 120 bp, Artificial Sequence
  ENSG00000050130_29 (sequence is synthesized)
agctgcacatgtaaacttaaatatttaaactgaaatgggatgtcttatagaatgatttgggggggtgttaatgttgtaaaataatatctgtacacaaaatattggttttatatattatag

SEQ ID NO: 33919 - DNA, 120 bp, Artificial Sequence
  ENSG00000050130_30 (sequence is synthesized)
gttcggtgcagctgccagatccgctgatctagtgcttctcgaaaaaaaccttcaggcggcccatggcataaggagaaggaagtaaaaagtctgcttgaatgtgaaaggagagaaggcact

SEQ ID NO: 33920 - DNA, 120 bp, Artificial Sequence
  ENSG00000050130_31 (sequence is synthesized)
gtagaccaggcagtctagattgtgaattcgtgaataatttgggaaatgattgttcaagaatagtcaaaagatgcataatttttcaaattaattcacatgtagaccgcagtttgttttgag

SEQ ID NO: 33921 - DNA, 120 bp, Artificial Sequence
  ENSG00000050130_32 (sequence is synthesized)
taccacagtacactgtactcatgaagccgtctacccactgtaagtgtttatttcgacttaagatcattgtttttttttaaatctctgaggattattatagattttatggcgtttggagac

SEQ ID NO: 33922 - DNA, 80 bp, Artificial Sequence
  ENSG00000050165_0 (sequence is synthesized)
gagagggagcctggtgggcgggcggggcgcgtcttgcgggctccctcgggtaccggcgctgccgcaccccgccgcgctcc

SEQ ID NO: 33923 - DNA, 120 bp, Artificial Sequence
  ENSG00000050165_1 (sequence is synthesized)
ctgcacccgcagcccggcggcctcccggcgggagcgagcagatccagtccggcccgcagcgcaactcggtccagtcggggcggcggctgcgggcgcagagcggagatgcagcggcttggg

SEQ ID NO: 33924 - DNA, 120 bp, Artificial Sequence
  ENSG00000050165_2 (sequence is synthesized)
gctgtgcctgctgctggcggcggcggtccccacggcccccgcgcccgctccgacggcgacctcggctccagtcaagcccggcccggctctcagctacccgcaggaggaggccaccctcaa

SEQ ID NO: 33925 - DNA, 120 bp, Artificial Sequence
  ENSG00000050165_3 (sequence is synthesized)
accctcaatgagatgttccgcgaggttgaggaactgatggaggacacgcagcacaaattgcgcagcgcggtggaagagatggaggcagaagaagctgctgctaaagcatcatcagaagtg

SEQ ID NO: 33926 - DNA, 120 bp, Artificial Sequence
  ENSG00000050165_4 (sequence is synthesized)
aacctggcaaacttacctcccagctatcacaatgagaccaacacagacacgaaggttggaaataataccatccatgtgcaccgagaaattcacaagataaccaacaaccagactggacaa

SEQ ID NO: 33927 - DNA, 120 bp, Artificial Sequence
  ENSG00000050165_5 (sequence is synthesized)
atggtcttttcagagacagttatcacatctgtgggagacgaagaaggcagaaggagccacgagtgcatcatcgacgaggactgtgggcccagcatgtactgccagtttgccagcttccag

SEQ ID NO: 33928 - DNA, 120 bp, Artificial Sequence
  ENSG00000050165_6 (sequence is synthesized)
tacacctgccagccatgccggggccagaggatgctctgcacccgggacagtgagtgctgtggagaccagctgtgtgtctggggtcactgcaccaaaatggccaccaggggcagcaatggg

SEQ ID NO: 33929 - DNA, 120 bp, Artificial Sequence
  ENSG00000050165_7 (sequence is synthesized)
accatctgtgacaaccagagggactgccagccggggctgtgctgtgccttccagagaggcctgctgttccctgtgtgcacacccctgcccgtggagggcgagctttgccatgaccccgcc

SEQ ID NO: 33930 - DNA, 120 bp, Artificial Sequence
  ENSG00000050165_8 (sequence is synthesized)
agccggcttctggacctcatcacctgggagctagagcctgatggagccttggaccgatgcccttgtgccagtggcctcctctgccagccccacagccacagcctggtgtatgtgtgcaag

SEQ ID NO: 33931 - DNA, 120 bp, Artificial Sequence
  ENSG00000050165_9 (sequence is synthesized)
ccgaccttcgtggggagccgtgaccaagatggggagatcctgctgcccagagaggtccccgatgagtatgaagttggcagcttcatggaggaggtgcgccaggagctggaggacctggag

SEQ ID NO: 33932 - DNA, 120 bp, Artificial Sequence
  ENSG00000050165_10 (sequence is synthesized)
gctaatttatttccccaggtgtgtgctttaggcgtgggctgaccaggcttcttcctacatcttcttcccagtaagtttcccctctggcttgacagcatgaggtgttgtgcatttgttcag

SEQ ID NO: 33933 - DNA, 120 bp, Artificial Sequence
  ENSG00000050165_11 (sequence is synthesized)
ctcccccaggctgttctccaggcttcacagtctggtgcttgggagagtcaggcagggttaaactgcaggagcagtttgccacccctgtccagattattggctgctttgcctctaccagtt

SEQ ID NO: 33934 - DNA, 120 bp, Artificial Sequence
  ENSG00000050165_12 (sequence is synthesized)
ggcagacagccgtttgttctacatggctttgataattgtttgaggggaggagatggaaacaatgtggagtctccctctgattggttttggggaaatgtggagaagagtgccctgctttgc

SEQ ID NO: 33935 - DNA, 120 bp, Artificial Sequence
  ENSG00000050165_13 (sequence is synthesized)
aaacatcaacctggcaaaaatgcaacaaatgaattttccacgcagttctttccatgggcataggtaagctgtgccttcagctgttgcagatgaaatgttctgttcaccctgcattacatg

SEQ ID NO: 33936 - DNA, 120 bp, Artificial Sequence
  ENSG00000050165_14 (sequence is synthesized)
tgtttattcatccagcagtgttgctcagctcctacctctgtgccagggcagcattttcatatccaagatcaattccctctctcagcacagcctggggagggggtcattgttctcctcgtc

SEQ ID NO: 33937 - DNA, 120 bp, Artificial Sequence
  ENSG00000050165_15 (sequence is synthesized)
catcagggatctcagaggctcagagactgcaagctgcttgcccaagtcacacagctagtgaagaccagagcagtttcatctggttgtgactctaagctcagtgctctctccactacccca

SEQ ID NO: 33938 - DNA, 120 bp, Artificial Sequence
  ENSG00000050165_16 (sequence is synthesized)
caccagccttggtgccaccaaaagtgctccccaaaaggaaggagaatgggatttttcttttgaggcatgcacatctggaattaaggtcaaactaattctcacatccctctaaaagtaaac

SEQ ID NO: 33939 - DNA, 120 bp, Artificial Sequence
  ENSG00000050165_17 (sequence is synthesized)
tactgttaggaacagcagtgttctcacagtgtggggcagccgtccttctaatgaagacaatgatattgacactgtccctctttggcagttgcattagtaactttgaaaggtatatgactg

SEQ ID NO: 33940 - DNA, 120 bp, Artificial Sequence
  ENSG00000050165_18 (sequence is synthesized)
agcgtagcatacaggttaacctgcagaaacagtacttaggtaattgtagggcgaggattataaatgaaatttgcaaaatcacttagcagcaactgaagacaattatcaaccacgtggaga

SEQ ID NO: 33941 - DNA, 120 bp, Artificial Sequence
  ENSG00000050165_19 (sequence is synthesized)
aaatcaaaccgagcagggctgtgtgaaacatggttgtaatatgcgactgcgaacactgaactctacgccactccacaaatgatgttttcaggtgtcatggactgttgccaccatgtattc

SEQ ID NO: 33942 - DNA, 120 bp, Artificial Sequence
  ENSG00000050165_20 (sequence is synthesized)
atccagagttcttaaagtttaaagttgcacatgattgtataagcatgctttctttgagttttaaattatgtataaacataagttgcatttagaaatcaagcataaatcacttcaactgct

SEQ ID NO: 33943 - DNA, 120 bp, Artificial Sequence
  ENSG00000050165_21 (sequence is synthesized)
cgacgccaaggggagggggctgacctgtgcttggtccaccccaggtaggggctgagagaggcttgaggtggaagtgggggtcgggcactctgacctggtcgaggaggggctagggtttga

SEQ ID NO: 33944 - DNA, 120 bp, Artificial Sequence
  ENSG00000050165_22 (sequence is synthesized)
accggggacagagtctaggtgagctggggcttgggagctattagcgtagaggatccgggttcggttgctctggcgagggctccagcatcacaggcggcggctgcgggcgcagagcggaga

SEQ ID NO: 33945 - DNA, 120 bp, Artificial Sequence
  ENSG00000050165_23 (sequence is synthesized)
gcaaatttgccacccaactgaagcacacctctttcagcatcaaaatattttagaaatcttaactatttttggatgggaatttgtcttaaagagtgtaaatgcttcacggccttctgaaag

SEQ ID NO: 33946 - DNA, 120 bp, Artificial Sequence
  ENSG00000050165_24 (sequence is synthesized)
gacaaatggaatatgtatgactctttttttaggggagccttctttaatcaaatgcagttctgggccataagacagtaagatcctcaaggaccataatattagagctactatattgaagtc

SEQ ID NO: 33947 - DNA, 120 bp, Artificial Sequence
  ENSG00000050165_25 (sequence is synthesized)
agctgcgtggcaagtgccagattaggcagtctacctatattcattcatttaatcttcactgaactccatgagcattttcttcatttcacagatgaacaaatggaggtgcaaagagattga

SEQ ID NO: 33948 - DNA, 120 bp, Artificial Sequence
  ENSG00000050165_26 (sequence is synthesized)
cagagtagaagtcagacaaaaacagcatctagtacagtatgtccaggttatagtgattattttaagatcaaatagggagctgttttctattcaatgtcagaaaccatcaggaccacccta

SEQ ID NO: 33949 - DNA, 120 bp, Artificial Sequence
  ENSG00000050165_27 (sequence is synthesized)
cattctggttactcaacagatatctactgagagcctcctcagaatcaggtgctgtggtacgctttggggtgccaagctgacccagatagggtccctaccttgaaggcatcccagtctaat

SEQ ID NO: 33950 - DNA, 120 bp, Artificial Sequence
  ENSG00000050165_28 (sequence is synthesized)
gagggagacacagccagagcaagcaatgacaaaacaaagacagtcaacccgatgtgggaacagaggtgttacggaagcctcagtggagcacttggggagagctggcatgggaactggctc

SEQ ID NO: 33951 - DNA, 120 bp, Artificial Sequence
  ENSG00000050165_29 (sequence is synthesized)
ttgaagatgataggagtttatcaggaagccagagggcacaggaaagggctttctgggccatgggcagagggagggaggcacaagggtcaggtgccatgtaggggaaactgcaagtcattt

SEQ ID NO: 33952 - DNA, 120 bp, Artificial Sequence
  ENSG00000050165_30 (sequence is synthesized)
gcagtggctggaaggcaaggaaagcttgaggaagcatttagagaagaggctaaaaattatgtcatccaaaaaatgattgaaaacattgtggtaaatgagataaaactaggtcccccatag

SEQ ID NO: 33953 - DNA, 120 bp, Artificial Sequence
  ENSG00000050165_31 (sequence is synthesized)
ttgtatatgtagatatagtaggctgctccattttgtcatgatagccacaaacttgtaagaacacgagaggctttgcaaaatacttagctgaagccagcatctgagtagcatctgagtgtc

SEQ ID NO: 33954 - DNA, 120 bp, Artificial Sequence
  ENSG00000050165_32 (sequence is synthesized)
tcctttactcagtcctgagtgaaatgtgggaggggctgggtggaggtggtgcttgaataccttgctgctgctctctcccaaagccagagttcctgccaagccatggcagatgccgtcagg

SEQ ID NO: 33955 - DNA, 120 bp, Artificial Sequence
  ENSG00000050165_33 (sequence is synthesized)
taaactgctcaacagctgttctcagtccctccagcagctagggctggccccatgacccaggaaatgtaaggggagggctcccagagtttctggaattttttcccaattgacaaaaggaga

SEQ ID NO: 33956 - DNA, 120 bp, Artificial Sequence
  ENSG00000050165_34 (sequence is synthesized)
gtggcaaacaagaatggagctcctgccctccatccacttcccctgcctttgagtatggtgctcaggaagcgacatttggctctggggcagccatctggtgatcatgtgatcaacagggct

SEQ ID NO: 33957 - DNA, 120 bp, Artificial Sequence
  ENSG00000050165_35 (sequence is synthesized)
gcattcctctggaggctctggggagagtccatttccttgctgttttttagcctctataggtcactggcattccttggctcatgggccccttcatcttcaaatcctgcaatgacagttctg

SEQ ID NO: 33958 - DNA, 120 bp, Artificial Sequence
  ENSG00000050165_36 (sequence is synthesized)
tccttctcaggtgccagctctctggctttctacaggtgggaaaggttctccacttctggggacccatgtgatcaaattgcgcccacctagataatccagaataatcttcccacgtcaagg

SEQ ID NO: 33959 - DNA, 120 bp, Artificial Sequence
  ENSG00000050165_37 (sequence is synthesized)
tccttaaccttaattgcatctgcaaaatctcttttgccctgtcaggtaaataatcacaatcttcccacgtcaaggtccttaaccttaattgcatctgcaaaatctcttttgccctgtcag

SEQ ID NO: 33960 - DNA, 120 bp, Artificial Sequence
  ENSG00000050165_38 (sequence is synthesized)
gtaaataatcacaggatacagggtttaggatgtggccctaccacagaaagagtctttgagtccttgacattgaggaggaaaccaatcctgttctccaccatctctggacaccttaagtaa

SEQ ID NO: 33961 - DNA, 120 bp, Artificial Sequence
  ENSG00000050165_39 (sequence is synthesized)
acacaggagctatttgcatgatgaaccatagcctgcaggagaacaaagcccaactggttctctgggcctgtggggagggaggatgaggttgaagagggaagggaggggcctgctgtagtg

SEQ ID NO: 33962 - DNA, 120 bp, Artificial Sequence
  ENSG00000050165_40 (sequence is synthesized)
tgagggacaaagacaggaagagaaaaaaggcattaggtattcctgtggtctgcacatcctctccagatactcaagaaatgcaattcaactatttggagattactttttgatagctatgct

SEQ ID NO: 33963 - DNA, 120 bp, Artificial Sequence
  ENSG00000050165_41 (sequence is synthesized)
tggtttctaaatgcagctaggcccctgcacacagggcttgctgaaagtggccacctcagcagcagcagcacaattgccctgtataaagatgaccaagggagggtgaaatccccttttggg

SEQ ID NO: 33964 - DNA, 120 bp, Artificial Sequence
  ENSG00000050165_42 (sequence is synthesized)
agattgtggtgtttggaaaacagattcttcccctccctgacactccgttgagggaggagaggttagattttattcccttggctgaaacttctgaggggaactttttgagacactcatgga

SEQ ID NO: 33965 - DNA, 120 bp, Artificial Sequence
  ENSG00000050165_43 (sequence is synthesized)
agatcaaattgagggttgaagacttggtagggactagtgcagcatgggatagtggtattcactgcagagaagtgtctgccagcaggaggctggcaagacactgtcaaatttcatgaggga

SEQ ID NO: 33966 - DNA, 120 bp, Artificial Sequence
  ENSG00000050165_44 (sequence is synthesized)
gcaccaatgctgttaggagttgggtcctttgctgataggacctgcagggcatctaccttcatgtctacaaaaaagttactagtgaccaggcacaaggggacagtaaccttaccagcctca

SEQ ID NO: 33967 - DNA, 120 bp, Artificial Sequence
  ENSG00000050165_45 (sequence is synthesized)
ttgctaagaagtggttagcacatgtcttccccccgctcttcctggcctcttccaccaccagtcaagctggtgcaggagttggcagggacagcacatcttggaggcactatggaggttcag

SEQ ID NO: 33968 - DNA, 120 bp, Artificial Sequence
  ENSG00000050165_46 (sequence is synthesized)
gggagctttgaatgaaaccactgaactttaagataagattgtcttaataatgcaaaatgacttaaaagtcacaggattgcactgagcacttgataagcccactgcccagtgggtaactgc

SEQ ID NO: 33969 - DNA, 120 bp, Artificial Sequence
  ENSG00000050165_47 (sequence is synthesized)
atttgacaaaacaattggcacagttatgaaaaaaatgtaagcattgagtatttttatctccataaattatactcttcaagcaggttacttaagcattataaaagaggctgaaaacaggtg

SEQ ID NO: 33970 - DNA, 120 bp, Artificial Sequence
  ENSG00000050165_48 (sequence is synthesized)
gggagagggcaggtgggaaacatggaaagcagagggaaggggagcttggtgcccacctgtgaggcaaggttttagggtccaataacaatttctgacctggtgagctgacactcagttgag

SEQ ID NO: 33971 - DNA, 120 bp, Artificial Sequence
  ENSG00000050165_49 (sequence is synthesized)
atcaattctcttgtacaggtgagctggtgaggaggtggaaaggggcagtgctgtgatggggaaggggcagagcattcctctcaactctcttttgccctcctagcttgacctactgatggc

SEQ ID NO: 33972 - DNA, 120 bp, Artificial Sequence
  ENSG00000050165_50 (sequence is synthesized)
tgcactcttttctaaatagtaacacatgctccaatgcatgcttgagtttgtgcagtattcttgtttctgaaagtcaagttgtgacaattaatgctgtatctaaccaaatgatcacagcct

SEQ ID NO: 33973 - DNA, 120 bp, Artificial Sequence
  ENSG00000050165_51 (sequence is synthesized)
ccctcttccccatgggaactacaatcaagaagcatcttccaatttcatgtacactaaacctaggtggccacaagcttcatttgggccatgaactcctttgaaaccctcataaaaactgtc

SEQ ID NO: 33974 - DNA, 120 bp, Artificial Sequence
  ENSG00000050165_52 (sequence is synthesized)
ctactatctccctggtaaatcgcacatacacagagttttgcctttcaggacatatggccttataagattttgactactagtgaccaaaatgttgatgtttttcaaaaattacacagaatt

SEQ ID NO: 33975 - DNA, 120 bp, Artificial Sequence
  ENSG00000050165_53 (sequence is synthesized)
gttaagatggaatagttttattcagcaaacaaaaaacttgctaattcagagtatcctctagtccacgtaatgtggtttagactacatttgcaaaattagggccttgacgctgaacaaaat

SEQ ID NO: 33976 - DNA, 120 bp, Artificial Sequence
  ENSG00000050165_54 (sequence is synthesized)
aaaatccagaggaagaactacagtatccaatcaaaaaggaagtactagcaaatgaaccagaataaaagactttattgtattccatacattcacaggtcacttccagatttagtaacaaca

SEQ ID NO: 33977 - DNA, 120 bp, Artificial Sequence
  ENSG00000050165_55 (sequence is synthesized)
ctgcaatgctatgatgctgtgcggtcatttagcttaaaccacagtgtaagttggtagctctctcctgctctcttggcctctagatgtatcacaatacaattcctaactgtggcctggcaa

SEQ ID NO: 33978 - DNA, 120 bp, Artificial Sequence
  ENSG00000050165_56 (sequence is synthesized)
ccaatgcttatttcattggattattttctgactgggacatgagttcatcgcatcttcccagaattttaaagtaccttcccttacattataagagatgaccaaacactctagtgtgaaggc

SEQ ID NO: 33979 - DNA, 120 bp, Artificial Sequence
  ENSG00000050165_57 (sequence is synthesized)
tgcttcacacactgttcttatctatcatgattgctcttccttacatacacgtcccgtacagatcagctacacacggcatggtcctgaaaccacagcttttgtttctttggccagaatgca

SEQ ID NO: 33980 - DNA, 120 bp, Artificial Sequence
  ENSG00000050165_58 (sequence is synthesized)
cccctcaccttgagtgcccgccttagaaacacaggtacttggttctcacagggtgtgcatggttgacacaagttcatctgccccacggtaaaagctcttcaaaacctttgcatgacttgt

SEQ ID NO: 33981 - DNA, 120 bp, Artificial Sequence
  ENSG00000050165_59 (sequence is synthesized)
ggggagcagggtcacaatttgttgcatgtgacctgcctcagcctcaaaagataagagatcatgaggctccaccgcccccgggctcaggaaacttgatccacatcgctagggctctgcctg

SEQ ID NO: 33982 - DNA, 120 bp, Artificial Sequence
  ENSG00000050165_60 (sequence is synthesized)
ttaggttatggatgctcacctgactctctgaagcagagggaggctgacacagattagcttttattgaaattattaaagtgcaactttgtgttttcactctatcaggcactgaaaagcaag

SEQ ID NO: 33983 - DNA, 120 bp, Artificial Sequence
  ENSG00000050165_61 (sequence is synthesized)
aagcttttaattttttcttttctataatgaaatatattttctttactcttatttgtatctgtaatacacctgcaattagaaacagcagttaaacataaaacaaagaacagagcagaaggc

SEQ ID NO: 33984 - DNA, 120 bp, Artificial Sequence
  ENSG00000050165_62 (sequence is synthesized)
acagtctaaagagtgggtatcagaagaattttaccatttacgctcataggaatactaaaccaaacccaatcagaccaaactccaaagcccattgtgtttacaagtctgcctcttttgtgt

SEQ ID NO: 33985 - DNA, 120 bp, Artificial Sequence
  ENSG00000050165_63 (sequence is synthesized)
gatagcaagtcagtcctttaaagcagaaaccccatttactaaccctacatcccaagtaagcaggcctgtatcagaaccaaacagctgtcctcttacatcagaaaatctaagtgatctgaa

SEQ ID NO: 33986 - DNA, 120 bp, Artificial Sequence
  ENSG00000050165_64 (sequence is synthesized)
agacaattcatcacaagtgtttccaattttcttctgagaacatcaccaatcccactaatgcaaactcagaacattacttcagtcaaatttcgctaaatgctatagctttcttcaaataaa

SEQ ID NO: 33987 - DNA, 120 bp, Artificial Sequence
  ENSG00000050165_65 (sequence is synthesized)
aattagccagaaaaataccttagaaaagattttttttttcattgtggattccaggagacttttaagacatggaattctcggtgattatattcaaatggcagagccacatttgctaacagt

SEQ ID NO: 33988 - DNA, 120 bp, Artificial Sequence
  ENSG00000050165_66 (sequence is synthesized)
attttctaattttatctttcttataagaaaaaaagggtaaaaatcggatctgaaatactgacagggttccccaaagttagatattaacacagcttttcatttctcttatgagaactttac

SEQ ID NO: 33989 - DNA, 120 bp, Artificial Sequence
  ENSG00000050165_67 (sequence is synthesized)
tgtaaatatacctttatcatagaaatgagatatccaatacacattacaaaatgtcatatttaaagatgacaaatctattcttaacccagattcttcatccacagaagtttaatgactaaa

SEQ ID NO: 33990 - DNA, 120 bp, Artificial Sequence
  ENSG00000050165_68 (sequence is synthesized)
ataacacaacagaatgaacaaatgttttattggcatgttcattgttgtaaacagcatctggcatgaaaaagttttaccaaaaccttttttattgatttttataaattagatggtatgtca

SEQ ID NO: 33991 - DNA, 120 bp, Artificial Sequence
  ENSG00000050165_69 (sequence is synthesized)
aaatttatgtagaattgtgttcattgagtacttttatttagcaaagcaaaaacttgctgatactaataaactctgcaatgaaatcatgttgactgcatcagtctgtaccatgacctgacc

SEQ ID NO: 33992 - DNA, 120 bp, Artificial Sequence
  ENSG00000050165_70 (sequence is synthesized)
tcattagcaagtttattcagaacaatgttaagacgtttcccaaaagttaaactacatgtaactacaaattgactctaaaaattaaaactggacttacaagcattctagaagattcaaact

SEQ ID NO: 33993 - DNA, 120 bp, Artificial Sequence
  ENSG00000050165_71 (sequence is synthesized)
tgaagtaaatcttcaaaactagatgtacaaagagaaaaaaattgaagccgctgaacagagaaacctcattaacaagggcaacgacaatcctatgggacctagcactgaggaacctcactg

SEQ ID NO: 33994 - DNA, 120 bp, Artificial Sequence
  ENSG00000050165_72 (sequence is synthesized)
aggattacatttacatagattgctatacttctcaatgtacacaaatgtacagaatgaatgatacgtgaaaagaataatcatggcagatagttgaactgcaattatgataactcaacagga

SEQ ID NO: 33995 - DNA, 120 bp, Artificial Sequence
  ENSG00000050165_73 (sequence is synthesized)
tcaattttatttacatgctgaataaatgaatgaaacatattctctacatccataacttaagtacaatcagttataattacaacactgcagcaatctgagctgccacctgctgggatcggt

SEQ ID NO: 33996 - DNA, 120 bp, Artificial Sequence
  ENSG00000050165_74 (sequence is synthesized)
ctaagggaaacgttctgatgttccagaataatgttcttaatactctgcaaaaaatgaaacaaaataaaaacacaacttcacaattccttactgggttacggctggttccaagaatttctt

SEQ ID NO: 33997 - DNA, 120 bp, Artificial Sequence
  ENSG00000050165_75 (sequence is synthesized)
ttcttcagctcctgtttttgctgctttccaagagtcaacacacgttggatttacttctgaattgtcaatgaggtaatgtgtgcatcagtgaaataaacagaaaattcattcattcatggc

SEQ ID NO: 33998 - DNA, 120 bp, Artificial Sequence
  ENSG00000050165_76 (sequence is synthesized)
ctttgcacagcttttattattaagctatgagcatcctgtttgaggctagttttactagcggctatgtgcacatttgtccgcaataaaagaagtttactcattcccctgtccccttttcta

SEQ ID NO: 33999 - DNA, 120 bp, Artificial Sequence
  ENSG00000050165_77 (sequence is synthesized)
ttttgttgtttttttttatttttttgcacatcccttttcactttacagtacatttgactatagtgcacaacatgattccgagtcaaaacagtggcccattgggcactgagcttctgattg

SEQ ID NO: 34000 - DNA, 120 bp, Artificial Sequence
  ENSG00000050165_78 (sequence is synthesized)
actgagcttctgattggtgtagggcagtccaatcagtgctggtgtcactgggttaccccaaccatgtccggccaaaatggcactacccagtggtagtgaaccatctaattaaaaccaaaa

SEQ ID NO: 34001 - DNA, 120 bp, Artificial Sequence
  ENSG00000050165_79 (sequence is synthesized)
aaggcaggctgtctcctccgattatgtgttgactgaatttgtgcaaccctcagccttctccagggcccctcggctggagcagctttctgaacaattatgatcagggacgtgcataatcaa

SEQ ID NO: 34002 - DNA, 120 bp, Artificial Sequence
  ENSG00000050165_80 (sequence is synthesized)
gtttgtgttttaggcagataactggagctgcagaaaggagtctggtggagagggaggcaggctggtggctggacgctggcctccttgctgccacattgtgcataggatgaggagtgcatc

SEQ ID NO: 34003 - DNA, 120 bp, Artificial Sequence
  ENSG00000050165_81 (sequence is synthesized)
tctgctgagctcagcctctcttggtggatgtggggcggggcgctcgagtaggacccgacgccaaggggagggggctgacctgtgcttggtccaccccaggcggcggctgcgggcgcagag

SEQ ID NO: 34004 - DNA, 120 bp, Artificial Sequence
  ENSG00000050165_82 (sequence is synthesized)
gccagcggtgatggcttgaatgccaggctgggggctgggatttttcctgaggatttcacaggacagaggttggcttggaaagaccaaggcggcggctgcgggcgcagagcggagatgcag

SEQ ID NO: 34005 - DNA, 120 bp, Artificial Sequence
  ENSG00000050165_83 (sequence is synthesized)
agacagttatcacatctgtgggagacgaagaaggcagaaggagccacgcagataactggagctgcagaaaggagtctggtggagagggaggcaggctggtggctggacgctggcctcctt

SEQ ID NO: 34006 - DNA, 120 bp, Artificial Sequence
  ENSG00000050165_84 (sequence is synthesized)
gctgccacattgtgcataggatgagctgctcttgttaccgtgggatactcagcctggccatctttttggatcccggaccccatctgctgcctgacctagcaggagagccagctgctgctt

SEQ ID NO: 34007 - DNA, 120 bp, Artificial Sequence
  ENSG00000050165_85 (sequence is synthesized)
cacatcccagctccagcactcactagctgtgtgactttggcaagttactcagcctttctgtgcctccatttcctcatctgtaaaatagaaaggaatagtaacagccctctctcagtggag

SEQ ID NO: 34008 - DNA, 120 bp, Artificial Sequence
  ENSG00000050165_86 (sequence is synthesized)
tgcgttcaaaattctctggcagatttttccccaaactaccacctgtctgagtgcctcttggtctaacatcatgcatgaagaacaaccaggttcattcccattctgacctgatgaagaaag

SEQ ID NO: 34009 - DNA, 120 bp, Artificial Sequence
  ENSG00000050165_87 (sequence is synthesized)
ttgttttttcatatgtgatatacaagcccaaactacaattgagaatcataaaatacggattgaaaaccagaaggagtaatgttactgttgaaagtggagagacaatgtatcaggatccta

SEQ ID NO: 34010 - DNA, 120 bp, Artificial Sequence
  ENSG00000050165_88 (sequence is synthesized)
aactgcttttgcatttaagcaatatatttaaccctaggcttcctgccagtccagttgcaaaggaatgtccagggattatcatttgaaaaaaagaaagcaaatggatgtctaaaaagaccc

SEQ ID NO: 34011 - DNA, 120 bp, Artificial Sequence
  ENSG00000050165_89 (sequence is synthesized)
tttcctagcattgaatttgtggaattgatctatctcataggtttttatgtatgtctcagtagggattgaactagagaccacgttatggtgaattgaccctcacttttttttaggaggaat

SEQ ID NO: 34012 - DNA, 120 bp, Artificial Sequence
  ENSG00000050165_90 (sequence is synthesized)
aacttgttcatacactctcgagtggggtgctggctttgttttctccctgcgccctggtttttgatgctggactcaatccatttaatggagtgtcagaaggagtgcatcatcgacgaggac

SEQ ID NO: 34013 - DNA, 120 bp, Artificial Sequence
  ENSG00000050165_91 (sequence is synthesized)
caattcctacatttctgaccagacagatgtagtccagtaataggttacgcctccatgcacttggcatcagaaacaacagataaattaaattgagtggtcatttgcatggcccatctcagc

SEQ ID NO: 34014 - DNA, 120 bp, Artificial Sequence
  ENSG00000050165_92 (sequence is synthesized)
tttgaaaggggtacaagcaagtaccagacatgttgactgggactttggtgacagacctggtatatcaggtggtgaaatccccagagcctctgggatggctaccccttttgtaatcccacc

SEQ ID NO: 34015 - DNA, 120 bp, Artificial Sequence
  ENSG00000050165_93 (sequence is synthesized)
tctggtcaggcagtttgagaacaagaacaccttatgtggagcccaatggcctaaagggaaaaaggctgtccgtccatttcagggctaggctctggtcccctgtgattgcttctgttagtt

SEQ ID NO: 34016 - DNA, 120 bp, Artificial Sequence
  ENSG00000050165_94 (sequence is synthesized)
gtgcacagatggcgattgtgtgaatttggtgtgggatcctccaggctctgggctgccaagcctcctaggcatggagatgctgaagggcagtgcagccaggcagggatcaggagcgactag

SEQ ID NO: 34017 - DNA, 120 bp, Artificial Sequence
  ENSG00000050165_95 (sequence is synthesized)
agtctggaggcctttcctgaccctgctgagcctgtggggtcaagaatggggaatggaagcgggcctggcccttcctgggcactgtgggcctgctgctctgctctccattgacacatctgc

SEQ ID NO: 34018 - DNA, 120 bp, Artificial Sequence
  ENSG00000050327_0 (sequence is synthesized)
ggggcggccgggcctgcgctggggacggctctggggactgcggccggcgccgggacctggaggggacgctggggccgaagcagcatgtgacaccgaccaggattcagccctgatggaggc

SEQ ID NO: 34019 - DNA, 120 bp, Artificial Sequence
  ENSG00000050327_1 (sequence is synthesized)
tgaggaggcccagcgtggagcctctcctcccatctctgccatagaggaattcagcattatccctgaggctcccatgaggagcagccaggtctctgccttggggcttgaagctcaagaaga

SEQ ID NO: 34020 - DNA, 120 bp, Artificial Sequence
  ENSG00000050327_2 (sequence is synthesized)
tgaggacccatcctataagtggagagaggaacacagactctcagcaactcagcagagtgagttaagggatgtgtgtgactatgcgattgagacgatgccctcttttcccaaggaaggttc

SEQ ID NO: 34021 - DNA, 120 bp, Artificial Sequence
  ENSG00000050327_3 (sequence is synthesized)
tgcagatgtggagcccaatcaggaaagccttgtggctgaggcctgtgacactccggaacactgggaggcagtaccccagagcctagcaggccgacaagcaaggactctagctcccccaga

SEQ ID NO: 34022 - DNA, 120 bp, Artificial Sequence
  ENSG00000050327_4 (sequence is synthesized)
gctctgggcctgccccattcagagtgagcatctagacatggccccattttccagtgacctgggaagcgaagaagaggaggtggaattttggccaggacttacttctttgacattgggatc

SEQ ID NO: 34023 - DNA, 120 bp, Artificial Sequence
  ENSG00000050327_5 (sequence is synthesized)
tggacaggcagaagaagaagaggaaacctcttcagataactctggtcagaccagatattattctccctgcgaagagcatcctgcagagaccaaccagaatgaaggctctgaaagtgggac

SEQ ID NO: 34024 - DNA, 120 bp, Artificial Sequence
  ENSG00000050327_6 (sequence is synthesized)
tatcaggcagggggaagagctgccacctgaggagctgcaggaaagtcaagggctcttgcatccccaggaggtccaagttctggaggagcagggacagcaggaagcaggatttcgggggga

SEQ ID NO: 34025 - DNA, 120 bp, Artificial Sequence
  ENSG00000050327_7 (sequence is synthesized)
aggaactctgagggaggatgtttgtgccgatgggctattaggggaggaacagatgatagagcaggttaatgatgaaaagggagaacagaagcaaaaacaggaacaggtacaagatgtgat

SEQ ID NO: 34026 - DNA, 120 bp, Artificial Sequence
  ENSG00000050327_8 (sequence is synthesized)
gcttgggagacaaggagaaagaatggggctcactggggagccagagggtctgaatgacggtgagtgggagcaggaggatatggagaggaaggctcagggtcagggaggtccagaacaggg

SEQ ID NO: 34027 - DNA, 120 bp, Artificial Sequence
  ENSG00000050327_9 (sequence is synthesized)
agaagagaggaagagggagctgcaggtgccagaagagaatagggcggactctcaggacgaaaagagtcaaacctttttgggaaaatcagaggaagtaactggaaagcaagaagatcatgg

SEQ ID NO: 34028 - DNA, 120 bp, Artificial Sequence
  ENSG00000050327_10 (sequence is synthesized)
tataaaggagaaaggggtgccagtcagcgggcaggaggcgaaagagccagagagttgggatgggggcaggctgggggcagtgggaagagcgaggagcagggaagaggagaatgagcatca

SEQ ID NO: 34029 - DNA, 120 bp, Artificial Sequence
  ENSG00000050327_11 (sequence is synthesized)
tgggccttcaatgcccgctctgatagcccctgaggactctcctcactgtgacctgtttccaggtgcctcatatctcatgactcagattcccgggactcagacagagtccagggctgagga

SEQ ID NO: 34030 - DNA, 120 bp, Artificial Sequence
  ENSG00000050327_12 (sequence is synthesized)
actgtcccccgcagctctgtctccctcgctagagcccatcaggtgctctcaccagcccatttctctactgggctcctttttgactgaggagtcacctgacaaggaaatagatcaaaacag

SEQ ID NO: 34031 - DNA, 120 bp, Artificial Sequence
  ENSG00000050327_13 (sequence is synthesized)
ccagcaagaggaatccaggctgaggaagggaacagtgtccagccaagggactgaggtggtctttgccagtgcatctgtgactcctccaaggacaccagattcagctcctcccagtcctgc

SEQ ID NO: 34032 - DNA, 120 bp, Artificial Sequence
  ENSG00000050327_14 (sequence is synthesized)
tgaagcctaccccatcacacctgcctcggtatctgccaggcccccagttgcctttcccaggagggaaacctcttgtgctgcacgtgctccagaaactgccagtgcccctctctcaatgga

SEQ ID NO: 34033 - DNA, 120 bp, Artificial Sequence
  ENSG00000050327_15 (sequence is synthesized)
tgacccatctccctgtgggacttctgagatgtgcccggctgccctctatggcttcccctccaccgggaccagccctccgaggcccccagccaactccacaggcaccgtccagcacttacg

SEQ ID NO: 34034 - DNA, 120 bp, Artificial Sequence
  ENSG00000050327_16 (sequence is synthesized)
gagtgactccttccctggttctcacaggacagagcagactccagacctggtgggaatgttgctttcctactcccactcagagctgccccagaggccccccaaacctgccatctacagctc

SEQ ID NO: 34035 - DNA, 120 bp, Artificial Sequence
  ENSG00000050327_17 (sequence is synthesized)
tgtgaccccaagaagggacagaaggagtggtagggactacagcaccgtttcagcatcccctactgccttatccacgctgaagcaggactctcaagaatccatctcaaatctagagagacc

SEQ ID NO: 34036 - DNA, 120 bp, Artificial Sequence
  ENSG00000050327_18 (sequence is synthesized)
cagcagtcctcccagcatccagccctgggtctccccacataatccagcctttgccacagagtctcccgcctacggttcttccccatcctttgtctccatggaggatgtgaggatccacga

SEQ ID NO: 34037 - DNA, 120 bp, Artificial Sequence
  ENSG00000050327_19 (sequence is synthesized)
acctctgccccctcctcccccacagaggagggacacccatccctccgtggtggagacagatggccatgctcgtgtagtggttcccacgctgaagcagcatagccaccctcctccattggc

SEQ ID NO: 34038 - DNA, 120 bp, Artificial Sequence
  ENSG00000050327_20 (sequence is synthesized)
cctaggttcagggctgcatgccccccataaaggcccacttccccaagcctctgaccccgctgtggccaggcagcaccgacctctgccatctaccccagacagctcccaccatgctcaggc

SEQ ID NO: 34039 - DNA, 120 bp, Artificial Sequence
  ENSG00000050327_21 (sequence is synthesized)
cacccccaggtggagatacaacaagccgctaccccctacccctgatttgccgcagccccaccttcctcccatttctgctcctggtagctcaaggatctacaggcctctacccccactacc

SEQ ID NO: 34040 - DNA, 120 bp, Artificial Sequence
  ENSG00000050327_22 (sequence is synthesized)
aactcagggggtcatgccaaaacaagacctgcttgtcaagactggacagtccccctccctgcctctgctggacgcacctcctggcccccggccacagctagatcaacagagtctttcact

SEQ ID NO: 34041 - DNA, 120 bp, Artificial Sequence
  ENSG00000050327_23 (sequence is synthesized)
tccaccagcaggagtaagagcgaagtgtcccctggcatggctttcagcaacatgacaaacttcctatgcccctcttcccctaccactccctggactccggagctccagggacccacctct

SEQ ID NO: 34042 - DNA, 120 bp, Artificial Sequence
  ENSG00000050327_24 (sequence is synthesized)
aaggatgaagcaggggtctcagaacaccctgaggcccctgcgagagaacctttgagaaggacaacccctcagcaaggagccagtggcccagggaggtcacctgtgggccaagcaaggcag

SEQ ID NO: 34043 - DNA, 120 bp, Artificial Sequence
  ENSG00000050327_25 (sequence is synthesized)
ccagaaaaacccagccatctgcacctggagaaggcgtccagctggccccacaggcgggactcagggaggccaccaggggacagcagtggacaggctgtggctcctagtgagggggccaac

SEQ ID NO: 34044 - DNA, 120 bp, Artificial Sequence
  ENSG00000050327_26 (sequence is synthesized)
aagcacaagggctggagccggcagggcctgcgcagaccttccatcttgcctgagggctcttcagattcaagaggtccagccgtggagaaacatccgggaccctcagacactgttgttttt

SEQ ID NO: 34045 - DNA, 120 bp, Artificial Sequence
  ENSG00000050327_27 (sequence is synthesized)
cgggagaaaaaaccaaaggaggtgatgggaggcttttcaagacgctgctccaaactcatcaactcctcccagctgctttaccaggagtatagtgatgttgtcctgaataaggagatccag

SEQ ID NO: 34046 - DNA, 120 bp, Artificial Sequence
  ENSG00000050327_28 (sequence is synthesized)
agccagcagcggctggagagcctgtccgagacacccgggcctagctctccgcggcagcctcggaaggccctggtctcctccgagtcgtacctgcagcggctctccatggcctccagcggc

SEQ ID NO: 34047 - DNA, 120 bp, Artificial Sequence
  ENSG00000050327_29 (sequence is synthesized)
tccctctggcaggaaatccccgtggtgcgcaacagcaccgtgctgctctccatgacccatgaagaccaaaagctgcaagaggtcaaatttgagctgattgtgtcagaggcctcctacctg

SEQ ID NO: 34048 - DNA, 120 bp, Artificial Sequence
  ENSG00000050327_30 (sequence is synthesized)
cgcagtctaaacatagctgtggatcatttccaactttcaacttcactccgggccacactttccaaccaggagcaccaatggctcttctctcgtttacaggatgtgcgagacgtcagcgcc

SEQ ID NO: 34049 - DNA, 120 bp, Artificial Sequence
  ENSG00000050327_31 (sequence is synthesized)
acgttcctttcagacctggaagagaactttgagaacaatatcttctccttccaagtatgtgacgtagtcctgaaccacgccccagacttccgccgggtctacctgccttatgtcaccaac

SEQ ID NO: 34050 - DNA, 120 bp, Artificial Sequence
  ENSG00000050327_32 (sequence is synthesized)
cagacctatcaggaacgcaccttccagagcctgatgaatagcaacagcaatttccgggaggtcttggagaagctggagagcgaccccgtctgccagcgcctttccctcaagtcctttctg

SEQ ID NO: 34051 - DNA, 120 bp, Artificial Sequence
  ENSG00000050327_33 (sequence is synthesized)
attctgcccttccaacgcatcacccgcctcaaactgctgctccagaacattctgaagagaacacagcctggctcctcggaggaggcagaggccacgaaggcacaccacgccctggagcag

SEQ ID NO: 34052 - DNA, 120 bp, Artificial Sequence
  ENSG00000050327_34 (sequence is synthesized)
ctgatccgggactgcaataacaatgtccagagtatgcgacggacagaggaactaatctacctgagccagaagattgagtttgagtgcaaaatattcccgctcatttctcagtcacgctgg

SEQ ID NO: 34053 - DNA, 120 bp, Artificial Sequence
  ENSG00000050327_35 (sequence is synthesized)
ctggtgaaaagtggggagctgacagccttggagttcagtgcttccccagggctacgaaggaagctgaacacgcgtccagtccacctgcacctcttcaatgactgtctgctgctgtctcgg

SEQ ID NO: 34054 - DNA, 120 bp, Artificial Sequence
  ENSG00000050327_36 (sequence is synthesized)
ccccgagagggtagccgattcctggtatttgaccatgctcccttctcctccattcggggggaaaagtgtgaaatgaagctacatggacctcacaaaaacctgttccgactctttctgcgg

SEQ ID NO: 34055 - DNA, 120 bp, Artificial Sequence
  ENSG00000050327_37 (sequence is synthesized)
cagaacactcagggcgcccaggccgagttcctcttccgcacggagactcaaagtgaaaagcttcggtggatctcagccttggccatgccaagagaggagttggaccttctggagtgttac

SEQ ID NO: 34056 - DNA, 120 bp, Artificial Sequence
  ENSG00000050327_38 (sequence is synthesized)
aactccccccaggtacagtgccttcgagcctacaagccccgagagaatgatgaattggcactggagaaagccgacgtggtgatggtgactcagcagagcagtgacggctggctggagggc

SEQ ID NO: 34057 - DNA, 120 bp, Artificial Sequence
  ENSG00000050327_39 (sequence is synthesized)
gtgaggctctcagacggggagcgaggctggtttcctgtgcagcaggtggagttcatttccaacccagaggtccgtgcacagaacctgaaggaagctcatcgagtcaagactgccaaacta

SEQ ID NO: 34058 - DNA, 120 bp, Artificial Sequence
  ENSG00000050327_40 (sequence is synthesized)
cagctggtggaacagcaagcctaagtcttctctgagaggagtttcgtgagctgaagaacaagctgctcatggcaagggctggccccagaaccctgcaagagaggccttctgtggatggag

SEQ ID NO: 34059 - DNA, 120 bp, Artificial Sequence
  ENSG00000050327_41 (sequence is synthesized)
aactaggccttctcaaagctcaaggacaaaatccagctaacccagtccctcggcccaggcctcctttcgtgctttgtgcttggtgggggggatttcgagggactttgcactggactctgg

SEQ ID NO: 34060 - DNA, 120 bp, Artificial Sequence
  ENSG00000050327_42 (sequence is synthesized)
gaacctttcatcattaaaaaaagggggaccattggggcctgagccaaggaactttccttctactgccttatagtgcttaaacattctccgcctccagggtgcagattcagagctggccag

SEQ ID NO: 34061 - DNA, 120 bp, Artificial Sequence
  ENSG00000050327_43 (sequence is synthesized)
agtttcagtgatagccgtatgttaaacagaatctcacctcagtctcctggagggagatgtttaagaggggttaacacatcagatgggagggtcagcccggtgacctctaaggtatcttct

SEQ ID NO: 34062 - DNA, 120 bp, Artificial Sequence
  ENSG00000050327_44 (sequence is synthesized)
aacctagaaattcaccataattatggtgcaaggtcagtgtgtctctgagatctatgtctgttggtggcaatgtgagggtgatactctctcactctaataaacttggcacttctccgagta

SEQ ID NO: 34063 - DNA, 120 bp, Artificial Sequence
  ENSG00000050327_45 (sequence is synthesized)
gaaaaggccttctgtacttgtcccagtcccatcctgacccgtggctcgggacgtcactggtactgatctctttcacgctctctgctttgccactttcttccctcccagtttcccaataaa

SEQ ID NO: 34064 - DNA, 120 bp, Artificial Sequence
  ENSG00000050327_46 (sequence is synthesized)
gcccattttcccttctggacccctgcatctcctgctctagatcttctttggctctctctatccctctgaaatctcagttatcttccccatttccacttttagattcaagaggtccagccg

SEQ ID NO: 34065 - DNA, 120 bp, Artificial Sequence
  ENSG00000050344_0 (sequence is synthesized)
ggagcttggccaccgcgccgggctgcgggcggctgggcgaacgggctcggcgctcaggtggctccttcttcgcttctcccgatccccggcggtgccaggcacggtgccggctgccgaggg

SEQ ID NO: 34066 - DNA, 120 bp, Artificial Sequence
  ENSG00000050344_1 (sequence is synthesized)
aacgcctttgtgcccggtgctgggaacccgcgacggccgccacgcgccccggtccattgtttcgcttatctgggttccaggcaggtgcgggcggcgcgcggggtccgcacgtgtcacccc

SEQ ID NO: 34067 - DNA, 120 bp, Artificial Sequence
  ENSG00000050344_2 (sequence is synthesized)
gccggcaggggcgttcccgggcgcgcggcggcgatgaagcacctgaagcggtggtggtcggccggcggcggcctcctgcacctcaccctcctgctgagcttggcggggctccgcgtagac

SEQ ID NO: 34068 - DNA, 120 bp, Artificial Sequence
  ENSG00000050344_3 (sequence is synthesized)
gctgagcttggcggggctccgcgtagacctagatctttacctgctgctgccgccgcccaccctgctgcaggacgagctgctgttcctgggcggcccggccagctccgcctacgcgctcag

SEQ ID NO: 34069 - DNA, 120 bp, Artificial Sequence
  ENSG00000050344_4 (sequence is synthesized)
cgggccacttgcaccccaagggccgggagctggaccctgccgcgccgcccgagggccagctgctccgggaggtgcgcgcgctcggggtccccttcgtccctcgcaccagcgtggatgcat

SEQ ID NO: 34070 - DNA, 120 bp, Artificial Sequence
  ENSG00000050344_5 (sequence is synthesized)
ccccttcgtccctcgcaccagcgtggatgcatggctggtgcacagcgtggctgccgggagcgcggacgaggcccacgggctgctcggcgccgccgccgcctcgtccaccggaggagccgg

SEQ ID NO: 34071 - DNA, 120 bp, Artificial Sequence
  ENSG00000050344_6 (sequence is synthesized)
cgccagcgtggacggcggcagccaggctgtgcaggggggcggcggggacccccgagcggctcggagtggccccttggacgccggggaagaggagaaggcacccgcggaaccgacggctca

SEQ ID NO: 34072 - DNA, 120 bp, Artificial Sequence
  ENSG00000050344_7 (sequence is synthesized)
ggtgccggacgctggcggatgtgcgagcgaggagaatggggtactaagagaaaagcacgaagctgtggatcatagttcccagcatgaggaaaatgaagaaagggtgtcagcccagaagga

SEQ ID NO: 34073 - DNA, 120 bp, Artificial Sequence
  ENSG00000050344_8 (sequence is synthesized)
gaactcacttcagcagaatgatgatgatgaaaacaaaatagcagagaaacctgactgggaggcagaaaagaccactgaatctagaaatgagagacatctgaatgggacagatacttcttt

SEQ ID NO: 34074 - DNA, 120 bp, Artificial Sequence
  ENSG00000050344_9 (sequence is synthesized)
ctctctggaagacttattccagttgctttcatcacagcctgaaaattcactggagggcatctcattgggagatattcctcttccaggcagtatcagtgatggcatgaattcttcagcaca

SEQ ID NO: 34075 - DNA, 120 bp, Artificial Sequence
  ENSG00000050344_10 (sequence is synthesized)
ttatcatgtaaacttcagccaggctataagtcaggatgtgaatcttcatgaggccatcttgctttgtcccaacaatacatttagaagagatccaacagcaaggacttcacagtcacaaga

SEQ ID NO: 34076 - DNA, 120 bp, Artificial Sequence
  ENSG00000050344_11 (sequence is synthesized)
accatttctgcagttaaattctcataccaccaatcctgagcaaacccttcctggaactaatttgacaggatttctttcaccggttgacaatcatatgaggaatctaacaagccaagacct

SEQ ID NO: 34077 - DNA, 120 bp, Artificial Sequence
  ENSG00000050344_12 (sequence is synthesized)
actgtatgaccttgacataaatatatttgatgagataaacttaatgtcattggccacagaagacaactttgatccaatcgatgtttctcagctttttgatgaaccagattctgattctgg

SEQ ID NO: 34078 - DNA, 120 bp, Artificial Sequence
  ENSG00000050344_13 (sequence is synthesized)
cctttctttagattcaagtcacaataatacctctgtcatcaagtctaattcctctcactctgtgtgtgatgaaggtgctataggttattgcactgaccatgaatctagttcccatcatga

SEQ ID NO: 34079 - DNA, 120 bp, Artificial Sequence
  ENSG00000050344_14 (sequence is synthesized)
cttagaaggtgctgtaggtggctactacccagaacccagtaagctttgtcacttggatcaaagtgattctgatttccatggagatcttacatttcaacacgtatttcataaccacactta

SEQ ID NO: 34080 - DNA, 120 bp, Artificial Sequence
  ENSG00000050344_15 (sequence is synthesized)
cagaatctacttctgaaccttttccgtggcctgggaagtcacagaagataaggagtagataccttgaagacacagatagaaacttgagccgtgatgaacagcgtgctaaagctttgcata

SEQ ID NO: 34081 - DNA, 120 bp, Artificial Sequence
  ENSG00000050344_16 (sequence is synthesized)
tccctttttctgtagatgaaattgtcggcatgcctgttgattctttcaatagcatgttaagtagatattatctgacagacctacaagtctcacttatccgtgacatcagacgaagaggga

SEQ ID NO: 34082 - DNA, 120 bp, Artificial Sequence
  ENSG00000050344_17 (sequence is synthesized)
aaaataaagttgctgcgcagaactgtcgtaaacgcaaattggacataattttgaatttagaagatgatgtatgtaacttgcaagcaaagaaggaaactcttaagagagagcaagcacaat

SEQ ID NO: 34083 - DNA, 120 bp, Artificial Sequence
  ENSG00000050344_18 (sequence is synthesized)
gtaacaaagctattaacataatgaaacagaaactgcatgacctttatcatgatatttttagtagattaagagatgaccaaggtaggccagtcaatcccaaccactatgctctccagtgta

SEQ ID NO: 34084 - DNA, 120 bp, Artificial Sequence
  ENSG00000050344_19 (sequence is synthesized)
cccatgatggaagtatcttgatagtacccaaagaactggtggcctcaggccacaaaaaggaaacccaaaagggaaagagaaagtgagaagaaactgaagatggactctattatgtgaagt

SEQ ID NO: 34085 - DNA, 120 bp, Artificial Sequence
  ENSG00000050344_20 (sequence is synthesized)
agtaatgttcagaaactgattatttggatcagaaaccattgaaactgcttcaagaattgtatctttaagtactgctacttgaataactcagttaacgctgttttgaagcttacatggaca

SEQ ID NO: 34086 - DNA, 120 bp, Artificial Sequence
  ENSG00000050344_21 (sequence is synthesized)
aatgtttaggacttcaagatcacacttgtgggcaatctgggggagccacaacttttcatgaagtgcattgtatacaaaattcatagttatgtccaaagaataggttaacatgaaaaccca

SEQ ID NO: 34087 - DNA, 120 bp, Artificial Sequence
  ENSG00000050344_22 (sequence is synthesized)
gtaagactttccatcttggcagccatcctttttaagagtaagttggttacttcaaaaagagcaaacactggggatcaaattattttaagaggtatttcagttttaaatgcaaaatagcct

SEQ ID NO: 34088 - DNA, 120 bp, Artificial Sequence
  ENSG00000050344_23 (sequence is synthesized)
gcaaaatagccttattttcatttagtttgttagcactatagtgagcttttcaaacactattttaatctttatatttaacttataaattttgctttctatggaaataaattttgtatttgt

SEQ ID NO: 34089 - DNA, 120 bp, Artificial Sequence
  ENSG00000050344_24 (sequence is synthesized)
cttttcccttttatacagaatctgaaccaaatttaccttactttccttccaaaatatccacattcaggaatataggtgaataacaaataaggcagcatagcaaactgctcagactcaagc

SEQ ID NO: 34090 - DNA, 120 bp, Artificial Sequence
  ENSG00000050344_25 (sequence is synthesized)
caaattgaggtcaacatagtatgccaaatccatagtaaggcaaatccacccccctaccccaatacttaacacacagaatactatgtgatatagaatgcactgaagacctacggtcactgg

SEQ ID NO: 34091 - DNA, 120 bp, Artificial Sequence
  ENSG00000050344_26 (sequence is synthesized)
tagtttgagccacaggccttcctcatgtaaccagagacagaatgggctacttgcaaaaacgtaactccttgtgtgtatattaaatccataaaatctctggcagtaaagccagcctgaagg

SEQ ID NO: 34092 - DNA, 120 bp, Artificial Sequence
  ENSG00000050344_27 (sequence is synthesized)
gatggcctcaccatcttagaatactgagatctcaccagaacactgtaagccatataaacagtagggaaagagtcagcaacagtgaaaccatctgtttaaaatgggcaaaagcgattaagg

SEQ ID NO: 34093 - DNA, 120 bp, Artificial Sequence
  ENSG00000050344_28 (sequence is synthesized)
gaaaaaaaacaggtgaatttgaaaataaaccagggtaaggtaaattctagaaataatagcatttgaaatgaaaacctcacttaagttcactagaacagtaaacaggagattgctgaattt

SEQ ID NO: 34094 - DNA, 120 bp, Artificial Sequence
  ENSG00000050344_29 (sequence is synthesized)
tttgaagacagcaatgacctcacctagatgactcaagtttggggaacatcaagattttgacgggtactataatgcttaatatgtccaaattttcaaaatgaagtttctcagatattattt

SEQ ID NO: 34095 - DNA, 120 bp, Artificial Sequence
  ENSG00000050344_30 (sequence is synthesized)
ctgccataggagctacagtgtagagtatcacataagtatcttgggctagagaaatgcagtttatatataccgttggatttttataataaagtttcccaagacctgttattttgccagaaa

SEQ ID NO: 34096 - DNA, 120 bp, Artificial Sequence
  ENSG00000050344_31 (sequence is synthesized)
tcagtgtatcaaagggacacctgcacccccatgtttattgcagcaatattcacaatagccttgtagttttagcgcttagaggcatttaaacagcctctctcctccagactacttcactgt

SEQ ID NO: 34097 - DNA, 120 bp, Artificial Sequence
  ENSG00000050344_32 (sequence is synthesized)
agtttattatccctgaccctccacaatgtgattaccaaccgctaggatgagttgcatcttattataaagtagcaaattacaagattgtaacattagactttttaagaaaatccagtcagc

SEQ ID NO: 34098 - DNA, 120 bp, Artificial Sequence
  ENSG00000050344_33 (sequence is synthesized)
ttttatactaatccatcttaatttctaggttactcagaattccaggtattctgatttggactcacatctcgtattgtattgcctgtatttaactaggaagttactgccaacagcatctat

SEQ ID NO: 34099 - DNA, 120 bp, Artificial Sequence
  ENSG00000050344_34 (sequence is synthesized)
ctctattaaatgtagaggaattgacaaaagaggggaaagaaagttgttaggtaatagaactgcttcagaaatagggctattcatgtttgaagtgtttctccttcgtttttcagggcatct

SEQ ID NO: 34100 - DNA, 120 bp, Artificial Sequence
  ENSG00000050344_35 (sequence is synthesized)
ctttcatcacagcctgaaaattcactggaggtaattggaactttggcttttatcctcgcaggaacatatctgcactgaccttttggtgaacaaatacaactcctttacttggatgacaca

SEQ ID NO: 34101 - DNA, 120 bp, Artificial Sequence
  ENSG00000050393_0 (sequence is synthesized)
gcgcgcccggcaggaaagggcggtcctgcgctgtggcccacgctcgctcccgctgtcggactctgggcctggaccgcgcgtggccggcgccaaaagcgagaggcatgagcgcgcgcccgg

SEQ ID NO: 34102 - DNA, 120 bp, Artificial Sequence
  ENSG00000050393_1 (sequence is synthesized)
gccagtgaactgctcggggatggactgcggctcggtcggcggccagaggacccagcgcctgcccggccgccagcggcttctcttcttgcccgtgggcctcagcggaagaccgggcggcag

SEQ ID NO: 34103 - DNA, 120 bp, Artificial Sequence
  ENSG00000050393_2 (sequence is synthesized)
cgaaacctcagcacgccgctgcctctctgcgctctccgacggtctgggggcgctgcgccctcgcgccccggcggcccgcggcggcgtgtcacgtgcctcaccgctgctcctcctcctgct

SEQ ID NO: 34104 - DNA, 120 bp, Artificial Sequence
  ENSG00000050393_3 (sequence is synthesized)
tcacgtgcctcaccgctgctcctcctcctgctagtgccctccccgcgcttggccgccgcagccccgcgccggcagctcggggactgggagcgctcgcgcctcgggtatgccgcacccccg

SEQ ID NO: 34105 - DNA, 120 bp, Artificial Sequence
  ENSG00000050393_4 (sequence is synthesized)
gggcgtcgccgctgccgccggcgcccttccccagtaccacggcccggcgcctgcactcgtttcctgcaggagagagctaagcttgtctgctggatccctgcagctggagcgcaaaaggag

SEQ ID NO: 34106 - DNA, 120 bp, Artificial Sequence
  ENSG00000050393_5 (sequence is synthesized)
agatttcacctcttctgggagcaggaaactctacttcgacactcatgccttagtgtgcttactggaagacaatgggtttgctactcaacaagcagaaatcattgtgtctgcattggtcaa

SEQ ID NO: 34107 - DNA, 120 bp, Artificial Sequence
  ENSG00000050393_6 (sequence is synthesized)
gatcctggaggccaacatggacatcgtctacaaagatatggtcaccaagatgcagcaggaaatcacttttcagcaagtaatgtctcagattgcgaatgtgaaaaaggatatgattatttt

SEQ ID NO: 34108 - DNA, 120 bp, Artificial Sequence
  ENSG00000050393_7 (sequence is synthesized)
ggagaagagtgaattttcagccctcagagcagaaaatgagaaaataaaactcgaactacatcagttaaaacaacaagtaatggatgaagtgatcaaagtccgaacagataccaaattaga

SEQ ID NO: 34109 - DNA, 120 bp, Artificial Sequence
  ENSG00000050393_8 (sequence is synthesized)
cttcaacctagaaaagagcagagtaaaagaattgtattcattgaacgaaaagaagctgctggaattgagaacagaaatagtggcattgcatgcccagcaagatcgggcccttacccagac

SEQ ID NO: 34110 - DNA, 120 bp, Artificial Sequence
  ENSG00000050393_9 (sequence is synthesized)
agacaggaagatcgaaactgaggttgctggcctcaaaaccatgcttgagtcacacaagcttgataatattaaatatttagcagggtctatatttacgtgcctaacagtagctctgggatt

SEQ ID NO: 34111 - DNA, 120 bp, Artificial Sequence
  ENSG00000050393_10 (sequence is synthesized)
ctaacagtagctctgggattttatcgcctgtggatctaataaagtgtctatttaaagtgatttctactgttttgccttaagaataccagattgttggctgggtgcggtggctcacacctg

SEQ ID NO: 34112 - DNA, 120 bp, Artificial Sequence
  ENSG00000050393_11 (sequence is synthesized)
aaaccggaataccagattgttgtccttttgttttcttgttacacatttgagcccagattttgacttaatgtgtattatttatttttatgaaaattgtggacacataaccaagataaagaa

SEQ ID NO: 34113 - DNA, 120 bp, Artificial Sequence
  ENSG00000050393_12 (sequence is synthesized)
gtcaggtattccatagccattccttatctcctttctgcttagttgactttctagctgagtggtgcacagtgcatggaagattccacttagccggaccaggaagcttggtctcatctgtgg

SEQ ID NO: 34114 - DNA, 120 bp, Artificial Sequence
  ENSG00000050393_13 (sequence is synthesized)
tgcacaccaacagcaaacattgatgtaattctctacaacttaatctttggcacatagaggatttgggggtctccatgttcagggcacaatggctttaataagtgctggaaaatcactgaa

SEQ ID NO: 34115 - DNA, 120 bp, Artificial Sequence
  ENSG00000050393_14 (sequence is synthesized)
gctaaaccaagagcaccagatcctctttacctaaataaccagtctttaacatgagctagtccctgtaccatagtattgtttcagctgtagttggttgtcatgttaataagacagctgcac

SEQ ID NO: 34116 - DNA, 120 bp, Artificial Sequence
  ENSG00000050393_15 (sequence is synthesized)
gtctaccttcttttcttttgatttccattgtcttggtaagttattgttagggttatttttaatgtgccttccagccagaaaaatcagctgtctaaagaagcattgcaattgtaatgggga

SEQ ID NO: 34117 - DNA, 120 bp, Artificial Sequence
  ENSG00000050393_16 (sequence is synthesized)
ctcttacctcttagaatgcaagattttccctcctccctccctcttctccatctctttccctcatgatttgagaactgtaataatcctccactggtggcattacctacctagaaaacctgc

SEQ ID NO: 34118 - DNA, 120 bp, Artificial Sequence
  ENSG00000050393_17 (sequence is synthesized)
tgattcttagcatggaactttgcttcagtttgcaggacaaagtctgcttccttccggtcttcatttactttttatacaagggatgcagtcagctctccatgtataagatacctagatgat

SEQ ID NO: 34119 - DNA, 120 bp, Artificial Sequence
  ENSG00000050393_18 (sequence is synthesized)
ggatacatatttcataaatgaaatttatgtcattaatgaatatccccttgcccacaaccagctcaggctttcaaaattcgagaatggtcatgccacacagcattctaatctagatggatt

SEQ ID NO: 34120 - DNA, 120 bp, Artificial Sequence
  ENSG00000050393_19 (sequence is synthesized)
aattctgttgttcaaaacattctcatacctgcctttatattgaaaacaaattctagatacaactggggttattctggaaaagcacattctcaccttttttttttttttgagacggagtct

SEQ ID NO: 34121 - DNA, 120 bp, Artificial Sequence
  ENSG00000050393_20 (sequence is synthesized)
actcctgacctcgtgattcacccgccttggtctcccaaagtagtgggattacaggcgtgagccgctgcgcctggcccattctcatcttattcaaattactggcacatgggcaagagagac

SEQ ID NO: 34122 - DNA, 120 bp, Artificial Sequence
  ENSG00000050393_21 (sequence is synthesized)
aatgacatggatagaagcttttctgcctttctctgcacacacatacagtgaaggaaccacaggcagattttttgatcagtttggtgaatacattgctcgttgtcactgttccaaccacat

SEQ ID NO: 34123 - DNA, 120 bp, Artificial Sequence
  ENSG00000050393_22 (sequence is synthesized)
tggtaaaaaaaatagttaccttttgtcctttggatgtcatgtctaaactttggaaaatataagtcattgcccttttagagaatgtttgtgtagtccaaagattgtgagctccatatagta

SEQ ID NO: 34124 - DNA, 120 bp, Artificial Sequence
  ENSG00000050393_23 (sequence is synthesized)
tgaaaatcaagtacttttgcatgagcaatagcagtttcaaagtgaaatattataatttaatctttttcaagtagatcaaaaattcttaactgattaataaaatattttatcaatatatca

SEQ ID NO: 34125 - DNA, 120 bp, Artificial Sequence
  ENSG00000050393_24 (sequence is synthesized)
tccccctttcagagagaagtccccagaagagacagcacacttagcaattgccctcattattaaaggcctaggtgagtggcataaagggccatatgcgattatgtttcaaggtaaacatta

SEQ ID NO: 34126 - DNA, 120 bp, Artificial Sequence
  ENSG00000050393_25 (sequence is synthesized)
cctaaccttgtgtgggttaaaaacagtgaagtgtccttgtatcctgataaaatttttttttaaataacatggtgggttgacatttttgcatctgctataagttttctcacatgtcgttct

SEQ ID NO: 34127 - DNA, 120 bp, Artificial Sequence
  ENSG00000050393_26 (sequence is synthesized)
tcctggtgagagcgggctgcatcattctggcacttaatttgggtgttcgattttgctatagagttctttgcagtacagcatagcctcttcttggccttgggaacagtgaactcttctttt

SEQ ID NO: 34128 - DNA, 120 bp, Artificial Sequence
  ENSG00000050393_27 (sequence is synthesized)
gatggtgtggattgcatgcatatctggagagaggagggctcaggactgtgttcactttatttggtcagatgtattttatttgaaaaccatttgagcccaaaatacaagtgtacccttccc

SEQ ID NO: 34129 - DNA, 120 bp, Artificial Sequence
  ENSG00000050393_28 (sequence is synthesized)
tgaaaaccatttgagcccaaaatacaagtgtacccttcccacttctggctcaagcacccgtgagccgactagacgtaatattaaaacttactgatgctgggtgcggtggctcatgcctat

SEQ ID NO: 34130 - DNA, 76 bp, Artificial Sequence
  ENSG00000050393_29 (sequence is synthesized)
aggcagaggttgcagtgagcagagattacaccactgcaacgagactcgggcccagacgagatctgtaaatagaacc

SEQ ID NO: 34131 - DNA, 120 bp, Artificial Sequence
  ENSG00000050393_30 (sequence is synthesized)
ataaataaataagtaaatagaacctcctgagctaccctggcttataaggattcagattactttaggaaattaggcattagcactaggaggggggaagatggctggcaaaacttctagcta

SEQ ID NO: 34132 - DNA, 120 bp, Artificial Sequence
  ENSG00000050393_31 (sequence is synthesized)
gcaacctatgtctagcacatgggtaactaaccatagcgagatcctgaacacatatcctctaggtgcaggtggagggaacgatgtccaatacctgaagcagaatctcacatggacggaacg

SEQ ID NO: 34133 - DNA, 120 bp, Artificial Sequence
  ENSG00000050393_32 (sequence is synthesized)
tctgtatttccctctcctgcacgaatcactcatcattcttggagggcttctctgcattcctccttttcttctctcccctcccctgccttttgtcttttctaaagagtctgaactccgatt

SEQ ID NO: 34134 - DNA, 120 bp, Artificial Sequence
  ENSG00000050393_33 (sequence is synthesized)
tccatgctctcctgctacattaataagcaaaacctgcttgtgtgtacggttctttactggaaacatgactttttgtttctgtattggttttactgtcatccagttttctagtttaatatc

SEQ ID NO: 34135 - DNA, 120 bp, Artificial Sequence
  ENSG00000050393_34 (sequence is synthesized)
tagcaaaactaaatctgaatgtactcgctttttccgttaagtatgccaagcacctcggttgaaaggcttgactcaaaccagaagtcttgctggaattcgtctctgaacacttgaaaaaca

SEQ ID NO: 34136 - DNA, 120 bp, Artificial Sequence
  ENSG00000050393_35 (sequence is synthesized)
gaaaccctgagccgcaacaaacatgcctctgtgtgtcgggattgcctttgtctctgcttccatgtggcttttccttttgtagctatgcttagtgacataatcttccctcttctagccttc

SEQ ID NO: 34137 - DNA, 120 bp, Artificial Sequence
  ENSG00000050393_36 (sequence is synthesized)
tcctttcaagcctgtctgttaattaaccatgtcagtattggcaagcatttatcttcccccaccctaacatgcaatcttctaagaattttgcaaaattctaaacaaatatagagatggtat

SEQ ID NO: 34138 - DNA, 120 bp, Artificial Sequence
  ENSG00000050393_37 (sequence is synthesized)
atagaattcatatctagaaaactttgattttaatgtgagcttatcaaatttgttctggcttttttggcactaaggcaaaaacatgttaaccagaaataatttattcttcatgtatgtaaa

SEQ ID NO: 34139 - DNA, 120 bp, Artificial Sequence
  ENSG00000050393_38 (sequence is synthesized)
atatttgagaatgtttagccttttattagaattttatttggaaaatatttatctttctacacattttacacttatgttcctttgcttataacccaatttcttaacttttttgttacttaa

SEQ ID NO: 34140 - DNA, 120 bp, Artificial Sequence
  ENSG00000050393_39 (sequence is synthesized)
ttttattatctaataaagtgtaagattcttactatctaaaatatttaattctgtgtgactaatatacttttctgatcattcaaattgaatatgaaaagctagaataactgtattgcaact

SEQ ID NO: 34141 - DNA, 120 bp, Artificial Sequence
  ENSG00000050393_40 (sequence is synthesized)
taactgtattgcaactgttaattccagccaattgtataatgataacactggtgaatttctaagtaaatctaatacttgaaaatttgggtatacatagaaaataaattttaatataatgta

SEQ ID NO: 34142 - DNA, 61 bp, Artificial Sequence
  ENSG00000050393_41 (sequence is synthesized)
aggctggagtgcagtggcacagtcttggcctactgcaacccccacctcccggtttcaagcg

SEQ ID NO: 34143 - DNA, 120 bp, Artificial Sequence
  ENSG00000050393_42 (sequence is synthesized)
tttaattaaaattttttaaaattttatttacattaaaatggagatgggatcactatgttgcccatgctggttctgaactcctgggctcaaagatcctcccgccttggtctcccagagtgt

SEQ ID NO: 34144 - DNA, 120 bp, Artificial Sequence
  ENSG00000050393_43 (sequence is synthesized)
caggcgtgagccaccacacccagccagtgaactcttcttaataaaactttaaaatttggcaaaagtttagtttgagtttttaaaaactaggaagacagacgagaaaaaagaaaacagagt

SEQ ID NO: 34145 - DNA, 120 bp, Artificial Sequence
  ENSG00000050405_0 (sequence is synthesized)
ggggtccggggcggggccgcaggagcagtaggtgttagcagcttggtcgcgacaggtgcgctaggtagagcgccgggacctgtgacagggctggtagcagcgcagaggaaaggcggcttt

SEQ ID NO: 34146 - DNA, 120 bp, Artificial Sequence
  ENSG00000050405_1 (sequence is synthesized)
tagccaggtatttcagtgtctgtagacaagatggaatcatctccatttaatagacggcaatggacctcactatcattgagggtaacagccaaagaactttctcttgtcaacaagaacaag

SEQ ID NO: 34147 - DNA, 120 bp, Artificial Sequence
  ENSG00000050405_2 (sequence is synthesized)
tcatcggctattgtggaaatattctccaagtaccagaaagcagctgaagaaacaaacatggagaagaagagaagtaacaccgaaaatctctcccagcactttagaaaggggaccctgact

SEQ ID NO: 34148 - DNA, 120 bp, Artificial Sequence
  ENSG00000050405_3 (sequence is synthesized)
gtgttaaagaagaagtgggagaacccagggctgggagcagagtctcacacagactctctacggaacagcagcactgagattaggcacagagcagaccatcctcctgctgaagtgacaagc

SEQ ID NO: 34149 - DNA, 120 bp, Artificial Sequence
  ENSG00000050405_4 (sequence is synthesized)
cacgctgcttctggagccaaagctgaccaagaagaacaaatccaccccagatctagactcaggtcacctcctgaagccctcgttcagggtcgatatccccacatcaaggacggtgaggat

SEQ ID NO: 34150 - DNA, 120 bp, Artificial Sequence
  ENSG00000050405_5 (sequence is synthesized)
cttaaagaccactcaacagaaagtaaaaaaatggaaaattgtctaggagaatccaggcatgaagtagaaaaatcagaaatcagtgaaaacacagatgcttcgggcaaaatagagaaatat

SEQ ID NO: 34151 - DNA, 120 bp, Artificial Sequence
  ENSG00000050405_6 (sequence is synthesized)
aatgttccgctgaacaggcttaagatgatgtttgagaaaggtgaaccaactcaaactaagattctccgggcccaaagccgaagtgcaagtggaaggaagatctctgaaaacagctattct

SEQ ID NO: 34152 - DNA, 120 bp, Artificial Sequence
  ENSG00000050405_7 (sequence is synthesized)
ctagatgacctggaaataggcccaggtcagttgtcatcttctacatttgactcggagaaaaatgagagtagacgaaatctggaacttccacgcctctcagaaacctctataaaggatcga

SEQ ID NO: 34153 - DNA, 120 bp, Artificial Sequence
  ENSG00000050405_8 (sequence is synthesized)
atggccaagtaccaggcagctgtgtccaaacaaagcagctcaaccaactatacaaatgagctgaaagccagtggtggcgaaatcaaaattcataaaatggagcaaaaggagaatgtgccc

SEQ ID NO: 34154 - DNA, 120 bp, Artificial Sequence
  ENSG00000050405_9 (sequence is synthesized)
ccaggtcctgaggtctgcatcacccatcaggaaggggaaaagatttctgcaaatgagaatagcctggcagtccgttccacccctgccgaagatgactcccgtgactcccaggttaagagt

SEQ ID NO: 34155 - DNA, 120 bp, Artificial Sequence
  ENSG00000050405_10 (sequence is synthesized)
gaggttcaacagcctgtccatcccaagccactaagtccagattccagagcctccagtctttctgaaagttctcctcccaaagcaatgaagaagtttcaggcacctgcaagagagacctgc

SEQ ID NO: 34156 - DNA, 120 bp, Artificial Sequence
  ENSG00000050405_11 (sequence is synthesized)
gtggaatgtcagaagacagtctatccaatggagcgtctcttggccaaccagcaggtgtttcacatcagctgcttccgttgctcctattgcaacaacaaactcagtctaggaacatatgca

SEQ ID NO: 34157 - DNA, 120 bp, Artificial Sequence
  ENSG00000050405_12 (sequence is synthesized)
tctttacatggaagaatctattgtaagcctcacttcaatcaactctttaaatctaagggcaactatgatgaaggctttgggcacagaccacacaaggatctatgggcaagcaaaaatgaa

SEQ ID NO: 34158 - DNA, 120 bp, Artificial Sequence
  ENSG00000050405_13 (sequence is synthesized)
aacgaagagattttggagagaccagcccagcttgcaaatgcaagggagacccctcacagcccaggggtagaagatgcccctattgctaaggtgggtgtcctggctgcaagtatggaagcc

SEQ ID NO: 34159 - DNA, 120 bp, Artificial Sequence
  ENSG00000050405_14 (sequence is synthesized)
aaggcctcctctcagcaggagaaggaagacaagccagctgaaaccaagaagctgaggatcgcctggccaccccccactgaacttggaagttcaggaagtgccttggaggaagggatcaaa

SEQ ID NO: 34160 - DNA, 120 bp, Artificial Sequence
  ENSG00000050405_15 (sequence is synthesized)
aaagaagccgcccattcactgtagcagcttcatttcaaagcacctctgtcaagagcccaaaaactgtgtccccacctatcaggaaaggctggagcatgtcagagcagagtgaagagtctg

SEQ ID NO: 34161 - DNA, 120 bp, Artificial Sequence
  ENSG00000050405_16 (sequence is synthesized)
tgggtggaagagttgcagaaaggaaacaagtggaaaatgccaaggcttctaagaagaatgggaatgtgggaaaaacaacctggcaaaacaaagaatctaaaggagagacagggaagagaa

SEQ ID NO: 34162 - DNA, 120 bp, Artificial Sequence
  ENSG00000050405_17 (sequence is synthesized)
gtaaggaaggtcatagtttggagatggagaatgagaatcttgtagaaaatggtgcagactccgatgaagatgataacagcttcctcaaacaacaatctccacaagaacccaagtctctga

SEQ ID NO: 34163 - DNA, 120 bp, Artificial Sequence
  ENSG00000050405_18 (sequence is synthesized)
attggtcgagttttgtagacaacacctttgctgaagaattcactactcagaatcagaaatcccaggatgtggaactctgggagggagaagtggtcaaagagctctctgtggaagaacaga

SEQ ID NO: 34164 - DNA, 120 bp, Artificial Sequence
  ENSG00000050405_19 (sequence is synthesized)
taaagagaaatcggtattatgatgaggatgaggatgaagagtgacaaattgcaatgatgctgggccttaaattcatgttagtgttagcgagccactgccctttgtcaaaatgtgatgcac

SEQ ID NO: 34165 - DNA, 120 bp, Artificial Sequence
  ENSG00000050405_20 (sequence is synthesized)
ataagcaggtatcccagcatgaaatgtaatttacttggaagtaactttggaaaagaattccttcttaaaatcaaaaacaaaacaaaaaaacacaaaaaacacattctaaatactagagat

SEQ ID NO: 34166 - DNA, 120 bp, Artificial Sequence
  ENSG00000050405_21 (sequence is synthesized)
aactttacttaaattcttcattttagcagtgatgatatgcataagtgctgtaaggcttgtaactggggaaatattccacctgataatagcccagattctactgtattcccaaaaggcaat

SEQ ID NO: 34167 - DNA, 120 bp, Artificial Sequence
  ENSG00000050405_22 (sequence is synthesized)
attaaggtagacagatgattagtagtatattgttacacactattttggaattagagaacatacagaaggaatttaggggcttaaacattacgactgaatgcactttagtataaagggcac

SEQ ID NO: 34168 - DNA, 120 bp, Artificial Sequence
  ENSG00000050405_23 (sequence is synthesized)
aagggcacagtttgtatatttttaaatgaataccaatttaattttttagtatttacctgttaagagattatttagtctttaaattttttaggttaattttcttgctgtgatatatatgag

SEQ ID NO: 34169 - DNA, 120 bp, Artificial Sequence
  ENSG00000050405_24 (sequence is synthesized)
tactttatgtcctgctctctaaactacatcctgaactcgacgtcctgaggtataatacaacagagcactttttgaggcaattgaaaaaccaacctacactcttcggtgcttagagagatc

SEQ ID NO: 34170 - DNA, 120 bp, Artificial Sequence
  ENSG00000050405_25 (sequence is synthesized)
tgctgtctcccaaataagcttttgtatctgccagtgaatttactgtactccaaatgattgctttcttttctggtgatatctgtgcttctcataattactgaaagctgcaatattttagta

SEQ ID NO: 34171 - DNA, 120 bp, Artificial Sequence
  ENSG00000050405_26 (sequence is synthesized)
ataccttcgggatcactgtcccccatcttccgtgttagagcaaagtgaagagtttaaaggaggaagaagaaagaactgtcttacaccacttgagctcagacctctaaaccctgtatttcc

SEQ ID NO: 34172 - DNA, 120 bp, Artificial Sequence
  ENSG00000050405_27 (sequence is synthesized)
cttatgatgtcccctttttgagacactaatttttaaatacttactagctctgaaatatattgatttttatcacagtattctcagggtgaaattaaaccaactataggcctttttcttggg

SEQ ID NO: 34173 - DNA, 120 bp, Artificial Sequence
  ENSG00000050405_28 (sequence is synthesized)
atgattttctagtcttaaggtttggggacattataaacttgagtacatttgttgtacacagttgatattccaaattgtatggatgggagggagaggtgtcttaagctgtaggcttttctt

SEQ ID NO: 34174 - DNA, 120 bp, Artificial Sequence
  ENSG00000050405_29 (sequence is synthesized)
tgtactgcatttatagagatttagctttaatattttttagagatgtaaaacattctgctttcttagtcttacctagtctgaaacatttttattcaataaagattttaattaaaatttgaa

SEQ ID NO: 34175 - DNA, 120 bp, Artificial Sequence
  ENSG00000050405_30 (sequence is synthesized)
tgggtcgtaatctagaataccatcactaggtgactaagtcatactcacattcctttcattgacctggtggccataaattgtttcctcccatgcctaaagattcacagagaacagaaaagt

SEQ ID NO: 34176 - DNA, 120 bp, Artificial Sequence
  ENSG00000050405_31 (sequence is synthesized)
cctaaagattcacagagaacagaaaagtactagattactacattattagcagactaatggtgggaaatgtctatagtcatcgacctctatgtttattttattttattttatttttttatt

SEQ ID NO: 34177 - DNA, 120 bp, Artificial Sequence
  ENSG00000050405_32 (sequence is synthesized)
gagccactgcacccaggttctatgttgattttagatgtaatagatgagttaattgtaatattcaccccagtgtcctttgcaaggaaaaaaatgcaattatccttattccttatgacaata

SEQ ID NO: 34178 - DNA, 120 bp, Artificial Sequence
  ENSG00000050405_33 (sequence is synthesized)
aaatgcatgttcttttatgttgaggctctgttttgagaagtaaaataaattatgtctttagtacaatatatgaattgtatatggaaaaacatgctttttgaaagtcccaccaaaaaggtt

SEQ ID NO: 34179 - DNA, 120 bp, Artificial Sequence
  ENSG00000050405_34 (sequence is synthesized)
tctttatggtatcattaaatataatttcagtttttatatgtatacatcatccctgtctctctttccaggccgggcatttatatatgtatggtcagtatattttctattattggcacttgg

SEQ ID NO: 34180 - DNA, 120 bp, Artificial Sequence
  ENSG00000050405_35 (sequence is synthesized)
catctcctttcccctgctccagaatggtcttttctgataaaactcacaagctttgcattaccacaagctctgctgctagaagagtgaatcacaagaatgttgtatgcttggggtgttctg

SEQ ID NO: 34181 - DNA, 120 bp, Artificial Sequence
  ENSG00000050405_36 (sequence is synthesized)
tgtgcctgtgttgatgtgtctgtattctaatgagcaatccagttttacactagcatacagatatttaactctgaggtatgtgtccacaaagctgcttttgtcatttcactagtcagtggg

SEQ ID NO: 34182 - DNA, 120 bp, Artificial Sequence
  ENSG00000050405_37 (sequence is synthesized)
ttttgcttgtgagagttagggggttgatttgacccgaggcttcttagaagaattttttaacattccaagtttatctaatagatgtgctatgaagagaacagaatgatgggactttaaaaa

SEQ ID NO: 34183 - DNA, 120 bp, Artificial Sequence
  ENSG00000050405_38 (sequence is synthesized)
ttcctgcttcagctcctgagtttttctctcttcccctctccctctccctctgccgggtggatgctttctccatgtggcaaggctgtaactgttcacagctgtctgaaacagcagtggacc

SEQ ID NO: 34184 - DNA, 120 bp, Artificial Sequence
  ENSG00000050405_39 (sequence is synthesized)
aggagcagcttggagttttaactttcattttacaaagaacaacatgtttgaatgtttcagcaggcaagttataactggcatctacttcttgttcttctagaacaccgaaaatctctccca

SEQ ID NO: 34185 - DNA, 120 bp, Artificial Sequence
  ENSG00000050405_40 (sequence is synthesized)
aggtagagcgccgggacctgtgacagggctggtagcagcgcagaggaaaggcggcttttagccagttttcaagactcctggatcagaaacaaagtggtactttatatttttcactcttca

SEQ ID NO: 34186 - DNA, 120 bp, Artificial Sequence
  ENSG00000050405_41 (sequence is synthesized)
tgtccaaacaaagcagctcaaccaactatacagtatgtgttctgcatcattcattcattcattcattccatcatccagcagatggtcactgagtactggaattaggaaatgtcaccagac

SEQ ID NO: 34187 - DNA, 120 bp, Artificial Sequence
  ENSG00000050405_42 (sequence is synthesized)
ccttgtatctgagccctggtcccctagctgttctcttttcacatgaaccctaccctcgctggatttgcagttcttaccatggtctaatcctgactttgctttcttagtcctggttcccac

SEQ ID NO: 34188 - DNA, 120 bp, Artificial Sequence
  ENSG00000050405_43 (sequence is synthesized)
agatcagttatgctcttcggttgccaagagctgcaagtagtactttatttttcttttacttctggtaagctgtgaattagcagtactttattattatttttttttagttttcaagactcc

SEQ ID NO: 34189 - DNA, 120 bp, Artificial Sequence
  ENSG00000050405_44 (sequence is synthesized)
aataacatagtaaatcctctacttgaatttaagggctaatgcttgaatgtcctttacacacttcatggcttaaggagaagttaaattcaattgaatatagttaacttgggacaaactgaa

SEQ ID NO: 34190 - DNA, 120 bp, Artificial Sequence
  ENSG00000050405_45 (sequence is synthesized)
agttagggtagaaccagcttctggagctgttctgtaattccttcttttccagcaagaaaactttttaagcttcttatatctctgatgcatacattcttcccccaatggatcattttgtaa

SEQ ID NO: 34191 - DNA, 120 bp, Artificial Sequence
  ENSG00000050405_46 (sequence is synthesized)
gctaaaatttaaacactagaatcaagcagttctataatttcttttcaagccttatttctacttgatgaagtggctttcaagagtatattcagaagagtaataggaacaccgaaaatctct

SEQ ID NO: 34192 - DNA, 120 bp, Artificial Sequence
  ENSG00000050405_47 (sequence is synthesized)
agaattgtagcaggtttagtgctccatgagaattgactgaccagctaagggagcccttagacaaagtaaattctagggtccatctcaagacagtgctaactcatcgctgcccatgctaaa

SEQ ID NO: 34193 - DNA, 120 bp, Artificial Sequence
  ENSG00000050405_48 (sequence is synthesized)
gttcaaatgctcagctgttctggtgcccgttatttcccctaggcagccagtgactgactggagtcagcagatttctgcaaatgagaatagcctggcagtccgttccacccctgccgaaga

SEQ ID NO: 34194 - DNA, 120 bp, Artificial Sequence
  ENSG00000050426_0 (sequence is synthesized)
tcgctgtgaagatggcgctctccagggtgtgctgggctcggtcggctgtgtggggctcggcagtcacccctggacattttgtcacccggaggctgcaacttggtcgctctggcctggctt

SEQ ID NO: 34195 - DNA, 120 bp, Artificial Sequence
  ENSG00000050426_1 (sequence is synthesized)
ggggggcccctcggtacctgtttcccaggcaactactgatcaggcatttctggaccccaaaacaacaaactgatttcttagatatctatcatgctttccggaagcagtcccacccagaaa

SEQ ID NO: 34196 - DNA, 120 bp, Artificial Sequence
  ENSG00000050426_2 (sequence is synthesized)
ttattagttatttagaaaaggtcatccctctcatttctgatgcaggactccggtggcgtctgacagatctgtgcaccaagatacagcgtggtacccacccagcaatacatgatatcttgg

SEQ ID NO: 34197 - DNA, 120 bp, Artificial Sequence
  ENSG00000050426_3 (sequence is synthesized)
ctctgagagagtgtttctctaaccatcctctgggcatgaaccaactccaggctttgcacgtgaaagccttgagccgggccatgcttctcacatcttacctgcctcctcccttgttgagac

SEQ ID NO: 34198 - DNA, 120 bp, Artificial Sequence
  ENSG00000050426_4 (sequence is synthesized)
atcgtttgaagactcatacaactgtgattcaccaactggacaaggctttggcaaagctggggattggccagctgactgctcaggaagtaaaatcggcttgttatctccgtggcctgaatt

SEQ ID NO: 34199 - DNA, 120 bp, Artificial Sequence
  ENSG00000050426_5 (sequence is synthesized)
ctacgcatattggtgaagataggtgtcgaacttggctgggagaatggctgcagatttcctgcagcctgaaagaagctgagctgtctctcttgctgcacaacgtggtcctgctctccacca

SEQ ID NO: 34200 - DNA, 120 bp, Artificial Sequence
  ENSG00000050426_6 (sequence is synthesized)
actaccttgggacaaggcgctgaatgaaccatggagcggatggcattgtcctgcagtcgtatagtatagcagtgcaggaacaaacagcacttgccagcaaagtctgtgtgtactgttaag

SEQ ID NO: 34201 - DNA, 120 bp, Artificial Sequence
  ENSG00000050426_7 (sequence is synthesized)
gggcttcacagcatggcacacatgtgggaactgcagacattcctctcacagctagaactgaaacaaaccctcttgctaggggtggtccgtgtgaggtgtcatcctgtccccctcataatt

SEQ ID NO: 34202 - DNA, 120 bp, Artificial Sequence
  ENSG00000050426_8 (sequence is synthesized)
actaatagctggaactggcagcagcctctactgggcttttactgtgatgtgttcagttcatgtcctaggaagtcagcttttgccccaggtgggaatccttatttggcttaggactgatcc

SEQ ID NO: 34203 - DNA, 120 bp, Artificial Sequence
  ENSG00000050426_9 (sequence is synthesized)
acttccatgttacttacatctgtgggtttttgttgttgctgttagaaaatttgtggctggtgaaaacagcactcctttggctggagcacatgtgtccgtgcatgtacttgggtgtttccc

SEQ ID NO: 34204 - DNA, 120 bp, Artificial Sequence
  ENSG00000050426_10 (sequence is synthesized)
tccatcctttctgatatgaccaaaaatcaagttgttttgttttttgtcaccttcactggcatgggctaaccacttctttttcaaaccctctgaacacctttttctgatgggtaacttgca

SEQ ID NO: 34205 - DNA, 120 bp, Artificial Sequence
  ENSG00000050426_11 (sequence is synthesized)
ggaatattctattggaaaagataacaggaagtacaagtgcttcttgaccccttcctcaatgtttctagccttcactctccattgtcttttctgggctgtattacagccctctgtggatct

SEQ ID NO: 34206 - DNA, 120 bp, Artificial Sequence
  ENSG00000050426_12 (sequence is synthesized)
tcaactctgctgcctccactgtgatgcagcagtccaactgtaactgacagtggctgccttctctgggccatggatcacacctgtaaggtactaattactgcccagcctggggagatcagg

SEQ ID NO: 34207 - DNA, 120 bp, Artificial Sequence
  ENSG00000050426_13 (sequence is synthesized)
agaggtctgcatagttagtaagttgggtttagcttttgtgtgtgcatcagtgacttagagttctgtaataacttattgtaaatgcatgaagcactgtttttaaacccaagtaaagactgc

SEQ ID NO: 34208 - DNA, 120 bp, Artificial Sequence
  ENSG00000050426_14 (sequence is synthesized)
atcatgctttccggaagcagtcccacccagaaattattagttatttagaaaaggtcatccctctcatttctgatgcaggactccggtggcgtctgacagatctgtgcaccaagaaagcct

SEQ ID NO: 34209 - DNA, 120 bp, Artificial Sequence
  ENSG00000050426_15 (sequence is synthesized)
caaagacaacctcttctctcccgcttctctcgctgtgaagatggcgctctccagggtcttcaaagcttcacctttctccaaaggcagatgtgaagaacttgatgtcttatgtggtaacca

SEQ ID NO: 34210 - DNA, 120 bp, Artificial Sequence
  ENSG00000050426_16 (sequence is synthesized)
agacaaaagcgattaatgggaaataccatcgtttcttgggtcgtcatttcccccgcttctatgtcctgtacacaatcttcatgaaagttccgccaagacgtcaccaagtgtcttttccta

SEQ ID NO: 34211 - DNA, 120 bp, Artificial Sequence
  ENSG00000050426_17 (sequence is synthesized)
agaataaagacaaatatgtggaagcacaatataaagtttcatcaacttccataccgggagatggagcatttgagacagaaagccttgagccgggccatgcttctcacatcttacctgcct

SEQ ID NO: 34212 - DNA, 72 bp, Artificial Sequence
  ENSG00000050426_18 (sequence is synthesized)
ccaactggacaaggctttggcaaagctggggattggccagctgactgctcaggaagtaaaatcgagtctcat

SEQ ID NO: 34213 - DNA, 85 bp, Artificial Sequence
  ENSG00000050426_19 (sequence is synthesized)
ccgtggcctgaattctacgcatattggtgaagataggtgtcgaacttggctgggagaatggctgcagatttcctgcagcctgaaa

SEQ ID NO: 34214 - DNA, 120 bp, Artificial Sequence
  ENSG00000050426_20 (sequence is synthesized)
aacgaaactacaatagaaattccggaatcagctcttgggcagggtcaaagagttagcataaataagatcatttgcaggttctgctatggggatgtgagccgagatatcttatatttcata

SEQ ID NO: 34215 - DNA, 120 bp, Artificial Sequence
  ENSG00000050426_21 (sequence is synthesized)
aatgcctgcgccttaaactaattcctataaattagcacttcttgagaatgtttctagaaagatgttatgagaaacaacttatgacagcaacatgagggagggagaatataggtatgttct

SEQ ID NO: 34216 - DNA, 120 bp, Artificial Sequence
  ENSG00000050426_22 (sequence is synthesized)
gaaaaagaacactgaggtagggaaatagtgtctccatctcttcttcctagtattcatgtctaccaaatgctttctttggcttcctctgaaagaagccagtttcagcaagtgagtttgtga

SEQ ID NO: 34217 - DNA, 120 bp, Artificial Sequence
  ENSG00000050426_23 (sequence is synthesized)
tgattgcctatctcttcttgaccccaagaccttccttggatttcagaagtgtcaagccttgggatacaatctccgagactcctgctttacattagggactcaaggcgtgagggagcttct

SEQ ID NO: 34218 - DNA, 120 bp, Artificial Sequence
  ENSG00000050426_24 (sequence is synthesized)
atcttgttagattcagtgtgcactaaactaggtaagaggagtagtcaggactttcctaacatctacaaatctcttacctcttccaagatacagcgtggtacccacccagcaatacatgat

SEQ ID NO: 34219 - DNA, 120 bp, Artificial Sequence
  ENSG00000050426_25 (sequence is synthesized)
ttgtatttcttttcttctggcacttcagaaagcaaggatactgcagtttagacctactattttagcttatataggactctttgcttttgtcatcttgtccatcactagttttcaaattgc

SEQ ID NO: 34220 - DNA, 73 bp, Artificial Sequence
  ENSG00000050426_26 (sequence is synthesized)
ttgcttttgtcatcttgtccatcactagttttcaaattgccatgaggaaaggcttcatgtgggaatgagattg

SEQ ID NO: 34221 - DNA, 68 bp, Artificial Sequence
  ENSG00000050426_27 (sequence is synthesized)
tgagattgtaacttatttaaaggagatttaggattgtttgtggatttccatttccttggcataatcat

SEQ ID NO: 34222 - DNA, 120 bp, Artificial Sequence
  ENSG00000050426_28 (sequence is synthesized)
gtcattttggagttaattattgagtactgtgagacatatatatacatacatctaattgaaagggcacaaactcacatgcctactgcatgcccggcaggtaacgaagtaggccataagaca

SEQ ID NO: 34223 - DNA, 120 bp, Artificial Sequence
  ENSG00000050426_29 (sequence is synthesized)
agagggagtagtggggactgtggaaacctaagagtgaatgcatgctagtgtgaattttccaaccttggcacttccttatggggggaatatcctgtgctttatttatttatttatttattt

SEQ ID NO: 34224 - DNA, 120 bp, Artificial Sequence
  ENSG00000050426_30 (sequence is synthesized)
cccttcacccacagttgtctcaaccaaaaatgtctctagacattgccaaatgtcctaggggtggggaggagagaggcaggattgtccccgttgagaagtactggtctaaaggcattcaaa

SEQ ID NO: 34225 - DNA, 120 bp, Artificial Sequence
  ENSG00000050426_31 (sequence is synthesized)
cctgtttaggctaggtcttgatgttttgtgggcctttggatgttagggtaggcctactaatcttgaagctgagaaatgtccctagagcaccaacttctaccagaagaatcccaacgcgac

SEQ ID NO: 34226 - DNA, 120 bp, Artificial Sequence
  ENSG00000050426_32 (sequence is synthesized)
tggtgtttagtaccattaccatctctgaattttctactgcaatcacatgagaaatagaggatgagttgatacgaatatatagtagaaggaaaggaaggcatgcatacaggggctgaaaca

SEQ ID NO: 34227 - DNA, 120 bp, Artificial Sequence
  ENSG00000050426_33 (sequence is synthesized)
aagaaggggaactttgagaaaaacagcttcttcattccacccctccctgcacttggcttcctgcctccaggcttaagccatatataacaaggcagttataaggcagtgttcccaagccaa

SEQ ID NO: 34228 - DNA, 120 bp, Artificial Sequence
  ENSG00000050426_34 (sequence is synthesized)
gtgaggtaattacatttaatcaagatctcaaggttttttctttcatttgttgttcaccattgatcaagcttttgccctttgccgtgagaacaaaatattgaactgaatgaggcatcagat

SEQ ID NO: 34229 - DNA, 120 bp, Artificial Sequence
  ENSG00000050426_35 (sequence is synthesized)
cctatggcaggccggaggtttacaggggctccttgtcttgtttgtttatagaacccagcttctttattctctcacttcatttatttatttatgatttatttttatttatttatttatttt

SEQ ID NO: 34230 - DNA, 120 bp, Artificial Sequence
  ENSG00000050426_36 (sequence is synthesized)
tagtagagatggtttcaccatgtttgccaggctgatctcaaacccctggcctcaagagatccatcaacccaaagtgccgagactacaggtgtgagctaccgcacccagcatatttattta

SEQ ID NO: 34231 - DNA, 120 bp, Artificial Sequence
  ENSG00000050426_37 (sequence is synthesized)
ccctggaatttttattcttctgttcaggattcaaactccgatccccactagtgacccggcttcctgaccctctgtactctcagtgccccatattgtctggtttccccgcgtgtcctgagc

SEQ ID NO: 34232 - DNA, 120 bp, Artificial Sequence
  ENSG00000050426_38 (sequence is synthesized)
tcatctttcagcctcactttttcggctcaggttttaccgctgctatctcgattccacctctttctgacttagcctgcagttcaaattgtcccacaggcattgcgctctctccagaggcat

SEQ ID NO: 34233 - DNA, 120 bp, Artificial Sequence
  ENSG00000050426_39 (sequence is synthesized)
aacagtcgaggctccgacgccccgagtccaggcagagggcaagggcggcgctgggaagccctgaggccctaaggaatcgcggagggtcactgggcgcctcaaggacagggtgccctccgc

SEQ ID NO: 34234 - DNA, 120 bp, Artificial Sequence
  ENSG00000050426_40 (sequence is synthesized)
gtcgcaaacccacaccagtggcataagaactcgctccctctgggacaccctgtttccggcgcctttaaacctggaagtactgctgtgtccaatcctggccctccttccgcacttagtctt

SEQ ID NO: 34235 - DNA, 120 bp, Artificial Sequence
  ENSG00000050426_41 (sequence is synthesized)
tgagtccttccctctcctggcttgtgctggagccaagcaggctatggctaccaatcagcgctcagaaaagacgcatgcgtcttcgaacgaacgcgacgtcttcaaagcttcacctttctc

SEQ ID NO: 34236 - DNA, 120 bp, Artificial Sequence
  ENSG00000050438_0 (sequence is synthesized)
gcgggccggtggctatggaggcggcggcggttgatggttgaccgttggctccggggtgggggtcgccgttcgagtgatctgctcagacccgaccagagggcgcgggctgctgatgcttgg

SEQ ID NO: 34237 - DNA, 120 bp, Artificial Sequence
  ENSG00000050438_1 (sequence is synthesized)
cttggagcccgtgggggagacctagttcggctccgccatgccggccgccgggagtaacgagccggacggcgtcctcagctatcagagaccagatgaagaagctgtggtggatcagggtgg

SEQ ID NO: 34238 - DNA, 120 bp, Artificial Sequence
  ENSG00000050438_2 (sequence is synthesized)
gaccagtacaattctcaacattcactatgaaaaagaagagctggaaggtcacagaactctgtatgtgggagttcggatgccgcttggccggcagagccatcggcatcaccgcactcatgg

SEQ ID NO: 34239 - DNA, 120 bp, Artificial Sequence
  ENSG00000050438_3 (sequence is synthesized)
ccagaagcaccggagacgagggcggggcaaaggagccagccagggggaggaaggcctggaagccctggcccacgacacaccatctcagcgtgttcagttcattcttggcaccgaggaaga

SEQ ID NO: 34240 - DNA, 120 bp, Artificial Sequence
  ENSG00000050438_4 (sequence is synthesized)
tgaagagcatgtgcctcatgagctgtttacagagctggatgagatctgtatgaaagagggagaagatgctgagtggaaggaaacagccaggtggctgaagtttgaagaagatgttgaaga

SEQ ID NO: 34241 - DNA, 120 bp, Artificial Sequence
  ENSG00000050438_5 (sequence is synthesized)
tgggggagaacgctggagcaagccttatgtggcaaccctttcattgcacagcctgtttgagctaaggagctgccttattaatggaacagtcctcctggatatgcatgcaaatagcataga

SEQ ID NO: 34242 - DNA, 120 bp, Artificial Sequence
  ENSG00000050438_6 (sequence is synthesized)
agaaatttcagacctgatcctggatcagcaagaactgtccagtgacctgaatgacagcatgagggttaaagtgcgggaagcccttctcaaaaagcatcatcatcagaatgaaaagaagag

SEQ ID NO: 34243 - DNA, 120 bp, Artificial Sequence
  ENSG00000050438_7 (sequence is synthesized)
aaacaacctcattcccattgttcgctcctttgctgaggttggcaagaagcagtctgatcctcatttgatggataaacatggtcaaaccgtgtctcctcagtctgttccaactacaaatct

SEQ ID NO: 34244 - DNA, 120 bp, Artificial Sequence
  ENSG00000050438_8 (sequence is synthesized)
tgaagtaaaaaatggagtgaattgtgaacatagtcctgtggatttaagcaaggtagaccttcatttcatgaaaaaaattcctactggggccgaggcctccaatgtcctggttggagaggt

SEQ ID NO: 34245 - DNA, 120 bp, Artificial Sequence
  ENSG00000050438_9 (sequence is synthesized)
ggatattttggaccgtcccattgttgcctttgtgaggctgtctccagctgttcttctctcaggcctaacagaagtgccaatcccaacaagatttttgtttatcttattgggtccagtagg

SEQ ID NO: 34246 - DNA, 120 bp, Artificial Sequence
  ENSG00000050438_10 (sequence is synthesized)
gaaaggtcagcagtaccatgagattggcagatccatggccaccatcatgacagatgagatttttcatgacgtagcatataaggcaaaagagcgagatgatctcctggcggggattgatga

SEQ ID NO: 34247 - DNA, 120 bp, Artificial Sequence
  ENSG00000050438_11 (sequence is synthesized)
gttcctagaccaggtgacggtgctccctccaggagagtgggatccctccattagaattgagccacccaaaaatgtcccttcccaggagaaaaggaaaatgcctggagttccaaatggaaa

SEQ ID NO: 34248 - DNA, 120 bp, Artificial Sequence
  ENSG00000050438_12 (sequence is synthesized)
tgtttgccacatagaacaggaaccacatgggggtcacagtgggccagaacttcagcgcactgggcggctatttgggggcttggtgctggacatcaagcggaaggccccctggtactggag

SEQ ID NO: 34249 - DNA, 120 bp, Artificial Sequence
  ENSG00000050438_13 (sequence is synthesized)
cgactaccgagatgcactcagcttacagtgtttggcttcctttctgttcctgtactgtgcctgcatgtcacctgtcatcacctttgggggactgcttggagaagccactgagggacgcat

SEQ ID NO: 34250 - DNA, 120 bp, Artificial Sequence
  ENSG00000050438_14 (sequence is synthesized)
aagtgcaattgaatccttgtttggagcttccatgactgggattgcttattccttgtttgcgggacaggctctcaccatcctgggaagtactggaccagtgcttgtgtttgaaaagatttt

SEQ ID NO: 34251 - DNA, 120 bp, Artificial Sequence
  ENSG00000050438_15 (sequence is synthesized)
gttcaaattctgcaaagactatgctctttcatacctctccctgcgagcttgtattggactgtggaccgctttcctgtgtattgtccttgtggcaactgatgccagttcccttgtctgcta

SEQ ID NO: 34252 - DNA, 120 bp, Artificial Sequence
  ENSG00000050438_16 (sequence is synthesized)
cattacccgtttcactgaagaagcatttgcctccctaatttgcattattttcatctatgaagcaatagaaaaactgattcacctggcagagacctaccccatccacatgcacagccagct

SEQ ID NO: 34253 - DNA, 120 bp, Artificial Sequence
  ENSG00000050438_17 (sequence is synthesized)
ggaccaccttagcctctattactgcaggtgtactctgccagagaatccaaacaatcacaccctccagtactggaaggaccacaacatcgtgacagcagaagtccactgggctaacctgac

SEQ ID NO: 34254 - DNA, 120 bp, Artificial Sequence
  ENSG00000050438_18 (sequence is synthesized)
tgtcagtgaatgccaggagatgcatggagagttcatgggatctgcgtgcggccatcatggaccctacactcctgatgtcctcttttggtcctgtattctctttttcaccaccttcatcct

SEQ ID NO: 34255 - DNA, 120 bp, Artificial Sequence
  ENSG00000050438_19 (sequence is synthesized)
ctcaagcaccttaaagacgtttaagacgagccgttatttcccaaccagagtacgctccatggtgagtgactttgctgttttcctcactatcttcacaatggtgattattgattttttgat

SEQ ID NO: 34256 - DNA, 120 bp, Artificial Sequence
  ENSG00000050438_20 (sequence is synthesized)
tggagtcccatcaccaaagcttcaagttcccagtgtgttcaagccaacaagggatgatcgcggatggattattaatcccattggccccaatccctggtggactgtgatagctgcaattat

SEQ ID NO: 34257 - DNA, 120 bp, Artificial Sequence
  ENSG00000050438_21 (sequence is synthesized)
cccagctcttctctgtactatcttgatattcatggatcagcagatcacagccgtcattattaacaggaaggaacataagctcaagaaaggctgtggctaccacctggacctactgatggt

SEQ ID NO: 34258 - DNA, 120 bp, Artificial Sequence
  ENSG00000050438_22 (sequence is synthesized)
ggccatcatgctgggtgtctgctccatcatgggcctgccctggtttgtagctgcaactgtcttgtccatcacacatgtgaacagcctcaagctagaatctgaatgctctgctcctggaga

SEQ ID NO: 34259 - DNA, 120 bp, Artificial Sequence
  ENSG00000050438_23 (sequence is synthesized)
acagcccaagttcctgggcatccgagaacagagagtgacaggccttatgatctttgtgctgatgggctgctcagtcttcatgacggctatcttaaagtttattccaatgccagtactcta

SEQ ID NO: 34260 - DNA, 120 bp, Artificial Sequence
  ENSG00000050438_24 (sequence is synthesized)
cggagttttcctttacatgggagtttcttcactacagggaattcagttctttgatcgtctaaagctctttgggatgcccgcaaagcaccagccagatttcatctacctgcggcatgtgcc

SEQ ID NO: 34261 - DNA, 120 bp, Artificial Sequence
  ENSG00000050438_25 (sequence is synthesized)
gctgcgcaaagtgcacctcttcaccctcatccagttgacctgtctcgtcctgctctgggtcatcaaggcatctccagctgccattgttttcccaatgatggttttggccttggtctttgt

SEQ ID NO: 34262 - DNA, 120 bp, Artificial Sequence
  ENSG00000050438_26 (sequence is synthesized)
caggaaagtcatggatctctgtttctctaagcgagagctgagctggctagatgatctcatgcctgaaagcaaaaagaagaagttggatgatgccaaaaagaaggccaaggaggaagagga

SEQ ID NO: 34263 - DNA, 120 bp, Artificial Sequence
  ENSG00000050438_27 (sequence is synthesized)
ggctgagaaaatgttagaaattgggggagacaagtttcccttagagagcaggaagttactaagtagtcctggaaagaacatcagttgcagatgtgacccctctgagattaatatatctga

SEQ ID NO: 34264 - DNA, 120 bp, Artificial Sequence
  ENSG00000050438_28 (sequence is synthesized)
tgaaatgcctaaaactacagtttggaaagctctcagtatgaattctggaaatgcaaaggaaaagagtctcttcaactaagagtctttgctgggatggaagatttgggccgtgtggtgcct

SEQ ID NO: 34265 - DNA, 120 bp, Artificial Sequence
  ENSG00000050438_29 (sequence is synthesized)
cagggaagttctggttacagagaaaatggcgagtctctcagagaagaagcaagaccaagtctggccctgtccttggtcatctcaaagccatgccgaagcattcagttattcttggtgtgc

SEQ ID NO: 34266 - DNA, 120 bp, Artificial Sequence
  ENSG00000050438_30 (sequence is synthesized)
attggaaggcatccagctatccccataccagcagccagtcaccagatgtgaatgtggaagcagaagaccacctcctgttggttcttctcctcttccttctttttctctttagaacggcca

SEQ ID NO: 34267 - DNA, 120 bp, Artificial Sequence
  ENSG00000050438_31 (sequence is synthesized)
ccattgaagacctagcttcccattttccagacgttttctctgaaattctctgctggcctgccaagccatatggattcattctgccactgaggagtccttcagtgaggtccctcttcctaa

SEQ ID NO: 34268 - DNA, 120 bp, Artificial Sequence
  ENSG00000050438_32 (sequence is synthesized)
aggacagagtggggagtaggaggggaacagagaggacatcctctctggctctccagtgctcttagtgtctacaggctcctaggcagccctgggccttggtttgattacctcccctggggg

SEQ ID NO: 34269 - DNA, 120 bp, Artificial Sequence
  ENSG00000050438_33 (sequence is synthesized)
atgctggtcagacccagaggttgtcaggaggtcagctaccaggaagatccatgatctgggcattggcagtgcctgccaccacagccaggaagatgcctctgacctgggtgcatctccatc

SEQ ID NO: 34270 - DNA, 120 bp, Artificial Sequence
  ENSG00000050438_34 (sequence is synthesized)
actccttagcagcagcctgcataactggcaagaatcttggatgatacaagagccaagaagggacatttgagttgtgtcgcttagataggaaagggatccagggaaaatcaacagtaagtg

SEQ ID NO: 34271 - DNA, 120 bp, Artificial Sequence
  ENSG00000050438_35 (sequence is synthesized)
aggatgagcagtgtctcttggttttcattgaggatagagtaagagattgagtttagattgcaacagaaggaattagtttagataccaggaagaacttcctagcctgaagatttgtcatag

SEQ ID NO: 34272 - DNA, 120 bp, Artificial Sequence
  ENSG00000050438_36 (sequence is synthesized)
tgtctgctttctagatatctgggaaagatttgataatagttgtttgtgaatagaaaggaggatatgatgtttttattggccattttgcgggactcttcgacttcttgctgctgtctcttg

SEQ ID NO: 34273 - DNA, 120 bp, Artificial Sequence
  ENSG00000050438_37 (sequence is synthesized)
aggatacattccaattccatcctggcgagatccaagtgcttacgtactgtctccttagctgccttagagtaaacgatcatcagttcaatggaccaaaatcaccttcagccatgtggtttc

SEQ ID NO: 34274 - DNA, 120 bp, Artificial Sequence
  ENSG00000050438_38 (sequence is synthesized)
ttcatcatcatggatttcttttggttgacaaacattctggctctcagatgcaaaaagtcacactgggaaatgaactgtaagtggtgaaattagttttggtatttaatttaaaactacatt

SEQ ID NO: 34275 - DNA, 120 bp, Artificial Sequence
  ENSG00000050438_39 (sequence is synthesized)
tatagtttttctcttctcttctatgttgcaatgaatgtaaagtatttgggatccagtgcttataaacctttccttcctttgtgcacagaatgtaactagcaagcccattagcacccagat

SEQ ID NO: 34276 - DNA, 120 bp, Artificial Sequence
  ENSG00000050438_40 (sequence is synthesized)
aattctatcatgttagtttcccatcctggaaaatctttgtacagtgggaagttccccgatgtgtttttctttcttaggtgaagggttggctatatcactttattgaattttgcattcctt

SEQ ID NO: 34277 - DNA, 120 bp, Artificial Sequence
  ENSG00000050438_41 (sequence is synthesized)
agacttttaaaatatactaatgtattctagtcttactctaaagacctttgatgttaaaggaatccttcatttatttcatattccctatctcatagggccacaattattttaatacagaga

SEQ ID NO: 34278 - DNA, 120 bp, Artificial Sequence
  ENSG00000050438_42 (sequence is synthesized)
tgattttcaaaatattttaacaactggtacaggacagatgccagccactcagaagggatgcctgctgtaaacaagcagtatgtatggttgtaccaatgcctattggctgaacattatgct

SEQ ID NO: 34279 - DNA, 120 bp, Artificial Sequence
  ENSG00000050438_43 (sequence is synthesized)
actttcagatattaaaatggtgttcctttgaatcgtgggtattgttcctggtttgtctcatttctatcacaaggctgttttgggcacagccttagcttcctttcatatatatatggtgca

SEQ ID NO: 34280 - DNA, 120 bp, Artificial Sequence
  ENSG00000050438_44 (sequence is synthesized)
gacaggataggtcatgcttcttggaacctatatgggcattaaaatcttcatgagccaaagcttcacattttagcactttaggataactgtagtaattgtactcatttacctacctaattg

SEQ ID NO: 34281 - DNA, 120 bp, Artificial Sequence
  ENSG00000050438_45 (sequence is synthesized)
ggaagaattaaaaggcagcccatctggaggataagctttcttgcagacttttcccttgtccctctctggctgcctccttgagcttgccactttttcatcttcattgttccctgagaacat

SEQ ID NO: 34282 - DNA, 120 bp, Artificial Sequence
  ENSG00000050438_46 (sequence is synthesized)
ctcccctttcttgctctatcttgcccctcccatcttttcctgccacctctgtgtggggaggttgatgaccatttcacctctttccctagcctcagcacagctgtaaggagtgtatcaaaa

SEQ ID NO: 34283 - DNA, 120 bp, Artificial Sequence
  ENSG00000050438_47 (sequence is synthesized)
ctgggtgagagtatcactcagaaaaatgcctcccctaacacacggatgtcttgtgctgccttgaccgcttgaggggaggagccttcattaactctgtgtagtgcaggtacaggaccacct

SEQ ID NO: 34284 - DNA, 120 bp, Artificial Sequence
  ENSG00000050438_48 (sequence is synthesized)
gtgcactttagggtacttctcgagctagaccctcctggatcactgcgccttaggaatgttagctactttttaaaaaaaatatgatttggtgcgttgttggggtgaactccatggggaaga

SEQ ID NO: 34285 - DNA, 120 bp, Artificial Sequence
  ENSG00000050438_49 (sequence is synthesized)
gagtgaagatgggaaggaatttgggtggttttgccacgaggtgatggttggggttgggcgaatgggttggatgatcctggctctgtgggtgtggtgctcggttgcctccgtacagttgca

SEQ ID NO: 34286 - DNA, 120 bp, Artificial Sequence
  ENSG00000050438_50 (sequence is synthesized)
gttcacctttgtgcatggtgattaccagtcactctagggattgtaggtcccaacagcggttccagcagcctgcacagctggtacgaggacagctggaggagggtctgatatccctgcaag

SEQ ID NO: 34287 - DNA, 72 bp, Artificial Sequence
  ENSG00000050438_51 (sequence is synthesized)
gtacgaggacagctggaggagggtctgatatccctgcaagtgatgcaggataaaacttcccggccgggcgca

SEQ ID NO: 34288 - DNA, 79 bp, Artificial Sequence
  ENSG00000050438_52 (sequence is synthesized)
cttcccaataggaggtattccttgatggctctcgaatgcatgaatgatatatcaatttgaagtttctcgacctttccat

SEQ ID NO: 34289 - DNA, 120 bp, Artificial Sequence
  ENSG00000050438_53 (sequence is synthesized)
atgaatgatatatcaatttgaagtttctcgacctttccatcaaggatcttgaattttttctcaattatgcttgctaatgtgtcaaaggccaagtacactgtatcaaacttgccgtctgta

SEQ ID NO: 34290 - DNA, 120 bp, Artificial Sequence
  ENSG00000050438_54 (sequence is synthesized)
agatgcaagatcaatctagtgtttcagccagttcactactgacatcagactcaactttgtcccctctctttcttttcatgcaagagactttaagggtaacctcttcagttgaaactgtct

SEQ ID NO: 34291 - DNA, 120 bp, Artificial Sequence
  ENSG00000050438_55 (sequence is synthesized)
tggaagtgcagccctcctcctgtgtggctagagaaagagatggcaccaggatctcttaacggcaagtgctcacggggcatgggtgattttgtctagtctggtccttttggacgtggtgat

SEQ ID NO: 34292 - DNA, 120 bp, Artificial Sequence
  ENSG00000050438_56 (sequence is synthesized)
ttcctgtcatcctcgtggtctgacattgcttctcactggatactggttgtggcctttgactcattagctgattgttggatctctttgtgaggttcgattttttaaaaatccatgggtccc

SEQ ID NO: 34293 - DNA, 120 bp, Artificial Sequence
  ENSG00000050438_57 (sequence is synthesized)
tatggactgtcacctgttgcagatgatggtgattctcttcttttttttgtctccaatagttgcctggacgacttcatgggtcagtccacatgattgcaggatttcccattgttcatctgt

SEQ ID NO: 34294 - DNA, 120 bp, Artificial Sequence
  ENSG00000050438_58 (sequence is synthesized)
gaatgttgattggccaacctgtctgagctttcagcagatgcatccttgagcttactttcaggaattcctcctggaattggttttccttggtggtaatttctcatggtggagcttgtttct

SEQ ID NO: 34295 - DNA, 120 bp, Artificial Sequence
  ENSG00000050438_59 (sequence is synthesized)
gaggcatggtacagtgctgcggaggcaaggcaaggctgtcatggtgattttcacagcatctggatggcaaattgccttcacgtagggaaaccacatgggactgatagctttctcaaggga

SEQ ID NO: 34296 - DNA, 120 bp, Artificial Sequence
  ENSG00000050438_60 (sequence is synthesized)
tagctttctcaagggatctccaagcatctctgaatttggggatttcatcagttactcctggaatcaaaatgagtgtggagtcataatatatattttttttgagacaaagtctcactctgt

SEQ ID NO: 34297 - DNA, 120 bp, Artificial Sequence
  ENSG00000050438_61 (sequence is synthesized)
tggcctcaaaatctttaaggaagttatttatcgtcacaagtgttgtcatctgtgactcatgggccacttgatgaacctgaaccattagtggttgtccagatcctccaactttttcaggca

SEQ ID NO: 34298 - DNA, 120 bp, Artificial Sequence
  ENSG00000050438_62 (sequence is synthesized)
gtattccaatcagggttttacgacaccagggtatcccaccttttttgcaacataggcagaaacaccaagctgtgggtaattgatgtgcgtgtcactgattcctgcaacagctttgaatgt

SEQ ID NO: 34299 - DNA, 120 bp, Artificial Sequence
  ENSG00000050438_63 (sequence is synthesized)
attaaatctgttttcaacagcccttgcataggtgttatctctcaaatctctgtaaagagcactaagagtatgtagtgttgcatgatataatccaagcctgtgggctgtgtcatccgggat

SEQ ID NO: 34300 - DNA, 120 bp, Artificial Sequence
  ENSG00000050438_64 (sequence is synthesized)
tgttggaattttgcatgtgtctgttccatatcccgctggtaaccagcttacagaccttctgtcaggttggcttacattatcatcaacaggttgccgtagtgatgatatgatgctggacac

SEQ ID NO: 34301 - DNA, 120 bp, Artificial Sequence
  ENSG00000050438_65 (sequence is synthesized)
aatcattgtgcactttgttaatttggtatggtggtgccacacattatcactgtacagcattaacaaggctggaatatggccctctgctgtagggggcgtggcacctgtgacttgcactgg

SEQ ID NO: 34302 - DNA, 120 bp, Artificial Sequence
  ENSG00000050438_66 (sequence is synthesized)
aataagtaggaggctttccccaaaggatatggagactgatgtgtgctccatatcttgaggggagctctcttggtttcctttggccgggtctgttagttacttttgaaggccatgccaacc

SEQ ID NO: 34303 - DNA, 120 bp, Artificial Sequence
  ENSG00000050438_67 (sequence is synthesized)
cttttaggccattaaatttttctcaaacaatagccagcctcatttctgcttcatctctgtggtaggaaccattccctactcttactccctcctcttgtccaacttccaccaaacactcaa

SEQ ID NO: 34304 - DNA, 120 bp, Artificial Sequence
  ENSG00000050438_68 (sequence is synthesized)
tccgagtcctggctgctttcttgcttaggtctgtggctggtcactgtggtgaaagagtcaaggtgggcagtgtttggggtaggaaatgagtagtggtgaagcagcagcagtgtgtgtgtg

SEQ ID NO: 34305 - DNA, 120 bp, Artificial Sequence
  ENSG00000050438_69 (sequence is synthesized)
ggtgtgggtgtgtgtgcatgcgtgtgcatttgcatgtgtgtatgttgacaaatgagagtgtagccataagatttcattgttactactagtctttgtgtacctatctggagggacattaaa

SEQ ID NO: 34306 - DNA, 120 bp, Artificial Sequence
  ENSG00000050438_70 (sequence is synthesized)
aaaatatggccattctcccatctagggggttcccatctcagacttctctgataagagtaatttgagaacaaatacagattcatctatgggaaaagatgtttaaactcagcatgaaggaga

SEQ ID NO: 34307 - DNA, 120 bp, Artificial Sequence
  ENSG00000050438_71 (sequence is synthesized)
aacaaatttaggagtggaaagcaaggcaggtagttaggtgatttccatgaccacatttgcttgggccagggaagtggtgcacctcttttataacaatgggagatttcagaaacagtttga

SEQ ID NO: 34308 - DNA, 120 bp, Artificial Sequence
  ENSG00000050438_72 (sequence is synthesized)
gtgttggcagaccaatgccctgataagcttgtggtatagaggtaggaagggagggaggccagagattagataaaatgatggtgggtgggatcttagctctaaatgaaaagaactggactt

SEQ ID NO: 34309 - DNA, 120 bp, Artificial Sequence
  ENSG00000050438_73 (sequence is synthesized)
actaagtgggtggattacttgctagccataacttttagggaagggtaggtctggagagaaggtgaagaccagcagaaatatactgtgaaattgccaaatatgtttggttgcagaaaacac

SEQ ID NO: 34310 - DNA, 120 bp, Artificial Sequence
  ENSG00000050438_74 (sequence is synthesized)
agcctggctctttgtggctagatgtgacttccaacttctgaagacaggattgccaagagatgtgatctttccacatacagctcctgtccccatctctttatgtgtagagacctggatttg

SEQ ID NO: 34311 - DNA, 120 bp, Artificial Sequence
  ENSG00000050438_75 (sequence is synthesized)
gacctggatttggggtagtggggtagtaaaccatatatttccaaaagatggtgtgaagagtcgtttctcttcgtctgggatgtgattggcttttgttttttgttttttgtttttgagacg

SEQ ID NO: 34312 - DNA, 120 bp, Artificial Sequence
  ENSG00000050438_76 (sequence is synthesized)
attacaggcttgagctactgcgcccggccagtgattggcttttaaattaatcacaaatgtttgataaaattctggtatgtgctaagtcccaggcttggttgatatctcagactatgatag

SEQ ID NO: 34313 - DNA, 120 bp, Artificial Sequence
  ENSG00000050438_77 (sequence is synthesized)
ctgtgaccttcaagaaatttctggcttggggaatctgtagtttctggttgtccaaaaaagatagttcttagtcctactttattttctacccactcaactctccagacttccctcttagta

SEQ ID NO: 34314 - DNA, 120 bp, Artificial Sequence
  ENSG00000050438_78 (sequence is synthesized)
aaggaattcataattctccctgcatcttctctgtttatttcaatgtccatgttctgagtctcaagttttcctgaagcacaggagcaggcttggccccagagcccctggctttttcaacga

SEQ ID NO: 34315 - DNA, 120 bp, Artificial Sequence
  ENSG00000050438_79 (sequence is synthesized)
gcatcagaaatgctatcaatatattctctctgttgctttatcagcttctctaaatttattttgtaaggaagttagcacctccttccaggactttaaacagttgtctttgccaatttgttc

SEQ ID NO: 34316 - DNA, 120 bp, Artificial Sequence
  ENSG00000050438_80 (sequence is synthesized)
ctggattttccttgaacttctcaggtttccaagccacatcctagcagggcatccaggagccttgcactgaacctctcagctcttttgactttcttctggtcataggtgttgggcctccca

SEQ ID NO: 34317 - DNA, 120 bp, Artificial Sequence
  ENSG00000050438_81 (sequence is synthesized)
ttaggtagaagtcctttgagcagacccgaaatggccaaatgagacatcatccaagttcctccctcctttactgtctcggctttttcaagcacccctttcacctctcttttctgccttttc

SEQ ID NO: 34318 - DNA, 120 bp, Artificial Sequence
  ENSG00000050438_82 (sequence is synthesized)
ctcagtctgtcaagttctttggaggaaagaagttcttggtcagaggtcctaaaaccaccaccagctgggggtgctgagaatggtgaggagttggacagtcccggggcttttttgaaaggg

SEQ ID NO: 34319 - DNA, 120 bp, Artificial Sequence
  ENSG00000050438_83 (sequence is synthesized)
gactttatggtcatttcccctgtttagggtgagggactaagaattctcaagccttcagtttcatccatatttcaatgtaagcagaaaagcacatctcaaagccaaatagaaatgattttc

SEQ ID NO: 34320 - DNA, 120 bp, Artificial Sequence
  ENSG00000050438_84 (sequence is synthesized)
tactaagcctatcctttgtgattcttggttcccttggtctcttaatattaattatagagaatgggcagttgagtcagttaacatcttttcatcagaaaggagggtaatattcataaccaa

SEQ ID NO: 34321 - DNA, 120 bp, Artificial Sequence
  ENSG00000050438_85 (sequence is synthesized)
aagagatgtaaaggaagtatattactgcttgaagtgtgaaaagaggaaaggagtgttatgtgaaccttttcagtagggaaattcagaaaatggaatgattcatccataggcataattctt

SEQ ID NO: 34322 - DNA, 120 bp, Artificial Sequence
  ENSG00000050438_86 (sequence is synthesized)
ttaggagattctgtgctcaaagggaagggaatggtttctgatccttctgaagagaaaaggaatagcatttttcttaaacctaacccagtttcagcattggagaatacagaactttttctt

SEQ ID NO: 34323 - DNA, 120 bp, Artificial Sequence
  ENSG00000050438_87 (sequence is synthesized)
ctagctgatggcattaatatttcttgagagagagaactcacccatggcacttttctgagcccagcagaaatcagcggagcttgggcttcgcttagcaggtttgcaattgacttcaacatg

SEQ ID NO: 34324 - DNA, 120 bp, Artificial Sequence
  ENSG00000050438_88 (sequence is synthesized)
caggcttttcacatgtgcaataatgctggaaacagaagcaccaaactgattgtgcaattactccttttgtagaagaggccaaaatcctcctcctccttcctttctcctatattcactcct

SEQ ID NO: 34325 - DNA, 120 bp, Artificial Sequence
  ENSG00000050438_89 (sequence is synthesized)
ccaggatcataaagcctccctcttgtttatctgtgtctgtctgtctgattggttagatttggctgcccttccaagctaatggtgtcaggtggagaacagagcaaccttccctcggaagga

SEQ ID NO: 34326 - DNA, 120 bp, Artificial Sequence
  ENSG00000050438_90 (sequence is synthesized)
gacaattcgaggtgctggtacatttcccttgttttctatgttcttctttctagtgggtctcatgtagagatagagatatttttttgttttagagattccaaagtatatatttttagtgta

SEQ ID NO: 34327 - DNA, 120 bp, Artificial Sequence
  ENSG00000050438_91 (sequence is synthesized)
agaaatgtaccctctccacactccatgatgtaaatagaaccaggaataaatgtgtcattgtgataatcccatagcaatttatggtaagaacaagacccctttccctcaccaccgagtctc

SEQ ID NO: 34328 - DNA, 120 bp, Artificial Sequence
  ENSG00000050438_92 (sequence is synthesized)
gtggtctgtgtctgtgaaccagggcaggtaattgtgacactgcatctcatagaactctgcctgcccagatttttgtgtgctcacctcaatgggtgaaaaataaagtctgtgtaaactgtt

SEQ ID NO: 34329 - DNA, 120 bp, Artificial Sequence
  ENSG00000050438_93 (sequence is synthesized)
attcatctcgtaagcgccaaggtggaggggggtcctaccgagggaggagctacaggccaccgcgaccagcagagagcgaaggcaggagggaccagcctggcccagccccttcattttact

SEQ ID NO: 34330 - DNA, 120 bp, Artificial Sequence
  ENSG00000050438_94 (sequence is synthesized)
atgtcttgctcattgccgcatctccagtacctggcacagtgcttggcaccaagtatctgctgctacttgtcaattgcatgaatgaattattatatacatttctcacaagctatttggggg

SEQ ID NO: 34331 - DNA, 120 bp, Artificial Sequence
  ENSG00000050438_95 (sequence is synthesized)
gactttttaataatagtcgttctgactgatgtgaaatggagtctctttgtggttctgatttgcatctctgatgatgcatgatgttgaccagtttttaatatgtttgttgactgcttgtat

SEQ ID NO: 34332 - DNA, 120 bp, Artificial Sequence
  ENSG00000050438_96 (sequence is synthesized)
gaagtgtctgttcatatcctttgccctttcgcttctatgcaccaataacacccaggctgagagtcaaaccaagaacacaatcctgactacagtagccataaagaaaatgaaatacctggg

SEQ ID NO: 34333 - DNA, 120 bp, Artificial Sequence
  ENSG00000050438_97 (sequence is synthesized)
gaaatacctgggaatacacctaatcaaaaacatgaaagcactctctagagggagaactacaaaacattgctgaaagaaatcagagatgattctctgaaaaagaagtcagattagaaatga

SEQ ID NO: 34334 - DNA, 82 bp, Artificial Sequence
  ENSG00000050438_98 (sequence is synthesized)
cagagatgattctctgaaaaagaagtcagattagaaatgattctctgaaaaagaaatcatctctgatttctttcagcagtgt

SEQ ID NO: 34335 - DNA, 120 bp, Artificial Sequence
  ENSG00000050438_99 (sequence is synthesized)
caaatggatggctggcctgtttctaaagccctccagggaagggctccttaagtcaatgctccagagcctagtgaccctctacgcggcccagacccagattatgatgttactgctgtaagc

SEQ ID NO: 34336 - DNA, 120 bp, Artificial Sequence
  ENSG00000050438_100 (sequence is synthesized)
tgaggaaaggtgaatcccaactatacccaccagaaccagaggaaaagagcaggctatttgggggcttggtgctggacatcaagcggaaggccccctggtactggagcgactaccgagatg

SEQ ID NO: 34337 - DNA, 120 bp, Artificial Sequence
  ENSG00000050438_101 (sequence is synthesized)
caattctcaacattcactatgaaaaagaagagctggaagggatatcattaggatctaattgcctacatgggagatagtgctttgaacacggtgaagtccaatataaatattaacaagtaa

SEQ ID NO: 34338 - DNA, 120 bp, Artificial Sequence
  ENSG00000050438_102 (sequence is synthesized)
cctgttctttgagaatgtgatgtactcagttcagtgcgttaattcttgacaactgcctggaaatacaaataaatacaaaacttaaagagaaaataaaatacaaatagttttaaaaactca

SEQ ID NO: 34339 - DNA, 120 bp, Artificial Sequence
  ENSG00000050438_103 (sequence is synthesized)
actgtatacctgggggcctcaaattacagaacataggaagggtcatgtgaaaagtcagcatgtctggaatcccgagggttatatttaggagctgggaagattacccccaaagatgttctc

SEQ ID NO: 34340 - DNA, 120 bp, Artificial Sequence
  ENSG00000050438_104 (sequence is synthesized)
agctaagaatggattagggattcttgcttctgtctgttcttaatttttgggtttgacaaccacttattttttcctttgtttacaatctactcaccaggctcatacctacaatgtgaacat

SEQ ID NO: 34341 - DNA, 120 bp, Artificial Sequence
  ENSG00000050438_105 (sequence is synthesized)
acagtatgcccttattagcagattcaatggctcacattctttcaaaaggtctaatttgacaaatacataagacccattatttcctagaatgtttgtaatatatctaattgcaaatggtgc

SEQ ID NO: 34342 - DNA, 120 bp, Artificial Sequence
  ENSG00000050438_106 (sequence is synthesized)
tgtggttggcaccatgcaaagataacttgcataggactttctgtcttttttcatttccctcagcacttggcatcttgtcatctacacaatggaccctcaataaatggcctatatgtgcaa

SEQ ID NO: 34343 - DNA, 120 bp, Artificial Sequence
  ENSG00000050438_107 (sequence is synthesized)
agaaagaatgtgtagcaaatgaaaataccagaccaagaaatgagtgagctgggaagtgtttccaaatacagttagtgcctaaaatagtgtcctttgaaaaaacttttaaaagactttttt

SEQ ID NO: 34344 - DNA, 120 bp, Artificial Sequence
  ENSG00000050438_108 (sequence is synthesized)
ttaggccaggcataatgggttatccctgtaattccagggcttttgggagttgaagctggaggattacttgaggccagaagtttgagactagcctaggcaatataatgagaccctgtctct

SEQ ID NO: 34345 - DNA, 84 bp, Artificial Sequence
  ENSG00000050438_109 (sequence is synthesized)
tcctatgggccattcttacatactgagttctactatgaacttgggcaggttatttaatctctggttctcttttttccttattgt

SEQ ID NO: 34346 - DNA, 120 bp, Artificial Sequence
  ENSG00000050438_110 (sequence is synthesized)
gcaggttatttaatctctggttctcttttttccttattgtaaggatgatcattttttatatatctaggatgttatgaggttttattttatcttttcactataaataatcaatgaatggct

SEQ ID NO: 34347 - DNA, 120 bp, Artificial Sequence
  ENSG00000050438_111 (sequence is synthesized)
agacacagtgtgggataagagaaagaagtttgaacctagaattagaaaagatggattcaaattttgactttgccacttaataaccttggccaaattgcctggtcttttaaagtctcagtt

SEQ ID NO: 34348 - DNA, 120 bp, Artificial Sequence
  ENSG00000050438_112 (sequence is synthesized)
tccatttctgtccagaggaaatggtgttacctacctttcagagcagttctttgatcgtctaaagctctttgggatgcccgcaaagcaccagccagatttcatctacctgcggcatgtgcc

SEQ ID NO: 34349 - DNA, 120 bp, Artificial Sequence
  ENSG00000050438_113 (sequence is synthesized)
aggtgcagcgggtcccgccgtgtcctcagcctgctgcgggcccgggaactcccggcggaccggcagaggggcgccccggcttctctgcgtctcagcccgccccgggggtgcggtctttgc

SEQ ID NO: 34350 - DNA, 120 bp, Artificial Sequence
  ENSG00000050438_114 (sequence is synthesized)
ggccaggctttcagcgcggaaaaagattggagggtcctagtcaccccaaagaggacaggcattagcagagccgcgggcggcgggtgcatggaaccggaatgtgctgcgcgccagcctgga

SEQ ID NO: 34351 - DNA, 120 bp, Artificial Sequence
  ENSG00000050438_115 (sequence is synthesized)
gcgctcggagcccggaggcctgccccggagggggaaacgcggcggggcggccatgggccccggggtcctgccccaggtttgcttctcatttgtgctccatccaacaagagctcgtattcc

SEQ ID NO: 34352 - DNA, 120 bp, Artificial Sequence
  ENSG00000050438_116 (sequence is synthesized)
gtgtgccatgaactgtgtcaagggctccaagtgccagggctgctataacaaagtaccacaaactgggtggctccaagcatgtttattgtctcacagtgctgaagaaatctacaaggccat

SEQ ID NO: 34353 - DNA, 120 bp, Artificial Sequence
  ENSG00000050438_117 (sequence is synthesized)
gctccctgtgagagaccagatgaagaagctgtggtggatcagggtgggaccagtacaattctcaacattcactatgaaaaagaagagctggaagtcttcacaagatccctgtgaagtttg

SEQ ID NO: 34354 - DNA, 120 bp, Artificial Sequence
  ENSG00000050438_118 (sequence is synthesized)
caggcatgtgcaggacaaaggaagagaccttcaactccaaaatctctatatctttactcctggaagtctttgaagttttgttgttccagagctgtgaccagaccaaagaactgtgatatt

SEQ ID NO: 34355 - DNA, 120 bp, Artificial Sequence
  ENSG00000050438_119 (sequence is synthesized)
tttttctcttaactatgctaggctttttgttgttgttgttttttaaaactaaaggagttctctccacagaccttctgcttctttccaggtcacagaactctgtatgtgggagttcggatg

SEQ ID NO: 34356 - DNA, 120 bp, Artificial Sequence
  ENSG00000050438_120 (sequence is synthesized)
ttattgaatatttactctgtgccaggcaatatgctagttattggggataaaatactttccattgcaatatctgctgggaagtagttcagggtacttctctgagagcccagtgtggaagga

SEQ ID NO: 34357 - DNA, 120 bp, Artificial Sequence
  ENSG00000050438_121 (sequence is synthesized)
ccaagctctagaggatttttcttcctatgttatctctccttttttgagtaatcaagaatgcagagaaatctttttctggggaaactattattgccaagtaggatatatagagaaatatat

SEQ ID NO: 34358 - DNA, 120 bp, Artificial Sequence
  ENSG00000050438_122 (sequence is synthesized)
taaggttggcttaactttcaagagaagatggttaattaaatacattcaagctatttacataaagaaacctcactcctgttccactaaatgagaccagtttgtataaggtcatgggtgtga

SEQ ID NO: 34359 - DNA, 120 bp, Artificial Sequence
  ENSG00000050438_123 (sequence is synthesized)
cctcaggcagtgtagtgtgaatgtcttgactagtctgtaccaaaacaaccagatattttgacattttgacattgaacccacagtgcatactctggtaaggactgcactgctcggtaagct

SEQ ID NO: 34360 - DNA, 120 bp, Artificial Sequence
  ENSG00000050438_124 (sequence is synthesized)
gcaaagtagggctttcaaggcatatgccttaggcggcagagggaggtgtggcctgttttttatcagctttctttgattgagaggcttaattcaggaaggaccttcattagtaattccatc

SEQ ID NO: 34361 - DNA, 120 bp, Artificial Sequence
  ENSG00000050438_125 (sequence is synthesized)
cagtgtttccaacctttaagatcaagaaaatttccctctcaacgtgggaaagctgattaaaattttttttttcatatatcttgcctttccttccatcctttgtggagataacataattgt

SEQ ID NO: 34362 - DNA, 120 bp, Artificial Sequence
  ENSG00000050438_126 (sequence is synthesized)
acaactttagactcatgtcttatctcttcttatactagcagacatgtatttagttcttttaatgcatctcatttccacgcttgttttttaaatccttttatccttgcacttctctaagtg

SEQ ID NO: 34363 - DNA, 120 bp, Artificial Sequence
  ENSG00000050438_127 (sequence is synthesized)
ctaaagttttctgcatctcagatccccgtgacagagataaaaatcaacaggttgtattcatttttcaccatatccattggtgattgtttcatgtaaagttacttttaactttcctgaggg

SEQ ID NO: 34364 - DNA, 120 bp, Artificial Sequence
  ENSG00000050438_128 (sequence is synthesized)
aagcaaagaccatgtgggtatatgctaaatatatcaagatgcagctctgttttggtgcacctagaatatcaaaacaataataaaaatgaatctgggctgggtgtggtggctcacacctgt

SEQ ID NO: 34365 - DNA, 60 bp, Artificial Sequence
  ENSG00000050438_129 (sequence is synthesized)
tagtaagctgagatggtgtcactgcattccagcttgggtgacagagcgagactccacctc

SEQ ID NO: 34366 - DNA, 120 bp, Artificial Sequence
  ENSG00000050438_130 (sequence is synthesized)
gggagctgccagatgtcctagcattgtgaccacaggtttaggagggacttctaagtgaaggggaggagtagccctttggccaaactctggcatttaccgaaataaagctttttaaaaaac

SEQ ID NO: 34367 - DNA, 120 bp, Artificial Sequence
  ENSG00000050438_131 (sequence is synthesized)
cctcccttccacaggaaatgctcccagacgacagcacgaacaagccctaattaagtctttcctcagatcccgacgtcttttcctccaaccacatcttgggtttagatgtagaccagatga

SEQ ID NO: 34368 - DNA, 120 bp, Artificial Sequence
  ENSG00000050438_132 (sequence is synthesized)
cccgagcccaggcttcccaggccgctccctgagggcgaggggaggccagcccgggacaccagggggcgctccgggcggttggggaccaggccagggctgcgagagagtgaccttgggccg

SEQ ID NO: 34369 - DNA, 120 bp, Artificial Sequence
  ENSG00000050438_133 (sequence is synthesized)
aacctgggatctggcccatctctgccgcatcccttgcgccgcccgcccaggagccctgacagccggcgggcggcgacctcttgttctcctcgcgtctttctgttggaaggggccggcgtc

SEQ ID NO: 34370 - DNA, 65 bp, Artificial Sequence
  ENSG00000050438_134 (sequence is synthesized)
tggccaagtgctattctttatttcagattgagagttgggaaaaactggagcaaataatggatttc

SEQ ID NO: 34371 - DNA, 120 bp, Artificial Sequence
  ENSG00000050438_135 (sequence is synthesized)
gattgagagttgggaaaaactggagcaaataatggatttctttcttgcttaaaatgtatttatatgtatgtcttattatatacaaggcagatttccctggaataaaagtctagaatgtgc

SEQ ID NO: 34372 - DNA, 120 bp, Artificial Sequence
  ENSG00000050438_136 (sequence is synthesized)
tgcttaattttacacatgtgtgcaggcaatattatctgtgagtgaaaagtggaataatacgtggattgggtcaactgattatcagcttgttaggagtcctctgtgtgagacatggtggta

SEQ ID NO: 34373 - DNA, 120 bp, Artificial Sequence
  ENSG00000050438_137 (sequence is synthesized)
taattgtgaagttctcactgtatgtggatgttcatgtgaaagatagtactttcttcccgtaaatatcttttgatttccatttgtatggaatcccaatgaatgtatctttggaaaacataa

SEQ ID NO: 34374 - DNA, 120 bp, Artificial Sequence
  ENSG00000050438_138 (sequence is synthesized)
gttcaacaagaacaacagcaacaaactcagaagcactcctcgctaccgccggggagacccaggatacctaaactttactgagttggggccactcaagcctgaacagaaggatcagtggag

SEQ ID NO: 34375 - DNA, 80 bp, Artificial Sequence
  ENSG00000050555_0 (sequence is synthesized)
gagcggggccggcagagcgcgcggcgtcggtgcccttgaccatggcggcggctgcgcttctgctggggctggcgctgctg

SEQ ID NO: 34376 - DNA, 120 bp, Artificial Sequence
  ENSG00000050555_1 (sequence is synthesized)
acggcgcagggcgcccgcagcgctgcctgccggtgttcgagaacgcggcgtttgggcggctcgcccaggcctcgcacacgtgcggcagcccgcccgaggacttctgtccccacgtgggcg

SEQ ID NO: 34377 - DNA, 120 bp, Artificial Sequence
  ENSG00000050555_2 (sequence is synthesized)
ccgcgggcgcgggggctcattgccagcgctgcgacgccgccgacccccagcgccaccacaacgcctcctacctcaccgacttccacagccaggacgagagcacctggtggcagagcccgt

SEQ ID NO: 34378 - DNA, 120 bp, Artificial Sequence
  ENSG00000050555_3 (sequence is synthesized)
ccatggccttcggcgtgcagtaccccacctcggtcaacatcaccctccgcctagggaaggcttatgagatcacgtatgtgaggctgaagttccacaccagtcgccctgagagctttgcca

SEQ ID NO: 34379 - DNA, 120 bp, Artificial Sequence
  ENSG00000050555_4 (sequence is synthesized)
tctacaagcgcagccgcgccgacggcccatgggagccctaccagttctacagcgcctcctgccagaagacctacggccggcccgagggccagtacctgcgccccggcgaggacgagcgcg

SEQ ID NO: 34380 - DNA, 120 bp, Artificial Sequence
  ENSG00000050555_5 (sequence is synthesized)
tggccttctgcacctctgagttcagcgacatctccccgctgagtggcggcaacgtggccttctccaccctggagggccggcccagcgcctacaacttcgaggagagccctgggctgcagg

SEQ ID NO: 34381 - DNA, 120 bp, Artificial Sequence
  ENSG00000050555_6 (sequence is synthesized)
agtgggtcaccagcaccgaactcctcatctctctagaccggctcaacacgtttggggacgacatcttcaaggaccccaaggtgctccagtcctactattatgccgtgtccgacttctctg

SEQ ID NO: 34382 - DNA, 120 bp, Artificial Sequence
  ENSG00000050555_7 (sequence is synthesized)
tgggcggcaggtgcaagtgcaacgggcatgccagcgagtgcggccccgacgtggcaggccagttggcctgccggtgccagcacaacaccaccggcacagactgtgagcgctgcctgccct

SEQ ID NO: 34383 - DNA, 120 bp, Artificial Sequence
  ENSG00000050555_8 (sequence is synthesized)
tcttccaggaccgcccgtgggcccggggcaccgccgaggctgcccacgagtgtctgccctgcaactgcagtggccgctccgaggaatgcacgtttgatcgggagctcttccgcagcacag

SEQ ID NO: 34384 - DNA, 120 bp, Artificial Sequence
  ENSG00000050555_9 (sequence is synthesized)
gccacggcgggcgctgtcaccactgccgtgaccacacagctgggccacactgtgagcgctgtcaggagaatttctatcactgggacccgcggatgccatgccagccctgtgactgccagt

SEQ ID NO: 34385 - DNA, 120 bp, Artificial Sequence
  ENSG00000050555_10 (sequence is synthesized)
cggcaggctccctacacctccagtgcgatgacacaggcacctgcgcctgcaagcccacggtgactggctggaagtgtgaccgctgtctgcccgggttccactcgctcagtgagggaggct

SEQ ID NO: 34386 - DNA, 120 bp, Artificial Sequence
  ENSG00000050555_11 (sequence is synthesized)
gcagaccctgcacttgcaatcccgctggcagcctggacacctgtgacccccgcagtgggcgctgcccctgcaaagagaatgtggaaggcaacctatgtgacagatgtcgcccggggacct

SEQ ID NO: 34387 - DNA, 120 bp, Artificial Sequence
  ENSG00000050555_12 (sequence is synthesized)
ttaacctgcagccccacaatccagctggctgcagcagctgtttctgctatggccactccaaggtgtgcgcgtccactgcccagttccaggtgcatcacatcctcagcgatttccaccagg

SEQ ID NO: 34388 - DNA, 120 bp, Artificial Sequence
  ENSG00000050555_13 (sequence is synthesized)
gagccgaaggctggtgggccagaagtgtggggggctctgagcaccccccacaatggagcccaaatggggtcctcctgagcccagaagacgaggaggagctcacagcaccagagaagttcc

SEQ ID NO: 34389 - DNA, 120 bp, Artificial Sequence
  ENSG00000050555_14 (sequence is synthesized)
tgggagaccagcggttcagctatgggcagcccctcatactgaccttccgggtgccccccggggactccccactccctgtacagctgaggctggaagggacaggcttggccctgtccctga

SEQ ID NO: 34390 - DNA, 120 bp, Artificial Sequence
  ENSG00000050555_15 (sequence is synthesized)
ggcactctagcctgtctggcccccaggatgccgggcatcccagggaggtagagctcaggttccacctgcaggagacctccgaggacgtggcccctccactgccccccttccacttccagc

SEQ ID NO: 34391 - DNA, 120 bp, Artificial Sequence
  ENSG00000050555_16 (sequence is synthesized)
ggctcctcgccaacctgaccagcctccgcctccgcgtcagtcccggccccagccctgccggtccagtgttcctgactgaggtccggctcacatccgcccggccagggctttccccgccag

SEQ ID NO: 34392 - DNA, 120 bp, Artificial Sequence
  ENSG00000050555_17 (sequence is synthesized)
cctcctgggtggagatttgttcatgtcccactggctacacgggccagttctgtgaatcctgtgctccgggatacaagagggagatgccacaggggggtccctatgccagctgtgtcccct

SEQ ID NO: 34393 - DNA, 120 bp, Artificial Sequence
  ENSG00000050555_18 (sequence is synthesized)
gcacctgtaaccagcatggcacctgtgaccccaacacagggatctgtgtctgcagccaccataccgagggcccatcctgtgaacgctgtttgccaggtttctatggcaaccctttcgcgg

SEQ ID NO: 34394 - DNA, 120 bp, Artificial Sequence
  ENSG00000050555_19 (sequence is synthesized)
gccaagccgacgactgccagccctgtccctgccctggccagtcggcctgtacgaccatcccagagagccgggaggtggtgtgtacccactgccccccgggccagagagggcggcgctgtg

SEQ ID NO: 34395 - DNA, 120 bp, Artificial Sequence
  ENSG00000050555_20 (sequence is synthesized)
aggtctgtgatgatggcttttttggggacccgctggggctctttgggcacccccagccctgccaccagtgccagtgtagcgggaacgtggaccccaatgccgtgggcaactgtgaccccc

SEQ ID NO: 34396 - DNA, 120 bp, Artificial Sequence
  ENSG00000050555_21 (sequence is synthesized)
tgtctggccactgcctgcgctgcctgcacaacaccacgggtgaccactgtgagcactgtcaggaaggcttctacgggagcgccctggcccctcgacccgcagacaaatgcatgccttgca

SEQ ID NO: 34397 - DNA, 120 bp, Artificial Sequence
  ENSG00000050555_22 (sequence is synthesized)
gctgtcacccacagggctcggtcagtgagcagatgccctgcgacccagtgacaggccaatgctcctgcctgcctcatgtgactgcacgggactgcagccgctgctaccctggcttcttcg

SEQ ID NO: 34398 - DNA, 120 bp, Artificial Sequence
  ENSG00000050555_23 (sequence is synthesized)
acctccagcctgggaggggctgccggagctgcaagtgtcacccactgggctcccaggaggaccagtgccatcccaagactggacagtgcacctgccgcccaggtgtcacaggccaggcct

SEQ ID NO: 34399 - DNA, 120 bp, Artificial Sequence
  ENSG00000050555_24 (sequence is synthesized)
gtgacaggtgccagctgggtttcttcggcttctccatcaagggctgccgggcctgcaggtgctccccactgggcgctgcctcggcccagtgccacgagaacggcacatgcgtgtgcaggc

SEQ ID NO: 34400 - DNA, 120 bp, Artificial Sequence
  ENSG00000050555_25 (sequence is synthesized)
ctggcttcgagggctacaaatgtgaccgctgccacgacaacttcttcctcacggcagacggcacacactgccagcaatgtccgtcctgctacgccctggtgaaggaggaggcagccaagc

SEQ ID NO: 34401 - DNA, 120 bp, Artificial Sequence
  ENSG00000050555_26 (sequence is synthesized)
tgaaggccagactgactttgacggaggggtggctccaagggtccgactgtggcagtccctggggaccactagacattctgctgggagaggccccaaggggggacgtctaccagggccatc

SEQ ID NO: 34402 - DNA, 120 bp, Artificial Sequence
  ENSG00000050555_27 (sequence is synthesized)
acctgcttccaggggctcgggaagccttcctggagcagatgatgagcctcgagggtgctgtcaaggccgcccgggagcagctgcagaggctgaacaagggtgcccgctgtgcccaggccg

SEQ ID NO: 34403 - DNA, 120 bp, Artificial Sequence
  ENSG00000050555_28 (sequence is synthesized)
gatcccagaagacctgcacccagctggcagacctggaggcagtgctggagtcctcggaagaggagattctgcatgcagctgccattctcgcgtctctggagattcctcaggaaggtccca

SEQ ID NO: 34404 - DNA, 120 bp, Artificial Sequence
  ENSG00000050555_29 (sequence is synthesized)
gtcagccgaccaaatggagccacctggccacagaggcccgtgccctcgccaggagccacagagacaccgccaccaagatcgcagccactgcttggagggccctgctcgcctccaacacca

SEQ ID NO: 34405 - DNA, 120 bp, Artificial Sequence
  ENSG00000050555_30 (sequence is synthesized)
gctacgcgcttctctggaatctgctggagggaagggtggccctagagacccagcgggacctggaggacaggtaccaggaggtccaggcggcccagaaagcactgaggacggctgtggcag

SEQ ID NO: 34406 - DNA, 120 bp, Artificial Sequence
  ENSG00000050555_31 (sequence is synthesized)
cggaaagcgtgttggccaccgtgcagcaagttggcgcagatacagccccgtacctggccttgctggcttccccgggagctctgcctcagaagtcccgggctgaagacctgggcctgaagg

SEQ ID NO: 34407 - DNA, 120 bp, Artificial Sequence
  ENSG00000050555_32 (sequence is synthesized)
cgaaggccctggagaagacagttgcatcatggcagcacatggccactgaggctgcccgaaccctccagactgctgcccaggcgacgctacggcaaacagaacccctcacaaagctgcacc

SEQ ID NO: 34408 - DNA, 120 bp, Artificial Sequence
  ENSG00000050555_33 (sequence is synthesized)
aggaggccagagccgccctgacccaggcttcctcatctgtccaggctgcgacagtgactgtcatgggagccaggactctgctggctgatctggaaggaatgaagctgcagtttccccggc

SEQ ID NO: 34409 - DNA, 120 bp, Artificial Sequence
  ENSG00000050555_34 (sequence is synthesized)
ccaaggaccaggcggcattgcagaggaaggcagactccgtcagtgacagactccttgcagacacgagaaagaagaccaagcaggcggagaggatgctgggaaacgcggcccctctttcct

SEQ ID NO: 34410 - DNA, 120 bp, Artificial Sequence
  ENSG00000050555_35 (sequence is synthesized)
ccagtgccaagaagaagggcagagaagcagaggtgttggccaaggacagtgccaagcttgccaaggccttgctgagggagcggaaacaggcgcaccgccgtgccagcaggctcaccagcc

SEQ ID NO: 34411 - DNA, 120 bp, Artificial Sequence
  ENSG00000050555_36 (sequence is synthesized)
agacgcaagccacgctccaacaggcgtcccagcaggtgctggcgtctgaagcacgcagacaggagctggaggaagctgagcgggtgggtgctgggctgagcgagatggagcagcagatcc

SEQ ID NO: 34412 - DNA, 120 bp, Artificial Sequence
  ENSG00000050555_37 (sequence is synthesized)
gggaatcgcgtatctcactggagaaggacatcgagaccttgtcagagctgcttgccaggctggggtcgctggacacccatcaagccccagcccaggccctgaacgagactcagtgggcac

SEQ ID NO: 34413 - DNA, 120 bp, Artificial Sequence
  ENSG00000050555_38 (sequence is synthesized)
tagaacgcctgaggctgcagctgggctccccggggtccttgcagaggaaactcagtctgctggagcaggaatcccagcagcaggagctgcagatccagggcttcgagagtgacctcgccg

SEQ ID NO: 34414 - DNA, 120 bp, Artificial Sequence
  ENSG00000050555_39 (sequence is synthesized)
agatccgcgccgacaaacagaacctggaggccattctgcacagcctgcccgagaactgtgccagctggcagtgagggctgcccagatccccggcacacactcccccacctgctgtttaca

SEQ ID NO: 34415 - DNA, 120 bp, Artificial Sequence
  ENSG00000050555_40 (sequence is synthesized)
tgacccagggggtgcacactaccccacaggtgtgcccatacagacattccccggagccggctgctgtgaactcgcccccgtgtggatagtcactccctgccgattctgtctgtggcttct

SEQ ID NO: 34416 - DNA, 120 bp, Artificial Sequence
  ENSG00000050555_41 (sequence is synthesized)
tccctgccagcaggactgagtgtgcgtacccagttcacctggacatgagtgcacactctcacccctgcacatgcataaacgggcacaccccagtgtcaataacatacacacgtgagggtg

SEQ ID NO: 34417 - DNA, 120 bp, Artificial Sequence
  ENSG00000050555_42 (sequence is synthesized)
catgtctgtgtgtatgacccacacgtgttcaagtctaatccatccagtcagcagcttacggtccacacacattacagtccacagctgttgtgagagccacctgtgtgctggacaccctct

SEQ ID NO: 34418 - DNA, 120 bp, Artificial Sequence
  ENSG00000050555_43 (sequence is synthesized)
ggatgttgggcaagttgttacatgagatgccctggggtgctacatccactcactccagatagcagggaggtctcagcagatctgcagagatcaagggggtcagcaacagccaaagcccct

SEQ ID NO: 34419 - DNA, 120 bp, Artificial Sequence
  ENSG00000050555_44 (sequence is synthesized)
agtcccagagctggctgccctctgtttcacagcagctccctgacctgtgttgctgcgtgcactccctacagctcgacacagccaggggaccaacaggccaagaaatgcaagatcccggga

SEQ ID NO: 34420 - DNA, 120 bp, Artificial Sequence
  ENSG00000050555_45 (sequence is synthesized)
gggttcttagcagcagaatctgaggcccagagaccctgaggccgtggccaggcctgctagtctggctagagcaaggcccattcctggcgggggtgtcattgccttcaccggacgcttccc

SEQ ID NO: 34421 - DNA, 120 bp, Artificial Sequence
  ENSG00000050555_46 (sequence is synthesized)
tctcagggtcctgggactgcaccagatgccctgagggaatggcccaccctggcctgtacccacttcagcctgtgatctatccaaagagccaggcccaaaagcgcctaggtcagggtgctc

SEQ ID NO: 34422 - DNA, 120 bp, Artificial Sequence
  ENSG00000050555_47 (sequence is synthesized)
aggctaccaggagcacgcctctgtgcccccggcaacccagttgacctttaattgacgctttccagaccagccctgcggcaccacttgccatgcgggaggccaccagggtgtgcaagcctg

SEQ ID NO: 34423 - DNA, 120 bp, Artificial Sequence
  ENSG00000050555_48 (sequence is synthesized)
gctgccattccagtctgtcctgtctgggaatcgccctgtggccaggcccgcatgctggcctctgcccaggactcctcagcatttcctcttggcatccctcccctctcccagaccctcttc

SEQ ID NO: 34424 - DNA, 120 bp, Artificial Sequence
  ENSG00000050555_49 (sequence is synthesized)
cagcagatggcaaggcctcggcattgggaagtcaggcacctctgcgggcccagccccctcccgtggctcccctgacaggggcaggggtagggcagcagcacagaccaattccgttgaacg

SEQ ID NO: 34425 - DNA, 120 bp, Artificial Sequence
  ENSG00000050555_50 (sequence is synthesized)
tggaaataaaggaccctttcactgggcagggtggtgtgcctcaccctccccggctggtgggcagccagggccctggctgtgggtgtgcatatgacacacctagtaggtggccagcatgtg

SEQ ID NO: 34426 - DNA, 120 bp, Artificial Sequence
  ENSG00000050555_51 (sequence is synthesized)
gaccggacgttggtaggaaggtggcaaaagccgagctcgtggctgggccagtacctcccattagagggctttgctggggttgtgtgatcacaggtacctaccctgtcctctcaggcactt

SEQ ID NO: 34427 - DNA, 120 bp, Artificial Sequence
  ENSG00000050555_52 (sequence is synthesized)
accacgtaaagcctaggagctggtgagttggaggggtggggtgcggagaggccctcagctgacctctggttcaggctcgagacgaactcacagccaagtgtccgaggatggtgaggagca

SEQ ID NO: 34428 - DNA, 120 bp, Artificial Sequence
  ENSG00000050555_53 (sequence is synthesized)
gggaggggcgccatccaggagggggatggtgtgggtggggccttgaagggtggggaggcagagaaggaagcattccaggcaagagggtggacaacagtccggggcccgcagggttggggc

SEQ ID NO: 34429 - DNA, 120 bp, Artificial Sequence
  ENSG00000050555_54 (sequence is synthesized)
tcggccagcttgcatcactccaggaccccaggttgaatggggtgggatgttggagctgctcagtcagggctcttggccgcaggcctcaaacccctcctgaggtggtttcagcagaaaagg

SEQ ID NO: 34430 - DNA, 120 bp, Artificial Sequence
  ENSG00000050555_55 (sequence is synthesized)
ggtgttgggagggtcgcttggaaccctggagtaaaaacggctgccacgtgttggagatagcctagggaggggagcctgaggcttccgggataggttggcttccctcttcccccctcccgc

SEQ ID NO: 34431 - DNA, 120 bp, Artificial Sequence
  ENSG00000050555_56 (sequence is synthesized)
ggcttccctcttcccccctcccgcctctcttcttggtctgtgtctctgctctcctctcctgtatctgcttcgttcttttctctttatttattgattttttttgagatggagtctcgctct

SEQ ID NO: 34432 - DNA, 120 bp, Artificial Sequence
  ENSG00000050555_57 (sequence is synthesized)
ctggtctcaaactcctgacctcagatgatatacctgcattggcctcttaaagttctgggatttcaggcatgagccactgcaaccggcccattcttttctctttgcagagtggctttcttt

SEQ ID NO: 34433 - DNA, 120 bp, Artificial Sequence
  ENSG00000050555_58 (sequence is synthesized)
cattcttttctctttgcagagtggctttctttgtttttcttgtgcctgataggagaggacacccacccctaccgccatcccccataatggccccaggtgtacatgtcatcaggtccagtg

SEQ ID NO: 34434 - DNA, 120 bp, Artificial Sequence
  ENSG00000050555_59 (sequence is synthesized)
cttgcaagagacaagctggtgactctgtcctgattccagcttctcagcttaggtgaagtcccaccaacccccgttcaggataatgaggatctctggatctaaggccaataatggatgacc

SEQ ID NO: 34435 - DNA, 120 bp, Artificial Sequence
  ENSG00000050555_60 (sequence is synthesized)
ggtgccaccccccaacctaatgggagatggtgttcagagaagaggtgtgctcctccacagaaaactgtaaaatcaaggctacggtgggggattgacatgattaaactgagctaggagtga

SEQ ID NO: 34436 - DNA, 80 bp, Artificial Sequence
  ENSG00000050628_0 (sequence is synthesized)
gaaggcgtggctccctcccgggccagtgagccctggcgccgccgcggccgcggtcccagcagcggagtagggcggcggct

SEQ ID NO: 34437 - DNA, 120 bp, Artificial Sequence
  ENSG00000050628_1 (sequence is synthesized)
taaacgccgacctccgccgccgcccgcgccgcgtctgccccctcccgctgcggctctctggacgccatcccctcctcacctcgaagccaacatgaaggagacccggggctacggagggga

SEQ ID NO: 34438 - DNA, 120 bp, Artificial Sequence
  ENSG00000050628_2 (sequence is synthesized)
tgcccccttctgcacccgcctcaaccactcctacacaggcatgtgggcgcccgagcgttccgccgaggcgcggggcaacctcacgcgccctccagggtctggcgaggattgcggatcggt

SEQ ID NO: 34439 - DNA, 120 bp, Artificial Sequence
  ENSG00000050628_3 (sequence is synthesized)
gtccgtggccttcccgatcaccatgctgctcactggtttcgtgggcaacgcactggccatgctgctcgtgtcgcgcagctaccggcgccgggagagcaagcgcaagaagtccttcctgct

SEQ ID NO: 34440 - DNA, 120 bp, Artificial Sequence
  ENSG00000050628_4 (sequence is synthesized)
gtgcatcggctggctggcgctcaccgacctggtcgggcagcttctcaccaccccggtcgtcatcgtcgtgtacctgtccaagcagcgttgggagcacatcgacccgtcggggcggctctg

SEQ ID NO: 34441 - DNA, 120 bp, Artificial Sequence
  ENSG00000050628_5 (sequence is synthesized)
cacctttttcgggctgaccatgactgttttcgggctctcctcgttgttcatcgccagcgccatggccgtcgagcgggcgctggccatcagggcgccgcactggtatgcgagccacatgaa

SEQ ID NO: 34442 - DNA, 120 bp, Artificial Sequence
  ENSG00000050628_6 (sequence is synthesized)
gacgcgtgccacccgcgctgtgctgctcggcgtgtggctggccgtgctcgccttcgccctgctgccggtgctgggcgtgggccagtacaccgtccagtggcccgggacgtggtgcttcat

SEQ ID NO: 34443 - DNA, 120 bp, Artificial Sequence
  ENSG00000050628_7 (sequence is synthesized)
cagcaccgggcgagggggcaacgggactagctcttcgcataactggggcaaccttttcttcgcctctgcctttgccttcctggggctcttggcgctgacagtcaccttttcctgcaacct

SEQ ID NO: 34444 - DNA, 120 bp, Artificial Sequence
  ENSG00000050628_8 (sequence is synthesized)
cccgctgccgggccaaggccacggcatctcagtccagtgcccagtggggccgcatcacgaccgagacggccattcagcttatggggatcatgtgcgtgctgtcggtctgctggtctccgc

SEQ ID NO: 34445 - DNA, 120 bp, Artificial Sequence
  ENSG00000050628_9 (sequence is synthesized)
tcctgataatgatgttgaaaatgatcttcaatcagacatcagttgagcactgcaagacacacacggagaagcagaaagaatgcaacttcttcttaatagctgttcgcctggcttcactga

SEQ ID NO: 34446 - DNA, 120 bp, Artificial Sequence
  ENSG00000050628_10 (sequence is synthesized)
accagatcttggatccttgggtttacctgctgttaagaaagatccttcttcgaaagttttgccagatgagaaaaagaagactcagagagcaattaatctgcagtttgcagaactctcaga

SEQ ID NO: 34447 - DNA, 120 bp, Artificial Sequence
  ENSG00000050628_11 (sequence is synthesized)
tacagagggcaactgcacattgtgggcaagtacaaacctatcgtgtgctgaacagagaagaaatggaggtactcgtgagcagcattaatgtgtacaccagaatctcaacagtaaagacag

SEQ ID NO: 34448 - DNA, 120 bp, Artificial Sequence
  ENSG00000050628_12 (sequence is synthesized)
aataacatgaagaaaataactacaggagtgctgtgttttaaaaaagcaagctcctccagctgagtttgtgactctaatccctgcttattttgagcactttccatgtgttgattgactcgg

SEQ ID NO: 34449 - DNA, 120 bp, Artificial Sequence
  ENSG00000050628_13 (sequence is synthesized)
aaaggtgggagattaccagcaagccaggtcatttgggcaaacatgggcatatttttagcaaagctgaacaaactggttggtcactcgaactacccaatttagacttatagtaagaatagc

SEQ ID NO: 34450 - DNA, 120 bp, Artificial Sequence
  ENSG00000050628_14 (sequence is synthesized)
acatggttcagaattgccaagactgctgctttagtcaacagaaattttttcatatgcatgctggtaatgcagtgcatctctggaagaaatgcaagagtattttaacatttggtccagaag

SEQ ID NO: 34451 - DNA, 120 bp, Artificial Sequence
  ENSG00000050628_15 (sequence is synthesized)
aaatatgtaaagggtgtttgtagaatttgatgccctcttcagtgacataaggttatgggtttgtgaatggaaaatctgttatttgttcaggttattaaaacacattctaattcaacatca

SEQ ID NO: 34452 - DNA, 120 bp, Artificial Sequence
  ENSG00000050628_16 (sequence is synthesized)
tgttaagaaagatccttcttcgaaagttttgccagatcaggtaccacacaaacaactatgcatccagctccacctccttaccctgccagtgttcctcaaccttgatgtggagcgaccatt

SEQ ID NO: 34453 - DNA, 120 bp, Artificial Sequence
  ENSG00000050628_17 (sequence is synthesized)
tggaaagataatgaaagaacggagttggacattttattgcaattcctgcttccctgaatttgcatatttcttcccacctgagaaggataattatatattttaatttggattatttcttca

SEQ ID NO: 34454 - DNA, 120 bp, Artificial Sequence
  ENSG00000050628_18 (sequence is synthesized)
tttttatctttttattttaatgattgttttgtcagtaatacccatggagatcaactttattattataatccatgcctctgaatattagattggtttcttggatgggattttgaatatgca

SEQ ID NO: 34455 - DNA, 120 bp, Artificial Sequence
  ENSG00000050628_19 (sequence is synthesized)
tttaagaagttgggaagaatttcacagatgatgattggaggaaaagtgatgaaaagaaagacctgtgttccaggagttttctccaacttcaaacctttacgtgaatcttaaccaaagtgg

SEQ ID NO: 34456 - DNA, 120 bp, Artificial Sequence
  ENSG00000050628_20 (sequence is synthesized)
acatctttacatttcatgatagcttgcttttgcaatatgagtttgaaaaatcagtataagcttatgatggtgaaaagtcaacatattgagagtgataattcaattaataggatatgaact

SEQ ID NO: 34457 - DNA, 120 bp, Artificial Sequence
  ENSG00000050628_21 (sequence is synthesized)
taacgacatataaaagcaaatgagggcaggagggaatcgtgacaaaaaatatttgtgcccaattatgattaatgttttagagatgttgtgtccctgtgggcttagcatggaactaaaagt

SEQ ID NO: 34458 - DNA, 120 bp, Artificial Sequence
  ENSG00000050628_22 (sequence is synthesized)
tcctaagtctcaattctagttatgtgtcatttagtaactcaggaatctgcttaattgttatttctaagcttttgatgacaaaggagtgatgcagctaagggcatccttggagtgtcataa

SEQ ID NO: 34459 - DNA, 120 bp, Artificial Sequence
  ENSG00000050628_23 (sequence is synthesized)
aaaacaaatttgaggttgaatgattagctgcgcagttagagtgataaaaaaatccaggtaggccttctgattcaccatgaccaagtcaggatttcttaatatttcttttctggcagcata

SEQ ID NO: 34460 - DNA, 120 bp, Artificial Sequence
  ENSG00000050628_24 (sequence is synthesized)
gcagcatatacaaaggcaaaattaataaataacagttgttgaataacaaactttattacgtttttataaaataaaagaatctattttgtctgtattaaaataaaaaactttgtggacttc

SEQ ID NO: 34461 - DNA, 120 bp, Artificial Sequence
  ENSG00000050628_25 (sequence is synthesized)
caaagatagggtcttactctgtcccgaaggctagagtgccatggtgtgatcataactcgttgcagcctcagcctcctggcttaaaatatatattcatctcccaggttcaagctattctcc

SEQ ID NO: 34462 - DNA, 120 bp, Artificial Sequence
  ENSG00000050628_26 (sequence is synthesized)
gtctccagctgctctaatgatggacagaaagggcagcctatctcattatctaatgaaataatacagacagaagcatgaaagaaaacacttaacttgcatgtgcacagcttttggtaacaa

SEQ ID NO: 34463 - DNA, 120 bp, Artificial Sequence
  ENSG00000050628_27 (sequence is synthesized)
atatcgctaaaccttactgtgaatttaggcatctctggcatgccactgtttatgcattgaagtggaatttttggtataaagctaaatggtcttagaagcatagaaaatccctatgtgcca

SEQ ID NO: 34464 - DNA, 120 bp, Artificial Sequence
  ENSG00000050628_28 (sequence is synthesized)
aaagtagtgaaacacaaacaaaggaaaatatattaataacagtctagtgtttttgttgagtctgccattcgtagctgaatatgtgattaattatgtgatgaaaacattttttataaatga

SEQ ID NO: 34465 - DNA, 120 bp, Artificial Sequence
  ENSG00000050628_29 (sequence is synthesized)
tcttggtctattggggagcggggatagttaatattccagtacactgaatacatgaggaatttaaccacatacatcattgaagacaagggatagcagtttgtttttattcaaagacattgc

SEQ ID NO: 34466 - DNA, 120 bp, Artificial Sequence
  ENSG00000050628_30 (sequence is synthesized)
tgtgttctctttcattgcctctctcgctttctgtcacttttttcctccttacattaaagaaaagtttaattacagttaaaaatgtataatgtatttataatattcatcgataccattatt

SEQ ID NO: 34467 - DNA, 120 bp, Artificial Sequence
  ENSG00000050628_31 (sequence is synthesized)
caaatattgctcaatacagcaaattagctcctaacctaacaaagtttaagtttacttggattgataattaggtttactctttatctgaataagaaccaattccatttgtttgaaatatgg

SEQ ID NO: 34468 - DNA, 120 bp, Artificial Sequence
  ENSG00000050628_32 (sequence is synthesized)
agtttgtgactacccaaattgctaattattctttcttttgaatatattttacatttctatgagcctaaggaagattcatgaaactgacctatgagagtcgtgaagtggtttttcagaatg

SEQ ID NO: 34469 - DNA, 120 bp, Artificial Sequence
  ENSG00000050628_33 (sequence is synthesized)
ctatgtaaggaccgatttgagcactaactataggtactctgaatatatatttcccttgattattcaccaaaagtgttccccagtctttgactctttaaattccaatactgattccaaaac

SEQ ID NO: 34470 - DNA, 120 bp, Artificial Sequence
  ENSG00000050628_34 (sequence is synthesized)
aaataaatattttgaagactcaatgaatactttccatattttggcctatttatataagaaagttaataacattgacccttcacagctcttctgcctgctcctcaaagtggctctatctaa

SEQ ID NO: 34471 - DNA, 120 bp, Artificial Sequence
  ENSG00000050628_35 (sequence is synthesized)
atatttattactaaaatgtttttcctacagtctacatgaatacaaacctcaatagctaagcttgacgtatttgtgcacaagtagatcactacattaagttttgggaattgcacttcttaa

SEQ ID NO: 34472 - DNA, 120 bp, Artificial Sequence
  ENSG00000050628_36 (sequence is synthesized)
aaatgtctccccaccaaacatagtaatcctgtagttatgcctacacaaagcttgccatattctttggtgcattcattttgtaaacccattaactttttattgtgaagattttcatttgca

SEQ ID NO: 34473 - DNA, 120 bp, Artificial Sequence
  ENSG00000050628_37 (sequence is synthesized)
gtttcttgcactgcttttctagttttttaaaagcttgagatttatttatacttcttgtagtaactgcatatttctgtgtgtgtttagtggtaaagaattaattttgataggtacaatatg

SEQ ID NO: 34474 - DNA, 120 bp, Artificial Sequence
  ENSG00000050628_38 (sequence is synthesized)
tctatcagattgatatatacaccagcctatgtcaattggggctaattattttaaatgaccatgtcaaattgaatttggagacaaaatctgttgagagtgcttatgtaattaatgatggtt

SEQ ID NO: 34475 - DNA, 120 bp, Artificial Sequence
  ENSG00000050628_39 (sequence is synthesized)
ctactaatctaaattttggaaaaggtgataaatagactatactaaaatctctctatgccatagaattggattatcctgtaggtcatctcattgggtataagacaaaactacctacttttt

SEQ ID NO: 34476 - DNA, 120 bp, Artificial Sequence
  ENSG00000050628_40 (sequence is synthesized)
ttcaaaagtgcactgaaatcacataataaagaggctttacctcttggttggtcctgtgaccctaagttctagtcagatagacacagaggcaatgtgaatttgagtggcatgagcatgatt

SEQ ID NO: 34477 - DNA, 120 bp, Artificial Sequence
  ENSG00000050628_41 (sequence is synthesized)
aggttattccttccagcatctagtatagcacctggaatatagaaactgtctaatacatatttattcagtgaatcaatgagcagaagtttgccaggacagtacacattggcaaggcacata

SEQ ID NO: 34478 - DNA, 120 bp, Artificial Sequence
  ENSG00000050628_42 (sequence is synthesized)
ccatatgattgaagtgcttcatgccattacagtccatcaggctgataaagtgaattatttctgattatttaattacagaaatatgaatttatcttcaagggtgtagtgtcatactgctgt

SEQ ID NO: 34479 - DNA, 120 bp, Artificial Sequence
  ENSG00000050628_43 (sequence is synthesized)
acaacacagtgctttatttatactaataatttaggagactgatacttccaaatgatagtggacattactatcacaagaatatcacttttcatcaaactgcaaaaatacagaaaggcaaaa

SEQ ID NO: 34480 - DNA, 120 bp, Artificial Sequence
  ENSG00000050628_44 (sequence is synthesized)
gcaaattaaattcctgcccaggggatatattttaggaggggatgaatggcagcttttgtgttttttttaacaagcttgaaagggaggtggaaaacaaagaaattatgtaaatggcatatg

SEQ ID NO: 34481 - DNA, 120 bp, Artificial Sequence
  ENSG00000050628_45 (sequence is synthesized)
agttttattatctaggcattcgttagtatggggaaacctgataagaaatgaaaatcccaaatgatttcagccttttcatgatggttgaggttagatttcagagatgtacagagactagag

SEQ ID NO: 34482 - DNA, 120 bp, Artificial Sequence
  ENSG00000050628_46 (sequence is synthesized)
cggtggttagaaagaggatatatgtagtcacagcagaaagacgtgtctaagtttaattttattggctttcaagttcactcatgtatacttagtttgtccatacatatgtctaatcaggaa

SEQ ID NO: 34483 - DNA, 120 bp, Artificial Sequence
  ENSG00000050628_47 (sequence is synthesized)
aaatgcatgtatagattatgacaattcctgaattttgaagtattggttaaaagacaattaaaggccaagaaaaccatggtggaagaagtaagcgaatgaaatgtagaaatatatgtaaaa

SEQ ID NO: 34484 - DNA, 120 bp, Artificial Sequence
  ENSG00000050628_48 (sequence is synthesized)
ttagcaagtgtcaattttaccaagtagtgttgattttccaaacaatgaatttatatactatgctgagtcacagagaagaatgatcacatgttacttaatgagagcagtttacttttcaaa

SEQ ID NO: 34485 - DNA, 120 bp, Artificial Sequence
  ENSG00000050628_49 (sequence is synthesized)
taaaataggtatgatgaatgtcttaaaaatatcttgaagttgaagaaacaaaaatgagttatctcaatatttaccaagttaacctagtgctgtatatatcccaagatattttaggtaaat

SEQ ID NO: 34486 - DNA, 120 bp, Artificial Sequence
  ENSG00000050628_50 (sequence is synthesized)
gtaagtgtttaatcatgccagatttaaactagtctgaaatatagggtatacatatatttctacttacatttctttattttatgaaatatccgaccatgttgcagaaaataatgcaaaacc

SEQ ID NO: 34487 - DNA, 120 bp, Artificial Sequence
  ENSG00000050628_51 (sequence is synthesized)
tcatgtaagttaactatgaaagatcctgtgagcacattggcattgagtgacagacaaactaaaaactggcaaacagtattttaataagggggtcactctgtggcagtattctaatattgg

SEQ ID NO: 34488 - DNA, 120 bp, Artificial Sequence
  ENSG00000050628_52 (sequence is synthesized)
attttcaagtagattaggctttttatttattcaacgctttttataattttgttctttttgactccaaattattggtcagctttcaaccttctccacatcagcaatcactaatagttcttt

SEQ ID NO: 34489 - DNA, 120 bp, Artificial Sequence
  ENSG00000050628_53 (sequence is synthesized)
tggttgagatcaactcagaaaaagaaaatagaaaacttttgttctttgaaattttagacatgcataatatctatttattttcataatttaaccccaaaagcttctcctgcaatacacagg

SEQ ID NO: 34490 - DNA, 120 bp, Artificial Sequence
  ENSG00000050628_54 (sequence is synthesized)
attctaggagctgaatgacacagggagactacagagtatttattattacaaacacataaaaagcctaacttgaagaattaaaatttctattttttatctgtataacaagtacaaaccatc

SEQ ID NO: 34491 - DNA, 120 bp, Artificial Sequence
  ENSG00000050628_55 (sequence is synthesized)
aacaatgacaaattttcacagctgcttgtttattgcttgttttatatgtttacatatctcaaaatctgttaaaactgaggtctaaaaaatgtgcagaattgtgcaactgtggcctagtcc

SEQ ID NO: 34492 - DNA, 120 bp, Artificial Sequence
  ENSG00000050628_56 (sequence is synthesized)
ataagacttttctgagttgcaacaaagtgctgacaaagtgacagatgtctgtgatgtttcatgacataggttatgatcgagccaatttacaaaatttaataaccaacctaaactcacata

SEQ ID NO: 34493 - DNA, 120 bp, Artificial Sequence
  ENSG00000050628_57 (sequence is synthesized)
catatttgttaagaagctgacatcagttcagtattgtaaggaaactaactaggtggtgatgatgataaaagaattagggaaaatattttatttgatatattcccttttataattcctaaa

SEQ ID NO: 34494 - DNA, 120 bp, Artificial Sequence
  ENSG00000050628_58 (sequence is synthesized)
atgaagattctatttaagggttataatttatataagtttagtcatataccattacattatgataccataagcagagtgcattatgattctctagaaatataattcaatcagatatgtatt

SEQ ID NO: 34495 - DNA, 120 bp, Artificial Sequence
  ENSG00000050628_59 (sequence is synthesized)
atatttatttatgtcacacattttctttactgagaataaaaattatcttattttcagaagctttgtatcaatcagtttcatgtaataagcaacccagatatctactagattatgtatttc

SEQ ID NO: 34496 - DNA, 120 bp, Artificial Sequence
  ENSG00000050628_60 (sequence is synthesized)
ttcatttgaaactacactgttttctcctagtccccttgactctactgtgcttatccattctttcacagaaagaaagtaacagacataattcctgttgatgaggctgggattgtttttaag

SEQ ID NO: 34497 - DNA, 120 bp, Artificial Sequence
  ENSG00000050628_61 (sequence is synthesized)
aggagagataataacttcatatttttaaagtgccagtagcctaatatgtgaaacagatcagaatctgttgtgtagtaagtctgctttgttgaagaatttattatgggagtaaagataaga

SEQ ID NO: 34498 - DNA, 120 bp, Artificial Sequence
  ENSG00000050628_62 (sequence is synthesized)
aggaaagagatcaccatcagaaacaagtcagccttttcatgcttttttgagcatttttggagatgattccacttctcaagttattatcatttgtgcatctcttcaatgctattgttaaat

SEQ ID NO: 34499 - DNA, 120 bp, Artificial Sequence
  ENSG00000050628_63 (sequence is synthesized)
gctttagaattagaatattttgatcctttaattaaagtaagccaaacgtctaggcaaaaacagccaatcattaaactttaatagtaattcaaatatagatttctcatacagttttccatg

SEQ ID NO: 34500 - DNA, 120 bp, Artificial Sequence
  ENSG00000050628_64 (sequence is synthesized)
tctgtagaaatcaaagttgtaatgttaagcagagggaaatgcgtgtgatttactaatacacttcaacgttctacttttgaaaggatactcatgtgggtggggcagagaacatagaaaaag

SEQ ID NO: 34501 - DNA, 120 bp, Artificial Sequence
  ENSG00000050628_65 (sequence is synthesized)
atatgatggaaaacctgtccattttctacctgttaaccttcatcattttgtgccaggccctggaagcaaagagaggaagggaccgactgcatttatctttgaacacttgagcatcagtag

SEQ ID NO: 34502 - DNA, 120 bp, Artificial Sequence
  ENSG00000050628_66 (sequence is synthesized)
tactactgagtggccaggggtcttgtctgtcaaagcaaatgataagttcactcaggccattattgactgctgaactctcttccttcccaactcttccttgaaagagaaaaaaatactttg

SEQ ID NO: 34503 - DNA, 120 bp, Artificial Sequence
  ENSG00000050628_67 (sequence is synthesized)
ccttcttgctctccttatcaaatgtttttgtacaaatagtgtaagcctgtttaagcaaaccaattaaaataggcactgattattttgatctgtttgtaacaaatgaatgtaagtactatt

SEQ ID NO: 34504 - DNA, 120 bp, Artificial Sequence
  ENSG00000050628_68 (sequence is synthesized)
tacatggtgtgcctaggaggagctgaaatcattggcactttaatccatattgtaaagatcagtatcaaaagcatagtgttcttcacctctcctcctcagcatccatctctatatacttga

SEQ ID NO: 34505 - DNA, 120 bp, Artificial Sequence
  ENSG00000050628_69 (sequence is synthesized)
ttaaatggaaaagtctcttttatcacctctatgtaaagttttatgggtagttatcgtcagtgtatttaaatatatcttctagtatgttttaaaggctggtcttcaatactgtggagacaa

SEQ ID NO: 34506 - DNA, 120 bp, Artificial Sequence
  ENSG00000050628_70 (sequence is synthesized)
aaaataaaagagcgtatgaaaagtacgttagacttttgctggcattcaagtcatggctagtctgtgtatttaataaatgtgtgttatttatgtcgtgtttgtcaatggaaaataaagttg

SEQ ID NO: 34507 - DNA, 120 bp, Artificial Sequence
  ENSG00000050628_71 (sequence is synthesized)
aatattctgaaatgtcgctgtgttttcttcctgatgtcaactcacgtcaggaatactttacctataactatgttaagtattttgctgaaatcccatttgatgtgctttgtcaaataatag

SEQ ID NO: 34508 - DNA, 120 bp, Artificial Sequence
  ENSG00000050628_72 (sequence is synthesized)
cacaatgtaatgcaacagccccatgctatctggaaaaattagatcattttgttttatattccataatcatgtgcataacaaattattgttgatttaatataaatatgagagttgctcttt

SEQ ID NO: 34509 - DNA, 120 bp, Artificial Sequence
  ENSG00000050628_73 (sequence is synthesized)
cctttctgccaggatcacatcactggaagctccatgactctctttttgtaaaagaaaaaaaaatcacagaaacacccacctcccaaactattctcttttacttcttcccccaagcccacc

SEQ ID NO: 34510 - DNA, 120 bp, Artificial Sequence
  ENSG00000050628_74 (sequence is synthesized)
cccaaatataactgttatccagaagctgttatgtcctgtttccatacatgtttttgtacttttactatatctacatacatcaattaaacttatgtcctattgttttgtgaatttatattt

SEQ ID NO: 34511 - DNA, 120 bp, Artificial Sequence
  ENSG00000050628_75 (sequence is synthesized)
gcgtatacattatcatatgtaaaatttgcatttttttattgaaaattatgtttcttgagatttatccacattgaaacatggagctctaaatcgttaattttaaccgctatagagtattcc

SEQ ID NO: 34512 - DNA, 120 bp, Artificial Sequence
  ENSG00000050628_76 (sequence is synthesized)
ataatttgaataaagcataatttgtttgtacaatctcccgccaagggaaaattatttccacactcatcatgacaaggagcactgcaaaaataaaaataaaaattacattcatacatgttt

SEQ ID NO: 34513 - DNA, 120 bp, Artificial Sequence
  ENSG00000050628_77 (sequence is synthesized)
actcagagagcaagagatggggcctgatggaaggtgtttttgtcatgcatggaggcaggtccccaggacttggtgcagttctcatgatagagaaccctgcagtgtccagctaagctgatg

SEQ ID NO: 34514 - DNA, 120 bp, Artificial Sequence
  ENSG00000050628_78 (sequence is synthesized)
cttccgttggttcttggatttgtcctttcccgccatgtcttcatcacatccacaacttccactaacacttgcgagcttcaaacttcttagagaaccctgcagtgtccagctaagctgatg

SEQ ID NO: 34515 - DNA, 120 bp, Artificial Sequence
  ENSG00000050730_0 (sequence is synthesized)
attctgtgtaattcctatccacagtcacttctgttcatttttaatgaaaacctattgctgttattttctattatgagttaacggtgatgtgtgttttttaaattttgtatacttgctctc

SEQ ID NO: 34516 - DNA, 120 bp, Artificial Sequence
  ENSG00000050730_1 (sequence is synthesized)
accctaaaatataccttaagagacttttcccctgtttttctttctgctttccaagactccaggaaaaacagcttccatggcacattttgtacagggcacatctagaatgattgccgcaga

SEQ ID NO: 34517 - DNA, 120 bp, Artificial Sequence
  ENSG00000050730_2 (sequence is synthesized)
aagttctacggagcataaagagtgtgctgaaccatcaacaagaaagaacttgatgaattctcttgaacaaaagataaggtgtttggaaaaacaaagaaaagagctcctggaagttaacca

SEQ ID NO: 34518 - DNA, 120 bp, Artificial Sequence
  ENSG00000050730_3 (sequence is synthesized)
gcaatgggatcagcaatttagaagtatgaaagagttatatgaaagaaaggtagcagagctgaagacgaaactggacgccgcggaaagattcctcagcacgcgggagaaggatccgcatca

SEQ ID NO: 34519 - DNA, 120 bp, Artificial Sequence
  ENSG00000050730_4 (sequence is synthesized)
gaggcagagaaaggacgacaggcagagagaggacgacaggcagcgcgacctgacccgggaccggctgcagcgggaggagaaggaaaaggaacgcctaaatgaagaattacatgaattgaa

SEQ ID NO: 34520 - DNA, 120 bp, Artificial Sequence
  ENSG00000050730_5 (sequence is synthesized)
agaagagaataaacttttaaagggaaaaaatactcttgcgaacaaggaaaaggaacattacgaatgtgaaataaaacgcctcaataaggctcttcaggatgccttgaatatcaagtgttc

SEQ ID NO: 34521 - DNA, 120 bp, Artificial Sequence
  ENSG00000050730_6 (sequence is synthesized)
attttccgaggactgtttgaggaagtctcgagtggaattctgccatgaggagatgagaacagaaatggaagttctgaagcagcaggtgcaaatatacgaagaagacttcaaaaaggaacg

SEQ ID NO: 34522 - DNA, 120 bp, Artificial Sequence
  ENSG00000050730_7 (sequence is synthesized)
atcggatcgagagagacttaatcaagagaaagaggagctacagcaaattaatgaaacttcccaatcccagttgaacaggctgaattcccagataaaagcttgtcagatggagaaagaaaa

SEQ ID NO: 34523 - DNA, 120 bp, Artificial Sequence
  ENSG00000050730_8 (sequence is synthesized)
actagaaaagcaattaaaacagatgtattgcccaccctgtaactgcggcttggttttccacctgcaagatccatgggtaccaacaggccctggagctgtgcagaagcaacgggagcaccc

SEQ ID NO: 34524 - DNA, 120 bp, Artificial Sequence
  ENSG00000050730_9 (sequence is synthesized)
caacaggcaacgagggagcgtggctgaggaccctcttctttgtttatactgaggcttgtttctgccacaaaggcacatcatctaccctgttatttgtgcctggtcatgttttcctttggt

SEQ ID NO: 34525 - DNA, 120 bp, Artificial Sequence
  ENSG00000050730_10 (sequence is synthesized)
atgaatacaggaaaaggcttctgacagctaagatcctgatcaaattggaggagccagttattatacaaccaaatacaacttccagtttccttgaaatgagacttggcagatggatgatgc

SEQ ID NO: 34526 - DNA, 120 bp, Artificial Sequence
  ENSG00000050730_11 (sequence is synthesized)
acgactccctgaaaatctcttcagcatattgctgttggatgcacaaaaatgattctatgatttaggcaactcagtgtttgctgcagggatattgtatgttgatttaaagtgcatatgtgt

SEQ ID NO: 34527 - DNA, 120 bp, Artificial Sequence
  ENSG00000050730_12 (sequence is synthesized)
gtgtgtgtgtgtgtgtgtgtgtttcctggggtaaaaatttctgcagttgtaaacgtttaacattgctcccattcttcttccacagggccttagttctttagctatttgactacatattgt

SEQ ID NO: 34528 - DNA, 120 bp, Artificial Sequence
  ENSG00000050730_13 (sequence is synthesized)
actacatattgttgacctcagtgatcctaaacgtagaattgaagaggtgtatatacctcattaaattaaataagtggttcaatctgaataagatggttaattggaagctattccttagac

SEQ ID NO: 34529 - DNA, 120 bp, Artificial Sequence
  ENSG00000050730_14 (sequence is synthesized)
ttaattggaagctattccttagacagatcatttctttaagatgatgagaaattgtgcgcctgcatcacaagacttgattatgaaagataaagtcttgggctgggtgcagtggctcatgcc

SEQ ID NO: 34530 - DNA, 63 bp, Artificial Sequence
  ENSG00000050730_15 (sequence is synthesized)
tcgtggcacacacctataaacccagctactcaggaggcttgaggcgggaggatcacttgagcc

SEQ ID NO: 34531 - DNA, 120 bp, Artificial Sequence
  ENSG00000050730_16 (sequence is synthesized)
agctactcaggaggcttgaggcgggaggatcacttgagcccagggaggcagaggttgctgtaagttgagatcgccactgcactccagcctgggaaatagagtgagcaagactcagtgccc

SEQ ID NO: 34532 - DNA, 120 bp, Artificial Sequence
  ENSG00000050730_17 (sequence is synthesized)
aaaaaaaaaaaaaaaaaaggaagacaaagtcctgatgggatgatgatggctatatggctatgctgtgtccatatatacttacagaaatatttcagacatatggatttatagttaaatctg

SEQ ID NO: 34533 - DNA, 120 bp, Artificial Sequence
  ENSG00000050730_18 (sequence is synthesized)
cagacatatggatttatagttaaatctgtgtttttccttcccttggatttgattaattttaatgaaaaacttaattctgacttctcaagccaattaaaatgaaaatggaatttattgaaa

SEQ ID NO: 34534 - DNA, 120 bp, Artificial Sequence
  ENSG00000050730_19 (sequence is synthesized)
gagaataaaaacatggcttttgatgaaaaatgcatttaacagattccatgtggatggctcatgaacaaaaatgagaaacacgacgataaactggtaatgttcaccaatcaatctgaagat

SEQ ID NO: 34535 - DNA, 120 bp, Artificial Sequence
  ENSG00000050730_20 (sequence is synthesized)
tctgaaagatgtgaaagcatggagctggacaaaaaaatccaggatctgattgagagaaatgcgtctcctcatccaaaacggttcaccccagaggccatgccaactcacagaaatctatgt

SEQ ID NO: 34536 - DNA, 120 bp, Artificial Sequence
  ENSG00000050730_21 (sequence is synthesized)
aagagtcttaaagacaggtctccgtattagaccttgtaatacgcttacctagatctgagaaggactttcaggatagaacatgattccatgtggatggctcatgaacaaaaatgagaaaca

SEQ ID NO: 34537 - DNA, 120 bp, Artificial Sequence
  ENSG00000050730_22 (sequence is synthesized)
cctggcctcaagtgatcctcctgcctctggctcccaaagtgctgaaatttcaggtttatcctcagtaaagaaagtccatccgtagaagtacacactaacagagagagacaacaggcaacg

SEQ ID NO: 34538 - DNA, 120 bp, Artificial Sequence
  ENSG00000050730_23 (sequence is synthesized)
caaaatctaggctgcagtgtgggtcccagccttggaggcttgcacaagaaattatctgtgattttataaatcactcctagctgcagctttcagtcatacttggctaaggaggctttagag

SEQ ID NO: 34539 - DNA, 120 bp, Artificial Sequence
  ENSG00000050730_24 (sequence is synthesized)
aatttttgtccctacaaagattcatcatgagaaagagaaatgaggaggaattacagagacagtaagaacatttcttagtttgaagaaccacataaagcaagtgggtgtttgcgaacaata

SEQ ID NO: 34540 - DNA, 120 bp, Artificial Sequence
  ENSG00000050730_25 (sequence is synthesized)
ccagatgtacaacacaaggcaaatgaatctgctatactttctactgcttgtttctatggtcttgtgaggccacccagaagcgggctgtataaactgagctataatcaaaatcccacttct

SEQ ID NO: 34541 - DNA, 120 bp, Artificial Sequence
  ENSG00000050730_26 (sequence is synthesized)
tctaaaaatgctgaagatgagctatgtagtctaatttcaggccattcttgaaatttgatctcgtttgaagtcagagctgagatcacagaaatctagtttttaatacaaggagtctgttat

SEQ ID NO: 34542 - DNA, 120 bp, Artificial Sequence
  ENSG00000050730_27 (sequence is synthesized)
ggagtgtaaatagggagtcagggacaccacatgtagttttgcaggttgtgaactttacaagtctgaggggctcatcatggtactctatgtgaatggagcctgctgaagtacaatacgcaa

SEQ ID NO: 34543 - DNA, 120 bp, Artificial Sequence
  ENSG00000050730_28 (sequence is synthesized)
tctggacagctgtacacagcagcaatgggagtgacaaaggccatagattacaacagcatcatagaaaagaaatatgaaatgtgagaattccataataaaatatccaggtatttatcaaaa

SEQ ID NO: 34544 - DNA, 80 bp, Artificial Sequence
  ENSG00000050748_0 (sequence is synthesized)
ggcgcgagggtctgtcagaccgggcgccgcggcggcggcagcggcggagaagggagcgggaccggaagggtcgcagcgcc

SEQ ID NO: 34545 - DNA, 120 bp, Artificial Sequence
  ENSG00000050748_1 (sequence is synthesized)
gcggagccggggccgcggagccaggagtgactagcacgcagcgccgccagtccgcccgcccgccctctccccgtggcgcggcggcggggaggcgagggatctgaaacttgcccacccttc

SEQ ID NO: 34546 - DNA, 120 bp, Artificial Sequence
  ENSG00000050748_2 (sequence is synthesized)
cggggaggcgagggatctgaaacttgcccacccttcgggatattgcaggacgctgcatcatgagcgacagtaaatgtgacagtcagttttatagtgtgcaagtggcagactcaaccttca

SEQ ID NO: 34547 - DNA, 120 bp, Artificial Sequence
  ENSG00000050748_3 (sequence is synthesized)
ctgtcctaaaacgttaccagcagctgaaaccaattggctctggggcccaagggattgtttgtgctgcatttgatacagttcttgggataaatgttgcagtcaagaaactaagccgtcctt

SEQ ID NO: 34548 - DNA, 120 bp, Artificial Sequence
  ENSG00000050748_4 (sequence is synthesized)
ttcagaaccaaactcatgcaaagagagcttatcgtgaacttgtcctcttaaaatgtgtcaatcataaaaatataattagtttgttaaatgtgtttacaccacaaaaaactctagaagaat

SEQ ID NO: 34549 - DNA, 120 bp, Artificial Sequence
  ENSG00000050748_5 (sequence is synthesized)
ttcaagatgtgtatttggttatggaattaatggatgctaacttatgtcaggttattcacatggagctggatcatgaaagaatgtcctaccttctttaccagatgctttgtggtattaaac

SEQ ID NO: 34550 - DNA, 120 bp, Artificial Sequence
  ENSG00000050748_6 (sequence is synthesized)
atctgcattcagctggtataattcatagagatttgaagcctagcaacattgttgtgaaatcagactgcaccctgaagatccttgactttggcctggcccggacagcgtgcactaacttca

SEQ ID NO: 34551 - DNA, 120 bp, Artificial Sequence
  ENSG00000050748_7 (sequence is synthesized)
tgatgaccccttacgtggtgacacggtactaccgggcgcccgaagtcatcctgggtatgggctacaaagagaacgttgatatctggtcagtgggttgcatcatgggagagctggtgaaag

SEQ ID NO: 34552 - DNA, 120 bp, Artificial Sequence
  ENSG00000050748_8 (sequence is synthesized)
gttgtgtgatattccaaggcactgaccatattgatcagtggaataaagttattgagcagctgggaacaccatcagcagagttcatgaagaaacttcagccaactgtgaggaattatgtcg

SEQ ID NO: 34553 - DNA, 120 bp, Artificial Sequence
  ENSG00000050748_9 (sequence is synthesized)
aaaacagaccaaagtatcctggaatcaaatttgaagaactctttccagattggatattcccatcagaatctgagcgagacaaaataaaaacaagtcaagccagagatctgttatcaaaaa

SEQ ID NO: 34554 - DNA, 120 bp, Artificial Sequence
  ENSG00000050748_10 (sequence is synthesized)
tgttagtgattgatcctgacaagcggatctctgtagacgaagctctgcgtcacccatacatcactgtttggtatgaccccgccgaagcagaagccccaccacctcaaatttatgatgccc

SEQ ID NO: 34555 - DNA, 120 bp, Artificial Sequence
  ENSG00000050748_11 (sequence is synthesized)
agttggaagaaagagaacatgcaattgaagaatggaaagagctaatttacaaagaagtcatggattgggaagaaagaagcaagaatggtgttgtaaaagatcagccttcagatgcagcag

SEQ ID NO: 34556 - DNA, 120 bp, Artificial Sequence
  ENSG00000050748_12 (sequence is synthesized)
taagtagcaacgccactccttctcagtcttcatcgatcaatgacatttcatccatgtccactgagcagacgctggcctcagacacagacagcagtcttgatgcctcgacgggaccccttg

SEQ ID NO: 34557 - DNA, 120 bp, Artificial Sequence
  ENSG00000050748_13 (sequence is synthesized)
aaggctgtcgatgataggttagaaatagcaaacctgtcagcattgaaggaactctcacctccgtgggcctgaaatgcttgggagttgatggaaccaaatagaaaaactccatgttctgca

SEQ ID NO: 34558 - DNA, 120 bp, Artificial Sequence
  ENSG00000050748_14 (sequence is synthesized)
tgtaagaaacacaatgccttgccctactcagacctgataggattgcctgcttagatgataaaatgaggcagaatatgtctgaagaaaaaaattgcaagccacacttctagagattttgtt

SEQ ID NO: 34559 - DNA, 120 bp, Artificial Sequence
  ENSG00000050748_15 (sequence is synthesized)
caagatcatttcaggtgagcagttagagtaggtgaatttgtttcaaattgtactagtgacagtttctcatcatctgtaactgttgagatgtatgtgcatgtgaccacaaatgcttgcttg

SEQ ID NO: 34560 - DNA, 120 bp, Artificial Sequence
  ENSG00000050748_16 (sequence is synthesized)
gacttgcccatctagcactttggaaatcagtatttaaatgccaaataatcttccaggtagtgctgcttctgaagttatctcttaatcctcttaagtaatttggtgtctgtccagaaaaag

SEQ ID NO: 34561 - DNA, 120 bp, Artificial Sequence
  ENSG00000050748_17 (sequence is synthesized)
tcgatttatgtgtattaattggccatcatgatgttatcatatcttattcccttttatgctatgatttattctatcttttgtatttcagaagacatataattaaatctatttaataaataa

SEQ ID NO: 34562 - DNA, 120 bp, Artificial Sequence
  ENSG00000050748_18 (sequence is synthesized)
aaatatatagcttttcttagatttgtgatgtttggggctgagaattatcacggctaaaaccaagacacttatgtggacatcttgttttctttaaactgtcttgtctgggatgattgtaca

SEQ ID NO: 34563 - DNA, 120 bp, Artificial Sequence
  ENSG00000050748_19 (sequence is synthesized)
ttcagctttactgcacgatacaattttaagttttgcttagtgctgcttgaaatcctagctaccttatctcttttcttcttggtcttctagacttcttatgaatttaaaatgctacctaga

SEQ ID NO: 34564 - DNA, 120 bp, Artificial Sequence
  ENSG00000050748_20 (sequence is synthesized)
ttaggtgcgtaacactccatcttaattaaatatgatggcagataggttcctgcatccatggcctaacgttggagtggaattttacaaaatgctcactagagatcactgcagtcatttcct

SEQ ID NO: 34565 - DNA, 120 bp, Artificial Sequence
  ENSG00000050748_21 (sequence is synthesized)
aagtgcttcctttgccacagactggcctgggtcctttatttaccttccctcattcactttccctcggccaataccacgttcttgattttctttcttcactggaagaaagcagataaactc

SEQ ID NO: 34566 - DNA, 120 bp, Artificial Sequence
  ENSG00000050748_22 (sequence is synthesized)
ctctttggtctgttttcagaggccaggctgattcagatgcctgttgctattgttgctctccattgttgggaggcattccttttcacaagaatgttctgggaaactcttcagaggacgtga

SEQ ID NO: 34567 - DNA, 120 bp, Artificial Sequence
  ENSG00000050748_23 (sequence is synthesized)
aggaaataccctgaagagtcatgattaactattgactattttctgatttaaaactgctcacctgaaattgatacttttagactttacgatcagtaaattattcagaattcatgaagatgc

SEQ ID NO: 34568 - DNA, 120 bp, Artificial Sequence
  ENSG00000050748_24 (sequence is synthesized)
tgagtatgttaagtgtcactgcaggaacggagctgtggtgatcacgttttgcctgcctgtgcccatgtctcttcccttgagcttattctgttgctgattcatatcttgtgttcaattatt

SEQ ID NO: 34569 - DNA, 120 bp, Artificial Sequence
  ENSG00000050748_25 (sequence is synthesized)
ttggaagcttttcagtcgacattctgtagagtgtgttctgaggaggaactgtgataagaaagtttattataaatattatgtaaaatatatggctctctctgcaccagttatatcttattg

SEQ ID NO: 34570 - DNA, 120 bp, Artificial Sequence
  ENSG00000050748_26 (sequence is synthesized)
gttggtcatatcactggaaactggaacctttgattagcaaaattaatattgaaataagaaatagttcttttatattgtgtcatttggacactttcaagtacaaaatggtaataataactt

SEQ ID NO: 34571 - DNA, 120 bp, Artificial Sequence
  ENSG00000050748_27 (sequence is synthesized)
ggattgaggcggaaacacctattttatggctatctatctaaacatcttaaaatggccttctctgtaatacactttcttttaaaagacttcactaaatctatctttaaaaggaaaaacaaa

SEQ ID NO: 34572 - DNA, 120 bp, Artificial Sequence
  ENSG00000050748_28 (sequence is synthesized)
agggagaggttgaaaatgcgcgagctgccctgcactgtgtgatgctccctccccgggagacgtggacgggggacgaggcacccgcagacgcccttctgctcactcgctcctctgtgcatt

SEQ ID NO: 34573 - DNA, 120 bp, Artificial Sequence
  ENSG00000050748_29 (sequence is synthesized)
cagcgagccacttgccacagatggagcccgtgacggtgtggagggtttcctggaaaggccatcttccaccaggtagaggcgagcgtgcctaggacaggccacagggctccacagaaatac

SEQ ID NO: 34574 - DNA, 120 bp, Artificial Sequence
  ENSG00000050748_30 (sequence is synthesized)
ctcaccccagcttcagggttctctctcctgagcctagatttgccagggtcttggtgccacgcaaatggtttcaaactgatctctatggataaatgctgatgttggttaaagaactgaaaa

SEQ ID NO: 34575 - DNA, 120 bp, Artificial Sequence
  ENSG00000050748_31 (sequence is synthesized)
atgtgctcaactgtttcatcttttctattttatttttgtaatttatattgtacacaacccaggaagtaactattttggacatgtatttttataaaccaggtaatttactattatcctgga

SEQ ID NO: 34576 - DNA, 120 bp, Artificial Sequence
  ENSG00000050748_32 (sequence is synthesized)
atttagactaggtttgtttcatttgttgacttagtttccagccaagaaggaaacgactgtctcccccatgtccaggtctcagtttcaagggcagagtccagagagcagacagagttctgt

SEQ ID NO: 34577 - DNA, 120 bp, Artificial Sequence
  ENSG00000050748_33 (sequence is synthesized)
gagagcaggagagcagtctggaaaccctggctgtgcataccgtgtcagccgtgggcctggagatgggagcaggtgagacgcagagccccagtactgagaggaggaagccctcttacaggg

SEQ ID NO: 34578 - DNA, 120 bp, Artificial Sequence
  ENSG00000050748_34 (sequence is synthesized)
ccccttgcccaccccaagtccgtgtctgaaacacggagcgggtgctgcttcaacccgcatttaatgctgtgtaagtagcgataaccacgtacgagtctgtctggttgatttctaatgtga

SEQ ID NO: 34579 - DNA, 120 bp, Artificial Sequence
  ENSG00000050748_35 (sequence is synthesized)
ctcctctggtatttcctcctggtaataaatacaagtgtgacctttcagattgcatatctcaaaagtaacattgctaatgttttataataaaatatattatgtgtgttttggttggtgaaa

SEQ ID NO: 34580 - DNA, 120 bp, Artificial Sequence
  ENSG00000050748_36 (sequence is synthesized)
ataatacagactacattttaaaagataaatgtatagcatgtccaatttttgtgtgtttttacatggcaattagatatttctccatcaccatctctgatgacagatttaacatgaacacag

SEQ ID NO: 34581 - DNA, 120 bp, Artificial Sequence
  ENSG00000050748_37 (sequence is synthesized)
atagatgataaagtgtcatgcttttgatcaatattagcaagaggtttcacactgagaggcagaaacattgctgtttgttctcttattgaaaatattctgcaaattcctaaatctgtgttt

SEQ ID NO: 34582 - DNA, 120 bp, Artificial Sequence
  ENSG00000050748_38 (sequence is synthesized)
tcaaaactaatggcagtaagttttgacttcaccaatatgcaggtccaattcagagtattggtgtaattgttttctcatgaggcgtggccaggagaattcaccagtcagccttagtcatgt

SEQ ID NO: 34583 - DNA, 120 bp, Artificial Sequence
  ENSG00000050748_39 (sequence is synthesized)
tacttaacgtcattcatggtgcttgtggctttgtgcctgggatgagccaagttcatctgacgtctgtgtttgaagcacttcaggctgtttagtacttaataccacaggagtggaaggaca

SEQ ID NO: 34584 - DNA, 120 bp, Artificial Sequence
  ENSG00000050748_40 (sequence is synthesized)
cgccatcattgcagtgccttgccattcattggcaggatgaggccagtcagtgtcattgtcactccatggattaaccaggaagggatgctgtgtgaggggttgggctggccatctcttcct

SEQ ID NO: 34585 - DNA, 120 bp, Artificial Sequence
  ENSG00000050748_41 (sequence is synthesized)
tggtgtctcacttcaactgtgtgtccagcccagaacgtcagaatcgttagtctgaccctgaacgttagtctcttgcatggtaagacggtcagccgccgcagcatcacgggccagctcaag

SEQ ID NO: 34586 - DNA, 120 bp, Artificial Sequence
  ENSG00000050748_42 (sequence is synthesized)
ccgaagtcatcctgggtatgggctacaaagagaacgctataaagtattggactctttggcactaaaaccccagattgctacaaaccgaaggctaaaatagagttgatatctggtcagtgg

SEQ ID NO: 34587 - DNA, 120 bp, Artificial Sequence
  ENSG00000050748_43 (sequence is synthesized)
atgaccacctgcttacacgagcgctcacgaggacaaagtcgtaaaatccactccagactgtgttctaaggggggctttactgtatttgttaattagtgtcacaagccaagtggttcaatt

SEQ ID NO: 34588 - DNA, 120 bp, Artificial Sequence
  ENSG00000050748_44 (sequence is synthesized)
tcattctttatttttaacttgactacctgtgatgactttgagacttagagttcagttaaaccgattatattagctcttaattttgccaaaaatagctggacacatagaagaaattattta

SEQ ID NO: 34589 - DNA, 120 bp, Artificial Sequence
  ENSG00000050748_45 (sequence is synthesized)
ctctttgataagtatattctgatatttaaatgaaaatactgtattatttagtttattccgttaatttaactaggaaagatgctatctaaatttaataggctagtgtgcttgtgtgcttta

SEQ ID NO: 34590 - DNA, 120 bp, Artificial Sequence
  ENSG00000050748_46 (sequence is synthesized)
attaagtactattttgttagttactggtatgcattgaaatattttcccccaaagtaagaactgaagcacattacaaaggacctaagtgaaagagattaaaatgaaaattttgtgaggaac

SEQ ID NO: 34591 - DNA, 120 bp, Artificial Sequence
  ENSG00000050748_47 (sequence is synthesized)
aatatgttaaactttcttgtttgttactgtgctgacattttgtagaattttttttaaaaatctgtctagtgggttattttgtgacacactggggaagtcaaaataaatgtaaaatgaaag

SEQ ID NO: 34592 - DNA, 120 bp, Artificial Sequence
  ENSG00000050748_48 (sequence is synthesized)
agataaactcatactgtagtcagcaagtcatgttagagatacagcagaaaggagaataactactctaattgttacaatagccttctttcctcatttgccattcttccatcctcagtattt

SEQ ID NO: 34593 - DNA, 120 bp, Artificial Sequence
  ENSG00000050748_49 (sequence is synthesized)
tttaccctaacatggttcttcacatcttccctttttcatttgtgttttaaccacttagtttttcattagtctttgactttgttttcgttatgaaagtttaaattggtctccatccttggg

SEQ ID NO: 34594 - DNA, 120 bp, Artificial Sequence
  ENSG00000050748_50 (sequence is synthesized)
aagatgcctgttagacatcaaggtggaactgggaatagggaggcagaggaatgagcctggagttcaggagatatgtctgaattgaacgtaggaatttgggagctgatggcctgtaactga

SEQ ID NO: 34595 - DNA, 120 bp, Artificial Sequence
  ENSG00000050748_51 (sequence is synthesized)
agtcagtgttttgtatgtatcttaggaaaataatttcagattttaataattttatcaaagtggtctccttataaattcttcacagtgcaaacttaaagtgaaaatatttttatttctctc

SEQ ID NO: 34596 - DNA, 120 bp, Artificial Sequence
  ENSG00000050748_52 (sequence is synthesized)
attttatttacctttctttacattttctatatcatagattatataatatgtcaagttattttatttgttctactaaattttctagcagtttccatagcctcatctcagattcacttgttg

SEQ ID NO: 34597 - DNA, 120 bp, Artificial Sequence
  ENSG00000050748_53 (sequence is synthesized)
caacctataaataaggacgtctttattttgcaagtaaacttaattaaaaagggaaaagttgaaaaattaaaagactaataatttagaaatatctacttaatgttcagtttgtctcaattc

SEQ ID NO: 34598 - DNA, 120 bp, Artificial Sequence
  ENSG00000050748_54 (sequence is synthesized)
ttactcattttgtgccattccttgttttattacaaaatgttttcttcaaaaagtacaaaaatgaaaaatgtgagtactttttggtgcattttagtaagtaaaattaaaattcctgctata

SEQ ID NO: 34599 - DNA, 120 bp, Artificial Sequence
  ENSG00000050748_55 (sequence is synthesized)
tctctgcgtgaagggccagcaggagtgaggaaggagtggagcctcacttctgggatggagatggggatctgggacatctactacgtacttggactttcaataaaatgaaaacttctccaa

SEQ ID NO: 34600 - DNA, 120 bp, Artificial Sequence
  ENSG00000050748_56 (sequence is synthesized)
ccttatttgaatattatttcaaaattccgctgctgatccagtggggtggcctagtcgataggtttaaatattattcaagtgatgctgccgcatgtactgtgaatacaaggtacttcagtt

SEQ ID NO: 34601 - DNA, 120 bp, Artificial Sequence
  ENSG00000050748_57 (sequence is synthesized)
ctttaattgattgtatgatatttttctttccctattcaactttttttttttgagacagagtttcgttctgtcgcccaggctggagagcagcggcgcgatctctgctcactgcaacctccg

SEQ ID NO: 34602 - DNA, 85 bp, Artificial Sequence
  ENSG00000050748_58 (sequence is synthesized)
gttacaggcgtgagccaccgcacctggcgtctttcccgattcaacttttataaatggcagcaacatgtgaaatgccagcctggct

SEQ ID NO: 34603 - DNA, 120 bp, Artificial Sequence
  ENSG00000050748_59 (sequence is synthesized)
attttactgatgtgccaggcactgaactttgttataagcatttctctttcatctttgcaataactgctgtcacctccatttacagatgaagaaattgaatttaaagccttttcaatgttg

SEQ ID NO: 34604 - DNA, 120 bp, Artificial Sequence
  ENSG00000050748_60 (sequence is synthesized)
ataaccctttgtactggtcccacccaaaatgccaatctaagtaaaatggagtatggtattctttttgagaaaattgttgatatcattttcccatttttctgcttgatctactgatcttca

SEQ ID NO: 34605 - DNA, 120 bp, Artificial Sequence
  ENSG00000050748_61 (sequence is synthesized)
tagtggtggaagcctctaatgaccaggtagttgtatgatcatgagactctgatatgagtcgtgttcacttacgtctgaaggattcttcctgtttactaaatgaaacgctcacgttatatc

SEQ ID NO: 34606 - DNA, 120 bp, Artificial Sequence
  ENSG00000050748_62 (sequence is synthesized)
attgtctctctcccactcccactgggaagcatgcacacacatgtgtgcggatgtgcagagagcacagcttactttttattcttgaattttatgttcaacatgacgtatgtgtcaagcatc

SEQ ID NO: 34607 - DNA, 120 bp, Artificial Sequence
  ENSG00000050748_63 (sequence is synthesized)
tagagattatataacttcagcaagaacttaggtgcttgttaactgagcacacacgtatgactgcagacgtcgatctcagagagtgcatgttgtgtttttattcaaaccagactaaaatat

SEQ ID NO: 34608 - DNA, 120 bp, Artificial Sequence
  ENSG00000050748_64 (sequence is synthesized)
ggatagtaggaagtaggatagtttcatttgctttaaaagattaaaatgtcagttttctggagttataaaaccataaaatatacaaggccactaatttttttcctttttctggtatatagt

SEQ ID NO: 34609 - DNA, 120 bp, Artificial Sequence
  ENSG00000050748_65 (sequence is synthesized)
ctttatttattgcaaaagatttctttgaaagttgatgctttttttcctgtagatttagtgtttatgttataaattgttacaattcaagtgtctggtgacactggaatcctagtcaggctt

SEQ ID NO: 34610 - DNA, 120 bp, Artificial Sequence
  ENSG00000050748_66 (sequence is synthesized)
aagcttttgtgatactgcattttcagataaatatagctgtgtccttttgatgtctgcttgaaagcagcaggtattttttaagtagctaacatgattatacatggccacatatatgtttag

SEQ ID NO: 34611 - DNA, 120 bp, Artificial Sequence
  ENSG00000050748_67 (sequence is synthesized)
ctactgagaaaaaaagaagaatcttgcaaggaaagacataggaatatgggactcttggcccaaagaaagactcaaggaaaagttcagaaagtccagctgactgacttcttgtctatactc

SEQ ID NO: 34612 - DNA, 120 bp, Artificial Sequence
  ENSG00000050748_68 (sequence is synthesized)
atagttaggattgggaaactgcaaaaggacagagccgagaaatggcctgcagtctcgctgcctggatttgcagcaatgtcgtgcctcagattttattatatttggttttcttagcacaga

SEQ ID NO: 34613 - DNA, 120 bp, Artificial Sequence
  ENSG00000050767_0 (sequence is synthesized)
aaactgcccaaagtggccgctgtggaggagctggctgcggcgaagggggcgtgcgcggcgatccgctgctacccggaggctaacccccgcgcccggcggacctcgtgcctcgggctgtcc

SEQ ID NO: 34614 - DNA, 120 bp, Artificial Sequence
  ENSG00000050767_1 (sequence is synthesized)
cgcctgctcctctcgcacccagcctctgccccagcagcaccgccccctcggagagtccacgcgcgacgaacgcgccatgggcccaggcgagcgcgccggtggcggcggcgacgcggggaa

SEQ ID NO: 34615 - DNA, 80 bp, Artificial Sequence
  ENSG00000050767_2 (sequence is synthesized)
acgacggccgggtcccgggcggtgagcgcgctgtgcctgctgctctccgtgggctcggcggctgcctgcctgctgctggg

SEQ ID NO: 34616 - DNA, 120 bp, Artificial Sequence
  ENSG00000050767_3 (sequence is synthesized)
gtggcggcgctcgaggaggagcgggagctgctgcggcgcgcggggccgccaggcgccctggacgcctgggccgagccgcacctggagcgcctgctgcgggagaagttggacggactagcg

SEQ ID NO: 34617 - DNA, 120 bp, Artificial Sequence
  ENSG00000050767_4 (sequence is synthesized)
gctgcgggagaagttggacggactagcgaagatccggactgctcgggaagctccatccgaatgtgtctgccccccagggccccctggacggcgcggcaagcctgggagaagaggcgaccc

SEQ ID NO: 34618 - DNA, 120 bp, Artificial Sequence
  ENSG00000050767_5 (sequence is synthesized)
tggtcctccagggcaatcaggacgagatggctacccgggacccctgggtttggatggcaagcccggacttccaggcccgaaaggggaaaagggtgcaccaggagactttggcccccgggg

SEQ ID NO: 34619 - DNA, 120 bp, Artificial Sequence
  ENSG00000050767_6 (sequence is synthesized)
agaccaaggacaagatggagctgctgggcctccggggccccctggacctcctggggcccggggccctcctggcgacactgggaaagatggccccaggggagcacaaggcccagcgggccc

SEQ ID NO: 34620 - DNA, 120 bp, Artificial Sequence
  ENSG00000050767_7 (sequence is synthesized)
caaaggagagcccggacaagacggcgagatgggcccaaagggacccccagggcccaagggtgagcctggagtacctggaaagaagggcgacgatgggacaccaagccagcctggaccacc

SEQ ID NO: 34621 - DNA, 120 bp, Artificial Sequence
  ENSG00000050767_8 (sequence is synthesized)
agggcccaagggcgagccagggagcatggggcctcggggagagaacggtgtggacggtgccccaggaccgaagggggagcctggccaccgaggcacggatggagctgcagggccccgggg

SEQ ID NO: 34622 - DNA, 120 bp, Artificial Sequence
  ENSG00000050767_9 (sequence is synthesized)
tgccccaggcctcaagggcgagcagggagacacagtggtgatcgactatgatggcaggatcttggatgccctcaaggggcctcccggaccacaggggcccccagggccaccagggatccc

SEQ ID NO: 34623 - DNA, 120 bp, Artificial Sequence
  ENSG00000050767_10 (sequence is synthesized)
tggagccaagggcgagcttggattgcccggtgccccaggaatcgatggagagaagggccccaaaggacagaaaggagacccaggagagcctgggccagcaggactcaaaggggaagcagg

SEQ ID NO: 34624 - DNA, 120 bp, Artificial Sequence
  ENSG00000050767_11 (sequence is synthesized)
cgagatgggcttgtccggcctcccgggcgctgacggcctcaagggggagaagggggagtcggcgtctgacagcctacaggagagcctggctcagctcatagtggagccagggccccctgg

SEQ ID NO: 34625 - DNA, 120 bp, Artificial Sequence
  ENSG00000050767_12 (sequence is synthesized)
ccgatgggcctccagggaatccagggtcccaagggcttggatggagcaaagggagagaagggtgcgtcgggtgagagaggccccagcggcctgcctgggccagttggcccaccgggcctt

SEQ ID NO: 34626 - DNA, 120 bp, Artificial Sequence
  ENSG00000050767_13 (sequence is synthesized)
attgggctgccaggaaccaaaggagagaagggcagacccggggagccaggactagatggtttccctggaccccgaggagagaaaggtgatcggagcgagcgtggagagaagggagaacga

SEQ ID NO: 34627 - DNA, 120 bp, Artificial Sequence
  ENSG00000050767_14 (sequence is synthesized)
ggggtccccggccggaaaggagtgaagggccagaagggcgagccgggaccaccaggcctggaccagccgtgtcccgtgggccccgacgggctgcctgtgcctggctgctggcataagtga

SEQ ID NO: 34628 - DNA, 120 bp, Artificial Sequence
  ENSG00000050767_15 (sequence is synthesized)
cccacaggcccagctcacacctgtacagatccgtgtggacatttttaatttttgtaaaaacaaaacagtaatatattgatcttttttcatggaatgcgctacctgtggccttttaacatt

SEQ ID NO: 34629 - DNA, 120 bp, Artificial Sequence
  ENSG00000050767_16 (sequence is synthesized)
caagagtatgcccacccagccccaaagccaccggcatgtgaagctgccggaaagtggacaggccagaccagggagatgtgtacctgaggggcacccttgggcctgggctttcccaggaag

SEQ ID NO: 34630 - DNA, 120 bp, Artificial Sequence
  ENSG00000050767_17 (sequence is synthesized)
gagatgaaggtagaagcacctggctcgggcaaggctagaaagatgctacgttgggccttcagtcacctgatcagcagagagactctcagctgtggtactgccctgtaagaacctgccccc

SEQ ID NO: 34631 - DNA, 120 bp, Artificial Sequence
  ENSG00000050767_18 (sequence is synthesized)
gcaaaactctggagtccctgggacacaccctatccaagaagacccaggggtggaacagcggctgctgttgctcctggcctcatcagcctccaaactcaaccacaaccagctgcctctgca

SEQ ID NO: 34632 - DNA, 120 bp, Artificial Sequence
  ENSG00000050767_19 (sequence is synthesized)
gttggacaagacttggcccccggacaagactcgcccagcacttgcggctgggcccggggagcagtgagtggaaatcccccacgagggtctagctctaccacattcaggaggcctcaggag

SEQ ID NO: 34633 - DNA, 120 bp, Artificial Sequence
  ENSG00000050767_20 (sequence is synthesized)
gccagcctgccatgagagcacatgtcctctggccaggagtagtggctgagctctgtgatcgctgtgatgtggacccagctccagggagcagagtgtcgaggatggaggggcccagcctgg

SEQ ID NO: 34634 - DNA, 120 bp, Artificial Sequence
  ENSG00000050767_21 (sequence is synthesized)
actgactgctacttcctgtctctgtttccattatcacccagagagggacaagataggacatggcctggaccagggaggcaggcctcccactcagagtctgggtctcactggccccaagtc

SEQ ID NO: 34635 - DNA, 120 bp, Artificial Sequence
  ENSG00000050767_22 (sequence is synthesized)
tcccacccagaactctggccaaaaatggctctctaggtgggctgtgcaggcaaagcaaagctcagggctggttcccagctggcctgagcagggggcctgccaccagacccacccacgctc

SEQ ID NO: 34636 - DNA, 120 bp, Artificial Sequence
  ENSG00000050767_23 (sequence is synthesized)
tgacgagaggcttttccacctccagcaagtgttcccagcaaccagctccatcctggctgcttgccttccatttccgtgtagatggagatcactgtgtgtaataaaccacaagtgcgtgtc

SEQ ID NO: 34637 - DNA, 120 bp, Artificial Sequence
  ENSG00000050767_24 (sequence is synthesized)
ctttctctgggcttggttaagtggctttgcctccaggtttcaaaaagccttgtagttcttcagatcaccttcctgcctttctgaccacacaacctatctgctgactagatggttttccca

SEQ ID NO: 34638 - DNA, 120 bp, Artificial Sequence
  ENSG00000050767_25 (sequence is synthesized)
aagggagaccaaggacaagatggagctgctgggcctccggggccccctggacctcctggggcccggggccctcctggcgacactgggaaagatggccccaggggagcacaaggcccagcg

SEQ ID NO: 34639 - DNA, 120 bp, Artificial Sequence
  ENSG00000050767_26 (sequence is synthesized)
tttgttcttttgctcttcacaataaatctccttgctgctcactctttgtgtcagtgtcatctttaagagctgtaacactcaccaggaaggatctgcttcgctctctgcgcctcttgttgc

SEQ ID NO: 34640 - DNA, 120 bp, Artificial Sequence
  ENSG00000050767_27 (sequence is synthesized)
accaggaaggatctgcttcgctctctgcgcctcttgttgcccgtctgtaaaatgaggctgaaatggcaggtggagtggaactgtgaagcgcctttccggtggctggaggtgccctggtga

SEQ ID NO: 34641 - DNA, 120 bp, Artificial Sequence
  ENSG00000050767_28 (sequence is synthesized)
gaagctccatccgaatgtgtctgccccccagagtgtgcaggtttacatatgctgttcggttggtgatggaaacacttacggccactgataaagcaataaatgaaaggaaatgacaggaaa

SEQ ID NO: 34642 - DNA, 120 bp, Artificial Sequence
  ENSG00000050767_29 (sequence is synthesized)
gcaccatcctcgagcttccatggacacagagatgaagatttccatctgtggctagacaggcgcagagctttggaggtgctcctggcccgtcggttcccagtgacgtgtcttcaactccag

SEQ ID NO: 34643 - DNA, 80 bp, Artificial Sequence
  ENSG00000050820_0 (sequence is synthesized)
ccccgagggcacgcggcccgggcagctcggtgtgcgcccccgcgagagccggggccccaggcccgccggacaccatgaac

SEQ ID NO: 34644 - DNA, 120 bp, Artificial Sequence
  ENSG00000050820_1 (sequence is synthesized)
ggccccaggcccgccggacaccatgaaccacctgaacgtgctggccaaagcgctctatgacaatgtggccgagtccccggatgagctctccttccgcaagggtgacatcatgacggtgct

SEQ ID NO: 34645 - DNA, 120 bp, Artificial Sequence
  ENSG00000050820_2 (sequence is synthesized)
ggagcaggacacgcagggcctggacggctggtggctctgctcgctgcatgggcgccagggcatcgtgcctgggaaccgcctcaagatcttggtgggcatgtatgataagaagccagcagg

SEQ ID NO: 34646 - DNA, 120 bp, Artificial Sequence
  ENSG00000050820_3 (sequence is synthesized)
gcctggccccggccctcccgccaccccggcccagcctcagcctggcctccatgccccagcgcctccggcctcccagtacacgcccatgctccccaacacctaccagccccagccagacag

SEQ ID NO: 34647 - DNA, 120 bp, Artificial Sequence
  ENSG00000050820_4 (sequence is synthesized)
cgtctacctggtgcccactcccagcaaggctcagcaaggcctctaccaagtcccgggtcccagccctcagttccagtctcccccagccaagcagacatccaccttctcgaagcagacacc

SEQ ID NO: 34648 - DNA, 120 bp, Artificial Sequence
  ENSG00000050820_5 (sequence is synthesized)
ccatcacccgtttcccagcccggccacagacctgtaccaggtgcccccagggcctggaggccctgcccaggatatttaccaggtgccaccttctgccgggatggggcatgacatctacca

SEQ ID NO: 34649 - DNA, 120 bp, Artificial Sequence
  ENSG00000050820_6 (sequence is synthesized)
ggtccccccgtccatggacacacgcagctgggagggcacgaagcccccggcaaaggtggtggtgcccacccgcgtggggcagggctatgtatacgaggccgcccagccggagcaggacga

SEQ ID NO: 34650 - DNA, 120 bp, Artificial Sequence
  ENSG00000050820_7 (sequence is synthesized)
gtacgacatcccgcgacacctgctggccccggggccacaggacatctatgatgtgcccccggttcgggggctgcttcccagccagtatggccaggaggtgtatgacacaccccccatggc

SEQ ID NO: 34651 - DNA, 120 bp, Artificial Sequence
  ENSG00000050820_8 (sequence is synthesized)
tgtcaagggtcccaatggccgagacccgttgctggaggtgtatgacgtgccccccagtgtggagaagggcctgccaccgtccaaccaccacgcagtctacgacgttcctccatcggtgag

SEQ ID NO: 34652 - DNA, 120 bp, Artificial Sequence
  ENSG00000050820_9 (sequence is synthesized)
caaggatgtgcccgatggcccactgctgcgtgaggagacctacgatgtgccccccgccttcgccaaggccaagccctttgacccggcccgcaccccactggtactggctgcgccccctcc

SEQ ID NO: 34653 - DNA, 120 bp, Artificial Sequence
  ENSG00000050820_10 (sequence is synthesized)
agactccccgccggccgaggacgtgtatgacgtgccgcccccggctcctgacctctacgacgtgccccctggcttgcggcggcctggcccgggcaccctgtacgatgtgccccgtgaacg

SEQ ID NO: 34654 - DNA, 120 bp, Artificial Sequence
  ENSG00000050820_11 (sequence is synthesized)
ggtgcttcctcctgaggtggctgatggtggcgtggtcgacagtggtgtgtatgcggtgcctcccccagctgaacgtgaagccccggcagagggcaagcgcctgtcggcctccagcaccgg

SEQ ID NO: 34655 - DNA, 120 bp, Artificial Sequence
  ENSG00000050820_12 (sequence is synthesized)
cagcacacgcagcagccagtctgcgtcctccttggaggtggcagggccgggccgggaacccctggagctggaagttgctgtggaggccctggcacggctgcagcagggtgtgagcgccac

SEQ ID NO: 34656 - DNA, 120 bp, Artificial Sequence
  ENSG00000050820_13 (sequence is synthesized)
cgttgcccaccttctggacctggcaggcagcgccggtgcgactgggagctggcgtagcccctctgagccacaggagccgctggtgcaggacctgcaggctgctgtggccgctgtccagag

SEQ ID NO: 34657 - DNA, 120 bp, Artificial Sequence
  ENSG00000050820_14 (sequence is synthesized)
tgccgtccacgagctgttggagtttgcccgcagcgcggtgggcaatgctgcccacacatctgaccgtgccctgcatgccaagcttagccggcagctgcagaagatggaggacgtgcacca

SEQ ID NO: 34658 - DNA, 120 bp, Artificial Sequence
  ENSG00000050820_15 (sequence is synthesized)
gacgctggtggcacatggtcaggccctcgacgctggccggggaggctctggagccacccttgaggacctggaccggctggtggcctgctcgcgggctgtgcccgaggacgccaagcagct

SEQ ID NO: 34659 - DNA, 120 bp, Artificial Sequence
  ENSG00000050820_16 (sequence is synthesized)
ggcctccttcctgcacggcaatgcctcactgctcttcagacggaccaaggccactgccccggggcctgaggggggtggcaccctgcaccccaaccccactgacaagaccagcagcatcca

SEQ ID NO: 34660 - DNA, 120 bp, Artificial Sequence
  ENSG00000050820_17 (sequence is synthesized)
gacccctgccctcaccccctaagttcacctcccaggactcgccagatgggcagtacgagaacagcgaggggggctggatggaggactatgactacgtccacctacaggggaaggaggagt

SEQ ID NO: 34661 - DNA, 120 bp, Artificial Sequence
  ENSG00000050820_18 (sequence is synthesized)
ttgagaagacccagaaggagctgctggaaaagggcagcatcacgcggcagggcaagagccagctggagttgcagcagctgaagcagtttgaacgactggaacaggaggtgtcacggccca

SEQ ID NO: 34662 - DNA, 120 bp, Artificial Sequence
  ENSG00000050820_19 (sequence is synthesized)
tagaccacgacctggccaactggacgccagcccaacccctggccccggggcgaacaggcggcctggggccctcggaccggcagctgctgctcttctacctggagcagtgtgaggccaacc

SEQ ID NO: 34663 - DNA, 120 bp, Artificial Sequence
  ENSG00000050820_20 (sequence is synthesized)
tgaccacactgaccaacgccgtggacgccttctttaccgccgtggccaccaaccagccgcccaagatctttgtggcgcacagcaagttcgtcatcctcagcgcccacaagctggtgttca

SEQ ID NO: 34664 - DNA, 120 bp, Artificial Sequence
  ENSG00000050820_21 (sequence is synthesized)
tcggggacacactgtcacggcaggccaaggctgctgacgtgcgcagccaggtgacccactacagcaacctgctgtgcgacctcctgcgcggcatcgtggccaccaccaaggccgctgcct

SEQ ID NO: 34665 - DNA, 120 bp, Artificial Sequence
  ENSG00000050820_22 (sequence is synthesized)
tgcagtacccatcgccttccgcggcccaggacatggtggagagggtcaaggagctgggccacagcacccagcagttccgccgcgtcctaggccagctggcagccgcctgagggtggtgac

SEQ ID NO: 34666 - DNA, 120 bp, Artificial Sequence
  ENSG00000050820_23 (sequence is synthesized)
cccaggagggaggcaggggaggggtgcggcggtcccagctccctggctcccatgtcaagagtcgctgtgccacaggcttagggacaggaccccagctctgcgtcggtcctggtgccctgg

SEQ ID NO: 34667 - DNA, 120 bp, Artificial Sequence
  ENSG00000050820_24 (sequence is synthesized)
atgcccaggaatctgtatatatttatggccgggcagggtgtggggccatgcctcctcaggagccgaagcccaggggccggccagtggccttccccagcatgcaccacgggcccgggttgg

SEQ ID NO: 34668 - DNA, 120 bp, Artificial Sequence
  ENSG00000050820_25 (sequence is synthesized)
gtcaccagacggggctggagtgtgagggtcctgcagcctgcaggacctcgtgccaccccgagggctgagcctggtcccacgagggtgccgtgtcccctgacagggccagtgcagtttggt

SEQ ID NO: 34669 - DNA, 120 bp, Artificial Sequence
  ENSG00000050820_26 (sequence is synthesized)
gtgtcctccgccttaccaggagaagaacctgaagaactatttttcgttattggttttccaatcatttgactaagagtctccatttaaataaagtttttaaaaggaagagcagctgcctga

SEQ ID NO: 34670 - DNA, 120 bp, Artificial Sequence
  ENSG00000050820_27 (sequence is synthesized)
gggtggcagatgagagcagcccggggtgggtgacggttctggggaaggcacccgggggcaagggccatgcgtggcatctcccgggagggcagaggaggagtgggtctctctagaagaaaa

SEQ ID NO: 34671 - DNA, 120 bp, Artificial Sequence
  ENSG00000050820_28 (sequence is synthesized)
ccaaggaacgccgaggctgggtgtctcctggaggcggggtgaggcctgcagctggccacaaggccctgggagccagggcagagcctgggcccaagaaagggggcagtttcagagctgcag

SEQ ID NO: 34672 - DNA, 120 bp, Artificial Sequence
  ENSG00000050820_29 (sequence is synthesized)
ggtctggggcccagaaagcacagcctgggcatggcccctgcaaccctagggagctgccacagtgagcacctgcccatgcccacagctggcatctggagtgagggcagattggggcaggaa

SEQ ID NO: 34673 - DNA, 120 bp, Artificial Sequence
  ENSG00000050820_30 (sequence is synthesized)
cagctgcacaaggggacgggttcctgtgagccgagggcaccgctgggggctgcatccagagctctgcttaaaagaatctcatcccagcctgcggaactcccgaagtgcacatggaattat

SEQ ID NO: 34674 - DNA, 120 bp, Artificial Sequence
  ENSG00000050820_31 (sequence is synthesized)
acctggacctggcatctgagttgggagggaggggcttggagaagacccttgccctgggcaagtgtgtcccccttcgtggctcccccacccagcagcccgcagcccagatggaagcttcag

SEQ ID NO: 34675 - DNA, 120 bp, Artificial Sequence
  ENSG00000050820_32 (sequence is synthesized)
ggtgcttggaacccctggtgctgctcccagccctgaccgttctgcatatgaacatgggccttggtttccccatctgtatgaagaagggagtagggctgggtgattcgcaagccctcctga

SEQ ID NO: 34676 - DNA, 120 bp, Artificial Sequence
  ENSG00000050820_33 (sequence is synthesized)
tcttacctctacagaggttgtccccgtgacagcatctgtccccccacctcagccacatcatgctcagcccacctgccttggtgaggacacagaggtaaaggtgtatgcagttgctctcaa

SEQ ID NO: 34677 - DNA, 80 bp, Artificial Sequence
  ENSG00000050820_34 (sequence is synthesized)
atgcgcggcgcggctggagcggccggacagtccggcgtccgggaacgctcaggagccggaggagccggaaagcgccggga

SEQ ID NO: 34678 - DNA, 120 bp, Artificial Sequence
  ENSG00000050820_35 (sequence is synthesized)
ataaaggcatctgctgtggtgctgcagccaaggccaggctgtgctctgtgcttgtgtcggggagcccttggcagtggccaccccacagaacgtgctggccaaagcgctctatgacaatgt

SEQ ID NO: 34679 - DNA, 120 bp, Artificial Sequence
  ENSG00000050820_36 (sequence is synthesized)
gttccgggagcggagcgggagtgggggcgggcgcgccgcgggctttgcagccccgcacgccgagcgccggtggaagccgggtcctggccacaggagtcctagccgcacgcgagtgtcgcg

SEQ ID NO: 34680 - DNA, 120 bp, Artificial Sequence
  ENSG00000050820_37 (sequence is synthesized)
ggagtcctagccgcacgcgagtgtcgcgggagggggccagggccgggttctgcagtgtggacatgaaggctttggagtccatggttgggggacccgcaagagctagagcagggtcggagc

SEQ ID NO: 34681 - DNA, 120 bp, Artificial Sequence
  ENSG00000050820_38 (sequence is synthesized)
tccggggtggggagctcctcttccctgggggtctcggggctcgctctcagctgggggagggcagaggggctccgggaggcctgctatgctgccccgcgatcaccttccgccggccgagcc

SEQ ID NO: 34682 - DNA, 120 bp, Artificial Sequence
  ENSG00000050820_39 (sequence is synthesized)
ctcccggtctgcgcccggacacagggcctaggagcccggccagggccacagggcagtgtagtgttgggggaggggactggttgggcgacccagagctggtgcgactggaggtggcccgcg

SEQ ID NO: 34683 - DNA, 120 bp, Artificial Sequence
  ENSG00000050820_40 (sequence is synthesized)
cacagagctcagtcgcacacctgctgcagagtagaaagttcacacgtggtggtggtgctgggtggtaacagtgatggtggtgatgaggtggcagcggcggtgatggtgatgaaatcatga

SEQ ID NO: 34684 - DNA, 120 bp, Artificial Sequence
  ENSG00000050820_41 (sequence is synthesized)
tatgatggtggtggcagtggcagtatcacagctaacctttcagtgagtgtctgcagtgacacaattatgtgaattaacacatgcaattctttgggaggaagctctcccaccttcaggcac

SEQ ID NO: 34685 - DNA, 120 bp, Artificial Sequence
  ENSG00000050820_42 (sequence is synthesized)
aggggtggtcacctggctccagagccggctcgtcccagagctgtcatggataggaattgtgaaggatgtgtgtgctagggctgcgagtgtgtgtgcgcgtgtgtgtgcctgtgtgcgtgc

SEQ ID NO: 34686 - DNA, 120 bp, Artificial Sequence
  ENSG00000050820_43 (sequence is synthesized)
ctctgcatttgtatgtgtgcctgtgtgtgtgcgcgtgcctctgtgtgtgtgtctgtatgtgtgtacgtgtgtgtgtgtgtgtggctgggtgctgcccccagtccctggggtgggcagatg

SEQ ID NO: 34687 - DNA, 120 bp, Artificial Sequence
  ENSG00000050820_44 (sequence is synthesized)
aaaggcctgtgacatttcctctggtggtttccacgaacccaggcgtcacccctcggtggagataaagtggagccacccagctccaccgtgtctcagcctggggtcggcctctgctgcttc

SEQ ID NO: 34688 - DNA, 120 bp, Artificial Sequence
  ENSG00000050820_45 (sequence is synthesized)
agccgggactctgctaccaggcgtgctggagacctagtgggcccagttctgctgcgctgcggggggctctgccaggcctgcggctgctggggggtgctggcgcctctgccacccccatgc

SEQ ID NO: 34689 - DNA, 120 bp, Artificial Sequence
  ENSG00000050820_46 (sequence is synthesized)
tcagcgcccccctcacagcaccctcagcaagcagggctggctgcctgcctgcattgggagggcctctaggggttcaggggcactgggcccgggggaggggctgctttggcgctgctgccc

SEQ ID NO: 34690 - DNA, 120 bp, Artificial Sequence
  ENSG00000050820_47 (sequence is synthesized)
tgggggatgtgcggggaggccctgagtcaaccctgtcccagacatcccctttgatgaaggaacaaaaggtctttcagtggagagagctgaacagggagcctggtggtggaggcgtgtggg

SEQ ID NO: 34691 - DNA, 120 bp, Artificial Sequence
  ENSG00000050820_48 (sequence is synthesized)
cgcagtgtgcccgggggctggagaatcccaccagggaggccttgacctccccaaggcagggagaccttcagggaaggaggctgcctggcatggcccctacccgcttcaggctggtgctgg

SEQ ID NO: 34692 - DNA, 120 bp, Artificial Sequence
  ENSG00000050820_49 (sequence is synthesized)
tgaggggtcctgtggccctgggcaggccattgtgctgcctgcctcttcacccactgtgcgggccttggcttccctgggctctgggtcatggtggtggtgcccacccgcgtggggcagggc

SEQ ID NO: 34693 - DNA, 120 bp, Artificial Sequence
  ENSG00000050820_50 (sequence is synthesized)
ccccagcccgctggcgccgctgcccgccaggccccgggggcggcggccaagatgtccgtgcctatgaaaaaatgagggcttccagactgtgctgatgtgagccccgccatccgttctggt

SEQ ID NO: 34694 - DNA, 120 bp, Artificial Sequence
  ENSG00000050820_51 (sequence is synthesized)
tcagagcataatcgtctcgtcttcagaaagaaggaagacagaacatgcctgccaagcccttcctctcttctgttctgctctcctggaaagttctggacttctctggcccagggcctcagg

SEQ ID NO: 34695 - DNA, 120 bp, Artificial Sequence
  ENSG00000050820_52 (sequence is synthesized)
gccttgccgctctcctaccccatgtcgctgaagcagatgagttggagcaggactcaggagggtactaggcccaggttttaggctgaacctaggaatgagtaatgagaggaggcagatcag

SEQ ID NO: 34696 - DNA, 120 bp, Artificial Sequence
  ENSG00000050820_53 (sequence is synthesized)
gcagatggggacactgaggtacagagagacagtcagttgtcctcagaattggatccagaacctcgtcttctggcatggccccccagtgcagcaccacatgtggcctccgaattcccagtc

SEQ ID NO: 34697 - DNA, 120 bp, Artificial Sequence
  ENSG00000050820_54 (sequence is synthesized)
tgggattgggggagctctggtccttgggggaccaccatgctcttttggagttgtcaacttggtaggaaccctctggttccaacgctgtgcctttgcggccctctcctggcatctgctgtc

SEQ ID NO: 34698 - DNA, 120 bp, Artificial Sequence
  ENSG00000050820_55 (sequence is synthesized)
actttcctgggaagttttcctctcgctgcggaacccccggggccctgactggccgcttcctccccgctggccgtagggagttttctgtccgacaccccctcttcctggccgggcagcctg

SEQ ID NO: 34699 - DNA, 120 bp, Artificial Sequence
  ENSG00000050820_56 (sequence is synthesized)
gcttcggcagacccccgggccatgtttccacacttgggcactggcatctctgagcatctcagtctcacctcctgagaacagcaagtgatcctggctaccccgggtaaccaggcctcaggt

SEQ ID NO: 34700 - DNA, 120 bp, Artificial Sequence
  ENSG00000050820_57 (sequence is synthesized)
gcaggccccacatgacagatggacagactgaagtgggaggtgggaggcggacaccccggcgtcctgccaggaagggacaccatctgcacctggcgagctgtggcctccagccatcgtttc

SEQ ID NO: 34701 - DNA, 120 bp, Artificial Sequence
  ENSG00000050820_58 (sequence is synthesized)
cctgcctagttaggggcttttccctccagagccctgtccactctggccttgtttctggaactgctcctcacccggaggaccccatcctttccgtgaagcaggcagtgggggctttctggc

SEQ ID NO: 34702 - DNA, 120 bp, Artificial Sequence
  ENSG00000050820_59 (sequence is synthesized)
aagtggcctcttcattaactatcccagagtgagtgcagatgaccagagggaagctggccaagtgcaaagcattgttattgtggaattaaagagcccgctcctgctcgcctccagaagtgg

SEQ ID NO: 34703 - DNA, 120 bp, Artificial Sequence
  ENSG00000050820_60 (sequence is synthesized)
ggccggtatcccagggcagtagtgattagggaatgtcactctggccacatcccagcctgggcgggcctctatggggaggtccccgtttgatttggtttggttgtccacagtcagagccaa

SEQ ID NO: 34704 - DNA, 120 bp, Artificial Sequence
  ENSG00000050820_61 (sequence is synthesized)
gctctgggcatggagtctgggatggcaccctgaccccttgccttacaggactttgggcagccttctttggcactgtgcctcatctgtaacaagagaggaacagcgggctgggtaggactt

SEQ ID NO: 34705 - DNA, 120 bp, Artificial Sequence
  ENSG00000050820_62 (sequence is synthesized)
ggacagataggcactgtcgtggggacctgcagcctggccacaccatcacgggctctgagtcatctcctaccctctcccttgtagtcacagcccaggagaattctgctgggggtgggcaga

SEQ ID NO: 34706 - DNA, 120 bp, Artificial Sequence
  ENSG00000050820_63 (sequence is synthesized)
ggtctttgccatctgccccctacgtggctggctggcagatcaccgtggctctctctcctgggaccttgggcagtgtgtgaggtggtggggccaagaggagaattcatttttggaacagtc

SEQ ID NO: 34707 - DNA, 120 bp, Artificial Sequence
  ENSG00000050820_64 (sequence is synthesized)
tttgcctgccaggagtgggtgagggaggagcagccgccgccttcacagacacctggtagtgtcaggagagggcatgcactgccctggtgaggctcctctggctgcccccaggcccacacc

SEQ ID NO: 34708 - DNA, 120 bp, Artificial Sequence
  ENSG00000050820_65 (sequence is synthesized)
gtgagcactgtgtactggtaccatggccccaggtctaggcgagggatggaaataaggacagtgccactagggcctcctgtctgtacaggaggggccctgagacagctcctcaaacccctt

SEQ ID NO: 34709 - DNA, 120 bp, Artificial Sequence
  ENSG00000050820_66 (sequence is synthesized)
aaaccaactggtcagctagaaccaaccagcaggggaggtgcgctccaggggggcttctaagaggaggcagttttggagtcagagaacgtgctggccaaagcgctctatgacaatgtggcc

SEQ ID NO: 34710 - DNA, 120 bp, Artificial Sequence
  ENSG00000050820_67 (sequence is synthesized)
cctaaaaggacgtggctcccaggtgtgagtggagcctccctaagggctggtttgagggcagcagtgaagtcggctctctgcccccaggtggtggtgcccacccgcgtggggcagggctat

SEQ ID NO: 34711 - DNA, 120 bp, Artificial Sequence
  ENSG00000050820_68 (sequence is synthesized)
gggtgctgaccagtgtctgcagggctgggggtggcgggcaggaagagactggctccagaccctggttctggatggttgacagatgaggaaatcaagctgtcttctgagcctcaggttctt

SEQ ID NO: 34712 - DNA, 120 bp, Artificial Sequence
  ENSG00000050820_69 (sequence is synthesized)
cgactgctcagggacacgtctgggttttaagcacacccatccatttgggcagtcttttcctagatgggctgacgcagcaggcactttggcccacagaaattataagatgcttcagaaggg

SEQ ID NO: 34713 - DNA, 120 bp, Artificial Sequence
  ENSG00000050820_70 (sequence is synthesized)
agtcctgagtgcatgctctgcggtctggggtcacctggggtgcttaccagtaggcacacgcctgggttatgaggtggaaggtgcgagctctgctggccatgggagctgcgtggggcattg

SEQ ID NO: 34714 - DNA, 120 bp, Artificial Sequence
  ENSG00000051009_0 (sequence is synthesized)
agtcgtgcgacgccgggcggttgcgtgtggtgcgcgggggcgcgggctgcgtgtggcgcggggcggggcgcggctggtgcgcttgagaagcgatggcggcggcctgaactcacctaacac

SEQ ID NO: 34715 - DNA, 120 bp, Artificial Sequence
  ENSG00000051009_1 (sequence is synthesized)
cgcagcagcaaccgggcccggccaggttcggcgttccgtgagtgaacgatttagaaatctggactggccagtgacctctgggcttgccattccagcctggtataacctctggctccatgg

SEQ ID NO: 34716 - DNA, 120 bp, Artificial Sequence
  ENSG00000051009_2 (sequence is synthesized)
gcagctactggctcctacagaccggatgaagcagactggagacacaagtggagaaaacctccagctggcaaatcctcagagtgtaggcctctggctgccagtcctgcccagcctgcctca

SEQ ID NO: 34717 - DNA, 120 bp, Artificial Sequence
  ENSG00000051009_3 (sequence is synthesized)
tggagaggatgaattggctgagcagactggcctcccggggccctgggcaccgtatacctcaaggggccaatctccaaaccccagtcatggctgatcccgagacctgcctcatggtcttca

SEQ ID NO: 34718 - DNA, 120 bp, Artificial Sequence
  ENSG00000051009_4 (sequence is synthesized)
agaatcactggtcccaggtggtgcgaatcctggagcggcaaggccctcgggcagctcctgggggtgcagacgatctcagtgctgtgcgcaaccacacttaccagatgttgacactgctgg

SEQ ID NO: 34719 - DNA, 120 bp, Artificial Sequence
  ENSG00000051009_5 (sequence is synthesized)
cagaggaccgtgcagttccctcggcccccacaggccctgggcccctgctggagtttgctctgcacgaggatctgctgacccgtgtgttgacatggcagctgcaatgggatgagcttgggg

SEQ ID NO: 34720 - DNA, 120 bp, Artificial Sequence
  ENSG00000051009_6 (sequence is synthesized)
atggggtcgaggaacggcgggctgagcaactgaaactatttgaaatgctagtgagcgaagctcgccagccactgttgcggcatggtccagttcgtgaggctctgctcaccctgctggatg

SEQ ID NO: 34721 - DNA, 120 bp, Artificial Sequence
  ENSG00000051009_7 (sequence is synthesized)
cctgtggccgccctgtgcccagtagcccagcactggatgaaggcttggtgctacttctcagccagctgtgtgtttgtgtggcccaggagccttcattgctcgagttcttcctgcagccac

SEQ ID NO: 34722 - DNA, 120 bp, Artificial Sequence
  ENSG00000051009_8 (sequence is synthesized)
ctcctgagcctggagccgctccccgtcttcttctcttttctcgccttgtcccttttgtgcatcgagagggcaccctgggccagcaggcccgtgatgccctacttcttctcatggctttgt

SEQ ID NO: 34723 - DNA, 120 bp, Artificial Sequence
  ENSG00000051009_9 (sequence is synthesized)
cagctgggagccccactgtgggccgctacatcgcggatcactcttacttctgcccggtgctggccacagggctcagtgccctgtactcatcactgcctcgaaagattgaggttccagggg

SEQ ID NO: 34724 - DNA, 120 bp, Artificial Sequence
  ENSG00000051009_10 (sequence is synthesized)
atgattggcactgtctgcgacgggaagactggctgggagtgccagcccttgcactcttcatgagttccctggagttctgcaatgcagtaattcaggtggctcaccccctggtgcagaagc

SEQ ID NO: 34725 - DNA, 120 bp, Artificial Sequence
  ENSG00000051009_11 (sequence is synthesized)
agttggttgattatatccataatgggttcctggtgcctgtcatgggtcctgccttgcacaagacctctgtggaggagatgatcgccagtaccgcctatctggaacttttcctacggagta

SEQ ID NO: 34726 - DNA, 120 bp, Artificial Sequence
  ENSG00000051009_12 (sequence is synthesized)
tctcagagcctgctttgctccgtaccttcctgcgattcctgttgttgcaccggcatgacacccacaccatcctcgacaccctcgttgctcgtattggcagtaactcccggctctgcatgg

SEQ ID NO: 34727 - DNA, 120 bp, Artificial Sequence
  ENSG00000051009_13 (sequence is synthesized)
tctctctgagtctcttcaggaccctcctgaacctcagctgtgaggatgtcctgctgcagctggttctcaggtatcttgttccatgtaaccacgttatgctgagccagaagccggctgttc

SEQ ID NO: 34728 - DNA, 120 bp, Artificial Sequence
  ENSG00000051009_14 (sequence is synthesized)
tgatgtggacctatatggacgagcagctgacaagtttctctccctaatcccacgctgttgtcggcaccacgcccccagcccacctcgtccagagcatgcctcatgggcacgaggtgggcc

SEQ ID NO: 34729 - DNA, 120 bp, Artificial Sequence
  ENSG00000051009_15 (sequence is synthesized)
tagcagagagacagggagaagggaggacatcacgggtcctggaagcccaagtgtggactcctcttctgtgacgacagtaccccggccctccacaccatctcgtctggctctcttcctgcg

SEQ ID NO: 34730 - DNA, 120 bp, Artificial Sequence
  ENSG00000051009_16 (sequence is synthesized)
gcagcagagcctgggtggctctgagtctccaggcccagccccttgctcaccagggctttctgcatcccccgcctccagccctggccgacggcctacccctgcagaggagcctggagagct

SEQ ID NO: 34731 - DNA, 120 bp, Artificial Sequence
  ENSG00000051009_17 (sequence is synthesized)
ggaagacaattacctggagtatctgcgtgaggcacgtcgtggtgtggaccgctgtgtccgagcctgccgtacctggtctgccccctatgatggcgagcggccctctcctgagcccagtcc

SEQ ID NO: 34732 - DNA, 120 bp, Artificial Sequence
  ENSG00000051009_18 (sequence is synthesized)
ttttggctcccggactaagaaacgcagcctactgcctgaggaggacaggaacaacgtgggggaaggggaggaggaagagctggggaggagggggcgggctgggggtgcaggggagggccc

SEQ ID NO: 34733 - DNA, 120 bp, Artificial Sequence
  ENSG00000051009_19 (sequence is synthesized)
tggtcacctgccccctccccagctcaatggagtgccaggatcatggcctgagggggccaagaaggttcgtctggtgccaaaggagggagctggggaactgctagagggcatctccgaggg

SEQ ID NO: 34734 - DNA, 120 bp, Artificial Sequence
  ENSG00000051009_20 (sequence is synthesized)
catggcaggactagagggctttgggcaggagctccgggagctagaggtggcattgagcaatgggggaactggctcagagtcccccttagaacctccactgccccttgaggaggaggaggc

SEQ ID NO: 34735 - DNA, 120 bp, Artificial Sequence
  ENSG00000051009_21 (sequence is synthesized)
ctacgagagcttcacctgtccccctgagccccctggccccttcctcagcagccctttgcggactctcaaccagctgccaagccagcccttcactggccccttcatggctgtgctctttgc

SEQ ID NO: 34736 - DNA, 120 bp, Artificial Sequence
  ENSG00000051009_22 (sequence is synthesized)
caaactcgagaacatgctgcagaactccgtctatgtcaacttcctgctgacggggctggtggcccagctggcctgtcacccccagcccctgctccgctctttcctgctcaacaccaacat

SEQ ID NO: 34737 - DNA, 120 bp, Artificial Sequence
  ENSG00000051009_23 (sequence is synthesized)
ggtcttccagcccagtgtcaagtccctgctgcaggtgctgggctctgtgaagaataagattgagaactttgcggcttcccaggaggacttcccagcactgctgtccaaagccaagaagta

SEQ ID NO: 34738 - DNA, 120 bp, Artificial Sequence
  ENSG00000051009_24 (sequence is synthesized)
cctcattgcccgtggcaagttggactgggctgagggccctgcagcaggacctgccccacgccgttctgatcccctagtgaagagccggaggccatccttgggggagttactcctgcggca

SEQ ID NO: 34739 - DNA, 120 bp, Artificial Sequence
  ENSG00000051009_25 (sequence is synthesized)
tgcacacagtccaaccagggcccggcaggcggcacaattggtccttcagcctgggcgagacggagcaggacttggcctaagtgggggctcccctggggcttcaactccagttctactcac

SEQ ID NO: 34740 - DNA, 120 bp, Artificial Sequence
  ENSG00000051009_26 (sequence is synthesized)
ccggggcggggcccctgaacgccaaggtgaggctcttcgagtcaagaatgctgtctactgtgcagtcattttccctgaatttctcaaggagttggctgccatctcccaggctcatgccgt

SEQ ID NO: 34741 - DNA, 120 bp, Artificial Sequence
  ENSG00000051009_27 (sequence is synthesized)
cacctcgcctttcttgttggagacttcagaggaaggatctggccctctcatctcaggctgtgggcccctcaatccttaactttcttccatggacaatcagggccatgggtggcccgggct

SEQ ID NO: 34742 - DNA, 120 bp, Artificial Sequence
  ENSG00000051009_28 (sequence is synthesized)
ggggctagggcacaggctcctttttatgtttggaggcagtggcaaaaggactttttaatttatttcagatgaatgttttatggagaacttgttgcaatatgtataaaagggaaatctcta

SEQ ID NO: 34743 - DNA, 120 bp, Artificial Sequence
  ENSG00000051009_29 (sequence is synthesized)
tggttataactgaacacttaaaatttgccagatctgaggctaaatgctttatattgataactctttgatcctcttcatcaccttatgaggtaggtatattttcctattttacgaactagg

SEQ ID NO: 34744 - DNA, 120 bp, Artificial Sequence
  ENSG00000051009_30 (sequence is synthesized)
aaactaaggcttggacaattttgacctgtccaaactagtaaagggcaaagccagtgaaaccagatctttcagagtccagagcctaagatctggcttgtcagcttgaatgtgtgtaaagct

SEQ ID NO: 34745 - DNA, 120 bp, Artificial Sequence
  ENSG00000051009_31 (sequence is synthesized)
ggcatctggaatcttgtgggtccatatggtgtctgccatcttatttcctccagaataggtggccacgggatatttaaacatacccagaggctgacatacaaatacttttcatctggtggg

SEQ ID NO: 34746 - DNA, 120 bp, Artificial Sequence
  ENSG00000051009_32 (sequence is synthesized)
tggccatgtcatttctgtgtacttgcctagcccctcatccatcctgcttgcatcacttccagatacgtgtcatgtcatacttgtgtccctgtgtctgtctgtacgtcttccatgcttgtg

SEQ ID NO: 34747 - DNA, 120 bp, Artificial Sequence
  ENSG00000051009_33 (sequence is synthesized)
ctggtttgagtattgacttacatctgagccttgtatgtatgtcctatgtgcatgttcctcctctttccctagtctggccatttcctgcgatttgtaattaggatattctgtgtttgatgt

SEQ ID NO: 34748 - DNA, 120 bp, Artificial Sequence
  ENSG00000051009_34 (sequence is synthesized)
ttcctggtgaatcacagcaatatttctgaaccatattgaagacgtatgtgctgtcctgtatggagaggcacctaaacactctctatgccattccgtccagtttatctgtctgggtcttgg

SEQ ID NO: 34749 - DNA, 120 bp, Artificial Sequence
  ENSG00000051009_35 (sequence is synthesized)
gttttctgtcagctctcctggggcctaaggttaaccttctggtatttttctccctactcagctccttcctccccacctcttcaaagaaggacttgatttcaagtttttcctgttcgcttt

SEQ ID NO: 34750 - DNA, 120 bp, Artificial Sequence
  ENSG00000051009_36 (sequence is synthesized)
ccttgtaccttcttggttgctgtgactgtctgctagcactaagactgtcttaagcagatagagtgcaatttctttgaaggcaaatgacaaagcgtggccctgagctccctgactgagttc

SEQ ID NO: 34751 - DNA, 120 bp, Artificial Sequence
  ENSG00000051009_37 (sequence is synthesized)
atttggactctcaaggatgccctggagctagactcgatctgagtggttggactaactcctctttgtttttgtatgagagccagcttaccccgccattctaaacctcaggccaggaaaacc

SEQ ID NO: 34752 - DNA, 120 bp, Artificial Sequence
  ENSG00000051108_0 (sequence is synthesized)
gccccagagacgtgaactgtcgttgcagagattgcgggcggctgagacgccgcctgcctggcacctaggagcgcagcggagccccgacaccgccgccgccgccatggagtccgagaccga

SEQ ID NO: 34753 - DNA, 120 bp, Artificial Sequence
  ENSG00000051108_1 (sequence is synthesized)
acccgagcccgtcacgctcctggtgaagagccccaaccagcgccaccgcgacttggagctgagtggcgaccgcggctggagtgtgggccacctcaaggcccacctgagccgcgtctaccc

SEQ ID NO: 34754 - DNA, 120 bp, Artificial Sequence
  ENSG00000051108_2 (sequence is synthesized)
cgagcgtccgcgtccagaggaccagaggttaatttattctgggaagctgttgttggatcaccaatgtctcagggacttgcttccaaagcaggaaaaacggcatgttttgcatctggtgtg

SEQ ID NO: 34755 - DNA, 120 bp, Artificial Sequence
  ENSG00000051108_3 (sequence is synthesized)
caatgtgaagagtccttcaaaaatgccagaaatcaacgccaaggtggctgaatccacagaggagcctgctggttctaatcggggacagtatcctgaggattcctcaagtgatggtttaag

SEQ ID NO: 34756 - DNA, 120 bp, Artificial Sequence
  ENSG00000051108_4 (sequence is synthesized)
gcaaagggaagttcttcggaacctttcttcccctggatgggaaaacatctcaaggcctgaagctgcccagcaggcattccaaggcctgggtcctggtttctccggttacacaccctatgg

SEQ ID NO: 34757 - DNA, 120 bp, Artificial Sequence
  ENSG00000051108_5 (sequence is synthesized)
gtggcttcagctttcctggttccagcagatatatgcacgacagtactacatgcaatatttagcagccactgctgcatcaggggcttttgttccaccaccaagtgcacaagagatacctgt

SEQ ID NO: 34758 - DNA, 120 bp, Artificial Sequence
  ENSG00000051108_6 (sequence is synthesized)
ggtctctgcacctgctccagcccctattcacaaccagtttccagctgaaaaccagcctgccaatcagaatgctgctcctcaagtggttgttaatcctggagccaatcaaaatttgcggat

SEQ ID NO: 34759 - DNA, 120 bp, Artificial Sequence
  ENSG00000051108_7 (sequence is synthesized)
gaatgcacaaggtggccctattgtggaagaagatgatgaaataaatcgagattggttggattggacctattcagcagctacattttctgtttttctcagtatcctctacttctactcctc

SEQ ID NO: 34760 - DNA, 120 bp, Artificial Sequence
  ENSG00000051108_8 (sequence is synthesized)
cctgagcagattcctcatggtcatgggggccaccgttgttatgtacctgcatcacgttgggtggtttccatttagaccgaggccggttcagaacttcccaaatgatggtcctcctcctga

SEQ ID NO: 34761 - DNA, 120 bp, Artificial Sequence
  ENSG00000051108_9 (sequence is synthesized)
cgttgtaaatcaggaccccaacaataacttacaggaaggcactgatcctgaaactgaagaccccaaccacctccctccagacagggatgtactagatggcgagcagaccagcccctcctt

SEQ ID NO: 34762 - DNA, 120 bp, Artificial Sequence
  ENSG00000051108_10 (sequence is synthesized)
tatgagcacagcatggcttgtcttcaagactttctttgcctctcttcttccagaaggccccccagccatcgcaaactgatggtgtttgtgctgtagctgttggaggctttgacaggaatg

SEQ ID NO: 34763 - DNA, 120 bp, Artificial Sequence
  ENSG00000051108_11 (sequence is synthesized)
agcaagcaaaagcagaaacgtgaagccgtgatacaaattggtgaacaaaaaatgcccaaggcttctcatgtctttattctgaagagctttaatatatactctatgtagtttaataagcac

SEQ ID NO: 34764 - DNA, 120 bp, Artificial Sequence
  ENSG00000051108_12 (sequence is synthesized)
tgtacgtagaaggccttaggtgttgcatgtctatgcttgaggaacttttccaaatgtgtgtgtctgcatgtgtgtttgtacatagaagtcatagatgcagaagtggttctgctggtacga

SEQ ID NO: 34765 - DNA, 120 bp, Artificial Sequence
  ENSG00000051108_13 (sequence is synthesized)
tttgattcctgttggaatgtttaaattacactaagtgtactactttatataatcaatgaaattgctagacatgttttagcaggacttttctaggaaagacttatgtataattgcttttta

SEQ ID NO: 34766 - DNA, 120 bp, Artificial Sequence
  ENSG00000051108_14 (sequence is synthesized)
aaatgcagtgctttactttaaactaaggggaactttgcggaggtgaaaacctttgctgggttttctgttcaataaagttttactatgaatgaccctggcagagactcctgtcatcctagc

SEQ ID NO: 34767 - DNA, 120 bp, Artificial Sequence
  ENSG00000051108_15 (sequence is synthesized)
agtttactctgcgtttgttgtatctagacagtcaacaactgagttgtcggtgtttaacctgaatgcttgtttttcagaagaggactgtttgtgccggtaagaatgatcaggtaaggccat

SEQ ID NO: 34768 - DNA, 120 bp, Artificial Sequence
  ENSG00000051108_16 (sequence is synthesized)
gaaagtttttgttggcgtttttgtttttgagatggggtcttgctttgttccttgggccagagtacattggctactcacaagtgggctggtagctggctacagccccagactcctggctta

SEQ ID NO: 34769 - DNA, 120 bp, Artificial Sequence
  ENSG00000051108_17 (sequence is synthesized)
agccacctcctgcctcagccaccctggcagctgggactacaggcatgcgccatcacacttagcttgaaagttttaatttactaagaatatacctgtgtttccccccatttcctgatttaa

SEQ ID NO: 34770 - DNA, 120 bp, Artificial Sequence
  ENSG00000051108_18 (sequence is synthesized)
acagtactggcttatataggaacccatcaaagttaaattccccaaatttaaatttagtaaatttagtggtttcaccttggcaaatctgcaatagtttcaccagctcaaatttcatgcttt

SEQ ID NO: 34771 - DNA, 120 bp, Artificial Sequence
  ENSG00000051108_19 (sequence is synthesized)
catgcttttgtaagctgagcttatgtttgtgattttaatcctttaagtactactgtggtaactaatcatttttttgttttttttggtggtgtttttgtttttgttttgagatggagtctc

SEQ ID NO: 34772 - DNA, 120 bp, Artificial Sequence
  ENSG00000051108_20 (sequence is synthesized)
gatgtgagccaccgcacccagccagggactaatctttaaagcaaagttttatatatttttacgtgagtaatgttatgtgtaggtgttctatttggcaaaataaatcagccttttctatca

SEQ ID NO: 34773 - DNA, 66 bp, Artificial Sequence
  ENSG00000051108_21 (sequence is synthesized)
gacctggctctaaagacatatatgacacacgaaaccatttatttttcatttcacaatgtttattca

SEQ ID NO: 34774 - DNA, 120 bp, Artificial Sequence
  ENSG00000051108_22 (sequence is synthesized)
acacgaaaccatttatttttcatttcacaatgtttattcacatatatggtattagtattctaatgtagtgatgcactctaaatttgcattatatttcctagaacatctgaacagagcata

SEQ ID NO: 34775 - DNA, 120 bp, Artificial Sequence
  ENSG00000051108_23 (sequence is synthesized)
ggaaattccctattttgccattatcagttctaacaaaaatcttaaaagcactttatcatttcatttccctgcactgtaatttttttaaatgatcaaaaacagtatcataccaaggcttac

SEQ ID NO: 34776 - DNA, 120 bp, Artificial Sequence
  ENSG00000051108_24 (sequence is synthesized)
ttatattggaatactattttagaaagttgtgggctgggttgtatttataaatcttgttggtcagatgtctgcaatgagtaaatttagcaccattatcaggaagctttctcaccaatgaca

SEQ ID NO: 34777 - DNA, 120 bp, Artificial Sequence
  ENSG00000051108_25 (sequence is synthesized)
acttcattggaagattttaatgaaagtgtagcatactctagggaaaaaatatgaatattttagcatctatgtattgaaaattatgttgaataaatgtcagactattttttacataacgtt

SEQ ID NO: 34778 - DNA, 120 bp, Artificial Sequence
  ENSG00000051108_26 (sequence is synthesized)
gcttctgtttaattttgtcacgttcagaggtggggggtaggagatgtaagcccttgacagcaaaataattccttttgcttgatttcagacagttgcatcagctcctttgttctgtgttca

SEQ ID NO: 34779 - DNA, 120 bp, Artificial Sequence
  ENSG00000051108_27 (sequence is synthesized)
gagtaataaaagaagttggataaaacgtttattgagagactgtatggtgttattaccaagtaatattttgtttctttcctaggaattagaaactgtattatcaacacaaagtgatgagtt

SEQ ID NO: 34780 - DNA, 120 bp, Artificial Sequence
  ENSG00000051108_28 (sequence is synthesized)
ccagcaggcattccaaggcctgggtcctggtttctccggttacacaccctatgggtggcttcagctttcctggttccagcagatatatgcacgacagtactacatgcaatatatcctcta

SEQ ID NO: 34781 - DNA, 120 bp, Artificial Sequence
  ENSG00000051108_29 (sequence is synthesized)
ggggacagtatcctgaggattcctcaagtgatggtttaaggcaaagggaagttcttcggaacctttcttcccctggatgggaaaacatctcaagtttagcagccactgctgcatcagggg

SEQ ID NO: 34782 - DNA, 120 bp, Artificial Sequence
  ENSG00000051108_30 (sequence is synthesized)
tacaggcatgagccaccatgcccagccgataatttgccattctgtatttatttgcgtgttagagaccagttaaagttaagacactttctaaatagaagtcttgtatatggggcttttgag

SEQ ID NO: 34783 - DNA, 120 bp, Artificial Sequence
  ENSG00000051108_31 (sequence is synthesized)
ttgtatatggggcttttgagaaagtgttttcccgtgatgctggggggaaacacacatattcaaattacttgtataaaacagtttattctgtgtttaggaacttgtaggggtgaaatgctg

SEQ ID NO: 34784 - DNA, 120 bp, Artificial Sequence
  ENSG00000051108_32 (sequence is synthesized)
ctgcccacgagcataattcttcatcacacaggagagggcatccgggcaggaaaagatagtgaagtcgtgagttccagcttgtggtagcgcctgtgtctgtttttgtttcatatggtcaag

SEQ ID NO: 34785 - DNA, 120 bp, Artificial Sequence
  ENSG00000051108_33 (sequence is synthesized)
gatgggtcttgcagtgagcttatcagggtgctgctgtgattagaggtggggagccttggattcttgagtaagtctcactgtgacatcagctaagatggacttttatgtgcttcctttgaa

SEQ ID NO: 34786 - DNA, 120 bp, Artificial Sequence
  ENSG00000051108_34 (sequence is synthesized)
acatcacttacacattaacttctgaatgtttttaagcactcaccaggttaggttcaggtccttaagtaccttcgtattacttttagcaggaaaaacggcatgttttgcatctggtgtgca

SEQ ID NO: 34787 - DNA, 120 bp, Artificial Sequence
  ENSG00000051108_35 (sequence is synthesized)
tcgatttgaattcttgattttaatttaaacttagttttcatttgttcatactcaacccactcaaaatgagtgttttttcaaatctatgtataggcctgaagctgcccagcaggcattcca

SEQ ID NO: 34788 - DNA, 120 bp, Artificial Sequence
  ENSG00000051108_36 (sequence is synthesized)
caaggtgagtgttataataaagatcttggcttatgcaacatgaatgttcctcgtttgcatcaatttaagaataaggtatgtttacacgtatataatcagaacttttaaacatacagaatt

SEQ ID NO: 34789 - DNA, 120 bp, Artificial Sequence
  ENSG00000051108_37 (sequence is synthesized)
ttgctttataaatagcttcgctttaaagatctcttatatatttaacttttcttaatacacagccttttagtacacacaaatttaaaaagtaggtaatgcatatattgaaaaaaaaaagaa

SEQ ID NO: 34790 - DNA, 120 bp, Artificial Sequence
  ENSG00000051108_38 (sequence is synthesized)
aatgtaggcgttttatccttccattgtgctgaccgcttggttgccgtcatgataggaaattagtgctgctgcaggagaaaacagctgtcgtaagcattgtgcagctgctttgctgagtgg

SEQ ID NO: 34791 - DNA, 120 bp, Artificial Sequence
  ENSG00000051108_39 (sequence is synthesized)
ctttgtgctttattgtaacaatgggtgacaacaagggagagactgtttaagaagtgtccttccaaagacttgggggtactaggaaaattggccaatttcttataactattaaagcttttc

SEQ ID NO: 34792 - DNA, 120 bp, Artificial Sequence
  ENSG00000051108_40 (sequence is synthesized)
tttagagcaaaagtcagaactaaatgctctgttatttggatttttatagctcttggaatacattgtttttggggaaaaattcattaactgcaagttgcaattctgtaactctccaattct

SEQ ID NO: 34793 - DNA, 80 bp, Artificial Sequence
  ENSG00000051128_0 (sequence is synthesized)
cgggagccagggagcgagcggggcgcccggcagcgcggagtcagcgccgcgggggccgcacccgactcgcgcctggacac

SEQ ID NO: 34794 - DNA, 120 bp, Artificial Sequence
  ENSG00000051128_1 (sequence is synthesized)
cgcacccgactcgcgcctggacactcgcggggcgccgacctggcagggggccaaaccagtgctcctgccacctctctggctgccccctagagcctgcccatcccagcctgaccaatgtcc

SEQ ID NO: 34795 - DNA, 120 bp, Artificial Sequence
  ENSG00000051128_2 (sequence is synthesized)
acagccagggagcagccaatcttcagcacacgggcgcacgtgttccaaattgacccagccaccaagcgaaactggatcccagcgggcaagcacgcactcactgtctcctatttctacgat

SEQ ID NO: 34796 - DNA, 120 bp, Artificial Sequence
  ENSG00000051128_3 (sequence is synthesized)
gccacccgcaatgtgtaccgcatcatcagcatcggaggcgccaaggccatcatcaacagcactgtcactcccaacatgaccttcaccaaaacttcccagaagttcgggcagtgggccgac

SEQ ID NO: 34797 - DNA, 120 bp, Artificial Sequence
  ENSG00000051128_4 (sequence is synthesized)
agtcgcgccaacacagtctacggcctgggctttgcctctgaacagcatctgacacagtttgccgagaagttccaggaagtgaaggaagcagccaggctggccagggagaaatctcaggat

SEQ ID NO: 34798 - DNA, 120 bp, Artificial Sequence
  ENSG00000051128_5 (sequence is synthesized)
ggcggggagctcaccagtccagccctggggctcgcctcccaccaggtgcccccgagccctctcgtcagtgccaacggccccggcgaggaaaaactgttccgcagccagagcgctgatgcc

SEQ ID NO: 34799 - DNA, 120 bp, Artificial Sequence
  ENSG00000051128_6 (sequence is synthesized)
cccggccccacagagcgcgagcggctaaagaagatgttgtctgagggctccgtgggcgaggtacagtgggaggccgagtttttcgcactgcaggacagcaacaacaagctggcaggcgcc

SEQ ID NO: 34800 - DNA, 120 bp, Artificial Sequence
  ENSG00000051128_7 (sequence is synthesized)
ctgcgagaggccaacgccgccgcagcccagtggaggcagcagctggaggctcagcgtgcagaggccgagcggctgcggcagcgggtggctgagctggaggctcaggcagcttcagaggtg

SEQ ID NO: 34801 - DNA, 120 bp, Artificial Sequence
  ENSG00000051128_8 (sequence is synthesized)
acccccaccggtgagaaggaggggctgggccagggccagtcgctggaacagctggaagctctggtgcaaaccaaggaccaggagattcagaccctgaagagtcagactggggggccccgc

SEQ ID NO: 34802 - DNA, 120 bp, Artificial Sequence
  ENSG00000051128_9 (sequence is synthesized)
gaggccctggaggctgccgagcgtgaggagactcagcagaaggtgcaggacctggagacccgcaatgcggagttggagcaccagctgcgggcgatggagcgcagcctggaggaggcacgg

SEQ ID NO: 34803 - DNA, 120 bp, Artificial Sequence
  ENSG00000051128_10 (sequence is synthesized)
gcagagcgggagcgggcgcgggctgaggtgggccgggcagcgcagctgctggacgtcagcctgtttgagctgagtgagctgcgtgagggcctggcccgcctggctgaggctgcgccctga

SEQ ID NO: 34804 - DNA, 120 bp, Artificial Sequence
  ENSG00000051128_11 (sequence is synthesized)
gccggggctggttttctatgaacgattccggcctgggatgcgggccaggctgcaggcggcatagttgggcccattcgtcctggaaagggactggggggtcccaacttagccctgggtggg

SEQ ID NO: 34805 - DNA, 120 bp, Artificial Sequence
  ENSG00000051128_12 (sequence is synthesized)
ccgggccgggctgggctggggtgggccccagtcggctctggttgttggcagctttggggctgtttttgagcttctcattgtgtagaatttctagatcccccgattacatttctaagcgtg

SEQ ID NO: 34806 - DNA, 120 bp, Artificial Sequence
  ENSG00000051128_13 (sequence is synthesized)
caataaccaggacaatgagaaatttacatctggatgtcagcggccaccaggctcctctcagagggccatctcctgtacagggtgttgtgggggcttcccctagacaaagaaagatggggt

SEQ ID NO: 34807 - DNA, 120 bp, Artificial Sequence
  ENSG00000051128_14 (sequence is synthesized)
ctgcttgctctgagttatctataataattatcttacctttttgtttctttttataatttctttcttttttgagacagggtctcactctcttgtccaggctggagtgcagtggcctgacca

SEQ ID NO: 34808 - DNA, 85 bp, Artificial Sequence
  ENSG00000051128_15 (sequence is synthesized)
ggcaggcacatgccaccacacccagctaattgtttaaatttttggtagagatggggtctcgccatgttgctcaggatggtctcga

SEQ ID NO: 34809 - DNA, 120 bp, Artificial Sequence
  ENSG00000051128_16 (sequence is synthesized)
tagagatggggtctcgccatgttgctcaggatggtctcgaactcctgggctcaaaggatcctcctgactcagcctcccaaagcaccaggtgtactttgggcctctcctgcctttttgatt

SEQ ID NO: 34810 - DNA, 120 bp, Artificial Sequence
  ENSG00000051128_17 (sequence is synthesized)
gaaagttccatgacgggcacacctggtgatgggtcctgagatggaacctgcttggcctccctcagcctggcctgagggacactcatagtccctcctctctccctaggggccaaaccagtg

SEQ ID NO: 34811 - DNA, 120 bp, Artificial Sequence
  ENSG00000051128_18 (sequence is synthesized)
aaacgctgcaagtcgcagcaggagctgccggaccggaagggcctgggttccggggacccctgtgttccccaactcccacccggcgcaggacccgcccccagtccaggccagagctgccgc

SEQ ID NO: 34812 - DNA, 120 bp, Artificial Sequence
  ENSG00000051128_19 (sequence is synthesized)
cccacccccactcaggggctccggtttcagaccctgtgaccaggacagcagctgcccaggacaggatagggggggcatcccccctttgaccacagaggccgctgggccagggcctcccct

SEQ ID NO: 34813 - DNA, 120 bp, Artificial Sequence
  ENSG00000051128_20 (sequence is synthesized)
cccccacctgtcttccccctcctccaaactcctccttggtcccctgcagattcggggttgctgaatggcccaatggggaggttggggagccctggtctcccagtgtggattctgctctgc

SEQ ID NO: 34814 - DNA, 120 bp, Artificial Sequence
  ENSG00000051128_21 (sequence is synthesized)
cctcatggtgggcattgggattggctgtttgtctacatcttgtctttttaacttggctgggggctccctggggatttggactctggacttcaaggggccaaaccagtgctcctgccacct

SEQ ID NO: 34815 - DNA, 120 bp, Artificial Sequence
  ENSG00000051128_22 (sequence is synthesized)
taagccttcccaggccctagtctctatctcctgaaagggttcagagtaaagaccttcaagaccctaatacaaggtaatacctggggggtttcatgtttgttagtatctgtcccatctacc

SEQ ID NO: 34816 - DNA, 120 bp, Artificial Sequence
  ENSG00000051128_23 (sequence is synthesized)
ttgaactttgttccccgaccctaggccatcatcaacagcactgtcactcccaacatgaccttcaccaaaacttcccagaagttcgggcagtgggccgacagtcgcgccaacacagtctac

SEQ ID NO: 34817 - DNA, 120 bp, Artificial Sequence
  ENSG00000051128_24 (sequence is synthesized)
ctgccgagcgtgaggagactcagcagaaggtgcaggtgtgtgtgggcacaaggaggtggggtgacggtgggtgacagtcacctcaacagacactcaggacaatatctacctaagatgata

SEQ ID NO: 34818 - DNA, 120 bp, Artificial Sequence
  ENSG00000051128_25 (sequence is synthesized)
aggggtccggacgtcccggacccagggactggaggggtggcagggggtcctcgaagtttaggagtctaggacaacgcggaggaccggggtcccggacccagttagaggaggagtcacgaa

SEQ ID NO: 34819 - DNA, 120 bp, Artificial Sequence
  ENSG00000051128_26 (sequence is synthesized)
gggagtccccggagttaccgacctggggttggaggaggcagaagaggtgtcccccgaagttctggacccagagacagggggcgtcgcgggaatctcggaagttccagggtcagagcccgc

SEQ ID NO: 34820 - DNA, 120 bp, Artificial Sequence
  ENSG00000051128_27 (sequence is synthesized)
gtcccggagttggggcgtgcactgggtgtcctgcctcgggtggggatgggatcctgaattaatattaacccccccgtcccccgcactcgggtgcatgggatggggcctcatccaccggcc

SEQ ID NO: 34821 - DNA, 120 bp, Artificial Sequence
  ENSG00000051128_28 (sequence is synthesized)
acccgactcgcgcctggacactcgcggggcgccgacctggcaggattggggatcccgggcaccgggcggtgtcggacccccctccgggagccccgtggccggcggcatccgaggcgcatg

SEQ ID NO: 34822 - DNA, 120 bp, Artificial Sequence
  ENSG00000051180_0 (sequence is synthesized)
aattctgaaagccgctggcggaccgcgcgcagcggccagagaccgagccctaaggagagtgcggcgcttcccgaggcgtgcagctgggaactgcaactcatctgggttgtgcgcagaagg

SEQ ID NO: 34823 - DNA, 120 bp, Artificial Sequence
  ENSG00000051180_1 (sequence is synthesized)
ctggggcaagcgagtagagaagtggagcgtaagccaggggcgttgggggccgtgcgggtcgggcgcgtgccacgcccgcggggtgaagtcggagcgcggggcctgctggagagaggagcg

SEQ ID NO: 34824 - DNA, 120 bp, Artificial Sequence
  ENSG00000051180_2 (sequence is synthesized)
ctgcggaccgagtaatggcaatgcagatgcagcttgaagcaaatgcagatacttcagtggaagaagaaagctttggcccacaacccatttcacggttagagcagtgtggcataaatgcca

SEQ ID NO: 34825 - DNA, 120 bp, Artificial Sequence
  ENSG00000051180_3 (sequence is synthesized)
acgatgtgaagaaattggaagaagctggattccatactgtggaggctgttgcctatgcgccaaagaaggagctaataaatattaagggaattagtgaagccaaagctgataaaattctgg

SEQ ID NO: 34826 - DNA, 120 bp, Artificial Sequence
  ENSG00000051180_4 (sequence is synthesized)
ctgaggcagctaaattagttccaatgggtttcaccactgcaactgaattccaccaaaggcggtcagagatcatacagattactactggctccaaagagcttgacaaactacttcaaggtg

SEQ ID NO: 34827 - DNA, 120 bp, Artificial Sequence
  ENSG00000051180_5 (sequence is synthesized)
gaattgagactggatctatcacagaaatgtttggagaattccgaactgggaagacccagatctgtcatacgctagctgtcacctgccagcttcccattgaccggggtggaggtgaaggaa

SEQ ID NO: 34828 - DNA, 120 bp, Artificial Sequence
  ENSG00000051180_6 (sequence is synthesized)
aggccatgtacattgacactgagggtacctttaggccagaacggctgctggcagtggctgagaggtatggtctctctggcagtgatgtcctggataatgtagcatatgctcgagcgttca

SEQ ID NO: 34829 - DNA, 120 bp, Artificial Sequence
  ENSG00000051180_7 (sequence is synthesized)
acacagaccaccagacccagctcctttatcaagcatcagccatgatggtagaatctaggtatgcactgcttattgtagacagtgccaccgccctttacagaacagactactcgggtcgag

SEQ ID NO: 34830 - DNA, 120 bp, Artificial Sequence
  ENSG00000051180_8 (sequence is synthesized)
gtgagctttcagccaggcagatgcacttggccaggtttctgcggatgcttctgcgactcgctgatgagtttggtgtagcagtggtaatcactaatcaggtggtagctcaagtggatggag

SEQ ID NO: 34831 - DNA, 120 bp, Artificial Sequence
  ENSG00000051180_9 (sequence is synthesized)
cagcgatgtttgctgctgatcccaaaaaacctattggaggaaatatcatcgcccatgcatcaacaaccagattgtatctgaggaaaggaagaggggaaaccagaatctgcaaaatctacg

SEQ ID NO: 34832 - DNA, 120 bp, Artificial Sequence
  ENSG00000051180_10 (sequence is synthesized)
ccattaatgcagatggagtgggagatgccaaagactgaatcattgggtttttcctctgttaaaaaccttaagtgctgcagcctaatgagagtgcactgctccctggggttctctacaggc

SEQ ID NO: 34833 - DNA, 120 bp, Artificial Sequence
  ENSG00000051180_11 (sequence is synthesized)
ctcttcctgttgtgactgccaggataaagcttccgggaaaacagctattatatcagcttttctgatggtataaacaggagacaggtcagtagtcacaaactgatctaaaatgtttattcc

SEQ ID NO: 34834 - DNA, 120 bp, Artificial Sequence
  ENSG00000051180_12 (sequence is synthesized)
ttctgtagtgtattaatctctgtgtgttttctttggttttggaggaggggtatgaagtatctttgacatggtgccttaggaatgacttgggtttaacaagctgtctactggacaatctta

SEQ ID NO: 34835 - DNA, 120 bp, Artificial Sequence
  ENSG00000051180_13 (sequence is synthesized)
tgtttccaagagaactaaagctggagagacctgacccttctctcacttctaaattaatggtaaaataaaatgcctcagctatgtagcaaagggaatgggtctgcacagattctttttttc

SEQ ID NO: 34836 - DNA, 120 bp, Artificial Sequence
  ENSG00000051180_14 (sequence is synthesized)
tgtcagtaaaactctcaagcaggtttttaagttgtctgtctgaatgatcttgtgtaaggttttggttatggagtcttgtgccaaacctactaggccattagcccttcaccatctacctgc

SEQ ID NO: 34837 - DNA, 120 bp, Artificial Sequence
  ENSG00000051180_15 (sequence is synthesized)
gcccttcaccatctacctgcttggtctttcattgctaagactaactcaagataatcctagagtcttaaagcatttcaggccagtgtggtgtcttgcgcctgtactcccagcactttggga

SEQ ID NO: 34838 - DNA, 120 bp, Artificial Sequence
  ENSG00000051180_16 (sequence is synthesized)
ttgagcccaggagttttaagtccagcttggccaaggtggtgaaatcccatctctacaaaaaatgcagaacttaatctggacacactgttacacgtgcctgtagtcccagctactcgatag

SEQ ID NO: 34839 - DNA, 120 bp, Artificial Sequence
  ENSG00000051180_17 (sequence is synthesized)
cctgaggtgggagaatcacttaagcctggaaggtggaagttgcagtgagtcgagattgcactgctgcattccagccagggtgacagagtgagaccatgtttcaaacaagaaacatttcag

SEQ ID NO: 34840 - DNA, 120 bp, Artificial Sequence
  ENSG00000051180_18 (sequence is synthesized)
agggtaagtaaacagatttgattgtgaggcttctaataaagtagttattagtagtgaatgtgctgtttatagcaattattgcagtgcaagctatttcaagacagggtttccataatcttt

SEQ ID NO: 34841 - DNA, 120 bp, Artificial Sequence
  ENSG00000051180_19 (sequence is synthesized)
ttggcactgtataggggtgatcagtttctgttgcttcaagatttgaaaccagaaaggaaagtcccacttgcagatgattgtgcttaaaagctaatggaaaaataaaagaaagacatacca

SEQ ID NO: 34842 - DNA, 83 bp, Artificial Sequence
  ENSG00000051180_20 (sequence is synthesized)
agggaattagtgaagccaaagctgataaaattctagcgtgatcttggtctactgcaccctccgcctctcaggttcaagtgatt

SEQ ID NO: 34843 - DNA, 120 bp, Artificial Sequence
  ENSG00000051180_21 (sequence is synthesized)
gaggtgagtgtgtgaggcgcaggctgggccctccagagccgcggctcgtcctcgcccacctgcgtcctggccggtccagtgctcagcggcagttggggcctccgcgcgcagtgtgaaacc

SEQ ID NO: 34844 - DNA, 120 bp, Artificial Sequence
  ENSG00000051180_22 (sequence is synthesized)
cggacgtggcagggcgtgtccgcgcccgaccgaccctcagctgctggggcgaaaacacaagtggacctcagtctttagaactaggggagaaacattagagcctttataggcaacacctat

SEQ ID NO: 34845 - DNA, 120 bp, Artificial Sequence
  ENSG00000051180_23 (sequence is synthesized)
cagggcttccggattcctgatctgtctttccattacaccgtgcttagaaagtaccaatctccgattgccaaaacagtgttttcatcatctaatgcggaaaaccattcacatgatgcctag

SEQ ID NO: 34846 - DNA, 120 bp, Artificial Sequence
  ENSG00000051341_0 (sequence is synthesized)
gagtttgaagactggcgggaagatgtccgcagctgttgccaggccagggttctcccgagagggaggacgctgggactgtggcttgccctgatcggccgagaagagtttgccatgaatctt

SEQ ID NO: 34847 - DNA, 120 bp, Artificial Sequence
  ENSG00000051341_1 (sequence is synthesized)
ctgcgtcggagtgggaaacggcggcgttcagaatcaggctcagattcgttctcgggaagcggcggtgacagcagtgccagcccccagttcctctccgggtccgtgctgagcccgccgccc

SEQ ID NO: 34848 - DNA, 120 bp, Artificial Sequence
  ENSG00000051341_2 (sequence is synthesized)
ggccttggtcgctgcctgaaggccgcagctgcaggagaatgcaagcctacagttcctgactacgaaagagacaagctactattggcaaactggggacttcctaaagcagttctggaaaaa

SEQ ID NO: 34849 - DNA, 120 bp, Artificial Sequence
  ENSG00000051341_3 (sequence is synthesized)
taccacagttttggtgtaaaaaagatgtttgaatggcaggcagagtgccttttgcttggacaagtcctggaaggaaagaatttagtttattcagctcctacaagtgctgggaagactctt

SEQ ID NO: 34850 - DNA, 120 bp, Artificial Sequence
  ENSG00000051341_4 (sequence is synthesized)
gtggcagaattacttattttgaagcgggttttggaaatgcggaagaaagctttgtttattcttccctttgtttctgtggctaaagagaagaaatactacctccagagtctgtttcaggaa

SEQ ID NO: 34851 - DNA, 120 bp, Artificial Sequence
  ENSG00000051341_5 (sequence is synthesized)
gtaggaataaaagtagacggttatatgggcagcacctctccatcaaggcatttctcttcattggatattgcagtctgcacaattgagagagccaatggtctgatcaatcgcctcatagag

SEQ ID NO: 34852 - DNA, 120 bp, Artificial Sequence
  ENSG00000051341_6 (sequence is synthesized)
gaaaataagatggatctgttaggaatggtggttgtggatgaattacatatgctgggagactctcaccgagggtatctgctggaacttttgctgaccaagatttgctatattactcggaaa

SEQ ID NO: 34853 - DNA, 120 bp, Artificial Sequence
  ENSG00000051341_7 (sequence is synthesized)
tcagcatcttgtcaggcagatctagccagttctctgtctaatgctgtgcaaatcgttggcatgagtgctacccttcctaatttggagcttgtggcttcctggttgaatgctgaactctac

SEQ ID NO: 34854 - DNA, 120 bp, Artificial Sequence
  ENSG00000051341_8 (sequence is synthesized)
cataccgactttcgccctgtaccgcttttggagtcagtaaaagttggaaattccatatatgactcttcaatgaaacttgtgagggaatttgagcccatgctacaagtgaagggagatgag

SEQ ID NO: 34855 - DNA, 120 bp, Artificial Sequence
  ENSG00000051341_9 (sequence is synthesized)
gaccatgttgttagtttatgttatgagacgatttgtgataaccattcagtattacttttttgtccatcaaagaaatggtgtgagaagctggcagatatcattgctcgagagttttataat

SEQ ID NO: 34856 - DNA, 120 bp, Artificial Sequence
  ENSG00000051341_10 (sequence is synthesized)
ctacatcatcaagctgagggattggtgaaaccctctgaatgcccaccagtaattctggaacaaaaagaactcctggaagtgatggatcagttaagacgtttgccttcaggactggactct

SEQ ID NO: 34857 - DNA, 120 bp, Artificial Sequence
  ENSG00000051341_11 (sequence is synthesized)
gtattacagaaaactgtaccatggggagtagcatttcatcatgcaggtcttacttttgaggagagggatatcattgaaggagcctttcgtcaaggtctcattcgggtcttggcggcaact

SEQ ID NO: 34858 - DNA, 120 bp, Artificial Sequence
  ENSG00000051341_12 (sequence is synthesized)
tctactctttcttctggggtgaatttacctgcacgtcgtgtgattattcgaacccctatttttggtggtcgacctctagatattcttacttataagcagatggttggccgtgctggcagg

SEQ ID NO: 34859 - DNA, 120 bp, Artificial Sequence
  ENSG00000051341_13 (sequence is synthesized)
aaaggagtggacacagtaggcgagagtatcttaatttgtaagaactctgagaaatcaaaaggcatagctctccttcagggttctctaaagcctgttcgcagctgtctgcaaagacgagaa

SEQ ID NO: 34860 - DNA, 120 bp, Artificial Sequence
  ENSG00000051341_14 (sequence is synthesized)
ggagaagaagtaactggcagcatgatacgagctattctggagataatagttggtggagtggcaagtacatcacaagatatgcatacttatgctgcctgcacatttttggctgcaagtatg

SEQ ID NO: 34861 - DNA, 120 bp, Artificial Sequence
  ENSG00000051341_15 (sequence is synthesized)
aaagaagggaagcaaggaattcagagaaatcaagagtctgttcagcttggagcgattgaggcctgtgtgatgtggctactagaaaatgaattcatccagagtacagaagccagtgatgga

SEQ ID NO: 34862 - DNA, 120 bp, Artificial Sequence
  ENSG00000051341_16 (sequence is synthesized)
acagaaggaaaggtgtatcatccaacacatcttggttcggccactctttcttcttcactttctccagctgatactttagatatttttgctgacctgcaaagagcaatgaagggctttgtt

SEQ ID NO: 34863 - DNA, 120 bp, Artificial Sequence
  ENSG00000051341_17 (sequence is synthesized)
ttagagaatgatcttcatattctctatctggttacacctatgtttgaggattggactactattgattggtatcgatttttctgtttatgggagaagttgccaacttcaatgaaaagggtg

SEQ ID NO: 34864 - DNA, 120 bp, Artificial Sequence
  ENSG00000051341_18 (sequence is synthesized)
gcagagctagtgggagttgaagaggggttcttggcccgttgtgtgaaaggaaaagtagtagccagaactgagagacagcatcgacaaatggccatccataaaaggtttttcaccagtctt

SEQ ID NO: 34865 - DNA, 120 bp, Artificial Sequence
  ENSG00000051341_19 (sequence is synthesized)
gtgctattagatttaatcagtgaagttcccttaagggaaataaatcagaaatatggatgcaatcgtgggcagattcaatctttgcaacagtcagctgctgtttatgcagggatgattaca

SEQ ID NO: 34866 - DNA, 120 bp, Artificial Sequence
  ENSG00000051341_20 (sequence is synthesized)
gtattttccaaccgtctgggctggcacaacatggaactactactttcccaatttcagaagcgtcttacgtttggcatccagagggagctgtgtgacctggttcgggtatccttactaaat

SEQ ID NO: 34867 - DNA, 120 bp, Artificial Sequence
  ENSG00000051341_21 (sequence is synthesized)
gctcagagagccagggttctctatgcttctggctttcatactgtggcagaccttgctagagcaaatattgtggaggtggaggtgattctgaaaaatgctgtgcctttcaaaagtgcccgg

SEQ ID NO: 34868 - DNA, 120 bp, Artificial Sequence
  ENSG00000051341_22 (sequence is synthesized)
aaggcagtggatgaggaagaggaagcagttgaagaacgtcgcaatatgcgaactatctgggtgactggcagaaaaggtttaactgaaagggaagcagcagcccttatagtggaagaagcc

SEQ ID NO: 34869 - DNA, 120 bp, Artificial Sequence
  ENSG00000051341_23 (sequence is synthesized)
agaatgattctgcagcaggacttagttgaaatgggagtgcaatggaatccatgtgccctgttacattctagtacatgctcattgactcatagtgagtccgaagtaaaggaacacacattt

SEQ ID NO: 34870 - DNA, 120 bp, Artificial Sequence
  ENSG00000051341_24 (sequence is synthesized)
atatcccaaactaagagttcttataaaaaattaacatcaaagaacaaaagtaacacaatatttagtgattcttatattaagcattcaccaaatatagtgcaagacttaaataaaagtaga

SEQ ID NO: 34871 - DNA, 120 bp, Artificial Sequence
  ENSG00000051341_25 (sequence is synthesized)
gagcatacaagttcctttaattgtaatttccagaatgggaatcaagaacatcagacatgttccattttcagagcaagaaaacgggcctctttagatataaataaagagaagccaggagcc

SEQ ID NO: 34872 - DNA, 120 bp, Artificial Sequence
  ENSG00000051341_26 (sequence is synthesized)
tctcagaatgaggggaaaacaagtgataagaaagttgttcagactttttcacagaaaacaaaaaaggcacctttgaatttcaattcagaaaagatgagcagaagttttcgatcttggaaa

SEQ ID NO: 34873 - DNA, 120 bp, Artificial Sequence
  ENSG00000051341_27 (sequence is synthesized)
cgtagaaagcatctaaagcgatctagggacagcagccccctgaaagactctggagcgtgtagaatccatttacaaggacagactctgtctaatcctagtctttgtgaagacccgtttacc

SEQ ID NO: 34874 - DNA, 120 bp, Artificial Sequence
  ENSG00000051341_28 (sequence is synthesized)
ttagatgagaagaaaacggaatttagaaattcagggccatttgctaaaaatgtatctttgagtggtaaggaaaaagataataaaacatcattcccattacaaataaagcaaaattgttca

SEQ ID NO: 34875 - DNA, 120 bp, Artificial Sequence
  ENSG00000051341_29 (sequence is synthesized)
tggaacataacactaactaatgataattttgtggagcatattgtcacaggatctcagagtaaaaatgtgacttgtcaggccactagtgtggttagtgaaaagggcagaggagtagctgtt

SEQ ID NO: 34876 - DNA, 120 bp, Artificial Sequence
  ENSG00000051341_30 (sequence is synthesized)
gaggcagaaaaaataaatgaagtgctgatacaaaatggttcaaaaaaccagaatgtttatatgaaacaccatgacatccatccaattaaccagtacctgcgaaagcaatctcatgaacag

SEQ ID NO: 34877 - DNA, 120 bp, Artificial Sequence
  ENSG00000051341_31 (sequence is synthesized)
acaagcactattaccaaacagaaaaatataatagagagacaaatgccctgtgaagcagtcagtagttacataaatagagactcaaatgttactatcaattgtgaaaggataaagcttaat

SEQ ID NO: 34878 - DNA, 120 bp, Artificial Sequence
  ENSG00000051341_32 (sequence is synthesized)
acagaggaaaataaaccaagtcattttcaggcattaggagatgatataagcagaactgtgatacccagtgaagtacttccatcagctggagcatttagcaaatcagaaggccagcatgag

SEQ ID NO: 34879 - DNA, 120 bp, Artificial Sequence
  ENSG00000051341_33 (sequence is synthesized)
aattttctaaatatttctagactacaagaaaaaacaggtacttatacaacaaacaaaactaaaaataatcatgtttctgacttaggtttagtcctctgtgattttgaagatagtttctat

SEQ ID NO: 34880 - DNA, 120 bp, Artificial Sequence
  ENSG00000051341_34 (sequence is synthesized)
ctggatactcagtcagagaaaataatacaacagatggcaactgaaaatgccaaactaggagcaaaggacaccaacctggcagcagggataatgcagaagagcttagtccaacagaactca

SEQ ID NO: 34881 - DNA, 120 bp, Artificial Sequence
  ENSG00000051341_35 (sequence is synthesized)
atgaactcttttcagaaggagtgtcacattccttttcctgctgaacagcaccctctaggagcgactaagatagatcatttggaccttaagactgtaggtactatgaaacaaagcagtgat

SEQ ID NO: 34882 - DNA, 120 bp, Artificial Sequence
  ENSG00000051341_36 (sequence is synthesized)
aatagttttcttcaaggttatcaaacacaagaaactgtgaaaccagttatacttctgattcctcaaaagagaactcccactggtgtagaaggagaatgtcttccagttcctgaaacaagt

SEQ ID NO: 34883 - DNA, 120 bp, Artificial Sequence
  ENSG00000051341_37 (sequence is synthesized)
ttgaatatgagtgatagtttactatttgatagcttcagtgatgactatctagtaaaagaacaattacctgatatgcaaatgaaagaaccccttccttcagaagtaacatcaaaccatttt

SEQ ID NO: 34884 - DNA, 120 bp, Artificial Sequence
  ENSG00000051341_38 (sequence is synthesized)
agtgattctctgtgtctacaagaagacctaattaaaaaatcaaatgtaaatgagaatcaagatacccaccagcagttgacttgttccaatgatgaatctattatattttcagaaatggat

SEQ ID NO: 34885 - DNA, 120 bp, Artificial Sequence
  ENSG00000051341_39 (sequence is synthesized)
tctgttcagatggttgaagctttggacaatgtggatatatttcctgtccaagagaagaatcatactgtagtatctcctagagcattagaactaagtgatccagtacttgatgagcaccac

SEQ ID NO: 34886 - DNA, 120 bp, Artificial Sequence
  ENSG00000051341_40 (sequence is synthesized)
caaggtgatcaagatggaggagatcaagatgaaagggctgaaaaatcaaaattaactgggaccaggcaaaatcattcattcatatggtcaggggcatcatttgatctaagtccaggactg

SEQ ID NO: 34887 - DNA, 120 bp, Artificial Sequence
  ENSG00000051341_41 (sequence is synthesized)
caaaggattttagataaagtatccagtcctctagaaaatgaaaagctaaaatcaatgactataaacttttccagtttgaatagaaaaaatacagagttaaatgaagaacaagaagttatt

SEQ ID NO: 34888 - DNA, 120 bp, Artificial Sequence
  ENSG00000051341_42 (sequence is synthesized)
tcaaacttggagacaaaacaagtgcagggaatttcattttcttctaataatgaagtaaaaagcaagattgagatgctagaaaacaatgccaatcatgatgaaacctcatccctcttacct

SEQ ID NO: 34889 - DNA, 120 bp, Artificial Sequence
  ENSG00000051341_43 (sequence is synthesized)
cgtaaagaaagtaatatagttgatgataatggtctcattcctcctacacccattccaacatctgcttctaagctgacatttccagggattcttgaaacacctgtaaacccttggaaaact

SEQ ID NO: 34890 - DNA, 120 bp, Artificial Sequence
  ENSG00000051341_44 (sequence is synthesized)
aataatgttttacaacctggtgaaagttatttatttggctcaccttcagatattaaaaaccacgatttaagtccagggagtagaaatgggttcaaagacaacagccctattagtgacaca

SEQ ID NO: 34891 - DNA, 120 bp, Artificial Sequence
  ENSG00000051341_45 (sequence is synthesized)
agcttttcacttcagttatcacaggatggattacagttaactccagcctcaagcagttcagaaagtttgtccataattgatgtagcaagtgaccaaaatcttttccaaacattcattaag

SEQ ID NO: 34892 - DNA, 120 bp, Artificial Sequence
  ENSG00000051341_46 (sequence is synthesized)
gagtggcggtgcaaaaagcgattttccatctcactggcttgtgaaaagattagaagtttgacatcttctaaaactgctactattggcagtaggtttaagcaagctagctcacctcaggaa

SEQ ID NO: 34893 - DNA, 120 bp, Artificial Sequence
  ENSG00000051341_47 (sequence is synthesized)
attcctattagagatgatggatttcccattaaaggttgtgatgacaccttggtggttggactggcagtatgctggggtggaagggatgcctattatttttcactgcagaaggaacaaaag

SEQ ID NO: 34894 - DNA, 120 bp, Artificial Sequence
  ENSG00000051341_48 (sequence is synthesized)
cattctgaaattagtgccagtttggttccaccttctttagatccaagcctgactttgaaagacaggatgtggtaccttcaatcttgcttgcgaaaggaatctgataaagaatgttctgtt

SEQ ID NO: 34895 - DNA, 120 bp, Artificial Sequence
  ENSG00000051341_49 (sequence is synthesized)
gtcatctatgacttcatccagagctataaaattcttcttctttcttgtggcatctccttggagcaaagttatgaagatcctaaggtggcatgctggttactagatccagattctcaggag

SEQ ID NO: 34896 - DNA, 120 bp, Artificial Sequence
  ENSG00000051341_50 (sequence is synthesized)
ccgactcttcatagcatagttaccagttttcttcctcatgagcttccactcctagaagggatggagaccagccaagggattcaaagcctggggctaaatgctggcagtgagcattctggg

SEQ ID NO: 34897 - DNA, 120 bp, Artificial Sequence
  ENSG00000051341_51 (sequence is synthesized)
cgatacagagcatctgtggagtccattctcatcttcaactctatgaatcagctcaactctttgttgcagaaggaaaaccttcaagatgttttccgtaaggtggaaatgccctctcagtac

SEQ ID NO: 34898 - DNA, 120 bp, Artificial Sequence
  ENSG00000051341_52 (sequence is synthesized)
tgcttggccttgctagaactaaatggaattggctttagtactgcagaatgtgaaagtcagaaacatataatgcaagccaagctggatgcaattgagacccaggcctatcaactagctggc

SEQ ID NO: 34899 - DNA, 120 bp, Artificial Sequence
  ENSG00000051341_53 (sequence is synthesized)
cacagtttttctttcaccagttcagatgacatcgctgaggttttatttttggaattgaagttgcccccaaatagagagatgaaaaaccaaggcagcaagaaaactctgggttctaccaga

SEQ ID NO: 34900 - DNA, 120 bp, Artificial Sequence
  ENSG00000051341_54 (sequence is synthesized)
agagggattgacaatggacgcaagctaaggctgggaagacagttcagcactagtaaggacgttttaaataaattaaaggcattacatcctttaccaggcttgatattagaatggagaaga

SEQ ID NO: 34901 - DNA, 120 bp, Artificial Sequence
  ENSG00000051341_55 (sequence is synthesized)
atcactaatgctattaccaaagtggtctttccccttcagcgggaaaagtgtcttaatccttttcttggaatggaaagaatctatcctgtatcacagtcgcacactgctacaggacgaata

SEQ ID NO: 34902 - DNA, 120 bp, Artificial Sequence
  ENSG00000051341_56 (sequence is synthesized)
acctttacagaaccaaatattcagaatgtgccaagagattttgaaatcaaaatgccaacactagtaggagaaagcccaccttctcaagctgtaggcaaaggcctacttcccatgggcaga

SEQ ID NO: 34903 - DNA, 120 bp, Artificial Sequence
  ENSG00000051341_57 (sequence is synthesized)
ggaaaatataagaagggtttcagcgtgaatcctagatgccaggcacagatggaggagagagctgcagacagaggaatgccattttcaattagcatgcgacatgcctttgtgcctttccca

SEQ ID NO: 34904 - DNA, 120 bp, Artificial Sequence
  ENSG00000051341_58 (sequence is synthesized)
ggtggttcaatactggctgctgactactctcagcttgaactgaggatcttggctcatttatcccatgatcgtcgtctcattcaagtgttaaacactggagctgatgttttcaggagcatt

SEQ ID NO: 34905 - DNA, 120 bp, Artificial Sequence
  ENSG00000051341_59 (sequence is synthesized)
gcagcagagtggaagatgattgagccagagtctgttggggatgatctgaggcagcaggcaaaacagatttgctatgggatcatttatggaatgggagctaaatctttgggagagcagatg

SEQ ID NO: 34906 - DNA, 120 bp, Artificial Sequence
  ENSG00000051341_60 (sequence is synthesized)
ggcattaaagaaaatgatgctgcatgctatattgactccttcaaatccagatacacagggattaatcaattcatgacagagacagtgaagaattgtaaaagagacggatttgttcagacc

SEQ ID NO: 34907 - DNA, 120 bp, Artificial Sequence
  ENSG00000051341_61 (sequence is synthesized)
attttgggaaggcgtagatatttgccaggaatcaaagacaacaacccttatcgtaaagctcacgctgagcgtcaagctatcaacacaatagtccaaggatcagcagctgatattgtcaaa

SEQ ID NO: 34908 - DNA, 120 bp, Artificial Sequence
  ENSG00000051341_62 (sequence is synthesized)
atagccacagttaacattcagaagcaattagagaccttccactcaaccttcaaatcccatggtcatcgagagggtatgctccaaagtgaccaaacaggattgtcacgaaagagaaaactg

SEQ ID NO: 34909 - DNA, 120 bp, Artificial Sequence
  ENSG00000051341_63 (sequence is synthesized)
caagggatgttctgcccaatcagaggaggcttcttcatccttcaactccatgatgaactcctatatgaagtggcagaagaagatgttgttcaggtagctcagattgtcaagaatgaaatg

SEQ ID NO: 34910 - DNA, 120 bp, Artificial Sequence
  ENSG00000051341_64 (sequence is synthesized)
gaaagtgctgtaaaactgtctgtgaaattgaaagtgaaagtgaaaataggcgccagctggggagagctaaaggactttgatgtgtaactgtgctgttgatgaagtcctcccagggaagcc

SEQ ID NO: 34911 - DNA, 120 bp, Artificial Sequence
  ENSG00000051341_65 (sequence is synthesized)
tgtgcagatgcagtcacctggaaagaacagagattaccctttcacctacctcagcaaaacaaactttcaagtcttgatagacttagcctagtaattttatagtgagagtttcaaactata

SEQ ID NO: 34912 - DNA, 120 bp, Artificial Sequence
  ENSG00000051341_66 (sequence is synthesized)
tatcagtgtctatagcatcaaaaacttctgggggcgtgggggaagtagaataccaagtataatagttacattcactttcaaagagcatctatgaatttgccttttgtaacttactgtggc

SEQ ID NO: 34913 - DNA, 120 bp, Artificial Sequence
  ENSG00000051341_67 (sequence is synthesized)
tttaaacatattcagaacagatgcttgaaatatgcacttagcactttggttccacatctgtctgggtaaaccatgaagaaaatgaagctgctgcctcaatcgacccagacagcagccata

SEQ ID NO: 34914 - DNA, 120 bp, Artificial Sequence
  ENSG00000051341_68 (sequence is synthesized)
ggcagataaagatttggtttcaccctggtggtggtaggcatcgtgtgtgactttttttcctctaatatcaattttacagtacggaaatagtattttaaaatagtattggctaataaatta

SEQ ID NO: 34915 - DNA, 120 bp, Artificial Sequence
  ENSG00000051341_69 (sequence is synthesized)
tgaattctataaagtagtaagacttggtatggttggagtgtaggaatgaatattcatgaaatgtttcttattgcttttccttccctaattcatacaatgaatgtatttggaatacttaca

SEQ ID NO: 34916 - DNA, 120 bp, Artificial Sequence
  ENSG00000051341_70 (sequence is synthesized)
tattataaaataaactatacctcttcaagaggtatcctgttctgtaagatcagatgtttttattgcaggtcaatataatactgccagagacagaaaatacccccttatcagtcccttagt

SEQ ID NO: 34917 - DNA, 120 bp, Artificial Sequence
  ENSG00000051341_71 (sequence is synthesized)
gcctctttctgtttgtggcatggtgagaaaacccatgctgaaaagattgtactttgtgatcccaatcagagggatggagctaatctttttgctgttgaaataaaatgaatttatgagaaa

SEQ ID NO: 34918 - DNA, 120 bp, Artificial Sequence
  ENSG00000051341_72 (sequence is synthesized)
atgaatggtcaccgttttacgttcagaactcgttcgcttctacctttacaaaagggacaacacagatgcattactaagctcttggctcataacgatccctggggtatattcagagcccct

SEQ ID NO: 34919 - DNA, 120 bp, Artificial Sequence
  ENSG00000051341_73 (sequence is synthesized)
tcctcgcggcgttcatatagtgtctcaggggtctgtcagccagcaatccccaattcctcattacatattcctcacaatgcatgctggctaaaatggaaattgtgttcagaaatagccctg

SEQ ID NO: 34920 - DNA, 120 bp, Artificial Sequence
  ENSG00000051341_74 (sequence is synthesized)
agacgtttgccttcaggactggactctgtattacagaaaactgtaccatggggagtagcatttcatcatgcagatttctttttaagaaattgtgtgggctgggcgtggtggctcactcct

SEQ ID NO: 34921 - DNA, 120 bp, Artificial Sequence
  ENSG00000051382_0 (sequence is synthesized)
ggccccgtggttatgaatgtgcttcagtttcataatgcctcctgctatggcagacatccttgacatctgggcggtggattcacagatagcatctgatggctccatacctgtggatttcct

SEQ ID NO: 34922 - DNA, 120 bp, Artificial Sequence
  ENSG00000051382_1 (sequence is synthesized)
tttgcccactgggatttatatccagttggaggtacctcgggaagctaccatttcttatattaagcagatgttatggaagcaagttcacaattacccaatgttcaacctccttatggatat

SEQ ID NO: 34923 - DNA, 120 bp, Artificial Sequence
  ENSG00000051382_2 (sequence is synthesized)
tgactcctatatgtttgcatgtgtgaatcagactgctgtatatgaggagcttgaagatgaaacacgaagactctgtgatgtcagaccttttcttccagttctcaaattagtgacaagaag

SEQ ID NO: 34924 - DNA, 120 bp, Artificial Sequence
  ENSG00000051382_3 (sequence is synthesized)
ttgtgacccaggggaaaaattagactcaaaaattggagtccttataggaaaaggtctgcatgaatttgattccttgaaggatcctgaagtaaatgaatttcgaagaaaaatgcgcaaatt

SEQ ID NO: 34925 - DNA, 120 bp, Artificial Sequence
  ENSG00000051382_4 (sequence is synthesized)
cagcgaggaaaaaatcctgtcacttgtgggattgtcttggatggactggctaaaacaaacatatccaccagagcatgaaccatccatccctgaaaacttagaagataaactttatggggg

SEQ ID NO: 34926 - DNA, 120 bp, Artificial Sequence
  ENSG00000051382_5 (sequence is synthesized)
aaagctcatcgtagctgttcattttgaaaactgccaggacgtgtttagctttcaagtgtctcctaatatgaatcctatcaaagtaaatgaattggcaatccaaaaacgtttgactattca

SEQ ID NO: 34927 - DNA, 120 bp, Artificial Sequence
  ENSG00000051382_6 (sequence is synthesized)
tgggaaggaagatgaagttagcccctatgattatgtgttgcaagtcagcgggagagtagaatatgtttttggtgatcatccactaattcagttccagtatatccggaactgtgtgatgaa

SEQ ID NO: 34928 - DNA, 120 bp, Artificial Sequence
  ENSG00000051382_7 (sequence is synthesized)
cagagccctgccccattttatacttgtggaatgctgcaagatcaagaaaatgtatgaacaagaaatgattgccatagaggctgccataaatcgaaattcatctaatcttcctcttccatt

SEQ ID NO: 34929 - DNA, 120 bp, Artificial Sequence
  ENSG00000051382_8 (sequence is synthesized)
accaccaaagaaaacacgaattatttctcatgtttgggaaaataacaaccctttccaaattgtcttggttaagggaaataaacttaacacagaggaaactgtaaaagttcatgtcagggc

SEQ ID NO: 34930 - DNA, 120 bp, Artificial Sequence
  ENSG00000051382_9 (sequence is synthesized)
tggtctttttcatggtactgagctcctgtgtaaaaccatcgtaagctcagaggtatcagggaaaaatgatcatatttggaatgaaccactggaatttgatattaatatttgtgacttacc

SEQ ID NO: 34931 - DNA, 120 bp, Artificial Sequence
  ENSG00000051382_10 (sequence is synthesized)
aagaatggctcgattatgttttgctgtttatgcagttttggataaagtaaaaacgaagaaatcaacgaaaactattaatccctctaaatatcagaccatcaggaaagctggaaaagtgca

SEQ ID NO: 34932 - DNA, 120 bp, Artificial Sequence
  ENSG00000051382_11 (sequence is synthesized)
ttatcctgtagcgtgggtaaatacgatggtttttgactttaaaggacaattgagaactggagacataatattacacagctggtcttcatttcctgatgaactcgaagaaatgttgaatcc

SEQ ID NO: 34933 - DNA, 120 bp, Artificial Sequence
  ENSG00000051382_12 (sequence is synthesized)
aatgggaactgttcaaacaaatccatatactgaaaatgcaacagctttgcatgttaaatttccagagaataaaaaacaaccttattattaccctcccttcgataagattattgaaaaggc

SEQ ID NO: 34934 - DNA, 120 bp, Artificial Sequence
  ENSG00000051382_13 (sequence is synthesized)
agctgagattgcaagcagtgatagtgctaatgtgtcaagtcgaggtggaaaaaagtttcttcctgtattgaaagaaatcttggacagggatcccttgtctcaactgtgtgaaaatgaaat

SEQ ID NO: 34935 - DNA, 120 bp, Artificial Sequence
  ENSG00000051382_14 (sequence is synthesized)
ggatcttatttggactttgcgacaagactgccgagagattttcccacaatcactgccaaaattactgctgtcaatcaagtggaataaacttgaggatgttgctcagcttcaggcgctgct

SEQ ID NO: 34936 - DNA, 120 bp, Artificial Sequence
  ENSG00000051382_15 (sequence is synthesized)
tcagatttggcctaaactgcccccccgggaggccctagagcttctggatttcaactatccagaccagtacgttcgagaatatgctgtaggctgcctgcgacagatgagtgatgaagaact

SEQ ID NO: 34937 - DNA, 120 bp, Artificial Sequence
  ENSG00000051382_16 (sequence is synthesized)
ttctcaatatcttttacaactggtgcaagtgttaaaatatgagccttttcttgattgtgccctctctagattcctattagaaagagcacttggtaatcggaggatagggcagtttctatt

SEQ ID NO: 34938 - DNA, 120 bp, Artificial Sequence
  ENSG00000051382_17 (sequence is synthesized)
ttggcatcttaggtcagaagtgcacattcctgctgtctcagtacaatttggtgtcatccttgaagcatactgccggggaagtgtggggcacatgaaagtgctttctaagcaggttgaagc

SEQ ID NO: 34939 - DNA, 120 bp, Artificial Sequence
  ENSG00000051382_18 (sequence is synthesized)
actcaataagttaaaaactttaaatagtttaatcaaactgaatgccgtgaagttaaacagagccaaagggaaggaggccatgcatacctgtttaaaacagagtgcttaccgggaagccct

SEQ ID NO: 34940 - DNA, 120 bp, Artificial Sequence
  ENSG00000051382_19 (sequence is synthesized)
ctctgacctgcagtcacccctgaacccatgtgttatcctctcagaactctatgttgaaaagtgcaaatacatggattccaaaatgaagcctttgtggctggtatacaataacaaggtatt

SEQ ID NO: 34941 - DNA, 120 bp, Artificial Sequence
  ENSG00000051382_20 (sequence is synthesized)
tggtgaggattcagttggagtgatttttaaaaatggtgatgatttacgacaggatatgttgacactccaaatgttgcgcttgatggatttactctggaaagaagctggtttggatcttcg

SEQ ID NO: 34942 - DNA, 120 bp, Artificial Sequence
  ENSG00000051382_21 (sequence is synthesized)
gatgttgccttatggctgtttagcaacaggagatcgctctggcctcattgaagttgtgagcacctctgaaacaattgctgacattcagctgaacagtagcaatgtggctgctgcagcagc

SEQ ID NO: 34943 - DNA, 120 bp, Artificial Sequence
  ENSG00000051382_22 (sequence is synthesized)
cttcaacaaagatgcccttctgaactggcttaaagaatacaactctggggatgacctggaccgagccattgaggaatttacactgtcctgtgctggctactgtgtagcttcttatgtcct

SEQ ID NO: 34944 - DNA, 120 bp, Artificial Sequence
  ENSG00000051382_23 (sequence is synthesized)
tgggattggtgacagacatagtgacaacatcatggtcaaaaaaactggccagctcttccacattgactttggacatattcttggaaatttcaaatctaagtttggcattaaaagggagcg

SEQ ID NO: 34945 - DNA, 120 bp, Artificial Sequence
  ENSG00000051382_24 (sequence is synthesized)
tcaacaaggaaaaacaggaaatacagaaaagtttggccggttccgccagtgttgtgaggatgcatatctgattttacgacggcatgggaatctcttcatcactctctttgcgctgatgtt

SEQ ID NO: 34946 - DNA, 120 bp, Artificial Sequence
  ENSG00000051382_25 (sequence is synthesized)
gactgcagggcttcctgaactcacatcagtcaaagatatacagtatcttaaggactctcttgcattagggaagagtgaagaagaagcactcaaacagtttaagcaaaaatttgatgaggc

SEQ ID NO: 34947 - DNA, 120 bp, Artificial Sequence
  ENSG00000051382_26 (sequence is synthesized)
gctcagggaaagctggactactaaagtgaactggatggcccacacagttcggaaagactacagatcttaacgatcagccttcgctcctaatgtatttgttggtttcatttcattttcatt

SEQ ID NO: 34948 - DNA, 120 bp, Artificial Sequence
  ENSG00000051382_27 (sequence is synthesized)
ttgcacttgcactaaattgaacatgaccctgttagagatgttataaagggaatgaaatcctggaactcagagttaaattaagaacaaggcatcccacagaacctaatctgaacaatcccc

SEQ ID NO: 34949 - DNA, 120 bp, Artificial Sequence
  ENSG00000051382_28 (sequence is synthesized)
gatgattccctctgctttttgaatgcttccaagacttatcatgaaaactgtcaatggataatcatttcctgctgactttgcacgccaaggaatgctactagggattgtttccgtttttgt

SEQ ID NO: 34950 - DNA, 120 bp, Artificial Sequence
  ENSG00000051382_29 (sequence is synthesized)
ttgttttttctaatatttggtacttcccagaatggtgtaaatacttcttttcaatgttgtgaccaagtattgtcactcagccaacaacttttccacacctgggggttggtggctgttctt

SEQ ID NO: 34951 - DNA, 120 bp, Artificial Sequence
  ENSG00000051382_30 (sequence is synthesized)
actgtccaaatgaagctaaaaagaaaggcatctttcttcccttttaaaattgtgtaaactgcaaattataatataatttgaatttatgattattttccagaagaaatcttgtaaacctgt

SEQ ID NO: 34952 - DNA, 120 bp, Artificial Sequence
  ENSG00000051382_31 (sequence is synthesized)
ggatactcattaattcttttgttaatatttatttccatgatagcatcattccagccagacttgctgaaaatctactggtgaggcaaatataatatatataaatatgctacatatatattt

SEQ ID NO: 34953 - DNA, 120 bp, Artificial Sequence
  ENSG00000051382_32 (sequence is synthesized)
ataaaatttctagtgggagttctatataaatgtttctttggtattcttcagcctgtgatttaaagttttacaaaaagcagagctttttcctaagttacttttcagttaggtaactgtgtg

SEQ ID NO: 34954 - DNA, 120 bp, Artificial Sequence
  ENSG00000051382_33 (sequence is synthesized)
atccagttcttccagctgcttctataatgaggcacatattaatacagtttttatatggtatctatgaaagagttcacttcatagagaataatacttgagcaaatgtatccaagaaagcaa

SEQ ID NO: 34955 - DNA, 120 bp, Artificial Sequence
  ENSG00000051382_34 (sequence is synthesized)
gcaaatgaaaagaaacctatttatggaataaactccagatctgaaattcagtattttagaaaaatgccagctcttcttactgtatttattaaaacttgtaataatgtgatttttttcaag

SEQ ID NO: 34956 - DNA, 120 bp, Artificial Sequence
  ENSG00000051382_35 (sequence is synthesized)
gatattagttcaaattgaaatggtttcacgccacacggaaatctttaagttatttgttgaggtaccatatatttagggtgctaggggcaagtaatgttaatatgtgcaataggaactact

SEQ ID NO: 34957 - DNA, 120 bp, Artificial Sequence
  ENSG00000051382_36 (sequence is synthesized)
ggtttgaatgtgtaaatgggtgatctctctgagtcctggcaacatccagcaaaactactgcttattctccaaagaatattgggagctctcaatcctcggtgatatgggaaagagaactga

SEQ ID NO: 34958 - DNA, 120 bp, Artificial Sequence
  ENSG00000051382_37 (sequence is synthesized)
gtatttgccctatgactgagctttctataggaattttattaaagaatgtttaattttgttgtccttcttaatgttctcagtcaaataaatgagtgagctggtttcggctgctcttggaat

SEQ ID NO: 34959 - DNA, 120 bp, Artificial Sequence
  ENSG00000051382_38 (sequence is synthesized)
gggtgagcctcttctttatgggtagactgggcctttggaacttggcactggaactccaagaaatggccaagtcagtagacaaaccaacctcaggaataggctaaggcttattatggcctc

SEQ ID NO: 34960 - DNA, 120 bp, Artificial Sequence
  ENSG00000051382_39 (sequence is synthesized)
ttccctgacttctccccttgtttcccagcctcatcaggcatggtataggaggccccctggactttggtgggagcctgaggtaaggagccatgcatatgggaggtgtcctgaagtctgggt

SEQ ID NO: 34961 - DNA, 120 bp, Artificial Sequence
  ENSG00000051382_40 (sequence is synthesized)
agttacttggcactgagccaaggccagactctgctgctttggagctcttgttcatggggcagatgctggagcagtccagttccttggaaataactcagctgaggatgggagttggcccct

SEQ ID NO: 34962 - DNA, 120 bp, Artificial Sequence
  ENSG00000051382_41 (sequence is synthesized)
gaattcctcatttccagggctggtgtagactcactgagacttccaggaatagaactatggaaggacaggtttgttcagagatctttgtctagtagccacccaccatttcatgaaccaggc

SEQ ID NO: 34963 - DNA, 120 bp, Artificial Sequence
  ENSG00000051382_42 (sequence is synthesized)
cgcaggtcagtggtttggagaatggtgaacactgccaggaagaaatggataccattctttccagaggggtctcctcagccaaaaggagggccttgataaatacatgccaaatcagtgaag

SEQ ID NO: 34964 - DNA, 120 bp, Artificial Sequence
  ENSG00000051382_43 (sequence is synthesized)
ttcaagtcaactgtttttcccatatgggcaccaaattgtatctttcctgttttctttgaagggttaagtaacgtgaccatagtcacagagtagttgatggagccagtattcaaacccaga

SEQ ID NO: 34965 - DNA, 120 bp, Artificial Sequence
  ENSG00000051382_44 (sequence is synthesized)
aagtaagaagcctattttaattatctgtgctctttactcacaatgcctcagtatacatttcagatttattgggttccacaaatagaaatctatggaaattttgaatcaaattgcattaag

SEQ ID NO: 34966 - DNA, 120 bp, Artificial Sequence
  ENSG00000051382_45 (sequence is synthesized)
ctatagacaaggttgagacaaattgacatctccagaatattgagttttccaaaatatgtaagtggagtacccatttatttagattatctttcatttatatccgcaatgatttatagtatt

SEQ ID NO: 34967 - DNA, 120 bp, Artificial Sequence
  ENSG00000051382_46 (sequence is synthesized)
ctgtgtttacatattatgcatcgtttgttagattcctgggtaagtgactttattgtaagtttcattgttgttaatctatagcaatcattctccaagtgtggtcccctgatgaggagcatc

SEQ ID NO: 34968 - DNA, 120 bp, Artificial Sequence
  ENSG00000051382_47 (sequence is synthesized)
agcatcaccagagagaactggttaaaaatgcaaattcttaatttttaatttttgtgagtacatagtagatatatatatggggtacatggaatattttgatacaggcatataacatgtaat

SEQ ID NO: 34969 - DNA, 120 bp, Artificial Sequence
  ENSG00000051382_48 (sequence is synthesized)
tatcgcatcagggtaattggggtatccattacctcaagcatttatcctttgtattagaaacaatccagttatactcttttagttattttaagatctataattaaattatcgactatagtt

SEQ ID NO: 34970 - DNA, 120 bp, Artificial Sequence
  ENSG00000051382_49 (sequence is synthesized)
gcccggccaaaaaaaatctctttttaaatatctcctatgattttggttgaatttgttcacctatagaacaaatttatgttgttttctgcttatcattagatgtaaaggagtaaagtccag

SEQ ID NO: 34971 - DNA, 120 bp, Artificial Sequence
  ENSG00000051382_50 (sequence is synthesized)
gttacagttaaagggtttattgaactaattgtcactgctgaagttcctgtgccctctgatagcttccttgaaaagttttcatagtttaaaaactctgcttgtccttagcctttgatctct

SEQ ID NO: 34972 - DNA, 120 bp, Artificial Sequence
  ENSG00000051382_51 (sequence is synthesized)
gttcggcggcggcgcgcgcgtgctctgtcggcctgtgcggcgctgcggcggagcgggccatggcagtggggagggggcgagtgtagtgctgcgcggggcaggcgggaggtgatcgagaga

SEQ ID NO: 34973 - DNA, 120 bp, Artificial Sequence
  ENSG00000051382_52 (sequence is synthesized)
ggcaggcgggaggtgatcgagagaggcagggatgggggcgccggagtggagcggttgcggcggcctgggctgctgactgcgcacttggaatagtagcaggcggcggcggcggaacgccag

SEQ ID NO: 34974 - DNA, 120 bp, Artificial Sequence
  ENSG00000051382_53 (sequence is synthesized)
ttcttaagtacccatagtgcgcacctggcccacatttatcttaagtacccataatctaagtctgcttttctcgaatttgtaagattttgtttaagaaaaggtttaaagaaagtttgaaaa

SEQ ID NO: 34975 - DNA, 120 bp, Artificial Sequence
  ENSG00000051382_54 (sequence is synthesized)
tgatgctataacaactgttaaaaataagtttattgtatgtaaaatgcttttcgtaagtcagacactatttttacttcagctggttatgtgtgtttatggttatgtgtatatgttgggagc

SEQ ID NO: 34976 - DNA, 120 bp, Artificial Sequence
  ENSG00000051382_55 (sequence is synthesized)
caggaaagctggaaaagtgcattatcctgtagcgtgggtaaatacgatggtttttgactttaaaggacaattgagaactggagacataatattacacagctggtcttcatttcctgatta

SEQ ID NO: 34977 - DNA, 120 bp, Artificial Sequence
  ENSG00000051382_56 (sequence is synthesized)
ttatagtttctatgggccacctaattttgatggagagagagcagttccaattaaagtcttttcaagattgagaactaaatttgaattaagaggtaaagtagtcattcagttttgttaact

SEQ ID NO: 34978 - DNA, 120 bp, Artificial Sequence
  ENSG00000051382_57 (sequence is synthesized)
ttctcatttttaaaacatgtatgcaaactcacactgaaattttgttccaagcattaacagaaaattagaggattactgatagaattgtctgtcacacttctgtagttgacatacttctaa

SEQ ID NO: 34979 - DNA, 120 bp, Artificial Sequence
  ENSG00000051382_58 (sequence is synthesized)
tttcatccatgtcattcaacaaggaaaaacaggaaatacagaaaagtttggccggtgagtactgcccttgtgccaaggctgaacacttctaacattttcttatctgaccaggtggaccag

SEQ ID NO: 34980 - DNA, 120 bp, Artificial Sequence
  ENSG00000051382_59 (sequence is synthesized)
attcccagataggagaaacagaatgctagaaatttaaaataattattatattttattccaataatatactaccttttacctgtttcagaacattctctgaaactattaagacagttgata

SEQ ID NO: 34981 - DNA, 120 bp, Artificial Sequence
  ENSG00000051382_60 (sequence is synthesized)
ggaagatgctgaaaagacatctgctgtcattgtgtatggagtacagtaagggaactagaattcagggcaaattttttaatctctgatctattactggctacctacatgttcccaagcata

SEQ ID NO: 34982 - DNA, 120 bp, Artificial Sequence
  ENSG00000051523_0 (sequence is synthesized)
agtgcgcgcctagcagtgtcccagccgggttcgtgtcgccatggggcagatcgagtgggccatgtgggccaacgaacaggcgctggcgtccggcctgatcctcatcaccgggggcatcgt

SEQ ID NO: 34983 - DNA, 120 bp, Artificial Sequence
  ENSG00000051523_1 (sequence is synthesized)
ggccacagctgggcgcttcacccagtggtactttggtgcctactccattgtggcgggcgtgtttgtgtgcctgctggagtacccccgggggaagaggaagaagggctccaccatggagcg

SEQ ID NO: 34984 - DNA, 120 bp, Artificial Sequence
  ENSG00000051523_2 (sequence is synthesized)
cggtgcccgccggcttcctgctggccaccatccttgggaccgcctgcctggccattgcgagcggcatctacctactggcggctgtgcgtggcgagcagtggacgcccatcgagcccaagc

SEQ ID NO: 34985 - DNA, 120 bp, Artificial Sequence
  ENSG00000051523_3 (sequence is synthesized)
tcgagcccaagccccgggagcggccgcagatcggaggcaccatcaagcagccgcccagcaaccccccgccgcggcccccggccgaggcccgcaagaagcccagcgaggaggaggctgcgg

SEQ ID NO: 34986 - DNA, 120 bp, Artificial Sequence
  ENSG00000051523_4 (sequence is synthesized)
gacccccgggaggtccccaggtcaaccccatcccggtgaccgacgaggtcgtgtgacctcgccccggacctgccctcccgccaggtgcacccacctgcaataaatgcagcgaagccggga

SEQ ID NO: 34987 - DNA, 120 bp, Artificial Sequence
  ENSG00000051523_5 (sequence is synthesized)
gaccgccgtggtgaagctgttcgggccctttaccaggaattactatgttcgggccgtcctgcatctcctgtgagtccccgtcccgcaccccctctagggctcaggagggcttggagccga

SEQ ID NO: 34988 - DNA, 120 bp, Artificial Sequence
  ENSG00000051523_6 (sequence is synthesized)
ccctccccactgtcccaccggccgggctgcctggacaggagccacccccacttacctcagtgtttttccaaacaaaaattcgggtccctggctctggcagggcctgtgtctgctgtctag

SEQ ID NO: 34989 - DNA, 120 bp, Artificial Sequence
  ENSG00000051523_7 (sequence is synthesized)
ccgtcgccagggtctggggtcagcatgcactgctggggggtcttgcctgggcttcctggtagggtggagggttccgtgctgtgtgtctgctggttactgccggctgaggccaggacaccc

SEQ ID NO: 34990 - DNA, 120 bp, Artificial Sequence
  ENSG00000051523_8 (sequence is synthesized)
acacgtggctgcttcctccgagcaagtgcaccagagccgctagtgtccacatcaaggctgagaacacccaggaccgaaacaagccccggtccgcgcacgtcccctgggtctgcagtctgc

SEQ ID NO: 34991 - DNA, 120 bp, Artificial Sequence
  ENSG00000051523_9 (sequence is synthesized)
ttgtaaggatccactccaaatccgaggagctccgatccgtcgccagggtctggggctctcggtgcccgccggcttcctgctggccaccatccttgggaccgcctgcctggccattgcgag

SEQ ID NO: 34992 - DNA, 120 bp, Artificial Sequence
  ENSG00000051523_10 (sequence is synthesized)
ccattgcgagcggcatctacctactggtgagtggcgccctctgaggtcggccccggccacccccatccccagcccctgccctgacaccctcggacacgcatggcccttgaagccggctct

SEQ ID NO: 34993 - DNA, 120 bp, Artificial Sequence
  ENSG00000051523_11 (sequence is synthesized)
gtaggctgagccaaggctgggagcaagtgtgagcctgggcgtgtgctcacagcacggcggggacgcagcggttgctgctgccatttttggcgtgtctagtgtgtcgggtcatttccttgc

SEQ ID NO: 34994 - DNA, 120 bp, Artificial Sequence
  ENSG00000051523_12 (sequence is synthesized)
gcctggggtcacgcagccggccgaagaccgtgcctgcgcttgggtcccattatcaggcttttctcacctaaaccctattcgcgctgattcatgggcggtgccaggacgcagacattttct

SEQ ID NO: 34995 - DNA, 120 bp, Artificial Sequence
  ENSG00000051523_13 (sequence is synthesized)
taaactgccgacacctgcgtttggtttatgactgctgcaccctgttagaaggctgcccatcccatgggatacagtgatctctctgagaggccagggatgggtgggaggacagggcgcagc

SEQ ID NO: 34996 - DNA, 120 bp, Artificial Sequence
  ENSG00000051523_14 (sequence is synthesized)
ctggccaggccttgggtgaaatgccctctgcctgccctgggctccggaacagacggctgcaggccacctctcactgcgggggtctctgggtggacagagccctcagactttgcttattta

SEQ ID NO: 34997 - DNA, 120 bp, Artificial Sequence
  ENSG00000051523_15 (sequence is synthesized)
aatccttttgtccatagagccaagtccctcctgcccgcagaggcaactgccctccccttgctgtgcgtcttctagtgtgtgtgcgtgggaaaggtgcagcactttctgtgtacgccttcc

SEQ ID NO: 34998 - DNA, 120 bp, Artificial Sequence
  ENSG00000051523_16 (sequence is synthesized)
gcgtatggaagtggagttctgtttcaagcctcactgacctgccaccggcagaactctcctttagaaccccttcctgttgccaagtgctcatctgggctgttgctttgttttccgggggcc

SEQ ID NO: 34999 - DNA, 120 bp, Artificial Sequence
  ENSG00000051523_17 (sequence is synthesized)
acccgcatcccccccgtctccctgctgccacgcacagctagtggctcctggagacctcgggaggaattccttgtgctaaacccagagaggaattgctgggtcaggcatcagcctctgcac

SEQ ID NO: 35000 - DNA, 120 bp, Artificial Sequence
  ENSG00000051523_18 (sequence is synthesized)
cacagggtgggctgtgcacgggttgggcagcccaggccccagcagccaggcccctcgccaggaccatgtggcgatcagcggcagacccgccagtctaagtcctggtgagtggtgggcagg

SEQ ID NO: 35001 - DNA, 120 bp, Artificial Sequence
  ENSG00000051523_19 (sequence is synthesized)
gggtgtcaccagagggccagggccagcactgaggcctccctgttggactgctgggatcccctctgcccgctcctgtcagtcatcccccttgaccggcccctctacctcctctgccccatc

SEQ ID NO: 35002 - DNA, 120 bp, Artificial Sequence
  ENSG00000051523_20 (sequence is synthesized)
cccaggcagggctcacagggttgggtggagcttggtttctcacttggaggctccggaaccaaccctttggtgcttgtgggtaaaccaaggccggtgcctgcccggtgtgttttgtgggag

SEQ ID NO: 35003 - DNA, 120 bp, Artificial Sequence
  ENSG00000051523_21 (sequence is synthesized)
gaaagaggcctgggtgccctggggtggtcagcagggcagcaaaggagtcccgagtgggagaggcccagccgcgccgtctcgccttcctccctcccccaggggacagaagtacatgaccgc

SEQ ID NO: 35004 - DNA, 120 bp, Artificial Sequence
  ENSG00000051523_22 (sequence is synthesized)
ttcacagcacgagctggccgtgtggagcttggactcgcccttctctgactgtggatttgagctgttggagtttcttctcccttgagttgcctgttcaaatcctttgcccatttttctatt

SEQ ID NO: 35005 - DNA, 87 bp, Artificial Sequence
  ENSG00000051523_23 (sequence is synthesized)
cttgagttgcctgttcaaatcctttgcccatttttctattgtgggagatggagtctcgcgccatcgcccaggctggagtgcagtggc

SEQ ID NO: 35006 - DNA, 120 bp, Artificial Sequence
  ENSG00000051596_0 (sequence is synthesized)
ttccgggcgcatgcgtgcggcagcggcgccaggactgactgcgccgtggaggctgctgcagtgttgtgagttggaagctggggagctcggcatggcggtccccgctgcagccatggggcc

SEQ ID NO: 35007 - DNA, 120 bp, Artificial Sequence
  ENSG00000051596_1 (sequence is synthesized)
ctcggcgttgggccagagcggccccggctcgatggccccgtggtgctcagtgagcagcggcccgtcgcgctacgtgcttgggatgcaggagctgttccggggccacagcaagacgcgcga

SEQ ID NO: 35008 - DNA, 120 bp, Artificial Sequence
  ENSG00000051596_2 (sequence is synthesized)
gttcctggcgcacagcgccaaggtgcactcggtggcctggagttgcgacgggcgtcgcctagcctcggggtccttcgacaagacggccagcgtcttcttgctggagaaggaccggttggt

SEQ ID NO: 35009 - DNA, 120 bp, Artificial Sequence
  ENSG00000051596_3 (sequence is synthesized)
caaagaaaacaattatcggggacatggggatagtgtggaccagctttgttggcatccaagtaatcctgacctatttgttacggcgtccggagataaaaccattcgcatctgggatgtgag

SEQ ID NO: 35010 - DNA, 120 bp, Artificial Sequence
  ENSG00000051596_4 (sequence is synthesized)
gactacaaaatgcattgccactgtgaacactaaaggggagaacattaatatctgctggagtcctgatgggcagaccattgctgtaggcaacaaggatgatgtggtgacctttattgatgc

SEQ ID NO: 35011 - DNA, 120 bp, Artificial Sequence
  ENSG00000051596_5 (sequence is synthesized)
caagacacaccgttccaaagcagaagagcagttcaagttcgaggtcaacgaaatctcctggaacaatgacaataatatgttcttcctgacaaatggcaatggttgtatcaacatcctcag

SEQ ID NO: 35012 - DNA, 120 bp, Artificial Sequence
  ENSG00000051596_6 (sequence is synthesized)
tcaacgcccatccttccaactgcatctgtatcaagtttgaccccatggggaagtactttgccacaggaagtgcagatgctttggtcagcctctgggatgtggatgagttagtgtgtgttc

SEQ ID NO: 35013 - DNA, 120 bp, Artificial Sequence
  ENSG00000051596_7 (sequence is synthesized)
ggtgcttttccaggctggattggcctgtaagaaccctcagtttcagccatgatgggaaaatgctggcgtcagcatcggaagatcattttattgacattgctgaagtggagacaggggaca

SEQ ID NO: 35014 - DNA, 120 bp, Artificial Sequence
  ENSG00000051596_8 (sequence is synthesized)
aactatgggaggtacagtgtgagtctccgaccttcacagtggcgtggcaccccaaaaggcctctgctggcatttgcctgtgatgacaaagacggcaaatatgacagcagccgggaagccg

SEQ ID NO: 35015 - DNA, 120 bp, Artificial Sequence
  ENSG00000051596_9 (sequence is synthesized)
gaactgtgaagctgtttgggcttcctaatgattcttgagaggaggttgtagggagaggaggccccggcagaggtcttccttcatgtggttagtttggtctgttctctcggagttggtggg

SEQ ID NO: 35016 - DNA, 120 bp, Artificial Sequence
  ENSG00000051596_10 (sequence is synthesized)
caccctaaatatttgtaagttggtataaattgtaaacgtctctggtcaggctgcgcatttcattcttttgctttgtctgtgtattagctctttccattctttgcccccagcatgagttaa

SEQ ID NO: 35017 - DNA, 120 bp, Artificial Sequence
  ENSG00000051596_11 (sequence is synthesized)
ctcgcgtggactctgcagtgcgagtagtgaccccaccataccttgtcctctggacctcctgtcttctctgcttctgggtgcatggtagactttgtggcatttgatacaacttggacaata

SEQ ID NO: 35018 - DNA, 120 bp, Artificial Sequence
  ENSG00000051596_12 (sequence is synthesized)
cctagtttggagggaggggaatggaagggcatggaagtttttttaaataattaaaaatatatatatataattttgagaattgagcatttaataaactgacttttgttattatggaacttc

SEQ ID NO: 35019 - DNA, 120 bp, Artificial Sequence
  ENSG00000051596_13 (sequence is synthesized)
gtggcagtgacagcgatggagactgcagctcgacaggaatgaactacttcctcaagcctaccaccaacgtgctgctccatcgtctatcaccgctgggccttcctcctcagtcaggcaaac

SEQ ID NO: 35020 - DNA, 120 bp, Artificial Sequence
  ENSG00000051596_14 (sequence is synthesized)
tggaaggaacatgagagggaatccggaggatggctgcagcaatgcggatgtaggagaccaagatgagcgcacagggagccaggaacaggaccacggcccccaggaacacatgctgattga

SEQ ID NO: 35021 - DNA, 120 bp, Artificial Sequence
  ENSG00000051596_15 (sequence is synthesized)
tttagacaagtatgtttctgttttgactgtcactgccaggtggtgaggaagcaaagagttaagaaataaacaggcaggtctgaggaaagtgatttagaaaaatattttgatttatttaaa

SEQ ID NO: 35022 - DNA, 120 bp, Artificial Sequence
  ENSG00000051596_16 (sequence is synthesized)
ctttaaactacagagtagaaggaagaaaaaagcaccacttggggtcccactctctaaataccacctgttttaaatgttgtgatatatttctctttatcttttgcctgtatatgaacttga

SEQ ID NO: 35023 - DNA, 120 bp, Artificial Sequence
  ENSG00000051596_17 (sequence is synthesized)
aaaaatattatttaaaatttgaggaattataaagtttttgctttaaaaacaacagaagctggaaatagaaaaatgggaggagagtattcattttgcaaaagaatttcctcagatttgttt

SEQ ID NO: 35024 - DNA, 120 bp, Artificial Sequence
  ENSG00000051596_18 (sequence is synthesized)
tttaatgttgctttattgtttttggaaatctttgacactcttcgtaaaaagattaaaactgtatagaaaacttcgaagaggaaagtaaagaacttgaaattccactatgtaaagaatgca

SEQ ID NO: 35025 - DNA, 120 bp, Artificial Sequence
  ENSG00000051596_19 (sequence is synthesized)
tgcccctgttagtcacgttgtggtgaacattgtccagcatccagccatgcagatccttcatgtaactgcatgtccctgtgacgcggagacactttcctgctcagtgacctgctcttgagt

SEQ ID NO: 35026 - DNA, 120 bp, Artificial Sequence
  ENSG00000051596_20 (sequence is synthesized)
taacccacctgtgctcagaaccggctctgtcctccactggcttgtgggctctctgtgcctgggggttctctgtaaaatgaggtaatagttgtatctatctcatgggattagtaggtggat

SEQ ID NO: 35027 - DNA, 120 bp, Artificial Sequence
  ENSG00000051596_21 (sequence is synthesized)
cgacccacccgcctcggcctcccagagttttgcgattacaggcgtgagccaccacgcccagcggaatttcttattctttttgatctatcaaaacaacctcattgttctcaatgactgacc

SEQ ID NO: 35028 - DNA, 120 bp, Artificial Sequence
  ENSG00000051596_22 (sequence is synthesized)
tttaatgagtaagcccggaagaaagctctggtcttctttctaggatagtgcaataaacttgtggaagattatgagcaaacagattatcttgctgattatgtctgggttcccaggggagaa

SEQ ID NO: 35029 - DNA, 120 bp, Artificial Sequence
  ENSG00000051596_23 (sequence is synthesized)
catgatgggaaaatgctggcgtcagcatcggaagatcattttattgacattgctgaagtggagacagtccaacagacacactcagcctcccagaaagcagctggccccctggccaagagg

SEQ ID NO: 35030 - DNA, 120 bp, Artificial Sequence
  ENSG00000051596_24 (sequence is synthesized)
gcatcgtgatcattccaccatctttgctgccatttgaatcttgaatcagctttgtgtacctgtaataaattccacttagccatggcatgtagttttttaaaaatacattgttgaatttga

SEQ ID NO: 35031 - DNA, 120 bp, Artificial Sequence
  ENSG00000051596_25 (sequence is synthesized)
gtaggagtcacctgtggtgagctggaggttggagcctgtagatggcgtggctctgtggctcacttcctgtggttgtggcagtgacagcgatggagactgcagctcgacaggaatgctacc

SEQ ID NO: 35032 - DNA, 120 bp, Artificial Sequence
  ENSG00000051620_0 (sequence is synthesized)
gggcgggggcaggacgcgcaactccggccggagctgtccggggtcgtgagccggccccgccttggtggcggcgccccctcgcggtccagaggcagacgcatcgggtgggctcgggtctcc

SEQ ID NO: 35033 - DNA, 80 bp, Artificial Sequence
  ENSG00000051620_1 (sequence is synthesized)
gtgggctcgggtctccagcccggccgggaggagggaccgggtctgcggagcggggactcggggcctcggcggggcgcgca

SEQ ID NO: 35034 - DNA, 120 bp, Artificial Sequence
  ENSG00000051620_2 (sequence is synthesized)
gctgaccaggctcccagagcgtcagcgccgcccatggccgagccgctccagccagaccccggggcggccgaggacgcggcggcccaagctgtggagacgccgggctggaaggccccggag

SEQ ID NO: 35035 - DNA, 120 bp, Artificial Sequence
  ENSG00000051620_3 (sequence is synthesized)
gacgccggcccccagcccggaagttatgagatccgacactatggaccagccaagtgggtcagcacgtccgtggagtctatggactgggattcagccatccagacgggctttacgaaactg

SEQ ID NO: 35036 - DNA, 120 bp, Artificial Sequence
  ENSG00000051620_4 (sequence is synthesized)
aacagctacattcaaggcaaaaacgagaaagagatgaaaataaagatgacagctccagtgacaagctacgtggagcctggttcaggtccttttagtgagtctaccattaccatttccctg

SEQ ID NO: 35037 - DNA, 120 bp, Artificial Sequence
  ENSG00000051620_5 (sequence is synthesized)
tatattccctctgaacagcaatttgatccacccaggcctttagagtcagatgtcttcattgaagatagagccgaaatgactgtgtttgtacggtctttcgatggattttctagtgcccaa

SEQ ID NO: 35038 - DNA, 120 bp, Artificial Sequence
  ENSG00000051620_6 (sequence is synthesized)
aagaatcaagaacaacttttgacattagcaagcattttaagggaagatggaaaagttttcgatgagaaggtttactacactgcaggctacaacagtcctgtcaaattgcttaatagaaat

SEQ ID NO: 35039 - DNA, 120 bp, Artificial Sequence
  ENSG00000051620_7 (sequence is synthesized)
aatgaagtgtggttgattcaaaaaaatgaacccaccaaagaaaacgaatgagaaaaatgaaaggaagttctgctgtcagaggcaaaacatctgtttatcatagacatcaacatgacctat

SEQ ID NO: 35040 - DNA, 120 bp, Artificial Sequence
  ENSG00000051620_8 (sequence is synthesized)
aagtaaagtgcgtgtctagtgtcttctattgagagtactactattaattaagcttatttccaatgtgcctttttaatgcttgaagttttatctacatacacaggtaacagaggacagtag

SEQ ID NO: 35041 - DNA, 120 bp, Artificial Sequence
  ENSG00000051620_9 (sequence is synthesized)
tctgtaaacatataaatcggtcataactatcgtggtctttatttctgtgaggatctagggaaatttcatgtcacttccctccttcactgcatcacaatcatattcccttttttttttctt

SEQ ID NO: 35042 - DNA, 120 bp, Artificial Sequence
  ENSG00000051620_10 (sequence is synthesized)
ggatttgtgtcagttggatgatatcccctccagatagtatcaataaaatgttaaaattatttatcttgtgtggaacccctaggctgtcaggcccggagaggtgaaattcagctggacaca

SEQ ID NO: 35043 - DNA, 120 bp, Artificial Sequence
  ENSG00000051620_11 (sequence is synthesized)
aaaatcaaattgtcttttgtggctgccaccattacattctctgttgtatgtattactttccctcctgcatcctcccactgccccactgcacaagaatactccatgtaactccatttaaat

SEQ ID NO: 35044 - DNA, 120 bp, Artificial Sequence
  ENSG00000051620_12 (sequence is synthesized)
gtaatgaattcattcctttctttctggtctccacttaaccccctaaaaatcttgctttttcccctaaacatttccctgaactgtcacgtattttcattcattctttaactcattgtaggg

SEQ ID NO: 35045 - DNA, 120 bp, Artificial Sequence
  ENSG00000051620_13 (sequence is synthesized)
agtccctgctatgttccaagcactctgctaaggactgggaggtggtggtaagaaaacctgtgtcccaagcccctcatcactgacttcctcttcactaactccaacaacatctttccacct

SEQ ID NO: 35046 - DNA, 120 bp, Artificial Sequence
  ENSG00000051620_14 (sequence is synthesized)
ccttaactatttcattcaccctcccactgtgaacaccacagacaaggcccctggcctcatggagtttacattctagagggtgagggagttcaacacaaataagatgcttgaaattggcaa

SEQ ID NO: 35047 - DNA, 120 bp, Artificial Sequence
  ENSG00000051620_15 (sequence is synthesized)
gtgtgatgaagaacagaatagggcagtggggtagagtgtggttaggtagggtgtggtggacatcacataaggtggtcagcaaaggcctctcaagagacagttgagacttgaatgacgagg

SEQ ID NO: 35048 - DNA, 120 bp, Artificial Sequence
  ENSG00000051620_16 (sequence is synthesized)
atgagtcagatgaaagccaggggcagaggtgaggggagcatcttgggcagaggtgacagtgttaaagggagaggccacgttcagtacccagaacaaaaagctgcacacactgcttgctga

SEQ ID NO: 35049 - DNA, 120 bp, Artificial Sequence
  ENSG00000051620_17 (sequence is synthesized)
gcaagagagcactgctcttgtagggcacggtctctcggataaagaaaactgcggaccttatgcagggttttaggaaggattaacagactttcaaaagcatttaggagtcgagggagcttt

SEQ ID NO: 35050 - DNA, 120 bp, Artificial Sequence
  ENSG00000051620_18 (sequence is synthesized)
agttgtggggatgcagttaccagagtgaggccgctgctgattagcatgatttagaagcctagtttggaggtgaggttactgatgggaaattgtcattgattgtttctggtacttaattgc

SEQ ID NO: 35051 - DNA, 120 bp, Artificial Sequence
  ENSG00000051620_19 (sequence is synthesized)
tactgtggccaaaggatggtcagttttattcaggatttgaagtggtggcagacaacgtgaggtgtgccactcaaattcaccttcaagaaagtaccagccgcccagctgtgaggggtgtgg

SEQ ID NO: 35052 - DNA, 120 bp, Artificial Sequence
  ENSG00000051620_20 (sequence is synthesized)
ttcgccgacagtctccccgttaccgtcttcagggtccacgccagatttcaagataaggacacactattctgtgggagagagggacctagtctacaactgagcaaggcagtggtagctgac

SEQ ID NO: 35053 - DNA, 120 bp, Artificial Sequence
  ENSG00000051620_21 (sequence is synthesized)
agcatgcttttttctggcaattcccagccaataactgagcaaggtggtggtataagacctagccatttaggccaggtgcagtggctcacagctgtaattccagcactttgggaggctaag

SEQ ID NO: 35054 - DNA, 120 bp, Artificial Sequence
  ENSG00000051620_22 (sequence is synthesized)
attgcttgagcccagaagttcaagacgagtcatggcaacctagtgagactgtctgtccaaaaaataaaaaattagccaagcgtggtggcacacgcctgtattcctagctcctgaggtgaa

SEQ ID NO: 35055 - DNA, 87 bp, Artificial Sequence
  ENSG00000051620_23 (sequence is synthesized)
tagccaagcgtggtggcacacgcctgtattcctagctcctgaggtgaaaggattgcttgagctcgggaggcggaggttgcagtgagt

SEQ ID NO: 35056 - DNA, 120 bp, Artificial Sequence
  ENSG00000051620_24 (sequence is synthesized)
agtcatttctaccaactcgaaagccctctaataagcagtctctgctctggagctttttggtgggctgctagagactttgttagatcctaccgttcctctgctcaatcctgcttttccctt

SEQ ID NO: 35057 - DNA, 120 bp, Artificial Sequence
  ENSG00000051620_25 (sequence is synthesized)
ttcctttcagagatgtcacttcaccagttttgtactcctaactccatctcagcctaaaattggcacaattggtaccagtggcccacgaacgtaggtggtaagacagcatttgcaggctga

SEQ ID NO: 35058 - DNA, 120 bp, Artificial Sequence
  ENSG00000051620_26 (sequence is synthesized)
gtgactcactgtctggctggctcggaggcccccatccctggtggataggtggcacagacagtccctggcacaagaaggctgtccagtgatgaagacttcagatgaaatggcatgctggtg

SEQ ID NO: 35059 - DNA, 120 bp, Artificial Sequence
  ENSG00000051620_27 (sequence is synthesized)
caggggaacgcaatgactggtgggtgatttgggtgtctcaaatatgggaagggtggataaaagagacaaggacagtgggcttccatggttattgctgagttggattgacgtcctgcaagt

SEQ ID NO: 35060 - DNA, 120 bp, Artificial Sequence
  ENSG00000051620_28 (sequence is synthesized)
ggataatgaaaagctgaggtcaattaacaaacaaaactaagtgtgagccgcagagtctctgtggtagcttgccaacaatcctcatctcatgctgtagccaagcagagcaagctgaaggcc

SEQ ID NO: 35061 - DNA, 120 bp, Artificial Sequence
  ENSG00000051620_29 (sequence is synthesized)
aagcacaggatttgatggtaaaagtagctaacagccaacaaatactcaaccaagccaggtctgttagatcaaggttggaatcaaacttgggatcccaaaacatgggatgggagcatttag

SEQ ID NO: 35062 - DNA, 120 bp, Artificial Sequence
  ENSG00000051620_30 (sequence is synthesized)
tggatctccccaaccatctgcctccctagaaaactccctgaatattcacatccttcagaagaggcccacccttccccatgaagagctggaactaccctcccttcctgcctcttccctaac

SEQ ID NO: 35063 - DNA, 120 bp, Artificial Sequence
  ENSG00000051620_31 (sequence is synthesized)
acaagggaagacagtgtccaaggtctttccccatgaagcaaaaggtgtccctcaggactggtccctccccttctcctggctaccaggcctataacgagacttaagtcacaacataactga

SEQ ID NO: 35064 - DNA, 120 bp, Artificial Sequence
  ENSG00000051620_32 (sequence is synthesized)
ttgcggctgaggggtctgatgagggagaaatgggatctatgccagaggagccacctaacctggcagcatgtactgcaggggccaggggcgtactcttgggactggatcctgagggtgctt

SEQ ID NO: 35065 - DNA, 120 bp, Artificial Sequence
  ENSG00000051620_33 (sequence is synthesized)
ggtcaaaggggctgggtttatacaactagataaaggagagggtatattgacttggggctctcaggatagaggatttcacaccatgagaaaaatgccaggagataatacagactcactgct

SEQ ID NO: 35066 - DNA, 120 bp, Artificial Sequence
  ENSG00000051620_34 (sequence is synthesized)
ctagggcagcttggtagaagcctagaaagagtgatcaaaatgttgaaatgcctgaatggctgggacaaacaatagagaaaggaatgagaaggctcagggaagggagcatgccagcatgga

SEQ ID NO: 35067 - DNA, 120 bp, Artificial Sequence
  ENSG00000051620_35 (sequence is synthesized)
tatatgaggcaaggtgacccatcagacaattatgttccacgggaaggcccaggggacccatccttcagcaaggctgctgggaatgcactgataagcgggcttgggcatcataaaggagct

SEQ ID NO: 35068 - DNA, 120 bp, Artificial Sequence
  ENSG00000051620_36 (sequence is synthesized)
cagcggtggctctcctcggcaggctggggctggcaggaagggctgtgatggaacttcacttgctgagagcaatgtggatgatgatgagaccttgaagagcccaggtggcagtgccagcca

SEQ ID NO: 35069 - DNA, 120 bp, Artificial Sequence
  ENSG00000051620_37 (sequence is synthesized)
cagaagccagggtgccatcagtatcctgttaaccactaagctccaaatggcagccgaggggtcctgacctgtaaagtctcatggaaatagttggtagaacaaggcattcctagggacaaa

SEQ ID NO: 35070 - DNA, 120 bp, Artificial Sequence
  ENSG00000051620_38 (sequence is synthesized)
agagctgactaatcaacaagggtaaggctttatatataatcaaaagtgagcaagaattgatgagcaggggactgagagagatcactccaattaaaaaacaaaaacatgattccttgccag

SEQ ID NO: 35071 - DNA, 120 bp, Artificial Sequence
  ENSG00000051620_39 (sequence is synthesized)
tttctagttcagttttctgacctagagctcattaattgcagaggtgactgtatcctaggggaaagtttcctgcaacatttcagcaggtgtacacagtaatgatcccctcattctttttct

SEQ ID NO: 35072 - DNA, 120 bp, Artificial Sequence
  ENSG00000051620_40 (sequence is synthesized)
aaaggatctatggccatttactcaggtggctctaccctggggaaagaggaatacctggatacgtcagggtccaagttaacgtctgatacccagaaacccaaagagtcattacagttcctc

SEQ ID NO: 35073 - DNA, 120 bp, Artificial Sequence
  ENSG00000051620_41 (sequence is synthesized)
ctaatcaaagtttggcttacagcagatctcctgggcctgcaggttatctgcctaatccctgaatgtataattgagactgacatccttggcaggcagaataacccctacatttgttccttg

SEQ ID NO: 35074 - DNA, 120 bp, Artificial Sequence
  ENSG00000051620_42 (sequence is synthesized)
acctgtggggaaagagtataagcttctaaactccctctcctccaatcagggcagtaaaccataataaatattgccttgaacagtattttttaagcacctcgggtgaacatctgcttctgg

SEQ ID NO: 35075 - DNA, 120 bp, Artificial Sequence
  ENSG00000051620_43 (sequence is synthesized)
ccatgatgatgaattgggaacccaatttacctgtccctcttaaacaactaaaagcccagacaaaatatatgaaacaatggttttcagacactgaaagttcatagtacaggactgtgatct

SEQ ID NO: 35076 - DNA, 120 bp, Artificial Sequence
  ENSG00000051620_44 (sequence is synthesized)
ctgcgagaagggggaataatgaggtgagtccagtgattgctcaggcgaatggcctggaggcagtttctaggcagcaaagcagggagagggaagccagagaccagtggtcctgctgtgttg

SEQ ID NO: 35077 - DNA, 120 bp, Artificial Sequence
  ENSG00000051620_45 (sequence is synthesized)
aggagatggagatcagtgtcaccggaggccaaggtgagtaagtgagaggagaggaggcagcagcacacagacagagagtgctgtagatctgcagtgggtcccctggagtccttggttgag

SEQ ID NO: 35078 - DNA, 120 bp, Artificial Sequence
  ENSG00000051620_46 (sequence is synthesized)
tgaaggtgttagaagaaactacttaagccaagaaatgagtaactggaaattagtagagcaaataatttacagatcatctatggggctgggaaaagtttgtgtttccactagccagagtag

SEQ ID NO: 35079 - DNA, 120 bp, Artificial Sequence
  ENSG00000051620_47 (sequence is synthesized)
aaataactcataatgcatgggtcatcaggtggagtcctccaacaggtgttgccttagtactgaggtcaaattgtccctagaccaaaggcttctttggacttcccctaacaaagcttaaag

SEQ ID NO: 35080 - DNA, 120 bp, Artificial Sequence
  ENSG00000051620_48 (sequence is synthesized)
acaagccttggaaggatcaaactaatttcaagaaacttaactgtgaatcagaataaaacccaataccatttataggaatataacaaaatccatcaacaaacaacataacactcataatta

SEQ ID NO: 35081 - DNA, 120 bp, Artificial Sequence
  ENSG00000051620_49 (sequence is synthesized)
ccaacattcagtaaaaaattactggaaacagagaaatataaattatggcccataattaggaaaaaagggtaatcattagaagtagaaccagaagtgacagatatgaagaaattagcagct

SEQ ID NO: 35082 - DNA, 120 bp, Artificial Sequence
  ENSG00000051620_50 (sequence is synthesized)
tgaattatgtgatgtggcagatcttatgtattggaggtagggggaaagaagatgcagtgtggaatagatgacaaggcccaatgagagaatcacagtgcaggtccctggggccctgaagga

SEQ ID NO: 35083 - DNA, 120 bp, Artificial Sequence
  ENSG00000051620_51 (sequence is synthesized)
aggtggttctaaccacaggagaggatcatatgctttttgaaaaacagcctctgctgtgctactgggccctggtagacacggaactttgagacccagtgatgctgtatccagaactgctca

SEQ ID NO: 35084 - DNA, 120 bp, Artificial Sequence
  ENSG00000051620_52 (sequence is synthesized)
tcttaactaggtcctgtgggaagcactaagtcataagctagtaggatcggcagcagcccattggaagatggaaatgatatgtacaggagcagttccaagccagaccagaggacataagca

SEQ ID NO: 35085 - DNA, 120 bp, Artificial Sequence
  ENSG00000051620_53 (sequence is synthesized)
aactgcaagagcaattactccaaccgccatgtctgcacagtggcacctacatcccccctccctgtggttgttggaggacctgtatgatccactgaaggaagaggaatgcttgggcttggt

SEQ ID NO: 35086 - DNA, 120 bp, Artificial Sequence
  ENSG00000051620_54 (sequence is synthesized)
ttattgattagttatcttctgtagttgcaagctgaaaatggaccttcactcaaaggtgacattgaaaaacgggaaaaaaattgcaatcttcctgcaaaaactgggcagaattttttgagg

SEQ ID NO: 35087 - DNA, 120 bp, Artificial Sequence
  ENSG00000051620_55 (sequence is synthesized)
tacactggatcattcaccttgtgagggaggacaggtaaaatatttatggaagtggcagaaaatggcctgccagctgatcaggagtttgggaggaaaaaaacatggattaggaggtctggg

SEQ ID NO: 35088 - DNA, 120 bp, Artificial Sequence
  ENSG00000051620_56 (sequence is synthesized)
gtagaggcatgtggatgggcatatggagtgaacacagaagttgaaaaactgtatcacatgttaatgcccactagatagcacccaccagagaagaggcactaaacaaccaagtagatgaaa

SEQ ID NO: 35089 - DNA, 120 bp, Artificial Sequence
  ENSG00000051620_57 (sequence is synthesized)
tgacttagcctgttctattagcttttgccagtgcccacctcagtgctggtaaaatgcacacataaagtggcagtggtggcaaagatggaggctatggatggaacccaccaacatgggctc

SEQ ID NO: 35090 - DNA, 120 bp, Artificial Sequence
  ENSG00000051620_58 (sequence is synthesized)
ccacttaccaaggccaacttagacactgctcactgtgactatccaacctgcctgcaacaaataccaatgctgagaccctgatgaggctgtgaagaccaactggtcgcttgatagcaaatt

SEQ ID NO: 35091 - DNA, 120 bp, Artificial Sequence
  ENSG00000051620_59 (sequence is synthesized)
cactatggtaggctcattctttcctagaagcaccagcagtttattcacacaaggacagacttcctattctaggtatgtggttcctttcgggcctacagggtcctgaacacaatctaagga

SEQ ID NO: 35092 - DNA, 120 bp, Artificial Sequence
  ENSG00000051620_60 (sequence is synthesized)
cttacaaaacatctgaactgtcagcgtagatttgctgaatacgtgatctatacatgttaacacccaatcagggagagttcgccagcggtcataggatccactgctcctatcacatactgc

SEQ ID NO: 35093 - DNA, 120 bp, Artificial Sequence
  ENSG00000051620_61 (sequence is synthesized)
gccacctagaagctgctagactgatggaatgttggcatggcctgctttagtgccaggtgggagacaataccctgccaagatgtgccaccgtctcctgcacacagtatacttattgaatca

SEQ ID NO: 35094 - DNA, 120 bp, Artificial Sequence
  ENSG00000051620_62 (sequence is synthesized)
gaaagcctgtatgatgctgtgtctacaacaggaatatatagatttcagaaccaaggagtggaggcaggagtgaccccacttaccatcgcacccaacgaaccactgagggacttagtactt

SEQ ID NO: 35095 - DNA, 120 bp, Artificial Sequence
  ENSG00000051620_63 (sequence is synthesized)
cccatgcccacaactccaggttctacagcatcagaagtcctagttctcagagactgtataccttctctaggcaatattgcaagaatcccattgaactacagtctgctgctactatgtggg

SEQ ID NO: 35096 - DNA, 120 bp, Artificial Sequence
  ENSG00000051620_64 (sequence is synthesized)
cactttggactctgtgttcagggaccagtaggcaagaagtcaccatctagtcaagggtaattgaccctgaactgcaggaggaggcaagcctgctgtcagaggatagtggcgagagcaatg

SEQ ID NO: 35097 - DNA, 120 bp, Artificial Sequence
  ENSG00000051620_65 (sequence is synthesized)
tgtgtggaacttagcggacccactggaggcaccctctgtactccttgcccagttgtaactgaatggactagtgcagcaaccctggtctgagaagggtttggctcccaggagctcaggacc

SEQ ID NO: 35098 - DNA, 120 bp, Artificial Sequence
  ENSG00000051620_66 (sequence is synthesized)
ctcaggaatgagagcttggtttatactatcaaaaaagccaccaagaccagcaaagatgacagttgtgggtgaggggaatttagaatgaagcagggagtaatgaggaccagttgtggttcc

SEQ ID NO: 35099 - DNA, 120 bp, Artificial Sequence
  ENSG00000051620_67 (sequence is synthesized)
aaaaccatttgcaggaaggtgctatagttggtcctaccaaactcctctttcaacatttatcctcaggaagagaggtccattggcgccctgaaacagtcactctctgcgtgtttttgggaa

SEQ ID NO: 35100 - DNA, 120 bp, Artificial Sequence
  ENSG00000051620_68 (sequence is synthesized)
aatggatccacataggcaaggggtggaccatggcaggcatagagcggtgccacttagatcccccttcaagacaagatatgccatccagctgcaaggagtgtgggtagctggcagccacca

SEQ ID NO: 35101 - DNA, 120 bp, Artificial Sequence
  ENSG00000051620_69 (sequence is synthesized)
gctgctacttcaccaggatccaccttagctttcaagctgaggtcacgctattctcaagacaggaggggttggtggccaatgatttcactaaattatggaaattgagagcatgcttttctg

SEQ ID NO: 35102 - DNA, 120 bp, Artificial Sequence
  ENSG00000051620_70 (sequence is synthesized)
agggggccctcttgccaaagaccaagcaaggccatggtacaaggacctaactgtttcagtccaacacaggactcctccaatgagtgacctttttcccagagttcccctgggatggcagct

SEQ ID NO: 35103 - DNA, 120 bp, Artificial Sequence
  ENSG00000051620_71 (sequence is synthesized)
cgcctgctctccctgcctcgtcctgcttcctcttttcctttcaaaggtgcttactccaataataaatcctttggtattctaactgtctacttcttgaagaatctaaactggcagtaggat

SEQ ID NO: 35104 - DNA, 120 bp, Artificial Sequence
  ENSG00000051620_72 (sequence is synthesized)
catgcccctcactgatagctcaaccacgttttctatctttgggcctccttgtctttacctagcacatgagaagcatttattaggactttttttcccccattgctgaacaaatgactacag

SEQ ID NO: 35105 - DNA, 120 bp, Artificial Sequence
  ENSG00000051620_73 (sequence is synthesized)
attgctctacctcttgttctgtgaataaaggctggccgctgtggaaggtaggtcagagcaggcaactgagagaaactgtattacagttaccgagtggcttattaaggaaagtggcgcaac

SEQ ID NO: 35106 - DNA, 120 bp, Artificial Sequence
  ENSG00000051620_74 (sequence is synthesized)
aatcaggtccatgtttcattcaaatgaccctccattcccccaacaacatcctcacatctgccaaagcaaattatgctgctgtgctcatttgatgatggaatcagcatcgcatgcaggctg

SEQ ID NO: 35107 - DNA, 120 bp, Artificial Sequence
  ENSG00000051620_75 (sequence is synthesized)
aacccctactacggcagaaccaagaaagccactctttcccctctcctcctaagatgccaccacagagcagggtgccagtggtgggtggggagaaagacggagacacagaaacgtctcctt

SEQ ID NO: 35108 - DNA, 120 bp, Artificial Sequence
  ENSG00000051620_76 (sequence is synthesized)
ttcactgtgattctcctaaggaatatacagtcacccccacaggaaaagcaagagttcaatcaagattcttcagaaatagtaggatggcagaaagcagatcgcattgaggttgtttccaac

SEQ ID NO: 35109 - DNA, 120 bp, Artificial Sequence
  ENSG00000051620_77 (sequence is synthesized)
tgacagaccaagcagtaatttgtttctctccccactgatagtaaaaataaagtggaaataatttagggctggggcttctgtgattatctggaacttaaagtatgagggtatgagagccat

SEQ ID NO: 35110 - DNA, 120 bp, Artificial Sequence
  ENSG00000051620_78 (sequence is synthesized)
cagatctacccctgtggagctttttaagatgcggtccataacagaagcgggccccaaggagtagagtagccacatggaaggtgccatgtttcagggatgagtctcgattcttctctccct

SEQ ID NO: 35111 - DNA, 120 bp, Artificial Sequence
  ENSG00000051620_79 (sequence is synthesized)
gtatttcatccatgcctgtaagaagttctcacgtctctccacatgccacgtcatctgaaccgccaggcgataggttattcgtattttattccaaagtccataggacacgatgtggacttg

SEQ ID NO: 35112 - DNA, 120 bp, Artificial Sequence
  ENSG00000051620_80 (sequence is synthesized)
tttttccacgtgcccttgtagatggtgccatccagtgtctgtgatgttccacctcctctgttgggttgtcacctcccccagagaccttctggtctcactgcttttctgtttgtatccagc

SEQ ID NO: 35113 - DNA, 120 bp, Artificial Sequence
  ENSG00000051620_81 (sequence is synthesized)
aaaacactcaacaattctgtataagaacacctatctcattattcaaaaaaaatgcatgtataaacaaaaagaaatatttcaaatatttactttacaattgttttattcaaaggaaattaa

SEQ ID NO: 35114 - DNA, 120 bp, Artificial Sequence
  ENSG00000051620_82 (sequence is synthesized)
agatgaaaataaagatgacagctccagtgacaagctacgtggagcctggttcaggtccttttagagagggaaaaaggggcaatgtgcaagtgaaaatcgagtctggaaaaggggcttcta

SEQ ID NO: 35115 - DNA, 120 bp, Artificial Sequence
  ENSG00000051620_83 (sequence is synthesized)
caggggtgttggtgtagttctctgatcagcagcaccggcatggatgtgggagctcggaggaaatacactctcaggccccaccccagacctgaatctgcatcgtagcaaaatccccaggtc

SEQ ID NO: 35116 - DNA, 120 bp, Artificial Sequence
  ENSG00000051620_84 (sequence is synthesized)
ccccggagagcctcggagctctggctgcccacgatgggagtcctctggggggcgccggagccgtgccgggtccccgccgcaggggacagtaacgcggagtcggcctggccggcggaaagg

SEQ ID NO: 35117 - DNA, 120 bp, Artificial Sequence
  ENSG00000051825_0 (sequence is synthesized)
ccctcgggtaacggtcgcgagaggccgcttgcatgaccctgacatcggcagcgggagcggcggccagactctcttggaagtttaggatatttcacagttctgaatgttagccactgaaaa

SEQ ID NO: 35118 - DNA, 120 bp, Artificial Sequence
  ENSG00000051825_1 (sequence is synthesized)
tgccagtagatgatgaagcctctgaagatgacacggattcatttttctcaaacagcccaagaacctttattttccaataagagaatataacaatttctgtacactatggaagagtttgac

SEQ ID NO: 35119 - DNA, 120 bp, Artificial Sequence
  ENSG00000051825_2 (sequence is synthesized)
ttggtgaaaaccttacacaaaacttcatcttctgtaggatctgatgaaaattctcttcattctcttggactgaacttaaatactgatagaagtagtccccaccttagtacaaatggggta

SEQ ID NO: 35120 - DNA, 120 bp, Artificial Sequence
  ENSG00000051825_3 (sequence is synthesized)
tcctctttctcagggaagaccagaccatctgtaattcaaggtacagttgaagtcctaacttctttaatgcaagagctacaaaacagtggaaagactgattcggaactttggaaaaactgt

SEQ ID NO: 35121 - DNA, 120 bp, Artificial Sequence
  ENSG00000051825_4 (sequence is synthesized)
gagaccaggtggttacagctattcaatttggtggaaaaacaatgccaagaacagatagttgcccagcaggagcagttccacaaccaaattcaacatatacaggaggagataaaaaattta

SEQ ID NO: 35122 - DNA, 120 bp, Artificial Sequence
  ENSG00000051825_5 (sequence is synthesized)
gtcaaattacagactagtagtgcttccttagcttcctgtgaaggaaattcttcaaacaaacaagtatcttcggaaagtcaaatgggttttttttctctaagcagtgagagaaatgaatct

SEQ ID NO: 35123 - DNA, 120 bp, Artificial Sequence
  ENSG00000051825_6 (sequence is synthesized)
gttatccattatcctgaatccacagaacctgaaatacagcaagaaatgtccacgtcacaaccagactgcaatgtggatagttgctcagtaagcagtggatatggcaccttttgtatctca

SEQ ID NO: 35124 - DNA, 120 bp, Artificial Sequence
  ENSG00000051825_7 (sequence is synthesized)
gaattaaatctgtacaaatctaaagaccctaaggagttcatggagcacatagatgttcccaaaggacagtatgtagcacctgcggtgccggctgagtcacttgtagatggtgtgaaaaat

SEQ ID NO: 35125 - DNA, 120 bp, Artificial Sequence
  ENSG00000051825_8 (sequence is synthesized)
gagaatttttatatacagactcctgaagagtgtcatgtgtctttaaaggaagatgtatccatttctcctggtgaatttgaacataattttcttggtgaaaataaggtttctgaagtatac

SEQ ID NO: 35126 - DNA, 120 bp, Artificial Sequence
  ENSG00000051825_9 (sequence is synthesized)
agtgggaaaacaaatagtaatgctataacatcatgggcacaaaaactgaagcagaaccaaccaaagagagcacatgtagaagatggaggttcaagatctaaacaaggaaatgagcaaagt

SEQ ID NO: 35127 - DNA, 120 bp, Artificial Sequence
  ENSG00000051825_10 (sequence is synthesized)
aagaagacaccaattgagaaatctgattttgctgctgctacacatcctcgtgctttttacctcagtaaaccagatgaaactccaaatgcttggatgtctgattcaggaacaggattgact

SEQ ID NO: 35128 - DNA, 120 bp, Artificial Sequence
  ENSG00000051825_11 (sequence is synthesized)
tactggaaactagaggaaaaggatatgcaccactctttgcctgaaactttagagaagacgttcatatcattgtcttccacagatgtgtcaccaaaccagtctaatactagtaatgagatg

SEQ ID NO: 35129 - DNA, 120 bp, Artificial Sequence
  ENSG00000051825_12 (sequence is synthesized)
aagctaccgtcactgaaggatatttattataaaaaacaaagggaaaacaagcagttacctgagaggaatctcacttctgcttccaacccaaatcatccaccagaggtcctgactctagat

SEQ ID NO: 35130 - DNA, 120 bp, Artificial Sequence
  ENSG00000051825_13 (sequence is synthesized)
cctacgttacacatgaagccaaagcagcagatttcagggattcaacctcacggccttccgaatgcccttgatgacagaatatccttttccccggactctgttctagagcctagtatgtct

SEQ ID NO: 35131 - DNA, 120 bp, Artificial Sequence
  ENSG00000051825_14 (sequence is synthesized)
agtccctctgacatagactcattttcacaagcaagtaatgtcacttctcagttacctggatttccaaaatatccctcacacacaaaagcttctccggtggactcttggaaaaatcagaca

SEQ ID NO: 35132 - DNA, 120 bp, Artificial Sequence
  ENSG00000051825_15 (sequence is synthesized)
ttccaaaacgaaagtaggaccagttccacgtttccgtcagtatataccattactagtaatgatatctcggtcaacactgtagatgaagaaaacactgtcatggttgcttcggcctcagtc

SEQ ID NO: 35133 - DNA, 120 bp, Artificial Sequence
  ENSG00000051825_16 (sequence is synthesized)
agtcagtcccagcttccaggtacagccaacagtgtcccagaatgcatttcattgacttccttggaagatcctgtgatattgtctaagattaggcagaatctgaaggaaaagcatgctcga

SEQ ID NO: 35134 - DNA, 120 bp, Artificial Sequence
  ENSG00000051825_17 (sequence is synthesized)
cacatagcagatcttcgagcttattatgaatcagaaataaatagtttgaaacagaagctggaggcaaaagaaatctctggagttgaagattggaagataaccaatcaaattcttgtagac

SEQ ID NO: 35135 - DNA, 120 bp, Artificial Sequence
  ENSG00000051825_18 (sequence is synthesized)
agatgtggccaattagatagtgctttgcatgaagctactagtcgcgtgagaacacttgaaaataagaataacttactggaaattgaagtgaatgatttgagagaacgcttcagtgcagcc

SEQ ID NO: 35136 - DNA, 120 bp, Artificial Sequence
  ENSG00000051825_19 (sequence is synthesized)
agcagtgcttccaaaattttgcaggaacgaattgaagaaatgagaacaagcagtaaagaaaaagacaataccatcattcgactaaaatctagactgcaagatttagaagaagcatttgag

SEQ ID NO: 35137 - DNA, 120 bp, Artificial Sequence
  ENSG00000051825_20 (sequence is synthesized)
aatgcttacaaactctcagatgataaagaagctcaactaaaacaagagaacaaaatgtttcaagatcttttaggagagtatgagtcccttggaaaagaacacaggagagtaaaggatgca

SEQ ID NO: 35138 - DNA, 120 bp, Artificial Sequence
  ENSG00000051825_21 (sequence is synthesized)
ttaaatacaactgagaacaaattgcttgatgcatatactcagatttctgatttgaaaagaatgatttcaaaacttgaagctcaggtcaagcaagtagaacatgaaaatatgttaagcctt

SEQ ID NO: 35139 - DNA, 120 bp, Artificial Sequence
  ENSG00000051825_22 (sequence is synthesized)
cgtcataattctagaattcacgtgagaccctcgcgtgccaacacactagcaacttcagacgtcagcaggcggaaatggctgattccaggtgcagagtattccatctttactggccagcct

SEQ ID NO: 35140 - DNA, 120 bp, Artificial Sequence
  ENSG00000051825_23 (sequence is synthesized)
ctggacacccaggacagtaacgtggataaccagctggaggaaacctgtagcctagggcaccgttcacctctggaaaaggattcttcacctggaagttcatcaacaagcttgttgataaaa

SEQ ID NO: 35141 - DNA, 120 bp, Artificial Sequence
  ENSG00000051825_24 (sequence is synthesized)
aagcaaagagagacttcagacacgccgatcatgagagctttaaaagaacttgatgagggaaaaatatttaaaaattgggggacacagacagagaaagaggacacctcaaatataaatcct

SEQ ID NO: 35142 - DNA, 120 bp, Artificial Sequence
  ENSG00000051825_25 (sequence is synthesized)
cggcaaactgaaacttcagttaatgcaagtcgttctccagaaaagtgtgcccaacagagacaaaagagacttaattcggcctcacagagatcatcatctttaccaccttcaaatcgtaaa

SEQ ID NO: 35143 - DNA, 120 bp, Artificial Sequence
  ENSG00000051825_26 (sequence is synthesized)
ccaacaaaaagagagattatgctaacaccagtgactgtggcttatagtccaaagcgatcccctaaagaaaacttgtccccaggatttagtcatctgcttagcaaaaatgagagcagtcca

SEQ ID NO: 35144 - DNA, 120 bp, Artificial Sequence
  ENSG00000051825_27 (sequence is synthesized)
attcgatttgatatacttttggatgatttagatactgttcctgtgtctacattacaacgtaccaatccaagaaagcaactccagtttcttcctctagatgactcggaagaaaaaacttat

SEQ ID NO: 35145 - DNA, 120 bp, Artificial Sequence
  ENSG00000051825_28 (sequence is synthesized)
tctgagaaagccaccgataaccatgttaatcatagctcttgccctgaaccggtgccaaatggagtgaagaaagtatctgtgagaacagcctgggagaagaataaatcagttagctacgaa

SEQ ID NO: 35146 - DNA, 120 bp, Artificial Sequence
  ENSG00000051825_29 (sequence is synthesized)
cagtgtaagccggtttcagtcactccacaggggaatgattttgaatatacagcaaaaattcggaccctagctgaaacagaacgattttttgatgaacttacaaaagaaaaggaccagatt

SEQ ID NO: 35147 - DNA, 120 bp, Artificial Sequence
  ENSG00000051825_30 (sequence is synthesized)
gaggcagcactaagcaggatgccttctcctggaggacgaatcactttacagacaagattaaatcaggaagccttggaagatcgtttggaaaggattaatcgagaactgggttcagttcgc

SEQ ID NO: 35148 - DNA, 120 bp, Artificial Sequence
  ENSG00000051825_31 (sequence is synthesized)
atgacgctaaagaaattccatgttttgcgcacctctgcaaatctttgagatttgtagccattaaattttgagacatttttgtttgcactaatgtataattatgcagtcagaaaaggcaaa

SEQ ID NO: 35149 - DNA, 120 bp, Artificial Sequence
  ENSG00000051825_32 (sequence is synthesized)
ctattttgtactgtttataagccttcaaacagtagttttacaatcatgctattcttacacttgctattttatacttcaaatggccacatattttcaagatatttttgttatgctcaggaa

SEQ ID NO: 35150 - DNA, 120 bp, Artificial Sequence
  ENSG00000051825_33 (sequence is synthesized)
tctcttgtatattttactatttaaaaagcattatttttaaatagtatctgtctccaatttatatcaagaataaggaaatataaacagaggaagcagcttgtttctaaacaaatagtgtta

SEQ ID NO: 35151 - DNA, 120 bp, Artificial Sequence
  ENSG00000051825_34 (sequence is synthesized)
tccttttacaattaactgcacatcaattttatagacttgttctacattgtaaatacaattcagtttttaaaaaataaagcttaatagcttccataatgatagactagtacatgctgaata

SEQ ID NO: 35152 - DNA, 120 bp, Artificial Sequence
  ENSG00000051825_35 (sequence is synthesized)
cataaacaattacagtgtaccttggatttcagttgtgttgaggtttttaaaaaatgataatgcaattcgtatttgaaacgtgtcttagagtgaatatcagaatagtaataatggactctt

SEQ ID NO: 35153 - DNA, 120 bp, Artificial Sequence
  ENSG00000051825_36 (sequence is synthesized)
ggaaagctttgaaaactacatgaatataactcattttctttaaactttattgtctgtaagagaaaaaagagagattgtaattctctaattttatcttttctaaaaaagttaaacaattgg

SEQ ID NO: 35154 - DNA, 120 bp, Artificial Sequence
  ENSG00000051825_37 (sequence is synthesized)
agagccctctctggagggctctcagagtagctctctgcccattgttctgaattaacttgtgtcccaccctggacaataaatggacagataaaccctttgaaatacaagccaccaccccgt

SEQ ID NO: 35155 - DNA, 120 bp, Artificial Sequence
  ENSG00000051825_38 (sequence is synthesized)
gagggattaagagggcagcctggttttcttagtgtgcatggcttcagctgtccgtcatagttgtcatctggatatgttcacccctttccactccttcaccctggccaaaaggaaaatatt

SEQ ID NO: 35156 - DNA, 120 bp, Artificial Sequence
  ENSG00000051825_39 (sequence is synthesized)
tccactgtaggtgctgtaagaacactagactttagatcatcacaatctactgtatttgttaatggacagggagtgtgtccggatggagcctggtgccttcccctcggccttgcagagggc

SEQ ID NO: 35157 - DNA, 120 bp, Artificial Sequence
  ENSG00000051825_40 (sequence is synthesized)
tccagcccactgcctctgtggtagccgctggctctcagaagtagcacgtgggcaggagtctctcctctgatccaggagcattggcaggtttgtgttgggactgctggttaagttggagct

SEQ ID NO: 35158 - DNA, 120 bp, Artificial Sequence
  ENSG00000051825_41 (sequence is synthesized)
gtgtaactacttagtttttggtagccaatcagaacgcagtgccccacatattccagctcggtacatgttgataaacagactcatccaaactttcaaaatggattcgtactaaacatgctc

SEQ ID NO: 35159 - DNA, 120 bp, Artificial Sequence
  ENSG00000051825_42 (sequence is synthesized)
aggttttaaattttggtttgcttttgagcttttcctctttatgtggctcttaataataagtagttagaatgaaccaagccatcccagttattccaagcaggctctcaaatgacctttgag

SEQ ID NO: 35160 - DNA, 120 bp, Artificial Sequence
  ENSG00000051825_43 (sequence is synthesized)
cacccttcacctggctggtccccaggccaggggtccacagccctgctcccttctcagcaaggagggtggcctgtctgacagtgcagttgaacctttgctccctactctgcaacttttgaa

SEQ ID NO: 35161 - DNA, 120 bp, Artificial Sequence
  ENSG00000051825_44 (sequence is synthesized)
gtgcagttgaacctttgctccctactctgcaacttttgaagacttcaggctaatcaaaattacttataattagaatcaagtgcctttattcttgttttttatttttattttattttattt

SEQ ID NO: 35162 - DNA, 78 bp, Artificial Sequence
  ENSG00000051825_45 (sequence is synthesized)
tgtgtgtgtatatgtctatgtgtgtgtgtgtatgtatatatcttttttttttttttagtagagatggtgtttcaccat

SEQ ID NO: 35163 - DNA, 120 bp, Artificial Sequence
  ENSG00000051825_46 (sequence is synthesized)
gcatgagccaccacacccggcctattcttggtattctttattcttggttttctagcctttagaaaaaaaaaatctagtcttggtaaagaaaatgttcattttaatcaagctccagtacag

SEQ ID NO: 35164 - DNA, 120 bp, Artificial Sequence
  ENSG00000051825_47 (sequence is synthesized)
tggtaaagaaaatgttcattttaatcaagctccagtacagcttgtgtcaagacctagtaagaccacctttaatgtgttcctggatatgacattaaaaactaacttgaaaattgttaggat

SEQ ID NO: 35165 - DNA, 120 bp, Artificial Sequence
  ENSG00000051825_48 (sequence is synthesized)
atttccttgttccctacttttattgtaaaatctactacattcttaagaattaaaaaatgccatttcagaagagatgatagttttatcttgccaaggaattatcttcttagtagcctatat

SEQ ID NO: 35166 - DNA, 120 bp, Artificial Sequence
  ENSG00000051825_49 (sequence is synthesized)
tggcttattccaaaaaaggcgttaacctccatcaaaacatcttctgcgcctctctctcagcatatgctttgatatttgaagtgtgtaatagattggagctatcagtcacttatttctaaa

SEQ ID NO: 35167 - DNA, 120 bp, Artificial Sequence
  ENSG00000051825_50 (sequence is synthesized)
aaatgtattcttttttcttcatagctgtgaagagggataccaaggaaagttctttctgctgtctttctcttcggtaatgcttatcttatgaacactcaactgaaaaaacactccacctaa

SEQ ID NO: 35168 - DNA, 120 bp, Artificial Sequence
  ENSG00000051825_51 (sequence is synthesized)
aagcaggaaagatggcaattctaaatagcagctattatccccgggtataaactatttttgttgttggcttggggctttgctgcaggtattaatagtttaaaaagaaaaaaaaaaaaaaaa

SEQ ID NO: 35169 - DNA, 120 bp, Artificial Sequence
  ENSG00000051825_52 (sequence is synthesized)
tgtgcccgctgcttgcctgtttctggtttctcttgtatcctcagcacctagtagagtactctgagcagaggacccctaaataagatcttgttcataaataaaattgtctgatcacataga

SEQ ID NO: 35170 - DNA, 120 bp, Artificial Sequence
  ENSG00000051825_53 (sequence is synthesized)
ttccagtcgacttctaaaatcctgaaaaaccagttttgagtcagagtgctgaaagtactgtctgatatactacagtgttacagtggttacctctaggtgttaggattatgagtgatttta

SEQ ID NO: 35171 - DNA, 120 bp, Artificial Sequence
  ENSG00000051825_54 (sequence is synthesized)
tttttttgtacactcttatttctctctcaaagttttacgttgaaattatattcctttcaaaattagaaaaaaaatactgaataagaaactgttatgctgatacatatagaaggaaaagaa

SEQ ID NO: 35172 - DNA, 120 bp, Artificial Sequence
  ENSG00000051825_55 (sequence is synthesized)
acttaaatactgataggtaagaatgggatttaaaaaaaatgtaccaaatcagaataaccttatttgcatacgtttatcaacttatccaaatagtgtcatagttactgatttgaattatta

SEQ ID NO: 35173 - DNA, 74 bp, Artificial Sequence
  ENSG00000051825_56 (sequence is synthesized)
aatagtgtcatagttactgatttgaattattattattttttaacctatcatcaagaatgttcataggctgaggc

SEQ ID NO: 35174 - DNA, 120 bp, Artificial Sequence
  ENSG00000051825_57 (sequence is synthesized)
taagttctctaaaattgtagaataaagtttactatattagtgatttttttctaaatgttgacttatgtctctagctatcactaatttttcagttaccagtgggaactctgtgaatttcat

SEQ ID NO: 35175 - DNA, 120 bp, Artificial Sequence
  ENSG00000051825_58 (sequence is synthesized)
ttaaatcataagtgaatgtcatactacaactaaagtactgcagtacaatgaacacagtttttaactatgtaaacttgctactactagattttaaattatcacctcagcacccctgtcagc

SEQ ID NO: 35176 - DNA, 120 bp, Artificial Sequence
  ENSG00000051825_59 (sequence is synthesized)
gcaccaaatgcatgtttacctgtgctgctgagaatctgtcccctccgaagtgtgggcagctgtgtgtgctattagcggggagggatgttgcttcttggttccagacccaactctgtcagg

SEQ ID NO: 35177 - DNA, 120 bp, Artificial Sequence
  ENSG00000051825_60 (sequence is synthesized)
ctcttgcggagatgagttaagcacattgaacctcagtttcctcttctataaaacggggataataataactaccctgcttatttcataaggtttttataaatatcaaatgagataatgtat

SEQ ID NO: 35178 - DNA, 120 bp, Artificial Sequence
  ENSG00000051825_61 (sequence is synthesized)
gggtaagtgttttaagtctttagtttgtaaatacaattttgttagaaaatagaaataaatttcagttttagacaattacataaccagctttcttttaagaaaatacataaatatgtgagt

SEQ ID NO: 35179 - DNA, 120 bp, Artificial Sequence
  ENSG00000051825_62 (sequence is synthesized)
ttcaattgcttttaaaagtttgggaagccctctctttggttctttaatgtcttaattttgagaacctgacttttattttactttgaaaggctactacttttagaatattttacttccatg

SEQ ID NO: 35180 - DNA, 120 bp, Artificial Sequence
  ENSG00000051825_63 (sequence is synthesized)
tagaatattttacttccatgagctctgccaagcttccccacctgtgctcagtggcacagtatgggtttgtgattaggataggatgtcgatcctcaggccaggtgtggtggctcacgcctg

SEQ ID NO: 35181 - DNA, 120 bp, Artificial Sequence
  ENSG00000051825_64 (sequence is synthesized)
atccagcagatcactccacagctttgctcccagcctgtccacctcaccctcggtcaacttcccctgagcctgctgctgtctcttgagcccactgtgagatccagatagatacccactgag

SEQ ID NO: 35182 - DNA, 120 bp, Artificial Sequence
  ENSG00000051825_65 (sequence is synthesized)
cctgagcctgctgctgtctcttgagcccactgtgagatccagatagatacccactgaggaggaagcaggatggagacatgggatcaggcgttgctttcttgtaaatatgtgcatttcctg

SEQ ID NO: 35183 - DNA, 120 bp, Artificial Sequence
  ENSG00000051825_66 (sequence is synthesized)
atttatctaaaattcactgtttgttttttttttttgaaaggtaaagcactagtttaccttagctacaactttcatggtatataaaccttgcagaaacttcattaaaactaactgaaggaa

SEQ ID NO: 35184 - DNA, 120 bp, Artificial Sequence
  ENSG00000051825_67 (sequence is synthesized)
cattggcagctgtgaagagggataccaaggaaagttctttctgctgtctttctcttcgacccctcagatatgtgaggaatcaagccataaatgtgcatttgctggacattatgtaccatg

SEQ ID NO: 35185 - DNA, 120 bp, Artificial Sequence
  ENSG00000051825_68 (sequence is synthesized)
ctctatgactacagatttcaaggataatttttacatctaacaatttcactgtaacagtgaccgataatgtgagaaatgtgctttttacagtgctgctggtgggtagacaagtgcttgctg

SEQ ID NO: 35186 - DNA, 120 bp, Artificial Sequence
  ENSG00000051825_69 (sequence is synthesized)
cagttgtttctgaatctagccagatgctggagtcgtgaagctgtaagctccgcgggagcagggaccatctctctttcttgcactacaggcactcaataaatacttgtggctgtgaactgg

SEQ ID NO: 35187 - DNA, 120 bp, Artificial Sequence
  ENSG00000051825_70 (sequence is synthesized)
gtcttagcttgaatctgctttagaggcttgatgccagtcagtgttccagttatctaagaggggtttaaaaaatcatggcacagtgaaaattagacacactgaagcagcagtcaaaacttt

SEQ ID NO: 35188 - DNA, 120 bp, Artificial Sequence
  ENSG00000051825_71 (sequence is synthesized)
tagcttttacgggaagtgtttgattatagcaattttataactgcaagctagctttcaggaataaaaattgattttacctttagacttagagaagaaggtgttcatgcccttgtattttca

SEQ ID NO: 35189 - DNA, 120 bp, Artificial Sequence
  ENSG00000051825_72 (sequence is synthesized)
agaaactaacttgagagcaaatggcaatatgcttttcaacagattttacactaagttagtgctcacagattgcctctctttttgtttgatttctccctcctcaaatctgtaatttatttc

SEQ ID NO: 35190 - DNA, 120 bp, Artificial Sequence
  ENSG00000051825_73 (sequence is synthesized)
tgaactcctttccattagcaagcagataaaatggttacactttggaaactgaatagctgtagaggttcaaaaagtgagccgtaggccgggcgcaggggctcacgcctataatcccagcac

SEQ ID NO: 35191 - DNA, 120 bp, Artificial Sequence
  ENSG00000051825_74 (sequence is synthesized)
tttgggaggctgaggctggtgtatcacctgaggtcaggagttccagccactgtgcccagcccccaacttctttttttctgactttgtctttttgttctgataaatattagtcaataattt

SEQ ID NO: 35192 - DNA, 66 bp, Artificial Sequence
  ENSG00000051825_75 (sequence is synthesized)
actttgtctttttgttctgataaatattagtcaataatttataggcgggtcacctgaggtcaggag

SEQ ID NO: 35193 - DNA, 120 bp, Artificial Sequence
  ENSG00000051825_76 (sequence is synthesized)
gtgccactgcactccagcctgggtaatagagcaagactcagtcttaaaaaaaaaaaaaaataaactttcaattgaacttttcatgttatgaaatatctttctataacatccttttaaatt

SEQ ID NO: 35194 - DNA, 120 bp, Artificial Sequence
  ENSG00000051825_77 (sequence is synthesized)
aattaacgtacaatattccatcagcagtaacgtatttaaccaagaatgttttagtagaaatttgggttgcttctaattttggatatcataaataaggctgcaataaagttcttaaacata

SEQ ID NO: 35195 - DNA, 120 bp, Artificial Sequence
  ENSG00000051825_78 (sequence is synthesized)
aaagaccccacctccacacaccatcacattgaagattagggcttcaacatgtatgtttggtgtgggggcggggggcaagatacagacatttagtccatagcactgtatgtcttaaaatta

SEQ ID NO: 35196 - DNA, 120 bp, Artificial Sequence
  ENSG00000051825_79 (sequence is synthesized)
agttgtccacattctgccgagtgaacgtgaacaatgcttcctgactctaacttttacctcaagcttcattttccctaggagatctaaagcctactcacttcaaaacaagcaaaacaaagc

SEQ ID NO: 35197 - DNA, 120 bp, Artificial Sequence
  ENSG00000052126_0 (sequence is synthesized)
tcagacatggcggcggatctgaacctggagtggatctccctgccccggtcctggacttacgggatcaccaggggcggccgagtcttcttcatcaacgaggaggccaagagcaccacctgg

SEQ ID NO: 35198 - DNA, 120 bp, Artificial Sequence
  ENSG00000052126_1 (sequence is synthesized)
ctgcaccccgtcaccggcgaggcggtggtcaccggacaccggcggcagagcacagatttgcctactggctgggaagaagcatatacttttgaaggtgcaagatactatataaaccataat

SEQ ID NO: 35199 - DNA, 120 bp, Artificial Sequence
  ENSG00000052126_2 (sequence is synthesized)
gaaaggaaagtgacctgcaaacatccagtcacaggacaaccatcacaggacaattgtatttttgtagtgaatgaacagactgttgcaaccatgacatctgaagaaaagaaggaacggcca

SEQ ID NO: 35200 - DNA, 120 bp, Artificial Sequence
  ENSG00000052126_3 (sequence is synthesized)
ataagtatgataaatgaagcttctaactataacgtgacttcagattatgcagtgcatccaatgagccctgtaggcagaacttcacgagcttcaaaaaaagttcataattttggaaagagg

SEQ ID NO: 35201 - DNA, 120 bp, Artificial Sequence
  ENSG00000052126_4 (sequence is synthesized)
tcaaattcaattaaaaggaatcctaatgcaccggttgtcagacgaggttggctttataaacaggacagtactggcatgaaattgtggaagaaacgctggtttgtgctttctgacctttgc

SEQ ID NO: 35202 - DNA, 120 bp, Artificial Sequence
  ENSG00000052126_5 (sequence is synthesized)
ctcttttattatagagatgagaaagaagagggtatcctgggaagcatactgttacctagttttcagatagctttgcttacctctgaagatcacattaatcgcaaatatgcttttaaggca

SEQ ID NO: 35203 - DNA, 120 bp, Artificial Sequence
  ENSG00000052126_6 (sequence is synthesized)
gcccatccaaacatgcggacctattatttctgcactgatacaggaaaggaaatggagttgtggatgaaagccatgttagatgctgccctagtacagacagaacctgtgaaaagagtggac

SEQ ID NO: 35204 - DNA, 120 bp, Artificial Sequence
  ENSG00000052126_7 (sequence is synthesized)
aagattacatctgaaaatgcaccaactaaagaaaccaataacattcccaaccatagagtgctaattaaaccagagatccaaaacaatcaaaaaaacaaggaaatgagcaaaattgaagaa

SEQ ID NO: 35205 - DNA, 120 bp, Artificial Sequence
  ENSG00000052126_8 (sequence is synthesized)
aaaaaggcattagaagctgaaaaatatggatttcagaaggatggtcaagatagacccttaacaaaaattaatagtgtaaagctgaattctctgccatctgaatatgagagtgggtcagca

SEQ ID NO: 35206 - DNA, 120 bp, Artificial Sequence
  ENSG00000052126_9 (sequence is synthesized)
tgccctgctcagactgtgcactacagaccaatcaacttgagcagttcagagaacaaaatagtcaatgttagcctggcagatcttagaggtggaaatcgccccaatacagggcccttatac

SEQ ID NO: 35207 - DNA, 120 bp, Artificial Sequence
  ENSG00000052126_10 (sequence is synthesized)
acagaggccgatcgagtcatacagagaacaaattcaatgcagcagttggaacagtggattaaaatccagaaggggaggggtcatgaagaagaaaccaggggagtaatttcttaccaaaca

SEQ ID NO: 35208 - DNA, 120 bp, Artificial Sequence
  ENSG00000052126_11 (sequence is synthesized)
ttaccaagaaatatgccaagtcacagagcccagattatggcccgctaccctgaaggttatagaacactcccaagaaacagcaagacaaggcctgaaagtatctgcagtgtaaccccttcc

SEQ ID NO: 35209 - DNA, 120 bp, Artificial Sequence
  ENSG00000052126_12 (sequence is synthesized)
actcatgacaagacattaggacccggagcggaggagaaacggaggtccatgagagatgacacaatgtggcagctctacgaatggcagcagcgtcagttttataacaaacagagcaccctc

SEQ ID NO: 35210 - DNA, 120 bp, Artificial Sequence
  ENSG00000052126_13 (sequence is synthesized)
cctcgacacagtactttgagtagtcccaaaaccatggtaaatatttctgaccagacaatgcactctattcccacatcaccttcccacgggtcaatagctgcttatcagggatactcccct

SEQ ID NO: 35211 - DNA, 120 bp, Artificial Sequence
  ENSG00000052126_14 (sequence is synthesized)
caacgaacttacagatcggaagtgtcttcaccaattcagagaggagatgtgacaatagaccgcagacacagggcccatcaccctaagcatgtctatgtgcctgacagaaggtcagtgcca

SEQ ID NO: 35212 - DNA, 120 bp, Artificial Sequence
  ENSG00000052126_15 (sequence is synthesized)
gctggcctgactttacagtctgttagtccccagagcctccaagggaaaacgctgtcacaagatgaaggtagaggcacattatacaaatacagacctgaagaagtagatattgatgccaag

SEQ ID NO: 35213 - DNA, 120 bp, Artificial Sequence
  ENSG00000052126_16 (sequence is synthesized)
ttaagccgattatgtgaacaagataaagtggtgcatgctctggaagagaaacttcagcaactccacaaggagaaatacacgcttgagcaagctttgctatcagccagccaagagatagaa

SEQ ID NO: 35214 - DNA, 120 bp, Artificial Sequence
  ENSG00000052126_17 (sequence is synthesized)
gttacaaagggatgatttacaaaatggactgcttagtacgtgtcgagaactttctcgagccactgccgaattggaacgagcatggagagaatatgataagttagaatacgatgtaactgt

SEQ ID NO: 35215 - DNA, 120 bp, Artificial Sequence
  ENSG00000052126_18 (sequence is synthesized)
taccaggaaccagatgcaagagcagctggatcaccttggtgaagttcagacggaatcagcaggaattcagcgtgcacagattcagaaagaactttggcgaattcaggatgtcatggaagg

SEQ ID NO: 35216 - DNA, 120 bp, Artificial Sequence
  ENSG00000052126_19 (sequence is synthesized)
gctgagtaaacataagcagcaaagaggtactacagaaataggtatgataggatcaaagcctttctcaacagttaagtacaaaaatgagggtccagattatagactctacaagagtgaacc

SEQ ID NO: 35217 - DNA, 120 bp, Artificial Sequence
  ENSG00000052126_20 (sequence is synthesized)
agagttaacaacagtggcagaagttgatgaatctaatggagaagaaaaatcagaacctgtttcagagatagaaacttcagttgttaaaggttcccactttcctgttggagtagtccctcc

SEQ ID NO: 35218 - DNA, 120 bp, Artificial Sequence
  ENSG00000052126_21 (sequence is synthesized)
aagagcaaaatcaccaacacccgaatcttcgacaatagcttcctatgtaaccttgaggaaaactaagaagatgatggatctaagaacggaaagaccaagaagtgcagtggaacagctctg

SEQ ID NO: 35219 - DNA, 120 bp, Artificial Sequence
  ENSG00000052126_22 (sequence is synthesized)
tttggctgaaagtactcgaccaaggatgactgtggaagagcaaatggaaagaataagaagacatcaacaagcgtgcctgagggagaagaaaaaagggttaaatgttatcggtgcttcaga

SEQ ID NO: 35220 - DNA, 120 bp, Artificial Sequence
  ENSG00000052126_23 (sequence is synthesized)
ccagtcacccttacaaagcccttcaaatttaagggataatccatttaggactactcagactcgaaggagggatgataaggaactggacactgccattagagaaaatgatgtaaagccaga

SEQ ID NO: 35221 - DNA, 120 bp, Artificial Sequence
  ENSG00000052126_24 (sequence is synthesized)
ccatgaaactcctgcaacagaaattgttcaactaaaagaaaccgaaccccaaaatgtggacttcagcaaagagttaaaaaaaactgaaaacatttcatatgaaatgctttttgaacctga

SEQ ID NO: 35222 - DNA, 120 bp, Artificial Sequence
  ENSG00000052126_25 (sequence is synthesized)
gccaaatggagtaaattctgtggaaatgatggataaagaaagaaacaaagacaaaatgcctgaggatgttacattcagccctcaagatgaaacacagaccgcaaatcataaaccagaaga

SEQ ID NO: 35223 - DNA, 120 bp, Artificial Sequence
  ENSG00000052126_26 (sequence is synthesized)
gcatcctgaagaaaatacaaagaacagtgttgacgaacaggaagaaactgttatttcttacgaatcaactcctgaggtttctagaggaaatcaaacaatggcagtgaaaagtctgtcccc

SEQ ID NO: 35224 - DNA, 120 bp, Artificial Sequence
  ENSG00000052126_27 (sequence is synthesized)
atctcctgagtcctcggcatcgccagttccatccactcagccgcagctcacagaaggatcacatttcatgtgtgtgtagtcttagaagaactatactgacttctgttgaaaccattcaaa

SEQ ID NO: 35225 - DNA, 120 bp, Artificial Sequence
  ENSG00000052126_28 (sequence is synthesized)
gctaaagacatggaccttcagcagtgtaagaagatattgtacagtatattttaaatctatgaaattcatagttctgatgcttttggtcacagagcatcattttatcacttctggaaaatg

SEQ ID NO: 35226 - DNA, 120 bp, Artificial Sequence
  ENSG00000052126_29 (sequence is synthesized)
tttattccaaaacagctttaatggcccatatgtacacttcgtaatctcaaggttattattctgacaccagcttgctgctatgatttcagagcacataagtaaaggtgctttttaatgtgc

SEQ ID NO: 35227 - DNA, 120 bp, Artificial Sequence
  ENSG00000052126_30 (sequence is synthesized)
agtctatttccagagcttacttagttgctgatttccagatttcgatgtttcttaagtctaggtgaatttatatatatatttttttgcttttcattttctaaagttagttattatttccat

SEQ ID NO: 35228 - DNA, 120 bp, Artificial Sequence
  ENSG00000052126_31 (sequence is synthesized)
tgaagcttgttttcttttttttcttcccattttagctactgcagtgcttttgtttcacacttgatttgtaaaaattttatatatatgtatttaaaatgtgccattttattgctaagtgaa

SEQ ID NO: 35229 - DNA, 120 bp, Artificial Sequence
  ENSG00000052126_32 (sequence is synthesized)
gtatgtcctgttttctgctataattctttctcggtcagattgcaatgtcagcagttactgccacactcctgtcagcttaaacacaaatgttactgcttatcttttcttaaaaaaaaaaaa

SEQ ID NO: 35230 - DNA, 120 bp, Artificial Sequence
  ENSG00000052126_33 (sequence is synthesized)
aacaaagtgtaggtattttgaagtactgggcttatatttcattggaatacatgtgtacagcaataagcaggtttccaaatccggtacttagtttgtgtacaaatgtaattatgttcattg

SEQ ID NO: 35231 - DNA, 120 bp, Artificial Sequence
  ENSG00000052126_34 (sequence is synthesized)
tgtatatattatacaatgagcacatgtaatgtattaaaggctacttactattgtttaaatgcaaatgttcatatctcatttctttttttatcatgttaaataaatgttgatgttcttaaa

SEQ ID NO: 35232 - DNA, 120 bp, Artificial Sequence
  ENSG00000052126_35 (sequence is synthesized)
taaagctgagacggcagcaagccgaactgagtagtatccgggagcatacgttagcacagctcatgcagctaaagcttgaggcccacagcccaaagaatgaaattctttcacatcatctcc

SEQ ID NO: 35233 - DNA, 120 bp, Artificial Sequence
  ENSG00000052126_36 (sequence is synthesized)
aaaggaacaccatatatttggatcatcagatgaaagaaaatgaacctattatcaccatggttcacacaatgattgagaactcggcgctaagaccccaactgtaccagcaattcttaagac

SEQ ID NO: 35234 - DNA, 120 bp, Artificial Sequence
  ENSG00000052126_37 (sequence is synthesized)
agttaagtacaaaaatgaggaagaggaagtagtcccacctcgtcctccacttcctcggtcctatgactttacagagcagcctcccataatcccccctctgcccagtgatagcagctcctt

SEQ ID NO: 35235 - DNA, 120 bp, Artificial Sequence
  ENSG00000052126_38 (sequence is synthesized)
gctctgttatagcaggggcccagttcatctgcctgaagaaaagaagatgtatcaagttcaaggatatccaagaaatggatctcactgtggtccagattatagactctacaagagtgaacc

SEQ ID NO: 35236 - DNA, 120 bp, Artificial Sequence
  ENSG00000052126_39 (sequence is synthesized)
tgcctcagcctcacaagtagctgggatcacaagtgcacgccaccacactcggctgatatttcgattttcttatagagacagtcttactaagttgtccacgctggtctcaaactcctgaat

SEQ ID NO: 35237 - DNA, 120 bp, Artificial Sequence
  ENSG00000052126_40 (sequence is synthesized)
cacgctggtctcaaactcctgaattcaagctaccctcccactgcatgagccactgtgcctagcctctttgattttcacattctcaaaatatttcttttattttctctccttttttttttt

SEQ ID NO: 35238 - DNA, 76 bp, Artificial Sequence
  ENSG00000052126_41 (sequence is synthesized)
ctttttttttttttttcgaggatcatggctcaatggctcactgaaggctgacctcccaggctcaagcaatcctccc

SEQ ID NO: 35239 - DNA, 120 bp, Artificial Sequence
  ENSG00000052126_42 (sequence is synthesized)
tgggactacaggtgtatgccaccatgccaggctaattgttttgcagagatggagttttcaccatgttgcccaggctgatctcaagctcctgagctcaagtgatctgtccgcctcagcctc

SEQ ID NO: 35240 - DNA, 120 bp, Artificial Sequence
  ENSG00000052126_43 (sequence is synthesized)
acaggtgtgagccaccacacccagccttttttcttccttttcaagcattttttaaatttcactagctttgggtacaagtggttttgggttacatggaagaattgtatagtggtgaagtct

SEQ ID NO: 35241 - DNA, 120 bp, Artificial Sequence
  ENSG00000052126_44 (sequence is synthesized)
tgaagtctgagattttagtgcacccattacccgagtagtgtatgttgtacccaatccttcaccgaccttccaccctctcccttctgagtctccaaagtccattataccacactgtatgcc

SEQ ID NO: 35242 - DNA, 120 bp, Artificial Sequence
  ENSG00000052126_45 (sequence is synthesized)
taccacactgtatgcctttgcatacccatagtgtagctccaacttataagtgagaacatatgatatttggttttcctttcctgagttactttacttagaataatggcctccagctccatc

SEQ ID NO: 35243 - DNA, 120 bp, Artificial Sequence
  ENSG00000052126_46 (sequence is synthesized)
aaatacattattttgttcctttttattgctgagtagtattccatggtgtatataaaccacattttctttatccactccttggttggtggactcttaggttggttccatacccttggagtt

SEQ ID NO: 35244 - DNA, 120 bp, Artificial Sequence
  ENSG00000052126_47 (sequence is synthesized)
attgtgctgctataaacatgcatgtgcatgtatcttttttatgtaatgacttgttttcttttgggtcgatactcagtagtgggattgctggatcaaatgctggatctacttttagttctt

SEQ ID NO: 35245 - DNA, 85 bp, Artificial Sequence
  ENSG00000052126_48 (sequence is synthesized)
ttcttctcaccacatccataccaacatctgttgttttttgacttttaaattatggccattctttttttttgtttttgagatggag

SEQ ID NO: 35246 - DNA, 88 bp, Artificial Sequence
  ENSG00000052126_49 (sequence is synthesized)
ctcaccacatccataccaacatctgttgttttttgacttttaaattatggccattctttttgcaggctggagtgcagtggcgtgatct

SEQ ID NO: 35247 - DNA, 120 bp, Artificial Sequence
  ENSG00000052126_50 (sequence is synthesized)
cgcccacctcggcctcccaaagtgctggcgtgacccactgcacccggccaattatggccattcttgcaggaataaggaggcatctcattgttgtgtaccttcttttgagaaatgcctatt

SEQ ID NO: 35248 - DNA, 87 bp, Artificial Sequence
  ENSG00000052126_51 (sequence is synthesized)
ttgagaaatgcctattcgcgtcagttttttttttcttgctgatttgttttgagttccttccagattctggatattagtcctttgttg

SEQ ID NO: 35249 - DNA, 120 bp, Artificial Sequence
  ENSG00000052126_52 (sequence is synthesized)
catagtttgcaaatatttcctcccatcctgttttctggaatctacttcctttcacaccttattgtaggaactataatctgtgccctttttttcagcccaaagtattttgttgtcttttca

SEQ ID NO: 35250 - DNA, 120 bp, Artificial Sequence
  ENSG00000052126_53 (sequence is synthesized)
tatttgtaacttttatttgagattatgtctacctggaacctcaaagaggcttctgtttttgtcagttggtatctgtgcaggactgaagtgcttgctggagagttacaaataacctaactg

SEQ ID NO: 35251 - DNA, 83 bp, Artificial Sequence
  ENSG00000052126_54 (sequence is synthesized)
gactgaagtgcttgctggagagttacaaataacctaactgtgatagtcttacctgtgttctgcctttgtcacttgtgtttaag

SEQ ID NO: 35252 - DNA, 120 bp, Artificial Sequence
  ENSG00000052126_55 (sequence is synthesized)
aatggtgagatcttggagccttgccctcctgggcttaagtgatcctcccacgacagcctcccaagtagctgggaccacacgcctgtgccaccaagcctggctgatttttttgtatttttt

SEQ ID NO: 35253 - DNA, 120 bp, Artificial Sequence
  ENSG00000052126_56 (sequence is synthesized)
tggtctcaaactcctgagctcaagcgctctgcccgcctcaatctcccaaagtgctgagattacaagattgagccatcacgcctggctatgtttaaacttttaatttaatatgtttagaaa

SEQ ID NO: 35254 - DNA, 120 bp, Artificial Sequence
  ENSG00000052126_57 (sequence is synthesized)
tgtttaaacttttaatttaatatgtttagaaatgactgttgaggccaggtgcggtaatgccagcactttgggaggccagggctggtggatcacttgaggtcgggagttcaggaccagcct

SEQ ID NO: 35255 - DNA, 120 bp, Artificial Sequence
  ENSG00000052126_58 (sequence is synthesized)
tacagtctgttagtccccagagcctccaagggaaaacgtggggtagagaaaaggtggcgacggcgactggagcagcagaggctgtagcatcggatacccacctcccacgaaccggttcct

SEQ ID NO: 35256 - DNA, 120 bp, Artificial Sequence
  ENSG00000052126_59 (sequence is synthesized)
cttccccctccttgctgtgtgtttgatgtgttgaagcaggagggagaacgccgcgagcagcgccgtgagcaacactaccatcgtccccagcactgcggatccgggccctagcggcgggcc

SEQ ID NO: 35257 - DNA, 120 bp, Artificial Sequence
  ENSG00000052126_60 (sequence is synthesized)
cagtagcggaggtggtggcggcggtggaggcggcggcatcgaggtaataggtgactgatctccccgggcgctagctctgagcagatgcggactctcttcggtttcctaggcaagatcgac

SEQ ID NO: 35258 - DNA, 120 bp, Artificial Sequence
  ENSG00000052126_61 (sequence is synthesized)
gaaccacacctcttcccgccggataattcacctttgccaatcgcaatctcgttaaattccatgatccagactcagcagttgtcgcaccatgtctgacaaacactgtattccttgacagag

SEQ ID NO: 35259 - DNA, 120 bp, Artificial Sequence
  ENSG00000052126_62 (sequence is synthesized)
ctttgataacgtaccatatgcagaaggagttattcctgataaggctaaggcttgtctctgttggcaccagctaatgcaatggcaggtcttctgcttggtgttgggctcctgcctactcct

SEQ ID NO: 35260 - DNA, 120 bp, Artificial Sequence
  ENSG00000052126_63 (sequence is synthesized)
aacccacttactcagactggcgctgttccaccggctgctttgggggctcctactcttgttcctgcccttgctgcgcttgggcttcctggagcaaacttgaactcaatctgttgccacaga

SEQ ID NO: 35261 - DNA, 120 bp, Artificial Sequence
  ENSG00000052126_64 (sequence is synthesized)
tagttgctgaagcttatgagcactgttggtcccaagttgaagcatgtagctgctggtcttgtttcaccaagtctgaaatcggatacctctagtaaagaaatagagaaaggggccccacat

SEQ ID NO: 35262 - DNA, 65 bp, Artificial Sequence
  ENSG00000052126_65 (sequence is synthesized)
ggatacctctagtaaagaaatagagaaaggggccccacatggtggctcaggccagtaatcccaga

SEQ ID NO: 35263 - DNA, 79 bp, Artificial Sequence
  ENSG00000052126_66 (sequence is synthesized)
tgtctctactaaaaattatacttaggaggctgaggcaggagaatcgcctgaatcctggaggcggaggttgcagtgagcc

SEQ ID NO: 35264 - DNA, 120 bp, Artificial Sequence
  ENSG00000052126_67 (sequence is synthesized)
cagcctgggcaacgagcacaaaactcttggctcaaaaaaaaatagaggaagctatgaaaagagtacaagaagcacactgcctaatttcggctgctatagaaccagagaaagaaaaaagaa

SEQ ID NO: 35265 - DNA, 120 bp, Artificial Sequence
  ENSG00000052126_68 (sequence is synthesized)
atatgaagtacttactcttggagactgcggtgtggttcagttttcttatagtggaaagagcagaaaagagatcacggtgtgcccctttgtcatcgttctgtcaggaagcatgtaatttgt

SEQ ID NO: 35266 - DNA, 120 bp, Artificial Sequence
  ENSG00000052126_69 (sequence is synthesized)
ctcaaagacaaagcagttgagtcttatttttactccagtgttctttttgcctgtaattgaatatccttttaagaattgattttgatgaaggctgtgtcattgaacagaagatgaaaggca

SEQ ID NO: 35267 - DNA, 120 bp, Artificial Sequence
  ENSG00000052126_70 (sequence is synthesized)
aaaaggaaagcagctcaagccttggaggcactcctacttggagtatgacttctggcaactttctaaatgctatgagcctcggtttatgtattcataaactgcaaataataacacctacct

SEQ ID NO: 35268 - DNA, 120 bp, Artificial Sequence
  ENSG00000052126_71 (sequence is synthesized)
caaatgggctctgtgaggattgtcaaggccattacgtgacagctgaatatccataatgaaaggaaagtgacctgcaaacatccagtcacaggacaaccatcacaggacaattgtattttt

SEQ ID NO: 35269 - DNA, 120 bp, Artificial Sequence
  ENSG00000052126_72 (sequence is synthesized)
cacttcttggtgactaatactagttgacaaaacagcatattctaaactgattgtcttcgttatccagtagctttcctattctccataacaaatgttccaaatctttgattactcacctca

SEQ ID NO: 35270 - DNA, 120 bp, Artificial Sequence
  ENSG00000052126_73 (sequence is synthesized)
gaatgcttgtctcactcctcttttcctcattcctagtagatcataccttggagaagaaagtagaaactatcaggcctgaacttcattagctttttcttcctcttcaatccaaatctgtct

SEQ ID NO: 35271 - DNA, 120 bp, Artificial Sequence
  ENSG00000052126_74 (sequence is synthesized)
gtatcttcattcatttttcttaaccctttccttgcttgctatttctgctttccaaaaccaaggaaggaattttgacagaggtacccaaggaattcactgggggaaaatgaatgattcaat

SEQ ID NO: 35272 - DNA, 120 bp, Artificial Sequence
  ENSG00000052126_75 (sequence is synthesized)
aaatgatgttatgataattagatagatagctatatgtaagcataaaaaatttttaaaaccttaggcccttattatcatatcatgcacaaaaattaagtggattattgatttaaatgtaaa

SEQ ID NO: 35273 - DNA, 120 bp, Artificial Sequence
  ENSG00000052126_76 (sequence is synthesized)
aacaaaaagtataaaacttttagaaaaaagagattatttgtgacattgggtctggcaaagatttcttagatgcgattaaagatttacaaaagaaaaaattgataaattagacttcatcaa

SEQ ID NO: 35274 - DNA, 120 bp, Artificial Sequence
  ENSG00000052126_77 (sequence is synthesized)
tgaagagaatgaaaagacaagtcacagactgggagaaagtacaggcaaatcacatatttgtcaaataactcatatccagaatttttaaagaacttttacaactcaataataacaagacaa

SEQ ID NO: 35275 - DNA, 120 bp, Artificial Sequence
  ENSG00000052126_78 (sequence is synthesized)
acagctcaattttttaaatgagggaaaaatttaaatatatttcacatgagaatatactcaaatagccagtgagcacatgaaaagatgttcagcatcattagacattagcaaattgcaaat

SEQ ID NO: 35276 - DNA, 120 bp, Artificial Sequence
  ENSG00000052126_79 (sequence is synthesized)
taaaaccacactgaggaacccactaggaatggctataatcaaagacgatcagtatcaagtattgcggagaatgtggagaaactcaaactctgttacactagtaatagaaatataaaatgt

SEQ ID NO: 35277 - DNA, 120 bp, Artificial Sequence
  ENSG00000052126_80 (sequence is synthesized)
tagaaccactttggaaagagattggcagtttctggaaaaaattaattgtaaatttgaccaagcaattttactacgtaagtatgttaagaatgaaaacgtgtgcacacaaagatctgtact

SEQ ID NO: 35278 - DNA, 120 bp, Artificial Sequence
  ENSG00000052126_81 (sequence is synthesized)
aaaatgttgatagcattattcataacagcctaacagtgcaaatgtctgtcaactactgtgaatggagagacaaaatgtgtttattaatacaataaaactacccagcaataaaaagaaata

SEQ ID NO: 35279 - DNA, 120 bp, Artificial Sequence
  ENSG00000052126_82 (sequence is synthesized)
attgactgataaatggtatacgatgactgaactttaaaaccttgatgctgcctaaaagagccagacacagactacacattgtataattccatttttatgaatttcccagaaaggcaaatt

SEQ ID NO: 35280 - DNA, 120 bp, Artificial Sequence
  ENSG00000052126_83 (sequence is synthesized)
atagagacaaaacaaatcagtggttgcctagggctggtggtggacgtggagattgactgtaaatgggacatgagggaatttttttgtggtgatagaaatgttataaaactagatgtggta

SEQ ID NO: 35281 - DNA, 120 bp, Artificial Sequence
  ENSG00000052126_84 (sequence is synthesized)
atagttgcacaactctgtaaattcactaaaagtcactgaactgtacacttaaccataggtgggtttaatgaaatgtgaattacactgcaataaaactaaataaaagctgagttagtacca

SEQ ID NO: 35282 - DNA, 120 bp, Artificial Sequence
  ENSG00000052126_85 (sequence is synthesized)
gttgctatatgatttttttcttatagctgtcacaagatgaaggtagaggcacattatacaaatacagacctgaagaagtagatattgatgtaagtattagtatgatatatgtggtcagta

SEQ ID NO: 35283 - DNA, 120 bp, Artificial Sequence
  ENSG00000052126_86 (sequence is synthesized)
ctccaaagtgacatcaggtaaattcatattttatgtgtgtgctctaaattattattccctgccctctacgtcccactgctccctattgttagcagtccaacgttattaagcatcacttaa

SEQ ID NO: 35284 - DNA, 120 bp, Artificial Sequence
  ENSG00000052126_87 (sequence is synthesized)
ccaacgttattaagcatcacttaaatgaaagtaaaaactgtttctgatttttagaagttacagattggctggtctcgacctcctgacctcaggtcatccacccaccttggcctcccaaag

SEQ ID NO: 35285 - DNA, 120 bp, Artificial Sequence
  ENSG00000052126_88 (sequence is synthesized)
tcgggggtgctgcgatcctctctgtgacagggaacggctcgggaaacgcttggcgcgttccctcctgccacgggaggagcagccggagccggaggaggcgttcgcagcctcagttgctgg

SEQ ID NO: 35286 - DNA, 120 bp, Artificial Sequence
  ENSG00000052126_89 (sequence is synthesized)
catctacccattaaggaacacttatttccttaattttgatgaatctcagtagtgcttaaagatcctaagtagtggtagatgaaaatgggttttgtggtcaagtacgtttggggaataata

SEQ ID NO: 35287 - DNA, 120 bp, Artificial Sequence
  ENSG00000052126_90 (sequence is synthesized)
gaccataaaggattgttcatagcagaacttcttgccctttaatatcttattcagaaccttaccctggaacttaattttttctggcatatggtttacttttaaaaggaaaaactgtaatat

SEQ ID NO: 35288 - DNA, 120 bp, Artificial Sequence
  ENSG00000052126_91 (sequence is synthesized)
tgtttttgttattttctcacagtcaatataaaaatcaaaagacaagaaaaatagtgaagtattgcctgcagaggctgtgatgttatctgtggtataactgactgggatggctattgaaat

SEQ ID NO: 35289 - DNA, 120 bp, Artificial Sequence
  ENSG00000052126_92 (sequence is synthesized)
cttgctaagcacaatcagaagtaaccaaaatatcttttaaccaaaatgtactgggcagaagctgaagaaaggatatttaagtacactgaataattccttacaatatagtaacataaatgg

SEQ ID NO: 35290 - DNA, 120 bp, Artificial Sequence
  ENSG00000052126_93 (sequence is synthesized)
agtcaactaacacacataaactttttatgaaatttgactatccatagtttataacataggctttcagttttataagatttcgaatgattttcctcttttcaattaaacccatccttttcc

SEQ ID NO: 35291 - DNA, 120 bp, Artificial Sequence
  ENSG00000052344_0 (sequence is synthesized)
agacggtgctggtgactcgtccacactgctcgcttcggatactccaggcgtctcccgttgcggccgctccctgccttagaggccagccttggacacttgctgcccctttccagcccggat

SEQ ID NO: 35292 - DNA, 120 bp, Artificial Sequence
  ENSG00000052344_1 (sequence is synthesized)
tctgggatccttccctctgagccaacatctgggtcctgccttcgacaccaccccaaggcttcctaccttgcgtgcctggagtctgccccaggggcccttgtcctgggccatggcccagaa

SEQ ID NO: 35293 - DNA, 120 bp, Artificial Sequence
  ENSG00000052344_2 (sequence is synthesized)
gggggtcctggggcctgggcagctgggggctgtggccattctgctctatcttggattactccggtcggggacaggagcggaaggggcagaagctccctgcggtgtggccccccaagcacg

SEQ ID NO: 35294 - DNA, 120 bp, Artificial Sequence
  ENSG00000052344_3 (sequence is synthesized)
catcacaggtggcagcagtgcagtcgccggtcagtggccctggcaggtcagcatcacctatgaaggcgtccatgtgtgtggtggctctctcgtgtctgagcagtgggtgctgtcagctgc

SEQ ID NO: 35295 - DNA, 120 bp, Artificial Sequence
  ENSG00000052344_4 (sequence is synthesized)
tcactgcttccccagcgagcaccacaaggaagcctatgaggtcaagctgggggcccaccagctagactcctactccgaggacgccaaggtcagcaccctgaaggacatcatcccccaccc

SEQ ID NO: 35296 - DNA, 120 bp, Artificial Sequence
  ENSG00000052344_5 (sequence is synthesized)
cagctacctccaggagggctcccagggcgacattgcactcctccaactcagcagacccatcaccttctcccgctacatccggcccatctgcctccctgcagccaacgcctccttccccaa

SEQ ID NO: 35297 - DNA, 120 bp, Artificial Sequence
  ENSG00000052344_6 (sequence is synthesized)
cggcctccactgcactgtcactggctggggtcatgtggccccctcagtgagcctcctgacgcccaagccactgcagcaactcgaggtgcctctgatcagtcgtgagacgtgtaactgcct

SEQ ID NO: 35298 - DNA, 120 bp, Artificial Sequence
  ENSG00000052344_7 (sequence is synthesized)
gtccaagaggacatggtgtgtgctggctatgtggaggggggcaaggacgcctgccagggtgactctgggggcccactctcctgccctgtggagggtctctggtacctgacgggcattgtg

SEQ ID NO: 35299 - DNA, 120 bp, Artificial Sequence
  ENSG00000052344_8 (sequence is synthesized)
agctggggagatgcctgtggggcccgcaacaggcctggtgtgtacactctggcctccagctatgcctcctggatccaaagcaaggtgacagaactccagcctcgtgtggtgccccaaacc

SEQ ID NO: 35300 - DNA, 120 bp, Artificial Sequence
  ENSG00000052344_9 (sequence is synthesized)
caggagtcccagcccgacagcaacctctgtggcagccacctggccttcagctctgccccagcccagggcttgctgaggcccatccttttcctgcctctgggcctggctctgggcctcctc

SEQ ID NO: 35301 - DNA, 120 bp, Artificial Sequence
  ENSG00000052344_10 (sequence is synthesized)
tccccatggctcagcgagcactgagctggccctacttccaggatggatgcatcacactcaaggacaggagcctggtccttccctgatggcctttggacccagggcctgacttgagccact

SEQ ID NO: 35302 - DNA, 120 bp, Artificial Sequence
  ENSG00000052344_11 (sequence is synthesized)
ccttccttcaggactctgcgggaggctggggccccatcttgatctttgagcccattcttctgggtgtgctttttgggaccatcactgagagtcaggagttttactgcctgtagcaatggc

SEQ ID NO: 35303 - DNA, 120 bp, Artificial Sequence
  ENSG00000052344_12 (sequence is synthesized)
cagagcctctggcccctcacccaccatggaccagcccattggccgagctcctggggagctcctgggacccttggctatgaaaatgagccctggctcccacctgtttctggaagactgctc

SEQ ID NO: 35304 - DNA, 120 bp, Artificial Sequence
  ENSG00000052344_13 (sequence is synthesized)
ccggcccgcctgcccagactgatgagcacatctctctgccctctccctgtgttctgggctggggccacctttgtgcagcttcgaggacaggaaaggccccaatcttgcccactggccgct

SEQ ID NO: 35305 - DNA, 120 bp, Artificial Sequence
  ENSG00000052344_14 (sequence is synthesized)
gagcgcccccgagccctgactcctggactccggaggactgagcccccaccggaactgggctggcgcttggatctggggtgggagtaacagggcagaaatgattaaaatgtttgagcacaa

SEQ ID NO: 35306 - DNA, 120 bp, Artificial Sequence
  ENSG00000052344_15 (sequence is synthesized)
attcccctggggtttaaccagtgcctggccttcagctgggctgccttccaactagattctcttagggctcccagagtggggggttttagccctcaccttatgggcagagaagcagggact

SEQ ID NO: 35307 - DNA, 120 bp, Artificial Sequence
  ENSG00000052344_16 (sequence is synthesized)
tgcccagggcacactgccagtgaaggtgcagctgggattcagatccacgtctgactcccaaagtggggcaatcgaggtggtttttttggtttggtttttgtcttttgaaacagggtctgg

SEQ ID NO: 35308 - DNA, 120 bp, Artificial Sequence
  ENSG00000052344_17 (sequence is synthesized)
cctcagcctccctagtggctgggactacaggtgcatgccatcacacccagctagttgtgttttgtttttgtttttgtttttgtttggtagagatgtgggtctcactatgttggccgggca

SEQ ID NO: 35309 - DNA, 78 bp, Artificial Sequence
  ENSG00000052344_18 (sequence is synthesized)
atcctggaggtggttttgagggaaccaaaccaagggtctcctttcttggaaggcacccaacccagctctgagtcagac

SEQ ID NO: 35310 - DNA, 120 bp, Artificial Sequence
  ENSG00000052344_19 (sequence is synthesized)
tcctttcttggaaggcacccaacccagctctgagtcagaccggctttcaatcctggcttccccatgcactggctgtgtgtcattggccaagtccccccacttctctaagccttagactcc

SEQ ID NO: 35311 - DNA, 120 bp, Artificial Sequence
  ENSG00000052344_20 (sequence is synthesized)
tcacctctaaaatgaagctggtcatgtccgtctcctggggctgtggagaggatgcagggagatgaggaagcgaaagcccctccagggcctggcacagccgctaggctctctaaatagtgg

SEQ ID NO: 35312 - DNA, 120 bp, Artificial Sequence
  ENSG00000052344_21 (sequence is synthesized)
ctattgtcatgatgataagggagagaaagatctggtctgcaattttctctgctcctagatgactttgtgaagagcagttgggctccactccaaagtggcctcaatgggggtggggctggg

SEQ ID NO: 35313 - DNA, 120 bp, Artificial Sequence
  ENSG00000052344_22 (sequence is synthesized)
gctgtcctggaaactagacattcacatcacaggagcccagttctgctgttggtttgttgaatatatgtccacgacgccacaggcactgcagacatgagaatctgcccctagggaatgccc

SEQ ID NO: 35314 - DNA, 120 bp, Artificial Sequence
  ENSG00000052723_0 (sequence is synthesized)
gacagactcccagaagatctgagcgagtcgcgtagctgagcccggcaggggctggggtggtgctgctgctatgagctgcaccatcgagaagatcctgacagacgccaagacgctgctgga

SEQ ID NO: 35315 - DNA, 120 bp, Artificial Sequence
  ENSG00000052723_1 (sequence is synthesized)
gaggctacgggagcacgatgcggccgccgagtcgctggtggatcagtcggcggcgctgcaccggcgggtagcagctatgcgggaggcggggacagcgcttccggaccagtatcaagagga

SEQ ID NO: 35316 - DNA, 120 bp, Artificial Sequence
  ENSG00000052723_2 (sequence is synthesized)
tgcatccgatatgaaggacatgtccaaatacaaacctcacattctgctgtcccaagagaacacacagattagagacttgcaacaggaaaacagagagctatggatttccttggaggaaca

SEQ ID NO: 35317 - DNA, 120 bp, Artificial Sequence
  ENSG00000052723_3 (sequence is synthesized)
ccaggatgctttggaacttatcatgagcaaatatcggaaacagatgttacagttaatggttgctaaaaaagcggtggatgctgaaccagtcctgaaagctcaccagtctcactctgcaga

SEQ ID NO: 35318 - DNA, 120 bp, Artificial Sequence
  ENSG00000052723_4 (sequence is synthesized)
aattgagagtcagattgacagaatctgtgaaatgggagaagtgatgaggaaagcagttcaggtggatgatgaccagttttgtaagattcaggaaaaattagcccaattagagcttgaaaa

SEQ ID NO: 35319 - DNA, 120 bp, Artificial Sequence
  ENSG00000052723_5 (sequence is synthesized)
taaggaacttcgagaattattgtccatcagcagtgagtctcttcaagccagaaaggaaaactcaatggacactgcttcccaagccatcaaataactgaactctgaatgatggctggagat

SEQ ID NO: 35320 - DNA, 120 bp, Artificial Sequence
  ENSG00000052723_6 (sequence is synthesized)
tgtctatcaaggaaggaagttactgtcttcccattcaagtactgtccattaagtgtcttgcctcagatttgatttaatcttaattaaaggtatcaggtggcaatttagaattccagtcaa

SEQ ID NO: 35321 - DNA, 120 bp, Artificial Sequence
  ENSG00000052723_7 (sequence is synthesized)
tattggctgtccacagttctcagatgtgttaatgtgaatactacatgctgaatttcaccattcctttctcaaagagactacttttaattttcatttctgggaccttgatttatataaact

SEQ ID NO: 35322 - DNA, 120 bp, Artificial Sequence
  ENSG00000052723_8 (sequence is synthesized)
atgttttcagttctttgttatttttcacatctctgaaactttgagcattttttataagccagcaatttattttacatagcattgtaaaatacacttctaggaaattttaggaaagattta

SEQ ID NO: 35323 - DNA, 120 bp, Artificial Sequence
  ENSG00000052723_9 (sequence is synthesized)
attttttttttccatttgacaaaaataatacaattccacagaactagatcagcagattctctgatttgtaatgtcattcacctgtgacattttaagtctctctggtgctaagaattggca

SEQ ID NO: 35324 - DNA, 120 bp, Artificial Sequence
  ENSG00000052723_10 (sequence is synthesized)
ctttatagcctggtgcctttacttttaatttgagagaacctactgctagtcccaggaaacacacttggaaataagtcagctattttttttgcccagtgatgctatagttgtcatattgtc

SEQ ID NO: 35325 - DNA, 120 bp, Artificial Sequence
  ENSG00000052723_11 (sequence is synthesized)
caaagttcatattgttcaaagctgaggagcttgtcctgtgtatgtgaatgcacacatgtgcacttagttcaaatactaaaagtagcttttattaaatataatcagccaaaaacacacaca

SEQ ID NO: 35326 - DNA, 120 bp, Artificial Sequence
  ENSG00000052723_12 (sequence is synthesized)
aaataaaaaaaacaaatataagtagtcagtttttcaatgttatcctactagttctacattctattttaatttttatacaatttccattttatagttaagaaccatcacttacttggattg

SEQ ID NO: 35327 - DNA, 120 bp, Artificial Sequence
  ENSG00000052723_13 (sequence is synthesized)
ttatagttaagaaccatcacttacttggattggatgtctttcattcctagcactaatagttggctttctttttttttgtttacatagaagcagggtttttttttatcttttttctttttt

SEQ ID NO: 35328 - DNA, 120 bp, Artificial Sequence
  ENSG00000052723_14 (sequence is synthesized)
agttttgttacctaatgaaaattattacactcataatgctgtgtaggcaacattgagattcaaatgcccagtggtcaactgggttcactcatcaactcattcccgtcccagtttactcac

SEQ ID NO: 35329 - DNA, 120 bp, Artificial Sequence
  ENSG00000052723_15 (sequence is synthesized)
atttcaaatttataaatttcttcatgttatactattctatttagatttgcccagaattagttgaaataatgctaaacctgtcaatattttccagtaacattaagcaccatactgcatggg

SEQ ID NO: 35330 - DNA, 120 bp, Artificial Sequence
  ENSG00000052723_16 (sequence is synthesized)
agagacacagtactaaaaagagttgttagtgctttatgtgagtgatatttctttcgtaatgctataaagaactacagttaaaataacaaaatattttaaagatgtcctaaaagcatctga

SEQ ID NO: 35331 - DNA, 120 bp, Artificial Sequence
  ENSG00000052723_17 (sequence is synthesized)
tcccagtaataactaatggatgtcatctagagcagtgggtgttaatgaataggtatatgtcatttaagaatttttcaaatttctgtttgatatcctgcatagaatttgacaaaaaaaaca

SEQ ID NO: 35332 - DNA, 120 bp, Artificial Sequence
  ENSG00000052723_18 (sequence is synthesized)
ctcgaagtataccttaagtgaccccataaatccattcaagaggcaggtactctataccatttggcagccacggccaaacctaccatggccagatttcagtgaaaatgatgaagtaatcaa

SEQ ID NO: 35333 - DNA, 120 bp, Artificial Sequence
  ENSG00000052723_19 (sequence is synthesized)
atcaaggtataatatggtgtccctttatgtgctttatgttcctttagagctgtttataaagttctttatatctcaagtgttaggataaatcgacatactaacttttccccctgcaaaatt

SEQ ID NO: 35334 - DNA, 120 bp, Artificial Sequence
  ENSG00000052723_20 (sequence is synthesized)
aaaagcctgaggtacaagtctaagaagcttttagtgctctacataatataaattctggctggtgttaatgctatgaagataatatgtagttagaaaattgagtcggggaggaatgctctt

SEQ ID NO: 35335 - DNA, 120 bp, Artificial Sequence
  ENSG00000052723_21 (sequence is synthesized)
gaagataagctaattttactcagtagtaagtcaaatgaggaagtgcagagggtttttttacatatatatagcaaccttgtcaagtggtcctcacaagagtcataaatactttgtaattag

SEQ ID NO: 35336 - DNA, 120 bp, Artificial Sequence
  ENSG00000052723_22 (sequence is synthesized)
ttagcacagtatattcagcagtgtataactctacaaatagtaccttatattagtgtagtattatatcaatatcttatgtataattcttatattaataccttatgcataattggattcaaa

SEQ ID NO: 35337 - DNA, 120 bp, Artificial Sequence
  ENSG00000052723_23 (sequence is synthesized)
gaaggtctattttagtgttcttcaaaatgtgcttccctgacctactgaaatagaaacttggtgatgaagttcaagaatttgtattctaatcatctcaaacaattcctaaagacactgatt

SEQ ID NO: 35338 - DNA, 120 bp, Artificial Sequence
  ENSG00000052723_24 (sequence is synthesized)
ttaaaatatctagtctaggccccattgtgtaatagttagcactctaaaagatgaaaaagaaaatagtctatgtgccaaccacttcattagtacttatgaatttaaaaatgaaaaagtctg

SEQ ID NO: 35339 - DNA, 120 bp, Artificial Sequence
  ENSG00000052723_25 (sequence is synthesized)
gtacaggagacaagtatatatataaaattataatgcagtgtgataaatccattatagtatgtataagatacagaagagggactttaaacttgagaattcaatagagataataaatgggta

SEQ ID NO: 35340 - DNA, 120 bp, Artificial Sequence
  ENSG00000052723_26 (sequence is synthesized)
ggagggaaatagaaaactttggtgccacaaaagcaaagtatgtatggtattgccaataatagctaccatctattgagtgctttactacctgtcaggtactgtattatataaactccattt

SEQ ID NO: 35341 - DNA, 120 bp, Artificial Sequence
  ENSG00000052723_27 (sequence is synthesized)
taactgtacctcattttgcagatactcaggcacaaggaggtggttatttgtccaaactggaaccaagattcaaacccagacagagtcttaagcacatttttaatcactaactaacttgag

SEQ ID NO: 35342 - DNA, 120 bp, Artificial Sequence
  ENSG00000052723_28 (sequence is synthesized)
atgcctaaatgccaaatactgttgggagttcaagtggttcttgattagcaaaatctatttttattagtgcaaaagaaacaccacagcttataaagtattatgaattcaataaatggagtc

SEQ ID NO: 35343 - DNA, 120 bp, Artificial Sequence
  ENSG00000052723_29 (sequence is synthesized)
ttaactaatgagatattattttctagaatggtgtagctgagagtatgtgtgattcaactgaaaggaataatgtttaatcagtgactcttactatatacaggaaaaggtgcagttctgtct

SEQ ID NO: 35344 - DNA, 120 bp, Artificial Sequence
  ENSG00000052723_30 (sequence is synthesized)
ttcaaatctgcctccttaccatattggcttacatccctcatgctgttttcttgtgtttgctagaaagttgttgccaagccaaatgtcatggccatgttgaaggcaaggaagaaaaaatgg

SEQ ID NO: 35345 - DNA, 120 bp, Artificial Sequence
  ENSG00000052723_31 (sequence is synthesized)
aaatggcctgtgccagctatatatatcgccttttatgagggaaagcaaagctttctcagaaatcccaaatggattttcccttgacttaattgcctgaccagttaaatggccactggtacc

SEQ ID NO: 35346 - DNA, 120 bp, Artificial Sequence
  ENSG00000052723_32 (sequence is synthesized)
tgcaaagaaagcagggtacatagctgtcccaaataaaatcagtattagcaagaagaaagaatattgagaaagcaattaacagtgtctgtgactgtgacatgtctgtgactttatattgtc

SEQ ID NO: 35347 - DNA, 120 bp, Artificial Sequence
  ENSG00000052723_33 (sequence is synthesized)
aagtcctttccccttgaatatagttttggaagaattagctgaaggagtgtgttgacattgaatggccaagagaatgggctgtagcagacatctgtcatttctcttttggctgcccagtat

SEQ ID NO: 35348 - DNA, 120 bp, Artificial Sequence
  ENSG00000052723_34 (sequence is synthesized)
cctaactcctgtgtttaaggaatccctcacctaatgaggcagagcatttcttcctcctaaagaatttgaaagtaccaggtaatgttttctcagcctccttttgcagctaaggaagaaaca

SEQ ID NO: 35349 - DNA, 120 bp, Artificial Sequence
  ENSG00000052723_35 (sequence is synthesized)
tctgccttcaattttaaaattagtgatacaaagaaggagggaaccatgcagattcctttgaagatggtgattaacaacactactgcattcatctccacagaggtacagcaaaagtgattt

SEQ ID NO: 35350 - DNA, 89 bp, Artificial Sequence
  ENSG00000052723_36 (sequence is synthesized)
tactgcattcatctccacagaggtacagcaaaagtgatttagttagcgataacctctaattctatttttttatttttattttttgagac

SEQ ID NO: 35351 - DNA, 80 bp, Artificial Sequence
  ENSG00000052723_37 (sequence is synthesized)
cagcctcccaagtcgctgggattacaagtgcccaccaccatgcacagctaatttttgtgtttttagttatgacttcaggt

SEQ ID NO: 35352 - DNA, 76 bp, Artificial Sequence
  ENSG00000052723_38 (sequence is synthesized)
taacctctaattcttgtttgctggctgtcctagagatcctgagaattacttttaataaaatcatttttttgctgtt

SEQ ID NO: 35353 - DNA, 120 bp, Artificial Sequence
  ENSG00000052723_39 (sequence is synthesized)
tcctgagaattacttttaataaaatcatttttttgctgttattaaaactaacctgaattgcctaaaaccaagaactctgcttgataaaataagcatagttttaggaacagccatgcagat

SEQ ID NO: 35354 - DNA, 120 bp, Artificial Sequence
  ENSG00000052723_40 (sequence is synthesized)
ataaattttatcaacactttatacataatttgggacttatatttaaatgtaatatttgatgcttataaaagggtaaatggggaatgcaaataaattatcaagcataataactcatcacct

SEQ ID NO: 35355 - DNA, 120 bp, Artificial Sequence
  ENSG00000052723_41 (sequence is synthesized)
aacttaagaataacattatgagtgcttgtattttatctatttgagctcttctcctatctttgccgacccccccgctctctttttaatagatttgttcgaatgtagaaagacctaaaatac

SEQ ID NO: 35356 - DNA, 120 bp, Artificial Sequence
  ENSG00000052723_42 (sequence is synthesized)
atatgtatccctaaagtgacttattttatagttttctttctttttgaacttcaaaaaaattgtatcatactctatgtagtctaaggatttggtttttttcactcaacatgtctctagaat

SEQ ID NO: 35357 - DNA, 120 bp, Artificial Sequence
  ENSG00000052723_43 (sequence is synthesized)
tctagaattcacaagttttattgttttatagctgtcattttcattgatgtatatttcattgttgggttatacaacatattgttaaggaatacatacatatataataaattatacattttt

SEQ ID NO: 35358 - DNA, 120 bp, Artificial Sequence
  ENSG00000052723_44 (sequence is synthesized)
aagccatcgtctcacctctgcctccggagcagctgggactacaggaaattgagagtcagattgacagaatctgtgaaatgggagaagtgatgaggaaagcagttcaggtggatgatgacc

SEQ ID NO: 35359 - DNA, 120 bp, Artificial Sequence
  ENSG00000052723_45 (sequence is synthesized)
ggcgggtagcagctatgcgggaggcggggacagcgcttccggaccaggtcaggcagagggtaggagtccagtgctctcggattctgggcactgaagggtggagagcgaggtaaagtggga

SEQ ID NO: 35360 - DNA, 120 bp, Artificial Sequence
  ENSG00000052749_0 (sequence is synthesized)
agtaatgcacacgaatccggaagtgacgccagaagaagaggaagtgaaggctacagggtatccacgtgggttctgagcgtgtttctacgtccctggaagccggtcatttaagctcattcc

SEQ ID NO: 35361 - DNA, 120 bp, Artificial Sequence
  ENSG00000052749_1 (sequence is synthesized)
tcgccacggcttagtcaacatgggtcgctcgggaaagttgccttctggtgtctcagctaagttgaagcgctggaagaaaggccacagcagcgacagcaaccccgccatctgccgccaccg

SEQ ID NO: 35362 - DNA, 120 bp, Artificial Sequence
  ENSG00000052749_2 (sequence is synthesized)
tcaggccgcccgcagccgcttcttcagccggccgtcaggaaggagtgacctgacagtcgatgctgtgaagttacataatgagctgcagtcagggtccttgcgcttgggcaaaagcgaagc

SEQ ID NO: 35363 - DNA, 120 bp, Artificial Sequence
  ENSG00000052749_3 (sequence is synthesized)
cccggagacgcccatggaagaagaggcggagctggttctcaccgagaagtcctcgggtaccttcctgagtggcctttccgactgcacaaacgtcaccttcagcaaagtacagcgcttctg

SEQ ID NO: 35364 - DNA, 120 bp, Artificial Sequence
  ENSG00000052749_4 (sequence is synthesized)
ggagtccaactcggctgcccacaaggagatctgtgctgttctggctgctgtcactgaggtgattcgctcccagggagggaaggagacggagactgagtacttcgctgctctgatgacaac

SEQ ID NO: 35365 - DNA, 120 bp, Artificial Sequence
  ENSG00000052749_5 (sequence is synthesized)
aatggaagcagtggagtccccggagtccctggccgccgttgcttacctgctgaaccttgtcctgaagcgtgttcccagccctgtgcttattaagaagttctctgatacctccaaagcctt

SEQ ID NO: 35366 - DNA, 120 bp, Artificial Sequence
  ENSG00000052749_6 (sequence is synthesized)
catggatatcatgtcagctcaggccagcagcggctccacctctgtcctccgatgggtcctttcctgcctggccacccttctgcggaagcaagacctggaggcctggggctaccccgtgac

SEQ ID NO: 35367 - DNA, 120 bp, Artificial Sequence
  ENSG00000052749_7 (sequence is synthesized)
ccttcaggtgtaccatgggctgctgagcttcacggtgcatcccaagcccaagatccggaaggctgcccagcatggagtatgctcagtcctcaagggcagtgaattcatgtttgaaaaggc

SEQ ID NO: 35368 - DNA, 120 bp, Artificial Sequence
  ENSG00000052749_8 (sequence is synthesized)
ccctgcccatcatcctgctgccatttccactgccaagttctgcatccaggagattgagaagtctggaggctccaaggaggccaccaccacgctgcacatgctgacgctgctgaaggacct

SEQ ID NO: 35369 - DNA, 120 bp, Artificial Sequence
  ENSG00000052749_9 (sequence is synthesized)
gctgccctgcttcccggaaggcctggtgaagagctgcagtgagactctcctcagggtcatgaccttgagccatgtgctggtgacagcctgtgccatgcaggcctttcacagcctcttcca

SEQ ID NO: 35370 - DNA, 120 bp, Artificial Sequence
  ENSG00000052749_10 (sequence is synthesized)
cgccaggcctggcctgagcaccctgtcagcagagctcaacgcccagatcatcacggccctgtacgactatgttcccagtgagaatgatttacaacccctgctagcctggcttaaggtcat

SEQ ID NO: 35371 - DNA, 120 bp, Artificial Sequence
  ENSG00000052749_11 (sequence is synthesized)
ggagaaagcccacatcaacctggtgaggttgcagtgggacctggggctaggccacctccctcgcttttttggaactgcggtgacctgcctcctttccccacactcgcaagtgctgactgc

SEQ ID NO: 35372 - DNA, 120 bp, Artificial Sequence
  ENSG00000052749_12 (sequence is synthesized)
tgctacgcagagcctcaaggagatcctgaaggaatgcgtggctccccacatggctgacattggctccgtgacctcctcggcctcaggccctgcccaatctgttgccaagatgttcagggc

SEQ ID NO: 35373 - DNA, 120 bp, Artificial Sequence
  ENSG00000052749_13 (sequence is synthesized)
agtggaggagggcctgacgtacaaattccatgcggcctggagctccgtgttgcagctgctgtgtgtcttcttcgaggcgtgtgggagacaggcccaccctgtgatgaggaagtgcctcca

SEQ ID NO: 35374 - DNA, 120 bp, Artificial Sequence
  ENSG00000052749_14 (sequence is synthesized)
gtccctgtgtgacctgcgcctctcccctcatttcccccacacggcggctcttgaccaggcagtgggggctgcggtgaccagtatgggacctgaggtggtgctgcaggctgtgcctttgga

SEQ ID NO: 35375 - DNA, 120 bp, Artificial Sequence
  ENSG00000052749_15 (sequence is synthesized)
aattgatggctctgaggagactctggatttcccacggagctggctgctgcctgtcatccgagaccatgttcaggaaacgcgacttggttttttcaccacctacttcttgcccctggctaa

SEQ ID NO: 35376 - DNA, 120 bp, Artificial Sequence
  ENSG00000052749_16 (sequence is synthesized)
caccctgaagagcaaagccatggacctggctcaggcaggcagcacagtggaatctaagatctacgacacactccagtggcagatgtggacactcctgcctgggttctgcacaaggcctac

SEQ ID NO: 35377 - DNA, 120 bp, Artificial Sequence
  ENSG00000052749_17 (sequence is synthesized)
agatgtggccatctccttcaaagggctggcacggacgctgggcatggccatcagcgagcgtccagacctgagggtcaccgtgtgccaggccctgcgcaccctcatcaccaagggctgcca

SEQ ID NO: 35378 - DNA, 120 bp, Artificial Sequence
  ENSG00000052749_18 (sequence is synthesized)
tcgccgggctgtgctggaaaccatcagaacttacctcaccatcactgacactcagttggtgaacagtctcctggaaaaagccagtgagaaggtgctcgaccctgccagctctgactttac

SEQ ID NO: 35379 - DNA, 120 bp, Artificial Sequence
  ENSG00000052749_19 (sequence is synthesized)
cagattgtctgtcctggacctggtcgtggccttggctccgtgtgctgacgaagctgccatcagtaagctatactccaccatccggccctacctagagagcaaggcccacggggtgcagaa

SEQ ID NO: 35380 - DNA, 120 bp, Artificial Sequence
  ENSG00000052749_20 (sequence is synthesized)
gaaggcctaccgagtgctggaggaggtgtgtgccagtcctcagggccccggggccctcttcgtgcagagccacctggaggacctgaagaagacactgctggactcgctgcggagcacctc

SEQ ID NO: 35381 - DNA, 120 bp, Artificial Sequence
  ENSG00000052749_21 (sequence is synthesized)
ctcacccgccaagaggccccgtttgaagtgcctcctacacatcgtgaggaagctctcagctgaacacaaggagttcatcactgccctcatcccagaggtgatcctgtgcaccaaggaggt

SEQ ID NO: 35382 - DNA, 120 bp, Artificial Sequence
  ENSG00000052749_22 (sequence is synthesized)
gtcggtgggcgcacggaagaacgcttttgcactgctcgtggagatgggccatgctttcctaaggtttggctcgaaccaggaagaggccctgcagtgctacctcgtcctgatctaccctgg

SEQ ID NO: 35383 - DNA, 120 bp, Artificial Sequence
  ENSG00000052749_23 (sequence is synthesized)
cctggtgggcgcggtgaccatggtcagctgcagcatcctggccctgacccacctccttttcgagtttaaaggtctgatggggaccagtacagtggagcagctgctggagaatgtgtgcct

SEQ ID NO: 35384 - DNA, 120 bp, Artificial Sequence
  ENSG00000052749_24 (sequence is synthesized)
gcttctggcctcccgcacccgtgacgtggtcaagtctgcactgggcttcatcaaggtggcagtgactgtcatggacgtggcgcacctggccaaacatgtgcagctggtgatggaagccat

SEQ ID NO: 35385 - DNA, 120 bp, Artificial Sequence
  ENSG00000052749_25 (sequence is synthesized)
tgggaagctttcagatgacatgcggcggcacttccgcatgaagcttcggaacctgttcaccaagttcatccgcaagtttggatttgagctggtgaaaaggctgttgcccgaggagtacca

SEQ ID NO: 35386 - DNA, 120 bp, Artificial Sequence
  ENSG00000052749_26 (sequence is synthesized)
cagagtcctggtcaacatccggaaagctgaggcccgggccaagaggcaccgagccctgagccaggctgccgtggaggaggaagaagaggaggaggaggaggaggagcccgcccagggcaa

SEQ ID NO: 35387 - DNA, 120 bp, Artificial Sequence
  ENSG00000052749_27 (sequence is synthesized)
aggtgacagcattgaggagattttagctgactcagaggacgaggaggacaatgaggaggaggaaagaagccgaggcaaggagcagcggaagctggcacgacagaggagccgggcatggct

SEQ ID NO: 35388 - DNA, 120 bp, Artificial Sequence
  ENSG00000052749_28 (sequence is synthesized)
gaaagagggcggtggggacgagcccctcaacttcctggatcccaaggtggcccaacgagtcctggccacgcagccagggccaggccggggcaggaagaaggaccacggcttcaaggtgag

SEQ ID NO: 35389 - DNA, 120 bp, Artificial Sequence
  ENSG00000052749_29 (sequence is synthesized)
cgccgatggccggctgatcataagggaggaggcagacggcaacaagatggaggaagaggaaggtgccaaaggcgaagatgaagagatggctgacccaatggaagatgtgatcatcaggaa

SEQ ID NO: 35390 - DNA, 120 bp, Artificial Sequence
  ENSG00000052749_30 (sequence is synthesized)
taaaaagcaccagaagctcaagcaccagaaagaggctgaggaggaggagctggagataccccctcagtaccaagctggaggctctggcattcatcgccctgtggccaagaaggctatgcc

SEQ ID NO: 35391 - DNA, 120 bp, Artificial Sequence
  ENSG00000052749_31 (sequence is synthesized)
tggggctgaatacaaggccaagaaagcaaaaggtgatgtgaagaagaaaggccggccggatccctatgcctacatccccctcaacagaagcaagctcaaccgcaggaagaagatgaagct

SEQ ID NO: 35392 - DNA, 120 bp, Artificial Sequence
  ENSG00000052749_32 (sequence is synthesized)
gcagggacagttcaaaggcctggtgaaggctgcccggcgaggttcccaggtgggacacaaaaaccgcagaaaggatcgtcgaccctgaggcccagggcccctgggctgccctgtggtcca

SEQ ID NO: 35393 - DNA, 120 bp, Artificial Sequence
  ENSG00000052749_33 (sequence is synthesized)
gtctgaggccctttcagcccccaggctgccttgccaccagctccaggtgctcaagattctggcagagcctggactcaggatgacttggaactagggcttggctctcagaagtcctggatt

SEQ ID NO: 35394 - DNA, 120 bp, Artificial Sequence
  ENSG00000052749_34 (sequence is synthesized)
ttggaaactccaaatggaatcacccttcagagacatccctggtgcctggagatgggaatgtggcctcagtgcctctgagtaggtgccatgaggcacctttgctttctgcccagagtggcc

SEQ ID NO: 35395 - DNA, 120 bp, Artificial Sequence
  ENSG00000052749_35 (sequence is synthesized)
atgagcaccagaacagatgatctccatttccgccagctgcctgtagccacgtggcatcctgcctgtggtctgggtgagatttactgtgaccagatgtagaataaatgtgtctcatcctgc

SEQ ID NO: 35396 - DNA, 120 bp, Artificial Sequence
  ENSG00000052749_36 (sequence is synthesized)
cagatgctaagaccttgtggcatctgaaatgggggaccttattgaatggccttccaaggatacaggagctctttggcaccacctaaggcagaggatgaagggaggttatggggcctgtca

SEQ ID NO: 35397 - DNA, 120 bp, Artificial Sequence
  ENSG00000052749_37 (sequence is synthesized)
aagactaaagctctcatcctgcgagggtgctcaggcctgtgtcctgaaggagggtgcaggggaaagatggggcctgcccacccgagggaagcatgactgggccagggtgtgggccaggag

SEQ ID NO: 35398 - DNA, 120 bp, Artificial Sequence
  ENSG00000052749_38 (sequence is synthesized)
cagggccgcgctaaccctcccctcagctgggcttgatcatgctgcgtccctgggctggacagcagtaaagggggcgcagcatggaaggctcgcctccctgaaagcctggtgctctgtccg

SEQ ID NO: 35399 - DNA, 120 bp, Artificial Sequence
  ENSG00000052749_39 (sequence is synthesized)
atccagtccagggcatatcataaggctttgcccataggacaggctttggaacttgcccgggagcacccacctgtgtcaggaggggcagcgaatgccccagggctggtgtcgggagctgca

SEQ ID NO: 35400 - DNA, 120 bp, Artificial Sequence
  ENSG00000052749_40 (sequence is synthesized)
gttcagcaccagggactgccccagctgtcctgggcacaagtctctccagcatctttgttcattgattcaacaaagtatttgctgagcccctctaagtgcccagcatagccttgttcattc

SEQ ID NO: 35401 - DNA, 120 bp, Artificial Sequence
  ENSG00000052749_41 (sequence is synthesized)
gaggaagaggaaggtgccaaaggtgggcccaacgcgcttgtccattcattcaccgtgttcacttattccttcggtgatcacttgctgaggaagcgtggctaaaaacagaccagagaaact

SEQ ID NO: 35402 - DNA, 120 bp, Artificial Sequence
  ENSG00000052749_42 (sequence is synthesized)
cttctctcggcagcttcctcaaactttttgagtttctcaaactttttttgagaaacattaagaaatctttttatgttgtaaccgagccatttatacaatacatatttaacttaaaggaaa

SEQ ID NO: 35403 - DNA, 120 bp, Artificial Sequence
  ENSG00000052749_43 (sequence is synthesized)
ggtcgccgcagtcacggagcgcacgtcgggaaacctctcagcctcatctgtaaaatgtgatcataaataccgggtacctggaagtgctcgagacagatctcactatgttgaccgggctgg

SEQ ID NO: 35404 - DNA, 120 bp, Artificial Sequence
  ENSG00000052749_44 (sequence is synthesized)
aaactcctggcctcaagcagtcctcctgcagcaacttcacagcaacactggaatgacagaagaactccactgaacattcattgaaggcccagatttagagtgagcggggcaaaccaagtt

SEQ ID NO: 35405 - DNA, 120 bp, Artificial Sequence
  ENSG00000052749_45 (sequence is synthesized)
agttttgtgctgggtggaaggaggggcggctgctgttcagcccacaggattcctgtgaggacaccacatgttcatagttgttaaaccatcttgcaaactcattgcctgatgttcagatct

SEQ ID NO: 35406 - DNA, 120 bp, Artificial Sequence
  ENSG00000052749_46 (sequence is synthesized)
agggcatgagcccagatgatgcctcaagactcaggttctaggagagaaagcagtgcttcagggactttgactgcccccgcccgaaatgcagtcgccatctgcaggtaaacagagctggag

SEQ ID NO: 35407 - DNA, 120 bp, Artificial Sequence
  ENSG00000052749_47 (sequence is synthesized)
cgccatctgcaggtaaacagagctggagctggtgctgccggaaaagaaagaggagggctctccggcagcctgcggcttcctcaaggacttcccaggccaggcgctgtggctcacgcctgt

SEQ ID NO: 35408 - DNA, 120 bp, Artificial Sequence
  ENSG00000052749_48 (sequence is synthesized)
tataaggcttacgcctgtggccctgaaacctggtcctggctggagtaagaaccccatagaacccttagcaacctaacttcctccctagcaacggatctccttggagctcctccccatccg

SEQ ID NO: 35409 - DNA, 120 bp, Artificial Sequence
  ENSG00000052749_49 (sequence is synthesized)
atgcgtcctccctctccagtcccgcgtcggtcgccgcagtcacggagcgcacgcctccacctggatcatgagtgtgacagctggagctcctgcagcccatctgtggagcacaaggtgaca

SEQ ID NO: 35410 - DNA, 120 bp, Artificial Sequence
  ENSG00000052749_50 (sequence is synthesized)
gtgaaaatggaagtcatacgttatggaggttgaagcagaaaaagagagggatcccaggatcctgaagattctgtggaactgccatagcagcctggactgcccattacctcctgatttcca

SEQ ID NO: 35411 - DNA, 120 bp, Artificial Sequence
  ENSG00000052749_51 (sequence is synthesized)
cacacagccacgcttgggggcagatgggctgtgggaaggtggggcctgtcttcatgtctttgtcccttgctgcttcccgagatcaggtccctgtctgctttctcctgcagtggcttctct

SEQ ID NO: 35412 - DNA, 120 bp, Artificial Sequence
  ENSG00000052749_52 (sequence is synthesized)
ttgtgtcctgtgtagcccatctgtcttgcaggtcccaaagggactgaaatgcacagctgtgcttaggccttgcgtgctgagtgactcttgtagaaccaaggccatgctcctttgcctggc

SEQ ID NO: 35413 - DNA, 120 bp, Artificial Sequence
  ENSG00000052749_53 (sequence is synthesized)
tcactccccaggcccatcccagaccggcctgagctttatcccacccagtccactctctacttctgctgcagcctccttcagctgccttaagcctccctgatataacaggccctgtctgtg

SEQ ID NO: 35414 - DNA, 120 bp, Artificial Sequence
  ENSG00000052749_54 (sequence is synthesized)
cctttgcagggtttgggtcctcagcttgaaatgccctctgctgtggccagcaaccctgcagatctcagcccagcagtgaccccctgaaagctgcccccattgccacagtttagtagcagt

SEQ ID NO: 35415 - DNA, 120 bp, Artificial Sequence
  ENSG00000052749_55 (sequence is synthesized)
tacctaacagtgtgagaagtgctctggggcagcactgcaggtggacatggaaatccagggccaggccacgtcacctcaggaaaggtgtccggcgttgggggttgggggagtgtgacagag

SEQ ID NO: 35416 - DNA, 120 bp, Artificial Sequence
  ENSG00000052749_56 (sequence is synthesized)
agctggtttggaggagcaaggagttgtcagtcttggaaggagagagaagagtgctccggctagaaagagcagcagatgtgcaggccttggcgcgtgccaggcaccatgagctcaggccac

SEQ ID NO: 35417 - DNA, 120 bp, Artificial Sequence
  ENSG00000052749_57 (sequence is synthesized)
tggagtgagcactgtccagagctgggtgagtggagtggattggtgggccccacggcacacacccccaacccctgtgcctcgcccaggagttagccactcgctgtccacattccactggtc

SEQ ID NO: 35418 - DNA, 120 bp, Artificial Sequence
  ENSG00000052749_58 (sequence is synthesized)
ctctgtcaagccacatgagcccccacggacccctgctcagaatccctccagtgctgggggatgctccgtggatagcattggacagggagtgagccccaggcctccctcaccggttcctgt

SEQ ID NO: 35419 - DNA, 120 bp, Artificial Sequence
  ENSG00000052749_59 (sequence is synthesized)
aaagctggagaaagggggacctgcagtggtggcatttggggaactcactggtcagtcaaaatgcagggcctggggtctccctccctgactgtgttcttaagctaaaaccaacagcactac

SEQ ID NO: 35420 - DNA, 120 bp, Artificial Sequence
  ENSG00000052749_60 (sequence is synthesized)
gttactctgtggtgtttggctaggccaggccatatcagagtccccttccagatggaagctgacctcagagatcaggtcagagtcagggtggatctgtagtgggctggtaaaccctccttc

SEQ ID NO: 35421 - DNA, 120 bp, Artificial Sequence
  ENSG00000052749_61 (sequence is synthesized)
atgcgtcctccctctccagtcccgcgtcggtcgccgcagtcacggagcgcacgtcgggaaacctctcagcctcatctgtaaaatgtgatcataaataccgggtacctggaagtgctcgat

SEQ ID NO: 35422 - DNA, 120 bp, Artificial Sequence
  ENSG00000052749_62 (sequence is synthesized)
gaggaaatttgcccaaggtgacagaaatcaggattcaagcccaggctgctggctcccaagaccatactctttctccactattgtctatggcctccacatttttgttgtatttttggcatt

SEQ ID NO: 35423 - DNA, 120 bp, Artificial Sequence
  ENSG00000052749_63 (sequence is synthesized)
agaggcagagaaaaggcactttgggaacaacgtgaaccaaaacacgagaggtttgcagctgcataatcataatagctcctatttgtgagggtttagtgcaactagccttttaatgtataa

SEQ ID NO: 35424 - DNA, 86 bp, Artificial Sequence
  ENSG00000052749_64 (sequence is synthesized)
atttgtgagggtttagtgcaactagccttttaatgtataatttcaaccccagcaattcatattatgtaagaagttgcccaggctgg

SEQ ID NO: 35425 - DNA, 80 bp, Artificial Sequence
  ENSG00000052795_0 (sequence is synthesized)
agtcatatgaccggcagccggcggctccggcgccgagcagagttactcagtcgcagcggccccgcgctcccgcaaggctg

SEQ ID NO: 35426 - DNA, 120 bp, Artificial Sequence
  ENSG00000052795_1 (sequence is synthesized)
cgcccccggctgcgcgctgagccgccggccccccgagcgccacggccggagctgcggcggcggcatcatggccccgaccctgctccagaagctcttcaacaaaaggggcagcagcggcag

SEQ ID NO: 35427 - DNA, 120 bp, Artificial Sequence
  ENSG00000052795_2 (sequence is synthesized)
ctccgcggcggcgtctgcccagggcagggctcctaaggaaggacccgcctttagttggtcatgttcggagtttgacctgaatgagattcgcctgatagtttaccaggactgtgacaggag

SEQ ID NO: 35428 - DNA, 120 bp, Artificial Sequence
  ENSG00000052795_3 (sequence is synthesized)
aggcagacaagtcttgtttgactctaaagctgttcaaaagattgaggaggtgacagctcagaaaacagaggatgttcctattaaaatatcagccaagtgctgccagggaagcagcagtgt

SEQ ID NO: 35429 - DNA, 120 bp, Artificial Sequence
  ENSG00000052795_4 (sequence is synthesized)
cagcagcagtagcagcagcagcatctcttcccacagttcttctgggggatcttcacatcatgctaaggaacagcttccaaagtaccagtacacaagaccagcttccgatgtcaacatgtt

SEQ ID NO: 35430 - DNA, 120 bp, Artificial Sequence
  ENSG00000052795_5 (sequence is synthesized)
aggggaaatgatgtttggctcagttgccatgagttacaaaggctccaccttaaagatacactacatacgttctcctccacaactgatgattagtaaagtcttctctgctagaatgggcag

SEQ ID NO: 35431 - DNA, 120 bp, Artificial Sequence
  ENSG00000052795_6 (sequence is synthesized)
cttctgtggaagtacaaataacttgcaagacagctttgagtacatcaaccaagatcctaatttgggaaaactgaacacaaatcaaaatagtttgggtccttgtcgtactggaagtaacct

SEQ ID NO: 35432 - DNA, 120 bp, Artificial Sequence
  ENSG00000052795_7 (sequence is synthesized)
agcacacagcacaccagttgatatgccaagcagaggacagaatgaagacagggacagtggcattgctcgatcagcctcactaagcagtcttttgatcacacctttcccatctccaagctc

SEQ ID NO: 35433 - DNA, 120 bp, Artificial Sequence
  ENSG00000052795_8 (sequence is synthesized)
ctctacatcttcttccagcagttaccagcgccgctggcttcgaagtcagacaacaagtttggaaaatggcatcatcccaagaaggtcaactgatgagacattcagcttggctgaagaaac

SEQ ID NO: 35434 - DNA, 120 bp, Artificial Sequence
  ENSG00000052795_9 (sequence is synthesized)
ctgtagctctaatccagctatggttaggaggaagaaaattgccataagcatcatcttttccctatgtgagaaagaagaagcacaaaggaatttccaggacttcttcttttctcattttcc

SEQ ID NO: 35435 - DNA, 120 bp, Artificial Sequence
  ENSG00000052795_10 (sequence is synthesized)
cctgtttgaatctcacatgaacaggctgaagagtgcaattgaaaaggctatgatctcctgtaggaaaatagcagaatcaagtctccgagtccagttttatgtcagccgtttgatggaagc

SEQ ID NO: 35436 - DNA, 120 bp, Artificial Sequence
  ENSG00000052795_11 (sequence is synthesized)
tctgggagaattcagaggaactatctggaacttatattctgttccaaggatagctgaacctgtatggcttactatgatgtccggcactttggaaaaaaaccagctctgccagcgctttct

SEQ ID NO: 35437 - DNA, 120 bp, Artificial Sequence
  ENSG00000052795_12 (sequence is synthesized)
caaggagtttacacttctgatagaacagataaataaaaaccagttttttgctgccttactgactgcggtgttaacctaccacctggcctgggtcccaactgtcatgcctgtggatcaccc

SEQ ID NO: 35438 - DNA, 120 bp, Artificial Sequence
  ENSG00000052795_13 (sequence is synthesized)
tcccatcaaagccttctcagagaaacgtacctcccagtcagtgaacatgctggccaaaacacatccgtataatcctctttgggcacagctgggtgatctttacggagccataggctctcc

SEQ ID NO: 35439 - DNA, 120 bp, Artificial Sequence
  ENSG00000052795_14 (sequence is synthesized)
agtgagactgactcgcaccgtagtggtagggaagcagaaggacttagtccagcgaatactttatgtcctgacctactttctccgttgctctgagctacaagagaaccagctgacctggag

SEQ ID NO: 35440 - DNA, 120 bp, Artificial Sequence
  ENSG00000052795_15 (sequence is synthesized)
tggcaatcatggtgaaggtgaccaagttttaaatgggagcaagatcataacagccttggagaaaggagaggtggaggagtctgagtatgtggtcattacggtgaggaacgagcccgctct

SEQ ID NO: 35441 - DNA, 120 bp, Artificial Sequence
  ENSG00000052795_16 (sequence is synthesized)
tgtaccccccatcctaccaccaacagcagcagagagacacaacccctggccgacagggtttcctgagtgcccagagggcactgacagtagagacctgggtcttaaacctgacaaagaagc

SEQ ID NO: 35442 - DNA, 120 bp, Artificial Sequence
  ENSG00000052795_17 (sequence is synthesized)
taacaggaggccagagcagggttctgaggcttgcagcgcagggtgcctggggccagcatcagacgcttcctggaaacctcagaatgcattttgtggggatgagaaaaataaagaggcacc

SEQ ID NO: 35443 - DNA, 120 bp, Artificial Sequence
  ENSG00000052795_18 (sequence is synthesized)
gcaagatggctcttcaagacttcccagctgtgaagttttgggggcaggaatgaagatggaccagcaagctgtctgtgagctgttgaaagtggagatgcctacaagactgccagaccggtc

SEQ ID NO: 35444 - DNA, 120 bp, Artificial Sequence
  ENSG00000052795_19 (sequence is synthesized)
agtggcctggccttgccctgacagacatctccgggagaaaccttccttagaaaaggtcactttccagattggaagctttgcatctccagagtctgactttgaaagccgcatgaaaaaaat

SEQ ID NO: 35445 - DNA, 120 bp, Artificial Sequence
  ENSG00000052795_20 (sequence is synthesized)
ggaggaacgggtgaaggcctgtggcccctccttggaggccagtgaggctgctgatgtggctcaggacccgcaggtttctaggagcccttttaaacctggctttcaggagaatgtttgctg

SEQ ID NO: 35446 - DNA, 120 bp, Artificial Sequence
  ENSG00000052795_21 (sequence is synthesized)
tcctcagaatcggctttcagagggggatgaaggcgagtctgacaagggttttgcagaggacagaggcagcagaaacgacatggcagcagatattgctgggcagctcagccacgctgctga

SEQ ID NO: 35447 - DNA, 120 bp, Artificial Sequence
  ENSG00000052795_22 (sequence is synthesized)
cttgggcacagcctcccacggtgcaggaggaacgggagggaggaggctggaggccactagaggtttgtatgtgaaggctgcggaaggacctgtgctggagcctgttgcccccaggtgtgt

SEQ ID NO: 35448 - DNA, 120 bp, Artificial Sequence
  ENSG00000052795_23 (sequence is synthesized)
ccagcggggccctggcctcgtggctggtgcgaatatcccctgtggggatgacaacaagaaggccaacttcaggactgaaggagacattccccgaaatgaaagctcagatagcgccctggg

SEQ ID NO: 35449 - DNA, 120 bp, Artificial Sequence
  ENSG00000052795_24 (sequence is synthesized)
agacagtgacgacgaagcctgcgcttcagccatgctagatctgggtcacggtggtgacaggactggagggtccttggaagtggagctgcctctgccaaggtctcagagcatcagcaccca

SEQ ID NO: 35450 - DNA, 120 bp, Artificial Sequence
  ENSG00000052795_25 (sequence is synthesized)
gaatgtaaggaactttggccgctcacttctggcgggctactgccccacatacatgcctgatcttgtgcttcatgggaccggcagtgatgagaagctgaagcagtgcctggtggccgacct

SEQ ID NO: 35451 - DNA, 120 bp, Artificial Sequence
  ENSG00000052795_26 (sequence is synthesized)
tgtccacacagtccatcatccagtcctggatgagccaatagctgaagctgtctgtattatcgcagacacggataaatggagtgtgcaggtagctacaagtcagaggaaagtgacggacaa

SEQ ID NO: 35452 - DNA, 120 bp, Artificial Sequence
  ENSG00000052795_27 (sequence is synthesized)
catgaaactaggccaggatgtcctggtctctagtcaggtgtccagtttgcttcagtccattttacagctctataagcttcacctccctgctgatttttgcatcatgcatcttgaagatag

SEQ ID NO: 35453 - DNA, 120 bp, Artificial Sequence
  ENSG00000052795_28 (sequence is synthesized)
actacaggagatgtaccttaaaagtaaaatgctatctgaatatctccggggacacacacgagtccatgtgaaagaattaggtgtcgtactggggattgaatccaacgacctgcctctgtt

SEQ ID NO: 35454 - DNA, 120 bp, Artificial Sequence
  ENSG00000052795_29 (sequence is synthesized)
ggaagaaaaaaatcaaattctcaactgaaggagaaaggaataagctctctgtgatgtcaaaagcatgagaagagcaaacagaaacagtcattccacctttttgttttgtgtttttgctgt

SEQ ID NO: 35455 - DNA, 120 bp, Artificial Sequence
  ENSG00000052795_30 (sequence is synthesized)
caagctgatgcttcattgaagacttaggtttacttgacataatagcatttgtgattgtcgtgaacactttaggccatttgttacccatgaatcaacaaagaaactgacctttttggtagg

SEQ ID NO: 35456 - DNA, 120 bp, Artificial Sequence
  ENSG00000052795_31 (sequence is synthesized)
aggaaacataagcactaaacactaagctgttgcaacagattgccttgtgctgtttgggcagaataaagacaagtgacttgagcggggtggtcagcagtgtacataatattccagtaggaa

SEQ ID NO: 35457 - DNA, 120 bp, Artificial Sequence
  ENSG00000052795_32 (sequence is synthesized)
actgcttccaagtttaagcatgagctccccaaactggagaaaacatattttgctattctgagacaacaatcagaatacagactttggattccaggtcacagtttgctttttagacaaggt

SEQ ID NO: 35458 - DNA, 120 bp, Artificial Sequence
  ENSG00000052795_33 (sequence is synthesized)
aaagcaaagaaagccacattgtgccatcttcagctccagtggctttagcagtgactgtttgacataaaacatgtaagaattgcttgttgggaagagtgctttagggacccactgttttca

SEQ ID NO: 35459 - DNA, 120 bp, Artificial Sequence
  ENSG00000052795_34 (sequence is synthesized)
tttcttcttggagtttaccttgtttcagatgcagccatgggtaggtcagagatggattgttggtgcaataaacccaagaatcaatgtagcctcttaatcccatcaagatgtagtttgtag

SEQ ID NO: 35460 - DNA, 120 bp, Artificial Sequence
  ENSG00000052795_35 (sequence is synthesized)
cagcaaagtgtacagtctgaaaccgtatgttttatccttatattttagagctttcagcagcctttttaagagaggccacttaccaaagttatttctataagctcaagagtgtttcggttg

SEQ ID NO: 35461 - DNA, 120 bp, Artificial Sequence
  ENSG00000052795_36 (sequence is synthesized)
gtaagttcttccagctgaagccactttttccttatagttaatacaaatgactatttttactttaaaaggcacagctgtcctggtgggaaatgaaacctgcagcagttcaggatgactaat

SEQ ID NO: 35462 - DNA, 120 bp, Artificial Sequence
  ENSG00000052795_37 (sequence is synthesized)
gaaagcaattagcttgaacatttagaaaaaattcatatatgatctaaatttttatattatcatttctgtgccttctaattcctgcatccttttcaaaacatctttccagacattaactta

SEQ ID NO: 35463 - DNA, 120 bp, Artificial Sequence
  ENSG00000052795_38 (sequence is synthesized)
cacattgtataaaaccgaccaaaatgatttcctaaagttcatgcaaaaaaaaaaaaaaaacaacctaattttctgttaatataaaagaaacttcagtttactgaccgtgaaacagactat

SEQ ID NO: 35464 - DNA, 120 bp, Artificial Sequence
  ENSG00000052795_39 (sequence is synthesized)
gtactgacatccagggtaaagtaaaagacttttaaatattggtcattaaaggacaggagctaagctagcaaagcaaaacatctttagcactttgcagatctcaagcagttaaccaggctc

SEQ ID NO: 35465 - DNA, 120 bp, Artificial Sequence
  ENSG00000052795_40 (sequence is synthesized)
tgattcccttccactgttttatgaattaattccagttcttttcatgtatctttgaacctaagattatgaagtaatttccctattagggactagaatgacttcagttttttcatttgataa

SEQ ID NO: 35466 - DNA, 120 bp, Artificial Sequence
  ENSG00000052795_41 (sequence is synthesized)
aaatcagaactgctacctttcccttttttaatgatgcaaaatgtagatgagtgcattaagttttgtaagatctttatcattttatgtcattcattgaaaattgaaatgttcattcttttt

SEQ ID NO: 35467 - DNA, 120 bp, Artificial Sequence
  ENSG00000052795_42 (sequence is synthesized)
aatgttttcctatttccttttgcctagcatttgactttggtgttttaagttctgtagttccatgacatcattgtttgctgttgtgttacagagagagaaggaacctcacctgtggctcag

SEQ ID NO: 35468 - DNA, 120 bp, Artificial Sequence
  ENSG00000052795_43 (sequence is synthesized)
ctcaccccacatccgtttctcattacgtgtaaataaactgtcagagctgatgttacagcttttacagtttaaagcattcccctcgtctctagttccttttttcttgtttacatgttttgg

SEQ ID NO: 35469 - DNA, 120 bp, Artificial Sequence
  ENSG00000052795_44 (sequence is synthesized)
gcactttccctcattcaccaccttccagggtttcatagaaaataacttgttacaaaatcagttcaattctaatgtggacatagtggcatgttcataattagacccatataggggacactg

SEQ ID NO: 35470 - DNA, 120 bp, Artificial Sequence
  ENSG00000052795_45 (sequence is synthesized)
agctttaaatcgttgattctaaactctatacattaaaaaaattcagcccaggcccctcaaagcctgagaaaatttaatttgctcttaatttaatgttccaaaactcactcttggaaaaat

SEQ ID NO: 35471 - DNA, 120 bp, Artificial Sequence
  ENSG00000052795_46 (sequence is synthesized)
gcctgttggaaaactacaggtgggtcacatgtgggggctgtctccgtgacactcaggattccagtcagaacctaatcctcatatctattgcctacaaaaatagaccaagaatgttgctgc

SEQ ID NO: 35472 - DNA, 120 bp, Artificial Sequence
  ENSG00000052795_47 (sequence is synthesized)
tcttttataatcctttaaatatttaacattcaagttttctttgtcttaaattcagcctcttcctaaaagcaaaaaagaaaaaaaaaacctcacagaattgtgttgagatccaccgctcac

SEQ ID NO: 35473 - DNA, 120 bp, Artificial Sequence
  ENSG00000052795_48 (sequence is synthesized)
acgccgtacaccacccagtggcttcattctggcttagccgcagaggcaagaaagggaccccacttgctcccatgcccacctcaagaaaaaacataaaacaattttttttaaaaaagaaaa

SEQ ID NO: 35474 - DNA, 120 bp, Artificial Sequence
  ENSG00000052795_49 (sequence is synthesized)
gaaatctacctcagttgacaggattccacctttagggtttcttcaacttttaagtcttacctgttgagtgtaacttttgtagcatcttgcttttccaagcaagctagtgaggcatgacag

SEQ ID NO: 35475 - DNA, 120 bp, Artificial Sequence
  ENSG00000052795_50 (sequence is synthesized)
agcagaagtctgtaaatgtccctgtgatggacctctttctagcatgttgcagttttatttttaataaattggtaagtgaaatgaatgtaaaggtaattgtgtacgttttagacatgacaa

SEQ ID NO: 35476 - DNA, 120 bp, Artificial Sequence
  ENSG00000052795_51 (sequence is synthesized)
tgaaaatttaaaatgtagcttccatacttgtgcataattccaaagtattttattttttatcaatcagtgttaaatagctttttgtacaggcttcaatccatttttcgaagtgtgctgttt

SEQ ID NO: 35477 - DNA, 120 bp, Artificial Sequence
  ENSG00000052795_52 (sequence is synthesized)
tttaatgaaagtaactataatcttttcacatcccatggaactgccgtttacacattgcaactttttaaacttaaccatatttttcaaaattaacgtttttggagggagaaaaatccccgc

SEQ ID NO: 35478 - DNA, 120 bp, Artificial Sequence
  ENSG00000052795_53 (sequence is synthesized)
ttgctaaatgatactaaaccgttgtttgggctcttataattaggtcctgagattttataaaaatttagtctgtagctttttaggttcttcactagagttggttgtacataaaaataataa

SEQ ID NO: 35479 - DNA, 120 bp, Artificial Sequence
  ENSG00000052795_54 (sequence is synthesized)
agaatataaagtatcccaaaattcttttaaagtctggatttttccgctaatatgtactttagagaatattttgttcatgcatacttccacgttaaattgaaaatgtcttcagcttctctt

SEQ ID NO: 35480 - DNA, 120 bp, Artificial Sequence
  ENSG00000052795_55 (sequence is synthesized)
ggtaaatgtgaaccatttgttttttattgtgcttgggggagagggtattttaatataatttttgcctaaatcaagaagtcccctctgaatgttaatttttaaatgtcaaaatatgatgaa

SEQ ID NO: 35481 - DNA, 120 bp, Artificial Sequence
  ENSG00000052795_56 (sequence is synthesized)
cgatatatcttgaaagtgagattgcaatatgcttaaacttaagtggtatttcaaaaacgagaaaattctggaatttgtcatttgaagctccataagagaaattgataggacttcgttttt

SEQ ID NO: 35482 - DNA, 120 bp, Artificial Sequence
  ENSG00000052795_57 (sequence is synthesized)
gatcagtctgaatagataccaatgtcattgtgtgggaattttttttaacttgtttatgtattattttgatccatttttctgtggcatttggtgcaataaaacttttgaatttatcttgaa

SEQ ID NO: 35483 - DNA, 120 bp, Artificial Sequence
  ENSG00000052795_58 (sequence is synthesized)
tgtgggtgtgtgttttgctttatttgagtttgtcgtgggtttttttttttgcgttatctttaatctgtgtttattttttttgtatgtgtactttgtttgccctcttctatgtgtttccat

SEQ ID NO: 35484 - DNA, 120 bp, Artificial Sequence
  ENSG00000052795_59 (sequence is synthesized)
ctctaggtctgctgcaagcatgcagcagcaaactgctgcagggggtagctgaaggaggacctctccggctcacccggagtgcttctttctttgcaggtttgtgtggaatgctgagtacag

SEQ ID NO: 35485 - DNA, 120 bp, Artificial Sequence
  ENSG00000052795_60 (sequence is synthesized)
tgtgacccacacatattaataaatcctgtgcaggttcttaggaaaaatcctacttgtgcctctctagaaatccaaggggctcttgtgatcacagatattggtttcaaatgcggccaaatc

SEQ ID NO: 35486 - DNA, 120 bp, Artificial Sequence
  ENSG00000052795_61 (sequence is synthesized)
catggtgtttcgaaaattctgccaatgaacctctcttgtaaatgtcttcgctaatactctagtgtaagctgattttgatctgaaatgagcccttagtatttccaagaggattgttttttt

SEQ ID NO: 35487 - DNA, 120 bp, Artificial Sequence
  ENSG00000052795_62 (sequence is synthesized)
ctgatttttctgggcctcttctgctactatgaactgtttccctttgccttggtgtcttttatccatttattcaactgcatccttacctgcacggagtttcattaaaagtcactctaataa

SEQ ID NO: 35488 - DNA, 120 bp, Artificial Sequence
  ENSG00000052795_63 (sequence is synthesized)
tctctctctctctctctctccctctctaagtagtgtaaatacaatttctaggttatttacaggtatagtcatcttggtgtctctgagatttaacttgtcttagcatgattaaacatgtga

SEQ ID NO: 35489 - DNA, 120 bp, Artificial Sequence
  ENSG00000052795_64 (sequence is synthesized)
gagatttaacttgtcttagcatgattaaacatgtgaggaacctccattactaacatttaaagttgtgagtatagcaaatggtattttcctttctgttctttgtagcctgaaatatgctaa

SEQ ID NO: 35490 - DNA, 120 bp, Artificial Sequence
  ENSG00000052795_65 (sequence is synthesized)
gcaccatagttaactgacaccctgataaaattgacacgctcctacctacttagagtgaggaaaatgcatttaaatactctctttaaaattgtgaaaataaacatgcttcaaaaaaatagc

SEQ ID NO: 35491 - DNA, 120 bp, Artificial Sequence
  ENSG00000052795_66 (sequence is synthesized)
tgtcaagtataataatcaggcagagcactgggctgcttgtccatttaaaacttcactacagcagcagcatatctaccttctagcacaataagtatacagcttaggtcaatctgaagcatt

SEQ ID NO: 35492 - DNA, 120 bp, Artificial Sequence
  ENSG00000052795_67 (sequence is synthesized)
gaaatggaggaagaaatatttgaaaatgagtataaatgttttctatctgccaagagagtgggttataaacagagaaacattttttgaatttatgaaatggttttcaagtatttctcttcc

SEQ ID NO: 35493 - DNA, 120 bp, Artificial Sequence
  ENSG00000052795_68 (sequence is synthesized)
ctaagtcgcctacagttactaccaaaactgattataaagcattttgaaatacattgctatttaaatactactactaatgaggaaaatggctaaaaaaaattacctgagaatgtttattca

SEQ ID NO: 35494 - DNA, 120 bp, Artificial Sequence
  ENSG00000052795_69 (sequence is synthesized)
ttgcatcaactgcacgaatcatttattattcagagttttttttttaagagttgaacatcactcagaaaagtttgtatgcttacaattgaatacaggcagatttttatgagatggttactt

SEQ ID NO: 35495 - DNA, 120 bp, Artificial Sequence
  ENSG00000052795_70 (sequence is synthesized)
ggttctcttttcttctcatcatctttttatatatttaattttgccttctagttaatctctattaaaagcttatgccaatcatcagtagcagtagcctactttgaaatttaaaaattactg

SEQ ID NO: 35496 - DNA, 120 bp, Artificial Sequence
  ENSG00000052795_71 (sequence is synthesized)
cagtcattttaaaaactttatctctgaagagcccaataacatggttttcttgttcctttatcttagcacacagcacaccagttgatatgccaagcagaggacagaatgaagacagggaca

SEQ ID NO: 35497 - DNA, 120 bp, Artificial Sequence
  ENSG00000052795_72 (sequence is synthesized)
gtggcattgctcgatcaggtacttgtactctgtttattggtttaactaacagagtgaactatctacagtggtgtggaaggtgggaaagtagaagacaggtagataaccctcatcctgttc

SEQ ID NO: 35498 - DNA, 120 bp, Artificial Sequence
  ENSG00000052795_73 (sequence is synthesized)
tttgttttttccttcctaagatagtctgacatatctaaagatctgaaactttaatgtacagtatccatgagtgattgtgcaacataaactagttttttctaacactcaaatttatatgag

SEQ ID NO: 35499 - DNA, 120 bp, Artificial Sequence
  ENSG00000052795_74 (sequence is synthesized)
actaatgtttgttaagaaatttctttccagaatgaagcttccttgagcccattgtactagtaatgtgcttgcttgactgttgagtatagactcagaggaagagaagggtttgtggaagta

SEQ ID NO: 35500 - DNA, 120 bp, Artificial Sequence
  ENSG00000052795_75 (sequence is synthesized)
aatctgtcctgtgacagtgggaggaccagccagctgacctggtcaccgtttcttctgttctagagacatgctgatctagattttatcaggtacccttctctccttgcctcaaggcctaaa

SEQ ID NO: 35501 - DNA, 120 bp, Artificial Sequence
  ENSG00000052795_76 (sequence is synthesized)
cctttctgttactgcttttaggatctgttggtttcaccttttgtatgtgacctcttttgagttttgacttgtggttcagatctgagattttgtattataagagaagggtggtgaatgagt

SEQ ID NO: 35502 - DNA, 120 bp, Artificial Sequence
  ENSG00000052795_77 (sequence is synthesized)
gaactgaaattcaaggactggaggtggtgtgtggtgctctgcttgatgaatacatatggtacaggcagcccctaccttccagtgagactaggagcaccctgctggtttctcctgtgatac

SEQ ID NO: 35503 - DNA, 120 bp, Artificial Sequence
  ENSG00000052795_78 (sequence is synthesized)
atgacaccttcaacaaatgggccagccaggcgttgctcagactggatgcaggcctcacatgatgttcttcttggcctttcactcatttctctgtccacactactccaaggtccttgtgct

SEQ ID NO: 35504 - DNA, 120 bp, Artificial Sequence
  ENSG00000052795_79 (sequence is synthesized)
cctgtgtagcctcagagccttttaacccactctgtgcaactctgctcttgtgttaataaatgaaatgtgatttgttactgagtctccagtttggtttacatatgtcacataatgtaaagt

SEQ ID NO: 35505 - DNA, 120 bp, Artificial Sequence
  ENSG00000052795_80 (sequence is synthesized)
aatagcattttatttatggttaaaatcgatgtgttttggtgttcataatcttttctgtaaagttgagctgggaacctttggtcagaaactctcattgatcaggccgagcacagtggctca

SEQ ID NO: 35506 - DNA, 72 bp, Artificial Sequence
  ENSG00000052795_81 (sequence is synthesized)
gtcagaaactctcattgatcaggccggagcagatcacttgaggtcagtttgagaccagcctgaccaacatgg

SEQ ID NO: 35507 - DNA, 120 bp, Artificial Sequence
  ENSG00000052795_82 (sequence is synthesized)
gcttttctcacatactgtatagggagtgaaatgattgtttagaactgctggtcattacagaatgttcctcacataacaaaggaacttcaggatttgtctccaagtccatgtttatggtca

SEQ ID NO: 35508 - DNA, 120 bp, Artificial Sequence
  ENSG00000052795_83 (sequence is synthesized)
ggataaaccagaagaacattaaaccgttcaggagatgtgcggcggcacagcgaacaccacaaaccagccagagagctggcaagactctgccagatgtgtgagtgatgctgttcctggtgc

SEQ ID NO: 35509 - DNA, 120 bp, Artificial Sequence
  ENSG00000052795_84 (sequence is synthesized)
tgggaggatttacagggcgcttttatgcacaaagattaaaaaacacaccggagtagacaggagcactgaccacacggaactcgacaacagttggtcatgttcggagtttgacctgaatga

SEQ ID NO: 35510 - DNA, 120 bp, Artificial Sequence
  ENSG00000052795_85 (sequence is synthesized)
acgcctgatgacctgaggtgcaacagtttcatcccgaaaccatcccccacccccagtccatggaaaaattgtcttccacgaagccagtccctggtcctggaaaaggttggggaccgctgc

SEQ ID NO: 35511 - DNA, 120 bp, Artificial Sequence
  ENSG00000052795_86 (sequence is synthesized)
cctaaaccgtggttggtggcagtgtgtagactcggtgactgttgttccaagaacttctttaggacttgggccaacttgagggtagaagtgaattattgacaggcgcttgcactgaaggac

SEQ ID NO: 35512 - DNA, 120 bp, Artificial Sequence
  ENSG00000052795_87 (sequence is synthesized)
cttctggcgggctactgccccacatacatgcctgatcttgtgcttcatgggaccggcagtgatgagaagctgaagcagtgcctggtggccgaccttgtccacacagtccatgaccagact

SEQ ID NO: 35513 - DNA, 120 bp, Artificial Sequence
  ENSG00000052795_88 (sequence is synthesized)
tttggagactgtatatatgcatgtgtaagaagcgtaggggtgaaagggtcatgaaaacctttggttgaaaatggtgatggggtcattatgtgtgtaagaaaatctttgtacttttcagtt

SEQ ID NO: 35514 - DNA, 120 bp, Artificial Sequence
  ENSG00000052795_89 (sequence is synthesized)
aacaattctacaaaatgagaactgtcttgggaaactgggctttatgaattcaaaaatatactttatcaaattctttatctctcatgtttaaaattatttgaacagacaaataaatgttga

SEQ ID NO: 35515 - DNA, 120 bp, Artificial Sequence
  ENSG00000052802_0 (sequence is synthesized)
ggctccacccccaagccaggcgaggcaggttccgaggttggaacacctggcgagtcctcggtgtcggtggccggcagtcatctcgcggccgttcagaattataaggctgtctgcagagat

SEQ ID NO: 35516 - DNA, 120 bp, Artificial Sequence
  ENSG00000052802_1 (sequence is synthesized)
ttgaaaaatggcaacaaatgaaagtgtcagcatctttagttcagcatccttggctgtggaatatgtagattcacttttacctgagaatcctctgcaagaaccatttaaaaatgcttggaa

SEQ ID NO: 35517 - DNA, 120 bp, Artificial Sequence
  ENSG00000052802_2 (sequence is synthesized)
ctatatgttgaataattatacaaagttccagattgcaacatggggatcccttatagttcatgaagccctttatttcttattctgtttacctggatttttatttcaatttataccttatat

SEQ ID NO: 35518 - DNA, 120 bp, Artificial Sequence
  ENSG00000052802_3 (sequence is synthesized)
gaaaaaatacaaaattcaaaaggataagccagagacatgggaaaaccaatggaagtgtttcaaagttcttctctttaatcacttctgtatccagctgcctttgatttgtggaacctatta

SEQ ID NO: 35519 - DNA, 120 bp, Artificial Sequence
  ENSG00000052802_4 (sequence is synthesized)
ttttacagagtatttcaatattccttatgattgggaaagaatgccaagatggtattttcttttggcaagatgctttggttgtgcagtcattgaagatacttggcactattttctgcatag

SEQ ID NO: 35520 - DNA, 120 bp, Artificial Sequence
  ENSG00000052802_5 (sequence is synthesized)
actcttacaccacaaaagaatatacaagtatattcataaagttcatcatgagtttcaggctccatttggaatggaagctgaatatgcacatcctttggagactctaattcttggaactgg

SEQ ID NO: 35521 - DNA, 120 bp, Artificial Sequence
  ENSG00000052802_6 (sequence is synthesized)
atttttcattggaatcgtgcttttgtgtgatcatgtaattcttctttgggcatgggtgaccattcgtttattagaaactattgatgtccatagtggttatgatattcctctcaacccttt

SEQ ID NO: 35522 - DNA, 120 bp, Artificial Sequence
  ENSG00000052802_7 (sequence is synthesized)
aaatctgatccctttctatgctggttctcggcatcatgatttccaccacatgaacttcattggaaactatgcttcaacatttacatggtgggatcgaatttttggaacagactctcagta

SEQ ID NO: 35523 - DNA, 120 bp, Artificial Sequence
  ENSG00000052802_8 (sequence is synthesized)
taatgcctataatgaaaagaggaagaagtttgagaaaaagactgaataaatatctcacgtaaaccttcctgaaagataaacgttttcctgaattcagaaactagtagctaacattgcttc

SEQ ID NO: 35524 - DNA, 120 bp, Artificial Sequence
  ENSG00000052802_9 (sequence is synthesized)
accttcctagtgggaactttttctactttacctacaagttctatatatgtagaaatgaataaatatatatttaagtacagttttcatgaggaagttttaaaagaccatgttcctaagctt

SEQ ID NO: 35525 - DNA, 120 bp, Artificial Sequence
  ENSG00000052802_10 (sequence is synthesized)
ccaagaaggttttggatactagaagtattaatctatggcttttctcccagtaaaaccataggcctgaagttcacattgggtctttaaatcttttagatatatactggtcatttcagaaaa

SEQ ID NO: 35526 - DNA, 120 bp, Artificial Sequence
  ENSG00000052802_11 (sequence is synthesized)
aaaattcttcatagtggtattggccttatatttaactttttttttattttttttttgagacaaagccacactctgtctccttggctggagtgtggtggcacagtctcagctcactgcaac

SEQ ID NO: 35527 - DNA, 120 bp, Artificial Sequence
  ENSG00000052802_12 (sequence is synthesized)
cacctaaagatcaaaatatcatggattgaacctcatcaattgatagcagtgagtgactgaagcttccaaatcaagaaaagccggcaccaagaacttccattctaatctagagctgaccag

SEQ ID NO: 35528 - DNA, 120 bp, Artificial Sequence
  ENSG00000052802_13 (sequence is synthesized)
tttgagctgattctctctttgaagagtccttcttgattgcagtgcagtactggcatttctgaatggatgtaagtggagtattttagtctaaaggcttttcaaattacttgaattttttta

SEQ ID NO: 35529 - DNA, 120 bp, Artificial Sequence
  ENSG00000052802_14 (sequence is synthesized)
aaaattgaggagctttatttctatttacccttccatttttgtatatcaaatttccattgtcattaaaaactgtatcttgaaactttgtgaactgacttgctgtatttgcactttgagctc

SEQ ID NO: 35530 - DNA, 120 bp, Artificial Sequence
  ENSG00000052802_15 (sequence is synthesized)
ttgaaataaatgtgatttttgtgtgattatctggtttccagttttaaacattaactgtcaccttttattcttaaacttgaaagtacagaaatcattaaattattaagttgtacaataaaa

SEQ ID NO: 35531 - DNA, 120 bp, Artificial Sequence
  ENSG00000052802_16 (sequence is synthesized)
gaaggtgggcctaggctaaggtacgtgctagaaaggatgaaaacggagtgaaattcttaagtgatggaactaggctagggcatgtttcttgccctttaaaatgtgttgtcttcgggagac

SEQ ID NO: 35532 - DNA, 120 bp, Artificial Sequence
  ENSG00000052802_17 (sequence is synthesized)
ccggctccacccccaagccaggcgaggcaggttccgaggttggaacacctggcgagtcctcggtgtcggtggccggcagtcatctcgcggccgttcaggtgagggggttggaggagtggc

SEQ ID NO: 35533 - DNA, 120 bp, Artificial Sequence
  ENSG00000052802_18 (sequence is synthesized)
tcatgagcgaggaagggggagcaggcgggctcccacccggtgctccgtgagatcgaggggagcgggttctgggtgcggatgcacgcgctgggcgggacgctggcagtggtacccgagacg

SEQ ID NO: 35534 - DNA, 120 bp, Artificial Sequence
  ENSG00000052802_19 (sequence is synthesized)
taaagcataatgaaatatatttattttcatggccataagattatcatatttctaaggagactaataggagaagttaatcttcttaatgttatattaagaaaacataactgttggataaaa

SEQ ID NO: 35535 - DNA, 120 bp, Artificial Sequence
  ENSG00000052802_20 (sequence is synthesized)
gtttaaataatagatgtttttacattctagcctatgctgttataatttttatagtgataatgtgttattagggcaagtatatattcaggaccagcaatttccttatccttctgtaataaa

SEQ ID NO: 35536 - DNA, 120 bp, Artificial Sequence
  ENSG00000052841_0 (sequence is synthesized)
gcttccggtgtgagcggcccggccgggggggcaagatggcggcggcagtaggggttcgtggccggtacgagctgccgccttgctccggcccaggctggctcctcagcctttccgccttgc

SEQ ID NO: 35537 - DNA, 120 bp, Artificial Sequence
  ENSG00000052841_1 (sequence is synthesized)
tgagtgtggcggcacgaggggccttcgccaccacgcactgggtcgtcacggaggacgggaaaatccagcagcaggtggattcaccaatgaacttgaagcatcctcatgacctagtcatat

SEQ ID NO: 35538 - DNA, 120 bp, Artificial Sequence
  ENSG00000052841_2 (sequence is synthesized)
taatgagacaagaagcaacagttaactacctcaaagaattagagaaacaattagttgctcaaaaaattcacatagaagagaatgaggacagagacacaggactggaacagagacataata

SEQ ID NO: 35539 - DNA, 120 bp, Artificial Sequence
  ENSG00000052841_3 (sequence is synthesized)
aagaagacccagactgcatcaaagccaaggtgcccttaggggacctggatctatatgatggcacatacataactttggagagcaaagacatcagtcctgaagattatatagacacagaat

SEQ ID NO: 35540 - DNA, 120 bp, Artificial Sequence
  ENSG00000052841_4 (sequence is synthesized)
ctcctgtccctccagacccagagcaacctgattgtactaaaattctagaacttccatatagtatacatgcttttcagcacttgagaggtgtacaggagagagttaatctttctgcacctc

SEQ ID NO: 35541 - DNA, 120 bp, Artificial Sequence
  ENSG00000052841_5 (sequence is synthesized)
tgctacctaaagaagacccaatcttcacatatttatctaaacggttaggaaggagtatagatgacataggtcacctcattcatgaaggcctacagaagaacacttcctcgtgggtactgt

SEQ ID NO: 35542 - DNA, 120 bp, Artificial Sequence
  ENSG00000052841_6 (sequence is synthesized)
ataacatggcttcattttactggagaattaagaatgagccatatcaggtagtagaatgtgccatgcgagcacttcacttctcttccaggcacaataaagacattgccctggtcaacctgg

SEQ ID NO: 35543 - DNA, 120 bp, Artificial Sequence
  ENSG00000052841_7 (sequence is synthesized)
caaacgttctacacagagcacacttctctgctgatgctgctgtcgtggtccatgcagctctggatgacagtgacttcttcaccagctattacactttggggaatatatatgcaatgcttg

SEQ ID NO: 35544 - DNA, 120 bp, Artificial Sequence
  ENSG00000052841_8 (sequence is synthesized)
gggaatataaccactcagtgctctgttatgaccacgctttgcaggccagacctgggtttgagcaagctataaagaggaagcatgctgtcctatgtcagcaaaaactggagcagaaattgg

SEQ ID NO: 35545 - DNA, 120 bp, Artificial Sequence
  ENSG00000052841_9 (sequence is synthesized)
aggctcagcatagatctctccagcgaacactgaatgagttaaaagagtatcaaaagcagcatgaccactacctgagacagcaggaaatcctagaaaaacataaactgattcaggaggagc

SEQ ID NO: 35546 - DNA, 120 bp, Artificial Sequence
  ENSG00000052841_10 (sequence is synthesized)
aaatcttaagaaatatcattcatgagactcagatggcaaaagaggcacaattaggaaatcatcagatatgccgactggtcaaccagcagcatagtttacattgccagtgggaccagcctg

SEQ ID NO: 35547 - DNA, 120 bp, Artificial Sequence
  ENSG00000052841_11 (sequence is synthesized)
tacgctatcatcgtggagatatctttgaaaatgtggactatgttcagtttggtgaggattcatcaacctccagtatgatgtctgtgaactttgatgttcaatcaaatcagagtgatatca

SEQ ID NO: 35548 - DNA, 120 bp, Artificial Sequence
  ENSG00000052841_12 (sequence is synthesized)
atgattcggtcaagtcttctcccgtagcccattctattctctggatttggggcagggactctgatgcatatagggacaaacagcatattctatggcctaaaagagcagattgtacagaaa

SEQ ID NO: 35549 - DNA, 120 bp, Artificial Sequence
  ENSG00000052841_13 (sequence is synthesized)
gctaccctagagtccctgttggtggggaattgccaacgtattttctgcctccggaaaacaaaggactcaggatccacgaactcagcagtgatgattattctacagaagaagaggcccaaa

SEQ ID NO: 35550 - DNA, 120 bp, Artificial Sequence
  ENSG00000052841_14 (sequence is synthesized)
cccctgactgttccataactgacttcagaaaaagccacactctgtcctacttagtcaaagaattagaggttcgcatggatctgaaagccaaaatgccagatgaccatgcacgaaaaattt

SEQ ID NO: 35551 - DNA, 120 bp, Artificial Sequence
  ENSG00000052841_15 (sequence is synthesized)
tgctttcccgtattaataactatactatcccagaagaagaaattgggtctttcttatttcatgctattaataagccaaatgctcctatctggctcatactcaatgaagctggactatact

SEQ ID NO: 35552 - DNA, 120 bp, Artificial Sequence
  ENSG00000052841_16 (sequence is synthesized)
ggagagcagtaggaaatagcacttttgctattgcctgtcttcagagggctttgaatttagctccacttcaataccaagatgttcctcttgtcaacttggccaaccttttgattcattacg

SEQ ID NO: 35553 - DNA, 120 bp, Artificial Sequence
  ENSG00000052841_17 (sequence is synthesized)
gccttcatcttgatgccactaagctgctacttcaagctttggccatcaatagctctgagcctctgacctttttgagcctgggaaatgcttaccttgctctgaagaatatcagtggggcac

SEQ ID NO: 35554 - DNA, 120 bp, Artificial Sequence
  ENSG00000052841_18 (sequence is synthesized)
gtgaaaacagcctgaagttgatccgctgtatgcagttttatccttttctgtacaacatcacttcttctgtttgcagtggtacggtggttgaggagagcaatggttctgatgagatggaga

SEQ ID NO: 35555 - DNA, 120 bp, Artificial Sequence
  ENSG00000052841_19 (sequence is synthesized)
attcagatgaaaccaaaatgtcagaagaaatactggctttggtggatgaatttcaacaggcatggcctttggaaggctttgggggtgcactagagatgaaagggcggcgtctagacttac

SEQ ID NO: 35556 - DNA, 120 bp, Artificial Sequence
  ENSG00000052841_20 (sequence is synthesized)
aaggaatacgggtgctgaagaaaggtccccaggatggagtggccagaagctcttgctatggagactgcagaagtgaagatgatgaagcaacagaatggattacattccaggtcaaacgtg

SEQ ID NO: 35557 - DNA, 120 bp, Artificial Sequence
  ENSG00000052841_21 (sequence is synthesized)
taaagaaacccaaaggagatcataagaaaactcctgggaaaaaagtagaaacaggtcagatagaaaatggacatcgttaccaagcaaacctagagatcactggccccaaggtggcatctc

SEQ ID NO: 35558 - DNA, 120 bp, Artificial Sequence
  ENSG00000052841_22 (sequence is synthesized)
ctgggccacaaggaaaaaaacgtgactaccagcgtctgggatggcccagcccggacgaatgcctcaaactccgctgggtagagctgactgccatcgtgagtacctggcttgcagtttctt

SEQ ID NO: 35559 - DNA, 120 bp, Artificial Sequence
  ENSG00000052841_23 (sequence is synthesized)
caaaaaacattgacatcacagaacacatagattttgccacccctatacagcagccagcaatggagcctctttgcaatggcaatctccccacgagtatgcataccctggaccacttgcatg

SEQ ID NO: 35560 - DNA, 120 bp, Artificial Sequence
  ENSG00000052841_24 (sequence is synthesized)
gggtttccaaccgagccagcctgcactacacaggggagagtcagttaacagaggtattacaaaatctcggcaaagaccaatatccacaacagtcgcttgaacagattggcacccgaattg

SEQ ID NO: 35561 - DNA, 120 bp, Artificial Sequence
  ENSG00000052841_25 (sequence is synthesized)
ccaaagttttggaaaagaaccagacgtcctgggtcctctccagcatggcagccctctactggagggtgaaaggccaaggaaagaaggcaatcgactgcctccgccaggctctgcactatg

SEQ ID NO: 35562 - DNA, 120 bp, Artificial Sequence
  ENSG00000052841_26 (sequence is synthesized)
cgccacaccagatgaaggatgtgcccctgattagcctggccaacatcttgcacaatgccaagctctggaatgacgccgtcatagtagccaccatggcagtagagatcgcaccacactttg

SEQ ID NO: 35563 - DNA, 120 bp, Artificial Sequence
  ENSG00000052841_27 (sequence is synthesized)
ctgtgaaccacttcactctgggcaatgtctacgtggcaatggaagaatttgaaaaagcactggtgtggtatgaatccacattgaagcttcagcccgagtttgtcccagccaagaaccgaa

SEQ ID NO: 35564 - DNA, 120 bp, Artificial Sequence
  ENSG00000052841_28 (sequence is synthesized)
tccagaccatccagtgtcacttaatgctgaagaagggacggcgctctccttagtgcacttcttccttctctctttctctttactcatgctctaaaaaaaaagaataagaaaagaaaccaa

SEQ ID NO: 35565 - DNA, 120 bp, Artificial Sequence
  ENSG00000052841_29 (sequence is synthesized)
tcattgtcagtatctactattaatgatgtgtgtgaaaataactaagacttataacaggacttttacatatgtgggaattggtttgtttttgtttttacgtttctcctttcccccaaccaa

SEQ ID NO: 35566 - DNA, 120 bp, Artificial Sequence
  ENSG00000052841_30 (sequence is synthesized)
cctcagaagaggcaccttcagaaacacacatttcttaaaaggaaagtgcagcttcaagatattgtgtaaatactgagccaagacatttctggagctgtgctctgtctccaaaaacctcaa

SEQ ID NO: 35567 - DNA, 120 bp, Artificial Sequence
  ENSG00000052841_31 (sequence is synthesized)
tgcctttagggcttttctcagtggtccagctagccttctctttggaggaggatgaagccgcattgcacattctctgcttcctgtcgtagcctctgttgtcaatggaaatgcggaagccca

SEQ ID NO: 35568 - DNA, 120 bp, Artificial Sequence
  ENSG00000052841_32 (sequence is synthesized)
tctggtgcccgtcagtgagaagcaacgttctgcgctctctccgttagacctccatgctgtccccagtcttgtccattccatgctgctgtgttacaaactctcagaggtagtttgcagggg

SEQ ID NO: 35569 - DNA, 120 bp, Artificial Sequence
  ENSG00000052841_33 (sequence is synthesized)
aggaaggggaatatgattttaaaaacaaaatatttacaacaacaaaaattcttaggatcacctgacctttgtaatgttatttatgttggggagggaggggggctgagaaggggaaatcag

SEQ ID NO: 35570 - DNA, 120 bp, Artificial Sequence
  ENSG00000052841_34 (sequence is synthesized)
cagtgtgcaacatctttataatttgtactttaattacaaatcacaaggaaaccaataagttgaaatcctatataacaggtttatatatatagaatatgtatatttgaagccctctacaga

SEQ ID NO: 35571 - DNA, 120 bp, Artificial Sequence
  ENSG00000052841_35 (sequence is synthesized)
ctgagtctatgttttactaattctttgttcactgtgttacccatcttggaataagttgtgaatgtcagctccctctctctgaggcctccagacttagctcctcaggagggtaatgagcca

SEQ ID NO: 35572 - DNA, 120 bp, Artificial Sequence
  ENSG00000052841_36 (sequence is synthesized)
aggttgagtgtttccatacaatgcttttacctttgatcccaggagaatcagaaactccaacattttggaatcttcaagggcacatactgagaaaaaaaataaaattgtttatgagcaaaa

SEQ ID NO: 35573 - DNA, 120 bp, Artificial Sequence
  ENSG00000052841_37 (sequence is synthesized)
aggtattacaaaatctcggcaaagaccaatatccacaacagtcgcttgaacagattggcacccgaattgccaaagttttggaaaaggcatccaccgcgggtcttggaatgtatccctatc

SEQ ID NO: 35574 - DNA, 120 bp, Artificial Sequence
  ENSG00000052841_38 (sequence is synthesized)
gtaaaaggaaaacttgtatcttttaagtttctatttctttgtgaagttacacattttacatacttcttagctgtttgttcatgtttttggccctttttcctttttttttttctgtcttta

SEQ ID NO: 35575 - DNA, 120 bp, Artificial Sequence
  ENSG00000052841_39 (sequence is synthesized)
tgtttagagtaagcctgttggtttgtgccttcactcagatattacataaatagaaaaaattctaaaatgttaatttcaggaatttcatgttagagctatttctaagtagatgaggtcttc

SEQ ID NO: 35576 - DNA, 120 bp, Artificial Sequence
  ENSG00000052841_40 (sequence is synthesized)
tgacttaacttctgaagtcctgaaatagagctcaacaagttgtgatcagttggtgggatttttcttatttccctcttggaataagctggagttggatggtctctatatgaagatcacacc

SEQ ID NO: 35577 - DNA, 120 bp, Artificial Sequence
  ENSG00000052841_41 (sequence is synthesized)
ctaatgcacgtgctcagctgatgattagaatgctcttctgacaggtatagtttctttgcactgtgtcctgttctttatcattgcttatcattcagtctggctcttcttcatcttgaattt

SEQ ID NO: 35578 - DNA, 120 bp, Artificial Sequence
  ENSG00000052841_42 (sequence is synthesized)
ggtaattgtcatgagaaaaccctggacaacagccatgacaaacagaaatattttgacaactcacagtcactggatgctgctgaagaagagccctctgagagaggaacagaggaggaccct

SEQ ID NO: 35579 - DNA, 120 bp, Artificial Sequence
  ENSG00000052841_43 (sequence is synthesized)
aagaccaggaaagtgccatagacataatgtaactggatttcagcaaggcatttaacagagcctcttatgatatccttgtgaaccagatggagagatgtgggcttgaagccttcccattgc

SEQ ID NO: 35580 - DNA, 120 bp, Artificial Sequence
  ENSG00000052841_44 (sequence is synthesized)
ctacaggataaaattcaaacttcctagtgtggtgtacaagaccctttacagcccgcctctgtgtacccttcaacaccattctctgaaccaaccatgctcatgtttttacctcagtgcctt

SEQ ID NO: 35581 - DNA, 120 bp, Artificial Sequence
  ENSG00000052841_45 (sequence is synthesized)
tgcacatgctattccctctgcctggaatgccctgtgccccctctgccctctgccgtgctaaaatatcactcatccttaaacttcaaaatcaagtgccatctcttccttgttaccttcagg

SEQ ID NO: 35582 - DNA, 120 bp, Artificial Sequence
  ENSG00000052841_46 (sequence is synthesized)
cagaattagttactctttcctctgtgcaattgttctatatcttcgctctagctcttttcctgttgtattgtaatgatttgtttatgtttaccttccttactagactgtgagctcaagagc

SEQ ID NO: 35583 - DNA, 120 bp, Artificial Sequence
  ENSG00000052841_47 (sequence is synthesized)
aggccgtcttaattattcctttctgtacccctagtgtcttttatggttctcagccccttataacaggtgctcaataaatatttttcaaatgaaattattaaatgtaaaagaaaattaaga

SEQ ID NO: 35584 - DNA, 120 bp, Artificial Sequence
  ENSG00000052841_48 (sequence is synthesized)
tagtatacatgcttttcagcacttgagagtaagtagagaactttaggatttttttttttttgcgttgcgttcttctttcagttggtctctcacttataaagaccatttctctttcttctc

SEQ ID NO: 35585 - DNA, 120 bp, Artificial Sequence
  ENSG00000052841_49 (sequence is synthesized)
tccttcctgacagctttgtaattttatagacatctcttatttcttaaaattccaaaatattagtatttcaaaataaacactacaagatactgaattatttgtcatcttttatatcctttg

SEQ ID NO: 35586 - DNA, 120 bp, Artificial Sequence
  ENSG00000052841_50 (sequence is synthesized)
cctggtgacctcttagacttgttttgcttatcctcttggcttgagcttgcttccaagcacagagatagaagcaaatttccatttattcatgtacattggccagttcctggtccttgtctg

SEQ ID NO: 35587 - DNA, 120 bp, Artificial Sequence
  ENSG00000052841_51 (sequence is synthesized)
aaaaaaaaaaaaaaaaaaaaaccggctaaccctgtgtgacaccagacttttccagaagaccggttattgttatgatggatgagaaaatacagtgttttatcagcacatttgtattcatgt

SEQ ID NO: 35588 - DNA, 120 bp, Artificial Sequence
  ENSG00000052841_52 (sequence is synthesized)
ttatcagcacatttgtattcatgtgttctgagttctgcattaatccagatcttatgctttttaaagacatggctggtgtcttctttgttcgtcaaggcaatgtatggaatgatggaagga

SEQ ID NO: 35589 - DNA, 120 bp, Artificial Sequence
  ENSG00000052841_53 (sequence is synthesized)
acacaggatttattgtcaggcattgctgagttttaaacacagctctacctcttactagctttgtgaatttgggcaccttattgaacttcaatgagctcatctagagtcatgcattctatg

SEQ ID NO: 35590 - DNA, 120 bp, Artificial Sequence
  ENSG00000052841_54 (sequence is synthesized)
gctgtcacaaagatgggtcctttctgtttcttctgtgtctgctacagaacccaatatggcatgatacaggtaacagttgctcaagttagacatttaaagggaatgatatttgtgatgata

SEQ ID NO: 35591 - DNA, 120 bp, Artificial Sequence
  ENSG00000052841_55 (sequence is synthesized)
gcaatcttgctacttgttccatccatcattttgtactctatactgttaggcaatagggaagggctgaggctctacctctgggagtcagcaaacttcccgaaaagggcaagagaataaaac

SEQ ID NO: 35592 - DNA, 120 bp, Artificial Sequence
  ENSG00000052841_56 (sequence is synthesized)
acttggactctggaggccagacagcctctggtgcacctacttaattctagcattgtagtatgaaaacagccacagaaatacgtagaggactgggaatgattgtgtcctaataaaactttt

SEQ ID NO: 35593 - DNA, 120 bp, Artificial Sequence
  ENSG00000052841_57 (sequence is synthesized)
ttcaaaataggcaggagactaggtttggcctatgggccaaagtttgccaacccgtaatgatataatggttcttgcagaaattattttggctttctgacagcatgactctaagtgtggtct

SEQ ID NO: 35594 - DNA, 120 bp, Artificial Sequence
  ENSG00000052841_58 (sequence is synthesized)
gtggacagtacacagactttttattagcagtctgcaatgagacaaggagcttcaccagaagaaaccaactacattattcagcagattgtttacttcagctgacattttgttgtgtttgtt

SEQ ID NO: 35595 - DNA, 120 bp, Artificial Sequence
  ENSG00000052841_59 (sequence is synthesized)
ttcgaagcaagacttcgccaatgaaagaagtaattgatttatattctggtacaagcaccttatctatcacagaccagtagcaaacagcacaaaagcactttgagtggcactgttctaatc

SEQ ID NO: 35596 - DNA, 120 bp, Artificial Sequence
  ENSG00000052841_60 (sequence is synthesized)
gtgatggatttggcaaagcacctgattctgcatgattgtcatctagcggttctttgagagcaccagccttggacttgaaaagttaagtctttatcttgaagtcacccaaactttgaaaat

SEQ ID NO: 35597 - DNA, 120 bp, Artificial Sequence
  ENSG00000052841_61 (sequence is synthesized)
atgaatcttgttcctttttcttgtgccaggatccacgaactcagcagtgatgattattctacagaagaagaggcccaaacccctgactgttccataactgacttcagaaaaagccacact

SEQ ID NO: 35598 - DNA, 120 bp, Artificial Sequence
  ENSG00000052841_62 (sequence is synthesized)
aaactcttccaaaactgttcctttctgttttgttaaaatctcaatctaaacccctgcctgtacctcaaacagttttctactgttcgtaaattcctataatataaaaagcgctatacagaa

SEQ ID NO: 35599 - DNA, 120 bp, Artificial Sequence
  ENSG00000052841_63 (sequence is synthesized)
gcactgggtcgtcacggaggacgggaaaatccagcagcagttatagccaggagcccatgcgtatctctctcaagagtggaagctgggctgctatttttgcgaacctgtacttctctaaac

SEQ ID NO: 35600 - DNA, 120 bp, Artificial Sequence
  ENSG00000052841_64 (sequence is synthesized)
ctcaaagaagatgtaagcccatgatggttagacttgaatcctgaagagataattccatgagaagtggagcaacagactttctgcctgcgtcattccatccctgtgaaactcatcttgctt

SEQ ID NO: 35601 - DNA, 120 bp, Artificial Sequence
  ENSG00000052841_65 (sequence is synthesized)
tccagcccaaaatgccaataataccaggttgagaaaccctgctttagagataaatgtttctactaagttggagttgtctttataaaatcaaaatacagaggggcaaaaattaagtttggt

SEQ ID NO: 35602 - DNA, 120 bp, Artificial Sequence
  ENSG00000052841_66 (sequence is synthesized)
aagaatgttaacattgaagaatgccttaaccccttatttcatgttgatcaatcttaaatctagcaaaggactcatttattcttacttctccacctatctttactcagagatgatctttag

SEQ ID NO: 35603 - DNA, 120 bp, Artificial Sequence
  ENSG00000052841_67 (sequence is synthesized)
ttccattgcataatgacgagattttaattagatcatagatgggggaaatgttaaagactacaggaatgactagcacctccaaatacaccaatccaggtgaagtaatcaccagggcataag

SEQ ID NO: 35604 - DNA, 120 bp, Artificial Sequence
  ENSG00000052841_68 (sequence is synthesized)
ctcacaaaggttgtatttgtaacttgaaatagttcagatgagatgataaaggggcaaagtgtggtcaagaaaccagtctatcttctgtatcaatgaaaaaaatgttcaaactctaaaaca

SEQ ID NO: 35605 - DNA, 120 bp, Artificial Sequence
  ENSG00000052841_69 (sequence is synthesized)
ttatggaaatgcaaattccagtggatttaacattatgtgtaataaatcataaaggaagaaaaattaggtgaatatttacatgctctttccatgtggaaagaactttctaaggcagagaga

SEQ ID NO: 35606 - DNA, 120 bp, Artificial Sequence
  ENSG00000052841_70 (sequence is synthesized)
atcctttaaaaatgaagcaaataaagtaatcattatgtatgttattggcaaaatgatagaccaatagaacagtggaacaaaagagagaggccaagaataaacctttacatagatggtcaa

SEQ ID NO: 35607 - DNA, 120 bp, Artificial Sequence
  ENSG00000052841_71 (sequence is synthesized)
aggaaacgtaaaaaattaaaaataatgtttacttgtctaccatagagacgaggatgggagagagacttcatggtataactttgtatacttcctggtttttgaaacgtgtgactgtgttac

SEQ ID NO: 35608 - DNA, 120 bp, Artificial Sequence
  ENSG00000052841_72 (sequence is synthesized)
ctattcagaaagttaaataaaatagaacatagatatgagatatagttctgctattcagtagttgagtgaacttgggcaagacacttaagctctctgagtcatagttttctcatttataga

SEQ ID NO: 35609 - DNA, 120 bp, Artificial Sequence
  ENSG00000052841_73 (sequence is synthesized)
agggctgtaatagtagtatcaagctcacaggattgttctaaggattaatgaaggacaggtggaacagaaagtgctgagcagagtgccagcacttagtaaatactcagttgaatggtcatg

SEQ ID NO: 35610 - DNA, 120 bp, Artificial Sequence
  ENSG00000052841_74 (sequence is synthesized)
gtgataattgtgtaatatactttccatttccattaaggaaaaaatatgtagatgccctatgattcacatgatacttgaatggaattatcataaactaagtttaacttttcttaaagcaaa

SEQ ID NO: 35611 - DNA, 120 bp, Artificial Sequence
  ENSG00000052841_75 (sequence is synthesized)
tataagccctaaataaattgtaaaatcatacagtgtctgcaataccttattttagtgacaaaatttgtagctatcagattaagagccatcaataatttaaaaatgaaacactatgattat

SEQ ID NO: 35612 - DNA, 120 bp, Artificial Sequence
  ENSG00000052841_76 (sequence is synthesized)
tcttattttgtaatcacttctagtcagactgatctactcccaaaattccaatcaacacaaagatgtactaacagctcccaaacttgaatctccagaccagatctttttacaatgcgttca

SEQ ID NO: 35613 - DNA, 120 bp, Artificial Sequence
  ENSG00000052841_77 (sequence is synthesized)
actcatttgtctgtctccctgacctgtctgtctagattgcactcaggcaacccatgctcgggaaaactaaagtcataattttcttgcccactctccatattaaaaaattattgttttttt

SEQ ID NO: 35614 - DNA, 120 bp, Artificial Sequence
  ENSG00000052841_78 (sequence is synthesized)
ttgttttgttttttcttttcctatttttagtaaatagctccagtaatgcttaggccaaaaacctgggagttatccttaatgattttcctcccttgctcttcaaattcagcctgttaccaa

SEQ ID NO: 35615 - DNA, 120 bp, Artificial Sequence
  ENSG00000052841_79 (sequence is synthesized)
ttcttagcacttttactccctgagtatttttcaaaaccacctacttttctccatccccattgctgcctcctcaaaccagagcataaccatccctacgtcggttcatccagtacttcctag

SEQ ID NO: 35616 - DNA, 120 bp, Artificial Sequence
  ENSG00000052841_80 (sequence is synthesized)
ctggtcctcttgctctgttcactcttgcctctgttcaatctattctctccacagtactcagaattcttcaaatataagtcaaatcattcttaaagcactctaggaaattcttaatgctat

SEQ ID NO: 35617 - DNA, 120 bp, Artificial Sequence
  ENSG00000052841_81 (sequence is synthesized)
ttaaagtggaccataaagcctttcttgatctgctccctgcctgttttttcatcctctcttttgccctctctcctgccagggctgtcacacgtggtgtctcctttgtctgtggcattgttc

SEQ ID NO: 35618 - DNA, 120 bp, Artificial Sequence
  ENSG00000052841_82 (sequence is synthesized)
tcactgtgggttctcagctggttaattcatactaaaccttctggcctcaacttaatcttacctccacagaatccttcactagctaccctcctccaccagtgcagaggcaacatatatcct

SEQ ID NO: 35619 - DNA, 120 bp, Artificial Sequence
  ENSG00000052841_83 (sequence is synthesized)
cctggagtgtattatcattgcaccatattttatcttttataacttaccacatgtaataaatgaatcactcacaagagaatgaacatggtaacagcagggactaactatgttgttttactc

SEQ ID NO: 35620 - DNA, 120 bp, Artificial Sequence
  ENSG00000052841_84 (sequence is synthesized)
attattatagtccttgtatctgacatgtaataggctctaaataaataatgagtgaatgtttgcctaataattgttagactttttaaatagctgcaagtaaaacatggcagtgccaatttg

SEQ ID NO: 35621 - DNA, 120 bp, Artificial Sequence
  ENSG00000052841_85 (sequence is synthesized)
tcatattagtgcatatgatagtctataatagtaagcttgtatatggtgggaaaatgaaaggaagtacttagtcttacacctaaatacaatgtacggctgtatctctataagatttactgt

SEQ ID NO: 35622 - DNA, 120 bp, Artificial Sequence
  ENSG00000052841_86 (sequence is synthesized)
ctaagctttaggtaactttttctgtggggaggaatgtgctgctgtgcataaaagaaaactaaaagatataactagttgtgggtatttatcaccacttatatcttggaagaagaaatccta

SEQ ID NO: 35623 - DNA, 120 bp, Artificial Sequence
  ENSG00000052841_87 (sequence is synthesized)
gaagaaaacttacttcgtttaaaatcaggggatagcatgttgaagctatgatgagctgattgttaatgctgtctctccttgattgttaatgctgtctctcttctcttcccacccactcaa

SEQ ID NO: 35624 - DNA, 120 bp, Artificial Sequence
  ENSG00000052850_0 (sequence is synthesized)
aaactcccagccaaggcgcgcggtggcgtcctcgcgccctcgctcgcgtccccgcccgccgcctgcgcaagccaggcatgaatgctgagacttgcgtctcttactgcgagtcgccggccg

SEQ ID NO: 35625 - DNA, 120 bp, Artificial Sequence
  ENSG00000052850_1 (sequence is synthesized)
ctgccatggacgcctactacagcccggtgtcgcagagtcgggagggctcgtcgccttttagggcatttcccggaggcgacaagttcggcacaactttcctgtcggccgccgccaaagcac

SEQ ID NO: 35626 - DNA, 120 bp, Artificial Sequence
  ENSG00000052850_2 (sequence is synthesized)
agggattcggggacgccaagagccgggcccgttacggcgctgggcagcaggacctggcgacacccctggagagtggagctggggcgcggggctcctttaacaagttccagccccagccgt

SEQ ID NO: 35627 - DNA, 120 bp, Artificial Sequence
  ENSG00000052850_3 (sequence is synthesized)
cgaccccgcagccccagccgccgccgcagccgcagccgcagcagcagcagccgcagccccagccgcccgcgcaaccgcatctttacttgcagcgaggcgcctgcaagacgcccccggacg

SEQ ID NO: 35628 - DNA, 120 bp, Artificial Sequence
  ENSG00000052850_4 (sequence is synthesized)
gcagcctcaaactccaggaaggcagcagcggccacagcgcggccttgcaggttccctgctacgctaaagagagctccctgggtgagccagagttaccccctgactctgacactgtgggga

SEQ ID NO: 35629 - DNA, 120 bp, Artificial Sequence
  ENSG00000052850_5 (sequence is synthesized)
tggacagcagctacctgagtgtcaaggaggctggggtgaaggggccccaggaccgggccagctcagacctccccagcccattggagaaggccgactcagagagcaacaagggcaagaagc

SEQ ID NO: 35630 - DNA, 120 bp, Artificial Sequence
  ENSG00000052850_6 (sequence is synthesized)
ggcggaaccggaccaccttcaccagctaccagctggaggagctggagaaggtcttccagaagacccactacccagacgtgtatgcgcgggaacagctggccatgaggacagacctcactg

SEQ ID NO: 35631 - DNA, 120 bp, Artificial Sequence
  ENSG00000052850_7 (sequence is synthesized)
aggcccgcgtgcaggtctggttccagaaccgaagggccaagtggaggaagcgggagcgttttgggcagatgcagcaggttcgaacccacttctccactgcatatgagctgcccctcctca

SEQ ID NO: 35632 - DNA, 120 bp, Artificial Sequence
  ENSG00000052850_8 (sequence is synthesized)
cccgagctgagaactacgcccagattcagaacccgtcctggctcggcaacaacggggctgcctcaccagtgccagcctgcgtggtcccctgcgacccggtgcctgcctgcatgtcccctc

SEQ ID NO: 35633 - DNA, 120 bp, Artificial Sequence
  ENSG00000052850_9 (sequence is synthesized)
atgcccacccccctggctctggggccagcagcgtcaccgacttcctgagtgtgtctggggctggcagtcacgtgggccagacgcacatgggcagcctgtttggagcagccagcctcagcc

SEQ ID NO: 35634 - DNA, 120 bp, Artificial Sequence
  ENSG00000052850_10 (sequence is synthesized)
caggcctcaatggctacgagctcaacggcgagccggaccgcaagacctcgagcatcgcggccctccgcatgaaggccaaggagcacagtgcggccatttcctgggccacatgacagggca

SEQ ID NO: 35635 - DNA, 120 bp, Artificial Sequence
  ENSG00000052850_11 (sequence is synthesized)
cccctgccccgtccccacctcgggacaccatgggccacgcccatgttttccaggcccccagcctcccactcgactttcctcttaggaacctggcctgggccaggggcctgaccctcagca

SEQ ID NO: 35636 - DNA, 120 bp, Artificial Sequence
  ENSG00000052850_12 (sequence is synthesized)
ctttcagccgccccaagtctgaggccccgtggactgctgggagggagggggcagcaggcccctggcccctccctggcactgaggccctgacccctgctcccggccacaggcagtggagaa

SEQ ID NO: 35637 - DNA, 120 bp, Artificial Sequence
  ENSG00000052850_13 (sequence is synthesized)
agccaggtggccacgtttttcagcttcgcatccatgataagctgaaagcgctttcttgctcccgcccactcctctgctctgcctagttgaccatgagtcaatgctagatttccatgcaga

SEQ ID NO: 35638 - DNA, 120 bp, Artificial Sequence
  ENSG00000052850_14 (sequence is synthesized)
cccagcagcctcaccagcccagtcttgtccatccttcccgctcctagtggggtcccctggtcaccaggccggtggctgtgtgtctgaagcacaggctgccctgcagagccagcctcctgc

SEQ ID NO: 35639 - DNA, 120 bp, Artificial Sequence
  ENSG00000052850_15 (sequence is synthesized)
cctcccatctttctctccctgaaagcacacggaatccgacctgctggggccaaggcgccagcctccacctccccccgaacagtgacgagtctgacagagcctggctgactgcatcctggc

SEQ ID NO: 35640 - DNA, 120 bp, Artificial Sequence
  ENSG00000052850_16 (sequence is synthesized)
tgtcccctaggctggatacacctggagagagtgggcagaggatgacaggagctggagccgaggacccctgctgccatctagcaatgccagtccccaggggagacacgggccagcccctca

SEQ ID NO: 35641 - DNA, 120 bp, Artificial Sequence
  ENSG00000052850_17 (sequence is synthesized)
ctggacactataggggaggagccagacctgagggaggctgagaacacagatgccacaagggctcccatggtgctagaagaaggaaaggtcctgggagagggggaggcatccgggtggggc

SEQ ID NO: 35642 - DNA, 120 bp, Artificial Sequence
  ENSG00000052850_18 (sequence is synthesized)
gtgggcccgggcagtcctcccgctctccggcctgcctggcatctggtacagcggggaggtctgggcagctttgttctccatccagagcccagtcaggttccctccaggaggatgcggagg

SEQ ID NO: 35643 - DNA, 120 bp, Artificial Sequence
  ENSG00000052850_19 (sequence is synthesized)
ggctcgtctcttccctgccctaccctggcccctccctggggctgctcagcagtgtcccggcatggaaggactcacaacttcggaacacataagctagagcttgggggccgggtggcagag

SEQ ID NO: 35644 - DNA, 120 bp, Artificial Sequence
  ENSG00000052850_20 (sequence is synthesized)
ggtcaaaagctgcgtgcaggctttgctagaggacgtgtggccatgctcggcctccaggccctgctatggcctcaaactgactgtcctccctgccatatctgtcagtgtcatcgctgccca

SEQ ID NO: 35645 - DNA, 120 bp, Artificial Sequence
  ENSG00000052850_21 (sequence is synthesized)
gagccttccacggcagatgggggctctgtgtccctccaggcactaggaggtgttgctcttctccacacagctttccacactccgtccttacacttcttccacagggaccaggactctctg

SEQ ID NO: 35646 - DNA, 120 bp, Artificial Sequence
  ENSG00000052850_22 (sequence is synthesized)
ccctctctccagcctgcggaagggctcctggcctgggctcctcggtgtggctttgctattgcaaatggggctgtcaggatgccctcctgaaaccaggcttcctgcctccaggaagcgggg

SEQ ID NO: 35647 - DNA, 120 bp, Artificial Sequence
  ENSG00000052850_23 (sequence is synthesized)
cagaggcaggcctgtcagaccccaggtggggggtccctccagcaggcagcgccccgcattgaagcgctcgccttttctaccttctcccttgattcctgtcatggagtagggccaggccca

SEQ ID NO: 35648 - DNA, 120 bp, Artificial Sequence
  ENSG00000052850_24 (sequence is synthesized)
ctatgctcagggtcgtggacacagaaaggcctcctgggttgggcggagggtaaacttggtgttgttgaatgagggtctctggggttgggggtgacagtctcccgcctgcctggtgttctc

SEQ ID NO: 35649 - DNA, 120 bp, Artificial Sequence
  ENSG00000052850_25 (sequence is synthesized)
atctgctctagaaaccaggctgaggaagggtctggctgtggcctcccttaatgagtcagacctctttgtgaaccgtagctctaaaatggatcttatagaggtgaaagggtcttggacatt

SEQ ID NO: 35650 - DNA, 120 bp, Artificial Sequence
  ENSG00000052850_26 (sequence is synthesized)
gaattaaatgttcttggaggcttggctttaagtgtttcaaatatttgaggatttggagtgacttttgggaagttttttctagttctgaggttcgctgaaatgacccagactcccccaaaa

SEQ ID NO: 35651 - DNA, 120 bp, Artificial Sequence
  ENSG00000052850_27 (sequence is synthesized)
tctagccagggaaaggaagaacttaaggctgggaacagtttccccatttctcccccctttccttctgaaatgctcatggctgaggaaggatggggaaggaaggaactttcaccttgggtc

SEQ ID NO: 35652 - DNA, 120 bp, Artificial Sequence
  ENSG00000052850_28 (sequence is synthesized)
tttctcacccatgagagaatcaggacaaagaggaggagagccaggtagctccagagtgggccaggagggagagcaagggaatcaggacaaagaggaggacagacaggtagctccagagca

SEQ ID NO: 35653 - DNA, 120 bp, Artificial Sequence
  ENSG00000052850_29 (sequence is synthesized)
ggcagggagggagagtgagagctttaagggggctcttccgcagtggcccccggcactcagttcctccatgcgtctgctctctggctgggctagacccaagtcaggcaaatttcaacccaa

SEQ ID NO: 35654 - DNA, 120 bp, Artificial Sequence
  ENSG00000052850_30 (sequence is synthesized)
aagcttgagaagaaaaggcgtctattagaagactctgtggctatggctgcctgtcccaacacacccaggaagtgtctaggattaaacatgccaatgtgaaacattcctgttcatctcgtc

SEQ ID NO: 35655 - DNA, 120 bp, Artificial Sequence
  ENSG00000052850_31 (sequence is synthesized)
aaaggcagccacgtaccccaggcctgtcctctgtggcttggcccagcccttgggggccacctaaccacactaagtatgataggaccaccgagttgggaggaagcttagaaaccctctagt

SEQ ID NO: 35656 - DNA, 120 bp, Artificial Sequence
  ENSG00000052850_32 (sequence is synthesized)
tagtccagtcccttcacaacagagaagaccctggcccagagtggagacatgactgccctgacctgtacttgccctgagactaggctgagagaggagcctgggacgtgccacccagggtgt

SEQ ID NO: 35657 - DNA, 120 bp, Artificial Sequence
  ENSG00000052850_33 (sequence is synthesized)
gagggcctgggcttcgttggcaccaggggcggccggtgctgcatggagctcccctctccaatgcctcatgggcattcactcagcagctcagttctccagaagagaaccttggggcccagt

SEQ ID NO: 35658 - DNA, 120 bp, Artificial Sequence
  ENSG00000052850_34 (sequence is synthesized)
cccttccaagacaggtggctaggcccaaccttctgcactgcagagcagggggccactgccgtgtcagctcctaggatgactgagcaagtcagggcagctgcccaaggccatctggagcta

SEQ ID NO: 35659 - DNA, 120 bp, Artificial Sequence
  ENSG00000052850_35 (sequence is synthesized)
aagctcatgaaggcaggtggagagaagcatctacctgccacgtggttcattgctatgcgaataagctaagagaggtgaggatttcctttggatacctgcctaagatctcaacagagatgg

SEQ ID NO: 35660 - DNA, 120 bp, Artificial Sequence
  ENSG00000052850_36 (sequence is synthesized)
caacttaaaaataaagtcgtgggtagccggcagatggatgggcagcctccccacactgacagcctccagtccctgctgggcacaggtctcagcatggcaaggcttgacactaaggtgctg

SEQ ID NO: 35661 - DNA, 120 bp, Artificial Sequence
  ENSG00000052850_37 (sequence is synthesized)
ctactgccctccagatgccagcactactcctggggcatgggagcgagggctctggggggcacacagagaggcttgtctccaaggctgaaatagcacttggaggacatgggcttttagaac

SEQ ID NO: 35662 - DNA, 120 bp, Artificial Sequence
  ENSG00000052850_38 (sequence is synthesized)
tttccttgaattcttttaactatacttgattctcagcgctcactaccgtgcctccagcttcgggaagcacggtggccaggttagctcaaagacactgcgatggggtaggtgcagcaagtg

SEQ ID NO: 35663 - DNA, 120 bp, Artificial Sequence
  ENSG00000052850_39 (sequence is synthesized)
tggggtgggtccccagcacacacagctgtgatcacactggacccagctccgtgccccatctcctgtcatttcggctgggcagacgagggacgcttccatgaaaactacgtaccctgctta

SEQ ID NO: 35664 - DNA, 120 bp, Artificial Sequence
  ENSG00000052850_40 (sequence is synthesized)
tgcagtcattccctccctgggctagacagtggggggccatcttcgagaacctgaaagacacgcgggggttcctggtctgtttcatggcccttactgtccagtgcaaaggcaaacaggcct

SEQ ID NO: 35665 - DNA, 120 bp, Artificial Sequence
  ENSG00000052850_41 (sequence is synthesized)
agctgggggaggatggttggtaaactggcccccaggataatactctgtgactatccagttaaaaaataagaaggtgacaatgacccatcaaccccacttcacttctttcaggatgctgta

SEQ ID NO: 35666 - DNA, 120 bp, Artificial Sequence
  ENSG00000052850_42 (sequence is synthesized)
gggaggaaaggtgcttccatgacctaacctcggcctctcctttcttccctcttcactcacacacatagagctaggcctttatactactgattttgaaggacagttttcaatgtctaatca

SEQ ID NO: 35667 - DNA, 120 bp, Artificial Sequence
  ENSG00000052850_43 (sequence is synthesized)
tctgtttaggtgtgcagtggttgaaaaaagaaagctgagtgctagaaggaacatgaacctcaaccgttacttattgttctcattgtaagatattttaaccctgtataaatgcaacttttc

SEQ ID NO: 35668 - DNA, 120 bp, Artificial Sequence
  ENSG00000052850_44 (sequence is synthesized)
ctttagcttaatggcctggggtggaatattaaaaatatatattaaaaatacagtaaaaatccagaaaaatgtaaaaaaaaaaatgaggtcggttccataaagttttactgcctataccac

SEQ ID NO: 35669 - DNA, 120 bp, Artificial Sequence
  ENSG00000052850_45 (sequence is synthesized)
catgtaactacattatagcaaaatattaaaagaaacgttcttgccttttaaagtaagttattgcacttacatcttttttgggagaggaggaacacggatgggaaggagatgtaggggccc

SEQ ID NO: 35670 - DNA, 120 bp, Artificial Sequence
  ENSG00000052850_46 (sequence is synthesized)
aggcatggggcaaaatggagtgcagaggtagccgggcactcccagaacaccctttgctggcccagcccaaactgtttggttgttgttatttgcaataaactccttctccttcctcctctc

SEQ ID NO: 35671 - DNA, 120 bp, Artificial Sequence
  ENSG00000053108_0 (sequence is synthesized)
agaaatagggcagccgcggcggcggtggcacagcagcgggcagcggcggctcagggagctggagcctcaacagcctccagcgagcccgggacccgccgacagcccgagaaaccagccgaa

SEQ ID NO: 35672 - DNA, 120 bp, Artificial Sequence
  ENSG00000053108_1 (sequence is synthesized)
ggacgcggggcggggtcgccgccgccgccacggggtgctccctccctcccgcccaagtccggccacctggtcttcccctcggccccggccgtctcagactcatcaaaatgaaaccaggag

SEQ ID NO: 35673 - DNA, 120 bp, Artificial Sequence
  ENSG00000053108_2 (sequence is synthesized)
gcttttggctgcatctcacactgctcggagcctccctgccggctgcgctgggatggatggacccaggaaccagcagaggcccggatgtgggtgtgggggagtcacaggcagaggagccca

SEQ ID NO: 35674 - DNA, 120 bp, Artificial Sequence
  ENSG00000053108_3 (sequence is synthesized)
gaagctttgaagtcacaagaagagaagggctttccagccacaacgagctgctggcctcctgcgggaagaagttctgcagccgagggagccggtgcgtgctcagcaggaagacaggggagc

SEQ ID NO: 35675 - DNA, 120 bp, Artificial Sequence
  ENSG00000053108_4 (sequence is synthesized)
ccgaatgccagtgcctggaggcatgcaggcccagctacgtgcctgtgtgcggctctgatgggaggttttatgaaaaccactgtaagctccaccgtgctgcttgcctcctgggaaagagga

SEQ ID NO: 35676 - DNA, 120 bp, Artificial Sequence
  ENSG00000053108_5 (sequence is synthesized)
tcaccgtcatccacagcaaggactgtttcctcaaaggtgacacgtgcaccatggccggctacgcccgcttgaagaatgtccttctggcactccagacccgtctgcagccactccaagaag

SEQ ID NO: 35677 - DNA, 120 bp, Artificial Sequence
  ENSG00000053108_6 (sequence is synthesized)
gagacagcagacaagaccctgcctcccagaagcgcctcctggtggaatctctgttcagggacttagatgcagatggcaatggccacctcagcagctccgaactggctcagcatgtgctga

SEQ ID NO: 35678 - DNA, 120 bp, Artificial Sequence
  ENSG00000053108_7 (sequence is synthesized)
agaagcaggacctggatgaagacttacttggttgctcaccaggtgacctcctccgatttgacgattacaacagtgacagctccctgaccctccgcgagttctacatggccttccaagtgg

SEQ ID NO: 35679 - DNA, 120 bp, Artificial Sequence
  ENSG00000053108_8 (sequence is synthesized)
ttcagctcagcctcgcccccgaggacagggtcagtgtgaccacagtgaccgtggggctgagcacagtgctgacctgcgccgtccatggagacctgaggccaccaatcatctggaagcgca

SEQ ID NO: 35680 - DNA, 120 bp, Artificial Sequence
  ENSG00000053108_9 (sequence is synthesized)
acgggctcaccctgaacttcctggacttggaagacatcaatgactttggagaggatgattccctgtacatcaccaaggtgaccaccatccacatgggcaattacacctgccatgcttccg

SEQ ID NO: 35681 - DNA, 120 bp, Artificial Sequence
  ENSG00000053108_10 (sequence is synthesized)
gccacgagcagctgttccagacccacgtcctgcaggtgaatgtgccgccagtcatccgtgtctatccagagagccaggcacaggagcctggagtggcagccagcctaagatgccatgctg

SEQ ID NO: 35682 - DNA, 120 bp, Artificial Sequence
  ENSG00000053108_11 (sequence is synthesized)
agggcattcccatgcccagaatcacttggctgaaaaacggcgtggatgtctcaactcagatgtccaaacagctctcccttttagccaatgggagcgaactccacatcagcagtgttcggt

SEQ ID NO: 35683 - DNA, 120 bp, Artificial Sequence
  ENSG00000053108_12 (sequence is synthesized)
atgaagacacaggggcatacacctgcattgccaaaaatgaagtgggtgtggatgaagatatctcctcgctcttcattgaagactcagctagaaagacccttgcaaacatcctgtggcgag

SEQ ID NO: 35684 - DNA, 120 bp, Artificial Sequence
  ENSG00000053108_13 (sequence is synthesized)
aggaaggcctcagcgtgggaaacatgttctatgtcttctccgacgacggtatcatcgtcatccatcctgtggactgtgagatccagaggcacctcaaacccacggaaaagattttcatga

SEQ ID NO: 35685 - DNA, 120 bp, Artificial Sequence
  ENSG00000053108_14 (sequence is synthesized)
gctatgaagaaatctgtcctcaaagagaaaaaaatgcaacccagccctgccagtgggtatctgcagtcaatgtccggaaccggtacatctatgtggcccagccagcactgagcagagtcc

SEQ ID NO: 35686 - DNA, 120 bp, Artificial Sequence
  ENSG00000053108_15 (sequence is synthesized)
ttgtggtcgacatccaagcccagaaagtcctacagtccataggtgtggaccctctgccggctaagctgtcctatgacaagtcacatgaccaagtgtgggtcctgagctggggggacgtgc

SEQ ID NO: 35687 - DNA, 120 bp, Artificial Sequence
  ENSG00000053108_16 (sequence is synthesized)
acaagtcccgaccaagtctccaggtgatcacagaagccagcaccggccagagccagcacctcatccgcacaccctttgcaggagtggatgatttcttcattcccccaacaaacctcatca

SEQ ID NO: 35688 - DNA, 120 bp, Artificial Sequence
  ENSG00000053108_17 (sequence is synthesized)
tcaaccacatcaggtttggcttcatcttcaacaagtctgatcctgcagtccacaaggtggacctggaaacaatgatgcccctcaagaccatcggcctgcaccaccatggctgcgtgcccc

SEQ ID NO: 35689 - DNA, 120 bp, Artificial Sequence
  ENSG00000053108_18 (sequence is synthesized)
aggccatggcacacacccacctgggcggctacttcttcatccagtgccgacaggacagccccgcctctgctgcccgacagctgctcgttgacagtgtcacagactctgtgcttggcccca

SEQ ID NO: 35690 - DNA, 120 bp, Artificial Sequence
  ENSG00000053108_19 (sequence is synthesized)
atggtgatgtaacaggcaccccacacacatcccccgacgggcgcttcatagtcagtgctgcagctgacagcccctggctgcacgtgcaggagatcacagtgcggggcgagatccagaccc

SEQ ID NO: 35691 - DNA, 120 bp, Artificial Sequence
  ENSG00000053108_20 (sequence is synthesized)
tgtatgacctgcaaataaactcgggcatctcagacttggccttccagcgctccttcactgaaagcaatcaatacaacatctacgcggctctgcacacggagccggacctgctgttcctgg

SEQ ID NO: 35692 - DNA, 120 bp, Artificial Sequence
  ENSG00000053108_21 (sequence is synthesized)
agctgtccacggggaaggtgggcatgctgaagaacttaaaggagccacccgcagggccagctcagccctgggggggtacccacagaatcatgagggacagtgggctgtttggacagtacc

SEQ ID NO: 35693 - DNA, 120 bp, Artificial Sequence
  ENSG00000053108_22 (sequence is synthesized)
agggcccagagcagagccctgggccaaggaacaccccctagtcctgacactgcagcctcaagcaggtacgctgtacatttttacagacaaaagcaaaaacctgtactcgctttgtggttc

SEQ ID NO: 35694 - DNA, 120 bp, Artificial Sequence
  ENSG00000053108_23 (sequence is synthesized)
aacactggtctccttgcaagtttcctagtataaggtatgcgctgctaccaagattggggttttttcgttaggaagtatgatttatgccttgagctacgatgagaacatatgctgctgtgt

SEQ ID NO: 35695 - DNA, 120 bp, Artificial Sequence
  ENSG00000053108_24 (sequence is synthesized)
aaagggatcatttctgtgccaagctgcacaccgagtgacctggggacatcatggaaccaagggatcctgctctccaagcagacacctctgtcagttgccttcacatagtcattgtccctt

SEQ ID NO: 35696 - DNA, 120 bp, Artificial Sequence
  ENSG00000053108_25 (sequence is synthesized)
actgccagacccagccagactttgccctgacggagtggcccggaagcagaggccgaccaggagcaggggcctccctcccgaactgaaagcccatccgtcctcgcgtgggaccgcatcttc

SEQ ID NO: 35697 - DNA, 120 bp, Artificial Sequence
  ENSG00000053108_26 (sequence is synthesized)
tccctcgcagctgcttcttgcttttctttccatttgacttgctgtaagcctgagggagagccaacaagacttactgcatcttgggggatggggaaatcactcactttattttggaaattt

SEQ ID NO: 35698 - DNA, 120 bp, Artificial Sequence
  ENSG00000053108_27 (sequence is synthesized)
ttgattaaaaaaaaattttataatctcaaatgctagtaagcagaaagatgctctccgaggtccaactatatccttccctgccttaggccgagtctcgggggtggtcacaaccccacatcc

SEQ ID NO: 35699 - DNA, 120 bp, Artificial Sequence
  ENSG00000053108_28 (sequence is synthesized)
cacagccagaaagaacaatggtcatctgagaatactggccctgtcgactattgccaccctgcttctccaagagcagaccaggccacctcatccgtaaggactcggttctgtgttgggacc

SEQ ID NO: 35700 - DNA, 120 bp, Artificial Sequence
  ENSG00000053108_29 (sequence is synthesized)
ccaaaaaaccagaacaagttctgtgtgcctcctttcagcacagaagggagacatctcattagtcaggtctggtaccccagattcagggcagactgggcttgcctggcaaggtatgggtgg

SEQ ID NO: 35701 - DNA, 120 bp, Artificial Sequence
  ENSG00000053108_30 (sequence is synthesized)
cctccaggctcaatgcagaaaccccaaggacacgagtggggccaggtgagttcctgaagctataccttttcaaaacagattttgttttcctacctgtggcccatccactcctctctggta

SEQ ID NO: 35702 - DNA, 120 bp, Artificial Sequence
  ENSG00000053108_31 (sequence is synthesized)
ccccatccccgcatcagcactgcagagagaacacatttcggcgagggttttcttacccacattccccaatcaatacacacacactgcagaacccagaacagaaggccacaggctggcact

SEQ ID NO: 35703 - DNA, 120 bp, Artificial Sequence
  ENSG00000053108_32 (sequence is synthesized)
actgcattctccttatgtgtctcaggctgtggtgactctcacatgggcatcgaagaagtacaacccacatagccctctggagaccgcctagatcagagactcagcaaaaacaggctcgcc

SEQ ID NO: 35704 - DNA, 120 bp, Artificial Sequence
  ENSG00000053108_33 (sequence is synthesized)
ttccctctcccacatatgagtggaacttacatgtgtcctggtttgaatgatcattttgcaagccacacgggttgggagaggtggtctcaccacagacgtctttgctaatttggccacctt

SEQ ID NO: 35705 - DNA, 120 bp, Artificial Sequence
  ENSG00000053108_34 (sequence is synthesized)
cacctactgacatgaccaggattttcctttgccattaaggaatgaactctttcaaggagaggaaaccctagactctgtgtcactctcaacacacacagctcctttcactcctgcctgact

SEQ ID NO: 35706 - DNA, 120 bp, Artificial Sequence
  ENSG00000053108_35 (sequence is synthesized)
gccaagccacctgcatcccccgccccagatctcatgagatcaatcacttgtatgtctcacgcaacttggtccaccaaacgcctgtcccctgtaactcctaggggtgcgcctagacaggta

SEQ ID NO: 35707 - DNA, 120 bp, Artificial Sequence
  ENSG00000053108_36 (sequence is synthesized)
cgtctgttttttattttaaaagatatgctatgtagatataagttgaggaagctcacctcaaaagcctagaatgcagtttcacagtagctgggatgcatggatgacccatctcaccccttt

SEQ ID NO: 35708 - DNA, 120 bp, Artificial Sequence
  ENSG00000053108_37 (sequence is synthesized)
ttttttcctgcctcaatatcttgatatgttatgtttactcccaatctcccatttttaccactaaaattctccaactttcataaacttttttttggaaaaatttccattgtatcagcccct

SEQ ID NO: 35709 - DNA, 120 bp, Artificial Sequence
  ENSG00000053108_38 (sequence is synthesized)
gacagaaaaaggatctctgagcctaaaggaggaaaagtcccaccaactaccagaccagaacacgagcccctctgggcagcaggattcctaagtcaaagaccagtttgacccaaactggcc

SEQ ID NO: 35710 - DNA, 120 bp, Artificial Sequence
  ENSG00000053108_39 (sequence is synthesized)
ttttaaaataatcaggagtgacagagtcaacttctgcagcacctgcttctcccccactgtcccttccatcttggaatgtgtctaaaaaagcatagctgccctttgctgtcctcagagtgc

SEQ ID NO: 35711 - DNA, 120 bp, Artificial Sequence
  ENSG00000053108_40 (sequence is synthesized)
atttcctggagacggcaggcttaggtctcactgacagcatgccagacacaactgaatcgaagcaggcctgaagcctaggtcagggtttcaggagtccagccccaggaggcaaagtcacca

SEQ ID NO: 35712 - DNA, 120 bp, Artificial Sequence
  ENSG00000053108_41 (sequence is synthesized)
atgcagggaggtaaatgccttttggcaggaaaaccaatagagttggttgggtggggagtcaggggtgggaggagaaggaggaagaggaggaaggccagactggcctgccctttctcccat

SEQ ID NO: 35713 - DNA, 120 bp, Artificial Sequence
  ENSG00000053108_42 (sequence is synthesized)
acttcaccccagcagaggttcatgggacacagttggaaagccactgggaggaaatgcctcactacaggggggcctcctgtagcaagcccagccggtaatcctcctaatgaacccacaagg

SEQ ID NO: 35714 - DNA, 120 bp, Artificial Sequence
  ENSG00000053108_43 (sequence is synthesized)
tcaattcacaactgatatcttagctattaaagaagtactgactttaccaaaagaatcatcaagaaagctatttatataaaccccctcagtcattttgaaataaaattaattttacaaaaa

SEQ ID NO: 35715 - DNA, 120 bp, Artificial Sequence
  ENSG00000053108_44 (sequence is synthesized)
gatcagacgtgcagggaaaatctgattccttttgtaactaacctgactttacaagcctcaccccaatgggagaaaagcacaactaaatgctcaatccattgtaaagattagcacgagctg

SEQ ID NO: 35716 - DNA, 120 bp, Artificial Sequence
  ENSG00000053108_45 (sequence is synthesized)
aacagaatgaggctctggggtccagaagggaggctgaagaatagtgtcaaagcaagcagcagatgttagccaatgaagaaggagaagcagcagcaattatatctcaagtctcctgtgtga

SEQ ID NO: 35717 - DNA, 120 bp, Artificial Sequence
  ENSG00000053108_46 (sequence is synthesized)
gaccaggacctcttcccagcattctaaatgcaagacatctcaacagcccagcatgtcagagtggcatcccgtaggatgtctgctttctctcatcagtcctggagtcgcacctcagagaat

SEQ ID NO: 35718 - DNA, 120 bp, Artificial Sequence
  ENSG00000053108_47 (sequence is synthesized)
gaaagctggtgaatttgttctgcaacaagcctgagctttaagaaaagactaaacggagagtggatggggccagagagggcttgccctgttcctttttaataaagatttttctcgctcttt

SEQ ID NO: 35719 - DNA, 120 bp, Artificial Sequence
  ENSG00000053108_48 (sequence is synthesized)
acctacttgggttcaccccctctggagcagggtctcaggttgggccacaggcccaagtccaggtcagggccgtctctttctcaccagcactgactctcacccacagtgccgccagtcatc

SEQ ID NO: 35720 - DNA, 120 bp, Artificial Sequence
  ENSG00000053254_0 (sequence is synthesized)
agctcggccgggagacggcgcgacccggcggcggggccacccgcgagtccagcgtcgccgcagccccccaatgcggccgcgagaagcagcgggggggcaggcgatcgaaggagccttcac

SEQ ID NO: 35721 - DNA, 120 bp, Artificial Sequence
  ENSG00000053254_1 (sequence is synthesized)
aggagccttcacgtaaatgggtccagtcatgcctcccagtaagaagccagaaagctcaggaattagtgtctccagtggactgagtcagtgttacgggggcagcggtttctccaaggccct

SEQ ID NO: 35722 - DNA, 120 bp, Artificial Sequence
  ENSG00000053254_2 (sequence is synthesized)
tcaggaagacgatgacctcgacttttctctgcctgacatccgattagaagagggggccatggaagatgaagagctgaccaacctgaactggctgcacgagagcaagaacttgctgaagag

SEQ ID NO: 35723 - DNA, 120 bp, Artificial Sequence
  ENSG00000053254_3 (sequence is synthesized)
ctttggggagtcggtcctcaggagtgtcagccccgtccaggacctggacgatgacacccccccatcccctgcccactctgacatgccctacgatgccaggcagaaccccaactgcaaacc

SEQ ID NO: 35724 - DNA, 120 bp, Artificial Sequence
  ENSG00000053254_4 (sequence is synthesized)
cccctactccttcagctgcctcatatttatggccatcgaggactctccaaccaagcgcctgccagtgaaggatatctacaactggatcttggaacattttccgtattttgcaaatgcacc

SEQ ID NO: 35725 - DNA, 120 bp, Artificial Sequence
  ENSG00000053254_5 (sequence is synthesized)
tactgggtggaaaaactcagtgagacacaatttatcattgaataagtgttttaagaaagtggacaaagagaggagtcagagtattgggaaagggtcgttgtggtgcatagacccagagta

SEQ ID NO: 35726 - DNA, 120 bp, Artificial Sequence
  ENSG00000053254_6 (sequence is synthesized)
cttatcacccacacccacacgtgttcaatacacctcccacctgtcctcaggcatatcaaagcacatcaggtccacccatctggccgggcagtaccttcttcaagagaaatggagcccttc

SEQ ID NO: 35727 - DNA, 120 bp, Artificial Sequence
  ENSG00000053254_7 (sequence is synthesized)
tccaagttcctccaggagtgatccaaaatggagcgcgggtcctgagccgagggctgtttcctggcgtgcggccgctgccaatcactcccattggggtgacagcggccatgaggaatggca

SEQ ID NO: 35728 - DNA, 120 bp, Artificial Sequence
  ENSG00000053254_8 (sequence is synthesized)
tcaccagctgccggatgcggactgagagtgagccatcttgtggctccccagtggtcagcggagaccccaaggaggatcacaactacagcagtgccaagtcctccaacgcccggagcacct

SEQ ID NO: 35729 - DNA, 120 bp, Artificial Sequence
  ENSG00000053254_9 (sequence is synthesized)
cgcccaccagcgactccatctcctcctcctcctcctcagccgacgaccactatgagtttgccaccaaggggagccaggagggcagcgagggcagcgaggggagcttccggagccacgaga

SEQ ID NO: 35730 - DNA, 120 bp, Artificial Sequence
  ENSG00000053254_10 (sequence is synthesized)
gccccagcgacacggaagaggacgacaggaagcacagccagaaggagcccaaggattctctgggggacagcgggtacgcatcccagcacaagaagcgccagcacttcgccaaggccagga

SEQ ID NO: 35731 - DNA, 120 bp, Artificial Sequence
  ENSG00000053254_11 (sequence is synthesized)
aggtccccagcgacacactgcccctcaaaaagagacgcaccgaaaagccccccgagagcgatgatgaggagatgaaagaagcggcagggtccctcctgcacttagcagggatccggtcct

SEQ ID NO: 35732 - DNA, 120 bp, Artificial Sequence
  ENSG00000053254_12 (sequence is synthesized)
gtttgaataacatcaccaatcggacggcaaaggggcagaaagagcaaaaggaaaccacaaaaaattaaaaacaagtcactgatttgttttgaacttacgaccatttggtttcagcatgtc

SEQ ID NO: 35733 - DNA, 120 bp, Artificial Sequence
  ENSG00000053254_13 (sequence is synthesized)
gcgtccttagcggggccaccgagcgatgcccgccgggcgcccgcgaaagtttgtcggctcctgctgaagggcagcggcgcccccgcacccccgtgccccgctccggccaggagccttcac

SEQ ID NO: 35734 - DNA, 120 bp, Artificial Sequence
  ENSG00000053254_14 (sequence is synthesized)
ttgtggcaatatcagcaattttttttcttttttcttgtttttggtttggttttctttcttttcttttccttttattttgttttaatttgccccctcttctttgttttggacccttaagaa

SEQ ID NO: 35735 - DNA, 120 bp, Artificial Sequence
  ENSG00000053254_15 (sequence is synthesized)
ttttatttttaaaggagattgaagccatagaactcatattgacactcagctgttttacaaaagcttttcattatctgaagacaaaaccgaaaaagccaaaattaccattgcttcctccag

SEQ ID NO: 35736 - DNA, 120 bp, Artificial Sequence
  ENSG00000053254_16 (sequence is synthesized)
cttgtcagaaacctgtggctgaatccgcagggatgtcaacgtcaatatcacaggaacacacattcggcacctagaaggcacgtgggcaaagtaatcatcgttcaggcccaacccttaggt

SEQ ID NO: 35737 - DNA, 120 bp, Artificial Sequence
  ENSG00000053254_17 (sequence is synthesized)
ttaaaaagtcaggttgtccatcccattgggttcactgagtgaaggcacataaagcaattgaggaggaggaggaacccctcgtccccctaggagcagacccaagcttgtggcaccaggcat

SEQ ID NO: 35738 - DNA, 120 bp, Artificial Sequence
  ENSG00000053254_18 (sequence is synthesized)
ctgatggtgccaggaaagccactggaattgtcacacggcgagcacagagggccggccaccagtcctcgatgcttctgaaccctgaagcccgatgacatcttacgaggtggacgttggact

SEQ ID NO: 35739 - DNA, 120 bp, Artificial Sequence
  ENSG00000053254_19 (sequence is synthesized)
gttcatgcgcatcgggtgtcagtgactcatggagaagaaatggggtaaatttttagtgatgttgctaatcattgaattctgttctctattaaattaagaaaatgttccaaaagccataag

SEQ ID NO: 35740 - DNA, 87 bp, Artificial Sequence
  ENSG00000053254_20 (sequence is synthesized)
agagagagagaaaactgatggggaaaacaagctgtgtcttcttaactgcccaagtgaaaagcaaccaagtccaggaaattacaatag

SEQ ID NO: 35741 - DNA, 120 bp, Artificial Sequence
  ENSG00000053254_21 (sequence is synthesized)
gcccaagtgaaaagcaaccaagtccaggaaattacaatagctgttaaggaaaggaaataatggtacagatctttttctgtctatcaaaactatttgatccaagtgaaaaaaaaaaaaaaa

SEQ ID NO: 35742 - DNA, 120 bp, Artificial Sequence
  ENSG00000053254_22 (sequence is synthesized)
cattagtattgtggtgtatttttaagattaaaggtacactgatggacaaaaaaaaaaagtaaaacatggcaaaaaataaaataactcctatactgccctcaaaatggagtttgcaattaa

SEQ ID NO: 35743 - DNA, 120 bp, Artificial Sequence
  ENSG00000053254_23 (sequence is synthesized)
tatcaggatttatctttgcaaaaatcagtgatttccacattcagccagtatagccagcagaaatttctgatccacaatgcatggattcctttgaagaaaaaaaagaaaaagagaaaaaaa

SEQ ID NO: 35744 - DNA, 120 bp, Artificial Sequence
  ENSG00000053254_24 (sequence is synthesized)
tcacaaaaacaaactttttttattcaaaagtaacaaagttcttgtaaggtaaataatgtatttagcatgaagcatgaattattttcatataaatatagaaaatagagaaaaggctatgcc

SEQ ID NO: 35745 - DNA, 120 bp, Artificial Sequence
  ENSG00000053254_25 (sequence is synthesized)
agaaaatagagaaaaggctatgcctgtaatttttaagcccttaggcttagagtttcttttggttttcttcttttttctttccttttctttgctttctttttttcctttttgtttttgttt

SEQ ID NO: 35746 - DNA, 120 bp, Artificial Sequence
  ENSG00000053254_26 (sequence is synthesized)
tcgggttattttgttttggttttttgaagcaggtgtttaaggtttaaccttcttcagggacaaattctgactgttggggaacttactctgcaatataaaaatatcttcatgctctggtag

SEQ ID NO: 35747 - DNA, 120 bp, Artificial Sequence
  ENSG00000053254_27 (sequence is synthesized)
ggcttggatggttgaactctgtactgccttgtgtgcacttcagccccgaccccctctgattctctgttgaaaagtgtgtcctttctctctgtctgtacatgtttaacatgacgcaataat

SEQ ID NO: 35748 - DNA, 120 bp, Artificial Sequence
  ENSG00000053254_28 (sequence is synthesized)
ttgagggcaaacttagtagtgagtgtgtatgatagaatcaagagaattatgggacgcttacttgagaaaatcattaccatgatttggttctaggaaaaaggcagtgaataattatgcaaa

SEQ ID NO: 35749 - DNA, 120 bp, Artificial Sequence
  ENSG00000053254_29 (sequence is synthesized)
ttagccagaagaaggggaaccgtgctaatgggccttattgggtgaggggacgagatggggttcatgtgaaggaggaagcgatgccgaggtaggaaaggccagccccagacatcctatcgc

SEQ ID NO: 35750 - DNA, 120 bp, Artificial Sequence
  ENSG00000053254_30 (sequence is synthesized)
cacaatgccatgtcgcaataggaagcaggggccggccatcgctaccttcagcacactgaccaacctggaattaagaccacctagattgcgagagctgaatttagaaaccagacaacgtca

SEQ ID NO: 35751 - DNA, 120 bp, Artificial Sequence
  ENSG00000053254_31 (sequence is synthesized)
tgcagcccagaaactcctgttgttacctttgcctaagaaattttctttaatggcgggggcggggggcgggggtacaaagagaaatctctaaaagaatatgatcttccatccaagtggagg

SEQ ID NO: 35752 - DNA, 120 bp, Artificial Sequence
  ENSG00000053254_32 (sequence is synthesized)
gctcaggatatgatgcgtgaggagagggagggaacagagatgaccttaacttttaaaaaagggactgctgtgggccaaagccaagcccatctgccaggacgaggtaatgtcagagctcca

SEQ ID NO: 35753 - DNA, 120 bp, Artificial Sequence
  ENSG00000053254_33 (sequence is synthesized)
tcagcccggacagtgggaactaactggtgcattccccacacttaccttccggtgggttgctgatgagagaacctgaaaaaacctacacctctacagcaggtcgaattcatgacctgaagc

SEQ ID NO: 35754 - DNA, 120 bp, Artificial Sequence
  ENSG00000053254_34 (sequence is synthesized)
tgaatacttccagcatatttattcagggtgtaggtgggaataaagtatcttcgcagtgctctgttccctccgtctccccagacatctgacaccctaaaagccatccacagctatggaacc

SEQ ID NO: 35755 - DNA, 120 bp, Artificial Sequence
  ENSG00000053254_35 (sequence is synthesized)
tgagcgacaccttgatttgtgttgtcacctgaccaagcctaaagacctccagctcagtcccccaccttcatcccaccccacagatgataaaattcagacctctctcctgaaaggcagagg

SEQ ID NO: 35756 - DNA, 120 bp, Artificial Sequence
  ENSG00000053254_36 (sequence is synthesized)
ttcaacattcaggactgtttctggccgaggacttcttccaattaaaacccccaccgtgggctgtctcccctcatttcatttttctaaaggggcagaggcctcttttagaaaataataaaa

SEQ ID NO: 35757 - DNA, 120 bp, Artificial Sequence
  ENSG00000053254_37 (sequence is synthesized)
tgcaatgtgtgtgatttacttttctgatctctttgagaaatagagaaatataaaagtgtgttcttaactccagaaccactctttttgcataaatacctcatcgggcagctttctaagtgt

SEQ ID NO: 35758 - DNA, 120 bp, Artificial Sequence
  ENSG00000053254_38 (sequence is synthesized)
gattttcctgagtctcccttcgttggatctgccggaagacttgtcggggaacctttagtgagggtacttcttcctatttttcttctgtttttggaggcatacacattatgcataaccaaa

SEQ ID NO: 35759 - DNA, 120 bp, Artificial Sequence
  ENSG00000053254_39 (sequence is synthesized)
acaatggctcaattgtgtttaactttgtattttgattgttgagaacaaaaacaaaaagtatcaatgtgtatgtggctgtttgtagtgaatttattggagaatgaggttgtccgtgtcctt

SEQ ID NO: 35760 - DNA, 120 bp, Artificial Sequence
  ENSG00000053254_40 (sequence is synthesized)
aacaagccaaggggcaggaggcaccctctcttatcccctcctccaagagcagtagagaatttaagcacaagcctatttgtgaaagaatattttgcttaagtgtcattcactttagtcttg

SEQ ID NO: 35761 - DNA, 120 bp, Artificial Sequence
  ENSG00000053254_41 (sequence is synthesized)
gaattccttcccaaacgtcaggtgttcttttagcttccaaactagcatatgtatccattagtctgacagatcgcctgaacaccattaagaggtgtggcgtttttgctttcatttctcctg

SEQ ID NO: 35762 - DNA, 120 bp, Artificial Sequence
  ENSG00000053254_42 (sequence is synthesized)
ctgggagaagtggcggttcatgtgtcattccagtatctcacatactcacacggggcaggggggagggggaaacggggaactatagcaatatttaaagatgctttggaaaccaaccgtgaa

SEQ ID NO: 35763 - DNA, 120 bp, Artificial Sequence
  ENSG00000053254_43 (sequence is synthesized)
cacatcaacaccacgacgtctacgattacttgctattggccctcggatacatttaagagaaagagacagtcactcttttttttcttaaatgatatacatataaacagttatttttatcct

SEQ ID NO: 35764 - DNA, 120 bp, Artificial Sequence
  ENSG00000053254_44 (sequence is synthesized)
attataattgtcttttgtctttatctagtactatgtggaaagggtttgcatcatagatttttcccagccttataatataccataagctcctacttccctgcccctccctaatcagtattc

SEQ ID NO: 35765 - DNA, 120 bp, Artificial Sequence
  ENSG00000053254_45 (sequence is synthesized)
tttcaagagttctttggtgaagccatctatctgaaactaaaatgaaccaaacccatatttcactggtggttggagaaaaccatggccaaaacgattgtggcaggtctcaatcttgggagt

SEQ ID NO: 35766 - DNA, 120 bp, Artificial Sequence
  ENSG00000053254_46 (sequence is synthesized)
ttttaagaaggaatgtgccagaggccgattcccaagaacagagttttcttttgttttgcagaggcattcaatgtgtctagtgcttgctggccacagcagttactaccacagagccttctg

SEQ ID NO: 35767 - DNA, 120 bp, Artificial Sequence
  ENSG00000053254_47 (sequence is synthesized)
ggaggggccgttgtgttgaaggaggctcctgcctgagggacagcatcaggcagtgggctctgtagagtgagaaccaggtggaggccttctgtgcccagctcagagttctgcaccacgcca

SEQ ID NO: 35768 - DNA, 120 bp, Artificial Sequence
  ENSG00000053254_48 (sequence is synthesized)
ggactgcccaggccaagggctactgacgcaagttccactcattccactctgtggggggcgccttgggcctctcctggaagggctcttggagaaggaattggagttacgtacaagtgacct

SEQ ID NO: 35769 - DNA, 120 bp, Artificial Sequence
  ENSG00000053254_49 (sequence is synthesized)
aaatgggaagcttttctagatgagattggattaaattccatgtgatttctctttccctttaatccaggttgggactcgtttctttctggtggatcacagctgcccagatgttgcaattga

SEQ ID NO: 35770 - DNA, 120 bp, Artificial Sequence
  ENSG00000053254_50 (sequence is synthesized)
tttttatgtttctgtagagaagtatttttctttcatcttcaggattttttttgccaccaaaagaaaacattggaactctgtgtttcctcttgattgtgacttcccagtgttgacagttaa

SEQ ID NO: 35771 - DNA, 120 bp, Artificial Sequence
  ENSG00000053254_51 (sequence is synthesized)
gtccttagtgtcgtaggtcccagcccaccaatactatatcaaacactgttatgcacataatgcagcactgtgatctaatttaaataatacttttttattatttatactactatatataat

SEQ ID NO: 35772 - DNA, 120 bp, Artificial Sequence
  ENSG00000053254_52 (sequence is synthesized)
atacatcaacacttttgctatataacctaagtgataaccctcttttagttacctgccaaactctggacttggtttatattgcagttaacacagttacaaagctgtaatggtgtctttttt

SEQ ID NO: 35773 - DNA, 120 bp, Artificial Sequence
  ENSG00000053254_53 (sequence is synthesized)
tcctttgtaacggaatgtgtaaatcaaagtatatacattgtgtggtgttcctgtttctggagtttcatgaggatttacacatggcattcagtgttctgtatagatctgcctacctttgtg

SEQ ID NO: 35774 - DNA, 120 bp, Artificial Sequence
  ENSG00000053254_54 (sequence is synthesized)
aattcatctgttaacccctcttcctttgagagagcaccggcgatggtggttaactccttgtgttttctctctctcctactggttattcttgaattaagcacagactcgtcagctcggttg

SEQ ID NO: 35775 - DNA, 120 bp, Artificial Sequence
  ENSG00000053254_55 (sequence is synthesized)
ctttatcatgaataatgtgtgtgaccttgcagttcttccacagttcagcaaacaagtgctagcttcactgaccaaaaattaaggaaggaaaacacagtttttaaaacgatccatctttta

SEQ ID NO: 35776 - DNA, 120 bp, Artificial Sequence
  ENSG00000053254_56 (sequence is synthesized)
acagccgaaaccgatgtgtctatggtgctgcaccttgctgttgtacttctgaaatcagacgtgtgtgaacgatcatttctgacttaaccgtgagatgctcacgagtacccttcctgttgt

SEQ ID NO: 35777 - DNA, 120 bp, Artificial Sequence
  ENSG00000053254_57 (sequence is synthesized)
tttgttagcattgaaatcgagactatttatttggaatatatacaacagtgtttttccactgtatttcatttgcaaaagttgagaactgctttctctaccttttgcaaaataattgatatt

SEQ ID NO: 35778 - DNA, 120 bp, Artificial Sequence
  ENSG00000053254_58 (sequence is synthesized)
ccatattggattctcaaagacttcgatatggtgaacctattaaacctagaaattgtattcatcctttcatgactgtggcctgagttccccagcccctctcctccttttttttagatgaga

SEQ ID NO: 35779 - DNA, 120 bp, Artificial Sequence
  ENSG00000053254_59 (sequence is synthesized)
tttagcacactctcagttatttaaacatgcaacatttcttgagtatgtatgttgaggccatctgagctcatagctgattcagtaaccagtttcatgctgtgtcattcacactcactactt

SEQ ID NO: 35780 - DNA, 120 bp, Artificial Sequence
  ENSG00000053254_60 (sequence is synthesized)
aatactgccatggtgaaaatgtggaggaaaaatgtatccatgtgtgtctgggaagcatatacacttgtacattttttaatactctgattctgtaacatttctgagttttgttttgtttta

SEQ ID NO: 35781 - DNA, 120 bp, Artificial Sequence
  ENSG00000053254_61 (sequence is synthesized)
cagaaaaaaaaaaaaagtgataaagcaatcagaagaccaagaggtttactattgatgcttagggtcgtctgaccttggctggccaatagacctacacggccaaattaatttacgagagta

SEQ ID NO: 35782 - DNA, 120 bp, Artificial Sequence
  ENSG00000053254_62 (sequence is synthesized)
ataatttttcaaaagccaattttttttctgtattttctgtatgaaactgccaatatcatgaatagaaagggagaaccataaaggagaaagaacgtgatgttctgttatgttcatgtaaac

SEQ ID NO: 35783 - DNA, 120 bp, Artificial Sequence
  ENSG00000053254_63 (sequence is synthesized)
ctaaagaaacagtgtggaggcaggcgcgatcagccgaactctagggacttggtgttgcttggaaggcatccatacctgcattttgcattcttcgtatgtaatcatattgccaaagacaaa

SEQ ID NO: 35784 - DNA, 120 bp, Artificial Sequence
  ENSG00000053254_64 (sequence is synthesized)
ctatttcatcatttattgtaaataacacttttccccagacctaccataaagtttctgtgatgtattgtcttccagttgcaataaaaattactgagttgcatcaattgaagaaaaacacca

SEQ ID NO: 35785 - DNA, 120 bp, Artificial Sequence
  ENSG00000053254_65 (sequence is synthesized)
agtcatgtgagcgctgactctaatcgtggctatagtagagggggaagaaaagtcccgaatctccaagaatcaaggtacagggagcctggcacagagagtattgggaaagggtcgttgtgg

SEQ ID NO: 35786 - DNA, 120 bp, Artificial Sequence
  ENSG00000053254_66 (sequence is synthesized)
ccattgagaaacaaggctgaacactgtaaggagggttacagaatttaaagcagatgtgacctctactatccaagaatgtttgtttatctatttatttaataaagagtgtgtggcgcctgt

SEQ ID NO: 35787 - DNA, 120 bp, Artificial Sequence
  ENSG00000053254_67 (sequence is synthesized)
cggccgctgccaatcactcccattggggtgacagcggccatgagacaaagtgtgtataccatgattcatctttgtgactctagcagccaaacatacattgtgccagaactttcagctaca

SEQ ID NO: 35788 - DNA, 120 bp, Artificial Sequence
  ENSG00000053254_68 (sequence is synthesized)
agcattttcctccaccttcctcttttgggagaaagacgcaacagttctgtggagagcatcataattcagaggacatgcaggaacctcagccaacaacacaaacttcaggaccaagcatga

SEQ ID NO: 35789 - DNA, 120 bp, Artificial Sequence
  ENSG00000053254_69 (sequence is synthesized)
gcaggaagaagaggagacaagaagtcaagactcctaatctcagctccgcatgaatggaaaaacctctttatgcttctgttattttcttccataaaagtagattggggaaagagtatagtt

SEQ ID NO: 35790 - DNA, 120 bp, Artificial Sequence
  ENSG00000053254_70 (sequence is synthesized)
gttcttcaaaaagtaaatataaaactaccatataacctagcaattccactcctaggtatatacacaaaagaattgaaaactgatacttaaacaaacatatatacatgcatgttcatagca

SEQ ID NO: 35791 - DNA, 120 bp, Artificial Sequence
  ENSG00000053254_71 (sequence is synthesized)
gtagcttgcaggtttctgatatcgcatcagtggacaggcggcatgcactatattaacagcctctagaagaccagcattctcgtgattatggaggcccctctgtcttttctgtgacgggag

SEQ ID NO: 35792 - DNA, 67 bp, Artificial Sequence
  ENSG00000053254_72 (sequence is synthesized)
aaagacaccttatcacccacacccacacgtgttcaatacacctcccacctgtcctcaggcatatcaa

SEQ ID NO: 35793 - DNA, 120 bp, Artificial Sequence
  ENSG00000053254_73 (sequence is synthesized)
cgtgagccaccgagcccggcctggtgctgaaccaaattacatttccaccaacaagcacatcaggtccacccatctggccgggcagtaccttcttcaagagaaatggagcccttctccaag

SEQ ID NO: 35794 - DNA, 120 bp, Artificial Sequence
  ENSG00000053254_74 (sequence is synthesized)
gaaatgaaattggagctgttgatgcgtgtgtctctatgcacatcaggtccacccatctggccgggcagtaccttcttcaagagaaatggagcccttctccaagttcctccaggagtgatc

SEQ ID NO: 35795 - DNA, 120 bp, Artificial Sequence
  ENSG00000053254_75 (sequence is synthesized)
attcttttgtgagtaagctggaaagaaacaaggggattacttttctgtttttataaaatgatcccgatgtcatatggttttaaaacataactaaatttctggagcagagatggacttttg

SEQ ID NO: 35796 - DNA, 120 bp, Artificial Sequence
  ENSG00000053254_76 (sequence is synthesized)
ggggtgtctcggccctcttttttttttccccaaactttagaaatctgacacagttaaattcatttttagaagagaatgcacgtgttcttcaatgttgacgctgaaaaacaatgagattct

SEQ ID NO: 35797 - DNA, 120 bp, Artificial Sequence
  ENSG00000053254_77 (sequence is synthesized)
gcatatcaaaggagggagcacaaagtgatcttctgaaatagcattaatgaagttcttctgcatctcagttgagaagcattccatcacaggccctagacaatcagtcttcagcaagagaca

SEQ ID NO: 35798 - DNA, 120 bp, Artificial Sequence
  ENSG00000053254_78 (sequence is synthesized)
gggaggaacagctgggctctctgagaagactgctgtatgtctgcctttgctaggcgattagcgtgatggtacccatagcaactggagcgtctccatagtaacgcgtagccgagacaggtg

SEQ ID NO: 35799 - DNA, 120 bp, Artificial Sequence
  ENSG00000053254_79 (sequence is synthesized)
gcagtgctgctctgtttggctctcttcttatgtgtgaaggttgccctcttgctagttaaaaccagaaagcttaagagtccctctctaactgcagagaacgtggctgatggcaagtgtggg

SEQ ID NO: 35800 - DNA, 120 bp, Artificial Sequence
  ENSG00000053254_80 (sequence is synthesized)
gagagcctcaggggtgggtattctctcatctaaaagataaatacgtaactggcctaacctgcaaggatgatgctagaggcctgggccttgtctggagagagccacaaatccgaggaagaa

SEQ ID NO: 35801 - DNA, 120 bp, Artificial Sequence
  ENSG00000053254_81 (sequence is synthesized)
gttgactttcaacgtccagcccttttgatgtcttacatagctggaggccagtgcacttcagtacatcagttcctccaggagtgatccaaaatggagcgcgggtcctgagccgagggctgt

SEQ ID NO: 35802 - DNA, 120 bp, Artificial Sequence
  ENSG00000053254_82 (sequence is synthesized)
gtggatgttgatcatgttgatgatgacgatattgatgaccaacatgtattttccaaatactcgtgccttccgtaactcagctaagtctccagagaccctggttcctccaggagtgatcca

SEQ ID NO: 35803 - DNA, 120 bp, Artificial Sequence
  ENSG00000053254_83 (sequence is synthesized)
gctgggattacaggcgtgaggcaccaccctggcaattacatggtaaattgtttgggaaaattcactgagctgtacacatacaagggctttgctggacatacgttattccaatagaaagtt

SEQ ID NO: 35804 - DNA, 120 bp, Artificial Sequence
  ENSG00000053254_84 (sequence is synthesized)
tggacatacgttattccaatagaaagtttcaaaactgattgggcagctgcaatttcattacacctatttgatttcagatttttattatgtacatgtagtgagcctcagaattcttacatg

SEQ ID NO: 35805 - DNA, 120 bp, Artificial Sequence
  ENSG00000053254_85 (sequence is synthesized)
atggggtctggccttggaaccacagcccgtggtctgcacctgcccacccagggactagtgctcttcccactggaggccgacttcaggaccacccgacacagcctcgccagcttcccttcc

SEQ ID NO: 35806 - DNA, 120 bp, Artificial Sequence
  ENSG00000053254_86 (sequence is synthesized)
agaccaatcctgacattgatgctgccagtgccatgatgcttttgaatactccccctgagatacaagcaggttttcctccaggagtgatccaaaatggagcgcgggtcctgagccgagggc

SEQ ID NO: 35807 - DNA, 120 bp, Artificial Sequence
  ENSG00000053254_87 (sequence is synthesized)
agctcggccgggagacggcgcgacccggcggcggggccacccgcgagtccagcgtcgccgcagccccccaatgcggccgcgagaagcagcgggggggcaggcgatcgaagcagcctctag

SEQ ID NO: 35808 - DNA, 120 bp, Artificial Sequence
  ENSG00000053254_88 (sequence is synthesized)
ggcattccccttctgcacgatggcaaaatctgggcaaagttgaaagttgcaagattccagtcaaacaattgtccttgcttgggtaaatatcctcaaatgaaaaaaaatcagcctctagaa

SEQ ID NO: 35809 - DNA, 80 bp, Artificial Sequence
  ENSG00000053328_0 (sequence is synthesized)
atggcccgggagaggccgcccgggaggggctgcggcgtcctgcgccggtgtctactcggggctgtgctgttgttcggcct

SEQ ID NO: 35810 - DNA, 80 bp, Artificial Sequence
  ENSG00000053328_1 (sequence is synthesized)
ctgggccgcacctgccgcccgcgccgggccagccgcgcggcgccagcaggaggcaggtgacctacgtgcgcagcggtcgc

SEQ ID NO: 35811 - DNA, 120 bp, Artificial Sequence
  ENSG00000053328_2 (sequence is synthesized)
gccggggggcggcgggagcgggacgccggagcctggctgctgtgccccgcgcgggcgcccccgccggaagggtccccggtggcatatagatctccagccttgggcaggctctgctcagtc

SEQ ID NO: 35812 - DNA, 120 bp, Artificial Sequence
  ENSG00000053328_3 (sequence is synthesized)
gctcagtccctggatgaagaagcctggaggttcctgagatatatcagcaccacccagattgcatgcaatcacatgaatacagacagcctggctactgactctagtcctacacacaagccc

SEQ ID NO: 35813 - DNA, 120 bp, Artificial Sequence
  ENSG00000053328_4 (sequence is synthesized)
caaatccgcaacaagcagtgccgcctctactccttagggctaggaagtgatgatacccattttgaggttagcatggccaacaacggatgtgaagtgcatcgttttgatcctagtgtcaag

SEQ ID NO: 35814 - DNA, 120 bp, Artificial Sequence
  ENSG00000053328_5 (sequence is synthesized)
tcagctcacattctggagagtcagcacctttggtatcaccgcttgtccattgactggcgggatccccatccagctgttgctgcccaaaaaccacatagcaacaccagaaaactgggaagc

SEQ ID NO: 35815 - DNA, 120 bp, Artificial Sequence
  ENSG00000053328_6 (sequence is synthesized)
attttgaatgaatttggacatcacaagattgacgttctcaaggcagatctggaaagtgcagaatggaaagttttggaaaatcttattctggaagatgttcttgagcagattggacagctc

SEQ ID NO: 35816 - DNA, 120 bp, Artificial Sequence
  ENSG00000053328_7 (sequence is synthesized)
atctttgagatccatctccactggcctgggtttgaggtcagtggcagtgacagcagcgttgtgcggttctggtacagccttctcaaagagttagaacaaaaggatttcaggctttttcac

SEQ ID NO: 35817 - DNA, 120 bp, Artificial Sequence
  ENSG00000053328_8 (sequence is synthesized)
agttacaaagacttatctaaacctcagctattcttgaagaaagacattttcaatgcaagtagctgttatactctgagttgggtgaatacaagatggaaataggatgcaggatgtcatcaa

SEQ ID NO: 35818 - DNA, 120 bp, Artificial Sequence
  ENSG00000053328_9 (sequence is synthesized)
cgcgcgggcgcccccgccggaaggtcagttgcaaagcggtcggtcttgggcctgggaccagaagccccctcccgaccgcgctacggagcccggcgctcaggtcccgcaggccgcctcgat

SEQ ID NO: 35819 - DNA, 120 bp, Artificial Sequence
  ENSG00000053328_10 (sequence is synthesized)
gggacctccggaggcttccgcttcttctcttccccctgtgctctcttaggcggctccacgggtcgcatctttcagtgcccagatagactgaagtgcggccaagcggagttcattcactat

SEQ ID NO: 35820 - DNA, 120 bp, Artificial Sequence
  ENSG00000053328_11 (sequence is synthesized)
tcagccagtacttgggggtcgccgtggccgggcgcccttctaggctccgcgcatcccgtgaagaaggacggagccctgttctcacggaggatacactttagtaggggagtgtttgcgtga

SEQ ID NO: 35821 - DNA, 120 bp, Artificial Sequence
  ENSG00000053328_12 (sequence is synthesized)
ctgctcccagccttctgcttaaggcctggacagagttgggtgggtatcgccgtgaatggcctgtccacgccactgccttcatctcgctgaagatccaccagctggccgaatttccctgga

SEQ ID NO: 35822 - DNA, 120 bp, Artificial Sequence
  ENSG00000053328_13 (sequence is synthesized)
gtctcattccaggcgttggctgggggctgggaggctggcgccagttgagaagccgagcacccagccccacttaatgagaagttaattggatcctcgaggacccaaggtccccggtggcat

SEQ ID NO: 35823 - DNA, 120 bp, Artificial Sequence
  ENSG00000053328_14 (sequence is synthesized)
atagatctccagccttgggcaggctctgctcagtccctggatgaagaagcctggaggttcctgagatatatcagcaccacccaggttgtgtttcaggctcaaagaagttagagaagaatg

SEQ ID NO: 35824 - DNA, 120 bp, Artificial Sequence
  ENSG00000053371_0 (sequence is synthesized)
ccaacgcgcaggcgccgctgctatgctgagtgccgcgtctcgcgtagtctcccgcgccgccgtccactgcgcgcttcgctctccgccgcccgaggcccgcgcgctcgccatgtcccggcc

SEQ ID NO: 35825 - DNA, 120 bp, Artificial Sequence
  ENSG00000053371_1 (sequence is synthesized)
accgccaccgcgggtcgcctcggtgctgggcaccatggagatggggcgccgcatggacgcgcccgccagcgccgcggccgtgcgcgcctttctggagcgcggccacaccgaactggacac

SEQ ID NO: 35826 - DNA, 120 bp, Artificial Sequence
  ENSG00000053371_2 (sequence is synthesized)
ggccttcatgtacagcgacggccagtccgagaccatcctgggcggcctggggctcgggctgggcggtggcgactgcagagtgaaaattgccaccaaggccaacccttgggatggaaaatc

SEQ ID NO: 35827 - DNA, 120 bp, Artificial Sequence
  ENSG00000053371_3 (sequence is synthesized)
actaaagcctgacagtgtccggtcccagctggagacgtcattgaagaggctgcagtgtccccaagtggacctcttctacctacacgcacctgaccacggcaccccggtggaagagacgct

SEQ ID NO: 35828 - DNA, 120 bp, Artificial Sequence
  ENSG00000053371_4 (sequence is synthesized)
gcatgcctgccagcggctgcaccaggagggcaagttcgtggagcttggcctctccaactatgctagctgggaagtggccgagatctgtaccctctgcaagagcaatggctggatcctgcc

SEQ ID NO: 35829 - DNA, 120 bp, Artificial Sequence
  ENSG00000053371_5 (sequence is synthesized)
ggaaacggagctcttcccctgcctcaggcactttggactgaggttctatgcctacaaccctctggctgggggcctgctgactggcaagtacaagtatgaggacaaggacgggaaacagcc

SEQ ID NO: 35830 - DNA, 120 bp, Artificial Sequence
  ENSG00000053371_6 (sequence is synthesized)
tgtgggccgcttctttgggaatagctgggctgagacctacaggaatcgcttctggaaggagcaccacttcgaggccattgcgttggtggagaaggccctgcaggccgcatatggcgccag

SEQ ID NO: 35831 - DNA, 120 bp, Artificial Sequence
  ENSG00000053371_7 (sequence is synthesized)
cgcccccagtgtgacctcggctgccctccggtggatgtaccaccactcacagctgcagggtgcccacggggacgcggtcatcctgggcatgtccagcctggagcagctggagcagaactt

SEQ ID NO: 35832 - DNA, 120 bp, Artificial Sequence
  ENSG00000053371_8 (sequence is synthesized)
ggcagcaacagaggaagggcccctggagccggctgtcgtggatgcctttaatcaagcctggcatttggttgctcacgaatgtcccaactacttccgctaggcccatcatggctcaggctg

SEQ ID NO: 35833 - DNA, 120 bp, Artificial Sequence
  ENSG00000053371_9 (sequence is synthesized)
cccaaggcttttctgtcacctcttttgttctctcacactgaccagtcttggccttaagctgacttagaagggtttttctgaattgtctagatccatgcattatttttctagcttcctgcc

SEQ ID NO: 35834 - DNA, 120 bp, Artificial Sequence
  ENSG00000053371_10 (sequence is synthesized)
ttgctccctattcactttacactgtgaaaggtggggggtgagtcccacttgagcgcttcctgttgaataaagcaggcacttgacctggctgtagcctaggtcttgagtgaaccccaaaaa

SEQ ID NO: 35835 - DNA, 120 bp, Artificial Sequence
  ENSG00000053371_11 (sequence is synthesized)
tttgcccccctgactgccccctgtgccgtctgcatagcagccactcccctgctgaaagcctgcagatggctcccatgtaccctcaggatgccattcaagctcctcagcctggccactggg

SEQ ID NO: 35836 - DNA, 120 bp, Artificial Sequence
  ENSG00000053371_12 (sequence is synthesized)
catctgcttccttcctgcctatctgtgcaccttggacccttccttccccacctcctttcatacttcagcctggaacacatttcccctgccctcctccctgggagaagcactcaggcctta

SEQ ID NO: 35837 - DNA, 120 bp, Artificial Sequence
  ENSG00000053371_13 (sequence is synthesized)
catagaggtctcctcctctggaagcctttctagacagccccataggagtctccagtctccaaatctcatcttcatacattcagcgagtactttccagctccttgtttgattgtagaacct

SEQ ID NO: 35838 - DNA, 120 bp, Artificial Sequence
  ENSG00000053372_0 (sequence is synthesized)
accgtcttccgccgcacgtggattcagcgcgatgcccaaatccaagcgcgacaagaaagtctccttaaccaaaactgccaagaaaggcttggaattgaaacaaaacctgatagaagagct

SEQ ID NO: 35839 - DNA, 120 bp, Artificial Sequence
  ENSG00000053372_1 (sequence is synthesized)
tcggaaatgtgtggacacctacaagtaccttttcatcttctctgtggccaacatgaggaacagcaagctgaaggacatccggaacgcctggaagcacagccggatgttctttggcaaaaa

SEQ ID NO: 35840 - DNA, 120 bp, Artificial Sequence
  ENSG00000053372_2 (sequence is synthesized)
caaggtgatgatggtggccttgggtcggagcccatctgatgaatacaaagacaacctgcaccaggtcagcaaaaggttgaggggtgaggtgggtctcctgttcaccaaccgcacaaagga

SEQ ID NO: 35841 - DNA, 120 bp, Artificial Sequence
  ENSG00000053372_3 (sequence is synthesized)
ggaggtgaatgagtggttcacgaaatacacagaaatggactacgcccgagctggtaacaaagcagctttcactgtgagcctggatccagggcccctggagcagttcccccactccatgga

SEQ ID NO: 35842 - DNA, 120 bp, Artificial Sequence
  ENSG00000053372_4 (sequence is synthesized)
gccacagctcaggcagctgggcctgcccaccgccctcaagagaggtgtggtgactctgctgtctgactacgaggtgtgcaaggagggcgatgtgctgaccccagagcaggctcgcgtcct

SEQ ID NO: 35843 - DNA, 120 bp, Artificial Sequence
  ENSG00000053372_5 (sequence is synthesized)
gaagctttttgggtatgagatggctgaattcaaggtgaccatcaaatacatgtgggattcacagtcgggaaggttccagcagatgggagacgacttgccagagagcgcatctgagtccac

SEQ ID NO: 35844 - DNA, 120 bp, Artificial Sequence
  ENSG00000053372_6 (sequence is synthesized)
agaagagtcagactcagaagatgatgactgaaagggactcgggactgaaggtctcctggaagcttctgggtctcactggaccatcaggactgctgccgcccctctggagagagcagcttt

SEQ ID NO: 35845 - DNA, 120 bp, Artificial Sequence
  ENSG00000053372_7 (sequence is synthesized)
actgctgccgcccctctggagagagcagctttttatttgtctgtagacagggaacatgatgggcactgacctcctgtaaagaataaaactgtgggccgggcgcggtggctcacgcctgga

SEQ ID NO: 35846 - DNA, 90 bp, Artificial Sequence
  ENSG00000053372_8 (sequence is synthesized)
gagttgagattggaaaactctgtcccaaaaaaaaaaaaagaatacaaccttgcaggatgtctctcctggagacagcaagagggagaggag

SEQ ID NO: 35847 - DNA, 120 bp, Artificial Sequence
  ENSG00000053372_9 (sequence is synthesized)
tgcaggatgtctctcctggagacagcaagagggagaggagggagagggctctttcttagaaaagaggcctttggtgagcccagaagtttgaaaccagcctgggcaattcagcaagatccc

SEQ ID NO: 35848 - DNA, 120 bp, Artificial Sequence
  ENSG00000053372_10 (sequence is synthesized)
gtctctacaaaaaataaaaaaaaattagtcgtggtgccacttgcctgtggtccccactgcttgggaggctgaggtgggagaattgcttaagcctgagagttggaggctcagtgagccatg

SEQ ID NO: 35849 - DNA, 120 bp, Artificial Sequence
  ENSG00000053372_11 (sequence is synthesized)
tgccactgcactccagcctgggtggccattgaattctgcgtggattgcctcagtttgccttgtcagccaacttccactggctgccttggcactgccatgacagcacagctccacaccaga

SEQ ID NO: 35850 - DNA, 120 bp, Artificial Sequence
  ENSG00000053372_12 (sequence is synthesized)
cagagctggggtttctcttcagtcctgggtaccccttggcagagggatttgctgaggaaaattaggtatccttcctagccctccacacacttccaaaccagggctgcggatctgatggat

SEQ ID NO: 35851 - DNA, 120 bp, Artificial Sequence
  ENSG00000053372_13 (sequence is synthesized)
gccaggaagacagccttgggctgagagtgacatcactgcaagagttgagagccagcgtctaaagtgtccacggcatcctgggaggttttatccttggtgactctaatggtagatttttgt

SEQ ID NO: 35852 - DNA, 120 bp, Artificial Sequence
  ENSG00000053372_14 (sequence is synthesized)
gttttatccttggtgactctaatggtagatttttgtccaccttgttctatttgcttttgtttgtttttgatttttctgttttaaaattttaaggagagatggggtttcaccatgttgccc

SEQ ID NO: 35853 - DNA, 66 bp, Artificial Sequence
  ENSG00000053372_15 (sequence is synthesized)
ccacattgttctatttgtatttcatgaaagcagttctgaatgagagtaaatcagcttcagggtgta

SEQ ID NO: 35854 - DNA, 120 bp, Artificial Sequence
  ENSG00000053372_16 (sequence is synthesized)
gatgcccaaatccaagcgcgacaagaaaggtgggcgaagggggagtcgggaccctggggggagctccgtgggctggctacccagcctgcggtgagggcttcggggcggcgggggcgcaga

SEQ ID NO: 35855 - DNA, 120 bp, Artificial Sequence
  ENSG00000053372_17 (sequence is synthesized)
ttggaacgccaggacatcctcgaggtgttccgctgcctcgctgcgagctggaatgggggcttcggggctgtaaaaccgccagaggtggctgacgcccggtcgggtctggggagcggagac

SEQ ID NO: 35856 - DNA, 120 bp, Artificial Sequence
  ENSG00000053372_18 (sequence is synthesized)
cttttcccaacttcggccctttctcatcttcctgcgctcccgccaccctggctgcctttcccttctttcagcacagtctccttaaccaaaactgccaagaaaggcttggaattgaaacaa

SEQ ID NO: 35857 - DNA, 120 bp, Artificial Sequence
  ENSG00000053372_19 (sequence is synthesized)
ccagcagccaaggtctgtgatgggggaaggcccagggccacgggacacttgggggagcctgactcatgggctggtggcgtggccaggagcatctcctcctaccacttctcttttccctta

SEQ ID NO: 35858 - DNA, 120 bp, Artificial Sequence
  ENSG00000053438_0 (sequence is synthesized)
agtgcgcccaacagcggactccgagaccagcggatctcggcaaaccctctttctcgaccacccacctaccattcttggaaccatggcggcagtggcggcggcctcggctgaactgctcat

SEQ ID NO: 35859 - DNA, 120 bp, Artificial Sequence
  ENSG00000053438_1 (sequence is synthesized)
catcggctggtacatcttccgcgtgctgctgcaggtgttcctggaatgctgcatttactgggtaggattcgcttttcgaaatcctccagggacacagcccattgcgagaagtgaggtgtt

SEQ ID NO: 35860 - DNA, 120 bp, Artificial Sequence
  ENSG00000053438_2 (sequence is synthesized)
caggtactccctgcagaagctggcatacacggtgtcgcggaccgggcggcaggtgttgggggagcgcaggcagcgagcccccaactgaggccccagctcccagccctgggcggccgtatc

SEQ ID NO: 35861 - DNA, 120 bp, Artificial Sequence
  ENSG00000053438_3 (sequence is synthesized)
atcaggtgctcctgtgcatctcggccagcacgggagccagtgccgcgcaggaatgtggggtcccctgtgttccctcgccagaggagcacttggcaaggtcagtgaggggccagtagaccc

SEQ ID NO: 35862 - DNA, 120 bp, Artificial Sequence
  ENSG00000053438_4 (sequence is synthesized)
ccggagaagcagtaccgacaatgacgaagataccagatcccttcccaacccctttgcaccggtcccactaaggggcagggtcgagagaggaggggggatagggggagcagacccctgaga

SEQ ID NO: 35863 - DNA, 120 bp, Artificial Sequence
  ENSG00000053438_5 (sequence is synthesized)
cgaagccagggccatgccagcaggccccaccatggaaatcaaaacaccgcaccagccagcagaatggacattctgacatcgccagccgacgccctgaatcttggtgcagcaccaaccgcg

SEQ ID NO: 35864 - DNA, 120 bp, Artificial Sequence
  ENSG00000053438_6 (sequence is synthesized)
tgcctgtgtggcgggactggagggcacagttgaggaaggagggtggttaagaaatacagtggggccctctcgctgtcccttgcccagggcacttgcattccagcctcgctgcatttgctc

SEQ ID NO: 35865 - DNA, 120 bp, Artificial Sequence
  ENSG00000053438_7 (sequence is synthesized)
tctcgattcccctttcctcctcactgcctcccaagcccaccctactccaaaataatgtgtcacttgatttggaactattcaagcagtaaaagtaaatgaatcccacctttactaaaacac

SEQ ID NO: 35866 - DNA, 120 bp, Artificial Sequence
  ENSG00000053438_8 (sequence is synthesized)
tttctctgaaccccccttgcccctcactgatcttgcttttccctggtctcatgcagttgtggtcaatattgtggtaatcgctaattgtactgattgtttaagtgtgcattagttgtgtct

SEQ ID NO: 35867 - DNA, 120 bp, Artificial Sequence
  ENSG00000053438_9 (sequence is synthesized)
ccccagctagattgtaagctcctggaggacagggaccacctctacaaaaaataaaaaaagtacctcccctgtctcgcacagtgtcccaggaccctgcggtgcagtagaggcgcaccaaaa

SEQ ID NO: 35868 - DNA, 120 bp, Artificial Sequence
  ENSG00000053501_0 (sequence is synthesized)
ctctcttaacatggagccggcggaaggggtggtgtagggccgggcgataatggcggcgtcgaggctggagctaaacctggtgcggctgctatcccgctgcgaggcgatggcagcggagaa

SEQ ID NO: 35869 - DNA, 120 bp, Artificial Sequence
  ENSG00000053501_1 (sequence is synthesized)
acgggacccggacgagtggcgcctggagaagtacgtgggagccctagaggacatgttgcaggccctgaaggtccacgcgagcaaaccggcctctgaggtgatcaatgaatattcctggaa

SEQ ID NO: 35870 - DNA, 120 bp, Artificial Sequence
  ENSG00000053501_2 (sequence is synthesized)
ggtggattttctgaaggggatgctgcaagccgagaagctgacctcctcctcagagaaagcactggccaaccagttcctggcccctggccgtgtgccaaccacagccagagagcgagtgcc

SEQ ID NO: 35871 - DNA, 120 bp, Artificial Sequence
  ENSG00000053501_3 (sequence is synthesized)
caaagacggtgcatctgcagtcacgggcgcggtacaccagcgagatgcggagtgagctactaggcacggactctgcagagcctgagatggacgtaaggaagagaactggagtggcagggt

SEQ ID NO: 35872 - DNA, 120 bp, Artificial Sequence
  ENSG00000053501_4 (sequence is synthesized)
cccagccagtgagtgagaagcagttggcagctgagctagacctcgtcctgcagcgacatcagaacctccaggaaaagctggcggaagagatgctaggactggcccggagcctcaagacca

SEQ ID NO: 35873 - DNA, 120 bp, Artificial Sequence
  ENSG00000053501_5 (sequence is synthesized)
ataccctggccgcccagagtgtcatcaagaaggacaaccagaccctgtcacactcactgaaaatggcggaccagaacctggagaaactgaagacggagtcagagcgtctggagcagcaca

SEQ ID NO: 35874 - DNA, 120 bp, Artificial Sequence
  ENSG00000053501_6 (sequence is synthesized)
cgcagaagtcagtcaactggctgctctgggccatgctcattatcgtctgcttcatcttcattagcatgatcctcttcattcgaatcatgcctaaactcaaataaagacccccgcccacct

SEQ ID NO: 35875 - DNA, 120 bp, Artificial Sequence
  ENSG00000053501_7 (sequence is synthesized)
agctgactaggacaagacatgtatccttgctgccccggggcctccatgccgagactccatgccctgactccaacaggagcatcaccaaactacacctggaggaagagccaggacagagga

SEQ ID NO: 35876 - DNA, 90 bp, Artificial Sequence
  ENSG00000053501_8 (sequence is synthesized)
tgagctgagattgcgccagtgcactccagcctagtgcaaataaataaattttttaaagctaggcactcccagcctatgggaccaaggcta

SEQ ID NO: 35877 - DNA, 120 bp, Artificial Sequence
  ENSG00000053501_9 (sequence is synthesized)
ttttaaagctaggcactcccagcctatgggaccaaggctaggctggagggagggacctggggtctgagggaaccgagacaggagtaaggagaccctcctagaagagggggtattcaagca

SEQ ID NO: 35878 - DNA, 120 bp, Artificial Sequence
  ENSG00000053501_10 (sequence is synthesized)
tggtcagaagccaacggggcagcagacaagatgaggaaacagcattccaagcagtagacccagcacaggcaatgctcaggatgccggaaacgggaaaccaacactcgccttttttgcttg

SEQ ID NO: 35879 - DNA, 120 bp, Artificial Sequence
  ENSG00000053501_11 (sequence is synthesized)
gcctgttttgctttcagagcctgagatggacgtaaggaagagaacgtgagtgtctgcggccctggggcagtagtggcaattgggcggtgcggcagggacggggtagcagtggccaaaccc

SEQ ID NO: 35880 - DNA, 120 bp, Artificial Sequence
  ENSG00000053501_12 (sequence is synthesized)
gggtagcagtggccaaaccctggaccaccgaggcactaccacaaggatctaaaccaaccagaagccacttctgtggatgctcttcccagaagtcaaaggccaggcgcagtggctcacgcc

SEQ ID NO: 35881 - DNA, 120 bp, Artificial Sequence
  ENSG00000053501_13 (sequence is synthesized)
caggccctgaaggtccacgcgaggtgagtgcaggcagcctcagggctttcacatcagcacgtggctgtgctactggacatcccagtaccgctatcccagctgggacccttccctgagctg

SEQ ID NO: 35882 - DNA, 120 bp, Artificial Sequence
  ENSG00000053524_0 (sequence is synthesized)
cggggcgcggttccggcgagattggcgacttgcttccttttgcagaacggccgctcctctctcggtccagctgcgacgctgggaaagcgccagacttggtctgtcacgggagcccccgcg

SEQ ID NO: 35883 - DNA, 120 bp, Artificial Sequence
  ENSG00000053524_1 (sequence is synthesized)
gggcgtggcgagggagagctggcctaggctgcgagggactctcgtttcttgcctggagagccaggaagagggcgagggcagagcatccttgggcggagatgcctttaaaaaatcatccac

SEQ ID NO: 35884 - DNA, 120 bp, Artificial Sequence
  ENSG00000053524_2 (sequence is synthesized)
cgcagcggtagaaacagttttgtttggctttatttatacggaatggtttttcagtgaaatgctgtcttgcttaaaagaagagatgcctccccaggagctcacccggcgactggccacagt

SEQ ID NO: 35885 - DNA, 120 bp, Artificial Sequence
  ENSG00000053524_3 (sequence is synthesized)
gatcactcatgtcgatgaaattatgcagcaggaagtcagacccctgatggcggtggagataatagaacaacttcacagacaatttgccattctttcaggaggccgaggggaggatggcgc

SEQ ID NO: 35886 - DNA, 120 bp, Artificial Sequence
  ENSG00000053524_4 (sequence is synthesized)
ccccatcatcacgttcccagagttttcggggttcaaacacatcccagatgaagacttcctgaatgtcatgacctacctgactagcatccccagtgtggaggctgccagcattggattcat

SEQ ID NO: 35887 - DNA, 120 bp, Artificial Sequence
  ENSG00000053524_5 (sequence is synthesized)
tgttgttatcgacagacgaagagacaagtggagctccgtaaaggcatccttgacacgaatagctgtggcatttccaggaaacttacagctcatattcatccttcgtccatctcgctttat

SEQ ID NO: 35888 - DNA, 120 bp, Artificial Sequence
  ENSG00000053524_6 (sequence is synthesized)
ccagaggacattcactgacattggcattaaatactatcgaaatgagtttaaaacgaaagtgccgatcatcatggtaaactctgtctctgaccttcacggctacatcgacaaaagccaact

SEQ ID NO: 35889 - DNA, 120 bp, Artificial Sequence
  ENSG00000053524_7 (sequence is synthesized)
gacccgggaattaggggggactttggaatatcgccacggtcagtgggtaaatcaccgcactgccatcgaaaactttgccttgaccttgaagaccactgcccagatgctgcagacgtttgg

SEQ ID NO: 35890 - DNA, 120 bp, Artificial Sequence
  ENSG00000053524_8 (sequence is synthesized)
gtcctgcctggccacagcagagctgcccagaagcatgctatccacggaagaccttctcatgtcccacacaaggcagcgggacaagctgcaggatgagctgaaattacttggaaagcaggg

SEQ ID NO: 35891 - DNA, 120 bp, Artificial Sequence
  ENSG00000053524_9 (sequence is synthesized)
gaccacattgctgtcatgcatccaagaaccagcaaccaaatgtcccaacagcaaactcaatctcaaccaacttgagaatgtaactaccatggaaaggttattagttcaactggatgaaac

SEQ ID NO: 35892 - DNA, 120 bp, Artificial Sequence
  ENSG00000053524_10 (sequence is synthesized)
agaaaaagcctttagtcacttttggtctgagcatcatctgaagcttaaccagtgcctacaactacagcattttgagcacgatttttgtaaggctaagcttgccctggataatttgctgga

SEQ ID NO: 35893 - DNA, 120 bp, Artificial Sequence
  ENSG00000053524_11 (sequence is synthesized)
agagcaagcagagtttacaggcattggagacagcgtgatgcacgtggagcagattcttaaggaacacaaaaaactggaggaaaaaagccaggagcccctggaaaaggcccagctgctggc

SEQ ID NO: 35894 - DNA, 120 bp, Artificial Sequence
  ENSG00000053524_12 (sequence is synthesized)
actggttggggaccagctcatccaaagccaccattatgcagcagatgccatcaggccccggtgtgtggagctcaggcacctctgtgacgatttcatcaatggaaacaagaaaaaatggga

SEQ ID NO: 35895 - DNA, 120 bp, Artificial Sequence
  ENSG00000053524_13 (sequence is synthesized)
cattttaggaaagtccttagagtttcatagacagctggacaaggtcagccaatggtgtgaggcaggaatctacctcttggcttcccaagctgtagacaagtgccagtctcgagaaggggt

SEQ ID NO: 35896 - DNA, 120 bp, Artificial Sequence
  ENSG00000053524_14 (sequence is synthesized)
tgatatcgccttgaacgacattgcgacattcctgggcacagtcaaggagtacccgttgctcagccccaaggagttttacaacgagtttgagttgctgctcaccctcgatgcaaaggccaa

SEQ ID NO: 35897 - DNA, 120 bp, Artificial Sequence
  ENSG00000053524_15 (sequence is synthesized)
agcccagaaagttttgcagaggctggatgatgtccaggaaatatttcacaagaggcaagtgagtctgatgaaactggcagccaaacagactcgtccagtgcaacctgtggccccacatcc

SEQ ID NO: 35898 - DNA, 120 bp, Artificial Sequence
  ENSG00000053524_16 (sequence is synthesized)
tgagtcttcaccaaaatgggtgtcatcaaaaaccagccagccctccacctcggtccctctagctcgtcctctgagaacgtctgaggaaccttatacggagacagagttgaactcccgggg

SEQ ID NO: 35899 - DNA, 120 bp, Artificial Sequence
  ENSG00000053524_17 (sequence is synthesized)
aaaggaagatgatgagactaaatttgaagtcaagagtgaagaaatctttgaaagccatcatgaaagggggaaccctgagctggagcagcaggccaggctcggagacctttccccccgcag

SEQ ID NO: 35900 - DNA, 120 bp, Artificial Sequence
  ENSG00000053524_18 (sequence is synthesized)
gcgcattatacgtgacttgcttgagactgaagagatttacataaaagagattaaaagcataattgatggatatatcactccaatggattttatttggctaaagcatctaattccagatgt

SEQ ID NO: 35901 - DNA, 120 bp, Artificial Sequence
  ENSG00000053524_19 (sequence is synthesized)
tcttcagaataacaaggactttctctttgggaatattagagaactttacgaatttcacaacaggacttttctaaaagagttggaaaagtgtgctgagaaccctgaacttctggcacattg

SEQ ID NO: 35902 - DNA, 120 bp, Artificial Sequence
  ENSG00000053524_20 (sequence is synthesized)
agctagggcaatctggcaagagtgtcaagactgcgcctactttggggtatgccagcgccaactggatcacaatctccctctttttaagtatctcaaaggaccaagccagagacttataaa

SEQ ID NO: 35903 - DNA, 120 bp, Artificial Sequence
  ENSG00000053524_21 (sequence is synthesized)
ataccagatgctgttgaagggtctgctggatttcgagtctcctgaagatatggagatagacccaggtgaactaggaggctcggctaaggatgggccaaagagaaccaaagattcagcatt

SEQ ID NO: 35904 - DNA, 120 bp, Artificial Sequence
  ENSG00000053524_22 (sequence is synthesized)
ctcaactgaactacaacaagctttggcagtgatagaggatttgatcaagtcctgtgagttggctgtggacctagcagcagtgactgaatgtccggacgatattggaaaactaggcaagct

SEQ ID NO: 35905 - DNA, 120 bp, Artificial Sequence
  ENSG00000053524_23 (sequence is synthesized)
gttgctgcacggccctttcagcgtctggacaattcacaaggatcgttataaaatgaaggatttgattcgatttaaacccagccagaggcaaatctacctatttgaaaggggaatagtgtt

SEQ ID NO: 35906 - DNA, 120 bp, Artificial Sequence
  ENSG00000053524_24 (sequence is synthesized)
ctgtaagatacgaatggagcctggggaccagggattatctcctcattacagcttcaagaagaccatgaagctgatgacactttcaattcgccagcttggaagggggagccatagaaagtt

SEQ ID NO: 35907 - DNA, 120 bp, Artificial Sequence
  ENSG00000053524_25 (sequence is synthesized)
tgagattgccagtcgaaatggacttgagaaatacatcctgcaggcagcttcaaaagaaatcagagactgttggttttcagaaataagtaaattattgatggaacaacaaaataatatcaa

SEQ ID NO: 35908 - DNA, 120 bp, Artificial Sequence
  ENSG00000053524_26 (sequence is synthesized)
agaccaaggaaatccacagtttgaaatgagcacgagcaaaggcagtggagcaggatccggaccatggattaaaaatatggaaagagctaccactagcaaggaagacccggcctccagcac

SEQ ID NO: 35909 - DNA, 120 bp, Artificial Sequence
  ENSG00000053524_27 (sequence is synthesized)
aggagggattaaaggctgctccagcagggagtttagctccatggacacctttgaagactgtgaaggcgcagaagacatggaaaaggagagcagtgctctgagtctcgcgggccttttcca

SEQ ID NO: 35910 - DNA, 120 bp, Artificial Sequence
  ENSG00000053524_28 (sequence is synthesized)
gtcggacgacagtcacgaaacctgttcctccaaatctgctttcctggagaggggagaaagcagccagggagaaaaagaagaacgcgatgaggaggaaacggcgacccgcagcaccgagga

SEQ ID NO: 35911 - DNA, 120 bp, Artificial Sequence
  ENSG00000053524_29 (sequence is synthesized)
ggagcgcgctggggcgtccacgggccggctggctcctgcgggggcgacggctggtttccaggcgagggcgctgcgcccgaggacctccgcccaggagagctgacctccctgcggacgccc

SEQ ID NO: 35912 - DNA, 120 bp, Artificial Sequence
  ENSG00000053524_30 (sequence is synthesized)
ccgctcctcggctccagagcgcccgcattcccgggagaggcggtgtgggggcccgggccctgcccagctacgcagaaagcagccggagcctcggcggcggcagaaaggggacaaccaggg

SEQ ID NO: 35913 - DNA, 120 bp, Artificial Sequence
  ENSG00000053524_31 (sequence is synthesized)
cctcctccgaggagcccgaggggtgtcctgggtgcgcgcctagctccgcacgggggacctcggagctgctctaaggcgcctgcagaggcgagcagagcccgcagcccacgccttctcgac

SEQ ID NO: 35914 - DNA, 120 bp, Artificial Sequence
  ENSG00000053524_32 (sequence is synthesized)
cgcgcacttcgatattcggagccgggcaattctttgctgcgtgggcttctctgtgctcccacggtaggatgtttagtagcacccctggcctctacccactaggtgccaggaatgcgccac

SEQ ID NO: 35915 - DNA, 120 bp, Artificial Sequence
  ENSG00000053524_33 (sequence is synthesized)
cccatcctccaccccgcccccaaatcgtgacaatcaaaaatgcctgcagacacgcccgcatttctccagggcggggtgggaatcggttgagagccgcttagcccgagccttggaggagcc

SEQ ID NO: 35916 - DNA, 120 bp, Artificial Sequence
  ENSG00000053524_34 (sequence is synthesized)
ggagccgctccaacccggcgggggccgcagactgggagctcccggtccgcctcccagcatccctgcgagcgttcatggggtgttcgtgttagtgccaagattgcttcgttgtagagagag

SEQ ID NO: 35917 - DNA, 120 bp, Artificial Sequence
  ENSG00000053524_35 (sequence is synthesized)
ttcgttccaagttactttctgaggtattttatgtatcgatttattagtttttaaatgagttttgttagtttcagttgtattttatttttagttttattagttgattttcatttctttgta

SEQ ID NO: 35918 - DNA, 120 bp, Artificial Sequence
  ENSG00000053524_36 (sequence is synthesized)
gctttctggttatttaattttatagtttcagttactggtttatagttactttattttcaaagttatttagttgttcattttcagttatttatatgtagttgttttgttttaggagttaca

SEQ ID NO: 35919 - DNA, 120 bp, Artificial Sequence
  ENSG00000053524_37 (sequence is synthesized)
tacaattattatctgagttatttaccttcatagttatttcactttatcttattggagtttttgagttatttatttttacagtaacttatttgactattaaacactcactggaagttcatg

SEQ ID NO: 35920 - DNA, 120 bp, Artificial Sequence
  ENSG00000053524_38 (sequence is synthesized)
gcagtgcctagagagaaatggagagcgagcgaggtggcgccgtttcctggaatccagtcgtggtctggtgcatgaagtgtgagcagcaagatcctagatactcaccttacaccttggtgc

SEQ ID NO: 35921 - DNA, 120 bp, Artificial Sequence
  ENSG00000053524_39 (sequence is synthesized)
caaggacaaatggaaacatcaatggtctaaaaacatatctgcttccctccgactccaagctttactgaagtataattggtaaataaaaattgcatatattcaaactatacaacatgatgg

SEQ ID NO: 35922 - DNA, 120 bp, Artificial Sequence
  ENSG00000053524_40 (sequence is synthesized)
catatattcaaactatacaacatgatggtttgatatacttacaccctgtgaaatgattactgcaatcaagttaatgaatacattcattaccattgtgtgtgtgtgtgtgtgtatatgtat

SEQ ID NO: 35923 - DNA, 120 bp, Artificial Sequence
  ENSG00000053524_41 (sequence is synthesized)
cattgaagtagaagggtggttgccaggggctggagtctagaggaagtagggagatgttggtcacagggtacaaacttgcagttatgagatgagtaagtcctggagatgtaacgcacagca

SEQ ID NO: 35924 - DNA, 120 bp, Artificial Sequence
  ENSG00000053524_42 (sequence is synthesized)
tggcgactatcatggaataatactgtactgtacacttgcaatttgtcaagacagtatatcttgtatctgccctttgaatggaaaacatgagttggcctcccaactttatctgactttatc

SEQ ID NO: 35925 - DNA, 120 bp, Artificial Sequence
  ENSG00000053524_43 (sequence is synthesized)
caaggtgagaatgagtccaatttgactgagctcacactgatatgtgggagtaaccgcaagcctggcttcctgcaaagccccatgaaatggaaggctggccatccatggtccccaaagcag

SEQ ID NO: 35926 - DNA, 120 bp, Artificial Sequence
  ENSG00000053524_44 (sequence is synthesized)
aggatcctcttctgaatgactcaactacgttttaaaacaagaatcatacagcgaggttagagtcccacaataaagctgtactaatgctctcaagaggagaagcactggtgttaaactaaa

SEQ ID NO: 35927 - DNA, 120 bp, Artificial Sequence
  ENSG00000053524_45 (sequence is synthesized)
aacctcaggaaatacattttctttccattctattttttacaacatagaggatgattcgaaaattctaaatctacagcctcctttaggcttagtactcaatttatgaacatcttggcctac

SEQ ID NO: 35928 - DNA, 120 bp, Artificial Sequence
  ENSG00000053524_46 (sequence is synthesized)
aacattatacctccaactaccccttcttcccacctcccagacttcttccctctttccctgtttctccaccctgttttaggcaacaaataggctatatgggccagtgggagctgccacaga

SEQ ID NO: 35929 - DNA, 120 bp, Artificial Sequence
  ENSG00000053524_47 (sequence is synthesized)
gaaatgttccacccaacatcaatccccaccaggtactttctaggacacgaccatggagatgatcctgaccccctgtgccttctaaatagttctcatttctcctctctttctcaactagtc

SEQ ID NO: 35930 - DNA, 120 bp, Artificial Sequence
  ENSG00000053524_48 (sequence is synthesized)
cttctcattctctttcttatttttatttttgtgaacccaaggcaacagatcaaacaacttaaagttgtaagcaactcatattatgactgaggctgagagcaatacttatgataactggaa

SEQ ID NO: 35931 - DNA, 120 bp, Artificial Sequence
  ENSG00000053524_49 (sequence is synthesized)
gcaaacaaagcctccaggtttcaagatatttgacattaatggagagaaggaatcttccatgctcagagccttttggtggccccatatggctttccatgtcaactcatcataggctttgtg

SEQ ID NO: 35932 - DNA, 120 bp, Artificial Sequence
  ENSG00000053524_50 (sequence is synthesized)
attcaatgtacactgaaaactattttatactcattctgattcattaatttttttgaactattacattattagtgctttatatactattttgaatttttgcacttaacaaacgactaatgt

SEQ ID NO: 35933 - DNA, 120 bp, Artificial Sequence
  ENSG00000053524_51 (sequence is synthesized)
gaaatctagtttcagagattagaagtattttatggttatgtatgtcattactgcaaagattatttaaattgctcaatgagaaatgggcaaagttcctgtgggaaagtggatattatcaaa

SEQ ID NO: 35934 - DNA, 120 bp, Artificial Sequence
  ENSG00000053524_52 (sequence is synthesized)
ttgttcaaatatgaggaaattgtcagagaattattaactaaataccttttctgaattcctctcctaaattgtaaagttttacaaagttttttgatagcgccccgccatgttgggaggaac

SEQ ID NO: 35935 - DNA, 120 bp, Artificial Sequence
  ENSG00000053524_53 (sequence is synthesized)
gttgggaggaacattgtaaatcattaacccagccagaaaacactgacttagccctatgtgatttatgatgttagagacaaaatacaagtagtactttttttttttttcttgagacggagt

SEQ ID NO: 35936 - DNA, 61 bp, Artificial Sequence
  ENSG00000053524_54 (sequence is synthesized)
gataatgaattttgaaatagttttctgaccaagtgttttaatcagcctctttagcctgtat

SEQ ID NO: 35937 - DNA, 120 bp, Artificial Sequence
  ENSG00000053524_55 (sequence is synthesized)
tttctgaccaagtgttttaatcagcctctttagcctgtatcttctgaaacaattctcctccagagaccatgttctatatagaataatatttgtccatagtgtactgtgggttccaagtac

SEQ ID NO: 35938 - DNA, 120 bp, Artificial Sequence
  ENSG00000053524_56 (sequence is synthesized)
tctgagatctcacatggtaaaatggaaagagcactggaatgggtgctcacactgatatgtgggagtaactggtaagtcaggaaacccgatttatcatgttggtcaagccacttgctatct

SEQ ID NO: 35939 - DNA, 120 bp, Artificial Sequence
  ENSG00000053524_57 (sequence is synthesized)
gcatgacctccagtaaataacttaaactttggaatctcactttcctcctccacacaacaggctaatagtaccaatatgtacagttgttgtgggaaacaaaataatgtatgcagaggattc

SEQ ID NO: 35940 - DNA, 120 bp, Artificial Sequence
  ENSG00000053524_58 (sequence is synthesized)
cataaagtaaaaagtgctttgacaatagccaccattttttgagtactctatccattgggcatttgtggagaggtttctatacatcatctcatttaatctcacaacagtcacaggagttga

SEQ ID NO: 35941 - DNA, 120 bp, Artificial Sequence
  ENSG00000053524_59 (sequence is synthesized)
ctactgttatgggcccacttaacagatgaggaaactgaagtctaggaaggttaggtaacttactttaggccatatgatttgtatttggcaaagccaagaactgaacctggaccatccgcc

SEQ ID NO: 35942 - DNA, 120 bp, Artificial Sequence
  ENSG00000053524_60 (sequence is synthesized)
accagagccccgcagtcttaatccgtaagcaagtatgtattcttgtgtgaatatgagtttctggtagcaattttatagcctcctgattcattctataaggagattaggagaattgggcac

SEQ ID NO: 35943 - DNA, 120 bp, Artificial Sequence
  ENSG00000053524_61 (sequence is synthesized)
ttttgtatgttgctggttagtggacatcctttctctgaggaattttggactgttagcctttagaagagcaatttaggtcaatactatattgttaagctctgagttattattctagctcct

SEQ ID NO: 35944 - DNA, 120 bp, Artificial Sequence
  ENSG00000053524_62 (sequence is synthesized)
taaccagtctgaacatttttcaagggccatctgtcttaaatgtgtgtgccatttttttcctggagggaatagcaaaggacggttgctgtagttcctatgctgaaatgaccacttacaacc

SEQ ID NO: 35945 - DNA, 120 bp, Artificial Sequence
  ENSG00000053524_63 (sequence is synthesized)
tattgggagaaagaaagagctacagaaatggaagtcatccactatagcaatgtatttgggagtagaacaggcatcattgaagctgagagggaaggaatcatctgtgttgacatgaaggaa

SEQ ID NO: 35946 - DNA, 120 bp, Artificial Sequence
  ENSG00000053524_64 (sequence is synthesized)
atccagagttgggctgagcaggaggacagggacacagacttctgcaaggaggtggctacatgggcttctccaccagaatggcatgggatctgtggccagcacagccgctgtgggccaggc

SEQ ID NO: 35947 - DNA, 120 bp, Artificial Sequence
  ENSG00000053524_65 (sequence is synthesized)
tccctgatagagcgagtgaagctggcaagctgacgccagaggcttggagtgtgctttctctccgggagattggcagatatgtgcccacctctcagcgtctttgataccatgagaatacag

SEQ ID NO: 35948 - DNA, 120 bp, Artificial Sequence
  ENSG00000053524_66 (sequence is synthesized)
gttgaacagcacgttgagtcctccttgctctctagctccgaaacagtcacataacatttcctgtctcagagtcttgtgctgcaggttgaaagtgatgtttgaggcggagcctgtcacttt

SEQ ID NO: 35949 - DNA, 120 bp, Artificial Sequence
  ENSG00000053524_67 (sequence is synthesized)
gagggttgcccaaatgactgagctccgtattggttgcccgatctaccacatctcccctctggcatgtttccatcttttggttgtttcttgggcttctttgcagggttggtgtcacgatga

SEQ ID NO: 35950 - DNA, 120 bp, Artificial Sequence
  ENSG00000053524_68 (sequence is synthesized)
ccacaaggagagggtggagagagaagagagggggaccatcaaacaccagcctcttttctgtcagttttactactcattgcagacctgttgtggggagatgtcgatgtcctggacaaaggg

SEQ ID NO: 35951 - DNA, 120 bp, Artificial Sequence
  ENSG00000053524_69 (sequence is synthesized)
caggaaaagaatgataaagataaaaaccaattcctgtttgtgagtctacttatgtatttaccaatagcccttgtagatgctcccagagcactctgtgcctatctatgtctggtagttatg

SEQ ID NO: 35952 - DNA, 120 bp, Artificial Sequence
  ENSG00000053524_70 (sequence is synthesized)
gttgtttaaagccttctgtttatctctccatcacacacacatcccaacataagattacttactgtacacccccaattccttacacattagaatactctggcttgttgaatgaatgaataa

SEQ ID NO: 35953 - DNA, 120 bp, Artificial Sequence
  ENSG00000053524_71 (sequence is synthesized)
gggattaaaggtagggagggtcccatgggagagtggagcacagaagcagtggggtgatgccagctgcttagatgctaaggaagacatcacctagggcccagcccttctttagttaaatga

SEQ ID NO: 35954 - DNA, 120 bp, Artificial Sequence
  ENSG00000053524_72 (sequence is synthesized)
gggagaaaaaagaaagcattttaccaccatgtggtttaaaatcaatttcctgctattcatttgtgtagagctaatggggcagaattaacatgaagggcaaatgtctcacattgagaagta

SEQ ID NO: 35955 - DNA, 120 bp, Artificial Sequence
  ENSG00000053524_73 (sequence is synthesized)
caggagcacccccttatccactgtttcactttccaggttttagttactcttagtcaactgctgtccaaatatcaaatggaaaaattacagaaataaacaatcgatgagttttaaatgata

SEQ ID NO: 35956 - DNA, 120 bp, Artificial Sequence
  ENSG00000053524_74 (sequence is synthesized)
ttccttgaaatttaaacttgttccattctattctaagcaaaaattaaaaggacacagttcagaagagctctttcagcaaataaataattgtttcacaaaagcactgctgtaaacaagatc

SEQ ID NO: 35957 - DNA, 120 bp, Artificial Sequence
  ENSG00000053524_75 (sequence is synthesized)
actttgatggccagagacacttatgttttcaaccaatggcaaccttaaacacttccaagtatagatacacagggtatatatgggcaaaaggcaatacatcattaatcaatcaactaataa

SEQ ID NO: 35958 - DNA, 120 bp, Artificial Sequence
  ENSG00000053524_76 (sequence is synthesized)
aaattaattataagcttgttgcttggtcaaatatgcttttgttctctatgtttttttaattggtcagaaaacttaaactgtaatgatctaaaaccctgtatctactctgaaagtaactac

SEQ ID NO: 35959 - DNA, 120 bp, Artificial Sequence
  ENSG00000053524_77 (sequence is synthesized)
aacctagaatgtttgacactgtagttttgacattagttaaaaattctaaattatctaagcaatgtaaacaagcctcaaatttcaaaatagaaaaaaattaaaatttctgtaaacattaaa

SEQ ID NO: 35960 - DNA, 120 bp, Artificial Sequence
  ENSG00000053524_78 (sequence is synthesized)
aagctacctgctaaaaattgtaagtatcatcattcagttgtgtatactgagaaatcttttttcgttttgttttgcgtgtttccgacatcaccttattatatgagacatctgattttccct

SEQ ID NO: 35961 - DNA, 120 bp, Artificial Sequence
  ENSG00000053524_79 (sequence is synthesized)
aacaggtgcctctgcagtcaaaggccttagagtgagttcagtcactcttgctgaagtcattattttggccttcatataatctccctagcagtagacaccacctagttctttctgtagtga

SEQ ID NO: 35962 - DNA, 120 bp, Artificial Sequence
  ENSG00000053524_80 (sequence is synthesized)
agggaggtagtgtgtattatagccacatttttatcctgctttgtaaaataaatgtaacttactctattagatctcagacacatctctttgattacaaggaacatgcagctttaaaaatgc

SEQ ID NO: 35963 - DNA, 120 bp, Artificial Sequence
  ENSG00000053524_81 (sequence is synthesized)
tttaaccccaaactggcaacttttctatcacttttttactctgttttcaagtttgaaatatttagaaaataaagatcacctctgacagttattgatgaaaaataaattgttttagatatt

SEQ ID NO: 35964 - DNA, 120 bp, Artificial Sequence
  ENSG00000053524_82 (sequence is synthesized)
agcatggtgtaccctggtatgcataataacccagctggcttctgtcacccatcagtcacgagcaaggaatgtggaaagggactggaaaacaatgacaaacaagcctcagttttgactctc

SEQ ID NO: 35965 - DNA, 120 bp, Artificial Sequence
  ENSG00000053524_83 (sequence is synthesized)
ttgtgcacacaggagggacagagtaaacatggtcgggtggatggaaaactgagcagctgtgttgcctttgttccttaggctattgctttattttcattttttatttttgagatggagtct

SEQ ID NO: 35966 - DNA, 120 bp, Artificial Sequence
  ENSG00000053524_84 (sequence is synthesized)
tttagctaaaggttattctggcttcctgggtcgcgttgtctaggacacatgacccttgtttagggaactccaactgtgtcaggagttatttctctctccgaaataagaaaattaggggca

SEQ ID NO: 35967 - DNA, 120 bp, Artificial Sequence
  ENSG00000053524_85 (sequence is synthesized)
gattgttgtcatttgcattgtcagatggagaaactaaggcacagagcaaggaaactacaaggccagggaaaaaaactgtgcttgtagctgagcccatgatagaaatgctttctggcatct

SEQ ID NO: 35968 - DNA, 120 bp, Artificial Sequence
  ENSG00000053524_86 (sequence is synthesized)
tcttccaccctctccagcctgggcctcaactctttatgccgcttaaatcggtatgggcccaggtcttcgaggggatggagtgtgggcagagtccacattggtcaccaccatttcacagac

SEQ ID NO: 35969 - DNA, 120 bp, Artificial Sequence
  ENSG00000053524_87 (sequence is synthesized)
cggggcagagcggggtctaaaccccctccttaggcagtgctgtgtccacctccagcagagaagacttggttgggaaaggccttccctccatgggtttgcattgcttatgagcccccaccc

SEQ ID NO: 35970 - DNA, 120 bp, Artificial Sequence
  ENSG00000053524_88 (sequence is synthesized)
ctcccttgactatagtgtggtttagaatgtacacagtggccaggtgtgtggtattttgcctgctttccacctgccttctatgatttagaggtaaacagcagctttgtgactgagaggctg

SEQ ID NO: 35971 - DNA, 120 bp, Artificial Sequence
  ENSG00000053524_89 (sequence is synthesized)
cctggcgtctgataccacttgtggagattaggaagttgattgctttaaccaaacccacttgaaaaatatgttttttcttttacacctttttctttagttttttcttttgcccatcttatt

SEQ ID NO: 35972 - DNA, 120 bp, Artificial Sequence
  ENSG00000053524_90 (sequence is synthesized)
tcttcagagaaggttatggatttattttgaatgcatttcttcaaagttagtacttaaatatatttcatcaatttcctcctttcctcctccctgccactgccatatgccacgcgttaatgc

SEQ ID NO: 35973 - DNA, 120 bp, Artificial Sequence
  ENSG00000053524_91 (sequence is synthesized)
agatataaggatgtggggaatcctttgttgctgtgagggaaagacaccacacctgtctcacggctttgctcaggtgtttctctgtggcacacctctgcccctcttctaggcctgactcat

SEQ ID NO: 35974 - DNA, 120 bp, Artificial Sequence
  ENSG00000053524_92 (sequence is synthesized)
gcacattcatcaaccctcaactctgacctcatctcttcgatgaaaccttccttcaccccagttctgctttcacagagtctttttttaaatttccacagaaccccgaggtttacctttgcc

SEQ ID NO: 35975 - DNA, 120 bp, Artificial Sequence
  ENSG00000053524_93 (sequence is synthesized)
tatggaagttatttgtctatggaaattatttctgcctctcccagtagactgtgaacttcttaagagtaggggccaatgctttgcttttcttctctttcgtttttaaaatctccagcccta

SEQ ID NO: 35976 - DNA, 120 bp, Artificial Sequence
  ENSG00000053524_94 (sequence is synthesized)
gcacagtgcccaacacctggttggttctcaaaagtaatgttggtagagttttcagttttgataatgagtcattccaaacaaatggtatttgttgtagggtgatgaaggggttaaaatatg

SEQ ID NO: 35977 - DNA, 66 bp, Artificial Sequence
  ENSG00000053524_95 (sequence is synthesized)
aatggtatttgttgtagggtgatgaaggggttaaaatatgctattctgtactatgcgccatcatcc

SEQ ID NO: 35978 - DNA, 120 bp, Artificial Sequence
  ENSG00000053524_96 (sequence is synthesized)
gtaaaaatttaaaaatgccattctggaatattgactatttaagttaaaagcacttgaaaaacagcaggtacaagaatatcactttgacctttgtgctgtttcttaagaggagaagatgga

SEQ ID NO: 35979 - DNA, 120 bp, Artificial Sequence
  ENSG00000053524_97 (sequence is synthesized)
attcctatgtgaaagacactctctagggactagaaggaaaggtaacttagagaatattgcacagaccttgttagaaattctattttttaagcttccccacataatttagtcacattttca

SEQ ID NO: 35980 - DNA, 120 bp, Artificial Sequence
  ENSG00000053524_98 (sequence is synthesized)
tagtttattattctttgttcaatccagtatagaagtaactgactctaactgattctttgggtcttcatttctttatgagggctcttgtgccatgtaaaacatttatgaataaatgtctat

SEQ ID NO: 35981 - DNA, 120 bp, Artificial Sequence
  ENSG00000053524_99 (sequence is synthesized)
gcttttctcatgttaatctgtgttttgtcgatttaactcttggacccagccaggaccctaagacaatagaggtgaagtttttccattcctacagtgagaagggggaccctgacggagggg

SEQ ID NO: 35982 - DNA, 120 bp, Artificial Sequence
  ENSG00000053524_100 (sequence is synthesized)
aaccccagctcttcattcctgcctttatcaacctgggttttaagaagttgaacttgaactctgtctttggcccagtggcatttcaggacaatatcccatcagtttagcaacttctgtggg

SEQ ID NO: 35983 - DNA, 120 bp, Artificial Sequence
  ENSG00000053524_101 (sequence is synthesized)
agcggcaaggaagagggtgaatagggatgtagacaataggaggagtgtcccctgtccccattctccttatatttgttttaaattcgatgtctagttttacttaatccccagggatacagt

SEQ ID NO: 35984 - DNA, 120 bp, Artificial Sequence
  ENSG00000053524_102 (sequence is synthesized)
caaatgctaagttaaatggaggattttccttttgcatttgcagccttttccaaatcacgctgaagatagctcagccccccggactgtgtggcaagaagcaggcagggttatcacccctat

SEQ ID NO: 35985 - DNA, 120 bp, Artificial Sequence
  ENSG00000053524_103 (sequence is synthesized)
ctcacagatggagatgaggagatcaaacaggggcttctgttttggatttctttgttctactgtaggctcctggtacaatttcttgtgacctagggaatattttcttttcctagaatgctg

SEQ ID NO: 35986 - DNA, 120 bp, Artificial Sequence
  ENSG00000053524_104 (sequence is synthesized)
tttgtctttcgggaaagagtggctgtctggccagttcttcccctcgcctttcttcttccgcttttgctcacactacttgctgcccctcccctgttcctttccacaaaaagtggagacaaa

SEQ ID NO: 35987 - DNA, 120 bp, Artificial Sequence
  ENSG00000053524_105 (sequence is synthesized)
cacaatttgcatctttttgtacgttacatagttatccagtaccagagtccttcccaattgcaaaatgttttatagacaggtggcagagggctcgtggatggataaaaaagaattgataca

SEQ ID NO: 35988 - DNA, 120 bp, Artificial Sequence
  ENSG00000053524_106 (sequence is synthesized)
ctagaataggaaaatggcaggatacttggggttgggaaatgctatctttgtgcctgaaattaattaggatctcgcattgtgagtgggttgggcaggtacagaaaggcttcccacagtaat

SEQ ID NO: 35989 - DNA, 120 bp, Artificial Sequence
  ENSG00000053524_107 (sequence is synthesized)
tcattcttcagcagacctctatgagagcccacagcatgtagggtgcggtgtacgatgctgtaaaggactgaaaaacctcaagacgatgtctcagaccgcaggaaactcattacatgactc

SEQ ID NO: 35990 - DNA, 120 bp, Artificial Sequence
  ENSG00000053524_108 (sequence is synthesized)
tgttatcaatatcttttgtgaaatatgtaaacaaagtgctataggagctcagaaaacagaaagtcacttcgacaggaaaaaaagggaaaacttcaggaaaaaagggggtttcaatccaga

SEQ ID NO: 35991 - DNA, 120 bp, Artificial Sequence
  ENSG00000053524_109 (sequence is synthesized)
cctgtaagagagggttcttggatcttatgtgggaaagaagtcaaggagagtcacaaaatgcagtgaaagaagcaagcttattagaaactactgttacagagtagggtgccctcagaaagc

SEQ ID NO: 35992 - DNA, 120 bp, Artificial Sequence
  ENSG00000053524_110 (sequence is synthesized)
aaaaggaggaacgcattgactttaagtttttcttatatagggatcttgtctatataaagattaaactaagctgtgcctatgtgcggatgggcagacagtgtgacaaaacttattattcta

SEQ ID NO: 35993 - DNA, 120 bp, Artificial Sequence
  ENSG00000053524_111 (sequence is synthesized)
ttgatttaaagaaaactatccttgacattttagtgtgtgagaacatcaaagcataactataattttttgaaaacatatattgttatggtattgggacatctggactttctgttgttgtag

SEQ ID NO: 35994 - DNA, 120 bp, Artificial Sequence
  ENSG00000053524_112 (sequence is synthesized)
tatccttaggctgttttctcaaccataaacatcttatgaccatgggtcctggttggcaaggaatgtgccttgttactctcaagatggagctgaacttaaaattgtgtcactttcactctc

SEQ ID NO: 35995 - DNA, 120 bp, Artificial Sequence
  ENSG00000053524_113 (sequence is synthesized)
ctaggctcctgcctccctaacaaaatgtccttgaggggatggtacagttgctacagatagatacagaagggagcattccagagagagaaaaggatagtgttgaagagctttgaacacagc

SEQ ID NO: 35996 - DNA, 120 bp, Artificial Sequence
  ENSG00000053524_114 (sequence is synthesized)
tgaagagctttgaacacagcccaaacctggattgaaatccagatcctattgctcactagctaggtggtctggggcaaatgacatggcttctattttttctttctttctttctttcttttt

SEQ ID NO: 35997 - DNA, 83 bp, Artificial Sequence
  ENSG00000053524_115 (sequence is synthesized)
ttttttttttttttgagacggagtttcgtgcttgtcgcccagactggagtgcggcagggaagtgattctcctacctcaacctc

SEQ ID NO: 35998 - DNA, 120 bp, Artificial Sequence
  ENSG00000053524_116 (sequence is synthesized)
ggcgtgagccactgcgcccagctgacctggcttctatttctatctaacgcagggtctgaagttttcaacagagcatatttggggaattacagagcatcccagttcaccagaacagagtga

SEQ ID NO: 35999 - DNA, 120 bp, Artificial Sequence
  ENSG00000053524_117 (sequence is synthesized)
cagagtgaggctgcttttcagacagtattgagaaacgagggctggaaaaagttggaaacagattgggcaaggcctttacccccaagttaaggagttgaggcacagtgagcaggaagaggc

SEQ ID NO: 36000 - DNA, 120 bp, Artificial Sequence
  ENSG00000053524_118 (sequence is synthesized)
cattttcctgcaagagggtttgaggagcagagtgaggagcagattgatctggtggtggtgtgtaggatggattggagagagcaggaaagggaggcagggagaccaattaggggattctac

SEQ ID NO: 36001 - DNA, 120 bp, Artificial Sequence
  ENSG00000053524_119 (sequence is synthesized)
actgagacaggtgcaaaacgaagagggatgatggcatgagaactggataggaagggatggacaagaagacaggcactggggactggtggaggtcgggaaggaggaagagggagaagctac

SEQ ID NO: 36002 - DNA, 120 bp, Artificial Sequence
  ENSG00000053524_120 (sequence is synthesized)
ggaagacgcttggttttaggagccttacaattatctcgtattactctaagtctggtgtgtggagtattctgtgtggaattcaggcctcattttgggtttgatggtctcatcgtgatttat

SEQ ID NO: 36003 - DNA, 120 bp, Artificial Sequence
  ENSG00000053524_121 (sequence is synthesized)
tttaaaactttttctaatcaaagccatgctaagacaatggttctcgacctcaactgcattttaggattgcctagggagattttaattcccaatgtccagactataattcagatgaattac

SEQ ID NO: 36004 - DNA, 120 bp, Artificial Sequence
  ENSG00000053524_122 (sequence is synthesized)
atcaggatttctcggggtgaaacctggattttcagcggtgtctaaatctcaccggtgatccccatgtgcagccagggatgagagtgtctgtgctaggagcggatagggagaagctatggt

SEQ ID NO: 36005 - DNA, 120 bp, Artificial Sequence
  ENSG00000053524_123 (sequence is synthesized)
gagacagaacagacatttgaggggtgtgaagaagaaaacctggaatccgacttagcttttggataaagtgaggtggcagtgaatgtgcagaaattgaaagttggagggagggctgttccc

SEQ ID NO: 36006 - DNA, 120 bp, Artificial Sequence
  ENSG00000053524_124 (sequence is synthesized)
acgtcctttacttttgctatcacagttctgtatttctttccttaaaatcaatatataaaaagattcaatttcttgagcttccttgaccctggaatttctttgtgaattatgtatagtact

SEQ ID NO: 36007 - DNA, 120 bp, Artificial Sequence
  ENSG00000053524_125 (sequence is synthesized)
gtacataaggaactattgaattacaaaccttcccacatgaatcttatggtattaaaataaataaatattcaaaaatacacagaaatcattaccacatctctattctgtttccaaaaacag

SEQ ID NO: 36008 - DNA, 120 bp, Artificial Sequence
  ENSG00000053524_126 (sequence is synthesized)
ctgagggccagttttagcccatcaggtgccgtctgctatataaattgtactactagtggttttcacagtccagcttataacaatagcacaataaatcctagtggtcactttctcagaatg

SEQ ID NO: 36009 - DNA, 120 bp, Artificial Sequence
  ENSG00000053524_127 (sequence is synthesized)
taagatatcgtcatttaaaacatgtcacctgtggctacagagtagagccagatggtctgaaaagacattagtaaaatattctgagccacagagatggagctgaacttgggtcaccctcag

SEQ ID NO: 36010 - DNA, 120 bp, Artificial Sequence
  ENSG00000053524_128 (sequence is synthesized)
tctcctaggctcctgcctccctaacaaaatgtccttgaagaatgggacagtttaactgcgtttcaatcatagttgttggtcctacaaatcaacatttgtataactaagcatggatattta

SEQ ID NO: 36011 - DNA, 120 bp, Artificial Sequence
  ENSG00000053524_129 (sequence is synthesized)
tcactgtgtttctctacttagtttccttattttaacttccagttctgggttcattattagaaacggattggagaaagtacttttattagatggtacaagagcagtatttcatatcaatgg

SEQ ID NO: 36012 - DNA, 120 bp, Artificial Sequence
  ENSG00000053524_130 (sequence is synthesized)
ttttattagatggtacaagagcagtatttcatatcaatggttaattttgttattgtttctatttctttctttctttctttcttttttgagaccgagtctcattctgttgcccaggctgga

SEQ ID NO: 36013 - DNA, 120 bp, Artificial Sequence
  ENSG00000053524_131 (sequence is synthesized)
gctgggattgtttctatttctaaaggacttttctatacggaatctgttgagggacctatttaagttagagtaatttttctacattcattttcctcacatacagtgtgatgaatagtcttt

SEQ ID NO: 36014 - DNA, 120 bp, Artificial Sequence
  ENSG00000053524_132 (sequence is synthesized)
ggtgttcgttgtgtcctctttttatgataagtggcctaaaatggggtctgatattagtactctaggaaggaataggagaagaatagtgttattatttggcctgtgaattgtgatgagact

SEQ ID NO: 36015 - DNA, 120 bp, Artificial Sequence
  ENSG00000053524_133 (sequence is synthesized)
tactcctttgtattgaaagactcagtgggattataataactactcagctttagaaaccagcctcgtcagagaagtgagtgcaatctgggcctcttactattatgaagtgtgaagggaaaa

SEQ ID NO: 36016 - DNA, 120 bp, Artificial Sequence
  ENSG00000053524_134 (sequence is synthesized)
taaatctcaggacccccaaatcattaagccaaagggtagtgaagctgggaagtgcatcagacaaacctgcctcccattttattcctaaagaagatagctacaaagataaaaaaaaaaaaa

SEQ ID NO: 36017 - DNA, 120 bp, Artificial Sequence
  ENSG00000053524_135 (sequence is synthesized)
tcacccaagggcttggatgagactcccccacctccgcagccccccctcctgctttgtctcctaggatagaacaaagcatgataggatgaggtgggacagatgaggacttcacacactcta

SEQ ID NO: 36018 - DNA, 61 bp, Artificial Sequence
  ENSG00000053524_136 (sequence is synthesized)
gatctcccaccatcacacccggctaagcttgccctggataatttgctggaagagcaagcag

SEQ ID NO: 36019 - DNA, 120 bp, Artificial Sequence
  ENSG00000053524_137 (sequence is synthesized)
agaacatgatgtctgcaagattttctgtgaagaagcttccatcatactcgtcctcccttccttgtgtgattgctgagaggcttgagtgctttatgtgaaaagatgttcgagaggcattaa

SEQ ID NO: 36020 - DNA, 120 bp, Artificial Sequence
  ENSG00000053524_138 (sequence is synthesized)
aaactgtgcagatcctggggtgtagaagtatacctggcacgaaggtaaaaagtgctctggccatcccaccacatcccattaaagttaactgaagcccatttctatctgtgtggagccgga

SEQ ID NO: 36021 - DNA, 120 bp, Artificial Sequence
  ENSG00000053524_139 (sequence is synthesized)
ctttaagagtgtgttttggcttggccctgtgggaacacttcttgattccctttcaggtgtacagagaaccaagcactatatttgcagagtgcttccctcatataaaggcaaagggttttg

SEQ ID NO: 36022 - DNA, 120 bp, Artificial Sequence
  ENSG00000053524_140 (sequence is synthesized)
actctttttggagaagcttaagtaataacaaccattttataccccctaccatgtatcgagcacctactgcattcctaccaggaacataattatgtcatctatttataatcctcaagacaa

SEQ ID NO: 36023 - DNA, 120 bp, Artificial Sequence
  ENSG00000053524_141 (sequence is synthesized)
cctctgaggaaggtattaatggcctcattgtgcagaggcagaaactgatactctgctgggtctcaaaatgtagcacacgagaatcacctagtgagctgttatatggcagattcccttatg

SEQ ID NO: 36024 - DNA, 120 bp, Artificial Sequence
  ENSG00000053524_142 (sequence is synthesized)
cactgccctgaagactcagcgtcgataggtctggaatactgcccaggaactagtattttagtaaagtgtctaaatgattctggtgcaggtggtgcagggatgtcaccaagaaaccctggg

SEQ ID NO: 36025 - DNA, 120 bp, Artificial Sequence
  ENSG00000053524_143 (sequence is synthesized)
gtaaatgactgcccaagaccacacatggtgcacacaggggaagccagaattaaagtcaggcctgccagattccacaccaaggcttcacaggatagacagcaagggcgcatgccaggggcc

SEQ ID NO: 36026 - DNA, 120 bp, Artificial Sequence
  ENSG00000053524_144 (sequence is synthesized)
cacaaggagaggggtgccctttggaggtgacctctagggtatgttcccagtcagcaggagcagcggtttctggagtcttccctgtgagctggtcccaggcagcatgtggctgacggcaat

SEQ ID NO: 36027 - DNA, 120 bp, Artificial Sequence
  ENSG00000053524_145 (sequence is synthesized)
gagtcagcatgctccatccccacagctgttcctcttgcatggcagggggcacccacccaggcgcttacctcatcccattgctaaagggattttaatgtcaatgaaatatagttgtttcag

SEQ ID NO: 36028 - DNA, 120 bp, Artificial Sequence
  ENSG00000053524_146 (sequence is synthesized)
aagcaagtagctccgaaggggctggtgtgcagcctgctctgtgtgctgagctcgctgtgggatcagctgctgttttcccaactccatttttgctccagagattataagcctggtgtgtgt

SEQ ID NO: 36029 - DNA, 120 bp, Artificial Sequence
  ENSG00000053524_147 (sequence is synthesized)
gtgtgtgtgtgtgtgtgtgtgcatgtgtgtttgagagagagagagggagacagagagagagagaaagcaagtagccatagtaactctacagaaaatcccagcctaatgttttttgcagat

SEQ ID NO: 36030 - DNA, 120 bp, Artificial Sequence
  ENSG00000053524_148 (sequence is synthesized)
ctgggcatgatgtgtaaagagaaagttttcacagcatatatcaaagcatgagttcatattattgtggaaatccaaaaatgtaggaagaaaaaggttactcatgggcacgtacatatccca

SEQ ID NO: 36031 - DNA, 120 bp, Artificial Sequence
  ENSG00000053524_149 (sequence is synthesized)
ctatcccccatccctacataatggtaattattaattctgaaatatctttatgattttttattattctaaatgtggtacatattcactgtaaataatctaggaaaaaaataagacaaaaac

SEQ ID NO: 36032 - DNA, 120 bp, Artificial Sequence
  ENSG00000053524_150 (sequence is synthesized)
acagcccagcgcagtgcaggcccttggagagcaggagttagagatggggaggaccgtgcctgcaacaggcactgcctgctacaccctgccatgggcagaggggatgtcctcccaccccac

SEQ ID NO: 36033 - DNA, 120 bp, Artificial Sequence
  ENSG00000053524_151 (sequence is synthesized)
agcctcccgctccgggtcctgccggatggcggcagctctccgggccagcccccttctctccgcggctcctccgcagacacccggcgcggaagaaggaggggcggagacctggccggcgcg

SEQ ID NO: 36034 - DNA, 120 bp, Artificial Sequence
  ENSG00000053524_152 (sequence is synthesized)
tctttcccagataagaatcataatatttatcctctatactaaccttcatttatgtacctgagaacaaaatttgtggatcccacaaaagcaacaagcaaaagagcttaaagtgacatctta

SEQ ID NO: 36035 - DNA, 120 bp, Artificial Sequence
  ENSG00000053702_0 (sequence is synthesized)
actccctctacagcaatctcgggaaattggagactgacgcggctgctcctgcatgttatttatttttcctctttccctcccgtggagaccctcctgttggaaagagagctgcagcacggg

SEQ ID NO: 36036 - DNA, 120 bp, Artificial Sequence
  ENSG00000053702_1 (sequence is synthesized)
acagagacaggcaggaagaagcagagaggactcggtgacgcccccaccgagcagcccctggcccactcctccagcaggggccatgagcaccaagcaggaggccaggagagatgagggaga

SEQ ID NO: 36037 - DNA, 120 bp, Artificial Sequence
  ENSG00000053702_2 (sequence is synthesized)
agccaggacgagggggcaggaggcacagcttcgagaccgagcccacctgagccagcagcgccggctcaaacaggccacccagttcctgcacaaggactcggccgacctgctcccgctgga

SEQ ID NO: 36038 - DNA, 120 bp, Artificial Sequence
  ENSG00000053702_3 (sequence is synthesized)
cagcctcaagaggctcggcacctccaaggacttgcagccgcgcagtgtgatccaaagacgcctggtggagggaaacccgaattggcttcagggggagcctccccggatgcaggacctgat

SEQ ID NO: 36039 - DNA, 120 bp, Artificial Sequence
  ENSG00000053702_4 (sequence is synthesized)
tcatggccaggagagcaggaggaagaccagcaggacagagattccagctcttctggtcaactgcaagtgccaggaccagctgcttagagtggccgttgacacaggcacccaatacaatcg

SEQ ID NO: 36040 - DNA, 120 bp, Artificial Sequence
  ENSG00000053702_5 (sequence is synthesized)
gatctctgctggatgtctcagccgcctggggttagagaaaagggtcctaaaagcctcagctggggacctggcccctgggcccccaacccaggtggagcagttggagctacagctggggca

SEQ ID NO: 36041 - DNA, 120 bp, Artificial Sequence
  ENSG00000053702_6 (sequence is synthesized)
ggagactgtggtgtgctcggcacaggtggtggatgctgagagtcctgaattctgcctgggcctgcagactctgctttctctcaagtgctgcatcgacctggagcacggagtgctgcggct

SEQ ID NO: 36042 - DNA, 120 bp, Artificial Sequence
  ENSG00000053702_7 (sequence is synthesized)
gaaagccccgttctcagagctacccttcctgcctttgtaccaagagcctggccagtgactgctgtctcagtcagtccccagagggaaagaccttgccttagaagaagaggcgtgtgggga

SEQ ID NO: 36043 - DNA, 120 bp, Artificial Sequence
  ENSG00000053702_8 (sequence is synthesized)
acgggggctcttgaagccaggtagctggggactatggtgtctgcccttccaatcacctccctgacccctgctgtcccattttccccagctggccgcattcctctctgcttctcagcagct

SEQ ID NO: 36044 - DNA, 120 bp, Artificial Sequence
  ENSG00000053702_9 (sequence is synthesized)
gtcctactccccaggacgagttttcactagagggcccacgatgccaggattctgattcatcttcctcccaagaaaagcaaagccaaatcaagaccacagataggaacctaagcacaatgg

SEQ ID NO: 36045 - DNA, 120 bp, Artificial Sequence
  ENSG00000053702_10 (sequence is synthesized)
ggtgcctgcttgggctgggtcgaaggctctgctgactgctgtccttgtccatcacccaataccaccccaaacacaactcaacttcccacaccaccatgtctctcaccacaccttctgggc

SEQ ID NO: 36046 - DNA, 120 bp, Artificial Sequence
  ENSG00000053702_11 (sequence is synthesized)
gccagaattcaatacaacaaagagcgggagttagtataggaatgtccatctcataaggctgagagctattttttcctgtggctgcaaatgtctgaagccagttagtttgattaccctgtg

SEQ ID NO: 36047 - DNA, 120 bp, Artificial Sequence
  ENSG00000053702_12 (sequence is synthesized)
caaaaccttggacatacttctgctattaacgctataggtatttatccgtttccactggctttttgtacccaccgagcccctgagccttgcgtgtgtgtgtgtggaagagccttgtagaga

SEQ ID NO: 36048 - DNA, 120 bp, Artificial Sequence
  ENSG00000053702_13 (sequence is synthesized)
actgctcctgtgaggcagacaggacagtgaggttgtcaccactcagacttcacctattcagcattctttctgatttctagaactatccacctcattaggccttcttcctatccccatctc

SEQ ID NO: 36049 - DNA, 120 bp, Artificial Sequence
  ENSG00000053702_14 (sequence is synthesized)
tggcctcttgagcttaagcttgtattgtcctggaatcagtggctttctaaccccctgccaggctttgccaaagcaaaaagacagaggctttttttttttttttaaagtttggggtctgtc

SEQ ID NO: 36050 - DNA, 120 bp, Artificial Sequence
  ENSG00000053702_15 (sequence is synthesized)
aggagacagaggcttttttgaattcactgtgaagagaagaacccgaaccttaagacgccagatccctgagagtctttctggctggtttgagtctctcaaatcatggattaggagtaaaga

SEQ ID NO: 36051 - DNA, 85 bp, Artificial Sequence
  ENSG00000053702_16 (sequence is synthesized)
aggagttgcttgaacctgggagatgggggttgtagtgagccaagttcgtgccatcggactccagcctgggtgaaggagtgagacc

SEQ ID NO: 36052 - DNA, 120 bp, Artificial Sequence
  ENSG00000053702_17 (sequence is synthesized)
tcgtgccatcggactccagcctgggtgaaggagtgagaccctgtctccaaaaacaaacaaaaaaggagcagagaaagacagtggtacagctaacctgaacaagggaactgggaccgttgg

SEQ ID NO: 36053 - DNA, 120 bp, Artificial Sequence
  ENSG00000053702_18 (sequence is synthesized)
gctgaaacagtcttgagcctggggttgactgggttagagaagaaccgggatgcaaggagctgcctgtgacacctggcctgccctttctcagctgcctcccctgccctttctcagctgcct

SEQ ID NO: 36054 - DNA, 120 bp, Artificial Sequence
  ENSG00000053702_19 (sequence is synthesized)
cccctgccctcagaaggaaaggagagggctcacttatcacttgtgccatagcacctggtctcaaaatcctaaaagctttcctcgccctcactgccttgctccacaaggtccactttcctg

SEQ ID NO: 36055 - DNA, 120 bp, Artificial Sequence
  ENSG00000053702_20 (sequence is synthesized)
ggtcttgtgctgtgcctttccttgtctgcctcctgctgcttctgtaactgcagaccccaggcccaatggcaagccctcggctcagctgcttctccattggaataaactcttgtttctcta

SEQ ID NO: 36056 - DNA, 120 bp, Artificial Sequence
  ENSG00000053747_0 (sequence is synthesized)
gagcgctgtcagttcctgatccggctggtgcccgctccagccgcggcaggttccagagctgagaggccacccccacgccgcgggcttccagcgcgtggagcaaggggagcggccccggcg

SEQ ID NO: 36057 - DNA, 120 bp, Artificial Sequence
  ENSG00000053747_1 (sequence is synthesized)
ccgcccatatccccggctgcgctagtcctggcgctgcaggtccgggaggcgcaggcggagagcggcggtgcccccgagcccctctgcggacggctcaggcgggaggaccccgcgcggctg

SEQ ID NO: 36058 - DNA, 120 bp, Artificial Sequence
  ENSG00000053747_2 (sequence is synthesized)
gctggatggcggcggccgcgcggcctcggggtcgggcactggggccagtactgccgccgacgccgctgctcctgctggtactgcgggtgctgccagcctgcggggcgaccgctcgggatc

SEQ ID NO: 36059 - DNA, 120 bp, Artificial Sequence
  ENSG00000053747_3 (sequence is synthesized)
ggccgcggccgggctcagccttcacccgacttacttcaacctggccgaggcggcgaggatttgggccaccgccacctgcggggagaggggacccggcgaggggaggccccagcccgagct

SEQ ID NO: 36060 - DNA, 120 bp, Artificial Sequence
  ENSG00000053747_4 (sequence is synthesized)
ctactgcaagttggtcgggggccccaccgccccaggcagcggccacaccatccagggccagttctgtgactattgcaattctgaagaccccaggaaagcacatcctgtcaccaatgccat

SEQ ID NO: 36061 - DNA, 120 bp, Artificial Sequence
  ENSG00000053747_5 (sequence is synthesized)
cgatggatctgaacgttggtggcaaagccctcccctgtcctcaggcacacagtacaacagagtcaacctcaccttggatctggggcagctcttccatgtggcctatattttaatcaaatt

SEQ ID NO: 36062 - DNA, 120 bp, Artificial Sequence
  ENSG00000053747_6 (sequence is synthesized)
tgcaaattctcctcgccctgatctttgggtcttggaaagatctgtagactttggaagcacctactcaccatggcaatattttgctcattctaaagtagactgtttaaaagaatttgggcg

SEQ ID NO: 36063 - DNA, 120 bp, Artificial Sequence
  ENSG00000053747_7 (sequence is synthesized)
ggaggcaaatatggctgtcacccgggatgatgatgtactttgtgttactgaatattcccgtattgtacctttggaaaatggtgaggttgtggtgtccttgataaacggtcgtccaggtgc

SEQ ID NO: 36064 - DNA, 120 bp, Artificial Sequence
  ENSG00000053747_8 (sequence is synthesized)
aaaaaattttactttctctcacaccctgagggagtttaccaaggcaacaaacatccgcttgcgttttcttagaaccaatacgcttcttggacacctcatctccaaagcccagcgagatcc

SEQ ID NO: 36065 - DNA, 120 bp, Artificial Sequence
  ENSG00000053747_9 (sequence is synthesized)
aactgtcactcggcggtattattacagcataaaggacatcagcattggtgggcagtgtgtttgcaatggccatgctgaagtgtgcaatataaacaatcctgaaaaactgtttcggtgtga

SEQ ID NO: 36066 - DNA, 120 bp, Artificial Sequence
  ENSG00000053747_10 (sequence is synthesized)
atgccagcaccacacctgtggggagacgtgtgatcgctgctgcacagggtacaatcagaggcgctggcggcccgccgcttgggagcagagccacgagtgtgaagcatgcaactgccacgg

SEQ ID NO: 36067 - DNA, 120 bp, Artificial Sequence
  ENSG00000053747_11 (sequence is synthesized)
ccatgccagcaactgttactatgatccagatgttgagcggcagcaggcaagcttgaatacccagggcatctatgctggtggaggggtctgcattaactgtcagcacaacacagctggagt

SEQ ID NO: 36068 - DNA, 120 bp, Artificial Sequence
  ENSG00000053747_12 (sequence is synthesized)
aaactgtgaacagtgtgctaagggctattaccgcccttatggggttccagtggatgcccctgatggctgcatcccctgcagctgtgaccctgagcatgcggatggctgtgaacagggttc

SEQ ID NO: 36069 - DNA, 120 bp, Artificial Sequence
  ENSG00000053747_13 (sequence is synthesized)
aggccgctgtcactgcaagccaaatttccacggagacaactgtgagaagtgtgcaattggatactacaatttcccattttgcttgagaattcccatttttcctgtttctacaccaagttc

SEQ ID NO: 36070 - DNA, 120 bp, Artificial Sequence
  ENSG00000053747_14 (sequence is synthesized)
agaagatccagtagctggagatataaaagggtgtgactgtaatctggaaggtgttctccctgaaatatgtgatgcccacggacggtgcctgtgccgccctggggttgagggccctcgatg

SEQ ID NO: 36071 - DNA, 120 bp, Artificial Sequence
  ENSG00000053747_15 (sequence is synthesized)
tgatacctgccgctctggtttctactcattccctatttgccaagcctgctggtgttcagcccttggatcctaccagatgccctgcagctcagtgactggacagtgtgaatgtcggccagg

SEQ ID NO: 36072 - DNA, 120 bp, Artificial Sequence
  ENSG00000053747_16 (sequence is synthesized)
agttacaggacagcggtgtgacaggtgtctctcaggagcttatgatttcccccactgccaaggttccagcagtgcttgtgacccagctggtaccatcaactccaatttggggtattgcca

SEQ ID NO: 36073 - DNA, 120 bp, Artificial Sequence
  ENSG00000053747_17 (sequence is synthesized)
atgcaagcttcatgttgaaggtcctacttgtagccgctgcaaactgttatattggaatctggacaaagaaaaccccagtggatgttcagaatgcaagtgccataaggcgggaacagtgag

SEQ ID NO: 36074 - DNA, 120 bp, Artificial Sequence
  ENSG00000053747_18 (sequence is synthesized)
tggaactggagagtgtaggcagggagatggtgactgtcactgcaagtcccatgtgggtggcgattcctgcgacacctgtgaagatggatattttgctttggaaaagagcaattactttgg

SEQ ID NO: 36075 - DNA, 120 bp, Artificial Sequence
  ENSG00000053747_19 (sequence is synthesized)
gtgtcaagggtgtcagtgtgacattggtggggcattgtcctccatgtgcagtgggccctcgggagtgtgccagtgccgagagcatgtcgtgggaaaggtgtgccagcggcctgaaaacaa

SEQ ID NO: 36076 - DNA, 120 bp, Artificial Sequence
  ENSG00000053747_20 (sequence is synthesized)
ctactatttcccagatttgcatcatatgaagtatgagattgaagacggcagcacacctaatgggagagaccttcgatttggatttgatccgctggcatttcctgagtttagctggagagg

SEQ ID NO: 36077 - DNA, 120 bp, Artificial Sequence
  ENSG00000053747_21 (sequence is synthesized)
atatgcccaaatgacctcagtacagaatgatgtaagaataacattgaatgtagggaagtcaagtggctccttgtttcgtgttattctgagatacgttaaccctggaactgaagcagtatc

SEQ ID NO: 36078 - DNA, 120 bp, Artificial Sequence
  ENSG00000053747_22 (sequence is synthesized)
tggccatataactatttatccatcctggggtgctgctcaaagcaaagagatcatcttcctgccgagtaaggagccagcctttgtcactgtccctggaaatggttttgcagacccattttc

SEQ ID NO: 36079 - DNA, 120 bp, Artificial Sequence
  ENSG00000053747_23 (sequence is synthesized)
aatcacaccaggaatatgggttgcttgtattaaggcagaaggagtccttctggattacctggtgctgctccccagggactactatgaagcctctgtactgcagctgccagtcacagaacc

SEQ ID NO: 36080 - DNA, 120 bp, Artificial Sequence
  ENSG00000053747_24 (sequence is synthesized)
atgtgcctacgcaggacctccccaagaaaattgcttactctaccagcatttgccagtgaccagattcccctgtaccctggcttgtgaggccagacacttcctgcttgatggggagccaag

SEQ ID NO: 36081 - DNA, 120 bp, Artificial Sequence
  ENSG00000053747_25 (sequence is synthesized)
acccgtggcagtgaggcagcccacacctgcacaccctgtcatggtggacctcagcgggagagaggtggaattgcatctgcggctgcgcatcccacaggttggccactacgtggttgtggt

SEQ ID NO: 36082 - DNA, 120 bp, Artificial Sequence
  ENSG00000053747_26 (sequence is synthesized)
cgagtattccacggaggcagctcagctgtttgtggttgatgtgaatgtgaagagctccgggtctgttctggcaggccaggtgaacatttacagctgcaactacagtgttctctgccggag

SEQ ID NO: 36083 - DNA, 120 bp, Artificial Sequence
  ENSG00000053747_27 (sequence is synthesized)
tgctgtgattgatcacatgagccgcatcgccatgtatgagctattggcagatgcagacattcagctcaagggacacatggcccgattccttctgcatcaagtttgtatcatacctattga

SEQ ID NO: 36084 - DNA, 120 bp, Artificial Sequence
  ENSG00000053747_28 (sequence is synthesized)
agaattctcagctgagtatgtgagaccacaagtccactgcattgccagttatgggcgatttgtcaatcaaagtgccacctgtgtctccttggcccatgaaactcctccaacagcattaat

SEQ ID NO: 36085 - DNA, 120 bp, Artificial Sequence
  ENSG00000053747_29 (sequence is synthesized)
tttggatgttctaagtggcaggcctttccctcacctgccccagcagtcgtcaccttctgttgatgttcttcctggggtcaccttgaaggcaccgcagaatcaagtgaccctgagaggacg

SEQ ID NO: 36086 - DNA, 120 bp, Artificial Sequence
  ENSG00000053747_30 (sequence is synthesized)
tgtaccacacctgggccgatacgtctttgtcatccatttttaccaagcagcgcacccgacgtttcccgcgcaggtgtcggtggatggcgggtggccacgggcaggctccttccatgcctc

SEQ ID NO: 36087 - DNA, 120 bp, Artificial Sequence
  ENSG00000053747_31 (sequence is synthesized)
tttttgcccccatgtgcttggctgccgggatcaagtgattgccgaaggccagattgagtttgacatctcagagcctgaagtggccgcaactgtgaaggttccagaaggaaagtccttggt

SEQ ID NO: 36088 - DNA, 120 bp, Artificial Sequence
  ENSG00000053747_32 (sequence is synthesized)
tttggtccgtgttctagtggtgcctgcagaaaactatgactaccaaatacttcacaaaaaatccatggacaagtcactcgagtttatcaccaattgtggaaaaaacagcttttaccttga

SEQ ID NO: 36089 - DNA, 120 bp, Artificial Sequence
  ENSG00000053747_33 (sequence is synthesized)
cccccagacagcctccagattctgtaagaattccgccaggtccctggtggccttttaccacaagggcgccctgccttgtgagtgccaccccactggggccaccggccctcactgcagccc

SEQ ID NO: 36090 - DNA, 120 bp, Artificial Sequence
  ENSG00000053747_34 (sequence is synthesized)
tgagggtgggcagtgcccatgccagcccaacgtcatcgggcggcagtgcacccgctgtgcaacaggccactacggattcccacgctgcaagccgtgcagctgtggtcggcgcctttgtga

SEQ ID NO: 36091 - DNA, 120 bp, Artificial Sequence
  ENSG00000053747_35 (sequence is synthesized)
agagatgacggggcagtgccgctgccctccccgcacggtcaggccccagtgtgaggtgtgtgagacacactcattcagcttccaccccatggccggctgcgaaggctgcaactgttccag

SEQ ID NO: 36092 - DNA, 120 bp, Artificial Sequence
  ENSG00000053747_36 (sequence is synthesized)
gaggggcaccatcgaggctgccatgccggagtgtgaccgggacagcgggcagtgcagatgcaagcccagaatcacagggcggcagtgtgaccgatgtgcttccgggttttaccgctttcc

SEQ ID NO: 36093 - DNA, 120 bp, Artificial Sequence
  ENSG00000053747_37 (sequence is synthesized)
tgagtgtgttccctgcaattgcaacagagatgggactgagccaggagtgtgtgacccagggaccggggcttgcctctgcaaggaaaatgtagaaggcacagagtgtaatgtgtgtcgaga

SEQ ID NO: 36094 - DNA, 120 bp, Artificial Sequence
  ENSG00000053747_38 (sequence is synthesized)
aggctcattccatttggacccagccaatctcaagggttgtaccagctgtttctgttttggagtaaataatcaatgtcacagctcacataagcgaaggactaagtttgtggatatgctggg

SEQ ID NO: 36095 - DNA, 120 bp, Artificial Sequence
  ENSG00000053747_39 (sequence is synthesized)
ctggcacctggagacagcagacagagtggacatccctgtctctttcaacccaggcagcaacagtatggtggcggatctccaggagctgcccgcaaccatccacagcgcgtcctgggtcgc

SEQ ID NO: 36096 - DNA, 120 bp, Artificial Sequence
  ENSG00000053747_40 (sequence is synthesized)
acccacctcctacctgggggacaaggtttcttcatatggtggttacctcacttaccaagccaagtcctttggcttgcctggcgacatggttcttctggaaaagaagccggatgtacagct

SEQ ID NO: 36097 - DNA, 120 bp, Artificial Sequence
  ENSG00000053747_41 (sequence is synthesized)
cactggtcagcacatgtccatcatctatgaggagacaaacaccccacggccagaccggctgcatcatggacgagtgcacgtggtcgagggaaacttcagacatgccagcagccgtgcccc

SEQ ID NO: 36098 - DNA, 120 bp, Artificial Sequence
  ENSG00000053747_42 (sequence is synthesized)
agtgtctagggaggagctgatgacagtgctgtctagactggcagatgtgcgcatccaaggcctctacttcacagagactcaaaggctcaccctgagcgaggtggggctagaggaagcctc

SEQ ID NO: 36099 - DNA, 120 bp, Artificial Sequence
  ENSG00000053747_43 (sequence is synthesized)
tgacacaggaagtgggcgcatagcacttgctgtggaaatctgtgcctgcccccctgcctacgctggtgactcttgtcagggttgtagccctggatactatcgggatcataaaggcttgta

SEQ ID NO: 36100 - DNA, 120 bp, Artificial Sequence
  ENSG00000053747_44 (sequence is synthesized)
actgtgaacgctgccaggagggctactatggcaacgccgtccacggatcctgcagggcctgcccatgtcctcacactaacagctttgccactggctgtgtggtgaatgggggagacgtgc

SEQ ID NO: 36101 - DNA, 120 bp, Artificial Sequence
  ENSG00000053747_45 (sequence is synthesized)
ggtgctcctgcaaagctgggtacacaggaacacagtgtgaaaggtgtgcaccgggatatttcgggaatccccagaaattcggaggtagctgccaaccatgcagttgtaacagcaatggcc

SEQ ID NO: 36102 - DNA, 120 bp, Artificial Sequence
  ENSG00000053747_46 (sequence is synthesized)
agctgggcagctgtcatcccctgactggagactgcataaaccaagaacccaaagatagcagccctgcagaagaatgtgatgattgcgacagctgtgtgatgaccctcctgaacgacctgg

SEQ ID NO: 36103 - DNA, 120 bp, Artificial Sequence
  ENSG00000053747_47 (sequence is synthesized)
ccaccatgggcgagcagctccgcctggtcaagtctcagctgcagggcctgagtgccagcgcagggcttctggagcagatgaggcacatggagacccaggccaaggacctgaggaatcagt

SEQ ID NO: 36104 - DNA, 120 bp, Artificial Sequence
  ENSG00000053747_48 (sequence is synthesized)
tgctcaactaccgttctgccatttcaaatcatggatcaaaaatagaaggcctggaaagagaactgactgatttgaatcaagaatttgagactttgcaagaaaaggctcaagtaaattcca

SEQ ID NO: 36105 - DNA, 120 bp, Artificial Sequence
  ENSG00000053747_49 (sequence is synthesized)
gaaaagcacaaacattaaacaacaatgttaatcgggcaacacaaagcgcaaaagaactggatgtgaagattaaaaatgtcatccggaatgtgcacattcttttaaagcagatctctggga

SEQ ID NO: 36106 - DNA, 120 bp, Artificial Sequence
  ENSG00000053747_50 (sequence is synthesized)
cagatggagagggaaacaacgtgccttcaggtgacttttccagagagtgggctgaagcccagcgcatgatgagggaactgcggaacaggaactttggaaagcacctcagagaagcagaag

SEQ ID NO: 36107 - DNA, 120 bp, Artificial Sequence
  ENSG00000053747_51 (sequence is synthesized)
ctgataaaagggagtcgcagctcttgctgaaccggataaggacctggcagaaaacccaccagggggagaacaatgggcttgctaacagtatccgggattctttaaatgaatacgaagcca

SEQ ID NO: 36108 - DNA, 120 bp, Artificial Sequence
  ENSG00000053747_52 (sequence is synthesized)
aactcagtgaccttcgtgctcggctgcaggaggcagctgcccaagccaagcaggcaaatggcttgaaccaagaaaacgagagagctttgggagccattcagagacaagtgaaagaaataa

SEQ ID NO: 36109 - DNA, 120 bp, Artificial Sequence
  ENSG00000053747_53 (sequence is synthesized)
attccctgcagagtgatttcaccaagtatctaaccactgcagactcatctttgttgcaaaccaacattgcgctgcagctgatggagaaaagccagaaggaatatgaaaaattagctgcca

SEQ ID NO: 36110 - DNA, 120 bp, Artificial Sequence
  ENSG00000053747_54 (sequence is synthesized)
gtttaaatgaagcaagacaagaactaagtgacaaagtaagagaactttccagatctgctggcaaaacatcccttgtggaggaggcagaaaagcacgcgcggtccttacaagagctggcaa

SEQ ID NO: 36111 - DNA, 120 bp, Artificial Sequence
  ENSG00000053747_55 (sequence is synthesized)
agcagctggaagagatcaagagaaacgccagcggggatgagctggtgcgctgtgctgtggatgccgccaccgcctacgagaacatcctcaatgccatcaaagcggccgaggacgcagcca

SEQ ID NO: 36112 - DNA, 120 bp, Artificial Sequence
  ENSG00000053747_56 (sequence is synthesized)
acagggctgccagtgcatctgaatctgccctccagacagtgataaaggaagatctgccaagaaaagctaaaaccctgagttccaacagtgataaactgttaaatgaagccaagatgacac

SEQ ID NO: 36113 - DNA, 120 bp, Artificial Sequence
  ENSG00000053747_57 (sequence is synthesized)
aaaagaagctaaagcaagaagtcagtccagctctcaacaacctacagcaaaccctgaatattgtgacagttcagaaagaagtgatagacaccaatctcacaactctccgagatggtcttc

SEQ ID NO: 36114 - DNA, 120 bp, Artificial Sequence
  ENSG00000053747_58 (sequence is synthesized)
atgggatacagagaggtgatattgatgctatgatcagtagtgcaaagagcatggtcagaaaggccaacgacatcacagatgaggttctggatgggctcaaccccatccagacagatgtgg

SEQ ID NO: 36115 - DNA, 120 bp, Artificial Sequence
  ENSG00000053747_59 (sequence is synthesized)
aaagaattaaggacacctatgggaggacacagaacgaagacttcaaaaaggctctgactgatgcagataactcggtgaataagttaaccaacaaactacctgatctttggcgcaagattg

SEQ ID NO: 36116 - DNA, 120 bp, Artificial Sequence
  ENSG00000053747_60 (sequence is synthesized)
aaagtatcaaccaacagctgttgcccttgggaaacatctctgacaacatggacagaatacgagaactaattcagcaggccagagatgctgccagtaaggttgctgtccccatgaggttca

SEQ ID NO: 36117 - DNA, 120 bp, Artificial Sequence
  ENSG00000053747_61 (sequence is synthesized)
atggtaaatctggagtcgaagtccgactgccaaatgacctggaagatttgaaaggatatacatctctgtccttgtttctccaaaggcccaactcaagagaaaatgggggtactgagaata

SEQ ID NO: 36118 - DNA, 120 bp, Artificial Sequence
  ENSG00000053747_62 (sequence is synthesized)
tgtttgtgatgtaccttggaaataaagatgcctcccgggactacatcggcatggcagttgtggatggccagctcacctgtgtctacaacctgggggaccgtgaggctgaactccaagtgg

SEQ ID NO: 36119 - DNA, 120 bp, Artificial Sequence
  ENSG00000053747_63 (sequence is synthesized)
accagatcttgaccaagagtgagactaaggaggcagttatggatcgggtgaaatttcagagaatttatcagtttgcaaggcttaattacaccaaaggagccacatccagtaaaccagaaa

SEQ ID NO: 36120 - DNA, 120 bp, Artificial Sequence
  ENSG00000053747_64 (sequence is synthesized)
cacccggagtctatgacatggatggtagaaatagcaatacactccttaatttggatcctgaaaatgttgtattttatgttggaggttacccacctgattttaaacttcccagtcgactaa

SEQ ID NO: 36121 - DNA, 120 bp, Artificial Sequence
  ENSG00000053747_65 (sequence is synthesized)
gtttccctccatacaaaggttgtattgaattagatgacctcaatgaaaatgttctgagcttgtacaacttcaaaaaaacattcaatctcaacacaactgaagtggagccttgtagaagga

SEQ ID NO: 36122 - DNA, 120 bp, Artificial Sequence
  ENSG00000053747_66 (sequence is synthesized)
ggaaggaagagtcagacaaaaattattttgaaggtacgggctatgctcgagttccaactcaaccacatgctcccatcccaacctttggacagacaattcagaccaccgtggatagaggct

SEQ ID NO: 36123 - DNA, 120 bp, Artificial Sequence
  ENSG00000053747_67 (sequence is synthesized)
tgctgttctttgcagaaaacggggatcgcttcatatctctaaatatagaagatggcaagctcatggtgagatacaaactgaattcagagctaccaaaagagagaggagttggagacgcca

SEQ ID NO: 36124 - DNA, 120 bp, Artificial Sequence
  ENSG00000053747_68 (sequence is synthesized)
taaacaacggcagagaccattcgattcagatcaaaattggaaaactccaaaagcgtatgtggataaatgtggacgttcaaaacactataattgatggtgaagtatttgatttcagcacat

SEQ ID NO: 36125 - DNA, 120 bp, Artificial Sequence
  ENSG00000053747_69 (sequence is synthesized)
attatctgggaggaattccaattgcaatcagggaaagatttaacatttctacgcctgctttccgaggctgcatgaaaaatttgaagaaaaccagtggtgtcgttagattgaatgatactg

SEQ ID NO: 36126 - DNA, 120 bp, Artificial Sequence
  ENSG00000053747_70 (sequence is synthesized)
tgggagtaaccaaaaagtgctcggaagactggaagcttgtgcgatctgcctcattctccagaggaggacaattgagtttcactgatttgggcttaccacctactgaccacctccaggcct

SEQ ID NO: 36127 - DNA, 120 bp, Artificial Sequence
  ENSG00000053747_71 (sequence is synthesized)
catttggatttcagacctttcaacccagtggcatattattagatcatcagacatggacaaggaacctgcaggtcactctggaagatggttacattgaattgagcaccagcgatagcggcg

SEQ ID NO: 36128 - DNA, 120 bp, Artificial Sequence
  ENSG00000053747_72 (sequence is synthesized)
gcccaatttttaaatctccacagacgtatatggatggtttactgcattatgtatctgtaataagcgacaactctggactacggcttctcatcgatgaccagcttctgagaaatagcaaaa

SEQ ID NO: 36129 - DNA, 120 bp, Artificial Sequence
  ENSG00000053747_73 (sequence is synthesized)
ggctaaaacacatttcaagttcccggcagtctctgcgtctgggcgggagcaattttgagggttgtattagcaatgtttttgtccagaggttatcactgagtcctgaagtcctagatttga

SEQ ID NO: 36130 - DNA, 120 bp, Artificial Sequence
  ENSG00000053747_74 (sequence is synthesized)
ccagtaactctctcaagagagatgtgtccctgggaggctgcagtttaaacaaaccaccttttctaatgttgcttaaaggttctaccaggtttaacaagaccaagacttttcgtatcaacc

SEQ ID NO: 36131 - DNA, 120 bp, Artificial Sequence
  ENSG00000053747_75 (sequence is synthesized)
agctgttgcaggacacaccagtggcctccccaaggagcgtgaaggtgtggcaagatgcttgctcaccacttcccaagacccaggccaatcatggagccctccagtttggggacattccca

SEQ ID NO: 36132 - DNA, 120 bp, Artificial Sequence
  ENSG00000053747_76 (sequence is synthesized)
ccagccacttgctattcaagcttcctcaggagctgctgaaacccaggtcacagtttgctgtggacatgcagacaacatcctccagaggactggtgtttcacacgggcactaagaactcct

SEQ ID NO: 36133 - DNA, 120 bp, Artificial Sequence
  ENSG00000053747_77 (sequence is synthesized)
ttatggctctttatctttcaaaaggacgtctggtctttgcactggggacagatgggaaaaaattgaggatcaaaagcaaggagaaatgcaatgatgggaaatggcacacggtggtgtttg

SEQ ID NO: 36134 - DNA, 120 bp, Artificial Sequence
  ENSG00000053747_78 (sequence is synthesized)
gccatgatggggaaaaggggcgcttggttgtggatggactgagggcccgggagggaagtttgcctggaaactccaccatcagcatcagagcgccagtttacctgggatcacctccatcag

SEQ ID NO: 36135 - DNA, 120 bp, Artificial Sequence
  ENSG00000053747_79 (sequence is synthesized)
ggaaaccaaagagcctccccacaaacagctttgtgggatgcctgaagaactttcagctggattcaaaacccttgtataccccttcttcaagcttcggggtgtcttcctgcttgggtggtc

SEQ ID NO: 36136 - DNA, 120 bp, Artificial Sequence
  ENSG00000053747_80 (sequence is synthesized)
ctttggagaaaggcatttatttctctgaagaaggaggtcatgtcgtcttggctcactctgtattgttggggccagaatttaagcttgttttcagcatccgcccaagaagtctcactggga

SEQ ID NO: 36137 - DNA, 120 bp, Artificial Sequence
  ENSG00000053747_81 (sequence is synthesized)
tcctaatacacatcggaagtcagcccgggaagcacttatgtgtttacctggaggcaggaaaggtcacggcctctatggacagtggggcaggtgggacctcaacgtcggtcacaccaaagc

SEQ ID NO: 36138 - DNA, 120 bp, Artificial Sequence
  ENSG00000053747_82 (sequence is synthesized)
agtctctgtgtgatggacagtggcactcggtggcagtcaccataaaacaacacatcctgcacctggaactggacacagacagtagctacacagctggacagatccccttcccacctgcca

SEQ ID NO: 36139 - DNA, 120 bp, Artificial Sequence
  ENSG00000053747_83 (sequence is synthesized)
gcactcaagagccactacaccttggaggtgctccagccaatttgacgacactgaggatccctgtgtggaaatcattctttggctgtctgaggaatattcatgtcaatcacatccctgtcc

SEQ ID NO: 36140 - DNA, 120 bp, Artificial Sequence
  ENSG00000053747_84 (sequence is synthesized)
ctgtcactgaagccttggaagtccaggggcctgtcagtctgaatggttgtcctgaccagtaacccaagcctatttcacagcaaggaaattcaccttcaaaagcactgattacccaatgca

SEQ ID NO: 36141 - DNA, 120 bp, Artificial Sequence
  ENSG00000053747_85 (sequence is synthesized)
cctccctccccagctcgagatcattcttcactcaggacacaaaccagacaggtttaatagcgaatctaattttgaattctgaccatggatacccatcactttggcattcagtgctacatg

SEQ ID NO: 36142 - DNA, 120 bp, Artificial Sequence
  ENSG00000053747_86 (sequence is synthesized)
catgtgtattttatataaaaatcccatttcttgaagataaaaaaattgttattcaaattgttatgcacagaatgtttttggtaatattaatttccactaaaaaattaaatgtcttttaag

SEQ ID NO: 36143 - DNA, 120 bp, Artificial Sequence
  ENSG00000053747_87 (sequence is synthesized)
aaacattcttttccacttgttaaaaaaattaaatatattttaaagcactttaagaatatgaaactttcatatatgttaaaggattataatttatggaattaaaaaatgcagtgtagtcct

SEQ ID NO: 36144 - DNA, 120 bp, Artificial Sequence
  ENSG00000053747_88 (sequence is synthesized)
ggcaggccaggtgaacatttacagctgcaactacaggtgcgatgcaatgaactcactgctctcacctcaaaggctgtgtcaagtacctgggtgcatagcacaaggaaaaagactcattct

SEQ ID NO: 36145 - DNA, 120 bp, Artificial Sequence
  ENSG00000053747_89 (sequence is synthesized)
cagtaatgttagggggtgcacacctacctttgcaacacaccttcagaactggggataattaatgtttgatgattgtcaagtggaaaaaaaaattaacaaaggacttcaaaatttgccctg

SEQ ID NO: 36146 - DNA, 120 bp, Artificial Sequence
  ENSG00000053747_90 (sequence is synthesized)
agaatcagcacaaggggtgtttccacatgaaattaattgtatactaaatgggactggaagtcagagttccttgaaacagcagatggagcactgcagtaaacccatccagttcttggccat

SEQ ID NO: 36147 - DNA, 120 bp, Artificial Sequence
  ENSG00000053747_91 (sequence is synthesized)
ggccttgaacattgtattactactactttcatgttgctttttgtcaaacccaagatgacctgaagcaatggacatcttccctgttgtgaaaatgaaaacaaataaacaaataaacaaaaa

SEQ ID NO: 36148 - DNA, 120 bp, Artificial Sequence
  ENSG00000053747_92 (sequence is synthesized)
ggtatctctttggtccagttaacaaagtcagctttgtcaacatgtgctgcacgagacccgcataccacagtctttcaaaatgccatctttggcaagatacacccattaaaaaacccataa

SEQ ID NO: 36149 - DNA, 120 bp, Artificial Sequence
  ENSG00000053747_93 (sequence is synthesized)
aaaactcctgggcccggcctccttttggaggagcagcgttagcatgtaaccttggaaaagacctaattaaaattaacttcagattatggcccggaaaagtattcactggaattttattgc

SEQ ID NO: 36150 - DNA, 120 bp, Artificial Sequence
  ENSG00000053747_94 (sequence is synthesized)
ggtttactgcattatgtatctgtaataagcgacaactctgggtgagtggaataatacttctgtcagagctgtgagtgagttttactctctttcgtttaatggaattttctggtgtctttt

SEQ ID NO: 36151 - DNA, 120 bp, Artificial Sequence
  ENSG00000053747_95 (sequence is synthesized)
cttcttcctttttccatatcaatttcttcataaaaaaataaactgccacacatggtggctcatgtctgtaatcccaacaactaagaaggctgaggcaagagggttgcttgaggccaagag

SEQ ID NO: 36152 - DNA, 120 bp, Artificial Sequence
  ENSG00000053747_96 (sequence is synthesized)
ttcgagaccagtcttggaaacacagtgaaaccatgtctctacgaaaactaaaataaaataaaatgtaaataaataaaattttaaaaataaatcagttggatggataaattgtggtgtatt

SEQ ID NO: 36153 - DNA, 120 bp, Artificial Sequence
  ENSG00000053747_97 (sequence is synthesized)
caaatggaatgctatatagcaatgagaaagaaggatctagaactatatgtaatgacatgaatgaccctcacaaacataatgtggaaaacattgagtcacacataaaagttcatctcatat

SEQ ID NO: 36154 - DNA, 120 bp, Artificial Sequence
  ENSG00000053747_98 (sequence is synthesized)
gtgaaaaggtggccatctacaagccagaaagcaggccctcagcagaaactgaaccagccagcacctggatcttggacttcccagcctccagaactggagaaataaatttctattgtttaa

SEQ ID NO: 36155 - DNA, 120 bp, Artificial Sequence
  ENSG00000053747_99 (sequence is synthesized)
ctcagttgcaatatgaggctgttcagctacaagagctctgagttccctgtggttctgttggacgagattctttgaatagattcttaatgattccttcattcaagtagccatatgcactgc

SEQ ID NO: 36156 - DNA, 120 bp, Artificial Sequence
  ENSG00000053747_100 (sequence is synthesized)
atgcctccagcagtgaggcggtcagcctgcagcatgggatggctgtggatctttggggcagccctggggcagtgtctgggctacagttcacagcagcaaagggtgccatttcttcagcct

SEQ ID NO: 36157 - DNA, 120 bp, Artificial Sequence
  ENSG00000053747_101 (sequence is synthesized)
cccggtcaaagtcaactgcaagcgagttatgtggagtttagacccagccagggttgtagccctggatactatcgggatcataaaggcttgtataccggacggtgtgttccctgcaattgc

SEQ ID NO: 36158 - DNA, 120 bp, Artificial Sequence
  ENSG00000053747_102 (sequence is synthesized)
atgtgttacctacaacatagtcttctacagataatcactgagcatatactgatgagggttttgtgtgtgttcactattgcaactacagtgagggataagaaataaattcctgcccttaag

SEQ ID NO: 36159 - DNA, 120 bp, Artificial Sequence
  ENSG00000053747_103 (sequence is synthesized)
gaatatgcagtccaattggggagacatataatattcataaaatagtaacttacaaacaaactgaactaatgaacccattaattaatgaagcccattggtttcccaatcctagccttcccc

SEQ ID NO: 36160 - DNA, 120 bp, Artificial Sequence
  ENSG00000053747_104 (sequence is synthesized)
agcctgctaccaaccaagtctagattatgatgatcaattccttgagggcacaaactacctggtagggaagctgagatggatgtaacgcaccatcactgaagcttcatatggcaagctaac

SEQ ID NO: 36161 - DNA, 120 bp, Artificial Sequence
  ENSG00000053747_105 (sequence is synthesized)
caaagtcagtgggatggaggactcacttctagttttatctacaaaataatgaatgatgtactgaaccaatattattacccagcaccactttccctaacagagaaggctacacaagcattt

SEQ ID NO: 36162 - DNA, 120 bp, Artificial Sequence
  ENSG00000053747_106 (sequence is synthesized)
ccatatcctctacatagtatttgttcatcagaagaaaaataacaaataattctaaaaaattggatatagtaatcctatgtggtacccttatagctacacaccctgcacctttgaaactga

SEQ ID NO: 36163 - DNA, 120 bp, Artificial Sequence
  ENSG00000053747_107 (sequence is synthesized)
gtcacatccccttcaacccaatgttctcttctgacttccacactgcagtcttgtggacatgctttctaaccacatctatacagaaattgaatgttctcctggagaggtagcgaggtcccc

SEQ ID NO: 36164 - DNA, 120 bp, Artificial Sequence
  ENSG00000053747_108 (sequence is synthesized)
atcataggagtattcaacagaggctgggtggtggtccttagggatgccatgttgggttggaggttaaactacatgactctaagctatgtgctttcttgaaatattgattttaaaatgaaa

SEQ ID NO: 36165 - DNA, 120 bp, Artificial Sequence
  ENSG00000053747_109 (sequence is synthesized)
aattcaccaggtgatgaccagccaggaactgagtctgcaagaggatcatccattttaacacctgcctttggcaggtctacactaagccggtggttctctcttctgggtccccagtgttaa

SEQ ID NO: 36166 - DNA, 120 bp, Artificial Sequence
  ENSG00000053747_110 (sequence is synthesized)
gggtccccagtgttaacctcactgaatctaaggagttattcactggtgccgattatttgttagcacttcctagattcattagaaaggggtaatgaccaggtgtggtggctcacacctgta

SEQ ID NO: 36167 - DNA, 120 bp, Artificial Sequence
  ENSG00000053747_111 (sequence is synthesized)
tggcccgattccttctggtatgcttctgttttgcccattgaattttagaagcattttgctgatatctatattttttgaagcttattaaaattttggctggggttgtattactcctataat

SEQ ID NO: 36168 - DNA, 120 bp, Artificial Sequence
  ENSG00000053747_112 (sequence is synthesized)
ctgtgaagaattgccagtttaatgtttattcttcccatctagaacctgacttgcctcttcatttgtttgagcattttttgatatggcctaataaaatttagtcatatttaagcacctctc

SEQ ID NO: 36169 - DNA, 120 bp, Artificial Sequence
  ENSG00000053747_113 (sequence is synthesized)
aatgctcccaaattcttgcatccagtccattctaattgatttgaaacacaacgtgcagagtgcaatgtagagttccccgttataggtggaaggcctcatggtttcagcgaatattactgt

SEQ ID NO: 36170 - DNA, 120 bp, Artificial Sequence
  ENSG00000053747_114 (sequence is synthesized)
tagagcatcacgtggtgaaaattggtagcccccaggagtcccaggttaccaacgggctgtagaatataacagcttaccatcatgcaaagaaaaaaaaaaagttcttctaaaagttagata

SEQ ID NO: 36171 - DNA, 120 bp, Artificial Sequence
  ENSG00000053747_115 (sequence is synthesized)
tggatggactgagggcccgggagggaagtttgcctggaaactccaccatcagcatcagagcgccagtttacctgggatcacctccatcagggaaaccaaaggtgcaggttgagacgcagg

SEQ ID NO: 36172 - DNA, 120 bp, Artificial Sequence
  ENSG00000053747_116 (sequence is synthesized)
gagattttttggttaacataatgtgtttcaaattacagtaatttgtgccattttcaccatctttgccataaggtaaaacattggcttaactgttttctctccatcaaactatttatttta

SEQ ID NO: 36173 - DNA, 120 bp, Artificial Sequence
  ENSG00000053747_117 (sequence is synthesized)
aatgtgcttctatgggatctttttatctctcccataaatggaaacccaatattctttaccataaataatagataaccctgagaaataaacatttgaaaaccaaacactgttaatatcaaa

SEQ ID NO: 36174 - DNA, 120 bp, Artificial Sequence
  ENSG00000053747_118 (sequence is synthesized)
aattacagagcggtgcgcttacctgcgggactgttatgtgcgctctggcacaggctgactcatgtgtgaagtttaaaggtggggcccctgccgcagacagccttcctcacctgagtcagg

SEQ ID NO: 36175 - DNA, 120 bp, Artificial Sequence
  ENSG00000053770_0 (sequence is synthesized)
aggctcgacgctaccgtgtatgaggaactttgatccttgcgggccaccattccggaagtagaatttagaggaagaaaataccggagttgcagggtataggtaaatttctcaaggttatag

SEQ ID NO: 36176 - DNA, 120 bp, Artificial Sequence
  ENSG00000053770_1 (sequence is synthesized)
gttggggttcttagaactttttgtggtgtgtgttggcctagagcgactcagaagcgttagtgacttcacctaaaaaagctaacctctctgctgagcgcgaccggtatgcggcgcaggatg

SEQ ID NO: 36177 - DNA, 120 bp, Artificial Sequence
  ENSG00000053770_2 (sequence is synthesized)
agcctcagggcttctgttaagagtctgtctgagaaagccggtctgcgctgttcctcggtggcgaccttaattatgagatgagctaatgctttactgacttaaccatggcgcagcgggcag

SEQ ID NO: 36178 - DNA, 120 bp, Artificial Sequence
  ENSG00000053770_3 (sequence is synthesized)
tgtggctcataagccacgaaccgggaactccactttgtggcaccgtgagattctccagacggtatccaactgttgaaaaacgagccagagtcttcaatggagcaagttatgtgcctgttc

SEQ ID NO: 36179 - DNA, 120 bp, Artificial Sequence
  ENSG00000053770_4 (sequence is synthesized)
ctgaagatggtccctttcttaaagcactgctctttgaacttagattattggatgatgataaagacttcgttgagagtcgtgatagctgttcacgcatcaataaaacatccatttatggac

SEQ ID NO: 36180 - DNA, 120 bp, Artificial Sequence
  ENSG00000053770_5 (sequence is synthesized)
tcctgataggaggtgaagaactctggccagttgttgcttttctgaagaatgacatgatatatgcttgtgttccactagttgaacaaactctgtcccctcgtccgccactaattagtgtca

SEQ ID NO: 36181 - DNA, 120 bp, Artificial Sequence
  ENSG00000053770_6 (sequence is synthesized)
gtggagtttcacaaggctttgaatttctttttgggatacaggattttctttattcaggtcaaaaaaatgactctgagctgaatacaaaattgagccagttgcctgacttgcttctgcagg

SEQ ID NO: 36182 - DNA, 120 bp, Artificial Sequence
  ENSG00000053770_7 (sequence is synthesized)
cttgtccatttggtactttattagatgccaacttacagaattcattagataataccaattttgcatctgtgactcagccacagaaacagccagcttggaaaactgggacgtacaaaggaa

SEQ ID NO: 36183 - DNA, 120 bp, Artificial Sequence
  ENSG00000053770_8 (sequence is synthesized)
aaccacaagtttctatttctatcactgaaaaggtaaaatccatgcaatatgataaacagggtatagcagatacatggcaagttgttggaacagtgacttgcaagtgtgatttggaaggaa

SEQ ID NO: 36184 - DNA, 120 bp, Artificial Sequence
  ENSG00000053770_9 (sequence is synthesized)
tcatgccaaatgttaccatcagcttgagtctccccaccaatggatctccacttcaggatattctagttcacccttgtgtaacttctcttgactctgcaattctgacttctagtagtattg

SEQ ID NO: 36185 - DNA, 120 bp, Artificial Sequence
  ENSG00000053770_10 (sequence is synthesized)
atgcaatggatgactctgcatttagtgggccttacaaatttccattcactccacctttagagtcattcaacttatgcttctacacttcccaggtccctgtcccaccaattttgggttttt

SEQ ID NO: 36186 - DNA, 120 bp, Artificial Sequence
  ENSG00000053770_11 (sequence is synthesized)
atcaaatgaaggaggaagaagtacaactaagaataaccattaatttaaaacttcatgaaagtgtgaaaaataattttgaattctgtgaagcccatatacctttttacaatagaggtccaa

SEQ ID NO: 36187 - DNA, 120 bp, Artificial Sequence
  ENSG00000053770_12 (sequence is synthesized)
ttacacatttggaatacaaaactagttttggccagcttgaagtatttcgagagaaaagcttattgatctggattattggccagaagttcccaaaatcaatggaaattagtctttctggaa

SEQ ID NO: 36188 - DNA, 120 bp, Artificial Sequence
  ENSG00000053770_13 (sequence is synthesized)
ctgtaacttttggagccaagagccatgagaagcagccatttgacccaatttgtactggagaaacagcatatttaaagcttcattttaggatcttagattacacacttactggatgttatg

SEQ ID NO: 36189 - DNA, 120 bp, Artificial Sequence
  ENSG00000053770_14 (sequence is synthesized)
cagatcagcattcagttcaagtttttgcatcaggaaaaccaaaaataagtgcacaccggaaactaatttcttctgattattacatctggaattctaaagcccctgctccagtaacatatg

SEQ ID NO: 36190 - DNA, 120 bp, Artificial Sequence
  ENSG00000053770_15 (sequence is synthesized)
gatcattattattgtaatagtctcatgtttaaatgggattatataatgataacagtttaaagaaaatcataatcttatatttttaatgtggatgcatataacctgtgagtgaaaaatcac

SEQ ID NO: 36191 - DNA, 120 bp, Artificial Sequence
  ENSG00000053770_16 (sequence is synthesized)
tgaatgatttaattgtaaaagtagtcttatgtggtgtttgtagtctgatagagcttgaaaggacattttaaaagctaatgtctccaattttgttaaccttcgattttatgccagtataat

SEQ ID NO: 36192 - DNA, 120 bp, Artificial Sequence
  ENSG00000053770_17 (sequence is synthesized)
tcagaacatagaaaagtaatgattcacttgggctcattttagactggtcctgggtcaccctgccacacttgtttcctagtgtttctgtggcagacattgctaatcaattacagccctttt

SEQ ID NO: 36193 - DNA, 120 bp, Artificial Sequence
  ENSG00000053770_18 (sequence is synthesized)
ctgtactgagccttggataaagggtcaggctcctttttagttcagagattcaggcagccactcccagtgggttgtagataatgtgcaagataaaaactattttctcttccaaatctaagt

SEQ ID NO: 36194 - DNA, 120 bp, Artificial Sequence
  ENSG00000053770_19 (sequence is synthesized)
actaagctcctagtataaggtgttgttacagaataccagagaccatgttagagacaactacatctcttcaaaaaacagccaacagagacaaaggaaaagtgtttaaatagtaagctgttc

SEQ ID NO: 36195 - DNA, 120 bp, Artificial Sequence
  ENSG00000053770_20 (sequence is synthesized)
ttcttaatcagaactatcctattgactaataaataatctgcataattctacttaaggtgtgtaatctctgttctagagttagtttttaagtaagcttgttaatctgccactttgacattt

SEQ ID NO: 36196 - DNA, 120 bp, Artificial Sequence
  ENSG00000053770_21 (sequence is synthesized)
tgcttaggatgtcagtagccatattaagatgtgtagaataccttcagaagatgatcatagtgttttgtaatcatttaatgtctgcagccaaatttttaaaggtaatttagacctaatact

SEQ ID NO: 36197 - DNA, 120 bp, Artificial Sequence
  ENSG00000053770_22 (sequence is synthesized)
gctcttgctgtgtcttattaagttaaaattaatgaatgaattctggtaaaaattcaaaaggcactctgtgagtagagagtatcatttaagcttattttagtcacatgtagtatatatctc

SEQ ID NO: 36198 - DNA, 120 bp, Artificial Sequence
  ENSG00000053770_23 (sequence is synthesized)
cttaaagctgtcactctcactttcttaccattctcttgatttcttcagaaaccatctagtcatcatctttatactctacctgcttctgcaattatatatcatattatgttttcagagcag

SEQ ID NO: 36199 - DNA, 120 bp, Artificial Sequence
  ENSG00000053770_24 (sequence is synthesized)
ttcattgtcaagttggactttaagtgaccattcaagaaaagatgaaatctcacgaacctcaaaacttcattcatgtctttttacaaatgagaaaaaaaaatgcattaaagattaatactc

SEQ ID NO: 36200 - DNA, 120 bp, Artificial Sequence
  ENSG00000053770_25 (sequence is synthesized)
aatttgattatatcttgggttctgttttttaatgagtgttctaaggaaaagcttagaaaagctgctaactcctcagaagaaagcatgatagtttaaaggtatagggcatataaatttagg

SEQ ID NO: 36201 - DNA, 120 bp, Artificial Sequence
  ENSG00000053770_26 (sequence is synthesized)
atttgaaatatgattttttaattaaggtcagtcctactcataaactcattttctgcaaagcattatcatggcataaggttctatgttcaaaattatcccaagtaacaaagaaaaaaagaa

SEQ ID NO: 36202 - DNA, 120 bp, Artificial Sequence
  ENSG00000053770_27 (sequence is synthesized)
taactgcctgaccaggattttaacttgttattctagcttaatcatagataatcagcagtgaaaactttccttttgaaagaagaaaatatcattccctataagttatttgatctctcttaa

SEQ ID NO: 36203 - DNA, 120 bp, Artificial Sequence
  ENSG00000053770_28 (sequence is synthesized)
actcaaagcttaacatttcacttatgttgataagttaatggtaatggagccatttggaatcttgattgtataaatgtttaccaaatacactaaggtaagcaagaggcatttatctagtga

SEQ ID NO: 36204 - DNA, 120 bp, Artificial Sequence
  ENSG00000053770_29 (sequence is synthesized)
gtaggcaaagatttaatataataatcccctaggcaaaagtttataagcagttagaaaaatcagtgaatcttctatttgacatttctagaaaccggaggaaaatctagggtgtcctggaaa

SEQ ID NO: 36205 - DNA, 120 bp, Artificial Sequence
  ENSG00000053770_30 (sequence is synthesized)
agtgatgaggtgttggggaacctgatgccatctgttgccattccattctaacatagtgctacagaactgaaccaacttaggttttcatcccattgagatcagctgggcacactgtgatgc

SEQ ID NO: 36206 - DNA, 120 bp, Artificial Sequence
  ENSG00000053770_31 (sequence is synthesized)
ttttgattttgtctagaaacctgtcacttcaggataatttctgaagacaaagtctgtttcccgtttggtaggtgacctgtttaatgttttccctgtgtctgggaactccttagtgtaatt

SEQ ID NO: 36207 - DNA, 120 bp, Artificial Sequence
  ENSG00000053770_32 (sequence is synthesized)
agcgacctttgaactccacaactaatcctgagctattttgtattccttactcatctttaaggctggacctttcctttcttcagagtccgttgccacaattaaagaagaaacagctgcatt

SEQ ID NO: 36208 - DNA, 120 bp, Artificial Sequence
  ENSG00000053770_33 (sequence is synthesized)
tcaaagggattccgattccagaagcttaatcgtgattgacatgttcttattctaagctataagacactctaagagtcctttcttgggttaaaacttcaatcattttctaaaaaattatct

SEQ ID NO: 36209 - DNA, 120 bp, Artificial Sequence
  ENSG00000053770_34 (sequence is synthesized)
cactatggattttattcattttctttgataactattctttgcattttttaacttgaaagatgctttgcgtttgcagtgaatatgagcaactacttccagtgaaagatttggatagtgtca

SEQ ID NO: 36210 - DNA, 120 bp, Artificial Sequence
  ENSG00000053770_35 (sequence is synthesized)
gaccttctctagatgcaaaattgctaaattcccttttagtgccaaaatatgattatgaaatctgatgtctatcacataggtaattattcttcaataaactcgaaaggttaaaaaaaaaag

SEQ ID NO: 36211 - DNA, 120 bp, Artificial Sequence
  ENSG00000053770_36 (sequence is synthesized)
tgttaattttttagaatgaactccagaaaagatcgttcatgattttgtaaacgcttcttttctccattttttactaaacaatattttaaaaactttttagagccagcaatatagtactta

SEQ ID NO: 36212 - DNA, 120 bp, Artificial Sequence
  ENSG00000053770_37 (sequence is synthesized)
ggcaatacccttacggtggtggcaatttttttttaactttttaagtaattgattcaaatgtcaagtttgaagcagtcttgtcaggaattctgatgacaattatttgtttaaaaaattttt

SEQ ID NO: 36213 - DNA, 120 bp, Artificial Sequence
  ENSG00000053770_38 (sequence is synthesized)
tttattaaacattagtctgtcccataaaatcgttttcatttttttcacaccaattcagtatttctactaggttaaaattatggtgtttttatacattgtatgatttaagatctttcaagg

SEQ ID NO: 36214 - DNA, 120 bp, Artificial Sequence
  ENSG00000053770_39 (sequence is synthesized)
cagacatttatacttggtaacaattgccaatttttttttctggtttttgttgtagtatttcaaaatacttcgtagacattgatagactcctacactacccctgggagctaggtaggtgga

SEQ ID NO: 36215 - DNA, 120 bp, Artificial Sequence
  ENSG00000053770_40 (sequence is synthesized)
attatcatccaggccttctgtagggactgctgccacaacagagtggttgttcctaagacaaaggtcaaaaaaaggggtgttaataaacagtcctcaggtttaagggacttttttaggatt

SEQ ID NO: 36216 - DNA, 120 bp, Artificial Sequence
  ENSG00000053770_41 (sequence is synthesized)
acatcttaaattccaacaaatcagatttaggagttactgaaagtgaaattgatccatccctcatccaaactttgcaatactttcctgttctgacatcatttagatagttagctgtattat

SEQ ID NO: 36217 - DNA, 120 bp, Artificial Sequence
  ENSG00000053770_42 (sequence is synthesized)
cagattagaaaccattgtaccaggctgctgaaaggaaaaggaggcaaaaagctaaacatgggatgaattctgaaccttttaacctggctgaagtacgttggtccctgttatgcaaatacc

SEQ ID NO: 36218 - DNA, 120 bp, Artificial Sequence
  ENSG00000053770_43 (sequence is synthesized)
ttcaatcctctgctaagttcagtggaaataattttcttgaatgacaggtttattcagcaaggattcagttggtgattaatccccctttgatctagggtatttcacttaactaccagttac

SEQ ID NO: 36219 - DNA, 120 bp, Artificial Sequence
  ENSG00000053770_44 (sequence is synthesized)
ctcgttctgacaaagtgcaactgagattagggagatcactagaacactaccagggtgtgcgtttattctctataaccttttaaagcaagggccaagaatgcaatttattttcagtatttg

SEQ ID NO: 36220 - DNA, 120 bp, Artificial Sequence
  ENSG00000053770_45 (sequence is synthesized)
aagatgtaaagtcctgtctgctaagttagaaagtcaattgaataccaaatgaagtttatttcttacgtaatagaacaaacatttctttttgcttcgcctaacaatgatattaggaaacat

SEQ ID NO: 36221 - DNA, 120 bp, Artificial Sequence
  ENSG00000053770_46 (sequence is synthesized)
aggctttgaagaaagaagaaacaaagactacattctaagtattgcttctagttttgtttcatgcactagggtatacttaactggccttgacataaccaaaaatcaaagcagtggctacaa

SEQ ID NO: 36222 - DNA, 120 bp, Artificial Sequence
  ENSG00000053770_47 (sequence is synthesized)
cttagactgagaaaatgcttctgttttattaagctgcatggtttcttctcacctttccccctaccaccaccaccaccattagaaaatgtcatactgtgtggtaaagaaatccagttgagg

SEQ ID NO: 36223 - DNA, 120 bp, Artificial Sequence
  ENSG00000053770_48 (sequence is synthesized)
actaatgatttcgaagctttgttaactatttcttttcttgaggcaaaggagcttcttgtgtttccattataagaataattgcattcattttcagaatgcttttttaaaaaaaaaaagtga

SEQ ID NO: 36224 - DNA, 120 bp, Artificial Sequence
  ENSG00000053770_49 (sequence is synthesized)
cagcattaccaaaatagccgagtaattaaattttttctgcctgcctttttctcagttatctgagtacctcttcttccataattttaaattttgaaatattatatggaattttgcacagta

SEQ ID NO: 36225 - DNA, 120 bp, Artificial Sequence
  ENSG00000053770_50 (sequence is synthesized)
ttttgagaaagaaaaggtaatgtttcatggtaggtttctcaatttgctgtttaaaactgtttcaatagcaatgtcagtctttatcttgtaagatgtcaaatcgggatttattcctccagt

SEQ ID NO: 36226 - DNA, 120 bp, Artificial Sequence
  ENSG00000053770_51 (sequence is synthesized)
agacctttaaaaaaaaagtatagtgatttgttacaaaatatgtttttaaagattagattttgattaatgatttagttatatacagcattttaatgcttagtaattactgttctagtagca

SEQ ID NO: 36227 - DNA, 120 bp, Artificial Sequence
  ENSG00000053770_52 (sequence is synthesized)
tagtagcattttgcaatacaagggatgtatttagattattatactttttttggctcagactttttgtgatctaatttataaattgaaacaatgactcaaagaagtgcatacctaacttac

SEQ ID NO: 36228 - DNA, 120 bp, Artificial Sequence
  ENSG00000053770_53 (sequence is synthesized)
gtttgtgccaagccagcctcctctagtttcaatttaataactagtttcaaaatatattttgatagcaagttcctaaaccacagcagaattgcggatcaggaaaaatacaagataacggca

SEQ ID NO: 36229 - DNA, 120 bp, Artificial Sequence
  ENSG00000053770_54 (sequence is synthesized)
ttctataaagatagagggcaggttcccatggctatgttgctaagaaactagtgtttttaatcattacactccgtgcagtcatatttaatcaataaaacaggatatattttgaaattcacc

SEQ ID NO: 36230 - DNA, 120 bp, Artificial Sequence
  ENSG00000053770_55 (sequence is synthesized)
atcacagaatatatatatatatacacacaacatatatatacaagtatatgaatttacgtaaatgtgtacaacactagtgtgtctgacttggtgggtttccctgtgaaacatgtcagtatc

SEQ ID NO: 36231 - DNA, 120 bp, Artificial Sequence
  ENSG00000053770_56 (sequence is synthesized)
atgtaagatgaagaatattttaagggcaaatattcaaatatctttcctccaaacacagtattagttaatagtaatgaaatgattcattaaactgaaaattgcaaaggaactcatgagttc

SEQ ID NO: 36232 - DNA, 120 bp, Artificial Sequence
  ENSG00000053770_57 (sequence is synthesized)
ctttgtgattgaaacaaagtgattaaaactcttatgacctgaaggctttccaactagcctccaactgtccgcaccagctgtttcatggatataacattagtgtttgtgtatagcctggaa

SEQ ID NO: 36233 - DNA, 120 bp, Artificial Sequence
  ENSG00000053770_58 (sequence is synthesized)
caatacaaggctgtatctgtatcactagcttcttgccttataagcaggatactgcaaggtctggttgatttctctaatgccctagctaatctgcctaattgacatcagtgtcatgttaat

SEQ ID NO: 36234 - DNA, 120 bp, Artificial Sequence
  ENSG00000053770_59 (sequence is synthesized)
gtatgatgcacaagcatttacagatggacaaatgctccacactaaaaaccacctgctgaattttttttccagtaggatgtgaaattttgcacttctaatctgttgaacatttaaagtcaa

SEQ ID NO: 36235 - DNA, 120 bp, Artificial Sequence
  ENSG00000053770_60 (sequence is synthesized)
aactacatgtttcctttaaatggcctctttaaatgatattttatgtttataaattttgttatgaaaaatttaaaaattagttattcctcttaaatttttactttttccttcaaaggactt

SEQ ID NO: 36236 - DNA, 120 bp, Artificial Sequence
  ENSG00000053770_61 (sequence is synthesized)
gggtgccctctgcaggttataaagagataattagtgactatatctattttaaaaccctgtgatttttctctttcatacacatagcctgcttacacccaatttcaaagaaagtgtgagcta

SEQ ID NO: 36237 - DNA, 120 bp, Artificial Sequence
  ENSG00000053770_62 (sequence is synthesized)
atttatttatattaactcttattaatttgccagtggttgaagttggagtttcttttctccactggttttataggtgtgtttagtgtgaagaatgtgataccattgaacttccagactact

SEQ ID NO: 36238 - DNA, 120 bp, Artificial Sequence
  ENSG00000053770_63 (sequence is synthesized)
tagctggggctctttaaatgttggaactatagtaacacacattccctcacagaaaggagattgggaaaatagctattttgaaagttattgcagatgtagggaatagcttgtttcccatta

SEQ ID NO: 36239 - DNA, 120 bp, Artificial Sequence
  ENSG00000053770_64 (sequence is synthesized)
tgtttctagaatattacacatttggagtaagccttgctttttcaacatgcatcatgtaaaattacatgaaagaaaataatttgaaaattacacaagatttctctttcttgatcttgttga

SEQ ID NO: 36240 - DNA, 120 bp, Artificial Sequence
  ENSG00000053770_65 (sequence is synthesized)
tgatgattgtgttctagctcaaaaaacagaccttcttagaatttcttattttttaaaaaagtgagtactcaacagataatactttggtactgcccgttgcagacatgggcctactaaact

SEQ ID NO: 36241 - DNA, 120 bp, Artificial Sequence
  ENSG00000053770_66 (sequence is synthesized)
agaaagagcatttgaagagcaaaaggcaaaggttccatcaccatcctgtggaaatacgtgagttgttcatttcagtacacccatagtttctcaacaggtgtagcagatttgtttctaaag

SEQ ID NO: 36242 - DNA, 120 bp, Artificial Sequence
  ENSG00000053770_67 (sequence is synthesized)
gacataggagtgcattttttatatgaaaccagaactggagtggtaatggcacttctgattcaattaacttacttggtgaagctgccagggaaactaaatatgatgagaagaagaggaatg

SEQ ID NO: 36243 - DNA, 120 bp, Artificial Sequence
  ENSG00000053770_68 (sequence is synthesized)
actggatcaaattaatagaaatagatctttttgcaagcaacataatgattctgatcatcaaccttgaaaagtaaattagaacaagcaaattgctgttgaaaaattctttcagcactctgc

SEQ ID NO: 36244 - DNA, 120 bp, Artificial Sequence
  ENSG00000053770_69 (sequence is synthesized)
tgttgctactcagctagtcatagctcagccagagggaaggaaaaaatgcactcggttttgcattaacaaaggaaacattattaaagtgaatgtttacattgtgtttattgaagtgttgaa

SEQ ID NO: 36245 - DNA, 120 bp, Artificial Sequence
  ENSG00000053770_70 (sequence is synthesized)
agaatatttgttgcatcttcaagcaacctgctgctctccagactgttacagtgcatgagtgataataaaaatgagtcagtcacttgtacattttagaaaataaataacttttaacatagt

SEQ ID NO: 36246 - DNA, 120 bp, Artificial Sequence
  ENSG00000053770_71 (sequence is synthesized)
atttctcaactatgttacttcaaaatgtttaagtgccaaacttaatgttaccttctctgctaaagatttttgtctctaggaaatatattccattaaaaaaaaaaagaaagaaactcattt

SEQ ID NO: 36247 - DNA, 120 bp, Artificial Sequence
  ENSG00000053770_72 (sequence is synthesized)
atttatttatttgggtataccttccagttacttccagatgctttatgtaactttcctcccagaagctgcaatacataagaaataataagctgaaaataatcaaaaaatgaaaacaattgt

SEQ ID NO: 36248 - DNA, 120 bp, Artificial Sequence
  ENSG00000053770_73 (sequence is synthesized)
gaaattactgaaatgagtatgtaattgagtatgtaatatatgcattggagaaataccggttgattattgtgataacttttgagagctacagttattttgaactacctcgtaaagactaca

SEQ ID NO: 36249 - DNA, 120 bp, Artificial Sequence
  ENSG00000053770_74 (sequence is synthesized)
ttgagaatgaaaaagccattgaacaatagatgtaccaatttgacctttaaaagttcaatctttattatatgcattgataaatgggaaagttagtaattaaaaatttagaaggaattttag

SEQ ID NO: 36250 - DNA, 120 bp, Artificial Sequence
  ENSG00000053770_75 (sequence is synthesized)
cctttacctttctaaaatgaacaatttaaatcactcttacactttagaaattgaaatatagtatttaacagggattaaaatgttttacttggtctcttagtgttactgaatacaagttta

SEQ ID NO: 36251 - DNA, 120 bp, Artificial Sequence
  ENSG00000053770_76 (sequence is synthesized)
gtattctgtaatcccttatggattggctgatttttgaagaactattttcttagatttaccaacaggacaagttgtcggccttttcccacatttcaacctaaaaatggtatctatcacagt

SEQ ID NO: 36252 - DNA, 120 bp, Artificial Sequence
  ENSG00000053770_77 (sequence is synthesized)
tatcaaagattaccccttgctaaaggctcttaagaaactgttagcctgttactttattacttaccatttctataacatgtacatttatagagcatcatatatttattttaagtctagaat

SEQ ID NO: 36253 - DNA, 120 bp, Artificial Sequence
  ENSG00000053770_78 (sequence is synthesized)
cagtaaaaagttatgtgtttgtcaataatcaaaaaatgtttaatctaaaataaagtagatgccacgcttctaattctgcttttgctaaggcaataatcagtagaagtggttagtaatatt

SEQ ID NO: 36254 - DNA, 120 bp, Artificial Sequence
  ENSG00000053770_79 (sequence is synthesized)
tgtagcttgttaaccaactggagcaaaaggactttttaatatgaataacagtggtctcgtgccataagtatttctctcatacatattaaaatagcatgttattttatttaatattgaagg

SEQ ID NO: 36255 - DNA, 120 bp, Artificial Sequence
  ENSG00000053770_80 (sequence is synthesized)
cctaaacacaattgaacataaggtatggcttggaatttagaactgctgagcaatatggttgagagggagaccttaatttagtcaataaaaattcataattaatgttaagctttgtgctca

SEQ ID NO: 36256 - DNA, 120 bp, Artificial Sequence
  ENSG00000053770_81 (sequence is synthesized)
tattatatgccactctgggattagacaaaagacaaaaaacagttccatattttgaacgatatattctacctcctgcagtgtattagcattgtagcgtaggagactatttctgtatgttat

SEQ ID NO: 36257 - DNA, 120 bp, Artificial Sequence
  ENSG00000053770_82 (sequence is synthesized)
tagtacagaaactgcccaaaaaggtgatggttgaagttccccagccagttaaagggcacaccgtgggggcagcatatctccatgggtctatctctagcaaacagaatcccagaaacttga

SEQ ID NO: 36258 - DNA, 120 bp, Artificial Sequence
  ENSG00000053770_83 (sequence is synthesized)
gcacctgatatagcagaaggaaataaagattatagtaagtatattcatgagagagaattttttttgcctccagatgtttggggtttggatatgtagggtaaatataaatgtctaatgaaa

SEQ ID NO: 36259 - DNA, 120 bp, Artificial Sequence
  ENSG00000053770_84 (sequence is synthesized)
gtaattactattatatttgatttgatatttaatttattatactgaaatactaaattaaatacaaaaaaactcctacatactaactatatgtttctcccactgattcccctcctgcctcct

SEQ ID NO: 36260 - DNA, 120 bp, Artificial Sequence
  ENSG00000053770_85 (sequence is synthesized)
tcactgattttgaatgtgtgctcaatttgctagtatgagatttacctctgccttatcagtgaagaaaatatgatgtctatatagaattataaggaaaatatatatgtgaagaaatgttag

SEQ ID NO: 36261 - DNA, 120 bp, Artificial Sequence
  ENSG00000053770_86 (sequence is synthesized)
gtaatctaacatttgtatgctaatgtgtcttagatttaccaactatcctaatgtgtagtcaattgataaactaaatttttctttaggatagttcacatccagtagaacttctaccttgga

SEQ ID NO: 36262 - DNA, 120 bp, Artificial Sequence
  ENSG00000053770_87 (sequence is synthesized)
aaacattcttagccttgtttattttgaatgtatgtgtgtgtgtgtgcatgtgtggaaaacaagaaaaatacaagctctagagtagtggcctcacattgatttatattagtgtgccagtct

SEQ ID NO: 36263 - DNA, 120 bp, Artificial Sequence
  ENSG00000053770_88 (sequence is synthesized)
ttcccctacctccctaatatttcaaacttcttgtggacaatgacattcattttcatacctttatatttccagtgccaccagaaacacaaaagcagcttagtgttgatttaatgaagtagc

SEQ ID NO: 36264 - DNA, 120 bp, Artificial Sequence
  ENSG00000053770_89 (sequence is synthesized)
aaaatgttaaatacataacaaaacagattgtcctgtcacctaaaacaaattagtgatgtttgagtaattagggttttgcatgtgtatatagaaaggctattttgcaaacagtggttcagt

SEQ ID NO: 36265 - DNA, 120 bp, Artificial Sequence
  ENSG00000053770_90 (sequence is synthesized)
ctgtattgggcacaggtgaattctgccctgcgattgccatctttagcacttttcagagaatttgttgccatttatgacactgatcttcagacacactgtgtagtgccttggcttaaactg

SEQ ID NO: 36266 - DNA, 120 bp, Artificial Sequence
  ENSG00000053770_91 (sequence is synthesized)
tcagactggcaacagctgaggctgcccatcataggacacgttccttgcagttatgcttcagtgaactttaaaacatttggcactcgtatcttagaaatgtccttccgaaactcactctac

SEQ ID NO: 36267 - DNA, 120 bp, Artificial Sequence
  ENSG00000053770_92 (sequence is synthesized)
aacagctttgtgggctccctactatttactagagtcaatcctgattttgtttggcataatgagacctgatatgctatgactctccctatcctataaagccacagctttcagcggtccccg

SEQ ID NO: 36268 - DNA, 120 bp, Artificial Sequence
  ENSG00000053770_93 (sequence is synthesized)
tatactaatgaaatggagtcgccagtatccaaaagttccaagtgattatttagaacatttccattaaccataaaggcaaagtggtatagagaaaataatacagtctttgaagtcacacag

SEQ ID NO: 36269 - DNA, 120 bp, Artificial Sequence
  ENSG00000053770_94 (sequence is synthesized)
gcctgatttcaaatcccagctctgtcatttacaaactgggtggtcctggataaattacttaacctctgtggtcttcagtttcctcccaactttgtagggttattgtgagcattgaatgat

SEQ ID NO: 36270 - DNA, 120 bp, Artificial Sequence
  ENSG00000053770_95 (sequence is synthesized)
accaagttataagtgcataggtattcaatcagtgttcattcccttctgtatcaaagacttataatggccttttcatggaattgtctctacctataattatgtgactgtgccttcagatta

SEQ ID NO: 36271 - DNA, 120 bp, Artificial Sequence
  ENSG00000053770_96 (sequence is synthesized)
tcaaaattatatgaattgtccatgtgcccttggttttgaatgttcaattctgtattgcaggaatgcctactcagttgcttgaatgggtgtttggagttaataaaatggctgtacaattga

SEQ ID NO: 36272 - DNA, 120 bp, Artificial Sequence
  ENSG00000053770_97 (sequence is synthesized)
actttggccttaaagtaggagctcaaggacaggtttgagaggctgtcctgtctggcttcaaagaactttcaagaaaaattacttccttttttcttttcccttgtgaatctctcatgagta

SEQ ID NO: 36273 - DNA, 120 bp, Artificial Sequence
  ENSG00000053770_98 (sequence is synthesized)
ttaagcagcagtttttaaatgggagagtcatgtaaaattttatgttatctttttgcattccttaccaattatattagttatctgtggctgtgtaaagaattgtctcattgtccccaaaat

SEQ ID NO: 36274 - DNA, 120 bp, Artificial Sequence
  ENSG00000053770_99 (sequence is synthesized)
agacatttattattttcatagtttctgtagggattagcttagctgggaactttcagggtagaatcactcatgaagttgcagtcaagttttcagttgaggctatagtcatctgaaggtctg

SEQ ID NO: 36275 - DNA, 120 bp, Artificial Sequence
  ENSG00000053770_100 (sequence is synthesized)
actgaggctggaagatctgcttgcaagatgactcactcacatggctaacaagttggtcctagttattggaggaaggccttagttcctttccacatggacttctcaactggctgcttaagt

SEQ ID NO: 36276 - DNA, 120 bp, Artificial Sequence
  ENSG00000053770_101 (sequence is synthesized)
gtcctcacacttggtgactggcttccctcagaccagatgatgagagaggggtgggggggggagagagagaggagagagagagagagagaagagagaagagagagaagagagaagagaaaa

SEQ ID NO: 36277 - DNA, 120 bp, Artificial Sequence
  ENSG00000053770_102 (sequence is synthesized)
ttacacagattcaaactaacttaagggaattaaaatggtgtttgcagttattacctaaggtaaaatttgaatgtaacagaacttagagattagagaataatcccaatttataaaattctg

SEQ ID NO: 36278 - DNA, 120 bp, Artificial Sequence
  ENSG00000053770_103 (sequence is synthesized)
ggctgattctaccccacataacagtttgtgtactttacactgccctctgccgccttcttgtttataaagtggtctggataagcaaagattgggatagaggggaacttcagtgtaaaattg

SEQ ID NO: 36279 - DNA, 120 bp, Artificial Sequence
  ENSG00000053770_104 (sequence is synthesized)
gattctccaggccattgtttcttcttgctctgtagtactcatggttcacatcctacacatttacctgtcccctttacctagtgatgacctctcccaaatttgcctccaaagaacactgcc

SEQ ID NO: 36280 - DNA, 120 bp, Artificial Sequence
  ENSG00000053770_105 (sequence is synthesized)
aaagtatgcatcctcaaatctgtccatggggcatgtctatgccgattttgactaaagactgccaaataatctgctccacagaatgctttcagccacctacgcactcactagcagcaagaa

SEQ ID NO: 36281 - DNA, 120 bp, Artificial Sequence
  ENSG00000053900_0 (sequence is synthesized)
cggaagtgcctggagcgcgcgacagcggcggggcggggcggcctggaggctgtggcgcgcggccggcagagggaggggagaggccactggggccgtgttagtctgccggtggggactctt

SEQ ID NO: 36282 - DNA, 120 bp, Artificial Sequence
  ENSG00000053900_1 (sequence is synthesized)
ggactcttgcagggccgtccccatgttgcgttttccgacctgtttcccatccttccgggtggtgggagagaagcagctcccgcaggagattattttcctggtctggtcgcccaagcggga

SEQ ID NO: 36283 - DNA, 120 bp, Artificial Sequence
  ENSG00000053900_2 (sequence is synthesized)
tctcattgctttggccaacacagctggcgaggttttacttcatcgactggcaagttttcatcgagtttggagttttccaccaaatgaaaatacaggaaaggaggtgacgtgtctggcatg

SEQ ID NO: 36284 - DNA, 120 bp, Artificial Sequence
  ENSG00000053900_3 (sequence is synthesized)
gagaccagatggcaaacttttggcctttgctcttgctgataccaagaaaattgttttgtgtgatgtagaaaaacctgagagcttacactctttttctgtggaggctccagtttcctgtat

SEQ ID NO: 36285 - DNA, 120 bp, Artificial Sequence
  ENSG00000053900_4 (sequence is synthesized)
gcattggatggaagtgacagtagaaagcagtgttctcacatcattttataatgctgaggatgaatcaaatcttctcttacctaaactacctacactgccaaaaaactatagcaacacctc

SEQ ID NO: 36286 - DNA, 120 bp, Artificial Sequence
  ENSG00000053900_5 (sequence is synthesized)
aaaaatatttagtgaagaaaattctgatgaaattattaagctcttgggagacgtcaggcttaatattctcgtccttggaggaagctctggatttattgagctttatgcttatggaatgtt

SEQ ID NO: 36287 - DNA, 120 bp, Artificial Sequence
  ENSG00000053900_6 (sequence is synthesized)
taaaattgctcgagtcacagggattgctggtacttgtcttgcattatgtttatcaagtgatttgaaatcattatcagtggtcacagaagtctctaccaatggtgcttcagaagtttcata

SEQ ID NO: 36288 - DNA, 120 bp, Artificial Sequence
  ENSG00000053900_7 (sequence is synthesized)
ctttcagcttgaaactaatctgttgtactctttcttacctgaagtaactcggatggccagaaagtttactcatatttcagctctgttacagtatataaatttgtcactaacatgtatgtg

SEQ ID NO: 36289 - DNA, 120 bp, Artificial Sequence
  ENSG00000053900_8 (sequence is synthesized)
tgaagcatgggaagaaatactaatgcagatggattctcgtctcaccaagtttgtgcaggaaaagaacacaaccacatcagtgcaagatgagttcatgcacttgctattatgggggaaagc

SEQ ID NO: 36290 - DNA, 120 bp, Artificial Sequence
  ENSG00000053900_9 (sequence is synthesized)
aagtgctgaacttcagactctcttgatgaatcagttaacagtaaagggcttgaaaaagcttggccagtctatagagtcatcatactccagtatacaaaaattggtcataagtcatttaca

SEQ ID NO: 36291 - DNA, 120 bp, Artificial Sequence
  ENSG00000053900_10 (sequence is synthesized)
gagtggctcggagtctttattataccatttgagtgaattgaaaggaatggcttcatggaagcaaaaatatgaacctcttggactagatgctgcaggaatcgaagaagctataactgctgt

SEQ ID NO: 36292 - DNA, 120 bp, Artificial Sequence
  ENSG00000053900_11 (sequence is synthesized)
tagtagtatgaaaaacttcaaagcattttttcggtggctttatgtggcaatgttgagaatgacagaagaccatgtgcttcccgagctgaataagatgactcagaaagatatcacatttgt

SEQ ID NO: 36293 - DNA, 120 bp, Artificial Sequence
  ENSG00000053900_12 (sequence is synthesized)
tgctgaatttcttactgaacatttcaatgaggctccagacctttataatcgaaaaggaaaatactttaacgttgaaagagttggtcagtacttgaaagatgaagatgatgatcttgtgtc

SEQ ID NO: 36294 - DNA, 120 bp, Artificial Sequence
  ENSG00000053900_13 (sequence is synthesized)
accccctaacacagaaggaaaccagtggtatgactttcttcaaaatagcagccaccttaaagaaagtcctttgctgtttccttattatcctcgaaaatcattgcattttgtgaaaaggcg

SEQ ID NO: 36295 - DNA, 120 bp, Artificial Sequence
  ENSG00000053900_14 (sequence is synthesized)
gatggagaatattattgatcagtgtttgcaaaagccagcagatgtaattggaaaatcgatgaatcaagcaatctgtattccattgtatagagataccagaagtgaggattctacacgtag

SEQ ID NO: 36296 - DNA, 120 bp, Artificial Sequence
  ENSG00000053900_15 (sequence is synthesized)
attgttcaaatttccttttctgtggaataataaaacttcaaatctacattatcttctttttactattctagaagattcactttataaaatgtgcatcttaaggagacatactgatatttc

SEQ ID NO: 36297 - DNA, 120 bp, Artificial Sequence
  ENSG00000053900_16 (sequence is synthesized)
tcaatctgtgagtaatggactaattgctattaaatttgggagctttacatatgccacaacagaaaaagtcagaagaagcatctacagttgtttagatgcacagttttatgatgatgaaac

SEQ ID NO: 36298 - DNA, 120 bp, Artificial Sequence
  ENSG00000053900_17 (sequence is synthesized)
tgtaacagtagttcttaaagacactgtaggacgtgaaggaagagatagactcttggtccagctgcctttgtctttagtatataacagtgaagattctgcagaatatcagttcactgggac

SEQ ID NO: 36299 - DNA, 120 bp, Artificial Sequence
  ENSG00000053900_18 (sequence is synthesized)
ttattctacaaggctagatgaacagtgtagtgctattcccacccgtaccatgcattttgagaagcactggagattactggaaagtatgaaagcacagtatgttgctgggaatggttttcg

SEQ ID NO: 36300 - DNA, 120 bp, Artificial Sequence
  ENSG00000053900_19 (sequence is synthesized)
aaaagtgtcctgtgtgttaagctcaaatcttcgtcatgtgagagtatttgaaatggacatagatgatgaatgggagctcgatgagtcttcagatgaagaggaggaggccagtaataagcc

SEQ ID NO: 36301 - DNA, 120 bp, Artificial Sequence
  ENSG00000053900_20 (sequence is synthesized)
tgtaaaaataaaggaagaagtgttgtcggagtcagaggcagagaaccaacaagctggtgctgccgctttagctccagagatagtcattaaagtggaaaaacttgaccctgagctagactc

SEQ ID NO: 36302 - DNA, 120 bp, Artificial Sequence
  ENSG00000053900_21 (sequence is synthesized)
ctaatctagcttgccattattgtgtgtgtaattatggccaaaaggacataggagatggactaagatgtcttggaccacctttgtgtaacaaagaaataaacagtaaattttattttttca

SEQ ID NO: 36303 - DNA, 120 bp, Artificial Sequence
  ENSG00000053900_22 (sequence is synthesized)
ttatccagcatggctttatctaagggagggcctacaaagcacagtggaagagggtgggcattagagtcagacttgggtttgattgacagaactagatacttagttattttcacactgggc

SEQ ID NO: 36304 - DNA, 120 bp, Artificial Sequence
  ENSG00000053900_23 (sequence is synthesized)
aattgcctaaacctgttaagcttcattttttttttcatctgtaaattggagaatatggtgtttacttcatatggctattgtaagcaataaaaaaaaaggtattttaaacacctagcatag

SEQ ID NO: 36305 - DNA, 120 bp, Artificial Sequence
  ENSG00000053900_24 (sequence is synthesized)
caggtgttagtgctaaattatatattactttctcctgataaagtaaccttttaaaaagtaaagagcttatttatatagagctagtttccagtctcttgttttagagacttaaaaaacagt

SEQ ID NO: 36306 - DNA, 120 bp, Artificial Sequence
  ENSG00000053900_25 (sequence is synthesized)
actggactgctgttgttgtttcactgtggcaaagaatagaagaatgaattttatttcatcatatatttgatggttcccaaatcattccttgcttcttatagccagcagaaacctacagtt

SEQ ID NO: 36307 - DNA, 120 bp, Artificial Sequence
  ENSG00000053900_26 (sequence is synthesized)
ggattttggtgagtctaagtttgtagtaagtgagattgtttttagtgagctgtcagcgggggttgatgaaaggcagaagaccatggtcgtttttaatgaggttgtgtgaaaatccaatga

SEQ ID NO: 36308 - DNA, 120 bp, Artificial Sequence
  ENSG00000053900_27 (sequence is synthesized)
agtggtcagtgaaaattctacctcgagataaactgtgcagactggctctaacagtagattattttcttctaattataagtttgctatagcttcttttatttttgtttctgtttttgtttg

SEQ ID NO: 36309 - DNA, 120 bp, Artificial Sequence
  ENSG00000053900_28 (sequence is synthesized)
atgcatgtctttgtgtaggagcaatagtgtctacagtatgtggctcacttatgtaaatgatcttaatttttagaatgaactatgaaaatgttgatagtcaactgtttttgattaacaaaa

SEQ ID NO: 36310 - DNA, 120 bp, Artificial Sequence
  ENSG00000053900_29 (sequence is synthesized)
acacgtgtgtgtgtgtgtgtgtgtgtataaagattactgaaggtgttggcatcttgagtattttatttgttcccagaagaaattcattgtaaacagtcttagttacagagctgatgtgtc

SEQ ID NO: 36311 - DNA, 120 bp, Artificial Sequence
  ENSG00000053900_30 (sequence is synthesized)
tctgcttactactgaaggatgtgaatgaatggttgttatgagaccagagggaggtggtcttaaacctgccatgtgcttagcaccaaggtccttttcagctcagaattttctctttttcct

SEQ ID NO: 36312 - DNA, 120 bp, Artificial Sequence
  ENSG00000053900_31 (sequence is synthesized)
tactgttacaattgtcattaacgtttcttatgtacaaggtttggtgatgtaggcgatttttttaccacattcgaacagtgatggtcagtcactttctgtagagtatctgtgtgcatatta

SEQ ID NO: 36313 - DNA, 120 bp, Artificial Sequence
  ENSG00000053900_32 (sequence is synthesized)
atattacaaaaaaaatatgtttttattttcacaaagagtattctgtaaagcccattttcagaaaggatttattgttcttagtatacataagaattataaatatcactttgggaacttttt

SEQ ID NO: 36314 - DNA, 120 bp, Artificial Sequence
  ENSG00000053900_33 (sequence is synthesized)
ttaggaataggatcagactcagttacggtggtaatataggtaaaagggctttgccacttcccacatcaagggcaggattctttgtgtatttatacatagagaatgatttgacttgtgatt

SEQ ID NO: 36315 - DNA, 120 bp, Artificial Sequence
  ENSG00000053900_34 (sequence is synthesized)
gaatagaaccttactgccctgcagtttatgtcgtacggtttcctataattaatactcctgagctccctgttgacaaagaaagtaatgtggttcccatgggcagatggcctgcagggctga

SEQ ID NO: 36316 - DNA, 120 bp, Artificial Sequence
  ENSG00000053900_35 (sequence is synthesized)
agttcttgttacgaccaaaaaaaattatgaggtgatgccattcttagtgatgggagattttcttaggattcaaaatggtaacagtacctaagccatccctgaggcttcgcaagggaaaga

SEQ ID NO: 36317 - DNA, 120 bp, Artificial Sequence
  ENSG00000053900_36 (sequence is synthesized)
agtgactaatcataggctgatctttttctcacttttttcctcacataaaataagtttttttatgataaagtccttggagttgctgtgcctatttttcatgtgtagtatcttatttttatt

SEQ ID NO: 36318 - DNA, 120 bp, Artificial Sequence
  ENSG00000053900_37 (sequence is synthesized)
ggggctttctagaactgaaacaacttcacagatttttgggggtcatgattacccatttttaagatttggttatatatgtgaataatcagtacaaaaagtaactgattttaatacaaacca

SEQ ID NO: 36319 - DNA, 120 bp, Artificial Sequence
  ENSG00000053900_38 (sequence is synthesized)
atgatatattttaaatgttattgtacagaatgtcacttaacttttaaatttttttctgcttgctgccagtataacatgcatacaatattttctcagtagtcacgatcatctttgatataa

SEQ ID NO: 36320 - DNA, 120 bp, Artificial Sequence
  ENSG00000053900_39 (sequence is synthesized)
ttaatgcacattataaattccaaccttttaggtacgctagataatggttatttcgttactagagataaccacagaggtagctgagcagaaatgctccaatttttcattcaaaatatgctg

SEQ ID NO: 36321 - DNA, 120 bp, Artificial Sequence
  ENSG00000053900_40 (sequence is synthesized)
gccttaatagctttttttgtccctttgctttactagtaaatcaggaagtatttgctggaatcaaggtggggaattatttggagtggataatgggacttcttttagttacatttttaagga

SEQ ID NO: 36322 - DNA, 120 bp, Artificial Sequence
  ENSG00000053900_41 (sequence is synthesized)
tagcattaaccctagttggttggaattagttatttttgatttgccttcagtattttccttccagaattaagacctcagtacccatgtaggaagtatactgtcaattccaagagatggctt

SEQ ID NO: 36323 - DNA, 120 bp, Artificial Sequence
  ENSG00000053900_42 (sequence is synthesized)
taattgactgagacttaagtaagcagatctctaatttaaaaatgtatccatttgctttctttgaaagggagtcagaaaccttgctaagatgatattctgcctgtttggaattacagtatt

SEQ ID NO: 36324 - DNA, 120 bp, Artificial Sequence
  ENSG00000053900_43 (sequence is synthesized)
atgatattctgcctgtttggaattacagtatttcttttcttttttttttttgaaacagggcctctctttgtcacccaggttggagtgcagtgacgcaatcatagctcactgcagcctcca

SEQ ID NO: 36325 - DNA, 120 bp, Artificial Sequence
  ENSG00000053900_44 (sequence is synthesized)
aagtgaccctcctgcctcagcctctcatagctgggactacaggcatgtgccaccttgcctgactaattttatttttttacagagatagagtcttactatgttgcccaggctggccttgaa

SEQ ID NO: 36326 - DNA, 120 bp, Artificial Sequence
  ENSG00000053900_45 (sequence is synthesized)
tcccaccttggcctcgcaaagtgctgagattccaggcatgagccactgtgcctagccagaatatagaatatggaatttttatagaatattatatcacagctttttttctaacacaacagt

SEQ ID NO: 36327 - DNA, 120 bp, Artificial Sequence
  ENSG00000053900_46 (sequence is synthesized)
tgctaaaattatattggaaatagaagtatgagtagaagtcaaaaccataattgaccctaataccacctgtagtaaaactagggaggataagatccccttttcattcctgagttggttttt

SEQ ID NO: 36328 - DNA, 120 bp, Artificial Sequence
  ENSG00000053900_47 (sequence is synthesized)
aagttctgaaaaataaatcatatttagaacgccattggtagcttaaaaatggttttaaacctgaatttgaagaaaatgttgagaccacgatgtaaccaaaaagaaataattgggttattt

SEQ ID NO: 36329 - DNA, 120 bp, Artificial Sequence
  ENSG00000053900_48 (sequence is synthesized)
ctattccaaatgtctttggtgactgtgtgattttaaaccaaattggtttatctatctaggcatttaaacaagttctcagtgttctaaagaagtacatgtactgaccctgacaatcatgtt

SEQ ID NO: 36330 - DNA, 120 bp, Artificial Sequence
  ENSG00000053900_49 (sequence is synthesized)
cttttaagcctttagattattgactatccaggttgttccacagagtctctttttttcccccttctttcttgaagatctgtgagtaatggactaattgctattaaatttgggagctttaca

SEQ ID NO: 36331 - DNA, 120 bp, Artificial Sequence
  ENSG00000053900_50 (sequence is synthesized)
aagaagtaacgttgcttctttggaaccttcatcaaatacatgatatataaggtccttttgtgcaaatatttttactgtgatttatagcttgtattgattatgatcatgtggtggccttag

SEQ ID NO: 36332 - DNA, 120 bp, Artificial Sequence
  ENSG00000053900_51 (sequence is synthesized)
ctatttagttcttgttctgataaagcttactaagtagttaataataatactagattttaatctcacgaaattgccactgttgttatgtggagatctttttatacaaaatgaaggctgaat

SEQ ID NO: 36333 - DNA, 120 bp, Artificial Sequence
  ENSG00000053900_52 (sequence is synthesized)
ttattgattttgttgtaaattgatgggaatataactttcctataaaaccattctttgattcagacttctgatttctaattctttatatatgataagccattaatttaaaaatgcttttat

SEQ ID NO: 36334 - DNA, 120 bp, Artificial Sequence
  ENSG00000053900_53 (sequence is synthesized)
tggtattgtatccacacatacctggcgttggccttctttccgccgccttttcttcatctggcattctctttttaagccttttctagctaaaattgttgcatggcatttgagaagaatctt

SEQ ID NO: 36335 - DNA, 120 bp, Artificial Sequence
  ENSG00000053900_54 (sequence is synthesized)
gattgaaagagtcaataataattctgctttatgaagtaattttccaacatcttttcaccaggctagactctatctgggtttttttcttaatcagctaagcatgaagtatattttgaaata

SEQ ID NO: 36336 - DNA, 120 bp, Artificial Sequence
  ENSG00000053900_55 (sequence is synthesized)
aggcatatatcttttttttgagcagtgagattaacattttacagtttaccaagaatattgtatatttatttatttaatatcttggcaaggtgttggtgattttacacaagaggatacaga

SEQ ID NO: 36337 - DNA, 120 bp, Artificial Sequence
  ENSG00000053900_56 (sequence is synthesized)
agttcagaatcagttatatggctggcccaaagttactaagtgtcggagccaagacttcatcctagattttcaaatctcatgctttttctatccatagctacttcattgaagcattttaca

SEQ ID NO: 36338 - DNA, 80 bp, Artificial Sequence
  ENSG00000053918_0 (sequence is synthesized)
cactgcgcccgggcgctcgccttcgctgcagctcccggtgccgccgctcgggccggccccccggcaggccctcctcgtta

SEQ ID NO: 36339 - DNA, 120 bp, Artificial Sequence
  ENSG00000053918_1 (sequence is synthesized)
gttatggccgcggcctcctccccgcccagggccgagaggaagcgctggggttggggccgcctgccaggcgcccggcggggcagcgcgggcctggccaagaagtgccccttctcgctggag

SEQ ID NO: 36340 - DNA, 80 bp, Artificial Sequence
  ENSG00000053918_2 (sequence is synthesized)
gccgcgcccgccgcgcccccagttgcctccgaccttggcccgcggccgccggtgagcctagacccgcgcgtctccatcta

SEQ ID NO: 36341 - DNA, 120 bp, Artificial Sequence
  ENSG00000053918_3 (sequence is synthesized)
cgtctccatctacagcacgcgccgcccggtgttggcgcgcacccacgtccagggccgcgtctacaacttcctcgagcgtcccaccggctggaaatgcttcgtttaccacttcgccgtctt

SEQ ID NO: 36342 - DNA, 120 bp, Artificial Sequence
  ENSG00000053918_4 (sequence is synthesized)
cctcatcgtcctggtctgcctcatcttcagcgtgctgtccaccatcgagcagtatgccgccctggccacggggactctcttctggatggagatcgtgctggtggtgttcttcgggacgga

SEQ ID NO: 36343 - DNA, 120 bp, Artificial Sequence
  ENSG00000053918_5 (sequence is synthesized)
gtacgtggtccgcctctggtccgccggctgccgcagcaagtacgtgggcctctgggggcggctgcgctttgcccggaagcccatttccatcatcgacctcatcgtggtcgtggcctccat

SEQ ID NO: 36344 - DNA, 120 bp, Artificial Sequence
  ENSG00000053918_6 (sequence is synthesized)
ggtggtcctctgcgtgggctccaaggggcaggtgtttgccacgtcggccatcaggggcatccgcttcctgcagatcctgaggatgctacacgtcgaccgccagggaggcacctggaggct

SEQ ID NO: 36345 - DNA, 120 bp, Artificial Sequence
  ENSG00000053918_7 (sequence is synthesized)
cctgggctccgtggtcttcatccaccgccaggagctgataaccaccctgtacatcggcttcctgggcctcatcttctcctcgtactttgtgtacctggctgagaaggacgcggtgaacga

SEQ ID NO: 36346 - DNA, 120 bp, Artificial Sequence
  ENSG00000053918_8 (sequence is synthesized)
gtcaggccgcgtggagttcggcagctacgcagatgcgctgtggtggggggtggtcacagtcaccaccatcggctatggggacaaggtgccccagacgtgggtcgggaagaccatcgcctc

SEQ ID NO: 36347 - DNA, 120 bp, Artificial Sequence
  ENSG00000053918_9 (sequence is synthesized)
ctgcttctctgtctttgccatctccttctttgcgctcccagcggggattcttggctcggggtttgccctgaaggtgcagcagaagcagaggcagaagcacttcaaccggcagatcccggc

SEQ ID NO: 36348 - DNA, 120 bp, Artificial Sequence
  ENSG00000053918_10 (sequence is synthesized)
ggcagcctcactcattcagaccgcatggaggtgctatgctgccgagaaccccgactcctccacctggaagatctacatccggaaggccccccggagccacactctgctgtcacccagccc

SEQ ID NO: 36349 - DNA, 120 bp, Artificial Sequence
  ENSG00000053918_11 (sequence is synthesized)
caaacccaagaagtctgtggtggtaaagaaaaaaaagttcaagctggacaaagacaatggggtgactcctggagagaagatgctcacagtcccccatatcacgtgcgaccccccagaaga

SEQ ID NO: 36350 - DNA, 120 bp, Artificial Sequence
  ENSG00000053918_12 (sequence is synthesized)
aggacctggacctggaaggggagactctgctgacacccatcacccacatctcacagctgcgggaacaccatcgggccaccattaaggtcattcgacgcatgcagtactttgtggccaaga

SEQ ID NO: 36351 - DNA, 120 bp, Artificial Sequence
  ENSG00000053918_13 (sequence is synthesized)
agaaattccagcaagcgcggaagccttacgatgtgcgggacgtcattgagcagtactcgcagggccacctcaacctcatggtgcgcatcaaggagctgcagaggaggctggaccagtcca

SEQ ID NO: 36352 - DNA, 120 bp, Artificial Sequence
  ENSG00000053918_14 (sequence is synthesized)
ttgggaagccctcactgttcatctccgtctcagaaaagagcaaggatcgcggcagcaacacgatcggcgcccgcctgaaccgagtagaagacaaggtgacgcagctggaccagaggctgg

SEQ ID NO: 36353 - DNA, 120 bp, Artificial Sequence
  ENSG00000053918_15 (sequence is synthesized)
cactcatcaccgacatgcttcaccagctgctctccttgcacggtggcagcacccccggcagcggcggcccccccagagagggcggggcccacatcacccagccctgcggcagtggcggct

SEQ ID NO: 36354 - DNA, 120 bp, Artificial Sequence
  ENSG00000053918_16 (sequence is synthesized)
ccgtcgaccctgagctcttcctgcccagcaacaccctgcccacctacgagcagctgaccgtgcccaggaggggccccgatgaggggtcctgaggaggggatggggctgggggatgggcct

SEQ ID NO: 36355 - DNA, 120 bp, Artificial Sequence
  ENSG00000053918_17 (sequence is synthesized)
gagtgagaggggaggccaagagtggccccacctggccctctctgaaggaggccacctcctaaaaggcccagagagaagagccccactctcagaggccccaataccccatggaccatgctg

SEQ ID NO: 36356 - DNA, 120 bp, Artificial Sequence
  ENSG00000053918_18 (sequence is synthesized)
tctggcacagcctgcacttgggggctcagcaaggccacctcttcctggccggtgtgggggccccgtctcaggtctgagttgttaccccaagcgccctggcccccacatggtgatgttgac

SEQ ID NO: 36357 - DNA, 120 bp, Artificial Sequence
  ENSG00000053918_19 (sequence is synthesized)
atcactggcatggtggttgggacccagtggcagggcacagggcctggcccatgtatggccaggaagtagcacaggctgagtgcaggcccaccctgcttggcccagggggcttcctgaggg

SEQ ID NO: 36358 - DNA, 120 bp, Artificial Sequence
  ENSG00000053918_20 (sequence is synthesized)
gagacagagcaacccctggaccccagcctcaaatccaggaccctgccaggcacaggcagggcaggaccagcccacgctgactacagggccgccggcaataaaagcccaggagcccatttg

SEQ ID NO: 36359 - DNA, 120 bp, Artificial Sequence
  ENSG00000053918_21 (sequence is synthesized)
gagggcctgggcctggctccctcactctcaggaaatgctgacccatgggcaggagactgtggagactgctcctgagcccccagcttccagcaggagggacagtctcaccatttccccagg

SEQ ID NO: 36360 - DNA, 120 bp, Artificial Sequence
  ENSG00000053918_22 (sequence is synthesized)
gcacgtggttgagtggggggaacgcccacttccctgggttagactgccagctcttcctagctggagaggagccctgcctctccgcccctgagcccactgtgcgtggggctcccgcctcca

SEQ ID NO: 36361 - DNA, 120 bp, Artificial Sequence
  ENSG00000053918_23 (sequence is synthesized)
acccctcgcccagtcccagcagccagccaaacacacagaaggggactgccacctccccttgccagctgctgagccgcagagaagtgacggttcctacacaggacaggggttccttctggg

SEQ ID NO: 36362 - DNA, 120 bp, Artificial Sequence
  ENSG00000053918_24 (sequence is synthesized)
cattacatcgcatagaaatcaataatttgtggtgatttggatctgtgttttaatgagtttcacagtgtgattttgattattaattgtgcaagcttttcctaataaacgtggagaatcaca

SEQ ID NO: 36363 - DNA, 120 bp, Artificial Sequence
  ENSG00000053918_25 (sequence is synthesized)
cccttcctcccctgcagcttccatggcctggggctgtgagaggcccgggaaggcactgtctttgcgcctgcacatgtgtgtgtctggagtgtaggatggcactggtgccgggcctggatt

SEQ ID NO: 36364 - DNA, 120 bp, Artificial Sequence
  ENSG00000053918_26 (sequence is synthesized)
tactcagcccagatcacggctgcttttgtttacgtggcccctgctctcacccacaactccaggtttctggctctcgggaatttgaggcctgtggctgctgtggaccctgggaaagagcct

SEQ ID NO: 36365 - DNA, 120 bp, Artificial Sequence
  ENSG00000053918_27 (sequence is synthesized)
atggtcacagtcaccaccatcggctatggggacaaggtgccccagacgtgggtcgggaagaccatcgcctcctgcttctctgtctttgccatctccttctttgcgctcccagcgaccgca

SEQ ID NO: 36366 - DNA, 120 bp, Artificial Sequence
  ENSG00000053918_28 (sequence is synthesized)
acaagagtacaaagaagaggccttctccgggttcttagcagacgagcgcgacctctccgaccagggagacagacaagaggggaggttatgaggtcacctgggagaggtgtgggttccagc

SEQ ID NO: 36367 - DNA, 120 bp, Artificial Sequence
  ENSG00000053918_29 (sequence is synthesized)
tcccgtcgccactccccgactggatgccagaacgagcctgtcgtctttcacctccagacagcagggccctggctcccagtatcaaagcatgtacaagagcggtctctagggcagttctgc

SEQ ID NO: 36368 - DNA, 120 bp, Artificial Sequence
  ENSG00000053918_30 (sequence is synthesized)
gtagacgccaaagtacaggaagacgtgcaggaactttgtgccgtcgacccttgaacaatgcagggttggggcaccgacccccgaactgcccagtcaaaaacccatgtataacttttgact

SEQ ID NO: 36369 - DNA, 120 bp, Artificial Sequence
  ENSG00000053918_31 (sequence is synthesized)
ccccagaaacttcactaatagcctcctgttgactggaggccctaccaataacataaacaatcaattaacacattttgtatgcttcatgtattacaataaagtaaagtaaggaagagaaaa

SEQ ID NO: 36370 - DNA, 120 bp, Artificial Sequence
  ENSG00000053918_32 (sequence is synthesized)
gtcacgagagtgcaaagttctgtgaaacgctccagtggttacacgccccggggtttcagcttcgaccctggcttcctcatcgtcctggtctgcctcatcttcagcgtgctgtccaccatc

SEQ ID NO: 36371 - DNA, 120 bp, Artificial Sequence
  ENSG00000053918_33 (sequence is synthesized)
aacagcagccacggctcatagtgtgggctggtgtaacggagcagcggaatggctgtgcccccagcctggagtcaggcctgtgtcgccctgggagtggaatggcatgggcttgcacagctg

SEQ ID NO: 36372 - DNA, 120 bp, Artificial Sequence
  ENSG00000053918_34 (sequence is synthesized)
gcagtgtggccagcttaggcagccccctagggctctcagaggtcagaggtggagagcgtggagcaggatggagcccaggtccccagctgcagccatgcccggccaccgtaccacccctga

SEQ ID NO: 36373 - DNA, 120 bp, Artificial Sequence
  ENSG00000054116_0 (sequence is synthesized)
agtgccggtcggtcttgtgggctgaggggcagcggcttaggctccggcgtctgcaggggtcgccgagctaacccgtggctaggcgagtggggcggggcggccggcaccatgtcgaggcag

SEQ ID NO: 36374 - DNA, 120 bp, Artificial Sequence
  ENSG00000054116_1 (sequence is synthesized)
gcgaaccgtggcaccgagagcaagaaaatgagctctgagctcttcaccctgacctatggtgccctggtcacccagctatgtaaggactatgaaaatgatgaagatgtgaataaacagctg

SEQ ID NO: 36375 - DNA, 120 bp, Artificial Sequence
  ENSG00000054116_2 (sequence is synthesized)
gacaaaatgggctttaacattggagtccggctgattgaagatttcttggctcggtcaaatgttgggaggtgccatgactttcgggaaactgcggatgtcattgccaaggtggcgttcaag

SEQ ID NO: 36376 - DNA, 120 bp, Artificial Sequence
  ENSG00000054116_3 (sequence is synthesized)
atgtacttgggcatcactccaagcattactaattggagcccagctggtgatgaattctccctcattttggaaaataaccccttggtggactttgtggaacttcctgataaccactcatcc

SEQ ID NO: 36377 - DNA, 120 bp, Artificial Sequence
  ENSG00000054116_4 (sequence is synthesized)
cttatttattccaatctcttgtgtggggtgttgcggggagctttggagatggtccagatggctgtggaggccaagtttgtccaggacaccctgaaaggagacggtgtgacagaaatccgg

SEQ ID NO: 36378 - DNA, 120 bp, Artificial Sequence
  ENSG00000054116_5 (sequence is synthesized)
agcactgttggaatcagcaggcctctgtgctccctctgccctccagaactcagtgactcttgaacatggatgttatatattcttataacctgtttccattctccattcaaataaagagca

SEQ ID NO: 36379 - DNA, 120 bp, Artificial Sequence
  ENSG00000054116_6 (sequence is synthesized)
gactgcgatatagtccatttaccccatgtgtgcacattcaggagcgacagtctctgcccccattcccttgagaggggctggatgtaatcacctttggttggactagaaagagctcaaacc

SEQ ID NO: 36380 - DNA, 120 bp, Artificial Sequence
  ENSG00000054116_7 (sequence is synthesized)
attttacattcctgtttgaatttttccaaagcaaaactcactttgaccccattaagaggcaagcctggcacatctatccctgggcctttagaaagccatttgcctcaaatggctataggg

SEQ ID NO: 36381 - DNA, 120 bp, Artificial Sequence
  ENSG00000054116_8 (sequence is synthesized)
ttgtggggtggagggaggaagggctgggagggagtggggaggaattgctagctgtagtgtgacacattgtagtgtttgccaggaaaggagccagtcatgccggaaacactgacttctggg

SEQ ID NO: 36382 - DNA, 120 bp, Artificial Sequence
  ENSG00000054116_9 (sequence is synthesized)
aagccacccaggtctcattcctccctgctgttggaggcaacatctcctctttttacagagggtacatccttttttcttacaaattcttcaataaagacacattcttgagtgaaatcccaa

SEQ ID NO: 36383 - DNA, 120 bp, Artificial Sequence
  ENSG00000054116_10 (sequence is synthesized)
ttgccaaggaaagaaaaatgtttctgggaaaacaaaacaaaacaaagcgacaggcaaaactgtatgatgccgtgaaggagaggggtgcagcatcatgtacagatgcttctcctttgttgt

SEQ ID NO: 36384 - DNA, 120 bp, Artificial Sequence
  ENSG00000054116_11 (sequence is synthesized)
cctgagtatctgaagtgtcatcttgcagaggccacaggtggcgttcaagatgtacttgggcatcactccaagcattactaattggagcccagctggtgatgaattctccctcattttgga

SEQ ID NO: 36385 - DNA, 120 bp, Artificial Sequence
  ENSG00000054116_12 (sequence is synthesized)
gcgtttggaaaagggccttcctgtgagctctggcaaggggaagcctcttgctgggtcactccgggggcgttccaggcaggtgaggggaccgtcggagaagttccccggaggagaccccgc

SEQ ID NO: 36386 - DNA, 120 bp, Artificial Sequence
  ENSG00000054116_13 (sequence is synthesized)
gaggcctttaatctcccaaaagactggctaggcagctctttgggtcaaaaaaacattccaggtcgttagggaatagcatagattatttaatccctgtggattaaagccccactgaaatca

SEQ ID NO: 36387 - DNA, 120 bp, Artificial Sequence
  ENSG00000054116_14 (sequence is synthesized)
cctgtggattaaagccccactgaaatcaaagcctgagcttttccactgtgaaggtgtagcagagtagcatgggggtaaagaatacagactcggtcgggcgtggtggctcacatctgtaat

SEQ ID NO: 36388 - DNA, 120 bp, Artificial Sequence
  ENSG00000054116_15 (sequence is synthesized)
gccccggagccccgcgcccgcagcctcccggcgcctctcccacggccacggccgagcgggctccacggctccaggagttcgccgcgctagctgcctccccctgcgtccgcgtcttggtac

SEQ ID NO: 36389 - DNA, 120 bp, Artificial Sequence
  ENSG00000054116_16 (sequence is synthesized)
ggccccagaattctttatgtgagaaggagtttctgtgattttaactgctattgtaatagaaaccagttgattctgaagagtcacctcttttcctggaaatattttggctgtgagttaaga

SEQ ID NO: 36390 - DNA, 120 bp, Artificial Sequence
  ENSG00000054116_17 (sequence is synthesized)
ggaacattattttctcccatgctggtgactttggaaaggggttgtcatcagtgcaatgaacttggtctgggacttccttccttccccatggactgggcccctgggtcctctgttgcttct

SEQ ID NO: 36391 - DNA, 120 bp, Artificial Sequence
  ENSG00000054116_18 (sequence is synthesized)
gggaggggccttgggagtacagtttactctaggccaggacattctaagacatgtggaaaccattggtcacacctgccagcaacagagattagtttgtaaatgtctgtttcaggtgtttca

SEQ ID NO: 36392 - DNA, 120 bp, Artificial Sequence
  ENSG00000054116_19 (sequence is synthesized)
cagcatctagtgaatgaccgttgctcccataccagattctggtgacctgatcttaggcttgacagctgtggtggagacttgggttggcagaagcctaccttggtgtgttggaagagtgat

SEQ ID NO: 36393 - DNA, 120 bp, Artificial Sequence
  ENSG00000054116_20 (sequence is synthesized)
tgcttagtgcatgaggtgccttttacagcccattttgcagtagttctggctgcagccctgctgctttgaccttgcaggccaaatttcctggctcctccaaaggggatgatgttctttccc

SEQ ID NO: 36394 - DNA, 120 bp, Artificial Sequence
  ENSG00000054116_21 (sequence is synthesized)
tccagacacagttagagggaatcctgacagttgcatcaaggctggtccagactctcaccacgctttctcttttgtgctgcttggtcctgactgccttttgaatctcttttagagctctga

SEQ ID NO: 36395 - DNA, 120 bp, Artificial Sequence
  ENSG00000054116_22 (sequence is synthesized)
tatcttctgggacacccgaaatgcaatagggacttgataagtgtttaaatgaatgaaagagagaaaagaaagggctttggctcaccccagcgctttactgcctgagatggtgatgctgct

SEQ ID NO: 36396 - DNA, 120 bp, Artificial Sequence
  ENSG00000054116_23 (sequence is synthesized)
gaggtaggatccaagtcggacatctttacatggtgatactcctccataccaggctggtggaaggtggtgctgtcagtccccaaagcccaggaacatccattctcagataggcttatttgg

SEQ ID NO: 36397 - DNA, 120 bp, Artificial Sequence
  ENSG00000054116_24 (sequence is synthesized)
tgacagtctcattcttgggtattctttgctaagtttctccttaagggttggagccattgtcttatgcaacagaatgttggcgctgtcaatcttgtccttgtgggaaaccagccccccttt

SEQ ID NO: 36398 - DNA, 120 bp, Artificial Sequence
  ENSG00000054116_25 (sequence is synthesized)
tttggatgctgtggatgagtcagttatgccccatccccactggttccctagaggctgtggccaggcagctaccccttcgttttcccactgtcccccaggtccagatggctgtggaggcca

SEQ ID NO: 36399 - DNA, 120 bp, Artificial Sequence
  ENSG00000054118_0 (sequence is synthesized)
gggcgaggttcgggctggttgttccgttgcgagctgcagctgcgatctctgtggtaggcccagaagtgtatgctgacttgtaaagtgaagaagccagtggtgctgcgggtgttcttttgg

SEQ ID NO: 36400 - DNA, 120 bp, Artificial Sequence
  ENSG00000054118_1 (sequence is synthesized)
ggtagtgtctgggatccagtacgagttgaatcattgttcaaataaggtgtaattgaaaagtgatcctctcttcagagatgtcaaaaacaaacaaatccaagtctggatctcgctcttctc

SEQ ID NO: 36401 - DNA, 120 bp, Artificial Sequence
  ENSG00000054118_2 (sequence is synthesized)
gctcaagatctgcatcaagatctcgttctcgttcattttcgaagtctcggtcccgaagccgatctctctctcgttcaaggaagcgcaggctgagttctaggtctcgttccagatcatatt

SEQ ID NO: 36402 - DNA, 120 bp, Artificial Sequence
  ENSG00000054118_3 (sequence is synthesized)
ctccagctcataacagagaaagaaaccacccaagagtatatcagaatcgggatttccgaggtcacaacagaggctatagaaggccctattatttccgtgggcgtaacagaggcttttatc

SEQ ID NO: 36403 - DNA, 120 bp, Artificial Sequence
  ENSG00000054118_4 (sequence is synthesized)
catggggccaatataaccgaggaggctatggaaactaccgctcaaattggcagaattaccggcaagcatacagtcctcgtcgaggccgttcaagatcccggtccccaaagagaaggtccc

SEQ ID NO: 36404 - DNA, 120 bp, Artificial Sequence
  ENSG00000054118_5 (sequence is synthesized)
cttcaccaaggtccaggagccattctagaaactctgataagtcgtcttctgaccggtcaaggcgctcctcatcctcccgttcttcctccaaccatagccgagttgaatcttctaagcgca

SEQ ID NO: 36405 - DNA, 120 bp, Artificial Sequence
  ENSG00000054118_6 (sequence is synthesized)
agtctgcaaaggagaaaaagtcctcttctaaggatagccggccatctcaggctgccggggataaccagggagatgaggccaaggagcagacattctctggaggcacctctcaagatacaa

SEQ ID NO: 36406 - DNA, 120 bp, Artificial Sequence
  ENSG00000054118_7 (sequence is synthesized)
aagcatctgagagctcgaagccatggccagatgccacctacggcactggttctgcatcacgggcctcagcagtttctgagctgagtcctcgggagcgaagcccagctctcaaaagccccc

SEQ ID NO: 36407 - DNA, 120 bp, Artificial Sequence
  ENSG00000054118_8 (sequence is synthesized)
tccagtctgtggtggtgaggcggcggtcaccccgtcctagccccgtgccaaaacctagtcctccactttccagcacatcccagatgggctcaactctgccgagtggtgccgggtatcagt

SEQ ID NO: 36408 - DNA, 120 bp, Artificial Sequence
  ENSG00000054118_9 (sequence is synthesized)
ctgggacacaccaaggtcagttcgaccatggttctgggtccctgagtccatccaaaaagagccctgtgggtaagagtccaccatccactggctccacatatggctcatctcagaaggagg

SEQ ID NO: 36409 - DNA, 120 bp, Artificial Sequence
  ENSG00000054118_10 (sequence is synthesized)
agagtgctgcttcaggaggagcagcctatacaaagaggtatctagaagagcagaagacagagaatggaaaagataaggaacagaaacaaacaaataccgataaagaaaaaataaaagaga

SEQ ID NO: 36410 - DNA, 120 bp, Artificial Sequence
  ENSG00000054118_11 (sequence is synthesized)
aagggagcttctctgacacaggcttgggtgatggaaaaatgaaatctgattcttttgctcccaaaactgattctgagaagccttttcggggcagtcagtctcccaaaaggtataagctcc

SEQ ID NO: 36411 - DNA, 120 bp, Artificial Sequence
  ENSG00000054118_12 (sequence is synthesized)
gagatgactttgagaagaagatggctgacttccacaaggaggagatggatgatcaagataaggacaaagctaagggaagaaaggaatctgagtttgatgatgaacccaaatttatgtcta

SEQ ID NO: 36412 - DNA, 120 bp, Artificial Sequence
  ENSG00000054118_13 (sequence is synthesized)
aagtcataggtgcaaacaaaaaccaggaggaggagaagtcaggcaaatgggagggcctggtatatgcacctccagggaaggaaaagcagagaaaaacagaggagctggaggaggagtctt

SEQ ID NO: 36413 - DNA, 120 bp, Artificial Sequence
  ENSG00000054118_14 (sequence is synthesized)
tcccagagagatccaaaaaggaagatcggggcaagagaagcgaaggtgggcacaggggctttgtgcctgagaagaatttccgagtgactgcttataaagcagtccaggagaaaagctcat

SEQ ID NO: 36414 - DNA, 120 bp, Artificial Sequence
  ENSG00000054118_15 (sequence is synthesized)
cacctcccccaagaaagacctctgagagccgagacaagctgggagcgaaaggagattttcccacaggaaagtcttccttttccattactcgagaggcacaggtcaatgtccggatggact

SEQ ID NO: 36415 - DNA, 120 bp, Artificial Sequence
  ENSG00000054118_16 (sequence is synthesized)
cttttgatgaggacctcgcacgacccagtggcttattggctcaggaacgcaagctttgccgagatctagtccatagcaacaaaaaggaacaggagtttcgttccattttccagcacatac

SEQ ID NO: 36416 - DNA, 120 bp, Artificial Sequence
  ENSG00000054118_17 (sequence is synthesized)
aatcagctcagtctcagcgtagcccctcagaactgtttgcccaacatatagtgaccattgttcaccatgttaaagagcatcactttgggtcctcaggaatgacattacatgaacgcttta

SEQ ID NO: 36417 - DNA, 120 bp, Artificial Sequence
  ENSG00000054118_18 (sequence is synthesized)
cagtacattcagaaaacatggtttggctcatgatgaaatgaaaagtccccgggaacctggctacaaggctgagggaaaatacaaagatgatcctgttgatctccgccttgatattgaacg

SEQ ID NO: 36418 - DNA, 120 bp, Artificial Sequence
  ENSG00000054118_19 (sequence is synthesized)
tcgtaaaaaacataaggagagagatcttaaacgaggtaaatcgagagaatcagtggattcccgagactccagtcactcaagggaaaggtcagctgaaaaaacagagaaaactcataaagg

SEQ ID NO: 36419 - DNA, 120 bp, Artificial Sequence
  ENSG00000054118_20 (sequence is synthesized)
atcaaagaaacagaagaagcatcggagagcaagagacaggtccagatcctcctcctcttcctcccagtcatctcactcctacaaagcagaagagtacactgaagagacagaggaaagaga

SEQ ID NO: 36420 - DNA, 120 bp, Artificial Sequence
  ENSG00000054118_21 (sequence is synthesized)
ggagagcaccacgggctttgacaaatcaagactggggaccaaagactttgtgggtccaagtgaaagaggaggtggcagagctcgaggaacctttcagtttcgagccagaggaagaggctg

SEQ ID NO: 36421 - DNA, 120 bp, Artificial Sequence
  ENSG00000054118_22 (sequence is synthesized)
gggcagaggcaactactctgggaacaataacaacaacagcaacaacgattttcaaaaaagaaaccgggaagaggagtgggacccagagtacacacccaaaagcaagaagtattacttgca

SEQ ID NO: 36422 - DNA, 120 bp, Artificial Sequence
  ENSG00000054118_23 (sequence is synthesized)
tgatgaccgtgaaggcgaaggcagtgacaagtgggtgagccggggccggggccgaggagcctttcctcggggtcggggccggttcatgttccggaaatcaagtaccagccccaagtgggc

SEQ ID NO: 36423 - DNA, 120 bp, Artificial Sequence
  ENSG00000054118_24 (sequence is synthesized)
ccatgacaagttcagtggggaggaaggggagattgaagacgacgagagtgggacagagaaccgagaagagaaggacaatatacagcccacaaccgagtaggggccacccttgacgggatt

SEQ ID NO: 36424 - DNA, 120 bp, Artificial Sequence
  ENSG00000054118_25 (sequence is synthesized)
cctgcccaggggagagaggcgctgggaagatggctggtgaggagcttaacagaggaacctcaagaagattctgaaaatcctacccccaccccccaccagccgcacagattgtactaccgc

SEQ ID NO: 36425 - DNA, 120 bp, Artificial Sequence
  ENSG00000054118_26 (sequence is synthesized)
gagaggcatccctggcgctgtctcccactggacagaggaggctggccatggggcccaggggtcaggcccagcttttgagcagaatacaacgcattgggctttagctgtttttctcatttg

SEQ ID NO: 36426 - DNA, 120 bp, Artificial Sequence
  ENSG00000054118_27 (sequence is synthesized)
ttggtgtgtggggtgggggcaggggtagggcgggagagcgatgcttggatttttgtttcctattagaaaccaacagttttgttctaatttcatttcatttggagctaagatgactaattt

SEQ ID NO: 36427 - DNA, 88 bp, Artificial Sequence
  ENSG00000054118_28 (sequence is synthesized)
gttctaatttcatttcatttggagctaagatgactaatttgatgattttcgatctcttttcccctgtcctgattttaaaagcccgcat

SEQ ID NO: 36428 - DNA, 120 bp, Artificial Sequence
  ENSG00000054118_29 (sequence is synthesized)
ttcttgaaagagaaaacaaaagcatgtgaataaactttgaagtgttcacctcagtttgggaccaaactgcttggatctttgtaaaaaccggttttgtatgtcaaggaggagtttaaggcc

SEQ ID NO: 36429 - DNA, 120 bp, Artificial Sequence
  ENSG00000054118_30 (sequence is synthesized)
tttccgaccaccttgtgttccccttttctgcgcagccatgtatcacgtggagttgctccttaccacacctcacgtgcccctgagccctatttcctgatttcttctgggctggacttcccc

SEQ ID NO: 36430 - DNA, 120 bp, Artificial Sequence
  ENSG00000054118_31 (sequence is synthesized)
gttctccaccagcagctccagtatcccaaactttctagtcctgctgatcctcccagcaacggggtggaaactggagggcagtgtctggtctgttttctaagaaacttatgaattctatta

SEQ ID NO: 36431 - DNA, 120 bp, Artificial Sequence
  ENSG00000054118_32 (sequence is synthesized)
tctttacaaatatgagaaaattttttcaatattttttattaatctttttataaaatgaaaagaaactcctatgatcgattaaggaaggtggttatggctgggtggttcaggggttttttt

SEQ ID NO: 36432 - DNA, 120 bp, Artificial Sequence
  ENSG00000054118_33 (sequence is synthesized)
gggtttctttttttttttctttgtctttttaaccttaagctgtttaagttgaagcattctcagatgtttggggggaaacatcctcttaaaatgggtccttgtgcttgccttctggggagg

SEQ ID NO: 36433 - DNA, 120 bp, Artificial Sequence
  ENSG00000054118_34 (sequence is synthesized)
cggtcctgagcaggtgaatcataaggcatttatgcatatgttatatgcggactgcacccacctctcccccccagcctttgcctcttgcgttgttgtgctgctttccccttactttgctac

SEQ ID NO: 36434 - DNA, 120 bp, Artificial Sequence
  ENSG00000054118_35 (sequence is synthesized)
atttctatagttaagttggttttacttgaatgattcatgtttagggggaaaatgaaaatctcccttaaaatttgtttcaactcctcctgcaaataaaataaatgaagtggcagatgtaaa

SEQ ID NO: 36435 - DNA, 120 bp, Artificial Sequence
  ENSG00000054118_36 (sequence is synthesized)
ctgtggggcgggggcgaggttcgggctggttgttccgttgcgagctgcagctgcgatctctgtggtaggcccagcctggtggccaaaaacgggatagtccaaatttgtctcctacgggaa

SEQ ID NO: 36436 - DNA, 120 bp, Artificial Sequence
  ENSG00000054118_37 (sequence is synthesized)
tattagagttctcacttttttcttgggctggagctgaggccggcttgcattccagtggcaatcggcgtgagttctgcttatatgagaagtgtatgctgacttgtaaagtgaagaagccag

SEQ ID NO: 36437 - DNA, 120 bp, Artificial Sequence
  ENSG00000054118_38 (sequence is synthesized)
tgtggggcgggggcgaggttcgggctggttgttccgttgcgagctgcagctgcgatctctgtggtaggcccaggtcaagagtcttcatctccagctgcctcagttttcttatcactaaaa

SEQ ID NO: 36438 - DNA, 120 bp, Artificial Sequence
  ENSG00000054118_39 (sequence is synthesized)
gatgggcataattctaaaaatgaactacaaagggttaatttttattaaatgtatcaacaacctttgtgaagtggttagaatatggtaaatgaccccaaagtctattgaggtgagcttgag

SEQ ID NO: 36439 - DNA, 120 bp, Artificial Sequence
  ENSG00000054148_0 (sequence is synthesized)
ctccctcgttgccccagcctcgcgggccgcctaactgccccgttccaagggtgccaccggaccccgctggagaggaacttctccgttggctggatttcatcaccacccattcccgattcc

SEQ ID NO: 36440 - DNA, 120 bp, Artificial Sequence
  ENSG00000054148_1 (sequence is synthesized)
acgtttcctttaagcggggctggcggagccgcaaggcggcaaggaactggattgcgattggtcagcacgtgcctcggtcggcggtacaattggctgaggcgctgggccttgggaagcatt

SEQ ID NO: 36441 - DNA, 120 bp, Artificial Sequence
  ENSG00000054148_2 (sequence is synthesized)
ccccgacgggattggtcgtcgctctcgcagagcccgcctcccgcagtacaagcggcccccgggtcgggtgggaggaggggactccgggaggaggaacatggcggtggcggacctcgctct

SEQ ID NO: 36442 - DNA, 120 bp, Artificial Sequence
  ENSG00000054148_3 (sequence is synthesized)
tccgagtccactcggctccccgctccggggctccggctgcagagagcaaggagatcgtgcgcggctacaagtgggctgagtaccatgcggacatctacgacaaagtgtcgggcgacatgc

SEQ ID NO: 36443 - DNA, 120 bp, Artificial Sequence
  ENSG00000054148_4 (sequence is synthesized)
agaagcaaggctgcgactgtgagtgtctgggcggcgggcgcatctcccaccagagtcaggacaagaagattcacgtgtacggctattccatggcctatggtcctgcccagcacgccattt

SEQ ID NO: 36444 - DNA, 120 bp, Artificial Sequence
  ENSG00000054148_5 (sequence is synthesized)
caactgagaaaatcaaagccaagtaccccgactacgaggtcacctgggctaacgacggctactgagcactcccagcccggggcctgctgcctccagcagccacttcagagcccccgcctt

SEQ ID NO: 36445 - DNA, 120 bp, Artificial Sequence
  ENSG00000054148_6 (sequence is synthesized)
tgcctgcactcctcttgcagggctggccctgcctgctcctgcggcagcctctggtgacgtgctgtccaccaggccttggagacaggctagcctggccacagaattaaacgtgttgccaca

SEQ ID NO: 36446 - DNA, 120 bp, Artificial Sequence
  ENSG00000054148_7 (sequence is synthesized)
ggcgggaagggcgtgacacggcctgacaccctccccagcagtctcccagttcccgcgccctccccggttccaccctccttcgctcattcatccctgtcccagcctcaaggggcttcgtct

SEQ ID NO: 36447 - DNA, 120 bp, Artificial Sequence
  ENSG00000054148_8 (sequence is synthesized)
ctcctggggaaggggctgttcagagctgggatttcagaccccttcggctgggagttcctcccgcggcctccaagggcggccagggcacgtcctgaggccgccctcccatcccagcggaca

SEQ ID NO: 36448 - DNA, 120 bp, Artificial Sequence
  ENSG00000054148_9 (sequence is synthesized)
gagcacgcaggcttcctggggttctcccagggtcggcggcagagccctccctccagggcccattgtgttcctgcattcccccatggagcacacgccagacctgaggggtgggacggacac

SEQ ID NO: 36449 - DNA, 120 bp, Artificial Sequence
  ENSG00000054148_10 (sequence is synthesized)
ccccagacatggccggctgtctcctctccctgccttgggaggccttgctgggctctagctgtcctccagcactttgggccctgggcccccagaggcagtcagtacctgggtggagctcag

SEQ ID NO: 36450 - DNA, 120 bp, Artificial Sequence
  ENSG00000054148_11 (sequence is synthesized)
agtccccacctgtgctcttcacaaaaaccaccagcagatgagacccacgtgcgtccctctgggcgcctcaggccccaggatccaccatcaaggcctatggtcctgcccagcacgccattt

SEQ ID NO: 36451 - DNA, 80 bp, Artificial Sequence
  ENSG00000054179_0 (sequence is synthesized)
ctccgcctccggctccccgcactctccgggtccacgcatcgtcctcccgcgcgcccgcccgcccatggccgggaaggtgc

SEQ ID NO: 36452 - DNA, 120 bp, Artificial Sequence
  ENSG00000054179_1 (sequence is synthesized)
cgccggcctcctactgctgtgcgtccccacccgcgacgtccgggagccgcccgccctcaagtatggcatcgtcctggacgctggttcttcacacacgtccatgtttatctacaagtggcc

SEQ ID NO: 36453 - DNA, 120 bp, Artificial Sequence
  ENSG00000054179_2 (sequence is synthesized)
ggcagacaaggagaacgacacaggcattgtgggccagcacagctcctgtgatgttccaggtgggggcatctccagctatgcagacaacccttctggggccagccagagtcttgttggatg

SEQ ID NO: 36454 - DNA, 120 bp, Artificial Sequence
  ENSG00000054179_3 (sequence is synthesized)
cctcgaacaggcgcttcaggatgtgcccaaagagagacacgcgggcacacccctctacctgggagccacagcgggtatgcgcctgctcaacctgaccaatccagaggcctcgaccagtgt

SEQ ID NO: 36455 - DNA, 120 bp, Artificial Sequence
  ENSG00000054179_4 (sequence is synthesized)
gctcatggcagtgactcacacactgacccagtacccctttgacttccggggtgcacgcatcctctcgggccaggaagagggggtgtttggctgggtgactgccaactacctgctggagaa

SEQ ID NO: 36456 - DNA, 120 bp, Artificial Sequence
  ENSG00000054179_5 (sequence is synthesized)
cttcatcaagtacggctgggtgggccggtggttccggccacggaaggggacactgggggccatggacctggggggtgcctctacccagatcacttttgagacaaccagtccagctgagga

SEQ ID NO: 36457 - DNA, 120 bp, Artificial Sequence
  ENSG00000054179_6 (sequence is synthesized)
cagagccagcgaggtccagctgcatctctacggccagcactaccgagtctacacccacagcttcctctgctatggccgtgaccaggtcctccagaggctgctggccagcgccctccagac

SEQ ID NO: 36458 - DNA, 120 bp, Artificial Sequence
  ENSG00000054179_7 (sequence is synthesized)
ccacggcttccacccctgctggccgaggggcttttccacccaagtgctgctcggggatgtgtaccagtcaccatgcaccatggcccagcggccccagaacttcaacagcagtgccagggt

SEQ ID NO: 36459 - DNA, 120 bp, Artificial Sequence
  ENSG00000054179_8 (sequence is synthesized)
tctcctcctgccccttctcccgatgctctttcaatggggtcttccagcccccagtggctgggaactttgtggccttctctgccttcttctacactgtggactttttgcggacttcgatgg

SEQ ID NO: 36460 - DNA, 120 bp, Artificial Sequence
  ENSG00000054179_9 (sequence is synthesized)
ggctgcccgtggccaccctgcagcagctggaggcagccgcagtgaatgtctgcaaccagacctgggctcagctgcaagctcgggtgccagggcaacgggcccgcctggccgactactgcg

SEQ ID NO: 36461 - DNA, 120 bp, Artificial Sequence
  ENSG00000054179_10 (sequence is synthesized)
ccggggccatgttcgtgcagcagctgctgagtcgcggctacggcttcgacgagcgcgccttcggcggcgtgatcttccagaagaaggccgcggacactgcagtgggctgggcgctcggct

SEQ ID NO: 36462 - DNA, 120 bp, Artificial Sequence
  ENSG00000054179_11 (sequence is synthesized)
acatgctgaacctgaccaacctgatccccgccgacccgccggggctgcgcaagggcacagacttcagctcctgggtcgtcctcctgctgctcttcgcctccgcgctcctggctgcgcttg

SEQ ID NO: 36463 - DNA, 120 bp, Artificial Sequence
  ENSG00000054179_12 (sequence is synthesized)
tcctgctgctgcgtcaggtgcactccgccaagctgccaagcaccatttaggggccgacgggggcagctgccccatccctcccccaacccctgtatccccaccccgtactcccacccctcc

SEQ ID NO: 36464 - DNA, 120 bp, Artificial Sequence
  ENSG00000054179_13 (sequence is synthesized)
cacaacccctgtacctcccacccctgtatccccacccctccacccacccctctcccaacctctctccccgcccctgtatcctgcattcctccacccaccctctatcccccaccgctccac

SEQ ID NO: 36465 - DNA, 120 bp, Artificial Sequence
  ENSG00000054179_14 (sequence is synthesized)
cccaccactgtcttctccatccttccaccccaccctcagcgtctctgcccctaaggcagcccaggaaataggaactgagactctggtacccacaggagcctgggtgggcaaagagcgctc

SEQ ID NO: 36466 - DNA, 120 bp, Artificial Sequence
  ENSG00000054179_15 (sequence is synthesized)
aatccagctccttgaacccctccagcccgcttcagcctgggcatcactgcaggccccgtgctcctcctcctcctcctcagggctgggtctccagagagtggggccttggtcctgagaatc

SEQ ID NO: 36467 - DNA, 120 bp, Artificial Sequence
  ENSG00000054179_16 (sequence is synthesized)
agcccttagaggctccttctgtgtagtctgggtctgtactggggagggtcacagcccacgggctggcagccagcccagcacctacttgtaaaaattttgtaataaaaagtttttcctaga

SEQ ID NO: 36468 - DNA, 120 bp, Artificial Sequence
  ENSG00000054179_17 (sequence is synthesized)
ctggcttctgccactggttccctccatggtaccacacaagggaagatggaagtgggtctgggcaccgggagtgtgcccaccggagactccaagagaaacgtacgagtcgtcccaggaccg

SEQ ID NO: 36469 - DNA, 120 bp, Artificial Sequence
  ENSG00000054179_18 (sequence is synthesized)
gggtggtgagcgaggccccattttgtcctcccagggcctagtctcagacagactggggtgagggaggtggggacaggcggcgagccagcgggcagactcaggcctggagctcgtcctgtt

SEQ ID NO: 36470 - DNA, 120 bp, Artificial Sequence
  ENSG00000054179_19 (sequence is synthesized)
cccctggccacacaccaaggtgttgctgcctcctgctccctggtggccatgcctgctgtccctcctcactggccttccaggcatgggcgctggctggggagggatggaagcgtgccctgc

SEQ ID NO: 36471 - DNA, 120 bp, Artificial Sequence
  ENSG00000054179_20 (sequence is synthesized)
cgggggtgcccctcggactcggtcttgccattcgtgtccgggcctgtgtggtggtctctggcctcgcacggcccgtgtgtgtctggggaggggtgaagcacgccgccggccccctctccc

SEQ ID NO: 36472 - DNA, 120 bp, Artificial Sequence
  ENSG00000054219_0 (sequence is synthesized)
ctcagcaggcggggcgggagccgcgtgcgcccgaggacccggccggaaggcttgcgccagctcaggatgaggacaggctgggcgacccctcgccgcccggcggggctcctcatgctgctc

SEQ ID NO: 36473 - DNA, 120 bp, Artificial Sequence
  ENSG00000054219_1 (sequence is synthesized)
tgctgctcttctggttcttcgatctcgcggagccctctggccgcgcagctaatgaccccttcaccatcgtccatggaaatacgggcaagtgcatcaagccagtgtatggctggatagtag

SEQ ID NO: 36474 - DNA, 120 bp, Artificial Sequence
  ENSG00000054219_2 (sequence is synthesized)
cagacgactgtgatgaaactgaggacaagttatggaagtgggtgtcccagcatcggctctttcatttgcactcccaaaagtgccttggcctcgatattaccaaatcggtaaatgagctga

SEQ ID NO: 36475 - DNA, 120 bp, Artificial Sequence
  ENSG00000054219_3 (sequence is synthesized)
gaatgttcagctgtgactccagtgccatgctgtggtggaaatgtgagcaccactctctgtacggagctgcccggtaccggctggctctgaaggatggacatggcacagcaatctcaaatg

SEQ ID NO: 36476 - DNA, 120 bp, Artificial Sequence
  ENSG00000054219_4 (sequence is synthesized)
catctgatgtctggaagaaaggaggctcagaggaaagcctttgtgaccagccttatcatgagatctataccagagatgggaactcttatgggagaccttgtgaatttccattcttaattg

SEQ ID NO: 36477 - DNA, 120 bp, Artificial Sequence
  ENSG00000054219_5 (sequence is synthesized)
atgggacctggcatcatgattgcattcttgatgaagatcatagtgggccatggtgtgccaccaccttaaattatgaatatgaccgaaagtggggcatctgcttaaagcctgaaaacggtt

SEQ ID NO: 36478 - DNA, 120 bp, Artificial Sequence
  ENSG00000054219_6 (sequence is synthesized)
gtgaagataattgggaaaagaacgagcagtttggaagttgctaccaatttaatactcagacggctctttcttggaaagaagcttatgtttcatgtcagaatcaaggagctgatttactga

SEQ ID NO: 36479 - DNA, 120 bp, Artificial Sequence
  ENSG00000054219_7 (sequence is synthesized)
gcatcaacagtgctgctgaattaacttaccttaaagaaaaagaaggcattgctaagattttctggattggtttaaatcagctatactctgctagaggctgggaatggtcagaccacaaac

SEQ ID NO: 36480 - DNA, 120 bp, Artificial Sequence
  ENSG00000054219_8 (sequence is synthesized)
cattaaactttctcaactgggatccagacaggcccagtgcacctactataggtggctccagctgtgcaagaatggatgctgagtctggtctgtggcagagcttttcctgtgaagctcaac

SEQ ID NO: 36481 - DNA, 120 bp, Artificial Sequence
  ENSG00000054219_9 (sequence is synthesized)
tgccctatgtctgcaggaaaccattaaataatacagtggagttaacagatgtctggacatactcagatacccgctgtgatgcaggctggctgccaaataatggattttgctatctgctgg

SEQ ID NO: 36482 - DNA, 120 bp, Artificial Sequence
  ENSG00000054219_10 (sequence is synthesized)
taaatgaaagtaattcctgggataaggcacatgcgaaatgcaaagccttcagtagtgacctaatcagcattcattctctagcagatgtggaggtggttgtcacaaaactccataatgagg

SEQ ID NO: 36483 - DNA, 120 bp, Artificial Sequence
  ENSG00000054219_11 (sequence is synthesized)
atatcaaagaagaagtgtggataggccttaagaacataaacataccaactttatttcagtggtcagatggtactgaagttactctaacatattgggatgagaatgagccaaatgttccct

SEQ ID NO: 36484 - DNA, 120 bp, Artificial Sequence
  ENSG00000054219_12 (sequence is synthesized)
acaataagacgcccaactgtgtttcctacttaggagagctaggtcagtggaaagtccaatcatgtgaggagaaactaaaatatgtatgcaagagaaagggagaaaaactgaatgacgcaa

SEQ ID NO: 36485 - DNA, 120 bp, Artificial Sequence
  ENSG00000054219_13 (sequence is synthesized)
gttctgataagatgtgtcctccagatgagggctggaagagacatggagaaacctgttacaagatttatgaggatgaggtcccttttggaacaaactgcaatctgactatcactagcagat

SEQ ID NO: 36486 - DNA, 120 bp, Artificial Sequence
  ENSG00000054219_14 (sequence is synthesized)
ttgagcaagaatacctaaatgatttgatgaaaaagtatgataaatctctaagaaaatacttctggactggcctgagagatgtagattcttgtggagagtataactgggcaactgttggtg

SEQ ID NO: 36487 - DNA, 120 bp, Artificial Sequence
  ENSG00000054219_15 (sequence is synthesized)
gaagaaggcgggctgtaaccttttccaactggaattttcttgagccagcttccccgggcggctgcgtggctatgtctactggaaagtctgttggaaagtgggaggtgaaggactgcagaa

SEQ ID NO: 36488 - DNA, 120 bp, Artificial Sequence
  ENSG00000054219_16 (sequence is synthesized)
gcttcaaagcactttcaatttgcaagaaaatgagtggaccccttgggcctgaagaagcatcccctaagcctgatgacccctgtcctgaaggctggcagagtttccccgcaagtctttctt

SEQ ID NO: 36489 - DNA, 120 bp, Artificial Sequence
  ENSG00000054219_17 (sequence is synthesized)
gttataaggtattccatgcagaaagaattgtaagaaagaggaactgggaagaagctgaacgattctgccaagcccttggagcacacctttctagcttcagccatgtggatgaaataaagg

SEQ ID NO: 36490 - DNA, 120 bp, Artificial Sequence
  ENSG00000054219_18 (sequence is synthesized)
aatttcttcactttttaacggaccagttcagtggccagcattggctgtggattggtttgaataaaaggagcccagatttacaaggatcctggcaatggagtgatcgtacaccagtgtcta

SEQ ID NO: 36491 - DNA, 120 bp, Artificial Sequence
  ENSG00000054219_19 (sequence is synthesized)
ctattatcatgccaaatgagtttcagcaggattatgacatcagagactgtgctgctgtcaaggtatttcataggccatggcgaagaggctggcatttctatgatgatagagaatttattt

SEQ ID NO: 36492 - DNA, 120 bp, Artificial Sequence
  ENSG00000054219_20 (sequence is synthesized)
atttgaggccttttgcttgtgatacaaaacttgaatgggtgtgccaaattccaaaaggccgtactccaaaaacaccagactggtacaatccagaccgtgctggaattcatggacctccac

SEQ ID NO: 36493 - DNA, 120 bp, Artificial Sequence
  ENSG00000054219_21 (sequence is synthesized)
ttataattgaaggaagtgaatattggtttgttgctgatcttcacctaaactatgaagaagccgtcctgtactgtgccagcaatcacagctttcttgcaactataacatcttttgtgggac

SEQ ID NO: 36494 - DNA, 120 bp, Artificial Sequence
  ENSG00000054219_22 (sequence is synthesized)
taaaagccatcaaaaacaaaatagcaaatatatctggtgatggacagaagtggtggataagaattagcgagtggccaatagatgatcattttacatactcacgatatccatggcaccgct

SEQ ID NO: 36495 - DNA, 120 bp, Artificial Sequence
  ENSG00000054219_23 (sequence is synthesized)
ttcctgtgacatttggagaggaatgcttgtacatgtctgccaagacttggcttatcgacttaggtaaaccaacagactgtagtaccaagttgcccttcatctgtgaaaaatataatgttt

SEQ ID NO: 36496 - DNA, 120 bp, Artificial Sequence
  ENSG00000054219_24 (sequence is synthesized)
cttcgttagagaaatacagcccagattctgcagctaaagtgcaatgttctgagcaatggattccttttcagaataagtgttttctaaagatcaaacccgtgtctctcacattttctcaag

SEQ ID NO: 36497 - DNA, 120 bp, Artificial Sequence
  ENSG00000054219_25 (sequence is synthesized)
caagcgatacctgtcactcctatggtggcacccttccttcagtgttgagccagattgaacaagactttattacatccttgcttccggatatggaagctactttatggattggtttgcgct

SEQ ID NO: 36498 - DNA, 120 bp, Artificial Sequence
  ENSG00000054219_26 (sequence is synthesized)
ggactgcctatgaaaagataaacaaatggacagataacagagagctgacgtacagtaactttcacccattattggttagtgggaggctgagaataccagaaaatttttttgaggaagagt

SEQ ID NO: 36499 - DNA, 120 bp, Artificial Sequence
  ENSG00000054219_27 (sequence is synthesized)
ctcgctaccactgtgccctaatactcaacctccaaaaatcaccgtttactgggacgtggaattttacatcctgcagtgaacgccactttgtgtctctctgtcagaaatattcagaagtta

SEQ ID NO: 36500 - DNA, 120 bp, Artificial Sequence
  ENSG00000054219_28 (sequence is synthesized)
gctaaaagggagtgtctgaaaagtaacatgcagctggtgagcatcacggacccttaccagcaggcattcctcagtgtgcaggcgctccttcacaactcttccttatggatcggactcttc

SEQ ID NO: 36501 - DNA, 120 bp, Artificial Sequence
  ENSG00000054219_29 (sequence is synthesized)
agtcaagatgatgaactcaactttggttggtcagatgggaaacgtcttcattttagtcgctgggctgaaactaatgggcaactcgaagactgtgtagtattagacactgatggattctgg

SEQ ID NO: 36502 - DNA, 120 bp, Artificial Sequence
  ENSG00000054219_30 (sequence is synthesized)
aaaacagttgattgcaatgacaatcaaccaggtgctatttgctactattcaggaaatgagactgaaaaagaggtcaaaccagttgacagtgttaaatgtccatctcctgttctaaatact

SEQ ID NO: 36503 - DNA, 120 bp, Artificial Sequence
  ENSG00000054219_31 (sequence is synthesized)
ccgtggataccatttcagaactgttgctacaatttcataataacaaagaataggcatatggcaacaacacaggatgaagttcatactaaatgccagaaactgaatccaaaatcacatatt

SEQ ID NO: 36504 - DNA, 120 bp, Artificial Sequence
  ENSG00000054219_32 (sequence is synthesized)
ctgagtattcgagatgaaaaggagaataactttgttcttgagcaactgctgtacttcaattatatggcttcatgggtcatgttaggaataacttatagaaataagtctcttatgtggttt

SEQ ID NO: 36505 - DNA, 120 bp, Artificial Sequence
  ENSG00000054219_33 (sequence is synthesized)
gataagaccccactgtcatatacacattggagagcaggaagaccaactataaaaaatgagaagtttttggctggtttaagtactgacggcttctgggatattcaaacctttaaagttatt

SEQ ID NO: 36506 - DNA, 120 bp, Artificial Sequence
  ENSG00000054219_34 (sequence is synthesized)
gaagaagcagtttattttcaccagcacagcattcttgcttgtaaaattgaaatggttgactacaaagaagaatataatactacactgccacagtttatgccatatgaagatggtatttac

SEQ ID NO: 36507 - DNA, 120 bp, Artificial Sequence
  ENSG00000054219_35 (sequence is synthesized)
agtgttattcaaaaaaaggtaacatggtatgaagcattaaacatgtgttctcaaagtggaggtcacttggcaagcgttcacaaccaaaatggccagctctttctggaagatattgtaaaa

SEQ ID NO: 36508 - DNA, 120 bp, Artificial Sequence
  ENSG00000054219_36 (sequence is synthesized)
cgtgatggatttccactatgggttgggctctcaagtcatgatggaagtgaatcaagttttgaatggtctgatggtagtacatttgactatatcccatggaaaggccaaacatctcctgga

SEQ ID NO: 36509 - DNA, 120 bp, Artificial Sequence
  ENSG00000054219_37 (sequence is synthesized)
aattgtgttctcttggatccaaaaggaacttggaaacatgaaaaatgcaactctgttaaggatggtgctatttgttataaacctacaaaatctaaaaagctgtcccgtcttacatattca

SEQ ID NO: 36510 - DNA, 120 bp, Artificial Sequence
  ENSG00000054219_38 (sequence is synthesized)
tcaagatgtccagcagcaaaagagaatgggtcacggtggatccagtacaagggtcactgttacaagtctgatcaggcattgcacagtttttcagaggccaaaaaattgtgttcaaaacat

SEQ ID NO: 36511 - DNA, 120 bp, Artificial Sequence
  ENSG00000054219_39 (sequence is synthesized)
gatcactctgcaactatcgtttccataaaagatgaagatgagaataaatttgtgagcagactgatgagggaaaataataacattaccatgagagtttggcttggattatctcaacattct

SEQ ID NO: 36512 - DNA, 120 bp, Artificial Sequence
  ENSG00000054219_40 (sequence is synthesized)
gttgaccagtcttggagttggttagatggatcagaagtgacatttgtcaaatgggaaaataaaagtaagagtggtgttggaagatgtagcatgttgatagcttcaaatgaaacttggaaa

SEQ ID NO: 36513 - DNA, 120 bp, Artificial Sequence
  ENSG00000054219_41 (sequence is synthesized)
aaagttgaatgtgaacatggttttggaagagttgtctgcaaagtgcctctgggccctgattacacagcaatagctatcatagttgccacactaagtatcttagttctcatgggcggactg

SEQ ID NO: 36514 - DNA, 120 bp, Artificial Sequence
  ENSG00000054219_42 (sequence is synthesized)
atttggttcctcttccaaaggcaccgtttgcacctggcgggtttctcatcagttcgatatgcacaaggagtgaatgaagatgagattatgcttccttctttccatgactaaattcttcta

SEQ ID NO: 36515 - DNA, 120 bp, Artificial Sequence
  ENSG00000054219_43 (sequence is synthesized)
aaagttttctaatttgcactaatgtgttatgagaaattagtcacttaaaatgtcccagtgtcagtatttactctgctccaaagtagaactcttaaatactttttcagttgtttagatctt

SEQ ID NO: 36516 - DNA, 120 bp, Artificial Sequence
  ENSG00000054219_44 (sequence is synthesized)
aggcatgtgctggtatccacagttaattccctgctaaatgccatgtttatcaccctaattaatagaatggaggggactccaaagctggaactgaagtccaaattgtttgtacagtaatat

SEQ ID NO: 36517 - DNA, 120 bp, Artificial Sequence
  ENSG00000054219_45 (sequence is synthesized)
gtttaatgttcattttctctgtatgaatgtgattggtaactaggatatgtatattttaatagaatttttaacaaaacttcttagaaaattaaaataggcatattactaggtgacatgtct

SEQ ID NO: 36518 - DNA, 120 bp, Artificial Sequence
  ENSG00000054219_46 (sequence is synthesized)
actttttaatttttaagagcatccggccaaatgcaaaattagtacctcaaagtaaaaattgaactgtaaactctatcagcattgtttcaaaatagtcatttttagcactggggaaaaata

SEQ ID NO: 36519 - DNA, 77 bp, Artificial Sequence
  ENSG00000054219_47 (sequence is synthesized)
attgtttcaaaatagtcatttttagcactggggaaaaataaacaataagacatgcttactttttaatttttacaatg

SEQ ID NO: 36520 - DNA, 75 bp, Artificial Sequence
  ENSG00000054219_48 (sequence is synthesized)
gcttactttttatatagcaaaatgattcctcttggcaagatgtttcttatattattccaaagttatttcatacca

SEQ ID NO: 36521 - DNA, 120 bp, Artificial Sequence
  ENSG00000054219_49 (sequence is synthesized)
ttggcaagatgtttcttatattattccaaagttatttcataccattattatgtaaatatgaagagtttttttctgtttataattgtttataaaacaatgacttttaaagatttagtgctt

SEQ ID NO: 36522 - DNA, 120 bp, Artificial Sequence
  ENSG00000054219_50 (sequence is synthesized)
ttttcccaagtgtgggaacattatttttagattgagtaggtaccttgtagcagtgtgctttgcattttctgatgtattacatgactgtttcttttgtaaagagaatcaactaggtattta

SEQ ID NO: 36523 - DNA, 120 bp, Artificial Sequence
  ENSG00000054219_51 (sequence is synthesized)
agactgataattttacaatttatatgcttcacatagcatgtcaacttttgactaagaattttgttttacttttttaacatgtgttaaacagagaaagggtccatgaaggaaagtgtatga

SEQ ID NO: 36524 - DNA, 120 bp, Artificial Sequence
  ENSG00000054219_52 (sequence is synthesized)
gttgcatttgtaaaaatgagactttttcagtggaactctaaaccttgtgatgactactaacaaatgtaaaattatgagtgattaagaaaacattgctttgtggttatcactttaagtttt

SEQ ID NO: 36525 - DNA, 120 bp, Artificial Sequence
  ENSG00000054219_53 (sequence is synthesized)
gacacctagattatagtcttagtaatagcatccactggaaaaggtgaaaatgttttattcggcatttaacttacatttgtactttatttttgtataaaatccatagatttattttacatt

SEQ ID NO: 36526 - DNA, 120 bp, Artificial Sequence
  ENSG00000054219_54 (sequence is synthesized)
tagagtatttacactatgataaagttgtaaataattttctaagacagtttttatatagtctacagttgtcctgatttcttattgaatttgttagactagttctcttgtcctgtgatctgt

SEQ ID NO: 36527 - DNA, 120 bp, Artificial Sequence
  ENSG00000054219_55 (sequence is synthesized)
gtacaattttagtcactaagactttcctccaagaactaagccaacttgatgtgaaaagcacagctgtatataatggtgatgtcataataaagttgttttatcttttaagtaaaagtaaaa

SEQ ID NO: 36528 - DNA, 120 bp, Artificial Sequence
  ENSG00000054219_56 (sequence is synthesized)
gcggggctcctcatgctgctcttctggttcttcgatctcgcggagccctctggccgcgcagagcagacttgtggccttgtttggggaagcactggaattttgaacccccagccatttggg

SEQ ID NO: 36529 - DNA, 120 bp, Artificial Sequence
  ENSG00000054219_57 (sequence is synthesized)
tcaattgtttggcaagagtgtccgcttcatgatgctggtgatggcatgcacctcgtcacatgtgcacggctaggcttgtgcaggtggcctctattacccaaacactgaaggagcccctct

SEQ ID NO: 36530 - DNA, 120 bp, Artificial Sequence
  ENSG00000054219_58 (sequence is synthesized)
cacccaatcgtgcgtgaagactttctgactccctggacattgccatggactcaactgtcacttcaggacctgtttttgaactaacaaacctagacttctgattctctcttgctgcaccta

SEQ ID NO: 36531 - DNA, 120 bp, Artificial Sequence
  ENSG00000054219_59 (sequence is synthesized)
cctgtacattccgaacacatggtagagactctacaaaatgcttaatatgtgatctatggacggttcccctgaaattataaatgctgccatcttcatccttcttgttttcccaagctattt

SEQ ID NO: 36532 - DNA, 120 bp, Artificial Sequence
  ENSG00000054219_60 (sequence is synthesized)
cttctggttcttcgatctcgcggagccctctggccgcgcagctaagctaagttaccatctggtttagacttccttcggagagcgatgggaagagatttctcagagtgtgaatggcatcat

SEQ ID NO: 36533 - DNA, 120 bp, Artificial Sequence
  ENSG00000054219_61 (sequence is synthesized)
cctatctacagcaaggacctggaaatgaaccctgctctgagtcacacttctctattctcctttgaccctgtgtgctaggaactaccaaaagaatcctttaaaataagatcctttattgcc

SEQ ID NO: 36534 - DNA, 120 bp, Artificial Sequence
  ENSG00000054219_62 (sequence is synthesized)
ttgataatttattctgcctgccccacaatccaaggtggaaaagttcactgcagcaactaactacagtgaaaatgcactaacttttcaatcactaacctcttggttcccatcgacatctgc

SEQ ID NO: 36535 - DNA, 120 bp, Artificial Sequence
  ENSG00000054219_63 (sequence is synthesized)
ttcagtcctgtttttatctccttcacaaatttcaggatttccctaattcttgcaatctctgcaatcactgccctttatcactgacccaaagcaaaaagcaccaggtttaactctgttccc

SEQ ID NO: 36536 - DNA, 120 bp, Artificial Sequence
  ENSG00000054219_64 (sequence is synthesized)
ctttggtctagggaccaaaggcaggaattatttagtgatcagacaataagaaaacactgaaagagatgatttgcctttgatggatgtaaaaatactaaaaatttattttcaatttatggt

SEQ ID NO: 36537 - DNA, 120 bp, Artificial Sequence
  ENSG00000054219_65 (sequence is synthesized)
aatttgatgtcctctagatattcaaaattgacatgttcttaccctcactctctgttggaaaaaaaatggacatgttttattatctaaaaggtcatttggtgcttagcagtcatggaacat

SEQ ID NO: 36538 - DNA, 120 bp, Artificial Sequence
  ENSG00000054219_66 (sequence is synthesized)
taagcactcttaatgtgcagacactatgaggaatctaaaaatgaatgagatgtattccctaccctttgtttaataaagtccaacagcaatgtatggcagaaaatctagaatataggcaag

SEQ ID NO: 36539 - DNA, 120 bp, Artificial Sequence
  ENSG00000054219_67 (sequence is synthesized)
gaagggccttgggaattcagaggagggagggagtgtttctgggagtataatcaggaaaaatgtcataaagaaggctgattcttggaaggtaggtattatttcaaaaggcaagataggaga

SEQ ID NO: 36540 - DNA, 120 bp, Artificial Sequence
  ENSG00000054219_68 (sequence is synthesized)
aggagaaggagccagaaaaaaaacagaacataagcaaaggaactaagaccagaatatacagatatggtcaaggagaaatgagtcatacaaattagctagaaaatggaatttggatatgaa

SEQ ID NO: 36541 - DNA, 120 bp, Artificial Sequence
  ENSG00000054219_69 (sequence is synthesized)
attggaatgtccttgtttgcaagggaaggagtttgatcttaagtaattaaacacaaccaaacaaaaaacaaaaacaaggtgcgtgtgtgtgtatttatatctacacacactcacatatac

SEQ ID NO: 36542 - DNA, 120 bp, Artificial Sequence
  ENSG00000054267_0 (sequence is synthesized)
gtttgcccgtcagtcgagtccggagtgaggagctcggtcgccgaagcggagggagactcttgagcttcatcttgccgccgccacggccaccgcctggacctttgcccggagggagctgca

SEQ ID NO: 36543 - DNA, 120 bp, Artificial Sequence
  ENSG00000054267_1 (sequence is synthesized)
gagggtccatcgccgccgtcctctggagggcagcgcgattgggggcccggacctccagtccgggggggatttttcgtcgtccccctccccccaaccagggagcccgagcggccgccaaac

SEQ ID NO: 36544 - DNA, 120 bp, Artificial Sequence
  ENSG00000054267_2 (sequence is synthesized)
aaaggtaccagtcgccgccgcgggaggaggaggagccggagcctctgcctcagcagccgctggacccgccgcccttcttccccatctctcccccgggcctgctggttttgggggggagaa

SEQ ID NO: 36545 - DNA, 120 bp, Artificial Sequence
  ENSG00000054267_3 (sequence is synthesized)
ggagagaggggactctggacgtgccagggtcagatctcgcctccgaggaaggtgcagctgaacctggtgttttagaggataccttggtcccagagtcatcatgaaggcccttgatgagcc

SEQ ID NO: 36546 - DNA, 120 bp, Artificial Sequence
  ENSG00000054267_4 (sequence is synthesized)
tccctatttgacagtgggcactgatgtgagtgctaaatacagaggagccttttgtgaagccaagatcaagacagcaaaaagacttgtcaaagtcaaggtgacatttagacatgattcttc

SEQ ID NO: 36547 - DNA, 120 bp, Artificial Sequence
  ENSG00000054267_5 (sequence is synthesized)
aacagtggaagttcaggatgaccacataaagggcccactaaaggtaggagctattgtggaagtgaagaatcttgatggtgcatatcaggaagctgttatcaataaactaacagatgcgag

SEQ ID NO: 36548 - DNA, 120 bp, Artificial Sequence
  ENSG00000054267_6 (sequence is synthesized)
ttggtacactgtagtttttgatgacggagatgagaagacactgagacgatcttcactgtgcctgaaaggagagaggcattttgctgaaagtgaaacattagaccagctcccactcaccaa

SEQ ID NO: 36549 - DNA, 120 bp, Artificial Sequence
  ENSG00000054267_7 (sequence is synthesized)
ccctgagcattttggcactccagtcataggaaagaaaacaaatagaggaagaagatctaatcatataccagaggaagagtcttcatcatcctccagtgatgaagatgaggatgataggaa

SEQ ID NO: 36550 - DNA, 120 bp, Artificial Sequence
  ENSG00000054267_8 (sequence is synthesized)
acagattgatgagctactaggcaaagttgtatgtgtagattacattagtttggataaaaagaaagcactgtggtttcctgcattggtggtttgtcctgattgtagtgatgagattgctgt

SEQ ID NO: 36551 - DNA, 120 bp, Artificial Sequence
  ENSG00000054267_9 (sequence is synthesized)
aaaaaaggacaatattcttgttcgatctttcaaagatggaaaatttacttcagttccaagaaaagatgtccatgaaattactagtgacactgcaccaaagcctgatgctgttttaaagca

SEQ ID NO: 36552 - DNA, 120 bp, Artificial Sequence
  ENSG00000054267_10 (sequence is synthesized)
agcctttgaacaggcacttgaatttcacaaaagtagaactattcctgctaactggaagactgaattgaaagaagatagctctagcagtgaagcagaggaagaagaggaggaggaagatga

SEQ ID NO: 36553 - DNA, 120 bp, Artificial Sequence
  ENSG00000054267_11 (sequence is synthesized)
tgaaaaagaaaaggaggataatagcagtgaagaagaagaagaaatagaaccatttccagaagaaagggagaactttcttcagcaattgtacaaatttatggaagatagaggtacacctat

SEQ ID NO: 36554 - DNA, 120 bp, Artificial Sequence
  ENSG00000054267_12 (sequence is synthesized)
taacaaacgacctgtacttggatatcgaaatttgaatctctttaagttattcagacttgtacacaaacttggaggatttgataatattgaaagtggagctgtttggaaacaagtctacca

SEQ ID NO: 36555 - DNA, 120 bp, Artificial Sequence
  ENSG00000054267_13 (sequence is synthesized)
agatcttggaatccctgtcttaaattcagctgcaggatacaatgttaaatgtgcttataaaaaatacttatatggttttgaggagtactgtagatcagccaacattgaatttcagatggc

SEQ ID NO: 36556 - DNA, 120 bp, Artificial Sequence
  ENSG00000054267_14 (sequence is synthesized)
attgccagagaaagttgttaacaagcaatgtaaggagtgtgaaaatgtaaaagaaataaaagttaaggaggaaaatgaaacagagatcaaagaaataaagatggaggaggagaggaatat

SEQ ID NO: 36557 - DNA, 120 bp, Artificial Sequence
  ENSG00000054267_15 (sequence is synthesized)
aataccaagagaagaaaagcctattgaggatgaaattgaaagaaaagaaaatattaagccctctctgggaagtaaaaagaatttattagaatctatacctacacattctgatcaggaaaa

SEQ ID NO: 36558 - DNA, 120 bp, Artificial Sequence
  ENSG00000054267_16 (sequence is synthesized)
agaagttaacattaaaaaaccagaagacaatgaaaatctggatgacaaagatgatgacacaactagggtagatgaatccctcaacataaaggtagaagctgaggaagaaaaagcaaaatc

SEQ ID NO: 36559 - DNA, 120 bp, Artificial Sequence
  ENSG00000054267_17 (sequence is synthesized)
tggagatgaaacgaataaagaagaagatgaagatgatgaagaagcagaagaggaggaggaggaggaagaagaagaagaggatgaagatgatgatgacaacaatgaggaagaggagtttga

SEQ ID NO: 36560 - DNA, 120 bp, Artificial Sequence
  ENSG00000054267_18 (sequence is synthesized)
gtgctatccaccaggcatgaaagtccaagtgcggtatggacgagggaaaaatcaaaaaatgtatgaagctagtattaaagattctgatgtcgaaggtggagaggtcctttacttggtgca

SEQ ID NO: 36561 - DNA, 120 bp, Artificial Sequence
  ENSG00000054267_19 (sequence is synthesized)
ttactgcggatggaatgtgagatacgatgaatggattaaagcagataaaatagtaagacctgctgataaaaatgtgccaaagataaaacatcggaagaaaataaagaataaattagacaa

SEQ ID NO: 36562 - DNA, 120 bp, Artificial Sequence
  ENSG00000054267_20 (sequence is synthesized)
agaaaaagacaaagatgaaaaatactctccaaaaaactgtaaacttcggcgcttgtccaaaccaccatttcagacaaatccatctcctgaaatggtatccaaactggatctcactgatgc

SEQ ID NO: 36563 - DNA, 120 bp, Artificial Sequence
  ENSG00000054267_21 (sequence is synthesized)
caaaaactctgatactgctcatattaagtccatagaaattacttcgatccttaatggacttcaagcttctgaaagttctgctgaagacagtgagcaggaagatgagagaggtgctcaaga

SEQ ID NO: 36564 - DNA, 120 bp, Artificial Sequence
  ENSG00000054267_22 (sequence is synthesized)
catggataataatggcaaagaggaatctaagattgatcatttgaccaacaacagaaatgatcttatttcaaaggaggaacagaacagttcatctttgctagaagaaaacaaagttcatgc

SEQ ID NO: 36565 - DNA, 120 bp, Artificial Sequence
  ENSG00000054267_23 (sequence is synthesized)
agatttggtaatatccaaaccagtgtcaaaatctccagaaagattaaggaaagatatagaagtattatccgaagatactgattatgaagaagatgaagtcacaaaaaagagaaaggatgt

SEQ ID NO: 36566 - DNA, 120 bp, Artificial Sequence
  ENSG00000054267_24 (sequence is synthesized)
caagaaggacacaacagataaatcttcaaaaccacaaataaaacgtggtaaaagaaggtattgcaatacagaagagtgtctaaaaactggatcacctggcaaaaaggaagagaaggccaa

SEQ ID NO: 36567 - DNA, 120 bp, Artificial Sequence
  ENSG00000054267_25 (sequence is synthesized)
gaaaacagtagcaacagctcttcagatgaagatgaagaagaaacaaaagcaaagatgacaccaactaagaaatacaatggtttggaggaaaaaagaaaatctctacggacaactggtttc

SEQ ID NO: 36568 - DNA, 120 bp, Artificial Sequence
  ENSG00000054267_26 (sequence is synthesized)
tattcaggattttcagaagtggcagaaaaaaggattaaacttttaaataactctgatgaaagacttcaaaacagcagggccaaagatcgaaaagatgtctggtcaagtattcagggacag

SEQ ID NO: 36569 - DNA, 120 bp, Artificial Sequence
  ENSG00000054267_27 (sequence is synthesized)
tggcctaaaaaaacgctgaaagagcttttttcagactctgatactgaggctgcagcttccccaccgcatcctgccccagaggagggggtggcagaggagtcactgcagactgtggctgaa

SEQ ID NO: 36570 - DNA, 120 bp, Artificial Sequence
  ENSG00000054267_28 (sequence is synthesized)
gaggagagttgttcacccagtgtagaactagaaaaaccacctccagtcaatgtcgatagtaaacccattgaagaaaaaacagtagaggtcaatgacagaaaagcagaatttccaagtagt

SEQ ID NO: 36571 - DNA, 120 bp, Artificial Sequence
  ENSG00000054267_29 (sequence is synthesized)
ggcagtaattcagtgctaaatacccctcctactacacctgaatcgccttcatcagtcactgtaacagaaggcagccggcagcagtcttctgtaacagtatcagaaccactggctccaaac

SEQ ID NO: 36572 - DNA, 120 bp, Artificial Sequence
  ENSG00000054267_30 (sequence is synthesized)
caagaagaggttcgaagtatcaagagtgaaactgatagcacaattgaggtggatagtgttgctggggagctccaagacctccagtctgaagggaatagctcgccagcaggttttgatgcc

SEQ ID NO: 36573 - DNA, 120 bp, Artificial Sequence
  ENSG00000054267_31 (sequence is synthesized)
agtgtgagctcaagcagtagtaatcagccagaaccagaacatcctgaaaaagcctgtacaggtcagaaaagagtgaaagatgctcagggaggaggaagttcatcaaaaaagcagaaaaga

SEQ ID NO: 36574 - DNA, 120 bp, Artificial Sequence
  ENSG00000054267_32 (sequence is synthesized)
agccataaagcaacagtggtaaacaacaaaaagaagggaaaaggcacaaatagtagtgatagtgaagaactttcagctggtgaaagtataactaagagtcagccagtcaaatcagtttcc

SEQ ID NO: 36575 - DNA, 120 bp, Artificial Sequence
  ENSG00000054267_33 (sequence is synthesized)
actggaatgaagtctcatagtaccaaatctcccgcaaggacgcagtctccaggaaaatgtggaaagaatggtgataaggatcctgatctcaaggaacccagtaatcgattacccaaagtt

SEQ ID NO: 36576 - DNA, 120 bp, Artificial Sequence
  ENSG00000054267_34 (sequence is synthesized)
tacaaatggagttttcagatgtcggacctggaaaatatgacaagtgccgaacgcatcacaattcttcaagaaaaacttcaagaaatcagaaaacattatctgtcattaaaatctgaagta

SEQ ID NO: 36577 - DNA, 120 bp, Artificial Sequence
  ENSG00000054267_35 (sequence is synthesized)
gcttccattgatcggaggagaaagcgtttaaagaagaaagagagagaaagtgctgctacatcctcatcctcctcttcaccttcatccagttccataacagctgctgttatgttaacttta

SEQ ID NO: 36578 - DNA, 120 bp, Artificial Sequence
  ENSG00000054267_36 (sequence is synthesized)
gctgaaccgtcaatgtccagcgcatcacaaaatggaatgtcagttgagtgcaggtgacagcaggacttgctaaagcactttgcacttaatggctgttgagggccactttttttttatact

SEQ ID NO: 36579 - DNA, 120 bp, Artificial Sequence
  ENSG00000054267_37 (sequence is synthesized)
gcacagtggcacaaaaaaatatcagacaagcactattttatatttaaaaattgtttcttgacaagctgacttggcacttaagtgcacttttttatgaagaaaaagtacaatgaactgctt

SEQ ID NO: 36580 - DNA, 120 bp, Artificial Sequence
  ENSG00000054267_38 (sequence is synthesized)
ttcctcaagcaataattgtttccaacttgtctgggaattgtgtgtctggtaactggaaggccttccactgtggcaaatggaggcttttcactgcctgtagagacaatacagtaagcatag

SEQ ID NO: 36581 - DNA, 120 bp, Artificial Sequence
  ENSG00000054267_39 (sequence is synthesized)
ttaaggggtgggtcagaacatgttaagataacttactgtatatgtattcccttgtattttgttaaagctggaacatttgatatttttccatttatttatgaaaaaatatgaacctatttt

SEQ ID NO: 36582 - DNA, 120 bp, Artificial Sequence
  ENSG00000054267_40 (sequence is synthesized)
catttgtacaaggtaattgttttttaaagcaagtcaccttagggtggctttaattgtataagtcaagcacatgtaataaattcaaaacctgcagttaacaggatattagacatcaatcct

SEQ ID NO: 36583 - DNA, 120 bp, Artificial Sequence
  ENSG00000054267_41 (sequence is synthesized)
ggtaaccaaatattaaagattctctttaaaaaagactgaacatgtttacaggtttgaattaggctaaaaggtcttgcagtggcttttcatggcccttcaaattggaatggaactactgta

SEQ ID NO: 36584 - DNA, 120 bp, Artificial Sequence
  ENSG00000054267_42 (sequence is synthesized)
ctttgccatttttctataaatcagtatttttttttaattttgatatacattgtgtgaaaaaagaaaatggctaataaactgtattaaatcttaaacaatgtataaagattgtacttagcc

SEQ ID NO: 36585 - DNA, 120 bp, Artificial Sequence
  ENSG00000054267_43 (sequence is synthesized)
agccagttcaaagtgtatatttattcataatgaattataacagttatatttttgtgttttcttgtaaatgtttcttttcccttaaatacagataattcatttgtattgcttattttatta

SEQ ID NO: 36586 - DNA, 120 bp, Artificial Sequence
  ENSG00000054267_44 (sequence is synthesized)
ctacaacaaaaggacttcaggaacaagtaatgtattagtatggttcaagattgttgataggaactgtctcaaaaggatggtggttattttaaatataaatagctaatgggggtggtaggc

SEQ ID NO: 36587 - DNA, 120 bp, Artificial Sequence
  ENSG00000054267_45 (sequence is synthesized)
ctataaaattaaatgccttgtataaaatccaaaatgaatgcaaaattgttttcacttgtattgactttatgttgtatgattccaatctctgttctgtttggcacttgtatttaattcttc

SEQ ID NO: 36588 - DNA, 120 bp, Artificial Sequence
  ENSG00000054267_46 (sequence is synthesized)
acctttgtaagacatttgtatattgtggatgtgttcattcaagctatttaatatctggcactgttaatacacagtactttattgtacagactgttttactgttttaattgtagttctgtg

SEQ ID NO: 36589 - DNA, 120 bp, Artificial Sequence
  ENSG00000054267_47 (sequence is synthesized)
tactttttttggatggggctggcatgttttctttgtttcctggcaatacgacgtgggaatttcaatgcgttttgttgtagatgctaacgtgtcagaatcctttacattcaacttttctaa

SEQ ID NO: 36590 - DNA, 120 bp, Artificial Sequence
  ENSG00000054267_48 (sequence is synthesized)
gaaaagcattttcagtcttgtagtgtgtgcttacagtaactaattttgttgaaaatggtttcaagttattcaaatttgtacaggactgtaaagatttgttgacagcaaaatgttgaagaa

SEQ ID NO: 36591 - DNA, 120 bp, Artificial Sequence
  ENSG00000054267_49 (sequence is synthesized)
aaaagcttatagaataaaagctataaagtatatattaggatctgcaaacaatgaagaattatgtaatatattgtacaaatgtaagcaaaggctctgaaataaaatgccatagtttgtgaa

SEQ ID NO: 36592 - DNA, 120 bp, Artificial Sequence
  ENSG00000054267_50 (sequence is synthesized)
ggcggggccagatgttgatctcgctcccacttgtcgggtctgagcccggaacgggacgtgggcaggggctctgtggcgggccggtcctgcccgcggcccacaggccctcctggcccctcg

SEQ ID NO: 36593 - DNA, 120 bp, Artificial Sequence
  ENSG00000054267_51 (sequence is synthesized)
cggccggcctctcgctcggacgcggcgcgtgggggcgcggattcgctcggccgggcgccgaggccctaggggagagcggccggccctgcgccggacgccgggcttgttgtgagtttcttc

SEQ ID NO: 36594 - DNA, 120 bp, Artificial Sequence
  ENSG00000054267_52 (sequence is synthesized)
gtttcttctctgacagaaatggcgtcattgtcgtagacgggaaactccgtcgggtctcgacaatggggacgggaagctgccgagctgtgtgcagctgaacctggtgttttagaggatacc

SEQ ID NO: 36595 - DNA, 120 bp, Artificial Sequence
  ENSG00000054267_53 (sequence is synthesized)
aggaaaatgtgtatgttgacttattttagggtttcccctcttaaagtttcaatgatttcacagtatctcttgttataacctgaggcgattaagtgtcatatttgtgtgaacatggtaaaa

SEQ ID NO: 36596 - DNA, 120 bp, Artificial Sequence
  ENSG00000054267_54 (sequence is synthesized)
atggaaattttaaaggtaatttgaaaatgaatagtggaatgcatttaaaagcttgagaaggctttaatgtgctttgcttgagccatccatggcattttattgtggaccagaacacatgct

SEQ ID NO: 36597 - DNA, 120 bp, Artificial Sequence
  ENSG00000054267_55 (sequence is synthesized)
agaaattgcacccaggcccaaatccaaacctgtttgagaattcattatatgcagtggttgactatatggcatgagcagcttaaatctatttctgtaacattgtttttgcaattgtaatgt

SEQ ID NO: 36598 - DNA, 120 bp, Artificial Sequence
  ENSG00000054267_56 (sequence is synthesized)
gcagtttctcacgaacattttgatttattgacagacccctccacccttaaccaaatactgtatgtaggggtttggagcaaccaactgtccaggcactgctttcctcagacaaccgtgtca

SEQ ID NO: 36599 - DNA, 120 bp, Artificial Sequence
  ENSG00000054267_57 (sequence is synthesized)
aactgattttcaagcctgactaacttgtgtgagtttgtaaaggaatttgatgctttcttagatgcatagcttccaaattgaaggaccaatgtgtacgttaataacctacagtaatacttt

SEQ ID NO: 36600 - DNA, 120 bp, Artificial Sequence
  ENSG00000054267_58 (sequence is synthesized)
tttgattttccgtgaaattgttaaaagtggaaattcaaatcggtaccttcccaaagtattagtgcctttcgatggtgccatagccatacttctgtcatcatttttcttataaaccacttc

SEQ ID NO: 36601 - DNA, 120 bp, Artificial Sequence
  ENSG00000054267_59 (sequence is synthesized)
attcaggtatctttaaatcagtatactctaggctgacacctggctttggaacacacttttccatcgtaaagacagagcactggagtatgttttttatataccgtaaaagattttagaatg

SEQ ID NO: 36602 - DNA, 120 bp, Artificial Sequence
  ENSG00000054267_60 (sequence is synthesized)
ctagctttaggttttcagcaaagcttaaagagatatggtctagatcaaattagttaattctatgttttctcaggaatcttgacttaaaacatttctgttttaaaataaattaaaaaaata

SEQ ID NO: 36603 - DNA, 120 bp, Artificial Sequence
  ENSG00000054267_61 (sequence is synthesized)
cttgcaattaaattgaaatgttctttgctttttttcacatttacaagtataactactatgattttatctgtgccatactatctcatgcaactgaactatccaggcatgactaatcttcaa

SEQ ID NO: 36604 - DNA, 120 bp, Artificial Sequence
  ENSG00000054267_62 (sequence is synthesized)
tatccaggcatgactaatcttcaaaatgaaagaatcctttatttcagaatattaggctttcaacagtaagattttactggccaggtgtggtcactcacacctgtaatcccagcaatttgg

SEQ ID NO: 36605 - DNA, 71 bp, Artificial Sequence
  ENSG00000054267_63 (sequence is synthesized)
gtggcgcatgcctgtagtcccagctaccttgggggctgatgagggagaatcacttgatcccggaaaaacaa

SEQ ID NO: 36606 - DNA, 120 bp, Artificial Sequence
  ENSG00000054267_64 (sequence is synthesized)
cataatgatagattagtgtgagtgattttaaaagtatacatattattggcagttcaggtaagaagaattttttgtttttgcttttcctaagatgctgctgcatttgtatatgattttcca

SEQ ID NO: 36607 - DNA, 120 bp, Artificial Sequence
  ENSG00000054267_65 (sequence is synthesized)
ggtttctaggcaggttgttttctgtaggactaaattcaaatggctaattttaaattacctactaaaatctgtgacaaatttattgttacatttttgtttattaaatcttttctttctctt

SEQ ID NO: 36608 - DNA, 120 bp, Artificial Sequence
  ENSG00000054267_66 (sequence is synthesized)
gaaaatggtattcagggtatgggatagtacactattttgattttgtctgtacactcaaaaaaagtcacacaaattctgtaaggctacttgctttaaaaaacaaaatagacaaaaaaaaaa

SEQ ID NO: 36609 - DNA, 120 bp, Artificial Sequence
  ENSG00000054267_67 (sequence is synthesized)
aagtcattactcatataagtatttttagtatgagaaatatttcataatcttgtatttgagatcctcataatcagatagtttacttggttactttagatatatgatcttgtgaaatagaaa

SEQ ID NO: 36610 - DNA, 120 bp, Artificial Sequence
  ENSG00000054267_68 (sequence is synthesized)
gaaaatattaagcctgattttcctaataacctcaaaaacatgtcttagtcttcctatgctttttttaatgagatgattaagaaagtatccaccaggctgggcgcagtggctcaggcctgt

SEQ ID NO: 36611 - DNA, 120 bp, Artificial Sequence
  ENSG00000054267_69 (sequence is synthesized)
aaaaaaacgagaacaaaaacaaaaaaacttaccatctaggccaggcacggtgactcacgaccataatcgtagcactttgggagggcaaggcaggtggctaacttgaactcaggagtttga

SEQ ID NO: 36612 - DNA, 120 bp, Artificial Sequence
  ENSG00000054267_70 (sequence is synthesized)
tgggcaacatggtgaaaccccatctcaacaaaaataaaaataaaaataattagcagggcatgtcagtgcactccagccccagtgcactcagtagccccagctactgaggaggctgtgttg

SEQ ID NO: 36613 - DNA, 120 bp, Artificial Sequence
  ENSG00000054267_71 (sequence is synthesized)
ccagctactgaggaggctgtgttgggaggacggcctgagccctggaggtggaggttgcaatgagccgtgaatttaccactgccctacatcctgggtgacagagtgagaccctgtcttatt

SEQ ID NO: 36614 - DNA, 120 bp, Artificial Sequence
  ENSG00000054267_72 (sequence is synthesized)
agattgcctgcggaaaacgaatctctggggttatcgaattcaggaagtaggaggtttcgacgaggtcgtcgtgtggggcttccgagttttgcagaggaaggtgtgtttggtgacttggtg

SEQ ID NO: 36615 - DNA, 120 bp, Artificial Sequence
  ENSG00000054267_73 (sequence is synthesized)
agtggtaaacaacaaaaagaagggaaaaggcagtgccccacactgacctcctgctgctcttccaggagactcctgccacctccactgcctgacctttgctagcagccggcttggctgcac

SEQ ID NO: 36616 - DNA, 120 bp, Artificial Sequence
  ENSG00000054267_74 (sequence is synthesized)
gtccaggcactgctttcctcagacaaccgtgtcaaactgattttcaagcctgactaacttgtcctgtacaggtcagaaaagagtgaaagatgctcagggaggaggaagttcatcaaaaaa

SEQ ID NO: 36617 - DNA, 120 bp, Artificial Sequence
  ENSG00000054267_75 (sequence is synthesized)
gcttttctgaaacggcgaggaccaccaaccgacggcgacaaacctgctccctcacccagcgcctcccttcgccgccgcccggcggccgactgccggaggggagggggcgtggccagagag

SEQ ID NO: 36618 - DNA, 120 bp, Artificial Sequence
  ENSG00000054267_76 (sequence is synthesized)
cggaagtgcccggaacccggaagtgcgagctggcgcgcagctgcagtctgggagtctttggagtaagaatggccttggaagggatgagcaaacggaagagaaagagaagtgtccaggagg

SEQ ID NO: 36619 - DNA, 120 bp, Artificial Sequence
  ENSG00000054267_77 (sequence is synthesized)
gagagaatcctgacgacggcgttcgcgggagtccgccggaagactacaggcttggacaggtcgccagtagcttatttcgcggcgaacaccattccagaggtggcaccggtcggctggcgt

SEQ ID NO: 36620 - DNA, 120 bp, Artificial Sequence
  ENSG00000054267_78 (sequence is synthesized)
ccctcttcagttctctggagccccagattcaacccgtgtacgtgcctgtgcctaaacaaaccatcaaaaaaacgaaacggaatgaggaggaagaaagtacatcccagattgaaagaccac

SEQ ID NO: 36621 - DNA, 120 bp, Artificial Sequence
  ENSG00000054267_79 (sequence is synthesized)
tttcgcaagaacctgccaaaaaagtgaaagcgaagaagaaacacactaacgcagaaaaaaagttggcagacagggaaagcgctctagcgagtgctgatttagaagaagaaattcaccaga

SEQ ID NO: 36622 - DNA, 120 bp, Artificial Sequence
  ENSG00000054267_80 (sequence is synthesized)
aacaagggcagaaaaggaaaaattctcaacctggtgttaaagtagcagatagaaaaatacttgatgacacagaagacacagttgtcagtcaaagaaagaaaattcaaatcaaccaagaag

SEQ ID NO: 36623 - DNA, 120 bp, Artificial Sequence
  ENSG00000054267_81 (sequence is synthesized)
aagagagattaaagaatgagagaactgtgtttgttgggaatttgcctgttacatgtaataagaagaagctgaagtcgttttttaaagagtatggacaaatagaatctgtacgatttcgtt

SEQ ID NO: 36624 - DNA, 120 bp, Artificial Sequence
  ENSG00000054267_82 (sequence is synthesized)
ctctgattccagcagagggaacgctatccaaaaagttggcagcaataaaacgtaaaattcatcctgatcagaaaaatattaatgcctatgttgtgtttaaggaggagagtgctgccacgc

SEQ ID NO: 36625 - DNA, 120 bp, Artificial Sequence
  ENSG00000054267_83 (sequence is synthesized)
aagcattgaaaagaaatggggcccagattgcagatggatttcgtattagagttgatctcgcatctgagacctcatctagagacaagagatcggtttttgtggggaatctcccttataaag

SEQ ID NO: 36626 - DNA, 120 bp, Artificial Sequence
  ENSG00000054267_84 (sequence is synthesized)
ttgaagaatctgccattgagaagcactttctggactgtggaagtatcatggccgtgaggattgtgagagacaaaatgacaggcatcggcaaagggtttggctatgtgctctttgagaata

SEQ ID NO: 36627 - DNA, 120 bp, Artificial Sequence
  ENSG00000054267_85 (sequence is synthesized)
cagattctgttcatcttgctctgaaattaaataattctgaactcatggggagaaaactcagagtcatgcgttctgttaataaagaaaaatttaaacaacaaaattcaaatccacgattga

SEQ ID NO: 36628 - DNA, 120 bp, Artificial Sequence
  ENSG00000054267_86 (sequence is synthesized)
agaatgtcagtaaacctaagcagggacttaattttacttccaaaactgcagaaggacatcctaaaagcttatttattggagaaaaagctgttctccttaaaacgaagaagaaaggacaga

SEQ ID NO: 36629 - DNA, 120 bp, Artificial Sequence
  ENSG00000054267_87 (sequence is synthesized)
agaaaagtggacgccctaagaaacagagaaaacagaaataacaaccaggaactgctttttcttttcctgctgagtactgctaataaaagtgctattatctgctgatagcatcgtctgcta

SEQ ID NO: 36630 - DNA, 120 bp, Artificial Sequence
  ENSG00000054277_0 (sequence is synthesized)
cacaatggctagagcaggcggcggagccccaaccccacccagtgcggagcgcgccgcgagccccgccgcaagctgagcgcctccgcccgccaggcgcgccggcgccgggccatgtactcg

SEQ ID NO: 36631 - DNA, 80 bp, Artificial Sequence
  ENSG00000054277_1 (sequence is synthesized)
gccatgtactcggggaaccgcagcggcggccacggctactgggacggcggcggggccgcgggcgctgaggggccggcgcc

SEQ ID NO: 36632 - DNA, 120 bp, Artificial Sequence
  ENSG00000054277_2 (sequence is synthesized)
gcgcctggcgctgctgctgggctccattgggctgctgggcgtcggcaacaacctgctggtgctcgtcctctactacaagttccagcggctccgcactcccactcacctcctcctggtcaa

SEQ ID NO: 36633 - DNA, 120 bp, Artificial Sequence
  ENSG00000054277_3 (sequence is synthesized)
catcagcctcagcgacctgctggtgtccctcttcggggtcacctttaccttcgtgtcctgcctgaggaacggctgggtgtgggacaccgtgggctgcgtgtgggacgggtttagcggcag

SEQ ID NO: 36634 - DNA, 120 bp, Artificial Sequence
  ENSG00000054277_4 (sequence is synthesized)
cctcttcgggattgtttccattgccaccctaaccgtgctggcctatgaacgttacattcgcgtggtccatgccagagtgatcaatttttcctgggcctggagggccattacctacatctg

SEQ ID NO: 36635 - DNA, 120 bp, Artificial Sequence
  ENSG00000054277_5 (sequence is synthesized)
gctctactcactggcgtgggcaggagcacctctcctgggatggaacaggtacatcctggacgtacacggactaggctgcactgtggactggaaatccaaggatgccaacgattcctcctt

SEQ ID NO: 36636 - DNA, 120 bp, Artificial Sequence
  ENSG00000054277_6 (sequence is synthesized)
tgtgcttttcttatttcttggctgcctggtggtgcccctgggtgtcatagcccattgctatggccatattctatattccattcgaatgcttcgttgtgtggaagatcttcagacaattca

SEQ ID NO: 36637 - DNA, 120 bp, Artificial Sequence
  ENSG00000054277_7 (sequence is synthesized)
agtgatcaagattttaaaatatgaaaagaaactggccaaaatgtgctttttaatgatattcaccttcctggtctgttggatgccttatatcgtgatctgcttcttggtggttaatggtca

SEQ ID NO: 36638 - DNA, 120 bp, Artificial Sequence
  ENSG00000054277_8 (sequence is synthesized)
tggtcacctggtcactccaacaatatctattgtttcgtacctctttgctaaatcgaacactgtatacaatccagtgatttatgtcttcatgatcagaaagtttcgaagatcccttttgca

SEQ ID NO: 36639 - DNA, 120 bp, Artificial Sequence
  ENSG00000054277_9 (sequence is synthesized)
gcttctgtgcctccgactgctgaggtgccagaggcctgctaaagacctaccagcagctggaagtgaaatgcagatcagacccattgtgatgtcacagaaagatggggacaggccaaagaa

SEQ ID NO: 36640 - DNA, 120 bp, Artificial Sequence
  ENSG00000054277_10 (sequence is synthesized)
agttcgtcctttgtaggaatgaagaatggcaacgaaagatggggccttaaattggatgccacttttggactttcatcataagaagtgtctggaatacccgttctatgtaatatcaacaga

SEQ ID NO: 36641 - DNA, 120 bp, Artificial Sequence
  ENSG00000054277_11 (sequence is synthesized)
accttgtggtccagcaggaaatccgaattgcccatatgctcttgggcctcaggaagaggttgaacaaaaacaaattcttttaattcaacgggtgctttacataatgaaaaaaccacttgt

SEQ ID NO: 36642 - DNA, 120 bp, Artificial Sequence
  ENSG00000054277_12 (sequence is synthesized)
ggcacacgatgggcatctaacatcatcatcttctaatgtgttggagattttcatttcaaatatattttttaaattactctattttccaaaacacgtaatgcatttttctcgaaaatacct

SEQ ID NO: 36643 - DNA, 120 bp, Artificial Sequence
  ENSG00000054277_13 (sequence is synthesized)
tactgtaaaaataactgtcgcgtacacatgtgtgaagtagctagaacatactgaattttttttgtactgttggactctattcagtgtcatgtcctatatctgatcaagttatcaaggaga

SEQ ID NO: 36644 - DNA, 120 bp, Artificial Sequence
  ENSG00000054277_14 (sequence is synthesized)
taattctagaatgaaaaagaaaatcctcttgttggaaacaaaagacgttttatatgtgcagtatgacaaagaggagtttcagagacaactttgaatccttgtcagcctggagaccagcac

SEQ ID NO: 36645 - DNA, 120 bp, Artificial Sequence
  ENSG00000054277_15 (sequence is synthesized)
cagaggaatctacaaggcaaactcccatatatttgcttcccccaaattgctgcccctacagactcaaagctctttttctttgttttgttgtttctctaaaaatttactgttctttgtcga

SEQ ID NO: 36646 - DNA, 120 bp, Artificial Sequence
  ENSG00000054277_16 (sequence is synthesized)
tgctatataagccagggagttctaagacgccagctctttgagatttgctcattcccctgtatttcccacatatatattacatatacccgctaataaatttatgtttgtttttctcttgtc

SEQ ID NO: 36647 - DNA, 120 bp, Artificial Sequence
  ENSG00000054277_17 (sequence is synthesized)
aatctgtcttttgttataggggccccagccaaggaacctaaagtgggtagaaggaaaaattattttttctttccctacaaactgaacatggattattagaactcaaggttttcattgaca

SEQ ID NO: 36648 - DNA, 120 bp, Artificial Sequence
  ENSG00000054277_18 (sequence is synthesized)
atatagaaaagaaacactgaatcattttattttattgcccaatttttatttcttatatgactctagtgtttcatcttcataattaatcatgtttgaaggatttctgagtgactcagcagc

SEQ ID NO: 36649 - DNA, 120 bp, Artificial Sequence
  ENSG00000054277_19 (sequence is synthesized)
ctgttaaagaaggatgaaccaaagaaaacatttcactaaatgtgcttttaaaaatcaagtgtattgctggttctgctgcagtatgtagtcgaagaataaattagtaaattgcttctgagg

SEQ ID NO: 36650 - DNA, 120 bp, Artificial Sequence
  ENSG00000054277_20 (sequence is synthesized)
gtctgaaattgaataaagtaatggctttgtatttctataaaagttgtctccccttgtttcctttccattctggcacatgtagacatttaatttatgaataaaaccctttcctgtccttca

SEQ ID NO: 36651 - DNA, 120 bp, Artificial Sequence
  ENSG00000054277_21 (sequence is synthesized)
atttcttgacactcctgtcttcttgccacctcatgatgcggccaatgagagaggtgactcataacaacgatggagacatagctacacacttgagaatgaagattcacagtgaaattcttt

SEQ ID NO: 36652 - DNA, 120 bp, Artificial Sequence
  ENSG00000054277_22 (sequence is synthesized)
gaaaatctacagatgtcttggattaaggagcactaggcaccagccatttatacagccagagaacaatctgatagagaattctgaagaatttgtcttagctggttcattctttaggacaaa

SEQ ID NO: 36653 - DNA, 82 bp, Artificial Sequence
  ENSG00000054277_23 (sequence is synthesized)
cactatctgcatgctggcatgatctcggctgactgcaacctccacctcatggattccagcgattctcctgcttcagcctccc

SEQ ID NO: 36654 - DNA, 120 bp, Artificial Sequence
  ENSG00000054277_24 (sequence is synthesized)
atttcttgacactcctgtcttcttgccacctcatgatgcggccaatggtaatatttcttgttttcagaaactgactttttattttgcctcttgtcttagcacactttctttctctggaac

SEQ ID NO: 36655 - DNA, 120 bp, Artificial Sequence
  ENSG00000054277_25 (sequence is synthesized)
attctgtctctcctccttacttgactaattcctccttccctcacaaggctaacagcacgattttcttgctctaacccaccctcagaaccagtttcccatcctgtgtactaccatatcctc

SEQ ID NO: 36656 - DNA, 120 bp, Artificial Sequence
  ENSG00000054277_26 (sequence is synthesized)
cctgtttacctccctcatggcttctacccgctcagtgtgcatcatcctcaccaaatagtgaattcctcaagagcagagactgggtcttatgtattttctcacctgtgactggaacagtgt

SEQ ID NO: 36657 - DNA, 120 bp, Artificial Sequence
  ENSG00000054277_27 (sequence is synthesized)
tccagttccatggtcttctcaagcggaggaaagatcgtggtgacatgtagtgtataagtagctaaacagaaaatcaaaatgaggaaaagtcttcagtccagaccttaccattgtatagag

SEQ ID NO: 36658 - DNA, 120 bp, Artificial Sequence
  ENSG00000054282_0 (sequence is synthesized)
attctaggctcccctgtgacagccgcggcaggaagcaggcgggcgctccccggccacaggcctgttgttctcggaagggagaaagctggacatttccccacgtaactcccagctctgggc

SEQ ID NO: 36659 - DNA, 120 bp, Artificial Sequence
  ENSG00000054282_1 (sequence is synthesized)
ctagagtgcgtgcatggcgaagtccccggagaactctaccctggaggagattctggggcagtatcaacggagtctccgggaacatgccagcagaagcattcaccaactgacatgtgccct

SEQ ID NO: 36660 - DNA, 120 bp, Artificial Sequence
  ENSG00000054282_2 (sequence is synthesized)
gaaagaaggcgatgtcactattggagaagatgcaccaaatctttcttttagcaccagtgtgggaaatgaggacgccaggacagcctggcccgaattacaacagagccatgctgttaatca

SEQ ID NO: 36661 - DNA, 120 bp, Artificial Sequence
  ENSG00000054282_3 (sequence is synthesized)
gctcaaagatttgttgcgccaacaagcagataaggaaagtgaagtatctccgtcaagaagaagaaaaatgtcccccttgaggtcattagaacatgaggaaaccaatatgcctactatgca

SEQ ID NO: 36662 - DNA, 120 bp, Artificial Sequence
  ENSG00000054282_4 (sequence is synthesized)
cgaccttgttcatactattaatgaccagtctcaatatattcatcatttagaggcagaagttaagttctgcaaggaggaactctctggaatgaaaaataaaatacaagtagttgtgcttga

SEQ ID NO: 36663 - DNA, 120 bp, Artificial Sequence
  ENSG00000054282_5 (sequence is synthesized)
aaacgaagggctccagcaacagctaaaatctcaaagacaagaggagacactgagggaacaaacacttctggatgcatccggaaacatgcacaattcttggattacaacaggtgaagattc

SEQ ID NO: 36664 - DNA, 120 bp, Artificial Sequence
  ENSG00000054282_6 (sequence is synthesized)
tggggtgggcgaaacctccaaaagaccattttcccatgacaatgcagattttggcaaagctgcatctgctggtgagcagctagaactggagaagctaaaacttacttatgaggaaaagtg

SEQ ID NO: 36665 - DNA, 120 bp, Artificial Sequence
  ENSG00000054282_7 (sequence is synthesized)
tgaaattgaggaatcccaattgaagtttttgaggaacgacttagctgaatatcagagaacttgtgaagatcttaaagagcaactaaagcataaagaatttcttctggctgctaatacttg

SEQ ID NO: 36666 - DNA, 120 bp, Artificial Sequence
  ENSG00000054282_8 (sequence is synthesized)
taaccgtgttggtggtctttgtttgaaatgtgctcagcatgaagctgttctttcccaaacccatactaatgttcatatgcagaccatcgaaagactggttaaagaaagagatgacttgat

SEQ ID NO: 36667 - DNA, 120 bp, Artificial Sequence
  ENSG00000054282_9 (sequence is synthesized)
gtctgcactagtttccgtaaggagcagcttggcagatacgcagcaaagagaagcaagtgcttatgaacaggtgaaacaagttttgcaaatatctgaggaagccaattttgaaaaaaccaa

SEQ ID NO: 36668 - DNA, 120 bp, Artificial Sequence
  ENSG00000054282_10 (sequence is synthesized)
aaagaacttgcatctcagcaagagaaaagggccattgagaaagacatgatgaaaaaggaaataacgaaagaaagggagtacatgggatcaaagatgttgatcttgtctcagaatattgcc

SEQ ID NO: 36669 - DNA, 120 bp, Artificial Sequence
  ENSG00000054282_11 (sequence is synthesized)
caactggaggcccaggtggaaaaggttacaaaggaaaagatttcagctattaatcaactggaggaaattcaaagccagctggcttctcgggaaatggatgtcacaaaggtgtgtggagaa

SEQ ID NO: 36670 - DNA, 120 bp, Artificial Sequence
  ENSG00000054282_12 (sequence is synthesized)
atgcgctatcagctgaataaaaccaacatggagaaggatgaggcagaaaaggagcacagagagttcagagcaaaaactaacagggatcttgaaattaaagatcaggaaatagagaaattg

SEQ ID NO: 36671 - DNA, 120 bp, Artificial Sequence
  ENSG00000054282_13 (sequence is synthesized)
agaatagaactggatgaaagcaaacaacacttggaacaggagcagcagaaggcagccctggccagagaggagtgcctgagactaacagaactgctgggcgaatctgagcaccaactgcac

SEQ ID NO: 36672 - DNA, 120 bp, Artificial Sequence
  ENSG00000054282_14 (sequence is synthesized)
ctcaccagacaggaaaaagatagcattcagcagagctttagcaaggaagcaaaggcccaagcccttcaggcccagcaaagagagcaggagctgacacagaagatacagcaaatggaggcc

SEQ ID NO: 36673 - DNA, 120 bp, Artificial Sequence
  ENSG00000054282_15 (sequence is synthesized)
cagcatgacaaaactgaaaatgaacagtatttgttgctgacctcccagaatacatttttgacaaagttaaaggaagaatgctgtacattagccaagaaactggaacaaatctctcaaaaa

SEQ ID NO: 36674 - DNA, 120 bp, Artificial Sequence
  ENSG00000054282_16 (sequence is synthesized)
accagatctgaaatagctcaactcagtcaagaaaaaaggtatacatatgataaattgggaaagttacagagaagaaatgaagaattggaggaacagtgtgtccagcatgggagagtacat

SEQ ID NO: 36675 - DNA, 120 bp, Artificial Sequence
  ENSG00000054282_17 (sequence is synthesized)
gagacgatgaagcaaaggctaaggcagctggataagcacagccaggccacagcccagcagctggtgcagctcctcagcaagcagaaccagcttctcctggagaggcagagcctgtcggaa

SEQ ID NO: 36676 - DNA, 120 bp, Artificial Sequence
  ENSG00000054282_18 (sequence is synthesized)
gaggtggaccggctgcggacccagttacccagcatgccacaatctgattgctgacctggatggaacagagtgaaataaatgatttacaaagagatatttacattcatctggtttagactt

SEQ ID NO: 36677 - DNA, 120 bp, Artificial Sequence
  ENSG00000054282_19 (sequence is synthesized)
aatatgccacaacgcaccacgaccttcccagggtgacaccgcctcagcctgcagtggggctggtcctcatcaacgcgggcgctgtccccgcacgcagtcgggctggagctggagtctgac

SEQ ID NO: 36678 - DNA, 120 bp, Artificial Sequence
  ENSG00000054282_20 (sequence is synthesized)
tctagctgagcagagctcctggtgtatgttttcagaaatggcttgaagttatgtgtttaaatctgctcattcgtatgctaggttatacatatgattttcaataaatgaactttttaaaga

SEQ ID NO: 36679 - DNA, 120 bp, Artificial Sequence
  ENSG00000054282_21 (sequence is synthesized)
cctaatcactctgatctgtcatggaccttctagctggaagagttatgccatcatattatcccaacactcatcagtgtgtggaggacccccttttactgaatgatttattgctctttgcag

SEQ ID NO: 36680 - DNA, 120 bp, Artificial Sequence
  ENSG00000054282_22 (sequence is synthesized)
aattcctttggctgcagattttatttctgagtcactctgttcagctcaattggtcgccttcagttaccgtggcaaccagcagatggggttctttgacaagggtcagcggggaggctgcct

SEQ ID NO: 36681 - DNA, 120 bp, Artificial Sequence
  ENSG00000054282_23 (sequence is synthesized)
tggtttggacagaagaggagctaaataaaaagctttcagcattgacggttccgtagcggacggccaggagttgttatcaaattacttgcattaaaacctaattaagatgtgtgccaataa

SEQ ID NO: 36682 - DNA, 120 bp, Artificial Sequence
  ENSG00000054282_24 (sequence is synthesized)
acttctagttttagtcattatcagacttacttgatgacattttaatacactttaaaaaatttcctcagattattaaaggatgaaaggcctaaaattgagttcttttccaaatcacgttcc

SEQ ID NO: 36683 - DNA, 86 bp, Artificial Sequence
  ENSG00000054282_25 (sequence is synthesized)
gggaggcggaggttgcagtaagctgagaccacgccactgcactccaacctggcaacagagtgagactccattcactaactgctctt

SEQ ID NO: 36684 - DNA, 120 bp, Artificial Sequence
  ENSG00000054282_26 (sequence is synthesized)
aaagaaataagaatcactaactgctcttatagaaattatgatattcaagtaaaataatgaaaataaagcactttagttttcaaattattagtattttttctctgtagatagtcttcatct

SEQ ID NO: 36685 - DNA, 120 bp, Artificial Sequence
  ENSG00000054282_27 (sequence is synthesized)
cagtctcatcatattcaacgtgtcaattagaatcaccacaccaaagtttcagggtcgtggtaaaaattaataaggtattggacgtaaactaaagcataaggaacgacttagctgaatatc

SEQ ID NO: 36686 - DNA, 120 bp, Artificial Sequence
  ENSG00000054282_28 (sequence is synthesized)
aaatttctatcagcctctcccaacctgggtgtccttgtctcttccttgcccctgtcaaagtttaaaggactcacctgatgtcaacgtcctggacatccagcagtgttgcagctgtgtctg

SEQ ID NO: 36687 - DNA, 120 bp, Artificial Sequence
  ENSG00000054282_29 (sequence is synthesized)
tcccagtaagacctatatattatagattaaccattagtgatttatgtataatgagtagaaaaagacagcaggaattaatatttttgttgttaaagattatttttaaatagtagtaatgaa

SEQ ID NO: 36688 - DNA, 120 bp, Artificial Sequence
  ENSG00000054282_30 (sequence is synthesized)
ataattttattttaataagtccaatttgaaattttaaaatcttccaggccatagcctatctagagacataactagagtaatactaagagccagaactcagctgattgtggtggcttacgc

SEQ ID NO: 36689 - DNA, 120 bp, Artificial Sequence
  ENSG00000054282_31 (sequence is synthesized)
atctaaaaaaaaaaaaaaaaaaaaaaaccgagctggaactcatagctttcactgtacatggttgtttattttttaaatgttcttatgtttttcatagattaccctgattagttttaggat

SEQ ID NO: 36690 - DNA, 120 bp, Artificial Sequence
  ENSG00000054282_32 (sequence is synthesized)
accctgattagttttaggatttctcttagagatttttacttttttacaaagaaatgttaacatttaaaaaatactctaatttttgctttcttgttttttgtcctattttattttattttg

SEQ ID NO: 36691 - DNA, 120 bp, Artificial Sequence
  ENSG00000054282_33 (sequence is synthesized)
tacgacttgattctttagtttttaaagtgatgtatttctagatcattgtacttaagggaatgtgacttattttgtctcattcagaatccagatatttcatctttaattacattaaaatac

SEQ ID NO: 36692 - DNA, 120 bp, Artificial Sequence
  ENSG00000054282_34 (sequence is synthesized)
caacttgtaatgaattagactttgttctctgaatccttctgtttcttcattttcttttactataatttaagattatttaaagaggcattttcataaataaataaaatcagtcttcttttc

SEQ ID NO: 36693 - DNA, 120 bp, Artificial Sequence
  ENSG00000054356_0 (sequence is synthesized)
tcgctgcggctccggcccgggagcgagcgcccggagctcggaaagatgcggcgcccgcggcggcctgggggtctcgggggatccgggggtctccggctgctcctctgcctcctgctgctg

SEQ ID NO: 36694 - DNA, 120 bp, Artificial Sequence
  ENSG00000054356_1 (sequence is synthesized)
ctgctcctctgcctcctgctgctgagcagccgcccggggggctgcagcgccgttagtgcccacggctgtctatttgaccgcaggctctgctctcacctggaagtctgtattcaggatggc

SEQ ID NO: 36695 - DNA, 120 bp, Artificial Sequence
  ENSG00000054356_2 (sequence is synthesized)
ttgtttgggcagtgccaggtgggagtggggcaggcccggccccttttgcaagtcacctccccagttctccaacgcttacaaggtgtgctccgacaactcatgtcccaaggattgtcctgg

SEQ ID NO: 36696 - DNA, 120 bp, Artificial Sequence
  ENSG00000054356_3 (sequence is synthesized)
cacgatgacctcacccagtatgtgatctctcaggagatggagcgcatccccaggcttcgccccccagagccccgtccaagggacaggtctggcttggcacccaagagacctggtcctgct

SEQ ID NO: 36697 - DNA, 120 bp, Artificial Sequence
  ENSG00000054356_4 (sequence is synthesized)
ggagagctgcttttacaggacatccccactggctccgcccctgctgcccagcatcggcttccacaaccaccagtgggcaaaggtggagctggggccagctcctctctgtcccctctgcag

SEQ ID NO: 36698 - DNA, 120 bp, Artificial Sequence
  ENSG00000054356_5 (sequence is synthesized)
gctgagctgctcccgcctctcttggagcacctgctgctgcccccacagcctccccacccttcactgagttacgaacctgccttgctgcagccctacctgttccaccagtttggctcccgt

SEQ ID NO: 36699 - DNA, 120 bp, Artificial Sequence
  ENSG00000054356_6 (sequence is synthesized)
gatggctccagggtctcagagggctccccagggatggtcagtgtcggccccctgcccaaggctgaagcccctgccctcttcagcagaactgcctccaagggcatatttggggaccaccct

SEQ ID NO: 36700 - DNA, 120 bp, Artificial Sequence
  ENSG00000054356_7 (sequence is synthesized)
ggccactcctacggggaccttccagggccttcacctgcccagctttttcaagactctgggctgctctatctggcccaggagttgccagcacccagcagggccagggtgccaaggctgcca

SEQ ID NO: 36701 - DNA, 120 bp, Artificial Sequence
  ENSG00000054356_8 (sequence is synthesized)
gagcaagggagcagcagccgggcagaggactccccagagggctatgagaaggaaggactaggggatcgtggagagaagcctgcttccccagctgtgcagccagatgcggctctgcagagg

SEQ ID NO: 36702 - DNA, 120 bp, Artificial Sequence
  ENSG00000054356_9 (sequence is synthesized)
ctggccgctgtgctggcgggctatggggtagagctgcgtcagctgacccctgagcagctctccacactcctgaccctgctgcagctactgcccaagggtgcaggaagaaatccgggaggg

SEQ ID NO: 36703 - DNA, 120 bp, Artificial Sequence
  ENSG00000054356_10 (sequence is synthesized)
gttgtaaatgttggagctgatatcaagaaaacaatggaggggccggtggagggcagagacacagcagagcttccagcccgcacatcccccatgcctggacaccccactgccagccctacc

SEQ ID NO: 36704 - DNA, 120 bp, Artificial Sequence
  ENSG00000054356_11 (sequence is synthesized)
tccagtgaagtccagcaggtgccaagccctgtctcctctgagcctcccaaagctgccagaccccctgtgacacctgtcctgctagagaagaaaagcccactgggccagagccagcccacg

SEQ ID NO: 36705 - DNA, 120 bp, Artificial Sequence
  ENSG00000054356_12 (sequence is synthesized)
gtggcaggacagccctcagcccgcccagcagcagaggaatatggctacatcgtcactgatcagaagcccctgagcctggctgcaggagtgaagctgctggagatcctggctgagcatgtg

SEQ ID NO: 36706 - DNA, 120 bp, Artificial Sequence
  ENSG00000054356_13 (sequence is synthesized)
cacatgtcctcaggcagcttcatcaacatcagtgtggtgggaccagccctcaccttccgcatccggcacaatgagcagaacctgtctttggctgatgtgacccaacaagcagggctggtg

SEQ ID NO: 36707 - DNA, 120 bp, Artificial Sequence
  ENSG00000054356_14 (sequence is synthesized)
aagtctgaactggaagcacagacagggctccaaatcttgcagacaggagtgggacagagggaggaggcagctgcagtccttccccaaactgcgcacagcacctcacccatgcgctcagtg

SEQ ID NO: 36708 - DNA, 120 bp, Artificial Sequence
  ENSG00000054356_15 (sequence is synthesized)
gtggccctggcaggtgtggctgggctgctggtggctctggctgtggctctgtgtgtgcggcagcatgcgcggcagcaagacaaggagcgcctggcagccctggggcctgagggggcccat

SEQ ID NO: 36709 - DNA, 120 bp, Artificial Sequence
  ENSG00000054356_16 (sequence is synthesized)
ggtgacactacctttgagtaccaggacctgtgccgccagcacatggccacgaagtccttgttcaaccgggcagagggtccaccggagccttcacgggtgagcagtgtgtcctcccagttc

SEQ ID NO: 36710 - DNA, 120 bp, Artificial Sequence
  ENSG00000054356_17 (sequence is synthesized)
agcgacgcagcccaggccagccccagctcccacagcagcaccccgtcctggtgcgaggagccggcccaagccaacatggacatctccacgggacacatgattctggcatacatggaggat

SEQ ID NO: 36711 - DNA, 120 bp, Artificial Sequence
  ENSG00000054356_18 (sequence is synthesized)
cacctgcggaaccgggaccgccttgccaaggagtggcaggccctctgtgcctaccaagcagagccaaacacctgtgccaccgcgcagggggagggcaacatcaaaaagaaccggcatcct

SEQ ID NO: 36712 - DNA, 120 bp, Artificial Sequence
  ENSG00000054356_19 (sequence is synthesized)
gacttcctgccctatgaccatgcccgcataaaactgaaggtggagagcagcccttctcggagcgattacatcaacgccagccccattattgagcatgaccctcggatgccagcctacata

SEQ ID NO: 36713 - DNA, 120 bp, Artificial Sequence
  ENSG00000054356_20 (sequence is synthesized)
gccacgcagggcccgctgtcccataccatcgcagacttctggcagatggtgtgggagagcggctgcaccgtcatcgtcatgctgaccccgctggtggaggatggtgtcaagcagtgtgac

SEQ ID NO: 36714 - DNA, 120 bp, Artificial Sequence
  ENSG00000054356_21 (sequence is synthesized)
cgctactggccagatgagggtgcctccctctaccacgtatatgaggtgaacctggtgtcggagcacatctggtgcgaggactttctggtgcggagcttctacctgaagaacgtgcagacc

SEQ ID NO: 36715 - DNA, 120 bp, Artificial Sequence
  ENSG00000054356_22 (sequence is synthesized)
caggagacgcgcacgctcacgcagttccacttcctcagctggccggcagagggcacaccggcctccacgcggcccctgctggacttccgcaggaaggtgaacaagtgctaccggggccgc

SEQ ID NO: 36716 - DNA, 120 bp, Artificial Sequence
  ENSG00000054356_23 (sequence is synthesized)
tcctgccccatcatcgtgcactgcagtgatggtgcggggaggaccggcacctacatcctcatcgacatggtcctgaaccgcatggcaaaaggagtgaaggagattgacatcgctgccacc

SEQ ID NO: 36717 - DNA, 120 bp, Artificial Sequence
  ENSG00000054356_24 (sequence is synthesized)
ctggagcatgtccgtgaccagcggcctggccttgtccgctctaaggaccagtttgaatttgccctgacagccgtggcggaggaagtgaatgccatcctcaaggccctgccccagtgagac

SEQ ID NO: 36718 - DNA, 120 bp, Artificial Sequence
  ENSG00000054356_25 (sequence is synthesized)
cctggggccccttggcgggcagcccagcctctgtccctctttgcctgtgtgagcatctctgtgtacccactcctcactgccccaccagccacctcttgggcatgctcagcccttcctaga

SEQ ID NO: 36719 - DNA, 120 bp, Artificial Sequence
  ENSG00000054356_26 (sequence is synthesized)
agagtcaggaagggaaagccagaaggggcacgcctgcccagcctcgcatgccagagcctggggcatcccagagcccagggcatcccatgggggtgctgcagccaggaggagaggaaagga

SEQ ID NO: 36720 - DNA, 120 bp, Artificial Sequence
  ENSG00000054356_27 (sequence is synthesized)
catgggtagcaattctacccagagccttctcctgcctacattccctggcctggctctcctgtagctctcctggggttctgggagttccctgaacatctgtgtgtgtccccctatgctcca

SEQ ID NO: 36721 - DNA, 120 bp, Artificial Sequence
  ENSG00000054356_28 (sequence is synthesized)
gtatggaagaatggggtggagggtcgccacacccggctccccctgcttctcagccccgggcctgcctctgactcacacttgggcgctctgccctccctggcctcacgcccagcctcctcc

SEQ ID NO: 36722 - DNA, 120 bp, Artificial Sequence
  ENSG00000054356_29 (sequence is synthesized)
caccaccctcccaccatgcgctgctcaacctctctccttctggcgcaagagaacatttctagaaaaaactacttttgtaccagtgtgaataaagttagtgtgttgtctgtgcagctgcaa

SEQ ID NO: 36723 - DNA, 120 bp, Artificial Sequence
  ENSG00000054356_30 (sequence is synthesized)
attgcaggttcgggagaaggacacggggtgcatgtgggcagagggacttagagaccggctgcgagaccacaggagaagccacttgctccgaggcgcctgggaggctgtctatttgaccgc

SEQ ID NO: 36724 - DNA, 120 bp, Artificial Sequence
  ENSG00000054356_31 (sequence is synthesized)
agaaggcccagaaaggaagagggctactgggcttgagaagaaggaagacttgcctggaggaggagaggtaggggagaaagtgaagagagtacagtccatttgcaacctggactttggaag

SEQ ID NO: 36725 - DNA, 120 bp, Artificial Sequence
  ENSG00000054356_32 (sequence is synthesized)
taacaatcctaggaggtataaatccccattttattgatgagggaattgaggcttggagaggttcagcaacttgcccaaggttacataattcatcagtagcaaaggcaggattcaaaccca

SEQ ID NO: 36726 - DNA, 120 bp, Artificial Sequence
  ENSG00000054356_33 (sequence is synthesized)
ggtggtctggctccaatagctgtacctgagggtgggaagaagacagctcagatcacccactgagtttgtccctctactctgacaaaccccatgagctgcagggcagagggtacagttctg

SEQ ID NO: 36727 - DNA, 120 bp, Artificial Sequence
  ENSG00000054356_34 (sequence is synthesized)
tgaaggtacagccacacccagcccgttgctggccccacccagcatcttccttgcctaagatgcccctgtagggcatccccgatctgctccagccccatcctctaacggggagagggccag

SEQ ID NO: 36728 - DNA, 120 bp, Artificial Sequence
  ENSG00000054356_35 (sequence is synthesized)
cagaggagccttctaagaagaagtcactggaaaaggccagcttccatcttcttaggaccagttcctctcactggcattgtctgagtgctacagagccaagaactctggaatcctcagcca

SEQ ID NO: 36729 - DNA, 120 bp, Artificial Sequence
  ENSG00000054356_36 (sequence is synthesized)
ggataatattccactcacccaattcctcattcaacaagtatttattgagtacttactatgtagcaggcatagttttaggtatttggaatgtatcgggaataaaacaaagatctctgctta

SEQ ID NO: 36730 - DNA, 120 bp, Artificial Sequence
  ENSG00000054356_37 (sequence is synthesized)
cttcagcaccgcggacagcgccagcggctcgggacagcgcgaggagagatgcctaagagacaccctccccagccccacccatgccctctttcccccgaccgggggaagtgtgctagaacc

SEQ ID NO: 36731 - DNA, 120 bp, Artificial Sequence
  ENSG00000054356_38 (sequence is synthesized)
tcttctgagttccaggccattataggatgcttttccatatttgggaaggaaattcctctttcagaatttggccaaaacctctcctgcagtaattctatgaatctctctccctgcacctgg

SEQ ID NO: 36732 - DNA, 120 bp, Artificial Sequence
  ENSG00000054356_39 (sequence is synthesized)
aagaaattcaggcctgattcctactctcctcccagcttaaggccttctttagaatgaaagaataaattgcatctgcttctcccgttcccagcctgtccacccatctgcccattctctgtg

SEQ ID NO: 36733 - DNA, 120 bp, Artificial Sequence
  ENSG00000054356_40 (sequence is synthesized)
agtgggtgtctgagcctctgctcaccttttcctctacaggctgtctatttgaccgcaggctctgctctcacctggaagtctgtattcaggatggcttgtttgggcagtgccaggtgggag

SEQ ID NO: 36734 - DNA, 120 bp, Artificial Sequence
  ENSG00000054356_41 (sequence is synthesized)
gaagagggctacagggatggggccaagtgggaattctagcgaggcgcctactatttgatggaggagggatgggctaggctgtctatttgaccgcaggctctgctctcacctggaagtctg

SEQ ID NO: 36735 - DNA, 120 bp, Artificial Sequence
  ENSG00000054356_42 (sequence is synthesized)
agcttggggcctggagcgaaactcggtgggggtgagggtgaaatgtcatgaagctcggggagaatatgggttgggggaggcatgcgagatgaggaaggctgtctatttgaccgcaggctc

SEQ ID NO: 36736 - DNA, 120 bp, Artificial Sequence
  ENSG00000054356_43 (sequence is synthesized)
cacaacctagatccctcacatgtgcaggtcacgatagggttcgcacttctgtgagaatctattgcaatggctgatctaacaggaggcggagctcaggtggtaatgttcgcttgcctcctg

SEQ ID NO: 36737 - DNA, 120 bp, Artificial Sequence
  ENSG00000054356_44 (sequence is synthesized)
ctatgcggctcggttcccaacaggccatagactgacactggtccatggcccagggattggggacccctgctttagagggctgttgcaagatttgataaagtatgtaaaatctagtgtaag

SEQ ID NO: 36738 - DNA, 120 bp, Artificial Sequence
  ENSG00000054356_45 (sequence is synthesized)
tgcctgatacatagcaagggctccgttaattctagatgctgcctattatcattattaaatgagcaaaaacaactattgtgattactcttctaccctagccctctgacgtaacagccaatg

SEQ ID NO: 36739 - DNA, 120 bp, Artificial Sequence
  ENSG00000054356_46 (sequence is synthesized)
agctagaaaaccatgtggactcctatgaagccattctaagtcacctggtcctatagctgaaggactgtgaagttccaaacttcaatctgacaacccctaagaaggtcttccctggttctg

SEQ ID NO: 36740 - DNA, 120 bp, Artificial Sequence
  ENSG00000054356_47 (sequence is synthesized)
gcttgcagggatatcaggagtatgcaggtgactcccaaagcagaaaggtcataaaggacaagggcaggttagatgggtccattgagagacggagaagccccctgctcctcactgagttgt

SEQ ID NO: 36741 - DNA, 120 bp, Artificial Sequence
  ENSG00000054356_48 (sequence is synthesized)
ggtcaggggcagtggagaaaggtctgaggtccaaggggaccccaagtctgaatataacgcagccacagaatgcctgtgctgaagtgagactgctccagggagacaagcagtagcacaatg

SEQ ID NO: 36742 - DNA, 120 bp, Artificial Sequence
  ENSG00000054356_49 (sequence is synthesized)
tcccgagttgaggggttggggttgtcctcccctggcccagggaacactatgcccagggcagcctgatgtcacaactggtaaggaccactggagcctgagtcgggaggaaaacagcctggg

SEQ ID NO: 36743 - DNA, 120 bp, Artificial Sequence
  ENSG00000054356_50 (sequence is synthesized)
tggtcataaagaatggcagagggccagagcagggatgtggcaagactgacacccttgaagtcaccagaaagctatccccttggacttgggcagaagtgtctcttaatatgatgatgtatt

SEQ ID NO: 36744 - DNA, 120 bp, Artificial Sequence
  ENSG00000054356_51 (sequence is synthesized)
atcattaatagttgccacctgctaccatgtattgagcacctattgtgtgccagacctagcacttagctctttacatgggttatctcatgtgatcattgtaagaaccctaaggaggttttt

SEQ ID NO: 36745 - DNA, 120 bp, Artificial Sequence
  ENSG00000054356_52 (sequence is synthesized)
cacctagcttgcaagtgacaaggcgagcccaatgccacccacaccagctctggttctttgcctccagccctggctcctttctccaaccatcttccctctctgccccgggcaggtggggag

SEQ ID NO: 36746 - DNA, 120 bp, Artificial Sequence
  ENSG00000054356_53 (sequence is synthesized)
aaaaggaagaaagagaggcccacgtcatgtgtttcagcttccctttccctctctgctggtgcccactggccctcacacccatttcttgttgcaggaaggtgaacaagtgctaccggggcc

SEQ ID NO: 36747 - DNA, 120 bp, Artificial Sequence
  ENSG00000054356_54 (sequence is synthesized)
ctactggccagatgagggtgcctccctctaccacgtatatgaggtcagcagggccccacagcaaggggacaatggatgtgggaagagtagatgatggccttttcgtaacgttttcttcac

SEQ ID NO: 36748 - DNA, 120 bp, Artificial Sequence
  ENSG00000054356_55 (sequence is synthesized)
caaatgagcactcaacagtctttttaaaaaggcttttattggccctgctcatgattcatacatatatgaatatatataaacacatatatgcatacccatatattcacatatatacatgtg

SEQ ID NO: 36749 - DNA, 120 bp, Artificial Sequence
  ENSG00000054356_56 (sequence is synthesized)
tgtgtgtgtgtgtgtgtgtgtcctgtctagagtcaaaaagcgttcatagagacttatgataaaggcacagagatcaaactataaaaccaccaaaaccgaggtaagaagctaacagctaag

SEQ ID NO: 36750 - DNA, 120 bp, Artificial Sequence
  ENSG00000054356_57 (sequence is synthesized)
accaaaaccgaggtaagaagctaacagctaagtgtatattagacagggaagataaggatacccaaagactgagattaagacctacgttaattgaacctaatttagctctgagtttcctgg

SEQ ID NO: 36751 - DNA, 120 bp, Artificial Sequence
  ENSG00000054356_58 (sequence is synthesized)
tggccaaagcaaagaaagacataccacccgttacatacgttactaatgtaaaagagaaacaaactttttcattaggagagagactaggtggaggggtggagaaggagggggaactgggca

SEQ ID NO: 36752 - DNA, 120 bp, Artificial Sequence
  ENSG00000054356_59 (sequence is synthesized)
gaggccaagcaggggaaagagaaatatttcagacaaatgggagaacgtgagtccccactaagacaaaaaaaccttaagaacacagcagaagcttctcatcaccagatgagcctgaatagt

SEQ ID NO: 36753 - DNA, 120 bp, Artificial Sequence
  ENSG00000054356_60 (sequence is synthesized)
aattttttccccaccaaataagcacatgacggtttttttaaaaagcctttcattggtcctgctggtggttaacgaaaaaaatccagtaagaatactacagaatttcatccaagtttatgg

SEQ ID NO: 36754 - DNA, 120 bp, Artificial Sequence
  ENSG00000054356_61 (sequence is synthesized)
cacgtgtagcaccgatactctggtagaccctgcgaggaagagggaggagaaactccgacctcgagaggctcacaatagctgtgtctgggtggaaaagctactagtggtcctgagcagtag

SEQ ID NO: 36755 - DNA, 120 bp, Artificial Sequence
  ENSG00000054356_62 (sequence is synthesized)
ataagtgacaggcagccagggttcctgggaccgctggaacttagaatttgaaccggcctgggaggccgggcggtggttggagagaccgagaaggtcgcgaggagagcgcgcgcaacgcgg

SEQ ID NO: 36756 - DNA, 120 bp, Artificial Sequence
  ENSG00000054356_63 (sequence is synthesized)
atatgtgacgcaaattagcttacgagccgggggtggaggtgtcgtcagcacccgcctgcggttggccgcgttgcagcgagaggggcatgtagaccccgcctcgtagggaggctgtctatt

SEQ ID NO: 36757 - DNA, 120 bp, Artificial Sequence
  ENSG00000054392_0 (sequence is synthesized)
gggcacggcggcaggggcgtgctcggaggacgcgcgctgcgctgctcctccaaagggcagctccgggggaaagagggtggcgtcccggggaagcccgcagccgccgccgatgtcgctggg

SEQ ID NO: 36758 - DNA, 120 bp, Artificial Sequence
  ENSG00000054392_1 (sequence is synthesized)
actcggaagtgccgaaagaggggtgttgggaactcgcggcgcgcgtgaacgttgccgtcgccgccgcccgggacagcccggagaaactctcagcgtaggcatcgggaaccttcgtgccaa

SEQ ID NO: 36759 - DNA, 120 bp, Artificial Sequence
  ENSG00000054392_2 (sequence is synthesized)
ggagccatgctgccccgatgggaactggcactttacctacttgcctcactaggcttccacttctattccttctatgaagtttacaaagtctccagagaacacgaagaggagctggaccag

SEQ ID NO: 36760 - DNA, 120 bp, Artificial Sequence
  ENSG00000054392_3 (sequence is synthesized)
gaatttgagctggagactgacactttatttggaggattaaagaaggatgcgaccgactttgagtggagcttctggatggaatgggggaagcagtggctggtgtggcttctccttggccac

SEQ ID NO: 36761 - DNA, 120 bp, Artificial Sequence
  ENSG00000054392_4 (sequence is synthesized)
atggtagtgtctcaaatggccacactgctggcaagaaagcacagaccctggattctcatgctctatgggatgtgggcctgctggtgtgtgctggggacccctggtgtggctatggttttg

SEQ ID NO: 36762 - DNA, 120 bp, Artificial Sequence
  ENSG00000054392_5 (sequence is synthesized)
ctccataccaccatctctttctgcgtggcccagttccggtctcagctcctgacgtggctctgttctctcctcctcctctccacactgaggctgcagggtgtggaagaagttaagagaagg

SEQ ID NO: 36763 - DNA, 120 bp, Artificial Sequence
  ENSG00000054392_6 (sequence is synthesized)
tggtacaagacagaaaacgagtactacctgctgcagttcacgctgaccgttcgctgcctgtactacaccagcttcagcctggagctctgctggcagcagctgcctgctgcatcgacctcc

SEQ ID NO: 36764 - DNA, 120 bp, Artificial Sequence
  ENSG00000054392_7 (sequence is synthesized)
tactcctttccctggatgctggcctatgtcttttattatccagtcttacacaatgggcccatcctcagcttctcggagttcatcaaacagatgcagcagcaggagcatgactccctgaag

SEQ ID NO: 36765 - DNA, 120 bp, Artificial Sequence
  ENSG00000054392_8 (sequence is synthesized)
gccagcctgtgtgtcctggccctggggctgggccgccttctttgctggtggtggctggccgagctgatggctcacctgatgtacatgcatgccatctacagcagcatccccctcctggag

SEQ ID NO: 36766 - DNA, 120 bp, Artificial Sequence
  ENSG00000054392_9 (sequence is synthesized)
actgtctcttgttggaccttaggaggactggcgttagcccaggtgctctttttctacgtgaagtacttggtgctctttggcgtgcctgctctgctcatgcgcctggatggactcactcca

SEQ ID NO: 36767 - DNA, 120 bp, Artificial Sequence
  ENSG00000054392_10 (sequence is synthesized)
cccgccctcccccgctgcgtgagcaccatgttcagtttcaccgggatgtggaggtattttgatgttggactgcataatttcttaatcaggtatgtgtacattccagtgggcgggtcccag

SEQ ID NO: 36768 - DNA, 120 bp, Artificial Sequence
  ENSG00000054392_11 (sequence is synthesized)
catggcctgctggggacactgttttccacggcgatgacatttgcatttgtgagctactggcatggcggctacgactacctctggtgctgggcagcgctcaactggctgggagtcactgtg

SEQ ID NO: 36769 - DNA, 120 bp, Artificial Sequence
  ENSG00000054392_12 (sequence is synthesized)
gagaatggagtccggaggctggtggagactccctgcatccaggacagtctggcccgatacttctccccacaagctcgccgtcgattccacgctgcccttgcttcttgttccacctcgatg

SEQ ID NO: 36770 - DNA, 120 bp, Artificial Sequence
  ENSG00000054392_13 (sequence is synthesized)
ctgatcctgtccaacctggtatttcttgggggcaatgaggttgggaaaacctactggaataggatcttcatacaaggctggccttgggtgaccctctctgtcctgggattcctgtactgc

SEQ ID NO: 36771 - DNA, 120 bp, Artificial Sequence
  ENSG00000054392_14 (sequence is synthesized)
tactcccacgtgggcattgcctgggcccagacctacgccacggactaatgctgttgggcccaggccagtccttgttgctggcctccaaggcaaatagtgcttcaccctgacctctcactc

SEQ ID NO: 36772 - DNA, 120 bp, Artificial Sequence
  ENSG00000054392_15 (sequence is synthesized)
ttgaatgccctcactccaagactggatgctggatctcatagaaaattcacagccagacaatcttctaatctggagtctttgagatcttctaccccaactcatcattttcctattgaggaa

SEQ ID NO: 36773 - DNA, 120 bp, Artificial Sequence
  ENSG00000054392_16 (sequence is synthesized)
acgggtccagggcagtcgtgtgtcttacccagctacacagggtgacattttggtctagaacctagtctcatgagccctttgcattctttccccttaagcaagaatagaatgtagtggaaa

SEQ ID NO: 36774 - DNA, 120 bp, Artificial Sequence
  ENSG00000054392_17 (sequence is synthesized)
tttattgattgagacacagaaatcctgattagtgataggcctgtcttctgggcaatatttctaaaatatttgagtgacattgatgtttaagtgacctccttcatcacatcctgcagtatc

SEQ ID NO: 36775 - DNA, 120 bp, Artificial Sequence
  ENSG00000054392_18 (sequence is synthesized)
tccagaagcagcactagggtttgagtttcatgcttcagcccctctgtaggaatgagaccaagccacagctgtcttttgaattacgtagtcgaagaagacggtagcagccctgtagcattc

SEQ ID NO: 36776 - DNA, 120 bp, Artificial Sequence
  ENSG00000054392_19 (sequence is synthesized)
taaggcatctatacccaaggagtcctgtgatctgagcttcagcagggtgatctacatttgggtgcttgtttctgagatttgcagagaagtataacatggtagttcctctaccttacagtt

SEQ ID NO: 36777 - DNA, 120 bp, Artificial Sequence
  ENSG00000054392_20 (sequence is synthesized)
aatcgtttcttaataaagaagcagaatttagaaaccacaggatagtgtacccacagatgggtgttatcaaggccagtcatgaggatggtgtcctggagtcttgtccaccctctccataca

SEQ ID NO: 36778 - DNA, 120 bp, Artificial Sequence
  ENSG00000054392_21 (sequence is synthesized)
agtctcaaaagtcatcctcctactcagtgattcacgtttagtggtttatattattaaggtttgattcaaacagagccttttctgtcctgtagataatctacatgtttgtagaattatttt

SEQ ID NO: 36779 - DNA, 120 bp, Artificial Sequence
  ENSG00000054392_22 (sequence is synthesized)
gaatatgtttgaggaaaatgtttaaaatctaaatatactcacataacttgattattcactcctctgaaaagatgctggataggctaccaaagttcccaagtggtagataattcagaagac

SEQ ID NO: 36780 - DNA, 120 bp, Artificial Sequence
  ENSG00000054392_23 (sequence is synthesized)
ttgtttgaatttggattttttttttttttggagtggggaagggtataaaggaggcttaaaatttgaatccataatatatctaattacaggagaatttacaacatctcaagtacgtaaatt

SEQ ID NO: 36781 - DNA, 120 bp, Artificial Sequence
  ENSG00000054392_24 (sequence is synthesized)
aagttgtcattgagtgaaaggttcacttggacctagtgctgcctcctgtttattacatagcatggcccttatgtcttgagttgaggttatcatctcaatgaggctttagctcctagagta

SEQ ID NO: 36782 - DNA, 120 bp, Artificial Sequence
  ENSG00000054392_25 (sequence is synthesized)
caggaccattttgttgattgtctttcttcatagcttctctgcttggcaaagagatgggagggggccagatactgactacctggggtaggcacattatgtgttaaagcaagacagaggcca

SEQ ID NO: 36783 - DNA, 120 bp, Artificial Sequence
  ENSG00000054392_26 (sequence is synthesized)
gagaggggcaggtagacctgcatagcagcagcctcagcagctgtcttggtaaaggagagagagagacatggggccagtaattccggggtgctcagaagttttaggaggggatgagcctca

SEQ ID NO: 36784 - DNA, 120 bp, Artificial Sequence
  ENSG00000054392_27 (sequence is synthesized)
gggaggagtgagcacctaaatgaacgcagtaaaccttcatggaccaacagtgattgaggatttgtgggcagccagagggagtctgactgaagtttacttggaaagaaagggcttgctaag

SEQ ID NO: 36785 - DNA, 120 bp, Artificial Sequence
  ENSG00000054392_28 (sequence is synthesized)
aaaaaagggagtaaaaatgatgatagggaagtgtctaatgtatgtgcacatataagtaatacaaaagttttgagctcttccaagtataccatttatatacaaacaaataggtttattcat

SEQ ID NO: 36786 - DNA, 120 bp, Artificial Sequence
  ENSG00000054392_29 (sequence is synthesized)
tcattaaactactttggaagcgtcagtggatatatttgaaagtggtaatcctgaatctcttttaaactattatatgattcataatggttctcaggaattaataaatgattactgtgttta

SEQ ID NO: 36787 - DNA, 120 bp, Artificial Sequence
  ENSG00000054392_30 (sequence is synthesized)
agtgcgcccgggcaaaggcggggatctaggcgccgggacaagtccgcgcacggccctgcccacgtcctctctccttggcttcgtccccagcttccggaactgctgcggggagttgcgaac

SEQ ID NO: 36788 - DNA, 120 bp, Artificial Sequence
  ENSG00000054392_31 (sequence is synthesized)
ctcttggctcaggcttggaggcctccgagcagcaacatcgtcccaattataccccgttggagcatcttcagatcttccactcttttcacaacgcaatcaaaatcttcgtacccattttgc

SEQ ID NO: 36789 - DNA, 120 bp, Artificial Sequence
  ENSG00000054392_32 (sequence is synthesized)
agagacagagggtgcagagaaccccagcggcagggactgaagggaggtgatggctgggagacgggaaaggatgcgaccgactttgagtggagcttctggatggaatgggggaagcagtgg

SEQ ID NO: 36790 - DNA, 120 bp, Artificial Sequence
  ENSG00000054392_33 (sequence is synthesized)
tagggatggggccatcagattccctgcccccactatgggccctttctactaggttggttcaaagtccatatgcctagaggcaagacagctggaaaagaagcttctgtagtgcatatatgt

SEQ ID NO: 36791 - DNA, 120 bp, Artificial Sequence
  ENSG00000054392_34 (sequence is synthesized)
gtgtttgtgcatgggtgtgtgtgtgtatatataactataaaaaatgtattatgtaaaaattagaacatttaaacaagaaaataacctctcaacagaaaccatgttaagatccattcttct

SEQ ID NO: 36792 - DNA, 120 bp, Artificial Sequence
  ENSG00000054392_35 (sequence is synthesized)
aaattttttccatgtgtatatacaaacagacatatgtatataacattaaaacaaatgctattacagagagatgattgtatcgggaccacctttttaagtcactgagtccatacctaacca

SEQ ID NO: 36793 - DNA, 120 bp, Artificial Sequence
  ENSG00000054392_36 (sequence is synthesized)
ccctttttaatggctacatagaattcccttacgtggatatgccataatttattttagtctcctattattagtaatcatattattctaaagattttttgcaactatcaactgtattaagat

SEQ ID NO: 36794 - DNA, 120 bp, Artificial Sequence
  ENSG00000054392_37 (sequence is synthesized)
gaatatcataaccaggatgaattctcgtaagtgaaatttccaggttcaaggtttttctcatctttaatgttcattatgtatattgcttattaactcttaactgccctgtagacaaaagta

SEQ ID NO: 36795 - DNA, 120 bp, Artificial Sequence
  ENSG00000054392_38 (sequence is synthesized)
cactaatttgtatttctaccaatggtgcataagaatgaccttgctaatactgagtataactggaattttaaatccttgataggtattgtatatagtagtataaaaaacagctaaggtttt

SEQ ID NO: 36796 - DNA, 120 bp, Artificial Sequence
  ENSG00000054392_39 (sequence is synthesized)
taagaagcagttcaactttacaggaaaatgatttggaaaatcaattaagcatttctctttacacatatattttaagtgattttaaactatgggcatagcttttatcttgcgaatgtgata

SEQ ID NO: 36797 - DNA, 120 bp, Artificial Sequence
  ENSG00000054392_40 (sequence is synthesized)
ttcatggcaggcaatcacacacagaaaatttgaaaaatgattaatgtggctacattccacccagtgtgaataactaaagcaaatgcactttaaaaagccctgtcaaaacagaatacattt

SEQ ID NO: 36798 - DNA, 120 bp, Artificial Sequence
  ENSG00000054392_41 (sequence is synthesized)
acatatgtttttataaagatagccatagtacaagtggacagttatttcaataaaaactgaaataaaccgagtagtcaaacaacacattggaggggatttaaatatgctcatgtatgtata

SEQ ID NO: 36799 - DNA, 120 bp, Artificial Sequence
  ENSG00000054392_42 (sequence is synthesized)
aagataaatatttttccagccatcagcaggaaagaaatgccagtggattctaacagaaaatgttatttcagtgaaagccatggctatgtaacacacaggaaaaccaaaaaggatggtatc

SEQ ID NO: 36800 - DNA, 120 bp, Artificial Sequence
  ENSG00000054392_43 (sequence is synthesized)
ataaagattttaatcttcatcctcaaatctgagcattctgctccaaagcctgaaaacacagttaccacctttgaaagtcagaaggttcttttcagcccagtctgtagccctgcaacacat

SEQ ID NO: 36801 - DNA, 120 bp, Artificial Sequence
  ENSG00000054392_44 (sequence is synthesized)
ttctgtgctctttcatgaagcaagtaacattaaccttgaacttaatgttaagcagtgctctgtggcctttgagccatagcttatgctagtaataattttagaaatctaaaacattcgagt

SEQ ID NO: 36802 - DNA, 120 bp, Artificial Sequence
  ENSG00000054392_45 (sequence is synthesized)
aacccaactgtgccatgtagcctgtgacctgttcattttggttcaaaataaatcaaggcatcaagcacacttactcacaggatgaagctcttgcttgtctaccttgctccatcacacctt

SEQ ID NO: 36803 - DNA, 120 bp, Artificial Sequence
  ENSG00000054392_46 (sequence is synthesized)
gctccaggactcactcattcacctcacttgaccttccatctacaattcaggtaccttggtacatagtaatttttgatatgcatttttttggcaaaatatttgtcttatatgttgcaagta

SEQ ID NO: 36804 - DNA, 120 bp, Artificial Sequence
  ENSG00000054392_47 (sequence is synthesized)
tgatgtttggcttgcatatttattgagcaagaatatatgaaacttatttttatcacctacaagcctggtaggcagttacagctatttagacgatggactccttgagtacatggccaggtt

SEQ ID NO: 36805 - DNA, 120 bp, Artificial Sequence
  ENSG00000054392_48 (sequence is synthesized)
cccattactctgtttatccccattgtctgagtgagcctcagtgttaaatcagtgcacaattagtgctttcatatcaggttgattatttagttcttcctccacttgcccagacatagaatc

SEQ ID NO: 36806 - DNA, 120 bp, Artificial Sequence
  ENSG00000054392_49 (sequence is synthesized)
ttcctccagtaccctgtttcttatgtagttccacacaacatccaaatgcacacaattttttgagtaaactatttccccacttaggttacccttcttccctctcttttcatgaatcaattt

SEQ ID NO: 36807 - DNA, 120 bp, Artificial Sequence
  ENSG00000054392_50 (sequence is synthesized)
cctgttcttctgtcaaaatccaaatgaagacttactggctttgtgagttaattatgcatgcccctcacatcctcagtagtattcagagttctccagagaaacagatcaataggatgtgtg

SEQ ID NO: 36808 - DNA, 120 bp, Artificial Sequence
  ENSG00000054392_51 (sequence is synthesized)
tgtattttggtagggggatagggatgacggtaaagaaatttagtatacagaattagaccatgtgattttgtaggctgagaaattcagacccaggagagctgatggtgtaagttccagtcc

SEQ ID NO: 36809 - DNA, 120 bp, Artificial Sequence
  ENSG00000054392_52 (sequence is synthesized)
aaagtagaaaaaccttgtggttcttttggagtgaaagccttgtaataggccccttggggcatgctggggctcatttctagacagtgaggcgtgatgagcaggagagatgaagaaaatctg

SEQ ID NO: 36810 - DNA, 120 bp, Artificial Sequence
  ENSG00000054523_0 (sequence is synthesized)
ggaggctgcttgagcaagctagtcattgttcatgcaacacaaaacattcccgcccctaacgccagaatggagcttccagatccctttttttttttttccttgattgctaaatgagcttcc

SEQ ID NO: 36811 - DNA, 120 bp, Artificial Sequence
  ENSG00000054523_1 (sequence is synthesized)
aaggaaacttggctgtaacttcaaaagaagatttgattctttatttctggactgcatatatatatataacaaggccattaaaatgtcgggagcctcagtgaaggtggctgtccgggtaag

SEQ ID NO: 36812 - DNA, 120 bp, Artificial Sequence
  ENSG00000054523_2 (sequence is synthesized)
gcccttcaattctcgagagaccagcaaggaatccaaatgcatcattcagatgcaaggcaactcgaccagtattattaacccaaagaatccaaaggaagctccaaagtccttcagcttcga

SEQ ID NO: 36813 - DNA, 120 bp, Artificial Sequence
  ENSG00000054523_3 (sequence is synthesized)
ctattcctactggtctcatacctcacccgaagatccctgttttgcatctcaaaaccgtgtgtacaatgacattggcaaggaaatgctcttacacgcctttgagggatataatgtctgtat

SEQ ID NO: 36814 - DNA, 120 bp, Artificial Sequence
  ENSG00000054523_4 (sequence is synthesized)
ttttgcctatgggcagactggtgctggaaaatcttatacaatgatgggtaaacaagaagaaagccaggctggcatcattccacagttatgtgaagaactttttgagaaaatcaatgacaa

SEQ ID NO: 36815 - DNA, 120 bp, Artificial Sequence
  ENSG00000054523_5 (sequence is synthesized)
ctgtaatgaagaaatgtcttactctgtagaggtgagctacatggaaatttactgtgaaagagtacgagatttgctgaatccaaaaaacaagggtaatttgcgtgtgcgtgaacacccact

SEQ ID NO: 36816 - DNA, 120 bp, Artificial Sequence
  ENSG00000054523_6 (sequence is synthesized)
tcttggaccctatgtggaggatctgtccaagttggcagttacttcctacacagacattgctgacctcatggatgctgggaacaaagccaggacagtggcagctacaaacatgaatgaaac

SEQ ID NO: 36817 - DNA, 120 bp, Artificial Sequence
  ENSG00000054523_7 (sequence is synthesized)
aagtagccgttcccacgctgtgtttacgattgttttcacccagaagaaacacgataatgagaccaacctttccactgagaaggtcagtaaaatcagcttggtggatctagcaggaagtga

SEQ ID NO: 36818 - DNA, 120 bp, Artificial Sequence
  ENSG00000054523_8 (sequence is synthesized)
acgagctgattcaactggtgccaaagggactcgattaaaggaaggagcaaatattaataagtctcttacaactttgggcaaagtcatttcagccttggccgaggtggataactgcactag

SEQ ID NO: 36819 - DNA, 120 bp, Artificial Sequence
  ENSG00000054523_9 (sequence is synthesized)
caagagtaaaaagaagaagaaaacagattttattccctacagggattctgtacttacttggctccttcgagaaaatttaggtggcaattctcggactgcaatggttgctgctctgagccc

SEQ ID NO: 36820 - DNA, 120 bp, Artificial Sequence
  ENSG00000054523_10 (sequence is synthesized)
cgcggatatcaactacgatgagactttgagcactctgagatatgcagatcgtgcaaaacaaattaaatgcaatgctgttatcaatgaggaccccaatgccaaactggttcgtgaattaaa

SEQ ID NO: 36821 - DNA, 120 bp, Artificial Sequence
  ENSG00000054523_11 (sequence is synthesized)
ggaggaggtgacacggctgaaggaccttcttcgtgctcagggcctgggagatattattgatattgatccattgatcgatgattactctggaagtggaagcaaatatctgaaagattttca

SEQ ID NO: 36822 - DNA, 120 bp, Artificial Sequence
  ENSG00000054523_12 (sequence is synthesized)
gaacaataagcatagatacttgctagcctctgagaatcaacgccctggccatttttccacagcatccatggggtccctcacttcatccccatcttcctgctcactcagtagtcaggtggg

SEQ ID NO: 36823 - DNA, 120 bp, Artificial Sequence
  ENSG00000054523_13 (sequence is synthesized)
cttgacgtctgtgaccagtattcaagagaggatcatgtctacacctggaggagaggaagctattgaacgtttaaaggaatcagagaagatcattgctgagttgaatgaaacttgggaaga

SEQ ID NO: 36824 - DNA, 120 bp, Artificial Sequence
  ENSG00000054523_14 (sequence is synthesized)
gaagcttcgtaaaacagaggccatcagaatggagagagaggctttgttggctgagatgggagttgccattcgggaagatggaggaaccctaggggttttctcacctaaaaagaccccaca

SEQ ID NO: 36825 - DNA, 120 bp, Artificial Sequence
  ENSG00000054523_15 (sequence is synthesized)
tcttgttaacctcaatgaagacccactaatgtctgagtgcctactttattacatcaaagatggaattacaagggttggccaagcagatgctgagcggcgccaggacatagtgctgagcgg

SEQ ID NO: 36826 - DNA, 120 bp, Artificial Sequence
  ENSG00000054523_16 (sequence is synthesized)
ggctcacattaaagaagagcattgtatcttccggagtgagagaagcaacagcggggaagttatcgtgaccttagagccctgtgagcgctcagaaacctacgtaaatggcaagagggtgtc

SEQ ID NO: 36827 - DNA, 120 bp, Artificial Sequence
  ENSG00000054523_17 (sequence is synthesized)
ccagcctgttcagctgcgctcaggaaaccgtatcatcatgggtaaaaaccatgttttccgctttaaccacccggaacaagcacgagctgagcgagagaagactccttctgctgagacccc

SEQ ID NO: 36828 - DNA, 120 bp, Artificial Sequence
  ENSG00000054523_18 (sequence is synthesized)
ctctgagcctgtggactggacatttgcccagagggagcttctggaaaaacaaggaattgatatgaaacaagagatggagaaaaggctacaggaaatggagatcttatacaaaaaggagaa

SEQ ID NO: 36829 - DNA, 120 bp, Artificial Sequence
  ENSG00000054523_19 (sequence is synthesized)
ggaagaagcagatcttcttttggagcagcagagactggactatgagagtaaattgcaggccttgcagaagcaggttgaaacccgatctctggctgcagaaacaactgaagaggaggaaga

SEQ ID NO: 36830 - DNA, 120 bp, Artificial Sequence
  ENSG00000054523_20 (sequence is synthesized)
agaggaagaagttccttggacacagcatgaatttgagttggcccaatgggccttccggaaatggaagtctcatcagtttacttcattacgggacttactctggggcaatgccgtgtacct

SEQ ID NO: 36831 - DNA, 120 bp, Artificial Sequence
  ENSG00000054523_21 (sequence is synthesized)
aaaggaggccaatgccatcagtgtggaactgaaaaagaaggtgcagtttcagtttgttctgctgactgacacactgtactcccctttgcctcctgaattacttcccactgagatggaaaa

SEQ ID NO: 36832 - DNA, 120 bp, Artificial Sequence
  ENSG00000054523_22 (sequence is synthesized)
aactcatgaggacaggcctttccctcgcacagtggtagcagtagaagtccaggatttgaagaatggagcaacacactattggtctttggagaaactcaagcagaggctggatttgatgcg

SEQ ID NO: 36833 - DNA, 120 bp, Artificial Sequence
  ENSG00000054523_23 (sequence is synthesized)
agagatgtatgatagggcaggggagatggcctccagtgcccaagacgaaagcgaaaccactgtgactggcagcgatcccttctatgatcggttccactggttcaaacttgtggggagctc

SEQ ID NO: 36834 - DNA, 120 bp, Artificial Sequence
  ENSG00000054523_24 (sequence is synthesized)
ccccattttccacggctgtgtgaacgagcgccttgccgaccgcacaccctcccccactttttccacggccgattccgacatcactgagctggctgacgagcagcaagatgagatggagga

SEQ ID NO: 36835 - DNA, 120 bp, Artificial Sequence
  ENSG00000054523_25 (sequence is synthesized)
ttttgatgatgaggcattcgtggatgacgccggctctgacgcagggacggaggagggatcagatctcttcagtgacgggcatgacccgttttacgaccgatccccttggttcattttagt

SEQ ID NO: 36836 - DNA, 120 bp, Artificial Sequence
  ENSG00000054523_26 (sequence is synthesized)
gggaagggcatttgtttacctgagcaatctgctgtatcccgtgcccctgatccacagggtggccatcgtcagtgagaaaggtgaagtgcggggatttctgcgtgtggctgtacaggccat

SEQ ID NO: 36837 - DNA, 120 bp, Artificial Sequence
  ENSG00000054523_27 (sequence is synthesized)
cgcagcggatgaagaagctcctgattatggctctggaattcgacagtcaggaacagctaaaatatcttttgataatgaatactttaatcagagtgacttttcgtctgttgcaatgactcg

SEQ ID NO: 36838 - DNA, 120 bp, Artificial Sequence
  ENSG00000054523_28 (sequence is synthesized)
ttctggtctgtccttggaggagttgaggattgtggaaggacagggtcagagttctgaggtcatcactcctccagaagaaatcagtcgaattaatgacttggatttgaagtcaagcacttt

SEQ ID NO: 36839 - DNA, 120 bp, Artificial Sequence
  ENSG00000054523_29 (sequence is synthesized)
gctggatggtaagatggtaatggaagggttttctgaagagattggcaaccacctgaaactgggcagtgccttcactttccgagtaacagtgttgcaggccagtggaatcctcccagagta

SEQ ID NO: 36840 - DNA, 120 bp, Artificial Sequence
  ENSG00000054523_30 (sequence is synthesized)
tgcagatatcttctgtcagttcaactttttgcatcgccatgatgaagcattctccacggagcccctcaaaaacaatggcagaggaagtcccctggccttttatcatgtgcagaatattgc

SEQ ID NO: 36841 - DNA, 120 bp, Artificial Sequence
  ENSG00000054523_31 (sequence is synthesized)
agtggagatcactgaatcatttgtggattacatcaaaaccaagcctattgtatttgaagtctttgggcattatcagcagcacccacttcatctgcaaggacaggagcttaacagtccgcc

SEQ ID NO: 36842 - DNA, 120 bp, Artificial Sequence
  ENSG00000054523_32 (sequence is synthesized)
tcagccgtgccgccgattcttccctccacccatgccactgtccaagccagttccagccaccaagttaaacacgatgagcaaaaccagccttggccagagcatgagcaagtatgacctcct

SEQ ID NO: 36843 - DNA, 120 bp, Artificial Sequence
  ENSG00000054523_33 (sequence is synthesized)
ggtttggtttgagatcagtgaactggagcctacaggagagtatatcccagctgtggttgaccacacagcaggcttgccttgccaggggacatttttgcttcatcagggcatccagcgaag

SEQ ID NO: 36844 - DNA, 120 bp, Artificial Sequence
  ENSG00000054523_34 (sequence is synthesized)
gatcacagtgaccattatccatgagaaggggagcgagctccattggaaagatgttcgtgaactggtggtaggtcgtattcggaataagcctgaggtggatgaagctgcagttgatgccat

SEQ ID NO: 36845 - DNA, 120 bp, Artificial Sequence
  ENSG00000054523_35 (sequence is synthesized)
cctctccctaaatattatttctgccaagtacctgaagtcttcccacaactctagcaggaccttctaccgctttgaggctgtgtgggatagctctctgcataactcccttcttctgaaccg

SEQ ID NO: 36846 - DNA, 120 bp, Artificial Sequence
  ENSG00000054523_36 (sequence is synthesized)
agtgacaccctatggagaaaagatctacatgaccttgtcggcctacctagagctggatcattgcatccagccggctgtcatcaccaaggatgtgtgcatggtcttctactcccgagatgc

SEQ ID NO: 36847 - DNA, 120 bp, Artificial Sequence
  ENSG00000054523_37 (sequence is synthesized)
caagatctcaccaccacgctctctgcgtagcctctttggcagcggctactcaaagtcaccagattcgaatcgagtcactggcatttacgaactcagcttatgcaaaatgtcagacacagg

SEQ ID NO: 36848 - DNA, 120 bp, Artificial Sequence
  ENSG00000054523_38 (sequence is synthesized)
tagtccaggtatgcagagaaggagaagaaaaatcttagatacgtcagtggcatatgtgcggggagaagagaacttagcaggctggcggccccgtggagacagcctcatccttgagcacca

SEQ ID NO: 36849 - DNA, 120 bp, Artificial Sequence
  ENSG00000054523_39 (sequence is synthesized)
gtgggagctggagaagctggagctcctacatgaggtggaaaaaacccgccactttttgctgctgcgtgagagacttggtgacagcatccccaaatccctgagcgactcgttatcccccag

SEQ ID NO: 36850 - DNA, 120 bp, Artificial Sequence
  ENSG00000054523_40 (sequence is synthesized)
cctcagcagtgggaccctcagcacctccaccagtatctcctctcagatctcaaccactacctttgaaagcgccatcacacctagcgagagcagtggctatgattcaggagacatcgaaag

SEQ ID NO: 36851 - DNA, 120 bp, Artificial Sequence
  ENSG00000054523_41 (sequence is synthesized)
cctggtggaccgagagaaagagctggctaccaagtgcctgcaacttctcacccacactttcaacagagaattcagccaggtgcacggcagcgtcagtgactgtaagttgtctgatatctc

SEQ ID NO: 36852 - DNA, 120 bp, Artificial Sequence
  ENSG00000054523_42 (sequence is synthesized)
tccaattggacgggatccctctgagtccagtttcagcagtgccaccctcactccctcctccacctgtccctctctggtagactctaggagcaactctctggatcagaagaccccagaagc

SEQ ID NO: 36853 - DNA, 120 bp, Artificial Sequence
  ENSG00000054523_43 (sequence is synthesized)
caattcccgggcctctagtccctgcccagaatttgaacagtttcagattgtcccagctgtggaaacaccatatttggcccgagcaggaaaaaacgaatttctcaatcttgttccagatat

SEQ ID NO: 36854 - DNA, 120 bp, Artificial Sequence
  ENSG00000054523_44 (sequence is synthesized)
gtcttcatctataacagtgacaaagaccctgtggagcgtggaatcattaacctgtccacagcacaggtggagtacagtgaggaccagcaggccatggtgaagacaccaaacacctttgct

SEQ ID NO: 36855 - DNA, 120 bp, Artificial Sequence
  ENSG00000054523_45 (sequence is synthesized)
gtctgcacaaagcaccgtggggtccttttgcaggccctcaatgacaaagacatgaacgactggttgtatgccttcaacccacttctagctggcacaatacggtcaaagctttcccgcaga

SEQ ID NO: 36856 - DNA, 120 bp, Artificial Sequence
  ENSG00000054523_46 (sequence is synthesized)
tgcccgagccagtcgaaatactaagtgactctgccgagtgccctcactcgccttcgagagataaagaaagcgttacctctcatttctctttgtgattcttgacggtgactcttgtatgta

SEQ ID NO: 36857 - DNA, 120 bp, Artificial Sequence
  ENSG00000054523_47 (sequence is synthesized)
atcctgtggcttaactacttctccctccttgtccagcacttttctagctctcccgttccccatctccattgctctgtactcttttcttttttcttgtgctgagaatctcgttagtagcat

SEQ ID NO: 36858 - DNA, 88 bp, Artificial Sequence
  ENSG00000054523_48 (sequence is synthesized)
caaaaacacaaaaactctgaggggatctggtgaatctccaaattattgtgggtgtactttggcttccttttgtatgataggtccccat

SEQ ID NO: 36859 - DNA, 120 bp, Artificial Sequence
  ENSG00000054523_49 (sequence is synthesized)
tgggtgtactttggcttccttttgtatgataggtccccatcatgaccacctctgatgtctgtgctgctgtcaccaggcacctttgtttttcaagacaacatactttttttttcttttctc

SEQ ID NO: 36860 - DNA, 120 bp, Artificial Sequence
  ENSG00000054523_50 (sequence is synthesized)
tgtttgtgatatcactttaatttttcttgggtggcttagagactaagggaggagacatctggcctttttagaacctgagaggaaaaaaagagtctttttttcccctctgtctctttttgc

SEQ ID NO: 36861 - DNA, 120 bp, Artificial Sequence
  ENSG00000054523_51 (sequence is synthesized)
catggctaatccctgcatttccattcagggaaaaggtggtagtgagcatagaactgcaacagttatattctgagtcaaagttggggctttttacggcataattatggaatttttatttac

SEQ ID NO: 36862 - DNA, 120 bp, Artificial Sequence
  ENSG00000054523_52 (sequence is synthesized)
tggtagagaggagacgagaggctttttcagtgggcctgggacagtggctgctcttgactttgtgtgaagggaaatgccaaggatgcttctggtggacttcaggggaccccagggtttggc

SEQ ID NO: 36863 - DNA, 120 bp, Artificial Sequence
  ENSG00000054523_53 (sequence is synthesized)
cgtgggccgtgatggcagcaggcggtgggatgcttgtagctcctcacagcaggattcctgcccactgttttttctctgttgggagggaagctcttttctaggagtgtctcagttctgctt

SEQ ID NO: 36864 - DNA, 120 bp, Artificial Sequence
  ENSG00000054523_54 (sequence is synthesized)
ttggcattagtgatggtggtggtacagttggaattagtgccatgtcatacacaaatgttccacaaggcgggagtgtttcactttctggtgataaacttgatggtcattgttatgattaag

SEQ ID NO: 36865 - DNA, 67 bp, Artificial Sequence
  ENSG00000054523_55 (sequence is synthesized)
ctctactaaaaatacaaaattagtcgggtatggtggcacatgcctgtaattccagctgcttgggagc

SEQ ID NO: 36866 - DNA, 120 bp, Artificial Sequence
  ENSG00000054523_56 (sequence is synthesized)
cctgggtgacagagcaagactctgcctcagaaaaaaaaaaaaataataatgctgggtagtgaccttgtgattgttacagctccctttgatcaaagaaatatagctttcaggcataaacct

SEQ ID NO: 36867 - DNA, 120 bp, Artificial Sequence
  ENSG00000054523_57 (sequence is synthesized)
aatatagctttcaggcataaacctggaagtctccctctgaatccagcagttgttttcattgatgcttgtcaggttgaagatgctttcagtgatgctctctatactcataaataagcaaat

SEQ ID NO: 36868 - DNA, 120 bp, Artificial Sequence
  ENSG00000054523_58 (sequence is synthesized)
gtggcaggctttgctttctggatcccaggattaaaactaaccgtgaccactactccaaacaaaacacaatatgcctaggggcacggatgaacgtccagggagcccgggccccaggctttg

SEQ ID NO: 36869 - DNA, 120 bp, Artificial Sequence
  ENSG00000054523_59 (sequence is synthesized)
ttgcgtgttccctgctcctctccatctggtgtggaaacactgcccagggagaaaggaggaagctcactgtggacagtcttctttccttctgacagaccaggtcatctggcttccgagatc

SEQ ID NO: 36870 - DNA, 120 bp, Artificial Sequence
  ENSG00000054523_60 (sequence is synthesized)
atcagagaagataagtctgtctctttcagctgccagtaagttttccaggatgagaggggaaaaagaaagcctccagtgacttcagttgctttgccagttgtcttgggattgttttacacc

SEQ ID NO: 36871 - DNA, 120 bp, Artificial Sequence
  ENSG00000054523_61 (sequence is synthesized)
atcctttacttcccttgctcagacctctctgtttcaccattgctcaggcattcaggaaagtatctgctcactcccacttggtgagtcctcggccttgaggttgctgactctcaggcgtta

SEQ ID NO: 36872 - DNA, 120 bp, Artificial Sequence
  ENSG00000054523_62 (sequence is synthesized)
ggcagctggatgacttcccgcttcacgcagcaaaggccaggggcttgcgcgcctctgcagagttgttgctagggagacttgtgtcatcatccacaaccttgtttctcacttcctggttgg

SEQ ID NO: 36873 - DNA, 120 bp, Artificial Sequence
  ENSG00000054523_63 (sequence is synthesized)
gctcatctctgaagaacaggtctcccagcttcgctccttatcactgcattgtgaagaggaggaaaagtgaatcacggagagagaaaggaaaggatagaatcacaggctgcgtctgcacct

SEQ ID NO: 36874 - DNA, 120 bp, Artificial Sequence
  ENSG00000054523_64 (sequence is synthesized)
gaaaagtgacccgcggaaactctatggcggattttttttttaactttcttcttcctgttaaaacataggtcactaactgtgatgttatttgttttctaagtggtatgtgagattttctaa

SEQ ID NO: 36875 - DNA, 120 bp, Artificial Sequence
  ENSG00000054523_65 (sequence is synthesized)
tgtagttagaagtttcattgtctgatggacacaatatgcccttccggttctattcaaaccagcaggatctgtcggtgcttagagatggctgcctggactggaatcaaatctaatttcagg

SEQ ID NO: 36876 - DNA, 120 bp, Artificial Sequence
  ENSG00000054523_66 (sequence is synthesized)
gaaatgaagatggaatttgaaggtcacttttaaaattaagtcattgatgctgctgttacagagtgtgacagaggatccatgtctgtgacacaggacggtgggaagcctgagagagagtga

SEQ ID NO: 36877 - DNA, 120 bp, Artificial Sequence
  ENSG00000054523_67 (sequence is synthesized)
aattatgtgatacactgaaatgacttttgtttttcttctaactcatacaaaactggtttggaaagtctttgctttggaagcgtcagacattagaacaggccaaactggactgtctgttca

SEQ ID NO: 36878 - DNA, 120 bp, Artificial Sequence
  ENSG00000054523_68 (sequence is synthesized)
tagcgtgcctgaataagaaggcctcttagggagccagagggagcagagtggtcgtgtcctgcgtgctcttcaccctctggggcgcccctgctgcggctggcaggtgcagacagcctttgc

SEQ ID NO: 36879 - DNA, 120 bp, Artificial Sequence
  ENSG00000054523_69 (sequence is synthesized)
tggtccccagcacgtccagggtgggtgctcccttgcccgacagaaccatccccactgtgaggctgtgagagatttgtggcaggaactgtttatgaggctctagttgttgctgttgtggcg

SEQ ID NO: 36880 - DNA, 120 bp, Artificial Sequence
  ENSG00000054523_70 (sequence is synthesized)
ggaaagttaagaaacatagcccttaaggaaaccacctttatgtattttcttaaagcacgcctttaaataagcaaaaactttaaaaggcaggaaagagaattcttaggcaaattcagagaa

SEQ ID NO: 36881 - DNA, 120 bp, Artificial Sequence
  ENSG00000054523_71 (sequence is synthesized)
ataagtgctagttaatactaatcacctcctcctctgtctctcatcctcctttctcccatcaaagcaaaatatggcctcaccaccagccccaaatcagtgctcagaccctctctgtgtctg

SEQ ID NO: 36882 - DNA, 120 bp, Artificial Sequence
  ENSG00000054523_72 (sequence is synthesized)
tgtgccctcctgggagtcagtcagcgctcaggccaggactgtgcagggccagccagcccatgcgctagtcaggagcacaggcaaggggtgcttgtggcagtggccgggcacctgagcccc

SEQ ID NO: 36883 - DNA, 120 bp, Artificial Sequence
  ENSG00000054523_73 (sequence is synthesized)
agctcgttgttaaacgtgctgacggcaaggggcaatggagtgagtttcccaactaagaaaccactattatatattttttcccttcagtcacatagacttcagacaactctcctatttttt

SEQ ID NO: 36884 - DNA, 120 bp, Artificial Sequence
  ENSG00000054523_74 (sequence is synthesized)
atggatttttcagctcatttcagatgaaggaactaagtcattgtgaactgtctcttgagatctaaaaacaagatgacttttcctggcacatattccaaagcaaagactttgttgcctgct

SEQ ID NO: 36885 - DNA, 120 bp, Artificial Sequence
  ENSG00000054523_75 (sequence is synthesized)
gcttattgtctaatttacagggatatttaattttgtcaggtctatgtatatttatccagctatacttacttgcacagtggattggagagaaaggattctccagtgtgcacactcatcggt

SEQ ID NO: 36886 - DNA, 120 bp, Artificial Sequence
  ENSG00000054523_76 (sequence is synthesized)
actctttctgcatttccctcgtgctgtgtcccgctcgggttccaatggacagtatcagggcttgtttgacttaggtctttcagttttcctttcggttcccttttaaaaatgtgattgtta

SEQ ID NO: 36887 - DNA, 61 bp, Artificial Sequence
  ENSG00000054523_77 (sequence is synthesized)
cagttttcctttcggttcccttttaaaaatgtgattgttaacctgcctcttgaaagattca

SEQ ID NO: 36888 - DNA, 120 bp, Artificial Sequence
  ENSG00000054523_78 (sequence is synthesized)
tgcactccagcctgggtgacaaagcaggactccgtctcaaaaaaaaagaaaagattcatgatgctgctgctcccagaaggtttgctggatgtgtttacataggactctaacttgtgtgca

SEQ ID NO: 36889 - DNA, 120 bp, Artificial Sequence
  ENSG00000054523_79 (sequence is synthesized)
acataggactctaacttgtgtgcactacagttgttcaccagggccagtgattcaccccagtgtgtggccagaccatgactgtgtagcaggaatgttttaatttgtgcttccttagtaaat

SEQ ID NO: 36890 - DNA, 120 bp, Artificial Sequence
  ENSG00000054523_80 (sequence is synthesized)
tgaaatatcagctgagagattatttgctgctgttattcaaaaggccatttatgaagttagtatttgagccccataagatctttaaaaagcctccaatcatttaaaggaagaaatcagagt

SEQ ID NO: 36891 - DNA, 120 bp, Artificial Sequence
  ENSG00000054523_81 (sequence is synthesized)
tgctataaaattcagtaaaaagctcatagccaaacggctgtgctcagatggaaagtctgagctgaggttggtctcttgccaaaccgtggctgttgtgtgttgttcttcatgtcttcgagt

SEQ ID NO: 36892 - DNA, 120 bp, Artificial Sequence
  ENSG00000054523_82 (sequence is synthesized)
tcattttttttcattctgcctattctggcatcagctcacttgaggagtccctcagccttcttgtatttaaggcatcgtcttagactttgtggctctaaagtacctgtctgttgagatttc

SEQ ID NO: 36893 - DNA, 120 bp, Artificial Sequence
  ENSG00000054523_83 (sequence is synthesized)
aagtctcttgtcaccatcctcacacatgacaacaaaacccataatgcataagtggcctttttgaaccaagactttgcaaactgatctctcccccgtgaaggagttgagcacattagcaac

SEQ ID NO: 36894 - DNA, 120 bp, Artificial Sequence
  ENSG00000054523_84 (sequence is synthesized)
aatgtacattaattttggattttcattttcatgttttattttgtaaatattatctgatgtttggagcttgagtatacagactgtaaatatagttcttgtatttgtactaattctgattct

SEQ ID NO: 36895 - DNA, 120 bp, Artificial Sequence
  ENSG00000054523_85 (sequence is synthesized)
tttgctgtatagccttagatgtgcaatgcagacactatctaactgtgtgtggtaaccttgcgtcacggagctgttagtgaacgaggtaaaaataataaaggtacagccagtgcatcagaa

SEQ ID NO: 36896 - DNA, 120 bp, Artificial Sequence
  ENSG00000054523_86 (sequence is synthesized)
ctgcagttgatgccatcctctccctaaatattatttctgccaagtacctgaagtcttcccacaactctagcaggctctttcttgataaggatattcctaggaccttctaccgctttgagg

SEQ ID NO: 36897 - DNA, 120 bp, Artificial Sequence
  ENSG00000054523_87 (sequence is synthesized)
tcatgattgcttttcaagatagtaggctaaatattagggtctacagtttataaatgaggagacagactcccagaggttaagcagcttaactaaagtcacatagcatcagtacagttaaga

SEQ ID NO: 36898 - DNA, 120 bp, Artificial Sequence
  ENSG00000054523_88 (sequence is synthesized)
tagcaggctggcggccccgtggagacagcctcatccttgagcaccagtgggagctggagaagctggagctcctacatgaggtatccaggggcagggttgttcagatgcaagaactctcgg

SEQ ID NO: 36899 - DNA, 120 bp, Artificial Sequence
  ENSG00000054523_89 (sequence is synthesized)
acaagattgccaaagtatcagtcttcctccccgctgctgcatgtgatcatagcttttcacttttctctcctgaggtcttaacgagctttgtgtttgctatagcagtagtattgatcttct

SEQ ID NO: 36900 - DNA, 120 bp, Artificial Sequence
  ENSG00000054523_90 (sequence is synthesized)
aaaagatactgatttctttattttccttgttctctgaatgtagagataactaataacttacaaagtttatattggtgtttctctgggtcttttgcattgaaatctttcctctgactcttg

SEQ ID NO: 36901 - DNA, 120 bp, Artificial Sequence
  ENSG00000054523_91 (sequence is synthesized)
ctgcctttcccaagtatgtctttaaagactgacattagagaagcttgtatttttgctgagtagtcttggaccagattttgacatactctaaaaacttttaaaagttccagccaccaagtt

SEQ ID NO: 36902 - DNA, 120 bp, Artificial Sequence
  ENSG00000054523_92 (sequence is synthesized)
gacaagaggtcgtgtgaagagagctggaaactgattacttctctgagagaaaagctacctcccagcaagttgcaaaccattgttaaaaaatgtggcctcccaagcagtgggaagaaacgt

SEQ ID NO: 36903 - DNA, 120 bp, Artificial Sequence
  ENSG00000054523_93 (sequence is synthesized)
gaaccaattaaaatgtatcagataccccaaagaaggcgcttgagtaaagattccaagtgggtcacaatctcagatcttaaaattcaggctgtcaaagagatttgctatgaggttgctctc

SEQ ID NO: 36904 - DNA, 120 bp, Artificial Sequence
  ENSG00000054523_94 (sequence is synthesized)
aatgacttcaggcacagtcggcaggagattgaagccctggccattgtcaagatgaaggagctttgtgccatgtatggcaagaaagaccccaatgagcgggactcctggagggcagtggcc

SEQ ID NO: 36905 - DNA, 120 bp, Artificial Sequence
  ENSG00000054523_95 (sequence is synthesized)
agggacgtctgggataccgtcggtgttggggatgagaagatcgaagacgtcatggccactgggaaaggcagcactgatgtagatgacctcaaggttcatatagacaagctggaagatatt

SEQ ID NO: 36906 - DNA, 120 bp, Artificial Sequence
  ENSG00000054523_96 (sequence is synthesized)
ttgcaagaagtcaaaaagcaaaataacatgaaagacgaggagataaaagtcttaagaaataaaatgctcaaaatggaaaaagtcttgccactgatcggatctcaggaacagaaaagccca

SEQ ID NO: 36907 - DNA, 120 bp, Artificial Sequence
  ENSG00000054523_97 (sequence is synthesized)
ggaagccacaaagcaaaggagcctgttggtgctggtgttagtagcacctctgagaataatgtaagtaaaggagacaatggagaacttgcaaaagaagaacgtgtttcccagctgatgaat

SEQ ID NO: 36908 - DNA, 120 bp, Artificial Sequence
  ENSG00000054523_98 (sequence is synthesized)
ggggatccagcttttagacgtggacgtctgcgctggatgaggcaagagcaaattcggtttaagaacttgcaacagcaggagataacaaagcagcttcgtcggcagaatgtacctcatagg

SEQ ID NO: 36909 - DNA, 120 bp, Artificial Sequence
  ENSG00000054523_99 (sequence is synthesized)
ttcatccctcctgagaaccggaagccccgcttcccctttaagagcaaccctaaacacagaaactcttggagtcctgggacacatatcatcataacagaagatgaggttatagagcttagg

SEQ ID NO: 36910 - DNA, 120 bp, Artificial Sequence
  ENSG00000054523_100 (sequence is synthesized)
attccaaaagacgatgaagcaaggaaagggaataaagaagagagccaagaaaaagggggtaaaggagcttttaaggatccccagtttccatggggctctcaaggaatgagaagtcaagat

SEQ ID NO: 36911 - DNA, 120 bp, Artificial Sequence
  ENSG00000054523_101 (sequence is synthesized)
cacatccaagttagcaagcagcacattaataatcagcaacagccacctcaactacgttggagaagcaattctctcaataatggccagccgaaaagtacgcgctgccaggcatctgcctcc

SEQ ID NO: 36912 - DNA, 120 bp, Artificial Sequence
  ENSG00000054523_102 (sequence is synthesized)
gcggagtcattaaactcccacagtggtcaccccactgctgatgtacagactttccaggcaaagcgccatattcatcaacaccgtcagtcttactgtaattataacactggaggtcagtta

SEQ ID NO: 36913 - DNA, 120 bp, Artificial Sequence
  ENSG00000054523_103 (sequence is synthesized)
gagggcaatgcagccacttcctatcagaagcagactgacaaacccagccactgtagccagtttgtgacacctccgcggatgaggagacagttctcagcacccaatctcaaagctggtcga

SEQ ID NO: 36914 - DNA, 120 bp, Artificial Sequence
  ENSG00000054523_104 (sequence is synthesized)
gaaaccacagtataaatcagttactggacaaacttgaaatcatggtggaagaaacagacagtgttagctcatgatttgatttggttctacctttggccttgagttcttattatttacatt

SEQ ID NO: 36915 - DNA, 120 bp, Artificial Sequence
  ENSG00000054523_105 (sequence is synthesized)
tattaactggttttatattgttaagacaaaacactggtaaaagtttcaacacctcccttttgcttgtataccataaatgggcagtttctgaaattttggataaagcatcaagaactcctt

SEQ ID NO: 36916 - DNA, 120 bp, Artificial Sequence
  ENSG00000054523_106 (sequence is synthesized)
tttctgaaacgttcctccttttttagtgcctaattaatatacttacttacacagacttgtcccatcttgatgtaagtttgttatgtttttataatgcctataaattaatctgacatccag

SEQ ID NO: 36917 - DNA, 120 bp, Artificial Sequence
  ENSG00000054523_107 (sequence is synthesized)
aaagacctgcctcttagtttatgcagacattcaaaaggagaatttgataagcagaattaaatgtctgttattcataaatgttagaaattggtttaaaaataataacatgcaactgggtgg

SEQ ID NO: 36918 - DNA, 120 bp, Artificial Sequence
  ENSG00000054523_108 (sequence is synthesized)
gcacagctttggatttctcatccacgtctgttcccttctttaaatatgattagaattttcgtaagccaaaactaaaggtcttcaaacatatcttgcaatacatagctttgcatcttccac

SEQ ID NO: 36919 - DNA, 120 bp, Artificial Sequence
  ENSG00000054523_109 (sequence is synthesized)
acaacttccacgtcttcttttattctgtattttacaaaaaactcatataatggttttttcttttgaatgtatcagaatatgtatgaaatttgtcatatcagaatctataaattggcactg

SEQ ID NO: 36920 - DNA, 120 bp, Artificial Sequence
  ENSG00000054523_110 (sequence is synthesized)
tgtctgggattctgtttgtggtttgcattttgaagttcaatgtatcatttgacacacatgcacacaaagtgaactattcaccaaaatcatgccaacagaaataccaacaaaaaacttgtg

SEQ ID NO: 36921 - DNA, 120 bp, Artificial Sequence
  ENSG00000054523_111 (sequence is synthesized)
tagcttgtaaggaggttatttggcttgagagggaagaggtgggacagacatgggggacaaagctacagcatatggctctgtggtgctgcttttttccaatagttgatgaaatagtgaaat

SEQ ID NO: 36922 - DNA, 120 bp, Artificial Sequence
  ENSG00000054523_112 (sequence is synthesized)
aaaagttaactttggttgggcttggaataaaggagatgatacataataaactattctttggttagcattagtaatgcttgtagacactcaaacaaggaaggcgaagtcctgatgatgatt

SEQ ID NO: 36923 - DNA, 120 bp, Artificial Sequence
  ENSG00000054523_113 (sequence is synthesized)
tattgtatcaatacctcattttatttggttgtggtctcagtttgcctcactggagaatccactaagaaagatggattttaatgggaagaaaagaattattttctacatcgttcctcatct

SEQ ID NO: 36924 - DNA, 120 bp, Artificial Sequence
  ENSG00000054523_114 (sequence is synthesized)
cttgagtttgtcaaaaagttttctaagaggcagtgtgaagagccagagatgtccgaaattgcctgacttcatgttttggaagattcctaagtcacatgaaatcatctatcaaacacttgt

SEQ ID NO: 36925 - DNA, 120 bp, Artificial Sequence
  ENSG00000054523_115 (sequence is synthesized)
cttccaaacggtgtgaaaaactacagccaagatagcagttagcattcaaggaagccttaaagattgtgattatgtttttttttcctttgcgtgtgggcactatgctttattagaacacat

SEQ ID NO: 36926 - DNA, 120 bp, Artificial Sequence
  ENSG00000054523_116 (sequence is synthesized)
tatttttaatcatagtattttttctttgcctctaagaaaatactttcttaatgctcagaaagttgcttccaattaatgtttttttccccttaaaaagagaagctttgagagatatttttg

SEQ ID NO: 36927 - DNA, 120 bp, Artificial Sequence
  ENSG00000054523_117 (sequence is synthesized)
ctttcatagctagaacagttgaagtcttcaactgaggttttatagcagattagacatgggtaaatgatgtctgtaatgggttgagttactgagatgacaatctcctgtgccatttggttt

SEQ ID NO: 36928 - DNA, 120 bp, Artificial Sequence
  ENSG00000054523_118 (sequence is synthesized)
gaatgtacttgataggctgcttcaaatcagtcacttcaatgcattttgtgtaaacccagttgtccttttttattcctctttagacataaatgtgctaactattcctttctatacacaatt

SEQ ID NO: 36929 - DNA, 120 bp, Artificial Sequence
  ENSG00000054523_119 (sequence is synthesized)
tattttctaagattaaaaataataattgctaggtttggtggcacatgcgtacagccccagctacttaggaggctgaagcaggaggatccctagagcccaggagttctgggctgtggtaca

SEQ ID NO: 36930 - DNA, 120 bp, Artificial Sequence
  ENSG00000054523_120 (sequence is synthesized)
ctatgccagttgggtgtaagtttggcatcaatatggtgatgtccctgaagcaggaaaccacaaacttgcatcaggacgggtgaacccagcccaggttggaaatggagcaggccaaaactc

SEQ ID NO: 36931 - DNA, 120 bp, Artificial Sequence
  ENSG00000054523_121 (sequence is synthesized)
aatggagcaggccaaaactcccaggctgatcagtaatgggatcttgcctatgaatagccagtgcactgcagccaggacaacagagtgagaacctgtctttaaaaaaaaaaaaaaaaaaaa

SEQ ID NO: 36932 - DNA, 120 bp, Artificial Sequence
  ENSG00000054523_122 (sequence is synthesized)
atattattcaggtttcaactctgtagcaaaaatgggctctcatttccctaacttgagataacatagggtaggtccatatattttcattcttacagtggtcttttcatgggagtgaatgag

SEQ ID NO: 36933 - DNA, 120 bp, Artificial Sequence
  ENSG00000054523_123 (sequence is synthesized)
ttactctccactggtgattaggtaatactgtagaatgaagagttgtataatatattcatttacagctgtggattgtggtaaggactatgtccacagtgatattccaaagaattgggttta

SEQ ID NO: 36934 - DNA, 120 bp, Artificial Sequence
  ENSG00000054523_124 (sequence is synthesized)
tatttgtgcttcatctgttaatcccaggtgtcctcatgttgctgaaatatttagatagctaaaatatcccttaatttcacagatgaccaggaagaaattaaccaaggttttattgactgc

SEQ ID NO: 36935 - DNA, 120 bp, Artificial Sequence
  ENSG00000054523_125 (sequence is synthesized)
catgtatgtcccatgatgcatttctgagcaaatgcttatcctagagaataactctgtatgaataaaattgcttaattgagtctcttactaaataagtaactagtgccatgcttttgtgag

SEQ ID NO: 36936 - DNA, 120 bp, Artificial Sequence
  ENSG00000054523_126 (sequence is synthesized)
ttactaaataagtaactagtgccatgcttttgtgagctcttggtatggcccatattactttgttttttgtttttgttattgttgttttgtgatagtcttgctctgtcgcccaggctgcag

SEQ ID NO: 36937 - DNA, 65 bp, Artificial Sequence
  ENSG00000054523_127 (sequence is synthesized)
ttgtttttttaacatgatttttctctaagcttaaataccacaaggccaaagagaaatggtcataa

SEQ ID NO: 36938 - DNA, 120 bp, Artificial Sequence
  ENSG00000054523_128 (sequence is synthesized)
taagcttaaataccacaaggccaaagagaaatggtcataatttaaaccattattatattgttgaggtatccctagctattattatagcaaagtgggaaaaaagtgtttattctattgaag

SEQ ID NO: 36939 - DNA, 120 bp, Artificial Sequence
  ENSG00000054523_129 (sequence is synthesized)
ttatgtaatgatccgacattaatgggaatatagaggagtcctaattaattggtataatttcacaaagcggaatggtattccttggagagttaaagacattctctttagtaagtgtaaacc

SEQ ID NO: 36940 - DNA, 120 bp, Artificial Sequence
  ENSG00000054523_130 (sequence is synthesized)
aaagggcattttctttattcctgcttctaattccttctagcccagtgaattatttctcttttcactggtaatgtgatgaatgggaattgtttattacattgaagtgacttgaagtgacct

SEQ ID NO: 36941 - DNA, 120 bp, Artificial Sequence
  ENSG00000054523_131 (sequence is synthesized)
tttgtgctttaggtgcaggttgacactgaaaaaaaaacaaaacactgaatttttcacacctatgtctgcattaaaggctgttttactaccggaagttacatagacttcctgcagtcagct

SEQ ID NO: 36942 - DNA, 120 bp, Artificial Sequence
  ENSG00000054523_132 (sequence is synthesized)
gctgtgccccagtgccttactggtcctttgtagatttgccttaatgatttgtacaaatgactgggaggcggggatgctgcctgtgtcctggtgaaccttaatgaaggggccgtcttaggc

SEQ ID NO: 36943 - DNA, 120 bp, Artificial Sequence
  ENSG00000054523_133 (sequence is synthesized)
acagtgcaaaacaagcatttgtcctgtactgttagagccaaaattgtgatgagcaatactgataattgtccagtttatgtcatctttcccagattttaaaatctgttctagatattctta

SEQ ID NO: 36944 - DNA, 120 bp, Artificial Sequence
  ENSG00000054523_134 (sequence is synthesized)
gcttgaaccacttttgattgtgaaatgtattaggtgttgtcccattattactgtaaaatgaagttttgaatcttcttgttaataaactgtggatttcccctctcaatttcttaaacaaca

SEQ ID NO: 36945 - DNA, 120 bp, Artificial Sequence
  ENSG00000054523_135 (sequence is synthesized)
acaaaaaaatgcttgaagattgtctttgagtgtaagatctgccttttcagaaagggagtgttagtttgtaatgttaaaaaataaagacctcattcaataaaagttgaagtcatcttttaa

SEQ ID NO: 36946 - DNA, 120 bp, Artificial Sequence
  ENSG00000054523_136 (sequence is synthesized)
ggattcttttcacacagtagtgttggctttgttctgttgggagggaaactattcctctaaaaaatgttcacatttttcctattacttcattcagtagtgaaatgtaatgatttgactctg

SEQ ID NO: 36947 - DNA, 120 bp, Artificial Sequence
  ENSG00000054523_137 (sequence is synthesized)
aagcctaccttcagataagattcacctttgaatggccccctcctcctgtaaaatgctggagtgccccgtgctgcctatgaacatatgaaggggaaaagttcaattcctatgaagttcaag

SEQ ID NO: 36948 - DNA, 120 bp, Artificial Sequence
  ENSG00000054523_138 (sequence is synthesized)
aactacacttccagagagtattgttttacaatgttgtattaaaatttatcttaaaaaatctccgtgatgtgcctatccagtggcttattcagaagttctcttaagtgagtaaaatggatt

SEQ ID NO: 36949 - DNA, 120 bp, Artificial Sequence
  ENSG00000054523_139 (sequence is synthesized)
agcatttttttttagtgtaaagttaaacttatattccttgaagttctaataagattttcaaggcctcttctagtttaattcttcttattgattagagtccgagtttagatgaataccgtt

SEQ ID NO: 36950 - DNA, 120 bp, Artificial Sequence
  ENSG00000054523_140 (sequence is synthesized)
tgtaaaaatgataccgtattctaagtattaacttttccatctccccaaatgccaaaaactgctctgttccctctctgtgtcactgctgaacctgaactttgacccttctcgtattttccc

SEQ ID NO: 36951 - DNA, 120 bp, Artificial Sequence
  ENSG00000054523_141 (sequence is synthesized)
tcctgcttaccttcagttgatccattgatcgatgattactctggaagtggaagcaaatatctgaaagattttcagaacaataagcatagatacttgctagcctctgagaatcaacgccct

SEQ ID NO: 36952 - DNA, 120 bp, Artificial Sequence
  ENSG00000054523_142 (sequence is synthesized)
cccccttattatcttgatacttgccttaatttcagatatttctgatttcatcttagagcatggtcttatagtacaaaggcagcctatttctaaaatgcctatcttgtttactgtttacaa

SEQ ID NO: 36953 - DNA, 120 bp, Artificial Sequence
  ENSG00000054598_0 (sequence is synthesized)
gctcaaaagttcagaagttttcccaatgcttccttaagcggctggcgcgcgagagaccgagaaaaggtgacgcggggcccgggcaggcggccggcgcgcggccccccccccccccgccct

SEQ ID NO: 36954 - DNA, 120 bp, Artificial Sequence
  ENSG00000054598_1 (sequence is synthesized)
ggttatttggccgccttcgccggcagctcagggcagagtctcctggaaggcgcaggcagtgtggcgagaagggcgcctgcttgttctttctttttgtctgctttcccccgtttgcgcctg

SEQ ID NO: 36955 - DNA, 120 bp, Artificial Sequence
  ENSG00000054598_2 (sequence is synthesized)
tttgtctgctttcccccgtttgcgcctggaagctgcgccgcgagttcctgcaaggcggtctgccgcggccgggcccggccttctcccctcgcagcgaccccgcctcgcggccgcgcgggc

SEQ ID NO: 36956 - DNA, 80 bp, Artificial Sequence
  ENSG00000054598_3 (sequence is synthesized)
ggagccagccccagcgagcgccgggagaggcggcagcgcagccggacgcacagcgcagcgggccggcaccagctcggccg

SEQ ID NO: 36957 - DNA, 120 bp, Artificial Sequence
  ENSG00000054598_4 (sequence is synthesized)
gtggggggcggcgggcggcgcggggcggcggcgagcgggggccatgcaggcgcgctactccgtgtccagccccaactccctgggagtggtgccctacctcggcggcgagcagagctacta

SEQ ID NO: 36958 - DNA, 120 bp, Artificial Sequence
  ENSG00000054598_5 (sequence is synthesized)
gcagagctactaccgcgcggcggccgcggcggccgggggcggctacaccgccatgccggcccccatgagcgtgtactcgcaccctgcgcacgccgagcagtacccgggcggcatggcccg

SEQ ID NO: 36959 - DNA, 120 bp, Artificial Sequence
  ENSG00000054598_6 (sequence is synthesized)
tacgggccctacacgccgcagccgcagcccaaggacatggtgaagccgccctatagctacatcgcgctcatcaccatggccatccagaacgccccggacaagaagatcaccctgaacggc

SEQ ID NO: 36960 - DNA, 120 bp, Artificial Sequence
  ENSG00000054598_7 (sequence is synthesized)
atctaccagttcatcatggaccgcttccccttctaccgggacaacaagcagggctggcagaacagcatccgccacaacctctcgctcaacgagtgcttcgtcaaggtgccgcgcgacgac

SEQ ID NO: 36961 - DNA, 120 bp, Artificial Sequence
  ENSG00000054598_8 (sequence is synthesized)
aagaagccgggcaagggcagctactggacgctggacccggactcctacaacatgttcgagaacggcagcttcctgcggcggcggcggcgcttcaagaagaaggacgcggtgaaggacaag

SEQ ID NO: 36962 - DNA, 120 bp, Artificial Sequence
  ENSG00000054598_9 (sequence is synthesized)
aagaaggacgcggtgaaggacaaggaggagaaggacaggctgcacctcaaggagccgcccccgcccggccgccagcccccgcccgcgccgccggagcaggccgacggcaacgcgcccggt

SEQ ID NO: 36963 - DNA, 120 bp, Artificial Sequence
  ENSG00000054598_10 (sequence is synthesized)
caggacatcaagaccgagaacggtacgtgcccctcgccgccccagcccctgtccccggccgccgccctgggcagcggcagcgccgccgcggtgcccaagatcgagagccccgacagcagc

SEQ ID NO: 36964 - DNA, 120 bp, Artificial Sequence
  ENSG00000054598_11 (sequence is synthesized)
aagatcgagagccccgacagcagcagcagcagcctgtccagcgggagcagccccccgggcagcctgccgtcggcgcggccgctcagcctggacggtgcggattccgcgccgccgccgccc

SEQ ID NO: 36965 - DNA, 120 bp, Artificial Sequence
  ENSG00000054598_12 (sequence is synthesized)
catagccagggcttcagcgtggacaacatcatgacgtcgctgcgggggtcgccgcagagcgcggccgcggagctcagctccggccttctggcctcggcggccgcgtcctcgcgcgcgggg

SEQ ID NO: 36966 - DNA, 120 bp, Artificial Sequence
  ENSG00000054598_13 (sequence is synthesized)
gtcctcgcgcgcggggatcgcacccccgctggcgctcggcgcctactcgcccggccagagctccctctacagctccccctgcagccagacctccagcgcgggcagctcgggcggcggcgg

SEQ ID NO: 36967 - DNA, 120 bp, Artificial Sequence
  ENSG00000054598_14 (sequence is synthesized)
acctaccactgcaacctgcaagccatgagcctgtacgcggccggcgagcgcgggggccacttgcagggcgcgcccgggggcgcgggcggctcggccgtggacgaccccctgcccgactac

SEQ ID NO: 36968 - DNA, 120 bp, Artificial Sequence
  ENSG00000054598_15 (sequence is synthesized)
gtggacgaccccctgcccgactactctctgcctccggtcaccagcagcagctcgtcgtccctgagtcacggcggcggcggcggcggcggcgggggaggccaggaggccggccaccaccct

SEQ ID NO: 36969 - DNA, 120 bp, Artificial Sequence
  ENSG00000054598_16 (sequence is synthesized)
ctcgtggtacctgaaccaggcgggcggagacctgggccacttggcgagcgcggcggcggcggcggcggccgcaggctacccgggccagcagcagaacttccactcggtgcgggagatgtt

SEQ ID NO: 36970 - DNA, 120 bp, Artificial Sequence
  ENSG00000054598_17 (sequence is synthesized)
cgagtcacagaggatcggcttgaacaactctccagtgaacgggaatagtagctgtcaaatggccttcccttccagccagtctctgtaccgcacgtccggagctttcgtctacgactgtag

SEQ ID NO: 36971 - DNA, 120 bp, Artificial Sequence
  ENSG00000054598_18 (sequence is synthesized)
caagttttgacacaccctcaaagccgaactaaatcgaaccccaaagcaggaaaagctaaaggaacccatcaaggcaaaatcgaaactaaaaaaaaaaaatccaattaaaaaaaacccctg

SEQ ID NO: 36972 - DNA, 120 bp, Artificial Sequence
  ENSG00000054598_19 (sequence is synthesized)
agaatattcaccacaccagcgaacagaatatccctccaaaaattcagctcaccagcaccagcacgaagaaaactctattttcttaaccgattaattcagagccacctccactttgccttg

SEQ ID NO: 36973 - DNA, 120 bp, Artificial Sequence
  ENSG00000054598_20 (sequence is synthesized)
tctaaataaacaaacccgtaaactgttttatacagagacagcaaaatcttggtttattaaaggacagtgttactccagataacacgtaagtttcttcttgcttttcagagacctgctttc

SEQ ID NO: 36974 - DNA, 120 bp, Artificial Sequence
  ENSG00000054598_21 (sequence is synthesized)
ccctcctcccgtctcccctctcttgccttcttccttgcctctcacctgtaagatattattttatcctatgttgaagggagggggaaagtccccgtttatgaaagtcgctttctttttatt

SEQ ID NO: 36975 - DNA, 120 bp, Artificial Sequence
  ENSG00000054598_22 (sequence is synthesized)
catggacttgttttaaaatgtaaattgcaacatagtaatttatttttaatttgtagttggatgtcgtggaccaaacgccagaaagtgttcccaaaacctgacgttaaattgcctgaaact

SEQ ID NO: 36976 - DNA, 120 bp, Artificial Sequence
  ENSG00000054598_23 (sequence is synthesized)
ttaaattgtgctttttttctcattataaaaagggaaactgtattaatcttattctatcctcttttctttctttttgttgaacatattcattgtttgtttattaataaattaccattcagt

SEQ ID NO: 36977 - DNA, 120 bp, Artificial Sequence
  ENSG00000054598_24 (sequence is synthesized)
ttgaatgagacctatatgtctggatactttaatagagctttaattattacgaaaaaagatttcagagataaaacactagaagttacctattctccacctaaatctctgaaaaatggagaa

SEQ ID NO: 36978 - DNA, 120 bp, Artificial Sequence
  ENSG00000054598_25 (sequence is synthesized)
accctctgactagtccatgtcaaattttactaaaagtctttttgtttagatttattttcctgcagcatcttctgcaaaatgtactatatagtcagcttgctttgaggctagtaaaaagat

SEQ ID NO: 36979 - DNA, 120 bp, Artificial Sequence
  ENSG00000054598_26 (sequence is synthesized)
atttttctaaacagattggagttggcatataaacaaatacgttttctcactaatgacagtccatgattcggaaattttaagcccatgaatcagccgcggtcttaccacggtgatgcctgt

SEQ ID NO: 36980 - DNA, 120 bp, Artificial Sequence
  ENSG00000054598_27 (sequence is synthesized)
gtgccgagagatgggactgtgcggccagatatgcacagataaatatttggcttgtgtattccatataaaattgcagtgcatattatacatccctgtgagccagatgctgaatagatattt

SEQ ID NO: 36981 - DNA, 120 bp, Artificial Sequence
  ENSG00000054598_28 (sequence is synthesized)
tcctattatttcagtcctttataaaaggaaaaataaaccagtttttaaatgtatgtatataattctcccccatttacaatccttcatgtattacatagaaggattgcttttttaaaaata

SEQ ID NO: 36982 - DNA, 120 bp, Artificial Sequence
  ENSG00000054598_29 (sequence is synthesized)
tactgcgggttggaaagggatatttaatctttgagaaactattttagaaaatatgtttgtagaacaattatttttgaaaaagatttaaagcaataacaagaaggaaggcgagaggagcag

SEQ ID NO: 36983 - DNA, 120 bp, Artificial Sequence
  ENSG00000054598_30 (sequence is synthesized)
aacattttggtctagggtggtttctttttaaaccattttttcttgttaatttacagttaaacctaggggacaatccggattggccctcccccttttgtaaataacccaggaaatgtaata

SEQ ID NO: 36984 - DNA, 120 bp, Artificial Sequence
  ENSG00000054598_31 (sequence is synthesized)
aattcattatcttagggtgatctgccctgccaatcagactttggggagatggcgatttgattacagacgttcgggggggtggggggcttgcagtttgttttggagataatacagtttcct

SEQ ID NO: 36985 - DNA, 120 bp, Artificial Sequence
  ENSG00000054598_32 (sequence is synthesized)
gctatctgccgctcctatctagaggcaacacttaagcagtaattgctgttgcttgttgtcaaaatttgatcattgttaaaggattgctgcaaataaatacactttaatttcagtcaaaaa

SEQ ID NO: 36986 - DNA, 120 bp, Artificial Sequence
  ENSG00000054611_0 (sequence is synthesized)
ggaagagcttctcggctctaggctctggagtcccgggagcagtgaggggccacccggggcacaggaaagggccgctaggggagggccgggtgcactcggggtgtctgggccgcgggtctg

SEQ ID NO: 36987 - DNA, 120 bp, Artificial Sequence
  ENSG00000054611_1 (sequence is synthesized)
agggatgaggaggggccatggccagcgacggggccaggaagcaattctggaagcgcagcaacagcaagctcccgggcagcatccagcacgtgtatggtgcccagcaccccccctttgatc

SEQ ID NO: 36988 - DNA, 120 bp, Artificial Sequence
  ENSG00000054611_2 (sequence is synthesized)
cactgttacatggcactttgctcaggtccacggccaagatgccgaccacaccagtgaaggccaagagggtcagcaccttccaggagtttgagagcaataccagcgatgcctgggacgctg

SEQ ID NO: 36989 - DNA, 120 bp, Artificial Sequence
  ENSG00000054611_3 (sequence is synthesized)
gggaggacgacgatgagctcctggccatggcggcggagagcctgaactccgaggtggtcatggagacggccaaccgtgtgctgcgtaaccacagccagcggcaggggcggcccacgctgc

SEQ ID NO: 36990 - DNA, 120 bp, Artificial Sequence
  ENSG00000054611_4 (sequence is synthesized)
aggaggggccagggcttcagcagaagcccaggcccgaggcagagccgccctcaccccccagcggcgacctccggctggtgaagtcggtcagtgagagccacacgtcctgtcctgcagaaa

SEQ ID NO: 36991 - DNA, 120 bp, Artificial Sequence
  ENSG00000054611_5 (sequence is synthesized)
gtgccagcgatgccgcccctctgcagaggtcccagtctctcccacactcggccaccgtcacgctgggtggcacatctgaccccagcactctcagcagctcagcgctgagcgaaagagagg

SEQ ID NO: 36992 - DNA, 120 bp, Artificial Sequence
  ENSG00000054611_6 (sequence is synthesized)
cctcccggctcgacaagttcaagcagctgcttgccggccccaacacggaccttgaggaattacggaggttgagctggtccggaatccctaagccagtgcgtccaatgacgtggaagctcc

SEQ ID NO: 36993 - DNA, 120 bp, Artificial Sequence
  ENSG00000054611_7 (sequence is synthesized)
tctcaggttaccttcccgccaatgtagaccggagaccagccactctccagagaaaacaaaaagaatattttgcatttattgagcactattacgattctaggaacgacgaagttcaccagg

SEQ ID NO: 36994 - DNA, 120 bp, Artificial Sequence
  ENSG00000054611_8 (sequence is synthesized)
acacatacaggcagatccacatagacatccctcgcatgagccctgaagcgttgatcctgcagcccaaggtgacggagatttttgaaaggatcttgttcatatgggcgatccgccacccag

SEQ ID NO: 36995 - DNA, 120 bp, Artificial Sequence
  ENSG00000054611_9 (sequence is synthesized)
ccagtggatacgttcagggtataaatgatctcgtcactcctttctttgtggtcttcatttgtgaatacatagaggcagaggaggtggacacggtggacgtctccggcgtgcccgcagagg

SEQ ID NO: 36996 - DNA, 120 bp, Artificial Sequence
  ENSG00000054611_10 (sequence is synthesized)
tgctgtgcaacatcgaggccgacacctactggtgcatgagcaagctgctggatggcattcaggacaactacacctttgcccaacctgggattcaaatgaaagtgaaaatgttagaagaac

SEQ ID NO: 36997 - DNA, 120 bp, Artificial Sequence
  ENSG00000054611_11 (sequence is synthesized)
tcgtgagccggattgatgagcaagtgcaccggcacctggaccaacacgaagtgagatacctgcagtttgccttccgctggatgaacaacctgctgatgagggaggtgcccctgcgttgta

SEQ ID NO: 36998 - DNA, 120 bp, Artificial Sequence
  ENSG00000054611_12 (sequence is synthesized)
ccatccgcctgtgggacacctaccagtctgaaccggacggcttttctcatttccacttgtacgtgtgcgctgcttttctcgtgagatggaggaaggaaatactagaagaaaaagattttc

SEQ ID NO: 36999 - DNA, 120 bp, Artificial Sequence
  ENSG00000054611_13 (sequence is synthesized)
aagagctgctgctcttcctccagaacctgcccacagcccactgggatgatgaggacatcagcctgttgctggccgaggcctaccgcctcaagtttgcttttgccgacgcccccaatcact

SEQ ID NO: 37000 - DNA, 120 bp, Artificial Sequence
  ENSG00000054611_14 (sequence is synthesized)
acaagaaatgagcccaggcccacccgcagctggcctcactgtcccgggtggcgcgccccacctgcctggctggtggtaggcccctgtgagctggtcccgggctgctaaaaggccttgtga

SEQ ID NO: 37001 - DNA, 120 bp, Artificial Sequence
  ENSG00000054611_15 (sequence is synthesized)
cacagacctggtctagggctgacaaagacagggacagcctttgttttctgagataccaaagagagccaggggagggccccgggttcggcggccagaggcaggtcaggggtcccctctccc

SEQ ID NO: 37002 - DNA, 120 bp, Artificial Sequence
  ENSG00000054611_16 (sequence is synthesized)
tctccctgcaatgtccttgccaaatgactgcctcgtgctgcccctagtccggggcagcctaggaggccgaccctctttggagtcctgctgtctgggtgccagggccggaacgaggtagtg

SEQ ID NO: 37003 - DNA, 120 bp, Artificial Sequence
  ENSG00000054611_17 (sequence is synthesized)
gccatctcatacctactctgaaatgcaaaacttctattctgttgagtgaaagaataaaatgtagacaaaatctagaccgagacgttgcgctgacccggggtctctgtgccgcgaggtccc

SEQ ID NO: 37004 - DNA, 120 bp, Artificial Sequence
  ENSG00000054611_18 (sequence is synthesized)
ctcacagctgtatttcactgctgctggccctttccctccgtgtgttttcctgcttgcttggtttaaacgtggctgggaagctgaaggctggagtccaagccgtgagcccgccgagtgcct

SEQ ID NO: 37005 - DNA, 120 bp, Artificial Sequence
  ENSG00000054611_19 (sequence is synthesized)
gggaggccgtgggaccaaaggctgggagcagagggaggcctcgccatcgccttactttccaccttgaacctcttttacaagagagaaacccccacctccctgaggtccagggccaagtgg

SEQ ID NO: 37006 - DNA, 120 bp, Artificial Sequence
  ENSG00000054611_20 (sequence is synthesized)
ccccgccacgcaggtaggcgccggcctcagccagagcccctggaggcccacccaggctgtcgggccatgttgggctggcagacgggcagggggtcgcgtccctgtcatcaaagccctgaa

SEQ ID NO: 37007 - DNA, 120 bp, Artificial Sequence
  ENSG00000054611_21 (sequence is synthesized)
ccacagtgctcttctcaccgcagcctggaagcggaatgagcttttggagacttcctgggacttgctgtccttgtccaggtctgccaggtgtaggggaggtgtgactggttccatcatgga

SEQ ID NO: 37008 - DNA, 120 bp, Artificial Sequence
  ENSG00000054611_22 (sequence is synthesized)
ccggttcctccatggaccggttcctccgtggaccggttccgccatggaccggttccgccatggaccactcctgccctggaccactcctgccctggaccggttctgccgtggactggttcc

SEQ ID NO: 37009 - DNA, 120 bp, Artificial Sequence
  ENSG00000054611_23 (sequence is synthesized)
cgccgtggaccagttcccgctgtatactggttctgccctggactggttcccgctgtggactggttccttggggctctaagtgcggaagggcccagagctggtccctgcccagcgccctgc

SEQ ID NO: 37010 - DNA, 120 bp, Artificial Sequence
  ENSG00000054611_24 (sequence is synthesized)
tagggctgtgtccttggctccaggggccttgggactggcttcccagcgttccctcggtgtgtcacaggctgcatgacccctggaatgcgggcagggccacagccacagtctgtctgatcc

SEQ ID NO: 37011 - DNA, 120 bp, Artificial Sequence
  ENSG00000054611_25 (sequence is synthesized)
ctgagcccaggacaggctcacgtcctcagcgacccactggtgactgacttcccagactctcctctgtccctcaggagcagccgtgtcctctcccaggccctaggacactgccagagactg

SEQ ID NO: 37012 - DNA, 120 bp, Artificial Sequence
  ENSG00000054611_26 (sequence is synthesized)
tgggacatacaggcataagtgatgtgtgtgtttctgcttctgttttaaaaatccagggtcattacacacagcatggaaattagcacaaaatgctgtgcaaacgtcagatgctcccaaacc

SEQ ID NO: 37013 - DNA, 120 bp, Artificial Sequence
  ENSG00000054611_27 (sequence is synthesized)
agcaaagggatgggcttgcttcacatcagatgcgggcacgccttacccctgccttccgtgtccccaccccagggtcaagggttcctcagaccagccatgcctcctcctcctgccgcctcc

SEQ ID NO: 37014 - DNA, 120 bp, Artificial Sequence
  ENSG00000054611_28 (sequence is synthesized)
ttttctagatggggaggggattccgtcacaagaagagccgcccctcggccgtgtgcaggaagccccatgtcgctttgccgagatcagccctgggaggatccccttctccagctcagatca

SEQ ID NO: 37015 - DNA, 120 bp, Artificial Sequence
  ENSG00000054611_29 (sequence is synthesized)
tgccgtgtggccagaaggctgcggacacaactgacctgcttctcgaggtggttgatgttttaaacaggaagctccacggagttcagccctgtgtgcatttcctcatgtatgtaaacgcca

SEQ ID NO: 37016 - DNA, 120 bp, Artificial Sequence
  ENSG00000054611_30 (sequence is synthesized)
agactgaatgtgagaggtgttggccgcgggccttaagtctgagcagatccatctggaatgttcggggtgtgctgtctggatgtggtgcgctaaaaacacggaataaagatcagtgacaaa

SEQ ID NO: 37017 - DNA, 75 bp, Artificial Sequence
  ENSG00000054611_31 (sequence is synthesized)
aatattattgtttgagtgtttgaatgataaactttggaatttactgcatccagttagaaaagtttacttttggcc

SEQ ID NO: 37018 - DNA, 78 bp, Artificial Sequence
  ENSG00000054611_32 (sequence is synthesized)
aggtggaggttgcagtgagccgagatcgttccattgcactccagaaagtttacttttaagagtgatctgggggttagc

SEQ ID NO: 37019 - DNA, 120 bp, Artificial Sequence
  ENSG00000054611_33 (sequence is synthesized)
aaaaggaaagtttacttttaagagtgatctgggggttagcagcgtgagttactgacagctcagacagtggctttgagaatgaagggagtcatcaaaggtggccggagaccctattcgact

SEQ ID NO: 37020 - DNA, 120 bp, Artificial Sequence
  ENSG00000054611_34 (sequence is synthesized)
ccacaggaccgtgcttgattcgagaacagtaagacctttcaacaaaaccagtgtcagggtccaagattggaggcgttgggagtcggggcaagggcagaagcagggagaccaggaggccag

SEQ ID NO: 37021 - DNA, 120 bp, Artificial Sequence
  ENSG00000054611_35 (sequence is synthesized)
ggagagatgagccttacccgaggacagatgaacagattatcctcagaagatgaggacatatccaagacaactacacctttgcccaacctgggattcaaatgaaagtgaaaatgttagaag

SEQ ID NO: 37022 - DNA, 120 bp, Artificial Sequence
  ENSG00000054611_36 (sequence is synthesized)
agaagtctgtgcccttacccatcacagcctcatccttatctcctccattccctaggggacttaacaggtgttgaaattattacagagaaagctgactcactcaccaggaatctgatcctg

SEQ ID NO: 37023 - DNA, 120 bp, Artificial Sequence
  ENSG00000054611_37 (sequence is synthesized)
ctgtgggctggcttgggtggaggtgttcctcccgcccccgcacccatcctcctgtttgaactcaggctgctgcctgctgggcctgcctgcccttggagccctgctgagctcagcctgagg

SEQ ID NO: 37024 - DNA, 65 bp, Artificial Sequence
  ENSG00000054611_38 (sequence is synthesized)
tttgcctgtggtctcttgagggctgcggctcttgccttgagcatagaagaggactagagtttccc

SEQ ID NO: 37025 - DNA, 120 bp, Artificial Sequence
  ENSG00000054611_39 (sequence is synthesized)
ccgcccgcctcggcctcccgataagactgggtttctgtgctcctgtgacatgctcttgtaggaatcatcatagaacagtcaaaatgccagttgaagttttgcttttcatccagcacgtgt

SEQ ID NO: 37026 - DNA, 120 bp, Artificial Sequence
  ENSG00000054611_40 (sequence is synthesized)
aggagactggtttctcattcagccacactgatcaagcagtcgctttgtgtgagatactgtgcaccccgtgctgcgcatcccggtgaagacggcggatgtgggagccacagcctgatgtgg

SEQ ID NO: 37027 - DNA, 120 bp, Artificial Sequence
  ENSG00000054654_0 (sequence is synthesized)
gccaaggagcggagcgcgctcagctgcgcccagagccttcggccggacctgaaaaagcgagagggagagcgagcaaaaggcgcgatccagagagccaggcaagcggggcgccgacctcgg

SEQ ID NO: 37028 - DNA, 120 bp, Artificial Sequence
  ENSG00000054654_1 (sequence is synthesized)
gcggccccggcccgcgcccttgcccctcggccgggcggacgttcacttcttcaactgagatggacatgatataatctccattgagtcaaagaatggcatctagtcctgagcttcccaccg

SEQ ID NO: 37029 - DNA, 120 bp, Artificial Sequence
  ENSG00000054654_2 (sequence is synthesized)
aagatgaacagggttcctggggcatcgacgatctccatatttcattgcaagctgaacaggaagacacccagaagaaagccttcacgtgctggataaactcacagttggccaggcacactt

SEQ ID NO: 37030 - DNA, 120 bp, Artificial Sequence
  ENSG00000054654_3 (sequence is synthesized)
ctccctcagttatatccgacctattcacagacattaaaaaggggcatgtcctcctggatctgctagaagtactttctgggcaacagttgcctcgggataaaggatctaataccttccagt

SEQ ID NO: 37031 - DNA, 120 bp, Artificial Sequence
  ENSG00000054654_4 (sequence is synthesized)
gtagaatcaatatagaacatgccttgacattcctaagaaaccgatcaattaagctaataaatattcatgttactgatatcattgatggaaacccatccattatccttggcctaatttgga

SEQ ID NO: 37032 - DNA, 120 bp, Artificial Sequence
  ENSG00000054654_5 (sequence is synthesized)
caattatcctgcactttcatattgagaagcttgcccagactctttcttgcaattacaatcagccttccctggatgatgtgagtgtggttgactcatctcctgcctcaagtcctccagcta

SEQ ID NO: 37033 - DNA, 120 bp, Artificial Sequence
  ENSG00000054654_6 (sequence is synthesized)
agaaatgctctaaagtgcaagcaagatggcaaatgtctgcaagaaaggcccttcttttgtgggctcaggaacaatgcgccacctatgagtctgtcaatgtgaccgattttaagtcaagtt

SEQ ID NO: 37034 - DNA, 120 bp, Artificial Sequence
  ENSG00000054654_7 (sequence is synthesized)
ggagaaatgggatggcttttttggccatcattcatgccttgcgaccagacctaattgacatgaagagtgtgaagcatagatccaacaaagacaatctgagagaggccttcagaattgcag

SEQ ID NO: 37035 - DNA, 120 bp, Artificial Sequence
  ENSG00000054654_8 (sequence is synthesized)
aacaagaattaaaaatccccagattgctggaaccagaagatgtggatgttgttgatcctgatgaaaagtccatcatgacctatgtggcacagtttctgcagtattccaaagatgcccctg

SEQ ID NO: 37036 - DNA, 120 bp, Artificial Sequence
  ENSG00000054654_9 (sequence is synthesized)
ggactggagaggaggctcagggaaaggtgaaagatgctatgggctggttaactctgcaaaaggaaaaactacagaagttgctaaaggattcagagaatgatacctactttaaaaagtata

SEQ ID NO: 37037 - DNA, 120 bp, Artificial Sequence
  ENSG00000054654_10 (sequence is synthesized)
atagcctgctgtcctttatggagtcattcaatgaagaaaaaaagtcctttttggatgtcctgtcaataaaacgggatctggatgagctggacaaggatcatttacagttgagagaagcct

SEQ ID NO: 37038 - DNA, 120 bp, Artificial Sequence
  ENSG00000054654_11 (sequence is synthesized)
gggatggcctcgatcaccagattaatgcatggaaaataaagctaaattatgccttgcccccacccctccatcaaactgaagcttggctccaggaggtagaagagcttatggatgaagatt

SEQ ID NO: 37039 - DNA, 120 bp, Artificial Sequence
  ENSG00000054654_12 (sequence is synthesized)
tgtcagcctcccaggatcactctcaagccgtgactctgatacaagagaaaatgactttattcaagagcctgatggatagatttgagcatcattcgaacattctccttacctttgaaaata

SEQ ID NO: 37040 - DNA, 120 bp, Artificial Sequence
  ENSG00000054654_13 (sequence is synthesized)
aggatgaaaatcacttgccattggtaccacctaacaaattggaggaaatgaaaagacgaatcaacaacattttggagaaaaaatttattctacttctagaatttcattactacaagtgct

SEQ ID NO: 37041 - DNA, 120 bp, Artificial Sequence
  ENSG00000054654_14 (sequence is synthesized)
tagttcttggtttggtagatgaagtgaaatcaaaattggatatttggaacattaaatatgggagcagagaatctgtggaattattgctggaagactggcataaatttattgaagaaaaag

SEQ ID NO: 37042 - DNA, 120 bp, Artificial Sequence
  ENSG00000054654_15 (sequence is synthesized)
aattcctagctcgacttgatacttcttttcaaaaatgtggagaaatttataagaatttggctggagaatgtcagaatattaataaacagtatatgatggtgaaatctgatgtttgtatgt

SEQ ID NO: 37043 - DNA, 120 bp, Artificial Sequence
  ENSG00000054654_16 (sequence is synthesized)
atagaaaaaatatatataatgtgaagtccactctacaaaaagtgctggcatgttgggctacttatgtggaaaaccttcgcttactaagggcttgctttgaggagacaaagaaggaagaaa

SEQ ID NO: 37044 - DNA, 120 bp, Artificial Sequence
  ENSG00000054654_17 (sequence is synthesized)
ttaaagaggtaccctttgagacactagcccagtggaatctagaacacgctactttaaatgaagcaggaaatttcttagtcgaagtcagcaatgatgtggttggatcatctatttctaaag

SEQ ID NO: 37045 - DNA, 120 bp, Artificial Sequence
  ENSG00000054654_18 (sequence is synthesized)
aactgagaaggctgaataaaagatggagaaagttggtttcaaaaactcaacttgaaatgaacctgccactgatgataaaaaaacaggatcagcccacttttgacaattctggaaatattc

SEQ ID NO: 37046 - DNA, 120 bp, Artificial Sequence
  ENSG00000054654_19 (sequence is synthesized)
tatctaaagaagagaaagcaactgttgagttttcaacagatatgtcagtagaacttcctgaaaattataatcaaaatataaaggctggagagaaacatgaaaaagaaaatgaagaattca

SEQ ID NO: 37047 - DNA, 120 bp, Artificial Sequence
  ENSG00000054654_20 (sequence is synthesized)
cagggcaactaaaagtggctaaagatgttgaaaaactcattggacaagtggaaatctgggaggcagaagccaaatctgttttggatcaagatgatgtggacacctcaatggaagaatctt

SEQ ID NO: 37048 - DNA, 120 bp, Artificial Sequence
  ENSG00000054654_21 (sequence is synthesized)
tgaagcatcttattgccaaaggctctatgtttgatgagcttatggcaagaagtgaagatatgttacaaatggatatacaaaatatttcaagccaggagtcctttcaacatgttctcacaa

SEQ ID NO: 37049 - DNA, 120 bp, Artificial Sequence
  ENSG00000054654_22 (sequence is synthesized)
ctgggcttcaggcaaagattcaagaagctaaagagaaagtccagatcaatgtggtaaaactcattgcagcgttgaagaacttaactgacgtttcaccagatttggacatcaggctgaaga

SEQ ID NO: 37050 - DNA, 120 bp, Artificial Sequence
  ENSG00000054654_23 (sequence is synthesized)
tggaagaatcccagaaggaacttgaatcatatatgatgagggctcagcagttactggggcaaagagagagccccggtgaactcatttcaaaacacaaggaagcactaataatttctaata

SEQ ID NO: 37051 - DNA, 120 bp, Artificial Sequence
  ENSG00000054654_24 (sequence is synthesized)
caaaaagtctggccaagtatttgaaagctgttgaagaactaaaaaataatgtaactgaggacataaagatgtctttagaagaaaagagtagagatgtctgtgccaaatgggagtctcttc

SEQ ID NO: 37052 - DNA, 120 bp, Artificial Sequence
  ENSG00000054654_25 (sequence is synthesized)
atcatgaactgtctttatatgttcaacaactaaaaatagatattgaaaaaggaaagcttagtgacaatattttaaaacttgaaaagcaaataaataaagaaaagaaacttatccgtagag

SEQ ID NO: 37053 - DNA, 120 bp, Artificial Sequence
  ENSG00000054654_26 (sequence is synthesized)
gaaggaccaagggtctcatcaaagaacatgaggcctgcttttctgaggaaggctgcctgtaccagcttaatcaccacatggaagtcctgagggagctgtgtgaagagctgccttcacaga

SEQ ID NO: 37054 - DNA, 120 bp, Artificial Sequence
  ENSG00000054654_27 (sequence is synthesized)
agagtcaacaagaagtgaagagactactcaaagattatgaacaaaagatagaaagacttctgaaatgtgcttccgagattcatatgacactgcagcccacagcgggaggcacgtcgaaaa

SEQ ID NO: 37055 - DNA, 120 bp, Artificial Sequence
  ENSG00000054654_28 (sequence is synthesized)
acgaggggaccatcaccacatctgagaatagaggaggggatccccacagtgaggcaccatttgcaaaatcagataatcagccatcaactgaaaaggcaatggaacccactatgaagttta

SEQ ID NO: 37056 - DNA, 120 bp, Artificial Sequence
  ENSG00000054654_29 (sequence is synthesized)
gcctggcatcagtgttaaggcctctgcaagaagaaagcattatggaaaaggattacagtgcatctataaatagtttactagagaggtatgatacatacagagatattcttgaacaccacc

SEQ ID NO: 37057 - DNA, 120 bp, Artificial Sequence
  ENSG00000054654_30 (sequence is synthesized)
tgcaaaacaacaaattcaggattacttctgatttctctagtgaagaggacaggagtagttcttgtctgcaggctaaactgacagatctacaggtcataaaaaatgaaactgatgctcgct

SEQ ID NO: 37058 - DNA, 120 bp, Artificial Sequence
  ENSG00000054654_31 (sequence is synthesized)
ggaaagagtttgaaattatttcattgaagttagaaaatcatgtgaatgacataaaaaagccttttgtaattaaggaaagagacacactaaaggaaagagaaagagagcttcagatgactc

SEQ ID NO: 37059 - DNA, 120 bp, Artificial Sequence
  ENSG00000054654_32 (sequence is synthesized)
ttaataccagaatggaatctttagagacagcactgcggcttgtgttacctgtagagaaggcatcacttcttctctgtggctcggacctgcctctccataaaatggccatccagggatttc

SEQ ID NO: 37060 - DNA, 120 bp, Artificial Sequence
  ENSG00000054654_33 (sequence is synthesized)
atctcattgatgctgatcgcatctatcaacacctaaggaatatccaagattccatagcaaaacagattgaaatatgtaaccgcttagaagagccaggcaactttgtattaaaggagttac

SEQ ID NO: 37061 - DNA, 120 bp, Artificial Sequence
  ENSG00000054654_34 (sequence is synthesized)
acccatttgatctacacgcaatgcagaatattatactgaaatacaaaacacaatttgaaggaatgaaccacagggtgcagaggagtgaagatactctcaaagctctggaagactttttgg

SEQ ID NO: 37062 - DNA, 120 bp, Artificial Sequence
  ENSG00000054654_35 (sequence is synthesized)
cgtctctcagaacagctaaactctctgctgagcccgttacagacctttcagcctcagatacacaggtggcacaagaaaatacgttgacagtaaaaaataaagagggagaaattcatctga

SEQ ID NO: 37063 - DNA, 120 bp, Artificial Sequence
  ENSG00000054654_36 (sequence is synthesized)
tgaaagacaaggccaaacatttggataaatgtttgaagatgctcgatatgagctttaaagatgctgaacggggtgatgacacctcctgtgaaaacctgcttgatgctttttcaataaagt

SEQ ID NO: 37064 - DNA, 120 bp, Artificial Sequence
  ENSG00000054654_37 (sequence is synthesized)
tatctgagacacatggctatggggtacaggaggaattcactgaggaaaacaaattactagaggcttgtattttcaaaaataatgaactccttaaaaatattcaagatgtgcagagtcaaa

SEQ ID NO: 37065 - DNA, 120 bp, Artificial Sequence
  ENSG00000054654_38 (sequence is synthesized)
tcagtaaaattggtcttaaggatcctactgttccagctgtgaaacatcggaaaaaatcattaatcagactggataaggttctagatgaatatgaagaagagaagagacatttacaagaaa

SEQ ID NO: 37066 - DNA, 120 bp, Artificial Sequence
  ENSG00000054654_39 (sequence is synthesized)
tggctaattctcttccacacttcaaagatggcagagaaaaaaccgtgaatcaacagtgccaaaatacagtagtcttgtgggagaataccaaagccttggtcaccgaatgtcttgaacaat

SEQ ID NO: 37067 - DNA, 120 bp, Artificial Sequence
  ENSG00000054654_40 (sequence is synthesized)
gtgggagagttttggagctcttaaaacaatatcagaattttaaaagcatcttgacaactttgattcaaaaagaagagagtgtcatctccctgcaggcttcgtacatgggaaaggagaacc

SEQ ID NO: 37068 - DNA, 120 bp, Artificial Sequence
  ENSG00000054654_41 (sequence is synthesized)
tgaagaaaaggatagcagagattgaaattgtcaaagaagaatttaatgagcatttagaagttgtagacaagataaaccaggtctgcaaaaatctacaattttatctaaataaaatgaaaa

SEQ ID NO: 37069 - DNA, 120 bp, Artificial Sequence
  ENSG00000054654_42 (sequence is synthesized)
cttttgaagagcccccttttgaaaaagaggctaatattattgtggatagatggcttgatataaatgagaagacagaagattactatgaaaatcttggtcgagctctagctttgtgggaca

SEQ ID NO: 37070 - DNA, 120 bp, Artificial Sequence
  ENSG00000054654_43 (sequence is synthesized)
aactttttaacttaaaaaatgtcattgatgagtggacagaaaaggcccttcaaaaaatggaattacatcaattgactgaagaggacagagaaaggctgaaggaagaattacaagtccatg

SEQ ID NO: 37071 - DNA, 120 bp, Artificial Sequence
  ENSG00000054654_44 (sequence is synthesized)
aacaaaaaacttcagaattttctagaagagtggctgaaatacagtttttgctccaaagcagtgaaatacctcttgaattgcaggtcatggagtcctctattttgaacaagatggaacatg

SEQ ID NO: 37072 - DNA, 120 bp, Artificial Sequence
  ENSG00000054654_45 (sequence is synthesized)
tacagaagtgcttaacaggagaatccaactgccatgcactcagtggcagcactgctgagctaagggaggatctcgaccaagccaagacccagatcgggatgactgaatccctcttaaaag

SEQ ID NO: 37073 - DNA, 120 bp, Artificial Sequence
  ENSG00000054654_46 (sequence is synthesized)
ccctgtctccttctgacagcttggagatcttcactaaactagaggagatacaacagcagattctacagcaaaaacacagtatgatattacttgagaatcaaataggttgtctgactcctg

SEQ ID NO: 37074 - DNA, 120 bp, Artificial Sequence
  ENSG00000054654_47 (sequence is synthesized)
aactctctgaattgaaaaagcaatatgaaagtgtcagtgatttatttaataccaaaaaaagtgttttgcaagatcacttttctaagttattgaatgatcaatgcaagaactttaatgact

SEQ ID NO: 37075 - DNA, 120 bp, Artificial Sequence
  ENSG00000054654_48 (sequence is synthesized)
ggttcagcaacattaaagtgaaccttaaggagtgttttgaatcatcagaaacaaaaaagagtgtggaacaaaagctacaaaaactttctgatttcttgactcttgaaggaagaaacagta

SEQ ID NO: 37076 - DNA, 120 bp, Artificial Sequence
  ENSG00000054654_49 (sequence is synthesized)
aaataaagcaggtggacagcgtactgaagcatgtgaagaagcatctgcccaaagcacatgtgaaggagcttatcagttggctcgtgggtcaggaattcgaattagaaaaaatggagtcca

SEQ ID NO: 37077 - DNA, 120 bp, Artificial Sequence
  ENSG00000054654_50 (sequence is synthesized)
tatgccaggctcgagcaaaggagcttgaagactccttgcagcagctactgagactccaggatgaccatagaaacctgaggaagtggttgactaatcaagaagagaaatggaaaggaatgg

SEQ ID NO: 37078 - DNA, 120 bp, Artificial Sequence
  ENSG00000054654_51 (sequence is synthesized)
aagaaccaggggagaaaactgagctgttctgccaagctttagctagaaagagggaacagtttgaatctgtggcccaattgaacaactctttgaaggaatatgggtttactgaagaagaag

SEQ ID NO: 37079 - DNA, 120 bp, Artificial Sequence
  ENSG00000054654_52 (sequence is synthesized)
aaataataatggaagcaacatgtttgatggatagataccagacattactgagacaactaagtgaaatcgaggaagaggataagttactacccacagaggaccagagctttaatgatcttg

SEQ ID NO: 37080 - DNA, 120 bp, Artificial Sequence
  ENSG00000054654_53 (sequence is synthesized)
cacatgatgtaattcattggataaaagagattaaagagtcccttatggttttgaattcatccgaaggcaaaatgccacttgaggaaagaatccaaaaaatcaaggaaatcattttgctga

SEQ ID NO: 37081 - DNA, 120 bp, Artificial Sequence
  ENSG00000054654_54 (sequence is synthesized)
agcctgaaggggatgccagaatagagaccatcatgaagcaggctgagagcagcgaggccccgctggttcagaagaccctcactgacatcagcaaccagtgggacaacacactccatttag

SEQ ID NO: 37082 - DNA, 120 bp, Artificial Sequence
  ENSG00000054654_55 (sequence is synthesized)
ctagcacctacctaagccatcaagaaaagcttctactagaaggagagaaatatttacaaagtaaggaggatctgagattaatgctcatagaactaaagaagaaacaggaagcaggctttg

SEQ ID NO: 37083 - DNA, 120 bp, Artificial Sequence
  ENSG00000054654_56 (sequence is synthesized)
ctctacaacatggtctgcaggagaagaaagctcagttaaagatttataagaaattcctcaagaaagcccaagatttgacatccttgctaaaggagttaaaatctcagggaaactacctct

SEQ ID NO: 37084 - DNA, 120 bp, Artificial Sequence
  ENSG00000054654_57 (sequence is synthesized)
tggagtgcactaaaaatcccagcttcagtgaagagccttggctggaaataaagcatctacacgaaagtcttcttcaacaactgcaggattctgtgcaaaacttggacggtcacgttcgag

SEQ ID NO: 37085 - DNA, 120 bp, Artificial Sequence
  ENSG00000054654_58 (sequence is synthesized)
aacatgattcataccaggtttgcgtcacagacctgaatactacattggacaatttctccaaggaatttgtcagtttttctgataagcctgtggatcaaatagcggttgaggaaaaattgc

SEQ ID NO: 37086 - DNA, 120 bp, Artificial Sequence
  ENSG00000054654_59 (sequence is synthesized)
agaaactgcaggaactagagaatagactcagtttacaagatggcacattaaagaagattttagctttagcaaaatccgtcaagcaaaatacatcttcagtggggcagaagattattaaag

SEQ ID NO: 37087 - DNA, 120 bp, Artificial Sequence
  ENSG00000054654_60 (sequence is synthesized)
atgatataaaatcacttcagtgtaaacaaaaagatttggaaaacaggcttgcatctgctaagcaggagatggaatgttgtctcaacagcattctcaaatcaaaacgctcaacagaaaaga

SEQ ID NO: 37088 - DNA, 120 bp, Artificial Sequence
  ENSG00000054654_61 (sequence is synthesized)
aaggaaagtttactctgccaggcagagagaagcaggccacttctgatgtgcaggagtctactcaggaatcagctgcagtggaaaagttggaggaagactgggaaataaacaaggattcag

SEQ ID NO: 37089 - DNA, 120 bp, Artificial Sequence
  ENSG00000054654_62 (sequence is synthesized)
ctgtggaaatggctatgtcaaaacaactttctcttaatgctcaagaaagcatgaaaaacactgaagatgagcggaaagtcaatgagctgcaaaatcaacctttagaattagatactatgt

SEQ ID NO: 37090 - DNA, 120 bp, Artificial Sequence
  ENSG00000054654_63 (sequence is synthesized)
taagaaatgaacaattagaagagatagagaaattatatacccagttggaagcaaagaaagcagccattaagccactggaacaaacagaatgtcttaacaaaacagaaactggggccttgg

SEQ ID NO: 37091 - DNA, 120 bp, Artificial Sequence
  ENSG00000054654_64 (sequence is synthesized)
ttctccacaatataggatattcggcacagcatttggacaatttgcttcaggcacttattactttgaagaaaaacaaagaaagccaatattgtgtcctcagagattttcaggaataccttg

SEQ ID NO: 37092 - DNA, 120 bp, Artificial Sequence
  ENSG00000054654_65 (sequence is synthesized)
ctgcagttgaatcttcaatgaaagccttgttgacagacaaggaaagtcttaaagtaggaccactggacagtgtaacgtatctggacaaaattaaaaaattcatagcatccatagaaaaag

SEQ ID NO: 37093 - DNA, 120 bp, Artificial Sequence
  ENSG00000054654_66 (sequence is synthesized)
agaaagattctttaggcaacttgaaaatcaaatgggagaatttatcaaaccacgtgactgacatggataagaaattgttggaaagccagattaagcaacttgaacatggttgggaacaag

SEQ ID NO: 37094 - DNA, 120 bp, Artificial Sequence
  ENSG00000054654_67 (sequence is synthesized)
tggaacagcagattcaaaagaagtattctcagcaggtagtggaatatgatgaatttacaaccctcatgaataaggtacaggacactgagatttctctgcaacagcagcagcaacatctac

SEQ ID NO: 37095 - DNA, 120 bp, Artificial Sequence
  ENSG00000054654_68 (sequence is synthesized)
agttaaggctgaagtctccagaagaacgggcagggaaccaaagcatgattgccttgaccactgacctccaggctaccaagcatggattttctgttttaaaggggcaagctgaacttcaga

SEQ ID NO: 37096 - DNA, 120 bp, Artificial Sequence
  ENSG00000054654_69 (sequence is synthesized)
tgaagaggatttggggagaaaaagaaaagaagaatttggaggatggaataaataacttgaagaaacaatgggaaacattggagccattacacttagaagcagaaaatcagattaagaagt

SEQ ID NO: 37097 - DNA, 120 bp, Artificial Sequence
  ENSG00000054654_70 (sequence is synthesized)
gtgacataaggaacaagatgaaagagactatcttatgggccaagaatttgttgggtgaacttaatccctccattccccttctcccagatgacattctttcacagatcagaaagtgcaaag

SEQ ID NO: 37098 - DNA, 120 bp, Artificial Sequence
  ENSG00000054654_71 (sequence is synthesized)
tgacacatgatggcattctagctaggcagcagtctgtggaatcgttggctgaagaggtcaaagataaggttcctagccttacaacctatgagggcagtgatttaaataataccctagagg

SEQ ID NO: 37099 - DNA, 120 bp, Artificial Sequence
  ENSG00000054654_72 (sequence is synthesized)
acttacggaatcaataccaaatgctggttttaaaatcaactcaaagatcacagcaattagaatttaagttggaagaaagaagcaatttttttgctataataaggaagtttcaacttatgg

SEQ ID NO: 37100 - DNA, 120 bp, Artificial Sequence
  ENSG00000054654_73 (sequence is synthesized)
ttcaagaaagtgaaacactgataattcccagggtggagacagctgccacggaagctgaactaaaacatcaccatgttactttggaggcatctcagaaggaattgcaagaaattgacagtg

SEQ ID NO: 37101 - DNA, 120 bp, Artificial Sequence
  ENSG00000054654_74 (sequence is synthesized)
gaatctcaacacatcttcaggagctaacaaacatctatgaggagctgaatgtgtttgaaagattatttctggaagatcagttgaaaaatcttaagattaggaccaacagaatacaaagat

SEQ ID NO: 37102 - DNA, 120 bp, Artificial Sequence
  ENSG00000054654_75 (sequence is synthesized)
tcattcagaatacatgtaatgaagtggaacacaagataaagttttgcagacaattccatgaaaaaacatcagcgcttcaggaggaggctgacagtatacagcgcaatgaactattactta

SEQ ID NO: 37103 - DNA, 120 bp, Artificial Sequence
  ENSG00000054654_76 (sequence is synthesized)
atcaagaagtaaataaaggtgttaaagaggagatctataatcttaaagacagactcaccgctattaagtgttgcatcttacaggtattgaaacttaaaaaagtgtttgactatattggac

SEQ ID NO: 37104 - DNA, 120 bp, Artificial Sequence
  ENSG00000054654_77 (sequence is synthesized)
taaactgggatttttcacaacttgaccaattacaaacccaagtatttgaaaaagaaaaggaacttgaagaaaaaattaagcagttggacacatttgaggaagaacatggcaaatatcagg

SEQ ID NO: 37105 - DNA, 120 bp, Artificial Sequence
  ENSG00000054654_78 (sequence is synthesized)
cattattaagtaaaatgagagctattgatttgcaaattaagaaaatgactgaagtagtactaaaagctcctgatagctctccggaaagcagacggctcaatgcccaaattttaagtcaga

SEQ ID NO: 37106 - DNA, 120 bp, Artificial Sequence
  ENSG00000054654_79 (sequence is synthesized)
gaattgagaaagccaagtgtttatgtgatgagataataaagaaattaaatgaaaataagacctttgatgactcattcaaggagaaagaaatactacaaataaagctgaatgcagaagaaa

SEQ ID NO: 37107 - DNA, 120 bp, Artificial Sequence
  ENSG00000054654_80 (sequence is synthesized)
atgataagttatacaaagttctccaaaacatggtattagaactctcaccaaaagaattggatgaaaagaattgtcaggacaaactagaaacttccttacatgttttaaatcagataaaat

SEQ ID NO: 37108 - DNA, 120 bp, Artificial Sequence
  ENSG00000054654_81 (sequence is synthesized)
ctcaattacagcagccattacttataaatttggaaattaaacatattcaaaatgaaaaggacaattgtgaagcatttcaggagcaagtttgggcagaaatgtgtagtattaaagctgtga

SEQ ID NO: 37109 - DNA, 120 bp, Artificial Sequence
  ENSG00000054654_82 (sequence is synthesized)
ctgctattgagaaacaaagagaagaaaactcttctgaagcgagtgatgtggagacaaaactacgtgagtttgaagatcttcagatgcagcttaacacaagcattgatttgcgcacaaatg

SEQ ID NO: 37110 - DNA, 120 bp, Artificial Sequence
  ENSG00000054654_83 (sequence is synthesized)
tcttgaatgatgcttatgaaaatctaacacgctataaagaagcagtcaccagggcagtggagagcatcacttccctcgaagccatcattataccctacagagtagatgttggtaatccag

SEQ ID NO: 37111 - DNA, 120 bp, Artificial Sequence
  ENSG00000054654_84 (sequence is synthesized)
aagaatctttagagatgcctcttcgaaaacaagaggaattggaatccacagtagcacacatccaggacctcactgagaaactgggaatgatatccagccccgaagccaaactacaacttc

SEQ ID NO: 37112 - DNA, 120 bp, Artificial Sequence
  ENSG00000054654_85 (sequence is synthesized)
agtatactttacaggaactagtttctaagaactcagcaatgaaggaagctttcaaagcacaggaaactgaggcagaaaggtatcttgagaattacaaatgctatagaaaaatggaagagg

SEQ ID NO: 37113 - DNA, 120 bp, Artificial Sequence
  ENSG00000054654_86 (sequence is synthesized)
atatttacactaacctcagcaaaatggagacagttcttggacagtccatgtcctcgttgccactgtcttacagagaagctttagagcgcttggaacagagcaaggccttggtgtcaaatc

SEQ ID NO: 37114 - DNA, 120 bp, Artificial Sequence
  ENSG00000054654_87 (sequence is synthesized)
ttatatcaaccaaagaagagttaatgaaactacgacagatccttagactcttgagactcaggtgcacagaaaatgatggcatatgtttgctcaagattgtgtcggctctgtgggagaaat

SEQ ID NO: 37115 - DNA, 120 bp, Artificial Sequence
  ENSG00000054654_88 (sequence is synthesized)
ggctgagtttgctggaagctgctaaagagtgggagatgtggtgcgaagaactgaagcaggaatggaaatttgtcagtgaagaaattgaacgagaggcaattattttagataatcttcagg

SEQ ID NO: 37116 - DNA, 120 bp, Artificial Sequence
  ENSG00000054654_89 (sequence is synthesized)
aagaactccctgaaatttccaaaacaaaagaggcagccaccacagaggaactctctgagctgctagactgtttatgccaatatggagagaacgtggagaagcaacagctgttactgactc

SEQ ID NO: 37117 - DNA, 120 bp, Artificial Sequence
  ENSG00000054654_90 (sequence is synthesized)
tacttcttcagcgcatcagaagtatccagaatgttcctgaaagctcaggggctgtggaaactgttccagcatttcaagaaattacttctatgaaagaacgatgcaacaagcttcttcaga

SEQ ID NO: 37118 - DNA, 120 bp, Artificial Sequence
  ENSG00000054654_91 (sequence is synthesized)
gttcagaaaaataaagaattggtgcagactgaaatccaagaaagacattccttcacaaaagagataattgctttgaagaatttctttcaacagaccacaacttcattccaaaatatggca

SEQ ID NO: 37119 - DNA, 120 bp, Artificial Sequence
  ENSG00000054654_92 (sequence is synthesized)
ttccaggatcacccagaaaagtcagaacaatttgaggagcttcaaagcatccttaagaaagggaaactaacttttgagaatattatggaaaaactgcgaatcaagtattccgaaatgtac

SEQ ID NO: 37120 - DNA, 120 bp, Artificial Sequence
  ENSG00000054654_93 (sequence is synthesized)
accatagtccctgcagagattgaatcccaggtggaagaatgcagaaaagctttagaagacatagatgagaagattagcaatgaagtcttaaaaagctcaccatcatatgcaatgaggaga

SEQ ID NO: 37121 - DNA, 120 bp, Artificial Sequence
  ENSG00000054654_94 (sequence is synthesized)
aaaatagaagaaattaacaatgggcttcataatgttgaaaagatgttgcagcagaaaagcaaaaatattgagaaagctcaagaaattcaaaagaaaatgtgggacgagttagatctatgg

SEQ ID NO: 37122 - DNA, 120 bp, Artificial Sequence
  ENSG00000054654_95 (sequence is synthesized)
cattccaaactaaatgagctggattctgaagttcaggacattgttgaacaggacccaggacaggctcaagaatggatggataacttgatgattcctttccagcagtatcagcaagtatca

SEQ ID NO: 37123 - DNA, 120 bp, Artificial Sequence
  ENSG00000054654_96 (sequence is synthesized)
cagagagcagagtgtagaacctcacagttgaataaggccacagttaagatggaggaatatagtgaccttctgaagagcactgaggcttggatagaaaataccagtcatttgctggccaat

SEQ ID NO: 37124 - DNA, 120 bp, Artificial Sequence
  ENSG00000054654_97 (sequence is synthesized)
cctgctgactatgactctttgaggacactgagtcaccatgctagcactgtgcagatggctttggaagattcagaacagaagcacaatcttttacattcaatctttatggatctagaagac

SEQ ID NO: 37125 - DNA, 120 bp, Artificial Sequence
  ENSG00000054654_98 (sequence is synthesized)
ctgtcaataatttttgaaacagatgaattaacccaatccatacaagagttaagtaatcaagtaacagctttacaacaaaaaataatggaaagccttccacagattcagcgaatggctgat

SEQ ID NO: 37126 - DNA, 120 bp, Artificial Sequence
  ENSG00000054654_99 (sequence is synthesized)
gatgtggttgctattgaatctgaagtaaaatcaatggaaaaaagagtttcaaaaatcaaaactatcctattatcaaaagaaatatttgatttttcacctgaagaacatctcaaacatggg

SEQ ID NO: 37127 - DNA, 120 bp, Artificial Sequence
  ENSG00000054654_100 (sequence is synthesized)
gaggtcatacttgaaaatatacgtcccatgaagaaaaccattgctgagatagtgtcttaccaagtggaactgaggttgccccaaacaggaatgaaacctctgcctgtgtttcagcggaca

SEQ ID NO: 37128 - DNA, 120 bp, Artificial Sequence
  ENSG00000054654_101 (sequence is synthesized)
aatcagcttttacaagatataaaactattggaaaatgtgactcaagaacaaaatgagttattaaaggtagtcataaaacagaccaatgaatgggatgaagaaatagaaaatttgaaacag

SEQ ID NO: 37129 - DNA, 120 bp, Artificial Sequence
  ENSG00000054654_102 (sequence is synthesized)
atcttaaataattattcagctcagttctcccttgaacatatgtcaccagaccaagctgacaagctgccacaactacagggagaaatcgaacgtatggagaaacagattctgagtttgaac

SEQ ID NO: 37130 - DNA, 120 bp, Artificial Sequence
  ENSG00000054654_103 (sequence is synthesized)
cagagaaaagaagacctgttggtggacttgaaggccaccgtactaaaccttcaccagcatttgaagcaagaacaagaaggagtagaaagagataggctgccagctgtaacatcagaggaa

SEQ ID NO: 37131 - DNA, 120 bp, Artificial Sequence
  ENSG00000054654_104 (sequence is synthesized)
ggtggagtggcagagagggatgcttctgagcggaagttgaacagaagaggctccatgtcttacctggcagcagtcgaggaagaggtggaagaaagttccgtgaagagcgataatggagat

SEQ ID NO: 37132 - DNA, 120 bp, Artificial Sequence
  ENSG00000054654_105 (sequence is synthesized)
gagaaggcagagccatcgcctcagtcttggtcttcactttggaagcatgacaaggacatggaagaagacagagcttcctcatcctctggaacaattgttcaggaagcatatgggaaaata

SEQ ID NO: 37133 - DNA, 120 bp, Artificial Sequence
  ENSG00000054654_106 (sequence is synthesized)
agcacctctgataattccatggcacaaatcctcacaccagactcactaaacactgagcaaggcccagaatgttccctaaggcccaaccaaacagaagagggcaccacacctcctattgag

SEQ ID NO: 37134 - DNA, 120 bp, Artificial Sequence
  ENSG00000054654_107 (sequence is synthesized)
gctgacactctggactcttctgacgcgcaaggaggtttggagcccagggtggagaaaactaggccggagcccacagaagtcctgcatgcctgcaagacccaggtggccgagctggagctg

SEQ ID NO: 37135 - DNA, 120 bp, Artificial Sequence
  ENSG00000054654_108 (sequence is synthesized)
tggctgcaacaagccaacgtggcagttgagccggaaacattaaacgcagacatgcagcaggtgctggaacagcagctggtagggtgccaggctatgctaacagagattgagcacaaggtt

SEQ ID NO: 37136 - DNA, 120 bp, Artificial Sequence
  ENSG00000054654_109 (sequence is synthesized)
gcctttctgttagagacttgcaaagatcagggcctgggagataatggagccactcaacatgaggctgaagcgctttccctgaaactgaaaacagtgaagtgcaatttagaaaaagtccag

SEQ ID NO: 37137 - DNA, 120 bp, Artificial Sequence
  ENSG00000054654_110 (sequence is synthesized)
atgatgcttcaggagaagcacagtgaagatcagcatcctaccattctaaagaaatcctcagagccagagcatcaagaagctctccaaccagttaacctttctgaattggaatccattgta

SEQ ID NO: 37138 - DNA, 120 bp, Artificial Sequence
  ENSG00000054654_111 (sequence is synthesized)
actgaaaggccacaattcagcagacaaaaagatttccagcagcaacaggttctggagttaaaaccaatggaacagaaagatttcatcaaattcatagaatttaatgctaagaaaatgtgg

SEQ ID NO: 37139 - DNA, 120 bp, Artificial Sequence
  ENSG00000054654_112 (sequence is synthesized)
ccccagtattgccaacatgataacgatacaactcaggaatcatctgcaagcaaccaggcatccagccctgaaaatgacgttccagactcgatcttgtcaccccagggccaaaatggagat

SEQ ID NO: 37140 - DNA, 120 bp, Artificial Sequence
  ENSG00000054654_113 (sequence is synthesized)
aagtggcaatatctgcatcatgaactctcatcaaaaataaagctcccactccctcagcttgtggagcctcaggtttccacaaatatgggtattctacccagcgtgactatgtataacttt

SEQ ID NO: 37141 - DNA, 120 bp, Artificial Sequence
  ENSG00000054654_114 (sequence is synthesized)
agatacccaacaactgaagaactgaaaacctataccacccaacttgaagacctgcgccaagaagcaagtaaccttcagacacaggaaaatatgacagaagaagcatatatcaatttggat

SEQ ID NO: 37142 - DNA, 120 bp, Artificial Sequence
  ENSG00000054654_115 (sequence is synthesized)
aaaaaattgtttgaactattcctgaccctcagtcagtgcctcagcagtgtggaggagatgctggagatgcccagactttacagggaggatggttctggccagcaggtgcactacgagacg

SEQ ID NO: 37143 - DNA, 120 bp, Artificial Sequence
  ENSG00000054654_116 (sequence is synthesized)
ctggctcttgagttgaagaaactttatttagcgctaagtgacaagaagggtgatcttttgaaagccatgacttggcctggcgagaacaccaacttgctccttgaatgttttgacaacctt

SEQ ID NO: 37144 - DNA, 120 bp, Artificial Sequence
  ENSG00000054654_117 (sequence is synthesized)
caagtctgcctggagcacactcaggctgcagctgtctgtagaagcaagtccctgaaagctggcctcgattacaaccgcagttaccagaatgaaataaagagattatatcatcagctcatt

SEQ ID NO: 37145 - DNA, 120 bp, Artificial Sequence
  ENSG00000054654_118 (sequence is synthesized)
aagagtaagacatctttacaacagtctttgaatgaaatcagtgggcagagtgttgctgaacagcttcagaaagcagatgcatatacagtggagctggagaacgccgagagccgagtggcc

SEQ ID NO: 37146 - DNA, 120 bp, Artificial Sequence
  ENSG00000054654_119 (sequence is synthesized)
aaactaagagatgaaggggagaggcttcatttaccttatgctttactccaggaggtttacaaattagaggatgtacttgacagtatgtggggaatgctaagagccaggtacacagaactc

SEQ ID NO: 37147 - DNA, 120 bp, Artificial Sequence
  ENSG00000054654_120 (sequence is synthesized)
agcagccctttcgtcactgagagccagcaagatgctttgttgcaaggcatggtggaactggtgaagattgggaaggaaaagcttgctcatggccacttaaaacaaaccaaaagtaaagtg

SEQ ID NO: 37148 - DNA, 120 bp, Artificial Sequence
  ENSG00000054654_121 (sequence is synthesized)
gcgttacaggctcaaatagaaaatcacaaggtttttttccagaagcttgttgctgacatgttgttgatccaagcatactctgccaaaatacttccttctttattgcaaaacagagagaca

SEQ ID NO: 37149 - DNA, 120 bp, Artificial Sequence
  ENSG00000054654_122 (sequence is synthesized)
ttttgggcagaacaagtaacagaagttaaaatactagaagaaaagtcacgccaatgtggtatgaagctgcagagtttgttgcagaaatgggaagaatttgatgaaaactatgcatctctt

SEQ ID NO: 37150 - DNA, 120 bp, Artificial Sequence
  ENSG00000054654_123 (sequence is synthesized)
gaaaaggacctggaaattcttatatctacattgccctctgtgagtttggtggaagaaacagaggaaagattagtggaaaggatttcattttaccagcaaataaaaagaaacattggtgga

SEQ ID NO: 37151 - DNA, 120 bp, Artificial Sequence
  ENSG00000054654_124 (sequence is synthesized)
aaacacgcccggctttaccaaactctgaacgaaggcaaacagttggtggcgtctgtgagctgtcctgaattagagggccagatcgcaaaactggaagagcagtggttgtccctgaacaag

SEQ ID NO: 37152 - DNA, 120 bp, Artificial Sequence
  ENSG00000054654_125 (sequence is synthesized)
aaaattgaccatgagctccacaggctgcaagctcttctcaagcatctgctcagttataacagagattcggatcagttaaccaagtggttggaatcttcccagcatactctgaattactgg

SEQ ID NO: 37153 - DNA, 120 bp, Artificial Sequence
  ENSG00000054654_126 (sequence is synthesized)
aaagaacagtccctcaatgtgtctcaggacttggatacaatcagaagcaacatcaacaatttttttgagttttcaaaagaagttgatgaaaaatcctccttgaagactgccgttatcagt

SEQ ID NO: 37154 - DNA, 120 bp, Artificial Sequence
  ENSG00000054654_127 (sequence is synthesized)
atcgggaaccagcttcttcacctgaaagaaactgatacagctacactgagagcttctttagcacagtttgaacaaaaatggacaatgctcataactcaacttccagatattcaagaaaaa

SEQ ID NO: 37155 - DNA, 120 bp, Artificial Sequence
  ENSG00000054654_128 (sequence is synthesized)
cttcaccagcttcaaatggagaaattgccgtctcgtaaagcaatcacagaaatgattagctggatgaacaatgtggagcatcaaacttcagatgaagactccgtgcattcaccaagttct

SEQ ID NO: 37156 - DNA, 120 bp, Artificial Sequence
  ENSG00000054654_129 (sequence is synthesized)
gcatctcaagttaaacatcttcttcagaagcacaaggagtttagaatggaaatggactataaacagtggatagttgacttcgttaaccagtcattacttcagctaagcacctgtgatgta

SEQ ID NO: 37157 - DNA, 120 bp, Artificial Sequence
  ENSG00000054654_130 (sequence is synthesized)
gaaagcaagcgctatgaaagaacggagtttgcagagcacctgggggagatgaaccgccagtggcaccgtgtacatggaatgctgaatagaaagatacaacatttagaacaacttctagaa

SEQ ID NO: 37158 - DNA, 120 bp, Artificial Sequence
  ENSG00000054654_131 (sequence is synthesized)
agtatcactgagagtgaaaataaaatacagatcttgaacaactggctggaagcacaagaagagagactgaaaactttacaaaaacctgaaagtgtgatctcagtgcagaagctgctcctg

SEQ ID NO: 37159 - DNA, 120 bp, Artificial Sequence
  ENSG00000054654_132 (sequence is synthesized)
gactgtcaggatatagaaaatcaacttgcaattaaatccaaagcactagatgagttgaaacaaagttatctgactttggagagtggggcagtgccattgttagaagatacagcatcccga

SEQ ID NO: 37160 - DNA, 120 bp, Artificial Sequence
  ENSG00000054654_133 (sequence is synthesized)
attgatgagttatttcaaaagagaagcagtgttctcactcaggtcaatcagctcaaaacctccatgcagtcagttttacaggagtggaagatttatgatcaactctatgatgaagtgaat

SEQ ID NO: 37161 - DNA, 120 bp, Artificial Sequence
  ENSG00000054654_134 (sequence is synthesized)
atgatgacaatccgattctggtactgcatggaacacagcaagcctgtggtgttatcattggagaccttgagatgccaggtggagaaccttcagtctctgcaagatgaagctgagagcagt

SEQ ID NO: 37162 - DNA, 120 bp, Artificial Sequence
  ENSG00000054654_135 (sequence is synthesized)
gaagggagttgggagaaactccaggaggttatcggcaaactcaaaggtctctgcccctctgttgctgaaataatcgaagagaaatgccaaaatactcataaaaggtggactcaggtgaac

SEQ ID NO: 37163 - DNA, 120 bp, Artificial Sequence
  ENSG00000054654_136 (sequence is synthesized)
caagccattgcagaccagttgcagaaggcccagagtctgctccagctctggaaggcctatagcaatgctcatggtgaagctgccgcaaggctgaagcagcaggaagcaaagtttcaacag

SEQ ID NO: 37164 - DNA, 120 bp, Artificial Sequence
  ENSG00000054654_137 (sequence is synthesized)
ctcgcaaacatcagcatgtctggaaacaacctggcagagatcctgcccccagccctgcaggacataaaggagctgcagcatgatgtgcagaaaacaaaagaagcctttctccaaaattcc

SEQ ID NO: 37165 - DNA, 120 bp, Artificial Sequence
  ENSG00000054654_138 (sequence is synthesized)
agtgtcctggatcgactcccacaacccgcagagtccagcacccacatgctcctcccgggccccctgcactctctccagagggctgcttatttggaaaagatgctgcttgtgaaagcaaat

SEQ ID NO: 37166 - DNA, 120 bp, Artificial Sequence
  ENSG00000054654_139 (sequence is synthesized)
gaatttgagtttgttctctcacagtttaaggattttggagtccggctggaatctttaaaaggtcttattatgcatgaagaagagaatttggatagacttcaccaacaggaaaaagaaaat

SEQ ID NO: 37167 - DNA, 120 bp, Artificial Sequence
  ENSG00000054654_140 (sequence is synthesized)
cctgactcattcctgaatcatgtgctggcactgacagcccaatcacctgatattgaacatttgaatgaagtgagcctcaagctcccacttagtgacgtagctgtgaagacgttacaaaat

SEQ ID NO: 37168 - DNA, 120 bp, Artificial Sequence
  ENSG00000054654_141 (sequence is synthesized)
atgaaccggcaatggattcgggccacggccacggcactggagcgctgcagtgagcttcagggaattggattgaatgaaaagtttctttattgctgtgaaaagtggatccaacttttggag

SEQ ID NO: 37169 - DNA, 120 bp, Artificial Sequence
  ENSG00000054654_142 (sequence is synthesized)
aagatagaagaagcactcaaagtggatgtggctaacagccttcctgagctcctggagcagcagaaaacctataagatgttagaagctgaagtttctataaaccagacaattgctgattcc

SEQ ID NO: 37170 - DNA, 120 bp, Artificial Sequence
  ENSG00000054654_143 (sequence is synthesized)
tatgtcacccagtccttacaactcctggacacaacagaaatagagaacagaccagaatttattacagaattctcaaagctgacggatcggtggcagaatgctgtccagggtgttcggcag

SEQ ID NO: 37171 - DNA, 120 bp, Artificial Sequence
  ENSG00000054654_144 (sequence is synthesized)
aggaagggtgacgttgatgggctggtgaggcagtggcaagatttcactacttctgtggagaacttgtttcgcttcctcactgacaccagccacctgctatctgcagtgaagggccaggag

SEQ ID NO: 37172 - DNA, 120 bp, Artificial Sequence
  ENSG00000054654_145 (sequence is synthesized)
cgcttcagcctctaccaaaccagaagtctgatccatgagctgaagaataaagaaattcattttcaaaggaggcgaactacctgtgccctaaccttggaagctggagaaaagttactgctc

SEQ ID NO: 37173 - DNA, 120 bp, Artificial Sequence
  ENSG00000054654_146 (sequence is synthesized)
acaactgacctgaaaactaaagagtctgtgggtaggagaatcagtcaacttcaggacagctggaaagacatggagccccagctggcagagatgattaagcagttccagagcactgtagag

SEQ ID NO: 37174 - DNA, 120 bp, Artificial Sequence
  ENSG00000054654_147 (sequence is synthesized)
acctgggaccagtgtgaaaagaaaatcaaggagttgaaaagcaggctgcaagttttaaaggcacaaagtgaagatcctcttccagagcttcacgaggacctccataacgaaaaagagctg

SEQ ID NO: 37175 - DNA, 120 bp, Artificial Sequence
  ENSG00000054654_148 (sequence is synthesized)
attaaggaactagaacagtctttggctagctggactcagaacttgaaagaacttcaaactatgaaggcggacttaacccggcacgttctcgtggaagatgtgatggttttgaaggagcaa

SEQ ID NO: 37176 - DNA, 120 bp, Artificial Sequence
  ENSG00000054654_149 (sequence is synthesized)
atagagcatttgcacagacaatgggaggacctctgcttaagggtggccatacgtaaacaggagattgaagacagactcaatacatgggttgtattcaatgaaaaaaataaagagttgtgt

SEQ ID NO: 37177 - DNA, 120 bp, Artificial Sequence
  ENSG00000054654_150 (sequence is synthesized)
gcctggctggtgcagatggaaaacaaagttctacagacagcggacattagtattgaagaaatgattgaaaagttacagaaggactgcatggaagaaataaacttgtttagtgaaaacaag

SEQ ID NO: 37178 - DNA, 120 bp, Artificial Sequence
  ENSG00000054654_151 (sequence is synthesized)
ttacagttaaagcagatgggtgaccagttgatcaaggccagcaacaaatcaagagcagctgagatcgatgacaagctcaacaaaattaacgatcgttggcaacatctttttgatgtcatc

SEQ ID NO: 37179 - DNA, 120 bp, Artificial Sequence
  ENSG00000054654_152 (sequence is synthesized)
ggatcaagggtgaagaagctgaaggagacctttgcttttattcagcagttggacaaaaacatgagcaaccttcgcacctggttggctcgaattgagtctgagctttccaagcctgttgtt

SEQ ID NO: 37180 - DNA, 120 bp, Artificial Sequence
  ENSG00000054654_153 (sequence is synthesized)
tatgatgtctgcgatgatcaagagatccagaagaggctcgctgagcagcaggatctacagcgagatattgaacaacacagcgcaggggtggagtccgtgtttaacatctgtgacgtccta

SEQ ID NO: 37181 - DNA, 120 bp, Artificial Sequence
  ENSG00000054654_154 (sequence is synthesized)
ctgcacgactccgatgcctgtgcaaatgagaccgagtgtgactcgatccagcagaccaccaggagcctggacagacgctggaggaacatttgtgccatgtccatggagcggcgcatgaaa

SEQ ID NO: 37182 - DNA, 120 bp, Artificial Sequence
  ENSG00000054654_155 (sequence is synthesized)
atcgaggagacgtggcgcctgtggcagaagtttttagacgactattctcgctttgaggactggctcaagtcagctgagaggacggcagcctgcccaaattcctcagaggtgttgtacacg

SEQ ID NO: 37183 - DNA, 120 bp, Artificial Sequence
  ENSG00000054654_156 (sequence is synthesized)
agtgccaaagaggaactgaagaggtttgaggcctttcagcggcagattcatgagcggctcactcagctggagctcatcaacaagcagtaccggcggctggcccgggagaaccgcacagac

SEQ ID NO: 37184 - DNA, 120 bp, Artificial Sequence
  ENSG00000054654_157 (sequence is synthesized)
acggccagcaggctgaagcagatggtccacgagggcaaccagcgctgggacaaccttcagaggcgggtcacagccgtcctgcggagactcaggcatttcaccaaccagagggaagaattt

SEQ ID NO: 37185 - DNA, 120 bp, Artificial Sequence
  ENSG00000054654_158 (sequence is synthesized)
gagggcaccagggagagcattctggtgtggctcacagagatggacctgcagctgaccaacgtggagcacttctcagagagtgacgccgatgacaagatgcgccaactgaatggcttccaa

SEQ ID NO: 37186 - DNA, 120 bp, Artificial Sequence
  ENSG00000054654_159 (sequence is synthesized)
caggaaattacattaaataccaacaagattgatcagctcattgtgtttggggagcagctgattcagaagagcgagcccctggatgctgtgctgattgaggatgagctggaggaactccac

SEQ ID NO: 37187 - DNA, 120 bp, Artificial Sequence
  ENSG00000054654_160 (sequence is synthesized)
cgctactgccaggaggtgtttggaagggtctcccggttccaccggcggctcacctcctgcactccgggcttggaagatgaaaaggaggcctctgagaatgaaacagacatggaagacccc

SEQ ID NO: 37188 - DNA, 120 bp, Artificial Sequence
  ENSG00000054654_161 (sequence is synthesized)
agagaaatccagactgattcttggcgtaaacggggagagagcgaggaaccgtcatctcctcagtccctgtgtcatctagtggccccagggcacgagcggtctggctgcgagacccctgtc

SEQ ID NO: 37189 - DNA, 120 bp, Artificial Sequence
  ENSG00000054654_162 (sequence is synthesized)
agcgtggactccatccccctggagtgggaccacacaggcgacgtggggggctcctcctctcacgaagaggacgaggagggcccatactacagcgcactgtcagatgtagaaatccctgaa

SEQ ID NO: 37190 - DNA, 120 bp, Artificial Sequence
  ENSG00000054654_163 (sequence is synthesized)
aatcctgaggcatatcttaaaatgaccacaaaaactttgaaagcgtcttctggtaaatccatttcggatggccactcgtggcatgttcccgacagcccttcctgtcccgagcatcactac

SEQ ID NO: 37191 - DNA, 120 bp, Artificial Sequence
  ENSG00000054654_164 (sequence is synthesized)
aagcaaatggaaggtgacaggaatgttccacctgttccccctgcgtccagcaccccttataaaccaccctatggaaagctactattacctccaggcacggatggtggcaaagaaggcccg

SEQ ID NO: 37192 - DNA, 120 bp, Artificial Sequence
  ENSG00000054654_165 (sequence is synthesized)
cgagtcctgaatggcaacccacagcaggaagacgggggactggccggtatcacagagcagcagtcaggtgccttcgacagatgggagatgattcaagcacaggagcttcacaataagctc

SEQ ID NO: 37193 - DNA, 120 bp, Artificial Sequence
  ENSG00000054654_166 (sequence is synthesized)
aaaataaaacaaaatttgcaacagctgaactctgatatcagcgccatcactacttggctgaaaaaaactgaagcagagctggaaatgttaaagatggcaaagcctccctctgatatccag

SEQ ID NO: 37194 - DNA, 120 bp, Artificial Sequence
  ENSG00000054654_167 (sequence is synthesized)
gaaatagaactgagagtgaagagactgcaggagatactgaaagcctttgacacttacaaggcattagtggtctctgtcaacgtgagcagcaaggaatttctgcaaaccgagagccccgaa

SEQ ID NO: 37195 - DNA, 120 bp, Artificial Sequence
  ENSG00000054654_168 (sequence is synthesized)
tccacagagctccaaagtagactccgccagctgagcctgctctgggaagcagcacagggcgcagtggacagctggagagggggcttacgacagtcgctcatgcagtgccaggacttccac

SEQ ID NO: 37196 - DNA, 120 bp, Artificial Sequence
  ENSG00000054654_169 (sequence is synthesized)
cagttgagtcaaaatctgctgctgtggttagcgagtgccaagaaccggaggcagaaggctcatgtcaccgatccaaaggcagacccccgggctctcctagagtgtcggagggaactaatg

SEQ ID NO: 37197 - DNA, 120 bp, Artificial Sequence
  ENSG00000054654_170 (sequence is synthesized)
caactggaaaaggagctggtagaacgtcaacctcaagtggacatgttacaggagatttcaaacagccttctcattaagggacatggagaagactgtattgaagctgaagaaaaggtgcat

SEQ ID NO: 37198 - DNA, 120 bp, Artificial Sequence
  ENSG00000054654_171 (sequence is synthesized)
gttattgagaagaaactcaaacagttacgggagcaagtgtcccaagatttaatggccttgcagggaacccagaacccagcctcacccctgcccagcttcgacgaggtagactcgggggac

SEQ ID NO: 37199 - DNA, 120 bp, Artificial Sequence
  ENSG00000054654_172 (sequence is synthesized)
cagcctcctgcaacatccgtgccagctccccgagcaaagttcagagcagtgagaactacagaaggcgaggaggagacagagagcagggtccccggcagcacacggccacagcgctccttc

SEQ ID NO: 37200 - DNA, 120 bp, Artificial Sequence
  ENSG00000054654_173 (sequence is synthesized)
ctctcaagggtggtccgggcagccctacccctgcagctgctcctcctgctgctgctgctcctggcctgcctgctgccctcctccgaagaagactacagctgcactcaggccaacaacttt

SEQ ID NO: 37201 - DNA, 120 bp, Artificial Sequence
  ENSG00000054654_174 (sequence is synthesized)
gcccggtccttttaccccatgctgaggtacaccaatgggccaccccccacatagagggcatagctggccacagtgctacaccacctgcctgattgccaagggtgcccagcacgtggcccc

SEQ ID NO: 37202 - DNA, 120 bp, Artificial Sequence
  ENSG00000054654_175 (sequence is synthesized)
agaccaatctgagtgacttagtgttggcaaggtcccgggacctgtgcagacttcttctgggcttacccagcacgggctccctggagcccagggcagctttcagattgtgttcctccccag

SEQ ID NO: 37203 - DNA, 120 bp, Artificial Sequence
  ENSG00000054654_176 (sequence is synthesized)
gagcagggaacctgtgtggcaggtgccccgggtattttggcagaactagttgattagtttagggatctctggaaatgtcagtttcctgaagagccaagcactttgtgaattctggtttgt

SEQ ID NO: 37204 - DNA, 120 bp, Artificial Sequence
  ENSG00000054654_177 (sequence is synthesized)
ttgtaaaacagcattattataatgtaggtatggtcaatgagcagtggtgtccatcacatatattatagaagcaagcgaggacattccaccctagaaatggttcagaaactcataggcacc

SEQ ID NO: 37205 - DNA, 120 bp, Artificial Sequence
  ENSG00000054654_178 (sequence is synthesized)
cttagctgatggaaacaatcaatcatatttaatacgcttagaatcagttttactccaatcagctggcaattttgagctgccggttatacaccaaaatgttctgttcagtacctagctctg

SEQ ID NO: 37206 - DNA, 120 bp, Artificial Sequence
  ENSG00000054654_179 (sequence is synthesized)
ctcttttatattgctttaaatttttaaagaaattgtattgcatggatgtggttatttgtgcatattttttaacaatgcccaatctgtatgaataatgtaaacttcgatttttttttaaaa

SEQ ID NO: 37207 - DNA, 120 bp, Artificial Sequence
  ENSG00000054654_180 (sequence is synthesized)
aaattagattttagctggagcttttgactaatgtaaagtaaatgccaaactaccgacttgatagggatgtttttgtaagttaattttctaagactttttcacatccaaagtgatgctttg

SEQ ID NO: 37208 - DNA, 120 bp, Artificial Sequence
  ENSG00000054654_181 (sequence is synthesized)
ctttgggttttaactgtttggccacggcgggggtgggggcggggggttggtacagaaacttgaagctgtttgtgatatgtacaactcagatgtttctcattaaaaaacaaaattagccag

SEQ ID NO: 37209 - DNA, 120 bp, Artificial Sequence
  ENSG00000054654_182 (sequence is synthesized)
atgtctctccccagctgtcctgtgtggggtgtggctgtggactggccgctgtgcttccgttgacctagctgggcagtagtggaggcagccctgtctcctggttttttaacctctgtgaag

SEQ ID NO: 37210 - DNA, 120 bp, Artificial Sequence
  ENSG00000054654_183 (sequence is synthesized)
caggagctctgagctgcttggcgctcccaggcaggaggagcacagacaagaagtggcgtccctcttatttcccagaaggggtaacagggtctcccccactaaaccgtgcgggtgtcaggg

SEQ ID NO: 37211 - DNA, 120 bp, Artificial Sequence
  ENSG00000054654_184 (sequence is synthesized)
atcataaccaagcctgcagcgagcctgggggctgctgaaatgacttcctctaagtagccagcttcccctcacctctggcaagggctgcctaaaccacagcctgcccccagctgctgagac

SEQ ID NO: 37212 - DNA, 120 bp, Artificial Sequence
  ENSG00000054654_185 (sequence is synthesized)
agctttgcaagacattgctgatgtactccagctgctatgtaatgaacttgaaagcctgttctgtagctggcatcaggactggtgaattaggccctctgctgccattgcagtttggggatg

SEQ ID NO: 37213 - DNA, 120 bp, Artificial Sequence
  ENSG00000054654_186 (sequence is synthesized)
ggacagagtagtcaggacaggtgctgtgaacttgccatgtaggacataggcaaggctgggaggaccaggtggtggctcagaggtgacgtctaggcagcaaatagctggatcagggggact

SEQ ID NO: 37214 - DNA, 120 bp, Artificial Sequence
  ENSG00000054654_187 (sequence is synthesized)
cgatatcacctcgttccaagtctgtgctttctctctagtgttacatctctaaggcaaaagcttcatatgaaatctgaagtaaaagcaagtgtctcaactgagtgtgaccctgtaagaata

SEQ ID NO: 37215 - DNA, 120 bp, Artificial Sequence
  ENSG00000054654_188 (sequence is synthesized)
atacatgttgtatctcttgttttagcagtaatcatggacttggtgccatgttgctaggccttttctgtgggtatagtaaatttcagactacattaaagacttgcttagtttcctctatgg

SEQ ID NO: 37216 - DNA, 120 bp, Artificial Sequence
  ENSG00000054654_189 (sequence is synthesized)
tgttttttctattattgttaatgaacgctcagaaagtgaatactctttagttctgaactgagtgaacagatgcattttgtatcttctgctactgtaggtcaaatcaaaacgtggcaacca

SEQ ID NO: 37217 - DNA, 120 bp, Artificial Sequence
  ENSG00000054654_190 (sequence is synthesized)
tgtggtggcgcatctcttaaaaaacaggaccttcgctactctctgcacactgcctgcggagcggccctgctctgcaggagcagtcacggagctaataaagaaattcattttcaaaggagg

SEQ ID NO: 37218 - DNA, 120 bp, Artificial Sequence
  ENSG00000054654_191 (sequence is synthesized)
gagagatgggagtgtgagaccattgtcagtgggcatggtaccgaggagagttgctttctctccattagaaagtttcaccagggaaggggcttacatatccttacatgtcagctgataccc

SEQ ID NO: 37219 - DNA, 120 bp, Artificial Sequence
  ENSG00000054654_192 (sequence is synthesized)
tggccttgggaccacttgtgcagctgtgcttccactggccacacgggtcctttccatagcagtgtgctcagatgttttgaacaacacatagaatttggaatatacaggagaacctataag

SEQ ID NO: 37220 - DNA, 120 bp, Artificial Sequence
  ENSG00000054654_193 (sequence is synthesized)
cctgttccccctgcgtccagcaccccttataaaccaccctatgtaagtcttaacttcactgggagtacagcctatgtctgtgccttcgacagatgggagatgattcaagcacaggagctt

SEQ ID NO: 37221 - DNA, 120 bp, Artificial Sequence
  ENSG00000054654_194 (sequence is synthesized)
gtgtatttttaataaaaattttcaatactaaaatactggaggcatagaactgtatcaaaataaatagggaggctgggcatggtaactcacacctgtaatcctagcattttcgaaggctga

SEQ ID NO: 37222 - DNA, 89 bp, Artificial Sequence
  ENSG00000054654_195 (sequence is synthesized)
ctgaggctggtggatcatctcgaactttggtaaaaggttcaccaagctcatggtgaaaccttatctctacaaaaaatacaaaaattagc

SEQ ID NO: 37223 - DNA, 84 bp, Artificial Sequence
  ENSG00000054654_196 (sequence is synthesized)
aaatacaaaaattagctgggtgtggcagcaagtacctgtagtcccaggtgagaggatcgcttgagcctgggaggaggaaggctc

SEQ ID NO: 37224 - DNA, 120 bp, Artificial Sequence
  ENSG00000054654_197 (sequence is synthesized)
gaccctgtctcaaataaaaaagaaatagagtaataagtactttgacttactgatattttcacatgagagataatattcccaaataacttggcctttttccaaatatttaagactctattt

SEQ ID NO: 37225 - DNA, 120 bp, Artificial Sequence
  ENSG00000054654_198 (sequence is synthesized)
attgggtgtgtgtacaaatggcttacagaatctctacttttacatatattctaagatgctgtttaatttagtgtccactggggaattcagttgtgttgaaatcatatttgataaaaaata

SEQ ID NO: 37226 - DNA, 120 bp, Artificial Sequence
  ENSG00000054654_199 (sequence is synthesized)
aagacctaatttggactttaaaatcccctttcttgaaagaggtattttaacttgtttatacatctttttccagttatatttcttttaaaaattgccgctgaacttcagtacatttctggt

SEQ ID NO: 37227 - DNA, 120 bp, Artificial Sequence
  ENSG00000054654_200 (sequence is synthesized)
tggaacgtagtggaggatatcctgaaatgaaaggcagagttcacgggggcgtatgaaaggcctgtggtaccctaaaatcttgatcactttagggtagactatctattactttaatgtttt

SEQ ID NO: 37228 - DNA, 120 bp, Artificial Sequence
  ENSG00000054654_201 (sequence is synthesized)
gatgataagttatgtttttaagcttatcaatggcactaaatgttcactgtttaattccttgctttgatggtaccattctttactgatagaatcacccctcttctaacaatttgaagtctc

SEQ ID NO: 37229 - DNA, 120 bp, Artificial Sequence
  ENSG00000054654_202 (sequence is synthesized)
atctttttttgtttgcttgtttgcctttaattttgcccattgcatgggccttaacaattgatgcccaaaccttgaaacgtaaacattgagataaaattcttatttgggcaacgttaaata

SEQ ID NO: 37230 - DNA, 120 bp, Artificial Sequence
  ENSG00000054654_203 (sequence is synthesized)
gagaatagtctgtggagaagttggacgtagccaggataggaaaatgtagctgtcctggtcttgctcctgctgatcttcctggtggctctgtgttactttgcttgatgtaattcccaagaa

SEQ ID NO: 37231 - DNA, 120 bp, Artificial Sequence
  ENSG00000054654_204 (sequence is synthesized)
gtcagaactattataaatcatctgccattggagatagccacatctccatcacccttctttcgtataggatcttaagaaggtggtatgtctgtgtactggtttggaaaagtgtcgtgaggg

SEQ ID NO: 37232 - DNA, 120 bp, Artificial Sequence
  ENSG00000054654_205 (sequence is synthesized)
ccagtgcaatacaatatattttaattgccaaaaacttgcttgtacagagtgaaaagtcttatttaacctttgcctgatgatcaatttggtaactgtataattatgtactaagtaagttgt

SEQ ID NO: 37233 - DNA, 120 bp, Artificial Sequence
  ENSG00000054654_206 (sequence is synthesized)
ataaatctttccatttagaaagtagaagagttaaagggacattagtcttctttctatttcacaaagttcctaaagacttagtgagaaaatttggagattttgacttgccatcattccttt

SEQ ID NO: 37234 - DNA, 120 bp, Artificial Sequence
  ENSG00000054654_207 (sequence is synthesized)
tcttacaagtatatattcttctgattctgacaaatgtatttttcctaacaatcagttctatgaggttcttccccctttgtttttacatctgtgtttacatagttatgtttatgtatttat

SEQ ID NO: 37235 - DNA, 120 bp, Artificial Sequence
  ENSG00000054654_208 (sequence is synthesized)
ttatgtgcttccagcttgtaaagtaatctaaaaatccaatacatggccatattttaaaaagtgaaacagcagccagacatggtggctcatgtctgttatcccagcactttgggaggccga

SEQ ID NO: 37236 - DNA, 89 bp, Artificial Sequence
  ENSG00000054654_209 (sequence is synthesized)
cagcattgcgagtttaggcaagatgatgtgtgcctgtagtttcagctactcaggagactgagacaggaggattgcttgaacccagaagt

SEQ ID NO: 37237 - DNA, 120 bp, Artificial Sequence
  ENSG00000054654_210 (sequence is synthesized)
tcaggagactgagacaggaggattgcttgaacccagaagttcaaggttgcagtgaggtgagattgtggcactgcattccagcctagatgatggagcgagatcctgtctctaaaaaaaaaa

SEQ ID NO: 37238 - DNA, 120 bp, Artificial Sequence
  ENSG00000054654_211 (sequence is synthesized)
aaaaaaagcaaactataaacaacccatgcaattttagctaagtttccacaacaataaacacgcatctaaaataggaaagatgggtgatgtatgtaaataataaaattaagatgaatttcc

SEQ ID NO: 37239 - DNA, 120 bp, Artificial Sequence
  ENSG00000054654_212 (sequence is synthesized)
ctttagatattgcagaactctttaagataatagagtgatctgactgacattaaatgctggaccaatggtgaattttagactggattttaacatgattcttgggaagaaaaaccttttaaa

SEQ ID NO: 37240 - DNA, 120 bp, Artificial Sequence
  ENSG00000054654_213 (sequence is synthesized)
tgattcttgggaagaaaaaccttttaaatattagggatgtggtagctcatggctgtcatcccagtcctttgggaggctgaggtaggaagactgtttgaggccaggagttcaagaccagcc

SEQ ID NO: 37241 - DNA, 120 bp, Artificial Sequence
  ENSG00000054654_214 (sequence is synthesized)
aaattaatgttgatattttaaaagtatgattgaagtagttctcttatgttattaatgtttaagtgtatggaaacctacttcactgtgtaagagtgagatgaatgtaattcagacactctt

SEQ ID NO: 37242 - DNA, 120 bp, Artificial Sequence
  ENSG00000054654_215 (sequence is synthesized)
gttggcatacgggagaaggtgaagaagttctctgtagtatcctgatttctgaggactttctctgaagttttgagagcatgctgtttggcactcctggtctcatttttagaactgtatttt

SEQ ID NO: 37243 - DNA, 120 bp, Artificial Sequence
  ENSG00000054654_216 (sequence is synthesized)
tccgcatttcaattactcttttgctctaaaacagtatttccaatgacatgaagagttgtgttagcaagtaatactaagaatttgtactacttgattataactggttgaatgagacatttt

SEQ ID NO: 37244 - DNA, 120 bp, Artificial Sequence
  ENSG00000054654_217 (sequence is synthesized)
cagttgtcttttctgacgtcagtttccatttcatacttgaaaaaataagttgcaatgggtcttaagacaaaaggaagaaaattgaagcaacttacaatttttgtgacttacatgtaacca

SEQ ID NO: 37245 - DNA, 120 bp, Artificial Sequence
  ENSG00000054654_218 (sequence is synthesized)
ccagacactttttgggctcattttatagatggttaaatagctccactctcacacagagcagacctcttgtcctagagtgtgtcgctgggacatggtggaactgtgacaaggaagagtaca

SEQ ID NO: 37246 - DNA, 120 bp, Artificial Sequence
  ENSG00000054654_219 (sequence is synthesized)
actttactgtgtgctctgtgaccatcaaacaactttgcaatctgattataccccttcatggcagagagaactacgaaaataatggagggaccaggggccaaaaagagtgacttcagtacg

SEQ ID NO: 37247 - DNA, 120 bp, Artificial Sequence
  ENSG00000054654_220 (sequence is synthesized)
atgttaatttgagacatgtatttccttctgagctgatgtttatagtgttgtttgtctttgacagcaacaaaaaagtacatgttcatcaagctgtgatttttttttcttttttttaattat

SEQ ID NO: 37248 - DNA, 120 bp, Artificial Sequence
  ENSG00000054654_221 (sequence is synthesized)
gtcagaacaaagactgtgtgtgtgaggaaaaagctggagatatttgtttactggaaggaagaaaactgagattaaaaattgcagttagcaggggagaaggtgtcttccttcccgctggca

SEQ ID NO: 37249 - DNA, 120 bp, Artificial Sequence
  ENSG00000054654_222 (sequence is synthesized)
ttgccctgtgcctgcgagccagccagccgtgctcacaaggagccttggagagggctgcgtccgcctctgtgcaagatgctgaaccagtgaagagggcacgctgggcagggggaggggctg

SEQ ID NO: 37250 - DNA, 120 bp, Artificial Sequence
  ENSG00000054654_223 (sequence is synthesized)
tataaatgctacctagacactaaagcaccactgtattcctagcaagatacccttcaaaggaaaggggcccatctcatttcttcactgttaatatgaaatgaatccagttgttcttcagat

SEQ ID NO: 37251 - DNA, 120 bp, Artificial Sequence
  ENSG00000054654_224 (sequence is synthesized)
actccctcagcttgtggagcctcaggtcagtctgtatctacatggtgcaaatagcctgtttatctttgaaaatccaacaagcattcattaaataaacatgtatattctccagaaagcaaa

SEQ ID NO: 37252 - DNA, 120 bp, Artificial Sequence
  ENSG00000054654_225 (sequence is synthesized)
ttacagaatttatatgcctggcacagtgtcttgtgccagctacttgtgaggctgagattggaggactgtttgaggccaggagtttgagaccagactggacaacatagagagaccctgtct

SEQ ID NO: 37253 - DNA, 120 bp, Artificial Sequence
  ENSG00000054654_226 (sequence is synthesized)
ctgggcgacagaatgagactccattccgaaaaataaaaaataaaaaagcctattttctgtattcttcggtgacaaaatctgagataactttctatttcctgggctgtttgggtgctggcc

SEQ ID NO: 37254 - DNA, 120 bp, Artificial Sequence
  ENSG00000054654_227 (sequence is synthesized)
tgctgcttgcagctttttagatcaggactgcaatggagatacaattaaatcctaaaggtactttagaagcagggggtgttgtaatgtcttttctagataatggtgtgacactatgaagag

SEQ ID NO: 37255 - DNA, 120 bp, Artificial Sequence
  ENSG00000054654_228 (sequence is synthesized)
atatcaagtttaattcttacaaattagaaagcatcatctgactaaactgagtgtctctggggcttaatcagcttgtatcactagtggggttttgtcatgcaaactgcactcctttaaatc

SEQ ID NO: 37256 - DNA, 120 bp, Artificial Sequence
  ENSG00000054654_229 (sequence is synthesized)
ataaggatgtgctggaaggctgctttcactttttagaattaaacttttcccccagtctcgtgagtattgcaactctcttaatgcttttaggagcttcaaagcatccttaagaaagggaaa

SEQ ID NO: 37257 - DNA, 120 bp, Artificial Sequence
  ENSG00000054654_230 (sequence is synthesized)
aaacttctgaatgtttgtaaccacagattgatgatttggttacaaagactctctgttggtgatggtttctgagaactggaagatggagtctagctctgttgcccaggctggagtataatg

SEQ ID NO: 37258 - DNA, 74 bp, Artificial Sequence
  ENSG00000054654_231 (sequence is synthesized)
gcccaacaccacgcctagccaatttttgtattatagagatggggtttcactgtgttaaccagaatggtcttgat

SEQ ID NO: 37259 - DNA, 120 bp, Artificial Sequence
  ENSG00000054654_232 (sequence is synthesized)
ggcgtgagccactgcacccggccaagtacttacctttgtaagaaatcataagattctcatttttttctccattaactacataaagcaggacaatggttggcaccattgcttcctcactga

SEQ ID NO: 37260 - DNA, 120 bp, Artificial Sequence
  ENSG00000054654_233 (sequence is synthesized)
caccattgcttcctcactgaactgtggatgggtctcagcatgcaaaggaagtagaaagtgaatgggaggacggcggctgttgctcagaagttccttccataatttgatttattaacacta

SEQ ID NO: 37261 - DNA, 120 bp, Artificial Sequence
  ENSG00000054654_234 (sequence is synthesized)
tttgggttgttcatggcttggttttccctccctttttcctccagtgaacggtgacttgacagaggtacataggaggctacttgttctcttgttggctgcttgtatttgctttctggaagg

SEQ ID NO: 37262 - DNA, 120 bp, Artificial Sequence
  ENSG00000054654_235 (sequence is synthesized)
agcagcagcccacccatggggtacagcagaaatattatctgatgatgactaaaaatgccatgtttattcgtgaagaggttttccagttttttcctatgaccatgcattttctcttcataa

SEQ ID NO: 37263 - DNA, 120 bp, Artificial Sequence
  ENSG00000054654_236 (sequence is synthesized)
atgttatttttcccaaattggggaactgcatcactatcatcatcaaaggacaagactccagagaccccacctctctccaagccaccacagctttggctggactttatcagttggggaggc

SEQ ID NO: 37264 - DNA, 120 bp, Artificial Sequence
  ENSG00000054654_237 (sequence is synthesized)
cgtgtctacctctgccttctgtggacaccatgcgccttggtccttgtgtcatggtgtatttacactgccgtactcacccataactgcgtgctccttacaaaaccccatccaagccagagc

SEQ ID NO: 37265 - DNA, 120 bp, Artificial Sequence
  ENSG00000054654_238 (sequence is synthesized)
cgtctcgatgccaaccccctctcctcccttcaggcctgtgcagagggaatttttcatggtgcctgttttgatgatttttttctccatctaactgaagtcctttggcatgggccaagcttt

SEQ ID NO: 37266 - DNA, 120 bp, Artificial Sequence
  ENSG00000054654_239 (sequence is synthesized)
cttcatggtggcttggtttggaactgtttccttgctttactgggatcccctggtggaaaggggtggggggttggggcggtaaagggtgctgatgatttgccacaggagggaaaaaacctt

SEQ ID NO: 37267 - DNA, 120 bp, Artificial Sequence
  ENSG00000054654_240 (sequence is synthesized)
cctttccttgatttgcagctctaatcctcatccttagccccatccctatctgccatggtgggtcggggagagccctgaggagccttttggttcccaagtccatcttgatgttcactcttc

SEQ ID NO: 37268 - DNA, 120 bp, Artificial Sequence
  ENSG00000054654_241 (sequence is synthesized)
ccctcactcctgagaggccttctgccatcttggtccccagacccggccttgccactcagtgtccctaccactcgagaccctggctccaaaacgccactcatcccacagcaaatcatgttg

SEQ ID NO: 37269 - DNA, 120 bp, Artificial Sequence
  ENSG00000054654_242 (sequence is synthesized)
gtcgtgctccgttgtgtacccatctagtgaaggcacagtgttgctgagttgcatgactcatctcattctcttctgggacatactgacattttgcaaacatgcatgctttgcaaggaaagc

SEQ ID NO: 37270 - DNA, 120 bp, Artificial Sequence
  ENSG00000054654_243 (sequence is synthesized)
tgcagaactcattttcatactgtaacctgatgccatgtcacccgtgacccgttcagtaggagagaatagactgtcgcttgctgtctttcgtttcaggtaaatccatttcggatggccact

SEQ ID NO: 37271 - DNA, 120 bp, Artificial Sequence
  ENSG00000054654_244 (sequence is synthesized)
ctttgcagactcaagaagggcccagtgcctaagtcttctctgcattcacatcaatgaatcacattctttaatcgtttatgaaggggcacagggggccatgaaaataacaagacctaaggt

SEQ ID NO: 37272 - DNA, 120 bp, Artificial Sequence
  ENSG00000054690_0 (sequence is synthesized)
gcagcccgggactccggcgagagcgacgcaaggtcggctgcggcggcggcccgagggcgcccgtgtgcccagtgcgcggcggggacggccgcgagctcgctggagggctccccagaataa

SEQ ID NO: 37273 - DNA, 120 bp, Artificial Sequence
  ENSG00000054690_1 (sequence is synthesized)
ataatccagaagtcgattccatcatggcagaactcaaggtggaggcgccggccagcgtagactggcagaaacgctgcctgaccctggaaactcagcttttccggttccgcctacaggcca

SEQ ID NO: 37274 - DNA, 120 bp, Artificial Sequence
  ENSG00000054690_2 (sequence is synthesized)
gcaagataagggagctgctggctgacaagatgcaggagctggagcagaggctgctggaggcagagcagagagcagagaacgctgagacccaggtgggtgtcatggaagagaaggtaaaac

SEQ ID NO: 37275 - DNA, 120 bp, Artificial Sequence
  ENSG00000054690_3 (sequence is synthesized)
tatccaatctgaagaatgtggactctgaggggagcctgcaccggaaataccaagaattgctgaaagccataaagggcaaagatgagctcatcagccagctagaggctcagctggagaagc

SEQ ID NO: 37276 - DNA, 120 bp, Artificial Sequence
  ENSG00000054690_4 (sequence is synthesized)
agaagcagatgagggcagaggaagcaaaaactgttcaagaaaaagctgcaaagatcaaggaatgggtgacactcaagttggcaaagcttgagatggagaatcagcatctgaaaagccata

SEQ ID NO: 37277 - DNA, 120 bp, Artificial Sequence
  ENSG00000054690_5 (sequence is synthesized)
atcagcgcctggtggagcaggtgggatcccttcaagatgcgctagaagctattcagatagctccttcacggaagctgctggtgcccccctacggagctgcagagcaggattctgtccctt

SEQ ID NO: 37278 - DNA, 120 bp, Artificial Sequence
  ENSG00000054690_6 (sequence is synthesized)
cagagccgggaatccagcctatgggccaggacagtggctcccaggcccagggtctgaaggcagctgtgcttgcaccttccccaggtgccctgcagagcaaggactctgtttctgaagcag

SEQ ID NO: 37279 - DNA, 120 bp, Artificial Sequence
  ENSG00000054690_7 (sequence is synthesized)
caagccccttggaggattctagttccagcacggtccattctggggaaacagtagaggccaagccccttcaacctcatctgggaagagagagccctccccaccagccatgcatgaagcttc

SEQ ID NO: 37280 - DNA, 120 bp, Artificial Sequence
  ENSG00000054690_8 (sequence is synthesized)
ttaccttcagatgtagttcagcttcctggggtgagggtctggttactgctcagagagggatgctccctgggacaaagacctctgccagggaaggtggtcctggcagcagtctgaccctac

SEQ ID NO: 37281 - DNA, 120 bp, Artificial Sequence
  ENSG00000054690_9 (sequence is synthesized)
caaaggtgcgggctcctggcaccccgcgggacagcatccagttggccaaaaggcaccacagccagccccaggtgggccatgggcactttggccgtgtggtgaacattgagactgaggcct

SEQ ID NO: 37282 - DNA, 120 bp, Artificial Sequence
  ENSG00000054690_10 (sequence is synthesized)
tctcagccctccacccctctggccttcctgagctggagtcccgagctaggtcccgggaggaaccagagaagatggagatggaggagccacccccagcagggaagaatgaggaaagagaga

SEQ ID NO: 37283 - DNA, 120 bp, Artificial Sequence
  ENSG00000054690_11 (sequence is synthesized)
gcccaaaggcccttggagctgagctggaggaagtggagctgggtaacaagccacctacacccccgctgcaccagttttcatcctgggagagccggatctatgctgtggccacatcgggca

SEQ ID NO: 37284 - DNA, 120 bp, Artificial Sequence
  ENSG00000054690_12 (sequence is synthesized)
tgcggctctcagatatgtctcccagaagtaatactgcatgctgcgcttcaagccctcctgcccttgtttcccctgggtctttctctggcctggtctacaagaatgtcactgtgcctgtct

SEQ ID NO: 37285 - DNA, 120 bp, Artificial Sequence
  ENSG00000054690_13 (sequence is synthesized)
acacagcactgaaggggagagctacacagatcagcaacatgccctttatggacgagtcctctgggtctgacgatgactgcagctctcaggcgagtttccgaatctcggtcccctcctctg

SEQ ID NO: 37286 - DNA, 120 bp, Artificial Sequence
  ENSG00000054690_14 (sequence is synthesized)
agtccaggaagaccagcggactaggcagcccccgggccatcaagagaggcgtctccatgtcctcactgagctccgagggtgactacgccatccccccggacgcctgctcactggacagtg

SEQ ID NO: 37287 - DNA, 120 bp, Artificial Sequence
  ENSG00000054690_15 (sequence is synthesized)
actactcagagcctgagcacaaactgcagcgcacctcatcctactccaccgacgggctgggcctgggcggggagtcactggagaagtcgggctacctgctgaaaatggggagccaggtga

SEQ ID NO: 37288 - DNA, 120 bp, Artificial Sequence
  ENSG00000054690_16 (sequence is synthesized)
agacgtggaagaggcgctggtttgtcctgagacagggacagattatgtactacaagtccccgagtgatgtcatccggaaacctcaaggccaagtggatctgaactcccgctgccaaattg

SEQ ID NO: 37289 - DNA, 120 bp, Artificial Sequence
  ENSG00000054690_17 (sequence is synthesized)
ttcgaggggagggttcacagacgtttcagctcatctctgagaagaaaacctactacctgacggccgattcacccagcctgctggaggagtggatccgagtactccagagcctgctgaagg

SEQ ID NO: 37290 - DNA, 120 bp, Artificial Sequence
  ENSG00000054690_18 (sequence is synthesized)
tgcaggccaccgggcctccagctctgcttcggggtggcaccaagcccaccgtgaagggctggctgaccaaggtaaagcatggccactccaaggtggtctggtgcgctcttgttgggaaaa

SEQ ID NO: 37291 - DNA, 120 bp, Artificial Sequence
  ENSG00000054690_19 (sequence is synthesized)
tcttctactactatcggagccatgaggacaagcgacccctgggctgcctgcctgtgcgggatgcgcacatagaggaagtagatcgatcctgtgactcagacgaggactatgaggctggag

SEQ ID NO: 37292 - DNA, 120 bp, Artificial Sequence
  ENSG00000054690_20 (sequence is synthesized)
gaaccagacggttgctttcctcccactgcaccctggtgatccaccccacagagcacagccccacctacctcctcattggcaccaagcatgaaaaggatacgtggctctaccacctcacag

SEQ ID NO: 37293 - DNA, 120 bp, Artificial Sequence
  ENSG00000054690_21 (sequence is synthesized)
tggctgcaggtggcagcagtgccaaggtgggcactgcctatgagcagctcattggaaaactgatggatggtgaaggagatccagattcgccgctctggaggcaccccatgctgtgctaca

SEQ ID NO: 37294 - DNA, 120 bp, Artificial Sequence
  ENSG00000054690_22 (sequence is synthesized)
gcaaagacggcctatacgcctccctcaccaccctgccctctgaggccttgcagacggaggccctcaagctcttcaagtcctgccagctcttcatcaacgtgccggtggaagctgcctcgg

SEQ ID NO: 37295 - DNA, 120 bp, Artificial Sequence
  ENSG00000054690_23 (sequence is synthesized)
tggactaccatgtgtccctggcccagaccgcactgcaggtctgcctggttcaccccgagctgcagagtgagatctactgccaactcatgaagcagaccagctgccgcccacctcagaagt

SEQ ID NO: 37296 - DNA, 120 bp, Artificial Sequence
  ENSG00000054690_24 (sequence is synthesized)
actccctcatgcagtgctggcagctcctcgctctgtgtgctccacttttcctgcctcagcatcacttcctctggtatgtcaagcagcagctccaacgccatgcagatcccagaagtgaaa

SEQ ID NO: 37297 - DNA, 120 bp, Artificial Sequence
  ENSG00000054690_25 (sequence is synthesized)
ctggccagtatgccacctactgccagcgggcagtggagcggaccctgcggaccggggagcgggaagccaggccatcgcgcatggaagtggtgtccatcctgctgcgtaaccccttccacc

SEQ ID NO: 37298 - DNA, 120 bp, Artificial Sequence
  ENSG00000054690_26 (sequence is synthesized)
actccttgcccttcagcatccccgtgcactttaccaacgggacttaccatgtggttggttttgacggctcttccacggttgatgagttcctccagcggctgaaccaggagataggcatga

SEQ ID NO: 37299 - DNA, 120 bp, Artificial Sequence
  ENSG00000054690_27 (sequence is synthesized)
ctggctttgccctcttcacggacgatccctcgggcagggacctggagcactgcctgcagggaagtgtcaagatctgtgatgccatctccaagtgggaacaagccatgaaggagctgcacc

SEQ ID NO: 37300 - DNA, 120 bp, Artificial Sequence
  ENSG00000054690_28 (sequence is synthesized)
ccggaaagtctgagggtgggacacgcgtcgtgaagctgatgtacaagaacaggctgtactttcgcagtcaagtcaaaggggagacggaccgagaacggctgctccttgcctctcaaacca

SEQ ID NO: 37301 - DNA, 120 bp, Artificial Sequence
  ENSG00000054690_29 (sequence is synthesized)
gtagagagatagtggcagggaggtttcctatcaacaaggaattggctcttgagatggctgccctgatggcccaggtagaatatggggacttggagaagcctgccctgccaggccctggag

SEQ ID NO: 37302 - DNA, 120 bp, Artificial Sequence
  ENSG00000054690_30 (sequence is synthesized)
gcacatcccctgccaaggctcagcatcttctccagcaggtcctagacaggttccaccccaggcgctatagacatggggcccccgctgaacagctgaggcacctggcagatatgttgacca

SEQ ID NO: 37303 - DNA, 120 bp, Artificial Sequence
  ENSG00000054690_31 (sequence is synthesized)
caaaatgggcaacattgcaaggatgctcccctcctgagtgcatccgcatctacctgaccgtggccaggaaatggcctttctttggtgctaaactttttgctgctcagcctgcccagctgt

SEQ ID NO: 37304 - DNA, 120 bp, Artificial Sequence
  ENSG00000054690_32 (sequence is synthesized)
cttccaaggagaacgctctggtgtggattgctgtgaatgaggatggcgtcagcatcctggaccacaacactatgcaagtgcacatcacttacccctactcttcagtgacaacgtttggtg

SEQ ID NO: 37305 - DNA, 120 bp, Artificial Sequence
  ENSG00000054690_33 (sequence is synthesized)
gctgcagggatgacttcatgcttgtgattagatctatcccagacaagagctctggaaaaagccacattgagaagttgatcttccggatggctgctcccaagattgcagaagctaccttca

SEQ ID NO: 37306 - DNA, 120 bp, Artificial Sequence
  ENSG00000054690_34 (sequence is synthesized)
tcatggccagctatatgaaccattgcactacaactgtgaacccccccaccaacccacccggagcctgccagctgtgggaactggatggacgacagttcttttcttctgtttcctgtgcta

SEQ ID NO: 37307 - DNA, 120 bp, Artificial Sequence
  ENSG00000054690_35 (sequence is synthesized)
ccaaggggccaacgttgctgtgaatatttctcctacccgattccccaacaccactagtgcctctggatttagagatatatatcctagggtatgatactactgtgacgggtctaacagccc

SEQ ID NO: 37308 - DNA, 120 bp, Artificial Sequence
  ENSG00000054690_36 (sequence is synthesized)
ccggctactcttgttctgtgaaatgtgtattttagtctctgtgaagcctttactctctaggtgccttataatgtttcagggctcaactttttaaaatccagacccagtgttaaaaccatt

SEQ ID NO: 37309 - DNA, 120 bp, Artificial Sequence
  ENSG00000054690_37 (sequence is synthesized)
tattccttttttcataagaataatgactccagatgctacctgattctagacatagacagggatgatccactgttactgagggcatcagtgctataagttaaggctttctgcactggtact

SEQ ID NO: 37310 - DNA, 120 bp, Artificial Sequence
  ENSG00000054690_38 (sequence is synthesized)
ataagttaaggctttctgcactggtactctcaaggaagctaattttctttctggggggggcgggggacacagtgtcactatgtcacccagtccacagggttcaagcaattctcctgcctc

SEQ ID NO: 37311 - DNA, 120 bp, Artificial Sequence
  ENSG00000054690_39 (sequence is synthesized)
gctgggattacaggcatgagccatcgcccagcccagaagctaattttttaatattgtatatggtcttatttatacttgaagttttgtgaacgtcgctaaacaggataggactaaaatttc

SEQ ID NO: 37312 - DNA, 120 bp, Artificial Sequence
  ENSG00000054690_40 (sequence is synthesized)
caattctcctacactctgtcagaagcctagaactcactaaactgggctgcctttcccaaatgggaaaggtgctgacagagttggagaaaaaagaatagactcatttttccccattattgg

SEQ ID NO: 37313 - DNA, 120 bp, Artificial Sequence
  ENSG00000054690_41 (sequence is synthesized)
tatgtaggcattggtacagccccttctggggcagtctttgcaggataacatgctatacctgctaagattcaagctgttttcctcacactggactttaggccaaacccagtaccacgcaat

SEQ ID NO: 37314 - DNA, 120 bp, Artificial Sequence
  ENSG00000054690_42 (sequence is synthesized)
gtgcaagcaagggcaggaggtaggtccaatctgacccctccctgtctcattttaatgactggacagcgctcggtgaaggctgtgttcactgtagtgggccatcatttgtttccttcttct

SEQ ID NO: 37315 - DNA, 120 bp, Artificial Sequence
  ENSG00000054690_43 (sequence is synthesized)
tgtaaaagaccaagcaaatgcactctgctttttgctgctgtaagaccaccaaaaatgagtcagaaacacagaagactatttcaggcatgtgggcctggatatgctccttgagacttctgg

SEQ ID NO: 37316 - DNA, 120 bp, Artificial Sequence
  ENSG00000054690_44 (sequence is synthesized)
caaacttctgctgggaattagtttgagggtgagggtacatatgtgacatttgccctagcctaagagtagcaggtaaaaaaaagtttctttcatcttttgccttactgataataccataat

SEQ ID NO: 37317 - DNA, 120 bp, Artificial Sequence
  ENSG00000054690_45 (sequence is synthesized)
ccccctcaattcagaccttctgattgagtgcagaggagactagacagtctcctctagacaggttgtagacacaccctcccctaacaaaaacaaaacgaaagagttcatactctgattttc

SEQ ID NO: 37318 - DNA, 120 bp, Artificial Sequence
  ENSG00000054690_46 (sequence is synthesized)
caacatctaggaaactgagttttatttcctagctctaaggcagccttactatatgtcagtaaagtgctgaaaactgtatatttagcagtagcacccaaaaccaagcctttaaccccaaca

SEQ ID NO: 37319 - DNA, 120 bp, Artificial Sequence
  ENSG00000054690_47 (sequence is synthesized)
atgtgtgtatcttttgcacagcaaaaactgcgaggccagaactagtttatctgaacacctcagctgctgtaagcttctcctctctcaccccgtaaactgacaagcatgatgaaaaaagaa

SEQ ID NO: 37320 - DNA, 120 bp, Artificial Sequence
  ENSG00000054690_48 (sequence is synthesized)
gcacatccaagtttctgcctcttttaaatgtacttgactttgcaaggcaagtagttttacagccatttctgttcacacttttcaccccacaacttggggatctagctgagacatttctac

SEQ ID NO: 37321 - DNA, 120 bp, Artificial Sequence
  ENSG00000054690_49 (sequence is synthesized)
ctcgaacaagtcacatgtaccacaggttcctgaataattcctgcagggctggtgacagacataacagctctggttttataatatcttgggtatctctaaggccaataaggataacattat

SEQ ID NO: 37322 - DNA, 120 bp, Artificial Sequence
  ENSG00000054690_50 (sequence is synthesized)
ctacccagagagtttagaagaaaagtaggagtccaaaggaagagtaaacaagaatggagctgtgttcacactgaatttggggtcaatctatttcccccaccctctctcctccccaaccct

SEQ ID NO: 37323 - DNA, 120 bp, Artificial Sequence
  ENSG00000054690_51 (sequence is synthesized)
tcaggaaccctttagtttattaatcttatacagaagaaactaacttagaaacaaaggattcaatatttgcttatttattctttgttaacatgagagtcccatgtctgaaaaccaaagtcc

SEQ ID NO: 37324 - DNA, 120 bp, Artificial Sequence
  ENSG00000054690_52 (sequence is synthesized)
aatttctgtctggccttttgtctcatccttcttggcaaaagtagcttttgaactgatataaaaaaaaatgctgagtaacagaaaagtattaatgtgcttgacaccatgactgaaatacta

SEQ ID NO: 37325 - DNA, 120 bp, Artificial Sequence
  ENSG00000054690_53 (sequence is synthesized)
tgatcttgtttgtcaataaaaagcagctatctgtgaaccaggtaactgtgtgttttggaagatctgtttattaacagtaaataaataagccctgtacagaacacaggcactaggttgaca

SEQ ID NO: 37326 - DNA, 120 bp, Artificial Sequence
  ENSG00000054690_54 (sequence is synthesized)
agagctctggaaaaagccacattgagaagttgatcttccggatggctgctcccaagaagggcactgtgcatctgagaggatctccagaccaacaggagcccacaccactgggcctctgaa

SEQ ID NO: 37327 - DNA, 120 bp, Artificial Sequence
  ENSG00000054690_55 (sequence is synthesized)
atggagatcatggtccccaaagggagtcaaggggagaagatgaacagggccctggcccccctcttgagatctgtcactggcctgctcctggagggaatgccatctgcccagttctctgct

SEQ ID NO: 37328 - DNA, 120 bp, Artificial Sequence
  ENSG00000054690_56 (sequence is synthesized)
gatggctgctcccaagccccagcatcatgcagtcctcagttgggtgcttacgtgctcttctcttccttgcagcagtcctcaaggcagggcagattcctctttaagagctaaccagagcag

SEQ ID NO: 37329 - DNA, 120 bp, Artificial Sequence
  ENSG00000054690_57 (sequence is synthesized)
aacactgggcctccttttctcagaagggcactgtgcatctgagaggatctccagaccaacaggagcccacaccactgggcctctgaacagcacagttatgattccctttggatattttct

SEQ ID NO: 37330 - DNA, 120 bp, Artificial Sequence
  ENSG00000054690_58 (sequence is synthesized)
ctgatgggtgtctgactgtttggtagctcatttggtgctgagcccaaggtgctgccctagtcagcatttctgtgccatcctaaaatgtacctgggcagggagaaaaaagctgttgtgtgc

SEQ ID NO: 37331 - DNA, 120 bp, Artificial Sequence
  ENSG00000054690_59 (sequence is synthesized)
ccttgtctctggagacaagatcgctacacacctacttccctcgagtggctgtgcagcgtccagaagaaaagcctcttcttggcttggtgtagggacagtgaggccccacgaagccactgc

SEQ ID NO: 37332 - DNA, 120 bp, Artificial Sequence
  ENSG00000054690_60 (sequence is synthesized)
ctacacgtgcccactcagaggctcacagctgtgtgcttggaccccctggatgtcaggtggtacccagcacctcacttttaccctttctttcagggcctatgccatgcttataggttgaac

SEQ ID NO: 37333 - DNA, 120 bp, Artificial Sequence
  ENSG00000054690_61 (sequence is synthesized)
gaagcaccataactattaatacctaaagctttcctccaataataatttagtctgtgtccctgtttttctctaaaatgaatgttgccatgaacatcactgtgcacatatatctttgggaac

SEQ ID NO: 37334 - DNA, 120 bp, Artificial Sequence
  ENSG00000054690_62 (sequence is synthesized)
ttatatctacatgtgtctgtaggacagagttctagaggtgggatttctgggcaaattatatacatgttttaatttttgacaggtactgccaaattaccttctaaaaatgccttacacact

SEQ ID NO: 37335 - DNA, 120 bp, Artificial Sequence
  ENSG00000054690_63 (sequence is synthesized)
agagttttttcccccatcttctccccatactctcaccaacactgagatagtcagtcactttaaatgtttgccaatggagatgcaatcattgattgttgcgacgtccccacacatttttaa

SEQ ID NO: 37336 - DNA, 120 bp, Artificial Sequence
  ENSG00000054690_64 (sequence is synthesized)
agctcgcatggcacacttagtctgtggtgtagctttctggccccctagtggcaaggagcgagggtcacagtgggcaggcattcagtcgtgatgggcagctgctttggggaccacagaaga

SEQ ID NO: 37337 - DNA, 120 bp, Artificial Sequence
  ENSG00000054690_65 (sequence is synthesized)
tggtgtgtgggaagggaggcctgagaagcatggaggtcatgacacaggagtgaggccaggagggaccttacactggacagttgtctgttcagagtcccggctgggggttggccacaccat

SEQ ID NO: 37338 - DNA, 120 bp, Artificial Sequence
  ENSG00000054690_66 (sequence is synthesized)
tatgaactcactgcatgaacagggaagctgagatgctgaccaagaaataagaaagggcctccaaaagattgttggtaaaggagggacccaggtatgcccagttcatttacagtggataag

SEQ ID NO: 37339 - DNA, 120 bp, Artificial Sequence
  ENSG00000054690_67 (sequence is synthesized)
ctcacatccctcatgcactggccctttgcctgtgaacacagaaaccaacttgctttggccttttgtatttgcccttgctcctttccacctgctgtatccagacacctccaccagccctag

SEQ ID NO: 37340 - DNA, 120 bp, Artificial Sequence
  ENSG00000054690_68 (sequence is synthesized)
acaggtctgcccacccccaaagccatgctttttcctgcacatgcctggagggggtgggatgggcatcatgccgggccctgagcttcctgagacctcttgtttcaggagagccggatctat

SEQ ID NO: 37341 - DNA, 120 bp, Artificial Sequence
  ENSG00000054690_69 (sequence is synthesized)
ttcttttacagcacctaggagattggctgaagtcagaagcacttcggcttggagactataggtggaatgccgtgtttccaagactaggagaaaaccagctgttccccattcccctaacag

SEQ ID NO: 37342 - DNA, 120 bp, Artificial Sequence
  ENSG00000054690_70 (sequence is synthesized)
agcagctagggctggcctctattctgtagcacagagctttccatccagtgtgctgtggcagcatgggttctagggacatcaaaagaatgatcgcctctgcctttgagatggttagtaggt

SEQ ID NO: 37343 - DNA, 120 bp, Artificial Sequence
  ENSG00000054690_71 (sequence is synthesized)
gaggtggctggaaatcactgcttagcagatccctggatgtgccttctttctcagaaagttattatagttcaaaatctctaactatggatatatctgatgggttgtttctgtttccccagc

SEQ ID NO: 37344 - DNA, 120 bp, Artificial Sequence
  ENSG00000054690_72 (sequence is synthesized)
ttttttatagaagaataaaaaaccaaaagtgaaatttcctctcacgtcgcttttccctaattcctaagcccagaggaagctatcatgaatggtttagtgtttattcagtaaggccttccg

SEQ ID NO: 37345 - DNA, 120 bp, Artificial Sequence
  ENSG00000054690_73 (sequence is synthesized)
atgcatttataaatatgcagcacactctcactgtctcctgtgtgcacacaaaaggtgctcatatacatgtcattctatgccttgcttgttcccctaaccacgtgaataaccacgtgtcag

SEQ ID NO: 37346 - DNA, 88 bp, Artificial Sequence
  ENSG00000054690_74 (sequence is synthesized)
cttgcttgttcccctaaccacgtgaataaccacgtgtcaggtcatccttccctacctcctcctttttatttttccgagacagagtctg

SEQ ID NO: 37347 - DNA, 120 bp, Artificial Sequence
  ENSG00000054690_75 (sequence is synthesized)
tcagcctcctcacaatacccactctcctgcttcccccgaagcacatgactgccactctatgtcctgatgaaagtccctaccccacgtaaccccacaataaatacaaaatcagttggctgg

SEQ ID NO: 37348 - DNA, 120 bp, Artificial Sequence
  ENSG00000054690_76 (sequence is synthesized)
ctcttccttgcagcagtcctcaaggcagggcagattcctctttaaggtgctcgcatgttacccctgggttctgctgacccaacattagctacaaagtgggacagtcccacagtgctccct

SEQ ID NO: 37349 - DNA, 120 bp, Artificial Sequence
  ENSG00000054690_77 (sequence is synthesized)
cttccttgttgtggggaagaccgcaaaaagacctcttttgctttagtgactttgttcctactcaatacaggaagtgttgaccagcaaaaataataattacaaaggctaagttctgattta

SEQ ID NO: 37350 - DNA, 120 bp, Artificial Sequence
  ENSG00000054690_78 (sequence is synthesized)
ttgttcctgactcccgtgtgattaactggaaaccctgttgttctcctttttaatcctaaagttagagtttgccaaacctactcctcctttaataccacccctgctaaaggggaggatctc

SEQ ID NO: 37351 - DNA, 120 bp, Artificial Sequence
  ENSG00000054690_79 (sequence is synthesized)
gagtcctctgggtctgacgatgactgcagctctcaggcgagtttccgaatctcggtcccctcctctgagtccaggaagaccagcggactaggcagcccccgggccatcaagagaggtaca

SEQ ID NO: 37352 - DNA, 120 bp, Artificial Sequence
  ENSG00000054690_80 (sequence is synthesized)
gagaaggggagcaggggcagggtgcagcagcaaggagcccctcacctcttcccatgggcacttgaacatgggcgtccccacttgatctgagctcgtgaccccccagcagctccaccccca

SEQ ID NO: 37353 - DNA, 120 bp, Artificial Sequence
  ENSG00000054690_81 (sequence is synthesized)
atgagagtgaaattttgtataagcaccagctagttatagctaaagactaagtacttcctataccaattccaggaaatacagaagtagacatcctgactttctatcaatttgagtaagaaa

SEQ ID NO: 37354 - DNA, 120 bp, Artificial Sequence
  ENSG00000054690_82 (sequence is synthesized)
atcccatccctccatctcagtatgtctccaggcaaatagtttccagtagtctcttggactcttacctcatccagtcccctaatctataactccaggtaccagatttcccttactaaatcc

SEQ ID NO: 37355 - DNA, 120 bp, Artificial Sequence
  ENSG00000054690_83 (sequence is synthesized)
agtaagcttaatggtatcttcagaatgaaccatgccctcctgttggtatgagatcagcatgaccctgcatctgctctgtgtcatactcggttatatgtttctggaggcaatacaaaatag

SEQ ID NO: 37356 - DNA, 120 bp, Artificial Sequence
  ENSG00000054690_84 (sequence is synthesized)
gctcataaatagtgggaaaagagtactttatctttttggaaataaaggtaacagacccagagaaagccccatccctgtttggaatccctgctgagtcctggtttcttattctcttctttg

SEQ ID NO: 37357 - DNA, 120 bp, Artificial Sequence
  ENSG00000054793_0 (sequence is synthesized)
aaggcgggcggcgccgccgacatgacggacaacatcccgctgcagccggtgcgccagaagaagcggatggacagcaggccccgcgccgggtgctgcgagtggctgagatgctgcggtgga

SEQ ID NO: 37358 - DNA, 120 bp, Artificial Sequence
  ENSG00000054793_1 (sequence is synthesized)
ggggaggccaggccccgcactgtctggctggggcaccccgagaagagagaccagaggtatcctcggaatgtcatcaacaatcagaagtacaatttcttcacctttcttcctggggtgctg

SEQ ID NO: 37359 - DNA, 120 bp, Artificial Sequence
  ENSG00000054793_2 (sequence is synthesized)
ttcaaccagttcaaatactttttcaacctctatttcttacttcttgcctgctctcagtttgttcccgaaatgagacttggtgcactctatacctactgggttcccctgggcttcgtgctg

SEQ ID NO: 37360 - DNA, 120 bp, Artificial Sequence
  ENSG00000054793_3 (sequence is synthesized)
gccgtcactgtcatccgtgaggcggtggaggagatccgatgctacgtgcgggacaaggaagtcaactcccaggtctacagccggctcacagcacgaggcacagtgaaggtgaagagttct

SEQ ID NO: 37361 - DNA, 120 bp, Artificial Sequence
  ENSG00000054793_4 (sequence is synthesized)
aacatccaagttggagaccttatcatcgttgaaaagaaccagcgggtccctgccgacatgatcttcctgaggacatcagaaaaaaacgggtcatgcttcttgcggacggatcagctggat

SEQ ID NO: 37362 - DNA, 120 bp, Artificial Sequence
  ENSG00000054793_5 (sequence is synthesized)
ggggagacggactggaagctgcggcttcccgtggcctgcacgcagaggctccccacggccgccgaccttcttcagattcgatcgtatgtgtacgcagaagagccaaatattgacattcac

SEQ ID NO: 37363 - DNA, 120 bp, Artificial Sequence
  ENSG00000054793_6 (sequence is synthesized)
aacttcgtgggaacttttacccgagaagacagcgaccccccgatcagcgagagcctgagcatagagaacacgctgtgggctggcactgtggtcgcatcaggtactgttgtgggtgttgtt

SEQ ID NO: 37364 - DNA, 120 bp, Artificial Sequence
  ENSG00000054793_7 (sequence is synthesized)
ctttacactggcagagaactccggagtgtcatgaatacctcaaatccccgaagtaagatcggcctgttcgacttggaagtgaactgcctcaccaagatcctctttggtgccctggtggtg

SEQ ID NO: 37365 - DNA, 120 bp, Artificial Sequence
  ENSG00000054793_8 (sequence is synthesized)
gtctcgctggtcatggttgcccttcagcactttgcaggccgttggtacctgcagatcatccgcttcctcctcttgttttccaacatcatccccattagtttgcgtgtgaacctggacatg

SEQ ID NO: 37366 - DNA, 120 bp, Artificial Sequence
  ENSG00000054793_9 (sequence is synthesized)
ggcaagatcgtgtacagctgggtgattcgaagggactcgaaaatccccgggaccgtggttcgctccagcacgattcctgagcagctgggcaggatttcgtacttactcacagacaagaca

SEQ ID NO: 37367 - DNA, 120 bp, Artificial Sequence
  ENSG00000054793_10 (sequence is synthesized)
ggcactcttacccagaacgagatgattttcaaacggctccatctcggaacagtagcctacggcctcgactcaatggacgaagtacaaagccacattttcagcatttacacccagcaatcc

SEQ ID NO: 37368 - DNA, 120 bp, Artificial Sequence
  ENSG00000054793_11 (sequence is synthesized)
caggacccaccggctcagaagggcccaacgctcaccactaaggtccggcggaccatgagcagccgcgtgcacgaagccgtgaaggccatcgcgctctgccacaacgtgactcccgtgtat

SEQ ID NO: 37369 - DNA, 120 bp, Artificial Sequence
  ENSG00000054793_12 (sequence is synthesized)
gagtccaacggtgtgactgatcaggctgaggccgagaagcagtacgaagactcctgccgcgtataccaggcatccagccccgatgaggtggccctggtacagtggacggaaagtgtgggc

SEQ ID NO: 37370 - DNA, 120 bp, Artificial Sequence
  ENSG00000054793_13 (sequence is synthesized)
ttaaccctggtgggccgagaccagtcttccatgcagctgaggacccctggcgaccagatcctgaacttcaccatcctacagatcttccctttcacctatgaaagcaaacgtatgggcatc

SEQ ID NO: 37371 - DNA, 120 bp, Artificial Sequence
  ENSG00000054793_14 (sequence is synthesized)
atcgtgcgggatgaatcaactggagaaattacgttttacatgaagggagcagatgtggtcatggctggcattgtgcagtacaatgactggttggaggaagagtgtggcaacatggcccga

SEQ ID NO: 37372 - DNA, 120 bp, Artificial Sequence
  ENSG00000054793_15 (sequence is synthesized)
gaagggctgcgggtgctcgtggtggcaaagaagtctcttgcagaggagcagtatcaggactttgaagcccgctacgtccaggccaagctgagtgtgcacgaccgctccctcaaagtggcc

SEQ ID NO: 37373 - DNA, 120 bp, Artificial Sequence
  ENSG00000054793_16 (sequence is synthesized)
acggtgatcgagagcctggagatggagatggaactgctgtgcctgacgggcgtggaggaccagctgcaggcagatgtgcggcccacgctggagaccctgaggaatgctggcatcaaggtt

SEQ ID NO: 37374 - DNA, 120 bp, Artificial Sequence
  ENSG00000054793_17 (sequence is synthesized)
tggatgctgacaggggacaagctggagacagctacgtgcacagcgaagaatgcacatctggtgaccagaaaccaagacatccacgtttttcggctggtgaccaaccgcggggaggctcac

SEQ ID NO: 37375 - DNA, 120 bp, Artificial Sequence
  ENSG00000054793_18 (sequence is synthesized)
ctcgagctgaacgccttccgcaggaagcatgattgtgccctggtcatctcgggagactccctggaggtttgcctcaagtactatgagtacgagttcatggagctggcctgccagtgcccg

SEQ ID NO: 37376 - DNA, 120 bp, Artificial Sequence
  ENSG00000054793_19 (sequence is synthesized)
gccgtagtctgctgccgatgtgcccccacccagaaggcccagatcgtgcgcctgcttcaggagcgcacgggcaagctcacctgtgcagtaggggacggaggcaatgacgtcagcatgatt

SEQ ID NO: 37377 - DNA, 120 bp, Artificial Sequence
  ENSG00000054793_20 (sequence is synthesized)
caggaatctgactgcggcgtgggagtggaaggaaaggaaggaaaacaggcttcgttggctgcagacttctccatcactcaatttaagcatcttggccggttgcttatggtgcatggccgg

SEQ ID NO: 37378 - DNA, 120 bp, Artificial Sequence
  ENSG00000054793_21 (sequence is synthesized)
aacagctacaagcggtcagccgccctcagccagttcgtgattcacaggagcctctgtatcagcaccatgcaggctgtcttttcctccgtgttttactttgcctccgtccctctctatcaa

SEQ ID NO: 37379 - DNA, 120 bp, Artificial Sequence
  ENSG00000054793_22 (sequence is synthesized)
ggattcctcatcattgggtactccacaatttacaccatgtttcctgtgttttctctggtcctggacaaagatgtcaaatcggaagttgccatgctgtatcctgagctctacaaggatctt

SEQ ID NO: 37380 - DNA, 120 bp, Artificial Sequence
  ENSG00000054793_23 (sequence is synthesized)
ctcaagggacggccgttgtcctacaagacattcttaatatgggttttgattagcatctatcaagggagcaccatcatgtacggggcgctgctgctgtttgagtcggagttcgtgcacatc

SEQ ID NO: 37381 - DNA, 120 bp, Artificial Sequence
  ENSG00000054793_24 (sequence is synthesized)
gtggccatctccttcacctcgctgatcctcaccgagctgctcatggtggcgctgaccatccagacctggcactggctcatgacagtggcggagctgctcagcctggcctgctacatcgcc

SEQ ID NO: 37382 - DNA, 120 bp, Artificial Sequence
  ENSG00000054793_25 (sequence is synthesized)
tccctggtgttcttacacgagttcatcgatgtgtacttcatcgccaccttgtcattcttgtggaaagtctccgtcatcactctggtcagctgcctccccctctatgtcctcaagtacctg

SEQ ID NO: 37383 - DNA, 120 bp, Artificial Sequence
  ENSG00000054793_26 (sequence is synthesized)
cgaagacggttctctccccccagctactcaaagctcacatcataggccgtgcgttcgctggagggggccctggtcttggcgcttccctgatggacagagctcaagttccatttatattaa

SEQ ID NO: 37384 - DNA, 120 bp, Artificial Sequence
  ENSG00000054793_27 (sequence is synthesized)
ccgccacctgtggattttgcagtaattgctaacacatgcagttttaatgggaagtggctctgcgcctaaacggagtcctaacgctgcatcaacgggagggagggtcctgaaagagaccca

SEQ ID NO: 37385 - DNA, 120 bp, Artificial Sequence
  ENSG00000054793_28 (sequence is synthesized)
tctgggcctgtctgaacccctcgttcttcatgtttaggtgaatatgaatatgttaaagctggtggctcagctgggagatttatatgggtcactgtgcgagcttccttatgacttgaattt

SEQ ID NO: 37386 - DNA, 84 bp, Artificial Sequence
  ENSG00000054793_29 (sequence is synthesized)
tatatgggtcactgtgcgagcttccttatgacttgaattttgttgtcacatgataaaagtttctgtgtagctgaaggttgtaga

SEQ ID NO: 37387 - DNA, 120 bp, Artificial Sequence
  ENSG00000054793_30 (sequence is synthesized)
atgtctttcttgctcttacaaagaggtgtcagaaaaatagaaagctcttggtgtcggtttgggaggaaaagacagtgacatttggtaaaaagttatccacacaataatctccattcggaa

SEQ ID NO: 37388 - DNA, 120 bp, Artificial Sequence
  ENSG00000054793_31 (sequence is synthesized)
atgctcagtatcgtctccagccagccctgcttatccaggttacactggattcctgggatcgtaaccagtaaatgagaggagagggagagagagtgtcctaagtccaatctgttatccttg

SEQ ID NO: 37389 - DNA, 120 bp, Artificial Sequence
  ENSG00000054793_32 (sequence is synthesized)
gaggtgtgatcccgctttattgggacctggtaacaatcacaaagccagtggctgtttgagaaggacctcagacattttcagcagagttgttttagcaggaaacgtgccactgaatggccc

SEQ ID NO: 37390 - DNA, 120 bp, Artificial Sequence
  ENSG00000054793_33 (sequence is synthesized)
ctaaatgtgtcgacagtgtgataagagactcaactaattctttaggcaacatggcagatgtgactcagatcctccaagaccaaagcggaaaggtcagggggctgggactcttctcttcca

SEQ ID NO: 37391 - DNA, 120 bp, Artificial Sequence
  ENSG00000054793_34 (sequence is synthesized)
tagaagcctgtttcctgttaggaggcataatggaagatgaccccacaaaggcagaggcatctttcggaacaacactggtggcagctttcagaacaaggaacccctggtgggaggacgccc

SEQ ID NO: 37392 - DNA, 120 bp, Artificial Sequence
  ENSG00000054793_35 (sequence is synthesized)
aagctacagcgttgggatctgggatctgttccactgccggcagatttcaaggggaacttgctgaaaggcagccagtggtgaagatttctcccctcccaggatggactacatgccggcatg

SEQ ID NO: 37393 - DNA, 120 bp, Artificial Sequence
  ENSG00000054793_36 (sequence is synthesized)
tttcttataaagctgtggctgcttgtttcagaggaagggagtttgcagtcgcgggacgtggtagagcaaggcattcttgggttttcaagttgcttcttgcagaagccacatatgcatgcc

SEQ ID NO: 37394 - DNA, 120 bp, Artificial Sequence
  ENSG00000054793_37 (sequence is synthesized)
ataagggttaagttggtggatctttaagagccaagtgtggttgagatcttggatttgcgtttacttcttgatgaatacatatccttcaaaccctctgcctggcgctacttctgtgtgctt

SEQ ID NO: 37395 - DNA, 120 bp, Artificial Sequence
  ENSG00000054793_38 (sequence is synthesized)
cagagatgtacatcacagcctggtttctgatgcctactaactcctgctcttggagagctggagacacgaggatcagatagtcccttgcctttggagcactcttgataagcttttgtattt

SEQ ID NO: 37396 - DNA, 120 bp, Artificial Sequence
  ENSG00000054793_39 (sequence is synthesized)
tgtgttgtccttttaaaatgttctagaatgactttacgttgcaggtactggttaattggctgttgacaccacatctattttgtcttatgattctgcagttttgcagtacttttctctatc

SEQ ID NO: 37397 - DNA, 120 bp, Artificial Sequence
  ENSG00000054793_40 (sequence is synthesized)
tgattcagccatttctgccagagggaaaaggtcggcagaaaagatgtattgagtgaatagttaaggataggatctttgtccaaaaatttcagaaagattgagcaaatctgacgtattcat

SEQ ID NO: 37398 - DNA, 120 bp, Artificial Sequence
  ENSG00000054793_41 (sequence is synthesized)
tgagtgagtttctgtgttttcaaaggtggaggagaaatttgtgctggaagtttttaagcctccgttttcttggaaatcagtctgtaacactggcaagtcttaagatagtcccatttagac

SEQ ID NO: 37399 - DNA, 120 bp, Artificial Sequence
  ENSG00000054793_42 (sequence is synthesized)
tttgcagatgctgaacctggctctgtaacgctgggaagtcttaagatagtcctgtttagactttgcaaaccctgtacctggctttgctcggagattcgggatgctggctcctgcaggcag

SEQ ID NO: 37400 - DNA, 120 bp, Artificial Sequence
  ENSG00000054793_43 (sequence is synthesized)
ggcgtgtgggagcctcgtcagaaagttttagaggtttccagcagaagcagaatgaagatggtctccctggccttttccttaattctcaattttgattgaggtgcacaagttgacttttaa

SEQ ID NO: 37401 - DNA, 120 bp, Artificial Sequence
  ENSG00000054793_44 (sequence is synthesized)
agccaacgcttaagatactgattgacatcttcaagggagaatgctcccaggaggggctgaagaagccatagttggaagtggaaggtactcgtcagtgttctccacaaacctttttactct

SEQ ID NO: 37402 - DNA, 120 bp, Artificial Sequence
  ENSG00000054793_45 (sequence is synthesized)
gttgtctcagccgcactggggcggaggcggtcaagggtgagaagtaccgacactcaagtgcaaactgccacgtcgttggcccatcccatcagtgggcagctggctgacgccattcactgg

SEQ ID NO: 37403 - DNA, 120 bp, Artificial Sequence
  ENSG00000054793_46 (sequence is synthesized)
acggtccctgaacacctaggaatgcacacaccgtgcttctcagacactggagacgcaaaggcaggaggatgcagtccggtgagaggacacgatctttacctgcacaatcagactgtaagc

SEQ ID NO: 37404 - DNA, 120 bp, Artificial Sequence
  ENSG00000054793_47 (sequence is synthesized)
ccagcagagaaccccaggggcgcctgggtacttctcggaggtcatcttagttgtggtggggaagacaaagaaataagcaaacaagaaactagagttactatacaagaaactctcctgagt

SEQ ID NO: 37405 - DNA, 120 bp, Artificial Sequence
  ENSG00000054793_48 (sequence is synthesized)
ttgtaaaccttaagcataaggattcagttgacctttttcttggttcatcaatctggaaagaacttacataaagcgccattgacactgtcacctgggagctccatgggccgtaagtctttg

SEQ ID NO: 37406 - DNA, 120 bp, Artificial Sequence
  ENSG00000054793_49 (sequence is synthesized)
acagccaatttaatttgaggtcagagggccttgaggtacacagtcagcactgtttgaacacttttcctgaaagcaaaactcacagctccctgcgccctctgacaacactagctatttctg

SEQ ID NO: 37407 - DNA, 120 bp, Artificial Sequence
  ENSG00000054793_50 (sequence is synthesized)
ccagagtaagaacttctattactattttattattgttcatatgtcttttgatgatggttgtgtgacagggggaagcaggatctatttggtttcttcccctccccccaccccttccttttt

SEQ ID NO: 37408 - DNA, 120 bp, Artificial Sequence
  ENSG00000054793_51 (sequence is synthesized)
gtctctctttttttttctctaagaaaatcaccagactagtttttccatcttgagtaatttcttatgtgggacagttttgatcctcattttgaaagcatgcgtgtgcacatgtgtgttgcc

SEQ ID NO: 37409 - DNA, 120 bp, Artificial Sequence
  ENSG00000054793_52 (sequence is synthesized)
tgtggtgccaggtgagacaggtggcactaactccagctgcttggaaggcatcccaagggcgcatcttaaagttggagcagacctcccttttccagcccctggggccattagaccacgtgc

SEQ ID NO: 37410 - DNA, 120 bp, Artificial Sequence
  ENSG00000054793_53 (sequence is synthesized)
tggaactagcattgtaaaattcccatcccagttccactcccctgaagtgaaacccttttttttttgtgacagtaaatcttaaaaatcattgtctctttatgaacatttcctcagtttctt

SEQ ID NO: 37411 - DNA, 120 bp, Artificial Sequence
  ENSG00000054793_54 (sequence is synthesized)
ctctgctgaaaatgtaagccatgctactttttaatgtattttgaattttgtgctcattggaaattgatatgctaatgcctcccccaccccccgccagacttttctttttatactttgtct

SEQ ID NO: 37412 - DNA, 120 bp, Artificial Sequence
  ENSG00000054793_55 (sequence is synthesized)
tgtttttactggggtaggctgggcatgcgtgcgtgcctttagggcagcattttaaacctttgccaaaattgcaaatgggacatgtacattcttctgctccatcctacttaaacacctatc

SEQ ID NO: 37413 - DNA, 120 bp, Artificial Sequence
  ENSG00000054793_56 (sequence is synthesized)
agctatttttatctttaaccttttctgtatgtttgaagtgtgtggggggtgtgtgtgtgtgtgaaagagcgagagaatgatgtcatctaaagttttttgaagaattatttggttttcatt

SEQ ID NO: 37414 - DNA, 120 bp, Artificial Sequence
  ENSG00000054793_57 (sequence is synthesized)
gcattaaaattctatcactcccagctttgttttcatttaaaaaaatatacaaagagctttgtaaatacaacacattttatttctcccccttcttttaatgtacagcttttttgccactta

SEQ ID NO: 37415 - DNA, 120 bp, Artificial Sequence
  ENSG00000054793_58 (sequence is synthesized)
tatatacttaaaatattcccatgaattatgtccagttcttcttggaaaaaaatttggttttgaatgaacctgcaaagcatcctgcagcgtgagcagctcctccacctggagctccgaagc

SEQ ID NO: 37416 - DNA, 120 bp, Artificial Sequence
  ENSG00000054793_59 (sequence is synthesized)
atcttctcaggccaaagcggcattacccgtgaatctgtcttctccgccacagcatggtttgaggcgcagtctgttaatatagctgggccatgtcagtgactgttgtgtttgtggggtcag

SEQ ID NO: 37417 - DNA, 120 bp, Artificial Sequence
  ENSG00000054793_60 (sequence is synthesized)
gtggggggcatggtatttgcaaaaaaaacaaattatggctaatttattattttgttgcagtggggttaactgtaaactcatgtaagagtctgtgatttcctcattggttgatctctctct

SEQ ID NO: 37418 - DNA, 120 bp, Artificial Sequence
  ENSG00000054793_61 (sequence is synthesized)
ctgtaatcctcattgcaaattttcaccaggacagcgttttttgattagaggggagctctggcacagtatgctttaatttagcaggaacttccagatgatttaaattctcgatgctgtgat

SEQ ID NO: 37419 - DNA, 120 bp, Artificial Sequence
  ENSG00000054793_62 (sequence is synthesized)
gacacacatatgatctttcgtgtttctgagcgactctactttcattgtttgccagcgtggctcgttgctgttgcccaataaagcttgtgtacgttctgccttgggggattattttaattt

SEQ ID NO: 37420 - DNA, 120 bp, Artificial Sequence
  ENSG00000054793_63 (sequence is synthesized)
gtacagaaacatgaattctggtatcaaaatgaggactttttattataacgctcctattttttctttatttcatggtacatgaaatgtaaagaaaactctttccagttcagaaaattattt

SEQ ID NO: 37421 - DNA, 120 bp, Artificial Sequence
  ENSG00000054793_64 (sequence is synthesized)
tgattttggcaaaaaaaaccccaaatcaatgcatgttatttattattttgtactattgtccatcccagacgtgtcagaatttcaaaaggtgatagatataaatggaaaataagatgaaaa

SEQ ID NO: 37422 - DNA, 120 bp, Artificial Sequence
  ENSG00000054793_65 (sequence is synthesized)
tttactggaatgaggatgctatttttaagaaagagcattgtgtttcatcatggaaattttgagcatctgagcaggcagcctgctggctcgctcatctttaaggtcctgatggacagaggc

SEQ ID NO: 37423 - DNA, 120 bp, Artificial Sequence
  ENSG00000054796_0 (sequence is synthesized)
agccacgccccaagggcgcagcctaggacaggggcttctggagcttctggcagccgtctgccctcatggcctttgcacctatggggcccgaggcctcgttcttcgacgttttggaccgac

SEQ ID NO: 37424 - DNA, 120 bp, Artificial Sequence
  ENSG00000054796_1 (sequence is synthesized)
acagggagtccctgctggctgccctgaggagaggtggcagggagcccccaactgggggaagccgcctggcctccagttctgaggttcttgcatctatagaaaatattatccaagacataa

SEQ ID NO: 37425 - DNA, 120 bp, Artificial Sequence
  ENSG00000054796_2 (sequence is synthesized)
tcacaagcttggcaagaaatgaagcacctgcattcacgatagacaacagatcaagctgggaaaacataaagtttgaagattctgtgggtcttcagatggtatcccattgcaccaccagaa

SEQ ID NO: 37426 - DNA, 120 bp, Artificial Sequence
  ENSG00000054796_3 (sequence is synthesized)
agatcaaaagtgattcaccaaaatcagctcaaaaattttctctaatccttaaaatattgtccatgatttataaattagtacagagcaacacttatgcaaccaaaagggacatatattaca

SEQ ID NO: 37427 - DNA, 120 bp, Artificial Sequence
  ENSG00000054796_4 (sequence is synthesized)
ctgacagtcaactctttggtaaccagactgtcgtcgacaatattatcaatgacatttcttgcatgttaaaagtgtcaaggaggagtctacatatattatctacatcaaaaggtttaattg

SEQ ID NO: 37428 - DNA, 120 bp, Artificial Sequence
  ENSG00000054796_5 (sequence is synthesized)
ctggcaacttaagatacatcgaggaagatggcaccaaagtgaattgtacctgtggtgcaacggctgttgctgtgccatcgaatattcaaggaattcggaatttagttacagatgcaaagt

SEQ ID NO: 37429 - DNA, 120 bp, Artificial Sequence
  ENSG00000054796_6 (sequence is synthesized)
ttgtattaattgtagaaaaagatgcaacatttcagcggctcctagatgacaacttttgcaacaaattgtctccttgcatcatgattacgggaaagggagttcctgatctaaacacaagac

SEQ ID NO: 37430 - DNA, 120 bp, Artificial Sequence
  ENSG00000054796_7 (sequence is synthesized)
tatgtcttttgaagctcatcatctcacagttccagctattagatggcttggtcttctcccttctgatcttaaaagattaaatgtacctaaagatagtttgattccactgacaaaaaggga

SEQ ID NO: 37431 - DNA, 120 bp, Artificial Sequence
  ENSG00000054796_8 (sequence is synthesized)
ccaaatgaaacttgacagtatcctgaggagaccttatgttacctgccaaccattttggagaaaagaaatggaaataatggcagactctaaaatgaaggcagaaattcaagctttgacttt

SEQ ID NO: 37432 - DNA, 120 bp, Artificial Sequence
  ENSG00000054796_9 (sequence is synthesized)
cctatcatcagattatctttccagagtgtacttacctaacaaattaaaatttggaggatggatataaaaataaatcagaagaacttctgattgccagaggcttttcattagttttgtttt

SEQ ID NO: 37433 - DNA, 120 bp, Artificial Sequence
  ENSG00000054796_10 (sequence is synthesized)
gattggcaaatactattgtggaaagaacatatattatattcttaattctgtaaaagtgaaataaaataactttccgttaattatatatttttgtcaaaacaaatgctgtactccaatttt

SEQ ID NO: 37434 - DNA, 120 bp, Artificial Sequence
  ENSG00000054796_11 (sequence is synthesized)
ctttgcaaggccttattcttgcctctatagagacagatttctgtcctatcttctaaagcaaattataaaagaatatgttattttgacctttaaattatttttgaaaaaataatattttat

SEQ ID NO: 37435 - DNA, 120 bp, Artificial Sequence
  ENSG00000054796_12 (sequence is synthesized)
acatgtcatcaaagtctacaaaatatttaccttctacgatacaactaatgttaacgcataaagtatcttactggtaacaaaaatcataatgatctgaatttgagatgttgcaaatgaatt

SEQ ID NO: 37436 - DNA, 120 bp, Artificial Sequence
  ENSG00000054796_13 (sequence is synthesized)
gtggtgtccggtagtttcttcttacattttcctttgcctttatactttaggggtcttactccattaattcatttgttacattagtaaaattcagtatgaataaatatttggattgatgta

SEQ ID NO: 37437 - DNA, 120 bp, Artificial Sequence
  ENSG00000054796_14 (sequence is synthesized)
ccagtctttcagcacctgaaatccaagggaaagggagttcctgatctaaacacaagacttttagtcaagaaactgtgggatacatttcatgttcctgttttcactcttgtagatgctgat

SEQ ID NO: 37438 - DNA, 80 bp, Artificial Sequence
  ENSG00000054803_0 (sequence is synthesized)
ggtccgccccaaggcttccctgagctcgccaggccccagggctgtgtggggcgggctcccggccaggcgcggtcgggacg

SEQ ID NO: 37439 - DNA, 120 bp, Artificial Sequence
  ENSG00000054803_1 (sequence is synthesized)
ccgcggcggcttatcctttttcgcgacccggcctggcagcgccgcgctccgcttggagggcactcggcggcagagttccgcgctgggaggggtgaggggaccagccgcctcctctgcgga

SEQ ID NO: 37440 - DNA, 120 bp, Artificial Sequence
  ENSG00000054803_2 (sequence is synthesized)
ctcagatcgagcaggagagagtgggcgcggagctggggccagcgcagggccgtgggctcctctctgggcacgcatcctttacgccacgggctttcaggggctgaggggcctcgaaccttg

SEQ ID NO: 37441 - DNA, 120 bp, Artificial Sequence
  ENSG00000054803_3 (sequence is synthesized)
ccaatcaccagtgctgtgcgccccgcttgctttggggtgcgttaaacgtcaggagagagctgctcagatggggtcaccagacgccttctcccccttttctcggagcccgcgggttgcgcg

SEQ ID NO: 37442 - DNA, 120 bp, Artificial Sequence
  ENSG00000054803_4 (sequence is synthesized)
ataagccaacccagccggacgctgcgctcctataaatagagcgcgtgtgcccgcttcgcgctctccgggctgcacgagggacgagaaagttgtgcgcagggactgggggcgggcggccag

SEQ ID NO: 37443 - DNA, 120 bp, Artificial Sequence
  ENSG00000054803_5 (sequence is synthesized)
gcaggagaggaccccgccggaccagccgccctgaacgctgcgcccggcgccctggacctgatcctgcgaatccgcgctttcggtgcgagggacctggctagccgctgcctccctccctac

SEQ ID NO: 37444 - DNA, 120 bp, Artificial Sequence
  ENSG00000054803_6 (sequence is synthesized)
ctctgggtgacaccaggtttgggggatttttttgaccaggcgaaagtgggagtcgctggcgtcctggccatgaacacagcctcgcgttcttctcagcctgggaaggaccttctgcctctg

SEQ ID NO: 37445 - DNA, 120 bp, Artificial Sequence
  ENSG00000054803_7 (sequence is synthesized)
taactcgtccctgccgcaagccagacaggactggcacccgcgccgctgggcacccgccacccttgtggcttctctttgagtcccctctttttgttcctgctccgtggtttagctggtggt

SEQ ID NO: 37446 - DNA, 120 bp, Artificial Sequence
  ENSG00000054803_8 (sequence is synthesized)
gcttgagtttggggtgagaatttattattattattattttttgccttgaggtgtgaatgtgagggtttgatgactttcagatgtctaggaaccagagtgggtgcaggggccccaggcagg

SEQ ID NO: 37447 - DNA, 120 bp, Artificial Sequence
  ENSG00000054803_9 (sequence is synthesized)
gctgattcttgggcggaggagagtagggtaaagggtgctgcatgagctccttaaaggacaaaggtaacagagccagcgagagagctcgaggggagactttgacttcaagccacagaattg

SEQ ID NO: 37448 - DNA, 120 bp, Artificial Sequence
  ENSG00000054803_10 (sequence is synthesized)
gtggaagtgtgcgcgccgccgccgccgtcgctcctgcagcgctgtcgacctagccgctagcatcttcccgagcaccgggatcccggggtaggaggcgacgcgggcgagcaccagcgccag

SEQ ID NO: 37449 - DNA, 120 bp, Artificial Sequence
  ENSG00000054803_11 (sequence is synthesized)
ccggctgcggctgcccacacggctcaccatgggctccgggcgccgggcgctgtccgcggtgccggccgtgctgctggtcctcacgctgccggggctgcccgtctgggcacagaacgacac

SEQ ID NO: 37450 - DNA, 120 bp, Artificial Sequence
  ENSG00000054803_12 (sequence is synthesized)
ggagcccatcgtgctggagggcaagtgtctggtggtgtgcgactcgaacccggccacggactccaagggctcctcttcctccccgctggggatatcggtccgggcggccaactccaaggt

SEQ ID NO: 37451 - DNA, 120 bp, Artificial Sequence
  ENSG00000054803_13 (sequence is synthesized)
ccatccgagatgagcaacaagacgcgcatcatttacttcgatcagatcctggtgaatgtgggtaattttttcacattggagtctgtctttgtagcaccaagaaaaggaatttacagtttc

SEQ ID NO: 37452 - DNA, 120 bp, Artificial Sequence
  ENSG00000054803_14 (sequence is synthesized)
agttttcacgtgattaaagtctaccagagccaaactatccaggttaacttgatgttaaatggaaaaccagtaatatctgcctttgcgggggacaaagatgttactcgtgaagctgccacg

SEQ ID NO: 37453 - DNA, 120 bp, Artificial Sequence
  ENSG00000054803_15 (sequence is synthesized)
aatggtgtcctgctctacctagataaagaggataaggtttacctaaaactggagaaaggtaatttggttggaggctggcagtattccacgttttctggctttctggtgttccccctatag

SEQ ID NO: 37454 - DNA, 120 bp, Artificial Sequence
  ENSG00000054803_16 (sequence is synthesized)
gattcaatttctccatgatgttcatccaggtgagggatgacccactcctgagttattggaagatcattttttcatcattggattgatgtcttttattggtttctcatgggtggatatgga

SEQ ID NO: 37455 - DNA, 120 bp, Artificial Sequence
  ENSG00000054803_17 (sequence is synthesized)
ttctaaggattctagcctgtctgaaccaatacaaaatttcacagattatttgtgtgtgtctgtttcagtatatttggattgggactctaagcagataatacctatgcttaaatgtaacag

SEQ ID NO: 37456 - DNA, 120 bp, Artificial Sequence
  ENSG00000054803_18 (sequence is synthesized)
tcaaaagctgtctgcaagacttattctgaatttcatttcctgggattactgaattagttacagatgtggaattttatttgtttagttttaaaagactggcaaccaggtctaaggattaga

SEQ ID NO: 37457 - DNA, 120 bp, Artificial Sequence
  ENSG00000054803_19 (sequence is synthesized)
aaactctaaagttctgacttcaatcaacggttagtgtgatactgccaaagaactgtatactgtgttaatatattgattatatttgtttttattcctttggaattagtttgtttggttctt

SEQ ID NO: 37458 - DNA, 120 bp, Artificial Sequence
  ENSG00000054803_20 (sequence is synthesized)
gtaaaaaacttggattttttttttcagtaactggtattatgttttctcttaaaataaggtaatgaatggcttgcccacaaatttaccttgactacgatatcatcgacatgacttctctca

SEQ ID NO: 37459 - DNA, 120 bp, Artificial Sequence
  ENSG00000054803_21 (sequence is synthesized)
aaaaaaaagaatgcttcatagttgtattttaattgtatatgtgaaagagtcatattttccaagttatattttctaagaagaagaatagatcataaatctgacaaggaaaaagttgcttac

SEQ ID NO: 37460 - DNA, 120 bp, Artificial Sequence
  ENSG00000054803_22 (sequence is synthesized)
ccaaaatctaagtgctcaatccctgagcctcagcaaaacagctcccctccgagggaaatcttatactttattgctcaactttaattaaaatgattgataataaccactttattaaaaacc

SEQ ID NO: 37461 - DNA, 120 bp, Artificial Sequence
  ENSG00000054803_23 (sequence is synthesized)
taaggttttttttttttccgtagacatgaccactttattaactggtggtgggatgctgttgtttctaattatacctatttttcaaggcttctgttgtatttgaagtatcatctggttttg

SEQ ID NO: 37462 - DNA, 120 bp, Artificial Sequence
  ENSG00000054803_24 (sequence is synthesized)
tttgccttaactctttaaattgtatatatttatctgtttagctaatattaaattcaaatatcccatatctaaatttagtgcaatatcttgtcttttgtataggtcatatgaattcataaa

SEQ ID NO: 37463 - DNA, 120 bp, Artificial Sequence
  ENSG00000054803_25 (sequence is synthesized)
tttatgtctgttatagaataaagattaatatatgttagttgaattgtttttttctttccgttttggaaatatgtattctacattatttatttcctcttactttgtctcttcttaaccctt

SEQ ID NO: 37464 - DNA, 120 bp, Artificial Sequence
  ENSG00000054938_0 (sequence is synthesized)
cccgctggtcccgcgcgcctcgcccggcgctgcgcgctcggcagacgccggtcctctccctgctttctcctcctctccctctcaccttccccctttctttgatcgcctctcccttctgct

SEQ ID NO: 37465 - DNA, 120 bp, Artificial Sequence
  ENSG00000054938_1 (sequence is synthesized)
ggaccttccttcgtctctccatctctccctcctttccccgcgttctctttccacctttctcttcttcccaccttagacctcccttcctgccctcctttcctgcccaccgctgcttcctgg

SEQ ID NO: 37466 - DNA, 120 bp, Artificial Sequence
  ENSG00000054938_2 (sequence is synthesized)
cccttctccgaccccgctctagcagcagacctcctggggtctgtgggttgatctgtggcccctgtgcctccgtgtccttttcgtctcccttcctcccgactccgctcccggaccagcggc

SEQ ID NO: 37467 - DNA, 120 bp, Artificial Sequence
  ENSG00000054938_3 (sequence is synthesized)
ctgaccctggggaaaggatggttcccgaggtgagggtcctctcctccttgctgggactcgcgctgctctggttccccctggactcccacgctcgagcccgcccagacatgttctgccttt

SEQ ID NO: 37468 - DNA, 120 bp, Artificial Sequence
  ENSG00000054938_4 (sequence is synthesized)
tccatgggaagagatactcccccggcgagagctggcacccctacttggagccacaaggcctgatgtactgcctgcgctgtacctgctcagagggcgcccatgtgagttgttaccgcctcc

SEQ ID NO: 37469 - DNA, 120 bp, Artificial Sequence
  ENSG00000054938_5 (sequence is synthesized)
actgtccgcctgtccactgcccccagcctgtgacggagccacagcaatgctgtcccaagtgtgtggaacctcacactccctctggactccgggccccaccaaagtcctgccagcacaacg

SEQ ID NO: 37470 - DNA, 120 bp, Artificial Sequence
  ENSG00000054938_6 (sequence is synthesized)
gtgtgtcctctgcagctgcacagagggccagatctactgcggcctcacaacctgccccgaaccaggctgcccagcacccctcccgctgccagactcctgctgccaggcctgcaaagatga

SEQ ID NO: 37471 - DNA, 120 bp, Artificial Sequence
  ENSG00000054938_7 (sequence is synthesized)
ggcaagtgagcaatcggatgaagaggacagtgtgcagtcgctccatggggtgagacatcctcaggatccatgttccagtgatgctgggagaaagagaggcccgggcaccccagcccccac

SEQ ID NO: 37472 - DNA, 120 bp, Artificial Sequence
  ENSG00000054938_8 (sequence is synthesized)
tggcctcagcgcccctctgagcttcatccctcgccacttcagacccaagggagcaggcagcacaactgtcaagatcgtcctgaaggagaaacataagaaagcctgtgtgcatggcgggaa

SEQ ID NO: 37473 - DNA, 120 bp, Artificial Sequence
  ENSG00000054938_9 (sequence is synthesized)
gacgtactcccacggggaggtgtggcacccggccttccgtgccttcggccccttgccctgcatcctatgcacctgtgaggatggccgccaggactgccagcgtgtgacctgtcccaccga

SEQ ID NO: 37474 - DNA, 120 bp, Artificial Sequence
  ENSG00000054938_10 (sequence is synthesized)
gtacccctgccgtcaccccgagaaagtggctgggaagtgctgcaagatttgcccagaggacaaagcagaccctggccacagtgagatcagttctaccaggtgtcccaaggcaccgggccg

SEQ ID NO: 37475 - DNA, 120 bp, Artificial Sequence
  ENSG00000054938_11 (sequence is synthesized)
ggtcctcgtccacacatcggtatccccaagcccagacaacctgcgtcgctttgccctggaacacgaggcctcggacttggtggagatctacctctggaagctggtaaaaggaatcttcca

SEQ ID NO: 37476 - DNA, 120 bp, Artificial Sequence
  ENSG00000054938_12 (sequence is synthesized)
cttgactcagatcaagaaagtcaggaagcaagacttccagaaagaggcacagcacttccgactgctcgctggcccccacgaaggtcactggaacgtcttcctagcccagaccctggagct

SEQ ID NO: 37477 - DNA, 120 bp, Artificial Sequence
  ENSG00000054938_13 (sequence is synthesized)
gaaggtcacggccagtccagacaaagtgaccaagacataacaaagacctaacagttgcagatatgagctgtataattgttgttattatatattaataaataagaagttgcattaccctca

SEQ ID NO: 37478 - DNA, 120 bp, Artificial Sequence
  ENSG00000054938_14 (sequence is synthesized)
ggacaaataaaaaggaaacaagcatgattgtgagggcagaggagcgtgggactgagtcaggagactggtgctgtcatcgctgcctggtgactgacttgctgtgtggccctcaggtgtaac

SEQ ID NO: 37479 - DNA, 120 bp, Artificial Sequence
  ENSG00000054938_15 (sequence is synthesized)
ttaccctctctgggcctcatttgtctaatcataataattaacgctgataccatgatataaatctgtacagcatttcactgcttgattccctaactgccctgtgagataagcgttaaggct

SEQ ID NO: 37480 - DNA, 120 bp, Artificial Sequence
  ENSG00000054938_16 (sequence is synthesized)
cagagacagtggcatgcccagtgttgcacagtaagtgtgtggtaaagccgagattcaaactcagaccttctggccccttgcctaggagagcatgcccagttgtctagcagattctctttt

SEQ ID NO: 37481 - DNA, 120 bp, Artificial Sequence
  ENSG00000054938_17 (sequence is synthesized)
gcctgagtggcccagatgacatctcttttagagctagaaagaaggagaaatgagacagggtctttgggctggagcctcctgggactaacatggcactggtcggtttgccaggcccagaca

SEQ ID NO: 37482 - DNA, 120 bp, Artificial Sequence
  ENSG00000054938_18 (sequence is synthesized)
gcagctgtgttctgagtgaccgcaagagtcaaacaacaagcaggggctttgggttcgaatcctaactctgccagtttgaatccagactctgctatatcttagctgtgtggccttgggcag

SEQ ID NO: 37483 - DNA, 120 bp, Artificial Sequence
  ENSG00000054938_19 (sequence is synthesized)
tcacatgatctctctgggcctcagttttctcttctgtagagtggggaagagggtttttagaggattaaatgacatgacatcggtgcagcccctgacatacacgaggcactaaaaatatca

SEQ ID NO: 37484 - DNA, 120 bp, Artificial Sequence
  ENSG00000054938_20 (sequence is synthesized)
gtcttctcattccaccatatcaggttggtgagaaatgcagagaggcagctttcagctccaagagaagaagaactttgtcacacttagaggcttctgccagtggaagggagggagcaagct

SEQ ID NO: 37485 - DNA, 120 bp, Artificial Sequence
  ENSG00000054938_21 (sequence is synthesized)
ccacttacgagaagcgtgcaagcaggggctggtggggattccgtctgcagctggggagttagattcagtaacccttaaaattttttgagccttaagattccatcagtcccagctgggcct

SEQ ID NO: 37486 - DNA, 120 bp, Artificial Sequence
  ENSG00000054965_0 (sequence is synthesized)
gagcggtcccccgcctcctccctccgcctcctcctccctcgcccgcagccgagcgtcccctccccccacccgtcgggctcctcggcggctactgcagaggattcagagccgagtcgctga

SEQ ID NO: 37487 - DNA, 120 bp, Artificial Sequence
  ENSG00000054965_1 (sequence is synthesized)
ggaggaggctccggtccccgcgcgccatccgccaccctactggacacgggcgagagcgtcgccgccgtagcctccggagaagacaagggcatcgccgcctcagccgccgccgccgccgtt

SEQ ID NO: 37488 - DNA, 120 bp, Artificial Sequence
  ENSG00000054965_2 (sequence is synthesized)
ttcgcctgcagctgctcaccggatcctcagtcttccacaatgaaccctgtttacagccccgtgcagcctggggctccttatggcaaccctaagaacatggcctacacgggttaccccaca

SEQ ID NO: 37489 - DNA, 120 bp, Artificial Sequence
  ENSG00000054965_3 (sequence is synthesized)
gcctatccagcagctgcccctgcctacaatcccagcctgtaccccaccaatagtcccagttatgctccagcaactctgctgatgaaacaggcctggccacagaactcgtcttcctgtggc

SEQ ID NO: 37490 - DNA, 120 bp, Artificial Sequence
  ENSG00000054965_4 (sequence is synthesized)
actgaaggcaccttccacctcccagtggacaccgggaccgagaaccgaacttaccaagcatcctctgcggctttcagatatactgcggggacaccatacaaggtcccaccgacccagagt

SEQ ID NO: 37491 - DNA, 120 bp, Artificial Sequence
  ENSG00000054965_5 (sequence is synthesized)
aacactgctccacccccctactccccatcacccaacccctatcagacggccatgtatccaatcagaagtgcctacccccagcagaatctgtatgcccagggagcctactacacacagccg

SEQ ID NO: 37492 - DNA, 120 bp, Artificial Sequence
  ENSG00000054965_6 (sequence is synthesized)
gtgtatgctgcccagcctcatgtcatccaccataccacggtcgtccagcccaacagcattccctctgctatctacccagcacctgttgccgccccgaggaccaacggtgtggccatgggc

SEQ ID NO: 37493 - DNA, 120 bp, Artificial Sequence
  ENSG00000054965_7 (sequence is synthesized)
atgccaacatatagggcccaaggaacccctgcgtacagctacgtgcccccacactggtaaagcctgcagcccatccaaatctggagtcacacattgtatgcaactactcaagtcttacac

SEQ ID NO: 37494 - DNA, 120 bp, Artificial Sequence
  ENSG00000054965_8 (sequence is synthesized)
cggtgctggagcagttccctagcagcaccacctctatttgcaagaagagacaacggaagtgcaagggtcactttatgcatctttaatggttttgatttttatttttggtttttgtaaaag

SEQ ID NO: 37495 - DNA, 120 bp, Artificial Sequence
  ENSG00000054965_9 (sequence is synthesized)
ctgctttttctaatctcctgcctctccccaactgtccccctcttagcccctgcccttccagctctatccccttcctcctacctgaccaggccatgtcctctctgctcttccctaagtgtc

SEQ ID NO: 37496 - DNA, 120 bp, Artificial Sequence
  ENSG00000054965_10 (sequence is synthesized)
ctgtccctggggatcccagtctagaggcaagcagagagtagggtttattgcagtggttcatctgaaggctggattccatttgaagagcataaacagatgtggtccagggtaggaactcag

SEQ ID NO: 37497 - DNA, 120 bp, Artificial Sequence
  ENSG00000054965_11 (sequence is synthesized)
agctgttgagcaggctacatctctaggggagtgttctggttgttttttcttaagcaagattagttcaggacattcccatgtcccagacacaaatgaaatgtctcctgagaaccattgcaa

SEQ ID NO: 37498 - DNA, 120 bp, Artificial Sequence
  ENSG00000054965_12 (sequence is synthesized)
cagaccaagaacaaaaccacctgagtatgtaggcgtgttattagcagcttaataccccaggctgagaacctggggaaaaaagtctttagaatttgggggagggtggggggagggagggca

SEQ ID NO: 37499 - DNA, 120 bp, Artificial Sequence
  ENSG00000054965_13 (sequence is synthesized)
ttgtggggaaggagagggaagaagggaggagcggtgcttgcctcatggctttggtttgaaaggtctctggccaaagcatctggccctggaccttctgatttgcacagtgatgttaactga

SEQ ID NO: 37500 - DNA, 120 bp, Artificial Sequence
  ENSG00000054965_14 (sequence is synthesized)
cctggcacttcctcaaaaggtgattttgtccttagacctgccaagcggctgcagggtggtaggatcccagcatcccgaggccttggaaggccggatgccctgtgtcatccagacttcagc

SEQ ID NO: 37501 - DNA, 120 bp, Artificial Sequence
  ENSG00000054965_15 (sequence is synthesized)
ctctgagctgtcatggacccactctgatgaggagcttcctcctgattggagtgggaacctagggcatttctctcccttttcttttgcccttcccagtgccaggactcacctgtctgacca

SEQ ID NO: 37502 - DNA, 120 bp, Artificial Sequence
  ENSG00000054965_16 (sequence is synthesized)
tagagcttgcaggcaggccaagctcttggttacctgtgccattcatggcccaagtgaaggaaccacattccaggtgggtgctggcagctctgaaggtgaggatagtgaaggaaaagcaat

SEQ ID NO: 37503 - DNA, 120 bp, Artificial Sequence
  ENSG00000054965_17 (sequence is synthesized)
agcaataaacatttcatagactcatggaactgaagggaccttagcaatcatctcatccatttccctatttggcagatgaggaaactgaggcccagagaagcggaaaggacttccctagac

SEQ ID NO: 37504 - DNA, 120 bp, Artificial Sequence
  ENSG00000054965_18 (sequence is synthesized)
cttacagtaaattagcattaaatgcagccttcctacctagtgggcaccttgcttacaaaaatttacctagggacggattggcttggttttgtaaaaattaagtcggcagcgcccatacct

SEQ ID NO: 37505 - DNA, 120 bp, Artificial Sequence
  ENSG00000054965_19 (sequence is synthesized)
ggtgagtctggaatggtctctgggctcctgtttctgctcttttcctccacggactccaaaggcgggggttgaagactgggcagaggctacatgggggcggatggcaggaacagaaattgc

SEQ ID NO: 37506 - DNA, 120 bp, Artificial Sequence
  ENSG00000054965_20 (sequence is synthesized)
aaatgaagaaatagcatttggaaattctgtgaagacatctggaacttccgtcctgtacctgactccacctccaggagaaggagcaggtggactggccgaaaaggagaggccatgctttta

SEQ ID NO: 37507 - DNA, 120 bp, Artificial Sequence
  ENSG00000054965_21 (sequence is synthesized)
ggacagtagcccctcatcccgagaggagaggaagaggaggaagacagtgggagtcatcaggagaggagaatgaggatgaggcccaggagacaggctcatctgggagaagagggacccctg

SEQ ID NO: 37508 - DNA, 120 bp, Artificial Sequence
  ENSG00000054965_22 (sequence is synthesized)
ggacgaggaggtccctgctagtctcagccaggagcctggattgcccagcagcagcctccggcacccagcgcttggctgggccagcagcccctctgggggtggggcacgaacattttattg

SEQ ID NO: 37509 - DNA, 120 bp, Artificial Sequence
  ENSG00000054965_23 (sequence is synthesized)
taaaaaatgggatcattgacaacatttgggactttaaaaaactgctttcatttaaaattcatgcaaacttggacatatccttaccccaacctcccatgtctccctaagggagggaaaaat

SEQ ID NO: 37510 - DNA, 120 bp, Artificial Sequence
  ENSG00000054965_24 (sequence is synthesized)
caggaaacccttgggttggaaggagctcagaagctgtctagccattcccaggagggtaaagcccatcagcctccttggcctagagccaggagtttgggggcccaccttcctgggcttcca

SEQ ID NO: 37511 - DNA, 120 bp, Artificial Sequence
  ENSG00000054965_25 (sequence is synthesized)
aggaactttaggaccagtaagaaaaaattcagctgttctaaattatctgttctgggtgctgatgaggtttcactttaaaacaatagaaagttttccagtgttaattcactttttgcaaat

SEQ ID NO: 37512 - DNA, 120 bp, Artificial Sequence
  ENSG00000054965_26 (sequence is synthesized)
acctccttccaccctctttggttttgtaaaggtgggtgaaggttgttctagattatgtcatacgtgtttgaaaaatgccaaaataataataatgataataataatagaaacctttggatt

SEQ ID NO: 37513 - DNA, 120 bp, Artificial Sequence
  ENSG00000054965_27 (sequence is synthesized)
tgtcaggtgcatcacagaggtcaaagcacttcacggcctttcatgtactcgccctgagagggacagggttagagttattacagtcaattgacaaatgaggaaacaggttatggaagggaa

SEQ ID NO: 37514 - DNA, 120 bp, Artificial Sequence
  ENSG00000054965_28 (sequence is synthesized)
caggcccacagtgagcagcatgctggtatccgctaggcttcccagaaccctgctgcctccatgtgggctggggtggaaccacagagaggagaaaggaagaagaggagacctaggaatgac

SEQ ID NO: 37515 - DNA, 120 bp, Artificial Sequence
  ENSG00000054965_29 (sequence is synthesized)
gatgaaatagaggttatttctcctatttgatccataaggaaatcaaggcttggaaaagtcaagtgacttgctaataagtgacagagccactcgaatcccaggctgtctgctgtctcgttc

SEQ ID NO: 37516 - DNA, 120 bp, Artificial Sequence
  ENSG00000054965_30 (sequence is synthesized)
ccctccatctgatccccacacaggctcacgtactgaagcatctgtgctctgtgccctatcttagcacctactatgtaattcaagagcaaaggggggccccaaggtgaaaataaggcactg

SEQ ID NO: 37517 - DNA, 120 bp, Artificial Sequence
  ENSG00000054965_31 (sequence is synthesized)
aaaggctgtggtctggaagagcccaggtccagcacccctttttcagtatgagccccagttcagccggcctcagcctcttgctgtgatggagatccacaagcctagccaagcttggggagt

SEQ ID NO: 37518 - DNA, 120 bp, Artificial Sequence
  ENSG00000054965_32 (sequence is synthesized)
cactgcaaaaggactgagcccaggagagcggggacagtcatgtgcctctggtaggatgggcacagttactggtaaggtcacagagatctagtgggaggtaccataggtagatacctccaa

SEQ ID NO: 37519 - DNA, 120 bp, Artificial Sequence
  ENSG00000054965_33 (sequence is synthesized)
agattctagatggcacggtggtcaagctagacaaaaagtcagagctggaagggccgtctcattgaaggcaggcaagcaagagaggacaagggatgtagccgcctgacagtgagctacagc

SEQ ID NO: 37520 - DNA, 120 bp, Artificial Sequence
  ENSG00000054965_34 (sequence is synthesized)
actggccccaggatgcaaacccctctctcctcctcatgccactgcctctccccaagtgcaacacctatggccaggatcaggggtacagatggctcgttaccagccaacccttttgaattc

SEQ ID NO: 37521 - DNA, 120 bp, Artificial Sequence
  ENSG00000054965_35 (sequence is synthesized)
ttctacttctacctgaccccctctcctcactggcctggggtcaagaagtttgagtctgggagctggattgcctgcaaatagtgaaagcctgaaacataatggtttgccatgttttgaaaa

SEQ ID NO: 37522 - DNA, 120 bp, Artificial Sequence
  ENSG00000054965_36 (sequence is synthesized)
aaaatgcatatttaatttcttcctcatgagataggacagttgctgttctttcttacctggcaatgaccctaaaatgtatatcctctttcctgaatatttagcagagacacacacacctgt

SEQ ID NO: 37523 - DNA, 120 bp, Artificial Sequence
  ENSG00000054965_37 (sequence is synthesized)
ccagagcgtttttggtatgcaaagtactttgacattggttgccaaagtcctccattttatagatgaaaaaactaaggctcaggaggcttgagacttgctaaaaggtcacacagcttggaa

SEQ ID NO: 37524 - DNA, 120 bp, Artificial Sequence
  ENSG00000054965_38 (sequence is synthesized)
gtgattcttcaaatcctctgctctttctgctgccacctgctgggtctcttggcaagcatggagggaggggctaactgtactttatagagctgggaagcccagtctctgagctgagcagat

SEQ ID NO: 37525 - DNA, 120 bp, Artificial Sequence
  ENSG00000054965_39 (sequence is synthesized)
ttgtatgaactgctttgggccaggacctgtaatgagccctggggagggacccagaggcacatctaactggcagcacaaggaggatgagaatttgcaactaaaggcctcacttggacaaaa

SEQ ID NO: 37526 - DNA, 120 bp, Artificial Sequence
  ENSG00000054965_40 (sequence is synthesized)
cactttggggtcacaatgcccaggaccgaagacatgttcaaggacagcacgaggcatctttctattgggagacccatgtccttggtaagcctgcacacctggcttcctaatccctgagag

SEQ ID NO: 37527 - DNA, 120 bp, Artificial Sequence
  ENSG00000054965_41 (sequence is synthesized)
cctgcccactgtccagatccagtgagttggtacaaaacgtacagactgaagtccctgggcttgcttttcccatgggtgaggaccagaaccagactctgagcatccttacccctggccacc

SEQ ID NO: 37528 - DNA, 120 bp, Artificial Sequence
  ENSG00000054965_42 (sequence is synthesized)
cgaattgttccaagtttgaggtaccccgttcccagagatctgggggtccttctttggagggcttgctttgttctgatggccttcagaaaggaatcacatgaagtataaaaggacaggccc

SEQ ID NO: 37529 - DNA, 120 bp, Artificial Sequence
  ENSG00000054965_43 (sequence is synthesized)
cttggtcaccaagttttggctcctcatacagataggactcatccaggttcccagcgaggcactgactaagcgaggctcagagcttccatatcaaattcctcagctttgttctgtgcccag

SEQ ID NO: 37530 - DNA, 120 bp, Artificial Sequence
  ENSG00000054965_44 (sequence is synthesized)
agggggtgggccccattctgggccctgtgaactttgtcttatatatcaccatctgtatcagaattcctcctcaattgcagttaagtgaaaatacgtggaagtctgcttttccatcctgta

SEQ ID NO: 37531 - DNA, 120 bp, Artificial Sequence
  ENSG00000054965_45 (sequence is synthesized)
ttctcccacatcactactggctgtgcggcccccgctgcttgccaagcttgggaatccagagaggggcagtagtagagtgggccagttgggacccacccgcagagctgaagaaacacgcca

SEQ ID NO: 37532 - DNA, 120 bp, Artificial Sequence
  ENSG00000054965_46 (sequence is synthesized)
gactaactgatgggattccacaccggagcctctgagcgcacaggcaggcatgccaagggggctgcagggtttgtcctttacttatctgcccctttcctagaaaactcctcgtttctgaaa

SEQ ID NO: 37533 - DNA, 120 bp, Artificial Sequence
  ENSG00000054965_47 (sequence is synthesized)
ttaggcattatatggttccaggacccagccttcaaaattcctggcaggccagcttcaacattccatggccagccctgcctaagccagacttgggtcccagtccctcagtctctccagtgg

SEQ ID NO: 37534 - DNA, 120 bp, Artificial Sequence
  ENSG00000054965_48 (sequence is synthesized)
atatcttctgtggtgcatgctgttgagtccaacccaaaggccaaccgaggcacacaggagttgggactggctgccacaaagctagaaagggacaaaacagcacttgcttccctatggcca

SEQ ID NO: 37535 - DNA, 120 bp, Artificial Sequence
  ENSG00000054965_49 (sequence is synthesized)
catggatagtccctggatatccttgctgtggtagaggtcctctacccattccagccactgatagcagggggattttccttcctaaggagaacagatgtaacagctttgcaaagtaccggc

SEQ ID NO: 37536 - DNA, 120 bp, Artificial Sequence
  ENSG00000054965_50 (sequence is synthesized)
ccataggaatcaaatgggtgagatcagctttgggcctgaccccagcaagaccagcatctccagaccccagcctttctcctcaggcctaagagagtcagggaaagagaggagactgtccca

SEQ ID NO: 37537 - DNA, 120 bp, Artificial Sequence
  ENSG00000054965_51 (sequence is synthesized)
gagaccttctcctcgggtcagccagatagtctggatctatggtgtgactcaagctcctccttacccagggggggtaaggccaggcctctagctacttggagttgtctgtaataatcttga

SEQ ID NO: 37538 - DNA, 120 bp, Artificial Sequence
  ENSG00000054965_52 (sequence is synthesized)
aaggcccaagggcctgtccccatcctgacttaaaggcatctgcttccctgtttcatatcacatgacagagaaacctgttctcatggcatgtaacatccctgtgaagagagcgttgtatat

SEQ ID NO: 37539 - DNA, 120 bp, Artificial Sequence
  ENSG00000054965_53 (sequence is synthesized)
ccctgtgaagagagcgttgtatatgattttgtattttttaattcattttaatctacaggttggaatctaatttttaaattttattggaactcacattttaaaaagaaataaaatttaaaa

SEQ ID NO: 37540 - DNA, 120 bp, Artificial Sequence
  ENSG00000054965_54 (sequence is synthesized)
taataaacctttgaccagtgtcttccaagtagtttgatcaaagaatttataggtgttttcaaaacacagtccggagtgtaaagattggaaagccccatggccttgcctgtgtgtatgaag

SEQ ID NO: 37541 - DNA, 120 bp, Artificial Sequence
  ENSG00000054965_55 (sequence is synthesized)
tgtaaatctggttttgttttgttgttttggattcttttgggtttttgttttgttttgaagatcagacagtgatcactctgaaagattgaagccaagaatttgtaactatggtatttactg

SEQ ID NO: 37542 - DNA, 120 bp, Artificial Sequence
  ENSG00000054965_56 (sequence is synthesized)
taagctgtagaacactcaataactattaaaaaaaaaaattcccccccaaaaaaaagtcttaggtgactagactgagtggttcttggggagggaggcacagaggactgtcctgggccagtg

SEQ ID NO: 37543 - DNA, 120 bp, Artificial Sequence
  ENSG00000054965_57 (sequence is synthesized)
agtcccttgggcgtctccccaagttgatgctaaatttgttctcagtagtcaagaaaaacctatggtacatcttacagctgatctgacaggggtctgccctaagggtctcacagctgctgg

SEQ ID NO: 37544 - DNA, 120 bp, Artificial Sequence
  ENSG00000054965_58 (sequence is synthesized)
ggagctttaagtggcaacttcagcacccaccctaagtgtgtgatgtgggagcacagtgaggccattcagagttgaaatccattgagccatccgcgcaataaagctgacatctattgtgtg

SEQ ID NO: 37545 - DNA, 120 bp, Artificial Sequence
  ENSG00000054965_59 (sequence is synthesized)
gcctacaatcccagcctgtaccccaccaatagtcccagttatgctccaggtaaggaggaaatgggacagcagtggcgaatggagtgggaagggggactctatttgggaaaagcaaaacca

SEQ ID NO: 37546 - DNA, 120 bp, Artificial Sequence
  ENSG00000054965_60 (sequence is synthesized)
cagggtaggggcgggaatagaatctcctccactctgtctgggacttaaggttggctcatctgtcctatgctggaatgtctgagacctgcatcctcctcatagaaccttttctgctctccc

SEQ ID NO: 37547 - DNA, 120 bp, Artificial Sequence
  ENSG00000054965_61 (sequence is synthesized)
aagcaatgtccaaattcattctttgctcagttttccctgaggctgccattgggacacacacacaccttgggacacacacacacccacacaccccttgggacacacacacacacacacaca

SEQ ID NO: 37548 - DNA, 90 bp, Artificial Sequence
  ENSG00000054965_62 (sequence is synthesized)
cacaccttgggttgccaccagagggcaaagagatggttttcaagctgagataagctacttgtttttcaaaaataataaaggcccaacact

SEQ ID NO: 37549 - DNA, 120 bp, Artificial Sequence
  ENSG00000054967_0 (sequence is synthesized)
ggctgtccgggcgctcgccgagccgggccgcggcgccgagtcgaacggggagccgagctggagctgccgcggcgcagccaggccggcgaccaccaggggcctgaggatgaagccaagtct

SEQ ID NO: 37550 - DNA, 120 bp, Artificial Sequence
  ENSG00000054967_1 (sequence is synthesized)
ctgaggatgaagccaagtctgctgtgccggcccctgtcctgcttccttatgctgctgccctggcctctcgccaccctgacatcaacaaccctttggcagtgcccacctggggaggagccc

SEQ ID NO: 37551 - DNA, 120 bp, Artificial Sequence
  ENSG00000054967_2 (sequence is synthesized)
gacctggacccagggcagggcacattatgcaggccctgccccccaggcaccttctcagctgcatggggctccagcccatgccagccccatgcccgttgcagcctttggaggaggctggag

SEQ ID NO: 37552 - DNA, 120 bp, Artificial Sequence
  ENSG00000054967_3 (sequence is synthesized)
gcccaggtgggcatggcaactcgagatacactctgtggagactgctggcctgggtggtttgggccttggggggttccccgcgttccatgtcaaccatgttcctgggcacctctgggtact

SEQ ID NO: 37553 - DNA, 120 bp, Artificial Sequence
  ENSG00000054967_4 (sequence is synthesized)
catggctgtgatgagtgggggcggcgggcccgacgtggcgtggaggtggcagcaggggccagcagcggtggtgagacacggcagcctgggaacggcacccgggcaggtggcccagaggag

SEQ ID NO: 37554 - DNA, 120 bp, Artificial Sequence
  ENSG00000054967_5 (sequence is synthesized)
acagccgcccagtacgcggtcatcgccatcgtccctgtcttctgcctcatggggctgttgggcatcctggtgtgcaacctcctcaagcggaagggctaccactgcacggcgcacaaggag

SEQ ID NO: 37555 - DNA, 120 bp, Artificial Sequence
  ENSG00000054967_6 (sequence is synthesized)
gtcgggcccggccctggaggtggaggcagtggaatcaaccctgcctaccggactgaggatgccaatgaggacaccattggggtcctggtgcgcttgatcacagagaagaaagagaatgct

SEQ ID NO: 37556 - DNA, 120 bp, Artificial Sequence
  ENSG00000054967_7 (sequence is synthesized)
gcggccctggaggagctgctgaaagagtaccacagcaaacagctggtgcagacgagccacaggcctgtgtccaagctgccgccagcgcccccgaacgtgccacacatctgcccgcaccgc

SEQ ID NO: 37557 - DNA, 120 bp, Artificial Sequence
  ENSG00000054967_8 (sequence is synthesized)
caccatctccacaccgtgcagggcctggcctcgctctctggcccctgctgctcccgctgtagccagaagaagtggcccgaggtgctgctgtcccctgaggctgtagccgccactactcct

SEQ ID NO: 37558 - DNA, 120 bp, Artificial Sequence
  ENSG00000054967_9 (sequence is synthesized)
gttcccagccttctgcctaacccgaccagggttcccaaggccggggccaaggcagggcgtcagggcgagatcaccatcttgtctgtgggcaggttccgcgtggctcgaattcctgagcag

SEQ ID NO: 37559 - DNA, 120 bp, Artificial Sequence
  ENSG00000054967_10 (sequence is synthesized)
cggacaagttcaatggtgtctgaggtgaagaccatcacggaggctgggccctcgtggggtgatctccctgactccccacagcctggcctcccccctgagcagcaggccctgctaggaagt

SEQ ID NO: 37560 - DNA, 120 bp, Artificial Sequence
  ENSG00000054967_11 (sequence is synthesized)
ggcggaagccgtacaaagtggctgaagcccccagcagagaacaaggccgaggagaaccgctatgtggtccggctaagtgagagcaacctggtcatctgaggggcggtctagtctaaggac

SEQ ID NO: 37561 - DNA, 120 bp, Artificial Sequence
  ENSG00000054967_12 (sequence is synthesized)
actgcggccctgccctgggaggttccgaaggcttcctggaggaggtggagctgcagctgggactgtgaggaccgagaagcaatggcccagcagacgagacagcaaagaccaaggcctgga

SEQ ID NO: 37562 - DNA, 120 bp, Artificial Sequence
  ENSG00000054967_13 (sequence is synthesized)
ggtgggagcgtctgccccagtgaggaggcaggtggccggcgggcactgtgtacaggagcaggctgagccccgcccctggccctgctgccatgttgctcccctgaaggatgccccgacccc

SEQ ID NO: 37563 - DNA, 120 bp, Artificial Sequence
  ENSG00000054967_14 (sequence is synthesized)
tgtatcatcagaggctgggcttggcagaggggaggggcctgtgcccgtcacccctggccccattccttggtaattagccacacccttgcctctgtacagggccctagagcagatgtgcgt

SEQ ID NO: 37564 - DNA, 120 bp, Artificial Sequence
  ENSG00000054967_15 (sequence is synthesized)
ccccctcctcttccagcaggtctataaagggaaggggtagcagaaagtcctgggctaggagagtgagtccctgggttctaatcttgggcacatctgtggccatcgctgggtccatttttc

SEQ ID NO: 37565 - DNA, 120 bp, Artificial Sequence
  ENSG00000054967_16 (sequence is synthesized)
tgactgtgaagtaaggagagacgtctcagtacccagggcctcttcagctctttgtaggttctgggctgggttgtgggggactggggagctgggctctaccatccctcccattagtagctt

SEQ ID NO: 37566 - DNA, 120 bp, Artificial Sequence
  ENSG00000054967_17 (sequence is synthesized)
tatccagccccgtttttgctgcttccagggcctctgccttcaaggcccccatggggctgtccatccatggctctgcctacggaaggggcttaatgcatgtgcctgcccctcccccagctg

SEQ ID NO: 37567 - DNA, 120 bp, Artificial Sequence
  ENSG00000054967_18 (sequence is synthesized)
tttttaatgaaactgaaaaaatagacttgatcccggcaggactgtgatacagagccctagcctgcccagccagccccaagatctcaggagctttagggagaagacttggtggggctggag

SEQ ID NO: 37568 - DNA, 120 bp, Artificial Sequence
  ENSG00000054967_19 (sequence is synthesized)
cacaccttgggcctcagtggtttctgtgtccctgtggtgccagtgcttctgggcagtgcaggcggctgccaggcccagccctgacttccactctggctcagcaacctggttatttatgtg

SEQ ID NO: 37569 - DNA, 120 bp, Artificial Sequence
  ENSG00000054967_20 (sequence is synthesized)
gggccgtgcaggcatgggcccactgcctgtccatcctgtttctcttatttattgaaactcaccattgccctatccttgtgtctccacccccttccatgtgttgaataataaaaggtggga

SEQ ID NO: 37570 - DNA, 120 bp, Artificial Sequence
  ENSG00000054967_21 (sequence is synthesized)
aagtgctgtcacgaggagctccttttctctgtgcccttcccagcttatccgcctgttccacttgtacctgtccagccctgccctgtgttgggcaccgtgacaggctgccctcccctcaca

SEQ ID NO: 37571 - DNA, 120 bp, Artificial Sequence
  ENSG00000054967_22 (sequence is synthesized)
gttcctgcacctcagcagccagggaagcagggcccagaggagacccatcaactcatctggttctcaccaaagcccctagctagaggcagggctgtcccacagaaatagtgtgagccacat

SEQ ID NO: 37572 - DNA, 120 bp, Artificial Sequence
  ENSG00000054967_23 (sequence is synthesized)
atgtgactttaaattttctgacagtcacatttcaaaaagtaaaaagaagcaggtgaacttaatttttttttaacccagtctatccaaaatattttcatttcaatataaaatcagtataaa

SEQ ID NO: 37573 - DNA, 120 bp, Artificial Sequence
  ENSG00000054967_24 (sequence is synthesized)
aagtgtgaatgagctgtttttgcttttgctttgaaatctggagtgtatcttacacatcttgattggaactcaaatatttcaagggctccatagccacgtggccagcagctaccacactgg

SEQ ID NO: 37574 - DNA, 120 bp, Artificial Sequence
  ENSG00000054967_25 (sequence is synthesized)
tcagcgcagcacctgaggaaatgcactgtgtggagcccgggaggtaattgggggtgaggaagatgtgcgggccagggaatgtgttccacagagagggacagcatgtgcaaaggctgagca

SEQ ID NO: 37575 - DNA, 120 bp, Artificial Sequence
  ENSG00000054967_26 (sequence is synthesized)
ccaacacatagtggtcacctgggccttatgcccagggagcctccaaagcattcagctcctgcttggccagtgtggagaggaaaggagccacaggagcgggtgctacacccggcaagacag

SEQ ID NO: 37576 - DNA, 120 bp, Artificial Sequence
  ENSG00000054967_27 (sequence is synthesized)
acagagcgtctccatctaaaattcctagggcaagcttccaacccggcccaagggccgcatgtggcccaggatatggctttgaatggggcctaacacaaattcataaactttcttaaaaca

SEQ ID NO: 37577 - DNA, 120 bp, Artificial Sequence
  ENSG00000054967_28 (sequence is synthesized)
cgcaccggccaccgccagtctccgagccccgtgacctgcaggtcctccggccgcgactccgggccggccctgcgtggtggctgtcggggggcgcgcggggaagcagcggaacttgcggtg

SEQ ID NO: 37578 - DNA, 120 bp, Artificial Sequence
  ENSG00000054967_29 (sequence is synthesized)
tggggatctcccacttgggtctccctcaagtcaccctgttccctgctggggtctcctgcccctggcctggcctatggccacttctgcctgtgccccctgcaggctgccgccagcgccccc

SEQ ID NO: 37579 - DNA, 120 bp, Artificial Sequence
  ENSG00000054967_30 (sequence is synthesized)
gctgcgcggctgtccgggcgctcgccgagccgggccgcggcgccgagtcgaacggggagccgagctggagctgccgcggcgcagccagattcccaccagggcgaacccagcaccgcctgt

SEQ ID NO: 37580 - DNA, 120 bp, Artificial Sequence
  ENSG00000054967_31 (sequence is synthesized)
agcaccgcctgtataccagactctgtgccaggcactgaacgtaaataaaagccttaccacagccctctgcaggcaggccacagagccagtgcaagacagagcagagcaggactgcacccc

SEQ ID NO: 37581 - DNA, 120 bp, Artificial Sequence
  ENSG00000054967_32 (sequence is synthesized)
cacatttgcagggctctgggaggcttgtcacctaaatgcacatgctcagggcccttaagaaggccagggttgccctctgctggcagatcatggtttagctcaggagtgcggcttccccct

SEQ ID NO: 37582 - DNA, 120 bp, Artificial Sequence
  ENSG00000054967_33 (sequence is synthesized)
gggtgtctggccgtcctgaggaggccttgttcaggacaatgcttcgatggccagaagggaaaacaggagggcagtgggttgacctttgcatccccagcatggcggggagtgggctcccct

SEQ ID NO: 37583 - DNA, 120 bp, Artificial Sequence
  ENSG00000054967_34 (sequence is synthesized)
gggcacattggctctcctgcagcccccactgactcgggccctgggcccctgtctctctgtgtttgtgtcactctgcttttgtcctgcctccatcgtctgtgatgctcagagtgggggcgg

SEQ ID NO: 37584 - DNA, 120 bp, Artificial Sequence
  ENSG00000054967_35 (sequence is synthesized)
ggcagtggtgaggcccagctggggtccaggtgggaaggacgggggcacgagcccagccccagctccacttgggggctgccagcggaatcctgcctggcctctggggtctgagagggagag

SEQ ID NO: 37585 - DNA, 120 bp, Artificial Sequence
  ENSG00000054967_36 (sequence is synthesized)
gcttgggaggtgatagctgcagactgacaacatgggaggaaaggtaaggggacgaaggtgtggccgtgggggcagagcagaggtggcacagctggtcaagtggcttcagtggatcctacc

SEQ ID NO: 37586 - DNA, 120 bp, Artificial Sequence
  ENSG00000054967_37 (sequence is synthesized)
ctgggtgaagccttgcccagatgtggggatctggactctttggaggccacagttgtgtgtatggttccagggtcggatggtggccttggagttactcaaggtgacctctgacctctggcc

SEQ ID NO: 37587 - DNA, 120 bp, Artificial Sequence
  ENSG00000054967_38 (sequence is synthesized)
tggagtagcaggagtgccctgtggcaggagggctggcagggcagctgtcctgtcctgggcaggcaccataaggggctcgggttttggttccaggctgtagtttgagttacaaggcctgga

SEQ ID NO: 37588 - DNA, 120 bp, Artificial Sequence
  ENSG00000054967_39 (sequence is synthesized)
accggagggacaggcatgcgccaccaccttcacccccagggccccgggcccctttccttcttccccacaccactactcccctgcagggcaggggcccactcgcacacaccctgccctggg

SEQ ID NO: 37589 - DNA, 120 bp, Artificial Sequence
  ENSG00000054967_40 (sequence is synthesized)
cccatgggagcctgtggctacctcaagagtgaaatggcatctcccatgctagcaccctcggctgtctggggctggcatgggagccagagacccttctaagtcctgacactgaagtctggc

SEQ ID NO: 37590 - DNA, 120 bp, Artificial Sequence
  ENSG00000054967_41 (sequence is synthesized)
gggggcaggaagcggacaggagcagtaagccggcaggaggaaacgtggtgactcagggccattttgcctgggactgtgcttgttttcctagagacttccctttaactgctggatgctgcc

SEQ ID NO: 37591 - DNA, 120 bp, Artificial Sequence
  ENSG00000054967_42 (sequence is synthesized)
tgggtgcaagtcctgggagctctgtttgctgctgggcccagggctgatcatcgtggcccattctcacacccttgagatttgggcccaaagctgactaggggcactcagttaaattgttac

SEQ ID NO: 37592 - DNA, 120 bp, Artificial Sequence
  ENSG00000054967_43 (sequence is synthesized)
atagggcacagtagagaggccatggaatagcagtttgctgtagatttggggagttctgggtagggtggcagcccacagctccttgaggctgaggaggagacagtgcagacccagaagacg

SEQ ID NO: 37593 - DNA, 120 bp, Artificial Sequence
  ENSG00000054967_44 (sequence is synthesized)
ctgacgcaccgccccctcgcccgcccaattcaatgactggagttcacgtggccctgaagcctctatgcacccgggctgttgggtgcaggaagcactggtgttgaatcatgaaggtgatat

SEQ ID NO: 37594 - DNA, 120 bp, Artificial Sequence
  ENSG00000054967_45 (sequence is synthesized)
atcacagagaagaaaggtgaggagaaggtctgaccccatcccagtgcccaggagaggagggtttcctccaggagcctgtgaggcagccgcggtgggcagagtcttgccctgctctgcctt

SEQ ID NO: 37595 - DNA, 120 bp, Artificial Sequence
  ENSG00000054967_46 (sequence is synthesized)
ccctgccagggtgcctcaagcagcctggtgctctctgacccaggagtgcacacctctgcctcccattcttgcctgatgaagtgggaggaaaaggcgcacagcccaggctgggagtggtgg

SEQ ID NO: 37596 - DNA, 120 bp, Artificial Sequence
  ENSG00000054967_47 (sequence is synthesized)
ccccagcttgggccctgagcaccctgctcaatgggagccctgcccttattgggcctctctgggcagtggaggcggccagagagatcaggactttccggttatgttgtgtctcacatggag

SEQ ID NO: 37597 - DNA, 120 bp, Artificial Sequence
  ENSG00000054967_48 (sequence is synthesized)
cccttgcatccctagggcagcatcttggcccccatggcacccgggcctctcaggctaaggctctggtccatgaacttgctgtgtgaccccgggcacgtgctgccttctctgtgccccggg

SEQ ID NO: 37598 - DNA, 120 bp, Artificial Sequence
  ENSG00000054983_0 (sequence is synthesized)
agtcatgtgacccacacaatggctgagtggctactctcggcttcctggcaacgccgagcgaaagctatgactgcggccgcgggttcggcgggccgcgccgcggtgcccttgctgctgtgt

SEQ ID NO: 37599 - DNA, 120 bp, Artificial Sequence
  ENSG00000054983_1 (sequence is synthesized)
gcgctgctggcgcccggcggcgcgtacgtgctcgacgactccgacgggctgggccgggagttcgacggcatcggcgcggtcagcggcggcggggcaacctcccgacttctagtaaattac

SEQ ID NO: 37600 - DNA, 120 bp, Artificial Sequence
  ENSG00000054983_2 (sequence is synthesized)
ccagagccctatcgttctcagatattggattatctctttaagccgaattttggtgcctctttgcatattttaaaagtggaaataggtggtgatgggcagacaacagacggcactgagccc

SEQ ID NO: 37601 - DNA, 120 bp, Artificial Sequence
  ENSG00000054983_3 (sequence is synthesized)
tcccacatgcattatgcactagatgagaattatttccgaggatacgagtggtggttgatgaaagaagctaagaagaggaatcccaatattacactcattgggttgccatggtcattccct

SEQ ID NO: 37602 - DNA, 120 bp, Artificial Sequence
  ENSG00000054983_4 (sequence is synthesized)
ggatggctgggaaaaggtttcgactggccttatgtcaatcttcagctgactgcctattatgtcgtgacctggattgtgggcgccaagcgttaccatgatttggacattgattatattgga

SEQ ID NO: 37603 - DNA, 120 bp, Artificial Sequence
  ENSG00000054983_5 (sequence is synthesized)
atttggaatgagaggtcatataatgccaattatattaagatattaagaaaaatgctgaattatcaaggtctccagcgagtgaaaatcatagcaagtgataatctctgggagtccatctct

SEQ ID NO: 37604 - DNA, 120 bp, Artificial Sequence
  ENSG00000054983_6 (sequence is synthesized)
gcatccatgctccttgatgccgaactcttcaaggtggttgatgttataggggctcattatcctggaacccattcagcaaaagatgcaaagttgactgggaagaagctttggtcttctgaa

SEQ ID NO: 37605 - DNA, 120 bp, Artificial Sequence
  ENSG00000054983_7 (sequence is synthesized)
gactttagcactttaaatagtgacatgggtgcaggctgctggggtcgcattttaaatcagaattatatcaatggctatatgacttccacaatcgcatggaatttagtggctagttactat

SEQ ID NO: 37606 - DNA, 120 bp, Artificial Sequence
  ENSG00000054983_8 (sequence is synthesized)
gaacagttgccttatgggagatgcgggttgatgacggcccaggagccatggagtgggcactacgtggtagaatctcctgtctgggtatcagctcataccactcagtttactcaacctggc

SEQ ID NO: 37607 - DNA, 120 bp, Artificial Sequence
  ENSG00000054983_9 (sequence is synthesized)
tggtattacctgaagacagttggccatttagagaaaggaggaagctacgtagctctgactgatggcttagggaacctcaccatcatcattgaaaccatgagtcataaacattctaagtgc

SEQ ID NO: 37608 - DNA, 120 bp, Artificial Sequence
  ENSG00000054983_10 (sequence is synthesized)
atacggccatttcttccttatttcaatgtgtcacaacaatttgccacctttgttcttaagggatcttttagtgaaataccagagctacaggtatggtataccaaacttggaaaaacatcc

SEQ ID NO: 37609 - DNA, 120 bp, Artificial Sequence
  ENSG00000054983_11 (sequence is synthesized)
gaaagatttctttttaagcagctggattctctatggctccttgacagcgatggcagtttcacactgagcctgcatgaagatgagctgttcacactcaccactctcaccactggtcgcaaa

SEQ ID NO: 37610 - DNA, 120 bp, Artificial Sequence
  ENSG00000054983_12 (sequence is synthesized)
ggcagctacccgcttcctccaaaatcccagcccttcccaagtacctataaggatgatttcaatgttgattacccattttttagtgaagctccaaactttgctgatcaaactggtgtattt

SEQ ID NO: 37611 - DNA, 120 bp, Artificial Sequence
  ENSG00000054983_13 (sequence is synthesized)
gaatattttacaaatattgaagaccctggcgagcatcacttcacgctacgccaagttctcaaccagagacccattacatgggctgccgatgcatccaacacaatcagtattataggagac

SEQ ID NO: 37612 - DNA, 120 bp, Artificial Sequence
  ENSG00000054983_14 (sequence is synthesized)
tacaactggaccaatctgactataaagtgtgatgtatacatagagacccctgacacaggaggtgtgttcattgcaggaagagtaaataaaggtggtattttgattagaagtgccagagga

SEQ ID NO: 37613 - DNA, 120 bp, Artificial Sequence
  ENSG00000054983_15 (sequence is synthesized)
aggacgtgttgaagttacagcaaaaaaatggtatacactcacgttaactattaagggtcatttcacctctggcatgctgaatgacaagtctctgtggacagacatccctgtgaattttcc

SEQ ID NO: 37614 - DNA, 120 bp, Artificial Sequence
  ENSG00000054983_16 (sequence is synthesized)
aaagaatggctgggctgcaattggaactcactcctttgaatttgcacagtttgacaactttcttgtggaagccacacgctaatacttaacagggcatcatagaatactctggattttctt

SEQ ID NO: 37615 - DNA, 120 bp, Artificial Sequence
  ENSG00000054983_17 (sequence is synthesized)
cccttctttttggttttggttcagagccaattcttgtttcattggaacagtatatgaggcttttgagactaaaaataatgaagagtaaaaggggagagaaatttatttttaatttaccct

SEQ ID NO: 37616 - DNA, 120 bp, Artificial Sequence
  ENSG00000054983_18 (sequence is synthesized)
gtggaagattttattagaattaattccaaggggaaaactggtgaatctttaacattacctggtgtgttccctaacattcaaactgtgcattggccatacccttaggagtggtttgagtag

SEQ ID NO: 37617 - DNA, 120 bp, Artificial Sequence
  ENSG00000054983_19 (sequence is synthesized)
tacagacctcgaagccttgctgctaacactgaggtagctctcttcatcttatttgcaagcggtcctgtagatggcagtaacttgatcatcactgagatgtatttatgcatgctgaccgtg

SEQ ID NO: 37618 - DNA, 120 bp, Artificial Sequence
  ENSG00000054983_20 (sequence is synthesized)
tgtccaagtgagccagtgtcttcatcacaagatgatgctgccataatagaaagctgaagaacactagaagtagctttttgaaaaccacttcaacctgttatgctttatgctctaaaaagt

SEQ ID NO: 37619 - DNA, 120 bp, Artificial Sequence
  ENSG00000054983_21 (sequence is synthesized)
atttttttattttcctttttaagatgatacttttgaaatgcaggatatgatgagtgggatgattttaaaaatgcctctttaataaactacctctaacactatttctgcagtaatagatat

SEQ ID NO: 37620 - DNA, 120 bp, Artificial Sequence
  ENSG00000054983_22 (sequence is synthesized)
tagcagattaattgggttatttgcattatttaatttttttgattccaagttttggtcttgtaaccactataactctctgtgaacgtttttccaggtggctggaagaaggaagaaaacctg

SEQ ID NO: 37621 - DNA, 120 bp, Artificial Sequence
  ENSG00000054983_23 (sequence is synthesized)
atatagccaatgctgttgtagtcgtttcctcagcctcatctcactgtgctgtggtctgtcctcacatgtgcactggtaacagactcacacagctgatgaatgcttttctctccttatgtg

SEQ ID NO: 37622 - DNA, 120 bp, Artificial Sequence
  ENSG00000054983_24 (sequence is synthesized)
tggaaggaggggagcacttagacatttgctaactcccagaattggatcatctcctaagatgtacttactttttaaagtccaaatatgtttatatttaaatatacgtgagcgtgttcatca

SEQ ID NO: 37623 - DNA, 120 bp, Artificial Sequence
  ENSG00000054983_25 (sequence is synthesized)
tgttgtatgatttatactaagcattaatgtggctctatgtagcaaatcagttattcatgtaggtaaagtaaatctagaattatttataagaattactcattgaactaattctactattta

SEQ ID NO: 37624 - DNA, 120 bp, Artificial Sequence
  ENSG00000054983_26 (sequence is synthesized)
ggaatttgtaagagtctaacataggcttagctacagtgaagttttgcattgcttttgaagacaagaagataagtgctagaataaataagattacagagaaaattttttgttaaaaccaag

SEQ ID NO: 37625 - DNA, 120 bp, Artificial Sequence
  ENSG00000054983_27 (sequence is synthesized)
tgatttccagctgatgtatctaatattttttaaaacgaacattatagaggtgtaatttatttacaataaaatgttcctactttaaatatacaattcagtgagttttgataaattgatata

SEQ ID NO: 37626 - DNA, 120 bp, Artificial Sequence
  ENSG00000054983_28 (sequence is synthesized)
cccatgtaaccaacactccagtcaagcttcagaatatttccatcaccccagaaggttctcttgtatacctgctcagtcagttcctttcactcccaattgttggcagccattgataggaat

SEQ ID NO: 37627 - DNA, 120 bp, Artificial Sequence
  ENSG00000054983_29 (sequence is synthesized)
tctatcactataggttagttttctttgttccagaacatcatgaaagcggcgtcatgtactgtgtattcttatgaatggtttctttccatcagcataatgatttgagatttgtccatgttg

SEQ ID NO: 37628 - DNA, 120 bp, Artificial Sequence
  ENSG00000054983_30 (sequence is synthesized)
tgtgattcagtggtttgttccttcttatttctgaagagttttccattgtatgaatataccacaatttgtttcctccccaccagtttctgatactacaattaaaactgtctacatttacaa

SEQ ID NO: 37629 - DNA, 120 bp, Artificial Sequence
  ENSG00000054983_31 (sequence is synthesized)
gtgcttattaacttttctctcagtccctcactctgctgctcttctcgcctcatctcacataagggaaaactcaggctccaaaagcaaagtgattccaccaagatgacaatggaatcggga

SEQ ID NO: 37630 - DNA, 120 bp, Artificial Sequence
  ENSG00000054983_32 (sequence is synthesized)
cctggtgtccaagcctggtcctcgcacgaggtagatactccctgagatgctggggaagagccatggtagggccactcatggccctcttcctttggcggaccttggaatccaccttccctg

SEQ ID NO: 37631 - DNA, 120 bp, Artificial Sequence
  ENSG00000054983_33 (sequence is synthesized)
agtcagcaggcggttggggcgggcccgctgcggggctggggcgggtgctttctcgtttaacacgaaccagacaggcagttaggtttgaacaaatgaggatccggaggtccagagagtata

SEQ ID NO: 37632 - DNA, 120 bp, Artificial Sequence
  ENSG00000054983_34 (sequence is synthesized)
ggtgcagagagtaaagtgacaggtctaagtagtgaagtagccggggctggaaccctcgtcccaggcagtggggcacaggctgtcttcatcgcggagatggcagtcggggagcgtcgctcc

SEQ ID NO: 37633 - DNA, 120 bp, Artificial Sequence
  ENSG00000054983_35 (sequence is synthesized)
agaaagggccagggagtgcgggagcgtccgtgtgcgaaagagaacgccccagtgggatgctttggctgtgtctctcccttttggaggagttggtgggtggtggagtcgttaagtcccgtg

SEQ ID NO: 37634 - DNA, 120 bp, Artificial Sequence
  ENSG00000054983_36 (sequence is synthesized)
cagttgttagtgcagggtaagaatgggctcctccagagagggtagcgccgaataggatttcgtttggaggcaggactggtgcctcaaggtctctttaaaaggaagataagcgagcggcct

SEQ ID NO: 37635 - DNA, 120 bp, Artificial Sequence
  ENSG00000054983_37 (sequence is synthesized)
tggagaataggtggtatttggttacatgagtaagttccttagtggttatttgtgagattttggtgcacccatcactggagcagtatacactgaaccaaatttgtagtcttttatccctca

SEQ ID NO: 37636 - DNA, 83 bp, Artificial Sequence
  ENSG00000054983_38 (sequence is synthesized)
cagtatacactgaaccaaatttgtagtcttttatccctcacctccttcccatcctttccccgagtccctgtaacttagctccc

SEQ ID NO: 37637 - DNA, 120 bp, Artificial Sequence
  ENSG00000054983_39 (sequence is synthesized)
gagatgacacctctccctgggttgattagggaagtcttttagaggaggtgatgtgtaatttgaatcttcaagaacggatggataggaactctccactttgctaaggcaggggcatatcat

SEQ ID NO: 37638 - DNA, 120 bp, Artificial Sequence
  ENSG00000054983_40 (sequence is synthesized)
agcctcctgagtagctgggattacagttctggcggctagaagttcaagatcaagatgttggcaggactggttcttccaggcttctctcctttgcttatagatgaccactgtcttcttgca

SEQ ID NO: 37639 - DNA, 120 bp, Artificial Sequence
  ENSG00000054983_41 (sequence is synthesized)
cttctctcctttgcttatagatgaccactgtcttcttgcatccccacatcatcttcaattctgtatatgtctatgccctaattttctcttcttataaggataccagtcacactggattag

SEQ ID NO: 37640 - DNA, 120 bp, Artificial Sequence
  ENSG00000054983_42 (sequence is synthesized)
ggcccaccccagtgacctattttaacttaattatacctctttaaagaccctagctccacatatagtcacattctgaggtactgagggttgacttcaacataggaatttaaaggtaggggt

SEQ ID NO: 37641 - DNA, 120 bp, Artificial Sequence
  ENSG00000054983_43 (sequence is synthesized)
agggacacaattcagctcgtagctaagacactttgcatggagtccggagtctttcaaaatcaggccttgatagttcaaaagtaaatgctggaaatgacctacataggaaaaaaaaaagat

SEQ ID NO: 37642 - DNA, 120 bp, Artificial Sequence
  ENSG00000054983_44 (sequence is synthesized)
aaaccatggtaaacttttgttgttgctattggattaactcacttctttactattggaaaaataaaatataaaactgaatacttttgttttacatgtaaatacataagcatacagacagat

SEQ ID NO: 37643 - DNA, 120 bp, Artificial Sequence
  ENSG00000054983_45 (sequence is synthesized)
gggcagacaacaggtaggagaatttgggagataggatttctcccatcaacattttaatctatacctcagcatatggactgtgatttcagaatatgtgtaaacaataccaacacttttgag

SEQ ID NO: 37644 - DNA, 120 bp, Artificial Sequence
  ENSG00000054983_46 (sequence is synthesized)
tatttaaaaatattatatagaatatgactggtccatcaaaaacaatattcaaacttcaaattgcttatttagttgaagtaatcggtagtaaacaaatccacagttttctaaaacctatat

SEQ ID NO: 37645 - DNA, 120 bp, Artificial Sequence
  ENSG00000054983_47 (sequence is synthesized)
atacaggacagagcatagggacagttttgaattttattgagcagttagaaagattttaatttcgtatagaacaaaaaaagtgttattaacttaaaatatgtggtaaaaatgatacagctt

SEQ ID NO: 37646 - DNA, 66 bp, Artificial Sequence
  ENSG00000054983_48 (sequence is synthesized)
gagagaagcctctgtctgagaaaaacaaacaaacaaacaaacaaaagaagctattatccagaacgc

SEQ ID NO: 37647 - DNA, 120 bp, Artificial Sequence
  ENSG00000054983_49 (sequence is synthesized)
aacaaacaaacaaaagaagctattatccagaacgctgatttgtaaagataactttatctatcttggtcataaattcaacagctaaaaattcatttgtatcctttcatatgttctgtttct

SEQ ID NO: 37648 - DNA, 120 bp, Artificial Sequence
  ENSG00000055044_0 (sequence is synthesized)
ctagttccagtacagcgtggagggtttaggcagcgtgttctgattctttgcgggacggcgagcgcatttgtgctttgcccgccgcggcctaggaggccttttgaggccgcgtagtcggtg

SEQ ID NO: 37649 - DNA, 120 bp, Artificial Sequence
  ENSG00000055044_1 (sequence is synthesized)
tttttgaactgactctacagcttctggcaggccgtgcggcgccctgacccggcctcaccatgttggtgctgtttgaaacgtctgtgggttacgccatctttaaggttctaaatgagaaga

SEQ ID NO: 37650 - DNA, 120 bp, Artificial Sequence
  ENSG00000055044_2 (sequence is synthesized)
aacttcaagaggttgatagtttatggaaagaatttgaaactccagagaaagcaaacaaaatagtaaagctaaaacattttgagaaatttcaggatacagcagaagcattagcagcattca

SEQ ID NO: 37651 - DNA, 120 bp, Artificial Sequence
  ENSG00000055044_3 (sequence is synthesized)
cagctctgatggagggcaaaatcaataagcagctgaaaaaagttctgaagaaaatagtaaaagaagcccatgaaccgctggcagtagctgatgctaaactaggaggggtcataaaggaaa

SEQ ID NO: 37652 - DNA, 120 bp, Artificial Sequence
  ENSG00000055044_4 (sequence is synthesized)
agctgaatctcagttgtatccatagtcctgttgttaatgaacttatgagaggaattcgttcacaaatggatggattaatccctggggtagaaccacgtgaaatggcagctatgtgtcttg

SEQ ID NO: 37653 - DNA, 120 bp, Artificial Sequence
  ENSG00000055044_5 (sequence is synthesized)
gattggctcacagcctgtctcgatatagattgaagtttagcgctgataaagtagacacaatgattgttcaggcaatttccttgttagatgacttggataaagaactaaacaactacatta

SEQ ID NO: 37654 - DNA, 120 bp, Artificial Sequence
  ENSG00000055044_6 (sequence is synthesized)
tgcgatgtagagaatggtatggctggcatttccctgaattaggaaaaattatttcagataatttaacatactgcaagtgtttacagaaagttggcgataggaagaactatgcctctgcca

SEQ ID NO: 37655 - DNA, 120 bp, Artificial Sequence
  ENSG00000055044_7 (sequence is synthesized)
agctttctgagttgctgccagaagaagttgaagcagaagtgaaagcagctgcagagatatcaatgggaacagaggtttcagaagaagatatttgcaatattctgcatctttgcacccagg

SEQ ID NO: 37656 - DNA, 120 bp, Artificial Sequence
  ENSG00000055044_8 (sequence is synthesized)
gttacagtcatggttggggaattagttggagcacggcttattgctcatgcaggttctcttttaaatttggccaagcatgcagcttctaccgttcagattcttggagctgaaaaggcactt

SEQ ID NO: 37657 - DNA, 120 bp, Artificial Sequence
  ENSG00000055044_9 (sequence is synthesized)
ttcagagccctcaaatctagacgggatacccctaagtatggtctcatttatcatgcttcactcgtgggccagacaagtcccaaacacaaaggaaagatttctcgaatgctggcagccaaa

SEQ ID NO: 37658 - DNA, 120 bp, Artificial Sequence
  ENSG00000055044_10 (sequence is synthesized)
accgttttggctatccgttatgatgcttttggtgaggattcaagttctgcaatgggagttgagaacagagccaaattagaggccaggttgagaactttggaagacagagggataagaaaa

SEQ ID NO: 37659 - DNA, 120 bp, Artificial Sequence
  ENSG00000055044_11 (sequence is synthesized)
ataagtggaacaggaaaagcattagcaaaaacagaaaaatatgaacacaaaagtgaagtgaagacttacgatccttctggtgactccacacttccaacctgttctaaaaaacgcaaaata

SEQ ID NO: 37660 - DNA, 120 bp, Artificial Sequence
  ENSG00000055044_12 (sequence is synthesized)
gaacaggtagataaagaggatgaaattactgaaaagaaagccaaaaaagccaagattaaagttaaagttgaagaagaggaagaagaaaaagtggcagaagaagaagaaacatctgtgaag

SEQ ID NO: 37661 - DNA, 120 bp, Artificial Sequence
  ENSG00000055044_13 (sequence is synthesized)
aagaagaagaaaaggggtaaaaagaaacacattaaggaagaaccactttctgaggaagaaccatgtaccagcacagcaattgctagtccagagaaaaagaagaaaaagaaaaaaaagaga

SEQ ID NO: 37662 - DNA, 120 bp, Artificial Sequence
  ENSG00000055044_14 (sequence is synthesized)
gagaacgaggattaacagaaaggaattacgattatatcacccggacacacatcatgcttaagattcaactgggagcataccagggatgctctctaacgtaatcaagggaaggttcagtaa

SEQ ID NO: 37663 - DNA, 120 bp, Artificial Sequence
  ENSG00000055044_15 (sequence is synthesized)
gacaaagtgatttatcatctataacttcaaacctatttgtcttgacatcaactctgttaaccttatgtcatcatttcttagagtctttgatatacaaataaaattttctttgtattttaa

SEQ ID NO: 37664 - DNA, 120 bp, Artificial Sequence
  ENSG00000055044_16 (sequence is synthesized)
cttattggaactgaatttaagtgatctgactcattcgtcactaccactgagacaacattgagttagcttttttcaccatagggctggttttccccatgtgtgaggagaggtgagaagtgg

SEQ ID NO: 37665 - DNA, 120 bp, Artificial Sequence
  ENSG00000055044_17 (sequence is synthesized)
ggctcacaggtgagaattactggaaaataaagtcaacttacttttatttgataagcgcttaacatagatctgttctaagaatgttacaaatgctcatttgaaccacatcagaaccttatg

SEQ ID NO: 37666 - DNA, 120 bp, Artificial Sequence
  ENSG00000055044_18 (sequence is synthesized)
aagaagatgatagtaatatcctcatttacagatgaaactgaagcccaaggtcaatacagctggtaagtggtaaagccaggatttgaacccaggcagtctggctctattgtctggattctt

SEQ ID NO: 37667 - DNA, 120 bp, Artificial Sequence
  ENSG00000055044_19 (sequence is synthesized)
tttcccccattgagcagtgttctgaaagttggatggttcagttttcactttctagttaggtgtgaagacgttttctcctttcatttcccccatgctgattgagtgttttcctgtaccata

SEQ ID NO: 37668 - DNA, 120 bp, Artificial Sequence
  ENSG00000055044_20 (sequence is synthesized)
gtaactacattgattactaaatcagaattcatttagctcaccacatctcttgaatgtgattgacctacttgaaaaatattaatacctttaacttttggaaactattagtcttcataaact

SEQ ID NO: 37669 - DNA, 120 bp, Artificial Sequence
  ENSG00000055044_21 (sequence is synthesized)
cttcaagaggttgatagtttatggaaagaatttgaaactccagagaaagcaaacaaaatgtaagtactcttgaaatcaataatttagcagttaacatttagggcttgttttattttttac

SEQ ID NO: 37670 - DNA, 120 bp, Artificial Sequence
  ENSG00000055044_22 (sequence is synthesized)
atgaacctaattattacaaatgttttacttggaatataggccatctcaattaatttgaaggcagtagtctcccccttacccacagggattatgttccagaagaccctgtggatactttaa

SEQ ID NO: 37671 - DNA, 120 bp, Artificial Sequence
  ENSG00000055044_23 (sequence is synthesized)
acctcggatagtaccaaatgtgattgctgtcagtaggaacacatttgtcttcgtgtcttccacacacaaatgtaataccttttttatcttaactaagcacttaccgcacacaggggttgt

SEQ ID NO: 37672 - DNA, 120 bp, Artificial Sequence
  ENSG00000055044_24 (sequence is synthesized)
aacctgctttttgagttttgcaacatcaaaactagcatgaactactttttctttcatcacaatttcatggaagattcattcttagtgtagatgttaaatctttggtttttttgtttgttt

SEQ ID NO: 37673 - DNA, 120 bp, Artificial Sequence
  ENSG00000055070_0 (sequence is synthesized)
gaaagcggcgagtaagatggaagatgaggaggtcgctgagagctgggaagaggcggcagacagcggggaaatagacagacggttggaaaaaaaactgaagatcacacaaaaagagagcag

SEQ ID NO: 37674 - DNA, 120 bp, Artificial Sequence
  ENSG00000055070_1 (sequence is synthesized)
gaaatccaaatctcctcccaaagtgcccattgtgattcaggacgatagccttcccgcggggccccctccacagatccgcatcctcaagaggcccaccagcaacggtgtggtcagcagccc

SEQ ID NO: 37675 - DNA, 120 bp, Artificial Sequence
  ENSG00000055070_2 (sequence is synthesized)
caactccaccagcaggcccacccttccagtcaagtccctagcacagcgagaggccgagtacgccgaggcccggaagcggatcctgggcagcgccagccccgaggaggagcaggagaaacc

SEQ ID NO: 37676 - DNA, 120 bp, Artificial Sequence
  ENSG00000055070_3 (sequence is synthesized)
catcctcgacaggccaaccaggatctcccaacccgaagacagcaggcagcccaataatgtgatcagacagcctttgggtcctgatgggtctcaaggcttcaaacagcgcagataaatgca

SEQ ID NO: 37677 - DNA, 120 bp, Artificial Sequence
  ENSG00000055070_4 (sequence is synthesized)
ggcaagaaaagatgccgccgttgctgccgtcaccgcctcctgggtcgtccgccacgggttgcactgccgtggcagacagctggacttgagcagagggaacgacctgacttacttgcactg

SEQ ID NO: 37678 - DNA, 120 bp, Artificial Sequence
  ENSG00000055070_5 (sequence is synthesized)
tgatcccccttgctccgcccactgtgaccttgaaccccatgcactgtgacctccccccttctcccccttcccactgtgattggcacatcgacaagggctgtcccaagtcaatggaaaggg

SEQ ID NO: 37679 - DNA, 120 bp, Artificial Sequence
  ENSG00000055070_6 (sequence is synthesized)
aaagggtgggggttaggggaaggttggggggacccagcaaggactcagagagtcagacagtgccacttggccacttggggtaaagccagtgccagcaataacagtttatcatgctcatta

SEQ ID NO: 37680 - DNA, 120 bp, Artificial Sequence
  ENSG00000055070_7 (sequence is synthesized)
atttgggatttcaaaacacaaatgaaaactcacacccacccacccccaagtgcatgtctccatcacttaaaaagtaagttccatttgaaaatatcctttcttttttttttcttcctattt

SEQ ID NO: 37681 - DNA, 120 bp, Artificial Sequence
  ENSG00000055070_8 (sequence is synthesized)
ttgtttgtttatacaaatatctgatttgcaagaaaaagtgcatgggaggggttttagtggtttaatgaatttttaattaagaaagggtagtttggtagtctacttaaaaatgtttctggg

SEQ ID NO: 37682 - DNA, 120 bp, Artificial Sequence
  ENSG00000055070_9 (sequence is synthesized)
aaattcactagaaacattaaccaataggattttggtgagcttagcttctgtattcctactgccgcccagaaaaggggcagggctctgcagccgccaggacagacgagcaccccatgccta

SEQ ID NO: 37683 - DNA, 120 bp, Artificial Sequence
  ENSG00000055070_10 (sequence is synthesized)
tacctccctccccgagctaagtcccagggcatctgggccttgcctggagactgggctagctctgtaggctcggagagcctggggagggtgccaaccccacctctagtattttgggagata

SEQ ID NO: 37684 - DNA, 120 bp, Artificial Sequence
  ENSG00000055070_11 (sequence is synthesized)
gggaaagtgaaccgacttccccttcccatacccctcagggtggttccctaccagccaggcttactacttctagaagaaagcagagtgccagggagtgagattgcatccctgggcttagaa

SEQ ID NO: 37685 - DNA, 120 bp, Artificial Sequence
  ENSG00000055070_12 (sequence is synthesized)
gtgacggagagaagacttgtttagtattttgccatcagcacaaggaaaaccaggagagagtctgcctccaggactctgagccttctgcctcgtatgttcagaaggtggataggtcttccc

SEQ ID NO: 37686 - DNA, 120 bp, Artificial Sequence
  ENSG00000055070_13 (sequence is synthesized)
actccagcatggcttgaactcttaggggtctgcagtgctccatctccattggtggccccagctcagtaactatacctggtacatttcctgtgtgcaatcagtaccttgaaggcagaacat

SEQ ID NO: 37687 - DNA, 120 bp, Artificial Sequence
  ENSG00000055070_14 (sequence is synthesized)
tctgaataaagttggaaaaagaacagctttgctttgcaaagattgatgacagactggttcctcagaggcctaggctacccgtcacccctttttccagagcgagggcctggaatgaaggca

SEQ ID NO: 37688 - DNA, 120 bp, Artificial Sequence
  ENSG00000055070_15 (sequence is synthesized)
gtttatcctctgtccctggagcctggggtttgctttggctccttgaggtggaagagactaagagggcagctgcccagagcagctgtgtgtacctggctcctctcaggcttcctgatccct

SEQ ID NO: 37689 - DNA, 120 bp, Artificial Sequence
  ENSG00000055070_16 (sequence is synthesized)
tccgttgcactgcgccttatccctcagccagccagacagcctccctgctcctgaccagcagatacgtttcggagtggttggtgtggtttttgtgatgagggcagcacgtggtggccaagg

SEQ ID NO: 37690 - DNA, 120 bp, Artificial Sequence
  ENSG00000055070_17 (sequence is synthesized)
tggcaagctgagtctcacaggctcactccctcgttggttccctgtgggaatggtaggccaggcccagtaagccatgccccaacacgtcctctcctccggaggaagggccagctgccagct

SEQ ID NO: 37691 - DNA, 120 bp, Artificial Sequence
  ENSG00000055070_18 (sequence is synthesized)
gagtcagcagctagtccatagcacagccttataactgtaaagccaggcattgcccatgagcagagctggaaccagagcttcagtcagtaagagggaggattaccttcaggagaaggcaag

SEQ ID NO: 37692 - DNA, 120 bp, Artificial Sequence
  ENSG00000055070_19 (sequence is synthesized)
gaagaaaactggctgctatctttatagttccactgccctaaccaagtgtccacattctaaatgtgtagtgtccatcccttatgtaatagtggtttcccgcccaaagtgagactttccttt

SEQ ID NO: 37693 - DNA, 120 bp, Artificial Sequence
  ENSG00000055070_20 (sequence is synthesized)
taattggagaagggtatagaggtagtccaggtgggaacgccagaagtgctgattgcccagccattgggaccacctgttcttgccccactaccctctagtgggaggccaaagtaaaggctg

SEQ ID NO: 37694 - DNA, 120 bp, Artificial Sequence
  ENSG00000055070_21 (sequence is synthesized)
gctggtgggtgtctgtggattgaggatgtggcagggactggtcctcccacctccctctggccaaagatgggctttgcccgctgtgtgcctgtcaccacccaccagcagtcatgccctggg

SEQ ID NO: 37695 - DNA, 120 bp, Artificial Sequence
  ENSG00000055070_22 (sequence is synthesized)
cttcccaaatggagaggtagcaggcaacgtttttaaaaagaaagaaaacaggaaactgtattgtgtcgggggaggcgggagggagatgaggaaacggtttggattttgtgtgtgggaggg

SEQ ID NO: 37696 - DNA, 120 bp, Artificial Sequence
  ENSG00000055070_23 (sequence is synthesized)
tattttttgggggtagttgtctgtaactttcctaagtgctttttttccttttcttttttaaagtaagttgcaggctttggcttggaaaaccccagggggatggggggcagaaacctgagg

SEQ ID NO: 37697 - DNA, 120 bp, Artificial Sequence
  ENSG00000055070_24 (sequence is synthesized)
ctgctgcccctttatctgccttcacggtactgtccccttcccccagctcctccctgaccccatgggccaggcctcagaccttccagctaaccgcttcccatgagccactactctgatgtc

SEQ ID NO: 37698 - DNA, 120 bp, Artificial Sequence
  ENSG00000055070_25 (sequence is synthesized)
agcctataaccaaaggagctggggggtccaggcctggtgaccaacctttctcagcccactcaatcagggtgctccccacctgcaggcaggaggcaacaccctatctgctaccatcagccc

SEQ ID NO: 37699 - DNA, 120 bp, Artificial Sequence
  ENSG00000055070_26 (sequence is synthesized)
cttccagagcccatctgccccgcccagccctgccctgcccagccataccctgctctgccccatctgggggtgccctgctcagggatgggctggcagggctgtacccagcctccctggtaa

SEQ ID NO: 37700 - DNA, 120 bp, Artificial Sequence
  ENSG00000055070_27 (sequence is synthesized)
gcagagactcaagaaacctctggggtcctgttttctggtcgtgtgatcccaggggtgcacatgggccccttgggtgtctgaacagaagggcatgggagggagggctgcacccctgcagtc

SEQ ID NO: 37701 - DNA, 120 bp, Artificial Sequence
  ENSG00000055070_28 (sequence is synthesized)
ttactctgctggtgtagcgggcagctgcccactcccaccccaccctgcaccgcgggctcctgagtcggcagattaagcattttataaattgtattttaaatacatgttttaaacttgtca

SEQ ID NO: 37702 - DNA, 120 bp, Artificial Sequence
  ENSG00000055070_29 (sequence is synthesized)
aagatggctgccctaatgtacacttgggaccttgcctggcgcctcttccgggcttggcagcgggcggggtccattgagtaaagccttgcgtgcctgcgcccgcgacggaggcgcgcttca

SEQ ID NO: 37703 - DNA, 120 bp, Artificial Sequence
  ENSG00000055070_30 (sequence is synthesized)
aagcgcaggcgcggggagggggtgggggaggagggaaagcggcgagtaagatggaagatgaggaggtcgctgagagctgggaagaggcggcagacagcggggaaatagacagacggttgg

SEQ ID NO: 37704 - DNA, 120 bp, Artificial Sequence
  ENSG00000055070_31 (sequence is synthesized)
aaagcggcgagtaagatggaagatgaggaggtcgctgagagctgggaagaggcggcagacagcgggatctggccctgtctgccaaagcttgttggccgtcattaggcagggcaagtgctc

SEQ ID NO: 37705 - DNA, 120 bp, Artificial Sequence
  ENSG00000055070_32 (sequence is synthesized)
tttggtgccctgcagccccttcacttccccaggtatgctccgtgcgagtggagtttggctgcttgcctggtctatgaaggcatttggtctcaaccctcaaaggcttctaaattctacagc

SEQ ID NO: 37706 - DNA, 120 bp, Artificial Sequence
  ENSG00000055070_33 (sequence is synthesized)
gaggagggaaagcggcgagtaagatggaagatgaggaggtcgctgagagctgggaagaggcggcagacagcgggggctggtgtgagcagaaaatgaatgtctggggaagaatgttgacag

SEQ ID NO: 37707 - DNA, 120 bp, Artificial Sequence
  ENSG00000055070_34 (sequence is synthesized)
ggcttgcgcggaccaaggaggcatgtccggcttcgcaggaaagcgggaggaggcagccgagggcggggggaaattgaatcctctttgggctactcaactctgctaaaatcccccaccatc

SEQ ID NO: 37708 - DNA, 120 bp, Artificial Sequence
  ENSG00000055070_35 (sequence is synthesized)
cgtcacggtggacgagtcgggttttttttctctttcacttttactccaagaagagtttgtgggcaggcaggcaggtctcacggggactctgccaaagcaaccgaaagctctgcggggcag

SEQ ID NO: 37709 - DNA, 120 bp, Artificial Sequence
  ENSG00000055070_36 (sequence is synthesized)
gagaaaggccgtggtcacaggccgaggttctgtggagggtggaatgcgctcgggggagctaggcctccgcacccgccttcgccgcgtctctagcgtcgacctgatagccgcacccaccct

SEQ ID NO: 37710 - DNA, 120 bp, Artificial Sequence
  ENSG00000055070_37 (sequence is synthesized)
ccgctgcactgtctggggcaactgggtggttttcccggtggtttgagactaacatttagccaggaattaactcacttctaccccgagggcccgatgagcagagagggctgtggcggatgc

SEQ ID NO: 37711 - DNA, 120 bp, Artificial Sequence
  ENSG00000055070_38 (sequence is synthesized)
aaagcggcgagtaagatggaagatgaggaggtcgctgagagctgggaagaggcggcagacagcggggttccccatgttcacttgtagaccatggacctccaaagccacaaacataaggca

SEQ ID NO: 37712 - DNA, 80 bp, Artificial Sequence
  ENSG00000055118_0 (sequence is synthesized)
cgctggagcggctgtcggcgcggtggcaggcgggagccaggagtccggggctcgggcgggcggagcgcagcgcggggacg

SEQ ID NO: 37713 - DNA, 80 bp, Artificial Sequence
  ENSG00000055118_1 (sequence is synthesized)
tcaggcggctccaggccgggcccggggtccggagcggggagccgggagccgagcgaggacccggcgcccgcagtccagtc

SEQ ID NO: 37714 - DNA, 80 bp, Artificial Sequence
  ENSG00000055118_2 (sequence is synthesized)
ggagccgagcgaggacccggcgcccgcagtccagtcttggccgcgcccgtgctcggcttggccgcggggtgcggggacca

SEQ ID NO: 37715 - DNA, 120 bp, Artificial Sequence
  ENSG00000055118_3 (sequence is synthesized)
ccgggccggggtgggtgggggcccgcccggcccgcccatgggctcaggatgccggtgcggaggggccacgtcgcgccgcagaacaccttcctggacaccatcatccgcaagtttgagggc

SEQ ID NO: 37716 - DNA, 120 bp, Artificial Sequence
  ENSG00000055118_4 (sequence is synthesized)
cagagccgtaagttcatcatcgccaacgctcgggtggagaactgcgccgtcatctactgcaacgacggcttctgcgagctgtgcggctactcgcgggccgaggtgatgcagcgaccctgc

SEQ ID NO: 37717 - DNA, 120 bp, Artificial Sequence
  ENSG00000055118_5 (sequence is synthesized)
acctgcgacttcctgcacgggccgcgcacgcagcgccgcgctgccgcgcagatcgcgcaggcactgctgggcgccgaggagcgcaaagtggaaatcgccttctaccggaaagatgggagc

SEQ ID NO: 37718 - DNA, 120 bp, Artificial Sequence
  ENSG00000055118_6 (sequence is synthesized)
tgcttcctatgtctggtggatgtggtgcccgtgaagaacgaggatggggctgtcatcatgttcatcctcaatttcgaggtggtgatggagaaggacatggtggggtccccggctcatgac

SEQ ID NO: 37719 - DNA, 120 bp, Artificial Sequence
  ENSG00000055118_7 (sequence is synthesized)
tgacaccaaccaccggggcccccccaccagctggctggccccaggccgcgccaagaccttccgcctgaagctgcccgcgctgctggcgctgacggcccgggagtcgtcggtgcggtcggg

SEQ ID NO: 37720 - DNA, 120 bp, Artificial Sequence
  ENSG00000055118_8 (sequence is synthesized)
gcgggcggcgcgggcgccccgggggccgtggtggtggacgtggacctgacgcccgcggcacccagcagcgagtcgctggccctggacgaagtgacagccatggacaaccacgtggcaggg

SEQ ID NO: 37721 - DNA, 120 bp, Artificial Sequence
  ENSG00000055118_9 (sequence is synthesized)
gacgaagtgacagccatggacaaccacgtggcagggctcgggcccgcggaggagcggcgtgcgctggtgggtcccggctctccgccccgcagcgcgcccggccagctcccatcgccccgg

SEQ ID NO: 37722 - DNA, 120 bp, Artificial Sequence
  ENSG00000055118_10 (sequence is synthesized)
tcgggctccagctgcagcctggcccggacgcgctcccgagaaagctgcgccagcgtgcgccgcgcctcgtcggccgacgacatcgaggccatgcgcgccggggtgctgcccccgccaccg

SEQ ID NO: 37723 - DNA, 120 bp, Artificial Sequence
  ENSG00000055118_11 (sequence is synthesized)
accggggccatgcacccactgcgcagcggcttgctcaactccacctcggactccgacctcgtgcgctaccgcaccattagcaagattccccaaatcaccctcaactttgtggacctcaag

SEQ ID NO: 37724 - DNA, 120 bp, Artificial Sequence
  ENSG00000055118_12 (sequence is synthesized)
ggcgaccccttcttggcttcgcccaccagtgaccgtgagatcatagcacctaagataaaggagcgaacccacaatgtcactgagaaggtcacccaggtcctgtccctgggcgccgacgtg

SEQ ID NO: 37725 - DNA, 120 bp, Artificial Sequence
  ENSG00000055118_13 (sequence is synthesized)
ctgcctgagtacaagctgcaggcaccgcgcatccaccgctggaccatcctgcattacagccccttcaaggccgtgtgggactggctcatcctgctgctggtcatctacacggctgtcttc

SEQ ID NO: 37726 - DNA, 120 bp, Artificial Sequence
  ENSG00000055118_14 (sequence is synthesized)
acaccctactcggctgccttcctgctgaaggagacggaagaaggcccgcctgctaccgagtgtggctacgcctgccagccgctggctgtggtggacctcatcgtggacatcatgttcatt

SEQ ID NO: 37727 - DNA, 120 bp, Artificial Sequence
  ENSG00000055118_15 (sequence is synthesized)
gtggacatcctcatcaacttccgcaccacctacgtcaatgccaacgaggaggtggtcagccaccccggccgcatcgccgtccactacttcaagggctggttcctcatcgacatggtggcc

SEQ ID NO: 37728 - DNA, 120 bp, Artificial Sequence
  ENSG00000055118_16 (sequence is synthesized)
gccatccccttcgacctgctcatcttcggctctggctctgaggagctgatcgggctgctgaagactgcgcggctgctgcggctggtgcgcgtggcgcggaagctggatcgctactcagag

SEQ ID NO: 37729 - DNA, 120 bp, Artificial Sequence
  ENSG00000055118_17 (sequence is synthesized)
gcagccacacatggactcacgcatcggctggctgcacaacctgggcgaccagataggcaaaccctacaacagcagcggcctgggcggcccctccatcaaggacaagtatgtgacggcgct

SEQ ID NO: 37730 - DNA, 120 bp, Artificial Sequence
  ENSG00000055118_18 (sequence is synthesized)
ctacttcaccttcagcagcctcaccagtgtgggcttcggcaacgtctctcccaacaccaactcagagaagatcttctccatctgcgtcatgctcattggctccctcatgtatgctagcat

SEQ ID NO: 37731 - DNA, 120 bp, Artificial Sequence
  ENSG00000055118_19 (sequence is synthesized)
cttcggcaacgtgtcggccatcatccagcggctgtactcgggcacagcccgctaccacacacagatgctgcgggtgcgggagttcatccgcttccaccagatccccaatcccctgcgcca

SEQ ID NO: 37732 - DNA, 120 bp, Artificial Sequence
  ENSG00000055118_20 (sequence is synthesized)
gcgcctcgaggagtacttccagcacgcctggtcctacaccaacggcatcgacatgaacgcggtgctgaagggcttccctgagtgcctgcaggctgacatctgcctgcacctgaaccgctc

SEQ ID NO: 37733 - DNA, 120 bp, Artificial Sequence
  ENSG00000055118_21 (sequence is synthesized)
actgctgcagcactgcaaacccttccgaggggccaccaagggctgccttcgggccctggccatgaagttcaagaccacacatgcaccgccaggggacacactggtgcatgctggggacct

SEQ ID NO: 37734 - DNA, 120 bp, Artificial Sequence
  ENSG00000055118_22 (sequence is synthesized)
gctcaccgccctgtacttcatctcccggggctccatcgagatcctgcggggcgacgtcgtcgtggccatcctggggaagaatgacatctttggggagcctctgaacctgtatgcaaggcc

SEQ ID NO: 37735 - DNA, 120 bp, Artificial Sequence
  ENSG00000055118_23 (sequence is synthesized)
tggcaagtcgaacggggatgtgcgggccctcacctactgtgacctacacaagatccatcgggacgacctgctggaggtgctggacatgtaccctgagttctccgaccacttctggtccag

SEQ ID NO: 37736 - DNA, 120 bp, Artificial Sequence
  ENSG00000055118_24 (sequence is synthesized)
cctggagatcaccttcaacctgcgagataccaacatgatcccgggctcccccggcagtacggagttagagggtggcttcagtcggcaacgcaagcgcaagttgtccttccgcaggcgcac

SEQ ID NO: 37737 - DNA, 120 bp, Artificial Sequence
  ENSG00000055118_25 (sequence is synthesized)
cgcaagcgcaagttgtccttccgcaggcgcacggacaaggacacggagcagccaggggaggtgtcggccttggggccgggccgggcgggggcagggccgagtagccggggccggccgggg

SEQ ID NO: 37738 - DNA, 120 bp, Artificial Sequence
  ENSG00000055118_26 (sequence is synthesized)
ctccagccctgagagcagtgaggatgagggcccaggccgcagctccagccccctccgcctggtgcccttctccagccccaggccccccggagagccgccgggtggggagcccctgatgga

SEQ ID NO: 37739 - DNA, 120 bp, Artificial Sequence
  ENSG00000055118_27 (sequence is synthesized)
ggactgcgagaagagcagcgacacttgcaaccccctgtcaggcgccttctcaggagtgtccaacattttcagcttctggggggacagtcggggccgccagtaccaggagctccctcgatg

SEQ ID NO: 37740 - DNA, 120 bp, Artificial Sequence
  ENSG00000055118_28 (sequence is synthesized)
ccccgcccccacccccagcctcctcaacatccccctctccagcccgggtcggcggccccggggcgacgtggagagcaggctggatgccctccagcgccagctcaacaggctggagacccg

SEQ ID NO: 37741 - DNA, 120 bp, Artificial Sequence
  ENSG00000055118_29 (sequence is synthesized)
gctgagtgcagacatggccactgtcctgcagctgctacagaggcagatgacgctggtcccgcccgcctacagtgctgtgaccaccccggggcctggccccacttccacatccccgctgtt

SEQ ID NO: 37742 - DNA, 120 bp, Artificial Sequence
  ENSG00000055118_30 (sequence is synthesized)
gcccgtcagccccctccccaccctcaccttggactcgctttctcaggtttcccagttcatggcgtgtgaggagctgcccccgggggccccagagcttccccaagaaggccccacacgacg

SEQ ID NO: 37743 - DNA, 120 bp, Artificial Sequence
  ENSG00000055118_31 (sequence is synthesized)
cctctccctaccgggccagctgggggccctcacctcccagcccctgcacagacacggctcggacccgggcagttagtggggctgcccagtgtggacacgtggctcacccagggatcaagg

SEQ ID NO: 37744 - DNA, 120 bp, Artificial Sequence
  ENSG00000055118_32 (sequence is synthesized)
cgctgctgggccgctccccttggaggccctgctcaggaggccctgaccgtggaaggggagaggaactcgaaagcacagctcctcccccagcccttgggaccatcttctcctgcagtcccc

SEQ ID NO: 37745 - DNA, 120 bp, Artificial Sequence
  ENSG00000055118_33 (sequence is synthesized)
tgggccccagtgagaggggcaggggcagggccggcagtaggtggggcctgtggtccccccactgccctgagggcattagctggtctaactgcccggaggcacccggccctgggccttagg

SEQ ID NO: 37746 - DNA, 120 bp, Artificial Sequence
  ENSG00000055118_34 (sequence is synthesized)
cacctcaaggacttttctgctatttactgctcttattgttaaggataataattaaggatcatatgaataattaatgaagatgctgatgactatgaataataaataattatcctgaggaga

SEQ ID NO: 37747 - DNA, 120 bp, Artificial Sequence
  ENSG00000055118_35 (sequence is synthesized)
tgccctctgcagcctcaagaggtgcgagccttctgaatatgcagtcactggggctgtggacctgggactgcctgcagggtcactgggctcctttaattcacctaaactcaggccctccaa

SEQ ID NO: 37748 - DNA, 120 bp, Artificial Sequence
  ENSG00000055118_36 (sequence is synthesized)
gcggggccatggagaggagccccacgtggggtgaggctgctgaactctggggttcccacattctccttcccttcaggatccgccacaaacagacactttttgcttccttaaagtaggatc

SEQ ID NO: 37749 - DNA, 120 bp, Artificial Sequence
  ENSG00000055118_37 (sequence is synthesized)
aaatctagatcctctagcctgggcagtagaggaagaaatgctagcctggaagctcggcatttggtttcactaagggccatgtggttccctgcagcctcatgcctggccccttgacacatc

SEQ ID NO: 37750 - DNA, 120 bp, Artificial Sequence
  ENSG00000055118_38 (sequence is synthesized)
caaagcaaagggagtcctgccccctccccccacttcctttctaccctgcctgtgcacagtgggtgggttggtgtgtctggacactgaggacttcctccccctttgcctgtccttccctcg

SEQ ID NO: 37751 - DNA, 120 bp, Artificial Sequence
  ENSG00000055118_39 (sequence is synthesized)
gccctgtgtgcctcagggcagatatagcaagctctttcgaccatagttgatggtaggacattttagactttgtttctcagctctgtacaaacacaaatacacacccccacaaaactaaaa

SEQ ID NO: 37752 - DNA, 120 bp, Artificial Sequence
  ENSG00000055118_40 (sequence is synthesized)
tcaaagtttcactacataacactgggccttactgcatgtggttcattctagcatttctgttctgtgctgtgctaagctatactactgtatgttctttcagtaaaaaaaaaaaaaaaaaaa

SEQ ID NO: 37753 - DNA, 120 bp, Artificial Sequence
  ENSG00000055118_41 (sequence is synthesized)
ggttccgagtgcggccgctgctgggctggcgggcgggcagagcacggcaccctggcagcagggcccacgccacggggccatgggcagctcgagccaggcaggctgctgcccacgcttact

SEQ ID NO: 37754 - DNA, 120 bp, Artificial Sequence
  ENSG00000055118_42 (sequence is synthesized)
gccagggtgaccccagccctggggcccagccacaaccaccctggcttcatgccaggggctgctctggttgccagtcggccagcctcgggggtgcagcctgggctgggactgctgctgggg

SEQ ID NO: 37755 - DNA, 120 bp, Artificial Sequence
  ENSG00000055118_43 (sequence is synthesized)
tgcaggtgaggcagtggccgggccctcaggccccagggcaggcaggctgcagggagccaagtcctccatggcggccccagccgggaaggcgagcaggacaggggctctgcggcccagggc

SEQ ID NO: 37756 - DNA, 120 bp, Artificial Sequence
  ENSG00000055118_44 (sequence is synthesized)
gccctggaacttagagactccaggggccaccatcgtgacatggtttgggggctgggtcaccagggcggggactactgaagggtggggtgtgctggagcgcagatgtacaagggcgtctcg

SEQ ID NO: 37757 - DNA, 120 bp, Artificial Sequence
  ENSG00000055118_45 (sequence is synthesized)
tgggcatgtcgacgctgagactgagacactgacctggtgcggggcctgagcagggtccctgtgggtgggtggggtccctgcagaggctgacggccccacgtgcccacgcccccagccctc

SEQ ID NO: 37758 - DNA, 120 bp, Artificial Sequence
  ENSG00000055130_0 (sequence is synthesized)
aggcggggcagccccggtagctgagggacgcagctagaccttggcgggacggggctttcgccggggcccaggcccagggaccaggcggaggcgtcgcgggagcctttggggcaccacaga

SEQ ID NO: 37759 - DNA, 120 bp, Artificial Sequence
  ENSG00000055130_1 (sequence is synthesized)
gatgcgggtttgcctgcaatgagatttcattctctacatttaaaggacatcctttctgagctgctgtgaataaatttggaatggtactgtatattttcatctaatggagaactagctgta

SEQ ID NO: 37760 - DNA, 120 bp, Artificial Sequence
  ENSG00000055130_2 (sequence is synthesized)
ctttgaataaggattgctgcactggacgactttagaacatccctcacaatgtcgtcaacccggagccagaacccccacggcctgaagcagattggcctggaccagatctgggacgacctc

SEQ ID NO: 37761 - DNA, 120 bp, Artificial Sequence
  ENSG00000055130_3 (sequence is synthesized)
agagccggcatccagcaggtgtacacacggcagagcatggccaagtccagatatatggagctctacactcatgtttataactactgtactagtgttcaccagtcaaaccaagcacgagga

SEQ ID NO: 37762 - DNA, 120 bp, Artificial Sequence
  ENSG00000055130_4 (sequence is synthesized)
gctggagttcctccttctaagtcgaaaaaggggcagacacctggaggagctcagtttgttggcctggaattatataaacgacttaaggaatttttgaagaattacttgacaaatcttctt

SEQ ID NO: 37763 - DNA, 120 bp, Artificial Sequence
  ENSG00000055130_5 (sequence is synthesized)
aaggatggagaagatttgatggatgagagtgtactgaaattctacactcaacaatgggaagattatcgattttcaagcaaagtgctgaatggaatttgtgcctacctcaatagacattgg

SEQ ID NO: 37764 - DNA, 120 bp, Artificial Sequence
  ENSG00000055130_6 (sequence is synthesized)
gttcgccgtgaatgtgacgaaggacgaaaaggaatatatgaaatctattcgcttgcattggtgacttggagagactgtctgttcaggccactgaataaacaggtaacaaatgctgtttta

SEQ ID NO: 37765 - DNA, 120 bp, Artificial Sequence
  ENSG00000055130_7 (sequence is synthesized)
aagctgattgaaaaggaaaggaatggtgaaaccatcaatacaagattgattagtggagttgtacagtcttacgtggaattggggctgaatgaagatgatgcatttgcaaagggccctacg

SEQ ID NO: 37766 - DNA, 120 bp, Artificial Sequence
  ENSG00000055130_8 (sequence is synthesized)
ttaacagtgtataaagaatcctttgaatctcaatttttggctgacacagagagattttataccagagagagtactgaattcttgcagcagaacccagttactgaatatatgaaaaaggca

SEQ ID NO: 37767 - DNA, 120 bp, Artificial Sequence
  ENSG00000055130_9 (sequence is synthesized)
gaggctcgtctgcttgaggaacaacgaagagttcaggtttaccttcatgaaagcacacaagatgaattagcaaggaaatgtgaacaagtcctcattgaaaaacacttggaaattttccac

SEQ ID NO: 37768 - DNA, 120 bp, Artificial Sequence
  ENSG00000055130_10 (sequence is synthesized)
acagaatttcagaatttattggatgctgacaaaaatgaagatttgggacgcatgtataatcttgtatctagaatccaggatggcctaggagaattgaaaaaactgttggagacacacatt

SEQ ID NO: 37769 - DNA, 120 bp, Artificial Sequence
  ENSG00000055130_11 (sequence is synthesized)
cataatcagggtcttgcagccattgaaaagtgtggagaagctgctttaaatgaccccaaaatgtatgtacagacagtgcttgatgttcataaaaaatacaatgccctggtaatgtctgca

SEQ ID NO: 37770 - DNA, 120 bp, Artificial Sequence
  ENSG00000055130_12 (sequence is synthesized)
ttcaacaatgacgctggctttgtggctgctcttgataaggcttgtggtcgcttcataaacaacaacgcggttaccaagatggcccaatcatccagtaaatcccctgagttgctggctcga

SEQ ID NO: 37771 - DNA, 120 bp, Artificial Sequence
  ENSG00000055130_13 (sequence is synthesized)
tccaagaacccagaggaggcagaactagaagacacactcaatcaagtgatggttgtcttcaagtacatagaagacaaagacgtatttcagaagttctatgcgaagatgctcgccaagagg

SEQ ID NO: 37772 - DNA, 120 bp, Artificial Sequence
  ENSG00000055130_14 (sequence is synthesized)
ctcgtccaccagaacagtgcaagtgacgatgccgaagccagcatgatctccaagttaaagcaagcttgcgggttcgagtacacctctaaacttcagcgcatgtttcaagacattggcgtg

SEQ ID NO: 37773 - DNA, 120 bp, Artificial Sequence
  ENSG00000055130_15 (sequence is synthesized)
agcaaagatctgaacgagcaattcaaaaagcacttgacaaactcagaacccctagacttggatttcagcattcaagtgctgagctccgggtcctggcccttccagcagtcttgtacattt

SEQ ID NO: 37774 - DNA, 120 bp, Artificial Sequence
  ENSG00000055130_16 (sequence is synthesized)
gccttgccgtcagagttggaacgtagttatcagcgattcacagctttctacgccagccgccacagtggccgaaaattgacgtggttatatcagttgtctaaaggagaattggtaactaac

SEQ ID NO: 37775 - DNA, 120 bp, Artificial Sequence
  ENSG00000055130_17 (sequence is synthesized)
tgcttcaaaaacagatatactttgcaggcgtcgacattccagatggctatcctgcttcagtacaacacggaagatgcctacactgtgcagcagctgaccgacagcactcaaattaaaatg

SEQ ID NO: 37776 - DNA, 120 bp, Artificial Sequence
  ENSG00000055130_18 (sequence is synthesized)
gacattttggcgcaagttttacagattttattaaagtcgaagctattggtcttggaagatgaaaatgcaaatgttgatgaggtggaattgaagccagataccttaataaaattatatctt

SEQ ID NO: 37777 - DNA, 120 bp, Artificial Sequence
  ENSG00000055130_19 (sequence is synthesized)
ggttataaaaataagaaattaagggttaacatcaatgtgccaatgaaaaccgaacagaagcaggaacaagaaaccacacacaaaaacatcgaggaagaccgcaaactactgattcaggcg

SEQ ID NO: 37778 - DNA, 120 bp, Artificial Sequence
  ENSG00000055130_20 (sequence is synthesized)
gccatcgtgagaatcatgaagatgaggaaggttctgaaacaccagcagttacttggcgaggtcctcactcagctgtcctccaggttcaaacctcgagtccctgtgatcaagaaatgcatt

SEQ ID NO: 37779 - DNA, 120 bp, Artificial Sequence
  ENSG00000055130_21 (sequence is synthesized)
gacattctaattgagaaagaatatttggagcgagtggatggtgaaaaggacacctacagttacttggcttaacccttctggaagggtctgactgtgtgacccgcagcaaatagttcatgt

SEQ ID NO: 37780 - DNA, 120 bp, Artificial Sequence
  ENSG00000055130_22 (sequence is synthesized)
tggaaagaatgaaaacaactcaagttcatagcagccagcctgccgccattggacctcccttttaaaaactgagaccaagactcccatcagctggtctcggatttacatcggaactgctca

SEQ ID NO: 37781 - DNA, 120 bp, Artificial Sequence
  ENSG00000055130_23 (sequence is synthesized)
ggattgatacatttcaagtctgtaaatacggacaccaacgccatttaccctaatttaagaacagcggggactgaccctccgtgccgagggctgcatgctaccgcactaagtcaatacatg

SEQ ID NO: 37782 - DNA, 120 bp, Artificial Sequence
  ENSG00000055130_24 (sequence is synthesized)
ggctccccgattcgcagctgtcgtcttggcagcacttgtcacgttggcagcactttgagagcaagtctgagtggacccacatgtaacctgctatgaaaaccatttgtatagtgtgtttca

SEQ ID NO: 37783 - DNA, 120 bp, Artificial Sequence
  ENSG00000055130_25 (sequence is synthesized)
ttttttaatgtgtgaaaataaagaaaattaaaggatttctgtacaagtcgcattgggttttgttttaagttttactaatttctatatgtaaataaaagatataatgattgtgcaaattta

SEQ ID NO: 37784 - DNA, 120 bp, Artificial Sequence
  ENSG00000055130_26 (sequence is synthesized)
actattttatatcacgactcatgccatccgtatgtgtaatcaaagccttctaagtcttgatatgtccttacaaagacgaaggatagagtgaatgtcaaaatttgccaaacaggagttact

SEQ ID NO: 37785 - DNA, 120 bp, Artificial Sequence
  ENSG00000055130_27 (sequence is synthesized)
gaaagtctgaaggggaaagcctagttaggttttatcttagaagtgatttttaaaacgaaacacgcagataagctcgagctttctggagccgattcctaaggccttgcaggtggtaagggg

SEQ ID NO: 37786 - DNA, 120 bp, Artificial Sequence
  ENSG00000055130_28 (sequence is synthesized)
gtcgagaattggctgaggttcctcggaagtccgcgccgattcggagggccacctctgactttctgatctggggtgcaacccccagtccctgtcccggtcgacaaaggtgtggagtcaggt

SEQ ID NO: 37787 - DNA, 120 bp, Artificial Sequence
  ENSG00000055130_29 (sequence is synthesized)
ctcgggctggcggggcgatggcgacgacggtttcccggctcccccgccccggacgccgatggcggtgcgttccggccctcccccaacagcttctcccccgcggtcgccggagccggtttg

SEQ ID NO: 37788 - DNA, 120 bp, Artificial Sequence
  ENSG00000055130_30 (sequence is synthesized)
agacattccttgaaatgaatccccaaagttagggttttctccctggctggctttgccaaaaagaggattctcttttccgattgggtcactcttggttgcttctggttcgtagtaggggtt

SEQ ID NO: 37789 - DNA, 120 bp, Artificial Sequence
  ENSG00000055130_31 (sequence is synthesized)
gcgagcgggcgggagggagctttccgggcccctcccgcgcctcgggctggcggggcgatggcgacgacggtttcccggctcccccgccccggacgccgatggcggtttgcctgcaatgag

SEQ ID NO: 37790 - DNA, 70 bp, Artificial Sequence
  ENSG00000055130_32 (sequence is synthesized)
taggaaaggccatgtgaggacacagtgagaaggtggccgtctgcaaccctggaagagagccctcaccaga

SEQ ID NO: 37791 - DNA, 120 bp, Artificial Sequence
  ENSG00000055147_0 (sequence is synthesized)
agtaggaacgccgagtcggctgccgtggctgtgctgagggtggcggccggatagctgatgttctaatcatgtcagataaagatgatattgagactccactgctaactgaagcagccccca

SEQ ID NO: 37792 - DNA, 120 bp, Artificial Sequence
  ENSG00000055147_1 (sequence is synthesized)
tccttgaagatggaaactgtgagccagccaagaattctgagtctgttgaccaaggtgccaaaccagagagtaaatcagaacctgtagtttccactcggaaaagaccagagaccaaacctt

SEQ ID NO: 37793 - DNA, 120 bp, Artificial Sequence
  ENSG00000055147_2 (sequence is synthesized)
ccagtgaccttgagacttcaaaagttctccctattcaggataatgtttccaaagatgtaccccagaccagatggggttattgggggagctggggcaagtccatactctcctcagcctcgg

SEQ ID NO: 37794 - DNA, 120 bp, Artificial Sequence
  ENSG00000055147_3 (sequence is synthesized)
ctacagtagctacagtaggacaaggcatttcaaatgtcatcgagaaggcagagacttcccttggaatccctggtcccagtgaaatttcaactgaagtcaagtatgtagcaggagagacaa

SEQ ID NO: 37795 - DNA, 120 bp, Artificial Sequence
  ENSG00000055147_4 (sequence is synthesized)
atgccaaagagaatgaaaactcctccccagtggctggggcatttggtgtattctctaccatctctactgctgttcagagcacaggaaagagtgttataagtgggggtttggatgccttag

SEQ ID NO: 37796 - DNA, 120 bp, Artificial Sequence
  ENSG00000055147_5 (sequence is synthesized)
aattcattggaaaaaagacaatggatgtgatagcagaaggggatcctggatttaaaagaaccaagggtctgatgaaccgaaatgctacactatctcaggttttacgagaggcgaaggaga

SEQ ID NO: 37797 - DNA, 120 bp, Artificial Sequence
  ENSG00000055147_6 (sequence is synthesized)
aagaagagatacggacctccaatgaggttaccgtggaaacagacaagaaaactcattatgggctactctttgatgaatttcaaggcctttcacatctagaagctctggagatgctttccc

SEQ ID NO: 37798 - DNA, 120 bp, Artificial Sequence
  ENSG00000055147_7 (sequence is synthesized)
aagaaagtgaaataaaggtgaaatctatccttaattctctgagtggagaagaattagagactctaaaagttgaattagagcaactcaaagaaacattttctctagcagaattttgtgaag

SEQ ID NO: 37799 - DNA, 120 bp, Artificial Sequence
  ENSG00000055147_8 (sequence is synthesized)
aagaggaagaagagaaaaaaggggatgaagattttaccaaggacataacagagctgttttcccagctgcacgtttcctccaaaccagagaaacttgccagggcaagaaataccgcccacg

SEQ ID NO: 37800 - DNA, 120 bp, Artificial Sequence
  ENSG00000055147_9 (sequence is synthesized)
aatggatcaggaagtctctgaccaagccattagcagagaatgaagaaggagaaaaacagtcggaagcagaaaatactgagcaagtcaacaaaaattcaatagaggatatccatgcgtttg

SEQ ID NO: 37801 - DNA, 120 bp, Artificial Sequence
  ENSG00000055147_10 (sequence is synthesized)
caatccggagcctggctgaactgactgcctgctcaattgaactattccacaaaacagctgcattggttctgcatggcaggaagcaggaagtgacagccatagaaaggagccaaactcttt

SEQ ID NO: 37802 - DNA, 120 bp, Artificial Sequence
  ENSG00000055147_11 (sequence is synthesized)
cccagatgacaattgtgttgtgtaaagagttgtcctctctgtctaaagagttcactacctgcctaacaactgctggggtcaaagaaatggcagatgtccttaacccattaatcactgcag

SEQ ID NO: 37803 - DNA, 120 bp, Artificial Sequence
  ENSG00000055147_12 (sequence is synthesized)
tatttctagaggcatcaaacagtgcctcctacatccaggacgcctttcagctactcttacctgtgctagagatctctctcattgagaacaagattgaatcacacagacatgagctgcagg

SEQ ID NO: 37804 - DNA, 120 bp, Artificial Sequence
  ENSG00000055147_13 (sequence is synthesized)
gccagaaacctttgttagaacattgaagaatggagacgttttgacctgggacttgtgacggccaaggaatgccaccttattctggctactcctgcagaaatgaaggagtggggttatttt

SEQ ID NO: 37805 - DNA, 120 bp, Artificial Sequence
  ENSG00000055147_14 (sequence is synthesized)
agtatataaaaattcaggcaggagagatggtttaaagaggaagattgttgccttcagtgtttgattgaagtattcaggttctcacagtattctttccagttgttgtaattcataaattat

SEQ ID NO: 37806 - DNA, 120 bp, Artificial Sequence
  ENSG00000055147_15 (sequence is synthesized)
ttgaaaagaaacttttgtagaaagtccaagaataataactctagataaagattagtgggacactcaggcaaaaatgttggtctttctttgacatgttgcaaaatgttatcaattttgtca

SEQ ID NO: 37807 - DNA, 120 bp, Artificial Sequence
  ENSG00000055147_16 (sequence is synthesized)
tggatataatttgcagcccatggatataactggttgataagccagagaaaaataatttagtgttctaaaattcatggcatgtgtggtttattaatgccatgtactttctcctttctggaa

SEQ ID NO: 37808 - DNA, 120 bp, Artificial Sequence
  ENSG00000055147_17 (sequence is synthesized)
taaaatctatggctttaagaaaactgagcatatgtaaactctgtgatgattaccctttatcacatgaattcttggaaatagaaagtttcatctgcttttttaaattcttagtagatattt

SEQ ID NO: 37809 - DNA, 120 bp, Artificial Sequence
  ENSG00000055147_18 (sequence is synthesized)
acacacttcatgtcatagctgaaccctactctactggattcaaggccagtaaatgcaatttagagaagcagttttatgtttgcagatattctgagtctcttcaggatgtgtttcgtgtct

SEQ ID NO: 37810 - DNA, 120 bp, Artificial Sequence
  ENSG00000055147_19 (sequence is synthesized)
accatatatgcaggataaattctttaacagcaaactccaaaggaatgttgaagctgttttagcaatgaggatttttttgtttgagtgttgaagtgggccatagtcctttagaaatgatgt

SEQ ID NO: 37811 - DNA, 120 bp, Artificial Sequence
  ENSG00000055147_20 (sequence is synthesized)
tcatttatgataggatttaacttctaaggcatagtttattttttcctctttcctttttgtttgttttaatgtattctttagcatgtttttgatataacttttatcctccagatcttaagc

SEQ ID NO: 37812 - DNA, 120 bp, Artificial Sequence
  ENSG00000055147_21 (sequence is synthesized)
tttcttttgctctcttcagcaatttaagagactattaagctgtcgtcttcctaaaagctattttggtatccactctttttaaaaaaattctccaactttgtggttttttaatgattaagg

SEQ ID NO: 37813 - DNA, 120 bp, Artificial Sequence
  ENSG00000055147_22 (sequence is synthesized)
taatttgttagctctgcccctcatcttctaaaacctttgtaataaaatgtattaatcatgttatttgatcctttcatttacttttgtaaacacgagccctaatatcttacttagaccaaa

SEQ ID NO: 37814 - DNA, 120 bp, Artificial Sequence
  ENSG00000055147_23 (sequence is synthesized)
aaaaaaaaaaaaaaatagcaaagcaaagccataacatagattagtataaagactgtttctacgtaatcttctttggggcaggagtcagttagtaagcaaggaagagaaataaatttggtt

SEQ ID NO: 37815 - DNA, 120 bp, Artificial Sequence
  ENSG00000055147_24 (sequence is synthesized)
taaaaaggtataccaacagcactacaatgttactctgcctatattctgtcttaatatgatcagaaagtttttgaatattcctttttaaagacaaatttcaccctttccagcttgaatatt

SEQ ID NO: 37816 - DNA, 120 bp, Artificial Sequence
  ENSG00000055147_25 (sequence is synthesized)
tctgaagtttcagaaaaacagttgccttctggttacaaaggctggtgtcaccagttctgaattgttgcctcaagcttggttgatgtgtctgaacctgtatcccttgagggcaaagtttag

SEQ ID NO: 37817 - DNA, 120 bp, Artificial Sequence
  ENSG00000055147_26 (sequence is synthesized)
aaactggtcactctgcctactgtctgttcagcctcttgtacaatggcagtttggcagctttaaatccttaacctagaaatgtatttaaggtttttctttcaagaaatggggtatacatat

SEQ ID NO: 37818 - DNA, 120 bp, Artificial Sequence
  ENSG00000055147_27 (sequence is synthesized)
gaaggagagagtaacaactctttttatacacctattcagatttcagccctgaatttggcaaattttagattaggtctcacataaggtaaatatgactcactaactctttttttctcatct

SEQ ID NO: 37819 - DNA, 120 bp, Artificial Sequence
  ENSG00000055147_28 (sequence is synthesized)
tccccacccccccatatatatttatttattttaatggagttagggaccactagtgaaatgatgaaaggcccaattctgagtaacaattgtctactcttcacataaaatatactgaaaaag

SEQ ID NO: 37820 - DNA, 120 bp, Artificial Sequence
  ENSG00000055147_29 (sequence is synthesized)
aattaagattccttgatccagtagacatagagaaacataaacattcatgacagatgagtaggtaaattcagggatcactttggaacttgctggattatggtgatggtttttggatagtat

SEQ ID NO: 37821 - DNA, 120 bp, Artificial Sequence
  ENSG00000055147_30 (sequence is synthesized)
gtgcttcattattttatttggggtagttacagtgttttagttttttgttaacagctacacttttggtactattttccttttaaatttttggtgtctaagatttaccactaattactaata

SEQ ID NO: 37822 - DNA, 120 bp, Artificial Sequence
  ENSG00000055147_31 (sequence is synthesized)
tatgcctttccaattcacttaaaaccttaataagtgaaatgttcaggtattgctagggtaaatgtgtcttttcctactattgagattttaaaaggctgtgattaagagagactttattaa

SEQ ID NO: 37823 - DNA, 120 bp, Artificial Sequence
  ENSG00000055147_32 (sequence is synthesized)
tttgatctgaaagaagtagaaacctctatgaaacaatttttattttcctttgcataataccttagaaatgtgttaaggacaagctatattttccttacttgcttttgatagttttttttt

SEQ ID NO: 37824 - DNA, 120 bp, Artificial Sequence
  ENSG00000055147_33 (sequence is synthesized)
ttttttttaagcatagatatccaggttggcaggcctctgaaatgtgaaattgtaatttttatagatggcattactatgaatctgaaatcagtgctaggtgtacaaatgtgaatttttcaa

SEQ ID NO: 37825 - DNA, 120 bp, Artificial Sequence
  ENSG00000055147_34 (sequence is synthesized)
tcctgtaatcaaagaacaagatcttgtgggttcctactgctgaaaaaggatgctttcttttgtacttgtttttagtgaaagacctttttgagggagagctattttataggtagttgctat

SEQ ID NO: 37826 - DNA, 120 bp, Artificial Sequence
  ENSG00000055147_35 (sequence is synthesized)
tgatatctccatttgagaaatagacatttttctgtatttctagaggtgttctgaattttaaacctgaattcttcagtttagaaaacccagaataaaattatacccacagtgggcactcaa

SEQ ID NO: 37827 - DNA, 120 bp, Artificial Sequence
  ENSG00000055147_36 (sequence is synthesized)
acttccggggcagtaggaacgccgagtcggctgccgtggctgtgctgagggtggcggccggatagggacccagaactccatttgacagatgaggaaacggagaggcagacagctgatgtt

SEQ ID NO: 37828 - DNA, 120 bp, Artificial Sequence
  ENSG00000055147_37 (sequence is synthesized)
ggccggataggtgcggagcttcctgaacgaggcaggaggggtgcgaggttcaggggcagggcccgggcagccgaagtcgttagggaggcggtgacctgacggtgggcggcggacatctcg

SEQ ID NO: 37829 - DNA, 120 bp, Artificial Sequence
  ENSG00000055147_38 (sequence is synthesized)
cggcagggtcgagggctgtgaaagcggtttagtgattgaagcgctacgtttgtgtgaggaattcttgtcgttgtcagcgcctgagaacttagttgggagcggacgtttacgtcgaatctc

SEQ ID NO: 37830 - DNA, 120 bp, Artificial Sequence
  ENSG00000055147_39 (sequence is synthesized)
tcgtttgggaccccattcttgaatgtgggaagaagtgagagcgcatgtttgctcatctagagacagccgtattaataacgataggatacaaaccatcaccccaccaagtgatagcagctg

SEQ ID NO: 37831 - DNA, 120 bp, Artificial Sequence
  ENSG00000055147_40 (sequence is synthesized)
ttaacctgtgggcggttacgtgccggtcactgttccaagcccctcacatatcgcgtcactgaatctttatagggacccagaactccatttgacagatgaggaaacggagaggcagacagg

SEQ ID NO: 37832 - DNA, 120 bp, Artificial Sequence
  ENSG00000055147_41 (sequence is synthesized)
tgacctgacttccccacaatcgctgcaggacaggaagaaagtaaactccagagcccgtgctcttagctactaagctgtactgctcttcattttgctgatgttctaatcatgtcagataaa

SEQ ID NO: 37833 - DNA, 120 bp, Artificial Sequence
  ENSG00000055147_42 (sequence is synthesized)
actacctgcctaacaactgctggggtcaaagaaatggcagatgtccttaacccattaatcactgcagtatttctagagaaagcatacagttgaagctgcagggtactggaagaagcagta

SEQ ID NO: 37834 - DNA, 120 bp, Artificial Sequence
  ENSG00000055147_43 (sequence is synthesized)
ctgcgctgaaggagcacttccggggcagtaggaacgccgagtcggctgccgtggctgtgctgagggtggcggccggataggtgcggagcttcctgaacgaggcaggagggctgatgttct

SEQ ID NO: 37835 - DNA, 120 bp, Artificial Sequence
  ENSG00000055147_44 (sequence is synthesized)
acccttgagttttttgagcacatgttccatatctacatgttttgttttaaaatggttctaaggttttgtggtcaaatgaagatactttttaaagtcaataaaaaggtataaaacaataca

SEQ ID NO: 37836 - DNA, 120 bp, Artificial Sequence
  ENSG00000055147_45 (sequence is synthesized)
ctgtcaatatggatagcacagaaagatattaagaaagaagtttaaaacacttagaatttccattctaaagatgacattttgctctcagtccagacttctgtgcttatatttaatatttat

SEQ ID NO: 37837 - DNA, 120 bp, Artificial Sequence
  ENSG00000055147_46 (sequence is synthesized)
gtatgggtgtgtgtgtgtgttttaaagtgtgatcgtactccacttactgttatttaacctactctgctcacttaaaaatgtattcgttattccaggtcaaagaaatggcagatgtcctta

SEQ ID NO: 37838 - DNA, 120 bp, Artificial Sequence
  ENSG00000055147_47 (sequence is synthesized)
atattatatgcccatatattctgaactccatagtgttgtcttaatctacctttctagcttcatgccttcccattgttcttctctctgccatggtaactactccctactgtaactgtccat

SEQ ID NO: 37839 - DNA, 120 bp, Artificial Sequence
  ENSG00000055147_48 (sequence is synthesized)
gttccatactgtcagacctcaggcctttggctgtaccctcatgttatttccatatccttgaatcctgtcattggcatcatcatctgtcaaaatcataagcttcttttaaggcaggtgttg

SEQ ID NO: 37840 - DNA, 120 bp, Artificial Sequence
  ENSG00000055147_49 (sequence is synthesized)
ccaactcagatgcctacagaggttaatcaggtagcataatttgagtgaagtggatttgcgtgggggattgtagggagctggagagcaactgccctagctaaaagggcccagcggctattt

SEQ ID NO: 37841 - DNA, 120 bp, Artificial Sequence
  ENSG00000055147_50 (sequence is synthesized)
tggaagcctatatttttatatgaagtctgatttttaaatgttggcatctagtttttgcaaaggttaaatactgtgcaggccaaataaaaacatctgtaggctggatttggcacttaaatt

SEQ ID NO: 37842 - DNA, 120 bp, Artificial Sequence
  ENSG00000055147_51 (sequence is synthesized)
gctgaaggagcacttccggggcagtaggaacgccgagtcggctgccgtggctgtgctgagggtggcggccggatagggacccagaactccatttgacagatgaggaaacggagaggcaga

SEQ ID NO: 37843 - DNA, 120 bp, Artificial Sequence
  ENSG00000055147_52 (sequence is synthesized)
agtaggaacgccgagtcggctgccgtggctgtgctgagggtggcggccggataggtgcggagcttcctgaacgaggcaggagggggacccagaactccatttgacagatgaggaaacgga

SEQ ID NO: 37844 - DNA, 120 bp, Artificial Sequence
  ENSG00000055147_53 (sequence is synthesized)
agtgaaactccgtctcaaattatgtgtgatcgtttttctttctgcagctcctgagcccaccagatttgaatagcagtgccaagaatgaaagggcaatcctctgtactctaacctgtctaa

SEQ ID NO: 37845 - DNA, 120 bp, Artificial Sequence
  ENSG00000055147_54 (sequence is synthesized)
gctttgcttccttcaattctcagaactcacccttgagctctcattgtttgctacagtgtaatgcctccatctctttttaggttttacgagaggcgaaggagaaagaagagatacggacct

SEQ ID NO: 37846 - DNA, 120 bp, Artificial Sequence
  ENSG00000055163_0 (sequence is synthesized)
gtagagttaaggaagggcctcttcctctgtgagaattcagcattttgcaaccatccaaaaatgttgagggcatgctttgcttccagggcagacagagcagcacagtgagcatgggacaca

SEQ ID NO: 37847 - DNA, 120 bp, Artificial Sequence
  ENSG00000055163_1 (sequence is synthesized)
ggatccctgacttgctgtgtgcccttaaaccagccactacctctctgacgttcaaaattgagcaatggaaggcagcctgcccaactgttacctgcctgtcatcatgaaagcctgcggatg

SEQ ID NO: 37848 - DNA, 120 bp, Artificial Sequence
  ENSG00000055163_2 (sequence is synthesized)
agtgcagaatacagaaactgcagccatgaccacgcacgtcaccctggaagatgccctgtccaacgtggacctgcttgaagagcttcccctccccgaccagcagccatgcatcgagcctcc

SEQ ID NO: 37849 - DNA, 120 bp, Artificial Sequence
  ENSG00000055163_3 (sequence is synthesized)
accttcctccatcatgtaccaggctaactttgacacaaactttgaggacaggaatgcatttgtcacgggcattgcaaggtacattgagcaggctacagtccactccagcatgaatgagat

SEQ ID NO: 37850 - DNA, 120 bp, Artificial Sequence
  ENSG00000055163_4 (sequence is synthesized)
gctggaggaaggacatgagtatgcggtcatgctgtacacctggcgcagctgttcccgggccattccccaggtgaaatgcaacgagcagcccaaccgagtagagatctatgagaagacagt

SEQ ID NO: 37851 - DNA, 120 bp, Artificial Sequence
  ENSG00000055163_5 (sequence is synthesized)
agaggtgctggagccggaggtcaccaagctcatgaagttcatgtattttcagcgcaaggccatcgagcggttctgcagcgaggtgaagcggctgtgccatgccgagcgcaggaaggactt

SEQ ID NO: 37852 - DNA, 120 bp, Artificial Sequence
  ENSG00000055163_6 (sequence is synthesized)
tgtctctgaggcctacctcctgacccttggcaagttcatcaacatgtttgctgtcctggatgagctaaagaacatgaagtgcagcgtcaagaatgaccactctgcctacaagagggcagc

SEQ ID NO: 37853 - DNA, 120 bp, Artificial Sequence
  ENSG00000055163_7 (sequence is synthesized)
acagttcctgcggaagatggcagatccccagtctatccaggagtcgcagaacctttccatgttcctggccaaccacaacaggatcacccagtgtctccaccagcaacttgaagtgatccc

SEQ ID NO: 37854 - DNA, 120 bp, Artificial Sequence
  ENSG00000055163_8 (sequence is synthesized)
aggctatgaggagctgctggctgacattgtcaacatctgtgtggattactacgagaacaagatgtacctgactcccagtgagaaacatatgctcctcaaggtgatgggctttggcctcta

SEQ ID NO: 37855 - DNA, 120 bp, Artificial Sequence
  ENSG00000055163_9 (sequence is synthesized)
cctaatggatggaaatgtcagtaacatttacaaactggatgccaagaagagaattaatcttagcaaaattgataaattctttaagcagctgcaggtggtgccccttttcggcgacatgca

SEQ ID NO: 37856 - DNA, 120 bp, Artificial Sequence
  ENSG00000055163_10 (sequence is synthesized)
gatagagctggccagatacattaagaccagtgctcactatgaagagaacaagtccaagtggacgtgcacccagagcagcatcagcccccagtacaatatctgcgagcagatggttcagat

SEQ ID NO: 37857 - DNA, 120 bp, Artificial Sequence
  ENSG00000055163_11 (sequence is synthesized)
ccgggatgaccacatccgcttcatctccgagctcgctcgctacagcaacagtgaggtggtgacgggctcagggctggacagccagaagtcagacgaggagtatcgcgagctcttcgacct

SEQ ID NO: 37858 - DNA, 120 bp, Artificial Sequence
  ENSG00000055163_12 (sequence is synthesized)
agccctgcggggtctgcagcttctatccaagtggagcgcccacgtcatggaggtgtactcttggaagctggttcatcccacagacaagttctgcaacaaggactgtcctggcaccgcgga

SEQ ID NO: 37859 - DNA, 120 bp, Artificial Sequence
  ENSG00000055163_13 (sequence is synthesized)
ggaatatgagagagccacacgctacaattacaccagtgaggaaaaatttgccttcgttgaggtgatcgccatgatcaaaggcctgcaggtgctcatgggcaggatggagagcgtcttcaa

SEQ ID NO: 37860 - DNA, 120 bp, Artificial Sequence
  ENSG00000055163_14 (sequence is synthesized)
ccaggccatcaggaacaccatctacgcggcattgcaggacttcgcccaggtgacgctgcgtgagcccctgcggcaggcggtacggaagaagaagaatgtcctcatcagcgtcctacaggc

SEQ ID NO: 37861 - DNA, 120 bp, Artificial Sequence
  ENSG00000055163_15 (sequence is synthesized)
aattcgaaagaccatctgtgactgggagggagggcgagagccccctaatgacccatgcttgagaggggagaaggaccccaaaggtggatttgatatcaaggtgccccggcgtgctgtggg

SEQ ID NO: 37862 - DNA, 120 bp, Artificial Sequence
  ENSG00000055163_16 (sequence is synthesized)
gccatccagcacacagctgtacatggtgcggaccatgcttgaatcactcattgcagacaaaagcggctccaagaagaccctgaggagcagcctggatggacccattgtcctcgccataga

SEQ ID NO: 37863 - DNA, 120 bp, Artificial Sequence
  ENSG00000055163_17 (sequence is synthesized)
tgcagcagtgttgtgacctctcccagctctggttccgagaattcttcctggagttaaccatgggccgacgaatccagttccccatcgagatgtccatgccctggattctaacggaccata

SEQ ID NO: 37864 - DNA, 120 bp, Artificial Sequence
  ENSG00000055163_18 (sequence is synthesized)
tcctggaaaccaaagaaccttccatgatggagtatgtcctctaccctctggatctgtacaacgacagcgcctactatgctctgaccaagtttaaaaagcagttcctgtacgatgagatag

SEQ ID NO: 37865 - DNA, 120 bp, Artificial Sequence
  ENSG00000055163_19 (sequence is synthesized)
aagctgaggtgaacctgtgttttgatcagtttgtctacaagctggcagaccagatctttgcttactacaaagccatggctggcagtgtcctgttggataaacgttttcgagctgagtgta

SEQ ID NO: 37866 - DNA, 120 bp, Artificial Sequence
  ENSG00000055163_20 (sequence is synthesized)
agaattatggcgtcatcattccgtatccaccgtccaatcgctatgaaacactgctgaagcagagacacgtccagctgttgggtagatcaattgacttgaacagactcattacccagcgca

SEQ ID NO: 37867 - DNA, 120 bp, Artificial Sequence
  ENSG00000055163_21 (sequence is synthesized)
tctctgccgccatgtataaatccttggaccaagctatcagccgctttgagagtgaggacctgacctccattgtggagctggagtggctgctggagattaaccggctcacgcatcggctgc

SEQ ID NO: 37868 - DNA, 120 bp, Artificial Sequence
  ENSG00000055163_22 (sequence is synthesized)
tctgtaagcatatgacgctggacagcttcgatgccatgttccgagaggccaatcacaatgtgtccgccccctatggccgtatcaccctgcatgtcttctgggaactgaactttgactttc

SEQ ID NO: 37869 - DNA, 120 bp, Artificial Sequence
  ENSG00000055163_23 (sequence is synthesized)
tccccaactactgctacaatgggtccactaaccgttttgtgcggactgccattcctttcacccaagaaccacaacgagacaaacctgccaacgtccagccttattacctctatggatcca

SEQ ID NO: 37870 - DNA, 120 bp, Artificial Sequence
  ENSG00000055163_24 (sequence is synthesized)
agcctctcaacattgcctacagccacatctacagctcctacaggaatttcgtggggccacctcatttcaagactatctgcagactcctgggttatcagggcatcgctgtggtcatggagg

SEQ ID NO: 37871 - DNA, 120 bp, Artificial Sequence
  ENSG00000055163_25 (sequence is synthesized)
aactgctaaagattgtgaagagcttgctccaaggaaccattctccagtatgtgaaaacactgatagaggtgatgcccaagatatgccgcttgccccgacatgagtatggctccccaggga

SEQ ID NO: 37872 - DNA, 120 bp, Artificial Sequence
  ENSG00000055163_26 (sequence is synthesized)
tcctggagttcttccaccaccagctgaaggacatcattgagtacgcagagctcaaaacagacgtgttccagagcctgagggaagtgggcaatgccatcctcttctgcctcctcatagagc

SEQ ID NO: 37873 - DNA, 120 bp, Artificial Sequence
  ENSG00000055163_27 (sequence is synthesized)
aagctctgtctcaggaggaggtctgcgatttgctccatgccgcacccttccaaaacatcttgcctagagtctacatcaaagagggggagcgcctggaggtccggatgaaacgtctggaag

SEQ ID NO: 37874 - DNA, 120 bp, Artificial Sequence
  ENSG00000055163_28 (sequence is synthesized)
ccaagtatgccccgctccacctggtccctctgatcgagcggctggggacccctcagcaaatcgccattgctcgcgagggtgacctcctgaccaaggagcggctgtgctgtggcctgtcca

SEQ ID NO: 37875 - DNA, 120 bp, Artificial Sequence
  ENSG00000055163_29 (sequence is synthesized)
tgttcgaggtcatcctgacccgcattcggagctacctgcaggaccccatctggcggggcccaccgcccaccaatggcgtcatgcacgtcgatgagtgtgtggagttccaccggctgtgga

SEQ ID NO: 37876 - DNA, 120 bp, Artificial Sequence
  ENSG00000055163_30 (sequence is synthesized)
gcgccatgcagttcgtgtactgcatccctgtgggaaccaacgagttcacagctgagcagtgtttcggcgatggcttgaactgggctggttgctccatcattgtcctgctgggccagcagc

SEQ ID NO: 37877 - DNA, 120 bp, Artificial Sequence
  ENSG00000055163_31 (sequence is synthesized)
gtcgctttgacctgttcgacttctgttaccacctgctaaaagtgcagaggcaggacgggaaggatgaaatcattaagaatgtgcccctgaagaagatggccgaccggatcaggaagtatc

SEQ ID NO: 37878 - DNA, 120 bp, Artificial Sequence
  ENSG00000055163_32 (sequence is synthesized)
agatcttgaacaatgaggtttttgccatcctgaacaaatacatgaagtccgtggagacagacagttccactgtggagcatgtgcgctgcttccagccacccatccaccagtccttggcca

SEQ ID NO: 37879 - DNA, 120 bp, Artificial Sequence
  ENSG00000055163_33 (sequence is synthesized)
ccacttgctaagcagaagatcctgcagacccttatctggaggaggaagagaagcaggagagagaaagccacagccagcctgccataggatccaactggacaacgtgtgggatggacctgg

SEQ ID NO: 37880 - DNA, 120 bp, Artificial Sequence
  ENSG00000055163_34 (sequence is synthesized)
aaacaagcacctccccaaacacatcaccactccctagggcggggcctgtgcatgctctcccatgacatctccatgctggtttctccatagcataaatgaaaaaaaaaaaaaaaaagtaaa

SEQ ID NO: 37881 - DNA, 120 bp, Artificial Sequence
  ENSG00000055163_35 (sequence is synthesized)
cctatctgtggttgcttcccaagacctcctcccaagatagacatctcctacccagtgcccttgtgtgaccccaggactcaagtctcagactgtgaacagatgtggccatgcccagagacg

SEQ ID NO: 37882 - DNA, 120 bp, Artificial Sequence
  ENSG00000055163_36 (sequence is synthesized)
ccagcctggccagaagggcatgcctcagcttactacttcatctctcctggttccctccctgcagtgccccgggtgtcatcttctcccactctgggtaccagggattctaccacataggct

SEQ ID NO: 37883 - DNA, 120 bp, Artificial Sequence
  ENSG00000055163_37 (sequence is synthesized)
tcccaaagccccattctaactcccctctctcagggaagccctagagagaggtccaaaaagcattcacagctgtatcacactctatgcaggtggggtaggagactgatcaggcctgctgtg

SEQ ID NO: 37884 - DNA, 120 bp, Artificial Sequence
  ENSG00000055163_38 (sequence is synthesized)
gggaagcagtatgtatgaacacagccagaaatgtcatagtccaaacaggatgctttcaggccatctcagctgcttgatggtgagatggttcccttattccttcaggaaaggcttagcatt

SEQ ID NO: 37885 - DNA, 120 bp, Artificial Sequence
  ENSG00000055163_39 (sequence is synthesized)
gggccacataggggaagcagctttgaacaaatcagtcatagcactgcctatagcattagccagtgaccaaattagggacaacgtcttggcacagaattgcttatcaaggaacatttccac

SEQ ID NO: 37886 - DNA, 120 bp, Artificial Sequence
  ENSG00000055163_40 (sequence is synthesized)
aagaaagaaaatattaaggggttatttccacagaagcccaaaacgtcttggaaacacagaggtgaggaggaggaatagtaattgtcaatgagcttttaataccaagatacaccccctgcc

SEQ ID NO: 37887 - DNA, 120 bp, Artificial Sequence
  ENSG00000055163_41 (sequence is synthesized)
cccaaagaagagtcctcttttagggaatcagaaccttcattgtcctagaagctgaaagattcttggaacattttagcttttactctcaacttgctgttctctttacattccttaagttag

SEQ ID NO: 37888 - DNA, 120 bp, Artificial Sequence
  ENSG00000055163_42 (sequence is synthesized)
actttcgggtgtggcttctctcccaggggtaacatttacttccattttctagactgaaccaaaagtcttctgcagaatctcccaccgagtgtggtaagaaggaaggacaaaaggctttag

SEQ ID NO: 37889 - DNA, 120 bp, Artificial Sequence
  ENSG00000055163_43 (sequence is synthesized)
gatataaatttcatgttacagagcatgtcattgtcaaaggaaatctgtggccctgagattttaagaacataaaatgtgacatttgatatttctccagcccagggaagtaagatggttagc

SEQ ID NO: 37890 - DNA, 120 bp, Artificial Sequence
  ENSG00000055163_44 (sequence is synthesized)
aatggttgccttaatcaaatggtcccatttttaaccccaaaggaagtgcccacagcaagaggtttgtgtgatgcacttatgtcctccggtgaggaaagggggccacatatgaaaggcccc

SEQ ID NO: 37891 - DNA, 120 bp, Artificial Sequence
  ENSG00000055163_45 (sequence is synthesized)
ttaggtcagatcctgagagtagcacatttgagtgcagattcctgggccccacctcaaacctactaattctgaatctctgggaatagggccaggaaatctgccctttctacaaactaccca

SEQ ID NO: 37892 - DNA, 120 bp, Artificial Sequence
  ENSG00000055163_46 (sequence is synthesized)
agttgttctgttgcacatcaatgtttgggaaccactgctgtaagggaatcattctggtcaccttgagctttgagctaccactaagccatgaaagaaaatacatcatacagggaagagaga

SEQ ID NO: 37893 - DNA, 120 bp, Artificial Sequence
  ENSG00000055163_47 (sequence is synthesized)
agggaggaggttccaagtagtaactggcagatcctcctgtctggaggtaccaccttctattctggtttctgacttttccttcttgatgaccatagatgtgttccagaggcaaaagagaca

SEQ ID NO: 37894 - DNA, 120 bp, Artificial Sequence
  ENSG00000055163_48 (sequence is synthesized)
cattatcccagatggcagaacatgctttcaaaacatataaaatgtcaaagttccagatccttctacatctttagtcctgtctgaggatggtagctggctctctgtagctgatagatggct

SEQ ID NO: 37895 - DNA, 120 bp, Artificial Sequence
  ENSG00000055163_49 (sequence is synthesized)
agagttccatccaaatccttgaccacgacttcatggagatttgaataatctatttgatgagatttctatttcaataacccacctctctcaccccacattcatatccctaaatttgaccct

SEQ ID NO: 37896 - DNA, 120 bp, Artificial Sequence
  ENSG00000055163_50 (sequence is synthesized)
ctgggccgagtcacattaccttcaggagacttgatcccagtagactgaggtcttccctttcagcagaaagatttcatttccctggcttgccagtggcactgatttccgaacacccaatga

SEQ ID NO: 37897 - DNA, 120 bp, Artificial Sequence
  ENSG00000055163_51 (sequence is synthesized)
gtttaatattctttcctccttggcattactgccccagcctctttttattttttttgtgtgtgtctaataaccaggaaaaaaataaagcttaggttttaaaaagttttaaaaataatctgt

SEQ ID NO: 37898 - DNA, 120 bp, Artificial Sequence
  ENSG00000055163_52 (sequence is synthesized)
ttcagaaactgtcaaatgtaccatatttgtattaagagttgttgggaatttttgtacaatgaatttacatttatttatggtgacatatttacgcttgtgatcaaataatgatgttaaatt

SEQ ID NO: 37899 - DNA, 120 bp, Artificial Sequence
  ENSG00000055163_53 (sequence is synthesized)
cttaaatcatatttgctatgcagctgaagatgatattttgatttgtattttgggggtacctgtgttgagttgataaacatttccatcttcattaaaactgcttccaaactagtaaaacca

SEQ ID NO: 37900 - DNA, 120 bp, Artificial Sequence
  ENSG00000055163_54 (sequence is synthesized)
gatttcagcaagcttcacattttgggggcaggcaggggaagaattctagaagagaaacagggtattctagtgagacaagccaatgctgactgtttaagagatttaggattgaaatctgct

SEQ ID NO: 37901 - DNA, 120 bp, Artificial Sequence
  ENSG00000055163_55 (sequence is synthesized)
tttgaactcgcattccggcggtcctctttggtgttctcaccaagggcaaaaggactcaaatcctcagcggaggacagaaggtggcctctcttctggcaaaacatgcaaatcgccattgct

SEQ ID NO: 37902 - DNA, 120 bp, Artificial Sequence
  ENSG00000055163_56 (sequence is synthesized)
gctgagtgagtaccccccagagaaggcagggttacccccaacctgcctgtgctcctgcaagtcatggggctgccagagttcagccagaaacgtgggcagggggtgggggtggttggccaa

SEQ ID NO: 37903 - DNA, 120 bp, Artificial Sequence
  ENSG00000055163_57 (sequence is synthesized)
cctggacccgccgcagagccaggtaagcggccctcgcaggcctcgggccgggcacggggactaggatgccgccggggacggggatgaggccgtgaggatgcgcgaagggccgccccctct

SEQ ID NO: 37904 - DNA, 80 bp, Artificial Sequence
  ENSG00000055163_58 (sequence is synthesized)
cccgaggcccggcctcaggccccacgcggcccctttccccctcggacccaccgtgcgtcccgcggcacggaccctctgcc

SEQ ID NO: 37905 - DNA, 120 bp, Artificial Sequence
  ENSG00000055163_59 (sequence is synthesized)
gcgggcacatcgcggagctccggcgcggcggcgggggagccgcagcagcaggtgcgcggcctgggccggagccgccagcccgggaggaggcggtgctaatctcagggaccggagacacct

SEQ ID NO: 37906 - DNA, 120 bp, Artificial Sequence
  ENSG00000055163_60 (sequence is synthesized)
ccaaccccccaactctgctccattcctgccactcaagggaagagatgaacatgcaagcaataatatcacacagagatcttgaaccctcgcctcacatacaataaaatgtaccttgtttgc

SEQ ID NO: 37907 - DNA, 120 bp, Artificial Sequence
  ENSG00000055163_61 (sequence is synthesized)
cacccaggtgagggcagactccttgttaggcctggcctgatgtctcggggttataggcaggcgtgtagaggttgggtggaccacgagcccaagcagacaagctcagtctgcagcttccat

SEQ ID NO: 37908 - DNA, 120 bp, Artificial Sequence
  ENSG00000055163_62 (sequence is synthesized)
ctccactgccctacttgagagtgaaatgtagctgaggacttaagtctgtcctcccaaccccaggtggccgattcaccctctccagttgtcatgctcgtgaagccctctcagccagtgctc

SEQ ID NO: 37909 - DNA, 120 bp, Artificial Sequence
  ENSG00000055163_63 (sequence is synthesized)
ggaccatatcctggaaaccaaagaaccttccatgatggagtaagaggcaggattgggccagcaagtggctcctggggtacaagtagagggcagtttgccagggagatccgttctttccag

SEQ ID NO: 37910 - DNA, 120 bp, Artificial Sequence
  ENSG00000055163_64 (sequence is synthesized)
aaggaagcactgagttgacaagaaatgaggccatatgtcccaccacagggagagctcagccagacagaatcatttaattcagccttgcagataaattctgaagtttcccagcccaactgc

SEQ ID NO: 37911 - DNA, 120 bp, Artificial Sequence
  ENSG00000055163_65 (sequence is synthesized)
ccttcctatgccttgtcagcctcataacagctatgctcagaaaagaatcatctcaggagcaggtagcttgtattcttaactgctacctgatgtgttttagtcccaaatgaatttttacaa

SEQ ID NO: 37912 - DNA, 120 bp, Artificial Sequence
  ENSG00000055163_66 (sequence is synthesized)
ctttttctttggactgactgtaaagtaagttgcttctaagcggtggaggctcaaggaacgtaagagagggatgaaagatggtcttttcctgactgtgaacttgtttctatttcccaagca

SEQ ID NO: 37913 - DNA, 80 bp, Artificial Sequence
  ENSG00000055163_67 (sequence is synthesized)
tatctcagctcaccgcaacctccgcttcccaggttcaggctggagtgcagtcgtgtgatctcagctcaccgcaacctctg

SEQ ID NO: 37914 - DNA, 120 bp, Artificial Sequence
  ENSG00000055163_68 (sequence is synthesized)
aaaaaaggcggagggaaggaggaaagagggtggaaagagaaggagagaagggggcgagaggtagagggggtgggtggagggaggggccacccccacgtctcagagtggccctggcttctc

SEQ ID NO: 37915 - DNA, 120 bp, Artificial Sequence
  ENSG00000055163_69 (sequence is synthesized)
ccaccacagtgtgcttccatgttgccagggcactgttggaaaagaggcacagtcacattcatatttccgcaatcccagcccaaaggccccccaaagccagcttcaaccgcagagtgtctg

SEQ ID NO: 37916 - DNA, 120 bp, Artificial Sequence
  ENSG00000055163_70 (sequence is synthesized)
tgctgtcagagtgggtaggctggttttggaggttgcccaccttgctttttctgtgctcagattccatccctttgtagtcctagagaggctgtgttcccgcccctctcatattactggtaa

SEQ ID NO: 37917 - DNA, 120 bp, Artificial Sequence
  ENSG00000055163_71 (sequence is synthesized)
ctggcaccaaagaggaggaggaaggactgttccattaggcctgaagctcccacagtgttggacttagcaggctttcttgctgaggcggctgggataccatttggtgtcacccaggggagt

SEQ ID NO: 37918 - DNA, 120 bp, Artificial Sequence
  ENSG00000055163_72 (sequence is synthesized)
tggccacgtgggctgagcaccaggagcagctaatgcctgttccacccaggcgcctgaggctgggaccctctccgaccccataattttctacccaggtggacgtgcacccagagcagcatc

SEQ ID NO: 37919 - DNA, 120 bp, Artificial Sequence
  ENSG00000055163_73 (sequence is synthesized)
gcggctggggacccctcaggtaccaatcttatataataaatgggctctgatcactgacaggaacttgagagcatttgaccaaaccccctcattgtacaggtcaggaaactgaggctcaga

SEQ ID NO: 37920 - DNA, 120 bp, Artificial Sequence
  ENSG00000055163_74 (sequence is synthesized)
gaagggaagacaatgtccaatacccaaaaactggttaatattaatagcaacagcaggtctggaatgagatttgctgactctcaggcctgagtgtttcttctgtagcctgtatcatgtatc

SEQ ID NO: 37921 - DNA, 120 bp, Artificial Sequence
  ENSG00000055163_75 (sequence is synthesized)
gaggggcgcagcgtcgatgtttgggggcggagggctttgatgagagaggagcaggtctgacccgcttggaagctttctggcctacactagcatcgctcaccaagctggctgcgggcacgg

SEQ ID NO: 37922 - DNA, 120 bp, Artificial Sequence
  ENSG00000055163_76 (sequence is synthesized)
cttattaaaaatccgttttaaaaaacaatgtttcttttttcttaaacattgatacagatcttacggcacataatggtttgtaacctgttcctttcctgtaatataatataccgtagtcac

SEQ ID NO: 37923 - DNA, 120 bp, Artificial Sequence
  ENSG00000055163_77 (sequence is synthesized)
ctttccagatgtcattaaggctatttctacaatgttatgtgtaatgactgccaagtattctgttgtattggaacattgtcatgtaacatatcccctgtggttggatatttgtttgctaaa

SEQ ID NO: 37924 - DNA, 120 bp, Artificial Sequence
  ENSG00000055163_78 (sequence is synthesized)
cttcattgaacacccttgtagcagtttttgtgcacatctttttgtcaaggcaaacttcctagaagagaaattgctggctcaaagggaaaaacagaataaatctttttttttatttcaata

SEQ ID NO: 37925 - DNA, 120 bp, Artificial Sequence
  ENSG00000055208_0 (sequence is synthesized)
gaaaagttttaggcagctaggaatgtggagatgtgggtagtggtggctgccaagcacaggaaaatgatcatgctgaactgtacaaaggagattgtctctgaaccttttcataggttctga

SEQ ID NO: 37926 - DNA, 120 bp, Artificial Sequence
  ENSG00000055208_1 (sequence is synthesized)
cactctatatatgtcatcttatttaaaaccctctgtattaaaatgataaggatttggagacattgaaattatatagaatttaaatgtatgcatgttcatatgtttttgcctctggctcat

SEQ ID NO: 37927 - DNA, 120 bp, Artificial Sequence
  ENSG00000055208_2 (sequence is synthesized)
atttccagaatacttaacagtattttaacattttgtttcttatgattctggtcctaaaaaatcaaggacgctgcttactcagaaagctaaaaaacctgagctccagacccagttcctgga

SEQ ID NO: 37928 - DNA, 120 bp, Artificial Sequence
  ENSG00000055208_3 (sequence is synthesized)
cctgccctggaaaagaagtatcccgtagagatgagctcactgcagttacttaattaacaatttgtaagctgcaaaaatggcaatgggccaaccaagaacagctacaatttgaatttttct

SEQ ID NO: 37929 - DNA, 120 bp, Artificial Sequence
  ENSG00000055208_4 (sequence is synthesized)
atttccagaaaatgcttggacagaagagatgagtactatttccactaaggcctagaattgcctactgtacaaatagtcctgatcaggcaatatacgaatggcccaaggaagccaccaaat

SEQ ID NO: 37930 - DNA, 120 bp, Artificial Sequence
  ENSG00000055208_5 (sequence is synthesized)
tgattttcaggttttacatgacctgcgacaaaaattccctgaagtacctgaagttgttgtatccaggtgcatgttacagaataataataacctggatgcctgctgtgctgttctctctca

SEQ ID NO: 37931 - DNA, 120 bp, Artificial Sequence
  ENSG00000055208_6 (sequence is synthesized)
ggagagtacaagatatctttatggtgaaggagacttgaatttttcagatgattctggaatttctggtctacgcaatcacatgacttctctcaacttggacttgcaatcacagaacattta

SEQ ID NO: 37932 - DNA, 120 bp, Artificial Sequence
  ENSG00000055208_7 (sequence is synthesized)
ccaccatggaagagaaggaagtaggatgaatggaagtaggactctaacgcacagcattagtgatggacaacttcaaggtggccagtccaatagtgaactatttcagcaggagccacagac

SEQ ID NO: 37933 - DNA, 120 bp, Artificial Sequence
  ENSG00000055208_8 (sequence is synthesized)
agcaccagctcaagttcctcaaggctttaatgtttttggaatgtccagttcctctggtgcttcaaattcagcaccacatcttggatttcacttaggcagcaaaggaacatctagcctttc

SEQ ID NO: 37934 - DNA, 120 bp, Artificial Sequence
  ENSG00000055208_9 (sequence is synthesized)
tcaacaaactcccagatttaatcccattatggtaactttagccccaaatatccagactggtcgtaatactcctacatctttgcacatacatggtgtacctccacctgtacttaacagtcc

SEQ ID NO: 37935 - DNA, 120 bp, Artificial Sequence
  ENSG00000055208_10 (sequence is synthesized)
acagggaaattctatctatattaggccttacattacaactcctggtggtacaactcgacagacacaacagcattctggctgggtatctcagtttaatcccatgaaccctcagcaagttta

SEQ ID NO: 37936 - DNA, 120 bp, Artificial Sequence
  ENSG00000055208_11 (sequence is synthesized)
tcagccttcacagcctggtccctggactacttgtcctgcatctaatcctctgtcacatacctcatctcaacagccaaatcagcaaggccaccagacctctcatgtctacatgccaatcag

SEQ ID NO: 37937 - DNA, 120 bp, Artificial Sequence
  ENSG00000055208_12 (sequence is synthesized)
ttcacctactacttcacaaccaccaaccattcattcatctggtagctcacagtcttctgcccatagccaatataacattcagaatatttcaacaggacctcgaaaaaaccagattgaaat

SEQ ID NO: 37938 - DNA, 120 bp, Artificial Sequence
  ENSG00000055208_13 (sequence is synthesized)
caaacttgaacccccacaaagaaataattcttcaaaactgcgttcttctggacctcgaacctccagcacttcctcttcagtcaatagccagaccttaaacagaaatcagcccactgttta

SEQ ID NO: 37939 - DNA, 120 bp, Artificial Sequence
  ENSG00000055208_14 (sequence is synthesized)
catagctgccagccccccaaatacggatgagctgatgtcccgtagtcaacctaaggtctatatttcagcgaatgctgccacaggagatgaacaggtcatgcggaatcagcccacactctt

SEQ ID NO: 37940 - DNA, 120 bp, Artificial Sequence
  ENSG00000055208_15 (sequence is synthesized)
catatccacaaactctggagcatctgctgcctccaggaacatgtctgggcaagtgagcatgggtcctgcctttattcatcaccatcctcccaaaagtcgagcaataggcaataactctgc

SEQ ID NO: 37941 - DNA, 120 bp, Artificial Sequence
  ENSG00000055208_16 (sequence is synthesized)
aacctctcctcgagtggtagtcactcagcccaatacgaaatacactttcaaaattacagtctctcccaataagccccctgcagtttcaccaggggtggtgtcccctacctttgaacttac

SEQ ID NO: 37942 - DNA, 120 bp, Artificial Sequence
  ENSG00000055208_17 (sequence is synthesized)
aaatcttcttaatcatcctgatcattatgtagaaaccgagaatattcagcacctcacggaccctacattagcacatgtggatagaataagtgaaacacggaaactgagtatgggatctga

SEQ ID NO: 37943 - DNA, 120 bp, Artificial Sequence
  ENSG00000055208_18 (sequence is synthesized)
atgaaatggaaaataatctaactcgaaggcgcctgaaaagatcaaattctatatcccagataccttcccttgaagaaatgcagcagctgagaagttgtaatagacaactccagattgaca

SEQ ID NO: 37944 - DNA, 120 bp, Artificial Sequence
  ENSG00000055208_19 (sequence is synthesized)
ttgactgcttaaccaaagaaattgatctttttcaagcccgaggaccacattttaaccccagcgctattcataacttttatgacaatattggatttgtaggtcctgtgccaccaaaaccca

SEQ ID NO: 37945 - DNA, 120 bp, Artificial Sequence
  ENSG00000055208_20 (sequence is synthesized)
aagatcaaaggtccatcatcaaaacaccaaagactcaagacacagaagatgatgagggagctcagtggaattgtaccgcctgtacttttttgaaccatccagccttaattcgctgtgaac

SEQ ID NO: 37946 - DNA, 120 bp, Artificial Sequence
  ENSG00000055208_21 (sequence is synthesized)
agtgtgagatgccaaggcatttctgagccaaatggccctgtatcttctctaaaaccacatctaaagttcaagaaactagtctgtcatcgggaaaaagtttcactgctacataggattttg

SEQ ID NO: 37947 - DNA, 120 bp, Artificial Sequence
  ENSG00000055208_22 (sequence is synthesized)
tcaaattgaaggtgtgacaagatggtgttctgctaatgttaaatgtcagcccacagagctaataatacctcagtataatgtcatgagcagttgaaattcatcacatgaaaagtaatctgc

SEQ ID NO: 37948 - DNA, 120 bp, Artificial Sequence
  ENSG00000055208_23 (sequence is synthesized)
tgaaagacttggttgcccactgcctaactgtgtacagtgttaccagtgtcccattatggataattctcaatatgttaacacctaggtgttcccaatacctttttcccctcatgtcactac

SEQ ID NO: 37949 - DNA, 120 bp, Artificial Sequence
  ENSG00000055208_24 (sequence is synthesized)
tgaattttgacaggaggaaggaatagaatgatagcttgttttatttgtaaagctttcagtgaaacactacatacacgaagaaaaggaacaaggtttaactatttaagaaccatttgctgc

SEQ ID NO: 37950 - DNA, 120 bp, Artificial Sequence
  ENSG00000055208_25 (sequence is synthesized)
cgcatagtgccattggatagggaagaacttcagaaatctgtggtactcttggccttgtctttgtcttccctgaacgtgtctccactctgtgaagccagcatctaggggctaaagatgcaa

SEQ ID NO: 37951 - DNA, 120 bp, Artificial Sequence
  ENSG00000055208_26 (sequence is synthesized)
aggaaagcagcatgcattgtctgtacaaatgtgcagcgaaataccccaaagcttttcctactgtacagatctctcgagtctgctttaagtgatttcttttcttcttgattattttcttat

SEQ ID NO: 37952 - DNA, 120 bp, Artificial Sequence
  ENSG00000055208_27 (sequence is synthesized)
atttctatatgtatagtgtaatagccttttgttaactaattttcttttttccttttagtaattaagcacgatcatgtccctttttaagccttacctgagaggaacaatgccttaaaataa

SEQ ID NO: 37953 - DNA, 120 bp, Artificial Sequence
  ENSG00000055208_28 (sequence is synthesized)
aaaagcattaatgagatgaaagtatgcacagaataactttcctctacttattctgtactttgccctcatgagttccaatgttgtgtgaagacaggcagatgctgcacagtgaattgcaga

SEQ ID NO: 37954 - DNA, 120 bp, Artificial Sequence
  ENSG00000055208_29 (sequence is synthesized)
tgatattacagaagtgatgtctgtaggtcacattaaatactgacttgagcagtgggtgacacaacacagtgtttgtcttccacagggaagcttaaaacaaaagatatttttaacccactg

SEQ ID NO: 37955 - DNA, 120 bp, Artificial Sequence
  ENSG00000055208_30 (sequence is synthesized)
acagaacaacaaggttaagcttcatctgcttggtgtcccacagaacttgcacaagcagttgttattgggaaagtacagtctcaaaaccagcaacagcagcagtacctacagccctttttt

SEQ ID NO: 37956 - DNA, 120 bp, Artificial Sequence
  ENSG00000055208_31 (sequence is synthesized)
tggagagaagtttaaatgctttactgttggggcagtccatttctaatcctgacttggtgacagtatcatgtgtatttataaaacaaggctagccatatttaggacaactgaagaaaagct

SEQ ID NO: 37957 - DNA, 120 bp, Artificial Sequence
  ENSG00000055208_32 (sequence is synthesized)
ggaaaaaaaaacaagcaaacttgaacactgaagcaacctcaagcatctctttattttgatgatatatttttgtaaggaaaatattcagatgatcaggaatgtatataactgaaatcaaga

SEQ ID NO: 37958 - DNA, 120 bp, Artificial Sequence
  ENSG00000055208_33 (sequence is synthesized)
aaaagaacagtatgcatttaaaaagacagaattatgaaattatatgagtgcttagaatggggctaagggaagtgctgaaatagagcaaaggatggaagataatatagactaccacccact

SEQ ID NO: 37959 - DNA, 120 bp, Artificial Sequence
  ENSG00000055208_34 (sequence is synthesized)
gtaaatgtttgcaagtggctgtgttttaaatgggattattacagttgatctctatgaatgtcagagccctaactttcaggctttgcattttgtatatgggaagaaatatgacaatcctag

SEQ ID NO: 37960 - DNA, 120 bp, Artificial Sequence
  ENSG00000055208_35 (sequence is synthesized)
gtaattaaaccatagacccaaagcccttacgtttgatgcaatttatttttaaaataggccttgtttttcagcttcatctgcagttctatgtgaagattgataaatcagtttttacttgtt

SEQ ID NO: 37961 - DNA, 120 bp, Artificial Sequence
  ENSG00000055208_36 (sequence is synthesized)
ttattaataaaacgtaatttggatatcttgagttgatggttttgtgatttagctgggtaaactatctttgtaacagataagttatttataaaaattaaaaaacttatattctaatgtgga

SEQ ID NO: 37962 - DNA, 80 bp, Artificial Sequence
  ENSG00000055208_37 (sequence is synthesized)
gtcgtttttgatctgctgcagccgccggcggggcgacccagcccgaccccctcccctccccctcagccaggagcggtggc

SEQ ID NO: 37963 - DNA, 120 bp, Artificial Sequence
  ENSG00000055208_38 (sequence is synthesized)
ctgagcggggagggagggagggctgaggtgtcccccctgccgggtggaaccggaggcggcggcggcgctggcggcggccgtggtggcggaggcgacggtggagacggctgccctagtggg

SEQ ID NO: 37964 - DNA, 120 bp, Artificial Sequence
  ENSG00000055208_39 (sequence is synthesized)
ggttaatgaaatggaaaataatctaactcgaaggcgcctgaaaagatcaaattctatatcccagataccttccgtaagtctttatgtaactgttgtgatctctgcttgaacatgagagta

SEQ ID NO: 37965 - DNA, 120 bp, Artificial Sequence
  ENSG00000055208_40 (sequence is synthesized)
ggccatctaacataagtgtaatatctctatctagttttcttcagatgttcttaactcttgtttttctgtccttactttcttgtgccaaactccattctttattaactaatgactaagaat

SEQ ID NO: 37966 - DNA, 120 bp, Artificial Sequence
  ENSG00000055208_41 (sequence is synthesized)
tactatgaatatgtggccccttaaatttcactggatgtttctggttttcggtcccatcaacctcaaaccctacgattgtggttgagtcagggaggctgcaagggtctcttggcggtgctg

SEQ ID NO: 37967 - DNA, 71 bp, Artificial Sequence
  ENSG00000055208_42 (sequence is synthesized)
atagctgggattacagaaaatgtagtacctaccacaaaaccacagtacataaattgccaagtgtggccgac

SEQ ID NO: 37968 - DNA, 120 bp, Artificial Sequence
  ENSG00000055208_43 (sequence is synthesized)
agtgaggtgaactccttcagggccacaggctgtaaagatctaaacaccatctgatccagtttcaatatgactgcctggatgaagaaggatttgagactaagtttattcctccaaagcaaa

SEQ ID NO: 37969 - DNA, 89 bp, Artificial Sequence
  ENSG00000055208_44 (sequence is synthesized)
tttgagcccaggagtttgagaccagctggggcaacatatggagactccgtctctacagaaggttttgaaattatgttactcagtagact

SEQ ID NO: 37970 - DNA, 120 bp, Artificial Sequence
  ENSG00000055211_0 (sequence is synthesized)
acctcccggccgcggctgccctctgcccgggttgtccaagatggagggcgctccaccggggtcgctcgccctccggctcctgctgttcgtggcgctacccgcctccggctggctgacgac

SEQ ID NO: 37971 - DNA, 120 bp, Artificial Sequence
  ENSG00000055211_1 (sequence is synthesized)
gggcgcccccgagccgccgccgctgtccggagccccacaggacggcatcagaattaatgtaactacactgaaagatgatggggacatatctaaacagcaggttgttcttaacataaccta

SEQ ID NO: 37972 - DNA, 120 bp, Artificial Sequence
  ENSG00000055211_2 (sequence is synthesized)
tgagagtggacaggtgtatgtaaatgacttacctgtaaatagtggtgtaacccgaataagctgtcagactttgatagtgaagaatgaaaatcttgaaaatttggaggaaaaagaatattt

SEQ ID NO: 37973 - DNA, 120 bp, Artificial Sequence
  ENSG00000055211_3 (sequence is synthesized)
tggaattgtcagtgtaaggattttagttcatgagtggcctatgacatctggttccagtttgcaactaattgtcattcaagaagaggtagtagagattgatggaaaacaagttcagcaaaa

SEQ ID NO: 37974 - DNA, 120 bp, Artificial Sequence
  ENSG00000055211_4 (sequence is synthesized)
ggatgtcactgaaattgatattttagttaagaaccggggagtactcagacattcaaactataccctccctttggaagaaagcatgctctactctatttctcgagacagtgacattttatt

SEQ ID NO: 37975 - DNA, 120 bp, Artificial Sequence
  ENSG00000055211_5 (sequence is synthesized)
tacccttcctaacctctccaaaaaagaaagtgttagttcactgcaaaccactagccagtatcttatcaggaatgtggaaaccactgtagatgaagatgttttacctggcaagttacctga

SEQ ID NO: 37976 - DNA, 120 bp, Artificial Sequence
  ENSG00000055211_6 (sequence is synthesized)
aactcctctcagagcagagccgccatcttcatataaggtaatgtgtcagtggatggaaaagtttagaaaagatctgtgtaggttctggagcaacgttttcccagtattctttcagttttt

SEQ ID NO: 37977 - DNA, 120 bp, Artificial Sequence
  ENSG00000055211_7 (sequence is synthesized)
gaacatcatggtggttggaattacaggagcagctgtggtaataaccatcttaaaggtgtttttcccagtttctgaatacaaaggaattcttcagttggataaagtggacgtcatacctgt

SEQ ID NO: 37978 - DNA, 120 bp, Artificial Sequence
  ENSG00000055211_8 (sequence is synthesized)
atggtccagagaaaagagctgaaaaccttgaagataaaacatgtatttaaaacgccatctcatatcatggactccgaagtagcctgttgcctccaaatttgccacttgaatataattttc

SEQ ID NO: 37979 - DNA, 120 bp, Artificial Sequence
  ENSG00000055211_9 (sequence is synthesized)
tttaaatcgttaagaatcagtttatacactagagaaattgctaaactctaagactgcctgaaaattgacctttacagtgccaagttaaagtttaccttattctcggccgggtgcagtggc

SEQ ID NO: 37980 - DNA, 120 bp, Artificial Sequence
  ENSG00000055211_10 (sequence is synthesized)
gcgagactctgtttcaaaaaaaaaaaagttgaccttattctctaaaagggctggctattcatatgatgaattgttaaggaaaacttaaagtggaagagaacacatgtgaagagactttga

SEQ ID NO: 37981 - DNA, 120 bp, Artificial Sequence
  ENSG00000055211_11 (sequence is synthesized)
gactttgaaattatcaaaagaaaaaaaaaagaccagacaaaatctcatgtgccaataacttttcaaggtgcctttgttaaggaaattatatccacttaattactataatatataagactt

SEQ ID NO: 37982 - DNA, 120 bp, Artificial Sequence
  ENSG00000055211_12 (sequence is synthesized)
tatgaaaagcactttataaaattctaatttaaaaggtcaagaacttaacacttatttttttattcagtacagtgtgcctttatattaagtatgtgactcagtataaaatcactgaagtgt

SEQ ID NO: 37983 - DNA, 120 bp, Artificial Sequence
  ENSG00000055211_13 (sequence is synthesized)
atcatgatttgattgtatcctgtaccaagactacttaccttgaatgctccaagatttaaaagtagtatgacatgttctcactctaaaataaactttttttttttttttttgaggaaaaaa

SEQ ID NO: 37984 - DNA, 120 bp, Artificial Sequence
  ENSG00000055211_14 (sequence is synthesized)
gccatcttcatataaggtactggaaacagttgactctgctccatttcgtttataatggactagcctaacgaatctcttgtcaattagcaattattttcacttgatttgtagttagaaaac

SEQ ID NO: 37985 - DNA, 120 bp, Artificial Sequence
  ENSG00000055211_15 (sequence is synthesized)
aatataaataattttacaggctattaacatttttgtgcttgtattgttagaacataatttttaaagttgtaagtaacttcattgaggtacattctaaaataaaatcaccatttaaaatat

SEQ ID NO: 37986 - DNA, 120 bp, Artificial Sequence
  ENSG00000055332_0 (sequence is synthesized)
gaaactgagaaccagctctcccgaagccgcgggtctccggccggcggcggcggcggcggcggcggcggcgcagtttctggagcaaattcagtttgccttcctggatttgtaaattgtaat

SEQ ID NO: 37987 - DNA, 120 bp, Artificial Sequence
  ENSG00000055332_1 (sequence is synthesized)
gacctcaaaactttagcagttcttccatctgactcaggtttgcttctctggcggtcttcagaatcaacatccacacttccgtgattatctgcgtgcattttggacaaagcttccaaccag

SEQ ID NO: 37988 - DNA, 120 bp, Artificial Sequence
  ENSG00000055332_2 (sequence is synthesized)
gatacgggaagaagaaatggctggtgatctttcagcaggtttcttcatggaggaacttaatacataccgtcagaagcagggagtagtacttaaatatcaagaactgcctaattcaggacc

SEQ ID NO: 37989 - DNA, 120 bp, Artificial Sequence
  ENSG00000055332_3 (sequence is synthesized)
tccacatgataggaggtttacatttcaagttataatagatggaagagaatttccagaaggtgaaggtagatcaaagaaggaagcaaaaaatgccgcagccaaattagctgttgagatact

SEQ ID NO: 37990 - DNA, 120 bp, Artificial Sequence
  ENSG00000055332_4 (sequence is synthesized)
taataaggaaaagaaggcagttagtcctttattattgacaacaacgaattcttcagaaggattatccatggggaattacataggccttatcaatagaattgcccagaagaaaagactaac

SEQ ID NO: 37991 - DNA, 120 bp, Artificial Sequence
  ENSG00000055332_5 (sequence is synthesized)
tgtaaattatgaacagtgtgcatcgggggtgcatgggccagaaggatttcattataaatgcaaaatgggacagaaagaatatagtattggtacaggttctactaaacaggaagcaaaaca

SEQ ID NO: 37992 - DNA, 120 bp, Artificial Sequence
  ENSG00000055332_6 (sequence is synthesized)
attggccgctaaacttgcatatcttcagatattatcagaagaaacctcagtgaaatctgactacctgtcctctggttcttttgctactacgtgtgagtcccaaagcaactctttagtgac

SEQ ID NO: 37993 - DNA, 120 bp, Artificial Sequence
  ENSG00000055332_7 (sequence is synthesized)
cagcacactcgcttctgaatcatcatctgaaggtgacttctcagcagatacatcagagataaattctaacagtgacagtttaaacagttcttcgttgcttatgaatggtctcagaaataa

SEQ ID NO: 37994 - DNA, 120 bp, Artificial Sequence
  ENSG00000055332_8 (sequence is synthesized)
tcaaaggaaggcaaaaagatctttggcacccagatttgaccttcctgacatgaaagaaacaaagtatactgtggacaagaggtttggcatggattttaaagaaatagaattaattggctc

SEQ ID NO: 37995 - DNA, 120 bp, Artificial Sequence
  ENSG00000055332_9 (sequence is synthesized)
aggtggatttggccaagttttcaaagcaaaacacagaattgacggaaagacttacgttattaaacgtgttaaatataataacgagaaggcggagcgtgaagtaaaagcattggcaaaact

SEQ ID NO: 37996 - DNA, 120 bp, Artificial Sequence
  ENSG00000055332_10 (sequence is synthesized)
tgatcatgtaaatattgttcactacaatggctgttgggatggatttgattatgatcctgagaccagtgatgattctcttgagagcagtgattatgatcctgagaacagcaaaaatagttc

SEQ ID NO: 37997 - DNA, 120 bp, Artificial Sequence
  ENSG00000055332_11 (sequence is synthesized)
aaggtcaaagactaagtgccttttcatccaaatggaattctgtgataaagggaccttggaacaatggattgaaaaaagaagaggcgagaaactagacaaagttttggctttggaactctt

SEQ ID NO: 37998 - DNA, 120 bp, Artificial Sequence
  ENSG00000055332_12 (sequence is synthesized)
tgaacaaataacaaaaggggtggattatatacattcaaaaaaattaattcatagagatcttaagccaagtaatatattcttagtagatacaaaacaagtaaagattggagactttggact

SEQ ID NO: 37999 - DNA, 120 bp, Artificial Sequence
  ENSG00000055332_13 (sequence is synthesized)
tgtaacatctctgaaaaatgatggaaagcgaacaaggagtaagggaactttgcgatacatgagcccagaacagatttcttcgcaagactatggaaaggaagtggacctctacgctttggg

SEQ ID NO: 38000 - DNA, 120 bp, Artificial Sequence
  ENSG00000055332_14 (sequence is synthesized)
gctaattcttgctgaacttcttcatgtatgtgacactgcttttgaaacatcaaagtttttcacagacctacgggatggcatcatctcagatatatttgataaaaaagaaaaaactcttct

SEQ ID NO: 38001 - DNA, 120 bp, Artificial Sequence
  ENSG00000055332_15 (sequence is synthesized)
acagaaattactctcaaagaaacctgaggatcgacctaacacatctgaaatactaaggaccttgactgtgtggaagaaaagcccagagaaaaatgaacgacacacatgttagagcccttc

SEQ ID NO: 38002 - DNA, 120 bp, Artificial Sequence
  ENSG00000055332_16 (sequence is synthesized)
tgaaaaagtatcctgcttctgatatgcagttttccttaaattatctaaaatctgctagggaatatcaatagatatttaccttttattttaatgtttcctttaattttttactatttttac

SEQ ID NO: 38003 - DNA, 120 bp, Artificial Sequence
  ENSG00000055332_17 (sequence is synthesized)
ttactaatctttctgcagaaacagaaaggttttcttctttttgcttcaaaaacattcttacattttactttttcctggctcatctctttattctttttttttttttaaagacagagtctc

SEQ ID NO: 38004 - DNA, 120 bp, Artificial Sequence
  ENSG00000055332_18 (sequence is synthesized)
gggatgagccaccgcgcccagcctcatctctttgttctaaagatggaaaaaccacccccaaattttctttttatactattaatgaatcaatcaattcatatctatttattaaatttctac

SEQ ID NO: 38005 - DNA, 120 bp, Artificial Sequence
  ENSG00000055332_19 (sequence is synthesized)
cgcttttaggccaaaaaaatgtaagatcgttctctgcctcacatagcttacaagccagctggagaaatatggtactcattaaaaaaaaaaaaaaaagtgatgtacaaccacttcggaaaa

SEQ ID NO: 38006 - DNA, 120 bp, Artificial Sequence
  ENSG00000055332_20 (sequence is synthesized)
caatttggcattatctagtaaagttgaatccatgtatacccacatagctatcaattctattcctacatacgtgcttacaagaatgtccataaaaccctgtttataatagccaaaagaaca

SEQ ID NO: 38007 - DNA, 120 bp, Artificial Sequence
  ENSG00000055332_21 (sequence is synthesized)
gggaacaaccataatgcacatcaaaagaagaatggattaaaaaaattatattcacacacaggagtactatatagtattgaaaacaattgaagtacagctaaatgtaataacgtaacacaa

SEQ ID NO: 38008 - DNA, 120 bp, Artificial Sequence
  ENSG00000055332_22 (sequence is synthesized)
tacaactctcagaaacataatgttaagcgaacaaagcaggttttcagaaaatatatgcagaataattccatttatataaagttccagagcatgcaaaactaaatcattttgtataaaaaa

SEQ ID NO: 38009 - DNA, 120 bp, Artificial Sequence
  ENSG00000055332_23 (sequence is synthesized)
cccaacaaatgtgatgagacaataatgggaaggaagggaatgagaaatattaaattctggatggtggttatctttgagggaggggaatgatgtgattggggaaatggactttcaaaggta

SEQ ID NO: 38010 - DNA, 120 bp, Artificial Sequence
  ENSG00000055332_24 (sequence is synthesized)
atggtaacttccttaagctggatggtaggtccactagtgtttgctgcatagttataccttttatcttaaatacattttgtatctattgtaacaaccactttaaagacaaccgtgctgtaa

SEQ ID NO: 38011 - DNA, 120 bp, Artificial Sequence
  ENSG00000055332_25 (sequence is synthesized)
ggcagtagctaaaaacagaaaatagtccatcgggaagggtaagatggctttctgctgagcacagggctagaagtgacagcccagtgggccttccaactatatgccagggtgttagatgag

SEQ ID NO: 38012 - DNA, 120 bp, Artificial Sequence
  ENSG00000055332_26 (sequence is synthesized)
tagagaggagaccacccaggaagtctggacaaggggtctggcatgagctctggagaagatatatttgaggaacatggggtatgctagtttgttgtcctgaattgctgtagagaagataat

SEQ ID NO: 38013 - DNA, 120 bp, Artificial Sequence
  ENSG00000055332_27 (sequence is synthesized)
ttaaattgcatcttagaagacgaccctgagggtgaatttcaacttagggcaattgttttagtttgtttcttattggtttaaatggatacttgaagctggataatttataaggaaaagaga

SEQ ID NO: 38014 - DNA, 120 bp, Artificial Sequence
  ENSG00000055332_28 (sequence is synthesized)
tttatatgacttacagttctgcaggctgtacaagaaacatggcaccagcatctgcttcttccccggctgcttccactcatggtggaaggtgaaggggagccggatgtgcagagatcatat

SEQ ID NO: 38015 - DNA, 120 bp, Artificial Sequence
  ENSG00000055332_29 (sequence is synthesized)
ggcaagagaggaagcaagagagcgagggagaaggtgccaggctctttttaaataaccggctcttgagggaactaatagattgagaactccttgcttctcctccccagcacaccccacccc

SEQ ID NO: 38016 - DNA, 89 bp, Artificial Sequence
  ENSG00000055332_30 (sequence is synthesized)
tgagaactccttgcttctcctccccagcacaccccacccccagggacggcattaatgtattcatgaggggtcttcccccatgacccaaa

SEQ ID NO: 38017 - DNA, 120 bp, Artificial Sequence
  ENSG00000055332_31 (sequence is synthesized)
aaactatagcagcaaccagctaccattctaaaactgccatatgattttaggatttttaaaaagggccaaatttaggttaagcaaaaagtgaaaatacagtaagagaaaatagttttataa

SEQ ID NO: 38018 - DNA, 120 bp, Artificial Sequence
  ENSG00000055332_32 (sequence is synthesized)
aggctttaaaaagtgttcataaagagcagttcatagatttttcacgtaacgttcatcaatagatgctaaaactattggatgaaaagctattgtggaataggatcttctacaaggatttaa

SEQ ID NO: 38019 - DNA, 120 bp, Artificial Sequence
  ENSG00000055332_33 (sequence is synthesized)
atataatcctacagaagaggtatcaattatacaggggaaaatgtacctttacaatggtcaccacaataaccaagtgattcaatttagcatcacccaaggtggaacaccctaacattatgc

SEQ ID NO: 38020 - DNA, 120 bp, Artificial Sequence
  ENSG00000055332_34 (sequence is synthesized)
ccctcctgatgtgacttaagaattttacctatttagttttcttgcacaaagtgttaaactggaatttaatcatgaggaaattattagacaaatcctgaatgtagtcattctataagatga

SEQ ID NO: 38021 - DNA, 120 bp, Artificial Sequence
  ENSG00000055332_35 (sequence is synthesized)
ttgacttgggcttctcaaaaagtcagtgtcatgaaaaaaaaaaaaaggggagagacttgtaagatacaatgaccaaatgcaatgtttgaatctttattgtattctggatatttaaaaaga

SEQ ID NO: 38022 - DNA, 120 bp, Artificial Sequence
  ENSG00000055332_36 (sequence is synthesized)
caaaagctggacgcagtagctaatgcctgttatcccagcatttttgggaggtcaaaaggggaggatggcttgagcataggattttgagactagcctgggcaacacagtgagttctcatct

SEQ ID NO: 38023 - DNA, 120 bp, Artificial Sequence
  ENSG00000055332_37 (sequence is synthesized)
gggcaacacagtgagttctcatctctacaaaaaatcagaaaattagctgggcatggtagtgtgcatctgtggtcccagctacttgggggggtgaggtgggaggatcacttgagcctagga

SEQ ID NO: 38024 - DNA, 120 bp, Artificial Sequence
  ENSG00000055332_38 (sequence is synthesized)
attccagcctgggtgacagagtgagatcatatctaaataataataataataaaagaaagcaacaacccagcaaacagctataaagatatcttcgggacaattgagaacatttgaatatag

SEQ ID NO: 38025 - DNA, 120 bp, Artificial Sequence
  ENSG00000055332_39 (sequence is synthesized)
attgagaacatttgaatatagactgcatattagataacaatgccaaataactgttttctcaggtgtgataatagtatatgtagaaaatgtctttttgttttgttttattttgtttttgtt

SEQ ID NO: 38026 - DNA, 68 bp, Artificial Sequence
  ENSG00000055332_40 (sequence is synthesized)
ttcctgagtagctgggattacaggtatctgccaccactccaggttaattttttctatttttagtagag

SEQ ID NO: 38027 - DNA, 87 bp, Artificial Sequence
  ENSG00000055332_41 (sequence is synthesized)
tcctgcctctgcttcctgagtagctgggattacaggtatctgccaccactccaggttaattttttcacccagctggttttgaactcc

SEQ ID NO: 38028 - DNA, 120 bp, Artificial Sequence
  ENSG00000055332_42 (sequence is synthesized)
tgagattacaggcatgagtcactgcacccagccaaaaatgtttttttaggcaatgcatgcacaaacatttagaggccaagtgtgtcatgatgtctgcaactttcaatgttcagcaaaaat

SEQ ID NO: 38029 - DNA, 120 bp, Artificial Sequence
  ENSG00000055332_43 (sequence is synthesized)
caacatggagagagaaagagggcacacatgtggcaaaatattagccattgtacaattggtaaatctagatgacagtacacaggtgtttgttgtattattctttgaacttttctgtagatt

SEQ ID NO: 38030 - DNA, 120 bp, Artificial Sequence
  ENSG00000055332_44 (sequence is synthesized)
tggaaatgttctgcgtagagagaaatctttttttaaaaaaacaatatctggttttgattaatgaggctatattcaaaagaaacactaaatgatgtggccagttagtgagaatgtagcctt

SEQ ID NO: 38031 - DNA, 72 bp, Artificial Sequence
  ENSG00000055332_45 (sequence is synthesized)
aacactaaatgatgtggccagttagtgagaatgtagccttatctttactgacctcattttaatattcctact

SEQ ID NO: 38032 - DNA, 120 bp, Artificial Sequence
  ENSG00000055332_46 (sequence is synthesized)
attaaatgaatatagcatttcttagcaacttcttttgatttgtgagtatatattttcttggcctcaaaattaaagtaaaaagtatcctcttactcagaggaggacaggggcaagagcctg

SEQ ID NO: 38033 - DNA, 120 bp, Artificial Sequence
  ENSG00000055332_47 (sequence is synthesized)
ggaccttatttgctaattaaaatgcacacacacacacacacacacagaaattttgagagccattttaatataattgcctccctagaaacataccttttagggaatttttatcactaaacc

SEQ ID NO: 38034 - DNA, 120 bp, Artificial Sequence
  ENSG00000055332_48 (sequence is synthesized)
aaccacatgttatttaaatacgtacatgtttaacataaatacatacataaaattcacatgcatacttaacacttatgttaaatatattcaatgtatatacatatgtacacaatatatgca

SEQ ID NO: 38035 - DNA, 120 bp, Artificial Sequence
  ENSG00000055332_49 (sequence is synthesized)
tacatgtgggtatgtggtatgtgtgcatgtgtgtgtatggccagctacataatttgtgggactaagggcaaaatgaaactgtacggccctcgttcaaaaattaggtgtggggtgcttcta

SEQ ID NO: 38036 - DNA, 120 bp, Artificial Sequence
  ENSG00000055332_50 (sequence is synthesized)
agcacagtcttgtgcaactgcacaggttgcatgtccatgaagccatcctgtgtgtgtgcacatatgtgtatgaatatgtattttatataatacatatatatgcatgtatgtatctgagaa

SEQ ID NO: 38037 - DNA, 120 bp, Artificial Sequence
  ENSG00000055332_51 (sequence is synthesized)
gaaatgtttaaaaggctacatacaagcttttccaggtctctactatctgttaactaactagagacataactcacaatatgcagtccccactgagtgttcaccataatttgagattcttgg

SEQ ID NO: 38038 - DNA, 120 bp, Artificial Sequence
  ENSG00000055332_52 (sequence is synthesized)
catgttaacttttcattatggaatattgaataatttcaatattattcatacatttctttatgttcaaacatacacaaaaatagaataatgaaactctacccatcacccagctgcaacaaa

SEQ ID NO: 38039 - DNA, 120 bp, Artificial Sequence
  ENSG00000055332_53 (sequence is synthesized)
caaatatcaatactttaccgttcttaatacatctaaccccttactttttgtttgtttcttttggtgaagtatttaattgtaattttttttttaagagacaggatctcactctgtcaccca

SEQ ID NO: 38040 - DNA, 87 bp, Artificial Sequence
  ENSG00000055332_54 (sequence is synthesized)
gcttgaatagctgggactacatgcatacaccaacacacccaactaatttttaaattttttgtagaaatatggtcttgctgtgtttcc

SEQ ID NO: 38041 - DNA, 120 bp, Artificial Sequence
  ENSG00000055332_55 (sequence is synthesized)
ttcccaggctggtctcaaactcctggccttgagagattctcctgccttggtcttccaaactgctgggattacaatatccggccctactggaatattttaaagtaaatctcaggtgttaca

SEQ ID NO: 38042 - DNA, 120 bp, Artificial Sequence
  ENSG00000055332_56 (sequence is synthesized)
tactggaatattttaaagtaaatctcaggtgttacatcattgcacttgtaagtactttaaaatgtatctctagcagataaatctttttaacaaaaccacagcatcattgtcacactcaaa

SEQ ID NO: 38043 - DNA, 120 bp, Artificial Sequence
  ENSG00000055332_57 (sequence is synthesized)
aaattgacaagatttccttaattatcatataatagtctgtattgtttctatctcaaaaatacagttttcttggttgttgaaatctagatccaacattgcatttggttgatgtgtctcctt

SEQ ID NO: 38044 - DNA, 120 bp, Artificial Sequence
  ENSG00000055332_58 (sequence is synthesized)
tactctgtaaaatttacccctgcgttttagttcttttcggcttttatttgtcctgtggaatttcctccactcaggatttgactgagagtatccccagagtgtccagttagacctagaagc

SEQ ID NO: 38045 - DNA, 120 bp, Artificial Sequence
  ENSG00000055332_59 (sequence is synthesized)
tggatttgatcctggttcatttattttcccccaagaatactccataggtgatgctatacactttctcttacatcatttcaggaggaacatgatgtctgattgttccactttcagtgattt

SEQ ID NO: 38046 - DNA, 120 bp, Artificial Sequence
  ENSG00000055332_60 (sequence is synthesized)
taatattgatcaatgagttctggtggtaccaactactacaaagtttctcatcaatctttcacctgatggttttagcagctattgataattgttgcctggatccattatttcatttcaggg

SEQ ID NO: 38047 - DNA, 120 bp, Artificial Sequence
  ENSG00000055332_61 (sequence is synthesized)
gttgtaaaatagtgattttctggttctatcaaacctcttgcatttatcatctatgattcttctttaaggaactttctctaaatctgaatgggaaagatgcgataaatatttatcaaattt

SEQ ID NO: 38048 - DNA, 120 bp, Artificial Sequence
  ENSG00000055332_62 (sequence is synthesized)
tagagtgagttagtgccctagcaacctccacagttgacaaatgagtatttctttaaagcaaggtatggcccaaccaatactttgaaactagcatgtttagaatagagcaggaggaaacta

SEQ ID NO: 38049 - DNA, 120 bp, Artificial Sequence
  ENSG00000055332_63 (sequence is synthesized)
tatttgaaaggtcagaagtggaaagactaagagggcctgaacaataagaggacagaaccaagaggagttggcaactaattggatgtggggattaaggaaaggtaagcatcaaagattacc

SEQ ID NO: 38050 - DNA, 120 bp, Artificial Sequence
  ENSG00000055332_64 (sequence is synthesized)
tccaagtttgttagaaggttagtagcaggattctgatgccattcaagtaaatacaagtctcagtcagatgaaccccaagagccacatgtatttgaggggtactttgtctcacacttttac

SEQ ID NO: 38051 - DNA, 120 bp, Artificial Sequence
  ENSG00000055332_65 (sequence is synthesized)
ctgttacatggttttcagtaatttagaatttaagccagtagtggggcgactgtacatctatcgacatggtgaggtagagcatgtttgggaggaaagacgttgaatcccatttggtgacag

SEQ ID NO: 38052 - DNA, 120 bp, Artificial Sequence
  ENSG00000055332_66 (sequence is synthesized)
tgagcttgaggtgctgccagaacactgcactgaagataggaggagactgtaggaaatacaagataggaaaggtctccactgaaatgttaactctttctctctaaacggccatccaggcct

SEQ ID NO: 38053 - DNA, 120 bp, Artificial Sequence
  ENSG00000055332_67 (sequence is synthesized)
caatgtctgcagtttctgatctgtgattatgacttatccaaatcttacatttcttaaaaatagtcatagatgaagggaatcacagttgatagttatatggtgacattattggcttaaatt

SEQ ID NO: 38054 - DNA, 120 bp, Artificial Sequence
  ENSG00000055332_68 (sequence is synthesized)
ctaaataactagaaactgtataataggcaaaactgtgaggcaaataaaatgcttctcaaatctgtgtggctcttatggggttaatttgatttggacctgtattaatttcttatggctgct

SEQ ID NO: 38055 - DNA, 120 bp, Artificial Sequence
  ENSG00000055332_69 (sequence is synthesized)
ataactaacaaattaccacaaacttggtggtttaaaacaacacacatttattctctttctgttctggaggccagaagtctaaaatgagattcactgggctgcagttcactgggcaaggcc

SEQ ID NO: 38056 - DNA, 120 bp, Artificial Sequence
  ENSG00000055332_70 (sequence is synthesized)
atgctcctctggaggcttccatgatgcatcccatattcagtgtttcccgagtaagccccacccatgcaggtctgcagttttacctcaacaggcttttgcactcagtggctctctcctgtg

SEQ ID NO: 38057 - DNA, 120 bp, Artificial Sequence
  ENSG00000055332_71 (sequence is synthesized)
gtttctatctgaaattctcttcattttttttttaataactgctttattgagatataattcacatgccatacaattcacctatacagtatacaattcagtagtgtttactatattcagagt

SEQ ID NO: 38058 - DNA, 120 bp, Artificial Sequence
  ENSG00000055332_72 (sequence is synthesized)
tgtgcaactatcatttttctcacccccaaaagaaaccctatgcccgttagtattcactctgttttctcacaactctaggtaaccactaatctactctccatctctatagatttgcccatg

SEQ ID NO: 38059 - DNA, 120 bp, Artificial Sequence
  ENSG00000055332_73 (sequence is synthesized)
ctagacatttcatataaatggaatcatacatgtggtctttttcactgagtatattttcaaggtgcatcccagctgtggcatgaatcagcatctcattcctttttattgccaaataatatt

SEQ ID NO: 38060 - DNA, 120 bp, Artificial Sequence
  ENSG00000055332_74 (sequence is synthesized)
ctatcatatggatatgtcgcattttatgtatccattcatcagctgatggacatttgggttgtttgtactttttggctaccatgaataatgctactatgaacttttgtgtacaaatcttat

SEQ ID NO: 38061 - DNA, 120 bp, Artificial Sequence
  ENSG00000055332_75 (sequence is synthesized)
gtggacttgttttcatttctcttggatgtatattcctaggagaatggctggattatacagtaactctttcctcataactttgcatatcaaaattatatccatctttcagaacccaaattc

SEQ ID NO: 38062 - DNA, 120 bp, Artificial Sequence
  ENSG00000055332_76 (sequence is synthesized)
agtgttatttccaaagtgttccaacatctcccactcaaaatgaatcttctccctagtactcccattgtttagtacctaattgttcttaccagtttgtcttagagctcagtcattcctaca

SEQ ID NO: 38063 - DNA, 120 bp, Artificial Sequence
  ENSG00000055332_77 (sequence is synthesized)
cagcacttttcttcattatactgctaatttcattacactgtaagagtggggacaagctgttcttcttgtataccagaaagtagtgagtgcactgctgtgaagaaagcaggaactcaaaag

SEQ ID NO: 38064 - DNA, 120 bp, Artificial Sequence
  ENSG00000055332_78 (sequence is synthesized)
ttaagaattttgaatgagcctataaaatgtgtctaataaataataatgttcattttcaaatctcaacaattaaatgtttaacaaataacacttgaaataaatgtttattagaaaaaccaa

SEQ ID NO: 38065 - DNA, 120 bp, Artificial Sequence
  ENSG00000055332_79 (sequence is synthesized)
agcagacgagggcttgtgcgagagggggccgggcggctgcagggaaggcggagtccaaggggaaaacgaaactgagaaccagctctcccgaagccgcgggtctccggccggcggcggcgg

SEQ ID NO: 38066 - DNA, 120 bp, Artificial Sequence
  ENSG00000055332_80 (sequence is synthesized)
cggcggcggcggcggcgcagtttgctcatactttgtgacttgcggtcacagtggcattcagctccacacttggtagaaccacaggcacgacaagcatagaaacatcctaaacaatcttca

SEQ ID NO: 38067 - DNA, 120 bp, Artificial Sequence
  ENSG00000055332_81 (sequence is synthesized)
tcgaggcatcgaggtccatcccaataaaaatcaggagaccctggctatcatagaccttagtcttcgctggtatcactcgtctgtctgaaccagcggttgcatttttttaagccttctttt

SEQ ID NO: 38068 - DNA, 120 bp, Artificial Sequence
  ENSG00000055332_82 (sequence is synthesized)
atgttgatcgttaatttacacagaggattcagctattcggcggtacagatttgaacctaggcagtcagactccacagattttgctaataaatagacattgttttgtggtgtaagatgttt

SEQ ID NO: 38069 - DNA, 120 bp, Artificial Sequence
  ENSG00000055332_83 (sequence is synthesized)
gcattgaacatattttgatctgaagttttatttcagacttatttattgttcttaatacttgtagagtattgtacacccttatttgagcagagtttcagaagcagaaagcttgaaatctat

SEQ ID NO: 38070 - DNA, 120 bp, Artificial Sequence
  ENSG00000055332_84 (sequence is synthesized)
aaacaaataattttagatgtgtcgagaaatctttgactatgtgcacatgctacactgtaaacataaagcactttgggggtatcgctagagtaattaggttaagggcattattttgtacaa

SEQ ID NO: 38071 - DNA, 120 bp, Artificial Sequence
  ENSG00000055483_0 (sequence is synthesized)
agcgcagcgcgaacgctgggtgcggcgcctttaagcgtcgcggtgacacgtgtgtgaggcgccggaggcccggatggtgcgcgtgctgggccgcgggccgaaggagtcgccagggctgcg

SEQ ID NO: 38072 - DNA, 120 bp, Artificial Sequence
  ENSG00000055483_1 (sequence is synthesized)
taggcttgtggcgcgcccgcggagaggccggggctctgacgcccgctctgcggcttcggtgtttgaacaggccacagtccaggagcgcttacattcaggagctccgcgtagcacctgccc

SEQ ID NO: 38073 - DNA, 120 bp, Artificial Sequence
  ENSG00000055483_2 (sequence is synthesized)
aaccaaactcagccctccgttaagatcctggttccatgccgcagtaggacagcaggcccaagtctgcacatcccagtgatgcaccatgccaatagtggataagttgaaggaggccctgaa

SEQ ID NO: 38074 - DNA, 120 bp, Artificial Sequence
  ENSG00000055483_3 (sequence is synthesized)
acccggccgcaaggactcggctgatgatggagaactggggaagcttcttgcctcctctgccaagaaggtccttttacagaaaatcgagttcgagccagccagcaagagcttctcctacca

SEQ ID NO: 38075 - DNA, 120 bp, Artificial Sequence
  ENSG00000055483_4 (sequence is synthesized)
gctggaggccttaaagagcaaatatgtgttgctcaaccccaaaacagagggagctagtcgccacaagagtggagatgacccaccggccaggagacagggcagtgagcacacgtatgagag

SEQ ID NO: 38076 - DNA, 120 bp, Artificial Sequence
  ENSG00000055483_5 (sequence is synthesized)
ctgtggtgacggagtcccagccccgcagaaagtgcttttccccacggagcgactgtctctgaggtgggagcgggtcttccgcgtgggcgcaggactccacaaccttggcaacacctgctt

SEQ ID NO: 38077 - DNA, 120 bp, Artificial Sequence
  ENSG00000055483_6 (sequence is synthesized)
tctcaatgccaccatccagtgcttgacctacacaccacctctagccaactacctgctctccaaggagcatgctcgcagctgccaccagggaagcttctgcatgctgtgtgtcatgcagaa

SEQ ID NO: 38078 - DNA, 120 bp, Artificial Sequence
  ENSG00000055483_7 (sequence is synthesized)
ccacattgtccaggccttcgccaacagcggcaacgccatcaagcccgtctccttcatccgagacctgaaaaagatcgcccgacacttccgctttgggaaccaggaggacgcgcatgagtt

SEQ ID NO: 38079 - DNA, 120 bp, Artificial Sequence
  ENSG00000055483_8 (sequence is synthesized)
cctgcggtacaccatcgacgccatgcagaaagcctgcctgaatggctgtgccaagttggatcgtcaaacgcaggctactaccttggtccatcaaatttttggagggtatctcagatcacg

SEQ ID NO: 38080 - DNA, 120 bp, Artificial Sequence
  ENSG00000055483_9 (sequence is synthesized)
cgtgaagtgctccgtgtgcaagagcgtctcggacacctacgacccctacttggacgtcgcgctggagatccggcaagctgcgaatattgtgcgtgctctggaactttttgtgaaagcaga

SEQ ID NO: 38081 - DNA, 120 bp, Artificial Sequence
  ENSG00000055483_10 (sequence is synthesized)
tgtcctgagtggagagaatgcctacatgtgtgctaaatgcaagaagaaggttccagccagcaagcgcttcaccatccacagaacatccaacgtcttaaccctttccctcaagcgctttgc

SEQ ID NO: 38082 - DNA, 120 bp, Artificial Sequence
  ENSG00000055483_11 (sequence is synthesized)
caacttcagcggggggaagatcaccaaggatgtaggctatccggaattcctcaacatacgtccgtatatgtcccagaataatggtgatcctgtcatgtatggactctatgctgtcctggt

SEQ ID NO: 38083 - DNA, 120 bp, Artificial Sequence
  ENSG00000055483_12 (sequence is synthesized)
gcactcgggctacagctgccatgccgggcactattactgctacgtgaaggcaagcaatggacagtggtaccagatgaatgattccttggtccattccagcaacgtcaaggtggttctgaa

SEQ ID NO: 38084 - DNA, 120 bp, Artificial Sequence
  ENSG00000055483_13 (sequence is synthesized)
ccagcaggcctacgtgctgttctatctgcgaattccaggctctaagaaaagtcccgagggcctcatctccaggacaggctcctcctcccttcccggccgcccgagtgtgattccagatca

SEQ ID NO: 38085 - DNA, 120 bp, Artificial Sequence
  ENSG00000055483_14 (sequence is synthesized)
ctccaagaagaacatcggcaatgggattatttcctccccactgactggaaagcgacaagactctgggacgatgaagaagccgcacaccactgaagagattggtgtgcccatatccaggaa

SEQ ID NO: 38086 - DNA, 120 bp, Artificial Sequence
  ENSG00000055483_15 (sequence is synthesized)
tggctccaccctgggcctgaagtcccagaacggctgcattcctccaaagctgccctcggggtccccttcccccaaactctcccagacacccacacacatgccaaccatcctagacgaccc

SEQ ID NO: 38087 - DNA, 120 bp, Artificial Sequence
  ENSG00000055483_16 (sequence is synthesized)
tggaaagaaggtgaagaagccagctcctccacagcacttttcccccagaactgctcaggggctgcctgggaccagcaactcgaatagcagcagatctgggagccaaaggcagggctcctg

SEQ ID NO: 38088 - DNA, 120 bp, Artificial Sequence
  ENSG00000055483_17 (sequence is synthesized)
ggacagcagggatgttgtcctctctacctcacctaagctcctggctacagccactgccaacgggcatgggctgaaggggaacgacgagagcgctggcctcgacaggaggggctccagcag

SEQ ID NO: 38089 - DNA, 120 bp, Artificial Sequence
  ENSG00000055483_18 (sequence is synthesized)
ctccagcccagagcactcggccagcagcgactccaccaaggccccccagacccccaggagtggagcggcccatctctgcgattctcaggaaacgaactgttccaccgctggccactccaa

SEQ ID NO: 38090 - DNA, 120 bp, Artificial Sequence
  ENSG00000055483_19 (sequence is synthesized)
aacgccgccaagtggagcagattctaagacggtgaagctgaagtcccctgtcctgagcaacaccaccactgagcctgcaagcaccatgtctcctccaccagccaaaaaactggccctttc

SEQ ID NO: 38091 - DNA, 120 bp, Artificial Sequence
  ENSG00000055483_20 (sequence is synthesized)
tgccaagaaggccagcaccctgtggagggcgaccggcaatgacctccgtccacctcccccctcaccatcctccgacctcacccaccccatgaaaacctctcaccccgtcgttgcctccac

SEQ ID NO: 38092 - DNA, 120 bp, Artificial Sequence
  ENSG00000055483_21 (sequence is synthesized)
cccaccccacattgctgtccagtacccccaagcccccagggacgtcagaaccacggagctgctcctccatctcgacggcgctgcctcaggtcaacgaggaccttgtgtctcttccacacc

SEQ ID NO: 38093 - DNA, 120 bp, Artificial Sequence
  ENSG00000055483_22 (sequence is synthesized)
agttgccagaggccagtgagcccccccagagcccctctgagaagaggaaaaagacctttgtgggagagccgcagaggctgggctcagagacgcgcctcccacagcacatcagggaggcca

SEQ ID NO: 38094 - DNA, 120 bp, Artificial Sequence
  ENSG00000055483_23 (sequence is synthesized)
ctgcggctccccacgggaagaggaagaggaagaagaagaagcgcccggaggacacagctgccagcgccctgcaggaggggcagacacagagacagcctgggagccccatgtacaggaggg

SEQ ID NO: 38095 - DNA, 120 bp, Artificial Sequence
  ENSG00000055483_24 (sequence is synthesized)
agggccaggcacagctgcccgctgtcagacggcaggaagatggcacacagccacaggtgaatggccagcaggtgggatgtgttacggacggccaccacgcgagcagcaggaagcggagga

SEQ ID NO: 38096 - DNA, 120 bp, Artificial Sequence
  ENSG00000055483_25 (sequence is synthesized)
ggaaaggagcagaaggtcttggtgaagaaggcggcctgcaccaggacccacttcggcacagctgctctcccatgggtgatggtgatccagaggccatggaagagtctccaaggaaaaaga

SEQ ID NO: 38097 - DNA, 120 bp, Artificial Sequence
  ENSG00000055483_26 (sequence is synthesized)
aaaagaaaaaaagaaagcaggagacacagcgggcagtagaagaggatgggcatctcaaatgcccaaggagtgccaagccccaagatgctgttgtccccgagtccagcagctgcgcaccat

SEQ ID NO: 38098 - DNA, 120 bp, Artificial Sequence
  ENSG00000055483_27 (sequence is synthesized)
ccgcgaatggctggtgtcctggggaccgcatggggctgagccaggcccctcctgtgtcttggaatggagagcgggagtctgatgtggtccaggaactgctcaaatactcatctgataaag

SEQ ID NO: 38099 - DNA, 120 bp, Artificial Sequence
  ENSG00000055483_28 (sequence is synthesized)
cttacgggagaaaagttctgacctgggatggcaagatgtcggcggtcagtcaggatgctattgaagacagcagacaggcccggactgagaccgtggttgatgactgggacgaagagtttg

SEQ ID NO: 38100 - DNA, 120 bp, Artificial Sequence
  ENSG00000055483_29 (sequence is synthesized)
accgagggaaggaaaagaaaattaaaaaatttaagagagagaagaggagaaacttcaacgccttccagaaacttcagactcgacggaacttctggtctgtgactcacccagcaaaggctg

SEQ ID NO: 38101 - DNA, 120 bp, Artificial Sequence
  ENSG00000055483_30 (sequence is synthesized)
ccagcctcagctatcgccgctgactgtgcccctgtggaaggaggtcggttccgagggggtgggtgtaagggtgaggtgggggtgtgtgtgccgtgtatgtgtgtaggggtgtggtggggt

SEQ ID NO: 38102 - DNA, 120 bp, Artificial Sequence
  ENSG00000055483_31 (sequence is synthesized)
gtggcgtgtgtgtatgatgtatgtgggctgtgtatctggcacatgtgtgttgggtggtgtgtgtggtgtgggcgcgtctgtggtgtgtgtcctagtcacttggagaagggtgtgtgtggg

SEQ ID NO: 38103 - DNA, 120 bp, Artificial Sequence
  ENSG00000055483_32 (sequence is synthesized)
atgcgtgtgtataagggggtgtgtgtgggatgcgtgtgtataagggggtgtgtgtagtgtgtgttgggtgtggggtgtgtacacctggcatctgtggcatgtgttctggtcacttggaga

SEQ ID NO: 38104 - DNA, 120 bp, Artificial Sequence
  ENSG00000055483_33 (sequence is synthesized)
agggcatgtgtggggtgtgtgtgggatgtgggttgtgtgtatatctggcatgtgtcccagtcacttgcagaagggtgacttcttgccagccgcatcgagatgccatgcattgggttccta

SEQ ID NO: 38105 - DNA, 120 bp, Artificial Sequence
  ENSG00000055483_34 (sequence is synthesized)
ggttggactcatacccgagggtggcagtgggaagattcgggtctcgtttctctctgtcaggactaccgtggtttgttctgcagcctcctggagacaaggcgtcccttcccgggagctgtc

SEQ ID NO: 38106 - DNA, 120 bp, Artificial Sequence
  ENSG00000055483_35 (sequence is synthesized)
ggtctggatctgagggagctctctgtgtgggctctgctgcgctgggagcctgtcacggtaggagctctcccggtaccagtgtccacagaccgcccaacacagaggctttgaggcttctct

SEQ ID NO: 38107 - DNA, 120 bp, Artificial Sequence
  ENSG00000055483_36 (sequence is synthesized)
agatcggaacctctttggtgacattcccgaccagccctgcaagagaaacgacagtgtgtgtgtgagcagaggtggccgcacacctgctggacatctttgccaggctgtgccttctcatgt

SEQ ID NO: 38108 - DNA, 120 bp, Artificial Sequence
  ENSG00000055483_37 (sequence is synthesized)
ttcatagacagtggtctgtgctggcagaggctgctgcccctggttggggctatcaggagagtgggggatggtggccacatgtcccccaggtggtctcccggtgcatagctggtggctctg

SEQ ID NO: 38109 - DNA, 120 bp, Artificial Sequence
  ENSG00000055483_38 (sequence is synthesized)
ggcaagccatcccttgcttctcggggctgacgccaccgttgtgtccgagcccgccctcccctgcttcctcagcgggaccccttcatctgttggccttacctgtcctcagaaaggaagagg

SEQ ID NO: 38110 - DNA, 120 bp, Artificial Sequence
  ENSG00000055483_39 (sequence is synthesized)
tgaccccacccagccacctctcccttttatggaactcgagagggtggccctactgtgcaccccttccttgtgagtagctctcaactgtcctggagagcagaggctatttggggtcggagg

SEQ ID NO: 38111 - DNA, 120 bp, Artificial Sequence
  ENSG00000055483_40 (sequence is synthesized)
agccctcgatacctgcgaatacatctgctttccaggctgctgtttattctgagacgactgtgctgtagcttcccttgcagctgcaataacccgcaggtcttcactgaggtggaggctttg

SEQ ID NO: 38112 - DNA, 120 bp, Artificial Sequence
  ENSG00000055483_41 (sequence is synthesized)
gggtagaattctccatttattttactacttaatacaaaacatttatttttgaccagtcctgtggcttccattagcaatatgtttcctttcccaaatatgcaaatagtggctttgtttgct

SEQ ID NO: 38113 - DNA, 120 bp, Artificial Sequence
  ENSG00000055483_42 (sequence is synthesized)
caattttgtgagtgctttggaatttaaatgattgtataactcaagaagattacttttctatgttgctcaagctgtgcctgccaacttgtaacttaataaatacaggaaatcctcagagaa

SEQ ID NO: 38114 - DNA, 120 bp, Artificial Sequence
  ENSG00000055483_43 (sequence is synthesized)
gcgggaagggctggcgggcgcagccgggacgctcagggagaacgtgggcgcgggtccgcgcagggcttcggccgtccccgaggaggacccgggatgctccgcccgctcgcgagctcgctt

SEQ ID NO: 38115 - DNA, 120 bp, Artificial Sequence
  ENSG00000055483_44 (sequence is synthesized)
gcgagctcgcttctccagagcccgggtattcccgaggagggtccggggccgggctgtcctcgccggtctccgccgtcccccgggctccgggccggtgatgggggtcgccggggcccgctg

SEQ ID NO: 38116 - DNA, 120 bp, Artificial Sequence
  ENSG00000055483_45 (sequence is synthesized)
ctcatagtagtgggaagtgtgaaggtgaccgtgaacatccttcctcatcgggtctgtccccgtcatttcctcccggagtcgtcgcaggtggagatggacaacgtggtgttggacttagac

SEQ ID NO: 38117 - DNA, 120 bp, Artificial Sequence
  ENSG00000055483_46 (sequence is synthesized)
ctccttcagtgtggctctgctgggccagaggcatcctgctgtcccgggtggctgcctcgctgtctgcaccccctctccctggggcagctttgcttcctgcccctgtgctcggggcctggg

SEQ ID NO: 38118 - DNA, 120 bp, Artificial Sequence
  ENSG00000055483_47 (sequence is synthesized)
tggttactggcgtgtagatggaattgcttttttaatatgggaagatacatttatttttttccatgtgggtgggtgtctctttttggattttcttctgtttttacgtttctcttcttagaa

SEQ ID NO: 38119 - DNA, 120 bp, Artificial Sequence
  ENSG00000055483_48 (sequence is synthesized)
gggtgggagagaatcaagctcctgtggccacctgtgtcccagcagcagtgagtggagctgctcagggtgccctctcctgcggaccagtctctgaatgttcaaagatgagggcctggcttc

SEQ ID NO: 38120 - DNA, 120 bp, Artificial Sequence
  ENSG00000055483_49 (sequence is synthesized)
cgtgctctggctttgtaacttatctggaagggaaagcacatgccttcacgggcagggtatgttccttttcttctcggggtgttgacttgcattcctgtgtgaactgttccctctgccatg

SEQ ID NO: 38121 - DNA, 120 bp, Artificial Sequence
  ENSG00000055483_50 (sequence is synthesized)
tttaccgtgtgatgttctgtagttgaaaatgttagttgtctgctggcacagaatttatctcgttcctttctctcccttctctcctccaaatcagtctcttcccttctccactagataact

SEQ ID NO: 38122 - DNA, 120 bp, Artificial Sequence
  ENSG00000055483_51 (sequence is synthesized)
gtaaaaccttttcctggggtacatacattcgttaactcttgggcagtggtgagcacgagatgactttctgcagcgtttatcactgttgggtggagtcacgtcccttccctccaccgaagt

SEQ ID NO: 38123 - DNA, 120 bp, Artificial Sequence
  ENSG00000055483_52 (sequence is synthesized)
catcaaccagatagggaagggaaagatgaggcccagaaaacgagttcaaactctaggtcttgtacacgtatgtaagtaaatgtcaataacccaagcctttgtcatagcagtcacttggtt

SEQ ID NO: 38124 - DNA, 120 bp, Artificial Sequence
  ENSG00000055483_53 (sequence is synthesized)
gacttaggatctgggtctgttgaattttgtgcttgggaatggagctggagggagtggggcctgtgtacagcagctacctctcccaggtcctctcacttgcctgccccgcgtcctggttgc

SEQ ID NO: 38125 - DNA, 120 bp, Artificial Sequence
  ENSG00000055483_54 (sequence is synthesized)
atggccgcacctgtgtgtgtgcagaggtctgtgtcccatcctctgcacctcctttccgggggcctggggagccccacgtgttgccaagatcttggtgcaataaaatactccggttttgtg

SEQ ID NO: 38126 - DNA, 120 bp, Artificial Sequence
  ENSG00000055483_55 (sequence is synthesized)
gcggtacaccatcgacgccatgcagaaagcctgcctgaatggctgtgccaaaataaaaattgaatgatcctgtattggtcccccaagtatttcagagctcccggagtctgggaagtgcca

SEQ ID NO: 38127 - DNA, 120 bp, Artificial Sequence
  ENSG00000055483_56 (sequence is synthesized)
cagagcttggggctttctggctgctcttcattgacctgtgtgttcccagcacacgaacagtgcccctaacggagatttgttcagcgactgaatatacacctgtaaacgagtagcatgtat

SEQ ID NO: 38128 - DNA, 120 bp, Artificial Sequence
  ENSG00000055483_57 (sequence is synthesized)
acattgattttgattacaaatggttctgtattatataccaccgttctgactgcttttttcacttatagcttggaaattgtcttctgttggtaatacagaaatctgtttcagtcttttgaa

SEQ ID NO: 38129 - DNA, 120 bp, Artificial Sequence
  ENSG00000055483_58 (sequence is synthesized)
agcacatgccttcacgggcagggatttgacactgttgacctccgcaccctggagagctcctctaagatgtgagcctgttgcatttgctgcatactctagatcaagcccagaatcaactga

SEQ ID NO: 38130 - DNA, 120 bp, Artificial Sequence
  ENSG00000055483_59 (sequence is synthesized)
tccagtcaatacatcccactgaacagccgaccgatccaccctctgtcaggatctctactgtagacactgaaagaggtgccccctcagtataggatcctggcctcaaataatcttctcgcc

SEQ ID NO: 38131 - DNA, 120 bp, Artificial Sequence
  ENSG00000055483_60 (sequence is synthesized)
agcgcgggagggctgttgcaggggtgggcaaagtccctcgagtccccgttctggggcgggggcgcgcgccactgtcacacttcaggcgtccgccacgccgccaggtgtgctcggccgacc

SEQ ID NO: 38132 - DNA, 120 bp, Artificial Sequence
  ENSG00000055483_61 (sequence is synthesized)
cggaagtagcggcacctctagtgcgctgcggagacgtcaccctgccgcggcacaggggcgggagcgcctgtggctctgcgcacttgcgtcatcacgctctgacgcccgctctgcggcttc

SEQ ID NO: 38133 - DNA, 120 bp, Artificial Sequence
  ENSG00000055483_62 (sequence is synthesized)
gtggcagcagaacattcctatggcaacagccagcccggcacctttctacccaggctgcccttgggtagacgtggcagaatttgcctctgggtactcaaactgttggagcccaaatagggg

SEQ ID NO: 38134 - DNA, 120 bp, Artificial Sequence
  ENSG00000055483_63 (sequence is synthesized)
attgcccttgcttcctgggaaagggctgtctccggagacgtcctgctggtccggggcggcttggtaggatcgggtggctgtggtggcggcagctgtgtctgagcagctcagtcaggggga

SEQ ID NO: 38135 - DNA, 120 bp, Artificial Sequence
  ENSG00000055483_64 (sequence is synthesized)
aatatgttagcagaccttcttaggggcattcagttcttaccatggactttttcagtctcttaaaaatcatgtcgtttttgaaaagaggttggggtggtaggaatgaggtctctgcagtat

SEQ ID NO: 38136 - DNA, 120 bp, Artificial Sequence
  ENSG00000055483_65 (sequence is synthesized)
aatttatatgtacatgtatatgtacaaacagggagctttaacatgaggaggtttataactttaggatctgactgtgcctggctgctgtttcttattcacacgccacgtaagcccttatat

SEQ ID NO: 38137 - DNA, 120 bp, Artificial Sequence
  ENSG00000055483_66 (sequence is synthesized)
gtgatggttgccatcacaaattgtctttgtgtcattcctgagttcataggttcagaccaaagaaaacaggcaggaaatgcttaggacttccttgtattgcctcagcttaggatcgtagaa

SEQ ID NO: 38138 - DNA, 120 bp, Artificial Sequence
  ENSG00000055483_67 (sequence is synthesized)
atactttaaatagtttagggaatatacctagaatgttctttagagaagttgagttgtggcaataagtgattgaaatggcaaaactactggcctcagtggatgatattcttacgtaaataa

SEQ ID NO: 38139 - DNA, 120 bp, Artificial Sequence
  ENSG00000055483_68 (sequence is synthesized)
gcagggaggaggcagctcttccctctgctctccctcagcaggagagtaccgcacgtggtggtcagcagtccaggcagggagggccctgtgagtgcaaagatattgacatccatctttgtg

SEQ ID NO: 38140 - DNA, 120 bp, Artificial Sequence
  ENSG00000055483_69 (sequence is synthesized)
aacttcagtggtgaaagagagctctctgttcggacaccaggatgcttcaggggctagtgggaatctcatctttggccaaagccctgctgagagtctgcctccctgctgggtctcggtctt

SEQ ID NO: 38141 - DNA, 120 bp, Artificial Sequence
  ENSG00000055483_70 (sequence is synthesized)
aggcatgcttaatgtgattttgagaggagcagaaggtcgaaatctcattgatgaagattccactattacagagcagttgttgctgttattaacttagcgttaagacaacatttttcagag

SEQ ID NO: 38142 - DNA, 120 bp, Artificial Sequence
  ENSG00000055483_71 (sequence is synthesized)
ctaattccgaagagccatttcctcggcagccccaggctttggccgatcgctcccagatccctccctccccaaactgcaggtgctccgcgtgtgggagtcacggatggccccagagcccgg

SEQ ID NO: 38143 - DNA, 120 bp, Artificial Sequence
  ENSG00000055609_0 (sequence is synthesized)
ggtgcgcgcgcccgcgccgatgtgtgtgagtgcgtgtcctgctcgctccatgttgccgcctctcccggtacctgctgctgctcccggggctgcgggaaatgcgagaggctgagccgggga

SEQ ID NO: 38144 - DNA, 120 bp, Artificial Sequence
  ENSG00000055609_1 (sequence is synthesized)
ggaggaacccgagcagcagcggcggcggcggcggccgcggcggcgggagccccccaggaggaggaccgggatccatgtgtctttcctggtgactaggatgtcgtcggaggaggacaagag

SEQ ID NO: 38145 - DNA, 120 bp, Artificial Sequence
  ENSG00000055609_2 (sequence is synthesized)
cgtggagcagccgcagccgccgccaccaccccccgaggagcctggagccccggccccgagccccgcagccgcagacaaaagacctcggggccggcctcgcaaagatggcgcttccccttt

SEQ ID NO: 38146 - DNA, 120 bp, Artificial Sequence
  ENSG00000055609_3 (sequence is synthesized)
ccagagagccagaaagaaacctcgaagtagggggaaaactgcagtggaagatgaggacagcatggatgggctggagacaacagaaacagaaacgattgtggaaacagaaatcaaagaaca

SEQ ID NO: 38147 - DNA, 120 bp, Artificial Sequence
  ENSG00000055609_4 (sequence is synthesized)
atctgcagaagaggatgctgaagcagaagtggataacagcaaacagctaattccaactcttcagcgatctgtgtctgaggaatcggcaaactccctggtctctgttggtgtagaagccaa

SEQ ID NO: 38148 - DNA, 120 bp, Artificial Sequence
  ENSG00000055609_5 (sequence is synthesized)
aatcagtgaacagctctgcgctttttgttactgtggggaaaaaagttccttaggacaaggagacttaaaacaattcagaataacgcctggatttatcttgccatggagaaaccaaccttc

SEQ ID NO: 38149 - DNA, 120 bp, Artificial Sequence
  ENSG00000055609_6 (sequence is synthesized)
taacaagaaggacattgatgacaacagcaatggaacctatgagaaaatgcaaaactcagcaccacgaaaacaaagaggacagagaaaagaacgatctcctcagcagaatatagtatcttg

SEQ ID NO: 38150 - DNA, 120 bp, Artificial Sequence
  ENSG00000055609_7 (sequence is synthesized)
tgtaagtgtaagcacccagacagcttcagatgatcaagctggtaaactgtgggatgaactcagtctggttgggcttccagatgccattgatatccaagccttatttgattctacaggcac

SEQ ID NO: 38151 - DNA, 120 bp, Artificial Sequence
  ENSG00000055609_8 (sequence is synthesized)
ttgttgggctcatcaccgttgtgtggagtggtcactaggagtatgccagatggaagaaccattgttagtgaacgtggacaaagctgttgtctcagggagcacagaacgatgtgcattttg

SEQ ID NO: 38152 - DNA, 120 bp, Artificial Sequence
  ENSG00000055609_9 (sequence is synthesized)
taagcaccttggagccactatcaaatgctgtgaagagaaatgtacccagatgtatcattatccttgtgctgcaggagccggcacctttcaggatttcagtcacatcttcctgctttgtcc

SEQ ID NO: 38153 - DNA, 120 bp, Artificial Sequence
  ENSG00000055609_10 (sequence is synthesized)
agaacacattgaccaagctcctgaaagatcgaaggaagatgcaaactgtgcagtgtgcgacagcccgggagacctcttagatcagttcttttgtactacttgtggtcagcactatcatgg

SEQ ID NO: 38154 - DNA, 120 bp, Artificial Sequence
  ENSG00000055609_11 (sequence is synthesized)
aatgtgcctggatatagcggttactccattaaaacgtgcaggttggcaatgtcctgagtgcaaagtgtgccagaactgcaaacaatcgggagaagatagcaagatgctagtgtgtgatac

SEQ ID NO: 38155 - DNA, 120 bp, Artificial Sequence
  ENSG00000055609_12 (sequence is synthesized)
gtgtgacaaagggtatcatactttttgtcttcaaccagttatgaaatcagtaccaaccaatggctggaaatgcaaaaattgcagaatatgtatagagtgtggcacacggtctagttctca

SEQ ID NO: 38156 - DNA, 120 bp, Artificial Sequence
  ENSG00000055609_13 (sequence is synthesized)
gtggcaccacaattgcctgatatgtgacaattgttaccaacagcaggataacttatgtcccttctgtgggaagtgttatcatccagaattgcagaaagacatgcttcattgtaatatgtg

SEQ ID NO: 38157 - DNA, 120 bp, Artificial Sequence
  ENSG00000055609_14 (sequence is synthesized)
caaaaggtgggttcacctagagtgtgacaaaccaacagatcatgaactggatactcagctcaaagaagagtatatctgcatgtattgtaaacacctgggagctgagatggatcgtttaca

SEQ ID NO: 38158 - DNA, 120 bp, Artificial Sequence
  ENSG00000055609_15 (sequence is synthesized)
gccaggtgaggaagtggagatagctgagctcactacagattataacaatgaaatggaagttgaaggccctgaagatcaaatggtattctcagagcaggcagctaataaagatgtcaacgg

SEQ ID NO: 38159 - DNA, 120 bp, Artificial Sequence
  ENSG00000055609_16 (sequence is synthesized)
tcaggagtccactcctggaattgttccagatgcggttcaagtccacactgaagagcaacagaagagtcatccctcagaaagtcttgacacagatagtcttcttattgctgtatcatccca

SEQ ID NO: 38160 - DNA, 120 bp, Artificial Sequence
  ENSG00000055609_17 (sequence is synthesized)
acatacagtgaatactgaattggaaaaacagatttctaatgaagttgatagtgaagacctgaaaatgtcttctgaagtgaagcatatttgtggcgaagatcaaattgaagataaaatgga

SEQ ID NO: 38161 - DNA, 120 bp, Artificial Sequence
  ENSG00000055609_18 (sequence is synthesized)
agtgacagaaaacattgaagtcgttacacaccagatcactgtgcagcaagaacaactgcagttgttagaggaacctgaaacagtggtatccagagaagaatcaaggcctccaaaattagt

SEQ ID NO: 38162 - DNA, 120 bp, Artificial Sequence
  ENSG00000055609_19 (sequence is synthesized)
catggaatctgtcactcttccactagaaaccttagtgtccccacatgaggaaagtatttcattatgtcctgaggaacagttggttatagaaaggctacaaggagaaaaggaacagaaaga

SEQ ID NO: 38163 - DNA, 120 bp, Artificial Sequence
  ENSG00000055609_20 (sequence is synthesized)
aaattctgaactttctactggattgatggactctgaaatgactcctacaattgagggttgtgtgaaagatgtttcataccaaggaggcaaatctataaagttatcatctgagacagagtc

SEQ ID NO: 38164 - DNA, 120 bp, Artificial Sequence
  ENSG00000055609_21 (sequence is synthesized)
atcattttcatcatcagcagacataagcaaggcagatgtgtcttcctccccaacaccttcttcagacttgccttcgcatgacatgctgcataattacccttcagctcttagttcctctgc

SEQ ID NO: 38165 - DNA, 120 bp, Artificial Sequence
  ENSG00000055609_22 (sequence is synthesized)
tggaaacatcatgccaacaacttacatctcagtcactccaaaaattggcatgggtaaaccagctattactaagagaaaattttctcctggtagacctcggtccaaacagggggcttggag

SEQ ID NO: 38166 - DNA, 120 bp, Artificial Sequence
  ENSG00000055609_23 (sequence is synthesized)
tacccataatacagtgagcccaccttcctggtccccagacatttcagaaggtcgggaaatttttaaacccaggcagcttcctggcagtgccatttggagcatcaaagtgggccgtgggtc

SEQ ID NO: 38167 - DNA, 120 bp, Artificial Sequence
  ENSG00000055609_24 (sequence is synthesized)
tggatttccaggaaagcggagacctcgaggtgcaggactgtcggggcgaggtggccgaggcaggtcaaagctgaaaagtggaatcggagctgttgtattacctggggtgtctactgcaga

SEQ ID NO: 38168 - DNA, 120 bp, Artificial Sequence
  ENSG00000055609_25 (sequence is synthesized)
tatttcatcaaataaggatgatgaagaaaactctatgcacaatacagttgtgttgttttctagcagtgacaagttcactttgaatcaggatatgtgtgtagtttgtggcagttttggcca

SEQ ID NO: 38169 - DNA, 120 bp, Artificial Sequence
  ENSG00000055609_26 (sequence is synthesized)
aggagcagaaggaagattacttgcctgttctcagtgtggtcagtgttaccatccatactgtgtcagtattaagatcactaaagtggttcttagcaaaggttggaggtgtcttgagtgcac

SEQ ID NO: 38170 - DNA, 120 bp, Artificial Sequence
  ENSG00000055609_27 (sequence is synthesized)
tgtgtgtgaggcctgtgggaaggcaactgacccaggaagactcctgctgtgtgatgactgtgacataagttatcacacctactgcctagaccctccattgcagacagttcccaaaggagg

SEQ ID NO: 38171 - DNA, 120 bp, Artificial Sequence
  ENSG00000055609_28 (sequence is synthesized)
ctggaagtgcaaatggtgtgtttggtgcagacactgtggagcaacatctgcaggtctaagatgtgaatggcagaacaattacacacagtgcgctccttgtgcaagcttatcttcctgtcc

SEQ ID NO: 38172 - DNA, 120 bp, Artificial Sequence
  ENSG00000055609_29 (sequence is synthesized)
agtctgctatcgaaactatagagaagaagatcttattctgcaatgtagacaatgtgatagatggatgcatgcagtttgtcagaacttaaatactgaggaagaagtggaaaatgtagcaga

SEQ ID NO: 38173 - DNA, 120 bp, Artificial Sequence
  ENSG00000055609_30 (sequence is synthesized)
cattggttttgattgtagcatgtgcagaccctatatgcctgcgtctaatgtgccttcctcagactgctgtgaatcttcacttgtagcacaaattgtcacaaaagtaaaagagctagaccc

SEQ ID NO: 38174 - DNA, 120 bp, Artificial Sequence
  ENSG00000055609_31 (sequence is synthesized)
acccaagacttatacccaggatggtgtgtgtttgactgaatcagggatgactcagttacagagcctcacagttacagttccaagaagaaaacggtcaaaaccaaaattgaaattgaagat

SEQ ID NO: 38175 - DNA, 120 bp, Artificial Sequence
  ENSG00000055609_32 (sequence is synthesized)
tataaatcagaatagcgtggccgtccttcagacccctccagacatccaatcagagcattcaagggatggtgaaatggatgatagtcgagaaggagaacttatggattgtgatggaaaatc

SEQ ID NO: 38176 - DNA, 120 bp, Artificial Sequence
  ENSG00000055609_33 (sequence is synthesized)
agaatctagtcctgagcgggaagctgtggatgatgaaactaagggagtggaaggaacagatggtgtcaaaaagagaaaaaggaaaccatacagaccaggtattggtggatttatggtgcg

SEQ ID NO: 38177 - DNA, 120 bp, Artificial Sequence
  ENSG00000055609_34 (sequence is synthesized)
gcaaagaagtcgaactgggcaagggaaaaccaaaagatctgtgatcagaaaagattcctcaggctctatttccgagcagttaccttgcagagatgatggctggagtgagcagttaccaga

SEQ ID NO: 38178 - DNA, 120 bp, Artificial Sequence
  ENSG00000055609_35 (sequence is synthesized)
tactttagttgatgaatctgtttctgttactgaaagcactgaaaaaataaagaagagataccgaaaaaggaaaaataagcttgaagaaactttccctgcctatttacaagaagctttctt

SEQ ID NO: 38179 - DNA, 120 bp, Artificial Sequence
  ENSG00000055609_36 (sequence is synthesized)
tggaaaagatcttctagatacaagtagacaaagcaagataagtttagataatctgtcagaagatggagctcagcttttatataaaacaaacatgaacacaggtttcttggatccttcctt

SEQ ID NO: 38180 - DNA, 120 bp, Artificial Sequence
  ENSG00000055609_37 (sequence is synthesized)
agatccactacttagttcatcctcggctccaacaaaatctggaactcacggtcctgctgatgacccattagctgatatttctgaagttttaaacacagatgatgacattcttggaataat

SEQ ID NO: 38181 - DNA, 120 bp, Artificial Sequence
  ENSG00000055609_38 (sequence is synthesized)
ttcagatgatctagcaaaatcagttgatcattcagatattggtcctgtcactgatgatccttcctctttgcctcagccaaatgtcaatcagagttcacgaccattaagtgaagaacagct

SEQ ID NO: 38182 - DNA, 120 bp, Artificial Sequence
  ENSG00000055609_39 (sequence is synthesized)
agatgggatcctcagtcctgaactagacaaaatggtcacagatggagcaattcttggaaaattatataaaattccagagcttggcggaaaagatgttgaagacttatttacagctgtact

SEQ ID NO: 38183 - DNA, 120 bp, Artificial Sequence
  ENSG00000055609_40 (sequence is synthesized)
tagtcctgcgaacactcagccaactccattgccacagcctcccccaccaacacagctgttgccaatacacaatcaggatgctttttcacggatgcctctcatgaatggccttattggatc

SEQ ID NO: 38184 - DNA, 120 bp, Artificial Sequence
  ENSG00000055609_41 (sequence is synthesized)
cagtcctcatctcccacataattctttgccacctggaagcggactgggaactttctctgcaattgcacaatcctcttatcctgatgccagggataaaaattcagcctttaatccaatggc

SEQ ID NO: 38185 - DNA, 120 bp, Artificial Sequence
  ENSG00000055609_42 (sequence is synthesized)
aagtgatcctaacaactcttggacatcatcagctcccactgtggaaggagaaaatgacacaatgtcgaatgcccagagaagcacgcttaagtgggagaaagaggaggctctgggtgaaat

SEQ ID NO: 38186 - DNA, 120 bp, Artificial Sequence
  ENSG00000055609_43 (sequence is synthesized)
ggcaactgttgccccagttctctacaccaatattaatttccccaacttaaaggaagaattccctgattggactactagagtgaagcaaattgccaaattgtggagaaaagcaagctcaca

SEQ ID NO: 38187 - DNA, 120 bp, Artificial Sequence
  ENSG00000055609_44 (sequence is synthesized)
agaaagagcaccatatgtgcaaaaagccagagataacagagctgctttacgcattaataaagtacagatgtcaaatgattccatgaaaaggcagcaacagcaagatagcattgatcccag

SEQ ID NO: 38188 - DNA, 120 bp, Artificial Sequence
  ENSG00000055609_45 (sequence is synthesized)
ctctcgtattgattcggagctttttaaagatcctttaaagcaaagagaatcagaacatgaacaggaatggaaatttagacagcaaatgcgtcagaaaagtaagcagcaagctaaaattga

SEQ ID NO: 38189 - DNA, 120 bp, Artificial Sequence
  ENSG00000055609_46 (sequence is synthesized)
agccacacagaaacttgaacaggtgaaaaatgagcagcagcagcagcaacaacagcaatttggttctcagcatcttctggtgcagtctggttcagatacaccaagtagtgggatacagag

SEQ ID NO: 38190 - DNA, 120 bp, Artificial Sequence
  ENSG00000055609_47 (sequence is synthesized)
tcccttgacacctcagcctggcaatggaaatatgtctcctgcacagtcattccataaagaactgtttacaaaacagccacccagtacccctacgtctacatcttcagatgatgtgtttgt

SEQ ID NO: 38191 - DNA, 120 bp, Artificial Sequence
  ENSG00000055609_48 (sequence is synthesized)
aaagccacaagctccacctcctcctccagccccatcccggattcccatccaggatagtctttctcaggctcagacttctcagccaccctcaccgcaagtgttttcacctgggtcctctaa

SEQ ID NO: 38192 - DNA, 120 bp, Artificial Sequence
  ENSG00000055609_49 (sequence is synthesized)
ctcacgaccaccatctccaatggatccatatgcaaaaatggttggtacccctcgaccacctcctgtgggccatagtttttccagaagaaattctgctgcaccagtggaaaactgtacacc

SEQ ID NO: 38193 - DNA, 120 bp, Artificial Sequence
  ENSG00000055609_50 (sequence is synthesized)
tttatcatcggtatctaggccccttcaaatgaatgagacaacagcaaataggccatcccctgtcagagatttatgttcttcttccacgacaaataatgacccctatgcaaaacctccaga

SEQ ID NO: 38194 - DNA, 120 bp, Artificial Sequence
  ENSG00000055609_51 (sequence is synthesized)
cacacctaggcctgtgatgacagatcaatttcccaaatccttgggcctatcccggtctcctgtagtttcagaacaaactgcaaaaggccctatagcagctggaaccagtgatcactttac

SEQ ID NO: 38195 - DNA, 120 bp, Artificial Sequence
  ENSG00000055609_52 (sequence is synthesized)
taaaccatctcctagggcagatgtgtttcaaagacaaaggatacctgactcatatgcacgacccttgttgacacctgcacctcttgatagtggtcctggaccttttaagactccaatgca

SEQ ID NO: 38196 - DNA, 120 bp, Artificial Sequence
  ENSG00000055609_53 (sequence is synthesized)
acctcctccatcctctcaggatccttatggatcagtgtcacaggcatcaaggcgattgtctgttgacccttatgaaaggcctgctttgacaccaagacctatagataatttttctcataa

SEQ ID NO: 38197 - DNA, 120 bp, Artificial Sequence
  ENSG00000055609_54 (sequence is synthesized)
tcagtcaaatgatccatatagtcagcctccccttaccccacatccagcagtgaatgaatcttttgcccatccttcaagggctttttcccagcctggaaccatatcaaggccaacatctca

SEQ ID NO: 38198 - DNA, 120 bp, Artificial Sequence
  ENSG00000055609_55 (sequence is synthesized)
ggacccatactcccaacccccaggaactccacgacctgttgtagattcttattcccaatcttcaggaacagctaggtccaatacagacccttactctcaacctcctggaactccccggcc

SEQ ID NO: 38199 - DNA, 120 bp, Artificial Sequence
  ENSG00000055609_56 (sequence is synthesized)
tactactgttgacccatatagtcagcagccccaaaccccaagaccatctacacaaactgacttgtttgttacacctgtaacaaatcagaggcattctgatccatatgctcatcctcctgg

SEQ ID NO: 38200 - DNA, 120 bp, Artificial Sequence
  ENSG00000055609_57 (sequence is synthesized)
aacaccaagacctggaatttctgtcccttactctcagccaccagcaacaccaaggccaaggatttcagagggttttactaggtcctcaatgacaagaccagtcctcatgccaaatcagga

SEQ ID NO: 38201 - DNA, 120 bp, Artificial Sequence
  ENSG00000055609_58 (sequence is synthesized)
tcctttcctgcaagcagcacaaaaccgaggaccagctttacctggcccgttggtaaggccacctgatacatgttcccagacacctaggccccctggacctggtctttcagacacatttag

SEQ ID NO: 38202 - DNA, 120 bp, Artificial Sequence
  ENSG00000055609_59 (sequence is synthesized)
ccgtgtttccccatctgctgcccgtgatccctatgatcagtctccaatgactccaagatctcagtctgactcttttggaacaagtcaaactgcccatgatgttgctgatcagccaaggcc

SEQ ID NO: 38203 - DNA, 120 bp, Artificial Sequence
  ENSG00000055609_60 (sequence is synthesized)
tggatcagaggggagcttctgtgcatcttcaaactctccaatgcactcccaaggccagcagttctctggtgtctcccaacttcctggacctgtgccaacttcaggagtaactgatacaca

SEQ ID NO: 38204 - DNA, 120 bp, Artificial Sequence
  ENSG00000055609_61 (sequence is synthesized)
gaatactgtaaatatggcccaagcagatacagagaaattgagacagcggcagaagttacgtgaaatcattctccagcagcaacagcagaagaagattgcaggtcgacaggagaaggggtc

SEQ ID NO: 38205 - DNA, 120 bp, Artificial Sequence
  ENSG00000055609_62 (sequence is synthesized)
acaggactcacccgcagtgcctcatccagggcctcttcaacactggcaaccagagaatgttaaccaggctttcaccagacccccacctccctatcctgggaacattaggtctcctgttgc

SEQ ID NO: 38206 - DNA, 120 bp, Artificial Sequence
  ENSG00000055609_63 (sequence is synthesized)
ccctcctttaggacctagatatgctgttttcccaaaagatcagcgtggaccctatcctcctgatgttgctagtatggggatgagacctcatggatttagatttggatttccaggaggtag

SEQ ID NO: 38207 - DNA, 120 bp, Artificial Sequence
  ENSG00000055609_64 (sequence is synthesized)
tcatggtaccatgccgagtcaagagcgcttccttgtgcctcctcagcaaatacagggatctggagtttctccacagctaagaagatcagtatctgtagatatgcctaggcctttaaataa

SEQ ID NO: 38208 - DNA, 120 bp, Artificial Sequence
  ENSG00000055609_65 (sequence is synthesized)
ctcacaaatgaataatccagttggacttcctcagcatttttcaccacagagcttgccagttcagcagcacaacatactgggccaagcatatattgaactgagacatagggctcctgacgg

SEQ ID NO: 38209 - DNA, 120 bp, Artificial Sequence
  ENSG00000055609_66 (sequence is synthesized)
aaggcaacggctgcctttcagtgctccacctggcagcgttgtagaggcatcttctaatctgagacatggaaacttcattccccggccagactttccgggccctagacacacagaccccat

SEQ ID NO: 38210 - DNA, 120 bp, Artificial Sequence
  ENSG00000055609_67 (sequence is synthesized)
gcgacgacctccccagggtctacctaatcagctacctgtgcacccagatttggaacaagtgccaccatctcaacaagagcaaggtcattctgtccattcatcttctatggtcatgaggac

SEQ ID NO: 38211 - DNA, 120 bp, Artificial Sequence
  ENSG00000055609_68 (sequence is synthesized)
tctgaaccatccactaggtggtgaattttcagaagctcctttgtcaacatctgtaccgtctgaaacaacgtctgataatttacagataaccacccagccttctgatggtctagaggaaaa

SEQ ID NO: 38212 - DNA, 120 bp, Artificial Sequence
  ENSG00000055609_69 (sequence is synthesized)
acttgattctgatgacccttctgtgaaggaactggatgttaaagaccttgagggggttgaagtcaaagacttagatgatgaagatcttgaaaacttaaatttagatacagaggatggcaa

SEQ ID NO: 38213 - DNA, 120 bp, Artificial Sequence
  ENSG00000055609_70 (sequence is synthesized)
cttaaggtcaggagagtttgatatcattgcatatacagatccagaacttgacatgggagataagaaaagcatgtttaatgaggaactagaccttccaattgatgataagttagataatca

SEQ ID NO: 38214 - DNA, 120 bp, Artificial Sequence
  ENSG00000055609_71 (sequence is synthesized)
gtgtgtatctgttgaaccaaaaaaaaaggaacaagaaaacaaaactctggttctctctgataaacattcaccacagaaaaaatccactgttaccaatgaggtaaaaacggaagtactgtc

SEQ ID NO: 38215 - DNA, 120 bp, Artificial Sequence
  ENSG00000055609_72 (sequence is synthesized)
tccaaattctaaggtggaatccaaatgtgaaactgaaaaaaatgatgagaataaagataatgttgacactccttgctcacaggcttctgctcactcagacctaaatgatggagaaaagac

SEQ ID NO: 38216 - DNA, 120 bp, Artificial Sequence
  ENSG00000055609_73 (sequence is synthesized)
ttctttgcatccttgtgatccagatctatttgagaaaagaaccaatcgagaaactgctggccccagtgcaaatgtcattcaggcatccactcaactacctgctcaagatgtaataaactc

SEQ ID NO: 38217 - DNA, 120 bp, Artificial Sequence
  ENSG00000055609_74 (sequence is synthesized)
ttgtggcataactggatcaactccagttctctcaagtttacttgctaatgagaaatctgataattcagacattaggccatcggggtctccaccaccaccaactctgccggcctccccatc

SEQ ID NO: 38218 - DNA, 120 bp, Artificial Sequence
  ENSG00000055609_75 (sequence is synthesized)
caatcatgtgtcaagtttgcctcctttcatagcaccgcctggccgtgttttggataatgccatgaattctaatgtgacagtagtctctagggtaaaccatgttttttctcagggtgtgca

SEQ ID NO: 38219 - DNA, 120 bp, Artificial Sequence
  ENSG00000055609_76 (sequence is synthesized)
ggtaaacccagggctcattccaggtcaatcaacagttaaccacagtctggggacaggaaaacctgcaactcaaactgggcctcaaacaagtcagtctggtaccagtagcatgtctggacc

SEQ ID NO: 38220 - DNA, 120 bp, Artificial Sequence
  ENSG00000055609_77 (sequence is synthesized)
ccaacagctaatgattcctcaaacattagcacagcagaatagagagaggccccttcttctagaagaacagcctctacttctacaggatcttttggatcaagaaaggcaagaacagcagca

SEQ ID NO: 38221 - DNA, 120 bp, Artificial Sequence
  ENSG00000055609_78 (sequence is synthesized)
gcaaagacagatgcaagccatgattcgtcagcgatcagaaccgttcttccctaatattgattttgatgcaattacagatcctataatgaaagccaaaatggtggcccttaaaggtataaa

SEQ ID NO: 38222 - DNA, 120 bp, Artificial Sequence
  ENSG00000055609_79 (sequence is synthesized)
taaagtgatggcacaaaacaatctgggcatgccaccaatggtgatgagcaggttcccttttatgggccaggtggtaactggaacacagaacagtgaaggacagaaccttggaccacaggc

SEQ ID NO: 38223 - DNA, 120 bp, Artificial Sequence
  ENSG00000055609_80 (sequence is synthesized)
cattcctcaggatggcagtataacacatcagatttctaggcctaatcctccaaattttggtccaggctttgtcaatgattcacagcgtaagcagtatgaagagtggctccaggagaccca

SEQ ID NO: 38224 - DNA, 120 bp, Artificial Sequence
  ENSG00000055609_81 (sequence is synthesized)
acagctgcttcaaatgcagcagaagtatcttgaagaacaaattggtgctcacagaaaatctaagaaggccctttcagctaaacaacgtactgccaagaaagctgggcgtgaatttccaga

SEQ ID NO: 38225 - DNA, 120 bp, Artificial Sequence
  ENSG00000055609_82 (sequence is synthesized)
ggaagatgcagaacaactcaagcatgttactgaacagcaaagcatggttcagaaacagctagaacagattcgtaaacaacagaaagaacatgctgaattgattgaagattatcggatcaa

SEQ ID NO: 38226 - DNA, 120 bp, Artificial Sequence
  ENSG00000055609_83 (sequence is synthesized)
acagcagcagcaatgtgcaatggccccacctaccatgatgcccagtgtccagccccagccacccctaattccaggtgccactccacccaccatgagccaacccacctttcccatggtgcc

SEQ ID NO: 38227 - DNA, 120 bp, Artificial Sequence
  ENSG00000055609_84 (sequence is synthesized)
acagcagcttcagcaccagcagcacacaacagttatttctggccatactagccctgttagaatgcccagtttacctggatggcaacccaacagtgctcctgcccacctgcccctcaatcc

SEQ ID NO: 38228 - DNA, 120 bp, Artificial Sequence
  ENSG00000055609_85 (sequence is synthesized)
tcctagaattcagcccccaattgcccagttaccaataaaaacttgtacaccagccccagggacagtctcaaatgcaaatccacagagtggaccaccacctcgggtagaatttgatgacaa

SEQ ID NO: 38229 - DNA, 120 bp, Artificial Sequence
  ENSG00000055609_86 (sequence is synthesized)
caatccctttagtgaaagttttcaagaacgggaacgtaaggaacgtttacgagaacagcaagagagacaacggatccaactcatgcaggaggtagatagacaaagagctttgcagcagag

SEQ ID NO: 38230 - DNA, 120 bp, Artificial Sequence
  ENSG00000055609_87 (sequence is synthesized)
gatggaaatggagcagcatggtatggtgggctctgagataagtagtagtaggacatctgtgtcccagattcccttctacagttccgacttaccttgtgattttatgcaacctctaggacc

SEQ ID NO: 38231 - DNA, 120 bp, Artificial Sequence
  ENSG00000055609_88 (sequence is synthesized)
ccttcagcagtctccacaacaccaacagcaaatggggcaggttttacagcagcagaatatacaacaaggatcaattaattcaccctccacccaaactttcatgcagactaatgagcgaag

SEQ ID NO: 38232 - DNA, 120 bp, Artificial Sequence
  ENSG00000055609_89 (sequence is synthesized)
gcaggtaggccctccttcatttgttcctgattcaccatcaatccctgttggaagcccaaatttttcttctgtgaagcagggacatggaaatctttctgggaccagcttccagcagtcccc

SEQ ID NO: 38233 - DNA, 120 bp, Artificial Sequence
  ENSG00000055609_90 (sequence is synthesized)
agtgaggccttcttttacacctgctttaccagcagcacctccagtagctaatagcagtctcccatgtggccaagattctactataacccatggacacagttatccgggatcaacccaatc

SEQ ID NO: 38234 - DNA, 120 bp, Artificial Sequence
  ENSG00000055609_91 (sequence is synthesized)
gctcattcagttgtattctgatataatcccagaggaaaaagggaaaaagaaaagaacaagaaagaagaaaagagatgatgatgcagaatccaccaaggctccatcaactccccattcaga

SEQ ID NO: 38235 - DNA, 120 bp, Artificial Sequence
  ENSG00000055609_92 (sequence is synthesized)
tataactgccccaccgactccaggcatctcagaaactacctctactcctgcagtgagcacacccagtgagcttcctcaacaagccgaccaagagtcggtggaaccagtcggcccatccac

SEQ ID NO: 38236 - DNA, 120 bp, Artificial Sequence
  ENSG00000055609_93 (sequence is synthesized)
tcccaatatggcagcaggccagctatgtacagaattagagaacaaactgcccaatagtgatttctcacaagcaactccaaatcaacagacgtatgcaaattcagaagtagacaagctctc

SEQ ID NO: 38237 - DNA, 120 bp, Artificial Sequence
  ENSG00000055609_94 (sequence is synthesized)
catggaaacccctgccaaaacagaagagataaaactggaaaaggctgagacagagtcctgcccaggccaagaggagcctaaattggaggaacagaatggtagtaaggtagaaggaaacgc

SEQ ID NO: 38238 - DNA, 120 bp, Artificial Sequence
  ENSG00000055609_95 (sequence is synthesized)
tgtagcctgtcctgtctcctcagcacagagtcctccccattctgctggggcccctgctgccaaaggagactcagggaatgaacttctgaaacacttgttgaaaaataaaaagtcatcttc

SEQ ID NO: 38239 - DNA, 120 bp, Artificial Sequence
  ENSG00000055609_96 (sequence is synthesized)
tcttttgaatcaaaaacctgagggcagtatttgttcagaagatgactgtacaaaggataataaactagttgagaagcagaacccagctgaaggactgcaaactttgggggctcaaatgca

SEQ ID NO: 38240 - DNA, 120 bp, Artificial Sequence
  ENSG00000055609_97 (sequence is synthesized)
aggtggttttggatgtggcaaccagttgccaaaaacagatggaggaagtgaaaccaagaaacagcgaagcaaacggactcagaggacgggtgagaaagcagcacctcgctcaaagaaaag

SEQ ID NO: 38241 - DNA, 120 bp, Artificial Sequence
  ENSG00000055609_98 (sequence is synthesized)
gaaaaaggacgaagaggagaaacaagctatgtactctagcactgacacgtttacccacttgaaacagcagaataatttaagtaatcctccaacaccccctgcctctcttcctcctacacc

SEQ ID NO: 38242 - DNA, 120 bp, Artificial Sequence
  ENSG00000055609_99 (sequence is synthesized)
acctcctatggcttgtcagaagatggccaatggttttgcaacaactgaagaacttgctggaaaagccggagtgttagtgagccatgaagttaccaaaactctaggacctaaaccatttca

SEQ ID NO: 38243 - DNA, 120 bp, Artificial Sequence
  ENSG00000055609_100 (sequence is synthesized)
gctgcccttcagaccccaggacgacttgttggcccgagctcttgctcagggccccaagacagttgatgtgccagcctccctcccaacaccacctcataacaatcaggaagaattaaggat

SEQ ID NO: 38244 - DNA, 120 bp, Artificial Sequence
  ENSG00000055609_101 (sequence is synthesized)
acaggatcactgtggtgatcgagatactcctgacagttttgttccctcatcctctcctgagagtgtggttggggtagaagtgagcaggtatccagatctgtcattggtcaaggaggagcc

SEQ ID NO: 38245 - DNA, 120 bp, Artificial Sequence
  ENSG00000055609_102 (sequence is synthesized)
tccagaaccggtgccgtcccccatcattccaattcttcctagcactgctgggaaaagttcagaatcaagaaggaatgacatcaaaactgagccaggcactttatattttgcgtcaccttt

SEQ ID NO: 38246 - DNA, 120 bp, Artificial Sequence
  ENSG00000055609_103 (sequence is synthesized)
tggtccttccccaaatggtcccagatcaggtcttatatctgtagcaattactctgcatcctacagctgctgagaacattagcagtgttgtggctgcattttccgaccttcttcacgtccg

SEQ ID NO: 38247 - DNA, 120 bp, Artificial Sequence
  ENSG00000055609_104 (sequence is synthesized)
aatccctaacagctatgaggttagcagtgctccagatgtcccatccatgggtttggtcagtagccacagaatcaacccgggtttggagtatcgacagcatttacttctccgtgggcctcc

SEQ ID NO: 38248 - DNA, 120 bp, Artificial Sequence
  ENSG00000055609_105 (sequence is synthesized)
gccaggatctgcaaaccctcccagattagtgagctcttaccggctgaagcagcctaatgtaccatttcctccaacaagcaatggtctttctggatataaggattctagtcatggtattgc

SEQ ID NO: 38249 - DNA, 120 bp, Artificial Sequence
  ENSG00000055609_106 (sequence is synthesized)
agaaagcgcagcactcagaccacagtggtgttgtcattgtaaagtggttattcttggaagtggtgtgcggaaatctttcaaagatctgacccttttgaacaaggattcccgagaaagcac

SEQ ID NO: 38250 - DNA, 120 bp, Artificial Sequence
  ENSG00000055609_107 (sequence is synthesized)
caagagggtagagaaggacattgtcttctgtagtaataactgctttattctttattcatcaactgcacaagcgaaaaactcagaaaacaaggaatccattccttcattgccacaatcacc

SEQ ID NO: 38251 - DNA, 120 bp, Artificial Sequence
  ENSG00000055609_108 (sequence is synthesized)
tatgagagaaacgccttccaaagcatttcatcagtacagcaacaacatctccactttggatgtgcactgtctcccccagctcccagagaaagcttctccccctgcctcaccacccatcgc

SEQ ID NO: 38252 - DNA, 120 bp, Artificial Sequence
  ENSG00000055609_109 (sequence is synthesized)
cttccctcctgcttttgaagcagcccaagtcgaggccaagccagatgagctgaaggtgacagtcaagctgaagcctcggctaagagctgtccatggtgggtttgaagattgcaggccgct

SEQ ID NO: 38253 - DNA, 120 bp, Artificial Sequence
  ENSG00000055609_110 (sequence is synthesized)
caataaaaaatggagaggaatgaaatggaagaagtggagcattcatattgtaatccctaaggggacatttaaaccaccttgtgaggatgaaatagatgaatttctaaagaaattgggcac

SEQ ID NO: 38254 - DNA, 120 bp, Artificial Sequence
  ENSG00000055609_111 (sequence is synthesized)
ttcccttaaacctgatcctgtgcccaaagactatcggaaatgttgcttttgtcatgaagaaggtgatggattgacagatggaccagcaaggctactcaaccttgacttggatctgtgggt

SEQ ID NO: 38255 - DNA, 120 bp, Artificial Sequence
  ENSG00000055609_112 (sequence is synthesized)
ccacttgaactgcgctctgtggtccacggaggtctatgagactcaggctggtgccttaataaatgtggagctagctctgaggagaggcctacaaatgaaatgtgtcttctgtcacaagac

SEQ ID NO: 38256 - DNA, 120 bp, Artificial Sequence
  ENSG00000055609_113 (sequence is synthesized)
gggtgccactagtggatgccacagatttcgatgcaccaacatttatcacttcacttgcgccattaaagcacaatgcatgttttttaaggacaaaactatgctttgccccatgcacaaacc

SEQ ID NO: 38257 - DNA, 120 bp, Artificial Sequence
  ENSG00000055609_114 (sequence is synthesized)
aaagggaattcatgagcaagaattaagttactttgcagtcttcaggagggtctatgttcagcgtgatgaggtgcgacagattgctagcatcgtgcaacgaggagaacgggaccatacctt

SEQ ID NO: 38258 - DNA, 120 bp, Artificial Sequence
  ENSG00000055609_115 (sequence is synthesized)
tcgcgtgggtagcctcatcttccacacaattggtcagctgcttccacagcagatgcaagcattccattctcctaaagcactcttccctgtgggctatgaagccagccggctgtactggag

SEQ ID NO: 38259 - DNA, 120 bp, Artificial Sequence
  ENSG00000055609_116 (sequence is synthesized)
cactcgctatgccaataggcgctgccgctacctgtgctccattgaggagaaggatgggcgcccagtgtttgtcatcaggattgtggaacaaggccatgaagacctggttctaagtgacat

SEQ ID NO: 38260 - DNA, 120 bp, Artificial Sequence
  ENSG00000055609_117 (sequence is synthesized)
ctcacctaaaggtgtctgggataagattttggagcctgtggcatgtgtgagaaaaaagtctgaaatgctccagcttttcccagcgtatttaaaaggagaggatctgtttggcctgaccgt

SEQ ID NO: 38261 - DNA, 120 bp, Artificial Sequence
  ENSG00000055609_118 (sequence is synthesized)
ctctgcagtggcacgcatagcggaatcacttcctggggttgaggcatgtgaaaattataccttccgatacggccgaaatcctctcatggaacttcctcttgccgttaaccccacaggttg

SEQ ID NO: 38262 - DNA, 120 bp, Artificial Sequence
  ENSG00000055609_119 (sequence is synthesized)
tgcccgttctgaacctaaaatgagtgcccatgtcaagaggtttgtgttaaggcctcacaccttaaacagcaccagcacctcaaagtcatttcagagcacagtcactggagaactgaacgc

SEQ ID NO: 38263 - DNA, 120 bp, Artificial Sequence
  ENSG00000055609_120 (sequence is synthesized)
accttatagtaaacagtttgttcactccaagtcatcgcagtaccggaagatgaaaactgaatggaaatccaatgtgtatctggcacggtctcggattcaggggctgggcctgtatgctgc

SEQ ID NO: 38264 - DNA, 120 bp, Artificial Sequence
  ENSG00000055609_121 (sequence is synthesized)
tcgagacattgagaaacacaccatggtcattgagtacatcgggactatcattcgaaacgaagtagccaacaggaaagagaagctttatgagtctcagaaccgtggtgtgtacatgttccg

SEQ ID NO: 38265 - DNA, 120 bp, Artificial Sequence
  ENSG00000055609_122 (sequence is synthesized)
catggataacgaccatgtgattgacgcgacgctcacaggagggcccgcaaggtatatcaaccattcgtgtgcacctaattgtgtggctgaagtggtgacttttgagagaggacacaaaat

SEQ ID NO: 38266 - DNA, 120 bp, Artificial Sequence
  ENSG00000055609_123 (sequence is synthesized)
tatcatcagctccagtcggagaatccagaaaggagaagagctctgctatgactataagtttgactttgaagatgaccagcacaagattccgtgtcactgtggagctgtgaactgccggaa

SEQ ID NO: 38267 - DNA, 120 bp, Artificial Sequence
  ENSG00000055609_124 (sequence is synthesized)
gtggatgaactgaaatgcattccttgctagctcagcgggcggcttgtccctaggaagaggcgattcaacacaccattggaattttgcagacagaaagagatttttgttttctgttttatg

SEQ ID NO: 38268 - DNA, 120 bp, Artificial Sequence
  ENSG00000055609_125 (sequence is synthesized)
actttttgaaaaagcttctgggagttctgatttcctcagtcctttaggttaaagcagcgccaggaggaagctgacagaagcagcgttcctgaagtggccgaggttaaacggaatcacaga

SEQ ID NO: 38269 - DNA, 89 bp, Artificial Sequence
  ENSG00000055609_126 (sequence is synthesized)
ccttgtgggtgggtttcattgttttggttttctagtctcactaaggagaaacttttactggggcaaagagccgatggctgccctgcccc

SEQ ID NO: 38270 - DNA, 120 bp, Artificial Sequence
  ENSG00000055609_127 (sequence is synthesized)
aacttttactggggcaaagagccgatggctgccctgccccgggcaggggccttcctatgaatgtaagactgaaatcaccagcgagggggacagagagtgctggccacggccttattaaaa

SEQ ID NO: 38271 - DNA, 120 bp, Artificial Sequence
  ENSG00000055609_128 (sequence is synthesized)
aggggcaggccctctaacttcaaaatgtttttaaataaagtagacaccactgaacaaggaatgtactgaaatgacttccttagggatagagctaagggataataacttgcactaaataca

SEQ ID NO: 38272 - DNA, 120 bp, Artificial Sequence
  ENSG00000055609_129 (sequence is synthesized)
tttaaatacttgattccatgagtcagtttattgtagtttttgatttctgtaaaataagagaaacttttgtatttattattgaataagtgaatgaagctatttttaaataaagttagaaga

SEQ ID NO: 38273 - DNA, 120 bp, Artificial Sequence
  ENSG00000055609_130 (sequence is synthesized)
aagccaagctgctgctgttacctgcagaactaacaaaccctgttactttgtacagatatgtaaatattttgagaaaaaatacagtataaaaatagttattgaccaaatgctaccaggctc

SEQ ID NO: 38274 - DNA, 120 bp, Artificial Sequence
  ENSG00000055609_131 (sequence is synthesized)
tgcagcagctcgggggcttataaaatgttcatagggatgttacaatataattttgtgttataaaatatgccattataattatgtaataaccaaaatttcaacctagagtgttgggggttt

SEQ ID NO: 38275 - DNA, 120 bp, Artificial Sequence
  ENSG00000055609_132 (sequence is synthesized)
tttggaaaccgcagtctattagtactcaatggttttatacaccttacttctgacagagcggggcgtatgctacgactacaacttttatagctgttttggtaatttaaactaattttttca

SEQ ID NO: 38276 - DNA, 120 bp, Artificial Sequence
  ENSG00000055609_133 (sequence is synthesized)
tattatattgttgcatccctacttcttcagtcaggtttttttgtgcttacaatttgtgataactgtgaataactgcttaaaaatacacccaaatggaggctgaattttttcttcagcaaa

SEQ ID NO: 38277 - DNA, 120 bp, Artificial Sequence
  ENSG00000055609_134 (sequence is synthesized)
agtagttttgattagaactttgtttcagccacagagaatcatgtaaacgtaataggatcatgtagcagaaacttaaatctaaccctttagccttctatttaacacaaaaatttgaaaaag

SEQ ID NO: 38278 - DNA, 120 bp, Artificial Sequence
  ENSG00000055609_135 (sequence is synthesized)
ttaaaaaaaaaaaggagatgtgattatgcttacagctgcaggactctggcaatagggtttttggaagatgtaattttaaaatgtgtttgtatgaactgtttgtttacatttctttaataa

SEQ ID NO: 38279 - DNA, 120 bp, Artificial Sequence
  ENSG00000055609_136 (sequence is synthesized)
aaaaaacactgttttgtgtttgcttgtagaaacttaatcagcattttgaaccaggttagctttttattttgtacttaaaattctggtactgacacttcacaggctaagtataaaatgaag

SEQ ID NO: 38280 - DNA, 120 bp, Artificial Sequence
  ENSG00000055609_137 (sequence is synthesized)
ttttgtgtgcacaattcaagtggactgtaaactgttggtatattcagtgatgcagttctgaacttgtatatggcatgatgtatttttatcttacagaataaatcaattgtatatattttt

SEQ ID NO: 38281 - DNA, 120 bp, Artificial Sequence
  ENSG00000055609_138 (sequence is synthesized)
ctcttgataaatagctgtatgaaatttgtttcctgaatatttttcttctcttgtacaatatcctgacatcctaccagtatttgtcctaccgggtttttgttgttttctgttctgtataat

SEQ ID NO: 38282 - DNA, 120 bp, Artificial Sequence
  ENSG00000055609_139 (sequence is synthesized)
agtatctaatgttggcaaaaattgaattttttgaagtatacagagtgttatgggttttggaatttgtggacacagatttagaagatcaccatttacaaataaaatattttacatctataa

SEQ ID NO: 38283 - DNA, 120 bp, Artificial Sequence
  ENSG00000055609_140 (sequence is synthesized)
ccctctaatggaaccaatcattggagtgaactttgcgcactttcttccttatggcagtggccaatttaatagtgggaatcgacttctaggaacttttggcagtgctaccctggaaggggt

SEQ ID NO: 38284 - DNA, 120 bp, Artificial Sequence
  ENSG00000055609_141 (sequence is synthesized)
tcagatcctgggcgaatagttccctcctcacacaggtcacttactcacttgtttcccaattctttgttgtgataaaaactctgtccataataggccagatgttcccaccctgcagtatct

SEQ ID NO: 38285 - DNA, 120 bp, Artificial Sequence
  ENSG00000055609_142 (sequence is synthesized)
cacccttcaggcactccagttcaccttcctccacatggcagctctgtgagcatttgctgtcacctctcccttcccttctgtgccacgggttcagcatccccatggcacccaggtggtatc

SEQ ID NO: 38286 - DNA, 120 bp, Artificial Sequence
  ENSG00000055609_143 (sequence is synthesized)
atttctgtgtgccataggatccttctttatccccttaacctggacacagtttggcagtgtcccctctgaagagcatccccgtccttctccaagggggccgtggctcctgagatggcactg

SEQ ID NO: 38287 - DNA, 120 bp, Artificial Sequence
  ENSG00000055609_144 (sequence is synthesized)
ttgggctgtgggcggcaaatctgggccgccgtgctgctgaggattgtgtgctcacgctggcgatcagtgtgtgcttaaccaagtgcccacatcgccacattcttcagcagttcaggtgtg

SEQ ID NO: 38288 - DNA, 120 bp, Artificial Sequence
  ENSG00000055609_145 (sequence is synthesized)
ggttgttgtcttcaaaatgccgagtgccaagcttgctgtttgtctccgtgctctcagaggtgactctggtccggcggctcacccattgggattatttttggccttaattgctgcatttgc

SEQ ID NO: 38289 - DNA, 120 bp, Artificial Sequence
  ENSG00000055609_146 (sequence is synthesized)
ttcccaccttggtctttcccactgtgattcaggtaccttggttctggaattggcatttcctggaaagctgtcactgagcagcaggcttggtttctgtaggaaacgtcccgcatttgggga

SEQ ID NO: 38290 - DNA, 120 bp, Artificial Sequence
  ENSG00000055609_147 (sequence is synthesized)
gtgaggcacctgagtgacttgactttgttggtgctcctctcccttcgtgaacatagccatgggattcgtgggattctatctgtattttgggtctttgtggaatctcctttcttagtcaag

SEQ ID NO: 38291 - DNA, 120 bp, Artificial Sequence
  ENSG00000055609_148 (sequence is synthesized)
aataaggatccgactagacccaaggcccgttatacatctcaaagtaacgtgtaaataagacagtgtgtgggagccctggcacagtgccagtaaccaatggctaccatggtggtcagaaga

SEQ ID NO: 38292 - DNA, 120 bp, Artificial Sequence
  ENSG00000055609_149 (sequence is synthesized)
gactcagcccagggccacctgcctccttcctacttgagtattcttgagtaaatagtttaatatgagcccctattttatcttctgcaagatagagaaaatgacttccttaccaggctcttg

SEQ ID NO: 38293 - DNA, 120 bp, Artificial Sequence
  ENSG00000055609_150 (sequence is synthesized)
gaaggactcagcagatacctgaaagaaagcagtggaatcattgccaagaacagctgctcaataaacactggtttccttcctttctgtgtagaaggtctttccagctagcgtctagaatca

SEQ ID NO: 38294 - DNA, 120 bp, Artificial Sequence
  ENSG00000055609_151 (sequence is synthesized)
tttcactcagaagagacctagaaattcctgggcctccccttcattttgcagcatcggctctctctggggtggtgggggttgcagggccgcgcactgaggcttgtaccgtgggactcacgc

SEQ ID NO: 38295 - DNA, 120 bp, Artificial Sequence
  ENSG00000055609_152 (sequence is synthesized)
agactcccacctaccttgattggtctgagatgttaatttggtgacctctaaatagaaagacatcctttcagtcttgagtgaggaaaaatgaaggagggaaaacagagttagctggcagtt

SEQ ID NO: 38296 - DNA, 120 bp, Artificial Sequence
  ENSG00000055609_153 (sequence is synthesized)
catctcacccagaattgcatgccccattcagtaaatcaggggaggtgaaaggcttctgggttttagggagagggctaggaaagcagttgcccttccagtcccctccatccacttgcaggg

SEQ ID NO: 38297 - DNA, 120 bp, Artificial Sequence
  ENSG00000055609_154 (sequence is synthesized)
acagcattatgagaagtcacagaaatacagctttctctggtcaggctcccgttctcagatctcgctgtttaaaaatactgcctccctcatttcctctgtgcaagcacaatgcctcttttc

SEQ ID NO: 38298 - DNA, 120 bp, Artificial Sequence
  ENSG00000055609_155 (sequence is synthesized)
agggttcccccagggtcccatggaacctcaataaatcaggtcttccttaatttacgtctgtttcgtttgctggttttaaaatgcaagggagatggaggcagaaacgctattgccttcctt

SEQ ID NO: 38299 - DNA, 120 bp, Artificial Sequence
  ENSG00000055609_156 (sequence is synthesized)
aagccaaaggaaatactcagtttatgtgttaaatacaattcctgactaggatatgagagttggttttaaaaacattatattatggaatggaaaaacaaatttacaatttaatacttccct

SEQ ID NO: 38300 - DNA, 120 bp, Artificial Sequence
  ENSG00000055609_157 (sequence is synthesized)
gtgggtttggagactctttttcttacttgttacttatacgatataatatggcaacccagtttaatattataccatggataatactaacagatgaattctaaaagttgttttatgacagtt

SEQ ID NO: 38301 - DNA, 120 bp, Artificial Sequence
  ENSG00000055609_158 (sequence is synthesized)
tgactgacccttgccatttccaaatgagtgatcttcttagaccttgccttttcaggttctcttcctttcacacattttagaacagacctaccttacagaaatctcaaggagcaccatatc

SEQ ID NO: 38302 - DNA, 120 bp, Artificial Sequence
  ENSG00000055609_159 (sequence is synthesized)
tttgaagatcacaggtggggaactacagagggcttgactttagtttgctagataacgacacaaaccttctcagatactgtgagcttggataataccatgtttcagttaaggtagttgatg

SEQ ID NO: 38303 - DNA, 120 bp, Artificial Sequence
  ENSG00000055609_160 (sequence is synthesized)
catacattctagaaatggaaaagctgtcatttaatgttacttcaggtataacttcatattcaccagtgtgcatcataaagtattggtttataaacattttcttgatcaaagtaaatataa

SEQ ID NO: 38304 - DNA, 120 bp, Artificial Sequence
  ENSG00000055609_161 (sequence is synthesized)
tgtagtgatgtctcaggcagaataaaatatttaatgtaaattgtagcagcaaacatttaagttatacttaaatgtttaaatcactgttagtgattaacttattttgccttccttgaagca

SEQ ID NO: 38305 - DNA, 120 bp, Artificial Sequence
  ENSG00000055609_162 (sequence is synthesized)
atttgtcctaaatttccatacgtttgcatttgtttttgctgttctaaaattccttagttgctggctttgaccttttatgttgctgagttttacacatctattttctcaactgccatatcc

SEQ ID NO: 38306 - DNA, 120 bp, Artificial Sequence
  ENSG00000055732_0 (sequence is synthesized)
gactctgggcggagcggggctcgaggctgctggagtcgctcgctgactcgccctgcgccctcgccgcggacaccggagctgcggccgctccccgctgtcccccagagatggcagatcctg

SEQ ID NO: 38307 - DNA, 120 bp, Artificial Sequence
  ENSG00000055732_1 (sequence is synthesized)
aggtagttgtgagtagctgcagctctcatgaagaggaaaatcgctgcaattttaaccagcaaacatctccatctgaggagcttctattagaagaccagatgaggcgaaaactcaaatttt

SEQ ID NO: 38308 - DNA, 120 bp, Artificial Sequence
  ENSG00000055732_2 (sequence is synthesized)
ttttcatgaatccctgtgagaagttctgggctcgaggtagaaaaccatggaaacttgccatacaaattctaaaaattgcaatggtgactatccagctggtcttatttgggctaagtaacc

SEQ ID NO: 38309 - DNA, 120 bp, Artificial Sequence
  ENSG00000055732_3 (sequence is synthesized)
agatggtggtagctttcaaggaagagaatactatagcattcaaacaccttttcctaaaaggatatatggaccgaatggatgacacatatgcagtgtacacacaaagtgacgtgtatgatc

SEQ ID NO: 38310 - DNA, 120 bp, Artificial Sequence
  ENSG00000055732_4 (sequence is synthesized)
agttaatcttcgcagtaaaccagtacttgcagctatacaatgtctccgttgggaatcatgcttatgagaacaaaggtaccaagcaatctgctatggcaatctgtcagcacttctacaagc

SEQ ID NO: 38311 - DNA, 120 bp, Artificial Sequence
  ENSG00000055732_5 (sequence is synthesized)
gaggaaacatctaccctggaaatgatacctttgacatcgatccagaaattgaaactgagtgtttctttgtggagccagatgaaccttttcacattgggacaccagcagaaaataaactga

SEQ ID NO: 38312 - DNA, 120 bp, Artificial Sequence
  ENSG00000055732_6 (sequence is synthesized)
acttaacactggacttccacagactcctaacagtggagcttcagtttaaactgaaagccattaatctgcagacagttcgtcatcaagaactccctgactgttatgactttactctgacta

SEQ ID NO: 38313 - DNA, 120 bp, Artificial Sequence
  ENSG00000055732_7 (sequence is synthesized)
taacatttgacaacaaggcccatagtggaagaattaaaataagtttagataatgacatttccatcagagaatgtaaagactggcatgtatctggatcaattcagaagaacactcattaca

SEQ ID NO: 38314 - DNA, 120 bp, Artificial Sequence
  ENSG00000055732_8 (sequence is synthesized)
tgatgatctttgatgcctttgtcattctgacttgcttggtttcattaatcctctgcattagatctgtgattagaggacttcagcttcagcaggagtttgtcaattttttcctcctccatt

SEQ ID NO: 38315 - DNA, 120 bp, Artificial Sequence
  ENSG00000055732_9 (sequence is synthesized)
ataagaaggaagtttctgtttctgatcaaatggaatttgtcaatggatggtacattatgattattattagtgacatattgacaatcattggatcaattctaaaaatggaaatccaagcta

SEQ ID NO: 38316 - DNA, 120 bp, Artificial Sequence
  ENSG00000055732_10 (sequence is synthesized)
agagtctaactagttatgatgtctgtagcatacttcttgggacttctaccatgctcgtgtggcttggagtcatccgatacctcggtttctttgcaaagtacaacctcctcattttgaccc

SEQ ID NO: 38317 - DNA, 120 bp, Artificial Sequence
  ENSG00000055732_11 (sequence is synthesized)
atttacttaggttactgcttctgtggatggatcgtgctggggccttaccatgacaagtttcgttctctgaacatggtctctgagtgccttttctctctgataaatggagatgatatgttt

SEQ ID NO: 38318 - DNA, 120 bp, Artificial Sequence
  ENSG00000055732_12 (sequence is synthesized)
gccacgtttgcaaaaatgcagcaaaaaagttacttagtctggctgtttagtagaatttacctctactcattcatcagcctctttatatatatgattttaagtcttttcattgcactgatc

SEQ ID NO: 38319 - DNA, 120 bp, Artificial Sequence
  ENSG00000055732_13 (sequence is synthesized)
actgatacatacgaaacaattaagcaataccaacaagatggcttcccagagactgaacttcgtacatttatatcagaatgcaaagatctacccaactctggaaaatacagattagaagat

SEQ ID NO: 38320 - DNA, 120 bp, Artificial Sequence
  ENSG00000055732_14 (sequence is synthesized)
gaccctccagtatctttattctgctgttgtaaaaagtagctatcaggtttatctgtactttagaggaaaatataatgtgtagctgagttggaacactgtggatattctgagatcagatgt

SEQ ID NO: 38321 - DNA, 120 bp, Artificial Sequence
  ENSG00000055732_15 (sequence is synthesized)
agtatgtttgaagactgttattttgagctaattgagacctataattcaccaataactgtttatatttttaaaagcaatatttaatgtctttgcaactttatgctgggattgtttttaaaa

SEQ ID NO: 38322 - DNA, 120 bp, Artificial Sequence
  ENSG00000055732_16 (sequence is synthesized)
aaactttaatgaggaaagctattggattattattatttcttgtttattttgccatggctttagaatgtattctgtatgcctctcttttgctctgatactgttgctcctgctattctgatt

SEQ ID NO: 38323 - DNA, 120 bp, Artificial Sequence
  ENSG00000055732_17 (sequence is synthesized)
gtgcagactgtgtaattagtggaaaacaatccttggtctgactgtgactttggacaactcagtaaccctggcttggaccactctcaggagtccatccttgagagagtgggtgtagttatc

SEQ ID NO: 38324 - DNA, 120 bp, Artificial Sequence
  ENSG00000055732_18 (sequence is synthesized)
atttatacagtaatcattgcattttaaaatcttctcttgaaaggaagaataagagtgcaccagaataagagcgcaccagaataagagcgcaccagctaacaatgtgatacggccatatgt

SEQ ID NO: 38325 - DNA, 120 bp, Artificial Sequence
  ENSG00000055732_19 (sequence is synthesized)
tgatacggccatatgtcacttaaggatggagatatgttctgagaaatgtgtcattaggcgattttgtcattaaacatcatagcatgtacttccacaaacctagatggtatagcctactac

SEQ ID NO: 38326 - DNA, 120 bp, Artificial Sequence
  ENSG00000055732_20 (sequence is synthesized)
gtatagcctgttggtcctggggtacaaatctgtacaacatgttactgtattgaatacagtaggcaattgtaacacaatggtaagtatctaaacatagaaaagggacagtaaaaatatggt

SEQ ID NO: 38327 - DNA, 120 bp, Artificial Sequence
  ENSG00000055732_21 (sequence is synthesized)
tttataatcttctgggaccaccattgtatatgcggtacatcattgaccaaaacatcgttatccagcatatgactgtatttggttatgaaagccaactgttacttgattctgcttttagtt

SEQ ID NO: 38328 - DNA, 120 bp, Artificial Sequence
  ENSG00000055732_22 (sequence is synthesized)
cttaagaggatcaggcttttaaatactcatttacaagttttctatcctccttcagtgttaaagtagaaagtaaaaagagtatcttatacatgcatgaaattaaagcatataccaaatgca

SEQ ID NO: 38329 - DNA, 120 bp, Artificial Sequence
  ENSG00000055732_23 (sequence is synthesized)
tggagtcgctcgctgactcgccctgcgccctcgccgcggacaccggagctgcggccgctccccgctgtcccccagcttactccaatcaagcctctgcccgccaggaacaggtaacctgtg

SEQ ID NO: 38330 - DNA, 120 bp, Artificial Sequence
  ENSG00000055732_24 (sequence is synthesized)
tgtgtccgtttgctccttctaagagcatgcctgatagatacttcggtagcctctccggatggccccttcgtcgggtagcctctcctgatggggtccttcgcccaccctgcctcccgcgcc

SEQ ID NO: 38331 - DNA, 120 bp, Artificial Sequence
  ENSG00000055732_25 (sequence is synthesized)
ggcgctccgggtgaatgtcaagggtggctggctgcgaatacctccttcagctgctggggttcccgacagtttgcagtttttaaaagtgcaccctcggaagggcttttcagactgggtaaa

SEQ ID NO: 38332 - DNA, 120 bp, Artificial Sequence
  ENSG00000055732_26 (sequence is synthesized)
tttcagaatgaattgtttcttccaaactgtatatcaagtagacttgaaattggtaatggtaattttcttaaatctagtcaggaggtctcttaggcagagtttttcaaagtgtgatccaca

SEQ ID NO: 38333 - DNA, 120 bp, Artificial Sequence
  ENSG00000055732_27 (sequence is synthesized)
aaccattgcatcagaatcattgggtgcctggtaaagtgtaccatgttagacctactgaattcagactcttcggcggggcctgtgaattcttacacacaccaaaattcatacacaaccaag

SEQ ID NO: 38334 - DNA, 120 bp, Artificial Sequence
  ENSG00000055732_28 (sequence is synthesized)
gtaactaaggtaagagttttttttttttttttaatcttacaagaaatgctcgaatctttaacaaaaatgagtggggctataggggaaagtgaggtcaaggcactatggtgtgcatgcttg

SEQ ID NO: 38335 - DNA, 120 bp, Artificial Sequence
  ENSG00000055732_29 (sequence is synthesized)
catttgtttcctccgtccattcaaagtgagaatgctcccattttcttactttaccattgatgtgctacaagcttatttattttaagactaacctagcctaaaaatcaactgtccccacaa

SEQ ID NO: 38336 - DNA, 120 bp, Artificial Sequence
  ENSG00000055732_30 (sequence is synthesized)
aataaaaatcacattaaaaaaactaatagtgttcagactaatcttgctcaaacttatgtttccctagtcttgatgcaactgattgagtcacctggggagttggttataaacctgggcaga

SEQ ID NO: 38337 - DNA, 120 bp, Artificial Sequence
  ENSG00000055732_31 (sequence is synthesized)
gaccccaaatgcaatggctcagagaagataggagcttatttctgtcttatgcaatagtcagaatgggttttacagactggtgagtagctcaacatctcacagtcattcaggcacccatgt

SEQ ID NO: 38338 - DNA, 120 bp, Artificial Sequence
  ENSG00000055732_32 (sequence is synthesized)
tcctcccattttgtttctctgccaccccttaaggacttgccctgactgcatgattattgccgtgttgcctcaaacaggttgcagcttatgggaagcaaaaacacggtatggtagaagctc

SEQ ID NO: 38339 - DNA, 120 bp, Artificial Sequence
  ENSG00000055732_33 (sequence is synthesized)
tcccatagactgatggcttggctcaagagtggccgactttatttctgtacatatcccactggatagaatttagtcaatcctaactgcagagggagccagggaacacagcccaggcatgtg

SEQ ID NO: 38340 - DNA, 120 bp, Artificial Sequence
  ENSG00000055732_34 (sequence is synthesized)
cctaggaaggggagaatgggtttaggttgacacttagcagctgccactatatgtggctatagtatgtatcattggaatagatgtttaactttagggacaaataaaaaaccaaaacaaaaa

SEQ ID NO: 38341 - DNA, 120 bp, Artificial Sequence
  ENSG00000055732_35 (sequence is synthesized)
aaggagtaaggggagagatttgcagcaaatctttatttttaccaacctcaactatcattaatttcagtgaaccctaaatggtatccaacaaaatatctttctagaccattcaccgtctct

SEQ ID NO: 38342 - DNA, 120 bp, Artificial Sequence
  ENSG00000055732_36 (sequence is synthesized)
gcctcatagatgatcatatcatgttttcttctcttctgaaacctctaatacccttgtcctatcctcattctaagctgatgaccttacttcctatttcacaaaaataatagaaaaaaaaaa

SEQ ID NO: 38343 - DNA, 120 bp, Artificial Sequence
  ENSG00000055732_37 (sequence is synthesized)
actctgggcggagcggggctcgaggctgctggagtcgctcgctgactcgccctgcgccctcgccgcggacaccggagctgcggccgctccccgctgtcccccagcttactccaatcaagc

SEQ ID NO: 38344 - DNA, 120 bp, Artificial Sequence
  ENSG00000055732_38 (sequence is synthesized)
tttaaatgacaaagttttcaaagaactttttttcttcaggacttgagagaaagagaagaggcagaaatgaaacggattgattttcttgccttgccttccctgtccttgcataaggaagac

SEQ ID NO: 38345 - DNA, 120 bp, Artificial Sequence
  ENSG00000055732_39 (sequence is synthesized)
agtaggaaaactatggaaggtgttctggcctagctttgtcctgcttggcccctggtgtcctgaagtggttattcttgaagcaagatgtgactgttgactccctgtcaccaaaccctttat

SEQ ID NO: 38346 - DNA, 120 bp, Artificial Sequence
  ENSG00000055732_40 (sequence is synthesized)
aatacatgtagtgccaacgtgactaagaaatctaggcccagaataaaaatcaaaaaagctccacttgaaatgtctcaaagcagaaataatgagcctttgtattagtaagaattatagcag

SEQ ID NO: 38347 - DNA, 120 bp, Artificial Sequence
  ENSG00000055732_41 (sequence is synthesized)
cactaaaaatctacccctaactgaggtcctgccggaatttgggagaaagcacagttgtaccagttcttgctcacatgaagaaggtatctggaggtacttagaacagagagcaagaggaag

SEQ ID NO: 38348 - DNA, 120 bp, Artificial Sequence
  ENSG00000055732_42 (sequence is synthesized)
tgctcttgttatataagttctttggagtggaaatgctgccctagacatataatgttttagagactacagggtctctgtagaagatctagttcatcgttctcatttcacagagaaatgaag

SEQ ID NO: 38349 - DNA, 120 bp, Artificial Sequence
  ENSG00000055732_43 (sequence is synthesized)
agaacttcccatggttgaacagaattagcaacagatcagagttgagaatctgggtctcctgtccccttgaaagaattgtttcctaattaatgtgtagaggtttcttggctccaaaactat

SEQ ID NO: 38350 - DNA, 120 bp, Artificial Sequence
  ENSG00000055732_44 (sequence is synthesized)
atagcctttcaaatttcggttaatggtaactctcatcagttactcaagccaaaaatcttggattcatcacagactcctctctttcactaatctcttctttcccacatctaatccaagagg

SEQ ID NO: 38351 - DNA, 89 bp, Artificial Sequence
  ENSG00000055732_45 (sequence is synthesized)
ctttcactaatctcttctttcccacatctaatccaagaggaaatcctattgttctaccttcattggccaggcactgtgactcataagga

SEQ ID NO: 38352 - DNA, 90 bp, Artificial Sequence
  ENSG00000055732_46 (sequence is synthesized)
gtcaaggtggcatgtgtctgtaatccatcttgagcacaggaagtcgaggctgcattgagccacaattgtgccacggcactccagcctggg

SEQ ID NO: 38353 - DNA, 82 bp, Artificial Sequence
  ENSG00000055732_47 (sequence is synthesized)
tgacagagtgagacccctgttctggtcaactccactattaccagcctggtccaagctactatctctcatttatattattgca

SEQ ID NO: 38354 - DNA, 120 bp, Artificial Sequence
  ENSG00000055732_48 (sequence is synthesized)
agcctggtccaagctactatctctcatttatattattgcaatagcatcctcactcctccaacaacctgctgtcaaccacagcagccaacatctgatcatatcacttctgtttgtggttct

SEQ ID NO: 38355 - DNA, 120 bp, Artificial Sequence
  ENSG00000055732_49 (sequence is synthesized)
caaatctccccaattgagttacagtaaaagacaaacttggtgagtgccaccttatctctataactgtataccctttctattgctcactccagccagatgcaatatccttgccaagcaccc

SEQ ID NO: 38356 - DNA, 120 bp, Artificial Sequence
  ENSG00000055732_50 (sequence is synthesized)
tcctgtctcagggcctttgcacttgccagtccctgtgcctggaaggcttctcccctagatttttgcatgacttctccctccctcccttcagatctttgctcaaatgccttctttttagtg

SEQ ID NO: 38357 - DNA, 120 bp, Artificial Sequence
  ENSG00000055732_51 (sequence is synthesized)
tatgtaaaatgacaaacccatacccattccttatcccctcctctgaattttctcttcagcaattatcagcagcaagtgtcccaaagtttctattaacttatttctgttgtctctttcttc

SEQ ID NO: 38358 - DNA, 120 bp, Artificial Sequence
  ENSG00000055732_52 (sequence is synthesized)
cctccactagaatgtaagctttatgagagcagagacttttgtttgttcactgctttatccttagcacctaaaacagtgccttactcatacttacctcaatatttattgccaaatgaattt

SEQ ID NO: 38359 - DNA, 120 bp, Artificial Sequence
  ENSG00000055813_0 (sequence is synthesized)
cttctcgactccgctctgcaaatcgaaggctttccggagcagcctaggagcggccgcgggcgcagcgaaggcggcaggaggagcgcagcagccttcgggcagccgcggcggcgtcgctag

SEQ ID NO: 38360 - DNA, 120 bp, Artificial Sequence
  ENSG00000055813_1 (sequence is synthesized)
agcagccggggaggcgccgcggtgcccggcgcgccctccaagctaggagaggggagaagccgggggctgcagctgggcaagggggaggaaagtgcgtgtgcgtgcacgcctgtgtgcagg

SEQ ID NO: 38361 - DNA, 120 bp, Artificial Sequence
  ENSG00000055813_2 (sequence is synthesized)
gcagagagtgcggggggcgacagtctcggcttagggcggaggagagggcaggggaacggcggtgcagctcccccgctgtccccgaggatttcccgcggcagccccgggctccccagtgcc

SEQ ID NO: 38362 - DNA, 120 bp, Artificial Sequence
  ENSG00000055813_3 (sequence is synthesized)
cctcaccatggacttgcgcggagttgggacgggcctcggcagcagcaagcggctggctgccgggccctgggggagcgcgggcgcgcgcgcggggatggcgaggtaggatggccacccagc

SEQ ID NO: 38363 - DNA, 120 bp, Artificial Sequence
  ENSG00000055813_4 (sequence is synthesized)
caacccagcggcccctgggcggtgccgctgactcgccggagcgcacaggggtgtgggcggaggcggcctcgccgcgcccgcgccttcgggagtcgcctcgcctcttccacccacttgcac

SEQ ID NO: 38364 - DNA, 120 bp, Artificial Sequence
  ENSG00000055813_5 (sequence is synthesized)
ttccacccacttgcacctgccaccccgcggataccatgtcgaaggcggccggaggcgcggcggcggctgcggcggcggcggaaagttgttccccagccccggccggctcgtccgcggccc

SEQ ID NO: 38365 - DNA, 120 bp, Artificial Sequence
  ENSG00000055813_6 (sequence is synthesized)
cgcccgcgccggtggaggacctgtccaaagtgtcggacgaggagctgctgcagtggagcaaggaggagctgatccgcagcctgcggcgcgccgaggcggagaaggtgagcgcgatgctgg

SEQ ID NO: 38366 - DNA, 120 bp, Artificial Sequence
  ENSG00000055813_7 (sequence is synthesized)
accacagcaacctcatccgcgaggtgaaccgccgcctgcagctgcacctcggcgagatccgcggcctcaaggatatcaaccagaaactccaggaagacaaccaggaactgagggacctct

SEQ ID NO: 38367 - DNA, 120 bp, Artificial Sequence
  ENSG00000055813_8 (sequence is synthesized)
gctgtttcctggatgatgaccggcagaaaggcaagagggtgtctcgggagtggcagagactgggtcgctacactgccggggtgatgcacaaggaagtggccttatacctgcagaagctga

SEQ ID NO: 38368 - DNA, 120 bp, Artificial Sequence
  ENSG00000055813_9 (sequence is synthesized)
aagacctggaggtgaagcaggaggaagtggtgaaggagaacatggagctcaaggagctctgtgtgctactagatgaggagaagggtgcaggctgcgcaggcagccgctgctccatcgaca

SEQ ID NO: 38369 - DNA, 120 bp, Artificial Sequence
  ENSG00000055813_10 (sequence is synthesized)
gccaggccagcctgtgccaactcacagcctccaccgcaccctacgtgcgggatgtgggtgacggcagcagcacctccagcactggcagcactgacagcccggaccaccacaagcaccacg

SEQ ID NO: 38370 - DNA, 120 bp, Artificial Sequence
  ENSG00000055813_11 (sequence is synthesized)
cgagcagtggcagcccggagcacctgcagaagccccggagcgagggcagcccggagcactccaagcacaggagcgccagccccgagcatccacagaaacccagagcctgtggaaccccag

SEQ ID NO: 38371 - DNA, 120 bp, Artificial Sequence
  ENSG00000055813_12 (sequence is synthesized)
atcgccccaaagcactcaaaggacctagcccggagcaccacaaacccttgtgcaagggcagccccgaacagcaaaggcacccgcatccagggagcagccccgaaacgctgcccaagcacg

SEQ ID NO: 38372 - DNA, 120 bp, Artificial Sequence
  ENSG00000055813_13 (sequence is synthesized)
tgctgagtgggagcccggaacacttccagaagcaccggtcagggagcagccctgaacacgccaggcacagtggagggagcccggagcatcttcagaaacacgctcttggggggagcctag

SEQ ID NO: 38373 - DNA, 120 bp, Artificial Sequence
  ENSG00000055813_14 (sequence is synthesized)
agcatctccccagagccaggggcaccagcccggagcacctcaaacaacattatggagggagccctgatcacaaacacggaggaggcagtggaggaagtggaggcagcggcggaggcagca

SEQ ID NO: 38374 - DNA, 120 bp, Artificial Sequence
  ENSG00000055813_15 (sequence is synthesized)
gggagggcaccctcagacggcaggcacaggaggacgggtcaccccatcaccggaatgtctacagtggcatgaacgaatcaaccttgtcctatgttaggcagctggaggcaagagtaagac

SEQ ID NO: 38375 - DNA, 120 bp, Artificial Sequence
  ENSG00000055813_16 (sequence is synthesized)
agctggaggaagaaaatcgcatgctgccccaggccagccagaatagaaggcaacctccaactagaaacagctcaaatatggagaaaggctgggggtccagagcccggcgggtcttgcagt

SEQ ID NO: 38376 - DNA, 120 bp, Artificial Sequence
  ENSG00000055813_17 (sequence is synthesized)
gcctactctcccgggttcttttaggttgtcatcaggggctgatgggagtaacagttcacccaactctgcagctagcttcagtggacatgccacaccttcccagcagcctgaacctgtggt

SEQ ID NO: 38377 - DNA, 120 bp, Artificial Sequence
  ENSG00000055813_18 (sequence is synthesized)
acattctcttaaggttgtgtggaggaaacttggagatgctgcaggttcgtgtcctggaattaggcaacatttgtcaggaaaccagtacaaaggaccaatgtgagatgcactctttttcaa

SEQ ID NO: 38378 - DNA, 120 bp, Artificial Sequence
  ENSG00000055813_19 (sequence is synthesized)
acaggagatcaccactgccagaaagtgatagaagacaagaagaaaaaggaaagagtgggtttccacaaacctggactcatggaataacatggagtgattgtacattgcacatatctcccc

SEQ ID NO: 38379 - DNA, 120 bp, Artificial Sequence
  ENSG00000055813_20 (sequence is synthesized)
tctaaaacctgtagtacaacttctcccctcaagctgatattctgtgtctctcacctcaatgtccacaacagtcaatctcaaacaaggtagctttgaacatctcaaacagagtagctttga

SEQ ID NO: 38380 - DNA, 120 bp, Artificial Sequence
  ENSG00000055813_21 (sequence is synthesized)
aaatcaacattttggtaccagtgttttcattagaaataagtgtttttaactccccagatataatattgtaattgggaaacctgaatagttttaagagtccagtggagcctcagtgttttg

SEQ ID NO: 38381 - DNA, 120 bp, Artificial Sequence
  ENSG00000055813_22 (sequence is synthesized)
aatagagatgactcattacacataatggtaggagttttctaccatatcatattgaagatatgaagaggtattttccagcttcccaagtttgagagttgggcatttacctcttacacttca

SEQ ID NO: 38382 - DNA, 120 bp, Artificial Sequence
  ENSG00000055813_23 (sequence is synthesized)
gtcaacaaacaaactagtaattcctaatgcataattaatttggatgcaagataagattaagtttctggagttttgttttgacttctgaggtgctaaaaaataccatgtaaattctcccta

SEQ ID NO: 38383 - DNA, 120 bp, Artificial Sequence
  ENSG00000055813_24 (sequence is synthesized)
ccagctagaagggtagcaagacgttgtagagtgcttatcagagagtaccatttacttcaattgatcaatataaatatatctttttttttcatcttaatgagtttctcataaagacacatc

SEQ ID NO: 38384 - DNA, 120 bp, Artificial Sequence
  ENSG00000055813_25 (sequence is synthesized)
ttggggcataccaaccttcatattcattcagtgtatccattggtgttaatattaacaatttcaactaaaaacaacaaacataatttttctaagtgtttcgagctgtgagatgtcaatttc

SEQ ID NO: 38385 - DNA, 120 bp, Artificial Sequence
  ENSG00000055813_26 (sequence is synthesized)
tacaatttagtttctagacatgctgtatatttaataaactttatgtaaactttaaaatattgcactgcatttatgaaaaaagctttctttgcctactgcagctatctaacattttatgaa

SEQ ID NO: 38386 - DNA, 120 bp, Artificial Sequence
  ENSG00000055813_27 (sequence is synthesized)
actgacgcatgtccttcattattgaggctaaaagctcttgttcagattgcttgaggtttgaaaaagaggtgtgctagctttgcttagtttatttcttatttttggtatacatatacatat

SEQ ID NO: 38387 - DNA, 120 bp, Artificial Sequence
  ENSG00000055813_28 (sequence is synthesized)
atataacattagaatgtgtgtactggaaatgctatgataggtattttgtgttaatccaaatgcaatgatagtttcttgtatgaatgtgcaagaggcctgtgaccgaatgctacgttttta

SEQ ID NO: 38388 - DNA, 120 bp, Artificial Sequence
  ENSG00000055813_29 (sequence is synthesized)
tggtagtttaagattataaaagtagaaatgcaacaattcccagtttttggataggttctaaatttctgagatttgattcatggcagatattctctgttgttgttgttttagatgggctca

SEQ ID NO: 38389 - DNA, 120 bp, Artificial Sequence
  ENSG00000055813_30 (sequence is synthesized)
ttacataacgagttaattgtcactagtaggagactgtgaaggaattttgttatactttcaaaaatgttactgtgatgaaaaatcatctattttcagaaaatatttatgaattaatttact

SEQ ID NO: 38390 - DNA, 120 bp, Artificial Sequence
  ENSG00000055813_31 (sequence is synthesized)
atagaattatctctctaattatcataattgggttacaatttaagctccccttttaaatgttatattttaaaatgttattactctataaaagaaaattgcttgctatatttacaccttctt

SEQ ID NO: 38391 - DNA, 120 bp, Artificial Sequence
  ENSG00000055813_32 (sequence is synthesized)
tcctaggaaagctttcatccttaaattgttgtattcctaccctctgaagacatttaaaataagcttttgtgcctgcagcagagcctgcagaagctaatacaagggacactggtcttttga

SEQ ID NO: 38392 - DNA, 120 bp, Artificial Sequence
  ENSG00000055813_33 (sequence is synthesized)
tcttttgacaaaataaacttgtgtaaattttgatactgtattaaaactatttttttaaagttctgcataaaattgagtattaagtatatgtgttcatcttagcaatggtaataaattatt

SEQ ID NO: 38393 - DNA, 120 bp, Artificial Sequence
  ENSG00000055917_0 (sequence is synthesized)
aacaggtttgatctgtggatgaaatgaatcatgattttcaagctcttgcattagaatctcggggaatgggagagcttttgcctaccaaaaagttttgggaacctgatgattcaacaaaag

SEQ ID NO: 38394 - DNA, 120 bp, Artificial Sequence
  ENSG00000055917_1 (sequence is synthesized)
atggacaaaaaggcatatttcttggggatgatgaatggagagagactgcatggggagcttctcaccattcaatgtcccagcctattatggtacagagaagatctggacagggttttcatg

SEQ ID NO: 38395 - DNA, 120 bp, Artificial Sequence
  ENSG00000055917_2 (sequence is synthesized)
gaaacagtgaagtaaatgcaatactgtctccgcgatcagaaagtggaggccttggtgtgagcatggtagaatatgtattaagttcttctcctgctgataaattggattctcgatttagga

SEQ ID NO: 38396 - DNA, 120 bp, Artificial Sequence
  ENSG00000055917_3 (sequence is synthesized)
agggaaattttggcactagagatgctgaaacagatggacctgagaaaggagatcaaaaaggcaaggcttctccatttgaggaggaccaaaacagagatcttaaacaaggagatgatgatg

SEQ ID NO: 38397 - DNA, 120 bp, Artificial Sequence
  ENSG00000055917_4 (sequence is synthesized)
attctaaaataaatggcagaggtttgccaaatggaatggatgccgattgcaaagattttaatcgtactcctggaagtcgtcaagcctctccaactgaagtagttgagcgcttgggcccca

SEQ ID NO: 38398 - DNA, 120 bp, Artificial Sequence
  ENSG00000055917_5 (sequence is synthesized)
atactaatccctcagaaggactggggcctcttcctaatcctacagctaataaaccacttgttgaagaattttcaaatcctgaaactcagaatctggatgccatggaacaagttggtctgg

SEQ ID NO: 38399 - DNA, 120 bp, Artificial Sequence
  ENSG00000055917_6 (sequence is synthesized)
aatccttacagtttgactatcctggtaatcaggtaccaatggactcttcaggagctactgtaggcctttttgactacaattcccagcagcagctctttcagaggactaatgcactaacag

SEQ ID NO: 38400 - DNA, 120 bp, Artificial Sequence
  ENSG00000055917_7 (sequence is synthesized)
ttcaacagttaactgcagctcaacagcagcaatatgcattagcagcagctcagcagccacatatagctggtgtattctcagcaggccttgctccagctgcatttgtgccaaatccataca

SEQ ID NO: 38401 - DNA, 120 bp, Artificial Sequence
  ENSG00000055917_8 (sequence is synthesized)
ttattagtgctgctcctccagggaccgatccgtatactgcagcaggattggctgcagcagctacattagcaggtccagcagtggttccacctcagtattacggcgttccatggggggtgt

SEQ ID NO: 38402 - DNA, 120 bp, Artificial Sequence
  ENSG00000055917_9 (sequence is synthesized)
atccagccaacttatttcagcagcaagctgcagctgcggcaaataacacagccagtcagcaagcagcatcacaagctcagcctggacagcaacaggttctccgtgctggagcaggtcagc

SEQ ID NO: 38403 - DNA, 120 bp, Artificial Sequence
  ENSG00000055917_10 (sequence is synthesized)
gtcctcttactcccaatcagggtcagcaagggcagcaagcagaatcacttgcggcagctgcagcagcaaatccaacattggcttttggtcagggtcttgctactggcatgccaggctatc

SEQ ID NO: 38404 - DNA, 120 bp, Artificial Sequence
  ENSG00000055917_11 (sequence is synthesized)
aagtactagctccaactgcctattatgatcagactggtgccttagtggttggccctggagcaaggactggccttggagctccagttcggttaatggctccaacacctgttttaattagtt

SEQ ID NO: 38405 - DNA, 120 bp, Artificial Sequence
  ENSG00000055917_12 (sequence is synthesized)
cagcagcagcacaagctgcagcagcagcagcagctggaggaactgcaagtagccttacaggcagcacaaatggtctgtttcggccaattggcactcagccaccacagcagcagcaacagc

SEQ ID NO: 38406 - DNA, 120 bp, Artificial Sequence
  ENSG00000055917_13 (sequence is synthesized)
agccaagcactaatctgcaatctaattcattttatggaagcagttctttgactaatagctcccagagtagttctttattttctcatggacctggtcaacctggaagtacatctcttggct

SEQ ID NO: 38407 - DNA, 120 bp, Artificial Sequence
  ENSG00000055917_14 (sequence is synthesized)
ttggaagtggtaactctttgggtgctgctataggctcagccctcagtggatttggttcatcagttggcagttctgcaagtagtagtgccacaaggagagagtctctatctactagctctg

SEQ ID NO: 38408 - DNA, 120 bp, Artificial Sequence
  ENSG00000055917_15 (sequence is synthesized)
acttgtacaaaagatctagtagcagcctagcacccatagggcaaccattttacaatagtctgggattttcctcctctccaagtccaataggcatgcctctgccaagccaaactccaggac

SEQ ID NO: 38409 - DNA, 120 bp, Artificial Sequence
  ENSG00000055917_16 (sequence is synthesized)
attcacttacgccaccgccatcactttcatcacatggatcctcatccagtttgcatttaggaggactgacaaatggtagtggtcgatatatctctgcagcacctggagcagaagcaaaat

SEQ ID NO: 38410 - DNA, 120 bp, Artificial Sequence
  ENSG00000055917_17 (sequence is synthesized)
atcgaagtgcttcaagcacttccagtctatttagctccagcagccagctctttcctccttcccggcttcggtataataggtctgatattatgccttctggccgcagtagattattggaag

SEQ ID NO: 38411 - DNA, 120 bp, Artificial Sequence
  ENSG00000055917_18 (sequence is synthesized)
atttcagaaacaaccgcttcccaaaccttcagcttagagacttgattggacatatagttgagttttctcaagaccagcatggttctagattcatacagcaaaaactagagagagctactc

SEQ ID NO: 38412 - DNA, 120 bp, Artificial Sequence
  ENSG00000055917_19 (sequence is synthesized)
cagctgagcgacagatggtatttaatgaaattctgcaagcagcctatcaattaatgactgatgtttttggcaactatgttatacagaagttttttgagtttgggagtctggatcaaaaat

SEQ ID NO: 38413 - DNA, 120 bp, Artificial Sequence
  ENSG00000055917_20 (sequence is synthesized)
tagccctggctactcgtattcgtggtcatgttctacccttagccttgcagatgtatggctgccgcgttattcagaaagcattagaatctatttcttctgaccagcagagtgaaatggtaa

SEQ ID NO: 38414 - DNA, 120 bp, Artificial Sequence
  ENSG00000055917_21 (sequence is synthesized)
aggagctggatggtcatgtgctcaaatgtgtgaaagatcagaatggaaaccatgttgtacaaaaatgtatcgaatgtgttcagccacagtcactacagttcatcattgatgctttcaagg

SEQ ID NO: 38415 - DNA, 120 bp, Artificial Sequence
  ENSG00000055917_22 (sequence is synthesized)
gacaagtatttgtgctttcaactcatccttatggctgcagagtaattcagcgcatcctagagcattgcactgcagaacagaccttacctatcttagaagaactccaccaacatacagagc

SEQ ID NO: 38416 - DNA, 120 bp, Artificial Sequence
  ENSG00000055917_23 (sequence is synthesized)
agttggtacaggatcagtatggcaattatgttattcagcatgtactggaacacggtcgacctgaagacaagagcaaaattgtttccgaaatcaggggaaaggttttagccctgagtcaac

SEQ ID NO: 38417 - DNA, 120 bp, Artificial Sequence
  ENSG00000055917_24 (sequence is synthesized)
acaaatttgccagcaatgtagtagaaaagtgtgttactcatgcctcccgtgctgagagagctttactgattgacgaggtttgctgccagaatgatggtcctcacagtgccttatacacca

SEQ ID NO: 38418 - DNA, 120 bp, Artificial Sequence
  ENSG00000055917_25 (sequence is synthesized)
caaatacacatacgggaagcatatactggccaagttggaaaagtattatttgaagaatagcccggacctaggacctattggaggaccaccaaatggaatgctgtaaattacaggagcaag

SEQ ID NO: 38419 - DNA, 120 bp, Artificial Sequence
  ENSG00000055917_26 (sequence is synthesized)
agaaagaagataatttaaccatgtgaaaagaatttttttgtgtgtgaattatcaaaacacaactcaactatgaatcttcaatttttttttaaagcaaaactatttattgactttattcat

SEQ ID NO: 38420 - DNA, 120 bp, Artificial Sequence
  ENSG00000055917_27 (sequence is synthesized)
ccatttgtaaattttttaaggttcttgtgtatatttggggggtgggggatgaattataaattatattcagccctgagtggagacctatcagattggattgctggcaaagcacagaatgcc

SEQ ID NO: 38421 - DNA, 120 bp, Artificial Sequence
  ENSG00000055917_28 (sequence is synthesized)
tgtatatgatgtaactgtatcaaaaataaaaagctgtcacatattttgtaaatttttaccttgtaaagtcacaaaaatagtttttaaaggaaaaagtacagtattcttttaataaactgg

SEQ ID NO: 38422 - DNA, 120 bp, Artificial Sequence
  ENSG00000055917_29 (sequence is synthesized)
ctcacagtctggtaggtctacaaccccatagcacaacaggtttatagagatgtatatagaattatagtccttatttttttcctttgcgtgaaaccttttataacagattaacaatcaact

SEQ ID NO: 38423 - DNA, 120 bp, Artificial Sequence
  ENSG00000055917_30 (sequence is synthesized)
gcataaatattattaatattttaaaaagagttaagttgtattttgataattcacaaactatcatgcaaataacgagtaagtagacaagaataaagtggtttgagatgaaaagaacctaac

SEQ ID NO: 38424 - DNA, 120 bp, Artificial Sequence
  ENSG00000055917_31 (sequence is synthesized)
attatttacagtagatgtggttttaatacaattactgccctaaaatgtctctggcaatgtacagaaatattgtatatacttacatatgtaattgttgtaagagttaaatacaaaatcatg

SEQ ID NO: 38425 - DNA, 120 bp, Artificial Sequence
  ENSG00000055917_32 (sequence is synthesized)
gtgacacttccaattaagtgcactaaatgaaaagttaagtcacttattaacttttcagtttggtttgcaatgagaaagagtggaaatttgtattttgttttgcttatagaattacagaca

SEQ ID NO: 38426 - DNA, 120 bp, Artificial Sequence
  ENSG00000055917_33 (sequence is synthesized)
tgttgaggaagtgttgagctttattttgctttttcatagaggcagaaagtaggaaccagatagagatgaaaaggggccactgaaaagtgaatttgatagctcagcatttaagcatgatta

SEQ ID NO: 38427 - DNA, 120 bp, Artificial Sequence
  ENSG00000055917_34 (sequence is synthesized)
catattcagatagctctttttgctttctataaatatatgcattgtgtgtgtagtaatagatgtaagtttacactttgaaaggaaatcttgtttcaatgtttattataaaagccttgctaa

SEQ ID NO: 38428 - DNA, 120 bp, Artificial Sequence
  ENSG00000055917_35 (sequence is synthesized)
tttagtagtgatgctttccttggttgtacaggtgtacatttgtaaaccttcatgctgtaaatggaatttgttttatctctttgggatacatttgcattttagtgtacatttacgtccctg

SEQ ID NO: 38429 - DNA, 120 bp, Artificial Sequence
  ENSG00000055917_36 (sequence is synthesized)
ccctctttgacctggcaatatagtgttgtataatgtaaatttatttctccaaatcgagagtgattttttaaaaattttttatctttatatggtttcagaagtatgaaccagctttctttt

SEQ ID NO: 38430 - DNA, 120 bp, Artificial Sequence
  ENSG00000055917_37 (sequence is synthesized)
tattattgtgagatcattttgttttataacatagttgttgactgttaatatggacctgctagaatttggatcactttcaattgaagtcagggtattgtgcataatagaaagtattggact

SEQ ID NO: 38431 - DNA, 120 bp, Artificial Sequence
  ENSG00000055917_38 (sequence is synthesized)
gagatatttggttaccatggaggccaatgcttttttcatcttattaaatgtgatgtgacttttttctttgtacagaagagtactgtatttttgaatagcctactcccaagtaagagcaaa

SEQ ID NO: 38432 - DNA, 120 bp, Artificial Sequence
  ENSG00000055917_39 (sequence is synthesized)
tctgtatgataacattttttcctctggacataagacataacagtaacacgatgtacatttacaagcggccttatgtacatttcccaacaatctttttaaggcaaaattgtgaccatatgt

SEQ ID NO: 38433 - DNA, 120 bp, Artificial Sequence
  ENSG00000055917_40 (sequence is synthesized)
gtataattaaaatcgtttttaatcctttgcctatgaaaatattttggaaaaaaacttgctgtgtatattcagtttctgaaagataaagaaagtgctttgtattttgttgaagtcagtatt

SEQ ID NO: 38434 - DNA, 120 bp, Artificial Sequence
  ENSG00000055917_41 (sequence is synthesized)
ttgtataaacatttatgttgacccacttatgttcagtgctgaaaactaaaatgaacatgctattctgtcagctgaatatggaagagatctttttttactagagatctgcagaagaaacgc

SEQ ID NO: 38435 - DNA, 120 bp, Artificial Sequence
  ENSG00000055917_42 (sequence is synthesized)
aatcttctgagcacaatatggaatctaaaggttttatcacttagttgttcatattatgaacctaaaaataatggcataaagtttggggatgccaggcatactttttcatgtttggtgttg

SEQ ID NO: 38436 - DNA, 120 bp, Artificial Sequence
  ENSG00000055917_43 (sequence is synthesized)
agttattttacttttctaacccaacattccttggtgagaccattaaatccaaacacttgtcaccgttccttctcatagtcactctgggtcatcagcatgtcccagtcactgcagcaacgc

SEQ ID NO: 38437 - DNA, 120 bp, Artificial Sequence
  ENSG00000055917_44 (sequence is synthesized)
cttgtgtttgtttcatttttttaaaacccacacaaagccgctgtctcactttttcctactttaccaacctcagagtatttcggcccgtatcgaacttttgttctcagtatcagcccatgg

SEQ ID NO: 38438 - DNA, 120 bp, Artificial Sequence
  ENSG00000055917_45 (sequence is synthesized)
tttcaggatcaaagctgtcatgttggagattggtaatggctttcctgtctttgtacagttgaattcctagtcttccttcatccttgccctctgttggcacaggcattatctctgcaattt

SEQ ID NO: 38439 - DNA, 120 bp, Artificial Sequence
  ENSG00000055917_46 (sequence is synthesized)
tagaaaatgacaagtagagaatactacattgagaaactaaaccctcttcttggggtcctgatactcattcccatttgtcccagtgctgacaacccaatcttcccaatactttcaggcctg

SEQ ID NO: 38440 - DNA, 120 bp, Artificial Sequence
  ENSG00000055917_47 (sequence is synthesized)
ctctacaaaagtacctgttcttgtagaaattttacagtctgccattttgggtgcccaccccaatttttaccttttagtaagttggcatgaaattttggtaaaatctgaaaatcacatttc

SEQ ID NO: 38441 - DNA, 120 bp, Artificial Sequence
  ENSG00000055917_48 (sequence is synthesized)
agaataaaacaattgggcaaaactacctaggctttactcttgagtgtctccttttgatagggattgtttctggaccagtttgtctaagtcctggctcttattggttcatatgaaataatg

SEQ ID NO: 38442 - DNA, 120 bp, Artificial Sequence
  ENSG00000055917_49 (sequence is synthesized)
ttaacttcacttctttgtatattatgtataaattagaaaatgaaaaatgtgtgaataacattgtatgaaataaacctggtcttgtgtttttctctagataaaatacccctctgtacctca

SEQ ID NO: 38443 - DNA, 120 bp, Artificial Sequence
  ENSG00000055917_50 (sequence is synthesized)
caccctgcagctagctaaccctccccttcttcagaacagcgttttccaaagagtatgtcattttcagaggactgatttaaggcttttgcctaccaaaaagttttgggaacctgatgattc

SEQ ID NO: 38444 - DNA, 120 bp, Artificial Sequence
  ENSG00000055917_51 (sequence is synthesized)
ggggggaggggagggcaggcggcggtggcagccatgttgttgtgagtctctgtgtctcaccctcggtacttcggtggttcggaggaggagggggaggagaaggaggaggtggggtggggg

SEQ ID NO: 38445 - DNA, 120 bp, Artificial Sequence
  ENSG00000055917_52 (sequence is synthesized)
gggagggtggtaggtggagaaagaagacattgccgccaccgaaggcggaggagggggaggaccgccaagagcgacgccgccgtgtgcccaacggtcggtgtccccggctgaggcagcgcg

SEQ ID NO: 38446 - DNA, 120 bp, Artificial Sequence
  ENSG00000055917_53 (sequence is synthesized)
attgccgccaccgaaggcggaggagggggaggaccgccaagagcgacgccgccgtgtgcccaacggtcggtgtccccggctgaggcagcgcggccgcagcagccctgaaacagtcataac

SEQ ID NO: 38447 - DNA, 120 bp, Artificial Sequence
  ENSG00000055917_54 (sequence is synthesized)
ctcaaaaatgactttttaattcaaatataagattatactgggtcttggccaaagaaaagtttctgtcgtatatttctgtgttggtgctttcgtgctacagaggcgtagttgagtagctgc

SEQ ID NO: 38448 - DNA, 120 bp, Artificial Sequence
  ENSG00000055917_55 (sequence is synthesized)
gattcggcgcgctggaggttagagaccgagctgtcggccctagggttcggaaagaggggagaggccgggtggccccagagaagcatgcggattgcaagtttgatctgtggatgaaatgaa

SEQ ID NO: 38449 - DNA, 120 bp, Artificial Sequence
  ENSG00000055950_0 (sequence is synthesized)
ccggaagcctcgaggtttagtcccgcccccctctcctcgctgcttaggctccgcggcctccaagctgtagctatgacggcgcgcgggactccgagccgcttcttggccagcgttctccac

SEQ ID NO: 38450 - DNA, 120 bp, Artificial Sequence
  ENSG00000055950_1 (sequence is synthesized)
aacggactgggtcgctatgtgcagcagctgcagcgtctgagcttcagcgtcagccgcgacggcgcctcgtctcgcggcgccagggagttcgtggagcgggaggtgatcgacttcgcccga

SEQ ID NO: 38451 - DNA, 120 bp, Artificial Sequence
  ENSG00000055950_2 (sequence is synthesized)
cggaatccaggggtcgtaatatatgtaaactcgcgtccgtgctgcgtgcccagagtagtggccgaataccttaacggggctgtgcgcgaggagagcatccactgcaagtcggtcgaggag

SEQ ID NO: 38452 - DNA, 120 bp, Artificial Sequence
  ENSG00000055950_3 (sequence is synthesized)
atctcgacgctggtgcagaagctggccgaccagtcgggcttggacgtgatccgcatccgcaagcccttccacaccgacaaccctagcatccagggccagtggcaccccttcaccaacaag

SEQ ID NO: 38453 - DNA, 120 bp, Artificial Sequence
  ENSG00000055950_4 (sequence is synthesized)
agcccaggtgcaagcacagtgaagagttgccccaccaactgcagccccaggctttggactgttactccggtaaaggtggttcttcccctttgggattccaagcccaggcaaatggaaccc

SEQ ID NO: 38454 - DNA, 120 bp, Artificial Sequence
  ENSG00000055950_5 (sequence is synthesized)
atcaatgggcaagttgacagaggttctgcttgggataatgaagagctgcctgtttctttccagtgcctgcttctgggggcagtgaccttgtgaaccactcatttttatgcaagtggcatc

SEQ ID NO: 38455 - DNA, 120 bp, Artificial Sequence
  ENSG00000055950_6 (sequence is synthesized)
cctaaaacctgagatgaggaagacttcaagggttttacagggcccttgttttttaaatccaaattgataataatgatctcaaaacacagtgagaggtctgaaggctggcttctgaagaat

SEQ ID NO: 38456 - DNA, 120 bp, Artificial Sequence
  ENSG00000055950_7 (sequence is synthesized)
ccctgatgtcttattggaacaaccactgagctacggagagctctgctgtgatgggctaggcactttatatctgtgtgaatacagatttataaaacaggttaataaacttatccaaggtca

SEQ ID NO: 38457 - DNA, 120 bp, Artificial Sequence
  ENSG00000055950_8 (sequence is synthesized)
ggctgagttcctcggcgaaggagcagggccctgctggtactccattgttgctctgcctcagaagcacatagctattgccattcatcctccgcagccggctgggcagtgccaccaagccat

SEQ ID NO: 38458 - DNA, 120 bp, Artificial Sequence
  ENSG00000055950_9 (sequence is synthesized)
tggacactggcctgagactgtctgcagttgcaccgcagatcctcctgcccggctggcccgacccaccagacctccccacagtggatcctatctcatcctcattgacctctgctccagccc

SEQ ID NO: 38459 - DNA, 120 bp, Artificial Sequence
  ENSG00000055950_10 (sequence is synthesized)
ctatgctgtccgcagtttcttgcctcccgattgtccctgcactgaccactgtgtgctcagcgtgaaggctgcatagaagtgtgtacggcttgaggtttcagcatccaggctgcagacccc

SEQ ID NO: 38460 - DNA, 120 bp, Artificial Sequence
  ENSG00000055950_11 (sequence is synthesized)
cctgaacccttgtcatccactacttggctataagctccagaagtgacaagacacttcacatcttaaatatgtttcctagtttataattcatttgggcagtaaatgtttgttgagcactta

SEQ ID NO: 38461 - DNA, 120 bp, Artificial Sequence
  ENSG00000055950_12 (sequence is synthesized)
ctcccaggtctccctggggaggtagaggcacgggataaggggccagggtcagaggtccagcctctatacccgtgccccaacgtcagcccaatccaccttgcagacacgagccacacgggc

SEQ ID NO: 38462 - DNA, 120 bp, Artificial Sequence
  ENSG00000055950_13 (sequence is synthesized)
actgcactggccttgctctcccgcacgaggacggagaacacaaactccgcatctgtgggtcaggcagtttgagaggcttttgagacaggctggggattcctttccctcactctgaggctg

SEQ ID NO: 38463 - DNA, 120 bp, Artificial Sequence
  ENSG00000055950_14 (sequence is synthesized)
acccctcacttgacaacacacaggaatggaatggacaggctcacctggggatttgggggtggggtggtcagctggccaagggagtaaaaatgaagaaatagtcccctaccccccatcatc

SEQ ID NO: 38464 - DNA, 120 bp, Artificial Sequence
  ENSG00000055950_15 (sequence is synthesized)
ctgtgcctcatcctcctaaccattgagccaatgcattggtgtctcctcagttctcagggagtgtgggtggcggctccggcggatgtcaggaatgctccggaattcatacctagtggctgt

SEQ ID NO: 38465 - DNA, 120 bp, Artificial Sequence
  ENSG00000055950_16 (sequence is synthesized)
gtagaggcctccatctggcgtggggatattccaggcatgagagacatgtcatattcaacagggcacatgacatatacatggtggcaggtcctagagatgagatccacatcctaaaaatac

SEQ ID NO: 38466 - DNA, 120 bp, Artificial Sequence
  ENSG00000055950_17 (sequence is synthesized)
catgtctgtgatagggaagaaggcctgctcaccaatgatgaggcctgtgaagccacgggctgggtcataaggacacttctccttcccctcctcgaagctggttggcaaggtgaaggcctc

SEQ ID NO: 38467 - DNA, 120 bp, Artificial Sequence
  ENSG00000055950_18 (sequence is synthesized)
agcatcctagggaacaaggaaccagcagtaagtggttccgaagacaggcagggacagtggctcaaagtcagatcagtctggggtcagggatcagcgatcagggataggggcaggttgtat

SEQ ID NO: 38468 - DNA, 120 bp, Artificial Sequence
  ENSG00000055950_19 (sequence is synthesized)
ggcagatgcacctgacagcaataacttaagcatcccctgagaatgaccttatggcctcaaaacaatgtatgtttggagttccaaatctgcaagtggccaacctagagattcactccttat

SEQ ID NO: 38469 - DNA, 120 bp, Artificial Sequence
  ENSG00000055950_20 (sequence is synthesized)
ctatgaagaacatctgagcccctagcccatcctgtggaacacatgctgtccaggggatcaaggccctttgttttgggttaaatgaagtttgccaggtggaggtgattagggggaggatgc

SEQ ID NO: 38470 - DNA, 120 bp, Artificial Sequence
  ENSG00000055950_21 (sequence is synthesized)
taagtgaaaatgctataaaaactgcatggtttttacaaaggggaatggttctccagtgcagcccgccgccactggagtgccctgtatggaagtccccttaataaaccatccgtctccttc

SEQ ID NO: 38471 - DNA, 120 bp, Artificial Sequence
  ENSG00000055950_22 (sequence is synthesized)
ccgcagatcctcctgcccggctggcccgacccactcgaggacaagctctccttcgatcccgccggacgccgggagacgtgacccagatcctggggaacactgttcgccacgcggccccct

SEQ ID NO: 38472 - DNA, 120 bp, Artificial Sequence
  ENSG00000055950_23 (sequence is synthesized)
ccccgcgctggtccccgactccgtggtggccggtttgcaccccgcgcagcccgaggcctggcccgcgcccctctagagccgtcatgcaggaccgggggacttggtggtgagaaaggcctg

SEQ ID NO: 38473 - DNA, 120 bp, Artificial Sequence
  ENSG00000055950_24 (sequence is synthesized)
gcccagcttggagggtagaatggacgtgggggaggccttgcccgacccccggcccgcagccccaggctcacgccagggcgccgcccgcactcctcgccttgctcacctttgcgctcggat

SEQ ID NO: 38474 - DNA, 120 bp, Artificial Sequence
  ENSG00000055950_25 (sequence is synthesized)
ttgcgctcggatccggggccatagagacagcgacgcgcggctccgcggccccacagcaccagctgcgagaggaaggggccgcggctggaggcggggcggggggggggtggtggaggcgga

SEQ ID NO: 38475 - DNA, 120 bp, Artificial Sequence
  ENSG00000055950_26 (sequence is synthesized)
gggtcggggtgggtgtggaggtggcaacgactccccgggtaggtcgcccccagtcaggggtcatactgctcactgtcccgggtcgcttagggagttcgtggagcgggaggtgatcgactt

SEQ ID NO: 38476 - DNA, 120 bp, Artificial Sequence
  ENSG00000055955_0 (sequence is synthesized)
agaagcctcctggcagacactggagccacgatgaagcccccaaggcctgtccgtacctgcagcaaagttctcgtcctgctttcactgctggccatccaccagactactactgccgaaaag

SEQ ID NO: 38477 - DNA, 120 bp, Artificial Sequence
  ENSG00000055955_1 (sequence is synthesized)
aatggcatcgacatctacagcctcaccgtggactccagggtctcatcccgatttgcccacacggtcgtcaccagccgagtggtcaatagggccaatactgtgcaggaggccaccttccag

SEQ ID NO: 38478 - DNA, 120 bp, Artificial Sequence
  ENSG00000055955_2 (sequence is synthesized)
atggagctgcccaagaaagccttcatcaccaacttctccatgatcatcgatggcatgacctacccagggatcatcaaggagaaggctgaagcccaggcacagtacagcgcagcagtggcc

SEQ ID NO: 38479 - DNA, 120 bp, Artificial Sequence
  ENSG00000055955_3 (sequence is synthesized)
aagggaaagagcgctggcctcgtcaaggccaccgggagaaacatggagcagttccaggtgtcggtcagtgtggctcccaatgccaagatcacctttgagctggtctatgaggagctgctc

SEQ ID NO: 38480 - DNA, 120 bp, Artificial Sequence
  ENSG00000055955_4 (sequence is synthesized)
aagcggcgtttgggggtgtacgagctgctgctgaaagtgcggccccagcagctggtcaagcacctgcagatggacattcacatcttcgagccccagggcatcagctttctggagacagag

SEQ ID NO: 38481 - DNA, 120 bp, Artificial Sequence
  ENSG00000055955_5 (sequence is synthesized)
agcaccttcatgaccaaccagctggtagacgccctcaccacctggcagaataagaccaaggctcacatccggttcaagccaacactttcccagcagcaaaagtccccagagcagcaagaa

SEQ ID NO: 38482 - DNA, 120 bp, Artificial Sequence
  ENSG00000055955_6 (sequence is synthesized)
acagtcctggacggcaacctcattatccgctatgatgtggaccgggccatctccgggggctccattcagatcgagaacggctactttgtacactactttgcccccgagggcctaaccaca

SEQ ID NO: 38483 - DNA, 120 bp, Artificial Sequence
  ENSG00000055955_7 (sequence is synthesized)
atgcccaagaatgtggtctttgtcattgacaagagcggctccatgagtggcaggaaaatccagcagacccgggaagccctaatcaagatcctggatgacctcagccccagagaccagttc

SEQ ID NO: 38484 - DNA, 120 bp, Artificial Sequence
  ENSG00000055955_8 (sequence is synthesized)
aacctcatcgtcttcagtacagaagcaactcagtggaggccatcactggtgccagcctcagccgagaacgtgaacaaggccaggagctttgctgcgggcatccaggccctgggagggacc

SEQ ID NO: 38485 - DNA, 120 bp, Artificial Sequence
  ENSG00000055955_9 (sequence is synthesized)
aacatcaatgatgcaatgctgatggctgtgcagttgctggacagcagcaaccaggaggagcggctgcccgaagggagtgtctcactcatcatcctgctcaccgatggcgaccccactgtg

SEQ ID NO: 38486 - DNA, 120 bp, Artificial Sequence
  ENSG00000055955_10 (sequence is synthesized)
ggggagactaaccccaggagcatccagaataacgtgcgggaagctgtaagtggccggtacagcctcttctgcctgggcttcggtttcgacgtcagctatgccttcctggagaagctggca

SEQ ID NO: 38487 - DNA, 120 bp, Artificial Sequence
  ENSG00000055955_11 (sequence is synthesized)
ctggacaatggcggcctggcccggcgcatccatgaggactcagactctgccctgcagctccaggacttctaccaggaagtggccaacccactgctgacagcagtgaccttcgagtaccca

SEQ ID NO: 38488 - DNA, 120 bp, Artificial Sequence
  ENSG00000055955_12 (sequence is synthesized)
agcaatgccgtggaggaggtcactcagaacaacttccggctcctcttcaagggctcagagatggtggtggctgggaagctccaggaccgggggcctgatgtgctcacagccacagtcagt

SEQ ID NO: 38489 - DNA, 120 bp, Artificial Sequence
  ENSG00000055955_13 (sequence is synthesized)
agtgtggcagagcaggaggcggagttccagagccccaagtatatcttccacaacttcatggagaggctctgggcatacctgactatccagcagctgctggagcaaactgtctccgcatcc

SEQ ID NO: 38490 - DNA, 120 bp, Artificial Sequence
  ENSG00000055955_14 (sequence is synthesized)
gatgctgatcagcaggccctccggaaccaagcgctgaatttatcacttgcctacagctttgtcacgcctctcacatctatggtagtcaccaaacccgatgaccaagagcagtctcaagtt

SEQ ID NO: 38491 - DNA, 120 bp, Artificial Sequence
  ENSG00000055955_15 (sequence is synthesized)
gctgagaagcccatggaaggcgaaagtagaaacaggaatgtccactcaggttccactttcttcaaatattatctccagggagcaaaaataccaaaaccagaggcttccttttctccaaga

SEQ ID NO: 38492 - DNA, 120 bp, Artificial Sequence
  ENSG00000055955_16 (sequence is synthesized)
agaggatggaatagacaagctggagctgctggctcccggatgaatttcagacctggggttctcagctccaggcaacttggactcccaggacctcctgatgttcctgaccatgctgcttac

SEQ ID NO: 38493 - DNA, 120 bp, Artificial Sequence
  ENSG00000055955_17 (sequence is synthesized)
caccccttccgccgtctggccatcttgcctgcttcagcaccaccagccacctcaaatcctgatccagctgtgtctcgtgtcatgaatatgaaaatcgaagaaacaaccatgacaacccaa

SEQ ID NO: 38494 - DNA, 120 bp, Artificial Sequence
  ENSG00000055955_18 (sequence is synthesized)
accccagcccccatacaggctccctctgccatcctgccactgcctgggcagagtgtggagcggctctgtgtggaccccagacaccgccaggggccagtgaacctgctctcagaccctgag

SEQ ID NO: 38495 - DNA, 120 bp, Artificial Sequence
  ENSG00000055955_19 (sequence is synthesized)
caaggggttgaggtgactggccagtatgagagggagaaggctgggttctcatggatcgaagtgaccttcaagaaccccctggtatgggttcacgcatcccctgaacacgtggtggtgact

SEQ ID NO: 38496 - DNA, 120 bp, Artificial Sequence
  ENSG00000055955_20 (sequence is synthesized)
cggaaccgaagaagctctgcgtacaagtggaaggagacgctattctcagtgatgcccggcctgaagatgaccatggacaagacgggtctcctgctgctcagtgacccagacaaagtgacc

SEQ ID NO: 38497 - DNA, 120 bp, Artificial Sequence
  ENSG00000055955_21 (sequence is synthesized)
atcggcctgttgttctgggatggccgtggggaggggctccggctccttctgcgtgacactgaccgcttctccagccacgttggagggacccttggccagttttaccaggaggtgctctgg

SEQ ID NO: 38498 - DNA, 120 bp, Artificial Sequence
  ENSG00000055955_22 (sequence is synthesized)
ggatctccagcagcatcagatgacggcagacgcacgctgagggttcagggcaatgaccactctgccaccagagagcgcaggctggattaccaggaggggcccccgggagtggagatttcc

SEQ ID NO: 38499 - DNA, 120 bp, Artificial Sequence
  ENSG00000055955_23 (sequence is synthesized)
tgctggtctgtggagctgtagttctgatggaaggagctgtgcccaccctgtacacttggcttccccctgcaactgcagggccgcttctggggcctggaccaccatggggaggaagagtcc

SEQ ID NO: 38500 - DNA, 120 bp, Artificial Sequence
  ENSG00000055955_24 (sequence is synthesized)
cactcattacaaataaagaaaggtggtgtgagcctgggaagtgggtgtctccagttccatgtggccaaatcctagggcctcaacctcgcatcctgaaccttagcatcgtggaacacagaa

SEQ ID NO: 38501 - DNA, 120 bp, Artificial Sequence
  ENSG00000055955_25 (sequence is synthesized)
gcttccactgtcagctctcaagagcccatggccaggaaggcccatgctgagctttcagtccagccccttcattttacaaacaaggaaactgagctcgaaccacccatttgagatgtcact

SEQ ID NO: 38502 - DNA, 120 bp, Artificial Sequence
  ENSG00000055955_26 (sequence is synthesized)
gtggcccccagctagaggcccagggctgggagcattctccaggagcagaggttcagtctgcttcatggtctcttggaccagttttgactacaaaaaaaaaaaaaaaaaaaatagagtgaa

SEQ ID NO: 38503 - DNA, 120 bp, Artificial Sequence
  ENSG00000055955_27 (sequence is synthesized)
attgggctcagtcctggctgtggagggtagtgccttgcccagctcctctggctggtgacagccctcgggcctcagttcagttgtatctgatcaggacttgaccacacagaggcttccttt

SEQ ID NO: 38504 - DNA, 120 bp, Artificial Sequence
  ENSG00000055955_28 (sequence is synthesized)
agtgtgccccaggtgggctgcacagagaagtgggcagtcataaagcccagcctttatgacacccccaaccctgcaggacttctaccaggaagtggccaacccactgctgacagcagtgac

SEQ ID NO: 38505 - DNA, 120 bp, Artificial Sequence
  ENSG00000055955_29 (sequence is synthesized)
ggtttatgatgtctgaactttttagtataaaccatctgaaatactaaaacaaatagaaggaaaagttgcagggagagttctggtgggctatgcatgagcagggaaggcttccgcaagaaa

SEQ ID NO: 38506 - DNA, 120 bp, Artificial Sequence
  ENSG00000055955_30 (sequence is synthesized)
ggggctggtctgagccctgaaaaagggcaaggttttggggaggttagcagtgggatggaaatgggattggaacagagcacagaaacccagaatttggggtaaaggggctgaatggggata

SEQ ID NO: 38507 - DNA, 120 bp, Artificial Sequence
  ENSG00000055955_31 (sequence is synthesized)
cttggtactgagcccattaccggggcccaggccttcctcagaaaccagctgtgcttgggaacaggcagcgcccctcccctgcgtgtgtctcccaggcttcctctgtctctgacccttact

SEQ ID NO: 38508 - DNA, 120 bp, Artificial Sequence
  ENSG00000055955_32 (sequence is synthesized)
ctgcctgtggatgacacaggggcatggcagggattcaatgagacaatggagtgattctcatgagaccagcacatacaggctctcggcagccggtctgtgcacctgcaagcacagatggag

SEQ ID NO: 38509 - DNA, 86 bp, Artificial Sequence
  ENSG00000055955_33 (sequence is synthesized)
tggatctcggctcattgcaagctccacctcccagcctacacagaacatcactttccaaacggagtccagtgtggcagagcaggagg

SEQ ID NO: 38510 - DNA, 120 bp, Artificial Sequence
  ENSG00000055955_34 (sequence is synthesized)
gggttgagatctcagcctcccaggtagcagagtttggacccagcgttctccccgatcttccctgcatcctgaccaagaccccaaccgtgcccccaacagactccccctgggagattcagc

SEQ ID NO: 38511 - DNA, 120 bp, Artificial Sequence
  ENSG00000055955_35 (sequence is synthesized)
ctattcactgatgaggaaagtgaagccgggtctcctgtctccccaaattcattgcacctacgatatagtccaggattgggtagcaagattaaacacaagcgcttcaaattgatgaaaacc

SEQ ID NO: 38512 - DNA, 120 bp, Artificial Sequence
  ENSG00000055957_0 (sequence is synthesized)
agcaggagccttagagcatggacggtgccatggggcctcgggggctgctgttgtgcatgtacctggtatctctcctcatcctgcaggccatgcctgccctgggctcggctacaggcaggt

SEQ ID NO: 38513 - DNA, 120 bp, Artificial Sequence
  ENSG00000055957_1 (sequence is synthesized)
ccaagagcagcgagaagcgacaggctgtggacaccgctgtcgatggcgtgttcatccggagtttgaaagtcaactgcaaagtcacctctcgcttcgcccactatgttgtcaccagccaag

SEQ ID NO: 38514 - DNA, 120 bp, Artificial Sequence
  ENSG00000055957_2 (sequence is synthesized)
tggtcaacactgccaatgaagccagggaagtggccttcgacctggaaatccccaagacagcattcatcagtgactttgccgttacagcagatggaaacgcatttatcggagacataaagg

SEQ ID NO: 38515 - DNA, 120 bp, Artificial Sequence
  ENSG00000055957_3 (sequence is synthesized)
acaaggtgactgcatggaagcagtaccggaaagcagctatctcaggagagaatgccggccttgtcagggcctcggggagaactatggagcaattcaccatccacctcaccgtcaatcccc

SEQ ID NO: 38516 - DNA, 120 bp, Artificial Sequence
  ENSG00000055957_4 (sequence is synthesized)
agagcaaggtcacgtttcagctgacttatgaggaagtgctgaagagaaaccatatgcagtatgaaattgtcatcaaagtcaagcccaagcagctggtgcatcattttgagattgatgtgg

SEQ ID NO: 38517 - DNA, 120 bp, Artificial Sequence
  ENSG00000055957_5 (sequence is synthesized)
acatcttcgagccccaggggatcagcaagctggatgcccaggcctctttcctgccgaaggaactggcagcccaaactatcaagaagtccttctcaggaaaaaagggtcatgtgctgttcc

SEQ ID NO: 38518 - DNA, 120 bp, Artificial Sequence
  ENSG00000055957_6 (sequence is synthesized)
gtcccaccgtgagccagcagcagtcctgccccacatgctctacatccttactgaacgggcacttcaaggtgacctacgatgtcagtcgagacaagatctgcgacctcctggtggccaata

SEQ ID NO: 38519 - DNA, 120 bp, Artificial Sequence
  ENSG00000055957_7 (sequence is synthesized)
accactttgcccacttctttgccccccaaaacctgacaaacatgaacaagaacgtggtttttgtgattgacatcagtggctccatgagaggccagaaagtgaagcagaccaaggaggcac

SEQ ID NO: 38520 - DNA, 120 bp, Artificial Sequence
  ENSG00000055957_8 (sequence is synthesized)
tccttaaaattctgggggacatgcagccaggggactactttgacctggttctttttgggactcgagtacaatcgtggaagggctcgctggtgcaagcatctgaggccaacctacaagcag

SEQ ID NO: 38521 - DNA, 120 bp, Artificial Sequence
  ENSG00000055957_9 (sequence is synthesized)
ctcaagactttgtgcggggcttttccctggatgaggccacaaacctgaatggaggtttgctccggggaattgagatcttgaaccaagttcaggaaagcctcccagaactcagcaaccatg

SEQ ID NO: 38522 - DNA, 120 bp, Artificial Sequence
  ENSG00000055957_10 (sequence is synthesized)
cctcaatactcatcatgttgacagatggcgatcccacagagggggtgacggaccgttcccaaatcctcaagaacgtccgcaacgccatccggggcaggttcccgctctacaacctgggtt

SEQ ID NO: 38523 - DNA, 120 bp, Artificial Sequence
  ENSG00000055957_11 (sequence is synthesized)
tcggccacaatgtggactttaactttctggaggtcatgtccatggagaacaacggacgggcccagagaatctacgaggaccatgatgccacccagcagctgcagggtttctacagccagg

SEQ ID NO: 38524 - DNA, 120 bp, Artificial Sequence
  ENSG00000055957_12 (sequence is synthesized)
tggatttgcagtacccccaggatgctgtcttggccctgacccagaaccaccataaacagtactacgaaggctcagagattgtggtggccgggcgcattgctgacaacaaacagagcagct

SEQ ID NO: 38525 - DNA, 120 bp, Artificial Sequence
  ENSG00000055957_13 (sequence is synthesized)
tcaaggctgatgtgcaggcccatggggagggacaagaattcagtataacctgcctagtggatgaggaggagatgaagaaactgctccgagagcgtggccacatgctggagaaccacgtcg

SEQ ID NO: 38526 - DNA, 120 bp, Artificial Sequence
  ENSG00000055957_14 (sequence is synthesized)
agcgcctctgggcctacctcaccatccaggagctgctggccaagcggatgaaggtggacagggaggagagggccaacctgtcatcccaggccctgcagatgtcgctggactatgggtttg

SEQ ID NO: 38527 - DNA, 120 bp, Artificial Sequence
  ENSG00000055957_15 (sequence is synthesized)
tgaccccactgacctccatgagcatcaggggcatggcggaccaggacggcctgaagcccaccatcgacaagccctcagaggattctccgcctttggagatgctgggacccagaaggacgt

SEQ ID NO: 38528 - DNA, 120 bp, Artificial Sequence
  ENSG00000055957_16 (sequence is synthesized)
tcgtgctgtcagccttgcagccttctcctactcattccagctccaatacccagcggctgccagaccgagtgaccggcgtggacacagaccctcacttcatcatccacgtgccccagaaag

SEQ ID NO: 38529 - DNA, 120 bp, Artificial Sequence
  ENSG00000055957_17 (sequence is synthesized)
aggacaccctgtgcttcaacatcaatgaggagcctggtgttatcctgagcctggtacaggaccccaacacaggcttctcagtgaatggacagctcattggcaacaaggccaggagccctg

SEQ ID NO: 38530 - DNA, 120 bp, Artificial Sequence
  ENSG00000055957_18 (sequence is synthesized)
ggcagcatgacggcacgtacttcgggcggctgggaatcgcaaaccctgccacggactttcagttggaagtgactcctcagaacattacgctgaaccccggctttggtgggcctgtgtttt

SEQ ID NO: 38531 - DNA, 120 bp, Artificial Sequence
  ENSG00000055957_19 (sequence is synthesized)
cctggagggaccaagctgtgctgcggcaggacggggtggtggtgaccatcaacaagaagaggaacctggtggtgtctgtggacgacggtggcacctttgaggttgttttgcaccgagtgt

SEQ ID NO: 38532 - DNA, 120 bp, Artificial Sequence
  ENSG00000055957_20 (sequence is synthesized)
ggaaggggagctcggtccaccaggacttcctgggcttctatgtgctggacagtcatcggatgtcagcccggacgcacgggctgctggggcaatttttccaccccatcggttttgaagtgt

SEQ ID NO: 38533 - DNA, 120 bp, Artificial Sequence
  ENSG00000055957_21 (sequence is synthesized)
ctgacatccacccaggctctgaccccacaaagccagatgccacgatggtggtgaggaaccgccggctcacggtcaccaggggtttgcaaaaagactacagcaaggacccgtggcatgggg

SEQ ID NO: 38534 - DNA, 120 bp, Artificial Sequence
  ENSG00000055957_22 (sequence is synthesized)
ccgaggtgtcctgctggttcattcacaacaatggggctggactcatcgatggtgcctacactgattatatcgtccccgacatcttctgagccctctggccagcacgcctgtcctcccccg

SEQ ID NO: 38535 - DNA, 120 bp, Artificial Sequence
  ENSG00000055957_23 (sequence is synthesized)
gggccaaggcagaggaggaggacgacatcctgacctgctgctgaggctgtacctccttgactaagctggttccttgtgtcaaagcacctcatgccttccattaaagagaggccgtgtcca

SEQ ID NO: 38536 - DNA, 120 bp, Artificial Sequence
  ENSG00000055957_24 (sequence is synthesized)
ccaagctgtgctgcggcaggacgggtaacctgccagggcctgggcaagatgcagggggaggtgtggcctgggcccaggactctgctgagtctgcagggccctcgtccctgagccatgtct

SEQ ID NO: 38537 - DNA, 120 bp, Artificial Sequence
  ENSG00000055957_25 (sequence is synthesized)
tgctcccaccgcaccttagctctgaatgccacccctgtctctaccaaacaaagccagctcatcctcccaggcccagcaaagaggccacctcttcccctcagccctcctgctctcttcctc

SEQ ID NO: 38538 - DNA, 120 bp, Artificial Sequence
  ENSG00000055957_26 (sequence is synthesized)
tgctgaactccagatttctctgggcttctcatttggcatgtcttagtctgcattgtctcatgacttttccttcctttactaattcgttcattcattcattcattcattcaacaaactgtg

SEQ ID NO: 38539 - DNA, 120 bp, Artificial Sequence
  ENSG00000055957_27 (sequence is synthesized)
ccaagcaccagagcaatgctgggcagcagagctataggaagaggtggggagagtctgctgtggaggtcacaggtgatgagtgggagtcacagaacacggactctgatattagacagcctg

SEQ ID NO: 38540 - DNA, 83 bp, Artificial Sequence
  ENSG00000055957_28 (sequence is synthesized)
tgggaggctgaggcaggaggacgaagcaagatcccatctttttttttaaaaaaataatttgcttcaatgttgcagattgatgt

SEQ ID NO: 38541 - DNA, 120 bp, Artificial Sequence
  ENSG00000055957_29 (sequence is synthesized)
aaggccatggggtgggggcgtggtcataagggttgggtcccagatgacaagggcagctgaatggagagggatgcagtgcagccgcacctgccctctcggccacctggctctgcagggtgg

SEQ ID NO: 38542 - DNA, 120 bp, Artificial Sequence
  ENSG00000055957_30 (sequence is synthesized)
gaattattgctggcacctaagtggtggctgagttgagggatgcaggcatgtacaccttcatttggtcagtatttttggagtgcctactgagtaccaggccctgtgatcagggctgggtgg

SEQ ID NO: 38543 - DNA, 120 bp, Artificial Sequence
  ENSG00000055957_31 (sequence is synthesized)
gtgcgtgcctgcccaactcccatgccttctcccaggggtgccgcttactagtcccagcttaagaacaaggatcggagtggccagataacgcagagcatctcctcattctagaagggccac

SEQ ID NO: 38544 - DNA, 120 bp, Artificial Sequence
  ENSG00000055957_32 (sequence is synthesized)
gtgtcccgggagccaatcaagggcatgtgatgttgagtggacatccctgcttggtggcctcaggccagccccaccagtgaggaaagagtcatcagagggatcagcagctccagggaaggc

SEQ ID NO: 38545 - DNA, 120 bp, Artificial Sequence
  ENSG00000055957_33 (sequence is synthesized)
ggtcctgcccctctctccgtcaccatggctcccaacactggttgagcacccaccatgtgtcaccacccaggcctgagaacacagggatggggactaacccctcagggtgagctctgatgt

SEQ ID NO: 38546 - DNA, 120 bp, Artificial Sequence
  ENSG00000055957_34 (sequence is synthesized)
gctcttcttgggcagggaactccctgaattctctaacttcctctttatctctgagcttcggtttgctcatctgctagacggggggtttctgtgagtcccaggaccgccacagggatcacg

SEQ ID NO: 38547 - DNA, 120 bp, Artificial Sequence
  ENSG00000055957_35 (sequence is synthesized)
agaagtactgaatgtccagattgatgtggacatcttcgagccccaggggatcagcaagctggatgcccaggcctctttcctgccgaaggaactggcagcccaaactatcaagaagtcctt

SEQ ID NO: 38548 - DNA, 120 bp, Artificial Sequence
  ENSG00000056050_0 (sequence is synthesized)
ggaagcggttggcggcgctcggaagcggccgcggatcggggaattctgctggcgctgcagctgcagaatggtcggcggtggcgggaagcgcaggcccggcggagaggggccgcagtgtga

SEQ ID NO: 38549 - DNA, 120 bp, Artificial Sequence
  ENSG00000056050_1 (sequence is synthesized)
aaaaacaactgatgtgaagaaaagtaaattctgtgaagctgatgtctccagtgaccttcgaaaagaagtagaaaatcattataagctttctttacctgaagatttctatcacttctggaa

SEQ ID NO: 38550 - DNA, 120 bp, Artificial Sequence
  ENSG00000056050_2 (sequence is synthesized)
gttctgtgaagaacttgatcctgaaaagccatctgattcactttctgcaagccttggacttcaattagttggtccttatgatatccttgctggaaaacataaaacgaagaaaaaatcaac

SEQ ID NO: 38551 - DNA, 120 bp, Artificial Sequence
  ENSG00000056050_3 (sequence is synthesized)
aggcctgaattttaaccttcactggaggttttactatgatcctcctgagttccagaccattattattggagataataaaactcagtaccacatggggtatttcagggattctcctgatga

SEQ ID NO: 38552 - DNA, 120 bp, Artificial Sequence
  ENSG00000056050_4 (sequence is synthesized)
atttcctgtatatgttggtataaatgaagcaaagaaaaattgtataattgttccaaatggagataatgtatttgctgcagtcaaattatttttgacgaaaaaacttagagaaataacgga

SEQ ID NO: 38553 - DNA, 120 bp, Artificial Sequence
  ENSG00000056050_5 (sequence is synthesized)
ctcttgaaaaacatagatgaaaaactcacagaagcagccagagaattggggtactcgcttgaacagagaaccgtgaagatgaaacagagagataagaaagttgtgacaaagacctttcat

SEQ ID NO: 38554 - DNA, 120 bp, Artificial Sequence
  ENSG00000056050_6 (sequence is synthesized)
ggtgcaggcttggttgttccagtagataaaaatgatgttgggtaccgagagctccctgaaacagatgctgacctcaagagaatttgcaagacaatagttgaggctgcaagtgatgaggag

SEQ ID NO: 38555 - DNA, 120 bp, Artificial Sequence
  ENSG00000056050_7 (sequence is synthesized)
agactaaaagcttttgctcccattcaggaaatgatgacttttgtgcagtttgctaatgatgaatgtgattatggcatggggcttgaattgggaatggatctcttttgctatggctcacat

SEQ ID NO: 38556 - DNA, 120 bp, Artificial Sequence
  ENSG00000056050_8 (sequence is synthesized)
tattttcataaagttgctggccagcttttacctcttgcatataatctgttgaagaggaatctgtttgcagaaattattgaggagcatctggcaaacagaagtcaagagaacatagaccaa

SEQ ID NO: 38557 - DNA, 120 bp, Artificial Sequence
  ENSG00000056050_9 (sequence is synthesized)
cttgctgcatgagtaaggtggctttgattggtgtacagtatttcaaaggactagtattaaacttgtgatttttgttttgtttttaaggaatacaaaaaataaacatttactaaaaacgtt

SEQ ID NO: 38558 - DNA, 120 bp, Artificial Sequence
  ENSG00000056050_10 (sequence is synthesized)
gaagactactacccaaggtggcacaagttgtattagtacaaagtcttaggaggaaaaaccctctttataatcttcttacttttgaagactgattcattttctaactatgtagataatctt

SEQ ID NO: 38559 - DNA, 120 bp, Artificial Sequence
  ENSG00000056097_0 (sequence is synthesized)
ctgttctccgctgaggaggagcggggcagaggagggaggcagcgggtgagagttcagagttcagcagcagcagcccgagcccatgattcccatatgccctgtagtttctttcacctatgt

SEQ ID NO: 38560 - DNA, 120 bp, Artificial Sequence
  ENSG00000056097_1 (sequence is synthesized)
gcccagccggctgggggaagatgccaaaatggcgaccggcaactactttggattcacccacagcggggcggcggcggcggcggctgcggcccaatatagccagcagccagcttcgggtgt

SEQ ID NO: 38561 - DNA, 120 bp, Artificial Sequence
  ENSG00000056097_2 (sequence is synthesized)
agcctattctcatccaactacagttgctagctacactgtccatcaggctccagtagctgctcacacagttactgctgcctatgcaccagcagccgccacagttgcagttgccaggcctgc

SEQ ID NO: 38562 - DNA, 120 bp, Artificial Sequence
  ENSG00000056097_3 (sequence is synthesized)
tccagtagctgttgcagctgctgcaacagctgctgcttatggaggctaccccactgcacacacagcaactgactatggttatactcagaggcaacaagaagcaccaccaccaccaccccc

SEQ ID NO: 38563 - DNA, 120 bp, Artificial Sequence
  ENSG00000056097_4 (sequence is synthesized)
agctactacacaaaactaccaggattcatactcatatgtaaggtccacagctcctgctgtagcttatgatagtaagcaatactaccaacaaccaacagcaactgctgctgctgtagctgc

SEQ ID NO: 38564 - DNA, 120 bp, Artificial Sequence
  ENSG00000056097_5 (sequence is synthesized)
cgctgcccaacctcagccttctgttgctgaaacttactatcagacagcccccaaagcaggttacagccaaggtgcaactcagtatactcaagcccagcaaactcgacaagtgacagccat

SEQ ID NO: 38565 - DNA, 120 bp, Artificial Sequence
  ENSG00000056097_6 (sequence is synthesized)
aaaaccagccacaccaagtccagctaccactactttctccatctatcctgtatcctccaccgtacagccagtagcagctgcggctactgtggtgccatcctatactcagagtgctactta

SEQ ID NO: 38566 - DNA, 120 bp, Artificial Sequence
  ENSG00000056097_7 (sequence is synthesized)
cagtaccacagcagttacatattctggtacgtcttattcaggttatgaagcagcagtgtattcagctgcatcttcctactatcaacagcagcagcagcaacagaagcaggcagcagcagc

SEQ ID NO: 38567 - DNA, 120 bp, Artificial Sequence
  ENSG00000056097_8 (sequence is synthesized)
agctgctgctgctgctgcaacagctgcctggacagggaccacctttactaaaaaagcaccattccaaaataaacaactgaaaccaaaacagcctcccaaaccaccacagattcactattg

SEQ ID NO: 38568 - DNA, 120 bp, Artificial Sequence
  ENSG00000056097_9 (sequence is synthesized)
tgatgtttgtaagatcagctgtgctggaccacagacttataaagaacatttagaaggacagaaacataaaaaaaaagaagctgcattgaaagcctcacaaaataccagcagcagcaacag

SEQ ID NO: 38569 - DNA, 120 bp, Artificial Sequence
  ENSG00000056097_10 (sequence is synthesized)
ttctactcgtgggactcaaaatcagctacgttgtgagctctgcgatgtgtcttgtacaggagcagatgcgtatgctgcccacattcgtggtgctaagcatcagaaagtggttaagttaca

SEQ ID NO: 38570 - DNA, 120 bp, Artificial Sequence
  ENSG00000056097_11 (sequence is synthesized)
cacaaaacttggtaaacccattccatcaacagaaccaaatgttgttagccaagctacttcttcaacagctgtatctgcttcaaagccgactgcctctccttcaagcattgcagcaaacaa

SEQ ID NO: 38571 - DNA, 120 bp, Artificial Sequence
  ENSG00000056097_12 (sequence is synthesized)
ttgtactgtgaatacgtcatcagttgcaacgtcttcaatgaagggtcttacgactacaggaaactcgtctcttaatagcacatctaacactaaagtatcagcagtgcctacaaatatggc

SEQ ID NO: 38572 - DNA, 120 bp, Artificial Sequence
  ENSG00000056097_13 (sequence is synthesized)
tgccaagaaaacatctacccccaaaataaattttgttggtggtaataagctgcagtcaacaggaaataaagcagaagacataaaaggaaccgaatgtgttaaaagtactcctgtcacttc

SEQ ID NO: 38573 - DNA, 120 bp, Artificial Sequence
  ENSG00000056097_14 (sequence is synthesized)
tgctgtgcagattcctgaagtaaagcaagacacagtgtcagaaccagtcacacctgcatctcttgctgctttacagagtgatgtgcagccagtgggccatgattatgtggaagaggtacg

SEQ ID NO: 38574 - DNA, 120 bp, Artificial Sequence
  ENSG00000056097_15 (sequence is synthesized)
aaatgatgaaggaaaagtaattcggttccattgtaaattatgcgagtgcagctttaatgatcccaatgctaaggagatgcacttaaaagggcgaagacacagacttcaatataaaaaaaa

SEQ ID NO: 38575 - DNA, 120 bp, Artificial Sequence
  ENSG00000056097_16 (sequence is synthesized)
agtaaatccagatttgcaagtagaagtaaagcctagtattcgagcaagaaagattcaagaagagaaaatgaggaagcaaatgcagaaggaggagtactggcgaagacgagaagaagagga

SEQ ID NO: 38576 - DNA, 120 bp, Artificial Sequence
  ENSG00000056097_17 (sequence is synthesized)
gcgttggagaatggaaatgagacgttatgaagaggacatgtactggaggagaatggaggaagaacaacatcattgggatgatcgccgccgaatgccagatggaggttatcctcatggtcc

SEQ ID NO: 38577 - DNA, 120 bp, Artificial Sequence
  ENSG00000056097_18 (sequence is synthesized)
tccaggcccattaggccttctgggagtccgaccaggcatgcctcctcagcctcaggggcctgcacccttacgtcgtcctgactcatctgatgaccgttatgtaatgacaaaacatgccac

SEQ ID NO: 38578 - DNA, 120 bp, Artificial Sequence
  ENSG00000056097_19 (sequence is synthesized)
aaaattgtttctattactgaacgtgctttaaaactcgtttcagacagtttgtctgaacatgagaagaacaagaacaaagagggagatgataagaaagagggaggtaaagacagagctttg

SEQ ID NO: 38579 - DNA, 120 bp, Artificial Sequence
  ENSG00000056097_20 (sequence is synthesized)
aaaggagttttgcgagtgggagtattggcaaaaggattacttctccgaggagatagaaatgtcaaccttgttttgctgtgctcagagaaaccttcaaagacattattaagccgtattgca

SEQ ID NO: 38580 - DNA, 120 bp, Artificial Sequence
  ENSG00000056097_21 (sequence is synthesized)
gaaaacctacccaaacagcttgctgttataagccctgagaagtatgacataaaatgtgctgtatctgaagcggcaataattttgaattcatgtgtggaacccaaaatgcaagtcactatc

SEQ ID NO: 38581 - DNA, 120 bp, Artificial Sequence
  ENSG00000056097_22 (sequence is synthesized)
acactgacatctccaattattcgagaagagaacatgagggaaggagatgtaacctcgggtatggtgaaagacccaccggacgtcttggacaggcaaaaatgccttgacgctctggctgct

SEQ ID NO: 38582 - DNA, 120 bp, Artificial Sequence
  ENSG00000056097_23 (sequence is synthesized)
ctacgccacgctaagtggttccaggctagagctaatggtctgcagtcctgtgtgattatcatacgcattcttcgagacctctgtcagcgagttccaacttggtctgattttccaagctgg

SEQ ID NO: 38583 - DNA, 120 bp, Artificial Sequence
  ENSG00000056097_24 (sequence is synthesized)
gctatggagttactagtagagaaagcaatcagcagtgcttctagccctcagagccctggggatgcactgagaagagtttttgaatgcatttcttcagggattattcttaaaggtagtcct

SEQ ID NO: 38584 - DNA, 120 bp, Artificial Sequence
  ENSG00000056097_25 (sequence is synthesized)
ggacttctggatccttgtgaaaaggatccctttgataccttggcaacaatgactgaccagcagcgtgaagacatcacatccagtgcacagtttgcattgagactccttgcattccgccag

SEQ ID NO: 38585 - DNA, 120 bp, Artificial Sequence
  ENSG00000056097_26 (sequence is synthesized)
atacacaaagttctaggcatggatccattaccgcaaatgagccaacgttttaacatccacaacaacaggaaacgaagaagagatagtgatggagttgatggatttgaagctgaggggaaa

SEQ ID NO: 38586 - DNA, 120 bp, Artificial Sequence
  ENSG00000056097_27 (sequence is synthesized)
aaagacaaaaaagattatgataacttttaaaaagtgtctgtaaatcttcagtgttaaaaaaacagatgcccatttgttggctgtttttcattcataataatgtctacattgaaaaattta

SEQ ID NO: 38587 - DNA, 120 bp, Artificial Sequence
  ENSG00000056097_28 (sequence is synthesized)
tcaagaatttaaaggatttcatggaagaaccaagtttttctatgatattaaaaaatgtacagtgttaggtattatttgaatggaaagacacccaaaaaaaaaaatgtgctccgactaggg

SEQ ID NO: 38588 - DNA, 120 bp, Artificial Sequence
  ENSG00000056097_29 (sequence is synthesized)
ggaaaacagtagttccgattttttcccattatttttattttattttctggttgccctagcttccccccctatttttgtgtcttttattaactagtgcattgtcttattaaatcttcactg

SEQ ID NO: 38589 - DNA, 120 bp, Artificial Sequence
  ENSG00000056097_30 (sequence is synthesized)
tatttaatgcaggatgtgtgcttcagttgctctgtgtattttgatattttaatttagaggttttgtttgctttttgacactagttgtaagttactttgttatagatggtatcctttaccc

SEQ ID NO: 38590 - DNA, 120 bp, Artificial Sequence
  ENSG00000056097_31 (sequence is synthesized)
cttcttaatattttacagcagtacgtttttttgtaacgtgagactgcagagtttgtttttctatatgtgaaggattacaacacaaaaagttatcctgccattcgagtgctcagaactgaa

SEQ ID NO: 38591 - DNA, 120 bp, Artificial Sequence
  ENSG00000056097_32 (sequence is synthesized)
tgtttctgcagatcttgtggcatttgtctctagtgtgatatataaaggtgtaattaagacagagttctgttaatctaatcaagtttgctgttagttgtgcattagcagtataaaagctaa

SEQ ID NO: 38592 - DNA, 120 bp, Artificial Sequence
  ENSG00000056097_33 (sequence is synthesized)
tatatactatatggtcttgcaacagttttaaagcctctgcataattgataataaaaatgcatgacattcttgtttttaatagacttttaaaatcataattttaggtttaacacgtagatc

SEQ ID NO: 38593 - DNA, 120 bp, Artificial Sequence
  ENSG00000056097_34 (sequence is synthesized)
tttgtacagttgactttttgacatagcaaggccaaaaataactttctgaatatttttttcttgtgtataagtggaaagggcatttttcacatataagtgggctaaccaatattttcaaaa

SEQ ID NO: 38594 - DNA, 120 bp, Artificial Sequence
  ENSG00000056097_35 (sequence is synthesized)
gaacttcatcattgtacaactaacaacagtaactagcccttaattatggtgacagttccttattggtgtgtgtgagattactctagcaactattacagtataacacagatgatcttctcc

SEQ ID NO: 38595 - DNA, 120 bp, Artificial Sequence
  ENSG00000056097_36 (sequence is synthesized)
acacaccccatcacccagataatttacagttctgttaacagtgaggttgataaagtattactgataaaaaattatctaaggaaaaaaacagaaaattatttggtgtggccatcttacctg

SEQ ID NO: 38596 - DNA, 120 bp, Artificial Sequence
  ENSG00000056097_37 (sequence is synthesized)
cttatgtctcctacacaaagctaaatattctagcagtgatgtaatgaaaaattacatcttactgttgatatatgtatgctctggtacacagatgtcattttgttgtcacagcactacagt

SEQ ID NO: 38597 - DNA, 120 bp, Artificial Sequence
  ENSG00000056097_38 (sequence is synthesized)
gaaatacacaaaaaatgaaattcatataatgacttaaatgtattatatgttagaattgacaacataaactacttttgctttgaaatgatgtatgcttcagtaaaatcatattcaaattta

SEQ ID NO: 38598 - DNA, 120 bp, Artificial Sequence
  ENSG00000056097_39 (sequence is synthesized)
ttcggatttcgttttggtgggtagggtttatatttccagaaattgtttattatattactaaattaataagttaaccttttgttcctcatattggattatgtaaatttattgaaaataact

SEQ ID NO: 38599 - DNA, 120 bp, Artificial Sequence
  ENSG00000056097_40 (sequence is synthesized)
ccgtggatatattaaagtgccaacaagctctcaaatggctcatgtgacactgatgctaccttaaggaagtgtcttgctcacctggtcaaacacccattcctcactgcattttgccaattc

SEQ ID NO: 38600 - DNA, 120 bp, Artificial Sequence
  ENSG00000056097_41 (sequence is synthesized)
aatccattttagatgtaacctcgggtatggtgaaagacccaccggacgtcttggacaggcaaaaatgccttgacgctctggctgctctacgccacgctaagtggttccaggttcggaaca

SEQ ID NO: 38601 - DNA, 120 bp, Artificial Sequence
  ENSG00000056097_42 (sequence is synthesized)
tcattttacttttttcttgtagccttatgagagaagtagttcagtacaacatgtttaactgtgcttaaacatttcaaaagactgcccaagcaatactattttaaattaaatatcagaaaa

SEQ ID NO: 38602 - DNA, 120 bp, Artificial Sequence
  ENSG00000056097_43 (sequence is synthesized)
tatgttaacatagaaagctgggtatgatgatctgcatattgcagttattattaatttgacaatgaacttaggtttggggagtgttttgtagttggggtttttttattttttatttttagt

SEQ ID NO: 38603 - DNA, 120 bp, Artificial Sequence
  ENSG00000056097_44 (sequence is synthesized)
ggctatatttaaagttgacttgtttaggaacatcacatgtttgtgtatatatattatattccataaggctgcagattaactttgctttaaataatggaatatgtgtttaaagctttgtgt

SEQ ID NO: 38604 - DNA, 120 bp, Artificial Sequence
  ENSG00000056097_45 (sequence is synthesized)
atagttttaagatttttttccccctctttctctaagttaataagtgtagggagtgaaaggtgaggaagcagctgtttggtttagtgactttgcagtcatgcaaaggcacagaagggaaac

SEQ ID NO: 38605 - DNA, 120 bp, Artificial Sequence
  ENSG00000056097_46 (sequence is synthesized)
caaacagatttccttaacctttcagtccctagacaaactttttagctctttactttttcttttatttctaatgtaggcagactttttttttttaagtttactgttttaaatgaacacagg

SEQ ID NO: 38606 - DNA, 120 bp, Artificial Sequence
  ENSG00000056097_47 (sequence is synthesized)
tcaaggttcacaggggatcaagaaatattattcttgtataatctgtttactttgacctaaataccagcttttaaatactaaccctggcataaaatactgctgtaaatggcagctcattga

SEQ ID NO: 38607 - DNA, 120 bp, Artificial Sequence
  ENSG00000056097_48 (sequence is synthesized)
atccaattttaagtgtgattgtttttgtttttatctgagcttccattgaacggtggtattttaactttttttcatcaagggatatattcagtatttctaagattaattcaattggttttt

SEQ ID NO: 38608 - DNA, 120 bp, Artificial Sequence
  ENSG00000056097_49 (sequence is synthesized)
taggtaatggtgattattgaacaactttgtgaatatactaaaaactactgaattgtacagtttaaaagggtgaatcttacatgtgaattatatctcaatttttaaaaatctaaatacaaa

SEQ ID NO: 38609 - DNA, 86 bp, Artificial Sequence
  ENSG00000056097_50 (sequence is synthesized)
gggaagaaagatggtctcactccatcactcagggtgctagagtgcaatggcgcaatctcagcttactgcagccagtaaacgatccc

SEQ ID NO: 38610 - DNA, 120 bp, Artificial Sequence
  ENSG00000056097_51 (sequence is synthesized)
tgcaatggcgcaatctcagcttactgcagccagtaaacgatcccaggctcaagcgatcctcccgcctcagtcccccaagtagctggggccaccagcatgtgccaccacatccagctaatt

SEQ ID NO: 38611 - DNA, 120 bp, Artificial Sequence
  ENSG00000056097_52 (sequence is synthesized)
gttttttggggttttttttgtagagacggggttttgccatcttgcccaggctggtctttaacccctgaactcaggcaatctgcctcccaaagtgtttggattacagacgtgagccactgt

SEQ ID NO: 38612 - DNA, 120 bp, Artificial Sequence
  ENSG00000056097_53 (sequence is synthesized)
gcccggcctattccttaattttgaatgtttttatattatatgtaatatttattttctgtttttgtgacttgttctatgtagctttttcagtctttaaaattttttcagtctttaaaattt

SEQ ID NO: 38613 - DNA, 120 bp, Artificial Sequence
  ENSG00000056097_54 (sequence is synthesized)
agtgagggagtgcgaggcgggagggggaggcggcgcggccgcggcctgggccccgccagggctgctctcacggcgcctctctctttctctccctgccctccctcggcgtctcggctcctc

SEQ ID NO: 38614 - DNA, 120 bp, Artificial Sequence
  ENSG00000056277_0 (sequence is synthesized)
ggttccgcgctggaagtctccgggggagtcgctgttgctgaggctgtcgcctgaggtttttcgcgctcctccctttcctcctcctctttctcctcctccttatccgaaccccagtcagac

SEQ ID NO: 38615 - DNA, 120 bp, Artificial Sequence
  ENSG00000056277_1 (sequence is synthesized)
cgatctgctctgctctcggtgaccttgcaacttcatggatgacgacaaaccttttcaaccaaaaaacatttcaaaaatggcagaactctttatggaatgtgaagaagaagagctagagcc

SEQ ID NO: 38616 - DNA, 120 bp, Artificial Sequence
  ENSG00000056277_2 (sequence is synthesized)
atggcagaagaaagtagaagaaactcaggatgaggatgacgatgaactgatctttgttggagagatatcaagttcaaaaccagccatttcaaatattttgaacagaggccactccagctc

SEQ ID NO: 38617 - DNA, 120 bp, Artificial Sequence
  ENSG00000056277_3 (sequence is synthesized)
atcttcaaaaggaataaagagtgagccacacagtccaggtattcctgaaatattcaggactgcaagtcaacgctgcagagacccaccatcaaatccagtggctgcctcgcctagatttca

SEQ ID NO: 38618 - DNA, 120 bp, Artificial Sequence
  ENSG00000056277_4 (sequence is synthesized)
tcttgtatctaaatcttcacaaagctctgttactgttgagaatgcgtctaaacctgattttacaaagaattcacaagttggatcggataattcttcaattttactgtttgactcgaccca

SEQ ID NO: 38619 - DNA, 120 bp, Artificial Sequence
  ENSG00000056277_5 (sequence is synthesized)
ggaatcactaccaccatcccaagacataccagcaatttttagagaaggtatgaaaaatacttcatatgtgttgaaacatccttctacttctaaagtaaacagtgttactccaaaaaaacc

SEQ ID NO: 38620 - DNA, 120 bp, Artificial Sequence
  ENSG00000056277_6 (sequence is synthesized)
aaagaccagtgaagatgttcctcagataaatccctccacttcattgcctttaattggctctcctccagtgacatcctcccaagttatgctgtcaaaaggtacaaatacctcatctccata

SEQ ID NO: 38621 - DNA, 120 bp, Artificial Sequence
  ENSG00000056277_7 (sequence is synthesized)
tgatgctggagcagattacctaagagcttgtccaaagtgcaatgttcagttcaatcttttggatcctttgaaataccacatgaagcattgttgtccagacatgataactaaatttttggg

SEQ ID NO: 38622 - DNA, 120 bp, Artificial Sequence
  ENSG00000056277_8 (sequence is synthesized)
agtaattgttaaatcagaacgtccatgtgatgaagacaagactgattcagagacaggaaagttgatcatgttagtcaatgagttttattatggaaggcatgaaggagtcactgagaaaga

SEQ ID NO: 38623 - DNA, 120 bp, Artificial Sequence
  ENSG00000056277_9 (sequence is synthesized)
gccaaagacttacacaacctttaaatgcttcagttgctcgaaagttcttaaaaataatattaggtttatgaaccacatgaaacatcacttggaacttgagaagcagaacaatgaaagctg

SEQ ID NO: 38624 - DNA, 120 bp, Artificial Sequence
  ENSG00000056277_10 (sequence is synthesized)
ggaaaaccacaccacctgccagcactgttaccggcaatatcccacacccttccaactgcagtgccacattgagagtacacacactccccatgagttttctactatttgcaaaatctgtga

SEQ ID NO: 38625 - DNA, 120 bp, Artificial Sequence
  ENSG00000056277_11 (sequence is synthesized)
attatcatttgaaacagagcatattcttttacaacatatgaaggacacccataaacctggtgaaatgccatatgtttgccaggtttgccagtttagatcatcaacattttctgatgtaga

SEQ ID NO: 38626 - DNA, 120 bp, Artificial Sequence
  ENSG00000056277_12 (sequence is synthesized)
agctcattttagagcagcccatgaaaacactaagaacttgctatgtccattttgcctcaaagttagtaaaatggcaaccccctacatgaatcattacatgaagcatcagaaaaaaggagt

SEQ ID NO: 38627 - DNA, 120 bp, Artificial Sequence
  ENSG00000056277_13 (sequence is synthesized)
tcatcgttgcccaaaatgcagactacaatttttgaccagcaaggagaaagctgaacataaggcgcagcatcgtacatttataaagcctaaagaactagaaggattgcctcctggagcaaa

SEQ ID NO: 38628 - DNA, 120 bp, Artificial Sequence
  ENSG00000056277_14 (sequence is synthesized)
agttactattcgagcttcacttggacctctccagtcaaaattaccaactgcacctttcggttgcgctccaggcacttcttttcttcaggtcacacctccgacatctcaaaatacaactgc

SEQ ID NO: 38629 - DNA, 120 bp, Artificial Sequence
  ENSG00000056277_15 (sequence is synthesized)
tagaaatcctagaaaatctaatgccagtagatctaagacaagtaagcttcatgcaactacatccactgcaagtaaagttaatacaagtaagccaaggggacgtatagctaagtccaaagc

SEQ ID NO: 38630 - DNA, 120 bp, Artificial Sequence
  ENSG00000056277_16 (sequence is synthesized)
aaaaccctcttacaagcaaaagcgacagcgcaacagaaaaaataaaatgagccttgctttgaagaacataaggtgtcgtcggggaattcacaagtgcattgaatgtcattccaaaataaa

SEQ ID NO: 38631 - DNA, 120 bp, Artificial Sequence
  ENSG00000056277_17 (sequence is synthesized)
agattttgcaagccacttttctatatacatccactgcagtttttgcaagtacaatactaactgtaacaaagcctttgtaaatcatatgatgagctctcatagcaaccatccaggtaaacg

SEQ ID NO: 38632 - DNA, 120 bp, Artificial Sequence
  ENSG00000056277_18 (sequence is synthesized)
gttttgtattttcaagaagcattcaggaactctcaggggcattactctagtgtgccttaaatgtgatttcctagctgattcttccggcttagatcgtatggctaaacacttaagtcaacg

SEQ ID NO: 38633 - DNA, 120 bp, Artificial Sequence
  ENSG00000056277_19 (sequence is synthesized)
attgaaatagattcctgctccatggagttcatgcaacctggtgcaagacaagttggaagttcctaagttcaaagttctgaagtattttctcacacaaagggcagttaaacagccaagttt

SEQ ID NO: 38634 - DNA, 120 bp, Artificial Sequence
  ENSG00000056277_20 (sequence is synthesized)
atgacactagctctcattattcagctcttttcagctttcagatgccactacattgttattccaccttatctttgcgtcaggttaacatatcttaacatatttttttctccagttggctct

SEQ ID NO: 38635 - DNA, 120 bp, Artificial Sequence
  ENSG00000056277_21 (sequence is synthesized)
ctccaaaaatgccttttgtttttctctgctatacttgacttgccttcagaatattacattccagataatatgactgttcatctttttctgtctgttttgtctgctttcttaatttcttat

SEQ ID NO: 38636 - DNA, 120 bp, Artificial Sequence
  ENSG00000056277_22 (sequence is synthesized)
aagtcttacatgtttaggtcagataaccattttttcttcattccttgttcattactgttctatttttcatatttttcaaatgaagaagcaacacataagtttcaaaaaatatccagggta

SEQ ID NO: 38637 - DNA, 120 bp, Artificial Sequence
  ENSG00000056277_23 (sequence is synthesized)
ctcctggacagtgtccccttttgatggacacaactgatacctgttctttctttccaagaaatgtgaattatttgactgtgagacgtcctctagtttgtggccttcagaaatcagatcttg

SEQ ID NO: 38638 - DNA, 120 bp, Artificial Sequence
  ENSG00000056277_24 (sequence is synthesized)
gggagagtcccttcctacctgactgacctcccataaggctgatgctgatttggccagagatgacctcaaggcccaccaaatagagcacaacttcccattgggagctttggcttttgatct

SEQ ID NO: 38639 - DNA, 120 bp, Artificial Sequence
  ENSG00000056277_25 (sequence is synthesized)
taagcttatgggtcgattctaaccaagaaaagtccatgagatcagtgcttcaacatccaggttgacgtttaaccattttggctgctgctctttaattttcctctagcaggcatgcagtcc

SEQ ID NO: 38640 - DNA, 120 bp, Artificial Sequence
  ENSG00000056277_26 (sequence is synthesized)
aaggaatatcaaaattctgattgtatgggaaccaaggttactttcttgttcttggataaagaaaatttctacaattacagttcccaaagacacagttgttcatgttatttaaagttttat

SEQ ID NO: 38641 - DNA, 120 bp, Artificial Sequence
  ENSG00000056277_27 (sequence is synthesized)
ccagtattctaggaattttcagcaatactaatattctcatttttaaacattttttacattttattttgttttattttggtagcttggttttatattgtttttagatcagtgcttcaacat

SEQ ID NO: 38642 - DNA, 120 bp, Artificial Sequence
  ENSG00000056277_28 (sequence is synthesized)
ccaggctgacgtttagccattttggctgctgttctttaatcttcctctagcaggcatgcagtccaaggaatatcaaaattctggttgtattgggaaccaaggttactttcttgtttttgg

SEQ ID NO: 38643 - DNA, 120 bp, Artificial Sequence
  ENSG00000056277_29 (sequence is synthesized)
aaaaacaaaatttctacaattacagttcccaaagtcagttattcatgttttcatttaaagttttatccaatattctaggaattttcagcaatactgatattcactttattttttttcttt

SEQ ID NO: 38644 - DNA, 120 bp, Artificial Sequence
  ENSG00000056277_30 (sequence is synthesized)
ttacaggtgtgagccactgcacccgaccgatactcacatttttaaactttttttttaattttattttggtagctaggttttatattgttcttaaatttattttactctattttatttttc

SEQ ID NO: 38645 - DNA, 120 bp, Artificial Sequence
  ENSG00000056277_31 (sequence is synthesized)
ttattttactctattttatttttccatcacttctttgtcccagattcatgaaatttgctgatgtccattttatgtctacttttgaactcttctctttgtgtttgttttgttcttattaca

SEQ ID NO: 38646 - DNA, 120 bp, Artificial Sequence
  ENSG00000056277_32 (sequence is synthesized)
aactccaagacatttcttagaattgtctacagatttcgtgtagctacttattggtagcttcttaatttcatacttgtccagaccattagacattattacatgctctgtcttgggcctatc

SEQ ID NO: 38647 - DNA, 120 bp, Artificial Sequence
  ENSG00000056277_33 (sequence is synthesized)
attaacattagcttagggattctgatttcaaagacataaagaattggcaaaactcttcttacagaacttaaaacaagttttaaagttacatttctatacatctaatacataataccttct

SEQ ID NO: 38648 - DNA, 120 bp, Artificial Sequence
  ENSG00000056277_34 (sequence is synthesized)
tagccattaatgtaattcctctggataaagataatatattcaaaaaatattgggaccaaaaaatgcacttgtttcttgctcatatatatatagatgtatattttttttaatttcttgttt

SEQ ID NO: 38649 - DNA, 120 bp, Artificial Sequence
  ENSG00000056277_35 (sequence is synthesized)
gtttattttggttacattgaatacagatttgctgaacagttttgatgttatttttttaataaaatttgtattgttaaagtgccttggaaatttctaataaataacttcatataaaagcta

SEQ ID NO: 38650 - DNA, 120 bp, Artificial Sequence
  ENSG00000056291_0 (sequence is synthesized)
tctggagccaagtaatggtgatactgatgcttccttttctttgccgcgctcggattctgagtttcacaagaatgtacctgggtgccccttagcgggatatgaatagcttcttcggaaccc

SEQ ID NO: 38651 - DNA, 120 bp, Artificial Sequence
  ENSG00000056291_1 (sequence is synthesized)
cagcggccagctggtgcctcctggaaagtgacgtctcatctgcaccggacaaggaggcggggagggagcgcagagcactcagcgtccagcagcgcggcgggccagcctggagcggaagcc

SEQ ID NO: 38652 - DNA, 120 bp, Artificial Sequence
  ENSG00000056291_2 (sequence is synthesized)
tggagtggagcaggcagtccgcgggggacagacgtcggctgggattgagccggcagactgcgaaaagtagctggagccggagcagggacagaacctgttgctgcagacgggcttggtgga

SEQ ID NO: 38653 - DNA, 120 bp, Artificial Sequence
  ENSG00000056291_3 (sequence is synthesized)
ttctggttcctgccgccgacagggctcgccgggagaggttcatcatgaatgagaaatgggacacaaactcttcagaaaactggcatcccatctggaatgtcaatgacacaaagcatcatc

SEQ ID NO: 38654 - DNA, 120 bp, Artificial Sequence
  ENSG00000056291_4 (sequence is synthesized)
tgtactcagatattaatattacctatgtgaactactatcttcaccagcctcaagtggcagcaatcttcattatttcctactttctgatcttctttttgtgcatgatgggaaatactgtgg

SEQ ID NO: 38655 - DNA, 120 bp, Artificial Sequence
  ENSG00000056291_5 (sequence is synthesized)
tttgctttattgtaatgaggaacaaacatatgcacacagtcactaatctcttcatcttaaacctggccataagtgatttactagttggcatattctgcatgcctataacactgctggaca

SEQ ID NO: 38656 - DNA, 120 bp, Artificial Sequence
  ENSG00000056291_6 (sequence is synthesized)
atattatagcaggatggccatttggaaacacgatgtgcaagatcagtggattggtccagggaatatctgtcgcagcttcagtctttacgttagttgcaattgctgtagataggttccagt

SEQ ID NO: 38657 - DNA, 120 bp, Artificial Sequence
  ENSG00000056291_7 (sequence is synthesized)
gtgtggtctacccttttaaaccaaagctcactatcaagacagcgtttgtcattattatgatcatctgggtcctagccatcaccattatgtctccatctgcagtaatgttacatgtgcaag

SEQ ID NO: 38658 - DNA, 120 bp, Artificial Sequence
  ENSG00000056291_8 (sequence is synthesized)
gaaaaatattaccgagtgagactcaactcccagaataaaaccagtccagtctactggtgccgggaagactggccaaatcaggaaatgaggaagatctacaccactgtgctgtttgccaac

SEQ ID NO: 38659 - DNA, 120 bp, Artificial Sequence
  ENSG00000056291_9 (sequence is synthesized)
atctacctggctcccctctccctcattgtcatcatgtatggaaggattggaatttcactcttcagggctgcagttcctcacacaggcaggaagaaccaggagcagtggcacgtggtgtcc

SEQ ID NO: 38660 - DNA, 120 bp, Artificial Sequence
  ENSG00000056291_10 (sequence is synthesized)
aggaagaagcagaagatcattaagatgctcctgattgtggccctgctttttattctctcatggctgcccctgtggactctaatgatgctctcagactacgctgacctttctccaaatgaa

SEQ ID NO: 38661 - DNA, 120 bp, Artificial Sequence
  ENSG00000056291_11 (sequence is synthesized)
ctgcagatcatcaacatctacatctacccttttgcacactggctggcattcggcaacagcagtgtcaatcccatcatttatggtttcttcaacgagaatttccgccgtggtttccaagaa

SEQ ID NO: 38662 - DNA, 120 bp, Artificial Sequence
  ENSG00000056291_12 (sequence is synthesized)
gctttccagctccagctctgccaaaaaagagcaaagcctatggaagcttatgccctaaaagctaaaagccatgtgctcataaacacatctaatcagcttgtccaggaatctacatttcaa

SEQ ID NO: 38663 - DNA, 120 bp, Artificial Sequence
  ENSG00000056291_13 (sequence is synthesized)
aaccctcatggggaaaccttgctttataggaaaagtgctgaaaaaccccaacaggaattagtgatggaagaattaaaagaaactactaacagcagtgagatttaaaaagagctagtgtga

SEQ ID NO: 38664 - DNA, 120 bp, Artificial Sequence
  ENSG00000056291_14 (sequence is synthesized)
taatcctaactctactacgcattatatatttaaatccattgctttttgtggctttgcacttcaaatttttcaaagaatgttctaaataaaacatttactgaaagccctctctggcaaaaa

SEQ ID NO: 38665 - DNA, 120 bp, Artificial Sequence
  ENSG00000056291_15 (sequence is synthesized)
aattaaaaataaacaaaaatggtcataagatcataaacaatcttatgttgtataaaaatacgtagagtgacttagacatgtttgcatgaataaatatatttctagagaacagtttacaaa

SEQ ID NO: 38666 - DNA, 120 bp, Artificial Sequence
  ENSG00000056291_16 (sequence is synthesized)
gtgagccaccgcgcccggccaatttcctttcttagttgcctctgcccacctcttctcttctgcttccatattacaggtctcctcagttgcgaaattaggatgttaattatagcttttgac

SEQ ID NO: 38667 - DNA, 120 bp, Artificial Sequence
  ENSG00000056291_17 (sequence is synthesized)
cctcagttgcgaaattaggatgttaattatagcttttgacatacaagaaacatcaaaaagattgaatgtcttaataagagtgaagcatgtagatcagtgactgctatgttcatcatgaat

SEQ ID NO: 38668 - DNA, 120 bp, Artificial Sequence
  ENSG00000056487_0 (sequence is synthesized)
aggccgcgtccgcccgcgcccgctctggcccccgcggagccgcgcaacttcccgggagcccgggccaaagtgagcgcaaagtgctgcccaagttgccgggatggagctgcagagccggcc

SEQ ID NO: 38669 - DNA, 120 bp, Artificial Sequence
  ENSG00000056487_1 (sequence is synthesized)
cgaggcgctcgccgtggaactcgcgcgccaccagaacggcgacctcaagaagcagctccacgaaaggcagccgcggatcgccgcgctcagcgacaaacaagctttgggaacgatcactgc

SEQ ID NO: 38670 - DNA, 120 bp, Artificial Sequence
  ENSG00000056487_2 (sequence is synthesized)
agtgcctgtcacgggtcctcaggtcagctccttgcagaggttggccgggcaaggagcggcagtgctacctcaggttaggccaaagactctgattccagacagcctccccgttgccccggg

SEQ ID NO: 38671 - DNA, 120 bp, Artificial Sequence
  ENSG00000056487_3 (sequence is synthesized)
ccgggaccggccacccaagcagcccccaacattccagaaggccaccgtggtcagcgtcaagaaccccagcccagccctccccaccgccaacaacactgtcagccatgtgccagcgcccgg

SEQ ID NO: 38672 - DNA, 120 bp, Artificial Sequence
  ENSG00000056487_4 (sequence is synthesized)
cagccagccccaggccctcgccgagcccgccgccctcgcctctccgctgagcagtgcgggggtggcctacgccatcatctccacctcccccagcaatgccgccgccatggcccccagcac

SEQ ID NO: 38673 - DNA, 120 bp, Artificial Sequence
  ENSG00000056487_5 (sequence is synthesized)
cgccgtgtctgtggtcagtgacagcatcaaagtccagcccctcctcatcagtgctgacaacaaggtcatcatcattcagcctcaagtgcagacgcagcccgagagcacggcagagtcgcg

SEQ ID NO: 38674 - DNA, 120 bp, Artificial Sequence
  ENSG00000056487_6 (sequence is synthesized)
gccgcccacagaggagccatctcagggagctcaggccaccaaaaagaagaaggaagaccggcccccgacccaggagaaccccgagaaaatcgccttcatggtagcgctaggcctggttac

SEQ ID NO: 38675 - DNA, 120 bp, Artificial Sequence
  ENSG00000056487_7 (sequence is synthesized)
cacggaacatttggaagaaatccagagcaagcgacaggagcggaagagaagaagcacagccaaccctgcctacagcggcctcctggagaccgagaggaaacggctggcctccaactatct

SEQ ID NO: 38676 - DNA, 120 bp, Artificial Sequence
  ENSG00000056487_8 (sequence is synthesized)
caacaaccccctgttcctcacagcgagagccaatgaggacccctgctggaagaacgagatcacccacgatgagcactgtgccgcctgcaagcgaggggccaacctgcagccctgcggcac

SEQ ID NO: 38677 - DNA, 120 bp, Artificial Sequence
  ENSG00000056487_9 (sequence is synthesized)
ctgcccgggggcctaccacctcagctgcctggagccgcccctcaagacggcgcccaagggcgtgtgggtgtgccccaggtgccagcagaaggccttaaagaaagacgagggtgtgccctg

SEQ ID NO: 38678 - DNA, 120 bp, Artificial Sequence
  ENSG00000056487_10 (sequence is synthesized)
gactgggatgctggccatcgtgcactcttatgtcacccacaagacagtcaaagaagaggagaagcagaagctgctgcaacgaggcagtgagctgcagaacgagcaccagcagctggagga

SEQ ID NO: 38679 - DNA, 120 bp, Artificial Sequence
  ENSG00000056487_11 (sequence is synthesized)
gcgggaccggcggctggcgtcagcagtgcagaaatgcctggagttgaagacaagcctgctggcccgccagaggggcacccagtcatccctggaccgcctgcgggccctcctgagactgat

SEQ ID NO: 38680 - DNA, 120 bp, Artificial Sequence
  ENSG00000056487_12 (sequence is synthesized)
acagggcgagcagctgctccaggtcaccatgacgaccactagccctgccccactgctggccgggccctggaccaagccctcagtggcagccacacaccccaccgtccagcacccccaggg

SEQ ID NO: 38681 - DNA, 120 bp, Artificial Sequence
  ENSG00000056487_13 (sequence is synthesized)
ccacaactgaccccgagggaccagtcttcatacccacggaaagttattgggaccctgcttacacagcctgggggttctgtcggccttaattcataaacactatgaatttcagacaaaaat

SEQ ID NO: 38682 - DNA, 120 bp, Artificial Sequence
  ENSG00000056487_14 (sequence is synthesized)
aggagaggagggaggaagagctgggcgagaggcctagagccaggaccaggtgggggtgcggccctgtgccctccaaattcacagggggtacctaggagccaggtggggtacgacaggctg

SEQ ID NO: 38683 - DNA, 120 bp, Artificial Sequence
  ENSG00000056487_15 (sequence is synthesized)
gggcacacagtctccccccggccacctcggggctgcctgggcctctggcttccaggccctgctctccacggcctccctctggcccgttggaggggcaggctgaggctgtggaggggacaa

SEQ ID NO: 38684 - DNA, 120 bp, Artificial Sequence
  ENSG00000056487_16 (sequence is synthesized)
gcacgccccccagaacgcagtctccactgagggcaccgcctattggtgtcctgtgggagggcgagctgagaacacatggactagctgagtggtagcggtagttgggacgagaagcggggt

SEQ ID NO: 38685 - DNA, 120 bp, Artificial Sequence
  ENSG00000056487_17 (sequence is synthesized)
agtggatctaggtagttcctcaatgccccacgctcctaggaggtccccctggggtgggcgggcgggcctggggcactccgtcgcctttgcagaaccacctgggcccctttctgtcagtat

SEQ ID NO: 38686 - DNA, 120 bp, Artificial Sequence
  ENSG00000056487_18 (sequence is synthesized)
tattagggttacgaattgcagctgtttaacttgaaagacactgtcggaggtgagcatctgggcgccgggacgctgcagtgatccccgccagagcctgtgcccttcctgctccgtctttgg

SEQ ID NO: 38687 - DNA, 120 bp, Artificial Sequence
  ENSG00000056487_19 (sequence is synthesized)
ggtcctcaaggctgcctccttccttttgccaatctcttggactcagtttgccgttgatgcgtttttctcatggagtttctgggcagagtggagctgcaaccctgttgtggggggcagcat

SEQ ID NO: 38688 - DNA, 120 bp, Artificial Sequence
  ENSG00000056487_20 (sequence is synthesized)
ttggcaggttttctccttggggttgaatcattcaacttaacgactgaagccctttcttgtctcctttggaagagccgataagtattccactcctcccttcttgccagtgcagacactatg

SEQ ID NO: 38689 - DNA, 120 bp, Artificial Sequence
  ENSG00000056487_21 (sequence is synthesized)
ccaaaaaataacttcacacttttgtatggcgtttttattgtgagatatttaatgtgaatggttggggggactctggctgacttcctttctgcttctagtagtctctgcttcaaggtacaa

SEQ ID NO: 38690 - DNA, 120 bp, Artificial Sequence
  ENSG00000056487_22 (sequence is synthesized)
atgggaacacctcccctcgggaagcctggccaagctggaagatccggcaggttttttacgagccgggtggagggttggggaggaaagaaagggcggtggctcgggaggttccggccttcg

SEQ ID NO: 38691 - DNA, 120 bp, Artificial Sequence
  ENSG00000056487_23 (sequence is synthesized)
gggaccagacttgctgccaagggcttctgcatccagggtgggcagtggcagcttgtcacccttgcccgattcccacatcccagtcctgagggactcagcacaacaggataagcgtccagg

SEQ ID NO: 38692 - DNA, 120 bp, Artificial Sequence
  ENSG00000056487_24 (sequence is synthesized)
agccacgggctcccaccccgagcatatcacatggtgccgaattgcactgaacacgcgtgtgtgcatcgcacgcggccacgaccacagacacgcatgcacacacgcagaggtgcagagcga

SEQ ID NO: 38693 - DNA, 120 bp, Artificial Sequence
  ENSG00000056487_25 (sequence is synthesized)
ggaggccggcaaatcccgcagctgccacggtccctcctgtcattctcacgactccgggagaaactgtgctgtatgatacagatctattttaatacacttaccactgggtgaacaagattt

SEQ ID NO: 38694 - DNA, 120 bp, Artificial Sequence
  ENSG00000056487_26 (sequence is synthesized)
ttatattcttttattgatgaacaaagtgaaccgtgtgaggcacacgtcttctatattggctactctgtgccaagtatgcattaccgcgtggcttgcgatgtccatgtcttcagcttcctt

SEQ ID NO: 38695 - DNA, 120 bp, Artificial Sequence
  ENSG00000056487_27 (sequence is synthesized)
ttctgttggtttggttttcttcgcggatggattgagttacatgttttaacagtgtaatgggaggatctgaaaggttggacccgggaggggtagctgccgatgtgtcttgagattgttagg

SEQ ID NO: 38696 - DNA, 120 bp, Artificial Sequence
  ENSG00000056487_28 (sequence is synthesized)
ttttttttggaccaaggaggaccgtccagtgggtagtgaggatagagaaaaagtgtttgtcttaaatacgccaatgtagttttccttctttacaatgtattaaactcgatcgatgatttc

SEQ ID NO: 38697 - DNA, 120 bp, Artificial Sequence
  ENSG00000056487_29 (sequence is synthesized)
atttatgagctttgctcgacacggactcgccgtgtttacttggctctttgttcctcccccctcccccggcacacactcacactcacactcactcgcacacgcaccccggcctgcaaactt

SEQ ID NO: 38698 - DNA, 120 bp, Artificial Sequence
  ENSG00000056487_30 (sequence is synthesized)
actgccgaattagcatcgtgccgaggcacaactttgccgaggcccaacgagatccaggcgcgcgcgccggaggaaatatagtccctgcccgcgggaggctcgcgcgggaggaggcggcgg

SEQ ID NO: 38699 - DNA, 80 bp, Artificial Sequence
  ENSG00000056487_31 (sequence is synthesized)
gggggccatgctccgggccgcgccggcagcccggggacccggcgcaacttgccgggcagcctgaggagttggggcagccg

SEQ ID NO: 38700 - DNA, 120 bp, Artificial Sequence
  ENSG00000056487_32 (sequence is synthesized)
tcctctcttcccctcacccctccctccccatcactgtccccttcacccctccatggcatcttccaggtcatcatcattcagcctcaagtgcagacgcagcccgagagcacggcagagtcg

SEQ ID NO: 38701 - DNA, 120 bp, Artificial Sequence
  ENSG00000056487_33 (sequence is synthesized)
tgcagagactctggccacaggaagtgtcagtatcctttggtgcagctgtgaatggtgcccaggagctgagcgtcttgtagtgcctgaagggcgcattggtggccaccccccgtgagcgag

SEQ ID NO: 38702 - DNA, 120 bp, Artificial Sequence
  ENSG00000056487_34 (sequence is synthesized)
aggacatccagcccccacctcaggggactcagtggttggagaaagttcctgattcagctccacgtggctctccatggagaagcagaaagagaatcgtgttttcttgcagaggcattgagg

SEQ ID NO: 38703 - DNA, 120 bp, Artificial Sequence
  ENSG00000056487_35 (sequence is synthesized)
tcctggaaagaaagagccgggttctcggaggcggcagggagagccgggccctgcgggggccgaagagaggagctcacttaaaaggcagcgcgcggcccggcgtccattttgaggtggtgg

SEQ ID NO: 38704 - DNA, 120 bp, Artificial Sequence
  ENSG00000056487_36 (sequence is synthesized)
acatgtttttggaacgtggcgatttctcccggctcggagtcccccgctttgcgctgaggcggccatgggggcggaggggggcggccgtgggggcctggacaccaaactcgttggaagcga

SEQ ID NO: 38705 - DNA, 120 bp, Artificial Sequence
  ENSG00000056487_37 (sequence is synthesized)
ggagctgcagagccggcccgaggcgctcgccgtggaactcgcgcgccaccagaacggcgacctcaagaagcagctccacgaaaggcagccgcggatcgccgcgctcagcgacaaacaaga

SEQ ID NO: 38706 - DNA, 120 bp, Artificial Sequence
  ENSG00000056487_38 (sequence is synthesized)
tgattagtgagcaggggactgatttcctcgttcctcattcatgaacaacaactaacatttgtgtagcagcatcttgaggtattgggcattgccacttacattaacccgttggattcacgt

SEQ ID NO: 38707 - DNA, 120 bp, Artificial Sequence
  ENSG00000056487_39 (sequence is synthesized)
ggcacccacaaataaaatccagcgttttctttggaggaggccaagctgagattggaggcagcttcctagagcccttctcatcactcgcacagcaccgccaccgccaacttgttccttgag

SEQ ID NO: 38708 - DNA, 120 bp, Artificial Sequence
  ENSG00000056487_40 (sequence is synthesized)
tccggggtttgaggaacatccatgtgaagagttccctgaggtctcctgaccaggctgctttatctgtggcccttcagactatggtcctgtgatccgccagcctgccatgggctgcggaga

SEQ ID NO: 38709 - DNA, 120 bp, Artificial Sequence
  ENSG00000056487_41 (sequence is synthesized)
cccttctcagtatctccccaactctgtgtgcggtacaggtggtctcggatgcactccttctgctgcctaccccgaatggccctgaggagggctgtttaccaggcaccaatgctttatcat

SEQ ID NO: 38710 - DNA, 120 bp, Artificial Sequence
  ENSG00000056487_42 (sequence is synthesized)
ctgaaaaacacatggcagaaagaattcaagggaggacggagaaaacccaaagataccttgtcaggtgagaggagggcttcagagtcactcacgccaaacaggcttcatagccacgccagg

SEQ ID NO: 38711 - DNA, 120 bp, Artificial Sequence
  ENSG00000056487_43 (sequence is synthesized)
ggcccatgatggtgatctacagggtccagccgtgagtgaggagccctgtggttgaaaaacacagggtgtgggtggattagaactccttccaaaacacagattattgagcctttcctccca

SEQ ID NO: 38712 - DNA, 120 bp, Artificial Sequence
  ENSG00000056487_44 (sequence is synthesized)
gcctgagaatttgcattttgaggcgagtcctcatgctctgctggtactgctggaatggccaccacaccttgagcaccgctgggttggaggaggagtgctgacggagtgctaagctgatct

SEQ ID NO: 38713 - DNA, 120 bp, Artificial Sequence
  ENSG00000056487_45 (sequence is synthesized)
catcctggccagaccttaggagggagctcctgcaaactgatgccagcagggccaggcgagcatggatcacgtggacacggaggccctttgtcctgcttcgtccgtccaaccctatgccag

SEQ ID NO: 38714 - DNA, 120 bp, Artificial Sequence
  ENSG00000056487_46 (sequence is synthesized)
tgagctccacgaagcagtgacgcctgcagagactctggccacaggaagtgtcagtatcctttggtgcagctgtgaatggtgcccaggagctgagcgtcttgtagtgcctgaaggtaacaa

SEQ ID NO: 38715 - DNA, 120 bp, Artificial Sequence
  ENSG00000056558_0 (sequence is synthesized)
gatttcatcagggctttcctgctccttctggttgcctcagtcccaggcaagatagggtcccagaatcttacagcccagaggccacctgttgcaacttcttttttacagatggagtcatca

SEQ ID NO: 38716 - DNA, 120 bp, Artificial Sequence
  ENSG00000056558_1 (sequence is synthesized)
gaacccactgtgaggaagtgacttctccttgaggtcacccagacactccaaacagagcagagcaaaagcgcctagaacttgaaattttggacctgtctccaacaccctggggatttccac

SEQ ID NO: 38717 - DNA, 120 bp, Artificial Sequence
  ENSG00000056558_2 (sequence is synthesized)
caggaagccttcagtcaccatccaggggatttttatcgccacaaagggtaattcctgctccatccctgctgtgactcagctgtgacgttgaaccacacaagccagagagaagaagataaa

SEQ ID NO: 38718 - DNA, 120 bp, Artificial Sequence
  ENSG00000056558_3 (sequence is synthesized)
gtcatcagagctcctactcaccagagagtgaggcccaggccaggactccacaaggctggtcccctgccctggagcaacttaaacaggccctctggccagcctggaaccctgagatggcct

SEQ ID NO: 38719 - DNA, 120 bp, Artificial Sequence
  ENSG00000056558_4 (sequence is synthesized)
ccagctcaggcagcagtcctcgcccggcccctgatgagaatgagtttccctttgggtgccctcccaccgtctgccaggacccaaaggagcccagggctctctgctgtgcaggctgtctct

SEQ ID NO: 38720 - DNA, 120 bp, Artificial Sequence
  ENSG00000056558_5 (sequence is synthesized)
ctgagaacccgaggaatggcgaggatcagatctgccccaaatgcagaggggaagacctccagtctataagcccaggaagccgtcttcgaactcaggagaaggctcaccccgaggtggctg

SEQ ID NO: 38721 - DNA, 120 bp, Artificial Sequence
  ENSG00000056558_6 (sequence is synthesized)
aggctggaattgggtgcccctttgcaggtgtcggctgctccttcaagggaagcccacagtctgtgcaagagcatgaggtcacctcccagacctcccacctaaacctgctgttggggttca

SEQ ID NO: 38722 - DNA, 120 bp, Artificial Sequence
  ENSG00000056558_7 (sequence is synthesized)
tgaaacagtggaaggcccggctgggctgtggcctggagtctgggcccatggccctggagcagaacctgtcagacctgcagctgcaggcagccgtggaagtggcgggggacctggaggtcg

SEQ ID NO: 38723 - DNA, 120 bp, Artificial Sequence
  ENSG00000056558_8 (sequence is synthesized)
attgctaccgggcaccctgctccgagagccaggaggagctggccctgcagcacttcatgaaggagaagcttctggctgagctggaggggaagctgcgtgtgtttgagaacattgttgctg

SEQ ID NO: 38724 - DNA, 120 bp, Artificial Sequence
  ENSG00000056558_9 (sequence is synthesized)
tcctcaacaaggaggtggaggcctcccacctggccctggccacctctatccaccagagccagctggaccgtgagcgcatcctgagcttggagcagagggtggtggagcttcagcagaccc

SEQ ID NO: 38725 - DNA, 120 bp, Artificial Sequence
  ENSG00000056558_10 (sequence is synthesized)
tggcccagaaagaccaggccctgggcaagctggagcagagcttgcgcctcatggaggaggcctccttcgatggcactttcctgtggaagatcaccaatgtcaccaggcggtgccatgagt

SEQ ID NO: 38726 - DNA, 120 bp, Artificial Sequence
  ENSG00000056558_11 (sequence is synthesized)
cggcctgtggcaggaccgtcagcctcttctccccagccttctacactgccaagtatggctacaagttgtgcctgcggctgtacctgaatggagatggcactggaaagagaacccatctgt

SEQ ID NO: 38727 - DNA, 120 bp, Artificial Sequence
  ENSG00000056558_12 (sequence is synthesized)
cgctcttcatcgtgatcatgagaggggagtatgatgcgctgctgccgtggcccttccggaacaaggtcaccttcatgctgctggaccagaacaaccgtgagcacgccattgacgccttcc

SEQ ID NO: 38728 - DNA, 120 bp, Artificial Sequence
  ENSG00000056558_13 (sequence is synthesized)
ggcctgacctaagctcagcgtccttccagaggccccagagtgaaaccaacgtggccagtggatgcccactcttcttccccctcagcaaactgcagtcacccaagcacgcctacgtgaagg

SEQ ID NO: 38729 - DNA, 120 bp, Artificial Sequence
  ENSG00000056558_14 (sequence is synthesized)
acgacacaatgttcctcaagtgcattgtggagaccagcacttagggtgggcggggctcctgagggagctccaactcagaagggagctagccagaggactgtgatgccctgcccttggcac

SEQ ID NO: 38730 - DNA, 120 bp, Artificial Sequence
  ENSG00000056558_15 (sequence is synthesized)
ccaagacctcagggcacaaagatgggtgaaggctggcatgatccaagcaagactgaggggtcgacttcgggctggccatctggttaggatggcaggacgtgggctgggcccacaaaggca

SEQ ID NO: 38731 - DNA, 120 bp, Artificial Sequence
  ENSG00000056558_16 (sequence is synthesized)
aagggtccagaaggagacaggcagagctgctcccctctgcacggaccatgcgacactgggaggccagtgagccactccggccccgaatgttgaggtggactctcaccaaatgagaagaaa

SEQ ID NO: 38732 - DNA, 120 bp, Artificial Sequence
  ENSG00000056558_17 (sequence is synthesized)
atggaaccaggcttggaaccgtaggacccaagcagagaagctctcgggctaggaagatctctgcagggccgccagggagacctggacacaggcctgctctctttttctccagggtcagaa

SEQ ID NO: 38733 - DNA, 120 bp, Artificial Sequence
  ENSG00000056558_18 (sequence is synthesized)
tttgaatgcagtctgtccaggctcgtcattggaggtgaacaagcaaacccagacggctccactaggacttcaaattgggggttggatttgaagacttttaagtttccttccagcccagaa

SEQ ID NO: 38734 - DNA, 120 bp, Artificial Sequence
  ENSG00000056558_19 (sequence is synthesized)
agtctctcattctaggcctcctggcccaggtgagtcctagagctacaggggttctggaaacattcaggagcttcctgtcctcccagctcctcactcaccttcagtaacccccactggact

SEQ ID NO: 38735 - DNA, 120 bp, Artificial Sequence
  ENSG00000056558_20 (sequence is synthesized)
gacctggtccacagggcacctgccaccctgggcctggcagctcagcttccccaacacgcaggagcacacccagcccccacatcctgtgcctccatcagctaaacaccacgtcacttcatg

SEQ ID NO: 38736 - DNA, 120 bp, Artificial Sequence
  ENSG00000056558_21 (sequence is synthesized)
caggtgaaacccagtcactgtgagctcccaggtgcagccagaggcacctcaagaagaagaggggcataaactttcctcttcctgcctagaggccccacctttggtgctttccagaatccc

SEQ ID NO: 38737 - DNA, 120 bp, Artificial Sequence
  ENSG00000056558_22 (sequence is synthesized)
gtaacacctgattaactgaggcatccacttctttcagcagactgatcaggacctccaagccactgagcaatgtataaccccaaagaaataatttttagaatctctttcgaagttttccta

SEQ ID NO: 38738 - DNA, 120 bp, Artificial Sequence
  ENSG00000056558_23 (sequence is synthesized)
aagtgtatggtttgggagttgtttgtactgagccaggtttgaaaaggccattgctgagtttgaggtggtgccaccagttttgcaggtggcatcagaggctggcatgctggcaggaacatc

SEQ ID NO: 38739 - DNA, 120 bp, Artificial Sequence
  ENSG00000056558_24 (sequence is synthesized)
ccctcttagccccagtcttctcttttctataatgagacccaccccagcttgcctccctccctggcttctctgaccctcaaaggagatgccacgcaggacagactggagagagaagcctgg

SEQ ID NO: 38740 - DNA, 120 bp, Artificial Sequence
  ENSG00000056558_25 (sequence is synthesized)
gcaatactgcccgcctgtcatggcctggtggtggcccacacctatcttctcaccttggaggccacacccaactttccaaagaccctgagacaagtcaggaccctactactctcccctgct

SEQ ID NO: 38741 - DNA, 120 bp, Artificial Sequence
  ENSG00000056558_26 (sequence is synthesized)
gctttcctgacagcttactcttcctccacctgctgagcctgtgccagactccattgctcaaatcgttagggttgcttctataaaaatgggtcagtagcccttcctgttctctccagccca

SEQ ID NO: 38742 - DNA, 120 bp, Artificial Sequence
  ENSG00000056558_27 (sequence is synthesized)
gcatacaggaggatcaaaggaggtgacggagcatcgtggcacggcagtctcaatgggtcagaaacccaggccagctgggctctaagcctggcatcctgtcatgcttagtccttcagctga

SEQ ID NO: 38743 - DNA, 120 bp, Artificial Sequence
  ENSG00000056558_28 (sequence is synthesized)
agatcagaggaagcctctcccttgccctctccagctctaggggttttcaggaggcccaactgcaataatggagcactagtgcttttatgtgcaatggtgtcgtccatgcacgacagcagc

SEQ ID NO: 38744 - DNA, 120 bp, Artificial Sequence
  ENSG00000056558_29 (sequence is synthesized)
aaacattctggggctgctttttattgttcccacggctgacagcgtggcagcggagactgtggaggcagtggagactgacttcttcctgctgacagctggatgtcacacatgaaggtctgg

SEQ ID NO: 38745 - DNA, 120 bp, Artificial Sequence
  ENSG00000056558_30 (sequence is synthesized)
cctagcgagtgatgggtctaggccctgaaactgatgtcctagcaataacctcttgatccctactcaccgagtgttgagcccaaggggggatttgtagaacaagcccccatgagaaacagc

SEQ ID NO: 38746 - DNA, 120 bp, Artificial Sequence
  ENSG00000056558_31 (sequence is synthesized)
tgttactctacacttttgattgcctatttctgatggcaagagatacatactctcttcaaagagcatgagatgcagccattctttcagcaaagcttcattgacacctgcacctgttaactg

SEQ ID NO: 38747 - DNA, 120 bp, Artificial Sequence
  ENSG00000056558_32 (sequence is synthesized)
tgttcgacattgaagggagaaaggcaagatgtgcactctggactcaagaaactcttagttcagtggaggaaatgagcagataagtagatcattatgattgagagtaggagaagcttagag

SEQ ID NO: 38748 - DNA, 120 bp, Artificial Sequence
  ENSG00000056558_33 (sequence is synthesized)
aaagcacagaatcccagatccagctggtgaaggagggaaggcttcaggcctttaagctcagcctgagaatattgtgaaatgcagaggatggggaaaagggaagagtaccgacttgaaaac

SEQ ID NO: 38749 - DNA, 120 bp, Artificial Sequence
  ENSG00000056558_34 (sequence is synthesized)
ggagagctgtcttggctgagggcagggtctgtgtggcaggatgggggagggagtcagaagggtcagatgaactggagtgtagacagcatcagatgcagcagtgcccaccgcccccccccc

SEQ ID NO: 38750 - DNA, 120 bp, Artificial Sequence
  ENSG00000056558_35 (sequence is synthesized)
caccccccgccctgcccacagagcacctgctggtaaccctgggcctattgaaagcaggatgagatgataatttaagacactgaatgatttcttttccaacaaagctctatgttaagtgca

SEQ ID NO: 38751 - DNA, 120 bp, Artificial Sequence
  ENSG00000056586_0 (sequence is synthesized)
atccctccaggtccgcctccgtggtgaggaggaggaggaggaggaggcggaggtggagggaggaggaggaggccccgtcgcggccttcgccgccgccaacggggctgtccctgtagctcc

SEQ ID NO: 38752 - DNA, 120 bp, Artificial Sequence
  ENSG00000056586_1 (sequence is synthesized)
cgatggagtttgaggtcgtgaaacctccgccgagctctgccccggcgagacgaggcgcctccgtcgccaagccgcgccgtcgcggggctcccgggagcggcccttagcgaccccgcccgg

SEQ ID NO: 38753 - DNA, 120 bp, Artificial Sequence
  ENSG00000056586_2 (sequence is synthesized)
gccccctcagcttacaaaacactacacagcaaaataatgatctgctagactgctaacccgagcatccagcttccacaatgcctgtgcaggcagctcaatggacagaatttctgtcctgtc

SEQ ID NO: 38754 - DNA, 120 bp, Artificial Sequence
  ENSG00000056586_3 (sequence is synthesized)
caatctgctataatgaatttgatgagaatgtgcacaaacccatcagtttaggttgttcacacactgtttgcaagacctgcttgaataaacttcatcgaaaagcttgtccttttgaccaga

SEQ ID NO: 38755 - DNA, 120 bp, Artificial Sequence
  ENSG00000056586_4 (sequence is synthesized)
ctgccatcaacacagatattgatgtacttcctgtcaacttcgcacttctccagttagttggagcccaggtaccagatcatcagtcaattaagttaagtaatctaggtgagaataaacact

SEQ ID NO: 38756 - DNA, 120 bp, Artificial Sequence
  ENSG00000056586_5 (sequence is synthesized)
atgaggttgcaaagaaatgcgttgaggatttggcactctacttaaaaccactaagtggaggtaaaggtgtagctagcttgaaccagagtgcactgagccgtccaatgcaaaggaaactgg

SEQ ID NO: 38757 - DNA, 120 bp, Artificial Sequence
  ENSG00000056586_6 (sequence is synthesized)
tgacacttgtaaactgtcaactggtggaggaagaaggtcgtgtaagagccatgcgagcagctcgttcccttggagaaagaactgtaacagaactgatattacagcaccagaaccctcagc

SEQ ID NO: 38758 - DNA, 120 bp, Artificial Sequence
  ENSG00000056586_7 (sequence is synthesized)
agttgtctgccaatctatgggccgctgtcagggctcgaggatgccagtttttagggccagctatgcaagaagaggccttgaagctggtgttactggcattagaagatggttctgccctct

SEQ ID NO: 38759 - DNA, 120 bp, Artificial Sequence
  ENSG00000056586_8 (sequence is synthesized)
caaggaaagttctggtactttttgttgtgcagagactagaaccaagatttcctcaggcatcaaaaacaagtattggtcatgttgtgcaactactgtatcgagcttcttgttttaaggtta

SEQ ID NO: 38760 - DNA, 120 bp, Artificial Sequence
  ENSG00000056586_9 (sequence is synthesized)
ccaaaagagatgaagactcttccctaatgcagctgaaggaggaatttcggagttatgaagcattacgcagagaacatgatgcccaaattgttcatattgccatggaagcaggactccgta

SEQ ID NO: 38761 - DNA, 120 bp, Artificial Sequence
  ENSG00000056586_10 (sequence is synthesized)
tttcacctgaacagtggtcctctcttttgtatggtgatttggctcataaatcacacatgcagtctatcattgataagctacagtctccagagtcatttgcaaagagtgtccaggaattga

SEQ ID NO: 38762 - DNA, 120 bp, Artificial Sequence
  ENSG00000056586_11 (sequence is synthesized)
caattgttttgcaacgaacaggtgacccagctaacttaaatagactgaggcctcatttagagcttcttgcaaacatagaccctaatccagacgctgtttcaccaacttgggagcagctgg

SEQ ID NO: 38763 - DNA, 120 bp, Artificial Sequence
  ENSG00000056586_12 (sequence is synthesized)
aaaatgcaatggtagctgttaaaacagtagttcatggccttgtggacttcatacaaaattatagtagaaaaggccatgagacccctcagcctcagccaaacagcaaatacaagactagca

SEQ ID NO: 38764 - DNA, 120 bp, Artificial Sequence
  ENSG00000056586_13 (sequence is synthesized)
tgtgccgagatttgcgacagcaagggggttgtccacgaggaacaaattgtacatttgcccattctcaggaagagcttgaaaagtatcgattaaggaacaaaaagatcaatgccactgtaa

SEQ ID NO: 38765 - DNA, 120 bp, Artificial Sequence
  ENSG00000056586_14 (sequence is synthesized)
gaacgtttcctcttctaaataaagttggtgtaaacaacactgtcacaaccacagccggaaatgtcatttctgtcataggaagtactgaaacaacagggaaaattgttccaagtacaaacg

SEQ ID NO: 38766 - DNA, 120 bp, Artificial Sequence
  ENSG00000056586_15 (sequence is synthesized)
gaatttcaaatgcagaaaacagtgtttcccagctaatctcacgtagtactgacagtaccttaagagctctggagaccgtgaagaaagtgggaaaggttggcgctaatggtcagaatgctg

SEQ ID NO: 38767 - DNA, 120 bp, Artificial Sequence
  ENSG00000056586_16 (sequence is synthesized)
ctgggccctctgcagattctgtaactgaaaataaaattggttctccacccaagactcctgtaagtaatgtagcagctacctcagctgggccctctaatgttggaacagagctgaattctg

SEQ ID NO: 38768 - DNA, 120 bp, Artificial Sequence
  ENSG00000056586_17 (sequence is synthesized)
tgcctcaaaaatccagcccatttctaactagagtaccagtatatcctccgcattctgaaaacattcagtattttcaagatccaaggactcagataccctttgaagtcccacagtacccac

SEQ ID NO: 38769 - DNA, 120 bp, Artificial Sequence
  ENSG00000056586_18 (sequence is synthesized)
agacaggatactatccaccacctccaacggtaccagctggtgtggctccctgtgttcctcgctttgtgaggtccaataacgttccagagtcctccctcccacctgcttccatgccatatg

SEQ ID NO: 38770 - DNA, 120 bp, Artificial Sequence
  ENSG00000056586_19 (sequence is synthesized)
ccgatcattacagtacattttcccctcgagatcgaatgaattcttctccttaccagcctcctcctccgcagccgtatggaccagttcctccagtaccttctggaatgtatgctcctgtgt

SEQ ID NO: 38771 - DNA, 120 bp, Artificial Sequence
  ENSG00000056586_20 (sequence is synthesized)
acgacagcaggcgcatctggcgcccacctatgtaccaacgagatgacattattagaagcaattctttacctccaatggatgtgatgcactcatctgtctatcagacatctttgcgggaaa

SEQ ID NO: 38772 - DNA, 120 bp, Artificial Sequence
  ENSG00000056586_21 (sequence is synthesized)
gatataactcattagatggatattattcggtggcttgtcagccaccaagtgagccaaggacaactgtgcctttaccaagggaaccttgtggtcatttgaagaccagttgcgaggagcaga

SEQ ID NO: 38773 - DNA, 120 bp, Artificial Sequence
  ENSG00000056586_22 (sequence is synthesized)
taagaagaaagccagatcagtgggcacagtaccacactcagaaagcacctcttgtctcttcaactcttcctgtggcaacacagtcaccaacaccaccttctcctctgttcagtgtagact

SEQ ID NO: 38774 - DNA, 120 bp, Artificial Sequence
  ENSG00000056586_23 (sequence is synthesized)
ttcgtgcggatttctcagagagtgtgagtggtacaaaatttgaagaagatcatctttcccattattctccctggtcttgtggcaccataggctcctgtataaatgccattgattcagagc

SEQ ID NO: 38775 - DNA, 120 bp, Artificial Sequence
  ENSG00000056586_24 (sequence is synthesized)
ccaaagatgtcattgctaattcaaatgctgtgttaatggacctggacagtggtgatgttaagagaagagtacatttatttgaaacccagagaaggacaaaagaagaagatccaataattc

SEQ ID NO: 38776 - DNA, 120 bp, Artificial Sequence
  ENSG00000056586_25 (sequence is synthesized)
cctttagtgatggacccatcatctcaaaatggggtgcgatttccagatcttcccgtacaggttaccataccacagatcctgtccaggccactgcttcccaaggaagtgcgactaagccca

SEQ ID NO: 38777 - DNA, 120 bp, Artificial Sequence
  ENSG00000056586_26 (sequence is synthesized)
tcagtgtatcagattatgtcccttatgtcaatgctgttgattcaaggtggagttcatatggcaacgaggccacatcatcagcacactatgttgaaagggacagattcattgttactgatt

SEQ ID NO: 38778 - DNA, 120 bp, Artificial Sequence
  ENSG00000056586_27 (sequence is synthesized)
tatctggtcatagaaagcattccagtactggggaccttttgagccttgaacttcagcaggccaagagcaactcattacttcttcagagagaggccaatgctttggccatgcaacagaagt

SEQ ID NO: 38779 - DNA, 120 bp, Artificial Sequence
  ENSG00000056586_28 (sequence is synthesized)
ggaattccctggatgaaggccgtcaccttaccttaaaccttttaagcaaggaaattgaactaagaaatggagagttacagagtgattatacagaagatgcaacagatactaaacctgata

SEQ ID NO: 38780 - DNA, 120 bp, Artificial Sequence
  ENSG00000056586_29 (sequence is synthesized)
gggatatcgagttagagctttcagcacttgatactgatgaacctgatggacaaagtgaaccaattgaagagatcttggacatacagcttggtatcagttctcaaaatgatcagttgctaa

SEQ ID NO: 38781 - DNA, 120 bp, Artificial Sequence
  ENSG00000056586_30 (sequence is synthesized)
atggaatggcagtggaaaatgggcatccagtacagcagcaccaaaaggagccaccaaagcagaagaaacagagtttaggtgaagaccatgtgattctggaggagcaaaaaacaattctgc

SEQ ID NO: 38782 - DNA, 120 bp, Artificial Sequence
  ENSG00000056586_31 (sequence is synthesized)
cggtaacttcttgctttagccagccactcccagtgtctattagcaatgcaagttgcctccccatcaccacatctgtcagtgctggcaacctcattctgaaaactcatgttatgtctgaag

SEQ ID NO: 38783 - DNA, 120 bp, Artificial Sequence
  ENSG00000056586_32 (sequence is synthesized)
ataaaaacgactttttaaaacctgttgcaaatgggaagatggttaacagctgaaaggaggttcatctttcaaatttgtgaccacaccatggaagcatttacactagctttttatatatat

SEQ ID NO: 38784 - DNA, 120 bp, Artificial Sequence
  ENSG00000056586_33 (sequence is synthesized)
aatatatattatataatgtatattttttttaaaaaaaagatattactgggggcatccatttcctgtggactctttgatacttcaagccctcttgcattagcattatgaaaaaaaaaaaga

SEQ ID NO: 38785 - DNA, 120 bp, Artificial Sequence
  ENSG00000056586_34 (sequence is synthesized)
aaatttactttactagggtaacatgttcactttccagaaatgattggaatttggacaacatttaacttaagcttcaagcagctttttatgagtttgtagcaatccggtgcagtaactgag

SEQ ID NO: 38786 - DNA, 120 bp, Artificial Sequence
  ENSG00000056586_35 (sequence is synthesized)
ccatttcctattttaaatggcttctatagaaaattaacaactcagttattaaactagcaggatcctacaatgatacatctagtgaaagtagacttagttaacttatttatttctatttta

SEQ ID NO: 38787 - DNA, 120 bp, Artificial Sequence
  ENSG00000056586_36 (sequence is synthesized)
tgtttcactgagagaagtttccatctcattccagctgctttatttatctttttcatggaactttgcatggatttctttttctttttttaattttgaagagtggagttagatgttcttacc

SEQ ID NO: 38788 - DNA, 120 bp, Artificial Sequence
  ENSG00000056586_37 (sequence is synthesized)
aatttttttttaattttccatttttcaagagtagtttctgctttgttaatatttatacacaggctacttgttgaagtaattaattaaaaatataaccaagtgcctaagtctttcagctga

SEQ ID NO: 38789 - DNA, 120 bp, Artificial Sequence
  ENSG00000056586_38 (sequence is synthesized)
tgtactagatattaaattctcctaagttatgcagaatcgtttttacaattttgataaattatgcactaatgtaatggcagttttttaaaatgcagatttaagcctgtacattattgaatc

SEQ ID NO: 38790 - DNA, 120 bp, Artificial Sequence
  ENSG00000056586_39 (sequence is synthesized)
tgatgacttggcaaaagaatcaggtgctttcagctttcttgagaaaaccctgtatgtagcgtttgcactgactaacaagatggtattgctgggtttttaatttaaactaattaatttggt

SEQ ID NO: 38791 - DNA, 120 bp, Artificial Sequence
  ENSG00000056586_40 (sequence is synthesized)
tgttcattgcattatcttggttaaatattgtttattgttacttcatgttggggtttagtttttcttgttttttgactgttaggttgataagactatgaactgtgtaatagtagaacagtg

SEQ ID NO: 38792 - DNA, 120 bp, Artificial Sequence
  ENSG00000056586_41 (sequence is synthesized)
gctaacatttattcatacttaagaacatgaataatttctgccttgctaaaatgtgactgaaatggttttgacttggcatctgaaagtatacaatgtgttcaacaagtcatgcatcagatt

SEQ ID NO: 38793 - DNA, 120 bp, Artificial Sequence
  ENSG00000056586_42 (sequence is synthesized)
tgtgggaggtattgtactgaaacctaaatttcagtcaacatttgaaaagaagagctgggcattccttcctggtgatctttacctatagtttatctatctgtttttcttctgtttctttaa

SEQ ID NO: 38794 - DNA, 120 bp, Artificial Sequence
  ENSG00000056586_43 (sequence is synthesized)
gattagtttgacttttattattatttttttaattaacttctgtgaagttgtttactctgaaaattgtactggaatattttaagccaagctgatctttcaccaggtgtactgtatgtaagg

SEQ ID NO: 38795 - DNA, 120 bp, Artificial Sequence
  ENSG00000056586_44 (sequence is synthesized)
gcttttcctgctagcaagatgcttaaacaggatcatgttattggtcgtctgagctatttagttgttttacaaaaccacagcattgtatcagataagattttgataaaaagttttgtgcac

SEQ ID NO: 38796 - DNA, 120 bp, Artificial Sequence
  ENSG00000056586_45 (sequence is synthesized)
atttccaggggcgggagggttgacatttccctgaaatttcttgattagaatgagtaaatactggtgtttgatacctgtcttaatgaacatgctcataaggtgactgataagttgtaaata

SEQ ID NO: 38797 - DNA, 120 bp, Artificial Sequence
  ENSG00000056586_46 (sequence is synthesized)
tacctgagaaacaaaggggtagttttgatattctggtgtcagtatggaagatcttacacatttatttaatactcaaatgtatgaagatgtttgtttgtagcataacaacagcacagtagc

SEQ ID NO: 38798 - DNA, 120 bp, Artificial Sequence
  ENSG00000056586_47 (sequence is synthesized)
cttgacttagtttcctttggttagtactgtaccttttttgccatggccagtgctccccatccctatgaagacattttatttatttcactctgtaacctgaaatgaataggaacaagggtt

SEQ ID NO: 38799 - DNA, 120 bp, Artificial Sequence
  ENSG00000056586_48 (sequence is synthesized)
ttaaaccatgttacattaacttttctgacattataaattagcctagaatattacaggaacatgattgttatataatttatatcagaacctttctataaatatgtgcttattacatttgaa

SEQ ID NO: 38800 - DNA, 120 bp, Artificial Sequence
  ENSG00000056586_49 (sequence is synthesized)
atgcttccaatgtactttatttgctgtttgtaattccaaaaaggatatgcaaaccagtctgtctatttcatggatatttaatagtgagatcttccatgttgaaggtaatgtatttttttt

SEQ ID NO: 38801 - DNA, 120 bp, Artificial Sequence
  ENSG00000056586_50 (sequence is synthesized)
taagattttaaaattgctattttgttacaaaatagagacctattaacagtttgagagctccttatgtgccctcagggaaagaaccctctgtgcaacagaactacacaaaacatcttcagc

SEQ ID NO: 38802 - DNA, 120 bp, Artificial Sequence
  ENSG00000056586_51 (sequence is synthesized)
acgttctgagggtgaatatatactacataaattgatcttgtgtatttaaccttatctttttaattttaaaattgaaattttgaaacttggttgtgctctgctggagggggttgggataaa

SEQ ID NO: 38803 - DNA, 120 bp, Artificial Sequence
  ENSG00000056586_52 (sequence is synthesized)
ctgcttagatgtttgcctacttgtccagtgaaattacatttgcatcagtatatgtatatacctgccaaccttattggtatgtctcagaacatttatattaaaataatgcttgtcttgcag

SEQ ID NO: 38804 - DNA, 120 bp, Artificial Sequence
  ENSG00000056586_53 (sequence is synthesized)
caggtgatcccataaaacaataactccctgttcttaaaaacttactctctttttcactaacaacataggaattgtttctgtgttgagattattctgtgttgcatccattctctatgtagt

SEQ ID NO: 38805 - DNA, 120 bp, Artificial Sequence
  ENSG00000056586_54 (sequence is synthesized)
ggtcaccttctgtctgtcatggtgggcttaatgtgaagtaaagccattggttctctgccactttcgaagaaagggcagttcatctgatccttcttcagaatggtacctactgatatcatc

SEQ ID NO: 38806 - DNA, 120 bp, Artificial Sequence
  ENSG00000056586_55 (sequence is synthesized)
gaggaaaatgttacaaatcagacctaggatatgactttttaaaattgaggcatttcccgtcatttggcctttttaccaacaagatgtgatgtacaaatttggaatcaaaggatacaaagc

SEQ ID NO: 38807 - DNA, 120 bp, Artificial Sequence
  ENSG00000056586_56 (sequence is synthesized)
aacaagagaggaaatgtgtaatgtgggtaaccaaactgcatatgttacctattgtctaatcagaaaaaatagtctgaggtctggaaagcaggaaagtggtggttattttctttcattttt

SEQ ID NO: 38808 - DNA, 120 bp, Artificial Sequence
  ENSG00000056586_57 (sequence is synthesized)
tgtgtttttgttttttaatttctaagttccattctgaaatccatgtgccgcattcagttactgtggttgtagcatcagtttttttgtggtttcatttcattttatgaattcagaggaagt

SEQ ID NO: 38809 - DNA, 120 bp, Artificial Sequence
  ENSG00000056586_58 (sequence is synthesized)
tacatatatattttttctagttggtacctgaacaaagcagattcccttgcctttgctgccacgtcttattttcaatgccatgtgataaaccagtgtcatacatgaaagttgtgcattgta

SEQ ID NO: 38810 - DNA, 120 bp, Artificial Sequence
  ENSG00000056586_59 (sequence is synthesized)
attttcaaaaaaaagggagttcattaggccagtggcactgatttttccttcccatcatagctatttattctagtaagaggataataaaagaaatttcctatacaagaactgaaattttcc

SEQ ID NO: 38811 - DNA, 120 bp, Artificial Sequence
  ENSG00000056586_60 (sequence is synthesized)
atttgtatggatctagtcactttcagatttcaatttgaggttaagtatataaagcacatcccaattttatatgctgccttgagaaaattacaggatgcacggcaatttgtaggaatttca

SEQ ID NO: 38812 - DNA, 120 bp, Artificial Sequence
  ENSG00000056586_61 (sequence is synthesized)
aatgggatcatttaaacatttgaaaaattattttaaaaaccatctagtttgcttttggattttagacattaaagcctatgttgtcttgttaacaggggtggaatgtataaccatcagatt

SEQ ID NO: 38813 - DNA, 120 bp, Artificial Sequence
  ENSG00000056586_62 (sequence is synthesized)
cagcatgtgatttcacctttgaatctgagtatttcttccctatcttctttgagtcatttttggagcagactgtcaccagtattgataactaagcattaaagggaaaagttgcattgcaac

SEQ ID NO: 38814 - DNA, 120 bp, Artificial Sequence
  ENSG00000056586_63 (sequence is synthesized)
tatgcattggtttcctggaagaacttttcttttgttttagtgaatgaagaggcttgatgggatcacttactgtaactccttctacataaggaccccttctgcaagcagaacacaaaagaa

SEQ ID NO: 38815 - DNA, 120 bp, Artificial Sequence
  ENSG00000056586_64 (sequence is synthesized)
catgctcaaggagtatcccattttctggataaattgaagaagtttgctagtaatgtctttatactagcgtcttccttgtatccctttgctggcaagggaatacaaggcgtcaagaccaca

SEQ ID NO: 38816 - DNA, 120 bp, Artificial Sequence
  ENSG00000056586_65 (sequence is synthesized)
gatcaaaacaccccacatttgagtggagtcttatttttactccaagagcagttattcccttctagtctaaaattggcagttttttcttttttttaataaaatttttaaaatattcccaaa

SEQ ID NO: 38817 - DNA, 120 bp, Artificial Sequence
  ENSG00000056586_66 (sequence is synthesized)
ccagtggaacacagacactggctgcacttagtactgccaaaagccaaggtcatttgcacatattccatcaacctgtcgagaattaggcctcactttataacccaaggcatggaagtgcat

SEQ ID NO: 38818 - DNA, 120 bp, Artificial Sequence
  ENSG00000056586_67 (sequence is synthesized)
gcattctcttagctgggcaaacaattatactgtagttgtgatacaacacatgtggcttttatttgtactgcacatatccactgtacagccacttgggagtatcgtggttagcttgcagca

SEQ ID NO: 38819 - DNA, 120 bp, Artificial Sequence
  ENSG00000056586_68 (sequence is synthesized)
actgctgtctgcatttatactgtttattgcatattcttttccctggaagtgaaagagaaatgtttttcttgttgcattgattacattttataaatttgcttagctggaaagtttgggaaa

SEQ ID NO: 38820 - DNA, 120 bp, Artificial Sequence
  ENSG00000056586_69 (sequence is synthesized)
agaggcctgtttgtcaattgtacaaccgattgtgaagctctagtgtgaatatttttacgtctgtattagacattttctttgcaaatctattgttcgattgaaatgtaaatgaaattaaag

SEQ ID NO: 38821 - DNA, 120 bp, Artificial Sequence
  ENSG00000056586_70 (sequence is synthesized)
atggtgtacacccatcatgtaaaaagcaggcaccatctctaagatggatttaatgctcatttttaaggcatatactcagcttctatttaaaactataatttaaaataattctgtacaatg

SEQ ID NO: 38822 - DNA, 120 bp, Artificial Sequence
  ENSG00000056586_71 (sequence is synthesized)
aaatggggaatatatatgggaataaattctattccatttatttcaatttgaatttccaaattgtaatgtttccctttgtgctataggaataggattaaatgggggaagactaggatttat

SEQ ID NO: 38823 - DNA, 120 bp, Artificial Sequence
  ENSG00000056586_72 (sequence is synthesized)
aaggcctgtatatggggggagggcagagatggaacaatgagggttgtgatgatagtgaatagcaaagagtgaattctgtgtgtttttgctgtagcactgaagtgaagagatattagcttt

SEQ ID NO: 38824 - DNA, 120 bp, Artificial Sequence
  ENSG00000056586_73 (sequence is synthesized)
ggctgttcacaaaatagagcatcatgattttcagtgtttgagagaaaattgatggaaaaagtttgcagtacttgacatgtatttgcatgcacaaaataaaattatttgtccaccttaaaa

SEQ ID NO: 38825 - DNA, 120 bp, Artificial Sequence
  ENSG00000056586_74 (sequence is synthesized)
agccaagtcttgtcagagatttcctctttcaggtggcaaagctgttttcttcacacttgagtctctacaatattgtttggatcagtagtttccaaagttcattaactcctggccatactt

SEQ ID NO: 38826 - DNA, 120 bp, Artificial Sequence
  ENSG00000056586_75 (sequence is synthesized)
tattatgttttggggtactggttatccaagggaaacacttttttaaacaacaaaacaaaaaaaccgcccagcagtccaaagtaatttgtgttcctaaaaatggaatatggaaagttaatt

SEQ ID NO: 38827 - DNA, 120 bp, Artificial Sequence
  ENSG00000056586_76 (sequence is synthesized)
tgcttgtttgatgtggtcgttgagaaaaatacataaaagctttgatgtttattatgtgagcaaccaatataaatacagtttagttgaaaggaacactattaaggtattgtttccaggcag

SEQ ID NO: 38828 - DNA, 120 bp, Artificial Sequence
  ENSG00000056586_77 (sequence is synthesized)
aatttcagaaatgtaattaattcagcaaataggttttttaaaaaagacatccaaaggttataaaattatttagaagtattttaggtctgaagctgtaatagttgacttaagcaattaact

SEQ ID NO: 38829 - DNA, 120 bp, Artificial Sequence
  ENSG00000056586_78 (sequence is synthesized)
cttttttattagctattggggcttgaggatgccaatttctggagctcggtgaatcctgagactcaacccgtctttatatgtacaaatcttgatataattaaagataaatttgtttttgtt

SEQ ID NO: 38830 - DNA, 120 bp, Artificial Sequence
  ENSG00000056586_79 (sequence is synthesized)
ttcattgttgtctcctttcctcagtggctagcttgggcactgtacataatgagctctacaagcagcagcattgtgatagagagaagataagtgtgtgtgcagtgaaaagagcagaaacat

SEQ ID NO: 38831 - DNA, 120 bp, Artificial Sequence
  ENSG00000056586_80 (sequence is synthesized)
gcttctcttctcagtttttttccccacttgaagtgcctagagaagaggattaaggagtcctaaggaaaaaagatgctgtttgtacccaatcgaactagttctatatacagaatttcacat

SEQ ID NO: 38832 - DNA, 120 bp, Artificial Sequence
  ENSG00000056586_81 (sequence is synthesized)
caagataatttgggagactccaggaaatacattcagcttgtccatacctgaaatagagctttttagctaaaaggggagcttttgagaaagttcgactaaaaaagtcagagaagaaactgt

SEQ ID NO: 38833 - DNA, 120 bp, Artificial Sequence
  ENSG00000056586_82 (sequence is synthesized)
ggtttcattgccattccaccctcaattagtgcccaggctgaaaatccattttcttctttctcataccttcaaacagacttcacattcttcatctgcagtacctagttcagaactttatta

SEQ ID NO: 38834 - DNA, 120 bp, Artificial Sequence
  ENSG00000056586_83 (sequence is synthesized)
tattttgccagacttgtaatagtagcagtaaaaataataatagccaaactaggtgtagtggctcatgcctgtattcccagcagtttgggaggcaaaggcaggaggataccttgagtccag

SEQ ID NO: 38835 - DNA, 82 bp, Artificial Sequence
  ENSG00000056586_84 (sequence is synthesized)
cctctacaaaaaaataaacaaaattggctgagcatagtggcatacgcctgtcatcttagctactcaggaggctgaggtggga

SEQ ID NO: 38836 - DNA, 90 bp, Artificial Sequence
  ENSG00000056586_85 (sequence is synthesized)
ggaggctgaggtgggaggattgcttgaactcgggaggtcaggtctgccgtgaactgagattataccactgtattccaaccctataaataa

SEQ ID NO: 38837 - DNA, 120 bp, Artificial Sequence
  ENSG00000056586_86 (sequence is synthesized)
aataaatatataaaatatcactcattcaaaaataataataatggcaaaattattggtcacatttttagtgtttcacatggtaatccagttggttttactgcttcagtggctttttatcca

SEQ ID NO: 38838 - DNA, 120 bp, Artificial Sequence
  ENSG00000056586_87 (sequence is synthesized)
gtatcttcctatatctcaatctgtcttttccatttccactattttctttttaaaatatgtgtgtctcctttaaattcttaattagttcctcagtacatcacagaatctcatcctgatttt

SEQ ID NO: 38839 - DNA, 120 bp, Artificial Sequence
  ENSG00000056586_88 (sequence is synthesized)
atcctctagctctactctgccatttgtatactttgtttttaaggtatattcaattaatcactgttgattactatataaatttcttttactcttcttttcacttgtctatattgtttattc

SEQ ID NO: 38840 - DNA, 120 bp, Artificial Sequence
  ENSG00000056586_89 (sequence is synthesized)
catattgtattattttctctctcctctttatctggataactatttctaatcatactcagatattatcttccctccacagacttccctaggcagtgttaattgcatccttcaccatgctgc

SEQ ID NO: 38841 - DNA, 88 bp, Artificial Sequence
  ENSG00000056586_90 (sequence is synthesized)
cttccctaggcagtgttaattgcatccttcaccatgctgccatagcactccatacatagtagtttaaaaattatggtatagttagctg

SEQ ID NO: 38842 - DNA, 86 bp, Artificial Sequence
  ENSG00000056586_91 (sequence is synthesized)
tactcctgtgtggacgacagagcaagattccgtctcaaaaaaataaatataaataaataaataaaaattatggtatagttataaaa

SEQ ID NO: 38843 - DNA, 120 bp, Artificial Sequence
  ENSG00000056586_92 (sequence is synthesized)
cttggttataccattactgagtgcattttggtgtgcctatctctgatggatgattgattgcttttaaaacttataacagaaataaaattgtaatcccagatttcttaaataattctttaa

SEQ ID NO: 38844 - DNA, 120 bp, Artificial Sequence
  ENSG00000056736_0 (sequence is synthesized)
atcccgcgcagtggcccggcgatgtcgctcgtgctgctaagcctggccgcgctgtgcaggagcgccgtaccccgagagccgaccgttcaatgtggctctgaaactgggccatctccagag

SEQ ID NO: 38845 - DNA, 120 bp, Artificial Sequence
  ENSG00000056736_1 (sequence is synthesized)
tggatgctacaacatgatctaatccccggagacttgagggacctccgagtagaacctgttacaactagtgttgcaacaggggactattcaattttgatgaatgtaagctgggtactccgg

SEQ ID NO: 38846 - DNA, 120 bp, Artificial Sequence
  ENSG00000056736_2 (sequence is synthesized)
gcagatgccagcatccgcttgttgaaggccaccaagatttgtgtgacgggcaaaagcaacttccagtcctacagctgtgtgaggtgcaattacacagaggccttccagactcagaccaga

SEQ ID NO: 38847 - DNA, 120 bp, Artificial Sequence
  ENSG00000056736_3 (sequence is synthesized)
ccctctggtggtaaatggacattttcctacatcggcttccctgtagagctgaacacagtctatttcattggggcccataatattcctaatgcaaatatgaatgaagatggcccttccatg

SEQ ID NO: 38848 - DNA, 120 bp, Artificial Sequence
  ENSG00000056736_4 (sequence is synthesized)
tctgtgaatttcacctcaccaggctgcctagaccacataatgaaatataaaaaaaagtgtgtcaaggccggaagcctgtgggatccgaacatcactgcttgtaagaagaatgaggagaca

SEQ ID NO: 38849 - DNA, 120 bp, Artificial Sequence
  ENSG00000056736_5 (sequence is synthesized)
gtagaagtgaacttcacaaccactcccctgggaaacagatacatggctcttatccaacacagcactatcatcgggttttctcaggtgtttgagccacaccagaagaaacaaacgcgagct

SEQ ID NO: 38850 - DNA, 120 bp, Artificial Sequence
  ENSG00000056736_6 (sequence is synthesized)
tcagtggtgattccagtgactggggatagtgaaggtgctacggtgcagctgactccatattttcctacttgtggcagcgactgcatccgacataaaggaacagttgtgctctgcccacaa

SEQ ID NO: 38851 - DNA, 120 bp, Artificial Sequence
  ENSG00000056736_7 (sequence is synthesized)
acaggcgtccctttccctctggataacaacaaaagcaagccgggaggctggctgcctctcctcctgctgtctctgctggtggccacatgggtgctggtggcagggatctatctaatgtgg

SEQ ID NO: 38852 - DNA, 120 bp, Artificial Sequence
  ENSG00000056736_8 (sequence is synthesized)
cacacaatttgttacttcactgaatttcttcaaaaccattgcagaagtgaggtcatccttgaaaagtggcagaaaaagaaaatagcagagatgggtccagtgcagtggcttgccactcaa

SEQ ID NO: 38853 - DNA, 120 bp, Artificial Sequence
  ENSG00000056736_9 (sequence is synthesized)
aagaaggcagcagacaaagtcgtcttccttctttccaatgacgtcaacagtgtgtgcgatggtacctgtggcaagagcgagggcagtcccagtgagaactctcaagacctcttccccctt

SEQ ID NO: 38854 - DNA, 120 bp, Artificial Sequence
  ENSG00000056736_10 (sequence is synthesized)
gcctttaaccttttctgcagtgatctaagaagccagattcatctgcacaaatacgtggtggtctactttagagagattgatacaaaagacgattacaatgctctcagtgtctgccccaag

SEQ ID NO: 38855 - DNA, 120 bp, Artificial Sequence
  ENSG00000056736_11 (sequence is synthesized)
taccacctcatgaaggatgccactgctttctgtgcagaacttctccatgtcaagcagcaggtgtcagcaggaaaaagatcacaagcctgccacgatggctgctgctccttgtagcccacc

SEQ ID NO: 38856 - DNA, 120 bp, Artificial Sequence
  ENSG00000056736_12 (sequence is synthesized)
catgagaagcaagagaccttaaaggcttcctatcccaccaattacagggaaaaaacgtgtgatgatcctgaagcttactatgcagcctacaaacagccttagtaattaaaacattttata

SEQ ID NO: 38857 - DNA, 120 bp, Artificial Sequence
  ENSG00000056736_13 (sequence is synthesized)
ccaataaaattttcaaatattgctaactaatgtagcattaactaacgattggaaactacatttacaacttcaaagctgttttatacatagaaatcaattacagttttaattgaaaactat

SEQ ID NO: 38858 - DNA, 120 bp, Artificial Sequence
  ENSG00000056736_14 (sequence is synthesized)
aaccattttgataatgcaacaataaagcatcttcagccaaacatctagtcttccatagaccatgcattgcagtgtacccagaactgtttagctaatattctatgtttaattaatgaatac

SEQ ID NO: 38859 - DNA, 120 bp, Artificial Sequence
  ENSG00000056736_15 (sequence is synthesized)
taactctaagaacccctcactgattcactcaatagcatcttaagtgaaaaaccttctattacatgcaaaaaatcattgtttttaagataacaaaagtagggaataaacaagctgaaccca

SEQ ID NO: 38860 - DNA, 120 bp, Artificial Sequence
  ENSG00000056736_16 (sequence is synthesized)
tgactggggatagtgaaggtgctacggtgcaggtaaagttcagtgagctgctctggggagggaagggacatagaagactgttccatcattcattgcttttaaggatgagttctctcttgt

SEQ ID NO: 38861 - DNA, 120 bp, Artificial Sequence
  ENSG00000056736_17 (sequence is synthesized)
caaatgcacttctgccagcagacaccagttaagtggcgttcatgggggctctttcgctgcagcctccaccgtgctgaggtcaggaggccgacgtggcagttgtggtcccttttgcttgta

SEQ ID NO: 38862 - DNA, 120 bp, Artificial Sequence
  ENSG00000056736_18 (sequence is synthesized)
ttaatggctgctgaccttccaaagcactttttattttcattttctgtcacagacactcagggatagcagtaccattttacttccgcaagcctttaactgcaagatgaagctgcaaagggt

SEQ ID NO: 38863 - DNA, 120 bp, Artificial Sequence
  ENSG00000056736_19 (sequence is synthesized)
ttgaaatgggaaggtttgagttccaggcagcgtatgaactctggagaggggctgccagtcctctctgggccgcagcggacccagctggaacacaggaagttggagcagtaggtgctcctt

SEQ ID NO: 38864 - DNA, 120 bp, Artificial Sequence
  ENSG00000056736_20 (sequence is synthesized)
cacctctcagtatgtctctttcaactctagtttttgaggtggggacacaggaggtccagtgggacacagccactccccaaagagtaaggagcttccatgcttcattccctggcataaaaa

SEQ ID NO: 38865 - DNA, 120 bp, Artificial Sequence
  ENSG00000056736_21 (sequence is synthesized)
ggagaaccatagacttcccttactacagggacttgcatgtcctaaagcactggctgaaggaagccaagaggatcactgctgctccttttttctagaggaaatgtttgtctacgtggtaag

SEQ ID NO: 38866 - DNA, 120 bp, Artificial Sequence
  ENSG00000056736_22 (sequence is synthesized)
atatgacctagcccttttaggtaagcgaactggtatgttagtaacgtgtacaaagtttaggttcagaccccgggagtcttgggcacgtgggtctcgggtcactggttttgactttagggc

SEQ ID NO: 38867 - DNA, 120 bp, Artificial Sequence
  ENSG00000056736_23 (sequence is synthesized)
tttgttacagatgtgtgaccaaggggaaaatgtgcatgacaacactagaggtatgggcgaagccagaaagaagggaagttttggctgaagtaggagtcttggtgagattttgctctgatg

SEQ ID NO: 38868 - DNA, 120 bp, Artificial Sequence
  ENSG00000056972_0 (sequence is synthesized)
cggcaatgctgatgttttaagcagttagaggaggtggaagaagctcgactccctcttcttccccattatctgcccacaatcccctcctttggagctgctaatgattactaattcttaaca

SEQ ID NO: 38869 - DNA, 120 bp, Artificial Sequence
  ENSG00000056972_1 (sequence is synthesized)
ttcgagttcaatctcctcccggagacaccctcccaggcgagggcactgcgactacactgaggttctgcccactcctgggcagcttcttagctgggtggcgaaaacaaaaatgccgcctaa

SEQ ID NO: 38870 - DNA, 120 bp, Artificial Sequence
  ENSG00000056972_2 (sequence is synthesized)
ttggtcactggccctttctcatgaatgaaggaggtttctgttttaagaaataaagtgactcctcagccgttgattcactgcccacagggagattttgagcagaggcttcctaggctccgt

SEQ ID NO: 38871 - DNA, 120 bp, Artificial Sequence
  ENSG00000056972_3 (sequence is synthesized)
agaaatttgcatacagcttccacttcctgcttcagagcctgttcttctacttacctgggcccggagaaggtggagggagacgagaagccgccgagagccgactaccctccgggcccagtc

SEQ ID NO: 38872 - DNA, 120 bp, Artificial Sequence
  ENSG00000056972_4 (sequence is synthesized)
tgtctgtccgtggtggatctaagcctcatctgtatcctcttgtgatggcgtgaaggaaagccatggcagatttccagcctggtgatgctgtacagaacacaggtggcctgcttccatgcc

SEQ ID NO: 38873 - DNA, 120 bp, Artificial Sequence
  ENSG00000056972_5 (sequence is synthesized)
tcctcagcttcaagaaactagaatgaaccgaagcattcctgtggaggttgatgaatcagaaccatacccaagtcagttgctgaaaccaatcccagaatattccccggaagaggaatcaga

SEQ ID NO: 38874 - DNA, 120 bp, Artificial Sequence
  ENSG00000056972_6 (sequence is synthesized)
accacctgctccaaatataaggaacatggcacccaacagcttgtctgcacccacaatgcttcacaattcctccggagacttttctcaagctcactcaaccctgaaacttgcaaatcacca

SEQ ID NO: 38875 - DNA, 120 bp, Artificial Sequence
  ENSG00000056972_7 (sequence is synthesized)
gcggcctgtatcccggcaggtcacctgcctgcgcactcaagttctggaggacagtgaagacagtttctgcaggagacacccaggcctgggcaaagctttcccttctgggtgctctgcagt

SEQ ID NO: 38876 - DNA, 120 bp, Artificial Sequence
  ENSG00000056972_8 (sequence is synthesized)
cagcgagcctgcgtctgagtctgtggttggagccctccctgcagagcatcagttttcatttatggaaaaacgtaatcaatggctggtatctcagctttcagcggcttctcctgacactgg

SEQ ID NO: 38877 - DNA, 120 bp, Artificial Sequence
  ENSG00000056972_9 (sequence is synthesized)
ccatgactcagacaaatcagaccaaagtttacctaatgcctcagcagactccttgggcggtagccaggagatggtgcaacggccccagcctcacaggaaccgagcaggcctggatctgcc

SEQ ID NO: 38878 - DNA, 120 bp, Artificial Sequence
  ENSG00000056972_10 (sequence is synthesized)
aaccatagacacgggatatgattcccagccccaggatgtcctgggcatcaggcagctggaaaggcccctgcccctcacctccgtgtgttacccccaggacctccccagacctctcaggtc

SEQ ID NO: 38879 - DNA, 120 bp, Artificial Sequence
  ENSG00000056972_11 (sequence is synthesized)
cagaggtatccagcatgtgcacagatgctgcctcccaatctttccccacatgctccatggaactatcattaccattgtcctggaagtcccgatcaccaggtgccatatggccatgactac

SEQ ID NO: 38880 - DNA, 120 bp, Artificial Sequence
  ENSG00000056972_12 (sequence is synthesized)
cctcgagcagcctaccagcaagtgatccagccggctctgcctgggcagcccctgcctggagccagtgtgagaggcctgcaccctgtgcagaaggttatcctgaattatcccagcccctgg

SEQ ID NO: 38881 - DNA, 120 bp, Artificial Sequence
  ENSG00000056972_13 (sequence is synthesized)
gaccacgaagagaggcccgcacagagagactgctcctttccggggcttccaaggcaccaggaccagccacatcaccagccacctaatagagctggtgctcctggggagtccttggagtgc

SEQ ID NO: 38882 - DNA, 120 bp, Artificial Sequence
  ENSG00000056972_14 (sequence is synthesized)
cctgcagagctgagaccacaggttccccagcctccgtccccagctgctgtgcctagaccccctagcaaccctccagccagaggaactctaaaaacaagcaatttgccagaagaattgcgg

SEQ ID NO: 38883 - DNA, 120 bp, Artificial Sequence
  ENSG00000056972_15 (sequence is synthesized)
aaagtctttatcacttattcgatggacacagctatggaggtggtgaaattcgtgaactttttgttggtaaatggcttccaaactgcaattgacatatttgaggatagaatccgaggcatt

SEQ ID NO: 38884 - DNA, 120 bp, Artificial Sequence
  ENSG00000056972_16 (sequence is synthesized)
gatatcattaaatggatggagcgctaccttagggataagaccgtgatgataatcgtagcaatcagccccaaatacaaacaggacgtggaaggcgctgagtcgcagctggacgaggatgag

SEQ ID NO: 38885 - DNA, 120 bp, Artificial Sequence
  ENSG00000056972_17 (sequence is synthesized)
catggcttacatactaagtacattcatcgaatgatgcagattgagttcataaaacaaggaagcatgaatttcagattcatccctgtgctcttcccaaatgctaagaaggagcatgtgccc

SEQ ID NO: 38886 - DNA, 120 bp, Artificial Sequence
  ENSG00000056972_18 (sequence is synthesized)
acctggcttcagaacactcatgtctacagctggcccaagaataaaaaaaacatcctgctgcggctgctgagagaggaagagtatgtggctcctccacgggggcctctgcccacccttcag

SEQ ID NO: 38887 - DNA, 120 bp, Artificial Sequence
  ENSG00000056972_19 (sequence is synthesized)
gtggttcccttgtgacaccgttcatccccagatcactgaggccaggccatgtttggggccttgttctgacagcattctggctgaggctggtcggtagcactcctggctggtttttttctg

SEQ ID NO: 38888 - DNA, 120 bp, Artificial Sequence
  ENSG00000056972_20 (sequence is synthesized)
ttcctccccgagaggccctctggcccccaggaaacctgttgtgcagagctcttccccggagacctccacacaccctggctttgaagtggagtctgtgactgctctgcattctctgctttt

SEQ ID NO: 38889 - DNA, 120 bp, Artificial Sequence
  ENSG00000056972_21 (sequence is synthesized)
aaaaaaaccattgcaggtgccagtgtcccatatgttcctcctgacagtttgatgtgtccattctgggcctctcagtgcttagcaagtagataatgtaagggatgtggcagcaaatggaaa

SEQ ID NO: 38890 - DNA, 120 bp, Artificial Sequence
  ENSG00000056972_22 (sequence is synthesized)
tgactacaaacactctcctatcaatcacttcaggctacttttatgagttagccagatgcttgtgtatcctcagaccaaactgattcatgtacaaataataaaatgtttactcttttgtaa

SEQ ID NO: 38891 - DNA, 120 bp, Artificial Sequence
  ENSG00000056972_23 (sequence is synthesized)
gttttacttatctcaaaggagatacatataatttataatgatatgggcagttgcttccagggacatcaacaaagctgcttagatataatattagataaatataacagaccactctgtatt

SEQ ID NO: 38892 - DNA, 120 bp, Artificial Sequence
  ENSG00000056972_24 (sequence is synthesized)
cagaccactctgtattaatggattaaagccagctagttaaacaaccctttttaaccataatcatggaagctttattcttgcaataaagatttttaggctgggcgcagtgactcacacctg

SEQ ID NO: 38893 - DNA, 120 bp, Artificial Sequence
  ENSG00000056972_25 (sequence is synthesized)
ctcaaaaaacaaacaaacaaataaaaacacccatttttaacaaaacaactttatatagcatacagccatgattctaaatagtatgattatggttctcaggatctgactacataggtaaaa

SEQ ID NO: 38894 - DNA, 120 bp, Artificial Sequence
  ENSG00000056972_26 (sequence is synthesized)
ccaccaattagctgtatgacctttagcaagtcctttaacttttcttagattccagggactcatttataaaatgacatggacaaaagcatctctaatcactctaaaagatttgaagtctag

SEQ ID NO: 38895 - DNA, 120 bp, Artificial Sequence
  ENSG00000056972_27 (sequence is synthesized)
gacctaaattctaaatactcttttgaggagtgactgagttttcattttcataattatgtctctcagaggacaaatttacattttcttaacagagacattttcttcttctttttttttgtt

SEQ ID NO: 38896 - DNA, 120 bp, Artificial Sequence
  ENSG00000056972_28 (sequence is synthesized)
aacaataccctcaggttgataattttggatatctatctgtatctatatatcttgtttacctggtctccagaaaaagaacacatacacatatccatatataaaatatgtatacatgtatca

SEQ ID NO: 38897 - DNA, 120 bp, Artificial Sequence
  ENSG00000056972_29 (sequence is synthesized)
aatctacgtaaactataaaggtgggatggctttaattatggcccaagctactaagacaatgaagactttttggggctgcaagctactgcttcccttctttatctactagcctcttaaaca

SEQ ID NO: 38898 - DNA, 120 bp, Artificial Sequence
  ENSG00000056972_30 (sequence is synthesized)
aggctcacttgtgctacaagacagtccaccgttttgttttttttttcttttttttgagacagggtctcactctttcccaggctgcagtacagtgacacagtctcagctcactgcagcttt

SEQ ID NO: 38899 - DNA, 120 bp, Artificial Sequence
  ENSG00000056972_31 (sequence is synthesized)
agctcactgcagctttgaccttgccgggctcaggtgacccttacacttcagcctcccaagtagcagggactataggtgtgcaccaacatgcttggttaatttttgtattttttgtagaga

SEQ ID NO: 38900 - DNA, 83 bp, Artificial Sequence
  ENSG00000056972_32 (sequence is synthesized)
ggagccaccacgcccagcccagtccagctcttatatgtagcacagggaaaggacaaatacttgtcaactataaataagaaaca

SEQ ID NO: 38901 - DNA, 120 bp, Artificial Sequence
  ENSG00000056972_33 (sequence is synthesized)
agggaaaggacaaatacttgtcaactataaataagaaacattgctaatgcattgcaaagaacactagtttcatttactttataacttagatgtctactgggtgagacgaatgtctttgtt

SEQ ID NO: 38902 - DNA, 120 bp, Artificial Sequence
  ENSG00000056972_34 (sequence is synthesized)
ctttaaaaaataggaaaagagaagaaaaactagcataacataagtactcatttgtaagactttctgacatgtaacattagttccgtagttttgagacctggtagaactgactttcatatt

SEQ ID NO: 38903 - DNA, 120 bp, Artificial Sequence
  ENSG00000056972_35 (sequence is synthesized)
tggataacctggaaaacacccaaacacaaacttcaagtcttctttctcttttttcattatcttttttagtctgaggtgacaccatcattaaggattcgacacccgtttgtaaataaaatg

SEQ ID NO: 38904 - DNA, 120 bp, Artificial Sequence
  ENSG00000056972_36 (sequence is synthesized)
acatcagcaattactctgaaatgtttctagtttgcaaagacttagcaatgtgatgttattaacccttcctcccttcagagacctgtcctaagctctgaaccactcattccttccactctt

SEQ ID NO: 38905 - DNA, 120 bp, Artificial Sequence
  ENSG00000056972_37 (sequence is synthesized)
cttaccccaggtggttgatgagcagtggtccctggtgttccacaaagagtcattaaagtgttacagctggtagcactggtagcaaaaaaacaaaccaaaaagtacacacagacacacaca

SEQ ID NO: 38906 - DNA, 120 bp, Artificial Sequence
  ENSG00000056972_38 (sequence is synthesized)
cacacacgcacacatacacacacacacgcacttggccaagtgacaaaagcttggcccctgaaatttctatgagatccgatgaccaccaacatcaaagcatttttttttttttttttttga

SEQ ID NO: 38907 - DNA, 120 bp, Artificial Sequence
  ENSG00000056972_39 (sequence is synthesized)
ggcatgagccaccacgcccggcccatcaaaggaattgtaacaactatttgagagcactgacaataagattaacactcggttgatttagatgttatgctggtcctcaggcattcatcttta

SEQ ID NO: 38908 - DNA, 120 bp, Artificial Sequence
  ENSG00000056972_40 (sequence is synthesized)
caggcattcatctttagatatttttggggtggaagtggggtagggctgacttagtaaaaataacctcttagcccaaaggctttattcagacttacaccgatttgaggggtgggtttgtgg

SEQ ID NO: 38909 - DNA, 120 bp, Artificial Sequence
  ENSG00000056972_41 (sequence is synthesized)
aatgcaaggttaggttcttacctaatatttgatgactaatttagaattttaaatgtaattttaaattttagtgactggtttcaaatctattttaacttctagattgttcaaagaggtctc

SEQ ID NO: 38910 - DNA, 120 bp, Artificial Sequence
  ENSG00000056972_42 (sequence is synthesized)
agtacatggctacaatcaaagtattagactagctatttctcagctcagtgctcagaaaaattattactgttgatacctttttctttgtttcctgttaaataaatcacctctttaaagaca

SEQ ID NO: 38911 - DNA, 120 bp, Artificial Sequence
  ENSG00000056972_43 (sequence is synthesized)
gtagaattgggctgaagaggtttcctaggcagcctcgcaggctgcacagcacaccacccccgaggtgcccacgtgcagccccgtgatttgttctccactgacagaatctataccggccac

SEQ ID NO: 38912 - DNA, 120 bp, Artificial Sequence
  ENSG00000056972_44 (sequence is synthesized)
tgggacacgttgtgctttaacaagatcgaaattgattgctgccagcgtgtccgtgtcggctgcttcttttggagggagccagtgggggacgggagtctcagcaggctgggaagaccgtga

SEQ ID NO: 38913 - DNA, 120 bp, Artificial Sequence
  ENSG00000056972_45 (sequence is synthesized)
gtgccatctatatatctggctgcttaagtgagttaatatgaccattatacacacttccatttgggaggtgtgtttcaaaaaacctcagtgtagatacagactcgtattttctctccagcc

SEQ ID NO: 38914 - DNA, 120 bp, Artificial Sequence
  ENSG00000056972_46 (sequence is synthesized)
cccctttcttctccatcttctgccccaagggcttcctgagatttaagtggtccattccagactaaaagccaacacaaagtaattattcagctttcacattaaaatgctagtcagacaatt

SEQ ID NO: 38915 - DNA, 120 bp, Artificial Sequence
  ENSG00000056972_47 (sequence is synthesized)
tccccaagactttagcctgagaaaacactggttcatcctgactgggtaaagcttatccaaactgtactgtctgctgctctaagctgacccagggatgagtgatggagtctgtgatgttgg

SEQ ID NO: 38916 - DNA, 120 bp, Artificial Sequence
  ENSG00000056972_48 (sequence is synthesized)
ctgccagcgtgtccgtgtcggctgcttcttttggagggagccagtgggggacgggagtctcagcaggctggggtgttgcacttttccttttgtctgcagcctgatgtttgctttgtgctg

SEQ ID NO: 38917 - DNA, 120 bp, Artificial Sequence
  ENSG00000056972_49 (sequence is synthesized)
acttacctgggcccggagaaggtggagggagacgagaagccgccgagagccgactaccctccgggcccagtctgtctgtccgtggtggatctaagatgcctctgcagcctcatctgtatc

SEQ ID NO: 38918 - DNA, 90 bp, Artificial Sequence
  ENSG00000056972_50 (sequence is synthesized)
ttacctgggcccggagaaggtggagggagacgagaagccgccgagagccgactaccctccgggcccagtctgtctgtccgtggtggatct

SEQ ID NO: 38919 - DNA, 120 bp, Artificial Sequence
  ENSG00000056972_51 (sequence is synthesized)
ataggaaagaaggaaatgaaggcggagagtggggagagagcagcagaattcaatttaatctgaggccaccccaagtgttttgtagaattgggctgaagaggtttcctaggcagcctcgca

SEQ ID NO: 38920 - DNA, 120 bp, Artificial Sequence
  ENSG00000056972_52 (sequence is synthesized)
acatcgctgggtatcatcctgcctgcagcgctccttcatgcaataaattctgcaggctactgattaaacaatgggaaggaaaggggagaaaaaaaatcttgaggtcaggaaaatgcagcc

SEQ ID NO: 38921 - DNA, 120 bp, Artificial Sequence
  ENSG00000056972_53 (sequence is synthesized)
ccaaaaaccagagtttgttttctggtgagaaagacaatgagcttatgaagttgttttattaaagaaaccctggcatacccacctaagtctgaagctgagaaagccccaacaaagcctccc

SEQ ID NO: 38922 - DNA, 120 bp, Artificial Sequence
  ENSG00000056972_54 (sequence is synthesized)
ttgttggaagccgtgcaaagacttggaaaggaaggacggagtcgccctcttggacatgcacaggcaggaaataacggtcaaaccagacacaggtggttgataacaatcagaggaaacaat

SEQ ID NO: 38923 - DNA, 120 bp, Artificial Sequence
  ENSG00000056972_55 (sequence is synthesized)
cttttgacgagaataggaaagaaggaaatgaaggcggagagtggggagagagcagcagaattcaatttaatctgaggccaccccaagtgttttgtagaattgggctgaagaggtttccta

SEQ ID NO: 38924 - DNA, 120 bp, Artificial Sequence
  ENSG00000056972_56 (sequence is synthesized)
agcagcagaagaaaaagtgtaatagctgttggtgttttaaatgatattatttgatttatgtgattatgcattgaatgcttatagatttaggtaataattttctagattttaagctatctg

SEQ ID NO: 38925 - DNA, 80 bp, Artificial Sequence
  ENSG00000056998_0 (sequence is synthesized)
cgcgggggctggcggaggcggggccgggcttccggacagaggccaatcgctgccctcggggcctccagcgccggctctgg

SEQ ID NO: 38926 - DNA, 120 bp, Artificial Sequence
  ENSG00000056998_1 (sequence is synthesized)
ggctctgggccgaggcagccagagcgcggaagaggcctggaaatccacgcggattcccggagacggcgcctctgctctgcgggttcgtggcgaggaagtccacccactgctcccgggcgc

SEQ ID NO: 38927 - DNA, 120 bp, Artificial Sequence
  ENSG00000056998_2 (sequence is synthesized)
aggtctgcaggtccgcgcccactgcccgcggcgccactgaccatgtcggagacagagtttcaccatggtgcccaggctggtctcgaactcctgaggtcaagcaattcacccacctcagcc

SEQ ID NO: 38928 - DNA, 120 bp, Artificial Sequence
  ENSG00000056998_3 (sequence is synthesized)
tcccaaagtgctggaatgacagtgactgatcaggcttttgtcacactagccaccaatgacatctactgccagggcgccctggtcctggggcagtcactgaggagacacaggctgacgagg

SEQ ID NO: 38929 - DNA, 120 bp, Artificial Sequence
  ENSG00000056998_4 (sequence is synthesized)
aagctggtggtgttgatcactcctcaggtgtccagcctgctcagggtcatcctctcgaaggtgttcgatgaagtcattgaagtgaatctaatcgatagtgccgactacatccacctggcc

SEQ ID NO: 38930 - DNA, 120 bp, Artificial Sequence
  ENSG00000056998_5 (sequence is synthesized)
tttctgaagagacctgagctcgggctcaccctcaccaagcttcactgttggactctcactcactacagcaagtgtgtcttcctggatgcagacactctggtgctgtccaatgtcgatgag

SEQ ID NO: 38931 - DNA, 120 bp, Artificial Sequence
  ENSG00000056998_6 (sequence is synthesized)
ctgtttgacaggggagagttttctgcggccccggaccccggatggccggattgcttcaatagcggggtgtttgtcttccagccttctctccacacgcataaactcctgctacagcacgcc

SEQ ID NO: 38932 - DNA, 120 bp, Artificial Sequence
  ENSG00000056998_7 (sequence is synthesized)
atggaacacggcagctttgacggggcagaccaaggcttactgaatagtttcttcaggaactggtcgaccacagacatccacaagcacctgccgttcatctataacttgagtagtaacacg

SEQ ID NO: 38933 - DNA, 120 bp, Artificial Sequence
  ENSG00000056998_8 (sequence is synthesized)
atgtacacttacagccctgccttcaagcaattcggttccagtgcaaaggtcgtccactttttggggtccatgaaaccttggaactacaagtacaatccacagagtggctcggtgttggag

SEQ ID NO: 38934 - DNA, 120 bp, Artificial Sequence
  ENSG00000056998_9 (sequence is synthesized)
caaggctcagcgtccagcagccagcaccaggcggcattccttcatctctggtggacggtctaccagaacaacgtgctgcccctttataaaagcgtccaagcgggggaagcacgcgcgtct

SEQ ID NO: 38935 - DNA, 120 bp, Artificial Sequence
  ENSG00000056998_10 (sequence is synthesized)
cctggtcacacactttgccacagtgatgtgggggggccgtgtgcggattcagcctctggtgttggagagccgtgtgaaaattcaacacccagtgcgggcgtgccgtgtgcaaattcacca

SEQ ID NO: 38936 - DNA, 120 bp, Artificial Sequence
  ENSG00000056998_11 (sequence is synthesized)
ctgggttctaaccagcctgctcagggccttccggagccgacccagatagtggatgagaccctgtccctacctgaaggacgccgttcagaagatatgatagcttgtcctgaaactgagact

SEQ ID NO: 38937 - DNA, 120 bp, Artificial Sequence
  ENSG00000056998_12 (sequence is synthesized)
cctgccgtgataacgtgtgacccactgtcccagccttcccctcagcctgcagacttcacagagactgaaaccatcttgcagccagcaaataaagtcgaaagtgtctcatccgaggaaacc

SEQ ID NO: 38938 - DNA, 120 bp, Artificial Sequence
  ENSG00000056998_13 (sequence is synthesized)
ttcgaaccaagccaggaactccctgctgaggctctcagggaccccagtctgcaggatgcactggaggtcgacctggccgtctctgtttcccagatctccatcgaagagaaggtgaaggaa

SEQ ID NO: 38939 - DNA, 120 bp, Artificial Sequence
  ENSG00000056998_14 (sequence is synthesized)
gaaggccgtatcgactacatggggaaggacgcgtttgctcgcatccaggagaagctggaccggttcctgcagtaatccggcagctggtgggcgttgtgtgtagttagacaatgtcctgtt

SEQ ID NO: 38940 - DNA, 120 bp, Artificial Sequence
  ENSG00000056998_15 (sequence is synthesized)
gggtggtcctgttgcgtggagatctcctctggtcctttcaaagggaaacgctgttgaaccttgtgcctctatttatgcttaatccatttgagtgcctcacacaaaaaacgtagagtatag

SEQ ID NO: 38941 - DNA, 120 bp, Artificial Sequence
  ENSG00000056998_16 (sequence is synthesized)
aaatccaccttaaagcccctcgccccaacttctccaccaacgccttctgggctttcttcagaggtcacttctacccttgaagctgtcggcaaaagcgagcagtaataacattctagtaga

SEQ ID NO: 38942 - DNA, 120 bp, Artificial Sequence
  ENSG00000056998_17 (sequence is synthesized)
ctctcgatggtggtctccgctcttgcccgaaggacctctgaagtacgctggagctgtgttgtacaggtgctgtgagacctaccctattcagaattaaacctcactgcaaatttcctccca

SEQ ID NO: 38943 - DNA, 120 bp, Artificial Sequence
  ENSG00000056998_18 (sequence is synthesized)
tcacgaagctaacaacactaatatacgtatttagcacctctgaggctttgccatggagacccatttctgtagggctaaggaaacatttagacgtggtgactgactttcatttggacttgg

SEQ ID NO: 38944 - DNA, 120 bp, Artificial Sequence
  ENSG00000056998_19 (sequence is synthesized)
cgaagtgtatctgagaaacacctcggctgtggtctctctgctttaaatcctaacaggacttcctagagcgttgacagaaattctactcgtggacgttgggaagaaagattgtaggtggct

SEQ ID NO: 38945 - DNA, 120 bp, Artificial Sequence
  ENSG00000056998_20 (sequence is synthesized)
tggggaatgtgggtggcttagaggatctaaaccgattcacttcctggttgagaagcaacgagggcttgctctaaatcgtttagaggataacaggatctagagatgctctctgcttgacaa

SEQ ID NO: 38946 - DNA, 120 bp, Artificial Sequence
  ENSG00000056998_21 (sequence is synthesized)
caaaagtcagggtgcagtcggtccacccttgactgctcttggcttggtctctaccctcactacctcagttctcaataacttagtgaatcactgccctcctcaaagccatttccactcagc

SEQ ID NO: 38947 - DNA, 120 bp, Artificial Sequence
  ENSG00000056998_22 (sequence is synthesized)
tctttccagagaattctcagttttatgagacgggaaactttatttcacgagaaagcctcattgtcagaagtatcttcattcaatgggcacaatatgctgtgtatctcaccaggtagctgt

SEQ ID NO: 38948 - DNA, 120 bp, Artificial Sequence
  ENSG00000056998_23 (sequence is synthesized)
caggggccaccgagagtgtcgttaaaaatgggcatggttgtaataaaggaggaaagtgcgacttttgaaatgtttggaaggtttatttctcatgcacattccagggaaaagcagagagta

SEQ ID NO: 38949 - DNA, 120 bp, Artificial Sequence
  ENSG00000056998_24 (sequence is synthesized)
aattagagacgggataggaaggccgtgggagaactcgatcctagcctgtgtcagctggatgtgtttacgtggagaggcgtggccactttttaggtcacctgaagcagtttagcctttgga

SEQ ID NO: 38950 - DNA, 120 bp, Artificial Sequence
  ENSG00000056998_25 (sequence is synthesized)
tagaggaacctgcctgaatttatggcattagtggtggcatttttttgtgtacaagatgtgggtgatggaggggctgtttctttttccgtgtgggtggttaataatcgtcagtctcggagg

SEQ ID NO: 38951 - DNA, 120 bp, Artificial Sequence
  ENSG00000056998_26 (sequence is synthesized)
gcgaggctcgtaggatatttcaggtgagtcagggttggatggtcatcggctttcagaaggagaccacgggaatgttcagggaaacaatgtcagcttctctgaggaccagaattcatgttc

SEQ ID NO: 38952 - DNA, 120 bp, Artificial Sequence
  ENSG00000056998_27 (sequence is synthesized)
acgggcagtgatgagttggcttatggagtgagtccagtctggaattccgccgtgcattctagcctgtatcatctcatttggacaaatgctggcacgttgaaattaaaatgttaaaaaaca

SEQ ID NO: 38953 - DNA, 120 bp, Artificial Sequence
  ENSG00000056998_28 (sequence is synthesized)
tccccttgcccaaggctcccggtgggggccatccaccgtcactgaggtcaactgcatgcacacaacagctgttaatttttcagcctcatttaacaaaaaataagaatcggcttccctctt

SEQ ID NO: 38954 - DNA, 120 bp, Artificial Sequence
  ENSG00000057019_0 (sequence is synthesized)
gggcctgcctgccagctagccggagccgcgggtgagcgcggcgagcggcgaccctggtgaggagcgcggcgcgggaggcacgttccttagctccgccgcggccgtcctccgcggctcgag

SEQ ID NO: 38955 - DNA, 120 bp, Artificial Sequence
  ENSG00000057019_1 (sequence is synthesized)
gactccgcttccttccctcccctcccctgcgctccggcctggggtctcggcgcggggagcggagggaagggacgaaggaggagtaggtgaaagcggggtgaggggcggaagggtcccggc

SEQ ID NO: 38956 - DNA, 120 bp, Artificial Sequence
  ENSG00000057019_2 (sequence is synthesized)
gcggggtgaggcgagggctgcctcttgttctcccgccgctgccgccgtctcctggtcgggtgccgcggccagaggcgcgcggggctgccgaggcacccgcactatgcaggcagactgccg

SEQ ID NO: 38957 - DNA, 120 bp, Artificial Sequence
  ENSG00000057019_3 (sequence is synthesized)
gtggtgagagccaggcgctgcccgcagtgtccccaagtccgggccgcggccgccgcccccgcctgggccgcgctccccctctcccgctccctccctccctgctccaactcctcctccttc

SEQ ID NO: 38958 - DNA, 120 bp, Artificial Sequence
  ENSG00000057019_4 (sequence is synthesized)
ccctgctccaactcctcctccttctccatgcctctgttcctcctgctcttacttgtcctgctcctgctgctcgaggacgctggagcccagcaaggtgatggatgtggacacactgtacta

SEQ ID NO: 38959 - DNA, 120 bp, Artificial Sequence
  ENSG00000057019_5 (sequence is synthesized)
ggccctgagagtggaacccttacatccataaactacccacagacctatcccaacagcactgtttgtgaatgggagatccgtgtaaagatgggagagagagttcgcatcaaatttggtgac

SEQ ID NO: 38960 - DNA, 120 bp, Artificial Sequence
  ENSG00000057019_6 (sequence is synthesized)
tttgacattgaagattctgattcttgtcactttaattacttgagaatttataatggaattggagtcagcagaactgaaataggcaaatactgtggtctggggttgcaaatgaaccattca

SEQ ID NO: 38961 - DNA, 120 bp, Artificial Sequence
  ENSG00000057019_7 (sequence is synthesized)
attgaatcaaaaggcaatgaaatcacattgctgttcatgagtggaatccatgtttctggacgcggatttttggcctcatactctgttatagataaacaagatctaattacttgtttggac

SEQ ID NO: 38962 - DNA, 120 bp, Artificial Sequence
  ENSG00000057019_8 (sequence is synthesized)
actgcatccaattttttggaacctgagttcagtaagtactgcccagctggttgtctgcttccttttgctgagatatctggaacaattcctcatggatatagagattcctcgccattgtgc

SEQ ID NO: 38963 - DNA, 120 bp, Artificial Sequence
  ENSG00000057019_9 (sequence is synthesized)
atggctggtgtgcatgcaggagtagtgtcaaacacgttgggcggccaaatcagtgttgtaattagtaaaggtatcccctattatgaaagttctttggctaacaacgtcacatctgtggtg

SEQ ID NO: 38964 - DNA, 120 bp, Artificial Sequence
  ENSG00000057019_10 (sequence is synthesized)
ggacacttatctacaagtctttttacatttaagacaagtggatgttatggaacactggggatggagtctggtgtgatcgcggatcctcaaataacagcatcatctgtgctggagtggact

SEQ ID NO: 38965 - DNA, 120 bp, Artificial Sequence
  ENSG00000057019_11 (sequence is synthesized)
gaccacacagggcaagagaacagttggaaacccaaaaaagccaggctgaaaaaacctggaccgccttgggctgcttttgccactgatgaataccagtggttacaaatagatttgaataag

SEQ ID NO: 38966 - DNA, 120 bp, Artificial Sequence
  ENSG00000057019_12 (sequence is synthesized)
gaaaagaaaataacaggcattataaccactggatccaccatggtggagcacaattactatgtgtctgcctacagaatcctgtacagtgatgatgggcagaaatggactgtgtacagagag

SEQ ID NO: 38967 - DNA, 120 bp, Artificial Sequence
  ENSG00000057019_13 (sequence is synthesized)
cctggtgtggagcaagataagatatttcaaggaaacaaagattatcaccaggatgtgcgtaataactttttgccaccaattattgcacgttttattagagtgaatcctacccaatggcag

SEQ ID NO: 38968 - DNA, 120 bp, Artificial Sequence
  ENSG00000057019_14 (sequence is synthesized)
cagaaaattgccatgaaaatggagctgctcggatgtcagtttattcctaaaggtcgtcctccaaaacttactcaacctccacctcctcggaacagcaatgacctcaaaaacactacagcc

SEQ ID NO: 38969 - DNA, 120 bp, Artificial Sequence
  ENSG00000057019_15 (sequence is synthesized)
cctccaaaaatagccaaaggtcgtgccccaaaatttacgcaaccactacaacctcgcagtagcaatgaatttcctgcacagacagaacaaacaactgccagtcctgatatcagaaatact

SEQ ID NO: 38970 - DNA, 120 bp, Artificial Sequence
  ENSG00000057019_16 (sequence is synthesized)
accgtaactccaaatgtaaccaaagatgtagcgctggctgcagttcttgtccctgtgctggtcatggtcctcactactctcattctcatattagtgtgtgcttggcactggagaaacaga

SEQ ID NO: 38971 - DNA, 120 bp, Artificial Sequence
  ENSG00000057019_17 (sequence is synthesized)
aagaaaaaaactgaaggcacctatgacttaccttactgggaccgggcaggttggtggaaaggaatgaagcagtttcttcctgcaaaagcagtggaccatgaggaaaccccagttcgctat

SEQ ID NO: 38972 - DNA, 120 bp, Artificial Sequence
  ENSG00000057019_18 (sequence is synthesized)
agcagcagcgaagttaatcacctgagtccaagagaagtcaccacagtgctgcaggctgactctgcagagtatgctcagccactggtaggaggaattgttggtacacttcatcaaagatct

SEQ ID NO: 38973 - DNA, 120 bp, Artificial Sequence
  ENSG00000057019_19 (sequence is synthesized)
acctttaaaccagaagaaggaaaagaagcaggctatgcagacctagatccttacaactcaccagggcaggaagtttatcatgcctatgctgaaccactcccaattacggggcctgagtat

SEQ ID NO: 38974 - DNA, 120 bp, Artificial Sequence
  ENSG00000057019_20 (sequence is synthesized)
gcaaccccaatcatcatggacatgtcagggcaccccacaacttcagttggtcagccctccacatccactttcaaggctacggggaaccaacctcccccactagtgggaacttacaataca

SEQ ID NO: 38975 - DNA, 120 bp, Artificial Sequence
  ENSG00000057019_21 (sequence is synthesized)
cttctctccaggactgacagctgctcctcagcccaggcccagtatgataccccgaaagctgggaagccaggtctacctgccccagacgaattggtgtaccaggtgccacagagcacacaa

SEQ ID NO: 38976 - DNA, 120 bp, Artificial Sequence
  ENSG00000057019_22 (sequence is synthesized)
gaagtatcaggagcaggaagggatggggaatgtgatgtttttaaagaaatcctttgaagatgatgctgctttttacaaagcatcgttttaaagcacatggccttttttttttaattatta

SEQ ID NO: 38977 - DNA, 120 bp, Artificial Sequence
  ENSG00000057019_23 (sequence is synthesized)
gtggtagtaatatatagaatgtattacataactgtcactgaagtggttggggaaaatgtggtgactgaggtacaggaaactactaatcttgccatcttgctttaaggtgttatggtggca

SEQ ID NO: 38978 - DNA, 120 bp, Artificial Sequence
  ENSG00000057019_24 (sequence is synthesized)
cagttactgctcgcctgttaaatttcaaatgtcctgtttgatactactgtagaacactatttttaatacagaaaaagctccctataatgcacttcagagaaattaaaaatcacagagtat

SEQ ID NO: 38979 - DNA, 120 bp, Artificial Sequence
  ENSG00000057019_25 (sequence is synthesized)
aatgctgcaggtacattaatgaactcgagatggctctgtaagcctgactggcaataacgcacggtactgttcttgaaatacctaatggcttgaaattctagtctgtttgtgaaagatggg

SEQ ID NO: 38980 - DNA, 120 bp, Artificial Sequence
  ENSG00000057019_26 (sequence is synthesized)
tactatcatgatttcctcttctattcctatattcttttctggattttttttaataattagtgatataagcattgtttttattgcagccatatccacttatccatcttaagatctgtagct

SEQ ID NO: 38981 - DNA, 120 bp, Artificial Sequence
  ENSG00000057019_27 (sequence is synthesized)
gggattttctgacttgtaatgagcagggggattgctttttcactttgtgacactctttagagctttaatgcttcacagtatatggcctggtctcatccttgcgtgttccacttgaggccc

SEQ ID NO: 38982 - DNA, 120 bp, Artificial Sequence
  ENSG00000057019_28 (sequence is synthesized)
tttggtgtcttgccccattcttgtgtttataaaatgtttgagtatttctgatgagtgatgcttgccttagtctcatgaattcagatcccttcatgtcctttaagtatgctcctcaatgtg

SEQ ID NO: 38983 - DNA, 120 bp, Artificial Sequence
  ENSG00000057019_29 (sequence is synthesized)
taaacaggaacaactttatgatttgaaagctttaaaggagattcttctcccacccccaactttatttgcaatgggatttttcctaggagagttatgaaaagttgaaggcttctaagggaa

SEQ ID NO: 38984 - DNA, 120 bp, Artificial Sequence
  ENSG00000057019_30 (sequence is synthesized)
tactgtaaacatgacccacttatatttatcacagtgaaaggcaaaattattcactcagaagtaatataaattacctctttaaaaagtaaccagaatttgtcctttttggttttatacatt

SEQ ID NO: 38985 - DNA, 120 bp, Artificial Sequence
  ENSG00000057019_31 (sequence is synthesized)
cacaaacatatacatttttcttgagtctcaaggtattttatatttttagtcagaaaaaataatttttcatttcagttttccataaactgttacacaaaatataaacctaacgtgtatttt

SEQ ID NO: 38986 - DNA, 120 bp, Artificial Sequence
  ENSG00000057019_32 (sequence is synthesized)
tcaggactgcgtgatcgtgcactttgtgtggtaagaggtttgagtagtcctatatgtcacctagggaacagacattatagcttactagcaaatgaatattcatgccttgtttttgatacc

SEQ ID NO: 38987 - DNA, 120 bp, Artificial Sequence
  ENSG00000057019_33 (sequence is synthesized)
tcctggcagcttccatgtcaccacttgttcatacctgcccagagctagttttagacatggcaaaatagaaatcatctgtaatttattagctaacaatgtaaaaccatcttttaaagcctt

SEQ ID NO: 38988 - DNA, 120 bp, Artificial Sequence
  ENSG00000057019_34 (sequence is synthesized)
cagactgtcaagacgacatgagcagctcaccatatgataaaaatacataaatttgacattccctcttccataaacctttgtttgtagatttaatgttgaacagtacttttccataaagtt

SEQ ID NO: 38989 - DNA, 120 bp, Artificial Sequence
  ENSG00000057019_35 (sequence is synthesized)
ctagtcacttctgttggcctgagccaccagattatgatgttgccagaattcactcaatttgaataaagatgaacagtatttgttttcttgtttccatgaattatatcagtattctaaaac

SEQ ID NO: 38990 - DNA, 120 bp, Artificial Sequence
  ENSG00000057019_36 (sequence is synthesized)
atcgcttcagaaagagaactgtttatttctgcaggcttcctgtccttttgtggtatggttttttggccttattttcactggcttttccttctccaaactttgaggcgtgatttcattcat

SEQ ID NO: 38991 - DNA, 120 bp, Artificial Sequence
  ENSG00000057019_37 (sequence is synthesized)
tgaagaatcaatacatattttgtttcaaaatgtttgaaacaaaagacatagatggtagacttttattaaaacatatatggatgtggaaagcacatatattaatgcagtcatcccttttca

SEQ ID NO: 38992 - DNA, 120 bp, Artificial Sequence
  ENSG00000057019_38 (sequence is synthesized)
ggtgggaagagagcaaaccagttgattttttaattcatccttagtacacagagaatatacttttcctcaagtaatatacctgtttgaagctttaagagagatgtttttggtaactatttc

SEQ ID NO: 38993 - DNA, 120 bp, Artificial Sequence
  ENSG00000057019_39 (sequence is synthesized)
attttcccaaagaagtttgctattcttgtgttaattgtgtatacctgattgttttttcctggaggtttttgttgttgttgtttagttttgggtttttttttttttaagaggggcaagtgt

SEQ ID NO: 38994 - DNA, 120 bp, Artificial Sequence
  ENSG00000057019_40 (sequence is synthesized)
tttctgaaatgatgcatattttaagactcgattcatattgccactgtgctatccttgaactaccaataatttttataaaatatctagtttttactacttttatataaactttactttcca

SEQ ID NO: 38995 - DNA, 120 bp, Artificial Sequence
  ENSG00000057019_41 (sequence is synthesized)
tatataaactttactttccagatgaagagctgagcctgattcaaatggtttttctgctttatacttctttttagttcattggtttttatagtagaggttttctatttttttttttttttt

SEQ ID NO: 38996 - DNA, 120 bp, Artificial Sequence
  ENSG00000057019_42 (sequence is synthesized)
tgatacatatacggctttggagacaatcaagtaacaactgaaaatgtgaaagtaaccatatctgacaaaattcccttgaatttttatcctttgcttgcaacatttaagactcaaagtcac

SEQ ID NO: 38997 - DNA, 120 bp, Artificial Sequence
  ENSG00000057019_43 (sequence is synthesized)
tggtatattggattaagttttttcctgttaatgcaattatagaaatacatcggagacacaacaaatgtggccattacaggtttcataaaattacactgacttggctgttacttgatctta

SEQ ID NO: 38998 - DNA, 120 bp, Artificial Sequence
  ENSG00000057019_44 (sequence is synthesized)
ggaaacagcacagtttaagatattgtgaattctgacttatactttattaaatgctgtaaatctaaatagatcctgttggatgtgatgggtctagtccagtttatttaagttcatgtttca

SEQ ID NO: 38999 - DNA, 120 bp, Artificial Sequence
  ENSG00000057019_45 (sequence is synthesized)
ctgtttgcactttgcattgaacaatgggtttattcgctgatgtaaacggttcgagtgaagaattaatgcagtaagtatgacaacacatacacacttgcctctccccatctccagaagagg

SEQ ID NO: 39000 - DNA, 120 bp, Artificial Sequence
  ENSG00000057019_46 (sequence is synthesized)
ggagcagagtccgagcttatctaaatatgaatgtggccacaaagctgtggaaggtgacaaagcttaaacacctttgccctggctctgcattgtcacctagagagcaagaggtctatagaa

SEQ ID NO: 39001 - DNA, 120 bp, Artificial Sequence
  ENSG00000057019_47 (sequence is synthesized)
acatcatgtcacatgaaacgattctctgctttttggttctgaacttgaagtccctaaactgcaaaatctaagagttgggtggttattaaaatgcttttaaagtcaactgtggcaccaatt

SEQ ID NO: 39002 - DNA, 120 bp, Artificial Sequence
  ENSG00000057019_48 (sequence is synthesized)
ctaatgtaatccaacttgtgactgtttttttttgttttgttttgtttttgtgtgtgtgtgtgtggcactgggaaaagtggaaacaaacatgtattgaaatacatattggaaataaaaatg

SEQ ID NO: 39003 - DNA, 120 bp, Artificial Sequence
  ENSG00000057019_49 (sequence is synthesized)
gtttgagcgtcagtgatattctcccagaatgtacttatcttacctcggcatgtactgtagtcactcagtatttgtatatgttgctagaatttagattgtaaaatagtgaaattttaatgt

SEQ ID NO: 39004 - DNA, 120 bp, Artificial Sequence
  ENSG00000057019_50 (sequence is synthesized)
gttcatttgtttttaatgtatatatgtcttgctcagattatttggtttaaataaaacaaccttgaggtttgtagcttttccttatactataaaatgccagattcttctattttaacctca

SEQ ID NO: 39005 - DNA, 120 bp, Artificial Sequence
  ENSG00000057019_51 (sequence is synthesized)
actgaaggcacctatgacttaccttactgggaccgggcaggtttttatttaatggtctctttggcttgccgtcacaatgaaggttggtggaaaggaatgaagcagtttcttcctgcaaaa

SEQ ID NO: 39006 - DNA, 120 bp, Artificial Sequence
  ENSG00000057019_52 (sequence is synthesized)
cttaccttactgggaccgggcaggtaactcacgtggtctttgcatctcatttctatcagagggatgtcgctcccctacagggggcagtagtgaaaaaagagtcattctctggcccaggtg

SEQ ID NO: 39007 - DNA, 120 bp, Artificial Sequence
  ENSG00000057019_53 (sequence is synthesized)
aactccccgacactgttagaacaatggcattactcttcagttctcaccatttttacccttctgcaaagtctcttgtaattcctaagtaatgaaatgaaaagtacaaatttcttaaaacaa

SEQ ID NO: 39008 - DNA, 120 bp, Artificial Sequence
  ENSG00000057019_54 (sequence is synthesized)
gctcttacttgtcctgctcctgctgctcgaggacgctggagcccagcaagttatggaggctagaattctgacagcagggtgtgcagagggccatgctctttcctaagactctaaggtgat

SEQ ID NO: 39009 - DNA, 120 bp, Artificial Sequence
  ENSG00000057019_55 (sequence is synthesized)
tttggtttttttttttttttggtttttcctttcaataattgaaatacgttgtctgctgtttgctggcttgcattgtttttgacaagaattctgctattatttctgttcctcaatatgtga

SEQ ID NO: 39010 - DNA, 120 bp, Artificial Sequence
  ENSG00000057019_56 (sequence is synthesized)
gctattatttctgttcctcaatatgtgatatgtctttttttctgtggctccttttaaggttttctttttatcatttgttttaagcagtttgattgatgtggcttttttatatttttcttc

SEQ ID NO: 39011 - DNA, 120 bp, Artificial Sequence
  ENSG00000057019_57 (sequence is synthesized)
ttttttttttgcgtggggttctttgaggtttttggatctgtaggttatgatttgcatcaaatttagaaaattgtagttctttttttttcaaatatttcccttccccaattctaattttat

SEQ ID NO: 39012 - DNA, 120 bp, Artificial Sequence
  ENSG00000057019_58 (sequence is synthesized)
gaatattatgacccttgaaggtatcttaccattcaccaatgctccgttctttatttttttcagtctttttctctttgtattttagtttgaaagttttctgttttgtcttcaagttcacta

SEQ ID NO: 39013 - DNA, 120 bp, Artificial Sequence
  ENSG00000057019_59 (sequence is synthesized)
atctattcttctgaaatgtctaatctgttaatcccatccaatgtatttttatctctgatactgtattttttatctctagatgttcagtttgggagttttaagatgtctccagtgtgtctt

SEQ ID NO: 39014 - DNA, 120 bp, Artificial Sequence
  ENSG00000057019_60 (sequence is synthesized)
tacatgctcatgcttttctctatctctggaacatggagcatatataatagctcttttaatatcctcatctgctaatgttatcctatgtcatatatgggtctttttatgttgattgatatt

SEQ ID NO: 39015 - DNA, 120 bp, Artificial Sequence
  ENSG00000057019_61 (sequence is synthesized)
atggatcatattttacctgcccgaattttttttattggatgccagacattgtgttacattgtttggtgctggggttttttgttattaatattcccttaagtatttttgagctttattctg

SEQ ID NO: 39016 - DNA, 120 bp, Artificial Sequence
  ENSG00000057019_62 (sequence is synthesized)
gaatgtagttaagctactggaaacaatgtgatattttcaaggcttgcttttaaacttcattaggcaggacctggacagccttcagttttcttatttttctcccccactgagacaatactg

SEQ ID NO: 39017 - DNA, 120 bp, Artificial Sequence
  ENSG00000057019_63 (sequence is synthesized)
ttctaagtactcactgcagcatcccatgtattatgaggtttctctgttctacctcttggcagtgtaaggaattcccagatctacggagctgtgagacttgtcctgctgactcattccagt

SEQ ID NO: 39018 - DNA, 120 bp, Artificial Sequence
  ENSG00000057019_64 (sequence is synthesized)
gtttcttttactggccataggtcatttctttacatgcagctgaagatttaagggataactccttatatattctagaagtgtctctctctctctctctcactcactctatctttatagctc

SEQ ID NO: 39019 - DNA, 120 bp, Artificial Sequence
  ENSG00000057019_65 (sequence is synthesized)
tcttctctcctaatctctgcctacaaattctagctaccttattggcctcccactctcagctctgtctctgcaactcagtgagaccggcaggctctgttagggatctctctccctgcactg

SEQ ID NO: 39020 - DNA, 120 bp, Artificial Sequence
  ENSG00000057019_66 (sequence is synthesized)
tggcctggaaactcttctatagacagtactggggcaataaatagcagggttcaccttatttgtttcccttctttccgtcattattgcccaaggcagcctgttatccagtttctcaggtac

SEQ ID NO: 39021 - DNA, 120 bp, Artificial Sequence
  ENSG00000057019_67 (sequence is synthesized)
gtatagggctgaacaataagtctaatccgttactcttatggtcagaaatgcaaatcttcacattgaattgtatgaattaacagtcttttcccgctcatgtaagtccatctgctccctcat

SEQ ID NO: 39022 - DNA, 120 bp, Artificial Sequence
  ENSG00000057019_68 (sequence is synthesized)
cacctccaacccaagggtaattggtgtattcattttaccccttttctgagcctgcacatgtgcatgagtacgcagagactgcatttggttttgtttttagaaaatgggatttatatatat

SEQ ID NO: 39023 - DNA, 120 bp, Artificial Sequence
  ENSG00000057019_69 (sequence is synthesized)
atatacaatttgttttcataatatatcactttctaacattatgccatatttatgtgtggtaatcaataaaatttaagtttcttgagggtgggaactgtagcaaccatatccattttctct

SEQ ID NO: 39024 - DNA, 120 bp, Artificial Sequence
  ENSG00000057019_70 (sequence is synthesized)
tcatgacacctcacatacttctctgtacatgaggattctcagtaaatgctcataggttgactatagcaaatcttttttactcagtttttataaaattgagacagcaatatagaggaatat

SEQ ID NO: 39025 - DNA, 120 bp, Artificial Sequence
  ENSG00000057019_71 (sequence is synthesized)
cttaaagatagtttttatgtgttaaagtaatgatttgttatcgtccctgttccactaatatagtaagaatgaaaataattgcctttcattttatttcagagtaatatctgaggaaatcac

SEQ ID NO: 39026 - DNA, 120 bp, Artificial Sequence
  ENSG00000057019_72 (sequence is synthesized)
gggagctcactagtatggaagttattgtaactgcaaaacaaactttttaggaaatgaaggatattaacacatctttcgagatttatagtctaatgccaagtgaattagccaagaagaaat

SEQ ID NO: 39027 - DNA, 120 bp, Artificial Sequence
  ENSG00000057019_73 (sequence is synthesized)
tctttagaaactacctagttgatctgacctagagaacaaacagggctctttttagcttattggagtccatacttaagtcggaagacccagagtcaagttgctgccctgtcattgactagc

SEQ ID NO: 39028 - DNA, 120 bp, Artificial Sequence
  ENSG00000057019_74 (sequence is synthesized)
tgtgcaatccacttacagattcctgtgccctcctatttcatagggttgtctgaattagttacattaaaatgttttataaataattaagtgctggtccattgtaagatactatcattattt

SEQ ID NO: 39029 - DNA, 120 bp, Artificial Sequence
  ENSG00000057019_75 (sequence is synthesized)
gcttgaagtagttaagggaatgagactcacctaaactcatatttttacctagggattatttttataatgcatttgttgctagttagttacaagcattaaattagtcacaggccaggcgtg

SEQ ID NO: 39030 - DNA, 120 bp, Artificial Sequence
  ENSG00000057019_76 (sequence is synthesized)
agttagttacaagcattaaattagtcacaggccaggcgtggtagctcacacctgtaattccagcattttgggggaggtctaggtgtgagtatacttgaggacaggagtttgagaccagcc

SEQ ID NO: 39031 - DNA, 66 bp, Artificial Sequence
  ENSG00000057019_77 (sequence is synthesized)
tgaacagcatagcaagacccctttctacaaaaataaaaaatcaccaggtgcttgaggtcaacatgg

SEQ ID NO: 39032 - DNA, 85 bp, Artificial Sequence
  ENSG00000057019_78 (sequence is synthesized)
tgaggcaggagagttgcttgaacttgggaggaactagcctgggcaacaaagcgagacctcttttctaaataaataagtaaatatt

SEQ ID NO: 39033 - DNA, 120 bp, Artificial Sequence
  ENSG00000057019_79 (sequence is synthesized)
caagattgcgccactgcacactagcctgggcaacaaagcgagacctcttttctaaataaataagtaaatattgccacacatgttggcatgcgcctctgtagtcctagctactcaggaggc

SEQ ID NO: 39034 - DNA, 120 bp, Artificial Sequence
  ENSG00000057019_80 (sequence is synthesized)
ctaggctgtattgtgctatgatcccgccaatgcattccttggatgacagagcaagactctatctctaaaaataattaataatttaagcataaaatagcatttcaaagtcacttctagttt

SEQ ID NO: 39035 - DNA, 120 bp, Artificial Sequence
  ENSG00000057019_81 (sequence is synthesized)
aaatagcagcatggaacaaaaaccgggataataggagaactgtctttatgcagtttatccagtaggtggaggtatatatctgttatatgtttgttagtatatgttcaccttcagcctgtt

SEQ ID NO: 39036 - DNA, 120 bp, Artificial Sequence
  ENSG00000057019_82 (sequence is synthesized)
gagagaaaaattatgaaaagtacacaagcaaaatatttcccctaagacttggcatgatcaattttgttttactttaaaaataaaaattaatatatttaaatagttggtaattccacagga

SEQ ID NO: 39037 - DNA, 120 bp, Artificial Sequence
  ENSG00000057019_83 (sequence is synthesized)
ctagagttactgatttactaataggataaattgtctcactggatttgaaaccttttacccaaatgccaagttagccctcttgttaagttcttaaatcatcttaaaatcatttctatatta

SEQ ID NO: 39038 - DNA, 120 bp, Artificial Sequence
  ENSG00000057019_84 (sequence is synthesized)
aatatttttgtttcataaacttttgataaaaatgtgcagcatcttaatatttttccaaattatgattattttcttaaaaattgatccttattatcatactttccagatgtaatttaaggc

SEQ ID NO: 39039 - DNA, 120 bp, Artificial Sequence
  ENSG00000057019_85 (sequence is synthesized)
gaagctaaatatagaagatgaaaatgtttacctgtttgagagtgagagttaaggtaattattaaaatgaaaatttcatgcttctcctttattcccattaaaaataaataagttcaattcc

SEQ ID NO: 39040 - DNA, 120 bp, Artificial Sequence
  ENSG00000057019_86 (sequence is synthesized)
ttcttgaactcatgccctgtgtctgcccagttattggaaaaacgttggttggttactgtgggccaggcatggtaccacatgctggggcattttcctcttggagctgtgttaatgacttcc

SEQ ID NO: 39041 - DNA, 120 bp, Artificial Sequence
  ENSG00000057019_87 (sequence is synthesized)
actcacggggttgagttgcaaaggcaaggtcttgcccgtctgtcccccaagttggcgcggctttactttttggcaaggccatttatttttctgaaagggggacgtgagaccctgctatga

SEQ ID NO: 39042 - DNA, 120 bp, Artificial Sequence
  ENSG00000057019_88 (sequence is synthesized)
aagcctcgttgatattaggtccttctggggaaaattttggggaggaaaaagaacctttggaggtaatgacccctaaagttaagctgcacggatggatggacactgtaggaaggcaggtta

SEQ ID NO: 39043 - DNA, 120 bp, Artificial Sequence
  ENSG00000057149_0 (sequence is synthesized)
agacacacatagcctctctgcccacctctgcttcctctaggaacacaggagttccagatcacatcgagttcaccatgaattcactcagtgaagccaacaccaagttcatgttcgacctgt

SEQ ID NO: 39044 - DNA, 120 bp, Artificial Sequence
  ENSG00000057149_1 (sequence is synthesized)
tccaacagttcagaaaatcaaaagagaacaacatcttctattcccctatcagcatcacatcagcattagggatggtcctcttaggagccaaagacaacactgcacaacagattaagaagg

SEQ ID NO: 39045 - DNA, 120 bp, Artificial Sequence
  ENSG00000057149_2 (sequence is synthesized)
ttcttcactttgatcaagtcacagagaacaccacaggaaaagctgcaacatatcatgttgataggtcaggaaatgttcatcaccagtttcaaaagcttctgactgaattcaacaaatcca

SEQ ID NO: 39046 - DNA, 120 bp, Artificial Sequence
  ENSG00000057149_3 (sequence is synthesized)
ctgatgcatatgagctgaagatcgccaacaagctcttcggagaaaaaacgtatctatttttacaggaatatttagatgccatcaagaaattttaccagaccagtgtggaatctgttgatt

SEQ ID NO: 39047 - DNA, 120 bp, Artificial Sequence
  ENSG00000057149_4 (sequence is synthesized)
ttgcaaatgctccagaagaaagtcgaaagaagattaactcctgggtggaaagtcaaacgaatgaaaaaattaaaaacctaattcctgaaggtaatattggcagcaataccacattggttc

SEQ ID NO: 39048 - DNA, 120 bp, Artificial Sequence
  ENSG00000057149_5 (sequence is synthesized)
ttgtgaacgcaatctatttcaaagggcagtgggagaagaaatttaataaagaagatactaaagaggaaaaattttggccaaacaagaatacatacaagtccatacagatgatgaggcaat

SEQ ID NO: 39049 - DNA, 120 bp, Artificial Sequence
  ENSG00000057149_6 (sequence is synthesized)
acacatcttttcattttgcctcgctggaggatgtacaggccaaggtcctggaaataccatacaaaggcaaagatctaagcatgattgtgttgctgccaaatgaaatcgatggtctccaga

SEQ ID NO: 39050 - DNA, 120 bp, Artificial Sequence
  ENSG00000057149_7 (sequence is synthesized)
aattgatggaatggacaagtttgcagaatatgagagagacacgtgtcgatttacacttacctcggttcaaagtggaagagagctatgacctcaaggacacgttgagaaccatgggaatgg

SEQ ID NO: 39051 - DNA, 120 bp, Artificial Sequence
  ENSG00000057149_8 (sequence is synthesized)
tggatatcttcaatggggatgcagacctctcaggcatgaccgggagccgcggtctcgtgctatctggagtcctacacaaggcctttgtggaggttacagaggagggagcagaagctgcag

SEQ ID NO: 39052 - DNA, 120 bp, Artificial Sequence
  ENSG00000057149_9 (sequence is synthesized)
ctgccaccgctgtagtaggattcggatcatcacctacttcaactaatgaagagttccattgtaatcaccctttcctattcttcataaggcaaaataagaccaacagcatcctcttctatg

SEQ ID NO: 39053 - DNA, 120 bp, Artificial Sequence
  ENSG00000057149_10 (sequence is synthesized)
gcagattctcatccccgtagatgcaattagtctgtcactccatttggaaaatgttcacctgcagatgttctggtaaactgattgctggcaacaacagattctcttggctcatatttcttt

SEQ ID NO: 39054 - DNA, 120 bp, Artificial Sequence
  ENSG00000057149_11 (sequence is synthesized)
tctttctcatcttgatgatgatcgtcatcatcaagaatttaatgattaaaatagcatgcctttctctctttctcttaataagcccacatataaatgtactttttcttccagaaaaattct

SEQ ID NO: 39055 - DNA, 120 bp, Artificial Sequence
  ENSG00000057149_12 (sequence is synthesized)
ccttgaggaaaaatgtccaaaataagatgaatcacttaataccgtatcttctaaatttgaaatataattctgtttgtgacctgttttaaatgaaccaaaccaaatcatactttttctttg

SEQ ID NO: 39056 - DNA, 120 bp, Artificial Sequence
  ENSG00000057149_13 (sequence is synthesized)
aatttagcaacctagaaacacacatttctttgaatttaggtgatacctaaatccttcttatgtttctaaattttgtgattctataaaacacatcatcaataaaatagtgacataaaatca

SEQ ID NO: 39057 - DNA, 120 bp, Artificial Sequence
  ENSG00000057252_0 (sequence is synthesized)
gctttagcttagcaggcgacgttgcgggccctgggcgccaggagagcttcccggagtcgaccttcctgctggctgctctgtgaccgcttcccggctctgccctcttggccgaagtgcccg

SEQ ID NO: 39058 - DNA, 120 bp, Artificial Sequence
  ENSG00000057252_1 (sequence is synthesized)
ctgccgggcgcgggcctcagacaatacaatggtgggtgaagagaagatgtctctaagaaaccggctgtcaaagtccagggaaaatcctgaggaagatgaagaccagagaaaccctgcaaa

SEQ ID NO: 39059 - DNA, 120 bp, Artificial Sequence
  ENSG00000057252_2 (sequence is synthesized)
ggagtccctagagacacctagtaatggtcgaattgacataaaacagttgatagcaaagaagataaagttgacagcagaggcagaggaattgaagccattttttatgaaggaagttggcag

SEQ ID NO: 39060 - DNA, 120 bp, Artificial Sequence
  ENSG00000057252_3 (sequence is synthesized)
tcactttgatgattttgtgaccaatctcattgaaaagtcagcatcattagataatggtgggtgcgctctcacaaccttttctgttcttgaaggagagaaaaacaaccatagagcgaagga

SEQ ID NO: 39061 - DNA, 120 bp, Artificial Sequence
  ENSG00000057252_4 (sequence is synthesized)
tttgagagcacctccagaacaaggaaagatttttattgcaaggcgctctctcttagatgaactgcttgaagtggaccacatcagaacaatatatcacatgtttattgccctcctcattct

SEQ ID NO: 39062 - DNA, 120 bp, Artificial Sequence
  ENSG00000057252_5 (sequence is synthesized)
ctttatcctcagcacacttgtagtagattacattgatgaaggaaggctggtgcttgagttcagcctcctgtcttatgcttttggcaaatttcctaccgttgtttggacctggtggatcat

SEQ ID NO: 39063 - DNA, 120 bp, Artificial Sequence
  ENSG00000057252_6 (sequence is synthesized)
gttcctgtctacattttcagttccctattttctgtttcaacattgggccactggctatagcaagagttctcatccgctgatccgttctctcttccatggctttcttttcatgatcttcca

SEQ ID NO: 39064 - DNA, 120 bp, Artificial Sequence
  ENSG00000057252_7 (sequence is synthesized)
gattggagttctaggttttggaccaacatatgttgtgttagcatatacactgccaccagcttcccggttcatcattatattcgagcagattcgttttgtaatgaaggcccactcatttgt

SEQ ID NO: 39065 - DNA, 120 bp, Artificial Sequence
  ENSG00000057252_8 (sequence is synthesized)
cagagagaacgtgcctcgggtactaaattcagctaaggagaaatcaagcactgttccaatacctacagtcaaccagtatttgtacttcttatttgctcctacccttatctaccgtgacag

SEQ ID NO: 39066 - DNA, 120 bp, Artificial Sequence
  ENSG00000057252_9 (sequence is synthesized)
ctatcccaggaatcccactgtaagatggggttatgtcgctatgaagtttgcacaggtctttggttgctttttctatgtgtactacatctttgaaaggctttgtgcccccttgtttcggaa

SEQ ID NO: 39067 - DNA, 120 bp, Artificial Sequence
  ENSG00000057252_10 (sequence is synthesized)
tatcaaacaggagcccttcagcgctcgtgttctggtcctatgtgtatttaactccatcttgccaggtgtgctgattctcttccttactttttttgcctttttgcactgctggctcaatgc

SEQ ID NO: 39068 - DNA, 120 bp, Artificial Sequence
  ENSG00000057252_11 (sequence is synthesized)
ctttgctgagatgttacgctttggtgacaggatgttctataaggattggtggaactccacgtcatactccaactattatagaacctggaatgtggtggtccatgactggctatattacta

SEQ ID NO: 39069 - DNA, 120 bp, Artificial Sequence
  ENSG00000057252_12 (sequence is synthesized)
tgcttacaaggactttctctggtttttctccaagagattcaaatctgctgccatgttagctgtctttgctgtatctgctgtagtacacgaatatgccttggctgtttgcttgagcttttt

SEQ ID NO: 39070 - DNA, 120 bp, Artificial Sequence
  ENSG00000057252_13 (sequence is synthesized)
ctatcccgtgctcttcgtgctcttcatgttctttggaatggctttcaacttcattgtcaatgatagtcggaaaaagccgatttggaatgttctgatgtggacttctcttttcttgggcaa

SEQ ID NO: 39071 - DNA, 120 bp, Artificial Sequence
  ENSG00000057252_14 (sequence is synthesized)
tggagtcttactctgcttttattctcaagaatggtatgcacgtcagcactgtcctctgaaaaatcccacatttttggattatgtccggccacgttcctggacttgtcgttacgtgtttta

SEQ ID NO: 39072 - DNA, 120 bp, Artificial Sequence
  ENSG00000057252_15 (sequence is synthesized)
gaagcttggactttgtttcctccttgtcactgaagattgggtagctccctgatttggagccagctgtttccagttgttactgaagttatctgtgttatttggaccactccaggctttaca

SEQ ID NO: 39073 - DNA, 120 bp, Artificial Sequence
  ENSG00000057252_16 (sequence is synthesized)
gatgactcactccattcctaggtcacttgaagccaaactgttggaagttcactggagtcttgtacacttaagcagagcagaactttttttgtggggctgggtggggggagaagaccgact

SEQ ID NO: 39074 - DNA, 120 bp, Artificial Sequence
  ENSG00000057252_17 (sequence is synthesized)
aacagctgaagtaatgacagattgttgctgggtcatatcagctttatcccttggtaattatatctgttttgtttcttgactctgtccaatcagagaataaacatcatagtttcttggcca

SEQ ID NO: 39075 - DNA, 120 bp, Artificial Sequence
  ENSG00000057252_18 (sequence is synthesized)
ctgaattagccaaaacacttaggaagaaatcacttaaatacctctggcttagaaattttttcatgcacactgttggaatgtatgctaattgaacatgcaattggggaagaaaaaatgtag

SEQ ID NO: 39076 - DNA, 120 bp, Artificial Sequence
  ENSG00000057252_19 (sequence is synthesized)
aatgatttttgctatttctagtagaaagaaaatgtctgttttccaaagataatgttatacatcctattttgtaatttttttgaaaaaagttcaatgttcagttttccttagtttttacct

SEQ ID NO: 39077 - DNA, 120 bp, Artificial Sequence
  ENSG00000057252_20 (sequence is synthesized)
tgttttctctataggtcatgatttctgtgaagcaaaaagatgccttttaccatgaattcttgagtttacatcaataatattgtatattaaggggatcagaagtaggaaggaaaaaataag

SEQ ID NO: 39078 - DNA, 120 bp, Artificial Sequence
  ENSG00000057252_21 (sequence is synthesized)
agatagcagaggaaaaagaaaaacatttcctcttataacttctgaagtaatttgtaaaaaagatttgtagagtcaatcatgtgtttaaattattttatcacaaacttaacatggaagata

SEQ ID NO: 39079 - DNA, 120 bp, Artificial Sequence
  ENSG00000057252_22 (sequence is synthesized)
ttcctttttaactttgtggtaacttctttgaagttatttagaaatatcctttggaacaattattttattgtctaataaatattgacttctcttgaattattttgcagactagtgagtctg

SEQ ID NO: 39080 - DNA, 120 bp, Artificial Sequence
  ENSG00000057252_23 (sequence is synthesized)
taccataagtattaatcacctccactcatattaaagtgatcattaagaatccagaagctggcttctgcatttgctcagttatacttttaatggtagtatgtttttaggtggaataaatta

SEQ ID NO: 39081 - DNA, 120 bp, Artificial Sequence
  ENSG00000057252_24 (sequence is synthesized)
atatgtgattggtttcaaggaaatgtactctattatgtaatacttccattttataagatgcccatttctaatacaatgtgtgtaggaattatttgtatgtatgaggtatgattgtaaaga

SEQ ID NO: 39082 - DNA, 120 bp, Artificial Sequence
  ENSG00000057252_25 (sequence is synthesized)
ttgagcattggaaggggtatcagagaccatgtagttcaactttccactcaaagtaagatttatgaattatttaaatgatagttgttacttggaacagccacttgagaggctctcttggta

SEQ ID NO: 39083 - DNA, 120 bp, Artificial Sequence
  ENSG00000057252_26 (sequence is synthesized)
ttgtttggaattgttttaaagtcagtttgagtctcacaagaaggtaagtagagtttcttaatagtcacaacttaatttgaaccacaagtatccagcttaatcacgtatcttactcacgat

SEQ ID NO: 39084 - DNA, 120 bp, Artificial Sequence
  ENSG00000057252_27 (sequence is synthesized)
accactggtccagatgagtttaggtaattttcaaacattaaatccaacttcaacggaaacaaatacactcaagggaagttatttttaaaaaggtactctgcatgttcccgcagtaatgtt

SEQ ID NO: 39085 - DNA, 120 bp, Artificial Sequence
  ENSG00000057252_28 (sequence is synthesized)
ctgcacaacagtattgtaattgtaatggaatcataacctgctaactagtttgctttaatatggcttgtaattcttgacatttttcttaaaattaaaacgaatttttattttgaatttata

SEQ ID NO: 39086 - DNA, 120 bp, Artificial Sequence
  ENSG00000057252_29 (sequence is synthesized)
actgcattttaaatatattggggacagattgcgctgagacctggttatgagcaagccaatcttttgaatctagagaatggaattcttaggtttatatttctgttaagaaatactataaat

SEQ ID NO: 39087 - DNA, 120 bp, Artificial Sequence
  ENSG00000057252_30 (sequence is synthesized)
atgactcttatgagaagactttgttgctctgtagtgtttctgaatactgtatttgttggattgatcaaggctatttttcaaaaagctctctgcttcctgtttgtttgtttgtttgttttt

SEQ ID NO: 39088 - DNA, 120 bp, Artificial Sequence
  ENSG00000057252_31 (sequence is synthesized)
gggaagacaggcgttagccaccgtgcccggcctctgtttcctgttattagtgattttcctgcccaagattgcaacaacaaatatgtagaactacagactgtttagaatgctgagactgtt

SEQ ID NO: 39089 - DNA, 120 bp, Artificial Sequence
  ENSG00000057252_32 (sequence is synthesized)
ctaagaaactttcaaaaacagtagcacttcaaggaatggtcactttctatgaaagaaactggtttgatagccataatcttattgctagctgcttttagcaaaagtcttttcttgaaacca

SEQ ID NO: 39090 - DNA, 120 bp, Artificial Sequence
  ENSG00000057252_33 (sequence is synthesized)
ccacctatactctttaaacaaataaaaactaaaatctcttgctaatgtttcaggaagatttattttttctattttgctattgtggcgaaaattattttcagttataggatacttttttcc

SEQ ID NO: 39091 - DNA, 120 bp, Artificial Sequence
  ENSG00000057252_34 (sequence is synthesized)
ttctgaaaagtaataagcttaaagtttttgtttctgtaagatgtaatgatagtaactattattttgggcatattaaccaacagaacaattatgtagtatgtatatcactttctcattaga

SEQ ID NO: 39092 - DNA, 120 bp, Artificial Sequence
  ENSG00000057252_35 (sequence is synthesized)
tctctaacttgaccttctagtacctttatgtgtgaggataaatttgttagatccttttattctcaatcttggataatgatgcaaaatggaattttgttttgtttgttggtagattcacat

SEQ ID NO: 39093 - DNA, 120 bp, Artificial Sequence
  ENSG00000057252_36 (sequence is synthesized)
gaattttgttttgtttgttggtagattcacatactaaaactttgcaggtaaagttgcttgcctcatgttagaatttaattagaaaactgaggctgccttttttttttttttttttttttt

SEQ ID NO: 39094 - DNA, 79 bp, Artificial Sequence
  ENSG00000057252_37 (sequence is synthesized)
ttttttaagacagagtcttgttctgtcgcccaggccagttttttttttcttgtacagatggtcaagggatctatttgcc

SEQ ID NO: 39095 - DNA, 120 bp, Artificial Sequence
  ENSG00000057252_38 (sequence is synthesized)
ctgggattacaggtgtgagccacggctcctggctccttgctccagaatcagttttttaatggaagatagctcatactttgtttttgtttttaaagagacagggtctcactctgttgccca

SEQ ID NO: 39096 - DNA, 120 bp, Artificial Sequence
  ENSG00000057252_39 (sequence is synthesized)
tagctcactgcagtctcaaactcctggactcaaatagtgctctggagtacctagaactacaagtgcctaccaccacacccagctaatttatttgtttttttttttttagagatggggggg

SEQ ID NO: 39097 - DNA, 87 bp, Artificial Sequence
  ENSG00000057252_40 (sequence is synthesized)
atgttgcccaggctggtctcaaactcttcacctcaagcaaaactcccactgcagaaagcttcatacttattgttaataaagtttcag

SEQ ID NO: 39098 - DNA, 120 bp, Artificial Sequence
  ENSG00000057252_41 (sequence is synthesized)
agtttcagtgacttgcttactaatcttatgcaaaatttcatgtaatttatgtaatactacataacaatgctacatatggtatgtatacatacactgtatacacacaaaggtctgttctgg

SEQ ID NO: 39099 - DNA, 120 bp, Artificial Sequence
  ENSG00000057252_42 (sequence is synthesized)
tgttctgggtattttatgtatcttatctctaggctttatggctctgaaatggagggaactggacataaatgtttcaaggaataaagtgaatgttttgtttgtttgtttgttttgagacgg

SEQ ID NO: 39100 - DNA, 69 bp, Artificial Sequence
  ENSG00000057252_43 (sequence is synthesized)
cagcctcccatagtgctgggattataggcatgagccatgctcccggccaaagtgaatgttttgggtgaa

SEQ ID NO: 39101 - DNA, 120 bp, Artificial Sequence
  ENSG00000057252_44 (sequence is synthesized)
atgagccatgctcccggccaaagtgaatgttttgggtgaagtttatataaggatttgacttttgtatcattattaaagtttctgtcaggtaatacagtgttggccctctgttgaaataaa

SEQ ID NO: 39102 - DNA, 76 bp, Artificial Sequence
  ENSG00000057252_45 (sequence is synthesized)
tctgtcaggtaatacagtgttggccctctgttgaaataaaatgttacatatcgctgggtgtagtggctcatgcctt

SEQ ID NO: 39103 - DNA, 120 bp, Artificial Sequence
  ENSG00000057252_46 (sequence is synthesized)
gtgcacgcctgtagtctcagctactcagtcggctgaggtgggaagatggcttcaagccgggagatggaggcttcagtgacctgtgacctgtgatcacaccacttaattcctcaaaacatt

SEQ ID NO: 39104 - DNA, 120 bp, Artificial Sequence
  ENSG00000057252_47 (sequence is synthesized)
ccgggagatggaggcttcagtgacctgtgacctgtgatcacaccacttaattcctcaaaacatttatgtcccagttccctccatttcagagccatgggcaacagagcgagaccctgtctc

SEQ ID NO: 39105 - DNA, 120 bp, Artificial Sequence
  ENSG00000057252_48 (sequence is synthesized)
ggtttaaagagaggataatatgcaaccaccctagttgaaacagagtgtatcacttctttctcaccctaaatttaatgcctagtttgaaaatcagtagacaataataaagttgataagctt

SEQ ID NO: 39106 - DNA, 120 bp, Artificial Sequence
  ENSG00000057252_49 (sequence is synthesized)
taggttggtaggaaagctatgtaatctatatagtgtactaaatccttatatgtttttggtaaaaaaagactttaatagctaatttggacttcagaaaatgggttaatttcacgagtgcat

SEQ ID NO: 39107 - DNA, 120 bp, Artificial Sequence
  ENSG00000057252_50 (sequence is synthesized)
atcacttttgactatattagtcaagcatattattaaagtttaaaaaactctaaaacttctgtactgtttttttcttaagtgctctcttccttatttctacattactacattcacatttct

SEQ ID NO: 39108 - DNA, 120 bp, Artificial Sequence
  ENSG00000057252_51 (sequence is synthesized)
gctgtcaataagccctaatggagtgataaactttaagctagtagatactgcaccatgtcttgtggtggtgttttcttaatgaaatggaagctgtacttcctgtttgtttttaaatacttt

SEQ ID NO: 39109 - DNA, 120 bp, Artificial Sequence
  ENSG00000057252_52 (sequence is synthesized)
tgaaacagacagttcatgtaccccatcatttagagatgcagtttgaatttccatggaaaaaggtgccaattttggattgggaaaggagctgaagccccagtcaagactttgccatttggg

SEQ ID NO: 39110 - DNA, 120 bp, Artificial Sequence
  ENSG00000057252_53 (sequence is synthesized)
gtaatgcagcagattcctgtgtctgtatctttccagtgtgtgtgttaatccatagtgttctgagcaccagaagggtcatgtaaatctgaagttgttattaaaggtttttctatagtgaaa

SEQ ID NO: 39111 - DNA, 120 bp, Artificial Sequence
  ENSG00000057294_0 (sequence is synthesized)
gcgccagcgcccccagctccgtggcggcttcgcccgcgagtccagaggcaggcgagcagctcggtcgcccccaccggccccatggcagcccccggcgccccagctgagtacggctacatc

SEQ ID NO: 39112 - DNA, 120 bp, Artificial Sequence
  ENSG00000057294_1 (sequence is synthesized)
cggcgccccagctgagtacggctacatccggaccgtcctgggccagcagatcctgggacaactggacagctccagcctggcgctgccctccgaggccaagctgaagctggcggggagcag

SEQ ID NO: 39113 - DNA, 120 bp, Artificial Sequence
  ENSG00000057294_2 (sequence is synthesized)
cggccgcggcggccagacagtcaagagcctgcggatccaggagcaggtgcagcagaccctcgcccggaagggccgcagctccgtgggcaacggaaatcttcaccgaaccagcagtgttcc

SEQ ID NO: 39114 - DNA, 120 bp, Artificial Sequence
  ENSG00000057294_3 (sequence is synthesized)
tgagtatgtctacaacctacacttggttgaaaatgattttgttggaggccgttcccctgttcctaaaacctatgacatgctaaaggctggcacaactgccacttatgaaggtcgctgggg

SEQ ID NO: 39115 - DNA, 120 bp, Artificial Sequence
  ENSG00000057294_4 (sequence is synthesized)
aagaggaacagcacagtacagctcccagaagtccgtggaagaaaggtccttgaggcatcctctgaggagactggagatttctcctgacagcagcccggagagggctcactacacgcacag

SEQ ID NO: 39116 - DNA, 120 bp, Artificial Sequence
  ENSG00000057294_5 (sequence is synthesized)
cgattaccagtacagccagagaagccaggctgggcacaccctgcaccaccaagaaagcaggcgggccgccctcctagtgccaccgagatatgctcgttccgagatcgtgggggtcagccg

SEQ ID NO: 39117 - DNA, 120 bp, Artificial Sequence
  ENSG00000057294_6 (sequence is synthesized)
tgctggcaccacaagcaggcagcgccactttgacacataccacagacagtaccagcatggctctgttagcgacaccgtttttgacagcatccctgccaacccggccctgctcacgtaccc

SEQ ID NO: 39118 - DNA, 120 bp, Artificial Sequence
  ENSG00000057294_7 (sequence is synthesized)
caggccagggaccagccgcagcatgggcaacctcttggagaaggagaactacctgacggcagggctcactgtcgggcaggtcaggccgctggtgcccctgcagcccgtcactcagaacag

SEQ ID NO: 39119 - DNA, 120 bp, Artificial Sequence
  ENSG00000057294_8 (sequence is synthesized)
ggcttccaggtcctcctggcatcagagctccttccacagcacccgcacgctgagggaagctgggcccagtgtcgccgtggattccagcgggaggagagcgcacttgactgtcggccaggc

SEQ ID NO: 39120 - DNA, 120 bp, Artificial Sequence
  ENSG00000057294_9 (sequence is synthesized)
ggccgcagggggaagtgggaatctgctcactgagagaagcactttcactgactcccagctggggaatgcagacatggagatgactctggagcgagcagtgagtatgctcgaggcagacca

SEQ ID NO: 39121 - DNA, 120 bp, Artificial Sequence
  ENSG00000057294_10 (sequence is synthesized)
catgctgccatccaggatttctgctgcagctactttcatacagcacgagtgcttccagaaatctgaagctcggaagagggttaaccagcttcgtggcatcctcaagcttctgcagctcct

SEQ ID NO: 39122 - DNA, 120 bp, Artificial Sequence
  ENSG00000057294_11 (sequence is synthesized)
aaaagttcagaatgaagacgttcagcgagctgtgtgtggggccttgagaaacttagtatttgaagacaatgacaacaaattggaggtggctgaactaaatggggtacctcggctgctcca

SEQ ID NO: 39123 - DNA, 120 bp, Artificial Sequence
  ENSG00000057294_12 (sequence is synthesized)
ggtgctgaagcaaaccagagacttggagactaaaaaacaaataacaggtttgctgtggaatttgtcatctaatgacaaactcaagaatctcatgataacagaagcattgcttacgctgac

SEQ ID NO: 39124 - DNA, 120 bp, Artificial Sequence
  ENSG00000057294_13 (sequence is synthesized)
ggagaatatcatcatccccttttctgggtggcctgaaggagactacccaaaagcaaatggtttgctcgattttgacatattctacaacgtcactggatgcctaagaaacatgagttctgc

SEQ ID NO: 39125 - DNA, 120 bp, Artificial Sequence
  ENSG00000057294_14 (sequence is synthesized)
tggcgctgatgggagaaaagcgatgagaagatgtgacggactcattgactcactggtccattatgtcagaggaaccattgcagattaccagccagatgacaaggccacggagaattgtgt

SEQ ID NO: 39126 - DNA, 120 bp, Artificial Sequence
  ENSG00000057294_15 (sequence is synthesized)
gtgcattcttcataacctctcctaccagctggaggcagagctcccagagaaatattcccagaatatctatattcaaaaccggaatatccagactgacaacaacaaaagtattggatgttt

SEQ ID NO: 39127 - DNA, 120 bp, Artificial Sequence
  ENSG00000057294_16 (sequence is synthesized)
tggcagtcgaagcaggaaagtaaaagagcaataccaggacgtgccgatgccggaggaaaagagcaaccccaagggcgtggagtggctgtggcattccattgttataaggatgtatctgtc

SEQ ID NO: 39128 - DNA, 120 bp, Artificial Sequence
  ENSG00000057294_17 (sequence is synthesized)
gacagttgtccagaaggaaagtggcctgcagcacacccgaaagatgctgcatgttggtgacccaagtgtgaaaaagacagccatctcgctgctgaggaatctgtcccggaatctttctct

SEQ ID NO: 39129 - DNA, 120 bp, Artificial Sequence
  ENSG00000057294_18 (sequence is synthesized)
gcagaatgaaattgccaaagaaactctccctgatttggtttccatcattcctgacacagtcccgagtactgaccttctcattgaaactacagcctctgcctgttacacattgaacaacat

SEQ ID NO: 39130 - DNA, 120 bp, Artificial Sequence
  ENSG00000057294_19 (sequence is synthesized)
aatccaaaacagttaccagaatgcacgcgaccttctaaacaccgggggcatccagaaaattatggccattagtgcaggcgatgcctatgcctccaacaaagcaagtaaagctgcttccgt

SEQ ID NO: 39131 - DNA, 120 bp, Artificial Sequence
  ENSG00000057294_20 (sequence is synthesized)
ccttctgtattctctgtgggcacacacggaactgcatcatgcctacaagaaggctcagtttaagaagacagattttgtcaacagccggactgccaaagcctaccactcccttaaagactg

SEQ ID NO: 39132 - DNA, 120 bp, Artificial Sequence
  ENSG00000057294_21 (sequence is synthesized)
aggaaaatgacaaagtattctcggctgcaaaaatccccaaaggaaaacacctatttttctactacccagcccaagaaacctcaaaagcatgccttgtttctatccttctctatttccgtg

SEQ ID NO: 39133 - DNA, 120 bp, Artificial Sequence
  ENSG00000057294_22 (sequence is synthesized)
gtcccctgaatccagaaaacaaatagaacataattttatgagtcttccagaagacctttgcaagtttgccaccagtagataccggccacaggctcgacaaatagtggtctttgttattag

SEQ ID NO: 39134 - DNA, 120 bp, Artificial Sequence
  ENSG00000057294_23 (sequence is synthesized)
ggcttatggtacatggcttcctggaatcaaaatgtgaattcatgtggaagggacattaatccaataaataaggaaagaagctgttgcattactgggattttaaaagtttgatttacattt

SEQ ID NO: 39135 - DNA, 120 bp, Artificial Sequence
  ENSG00000057294_24 (sequence is synthesized)
atattccttttctggttcccatgttttgtcactcatgtgcacattgcttcgccattgggcctccagtgtattgttctgcagtgttgaaacagaatggaaatgacaagaaatatctgcagt

SEQ ID NO: 39136 - DNA, 120 bp, Artificial Sequence
  ENSG00000057294_25 (sequence is synthesized)
tatccaggagaaagtataatggcaaaattattggtttctttctttactttgtgcttgtttttatccccttgggttgtttttctctgatttttaaataaacttaagaaatttagattacag

SEQ ID NO: 39137 - DNA, 120 bp, Artificial Sequence
  ENSG00000057294_26 (sequence is synthesized)
aaacttaagaaatttagattacagagtatgcatgactgtaagaaaaagaaattgagaggaagtgatcatagcaaattaaagaagtcttttcctcccagaacttaaagtaaaataaaaaat

SEQ ID NO: 39138 - DNA, 120 bp, Artificial Sequence
  ENSG00000057294_27 (sequence is synthesized)
acagagaaaggcaactgtgatgataaaatttaacgttcccccaaacactgagtcaatgagatttttctcaggagatactttacctataacaacgccgttaaatccaaatctcttctaaac

SEQ ID NO: 39139 - DNA, 120 bp, Artificial Sequence
  ENSG00000057294_28 (sequence is synthesized)
gatggcattctatgtaatgcctttcctggacttttttggccactgccctggactagtgaaagaatggactctatctttatctgcaagaggaactaaggccttctctcagactgcctggcc

SEQ ID NO: 39140 - DNA, 120 bp, Artificial Sequence
  ENSG00000057294_29 (sequence is synthesized)
agcctggggcactgaaaatacggctcatgttaatgagttacattatcagccagcccagccttgcccaccatttaagaaatatcacagagccactagatctcatatgatcttcttcaagcc

SEQ ID NO: 39141 - DNA, 120 bp, Artificial Sequence
  ENSG00000057294_30 (sequence is synthesized)
attattttaactcaagaaaactctagagaagaaaagtgaagaagtcatgttgaagaagatgtaagaatgtgtcaagaccatccagaaatgatatgagaaatactgatattttaaatggtt

SEQ ID NO: 39142 - DNA, 120 bp, Artificial Sequence
  ENSG00000057294_31 (sequence is synthesized)
gacatcatccagcgaaatgaatctacattaaatgttgttttaactgcgctatgattaaaaccattcatatagagttagtctttacaactactattctgttatttttttttttaatctgac

SEQ ID NO: 39143 - DNA, 120 bp, Artificial Sequence
  ENSG00000057294_32 (sequence is synthesized)
aacatttgtcctaagtaagataagcaaaaaaattcttcaactccttttggcaagaaaactgtaacagaaaataaattttgaatgtgtacttaagtctttattatatttgaagcaattttt

SEQ ID NO: 39144 - DNA, 120 bp, Artificial Sequence
  ENSG00000057294_33 (sequence is synthesized)
tttcaattttaaaagctgaatgaagacaacttaggttgctaacctagttcaaaatgaaattatttagataccaatttttaaaatactggagagaatttatatgtctttttccagagttct

SEQ ID NO: 39145 - DNA, 120 bp, Artificial Sequence
  ENSG00000057294_34 (sequence is synthesized)
gatgataagcatttggagtgcatttattcctccagataataaatgtgtgttcagaactttttgtgttttttaaggcattaataaagccttcgataatattaaatacaaaatgagaccaaa

SEQ ID NO: 39146 - DNA, 120 bp, Artificial Sequence
  ENSG00000057294_35 (sequence is synthesized)
gtctggtcaccgagtggcctgacttcatggatggctgctgcggagtagcagttgaggagcgaagaggtcttacagaacacccacaggccgcatccagaagcctcactcattctccctgat

SEQ ID NO: 39147 - DNA, 120 bp, Artificial Sequence
  ENSG00000057294_36 (sequence is synthesized)
gcggccgcggcggccagacagtcaagagcctgcggatccaggagcaggtgcagcagaccctcgcccggaagggccgcagctccgtgggcaacggtccagtgctaaactgaaaccaaatca

SEQ ID NO: 39148 - DNA, 120 bp, Artificial Sequence
  ENSG00000057294_37 (sequence is synthesized)
gcttcccctgcgtaggagacacaggaggcatattagatattctttcttatcctctgagaatggccagctaggaagagagcaagcagatacaactcttccataaatggagggaatggagcc

SEQ ID NO: 39149 - DNA, 120 bp, Artificial Sequence
  ENSG00000057294_38 (sequence is synthesized)
atgaacagaagaaaagggaatgttgctgagcatctactatgtgcctattccagaatcttcattatattcttgaaacaattgctgagatagatatgagaatccatctcacatatgaagtat

SEQ ID NO: 39150 - DNA, 120 bp, Artificial Sequence
  ENSG00000057294_39 (sequence is synthesized)
gtgtctgtcagcaatggttggaaatttaatcccaactccacacataatctgttctttctacaaagtaatgcatcacctgtgtgatgaattcagcaagcatcaaatgagtatgttcttcat

SEQ ID NO: 39151 - DNA, 120 bp, Artificial Sequence
  ENSG00000057294_40 (sequence is synthesized)
gccgggcgctgtgcaggtgctgaattaaacacaaagactctgcttgctttaaagcaaaaagtttgaagaaggaagccaaccgctagaaaaatacattaccaaataaaaagtagtaagtga

SEQ ID NO: 39152 - DNA, 120 bp, Artificial Sequence
  ENSG00000057294_41 (sequence is synthesized)
aaatacattaccaaataaaaagtagtaagtgacccaaaagaatggctaatatattatggagtttagaagtgtaaattggctgggcgcagtgactcatgcctgtaattgcagcactttggg

SEQ ID NO: 39153 - DNA, 120 bp, Artificial Sequence
  ENSG00000057294_42 (sequence is synthesized)
agttactcctggtggcaggaaattttgaaaagcttcctggaggtagatctcaaaaattcagtaggactggacatagggaggtgactggagaaagatcattctaggagggaacagaatgaa

SEQ ID NO: 39154 - DNA, 120 bp, Artificial Sequence
  ENSG00000057294_43 (sequence is synthesized)
tatttcacagttcacagagttgatatggtagaacaaagggcactatcttggtccttctgctataatgcttgggtcaactacttgactggctgttccaactaaggaacaaagcgtttgaaa

SEQ ID NO: 39155 - DNA, 120 bp, Artificial Sequence
  ENSG00000057294_44 (sequence is synthesized)
tattttgattgcaacagcagctttccagtaagctgaaatacactctgcagcctacacagaagtacaaatcagacagagagataaggcagcaaacaacacctacttactttaaagcctcag

SEQ ID NO: 39156 - DNA, 120 bp, Artificial Sequence
  ENSG00000057294_45 (sequence is synthesized)
ctttctaagactcaaaaaggaaatcagcttcaaaggaatttaacattagcatgccatgaaacaattaccaggggtggttcgtatgtattgtttaattaaacttctttgaaaaggtctggg

SEQ ID NO: 39157 - DNA, 120 bp, Artificial Sequence
  ENSG00000057294_46 (sequence is synthesized)
ggctcgtggtggttctgagtataatttttattatttccatgttactatcctgtctctcaagttgaaacagacaagcaattgttgaaacagtgctggtctggaaaaaatcctgtatcaaca

SEQ ID NO: 39158 - DNA, 120 bp, Artificial Sequence
  ENSG00000057294_47 (sequence is synthesized)
ggtacttggagtgaagtagaagacttatgacacaattacgtgttgtttggaaatatttagaaagtatgttcatagttgatctattaagcagtcaatgatttgttgactgggcaagtctgc

SEQ ID NO: 39159 - DNA, 120 bp, Artificial Sequence
  ENSG00000057294_48 (sequence is synthesized)
cacacttttacaaatttgccagtttccaaacacctggaagaagcatcaagtaaaacttcaaaacaaagacctgttggatacacagcctagacttacttttttgttttttgttttttctga

SEQ ID NO: 39160 - DNA, 120 bp, Artificial Sequence
  ENSG00000057294_49 (sequence is synthesized)
cggaagtggaccagtgagtattgggcctgatttcctactttttaaaataatgatattgtagacatacctacattcaattcagagatgaaacagtgagggaagagaaaaaggtttcttatt

SEQ ID NO: 39161 - DNA, 120 bp, Artificial Sequence
  ENSG00000057294_50 (sequence is synthesized)
ttagtaaagacaattctcagaaattacagagggcttcggtctcagcttatgcaaagtcaagtcaggctgcttgactgacaagtcaagtcagtactctttcagttacagatctcagaatcc

SEQ ID NO: 39162 - DNA, 120 bp, Artificial Sequence
  ENSG00000057294_51 (sequence is synthesized)
tgcctcaagctggtttaagcaaaaaagaggaaatttttggcttatggcactgaaaactccagggtgggccttctttctgtcgtgactggacttaggtgcaccagtgattacagttgactt

SEQ ID NO: 39163 - DNA, 120 bp, Artificial Sequence
  ENSG00000057294_52 (sequence is synthesized)
tcttcatctccgggcttggttttcctctgctgggtttgttctcaaaggctctctccatagggtaacaaagacagccatgaattatttcaggctcacgttttatcagcccaatgtgtcccc

SEQ ID NO: 39164 - DNA, 62 bp, Artificial Sequence
  ENSG00000057294_53 (sequence is synthesized)
tgctgtggaatttgtcatctaatgacaaactcaagaatctcatgataacagaagcattgctt

SEQ ID NO: 39165 - DNA, 120 bp, Artificial Sequence
  ENSG00000057294_54 (sequence is synthesized)
gaaaaccattctagaatgacctatgcttaattctctgaattttctctcactgggagaaatatcaagttaggggtgtggagtgttattaggaagaaataatcattatgggctaaaagttaa

SEQ ID NO: 39166 - DNA, 120 bp, Artificial Sequence
  ENSG00000057294_55 (sequence is synthesized)
gtgattagaaattatatatatttgcttttaaaatttctatttcaagggcttcttatgcaaattatgagcctttctagacagtatttctggtctcctggtttgagtgtgaaattatagcca

SEQ ID NO: 39167 - DNA, 120 bp, Artificial Sequence
  ENSG00000057468_0 (sequence is synthesized)
gcgcagttctcccgcccgtttcagcggcgcagcttctgtagttgggctactggaggggtcgctcagaaacctcatacttctcgggtcagggaaggtttgggaggatgctgaggcctgaga

SEQ ID NO: 39168 - DNA, 120 bp, Artificial Sequence
  ENSG00000057468_1 (sequence is synthesized)
tctcatcaacctcgccttctgccccggcggtttccccgtcgtcgggagaaacccgctcacctcagggtccccgctacaatttcggactccaggagactccacagagccgcccttcggtcc

SEQ ID NO: 39169 - DNA, 120 bp, Artificial Sequence
  ENSG00000057468_2 (sequence is synthesized)
aggtggtctctgcatccacctgtcctggcacgtcaggagctgcgggcgaccggagcagcagcagcagcagccttccctgccccgcgccaaactcccggccagctcaaggttcatactttg

SEQ ID NO: 39170 - DNA, 120 bp, Artificial Sequence
  ENSG00000057468_3 (sequence is synthesized)
gaaacaaaagagcttatgcagaaaacacagttgcatcaaattttacttttggtgcaagctcatcttctgcacgagatactaattatcctcaaacacttaaaactccattgtctactggaa

SEQ ID NO: 39171 - DNA, 120 bp, Artificial Sequence
  ENSG00000057468_4 (sequence is synthesized)
atcctcagagatcaggttataagagctggacaccacaagtgggatattcagcttcatcctcatctgcgatttctgcacactccccatcagttattgtagctgttgtagaagggagaggac

SEQ ID NO: 39172 - DNA, 120 bp, Artificial Sequence
  ENSG00000057468_5 (sequence is synthesized)
ttgccagaggtgaaataggaatggcaagtattgatttaaaaaacccccaaattatactatcccagtttgcagacaacacaacatatgcaaaggtgatcactaaacttaaaattttatcac

SEQ ID NO: 39173 - DNA, 120 bp, Artificial Sequence
  ENSG00000057468_6 (sequence is synthesized)
ctttggaaataataatgtcaaatactgcttgtgctgtggggaattccaccaagttgttcactctgatcacagaaaatttcaagaatgttaatttcactactatccaaaggaaatacttca

SEQ ID NO: 39174 - DNA, 120 bp, Artificial Sequence
  ENSG00000057468_7 (sequence is synthesized)
atgaaacaaaaggattagagtacattgaacagttatgcatagcagaattcagcactgtcctaatggaggttcagtccaagtattactgccttgcagctgttgcagctttgttaaaatatg

SEQ ID NO: 39175 - DNA, 120 bp, Artificial Sequence
  ENSG00000057468_8 (sequence is synthesized)
ttgaatttattcaaaattcagtttatgcaccaaaatcactgaagatttgtttccagggtagtgaacagacagccatgatagattcatcatcagcccaaaaccttgaattgttaattaata

SEQ ID NO: 39176 - DNA, 120 bp, Artificial Sequence
  ENSG00000057468_9 (sequence is synthesized)
atcaagactataggaataatcacactctctttggtgttctaaattatactaagactcctggagggagtagacgacttcgttctaatatattagagcctctagttgatattgaaaccatta

SEQ ID NO: 39177 - DNA, 120 bp, Artificial Sequence
  ENSG00000057468_10 (sequence is synthesized)
acatgagattagattgtgttcaagaactacttcaagatgaggaactattttttggacttcaatcagttatatcaagatttcttgatacagagcagcttctttctgttttagtccaaattc

SEQ ID NO: 39178 - DNA, 120 bp, Artificial Sequence
  ENSG00000057468_11 (sequence is synthesized)
caaagcaagacacggtcaatgctgctgaatcaaagataacaaatttaatatacttaaaacataccttggaacttgtggatcctttaaagattgctatgaagaactgtaacacacctttat

SEQ ID NO: 39179 - DNA, 120 bp, Artificial Sequence
  ENSG00000057468_12 (sequence is synthesized)
taagagcttactatggttccttggaagacaagaggtttggaatcatacttgaaaagattaaaacagtaattaatgatgatgcaagatacatgaaaggatgcctaaacatgaggactcaga

SEQ ID NO: 39180 - DNA, 120 bp, Artificial Sequence
  ENSG00000057468_13 (sequence is synthesized)
aatttcttgacatagcaagaagaacatacacagagattgtagatgacatagcaggaatgatatcacaacttggagaaaaatatagtctacctttaaggacaagttttagctctgctcgag

SEQ ID NO: 39181 - DNA, 120 bp, Artificial Sequence
  ENSG00000057468_14 (sequence is synthesized)
gatttttcatccagatgactacagattgtatagccctacctagtgatcaacttccttcagaatttattaagatttctaaagtgaaaaattcttacagctttacatcagcagatttaatta

SEQ ID NO: 39182 - DNA, 120 bp, Artificial Sequence
  ENSG00000057468_15 (sequence is synthesized)
aaatgaatgaaagatgccaagaatctttgagagaaatctatcacatgacttatatgatagtgtgcaaactgcttagtgagatttatgaacatattcattgcttatataaactatctgaca

SEQ ID NO: 39183 - DNA, 120 bp, Artificial Sequence
  ENSG00000057468_16 (sequence is synthesized)
ctgtgtcaatgctggatatgctactgtcatttgctcatgcctgcactctttctgactatgttcgaccagaatttactgatactttagcaatcaaacagggatggcatcctattcttgaaa

SEQ ID NO: 39184 - DNA, 120 bp, Artificial Sequence
  ENSG00000057468_17 (sequence is synthesized)
aaatatctgcggaaaaacctattgccaacaatacctatgttacagaagggagtaattttttgatcataactggaccaaacatgagtggaaaatccacatatttaaaacagattgctcttt

SEQ ID NO: 39185 - DNA, 120 bp, Artificial Sequence
  ENSG00000057468_18 (sequence is synthesized)
gtcagattatggcccagattggatcatatgttccagcagaatattcttcctttagaattgctaaacagatttttacaagaattagtactgatgatgatatcgaaacaaattcatcaacat

SEQ ID NO: 39186 - DNA, 120 bp, Artificial Sequence
  ENSG00000057468_19 (sequence is synthesized)
ttatgaaagaaatgaaagagatagcatatattctacataatgctaatgacaaatcgctcatattaattgatgaacttggcagaggtactaatacggaagaaggtattggcatttgttatg

SEQ ID NO: 39187 - DNA, 120 bp, Artificial Sequence
  ENSG00000057468_20 (sequence is synthesized)
ctgtttgtgaatatctactgagcttaaaggcatttacactgtttgctacacatttcctggaactatgccatattgatgccctgtatcctaatgtagaaaacatgcattttgaagttcaac

SEQ ID NO: 39188 - DNA, 120 bp, Artificial Sequence
  ENSG00000057468_21 (sequence is synthesized)
atgtaaagaatacctcaagaaataaagaagcaattttgtatacctacaaactttctaagggactcacagaagagaaaaattatggattaaaagctgcagaggtgtcatcacttccaccat

SEQ ID NO: 39189 - DNA, 120 bp, Artificial Sequence
  ENSG00000057468_22 (sequence is synthesized)
caattgtcttggatgccaaggaaatcacaactcaaattacgagacaaattttgcaaaaccaaaggagtacccctgagatggaaagacagagagctgtgtaccatctagccactaggcttg

SEQ ID NO: 39190 - DNA, 120 bp, Artificial Sequence
  ENSG00000057468_23 (sequence is synthesized)
ttcaaactgctcgaaactctcaattggatccagacagtttacgaatatatttaagtaacctcaagaagaagtacaaagaagattttcccaggactgaacaagttccagaaaagactgaag

SEQ ID NO: 39191 - DNA, 120 bp, Artificial Sequence
  ENSG00000057468_24 (sequence is synthesized)
gactgaagaataatcacaattctaatgtaataatatatcttaattcaaggaacctagaatttatttttctccttagagataaggaaaataacatttgccaaatttcatattttaattgaa

SEQ ID NO: 39192 - DNA, 120 bp, Artificial Sequence
  ENSG00000057468_25 (sequence is synthesized)
ttaacatcacaattgtcatctatatattctatatgaaaaatatttattataacttaacaaatgagaactacttaaaggaatggtttttatgttaggagaaaatacaatacaccacttttt

SEQ ID NO: 39193 - DNA, 120 bp, Artificial Sequence
  ENSG00000057468_26 (sequence is synthesized)
tttttctcacaaaaattcacattattaagacctaagttcatttatacttacaagttatagtttaaaatattattgtaaataccctagtttaataaacacctttctttttaggtctggaaa

SEQ ID NO: 39194 - DNA, 120 bp, Artificial Sequence
  ENSG00000057593_0 (sequence is synthesized)
tcaacaggcaggggcagcactgcagagatttcatcatggtctcccaggccctcaggctcctctgccttctgcttgggcttcagggctgcctggctgcaggcggggtcgctaaggcctcag

SEQ ID NO: 39195 - DNA, 120 bp, Artificial Sequence
  ENSG00000057593_1 (sequence is synthesized)
gaggagaaacacgggacatgccgtggaagccggggcctcacagagtcttcgtaacccaggaggaagcccacggcgtcctgcaccggcgccggcgcgccaacgcgttcctggaggagctgc

SEQ ID NO: 39196 - DNA, 120 bp, Artificial Sequence
  ENSG00000057593_2 (sequence is synthesized)
ggccgggctccctggagagggagtgcaaggaggagcagtgctccttcgaggaggcccgggagatcttcaaggacgcggagaggacgaagctgttctggatttcttacagtgatggggacc

SEQ ID NO: 39197 - DNA, 120 bp, Artificial Sequence
  ENSG00000057593_3 (sequence is synthesized)
agtgtgcctcaagtccatgccagaatgggggctcctgcaaggaccagctccagtcctatatctgcttctgcctccctgccttcgagggccggaactgtgagacgcacaaggatgaccagc

SEQ ID NO: 39198 - DNA, 120 bp, Artificial Sequence
  ENSG00000057593_4 (sequence is synthesized)
tgatctgtgtgaacgagaacggcggctgtgagcagtactgcagtgaccacacgggcaccaagcgctcctgtcggtgccacgaggggtactctctgctggcagacggggtgtcctgcacac

SEQ ID NO: 39199 - DNA, 120 bp, Artificial Sequence
  ENSG00000057593_5 (sequence is synthesized)
ccacagttgaatatccatgtggaaaaatacctattctagaaaaaagaaatgccagcaaaccccaaggccgaattgtggggggcaaggtgtgccccaaaggggagtgtccatggcaggtcc

SEQ ID NO: 39200 - DNA, 120 bp, Artificial Sequence
  ENSG00000057593_6 (sequence is synthesized)
tgttgttggtgaatggagctcagttgtgtggggggaccctgatcaacaccatctgggtggtctccgcggcccactgtttcgacaaaatcaagaactggaggaacctgatcgcggtgctgg

SEQ ID NO: 39201 - DNA, 120 bp, Artificial Sequence
  ENSG00000057593_7 (sequence is synthesized)
gcgagcacgacctcagcgagcacgacggggatgagcagagccggcgggtggcgcaggtcatcatccccagcacgtacgtcccgggcaccaccaaccacgacatcgcgctgctccgcctgc

SEQ ID NO: 39202 - DNA, 120 bp, Artificial Sequence
  ENSG00000057593_8 (sequence is synthesized)
accagcccgtggtcctcactgaccatgtggtgcccctctgcctgcccgaacggacgttctctgagaggacgctggccttcgtgcgcttctcattggtcagcggctggggccagctgctgg

SEQ ID NO: 39203 - DNA, 120 bp, Artificial Sequence
  ENSG00000057593_9 (sequence is synthesized)
accgtggcgccacggccctggagctcatggtcctcaacgtgccccggctgatgacccaggactgcctgcagcagtcacggaaggtgggagactccccaaatatcacggagtacatgttct

SEQ ID NO: 39204 - DNA, 120 bp, Artificial Sequence
  ENSG00000057593_10 (sequence is synthesized)
gtgccggctactcggatggcagcaaggactcctgcaagggggacagtggaggcccacatgccacccactaccggggcacgtggtacctgacgggcatcgtcagctggggccagggctgcg

SEQ ID NO: 39205 - DNA, 120 bp, Artificial Sequence
  ENSG00000057593_11 (sequence is synthesized)
caaccgtgggccactttggggtgtacaccagggtctcccagtacatcgagtggctgcaaaagctcatgcgctcagagccacgcccaggagtcctcctgcgagccccatttccctagccca

SEQ ID NO: 39206 - DNA, 120 bp, Artificial Sequence
  ENSG00000057593_12 (sequence is synthesized)
gagaggtggggagggagacagagacagaaacagagagagacagagacagagagagactgagggagagactctgaggacatggagagagactcaaagagactccaagattcaaagagacta

SEQ ID NO: 39207 - DNA, 120 bp, Artificial Sequence
  ENSG00000057593_13 (sequence is synthesized)
atagagacacagagatggaatagaaaagatgagaggcagaggcagacaggcgctggacagaggggcaggggagtgccaaggttgtcctggaggcagacagcccagctgagcctccttacc

SEQ ID NO: 39208 - DNA, 120 bp, Artificial Sequence
  ENSG00000057593_14 (sequence is synthesized)
tcccttcagccaagcccacctgcacgtgatctgctggcctcaggctgctgctctgccttcattgctggagacagtagaggcatgaacacacatggatgcacacacacacacgccaatgca

SEQ ID NO: 39209 - DNA, 120 bp, Artificial Sequence
  ENSG00000057593_15 (sequence is synthesized)
cacacacagagatatgcacacacacggatgcacacacagatggtcacacagagatacgcaaacacaccgatgcacacgcacatagagatatgcacacacagatgcacacacagatataca

SEQ ID NO: 39210 - DNA, 120 bp, Artificial Sequence
  ENSG00000057593_16 (sequence is synthesized)
catggatgcacgcacatgccaatgcacgcacacatcagtgcacacggatgcacagagatatgcacacaccgatgtgcgcacacacagatatgcacacacatggatgagcacacacacacc

SEQ ID NO: 39211 - DNA, 120 bp, Artificial Sequence
  ENSG00000057593_17 (sequence is synthesized)
aatgcgcacacacaccgatgtacacacacagatgcacacacagatgcacacacaccgatgctgactccatgtgtgctgtcctctgaaggcggttgtttagctctcacttttctggttctt

SEQ ID NO: 39212 - DNA, 120 bp, Artificial Sequence
  ENSG00000057593_18 (sequence is synthesized)
atccattatcatcttcacttcagacaattcagaagcatcaccatgcatggtggcgaatgcccccaaactctcccccaaatgtatttctcccttcgctgggtgccgggctgcacagactat

SEQ ID NO: 39213 - DNA, 120 bp, Artificial Sequence
  ENSG00000057593_19 (sequence is synthesized)
tccccacctgcttcccagcttcacaataaacggctgcgtctcctccgcacacctgtggtgcctgccacccactgggttgcccatgattcatttttggagcccccggtgctcatcctctga

SEQ ID NO: 39214 - DNA, 120 bp, Artificial Sequence
  ENSG00000057593_20 (sequence is synthesized)
gatgctcttttctttcacaattttcaacatcactgaaatgaaccctcacatggaagctattttttaaaaacaaaagctgtttgatagatgtttgaggctgtagctcccaggatcctgtgg

SEQ ID NO: 39215 - DNA, 120 bp, Artificial Sequence
  ENSG00000057593_21 (sequence is synthesized)
aattggatgttctctccctgccacagcccttgtcaatgatatttcacagagaccctgggagcacctgctcaagagtcagggacacacgcatcactaaatgcaagttcccaggccctggct

SEQ ID NO: 39216 - DNA, 120 bp, Artificial Sequence
  ENSG00000057593_22 (sequence is synthesized)
gcagtgggaggacctggcaagctgcactcttgctgagtccccagggtggtggaagaagaatgagaaacacatgaacagagaaatggggaggtgacaaacagtgcccccactcagactccg

SEQ ID NO: 39217 - DNA, 120 bp, Artificial Sequence
  ENSG00000057593_23 (sequence is synthesized)
gcaagcacggctcagagagtggactcgatgccatccctgcagggccgtcctgggcaccactggcactcacagcagcaaggtgggcaccattggcactcacagcagcaaggcaggcaccag

SEQ ID NO: 39218 - DNA, 120 bp, Artificial Sequence
  ENSG00000057593_24 (sequence is synthesized)
caacccacctcgggggcactcaggcatcatctacttcagagcagacagggtctatgaactacagccgtgggctgcttccaaggcaccctgctcttgtaaataaagttttatgggaacaca

SEQ ID NO: 39219 - DNA, 120 bp, Artificial Sequence
  ENSG00000057593_25 (sequence is synthesized)
agtcccatggggaatgtcaacaggcaggggcagcactgcagagatttcatcatggtctcccaggccctcaggctcctctgccttctgcttgggcttcagggctgcctggctgcagtcttc

SEQ ID NO: 39220 - DNA, 120 bp, Artificial Sequence
  ENSG00000057593_26 (sequence is synthesized)
ccttctcctcgccggcatcgacccgcagcctcacgtttacgcggcggcgcccgcagcccccttcggcccggcttccgcgcgtgcccccgagcgcgccctcgggatcagcccccggaagca

SEQ ID NO: 39221 - DNA, 120 bp, Artificial Sequence
  ENSG00000057593_27 (sequence is synthesized)
gggatcagcccccggaagcagagaggccaggccgggaaggatgggcgacgggggtggctgacccgggagcacggcagggaggacacccagccaggcccgcgagcagcgccgctcccctcc

SEQ ID NO: 39222 - DNA, 120 bp, Artificial Sequence
  ENSG00000057593_28 (sequence is synthesized)
tccaggacgggcgggaacctgcgatgcccccgccgcgtgggccgtggggcggtctccgaggcactgggcggggcacgcggtgggcgcttcacggaactcgcatttcccagtcttcgtaac

SEQ ID NO: 39223 - DNA, 120 bp, Artificial Sequence
  ENSG00000057593_29 (sequence is synthesized)
atcatggtctcccaggccctcaggctcctctgccttctgcttgggcttcagggctgcctggctgcaggaggaagcccacggcgtcctgcaccggcgccggcgcgccaacgcgttcctgga

SEQ ID NO: 39224 - DNA, 120 bp, Artificial Sequence
  ENSG00000057593_30 (sequence is synthesized)
gtcagtcccatggggaatgtcaacaggcaggggcagcactgcagagatttcatcatggtctcccaggccctcaggctcctctgccttctgcttgggcttcagggctgcctggctgcagat

SEQ ID NO: 39225 - DNA, 120 bp, Artificial Sequence
  ENSG00000057593_31 (sequence is synthesized)
tgtgacgagacgtgggaagtactgccaacttgggaagctctacgagccccggtgtccagaggttttatcagggctcaatcacatagacccagctgaccacccgcatggctgacctcagtc

SEQ ID NO: 39226 - DNA, 120 bp, Artificial Sequence
  ENSG00000057593_32 (sequence is synthesized)
tcagcccctccagaggctacgccgatagtgcggcccaaggccccaccatacatcacattgtcagctagaccatccagcatggctcaaggcccagcagttcatccttgaccacccaagacc

SEQ ID NO: 39227 - DNA, 120 bp, Artificial Sequence
  ENSG00000057608_0 (sequence is synthesized)
agttcttctcttcccgtctgaggtggcggtcggtctcgccttgtcgccagctccattttcctctctttctcttcccctttccttcgcgcccaagagcgcctcccagcctcgtagggtggt

SEQ ID NO: 39228 - DNA, 120 bp, Artificial Sequence
  ENSG00000057608_1 (sequence is synthesized)
cacggagcccctgcgccttttccttgctcgggtcctgcgtccgcgcctgccccgccatgaatgaggagtacgacgtgatcgtgctgggcaccggcctgacggaatgtatcctgtcaggta

SEQ ID NO: 39229 - DNA, 120 bp, Artificial Sequence
  ENSG00000057608_2 (sequence is synthesized)
taatgtcagtgaatggcaagaaagttcttcatatggatcgaaacccttactacggaggagagagtgcatctataacaccattggaagatttatacaaaagatttaaaataccaggatcac

SEQ ID NO: 39230 - DNA, 120 bp, Artificial Sequence
  ENSG00000057608_3 (sequence is synthesized)
cacccgagtcaatggggagaggaagagactggaatgttgacttgattcccaagttccttatggctaatggtcagctggttaagatgctgctttatacagaggtaactcgctatctggatt

SEQ ID NO: 39231 - DNA, 120 bp, Artificial Sequence
  ENSG00000057608_4 (sequence is synthesized)
ttaaagtgactgaagggagctttgtctataagggtggaaaaatctacaaggttccttccactgaagcagaagccctggcatctagcctaatgggattgtttgaaaaacgtcgcttcagga

SEQ ID NO: 39232 - DNA, 120 bp, Artificial Sequence
  ENSG00000057608_5 (sequence is synthesized)
aattcctagtgtatgttgccaacttcgatgaaaaagatccaagaacttttgaaggcattgatcctaagaagaccacaatgcgagatgtgtataagaaatttgatttgggtcaagacgtta

SEQ ID NO: 39233 - DNA, 120 bp, Artificial Sequence
  ENSG00000057608_6 (sequence is synthesized)
tagattttactggtcatgctcttgcactttacagaactgatgattacttagatcaaccgtgttatgaaaccattaatagaattaaactttacagtgaatctttggcaagatatggcaaaa

SEQ ID NO: 39234 - DNA, 120 bp, Artificial Sequence
  ENSG00000057608_7 (sequence is synthesized)
gcccatacctttatccactctatggccttggagaactgccccaaggatttgcaaggctaagtgctatttatggaggtacctatatgctgaataaacccattgaagaaatcattgtacaga

SEQ ID NO: 39235 - DNA, 120 bp, Artificial Sequence
  ENSG00000057608_8 (sequence is synthesized)
atggaaaagtaattggtgtaaaatctgaaggagaaattgctcgctgtaagcagctcatctgtgaccccagctacgtaaaagatcgggtagaaaaagtgggccaggtgatcagagttattt

SEQ ID NO: 39236 - DNA, 120 bp, Artificial Sequence
  ENSG00000057608_9 (sequence is synthesized)
atcaagaacaccaatgatgccaactcctgccagatcattattccacagaaccaagtcaatcgaaagtcagatatctacgtctgcatgatctcctttgcgcacaatgtagcagcacaaggg

SEQ ID NO: 39237 - DNA, 120 bp, Artificial Sequence
  ENSG00000057608_10 (sequence is synthesized)
aagtacattgctatagttagtacaactgtggaaaccaaggagcctgagaaggaaatcagaccagctttggagctcttggaaccaattgaacagaaatttgttagcatcagtgacctcctg

SEQ ID NO: 39238 - DNA, 120 bp, Artificial Sequence
  ENSG00000057608_11 (sequence is synthesized)
gtaccaaaagacttgggaacagaaagccagatctttatttcccgcacatatgatgccaccactcattttgagacaacgtgtgatgacattaaaaacatctataagaggatgacaggatca

SEQ ID NO: 39239 - DNA, 120 bp, Artificial Sequence
  ENSG00000057608_12 (sequence is synthesized)
gagtttgactttgaggaaatgaagcgcaagaagaatgacatctatggggaagactaacagcagtacatgttattatgtaattaggacacatttaaaatttggcaaataatgcatataatg

SEQ ID NO: 39240 - DNA, 120 bp, Artificial Sequence
  ENSG00000057608_13 (sequence is synthesized)
aaatcaatattgtaaggcctgcttttgtaatgaaaatggagagaatgaagagcgctgtgccagtaaatactccccttcacctttctaattattaacttgttttcatggagtggctattca

SEQ ID NO: 39241 - DNA, 120 bp, Artificial Sequence
  ENSG00000057608_14 (sequence is synthesized)
gcattggcagttaccacattctgttcaatttaaccaaactggctttttttttttctagtgaagttaaacaaacattgggataccgacacagacaacttgagacagtttttttaatctttt

SEQ ID NO: 39242 - DNA, 120 bp, Artificial Sequence
  ENSG00000057608_15 (sequence is synthesized)
aatcagtgtagctatgtgctgctgctgctcaagagctggatccatacaggttgtgtgtcatctgtcctcttgaggttcaggagattctaaattgaatattccacggtttgggacagcatc

SEQ ID NO: 39243 - DNA, 120 bp, Artificial Sequence
  ENSG00000057608_16 (sequence is synthesized)
cggaagttttccctatgactttatattttgtattatgtcaaatgttatggcagggcccaaatagcatagccacaagtttggtttatgtgggcataaaattctaaccaaaccccagacata

SEQ ID NO: 39244 - DNA, 120 bp, Artificial Sequence
  ENSG00000057608_17 (sequence is synthesized)
gggagtcatttggagaaagcctgtatgtggtgttttaacctaataaagttgatgagagagaaggggagaggaagcgaacataaagcgggtcaagtgtagtgcatcttttgtatctcaggc

SEQ ID NO: 39245 - DNA, 120 bp, Artificial Sequence
  ENSG00000057608_18 (sequence is synthesized)
gtggcttcttcagtggaccaagctgcaatgcagtattgacttgacagagcctctacttctgtctcaaaatggctccaaatgatttctgtactgcaaaataaagccaaattctggaaacta

SEQ ID NO: 39246 - DNA, 120 bp, Artificial Sequence
  ENSG00000057608_19 (sequence is synthesized)
attcacctgcttaggctttcgtggggtcggcctcttggagctgagaacacagcttctgcttacacctgtgtcctcaatgaagccagagattcctaagagaattctagaaaaagaggagcg

SEQ ID NO: 39247 - DNA, 120 bp, Artificial Sequence
  ENSG00000057608_20 (sequence is synthesized)
gggtagaaggcaagcaaggaacagtttctaagcttagggcctaaacctttgcatacaaggatcagctaccacgtttacagcggctttaagttacagccctcggaatgtatcctgtcaggt

SEQ ID NO: 39248 - DNA, 68 bp, Artificial Sequence
  ENSG00000057608_21 (sequence is synthesized)
tccgcctgttttgatcatttttgaatcagggttttttttgttgttgttttaggagttcttgatgtatt

SEQ ID NO: 39249 - DNA, 120 bp, Artificial Sequence
  ENSG00000057608_22 (sequence is synthesized)
gggttttttttgttgttgttttaggagttcttgatgtattgtggatattaatcccttatttgcagatattttctctcattctgtgagttgcctcaactcttgattagtgtcttctgatgc

SEQ ID NO: 39250 - DNA, 120 bp, Artificial Sequence
  ENSG00000057608_23 (sequence is synthesized)
tgattagtgtcttctgatgcaaaaatttctttattgtttttttaaaagagacagtgtcttgctgtgtgttgcccaagctggactcaaagtcttgggctcaagcaattctcctgcctcagc

SEQ ID NO: 39251 - DNA, 120 bp, Artificial Sequence
  ENSG00000057608_24 (sequence is synthesized)
caggcacatgccaccatgcctggctatgcacaagatttttaaaattttcatgaaatcctgttttcatgaattctttcctttgttgcctgtgtctttggttttagatacaaggaattactg

SEQ ID NO: 39252 - DNA, 120 bp, Artificial Sequence
  ENSG00000057608_25 (sequence is synthesized)
ccaactccaatgtcatgaagcttttgcactgttttctcctaagagttttatagttttagataccacatttaggtctttgttccatttttagtttttgtggatggtgtcaggtagggtcca

SEQ ID NO: 39253 - DNA, 120 bp, Artificial Sequence
  ENSG00000057608_26 (sequence is synthesized)
acttcattcttttgcatgtggatagttttcccaggacggtttgttgaaatgactttttttcccctcattgaatggtctttgcaactttgtcaaaaatcactgtactgtggatgcgagggt

SEQ ID NO: 39254 - DNA, 120 bp, Artificial Sequence
  ENSG00000057608_27 (sequence is synthesized)
ttatttctggctctctcctcgtttcattggtccatacgtttgtcattatgccagtaccacactgaattgatcactgtagctttttagtgagtgagtcctccagctttgctgttcttcttt

SEQ ID NO: 39255 - DNA, 120 bp, Artificial Sequence
  ENSG00000057608_28 (sequence is synthesized)
taagattgttttggttgttccagaattcaatcccttgggaaccaatatgaacttgaggatggtttttgatatcttaacaatactaagtcttccaaactatgaacatgggatgtgtttccc

SEQ ID NO: 39256 - DNA, 120 bp, Artificial Sequence
  ENSG00000057608_29 (sequence is synthesized)
ctcttggaaccaattgaacagaagtgagttgtgttcttttatatctgccgagatgcaaactgaggcctttgattgtggctccatggtgggacgaatgtgagggcaaggcaggtagctgct

SEQ ID NO: 39257 - DNA, 120 bp, Artificial Sequence
  ENSG00000057608_30 (sequence is synthesized)
ggctgctctgtgggattcatctgtacctctcagttgacctcaggcagagccatggtcaggtgtgggaccagctcacctgactgaattctctctccctccagatttgttagcatcagtgac

SEQ ID NO: 39258 - DNA, 120 bp, Artificial Sequence
  ENSG00000057608_31 (sequence is synthesized)
gaagcccccggaagcctccccagaagctgttgccggtgctatgcgacctgtacagcctgcagaaccaaagatccatggtccaatataacatatcttcttcaagtatttatggggtaacat

SEQ ID NO: 39259 - DNA, 120 bp, Artificial Sequence
  ENSG00000057657_0 (sequence is synthesized)
aacacagacaaagtgctgccgtgacactcggccctccagtgttgcggagaggcaagagcagcgaccgcggcacctgtccgcccggagctgggacgcgggcgcccgggcggccggacgaag

SEQ ID NO: 39260 - DNA, 120 bp, Artificial Sequence
  ENSG00000057657_1 (sequence is synthesized)
cgaggagggaccgccgaggtgcgcgtctgtgcggctcagcctggcgggggacgcggggagaatgtggactgggtagagatgaacgagacttttctcagatgttggatatttgcttggaaa

SEQ ID NO: 39261 - DNA, 120 bp, Artificial Sequence
  ENSG00000057657_2 (sequence is synthesized)
aacgtgtgggtacgaccttggctgcccccaagtgtaactccagcactgtgaggtttcagggattggcagaggggaccaaggggaccatgaaaatggacatggaggatgcggatatgactc

SEQ ID NO: 39262 - DNA, 120 bp, Artificial Sequence
  ENSG00000057657_3 (sequence is synthesized)
tgtggacagaggctgagtttgaagagaagtgtacatacattgtgaacgaccacccctgggattctggtgctgatggcggtacttcggttcaggcggaggcatccttaccaaggaatctgc

SEQ ID NO: 39263 - DNA, 120 bp, Artificial Sequence
  ENSG00000057657_4 (sequence is synthesized)
ttttcaagtatgccaccaacagtgaagaggttattggagtgatgagtaaagaatacataccaaagggcacacgttttggacccctaataggtgaaatctacaccaatgacacagttccta

SEQ ID NO: 39264 - DNA, 120 bp, Artificial Sequence
  ENSG00000057657_5 (sequence is synthesized)
agaacgccaacaggaaatatttttggaggatctattccagaggggagcttcaccacttcattgacggctttaatgaagagaaaagcaactggatgcgctatgtgaatccagcacactctc

SEQ ID NO: 39265 - DNA, 120 bp, Artificial Sequence
  ENSG00000057657_6 (sequence is synthesized)
cccgggagcaaaacctggctgcgtgtcagaacgggatgaacatctacttctacaccattaagcccatccctgccaaccaggaacttcttgtgtggtattgtcgggactttgcagaaaggc

SEQ ID NO: 39266 - DNA, 120 bp, Artificial Sequence
  ENSG00000057657_7 (sequence is synthesized)
ttcactacccttatcccggagagctgacaatgatgaatctcacacaaacacagagcagtctaaagcaaccgagcactgagaaaaatgaactctgcccaaagaatgtcccaaagagagagt

SEQ ID NO: 39267 - DNA, 120 bp, Artificial Sequence
  ENSG00000057657_8 (sequence is synthesized)
acagcgtgaaagaaatcctaaaattggactccaacccctccaaaggaaaggacctctaccgttctaacatttcacccctcacatcagaaaaggacctcgatgactttagaagacgtggga

SEQ ID NO: 39268 - DNA, 120 bp, Artificial Sequence
  ENSG00000057657_9 (sequence is synthesized)
gccccgaaatgcccttctaccctcgggtcgtttaccccatccgggcccctctgccagaagactttttgaaagcttccctggcctacgggatcgagagacccacgtacatcactcgctccc

SEQ ID NO: 39269 - DNA, 120 bp, Artificial Sequence
  ENSG00000057657_10 (sequence is synthesized)
ccattccatcctccaccactccaagcccctctgcaagaagcagccccgaccaaagcctcaagagctccagccctcacagcagccctgggaatacggtgtcccctgtgggccccggctctc

SEQ ID NO: 39270 - DNA, 120 bp, Artificial Sequence
  ENSG00000057657_11 (sequence is synthesized)
aagagcaccgggactcctacgcttacttgaacgcgtcctacggcacggaaggtttgggctcctaccctggctacgcacccctgccccacctcccgccagctttcatcccctcgtacaacg

SEQ ID NO: 39271 - DNA, 120 bp, Artificial Sequence
  ENSG00000057657_12 (sequence is synthesized)
ctcactaccccaagttcctcttgcccccctacggcatgaattgtaatggcctgagcgctgtgagcagcatgaatggcatcaacaactttggcctcttcccgaggctgtgccctgtctaca

SEQ ID NO: 39272 - DNA, 120 bp, Artificial Sequence
  ENSG00000057657_13 (sequence is synthesized)
gcaatctcctcggtgggggcagcctgccccaccccatgctcaaccccacttctctcccgagctcgctgccctcagatggagcccggaggttgctccagccggagcatcccagggaggtgc

SEQ ID NO: 39273 - DNA, 120 bp, Artificial Sequence
  ENSG00000057657_14 (sequence is synthesized)
ttgtcccggcgccccacagtgccttctcctttaccggggccgccgccagcatgaaggacaaggcctgtagccccacaagcgggtctcccacggcgggaacagccgccacggcagaacatg

SEQ ID NO: 39274 - DNA, 120 bp, Artificial Sequence
  ENSG00000057657_15 (sequence is synthesized)
tggtgcagcccaaagctacctcagcagcgatggcagcccccagcagcgacgaagccatgaatctcattaaaaacaaaagaaacatgaccggctacaagacccttccctacccgctgaaga

SEQ ID NO: 39275 - DNA, 120 bp, Artificial Sequence
  ENSG00000057657_16 (sequence is synthesized)
agcagaacggcaagatcaagtacgaatgcaacgtttgcgccaagactttcggccagctctccaatctgaaggtccacctgagagtgcacagtggagaacggcctttcaaatgtcagactt

SEQ ID NO: 39276 - DNA, 120 bp, Artificial Sequence
  ENSG00000057657_17 (sequence is synthesized)
gcaacaagggctttactcagctcgcccacctgcagaaacactacctggtacacacgggagaaaagccacatgaatgccaggtctgccacaagagatttagcagcaccagcaatctcaaga

SEQ ID NO: 39277 - DNA, 120 bp, Artificial Sequence
  ENSG00000057657_18 (sequence is synthesized)
cccacctgcgactccattctggagagaaaccataccaatgcaaggtgtgccctgccaagttcacccagtttgtgcacctgaaactgcacaagcgtctgcacacccgggagcggccccaca

SEQ ID NO: 39278 - DNA, 120 bp, Artificial Sequence
  ENSG00000057657_19 (sequence is synthesized)
agtgctcccagtgccacaagaactacatccatctctgtagcctcaaggttcacctgaaagggaactgcgctgcggccccggcgcctgggctgcccttggaagatctgacccgaatcaatg

SEQ ID NO: 39279 - DNA, 120 bp, Artificial Sequence
  ENSG00000057657_20 (sequence is synthesized)
aagaaatcgagaagtttgacatcagtgacaatgctgaccggctcgaggacgtggaggatgacatcagtgtgatctctgtagtggagaaggaaattctggccgtggtcagaaaagagaaag

SEQ ID NO: 39280 - DNA, 120 bp, Artificial Sequence
  ENSG00000057657_21 (sequence is synthesized)
ccagcaacccactacctctggtacctgtaaaggtcaaacaagaaacagttgaaccaatggatccttaagattttcagaaaacacttattttgtttcttaagttatgacttggtgagtcag

SEQ ID NO: 39281 - DNA, 120 bp, Artificial Sequence
  ENSG00000057657_22 (sequence is synthesized)
ggtgcctgtaggaagtggcttgtacataatcccagctctgcaaagctctctcgacagcaaatggtttcccctcacctctggaattaaagaaggaactccaaagttactgaaatctcaggg

SEQ ID NO: 39282 - DNA, 120 bp, Artificial Sequence
  ENSG00000057657_23 (sequence is synthesized)
catgaacaaggcaaaggccatatatatatatatatatatatctgtatacatattatatatacttatttacacctgtgtctatatatttgcccctgtgtattttgaatatttgtgtggaca

SEQ ID NO: 39283 - DNA, 120 bp, Artificial Sequence
  ENSG00000057657_24 (sequence is synthesized)
tgtttgcatagccttcccattactaagactattacctagtcataattattttttcaatgataatccttcataatttattatacaatttatcattcagaaagcaataattaaaaaagttta

SEQ ID NO: 39284 - DNA, 120 bp, Artificial Sequence
  ENSG00000057657_25 (sequence is synthesized)
caatgactggaaagattccttgtaatttgagtataaatgtatttttgtcttgtggccattctttgtagataatttctgcacatctgtataagtacctaagatttagttaaacaaatatat

SEQ ID NO: 39285 - DNA, 120 bp, Artificial Sequence
  ENSG00000057657_26 (sequence is synthesized)
gacttcagtcaacctctctctctaataatggtttgaaaatgaggtttgggtaattgccaatgttggacagttgatgtgttcattcctgggatcctatcatttgaacagcattgtacataa

SEQ ID NO: 39286 - DNA, 120 bp, Artificial Sequence
  ENSG00000057657_27 (sequence is synthesized)
cttgggggtatgtgtgcaggattacccaagaataacttaagtagaagaaacaagaaagggaatcttgtatatttttgttgatagttcatgtttttcccccagccacaattttaccggaag

SEQ ID NO: 39287 - DNA, 120 bp, Artificial Sequence
  ENSG00000057657_28 (sequence is synthesized)
ggtgacaggaaggctttaccaacctgtctctccctccaaaagagcagaatcctcccaccgccctgccctccccaccgagtcctgtggccattcagagcggccacatgacttttgcatcca

SEQ ID NO: 39288 - DNA, 120 bp, Artificial Sequence
  ENSG00000057657_29 (sequence is synthesized)
ttgtattatcagaaaatgtgaagaagaaaaaaatgccatgttttaaaaccactgcgaaaatttccccaaagcataggtggctttgtgtgtgtgcgatttgggggcttgagtctgggtggt

SEQ ID NO: 39289 - DNA, 120 bp, Artificial Sequence
  ENSG00000057657_30 (sequence is synthesized)
tgctttttttttttttttttttttaatgtcaaaattgcacaaacatggtgctctaccaggaaggattcgaggtagataggctcaggccacactttaaaaacaaacacacaaacaacaaaa

SEQ ID NO: 39290 - DNA, 120 bp, Artificial Sequence
  ENSG00000057657_31 (sequence is synthesized)
caaacacacaaacaacaaaaaacgggtattctagtcatcttggggtaaaagcgggtaatgaacattcctatccccaacacatcaattgtattttttctgtaaaactcagattttcctcag

SEQ ID NO: 39291 - DNA, 120 bp, Artificial Sequence
  ENSG00000057657_32 (sequence is synthesized)
tatttgtgtttttacattttatggttaatttaatggaagatgaaagggcattgcaaagttgttcaacaacagttacctcattgagtgtgtccagtagtgcaggaaatgatgtcttatcta

SEQ ID NO: 39292 - DNA, 120 bp, Artificial Sequence
  ENSG00000057657_33 (sequence is synthesized)
atgatttgcttctctagaggagaaaccgagtaaatgtgctccagcaagatagactttgtgttattctatcttttattctgctaagcccaaagattacatgttggtgttcaaagtgtagca

SEQ ID NO: 39293 - DNA, 120 bp, Artificial Sequence
  ENSG00000057657_34 (sequence is synthesized)
aaaaatgatgtatatttataaatctatttataccactatatcatatgtatatatatttataaccacttaaattgtgagccaagccatgtaaaagatctactttttctaagggcaaaaaaa

SEQ ID NO: 39294 - DNA, 120 bp, Artificial Sequence
  ENSG00000057657_35 (sequence is synthesized)
aaaaaaaaaaaaaaagaacactcctttctgagactttgcttaatacttggtgacctcacaatcacgtcggtatgattgggcacccttgcctactgtaagagaccctaaaaccttggtgca

SEQ ID NO: 39295 - DNA, 120 bp, Artificial Sequence
  ENSG00000057657_36 (sequence is synthesized)
gtggtggggaccacaaaacaaccagggaggaagagatacatcattttttagtattaaggaccatctaagacagctctattttttttttgccactttatgattatgtggtcacacccaagt

SEQ ID NO: 39296 - DNA, 120 bp, Artificial Sequence
  ENSG00000057657_37 (sequence is synthesized)
cacagaaataaaaaactgactttaccgctgcaatttttctgttttcctccttactaaatactgatacattactccaatctattttataattatatttgacattttgttcacatcaactaa

SEQ ID NO: 39297 - DNA, 120 bp, Artificial Sequence
  ENSG00000057657_38 (sequence is synthesized)
tgttcacctgtagaagagaacaaatttcgaataatccagggaaacccaagagccttactggtcttctgtaacttccaagactgacagctttttatgtatcagtgtttgataaacacagtc

SEQ ID NO: 39298 - DNA, 120 bp, Artificial Sequence
  ENSG00000057657_39 (sequence is synthesized)
cttaactgaaggtaaaccaaagcatcacgttgacattagaccaaatacttttgattcccaactactcgtttgttctttttctccttttgtgctttcccatagtgagaatttttataaaga

SEQ ID NO: 39299 - DNA, 120 bp, Artificial Sequence
  ENSG00000057657_40 (sequence is synthesized)
cttcttgcttctctcaccatccatccttctcttttctgcctcttacatgtgaatgttgagcccacaatcaacagtggttttattttttcctctactcaaagttaaaactgaccaaagtta

SEQ ID NO: 39300 - DNA, 120 bp, Artificial Sequence
  ENSG00000057657_41 (sequence is synthesized)
ctggctttttactttgctagaacaacaaactatcttatgtttacatactggtttacaatgttatttatgtgcaaattgtcaaaatgtaaattaaatataaatgttcatgctttaccaaaa

SEQ ID NO: 39301 - DNA, 120 bp, Artificial Sequence
  ENSG00000057657_42 (sequence is synthesized)
agtcttccatgtgagaggatgaaagagagctcgcagcagagggaggaggcagttgttttgaaagttgttttgcgttgggagctggtgggaaagttcggtcttccccatttggaaaaggca

SEQ ID NO: 39302 - DNA, 120 bp, Artificial Sequence
  ENSG00000057657_43 (sequence is synthesized)
ggctgggttccgctcctgcaccacacgcgctttccatttttagcttcattcagaggcagacagagctccttcctcttcctctccttgtttgtgacacttttctgaggcagcttttccaca

SEQ ID NO: 39303 - DNA, 120 bp, Artificial Sequence
  ENSG00000057657_44 (sequence is synthesized)
gtgccgagggtctggcggccatgaccccaggcattctgggacactggactgtgtgcccagaacatttttctgccatgagaggtaaagccagggattgttcagaggctgcccccaagtgta

SEQ ID NO: 39304 - DNA, 120 bp, Artificial Sequence
  ENSG00000057657_45 (sequence is synthesized)
gtttgacttagcccccctttcctacaatttcacaattttatgactctcctggttgcactgatatccttgaaaaagacagctgagttcagttagtgaacctgcagtaaagtggggttgcct

SEQ ID NO: 39305 - DNA, 120 bp, Artificial Sequence
  ENSG00000057657_46 (sequence is synthesized)
cctcgggaaagcttagtttgcattcattgaagttgcttgctttctaggttcatctaggccagcagggaaggtgccacttggaagattgctgggtttcctgcttcgaagtcttcaggagcg

SEQ ID NO: 39306 - DNA, 120 bp, Artificial Sequence
  ENSG00000057657_47 (sequence is synthesized)
aatcggaactgaagtcagtagcatcgcccatttgccattcactgcagtagcaaaagtagtactctgtggtgggttaatcggtttgaggcagctccttaaatgaacatttgtgtttcattt

SEQ ID NO: 39307 - DNA, 120 bp, Artificial Sequence
  ENSG00000057657_48 (sequence is synthesized)
gtaatgtcggttctgcccctttgaactaataacatgttgtttaattatacggctttgtcatgtgttggatgaagtaggtggcttaagctagggactaggaagaggaaaaacattttttga

SEQ ID NO: 39308 - DNA, 120 bp, Artificial Sequence
  ENSG00000057657_49 (sequence is synthesized)
ctttctcatcctgtgctgagaaatgctggggctcacccataagtatccagcatccccatggacacagggaattctgaacaaatgtgatgaaaccgatgaaatgtctggcctgtaggtggt

SEQ ID NO: 39309 - DNA, 120 bp, Artificial Sequence
  ENSG00000057657_50 (sequence is synthesized)
tagtgatggagatacgggctatatgtgaatcttgatttttgcaattcattagagctttgtaatgaaaggaaacagtttgttgcttgctttaaggataggttcatttgcatttctccgcaa

SEQ ID NO: 39310 - DNA, 120 bp, Artificial Sequence
  ENSG00000057657_51 (sequence is synthesized)
ggaagtagtaatgagttaccaagccttagatttcacccctttttgatttcttgctgacttaactttaattgaatggaagagttatcacaaatgaattatctttttggttttttttttttt

SEQ ID NO: 39311 - DNA, 120 bp, Artificial Sequence
  ENSG00000057657_52 (sequence is synthesized)
aagaggaaaagtgacttctcagtaatagactgtcaaattcgggctgctgcccgagtgttcgctttgttatggcaggtgaagttcacctttgccccacccagtgtttccacaaaaagatct

SEQ ID NO: 39312 - DNA, 120 bp, Artificial Sequence
  ENSG00000057663_0 (sequence is synthesized)
gcccgcccggccgcgatggcgggtgaaggtggttcctccgggcaaggtggagttggcgagacgccggcccggagccctggggccggttggcgggtgtggcctgcggggtccctcttgggg

SEQ ID NO: 39313 - DNA, 120 bp, Artificial Sequence
  ENSG00000057663_1 (sequence is synthesized)
tacatgtctgttgcttactaagtttggctttggttgaaataagaatttagcctgtatgtactgctttaactcctggaagaatgacagatgacaaagatgtgcttcgagatgtgtggtttg

SEQ ID NO: 39314 - DNA, 120 bp, Artificial Sequence
  ENSG00000057663_2 (sequence is synthesized)
gacgaattccaacttgtttcacgctatatcaggatgagataactgaaagggaagcagaaccatactatttgcttttgccaagagtaagttatttgacgttggtaactgacaaagtgaaaa

SEQ ID NO: 39315 - DNA, 120 bp, Artificial Sequence
  ENSG00000057663_3 (sequence is synthesized)
agcactttcagaaggttatgagacaagaagacattagtgagatatggtttgaatatgaaggcacaccactgaaatggcattatccaattggtttgctatttgatcttcttgcatcaagtt

SEQ ID NO: 39316 - DNA, 120 bp, Artificial Sequence
  ENSG00000057663_4 (sequence is synthesized)
cagctcttccttggaacatcacagtacattttaagagttttccagaaaaagaccttctgcactgtccatctaaggatgcaattgaagctcattttatgtcatgtatgaaagaagctgatg

SEQ ID NO: 39317 - DNA, 120 bp, Artificial Sequence
  ENSG00000057663_5 (sequence is synthesized)
ctttaaaacataaaagtcaagtaatcaatgaaatgcagaaaaaagatcacaagcaactctggatgggattgcaaaatgacagatttgaccagttttgggccatcaatcggaaactcatgg

SEQ ID NO: 39318 - DNA, 120 bp, Artificial Sequence
  ENSG00000057663_6 (sequence is synthesized)
aatatcctgcagaagaaaatggatttcgttatatcccctttagaatatatcagacaacgactgaaagacctttcattcagaagctgtttcgtcctgtggctgcagatggacagttgcaca

SEQ ID NO: 39319 - DNA, 120 bp, Artificial Sequence
  ENSG00000057663_7 (sequence is synthesized)
cactaggagatctcctcaaagaagtttgtccttctgctattgatcctgaagatggggaaaaaaagaatcaagtgatgattcatggaattgagccaatgttggaaacacctctgcagtggc

SEQ ID NO: 39320 - DNA, 120 bp, Artificial Sequence
  ENSG00000057663_8 (sequence is synthesized)
tgagtgaacatctgagctacccggataattttcttcatattagtatcatcccacagccaacagattgaaggatcaactatttgcctgaacagaatcatccttaaatgggatttatcagag

SEQ ID NO: 39321 - DNA, 120 bp, Artificial Sequence
  ENSG00000057663_9 (sequence is synthesized)
catgtcacccttttgcttcaatcaggtttggtggaggcaacctgaccagaaacacttcgctgctgcaagccagacaggaaaaagattccatgtcagataaggcaactgggctggtcttac

SEQ ID NO: 39322 - DNA, 120 bp, Artificial Sequence
  ENSG00000057663_10 (sequence is synthesized)
tttgcatcacctctgctttcctccactgccatcattaaacctcagctgtgacatgaaagacttaccggaccactgaaggtcttctgtaaaatataatgaagctgaaacctttggcctaag

SEQ ID NO: 39323 - DNA, 120 bp, Artificial Sequence
  ENSG00000057663_11 (sequence is synthesized)
aagaaaatggaagtatgtgccactcgatttgtatttctgattaacaaataaacaggggtatttcctaaggtgaccatggttgaactttagctcatgaaagtggaaacattggtttaattt

SEQ ID NO: 39324 - DNA, 120 bp, Artificial Sequence
  ENSG00000057663_12 (sequence is synthesized)
tccttaacgaaaatttcctatgtttacagtctgtctattggtatgcaatcttgtaactttgataatgaacagtgagagatttttaaataaagcctctaaatatgttttgtcatttaataa

SEQ ID NO: 39325 - DNA, 120 bp, Artificial Sequence
  ENSG00000057663_13 (sequence is synthesized)
catacagttttgtcacttttcaagtactttctgactcacatacagtagatcactttttactctgtgttaccattttgactggtcgtcattggcatggggtggatatagggcataggatta

SEQ ID NO: 39326 - DNA, 120 bp, Artificial Sequence
  ENSG00000057663_14 (sequence is synthesized)
cttgtctcagaagctgtcatagaatttcttgctgccaattaaaaaacctgtgttctttacacactacacgtataaatattgtaactgttcatctttgttgttttatcactgtaagcctgt

SEQ ID NO: 39327 - DNA, 120 bp, Artificial Sequence
  ENSG00000057663_15 (sequence is synthesized)
caaatcatagtatcctaagcatctgtaaatgctaattttgcatttttggaaaaacccattccttccaagctagtgtttttcattggctccaggtctaatttttcactgtggtccctggca

SEQ ID NO: 39328 - DNA, 120 bp, Artificial Sequence
  ENSG00000057663_16 (sequence is synthesized)
gccagtcttttgaagtttaaagattacctgtctcttgactgcagtaccttttctttaatttttaccaaaaatatccagaggttactggagttcttattcaatataaggaaagtttgctgc

SEQ ID NO: 39329 - DNA, 120 bp, Artificial Sequence
  ENSG00000057663_17 (sequence is synthesized)
actttattaccaagcctctgggattttaccagtcaaacatatttgtgcattacatttcatttcttgtgagctagctggctgtccatattgaatgttgacccatttgagtacgctaaaagg

SEQ ID NO: 39330 - DNA, 120 bp, Artificial Sequence
  ENSG00000057663_18 (sequence is synthesized)
cttacagtatcagacacgatcatggttttagatcccataataaaaatgaatgtttttcttataaaaaattatacaaatgctgaagtgagattctactattgttcattgcttccttttctt

SEQ ID NO: 39331 - DNA, 120 bp, Artificial Sequence
  ENSG00000057663_19 (sequence is synthesized)
tttccttttgcgattttcactgattaatagcacatttcttcacaaaattagataaagttggtcaaagaccagatattctggaatggaaattgtaaagcttaatcaaaaagaatagccagt

SEQ ID NO: 39332 - DNA, 120 bp, Artificial Sequence
  ENSG00000057663_20 (sequence is synthesized)
acagcatacaatctcagaaacttagaagcaagtagaaaataattggttgatgtaaacgaaagtgccattttagtaaaggcaggaaaaaaatagcaatatttgagttatgtaaggataaaa

SEQ ID NO: 39333 - DNA, 120 bp, Artificial Sequence
  ENSG00000057663_21 (sequence is synthesized)
aatccactgacttgtatttttgcacaagaggctggtctgaatatgattgttcacattaagagtgtttattcgtcggttcattttggggattttcccccttgatgttttgacagattgaag

SEQ ID NO: 39334 - DNA, 120 bp, Artificial Sequence
  ENSG00000057663_22 (sequence is synthesized)
tgagctttagtgagcaaaaggatcagaatgcagggaacactaagctgtgatgaagaaagtgtggtaaaaagccagagtagttttatacagacaaaaccagtgtcaggcctttgcagtagg

SEQ ID NO: 39335 - DNA, 120 bp, Artificial Sequence
  ENSG00000057663_23 (sequence is synthesized)
cttgagtgaacttctgatctagatttgaaagtaaattttatgaagacattgcccatttttacttcctcattcattattgtaccagcatcatagctttattactctaatcccaggtaagtc

SEQ ID NO: 39336 - DNA, 120 bp, Artificial Sequence
  ENSG00000057663_24 (sequence is synthesized)
aagcctacaatgccctagaggaagagtaaaaccagaaattcatgctggcttaaataatctatttttgtttcttttcatttgaatatttaaattttatggtttattaaaaaattaaataaa

SEQ ID NO: 39337 - DNA, 120 bp, Artificial Sequence
  ENSG00000057663_25 (sequence is synthesized)
agcgttgccggttgtattcgctggataccagagggcggaagtgcagcagggttcagctccgacctccgcgccggtgctttttgcggctgcgcgggcttcctggagtcctgctaccgcgtc

SEQ ID NO: 39338 - DNA, 120 bp, Artificial Sequence
  ENSG00000057663_26 (sequence is synthesized)
cccgcaggacagtgtgtcaggcgggcagcttgccccgccgccccaccggagcgcggaatctgggcgtccccaccagtgcggggagccggaaggaggagccatagcttggagtaggtttgg

SEQ ID NO: 39339 - DNA, 120 bp, Artificial Sequence
  ENSG00000057663_27 (sequence is synthesized)
ctgctattgatcctgaagactaagactctcgcactggtgatgaaatactcacttttccactcaagccgcctggaaacttcctcgggacctctgaaagggctgcccctgagcagaactctc

SEQ ID NO: 39340 - DNA, 120 bp, Artificial Sequence
  ENSG00000057663_28 (sequence is synthesized)
cctctccccagcgcagagccctgccgggcagaggccactggctgctctcccaccccagaatgtggatcttcacaagaggcctgtgtcaacagccctatcaggaagatcacatgacacagc

SEQ ID NO: 39341 - DNA, 120 bp, Artificial Sequence
  ENSG00000057663_29 (sequence is synthesized)
agaggaagacaagacacctccccagctgccttccaccacagcccagaaaggccctgcttctcctacctgaatggttcggtgcgggagaacaactagagacacaggaaactaggtctccag

SEQ ID NO: 39342 - DNA, 120 bp, Artificial Sequence
  ENSG00000057663_30 (sequence is synthesized)
ccaggagcccactgtcctccctccatggaaatgaaagacaagttgctttgatcaccttggagaccaaccacctccttcttctgaaagctaaccccaccttagcagcagctgcctcccctc

SEQ ID NO: 39343 - DNA, 120 bp, Artificial Sequence
  ENSG00000057663_31 (sequence is synthesized)
cccccaggagccccactccctccactcggcttgagtatcaggctaatcagtttgatctgacagattttaattacattaattagggcttttctgaataggcctgattagcatcctaccaag

SEQ ID NO: 39344 - DNA, 120 bp, Artificial Sequence
  ENSG00000057663_32 (sequence is synthesized)
ttttgtttgttttggttttgtttttttttcccttcttctctaaagcagctctgctagcatcaggactaatactttcatttcttcaaacaatggtgacatttttgtcttgctcaaggtaaa

SEQ ID NO: 39345 - DNA, 120 bp, Artificial Sequence
  ENSG00000057663_33 (sequence is synthesized)
tttgtcttgctcaaggtaaataatcagatatttggaggcgccaagtgtgacagtgtattttataataatatcacccatgaggatacggagtaggctctgcatctatctcatgaaccttgg

SEQ ID NO: 39346 - DNA, 120 bp, Artificial Sequence
  ENSG00000057663_34 (sequence is synthesized)
tggggaagaagagattgtttaggacatttctctagaacataggcattggttttgtttagcttttgcctaaggaaaactctacattgagttttaaagatccaacctcttccagatcttccc

SEQ ID NO: 39347 - DNA, 120 bp, Artificial Sequence
  ENSG00000057663_35 (sequence is synthesized)
ccgcacccccaatcagactgaagcacaaagatattcttacctctctgtatcattttgttgaccccgttttagagagaatcagtgatagtcacagaaaagcaaacagagatttagcctttg

SEQ ID NO: 39348 - DNA, 120 bp, Artificial Sequence
  ENSG00000057663_36 (sequence is synthesized)
tctctccattgtttcttaaaataaaaataccttgagtgtcaacaaggtttttactgaaaatatttaactactttcagccactaataaaagagaacaacgttgatttctcaaaatactgta

SEQ ID NO: 39349 - DNA, 120 bp, Artificial Sequence
  ENSG00000057663_37 (sequence is synthesized)
caaagattagcatggcacatatatttgcctttgttgatcatctgtgctataattactgctttaaaatatgctgttttgaataagccacaataaatgagggcgtagttccagacaccagga

SEQ ID NO: 39350 - DNA, 120 bp, Artificial Sequence
  ENSG00000057663_38 (sequence is synthesized)
ttgttagtctctttaagagatactgagaaaaaatgcttttgttgatatctttttgtgttgtttgctttttaatgtctttaagtttttgaagggtcccagccaattatctttagaatgtcc

SEQ ID NO: 39351 - DNA, 120 bp, Artificial Sequence
  ENSG00000057663_39 (sequence is synthesized)
cacccaactttggatttgtctgtttcctcagaattagatttacctgaatttatcatgttaaacatttttcacagtgataccacatctgtgatgttgtgtaattatgctaacaccgtatca

SEQ ID NO: 39352 - DNA, 120 bp, Artificial Sequence
  ENSG00000057663_40 (sequence is synthesized)
aaaggcacctaatgccaacataaagtttatgatatataaatttgtaattggcagcaacaaagacttaattgcttgaatcattttttcctttttcaaatagacaacgactgaaagaccttt

SEQ ID NO: 39353 - DNA, 120 bp, Artificial Sequence
  ENSG00000057663_41 (sequence is synthesized)
tccaagctagtgaggaagaaagtgaagatgaggagttcttggctaccctaactggtggcgagcgttctggaaaagctcgcaaacagtggacgcagtgagtccacaatacaacgactgaaa

SEQ ID NO: 39354 - DNA, 120 bp, Artificial Sequence
  ENSG00000057663_42 (sequence is synthesized)
tattgatcctgaaggtaatacaatcagcaacattaaaacatttctttcattttctgttactgaagtaaaataagcattccacatttataaacaacaggttatttcaggaagatattttca

SEQ ID NO: 39355 - DNA, 120 bp, Artificial Sequence
  ENSG00000057663_43 (sequence is synthesized)
tatcttacagcgaaaagtcttttcaaacagaagcacctaatatttaatatattattttgtaaattattgactaacaaaatgatgactcgactggcgaaataaaatacagtttttaaatca

SEQ ID NO: 39356 - DNA, 120 bp, Artificial Sequence
  ENSG00000057663_44 (sequence is synthesized)
caaagaagtttgtccttctgctattgatcctgaagagatcccaccaggagaagattaagagcttattttggactgaaaatttatgtcttccaggagtgaaacagctaagaagtatgaagg

SEQ ID NO: 39357 - DNA, 120 bp, Artificial Sequence
  ENSG00000057663_45 (sequence is synthesized)
acatcttttcctcaccataggcgaagaagataaatgtctatgagttggtgtaaacacaactgcaaaagcccagccaagggcatcagaaaatggaacacattgataactaagactctcgca

SEQ ID NO: 39358 - DNA, 120 bp, Artificial Sequence
  ENSG00000057704_0 (sequence is synthesized)
agaggcaacagctgcagcagccgcgccgccccctcgcccgcggctcccagggtgatcccgagcacagccggtggctcgcggcgcggcagccccagaagacgggaaagttcgcggccggag

SEQ ID NO: 39359 - DNA, 120 bp, Artificial Sequence
  ENSG00000057704_1 (sequence is synthesized)
cgcggagatgccgggcagcgacacggcgctcaccgtggaccggacctactcgtaccccggccggcaccaccgctgcaagagccgggtagaacgtcatgacatgaataccttaagcctgcc

SEQ ID NO: 39360 - DNA, 120 bp, Artificial Sequence
  ENSG00000057704_2 (sequence is synthesized)
cctgaacatacgccgaggggggtcagacaccaacctcaactttgatgtcccggatggcatcctggacttccacaaggtcaaactcactgcagacagcctgaagcaaaaaattctaaaggt

SEQ ID NO: 39361 - DNA, 120 bp, Artificial Sequence
  ENSG00000057704_3 (sequence is synthesized)
aacagagcagataaaaattgagcaaacatcgcgcgatgggaatgttgcggagtatctgaaactagtgaacaacgcagacaagcagcaggcgggacgtatcaagcaagtctttgagaagaa

SEQ ID NO: 39362 - DNA, 120 bp, Artificial Sequence
  ENSG00000057704_4 (sequence is synthesized)
gaatcagaaatcagctcactccatcgcccagctgcagaagaagttagagcagtatcatcgaaagctcagagagatcgagcagaatggagcctctaggagctcaaaggacatttccaaaga

SEQ ID NO: 39363 - DNA, 120 bp, Artificial Sequence
  ENSG00000057704_5 (sequence is synthesized)
ccacctgaaggatatacatcgctctttgaaagatgcccacgtgaaatctcgaactgccccccattgcatggagagcagcaaatcgggcatgccaggggtctcacttactccacctgtgtt

SEQ ID NO: 39364 - DNA, 120 bp, Artificial Sequence
  ENSG00000057704_6 (sequence is synthesized)
cgttttcaataagtccagagagtttgccaacctgatccggaataagtttggcagcgccgacaacattgctcacttgaaaaattccttagaggagtttaggccagaggcgagtgccagggc

SEQ ID NO: 39365 - DNA, 120 bp, Artificial Sequence
  ENSG00000057704_7 (sequence is synthesized)
ctacgggggcagcgctaccatcgtgaacaaacccaagtatggcagtgatgatgaatgttcgagtggcacgtcaggctcggccgacagtaacggaaaccagtcgtttggggctggtggagc

SEQ ID NO: 39366 - DNA, 120 bp, Artificial Sequence
  ENSG00000057704_8 (sequence is synthesized)
cagcacactggacagccagggcaagctcgccgtgatcctggaggaactgagggagatcaaggatacccaagctcagctggctgaggacatcgaggcactgaaggtgcagtttaagagaga

SEQ ID NO: 39367 - DNA, 120 bp, Artificial Sequence
  ENSG00000057704_9 (sequence is synthesized)
atatggttttatttctcagaccctgcaagaggaaagatacaggtatgagcgactggaggaccagctgcatgacctgacggacctgcatcagcatgagacagccaacctgaagcaggagct

SEQ ID NO: 39368 - DNA, 120 bp, Artificial Sequence
  ENSG00000057704_10 (sequence is synthesized)
ggccagcattgaggagaaggtggcctaccaggcctacgagcgctcgcgggacatccaggaagccttggaatcctgccagactcgcatttctaagctggagctccaccagcaagagcagca

SEQ ID NO: 39369 - DNA, 120 bp, Artificial Sequence
  ENSG00000057704_11 (sequence is synthesized)
agctctgcagacagacaccgtgaatgctaaagttctcctggggaggtgcatcaacgtgatcctggccttcatgactgtcatcttagtgtgtgtgtccaccatcgcgaagttcgtctcacc

SEQ ID NO: 39370 - DNA, 120 bp, Artificial Sequence
  ENSG00000057704_12 (sequence is synthesized)
catgatgaagagtcgctgccacattcttggcaccttctttgccgtgactcttcttgctatattttgtaaaaactgggaccatatcctgtgtgccatagaaaggatgataataccaagatg

SEQ ID NO: 39371 - DNA, 120 bp, Artificial Sequence
  ENSG00000057704_13 (sequence is synthesized)
aagccactggttcctgccttcaagttctttcaagtttttattttaaagaaaactctgtgcatactaccaaattttacagtgaatgattgtgcggactcgtgtgtaagaaaaactaggact

SEQ ID NO: 39372 - DNA, 120 bp, Artificial Sequence
  ENSG00000057704_14 (sequence is synthesized)
gtgtggtgtaaataactacaattctcttaactccgtagcagttgccaactcagtccttgtacttcgttaacacgaatctgtttcagagctctcctaccttgctcactgccttaatcagac

SEQ ID NO: 39373 - DNA, 120 bp, Artificial Sequence
  ENSG00000057704_15 (sequence is synthesized)
cgatttcctgcccacctgaccagcccagcgtggtaaacctctgtatattgagaccttggcataattggtgatcctgaagaaagaggtctctctcctaagtctctgtcagaattgagcttc

SEQ ID NO: 39374 - DNA, 120 bp, Artificial Sequence
  ENSG00000057704_16 (sequence is synthesized)
acaattgctaatggttgttttctgtgagtcctataaaaagcaaggatatgcatgattcagggaatgaagaatcacaggcttgggcagtgttaaacactgtggcctatggtccccgtgtga

SEQ ID NO: 39375 - DNA, 120 bp, Artificial Sequence
  ENSG00000057704_17 (sequence is synthesized)
tccaccctgcttctctccaggggaccataggtcccgtcatgtactcagtgtccacagcagtcagtcgtgtatgaccctgtaacgtggaaatcttatcacacacctgttatccaacaagtc

SEQ ID NO: 39376 - DNA, 120 bp, Artificial Sequence
  ENSG00000057704_18 (sequence is synthesized)
tacctgaggggttttgttacactttaaatgggaaggcatagggatttatgaatggggctttcaccttctcatacccaggcaaccaacacctgattttgtctcaactggctagcaaatgcc

SEQ ID NO: 39377 - DNA, 120 bp, Artificial Sequence
  ENSG00000057704_19 (sequence is synthesized)
cagccttcagagtgtgcaggaatgttttcaaatccctcatcagactgtgactttaacattaatttggaatcctgtgagcactactctgaaggtttgtgttttggcaaatcttttttcttt

SEQ ID NO: 39378 - DNA, 120 bp, Artificial Sequence
  ENSG00000057704_20 (sequence is synthesized)
ctactctgaaggtttgtgttttggcaaatcttttttcttttttgagacagggctctgctaaatattgctcaggctggttgcaaactccttgcttcaagggatcctcccacctcagcctcc

SEQ ID NO: 39379 - DNA, 120 bp, Artificial Sequence
  ENSG00000057704_21 (sequence is synthesized)
tgttttttggcaaatcttgattgtgataagcccccctggaggatatgattcactttatgtgattcatcttattcacaggtctgtgagggactgcaaagcttactcaggaaatgaaaacaa

SEQ ID NO: 39380 - DNA, 120 bp, Artificial Sequence
  ENSG00000057704_22 (sequence is synthesized)
atgatggtcatgttgcagttttttccttgaaggacaaccgaaccatagcctctaaagttcaagtgcactgaggtgtcggaacgctgaaagcatgaggaaacgaggacgtagggtgtgact

SEQ ID NO: 39381 - DNA, 120 bp, Artificial Sequence
  ENSG00000057704_23 (sequence is synthesized)
gaatggtggctagattagtgggagcagttcacctggatgaagattgagagcatcgtctttgagaagtgaaagactagcaagaataaaataaattaagtccagtgtttgagccaaggttgc

SEQ ID NO: 39382 - DNA, 120 bp, Artificial Sequence
  ENSG00000057704_24 (sequence is synthesized)
ccgccttcagcccagatgatactttcctttaaatctgtgtctctgtgtgtataacaaagaggaagatggaaacaatgttcatggaaactgctgttgagccccttgtcccaccactcccgc

SEQ ID NO: 39383 - DNA, 120 bp, Artificial Sequence
  ENSG00000057704_25 (sequence is synthesized)
catctgctgcaggcaggaaggcatgtgagtgtacgttttcttccaggagacatcaggtccccctggattcaaattaagtgcaatattttgcaaacagctcttcttagggaaatctcctga

SEQ ID NO: 39384 - DNA, 120 bp, Artificial Sequence
  ENSG00000057704_26 (sequence is synthesized)
aggaaaaaaatgtgacagaatgttccatagtctgagagaatggaatcgttgagcatttagtacaagtccagtgtgtgtgagcgggacttaggcagctcaagcttgcttttttttttaagc

SEQ ID NO: 39385 - DNA, 120 bp, Artificial Sequence
  ENSG00000057704_27 (sequence is synthesized)
gtacaattgagtggttttagtaaattcacaaacttgttcaaccatcaccactatctaattccagactcacgcttttttaaacaataaatgtcatttcatgaaatctttggtgataaagta

SEQ ID NO: 39386 - DNA, 120 bp, Artificial Sequence
  ENSG00000057704_28 (sequence is synthesized)
ttttggattcagagaagagctcccttaccagtcccaccctgatctcatggctgtctctcctttcattgtcagactccccctggtctaccgcgttgatgtgtatacactgatctttcaagt

SEQ ID NO: 39387 - DNA, 120 bp, Artificial Sequence
  ENSG00000057704_29 (sequence is synthesized)
ctgggagacagataaggaggccaggtgcaaggcagggaggcagagagaatgttgtgcttcctttagcttttgtatttcgatggccagcattaccctttacctgtgggcatcagactcagc

SEQ ID NO: 39388 - DNA, 120 bp, Artificial Sequence
  ENSG00000057704_30 (sequence is synthesized)
gtgggctgagtgctgagtgtaacttacactcctaaatcaagctggggcctgggtgggcccctcttggtatctgtgaatctttccaagcaccacttcggacacaccagggattgagtgctg

SEQ ID NO: 39389 - DNA, 120 bp, Artificial Sequence
  ENSG00000057704_31 (sequence is synthesized)
ctgttagtttagagaaggagagatgtctaacccttgaggtgaagggctctgggagggtccaagaagacgtaggcttcattttcacaccagcccacaccattccagtgctcagcctagcaa

SEQ ID NO: 39390 - DNA, 120 bp, Artificial Sequence
  ENSG00000057704_32 (sequence is synthesized)
atgtgctttaatgcacacttctcagacctgtgatccgtgtatcttctccccagtgacagaagtagagaagagaatggaaagcagcacactccgtcccctctagtctggagctgttaacag

SEQ ID NO: 39391 - DNA, 120 bp, Artificial Sequence
  ENSG00000057704_33 (sequence is synthesized)
aatctgctagaaactagctttattctaacataccgtaggatctaaatcctcctacctggatcatgaattcctttgaaataattcatattttcattgactctcactaaatgtcaaataacc

SEQ ID NO: 39392 - DNA, 120 bp, Artificial Sequence
  ENSG00000057704_34 (sequence is synthesized)
ttgttttcacttggataggctcaacctacctggcatatttattttgcagtcttgttgaaagttcatgaaactttgtactttttaataagatgatacactcgaaggaaacttttaatctct

SEQ ID NO: 39393 - DNA, 120 bp, Artificial Sequence
  ENSG00000057704_35 (sequence is synthesized)
gcagtttattctctcttaaggaataaacactcccactgtttgttctcttcaatgtgtaaggagattaaatgacattttagaaatattacaattaaaaatagtgatgtagctgtaacatat

SEQ ID NO: 39394 - DNA, 120 bp, Artificial Sequence
  ENSG00000057704_36 (sequence is synthesized)
gctggaattggatatttaatttatgtttgtgtcaactataatcctttccccacccctttcatttatggtaaacatcttgggcaaacccaaagatggaaagtgcttgttgggtgggtaagc

SEQ ID NO: 39395 - DNA, 120 bp, Artificial Sequence
  ENSG00000057704_37 (sequence is synthesized)
accacctggtctctcagcaaacactcctgagtggttgaagatgctggacattggattctagcactgggtttatctggtgacatagtctcctgtgggtcttgagttggttatttcaagctc

SEQ ID NO: 39396 - DNA, 120 bp, Artificial Sequence
  ENSG00000057704_38 (sequence is synthesized)
aaactctgaatatgattaaaccagaacaccccacccccaactgccaaaaaaaaaaaaaaaaaatggaaatccataatgaaacagcaaaaaagtactccgttgctgggtttggacaatgaa

SEQ ID NO: 39397 - DNA, 120 bp, Artificial Sequence
  ENSG00000057704_39 (sequence is synthesized)
catgggattagtcccaagtttgtagcttggaacggtagcatttttgcctgcgtgatccttgtcagctattcacagaaggaaatcttccgaaactccgtctttcatttcagccggtgaggc

SEQ ID NO: 39398 - DNA, 120 bp, Artificial Sequence
  ENSG00000057704_40 (sequence is synthesized)
tgttatccttctctgtcaattagcattcatgtggttttcgctctttccagctctgtcactcttgttttcatttaaatattgccccactctgtgtttattgccttgccatttctctagcat

SEQ ID NO: 39399 - DNA, 120 bp, Artificial Sequence
  ENSG00000057704_41 (sequence is synthesized)
atcaggtttaattatgggctcagtaataatgaggaactagcttccctcaggcaactaattacttttgtcttttttggtcggattgtaccaaattattttgcattgaatgggaatgttttt

SEQ ID NO: 39400 - DNA, 120 bp, Artificial Sequence
  ENSG00000057704_42 (sequence is synthesized)
gcagtgaatccagatatagttgtattggtttggaaaaacatttaaatatatttattcatatgaacatgtgtgattaaacaacctattttacatatttctgtaattctgaggagtgggctg

SEQ ID NO: 39401 - DNA, 120 bp, Artificial Sequence
  ENSG00000057704_43 (sequence is synthesized)
ggggtaggaagaaatggcaccacttaaaattcagggcttatatgaagaggtgttttaaggttagcacatgcacaaaggaacgagttggtttaaaaagataaatcactgcaaagaatgaaa

SEQ ID NO: 39402 - DNA, 120 bp, Artificial Sequence
  ENSG00000057704_44 (sequence is synthesized)
ttggcttattcacatcaaaactagataagatgctaaaaaaaaaagatatgaaacagaactaacctatagtttcctgaaatcagtacagtttaatttataagaagctagaaagtaatgcac

SEQ ID NO: 39403 - DNA, 120 bp, Artificial Sequence
  ENSG00000057704_45 (sequence is synthesized)
cttgattgttttaggaatgatttatgtgttgcaattttaatttatttaaagcatgtctactgtgtttgtcctaagagaaatatttcaacaaaacgtgctctgtgtttaagatatgtttag

SEQ ID NO: 39404 - DNA, 120 bp, Artificial Sequence
  ENSG00000057704_46 (sequence is synthesized)
gcagtagttagcaactctgaaagtagaaactggaaatgtttattgtgaggcttgttgcagaatttccattttgtgagttactacttagtttcatgtcagcctaaaattgtaaattccctg

SEQ ID NO: 39405 - DNA, 120 bp, Artificial Sequence
  ENSG00000057704_47 (sequence is synthesized)
tagatcttcaccccattgtggtgtcatcaatgaatccaaagcaggtgccattatttttttaaataaacacttgatgttagctttggtgttaaataaagaggtagatttcttaaattttca

SEQ ID NO: 39406 - DNA, 120 bp, Artificial Sequence
  ENSG00000057704_48 (sequence is synthesized)
ccaaagtccaggctgagtcatatggtaggtgctgtttggaatatctagcctgcctgccttgcagattcaaatgcctcgggcaggagggtgagctagctgccgatcctgctctgctcctgg

SEQ ID NO: 39407 - DNA, 120 bp, Artificial Sequence
  ENSG00000057704_49 (sequence is synthesized)
tcctggagtggaggccgaaaatgttatctgctgcctccccagcctcccttgcaactagggcatggacatgggactcagccccggccaaagggacccctgaggagcttctggaaaatgttt

SEQ ID NO: 39408 - DNA, 120 bp, Artificial Sequence
  ENSG00000057704_50 (sequence is synthesized)
tccttcctaataaaatatgaaagaagataagtatcctcatctatagccagaaactgtctacacgtgatttctggaactacagtagctctcttgcctccatgtgagcagaagcaaatggcc

SEQ ID NO: 39409 - DNA, 120 bp, Artificial Sequence
  ENSG00000057757_0 (sequence is synthesized)
agttgccggagctgaacggcgcggagctggtctgaggcgagccgagccgagcgagcgcggcggtggggccgagaggacgcgcaggtggcggcgttgccatgtcgcacggtcacagccacg

SEQ ID NO: 39410 - DNA, 120 bp, Artificial Sequence
  ENSG00000057757_1 (sequence is synthesized)
gcgggggtggctgccgctgcgccgccgaacgggaggagccgcccgagcagcgcggcctggcctacggcctgtacctgcgcatcgacctggagcggctgcaatgccttaacgagagccgcg

SEQ ID NO: 39411 - DNA, 120 bp, Artificial Sequence
  ENSG00000057757_2 (sequence is synthesized)
agggcagcggccgcggcgtcttcaagccgtgggaggagcggaccgaccgctccaagtttgttgaaagtgatgcagatgaagagcttctgtttaatattccatttacgggcaatgtcaagc

SEQ ID NO: 39412 - DNA, 120 bp, Artificial Sequence
  ENSG00000057757_3 (sequence is synthesized)
tcaaaggcatcattataatgggagaggatgatgactcacacccctctgagatgagactgtacaagaatattccacagatgtcctttgatgatacagaaagggagccagatcagaccttta

SEQ ID NO: 39413 - DNA, 120 bp, Artificial Sequence
  ENSG00000057757_4 (sequence is synthesized)
gtctgaaccgggatcttacaggagaattagagtatgctacaaaaatttctcgtttttcaaatgtctatcatctctcaattcatatttcaaaaaacttcggagcagatacgacaaaggtct

SEQ ID NO: 39414 - DNA, 120 bp, Artificial Sequence
  ENSG00000057757_5 (sequence is synthesized)
tttatattggcctgagaggagagtggactgagcttcgccgacacgaggtgaccatctgcaattacgaagcatctgccaacccagcagaccatagggtccatcaggttaccccacagacac

SEQ ID NO: 39415 - DNA, 120 bp, Artificial Sequence
  ENSG00000057757_6 (sequence is synthesized)
ccatagaggcgctgtgtcagtgaagatgtacgactacctgttgggaaggacaaagggatgaggctccagagagagttggctgccacagcctctgccaagctttgtctttggggcttgctg

SEQ ID NO: 39416 - DNA, 120 bp, Artificial Sequence
  ENSG00000057757_7 (sequence is synthesized)
cagaaacctggcctacggaagatacgacaccactgggagggttgtgtaggtgccaggggaccatcgtggttctctagggcgctgtggaaattgggtcttgggctgggtggcatctggcag

SEQ ID NO: 39417 - DNA, 120 bp, Artificial Sequence
  ENSG00000057757_8 (sequence is synthesized)
tctggcagtcatgggtaacacttgcttttccagttaatgtggccatgtgattccaagtgtcatgttgctttgtggcaagattgttgtgtgacttgtttttttgtttttgtttttgttttt

SEQ ID NO: 39418 - DNA, 120 bp, Artificial Sequence
  ENSG00000057757_9 (sequence is synthesized)
aactatttgtgggctataggaaactttctgatgcctccggattgtgttagtagtagccatcaggagggtctccaactaaaacacttgttcctgcttgctcctttcccctctcattgttca

SEQ ID NO: 39419 - DNA, 120 bp, Artificial Sequence
  ENSG00000057757_10 (sequence is synthesized)
gcattcttgtcaagttgcccagcttggagttgtctgtcacgcacatgtgtcctgtggttatagctagaaggacaggagtctcctgctgatgcgtgatagcttaagcttggggagaaggtc

SEQ ID NO: 39420 - DNA, 120 bp, Artificial Sequence
  ENSG00000057757_11 (sequence is synthesized)
ttttccactgcctagctaagcagtctggggagagcatggggatcatttctatgtgtgtgggtaatctggtcagtaagattgagacttagttaagattccccttggaaattccttaatgtt

SEQ ID NO: 39421 - DNA, 120 bp, Artificial Sequence
  ENSG00000057757_12 (sequence is synthesized)
tattagcttctaactagtgttgtaagtccgatgccagaatttggagatttgagttcttcttttcatggcttttattcactgtgactaataagcttcctaataaatccttgccagacttaa

SEQ ID NO: 39422 - DNA, 120 bp, Artificial Sequence
  ENSG00000057757_13 (sequence is synthesized)
agcagggtgggagatgcctgaaattgtaggctctcagcaaatatttgttgctttctcctcccccctccccatcccctccagtttgttgaaagtgatgcagatgaagagcttctgtttaat

SEQ ID NO: 39423 - DNA, 120 bp, Artificial Sequence
  ENSG00000057757_14 (sequence is synthesized)
attccgtaagtatctccttggtgcctacctcaggctaaataggctgtacccagttgcctcagatggattcattcactggtgtcaagagcacacatttgcttctagaaatgggataaatta

SEQ ID NO: 39424 - DNA, 120 bp, Artificial Sequence
  ENSG00000057757_15 (sequence is synthesized)
ctttggtgggtttgaggaggaaagcatcatagctttcttggtgcagactggaaacagatgtatttgtagaacaataactgagaaattgaggtagatttcttagaattgtagaatgctaga

SEQ ID NO: 39425 - DNA, 120 bp, Artificial Sequence
  ENSG00000057757_16 (sequence is synthesized)
ttgacagatgagtaaactgaagcccatacaggggaagggtcttgcccagggtcacacaactaaacaggtattcaaactcaggtttgacaaccttctcttttgcattctggcagatttacg

SEQ ID NO: 39426 - DNA, 85 bp, Artificial Sequence
  ENSG00000057757_17 (sequence is synthesized)
cctgtaattccagcactttcggagaccgacgtaattgccaacatggtacaagaatattccacagatgtcctttgatgatacagaa

SEQ ID NO: 39427 - DNA, 120 bp, Artificial Sequence
  ENSG00000057935_0 (sequence is synthesized)
atggcggccaacatgtaccgggtcggagattatgtctactttgagaattcctccagcaacccatacctaataagaaggatagaagaactcaacaagactgcaagtggcaacgtggaagca

SEQ ID NO: 39428 - DNA, 120 bp, Artificial Sequence
  ENSG00000057935_1 (sequence is synthesized)
aaagtagtatgcttttatagacgacgtgatatttccaacacacttataatgctcgcagataagcatgctaaagaaattgaggaagaatctgaaacaacagttgaggctgacttgaccgat

SEQ ID NO: 39429 - DNA, 120 bp, Artificial Sequence
  ENSG00000057935_2 (sequence is synthesized)
aagcagaaacatcagttgaaacatagggaactctttttgtcacgccagtatgaatctctgcccgcaacacatatcaggggaaagtgcagtgttgcccttctgaatgagacagaatcagta

SEQ ID NO: 39430 - DNA, 120 bp, Artificial Sequence
  ENSG00000057935_3 (sequence is synthesized)
ttgtcatatcttgataaggaggataccttcttctactcattggtctatgacccctcattgaaaacactattagctgacaaaggtgaaatcagagtgggacctagatatcaagcagacatt

SEQ ID NO: 39431 - DNA, 120 bp, Artificial Sequence
  ENSG00000057935_4 (sequence is synthesized)
ccagaaatgctgttagaaggagaatcagatgagagggaacaatcaaaattggaagttaaagtttgggatccaaatagcccacttacggatcgacagattgaccagtttttagttgtagca

SEQ ID NO: 39432 - DNA, 120 bp, Artificial Sequence
  ENSG00000057935_5 (sequence is synthesized)
cgtgctgttgggacattcgccagagccctggattgcagcagttctgtgaggcagcctagtttgcatatgagtgctgctgcagcttcccgagacatcaccttgtttcacgctatggataca

SEQ ID NO: 39433 - DNA, 120 bp, Artificial Sequence
  ENSG00000057935_6 (sequence is synthesized)
ttgtatagacacagctatgatttgagcagtgccattagtgtcttagtaccactcggaggacctgttttatgcagagatgaaatggaggaatggtcagcctctgaagctagcttatttgaa

SEQ ID NO: 39434 - DNA, 120 bp, Artificial Sequence
  ENSG00000057935_7 (sequence is synthesized)
actgacagatatgtgcaacagaaacgtctaaaagcagcagaagctgagagtaaactgaaacaagtatatatcccaacctacagcaaaccaaatcccaaccaaatatccactagtaatggg

SEQ ID NO: 39435 - DNA, 120 bp, Artificial Sequence
  ENSG00000057935_8 (sequence is synthesized)
aagcctggtgctgtgaatggagctgtggggaccacgttccagcctcagaatcctctcttagggagagcctgtgagagctgctatgctacacagtctcaccagtggtattcttggggccca

SEQ ID NO: 39436 - DNA, 120 bp, Artificial Sequence
  ENSG00000057935_9 (sequence is synthesized)
cctaatatgcagtgtagattatgtgcaatttgttggctttattggaaaaaatatggaggcttgaaaatgcccacccagtcagaagaagagaagttatctcctagcccaactacagaggac

SEQ ID NO: 39437 - DNA, 120 bp, Artificial Sequence
  ENSG00000057935_10 (sequence is synthesized)
cctcgtgttagaagtcacgtgtcccgccaggccatgcagggaatgccagtccgaaacactgggagtccaaagtctgcagtgaagacccgccaagctttcttccttcatactacatatttc

SEQ ID NO: 39438 - DNA, 120 bp, Artificial Sequence
  ENSG00000057935_11 (sequence is synthesized)
acaaaatttgctcgtcaggtctgcaaaaataccctccggctgcggcaggcagcaagacggccgtttgttgctattaattatgctgccattagggcagaatatgcagacagacatgctgaa

SEQ ID NO: 39439 - DNA, 120 bp, Artificial Sequence
  ENSG00000057935_12 (sequence is synthesized)
ctatctggaagtccactgaaaagcaaaagcactaggaagcctttggcatgtatcattgggtatttagagatccatcctgcaaagaaacctaatgtaattcgatctacaccaagcctgcaa

SEQ ID NO: 39440 - DNA, 120 bp, Artificial Sequence
  ENSG00000057935_13 (sequence is synthesized)
accccaactaccaagcggatgctaacaactccaaatcacacatctctgagcattctggggaaaagaaactacagtcatcacaatggtctggatgaactcacgtgctgtgtgtcagactga

SEQ ID NO: 39441 - DNA, 120 bp, Artificial Sequence
  ENSG00000057935_14 (sequence is synthesized)
gtttgctctgctgcctgcctccttcccagtcttctgcggaagagagaaataaggtcaaacaaactttctccctactcacgacgccctcctccctctttcctggtaaaataataattcaga

SEQ ID NO: 39442 - DNA, 120 bp, Artificial Sequence
  ENSG00000057935_15 (sequence is synthesized)
taagtggcgtgtttgtatgagagactggctcttccttctctgctcattagccgagcttctgatggatggtggtgggaatggcctggctaaatgaggccactttgcagaagagagcggcga

SEQ ID NO: 39443 - DNA, 120 bp, Artificial Sequence
  ENSG00000057935_16 (sequence is synthesized)
aattttatccttttagttgaaagcctgcagcaatttcttaatcacaagacattaaatggatctggattaaatatggtaaaagggtaaaaaagatgctgatatcacccccagaacactttg

SEQ ID NO: 39444 - DNA, 120 bp, Artificial Sequence
  ENSG00000057935_17 (sequence is synthesized)
gtgtctgccacatccaaaaatatattataagcatgttcttgtattccatgattgaagtatgtggttgaggaataagggggaatacagccatatgccacattttgccaagggatagttctc

SEQ ID NO: 39445 - DNA, 120 bp, Artificial Sequence
  ENSG00000057935_18 (sequence is synthesized)
catcccatcaggaggtacttatttgctcccatctcctgttaggaggcgtttttggagatgaaatctgtatttagcagattgcttctgctgggtaataatgttcttgctgtgatgcgcgct

SEQ ID NO: 39446 - DNA, 120 bp, Artificial Sequence
  ENSG00000057935_19 (sequence is synthesized)
ttatagagtagagatctcagtgcacacagtggttaaatgatttcttctggtagcagtggtgggagtgtcacctgatagttgtaataacaataccaaaaggaaatcttaagtagggtcttt

SEQ ID NO: 39447 - DNA, 120 bp, Artificial Sequence
  ENSG00000057935_20 (sequence is synthesized)
gctgtcaggccagaccaactttacaaaccaggctttaacaggtgaatggaattgtggaaagtggaagaccttgagtcaactctgacttcagctgtcttgatagttgtgaggtctcattgc

SEQ ID NO: 39448 - DNA, 120 bp, Artificial Sequence
  ENSG00000057935_21 (sequence is synthesized)
atcagtagatatgggaagacagcatataatctgcatttagccattcagcattcatttccgataaattatttactgatttattttgcttattttctgtttagcaaataaacacaaaaagta

SEQ ID NO: 39449 - DNA, 120 bp, Artificial Sequence
  ENSG00000057935_22 (sequence is synthesized)
tcgagaatgaaagctccttgaggtcagagacttatttattaggcactgaacaaatacatgttaaatgaattatgaatttattgagaacgtactatgtgtacctgtgcagtgttctggggc

SEQ ID NO: 39450 - DNA, 120 bp, Artificial Sequence
  ENSG00000057935_23 (sequence is synthesized)
acggtttataagcagcgggggagttagcctaccgtacatggggaaaagttagccttgtttgcctgggaaataccaagataatctgggctgcacgtttctaaggaattaatggctctgttg

SEQ ID NO: 39451 - DNA, 120 bp, Artificial Sequence
  ENSG00000057935_24 (sequence is synthesized)
aggaattaatggctctgttgacttggtctttgggaaatttgcatatacacttctggtagatgtctcttcccctccctgctccccaaaagaaagggtctccctctgttgcccaggctggag

SEQ ID NO: 39452 - DNA, 89 bp, Artificial Sequence
  ENSG00000057935_25 (sequence is synthesized)
ctgggctcaagtgatcctcccaccctggcacctatgcctgggtaatttttatttttgtttttgtagagacagagtctcactgtgttgcc

SEQ ID NO: 39453 - DNA, 120 bp, Artificial Sequence
  ENSG00000057935_26 (sequence is synthesized)
gtctcactgtgttgcccaggctggtctccgaactcctggcttcaagtcatcctcctgcctctcttttctcctcttaaaaaatactgtcttaaaaaggaaaacctccaaatacctttactg

SEQ ID NO: 39454 - DNA, 120 bp, Artificial Sequence
  ENSG00000057935_27 (sequence is synthesized)
ctttactggtttttaaaatttcaaatgctatgtaatatttctgataaaatttcagatgtaatcggagtggtcatcatgagtggccagaagctcctgaagtcctaagtgacctagagatgg

SEQ ID NO: 39455 - DNA, 120 bp, Artificial Sequence
  ENSG00000057935_28 (sequence is synthesized)
gccctgttgaccccgcagcatctgctaagcgtgtggcttttgtgcagctccctggagagctggagtgcagtagccacagcccccacaccagcagcaggaactgaagagtggctttctcga

SEQ ID NO: 39456 - DNA, 120 bp, Artificial Sequence
  ENSG00000057935_29 (sequence is synthesized)
gactccgtctccaaaaaaaaaaaaaagtgtcagaggatgttctaaggaaattgtattcggaccagaaaagagatgggacagtatttacttcgtgaatgtcaggcataagcaattcctttt

SEQ ID NO: 39457 - DNA, 120 bp, Artificial Sequence
  ENSG00000057935_30 (sequence is synthesized)
tgaatgtcaggcataagcaattccttttttcatagactcgttttataaagatgagtagtgtgagttcatttaacaccttggttttaccagtttatttcttcttcacacattttaaaatgt

SEQ ID NO: 39458 - DNA, 120 bp, Artificial Sequence
  ENSG00000057935_31 (sequence is synthesized)
ttgtttatgtttattaaatagtgacggtaaatcagtaatgatatagagctttttgccttattgtacaaatcattttatcaccttattttaatttcattgaaagcagcaaaccaaatccca

SEQ ID NO: 39459 - DNA, 120 bp, Artificial Sequence
  ENSG00000057935_32 (sequence is synthesized)
aatgtaagatgcttttaaattcttaaccttatatgttgtgcttctgaccattttctcttttcctctctttccttttttttttgtttgtttgtttgcaataaacataagttcttgtgtaca

SEQ ID NO: 39460 - DNA, 120 bp, Artificial Sequence
  ENSG00000057935_33 (sequence is synthesized)
agcccttccttggcatgctctgaggctgtgaagaactcacgtgctgtgtgtcagactgagctttccctgattcattctacaatccaagacttgctgcactgtcctgctgatgttcacagc

SEQ ID NO: 39461 - DNA, 120 bp, Artificial Sequence
  ENSG00000057935_34 (sequence is synthesized)
cgtgcctgggaagaaggcagccccactcccagtacatttcagtgggagacctctgcgtgcatccatggagacgcaatggggcggggaaggaactgtgggagtgcacgttccaaatcctgt

SEQ ID NO: 39462 - DNA, 120 bp, Artificial Sequence
  ENSG00000057935_35 (sequence is synthesized)
gtctccacgtgtggatcagcagcacctcgctttcttgtcagagacctcgctgttacggagcgagacctgctgagaattgaggggctgagggaacccctccacctcctcccttctgcagcg

SEQ ID NO: 39463 - DNA, 120 bp, Artificial Sequence
  ENSG00000057935_36 (sequence is synthesized)
ccctgcgccccacccagcaacagcggccacttggcagtggggctgctgcaagctcagagccgctgccaccctgcatgtgtccgctcagctcggtcttatgctgtatagttactaaatatg

SEQ ID NO: 39464 - DNA, 120 bp, Artificial Sequence
  ENSG00000057935_37 (sequence is synthesized)
tacaggagggccatggcatctttctgaatggatttttcttaagaaatgcgccagtgtttatgaggttcaaggtatttccctgtccttgctgttaccgtcactcagctttttctcgatagg

SEQ ID NO: 39465 - DNA, 120 bp, Artificial Sequence
  ENSG00000057935_38 (sequence is synthesized)
cttcatccttgtttttttgaaatgggggaatttgctgtttaccctctgcattcctatatgtgaccctccctcctactcctccaaggaacagaattaccgaggttctgacaaaagataagc

SEQ ID NO: 39466 - DNA, 120 bp, Artificial Sequence
  ENSG00000057935_39 (sequence is synthesized)
atagaagaaaacctgactgaggcattcttgagttgctttttagtctgtgaactataatattcatgagacgcttaacacttcccaaagtggcagggaggaaactctttgtttcttctgatt

SEQ ID NO: 39467 - DNA, 120 bp, Artificial Sequence
  ENSG00000057935_40 (sequence is synthesized)
ccaccggaagagagagtggacaggacccaggacttttcggagtagagttagtgattcatctcttgtttgtgagatagatggggcttgagtagtgagtatccctttgggacatttttttga

SEQ ID NO: 39468 - DNA, 120 bp, Artificial Sequence
  ENSG00000057935_41 (sequence is synthesized)
gtcagctgctagatatcatatgtatttattttactatattcagttccaatatgtgtgtatgacttaatatcttcattaatagattttctttttttctgagacggagttttgctcttgctg

SEQ ID NO: 39469 - DNA, 78 bp, Artificial Sequence
  ENSG00000057935_42 (sequence is synthesized)
aaattgaggaagaatctgaaacaacagttgaggctgacttgaccgataagcagaaacatcagttgaaacatagggaac

SEQ ID NO: 39470 - DNA, 120 bp, Artificial Sequence
  ENSG00000057935_43 (sequence is synthesized)
gaatctcaccgcgaggaaggcaccctgctgcctgcacttatttgcatccaagagtttgcattgagactggcgcttgcctactagggcagccacaggggggttccccagggacagagatta

SEQ ID NO: 39471 - DNA, 120 bp, Artificial Sequence
  ENSG00000057935_44 (sequence is synthesized)
ttctgtactctttaccagagagtagtgcttagcaaaagattggtgggaggtgatcctattccatggggttttgtgatggaattgcctgcagagcccttattgaagcacttttacctttta

SEQ ID NO: 39472 - DNA, 120 bp, Artificial Sequence
  ENSG00000057935_45 (sequence is synthesized)
ggtagtgccacaatgtaacccctaaggatgctgttataatgagactccataatcgagacagtacagtccagtcttacatggattcattaggtttaaataaaatttgccaatttacactaa

SEQ ID NO: 39473 - DNA, 120 bp, Artificial Sequence
  ENSG00000057935_46 (sequence is synthesized)
agcctcggtgccgcctgccagcccgcggagggaagcggtccccgacccggccccggcccccacgttctggggcgcgagtcctgagaaggcgcctaacgtgtagcgcgcctggaccctctc

SEQ ID NO: 39474 - DNA, 120 bp, Artificial Sequence
  ENSG00000057935_47 (sequence is synthesized)
gagatgctgcccttagagtgggatgaaagtctggggaggaacgccttgtcaccggcaaaaacagcctttctcttggtcttcgtctgcatcctccttttcaaaatatcttgatttcccccg

SEQ ID NO: 39475 - DNA, 120 bp, Artificial Sequence
  ENSG00000057935_48 (sequence is synthesized)
cgcacccctgacccggctgcagcaccggccctccgagcgggaagagccccgtgaaggctccgcagagcgatctaccccgcgctcttgtccgtgcccagaaagcgggttccacttggcagg

SEQ ID NO: 39476 - DNA, 120 bp, Artificial Sequence
  ENSG00000057935_49 (sequence is synthesized)
gattattttaaactgctaccagcaattcattcacctgacacccgacaccggcagcccagcccgccggaggcgagacaggattgtccggtgcccgctagaggtcgccaaacggagtccttt

SEQ ID NO: 39477 - DNA, 120 bp, Artificial Sequence
  ENSG00000057935_50 (sequence is synthesized)
ctcatcatctgtgttttgtggttggagagaaactggtgttctgcccggctctgcttggtcacagacagctccagcaagagcagttgttaaaagtgccaagcgtgtgtatcactgtgacaa

SEQ ID NO: 39478 - DNA, 120 bp, Artificial Sequence
  ENSG00000057935_51 (sequence is synthesized)
gccgtttgcttactgccctgttcccttgcagccaaaccagctgatgaagaactgctgccaggtgggtcctacagcaggtcacaaatgacctagtttcattttaagcagacagactctgtt

SEQ ID NO: 39479 - DNA, 120 bp, Artificial Sequence
  ENSG00000057935_52 (sequence is synthesized)
tggcctagaggtgtggagtgagagaactgtgtttgtgggtatgagtctgtgtggccaaccccatgacccccacccctccagcccaacatcttgtgagcacatgtgacctaggccccgggg

SEQ ID NO: 39480 - DNA, 120 bp, Artificial Sequence
  ENSG00000057935_53 (sequence is synthesized)
gacctgcctgctcctttggcttgggctcttcgtgtttcccacctgccctcggcacgagcccttggtggcatcacagttggccactcagctgtgctgagtagctgtgctacttgtgctggc

SEQ ID NO: 39481 - DNA, 120 bp, Artificial Sequence
  ENSG00000057935_54 (sequence is synthesized)
agctgcaaggataggaatagctcagcgcccgatgagctccctgagcagatgtgaggctggcaactcccctgccctctgtttgcaggcacagggtcacagtcccaagaaagacaactggag

SEQ ID NO: 39482 - DNA, 120 bp, Artificial Sequence
  ENSG00000057935_55 (sequence is synthesized)
tctgatctcccagccatctctggggttactaggaggcagctggatggcagatacgagaggcccaaatagccaagctgttgcaagacagagtggctacaattgaattgacaccctgggaag

SEQ ID NO: 39483 - DNA, 120 bp, Artificial Sequence
  ENSG00000057935_56 (sequence is synthesized)
cacgaggtaacttggtaaggataatgatgctgtagatgtctgtgtcctcggaggctgagctccgcttggcagagagagcgtgctgtgtgaggtggagggcggttttgcagacatctcagc

SEQ ID NO: 39484 - DNA, 120 bp, Artificial Sequence
  ENSG00000057935_57 (sequence is synthesized)
ttcttttctgaggaggagttggttctcatcttaggcttctgcaagggcgagcatgggatgtctccaccaccacccactcttggagctgtgctgggtcttggcttggggcgctgagggtgg

SEQ ID NO: 39485 - DNA, 120 bp, Artificial Sequence
  ENSG00000057935_58 (sequence is synthesized)
ggcctgtgtcagaagcatttggtgagaggggtggaggtggcaggcaggggttctcctcagggttcccactgaggggtcccttcagcaaagacctgggaggaggtgccgcatcacgtggat

SEQ ID NO: 39486 - DNA, 120 bp, Artificial Sequence
  ENSG00000057935_59 (sequence is synthesized)
gtttcttccctaaagaaaaagacacaggaaagctgtctgtctgtaccctgctctggatttattgtcgtacttggacccagaaggggaaatgattccctcaccctttcactttctctctga

SEQ ID NO: 39487 - DNA, 120 bp, Artificial Sequence
  ENSG00000057935_60 (sequence is synthesized)
acccctactaagtggtgactgcagattctggaaacaattagctgcccgtgactcagctgccagcttcattttctctgccttttgggagaggccctctcacccaggcccaagagatttgga

SEQ ID NO: 39488 - DNA, 120 bp, Artificial Sequence
  ENSG00000057935_61 (sequence is synthesized)
gacaggagtcaggccaggtctgaagcaggagaagggaggcccctcctatctacccagttgacatttggctttgggaaaagcgcagcttgttcgagccacgtgtgccaagcaggcttttcc

SEQ ID NO: 39489 - DNA, 120 bp, Artificial Sequence
  ENSG00000057935_62 (sequence is synthesized)
ttcctcttgtaagtaaagctcgtggttctgtagtccagtcatcctaggagggtgatgttgactgagacttcacgctctccctttgtctctggaaactgccccctcgttctgacagaatcc

SEQ ID NO: 39490 - DNA, 120 bp, Artificial Sequence
  ENSG00000057935_63 (sequence is synthesized)
cccaggcaatggaggaagggtgccgaggcgcctctagtctgtgcctttgccgttggaagcatttggtgctgagagggtttcccagccacccgctccctttctggggccatggtgtccctg

SEQ ID NO: 39491 - DNA, 120 bp, Artificial Sequence
  ENSG00000057935_64 (sequence is synthesized)
ctgtgtgtcagtggcatgtcactgtggttcagtgagcacatgggtggacgtgcagagactgtctgcgcagcccccagcagacatgcccctggggtgaggacacaggctctgcaggctatc

SEQ ID NO: 39492 - DNA, 120 bp, Artificial Sequence
  ENSG00000057935_65 (sequence is synthesized)
tccccctctggctcagtcatcgcctgcccacccttcacttcttaaaggtgcgcaagagaggagggccgactggagggtgtcgccggaaggtttcagcctgcccttcacaattccccttgt

SEQ ID NO: 39493 - DNA, 120 bp, Artificial Sequence
  ENSG00000057935_66 (sequence is synthesized)
gcacagcccagtttccatctctcagggcccacccaggaaaatggatttcaagtgggggttttcatccagagatttgtttaacacaaaacaagaaaagctgagaggcaaaacaggggagtg

SEQ ID NO: 39494 - DNA, 120 bp, Artificial Sequence
  ENSG00000057935_67 (sequence is synthesized)
aggggcaacccagaggtggggaacaacaacagcaagccgcccccatcctgagactggctgggcaccaggggaggacgcgtcaccagagcctggggccaaggccactgggggacctgccac

SEQ ID NO: 39495 - DNA, 120 bp, Artificial Sequence
  ENSG00000057935_68 (sequence is synthesized)
actgtggacctgtctggtgggggctggagcctcgagaagccatgattcttgtcagaaacatttccccaggcagagagagggggccccagcctctcccctcctcttggcctccagagtcct

SEQ ID NO: 39496 - DNA, 120 bp, Artificial Sequence
  ENSG00000057935_69 (sequence is synthesized)
gcaggtgcctcacagtagtgaaacccagttggaagcagctgccctgggagcctgggacaggcgacccaccgggtcagtcccctgccactcagagcagagcagggggctgagggcaagcag

SEQ ID NO: 39497 - DNA, 120 bp, Artificial Sequence
  ENSG00000057935_70 (sequence is synthesized)
gtggggctgtgcgtggcctcagtgcactcggtgtcatgtctgagcctggtgtttatgccccactgctgtcctaagtccctggcgaggggaggtggaggagctgccccgtgggtgtttgga

SEQ ID NO: 39498 - DNA, 120 bp, Artificial Sequence
  ENSG00000057935_71 (sequence is synthesized)
gattctgttttactctgcctagagaggaaacggctttggggagggagggggaagcctttattctttactgttgtccctgttttcctttgggggaatttactcagttagcagcccctcctc

SEQ ID NO: 39499 - DNA, 120 bp, Artificial Sequence
  ENSG00000057935_72 (sequence is synthesized)
accattccccccaggaaggccatgtcccagttttctgtccacccctcctgttcctctgcactatgtctctgattttccctgccagggaagctaacccagagcacgcacctgtgctcatga

SEQ ID NO: 39500 - DNA, 120 bp, Artificial Sequence
  ENSG00000057935_73 (sequence is synthesized)
gtgtttccgcaggataattcgttctgagcatgataccacagtgtggattgtctgtctgtaaggagatgccatctactaaccaatttgtattgtgtttccaataaattcctggaaattttg

SEQ ID NO: 39501 - DNA, 120 bp, Artificial Sequence
  ENSG00000057935_74 (sequence is synthesized)
acaggctattttttttcttgatttcatgataacgacctgtttatagtaaattggcttgtcaattattatatcttatagagtgaaaattctttttatttgatgtttgattctcattcagaa

SEQ ID NO: 39502 - DNA, 120 bp, Artificial Sequence
  ENSG00000057935_75 (sequence is synthesized)
acttgtttttgcctcttcttttacagttttttatttactatccaaatgtgttttttaaaacgttaaaaaaacaaaccaaaacagatacttaattcttccttattgtgtttgtggtttatt

SEQ ID NO: 39503 - DNA, 120 bp, Artificial Sequence
  ENSG00000057935_76 (sequence is synthesized)
tttgtaagtagaaaattatgagtaaaataaaatgttgagatgggaatattctgttttagaaatctggtaaaccttacagtattcatttagcaagtttgtgagttaatagtttttatctgc

SEQ ID NO: 39504 - DNA, 120 bp, Artificial Sequence
  ENSG00000057935_77 (sequence is synthesized)
tatatcccaacctagctgagcatggtagttcacgcctataatcccagcactttggggaacctcgtttctgcaaaaaatttaaaagaaatataagcaaaccaaatcccaaccaaatatcca

SEQ ID NO: 39505 - DNA, 120 bp, Artificial Sequence
  ENSG00000057935_78 (sequence is synthesized)
cccactcggccttgctagcctggcgctgggggcgggcaccagcccccacccctcggcgtaccatcccctttacttcccccaccccctgtcccctcccttccctcccttcccccccgtggc

SEQ ID NO: 39506 - DNA, 120 bp, Artificial Sequence
  ENSG00000058056_0 (sequence is synthesized)
cgcgctccggctccggctcggctcgctcggctccggtgcgcgccgaggccatgcagcgccggggcgccctgttcggcatgccgggcggcagcggaggcaggaagatggctgcaggagaca

SEQ ID NO: 39507 - DNA, 120 bp, Artificial Sequence
  ENSG00000058056_1 (sequence is synthesized)
atggctgcaggagacatcggcgagctgctagtgccccacatgcccacgatccgcgtgcccaggtccggcgacagggtctacaagaacgagtgcgccttctcctacgactctcccaattct

SEQ ID NO: 39508 - DNA, 120 bp, Artificial Sequence
  ENSG00000058056_2 (sequence is synthesized)
gaaggtggactctatgtatgcatgaatacatttttggcctttggaagggaacatgttgaaagacattttcgaaaaactggacagagtgtatacatgcacctgaaaagacatgtgcgagag

SEQ ID NO: 39509 - DNA, 120 bp, Artificial Sequence
  ENSG00000058056_3 (sequence is synthesized)
aaggtaagaggggcgtctggtggagcgttaccaaaaaggaggaattccaagatttttttagatctagatactgatgacgatttaaatagcgacgattatgaatatgaagatgaagccaaa

SEQ ID NO: 39510 - DNA, 120 bp, Artificial Sequence
  ENSG00000058056_4 (sequence is synthesized)
cttgttatattcccagatcactatgaaatagcactaccaaatattgaggagttaccagccctggtaacaattgcttgtgatgcagttctcagctcaaaatctccatacagaaagcaggac

SEQ ID NO: 39511 - DNA, 120 bp, Artificial Sequence
  ENSG00000058056_5 (sequence is synthesized)
ccagacacgtgggaaaatgaattgccagtatctaaatatgccaacaacctcacccagctggacaatggagtcaggattcctccaagtggttggaagtgtgccagatgcgacctgcgagaa

SEQ ID NO: 39512 - DNA, 120 bp, Artificial Sequence
  ENSG00000058056_6 (sequence is synthesized)
aacctctggttgaatctgactgacggctctgtcctgtgtggaaagtggttctttgacagctctgggggcaacgggcatgcgctggagcattacagagacatgggctacccactagccgtg

SEQ ID NO: 39513 - DNA, 120 bp, Artificial Sequence
  ENSG00000058056_7 (sequence is synthesized)
aaactgggaaccatcactcctgacggggcagatgtttattcttttcaagaagaagaacctgttttggatcctcatttggccaagcacttagcgcattttggaattgatatgcttcatatg

SEQ ID NO: 39514 - DNA, 120 bp, Artificial Sequence
  ENSG00000058056_8 (sequence is synthesized)
catgggacagagaatgggctccaggacaatgacatcaagctgagggtcagtgagtgggaagtgatccaggagtcgggcacgaaactgaagccaatgtatggtcctggctacacgggtctg

SEQ ID NO: 39515 - DNA, 120 bp, Artificial Sequence
  ENSG00000058056_9 (sequence is synthesized)
aagaacctgggcaacagctgctatctcagctctgtcatgcaggccatcttcagcatcccagaattccagagagcgtatgtaggaaaccttcccagaatatttgactactcgcctttagat

SEQ ID NO: 39516 - DNA, 120 bp, Artificial Sequence
  ENSG00000058056_10 (sequence is synthesized)
ccaacacaagatttcaacacacagatgactaagttaggacatggccttctctcaggccagtattcaaagcctccggtgaaatctgaactcattgaacaggtgatgaaggaggagcacaag

SEQ ID NO: 39517 - DNA, 120 bp, Artificial Sequence
  ENSG00000058056_11 (sequence is synthesized)
ccacagcagaacgggatctctccgcgcatgtttaaggcctttgtaagcaagagccacccggaattctcctctaacaggcagcaagatgcccaggaattcttcttgcacctggtgaatcta

SEQ ID NO: 39518 - DNA, 120 bp, Artificial Sequence
  ENSG00000058056_12 (sequence is synthesized)
gtagagaggaaccgcatcggctcagaaaacccaagcgatgtttttcgttttttggtggaagaacgcattcagtgctgtcagacccggaaagtccgctacacggagagggtggattacctg

SEQ ID NO: 39519 - DNA, 120 bp, Artificial Sequence
  ENSG00000058056_13 (sequence is synthesized)
atgcagttacctgtggccatggaggcggcaaccaacaaggatgaactgatcgcttatgaactaacgagaagggaagcagaagcaaacagaagaccccttcctgagttggtacgtgccaag

SEQ ID NO: 39520 - DNA, 120 bp, Artificial Sequence
  ENSG00000058056_14 (sequence is synthesized)
ataccatttagtgcctgccttcaggccttctctgaaccagaaaatgttgatgatttctggagcagtgccctacaagcaaagtctgcgggtgtgaaaacatctcgctttgcttcattccct

SEQ ID NO: 39521 - DNA, 120 bp, Artificial Sequence
  ENSG00000058056_15 (sequence is synthesized)
gaatacttggtagtgcagataaagaagttcacttttggtcttgactgggttcccaaaaaatttgatgtttctattgatatgccagacctacttgatatcaaccatctccgagccaggggg

SEQ ID NO: 39522 - DNA, 120 bp, Artificial Sequence
  ENSG00000058056_16 (sequence is synthesized)
ttacagccaggagaggaagaacttccagacatcagcccccccatagtcattcctgatgactcaaaagatcgcctgatgaaccaattgatagacccatcagacatcgatgagtcatcagtg

SEQ ID NO: 39523 - DNA, 120 bp, Artificial Sequence
  ENSG00000058056_17 (sequence is synthesized)
atgcagctggccgagatgggtttcccgctggaagcatgtcgcaaggctgtgtacttcactggaaatatgggcgccgaggtggccttcaactggatcattgttcacatggaagagccagat

SEQ ID NO: 39524 - DNA, 120 bp, Artificial Sequence
  ENSG00000058056_18 (sequence is synthesized)
tttgctgagccgctgaccatgcctggttatggaggggcagcttctgctggagcctctgtttttggtgcttctggactggataaccaacctccagaggaaatcgtagctatcatcacctcc

SEQ ID NO: 39525 - DNA, 120 bp, Artificial Sequence
  ENSG00000058056_19 (sequence is synthesized)
atgggatttcagcgaaatcaggctattcaggcactacgagcaacgaataataacctggaaagagcactggattggatctttagccaccctgagtttgaagaagacagtgattttgtgatt

SEQ ID NO: 39526 - DNA, 120 bp, Artificial Sequence
  ENSG00000058056_20 (sequence is synthesized)
gagatggagaataatgccaatgcaaacattatttctgaggccaagcccgaaggacctagagtcaaggatggatctggaacatatgagctatttgcattcatcagtcacatgggaacatcc

SEQ ID NO: 39527 - DNA, 120 bp, Artificial Sequence
  ENSG00000058056_21 (sequence is synthesized)
acaatgagtggtcattacatttgccatatcaaaaaggaaggaagatgggtgatttacaatgaccacaaagtttgtgcctcagaaaggccccctaaagacctgggctacatgtacttttac

SEQ ID NO: 39528 - DNA, 120 bp, Artificial Sequence
  ENSG00000058056_22 (sequence is synthesized)
cgcaggataccaagctaaacctcaaatataaaaattggcgaaaagaagccatacgcctttttaatttgccaaaaaaaaaaagaagaagaagaagttgaaacaactagacatgaaggaata

SEQ ID NO: 39529 - DNA, 120 bp, Artificial Sequence
  ENSG00000058056_23 (sequence is synthesized)
tatggggtatttatcgtttatttaaagagcacgatcagttgacaccttctgaaatagaactgagaagaaatttctattagtgatgatacactattatattgtagatagtttttataaatg

SEQ ID NO: 39530 - DNA, 120 bp, Artificial Sequence
  ENSG00000058056_24 (sequence is synthesized)
ttcaaaaagatgatgatatttaaaaacaaaaaaagtattcatattgctggtggaggatctgccatcagcacatcaaaaatggggatgtgcccccagccctctattttgctttgggggtca

SEQ ID NO: 39531 - DNA, 120 bp, Artificial Sequence
  ENSG00000058056_25 (sequence is synthesized)
gtgatagtggcctctggagaaaccaaataatgtggccagtggtgtggccttacccacaacaaatgaaaagcccacttgtgtttcatatagaaaatcagcagttgggtggggctttatttg

SEQ ID NO: 39532 - DNA, 120 bp, Artificial Sequence
  ENSG00000058056_26 (sequence is synthesized)
tgacataatttttttcatgacatacaataatttctgatgtatccatgtagatattatgctctgtccataatagagcctctgcaatgaaagatatttttaatttgtcacattaaaattcat

SEQ ID NO: 39533 - DNA, 120 bp, Artificial Sequence
  ENSG00000058056_27 (sequence is synthesized)
aatacgattgtgtgaatgtgtgtgagactgactgagagtgtgagacttttactagaaaagtgagtccactagaaaatctgtgacaagttggtttttaaagtctgaacagttgatattaag

SEQ ID NO: 39534 - DNA, 120 bp, Artificial Sequence
  ENSG00000058056_28 (sequence is synthesized)
catatctgaaaaaagcaagtaaatattttaacaaaactatgactcaggaaccttcgagaagattagttccccacttagatttttaaggagtaaaaagggctgagttatgcctttaagtgc

SEQ ID NO: 39535 - DNA, 120 bp, Artificial Sequence
  ENSG00000058056_29 (sequence is synthesized)
tgtcaagaattcacttgggtttgggacatttgctggtgtaatgctagatgcccacagcagcataatattgtactttgtcaaaggtaggtaaattctctgtttctcagcagccctttcccc

SEQ ID NO: 39536 - DNA, 120 bp, Artificial Sequence
  ENSG00000058056_30 (sequence is synthesized)
aaaaggtatggtgtttatttttagtaaaaatagctaatctctttttaccatctcacatgataactctttggagtcatgtcaagtgccccaaatttgtctgtgattttcccatctctgagc

SEQ ID NO: 39537 - DNA, 120 bp, Artificial Sequence
  ENSG00000058056_31 (sequence is synthesized)
tctttatctgcctccgtttccttgtttttctggggccagagtctcatctctgcctttttttggtgtatcaccttctgacttgccttcattgcttgtctgatgtgaccaacagtgtgatct

SEQ ID NO: 39538 - DNA, 120 bp, Artificial Sequence
  ENSG00000058056_32 (sequence is synthesized)
aacgtgatgaaaagtggaatgatagcattctataatttccataattttcctactggtccgtaccaaattctagagtctctggagttgctatttcagagtatttggtcaaacgaaaaagaa

SEQ ID NO: 39539 - DNA, 120 bp, Artificial Sequence
  ENSG00000058056_33 (sequence is synthesized)
tttattgctgtctgtttaacatgtatttgtttggttgaaaggatctttttagaaactgtaggaaaataaacagaaccaaccaggtgaaacaaagcacagacattgggttaggatgtagtg

SEQ ID NO: 39540 - DNA, 120 bp, Artificial Sequence
  ENSG00000058056_34 (sequence is synthesized)
agttgtgaacaatcaggattctgggtgtgatgggggtccctgtctcataggtgatcctttggtgccatgtgaccgagagacatggtgtctaaggcccatggcctggagacctgggtgctg

SEQ ID NO: 39541 - DNA, 120 bp, Artificial Sequence
  ENSG00000058056_35 (sequence is synthesized)
ctcctagctgactgtggaccttgggcaagtccttcatccgtcctgtgcctcactgtcctcatctgaacaatggtatgatgacacctgccctctctttcaatcatgctttgaggatacagt

SEQ ID NO: 39542 - DNA, 120 bp, Artificial Sequence
  ENSG00000058056_36 (sequence is synthesized)
gagattggttacagtgaaccttcaatgagtagaatgtggtatgccatggtgggttgtagtagatggtgctccctgccttttctcctctgttttcctcaatttgggaacaaatgagattgg

SEQ ID NO: 39543 - DNA, 120 bp, Artificial Sequence
  ENSG00000058056_37 (sequence is synthesized)
cagaaggagggagctcacggtgcagtacttttctaccaaagtgtgcccactggtgtcacctcctaatgttaacttggatttcctaaagcagtcccactctgttatgagagtcactgactc

SEQ ID NO: 39544 - DNA, 120 bp, Artificial Sequence
  ENSG00000058056_38 (sequence is synthesized)
ccgtggacatccccacagtaagcagccttacaaaatccagtccccttagggcagagtgagtgtcatagaataatgactccaaacccacgtcaaaaatggcttgttttcagcgatgttata

SEQ ID NO: 39545 - DNA, 120 bp, Artificial Sequence
  ENSG00000058056_39 (sequence is synthesized)
aaacaaaggcctgttttttggaattgggggtgactgggtggtttggattgaaatgtggacaaagatagcatgtgtattttgaataaaataaaaattttgtaataaaacttttaaaaatca

SEQ ID NO: 39546 - DNA, 120 bp, Artificial Sequence
  ENSG00000058056_40 (sequence is synthesized)
gtgatgtaaaatcaatatttaagactataggctataaattgtttgatttcattaactagcccttttgatgcctagacatgttgtaaaaaaattgtgctatggctgccttttcttctgccc

SEQ ID NO: 39547 - DNA, 120 bp, Artificial Sequence
  ENSG00000058056_41 (sequence is synthesized)
cacaacacaaagggctatttctacaaggcaaagttttgtatatgtgctattctttacttcagattgagagttgggaaaaactggagtaaataatgggtttcttacttgcttaaaagcata

SEQ ID NO: 39548 - DNA, 120 bp, Artificial Sequence
  ENSG00000058056_42 (sequence is synthesized)
tttatatgtgtatctcaatatatacaaggcaggttcccctataaaagtctggaatgtactgcttaattttacacttgtgtagacacgattatttgtgactgaaaagtggaataacgtgtg

SEQ ID NO: 39549 - DNA, 120 bp, Artificial Sequence
  ENSG00000058056_43 (sequence is synthesized)
gattttgtcaactcattatcagtctgttagcagtcctctatgtgaggcatggtggtctaattgtgaaattctccctgtatatgggtgtctgtgtgaaagacagcactttcttcctgtaaa

SEQ ID NO: 39550 - DNA, 120 bp, Artificial Sequence
  ENSG00000058056_44 (sequence is synthesized)
tatcttttgatatccatttatgtagaattccaatgaatatgtctttggaaaaggtaatgtatcaaagtttttattttgccaattgatctaaatgcccatataactaatcagaaatccagt

SEQ ID NO: 39551 - DNA, 120 bp, Artificial Sequence
  ENSG00000058056_45 (sequence is synthesized)
ttggttcagattgggattttcttttaaagaaaaaaaaagtatgcagaaaagactattggaagaatcatgtgttagtgacactttacatcaacgttgcttcaatattttggaattgaccag

SEQ ID NO: 39552 - DNA, 120 bp, Artificial Sequence
  ENSG00000058056_46 (sequence is synthesized)
gctgctttctcctacctgcaagagaatgtgcctgacatttcccagtgcttactttgggctataggaagtccagcggggatagctcgagcctcttgctccctgagtcatttattcccttta

SEQ ID NO: 39553 - DNA, 120 bp, Artificial Sequence
  ENSG00000058056_47 (sequence is synthesized)
cctgaacagagccttacctgcaattcatagtgagagcacctgggtctgtatcctgactccactctaagtgaggtgggactgaatcactgtacctctctgggccttttcatttgaaacaag

SEQ ID NO: 39554 - DNA, 120 bp, Artificial Sequence
  ENSG00000058056_48 (sequence is synthesized)
tgggttagactagattagctccaaagtcctctcttgccctaacattttatttttattttcctgtggttaccactagggtctgacacgtaaaatgtgagggatcacttagaggtttggatg

SEQ ID NO: 39555 - DNA, 120 bp, Artificial Sequence
  ENSG00000058056_49 (sequence is synthesized)
ttatatttttgcattgttacagcttatactccccagttgaggacctgtgtcattcttagtggccccacgacccctctgtttgtattcctgctccacttatctatacttttttgggtaatc

SEQ ID NO: 39556 - DNA, 120 bp, Artificial Sequence
  ENSG00000058056_50 (sequence is synthesized)
aaagtgctgggattacacgcatgagctaccgcgtccagccccactttttttctactcttgaaaaaaacaactttctagtccatgaggtactttggctccatccccctcaaaaacaaaaca

SEQ ID NO: 39557 - DNA, 120 bp, Artificial Sequence
  ENSG00000058056_51 (sequence is synthesized)
aaaaacaaaacaaaaaatccatttaaagtgtcctcctagaaaagcctcagaactgccttcaactacatctgtcacctttatagaatattttgaaattctggaagaggatgggaaacaaaa

SEQ ID NO: 39558 - DNA, 120 bp, Artificial Sequence
  ENSG00000058056_52 (sequence is synthesized)
ttctaatttagctagagctgtgatccccaaataagtgctgacaaaattgtctaccacagaaaggccgtccttgtcatcttgtaggcatcactgctgctaaatcacatcagtacatgcctt

SEQ ID NO: 39559 - DNA, 120 bp, Artificial Sequence
  ENSG00000058056_53 (sequence is synthesized)
ctgtggggagatggcagggggcaggggcaggaccaggggatgggattagataaagtgtgataatgtcctttagataaaagaaatcctacgctatagaacaaggttctgtactcttgagtt

SEQ ID NO: 39560 - DNA, 120 bp, Artificial Sequence
  ENSG00000058056_54 (sequence is synthesized)
ggtgtctgagatcacctgcacagtgttacagagattttccactccataaatcactctaaaagagtttgcataagactcggtagacctgtgctattcaatgtggcagtcaacagccatatg

SEQ ID NO: 39561 - DNA, 120 bp, Artificial Sequence
  ENSG00000058056_55 (sequence is synthesized)
tggcgatgactactcaaagtttggcttgttcaaatcgagactgtgttgtacacatacaatacacaccagattttgaaggcttggtaccaaaaaggaatttaaaatatttcaccaatattt

SEQ ID NO: 39562 - DNA, 120 bp, Artificial Sequence
  ENSG00000058056_56 (sequence is synthesized)
taacatgctgaaatgacactattttggatgtactaagtaaaatattaacaatttaatatatttatataattgaaattaaaattcttttcacccatttttatttttttaaaaatgtggccc

SEQ ID NO: 39563 - DNA, 120 bp, Artificial Sequence
  ENSG00000058056_57 (sequence is synthesized)
tgtggcccctaaagaacttcaaattagacatgtggataacgttatacttctattggacagccccactctagacttacatggtgtggggtaggcagtgaaatccgtaaataggaaacgcaa

SEQ ID NO: 39564 - DNA, 120 bp, Artificial Sequence
  ENSG00000058056_58 (sequence is synthesized)
ttctgcaaagtatctaaatagacagaaacaacacaaatatttttgctggagtcaggagcactgtgaggcacagaacatctcccagaaagcagattttttttttctgccgaaaaaccaata

SEQ ID NO: 39565 - DNA, 120 bp, Artificial Sequence
  ENSG00000058056_59 (sequence is synthesized)
tatatatgtatgatcccaattaaaagacaaaagcaaatgagccccaaactgcctgtcttcagctttgcctgggagctgctacctttgctcttctagcatcttctaggtaccaaggatatt

SEQ ID NO: 39566 - DNA, 120 bp, Artificial Sequence
  ENSG00000058056_60 (sequence is synthesized)
agccacttgagggtgttgggcatatttgtttcattgtaggcaaaatcctcttgtggtttcccctccccaggtattgttgagtctgttcaaagctgggtgtgttgaaacactgcacaaatc

SEQ ID NO: 39567 - DNA, 120 bp, Artificial Sequence
  ENSG00000058056_61 (sequence is synthesized)
ctgccactcttgatgtgccgcttgtctcagccttggcagaggctgagtctgttcctgtgcccacctgtccagcaggttttgatgttggctcctgaaagagtttgtatttattttattttg

SEQ ID NO: 39568 - DNA, 120 bp, Artificial Sequence
  ENSG00000058056_62 (sequence is synthesized)
cactagtcacagttgttgttaaactgtatcaaatgttttgggagattatttgcctgagatggaaagagagatggatgatttattgcttcaattgttttaaattaaaagctattctcacaa

SEQ ID NO: 39569 - DNA, 80 bp, Artificial Sequence
  ENSG00000058063_0 (sequence is synthesized)
aataatgaaggtggctgcggcgcggcggcaggctcagctgcgccgggcgggggcggcgccggggccgcgcctgtaggact

SEQ ID NO: 39570 - DNA, 120 bp, Artificial Sequence
  ENSG00000058063_1 (sequence is synthesized)
ggtaagcggaacttcggcccgaggggctcgcccgctcccgcctctgtcttgtcggcctccacctgcagccccgcggcccccgcgccccgcgggacccggacggcgacgacgggggaatgt

SEQ ID NO: 39571 - DNA, 120 bp, Artificial Sequence
  ENSG00000058063_2 (sequence is synthesized)
cggcgacgacgggggaatgtggcgctggatccggcagcagctgggttttgacccaccacatcagagtgacacaagaaccatctacgtagccaacaggtttcctcagaatggcctttacac

SEQ ID NO: 39572 - DNA, 120 bp, Artificial Sequence
  ENSG00000058063_3 (sequence is synthesized)
acctcagaaatttatagataacaggatcatttcatctaagtacactgtgtggaattttgttccaaaaaatttatttgaacagttcagaagagtggcaaacttttattttcttattatatt

SEQ ID NO: 39573 - DNA, 120 bp, Artificial Sequence
  ENSG00000058063_4 (sequence is synthesized)
tttggttcagcttatgattgatacacctaccagtccagttaccagtggacttccattattctttgtgataacagtaactgccataaagcagggatatgaagattggttacggcataactc

SEQ ID NO: 39574 - DNA, 120 bp, Artificial Sequence
  ENSG00000058063_5 (sequence is synthesized)
agataatgaagtaaatggagctcctgtttatgttgttcgaagtggtggccttgtaaaaactagatcaaaaaacattcgggtgggtgatattgttcgaatagccaaagatgaaatttttcc

SEQ ID NO: 39575 - DNA, 120 bp, Artificial Sequence
  ENSG00000058063_6 (sequence is synthesized)
tgcagacttggtgcttctgtcctcagatcgactggatggttcctgtcacgttacaactgctagtttggacggagaaactaacctgaagacacatgtggcagttccagaaacagcattatt

SEQ ID NO: 39576 - DNA, 120 bp, Artificial Sequence
  ENSG00000058063_7 (sequence is synthesized)
acaaacagttgccaatttggacactctagtagctgtaatagaatgccagcaaccagaagcagacttatacagattcatgggacgaatgatcataacccaacaaatggaagaaattgtaag

SEQ ID NO: 39577 - DNA, 120 bp, Artificial Sequence
  ENSG00000058063_8 (sequence is synthesized)
acctctggggccggagagtctcctgcttcgtggagccagattaaaaaacacaaaagaaatttttggtgttgcggtatacactggaatggaaactaagatggcattaaattacaagagcaa

SEQ ID NO: 39578 - DNA, 120 bp, Artificial Sequence
  ENSG00000058063_9 (sequence is synthesized)
atcacagaaacgatctgcagtagaaaagtcaatgaatacatttttgataatttatctagtaattcttatatctgaagctgtcatcagcactatcttgaagtatacatggcaagctgaaga

SEQ ID NO: 39579 - DNA, 120 bp, Artificial Sequence
  ENSG00000058063_10 (sequence is synthesized)
aaaatgggatgaaccttggtataaccaaaaaacagaacatcaaagaaatagcagtaagattctgagatttatttcagacttccttgcttttttggttctctacaatttcatcattccaat

SEQ ID NO: 39580 - DNA, 120 bp, Artificial Sequence
  ENSG00000058063_11 (sequence is synthesized)
ttcattatatgtgacagtcgaaatgcagaaatttcttggatcattttttattggctgggatcttgatctgtatcatgaagaatcagatcagaaagctcaagtcaatacttccgatctgaa

SEQ ID NO: 39581 - DNA, 120 bp, Artificial Sequence
  ENSG00000058063_12 (sequence is synthesized)
tgaagagcttggacaggtagagtacgtgtttacagataaaactggtacactgacagaaaatgagatgcagtttcgggaatgttcaattaatggcatgaaataccaagaaattaatggtag

SEQ ID NO: 39582 - DNA, 120 bp, Artificial Sequence
  ENSG00000058063_13 (sequence is synthesized)
acttgtacccgaaggaccaacaccagactcttcagaaggaaacttatcttatcttagtagtttatcccatcttaacaacttatcccatcttacaaccagttcctctttcagaaccagtcc

SEQ ID NO: 39583 - DNA, 120 bp, Artificial Sequence
  ENSG00000058063_14 (sequence is synthesized)
tgaaaatgaaactgaactaattaaagaacatgatctcttctttaaagcagtcagtctctgtcacactgtacagattagcaatgttcaaactgactgcactggtgatggtccctggcaatc

SEQ ID NO: 39584 - DNA, 120 bp, Artificial Sequence
  ENSG00000058063_15 (sequence is synthesized)
caacctggcaccatcgcagttggagtactatgcatcttcaccagatgaaaaggctctagtagaagctgctgcaaggattggtattgtgtttattggcaattctgaagaaactatggaggt

SEQ ID NO: 39585 - DNA, 120 bp, Artificial Sequence
  ENSG00000058063_16 (sequence is synthesized)
taaaactcttggaaaactggaacggtacaaactgcttcatattctggaatttgattcagatcgtaggagaatgagtgtaattgttcaggcaccttcaggtgagaagttattatttgctaa

SEQ ID NO: 39586 - DNA, 120 bp, Artificial Sequence
  ENSG00000058063_17 (sequence is synthesized)
aggagctgagtcatcaattctccctaaatgtataggtggagaaatagaaaaaaccagaattcatgtagatgaatttgctttgaaagggctaagaactctgtgtatagcatatagaaaatt

SEQ ID NO: 39587 - DNA, 120 bp, Artificial Sequence
  ENSG00000058063_18 (sequence is synthesized)
tacatcaaaagagtatgaggaaatagataaacgcatatttgaagccaggactgccttgcagcagcgggaagagaaattggcagctgttttccagttcatagagaaagacctgatattact

SEQ ID NO: 39588 - DNA, 120 bp, Artificial Sequence
  ENSG00000058063_19 (sequence is synthesized)
tggagccacagcagtagaagacagactacaagataaagttcgagaaactattgaagcattgagaatggctggtatcaaagtatgggtacttactggggataaacatgaaacagctgttag

SEQ ID NO: 39589 - DNA, 120 bp, Artificial Sequence
  ENSG00000058063_20 (sequence is synthesized)
tgtgagtttatcatgtggccattttcatagaaccatgaacatccttgaacttataaaccagaaatcagacagcgagtgtgctgaacaattgaggcagcttgccagaagaattacagagga

SEQ ID NO: 39590 - DNA, 120 bp, Artificial Sequence
  ENSG00000058063_21 (sequence is synthesized)
tcatgtgattcagcatgggctggtagtggatgggaccagcctatctcttgcactcagggagcatgaaaaactatttatggaagtttgcagaaattgttcagctgtattatgctgtcgtat

SEQ ID NO: 39591 - DNA, 120 bp, Artificial Sequence
  ENSG00000058063_22 (sequence is synthesized)
ggctccactgcagaaagcaaaagtaataagactaataaaaatatcacctgagaaacctataacattggctgttggtgatggtgctaatgacgtaagcatgatacaagaagcccatgttgg

SEQ ID NO: 39592 - DNA, 120 bp, Artificial Sequence
  ENSG00000058063_23 (sequence is synthesized)
cataggaatcatgggtaaagaaggaagacaggctgcaagaaacagtgactatgcaatagccagatttaagttcctctccaaattgctttttgttcatggtcatttttattatattagaat

SEQ ID NO: 39593 - DNA, 120 bp, Artificial Sequence
  ENSG00000058063_24 (sequence is synthesized)
agctacccttgtacagtattttttttataagaatgtgtgctttatcacaccccagtttttatatcagttctactgtttgttttctcagcaaacattgtatgacagcgtgtacctgacttt

SEQ ID NO: 39594 - DNA, 120 bp, Artificial Sequence
  ENSG00000058063_25 (sequence is synthesized)
atacaatatttgttttacttccctacctattctgatatatagtcttttggaacagcatgtagaccctcatgtgttacaaaataagcccaccctttatcgagacattagtaaaaaccgcct

SEQ ID NO: 39595 - DNA, 120 bp, Artificial Sequence
  ENSG00000058063_26 (sequence is synthesized)
cttaagtattaaaacatttctttattggaccatcctgggcttcagtcatgcctttattttcttttttggatcctatttactaatagggaaagatacatctctgcttggaaatggccagat

SEQ ID NO: 39596 - DNA, 120 bp, Artificial Sequence
  ENSG00000058063_27 (sequence is synthesized)
gtttggaaactggacatttggcactttggtcttcacagtcatggttattacagtcacagtaaagatggctctggaaactcatttttggacttggatcaaccatctcgttacctggggatc

SEQ ID NO: 39597 - DNA, 120 bp, Artificial Sequence
  ENSG00000058063_28 (sequence is synthesized)
tattatattttattttgtattttccttgttttatggagggattctctggccatttttgggctcccagaatatgtattttgtgtttattcagctcctgtcaagtggttctgcttggtttgc

SEQ ID NO: 39598 - DNA, 120 bp, Artificial Sequence
  ENSG00000058063_29 (sequence is synthesized)
cataatcctcatggttgttacatgtctatttcttgatatcataaagaaggtctttgaccgacacctccaccctacaagtactgaaaaggcacagcttactgaaacaaatgcaggtatcaa

SEQ ID NO: 39599 - DNA, 120 bp, Artificial Sequence
  ENSG00000058063_30 (sequence is synthesized)
agtgcatcggatcctttctataccaacgacaggagcatcttgactctctccacaatggactcatctacttgttaaaggggcagtagtactttgtgggagccagttcacctcctttcctaa

SEQ ID NO: 39600 - DNA, 120 bp, Artificial Sequence
  ENSG00000058063_31 (sequence is synthesized)
aattcagtgtgatcaccctgttaatggccacactagctctgaaattaatttccaaaatctttgtagtagttcatacccactcagagttataatggcaaacaaacagaaagcattagtaca

SEQ ID NO: 39601 - DNA, 120 bp, Artificial Sequence
  ENSG00000058063_32 (sequence is synthesized)
agcccctcccaacacccttaatttgaatctgaacatgttaaaatttgagaataaagagacatttttcatctctttgtctggtttgtcccttgtgcttatgggactcctaatggcatttca

SEQ ID NO: 39602 - DNA, 120 bp, Artificial Sequence
  ENSG00000058063_33 (sequence is synthesized)
gtctgttgctgaggccattatattttaatataaatgtagaaaaaagagagaaatcttagtaaagagtattttttagtattagcttgattattgactcttctatttaaatctgcttctgta

SEQ ID NO: 39603 - DNA, 120 bp, Artificial Sequence
  ENSG00000058063_34 (sequence is synthesized)
aattatgctgaaagtttgccttgagaactctatttttttattagagttatatttaaagcttttcatgggaaaagttaatgtgaatactgaggaattttggtccctcagtgacctgtgttg

SEQ ID NO: 39604 - DNA, 120 bp, Artificial Sequence
  ENSG00000058063_35 (sequence is synthesized)
ttaattcattaatgcattctgagttcacagagcaaattaggagaatcatttccaaccattatttactgcagtatggggagtaaatttataccaattcctctaactgtactgtaacacagc

SEQ ID NO: 39605 - DNA, 120 bp, Artificial Sequence
  ENSG00000058063_36 (sequence is synthesized)
ctgtaaagttagccatataaatgcaagggtatatcatatatacaaatcaggaatcaggtccgttcaccgaacttcaaattgatgtttactaatatttttgtgacagagtataaagaccct

SEQ ID NO: 39606 - DNA, 120 bp, Artificial Sequence
  ENSG00000058063_37 (sequence is synthesized)
atagtgggtaaattagatactattagcatattattaatttaatgtctttatcattggatcttttgcatgctttaatctggttaacatatttaaatttgctttttttctctttacctgaag

SEQ ID NO: 39607 - DNA, 120 bp, Artificial Sequence
  ENSG00000058063_38 (sequence is synthesized)
gctctgtgtatagtatttcatgacatcgttgtacagtttaactatatcaataaaaagtttggacagtatttaaatattgcaaatatgtttaattatacaaatcagaatagtatgggtaat

SEQ ID NO: 39608 - DNA, 120 bp, Artificial Sequence
  ENSG00000058063_39 (sequence is synthesized)
taaatgaatacaaaaagaagagcctctttctgcagccgacttagacatgctcttccctttctataagctagattttagaataaagggtttcagttaataatcttattttcaggttatgtc

SEQ ID NO: 39609 - DNA, 120 bp, Artificial Sequence
  ENSG00000058063_40 (sequence is synthesized)
atctaacttatagcaaactaccacaatacagtgagttctgccagtgtcccagtacaaggcatatttcaggtgtggctgtggaatgtaaaaatgctcaacttgtatcaggtaatgttagca

SEQ ID NO: 39610 - DNA, 120 bp, Artificial Sequence
  ENSG00000058063_41 (sequence is synthesized)
ataaattaaatgctaagaatgattaatcgggtacatgttactgtaattaactcattgcacttcaaaacctaacttccatcctgaatttatcaagtagttcagtattgtcatttgtttttg

SEQ ID NO: 39611 - DNA, 120 bp, Artificial Sequence
  ENSG00000058063_42 (sequence is synthesized)
ttttattgaaaagtaatgttgtcttaagatttagaagtgattattagcttgagaactattacccagctctaagcaaataatgattgtatacatattaagataatggttaaatgcggtttt

SEQ ID NO: 39612 - DNA, 120 bp, Artificial Sequence
  ENSG00000058063_43 (sequence is synthesized)
accaagttttcccttgaaaatgtaattcctttatggagatttattgtgcagccctaagcttccttcccatttcatgaatataaggcttctagaattggactggcaggggaaagaatggta

SEQ ID NO: 39613 - DNA, 120 bp, Artificial Sequence
  ENSG00000058063_44 (sequence is synthesized)
gagacagaaattaagactttatccttgtttgcttgtaaactattattttcttgctaatgtaacatttgtctgttccagtgatgtaaggatattaagttattaagctaaatattaattttc

SEQ ID NO: 39614 - DNA, 120 bp, Artificial Sequence
  ENSG00000058063_45 (sequence is synthesized)
aaaaatagtccttctttaacttagatatttcatagctggatttaggaagatctgttattctggaagtactaaaaagaataatacaacgtacaatgtctgcattcactaattcatgttcca

SEQ ID NO: 39615 - DNA, 120 bp, Artificial Sequence
  ENSG00000058063_46 (sequence is synthesized)
gaagaggaaataatgaagatatactcagtagagtactaggtgggaggatatggaaatttgctcataaaatctcttataaaacgtgcatataacaaaatgacacccagtaggcctgcatta

SEQ ID NO: 39616 - DNA, 120 bp, Artificial Sequence
  ENSG00000058063_47 (sequence is synthesized)
catttacatgaccgtgtttatttgccatcaaataaactgagtactgacaccagacaaagactccaaagtcataaaatagcctatgaccaactgcagcaagacaggaggtcagctcgccta

SEQ ID NO: 39617 - DNA, 120 bp, Artificial Sequence
  ENSG00000058063_48 (sequence is synthesized)
taatggtgcttaaagtgtgattgatgtaattttctgtactcaccatttgaagttagttaaggagaactttatttttttaaaaaaagtaaatggcaaccactagtgtgctcatcctgaact

SEQ ID NO: 39618 - DNA, 120 bp, Artificial Sequence
  ENSG00000058063_49 (sequence is synthesized)
gttactccaaatccactccgtttttaaagcaaaattatcttgtgattttaagaaaagagttttctatttatttaagaaagtaacaatgcagtctgcaagctttcagtagttttctagtgc

SEQ ID NO: 39619 - DNA, 120 bp, Artificial Sequence
  ENSG00000058063_50 (sequence is synthesized)
tatattcatcctgtaaaactcttactacgtaaccagtaatcacaaggaaagtgtcccctttgcatatttctttaaaattctttctttggaaagtatgatgttgataattaacttaccctt

SEQ ID NO: 39620 - DNA, 120 bp, Artificial Sequence
  ENSG00000058063_51 (sequence is synthesized)
atctgccaaaaccagagcaaaatgctaaatacgttattgctaatcagtggtctcaaatcgatttgcctccctttgcctcgtctgagggctgtaagcctgaagatagtggcaagcaccaag

SEQ ID NO: 39621 - DNA, 120 bp, Artificial Sequence
  ENSG00000058063_52 (sequence is synthesized)
tcagtttccaaaattgcccctcagctgctttaagtgactcagcaccctgcctcagcttcagcaggcgtaggctcaccctgggcggagcaaagtatgggccagggagaactacagctacga

SEQ ID NO: 39622 - DNA, 120 bp, Artificial Sequence
  ENSG00000058063_53 (sequence is synthesized)
agacctgctgtcgagttgagaaaaggggagaatttatggtctgaattttctaactgtcctctttcttgggtctaaagctcataatacacaaaggcttccagacctgagccacacccaggc

SEQ ID NO: 39623 - DNA, 120 bp, Artificial Sequence
  ENSG00000058063_54 (sequence is synthesized)
cctatcctgaacaggagactaaacagaggcaaatcaaccctaggaaatacttgcattctgccctacggttagtaccaggactgaggtcatttctactggaaaagattgtgagattgaact

SEQ ID NO: 39624 - DNA, 120 bp, Artificial Sequence
  ENSG00000058063_55 (sequence is synthesized)
tatctgatcgcttgagactcctaataggcaggagtcaaggccactagaaaattgacagttaagagccaaaagtttttaaaatatgctactctgaaaaatctcgtgaaggctgtaggaaaa

SEQ ID NO: 39625 - DNA, 120 bp, Artificial Sequence
  ENSG00000058063_56 (sequence is synthesized)
gggagaatcttccatgttggtgtttttcctgtaaagatcagtttggggtatgatataagcaggtattaataaaaataacacaccaaagagttacgtaaaacatgttttattaattttggt

SEQ ID NO: 39626 - DNA, 120 bp, Artificial Sequence
  ENSG00000058063_57 (sequence is synthesized)
ccccacgtacagacattttatttctattttgaaatgagttatctattttcataaaagtaaaacactattaaagtgctgttttatgtgaaataacttgaatgttgttcctataaaaaatag

SEQ ID NO: 39627 - DNA, 120 bp, Artificial Sequence
  ENSG00000058063_58 (sequence is synthesized)
atcataactcatgatatgtttgtaatcatggtaatttagatttttatgaggaatgagtatctggaaatattgtagcaatacttggtttaaaattttggacctgagacactgtggctgtct

SEQ ID NO: 39628 - DNA, 120 bp, Artificial Sequence
  ENSG00000058063_59 (sequence is synthesized)
gtctaatgtaatcctttaaaaattctctgcattgtcagtaaatgtagtatattattgtacagctactcataattttttaaagtttatgaagttatatttatcaaataaaaactttcctat

SEQ ID NO: 39629 - DNA, 120 bp, Artificial Sequence
  ENSG00000058063_60 (sequence is synthesized)
tccaacccacatcagcaggtgtgaaatctctctaagtagcctttgctgcagatgagtatcctatctggaacaggatgaacctgccgctctagatacctaataaatcagcagctggtttta

SEQ ID NO: 39630 - DNA, 120 bp, Artificial Sequence
  ENSG00000058063_61 (sequence is synthesized)
gaagagaaagcacctttgaagagacttcatctaatgaacaaaaaattttgtttcataatctttctaaaatgtgctcagtaggagtgtgtttatggtactcttttatggtttgtataactt

SEQ ID NO: 39631 - DNA, 120 bp, Artificial Sequence
  ENSG00000058063_62 (sequence is synthesized)
ggctttccttttcttactctgtatgtatattttccagttggttatttgaggctttgaggtatttataaacacaaaaggctgtatttctgctcccctacctcttcttatgtctgtaatgaa

SEQ ID NO: 39632 - DNA, 120 bp, Artificial Sequence
  ENSG00000058063_63 (sequence is synthesized)
gttttgaaatgagtcatgatttttaagtttcttttgcttggtatttattgcctaattaaaagtgtatgagttagaacaggctttttaaattatggagtaaaagaatcttagcatttttgt

SEQ ID NO: 39633 - DNA, 120 bp, Artificial Sequence
  ENSG00000058063_64 (sequence is synthesized)
cccctcctaaatctgtttcttgaatgagatttatcaccatgcctgctgttgtgcaccataacgaaaaaaaacaccttttggtaaacaccatttaaaattcatttaaacttgcaatggatt

SEQ ID NO: 39634 - DNA, 120 bp, Artificial Sequence
  ENSG00000058063_65 (sequence is synthesized)
tatttattcatacatttccccaagagttatatcactatttagaggatgttagggggtagaaagagctttttccacacttggtgttctttaggtgaatgataccatattctcaaaatcagg

SEQ ID NO: 39635 - DNA, 120 bp, Artificial Sequence
  ENSG00000058063_66 (sequence is synthesized)
gcagcagtacacggtatgcatggaggtacaaatgggcagggagagatgttggttgccattgtcccaaatgtgctacatgaatattagcactttctacatgtgccagggcttggaaaaggt

SEQ ID NO: 39636 - DNA, 120 bp, Artificial Sequence
  ENSG00000058063_67 (sequence is synthesized)
tggaaattaccccaggaacaggttataaagagtgaagaaggcactactcctatctactggaaaaaggatttttattatttggttagctttgtgttttaaaaaaatgatgagtatgatatc

SEQ ID NO: 39637 - DNA, 120 bp, Artificial Sequence
  ENSG00000058063_68 (sequence is synthesized)
attcatctgttataaaattcaggtaacttttactggtgaacttgttagttctcactttagctttagcttagccatgcctttatgatacaattgaatttataaatagcattcttatgttaa

SEQ ID NO: 39638 - DNA, 120 bp, Artificial Sequence
  ENSG00000058063_69 (sequence is synthesized)
taaggaaaaggcatggatcatctccaagaaaagaattgccaaattgctgataaatagatgaaaatatgaattctcatggaggaaatattattgagttttggaatatgggtaaaatgacag

SEQ ID NO: 39639 - DNA, 120 bp, Artificial Sequence
  ENSG00000058063_70 (sequence is synthesized)
aagaagataagggttcagtcagctcagcatatgaatttgctgaaagccagcacagaggggaggacagtaggcacctgctagctgaggcttgcagccagcaggacagttgttgcgtgcact

SEQ ID NO: 39640 - DNA, 120 bp, Artificial Sequence
  ENSG00000058063_71 (sequence is synthesized)
gaacaaagtgtctttggattataattatacttaactttggttaaagtagtaaagtttgaccagattaaggggaagtttttaaaattactatttcaaaaataaaaaggttttaagaaagaa

SEQ ID NO: 39641 - DNA, 120 bp, Artificial Sequence
  ENSG00000058085_0 (sequence is synthesized)
acagcggagcgcagagtgagaaccaccaaccgaggcgccgggcagcgacccctgcagcggagacagagactgagcggcccggccccgccatgcctgcgctctggctgggctgctgcctct

SEQ ID NO: 39642 - DNA, 120 bp, Artificial Sequence
  ENSG00000058085_1 (sequence is synthesized)
gcttctcgctcctcctgcccgcagcccgggccacctccaggagggaagtctgtgattgcaatgggaagtccaggcagtgtatctttgatcgggaacttcacagacaaactggtaatggat

SEQ ID NO: 39643 - DNA, 120 bp, Artificial Sequence
  ENSG00000058085_2 (sequence is synthesized)
tccgctgcctcaactgcaatgacaacactgatggcattcactgcgagaagtgcaagaatggcttttaccggcacagagaaagggaccgctgtttgccctgcaattgtaactccaaaggtt

SEQ ID NO: 39644 - DNA, 120 bp, Artificial Sequence
  ENSG00000058085_3 (sequence is synthesized)
ctcttagtgctcgatgtgacaactccggacggtgcagctgtaaaccaggtgtgacaggagccagatgcgaccgatgtctgccaggcttccacatgctcacggatgcggggtgcacccaag

SEQ ID NO: 39645 - DNA, 120 bp, Artificial Sequence
  ENSG00000058085_4 (sequence is synthesized)
accagagactgctagactccaagtgtgactgtgacccagctggcatcgcagggccctgtgacgcgggccgctgtgtctgcaagccagctgtcactggagaacgctgtgataggtgtcgat

SEQ ID NO: 39646 - DNA, 120 bp, Artificial Sequence
  ENSG00000058085_5 (sequence is synthesized)
caggttactataatctggatggggggaaccctgagggctgtacccagtgtttctgctatgggcattcagccagctgccgcagctctgcagaatacagtgtccataagatcacctctacct

SEQ ID NO: 39647 - DNA, 120 bp, Artificial Sequence
  ENSG00000058085_6 (sequence is synthesized)
ttcatcaagatgttgatggctggaaggctgtccaacgaaatgggtctcctgcaaagctccaatggtcacagcgccatcaagatgtgtttagctcagcccaacgactagaccctgtctatt

SEQ ID NO: 39648 - DNA, 120 bp, Artificial Sequence
  ENSG00000058085_7 (sequence is synthesized)
ttgtggctcctgccaaatttcttgggaatcaacaggtgagctatggtcaaagcctgtcctttgactaccgtgtggacagaggaggcagacacccatctgcccatgatgtgattctggaag

SEQ ID NO: 39649 - DNA, 120 bp, Artificial Sequence
  ENSG00000058085_8 (sequence is synthesized)
gtgctggtctacggatcacagctcccttgatgccacttggcaagacactgccttgtgggctcaccaagacttacacattcaggttaaatgagcatccaagcaataattggagcccccagc

SEQ ID NO: 39650 - DNA, 120 bp, Artificial Sequence
  ENSG00000058085_9 (sequence is synthesized)
tgagttactttgagtatcgaaggttactgcggaatctcacagccctccgcatccgagctacatatggagaatacagtactgggtacattgacaatgtgaccctgatttcagcccgccctg

SEQ ID NO: 39651 - DNA, 120 bp, Artificial Sequence
  ENSG00000058085_10 (sequence is synthesized)
tctctggagccccagcaccctgggttgaacagtgtatatgtcctgttgggtacaaggggcaattctgccaggattgtgcttctggctacaagagagattcagcgagactggggccttttg

SEQ ID NO: 39652 - DNA, 120 bp, Artificial Sequence
  ENSG00000058085_11 (sequence is synthesized)
gcacctgtattccttgtaactgtcaagggggaggggcctgtgatccagacacaggagattgttattcaggggatgagaatcctgacattgagtgtgctgactgcccaattggtttctaca

SEQ ID NO: 39653 - DNA, 120 bp, Artificial Sequence
  ENSG00000058085_12 (sequence is synthesized)
acgatccgcacgacccccgcagctgcaagccatgtccctgtcataacgggttcagctgctcagtgatgccggagacggaggaggtggtgtgcaataactgccctcccggggtcaccggtg

SEQ ID NO: 39654 - DNA, 120 bp, Artificial Sequence
  ENSG00000058085_13 (sequence is synthesized)
cccgctgtgagctctgtgctgatggctactttggggacccctttggtgaacatggcccagtgaggccttgtcagccctgtcaatgcaacaacaatgtggaccccagtgcctctgggaatt

SEQ ID NO: 39655 - DNA, 120 bp, Artificial Sequence
  ENSG00000058085_14 (sequence is synthesized)
gtgaccggctgacaggcaggtgtttgaagtgtatccacaacacagccggcatctactgcgaccagtgcaaagcaggctacttcggggacccattggctcccaacccagcagacaagtgtc

SEQ ID NO: 39656 - DNA, 120 bp, Artificial Sequence
  ENSG00000058085_15 (sequence is synthesized)
gagcttgcaactgtaaccccatgggctcagagcctgtaggatgtcgaagtgatggcacctgtgtttgcaagccaggatttggtggccccaactgtgagcatggagcattcagctgtccag

SEQ ID NO: 39657 - DNA, 120 bp, Artificial Sequence
  ENSG00000058085_16 (sequence is synthesized)
cttgctataatcaagtgaagattcagatggatcagtttatgcagcagcttcagagaatggaggccctgatttcaaaggctcagggtggtgatggagtagtacctgatacagagctggaag

SEQ ID NO: 39658 - DNA, 120 bp, Artificial Sequence
  ENSG00000058085_17 (sequence is synthesized)
gcaggatgcagcaggctgagcaggcccttcaggacattctgagagatgcccagatttcagaaggtgctagcagatcccttggtctccagttggccaaggtgaggagccaagagaacagct

SEQ ID NO: 39659 - DNA, 120 bp, Artificial Sequence
  ENSG00000058085_18 (sequence is synthesized)
accagagccgcctggatgacctcaagatgactgtggaaagagttcgggctctgggaagtcagtaccagaaccgagttcgggatactcacaggctcatcactcagatgcagctgagcctgg

SEQ ID NO: 39660 - DNA, 120 bp, Artificial Sequence
  ENSG00000058085_19 (sequence is synthesized)
cagaaagtgaagcttccttgggaaacactaacattcctgcctcagaccactacgtggggccaaatggctttaaaagtctggctcaggaggccacaagattagcagaaagccacgttgagt

SEQ ID NO: 39661 - DNA, 120 bp, Artificial Sequence
  ENSG00000058085_20 (sequence is synthesized)
cagccagtaacatggagcaactgacaagggaaactgaggactattccaaacaagccctctcactggtgcgcaaggccctgcatgaaggagtcggaagcggaagcggtagcccggacggtg

SEQ ID NO: 39662 - DNA, 120 bp, Artificial Sequence
  ENSG00000058085_21 (sequence is synthesized)
ctgtggtgcaagggcttgtggaaaaattggagaaaaccaagtccctggcccagcagttgacaagggaggccactcaagcggaaattgaagcagataggtcttatcagcacagtctccgcc

SEQ ID NO: 39663 - DNA, 120 bp, Artificial Sequence
  ENSG00000058085_22 (sequence is synthesized)
tgagttcaagcgtacacagaagaatctgggaaactggaaagaagaagcacagcagctcttacagaatggaaaaagtgggagagagaaatcagatcagctgctttcccgtgccaatcttgc

SEQ ID NO: 39664 - DNA, 120 bp, Artificial Sequence
  ENSG00000058085_23 (sequence is synthesized)
taaaagcagagcacaagaagcactgagtatgggcaatgccactttttatgaagttgagagcatccttaaaaacctcagagagtttgacctgcaggtggacaacagaaaagcagaagctga

SEQ ID NO: 39665 - DNA, 120 bp, Artificial Sequence
  ENSG00000058085_24 (sequence is synthesized)
agaagccatgaagagactctcctacatcagccagaaggtttcagatgccagtgacaagacccagcaagcagaaagagccctggggagcgctgctgctgatgcacagagggcaaagaatgg

SEQ ID NO: 39666 - DNA, 120 bp, Artificial Sequence
  ENSG00000058085_25 (sequence is synthesized)
ggccggggaggccctggaaatctccagtgagattgaacaggagattgggagtctgaacttggaagccaatgtgacagcagatggagccttggccatggaaaagggactggcctctctgaa

SEQ ID NO: 39667 - DNA, 120 bp, Artificial Sequence
  ENSG00000058085_26 (sequence is synthesized)
gagtgagatgagggaagtggaaggagagctggaaaggaaggagctggagtttgacacgaatatggatgcagtacagatggtgattacagaagcccagaaggttgataccagagccaagaa

SEQ ID NO: 39668 - DNA, 120 bp, Artificial Sequence
  ENSG00000058085_27 (sequence is synthesized)
cgctggggttacaatccaagacacactcaacacattagacggcctcctgcatctgatggaccagcctctcagtgtagatgaagaggggctggtcttactggagcagaagctttcccgagc

SEQ ID NO: 39669 - DNA, 120 bp, Artificial Sequence
  ENSG00000058085_28 (sequence is synthesized)
caagacccagatcaacagccaactgcggcccatgatgtcagagctggaagagagggcacgtcagcagaggggccacctccatttgctggagacaagcatagatgggattctggctgatgt

SEQ ID NO: 39670 - DNA, 120 bp, Artificial Sequence
  ENSG00000058085_29 (sequence is synthesized)
gaagaacttggagaacattagggacaacctgcccccaggctgctacaatacccaggctcttgagcaacagtgaagctgccataaatatttctcaactgaggttcttgggatacagatctc

SEQ ID NO: 39671 - DNA, 120 bp, Artificial Sequence
  ENSG00000058085_30 (sequence is synthesized)
agggctcgggagccatgtcatgtgagtgggtgggatggggacatttgaacatgtttaatgggtatgctcaggtcaactgacctgaccccattcctgatcccatggccaggtggttgtctt

SEQ ID NO: 39672 - DNA, 120 bp, Artificial Sequence
  ENSG00000058085_31 (sequence is synthesized)
attgcaccatactccttgcttcctgatgctgggcaatgaggcagatagcactgggtgtgagaatgatcaaggatctggaccccaaagaatagactggatggaaagacaaactgcacaggc

SEQ ID NO: 39673 - DNA, 120 bp, Artificial Sequence
  ENSG00000058085_32 (sequence is synthesized)
agatgtttgcctcataatagtcgtaagtggagtcctggaatttggacaagtgctgttgggatatagtcaacttattctttgagtaatgtgactaaaggaaaaaactttgactttgcccag

SEQ ID NO: 39674 - DNA, 120 bp, Artificial Sequence
  ENSG00000058085_33 (sequence is synthesized)
gcatgaaattcttcctaatgtcagaacagagtgcaacccagtcacactgtggccagtaaaatactattgcctcatattgtcctctgcaagcttcttgctgatcagagttcctcctactta

SEQ ID NO: 39675 - DNA, 120 bp, Artificial Sequence
  ENSG00000058085_34 (sequence is synthesized)
caacccagggtgtgaacatgttctccattttcaagctggaagaagtgagcagtgttggagtgaggacctgtaaggcaggcccattcagagctatggtgcttgctggtgcctgccaccttc

SEQ ID NO: 39676 - DNA, 120 bp, Artificial Sequence
  ENSG00000058085_35 (sequence is synthesized)
aagttctggacctgggcatgacatcctttcttttaatgatgccatggcaacttagagattgcatttttattaaagcatttcctaccagcaaagcaaatgttgggaaagtatttacttttt

SEQ ID NO: 39677 - DNA, 120 bp, Artificial Sequence
  ENSG00000058085_36 (sequence is synthesized)
cggtttcaaagtgatagaaaagtgtggcttgggcattgaaagaggtaaaattctctagatttattagtcctaattcaatcctacttttcgaacaccaaaaatgatgcgcatcaatgtatt

SEQ ID NO: 39678 - DNA, 120 bp, Artificial Sequence
  ENSG00000058085_37 (sequence is synthesized)
ttatcttattttctcaatctcctctctctttcctccacccataataagagaatgttcctactcacacttcagctgggtcacatccatccctccattcatccttccatccatctttccatc

SEQ ID NO: 39679 - DNA, 120 bp, Artificial Sequence
  ENSG00000058085_38 (sequence is synthesized)
cattacctccatccatccttccaacatatatttattgagtacctactgtgtgccaggggctggtgggacagtggtgacatagtctctgccctcatagagttgattgtctagtgaggaaga

SEQ ID NO: 39680 - DNA, 120 bp, Artificial Sequence
  ENSG00000058085_39 (sequence is synthesized)
caagcatttttaaaaaataaatttaaacttacaaactttgtttgtcacaagtggtgtttattgcaataaccgcttggtttgcaacctctttgctcaacagaacatatgttgcaagaccct

SEQ ID NO: 39681 - DNA, 120 bp, Artificial Sequence
  ENSG00000058085_40 (sequence is synthesized)
cccatgggggcacttgagttttggcaaggctgacagagctctgggttgtgcacatttctttgcattccagctgtcactctgtgcctttctacaactgattgcaacagactgttgagttat

SEQ ID NO: 39682 - DNA, 120 bp, Artificial Sequence
  ENSG00000058085_41 (sequence is synthesized)
gataacaccagtgggaattgctggaggaaccagaggcacttccaccttggctgggaagactatggtgctgccttgcttctgtatttccttggattttcctgaaagtgtttttaaataaag

SEQ ID NO: 39683 - DNA, 120 bp, Artificial Sequence
  ENSG00000058085_42 (sequence is synthesized)
aacaattgttagatgcctggggtcagtttctgatttactaaactctaagcctatgatggtaccaaagtaatggaaatgaaaatgccacagaaatggcaataggtcctagagttagcatct

SEQ ID NO: 39684 - DNA, 120 bp, Artificial Sequence
  ENSG00000058085_43 (sequence is synthesized)
tcagttcccacttctgagcatcttacttcgcccattccaaccatacaggattgatgatgctgtcaatgagatttttatgaggtttaactgatgctgtcttctaagcataaagctttattt

SEQ ID NO: 39685 - DNA, 120 bp, Artificial Sequence
  ENSG00000058085_44 (sequence is synthesized)
gctccatgctccagggctttgctccagaacactcactatacctagccccagcaaaggggagtctcagctttccttaaggatatcagtaaatgtgctttgtttccaggcccagataacttt

SEQ ID NO: 39686 - DNA, 120 bp, Artificial Sequence
  ENSG00000058085_45 (sequence is synthesized)
cggcaggttcccttacatttactggaccctgttttaccgttgctaagatgggtcactgaacacctattgcacttgggggtaaaggtctgtgggccaaagaacaggtgtatataagcaact

SEQ ID NO: 39687 - DNA, 120 bp, Artificial Sequence
  ENSG00000058085_46 (sequence is synthesized)
tcacagaacacgagacagcttgggaatcctgctaaagagtctggcctggaccctgagaagccagtggacagttttaagcagaggaataacatcaccactgtatatttcagaaagatcact

SEQ ID NO: 39688 - DNA, 120 bp, Artificial Sequence
  ENSG00000058085_47 (sequence is synthesized)
agggcagccgagtggaggaaagcttgaagagggggttagagagaaggcaggttgagactacttaagatattgttgaaataattgaagagagaaatgacaggagcctgctctaaggcagta

SEQ ID NO: 39689 - DNA, 120 bp, Artificial Sequence
  ENSG00000058085_48 (sequence is synthesized)
aatgacaggagcctgctctaaggcagtagaatggtggctgggaagatgtgaaggaagattttcccagtctgtgaagtcaagaatcacttgccggccgggtgtggtggctcacgcctgtaa

SEQ ID NO: 39690 - DNA, 120 bp, Artificial Sequence
  ENSG00000058085_49 (sequence is synthesized)
gatgtttgcctcataatagtcgcatgaaattcttcctaatgtcagaacagagtgcaacccagtcacactgtggccagtaaaatactattgcctcatattgtcctctgcaagcttcttgct

SEQ ID NO: 39691 - DNA, 120 bp, Artificial Sequence
  ENSG00000058085_50 (sequence is synthesized)
gatgcacagagggcaaagaatggggccggggaggccctggaaatctccagtgagattgaacaggtaaagagaaatcgacatgtgtgttggtgccagtagcaccaaacacaagggtggtgt

SEQ ID NO: 39692 - DNA, 120 bp, Artificial Sequence
  ENSG00000058085_51 (sequence is synthesized)
ggagggaaaaagaacattgagcttattttaacctctgaggctcagagccctgttgtggcccatgggagccccagattaaaagactatggtagcaaagacgcatgacagagaatgatgtgt

SEQ ID NO: 39693 - DNA, 120 bp, Artificial Sequence
  ENSG00000058085_52 (sequence is synthesized)
ttttttgtcctccgggttttcccaaatggttcctaactctgttcaacatttggtgagcattgaactgagagagaagcactgtctggccgctgaccttcctagtcatacccccagattagc

SEQ ID NO: 39694 - DNA, 120 bp, Artificial Sequence
  ENSG00000058085_53 (sequence is synthesized)
attcatctaatttactccatcagggcccggctgccgctgtattttttctatggttgtctttgggatgtttttgtgcctcacccctatctctccttccgtccctggctccttttcttctct

SEQ ID NO: 39695 - DNA, 80 bp, Artificial Sequence
  ENSG00000058091_0 (sequence is synthesized)
cccccggcaccacgtaaaccgcccccgcccgcccagctgcggcccaggccggagcggagcctgccgtcctccgcctgcct

SEQ ID NO: 39696 - DNA, 120 bp, Artificial Sequence
  ENSG00000058091_1 (sequence is synthesized)
ccggagcggagcctgccgtcctccgcctgcctgctgctcgcctccctagacctgcgcgtcgcttcccggcccgccgaggaggtggtggaggaggaggcgccgctttccccgcggcgcgcg

SEQ ID NO: 39697 - DNA, 120 bp, Artificial Sequence
  ENSG00000058091_2 (sequence is synthesized)
ccctcgccgttgtctgagctgtgcctggaccagtttggggaagttgtcggggctccgcgtcgcccagatgtgtgacctcattgagccgcagccggccgagaagatcggcaagatgaagaa

SEQ ID NO: 39698 - DNA, 120 bp, Artificial Sequence
  ENSG00000058091_3 (sequence is synthesized)
gttgcggagaactttgtcggagagtttcagtcgcattgctttgaagaaagatgacaccacctttgatgagatatgtgtcacaaagatgtctacacggaactgccagggaatggactcagt

SEQ ID NO: 39699 - DNA, 120 bp, Artificial Sequence
  ENSG00000058091_4 (sequence is synthesized)
gatcaaacccctggacacaattcctgaggataaaaaagtcagagttcagaggacacagagcacttttgacccatttgagaaaccagctaatcaagtaaagagggtgcattctgagaacaa

SEQ ID NO: 39700 - DNA, 120 bp, Artificial Sequence
  ENSG00000058091_5 (sequence is synthesized)
tgcttgcattaactttaagacctcctccactggcaaagagtcacctaaagttaggcggcactccagccccagctcgccaacaagtcccaaatttggaaaagctgactcatatgaaaagct

SEQ ID NO: 39701 - DNA, 120 bp, Artificial Sequence
  ENSG00000058091_6 (sequence is synthesized)
ggaaaaactaggggaaggatcttatgctacagtatacaaagggaaaagcaaggtaaatgggaagttggtagctctgaaggtgatcaggctgcaggaagaagaagggacacctttcacagc

SEQ ID NO: 39702 - DNA, 120 bp, Artificial Sequence
  ENSG00000058091_7 (sequence is synthesized)
tatcagggaagcttctcttttaaaaggactaaaacatgctaacatagtgctacttcatgacatcatccataccaaggagacgctgacacttgtgtttgaatatgtgcacactgatttatg

SEQ ID NO: 39703 - DNA, 120 bp, Artificial Sequence
  ENSG00000058091_8 (sequence is synthesized)
tcagtacatggacaagcaccctggggggctgcatccagataatgtgaagttgtttttatttcagttgctgcgaggtctgtcttacatccaccagcgttatattttgcacagagacctgaa

SEQ ID NO: 39704 - DNA, 120 bp, Artificial Sequence
  ENSG00000058091_9 (sequence is synthesized)
accacagaaccttctgatcagtgacacgggggagttaaagctggcagatttcggtcttgcaagagcaaaatccgtccctagccacacatactccaacgaagtggttaccttgtggtacag

SEQ ID NO: 39705 - DNA, 120 bp, Artificial Sequence
  ENSG00000058091_10 (sequence is synthesized)
acctccagatgtccttctaggctcaacagaatattccacctgccttgacatgtggggagtaggttgcatctttgttgaaatgatccaaggagttgctgcttttccaggaatgaaagacat

SEQ ID NO: 39706 - DNA, 120 bp, Artificial Sequence
  ENSG00000058091_11 (sequence is synthesized)
tcaggatcaacttgaacgaatatttctggttcttggaacaccaaatgaggacacatggcctggagttcattctttaccacattttaagccagaacgctttaccctgtacagctctaaaaa

SEQ ID NO: 39707 - DNA, 120 bp, Artificial Sequence
  ENSG00000058091_12 (sequence is synthesized)
ccttagacaagcatggaataagctcagctatgtgaaccatgcagaggacctggcctccaagctcctacaatgttccccaaagaacagactgtcggcacaggctgccttgagccacgagta

SEQ ID NO: 39708 - DNA, 120 bp, Artificial Sequence
  ENSG00000058091_13 (sequence is synthesized)
ttttagtgacctgccgccacggctatgggaactcaccgacatgtcttctatttttactgtcccaaatgtgagattgcaaccagaagctggagaaagcatgcgggcctttgggaaaaacaa

SEQ ID NO: 39709 - DNA, 120 bp, Artificial Sequence
  ENSG00000058091_14 (sequence is synthesized)
tagttatggcaaaagtctatcaaacagcaagcactgacaagcagcacattctcaagagcacacaggattaagttgtcatcattctgggaagaaaaaaaaaacattaatgaagaggccaat

SEQ ID NO: 39710 - DNA, 120 bp, Artificial Sequence
  ENSG00000058091_15 (sequence is synthesized)
aatatgaagggaatcatggatcagttttctttcgctccctgtggtggatttcacttacaagaaaattgaagctggcaagaccctgttttctctgcaatttatttaaaaccttgcacgcat

SEQ ID NO: 39711 - DNA, 120 bp, Artificial Sequence
  ENSG00000058091_16 (sequence is synthesized)
ttggataccttgtgatttccaagaactacgtgaagattaagctttgcttactgatacatggcatgtattcttttcagtcttttgtgtttgattttgtttgatttccctctgcagcacagc

SEQ ID NO: 39712 - DNA, 120 bp, Artificial Sequence
  ENSG00000058091_17 (sequence is synthesized)
gtctctgtaaaggtttttatgctttcaccagccatgtcttaaatacattaagacaacacatttggtgttcacacttcttcagtaatgtctgaacttgaaagccacagagtggcataaaac

SEQ ID NO: 39713 - DNA, 120 bp, Artificial Sequence
  ENSG00000058091_18 (sequence is synthesized)
aatgtgtgttttctttgagagcagtgcacattttgcaaccactaggaaggaaattttctgctaaagcaaacccctgttctctgacttgacaacttggccccggactgtggggccccacct

SEQ ID NO: 39714 - DNA, 120 bp, Artificial Sequence
  ENSG00000058091_19 (sequence is synthesized)
gttgcttaccttttgaggtaattttgcaaatgtggtttttttacttggaaataactgcacatttatatataggatattggactctgcttagcattttcaagccacatagcatgactgttt

SEQ ID NO: 39715 - DNA, 120 bp, Artificial Sequence
  ENSG00000058091_20 (sequence is synthesized)
tttgaataggttggaattgaaaaaacaattatcaaacgttaagaacaaagacagggataaattgcttacatttcaacctctggagattgaggtaactttttgtgtctgggtcttgtcaac

SEQ ID NO: 39716 - DNA, 120 bp, Artificial Sequence
  ENSG00000058091_21 (sequence is synthesized)
ttccatccattctgttacactttgtattttctaactggagaaaagagtgaggaacagaatgttttaaatctggtgcaaaagaactatatctgctggatgagccttgaaagcagtcttggc

SEQ ID NO: 39717 - DNA, 120 bp, Artificial Sequence
  ENSG00000058091_22 (sequence is synthesized)
ctgttagggcttacaaagtaaattacaaagtgatccagttcaaagtttgcttagttacaacaaagcacctttaaaaaaaatacattttaaaaaaacattccaagccaattggaagacatc

SEQ ID NO: 39718 - DNA, 120 bp, Artificial Sequence
  ENSG00000058091_23 (sequence is synthesized)
attgggttcttactttaagacatctcctggaataactgttcaaatgcaggttttagaaacaatgcaggaatcttgctttaaagatgaaaaagggaatgggccagcttcccttactcaagg

SEQ ID NO: 39719 - DNA, 120 bp, Artificial Sequence
  ENSG00000058091_24 (sequence is synthesized)
agttgagggaccttggaggatgaaggcgagtatgtgacactggagaaaagtggaccaggcatgtcttttgctttgatctggagggagggctgcctgatgcaggccggctcccagtggggc

SEQ ID NO: 39720 - DNA, 120 bp, Artificial Sequence
  ENSG00000058091_25 (sequence is synthesized)
aggcctcgctgcagaatgcccagtagtactgcggccaaggggacagttaggagacttcatctaaagcatgaaacctagctcctctacacacaaattcctatggaaatacctttgtgtaca

SEQ ID NO: 39721 - DNA, 120 bp, Artificial Sequence
  ENSG00000058091_26 (sequence is synthesized)
gtgtcttacattttcctattagtcagaaagaaggagagaatgagtgagtgcttgaaatgtgtcatactgttttaggatcaagactaggaattaggagccaggttgacaaggactttttct

SEQ ID NO: 39722 - DNA, 120 bp, Artificial Sequence
  ENSG00000058091_27 (sequence is synthesized)
gagagttgggtgagggtaaagcttttctataatcaagctcaatacaccaaggaaactggatccagaattcctaaactttaaaatggtactgtctgcggagtggagtatggatggttatgt

SEQ ID NO: 39723 - DNA, 120 bp, Artificial Sequence
  ENSG00000058091_28 (sequence is synthesized)
caaagtcatagttcatcctatccagatgtagcattcatggtaaacttttaagtgctaagcaaggaattatttactgattggttttaaagagagcagaaaacacccaagtgtagaatgtct

SEQ ID NO: 39724 - DNA, 120 bp, Artificial Sequence
  ENSG00000058091_29 (sequence is synthesized)
actgtttgctacctagaaatcttttccattcctctttcatacattccaacccactggaagtctttagaggtattttgatttaaagtatacttaaattaggatttcttaaagaaaacatag

SEQ ID NO: 39725 - DNA, 120 bp, Artificial Sequence
  ENSG00000058091_30 (sequence is synthesized)
ggagaaaactttacatgcaattaaaaatggactttcctgtgatttgtttttaatcattcatttggagaagaggcatgacctttgtatttcactaagtttaaagcaagagcaactgatgat

SEQ ID NO: 39726 - DNA, 120 bp, Artificial Sequence
  ENSG00000058091_31 (sequence is synthesized)
taaatgttgctttttaataaggtttttaacttgaaaatttgaaaatatttaatgttgaaagacttcaattagggctattagagttatatctccctgtcgtaggcagcttcttcggagaag

SEQ ID NO: 39727 - DNA, 120 bp, Artificial Sequence
  ENSG00000058091_32 (sequence is synthesized)
tgaaatataacattactcagtggacggagaaatctgttttgttacagagacatgcctctcagaaggtcaggaggttttgagtacctatccttgccacccatacaggaaatccaaagtttg

SEQ ID NO: 39728 - DNA, 120 bp, Artificial Sequence
  ENSG00000058091_33 (sequence is synthesized)
gtgtctctctctctctgtctctttctttctctttctccccccaaacccctctcactccctccctccctctctccttcccctatttgcaatcatattctccctctgcttcttttctcttct

SEQ ID NO: 39729 - DNA, 120 bp, Artificial Sequence
  ENSG00000058091_34 (sequence is synthesized)
gccctccttgtgggcagtcatgaaaatcaattcagactgtgttgattagcagatttattattctattgagaaagcactggaatgttttgtgagattatttttatatgaaggaatagcctg

SEQ ID NO: 39730 - DNA, 120 bp, Artificial Sequence
  ENSG00000058091_35 (sequence is synthesized)
aactcaaacagatggtaagaatagtacaaacaccttagcacatcactgcacacacagtattctgaaaggagatttgacacttaattcccattttcttaaaataacagttttgttgactta

SEQ ID NO: 39731 - DNA, 120 bp, Artificial Sequence
  ENSG00000058091_36 (sequence is synthesized)
aaaatatgagatacataggatgtgaaaaaaaatgtttgcagtactcagcaaaaaatagggtacataaagcagggtggctgtccatccactgattctggggtgagaagcgatttctacctc

SEQ ID NO: 39732 - DNA, 120 bp, Artificial Sequence
  ENSG00000058091_37 (sequence is synthesized)
gcaagagtgactagaaagtttctaggagcacctccaggcttgcaaagaaagtgaggcctcttggtatcctttcctcagtgtgtatatgacagccagtataatcaataccctaggttatgc

SEQ ID NO: 39733 - DNA, 120 bp, Artificial Sequence
  ENSG00000058091_38 (sequence is synthesized)
gtctatatgatactcatctgtgaatattattggttttgtaatctttgttatataagaggatgtttaggctgtatatactggggtagattattgcctgccccttatacataggaatatgct

SEQ ID NO: 39734 - DNA, 120 bp, Artificial Sequence
  ENSG00000058091_39 (sequence is synthesized)
gcataattgcgcataacttccatctcccttactggcttgtaggcagaggaaactgtatatgttactgccttgtacttttctcatacaccaaaaacacaccaaaaaaatcaataaaataag

SEQ ID NO: 39735 - DNA, 120 bp, Artificial Sequence
  ENSG00000058091_40 (sequence is synthesized)
caatcttctattctcattccttttcccacagcagcatattttagaggcacatacaaaacctacattctctagttgggagtggatttttaaagttttccttttatcttttatttttttttg

SEQ ID NO: 39736 - DNA, 120 bp, Artificial Sequence
  ENSG00000058091_41 (sequence is synthesized)
tatgatgcactgagatgtgtactttctaacaggggattggtacctaagaaatgtggtagcattattcagaaaactattatactttcaaatgacacatagtaaggagaatggaataataca

SEQ ID NO: 39737 - DNA, 120 bp, Artificial Sequence
  ENSG00000058091_42 (sequence is synthesized)
tgttgcatatttgttaccagttgtaatttgtctgtattatgaaagatgtaatggtttgtcagctgtcactgttgttttcttgtaacatgatatggaataaagtatagcagaatctccgta

SEQ ID NO: 39738 - DNA, 120 bp, Artificial Sequence
  ENSG00000058091_43 (sequence is synthesized)
gaatattccacctgccttgacatgtgtgccatcactccataatccaaccagcttcaacttttctagccctttcaggcgttaagcatccttcctaaccctacactctgaggtaagcatgtc

SEQ ID NO: 39739 - DNA, 120 bp, Artificial Sequence
  ENSG00000058091_44 (sequence is synthesized)
gaaagttgatagaagttttcccaaaattaacaacagtcctaaaagtttaccgaccttacgaacaatgagaagtgaagcagagaaaaaaattctaaactattagacatacccccaaaccaa

SEQ ID NO: 39740 - DNA, 120 bp, Artificial Sequence
  ENSG00000058091_45 (sequence is synthesized)
tgttcatcgtcatgctagaggaaagtctaaattatctctacattctcgttacagaaaatgttactgtagaattgtcataagaagacttaattgaagattatacagccaaattatagaaat

SEQ ID NO: 39741 - DNA, 120 bp, Artificial Sequence
  ENSG00000058091_46 (sequence is synthesized)
tacggccgtaccatttcagcttgctagtgcagaaagatgtgaattcagttgctgtatgagcctggcctggtgcaaacacattgctagagacatgttaaagagttccaggtgaatcaagcc

SEQ ID NO: 39742 - DNA, 120 bp, Artificial Sequence
  ENSG00000058091_47 (sequence is synthesized)
cagaaaagaaatttggtaagaagaaagtgatttgactttgaagaaagatgacaccacctttgatgagggtaaatgggaagttggtagctctgaaggtgatcaggctgcaggaagaagaag

SEQ ID NO: 39743 - DNA, 120 bp, Artificial Sequence
  ENSG00000058091_48 (sequence is synthesized)
attatgtgctgtgcagccttggacaagttacttaacaaaattgagcatctgtttccttaaaatatccttaaacagggtagagagataatatactttgccatttttgatctatggggctat

SEQ ID NO: 39744 - DNA, 120 bp, Artificial Sequence
  ENSG00000058091_49 (sequence is synthesized)
agctttgatgattgccagaacaaagtgttggctctgcctggctctttgatcctgaggtgacttccttctaagtttttcctccaaagctaccaaataaaccctaatatgtgtcacaaagat

SEQ ID NO: 39745 - DNA, 120 bp, Artificial Sequence
  ENSG00000058091_50 (sequence is synthesized)
attttagcagcttttgcagcatgcatgatggtggctgaaacttggccttctataggatcccagattattatttaatggggttgtcactcaggacacttactggctttctccagtgctctt

SEQ ID NO: 39746 - DNA, 120 bp, Artificial Sequence
  ENSG00000058091_51 (sequence is synthesized)
aaaaaattgaattgagcatgatgaggtgcatccccttgattaaatgtttttcctcctatgcaatcaccattagctgtttggctcccattctgtattcttctgaagcagccctgcattgca

SEQ ID NO: 39747 - DNA, 120 bp, Artificial Sequence
  ENSG00000058091_52 (sequence is synthesized)
ccccgctgcaagttcttagattcctggaggatctgcagagtcaacattaggagtatccatccattcaccaaggccatcaggaatgtgctgaatgtgctgtaaagaagagttgtcaattgt

SEQ ID NO: 39748 - DNA, 120 bp, Artificial Sequence
  ENSG00000058091_53 (sequence is synthesized)
gcacagaagataagaaatatatgatgaatagataattgaaaagagatcctccagaaagagcagaaggaagtttcttcaatgataccagtaacagcaattcaaagatgtgaatgggattaa

SEQ ID NO: 39749 - DNA, 120 bp, Artificial Sequence
  ENSG00000058091_54 (sequence is synthesized)
tgttgtgaattgccttgacagcatatgcacggttactttggctgcaatgctgctgcagagcccggttactctgccttcgtgggaactccacagatatgtgtcacaaagatgtctacacgg

SEQ ID NO: 39750 - DNA, 120 bp, Artificial Sequence
  ENSG00000058091_55 (sequence is synthesized)
cttgacagcatatgcacggttactttggctgcaatgctgctgcagagcccggttactctgccttcgtgggaactccacaggcaagtccatcgtgtttggaaaaaaaaattagattttttg

SEQ ID NO: 39751 - DNA, 120 bp, Artificial Sequence
  ENSG00000058091_56 (sequence is synthesized)
gagaaaataattgagctgttaaagctattgatactgaatgttagcatgtcctttgagttcttctcaacagtttttggtcttattccactgagattagcttctcttaggggatttctgggc

SEQ ID NO: 39752 - DNA, 120 bp, Artificial Sequence
  ENSG00000058091_57 (sequence is synthesized)
aggctgtggaagtgattctgattctctgccagggttgtgacgctgcagctttccatgaagtacttcacaagtagatatgtgtcacaaagatgtctacacggaactgccagggaatggact

SEQ ID NO: 39753 - DNA, 120 bp, Artificial Sequence
  ENSG00000058262_0 (sequence is synthesized)
gacgtgtctctcggcggagctgctgtgcagtggaacgcgctgggccgcgggcagcgtcgcctcacgcggagcagagctgagctgaagcgggacccggagcccgagcagccgccgccatgg

SEQ ID NO: 39754 - DNA, 120 bp, Artificial Sequence
  ENSG00000058262_1 (sequence is synthesized)
caatcaaatttctggaagtcatcaagcccttctgtgtcatcctgccggaaattcagaagccagagaggaagattcagtttaaggagaaagtgctgtggaccgctatcaccctctttatct

SEQ ID NO: 39755 - DNA, 120 bp, Artificial Sequence
  ENSG00000058262_2 (sequence is synthesized)
tcttagtgtgctgccagattcccctgtttgggatcatgtcttcagattcagctgaccctttctattggatgagagtgattctagcctctaacagaggcacattgatggagctagggatct

SEQ ID NO: 39756 - DNA, 120 bp, Artificial Sequence
  ENSG00000058262_3 (sequence is synthesized)
ctcctattgtcacgtctggccttataatgcaactcttggctggcgccaagataattgaagttggtgacaccccaaaagaccgagctctcttcaacggagcccaaaagttatttggcatga

SEQ ID NO: 39757 - DNA, 120 bp, Artificial Sequence
  ENSG00000058262_4 (sequence is synthesized)
tcattactatcggccagtctatcgtgtatgtgatgaccgggatgtatggggacccttctgaaatgggtgctggaatttgcctgctaatcaccattcagctctttgttgctggcttaattg

SEQ ID NO: 39758 - DNA, 120 bp, Artificial Sequence
  ENSG00000058262_5 (sequence is synthesized)
tcctacttttggatgaactcctgcaaaaaggatatggccttggctctggtatttctctcttcattgcaactaacatctgtgaaaccatcgtatggaaggcattcagccccactactgtca

SEQ ID NO: 39759 - DNA, 120 bp, Artificial Sequence
  ENSG00000058262_6 (sequence is synthesized)
acactggccgaggaatggaatttgaaggtgctatcatcgcacttttccatctgctggccacacgcacagacaaggtccgagcccttcgggaggcgttctaccgccagaatcttcccaacc

SEQ ID NO: 39760 - DNA, 120 bp, Artificial Sequence
  ENSG00000058262_7 (sequence is synthesized)
tcatgaatctcatcgccaccatctttgtctttgcagtggtcatctatttccagggcttccgagtggacctgccaatcaagtcggcccgctaccgtggccagtacaacacctatcccatca

SEQ ID NO: 39761 - DNA, 120 bp, Artificial Sequence
  ENSG00000058262_8 (sequence is synthesized)
agctcttctatacgtccaacatccccatcatcctgcagtctgccctggtgtccaacctttatgtcatctcccaaatgctctcagctcgcttcagtggcaacttgctggtcagcctgctgg

SEQ ID NO: 39762 - DNA, 120 bp, Artificial Sequence
  ENSG00000058262_9 (sequence is synthesized)
gcacctggtcggacacgtcttctgggggcccagcacgtgcttatccagttggtggcctttgctattacctgtcccctccagaatcttttggctccgtgttagaagacccggtccatgcag

SEQ ID NO: 39763 - DNA, 120 bp, Artificial Sequence
  ENSG00000058262_10 (sequence is synthesized)
ttgtatacatagtgttcatgctgggctcctgtgcattcttctccaaaacgtggattgaggtctcaggttcctctgccaaagatgttgcaaagcagctgaaggagcagcagatggtgatga

SEQ ID NO: 39764 - DNA, 120 bp, Artificial Sequence
  ENSG00000058262_11 (sequence is synthesized)
gaggccaccgagagacctccatggtccatgaactcaaccggtacatccccacagccgcggcctttggtgggctgtgcatcggggccctctcggtcctggctgacttcctaggcgccattg

SEQ ID NO: 39765 - DNA, 120 bp, Artificial Sequence
  ENSG00000058262_12 (sequence is synthesized)
ggtctggaaccgggatcctgctcgcagtcacaatcatctaccagtactttgagatcttcgttaaggagcaaagcgaggttggcagcatgggggccctgctcttctgagcccgtctcccgg

SEQ ID NO: 39766 - DNA, 120 bp, Artificial Sequence
  ENSG00000058262_13 (sequence is synthesized)
acaggttgaggaagctgctccagaagcgcctcggaaggggagctctcatcatggcgcgtgctgctgcggcatatggacttttaataatgtttttgaatttcgtattctttcattccactg

SEQ ID NO: 39767 - DNA, 120 bp, Artificial Sequence
  ENSG00000058262_14 (sequence is synthesized)
ccgactgccagagaagtgggaatggtataggattgtccccaagtgtccatgtaacttttgttttaacctttgcaccttctcagtgctgtatgcggctgcagccgtctcacctgtttcccc

SEQ ID NO: 39768 - DNA, 120 bp, Artificial Sequence
  ENSG00000058262_15 (sequence is synthesized)
acaaagggaatttctcactctggttggaagcacaaacactgaaatgtctacgtttcattttggcagtagggtgtgaagctgggagcagatcatgtatttcccggagacgtgggaccttgc

SEQ ID NO: 39769 - DNA, 120 bp, Artificial Sequence
  ENSG00000058262_16 (sequence is synthesized)
tggcatgtctccttcacaatcaggcgtgggaatatctggcttaggactgtttctctctaagacaccattgttttcccttattttaaaagtgatttttttaaggacagaacttcttccaaa

SEQ ID NO: 39770 - DNA, 120 bp, Artificial Sequence
  ENSG00000058262_17 (sequence is synthesized)
agagagggatggctttcccagaagacactcctggccatctgtggatttgtctgtgcacctattggctcttctagctgactcttctggttgggcttagagtctgcctgtttctgctagctc

SEQ ID NO: 39771 - DNA, 120 bp, Artificial Sequence
  ENSG00000058262_18 (sequence is synthesized)
cgtgtttagtccacttgggtcatcagctctgccaagctgagcctggccaagctaggtggacagacccttgcagtgatgtccgtttgtccagattctgccagtcatcactggacacgtctc

SEQ ID NO: 39772 - DNA, 120 bp, Artificial Sequence
  ENSG00000058262_19 (sequence is synthesized)
ctcgcagctgccctagcaaggggagacattgtggtagctatcagacatggacagaaactgacttagtgctcacaagcccctacaccttctgggctgaagatcacccagctgtgttcagaa

SEQ ID NO: 39773 - DNA, 120 bp, Artificial Sequence
  ENSG00000058262_20 (sequence is synthesized)
ttttcttactgtgcttaggactgcacgcaagtgagcagacaccaccgacttcctttctgcgtcaccagtgtcgtcagcagagagaggacagcacaggctcaaggttggtagtgaagtcag

SEQ ID NO: 39774 - DNA, 120 bp, Artificial Sequence
  ENSG00000058262_21 (sequence is synthesized)
gttcggggtgcatgggctgtggtggtgttgatcagttgctccagtgtttgaaataagaagactcatgtttatgtctggaataagttctgtttgtgctgacaggtggcctaggtcctggag

SEQ ID NO: 39775 - DNA, 120 bp, Artificial Sequence
  ENSG00000058262_22 (sequence is synthesized)
atgagcaccctctctctggcctttagggagtcccctcttaggacaggcactgcccagcagcaagggcagcagagttgggtgctaagatcctgaggagctcgaggtttcgagctggcttta

SEQ ID NO: 39776 - DNA, 120 bp, Artificial Sequence
  ENSG00000058262_23 (sequence is synthesized)
gacattggtgggaccaaggatgttttgcaggatgccctgatcctaagaagggggcctgggggtgcgtgcagcctgtcggggagaccccactctgacagtgggcacacggcagcctgcaaa

SEQ ID NO: 39777 - DNA, 120 bp, Artificial Sequence
  ENSG00000058262_24 (sequence is synthesized)
gcacagggccaccgccacagcccggcagaggggcacactctggagaccttgctggcagtgctagccaggaaacagagtgaccaagggacaagaagggacttgcctaaagccacccagcaa

SEQ ID NO: 39778 - DNA, 120 bp, Artificial Sequence
  ENSG00000058262_25 (sequence is synthesized)
ctcagcagcagaaccaagatgggccccaggctcctccatatggcccagggcttaccaccctatcacacgtggccttgtctagacccagtcctgagcaggggagaggctcttgagacctga

SEQ ID NO: 39779 - DNA, 120 bp, Artificial Sequence
  ENSG00000058262_26 (sequence is synthesized)
tgccctcctacccacatggttctcccactgccctgtctgctctgctgctacagaggggcagggcctcccccagcccacgcttaggaatgcttggcctctggcaggcaggcagctgtaccc

SEQ ID NO: 39780 - DNA, 120 bp, Artificial Sequence
  ENSG00000058262_27 (sequence is synthesized)
aagctggtgggcagggggctggaaggcaccaggcctcaggaggagccccatagtcccgcctgcagcctgtaaccatcggctgggccctgcaaggcccacactcacgccctgtgggtgatg

SEQ ID NO: 39781 - DNA, 120 bp, Artificial Sequence
  ENSG00000058262_28 (sequence is synthesized)
gtcacggtgggtgggtgggggctgaccccagcttccaggggactgtcactgtggacgccaaaatggcataactgagataaggtgaataagtgacaaataaagccagttttttacaaggta

SEQ ID NO: 39782 - DNA, 120 bp, Artificial Sequence
  ENSG00000058262_29 (sequence is synthesized)
agatcagctgtgggtatgagaatctgaatccacactgtaaagttagactttttcatatgacttccttgcggcagttttaaagttctctgtatgaatattgtcagtgctcgaagaggcgat

SEQ ID NO: 39783 - DNA, 120 bp, Artificial Sequence
  ENSG00000058262_30 (sequence is synthesized)
agcgtcgcctcacgcggagcagagctgagctgaagcgggacccggagcccgagcagccgccgccatggcaagtgagtcctgtagggaagccctattgaggccgggacggaacagatcccc

SEQ ID NO: 39784 - DNA, 120 bp, Artificial Sequence
  ENSG00000058262_31 (sequence is synthesized)
agatcccccttccccacacccgtgcggtcgggcgcccgccggccaaccctgaccggccccctgcagaacgcggcccgtgcccccggcccttctcgagtatccccacgcgtccggggtgcg

SEQ ID NO: 39785 - DNA, 120 bp, Artificial Sequence
  ENSG00000058262_32 (sequence is synthesized)
aatcacaccgccatgctttgcccacaacagtctcctcaacctgttccctcattccttctcgccagaatctatcaaggctcggcacaaaggtactctcccaggaggccttcctgaattctt

SEQ ID NO: 39786 - DNA, 120 bp, Artificial Sequence
  ENSG00000058262_33 (sequence is synthesized)
ctgtgaggcagactacttcccgagctgccccggcccttctccggccaagtctctccagaaactcatcccattcgttctcagatggaaggggacccacacccacgacaagcctccgggttt

SEQ ID NO: 39787 - DNA, 120 bp, Artificial Sequence
  ENSG00000058262_34 (sequence is synthesized)
catcgcacttttccatctgctggccacacgcacagacaagtggtcatctatttccaggtgtgtccagatccaaccccagggagtttccatggtctggatttaagtttcagaatgccttgt

SEQ ID NO: 39788 - DNA, 120 bp, Artificial Sequence
  ENSG00000058262_35 (sequence is synthesized)
gtgcagtcccccactctgtggggtgcactgtcatcatattgtgttgaaacgatgagatggtatttgaaggcagcaggtttccagatgagctggacaagcatgttcattgagtcatgggac

SEQ ID NO: 39789 - DNA, 120 bp, Artificial Sequence
  ENSG00000058262_36 (sequence is synthesized)
ggacctgccattaacgaaacaaaattaaggcagttctaacagacggagtctgactgtgttgcccaggctggtatcgaacttctgggctcaagcaattctcccacctcggcctcccaaagt

SEQ ID NO: 39790 - DNA, 120 bp, Artificial Sequence
  ENSG00000058272_0 (sequence is synthesized)
agatctgccctgtagagccttgcggttccactgctggcctccggattcccgggagcccccagcccgacaggacaaccttccttccccgcttcctcctttccagacccggcggcaggagag

SEQ ID NO: 39791 - DNA, 120 bp, Artificial Sequence
  ENSG00000058272_1 (sequence is synthesized)
gggatgaagatggcggacgcgaagcagaagcggaacgagcagctgaaacgctggatcggctccgagacggacctcgagcctccggtggtgaagcgccagaagaccaaggtgaagttcgac

SEQ ID NO: 39792 - DNA, 120 bp, Artificial Sequence
  ENSG00000058272_2 (sequence is synthesized)
gatggcgccgtcttcctggctgcttgctccagcggcgacacggacgaggtcctcaagctgctgcaccgcggcgccgacatcaattacgccaatgtggacggactcactgccctgcaccag

SEQ ID NO: 39793 - DNA, 120 bp, Artificial Sequence
  ENSG00000058272_3 (sequence is synthesized)
gcttgcattgatgacaatgttgatatggtgaagtttctggtagaaaatggagcaaatattaatcaacctgataatgaaggctggataccactacatgcagcagcttcctgtggatatctt

SEQ ID NO: 39794 - DNA, 120 bp, Artificial Sequence
  ENSG00000058272_4 (sequence is synthesized)
gatattgcagagtttttgattggtcaaggagcacatgtaggggctgtcaacagtgaaggagatacacctttagatattgcggaggaggaggcaatggaagagctacttcaaaatgaagtt

SEQ ID NO: 39795 - DNA, 120 bp, Artificial Sequence
  ENSG00000058272_5 (sequence is synthesized)
aatcggcaaggggttgatatagaagcagctcgaaaggaagaagaacggatcatgcttagagatgccaggcagtggctaaatagtggtcatataaatgatgtccggcatgcaaaatctgga

SEQ ID NO: 39796 - DNA, 120 bp, Artificial Sequence
  ENSG00000058272_6 (sequence is synthesized)
ggtacagcacttcacgttgcagctgctaaaggctatacggaagttttaaaacttttaatacaggcaggctatgatgttaatattaaagactatgatggctggacacctcttcatgctgca

SEQ ID NO: 39797 - DNA, 120 bp, Artificial Sequence
  ENSG00000058272_7 (sequence is synthesized)
gctcattggggtaaagaagaagcatgtcgaattttagtggacaatctgtgtgatatggagatggtcaacaaagtgggccaaacagcctttgatgtagcagatgaagacattttaggatat

SEQ ID NO: 39798 - DNA, 120 bp, Artificial Sequence
  ENSG00000058272_8 (sequence is synthesized)
ttagaagagttgcaaaagaaacaaaatctgctccatagtgaaaaacgggacaagaaatctccactaattgaatcaacagcaaatatggacaataatcagtcacagaagacctttaaaaac

SEQ ID NO: 39799 - DNA, 120 bp, Artificial Sequence
  ENSG00000058272_9 (sequence is synthesized)
aaagagacgttgattattgaaccagagaaaaatgcatcccgtattgaatctctggaacaagaaaaggttgatgaagaagaagaaggaaagaaggatgagtctagctgctctagtgaagaa

SEQ ID NO: 39800 - DNA, 120 bp, Artificial Sequence
  ENSG00000058272_10 (sequence is synthesized)
gatgaggaagatgactcggaatcagaagctgaaacagataagacaaaacccctggcttctgtaactaatgccaacacttctagtacacaagcagctcctgtagctgttacaacacctact

SEQ ID NO: 39801 - DNA, 120 bp, Artificial Sequence
  ENSG00000058272_11 (sequence is synthesized)
gtgtcatcaggtcaagcaacacctacatcacctattaaaaagtttccaaccacagctacaaaaatttctcccaaagaagaagagagaaaagatgagtctcctgcaacttggaggttagga

SEQ ID NO: 39802 - DNA, 120 bp, Artificial Sequence
  ENSG00000058272_12 (sequence is synthesized)
cttagaaagacgggcagctatggtgcacttgctgaaatcacagcatctaaagagggtcagaaagaaaaagatactgcaggtgttacacgttcagcttcaagtcccagactttcctcctct

SEQ ID NO: 39803 - DNA, 120 bp, Artificial Sequence
  ENSG00000058272_13 (sequence is synthesized)
ttggataataaagaaaaggagaaagatagtaaaggaactaggcttgcatatgttgcacctacaataccaagacgactagccagtacatctgacattgaagagaaagaaaacagagattct

SEQ ID NO: 39804 - DNA, 120 bp, Artificial Sequence
  ENSG00000058272_14 (sequence is synthesized)
tcaagtttgcgaacaagtagttcatatacaaggagaaaatgggaagatgatcttaaaaaaaatagctcagttaatgaaggatcaacgtatcataaaagttgctcctttggtagaagacaa

SEQ ID NO: 39805 - DNA, 120 bp, Artificial Sequence
  ENSG00000058272_15 (sequence is synthesized)
gatgatttgattagttctagtgttccaagcaccacatcaacaccaacagttacctctgcagctgggcttcagaaaagcctgctttccagcacaagcactactacaaagattacaacgggt

SEQ ID NO: 39806 - DNA, 120 bp, Artificial Sequence
  ENSG00000058272_16 (sequence is synthesized)
tcttcctcagcaggcacacaaagcagtacctcaaatcgtttgtgggctgaggatagtactgagaaagaaaaggacagtgttcctacggcagtgaccattcctgttgctccaactgttgta

SEQ ID NO: 39807 - DNA, 120 bp, Artificial Sequence
  ENSG00000058272_17 (sequence is synthesized)
aatgctgcagcttctaccacaaccctgactacaactactgctggcactgtctcctccacaacagaggtcagggagagacgcagatcatacctcactcctgttagggatgaagagtctgaa

SEQ ID NO: 39808 - DNA, 120 bp, Artificial Sequence
  ENSG00000058272_18 (sequence is synthesized)
tcccaaagaaaagcaagatctagacaagcaagacaatctagaagatcaacacagggagtgacattaactgatcttcaagaagctgagaaaacaataggaagaagtcgttctacccgaacc

SEQ ID NO: 39809 - DNA, 120 bp, Artificial Sequence
  ENSG00000058272_19 (sequence is synthesized)
agagaacaagaaaatgaagaaaaagaaaaagaggaaaaagagaaacaagataaagagaaacaagaagaaaagaaggagtcagaaacatctagagaagatgaatataaacaaaagtactcc

SEQ ID NO: 39810 - DNA, 120 bp, Artificial Sequence
  ENSG00000058272_20 (sequence is synthesized)
agaacgtatgatgagacttaccagcgttataggccagtatcaacttcaagttcaaccactccatcctcttcactttctactatgagcagttcactgtatgcttcaagtcaactaaacagg

SEQ ID NO: 39811 - DNA, 120 bp, Artificial Sequence
  ENSG00000058272_21 (sequence is synthesized)
ccaaatagtcttgtaggcataacttctgcttactccagaggaataacaaaagaaaatgaaagagagggagaaaaaagagaagaggagaaagaaggagaagataaatcacaacctaaatca

SEQ ID NO: 39812 - DNA, 120 bp, Artificial Sequence
  ENSG00000058272_22 (sequence is synthesized)
atcagagaacgacgacgaccaagagagaaaagaagatctacaggagtttcattttggacacaagatagtgatgaaaatgaacaagaacaacaatcagacacagaagagggatccaataag

SEQ ID NO: 39813 - DNA, 120 bp, Artificial Sequence
  ENSG00000058272_23 (sequence is synthesized)
atatgattccttgctgggtcgctctggatcatacagttacttagaagaaagaaaaccttacagcagcaggctagaaaaggatgactcaactgactttaaaaagctttatgaacaaattct

SEQ ID NO: 39814 - DNA, 120 bp, Artificial Sequence
  ENSG00000058272_24 (sequence is synthesized)
agctgaaaatgaaaagctgaaggcacagctacatgatacaaatatggaactaacagatcttaaattacagttggaaaaggccacccagagacaagaaagatttgctgatagatcactgtt

SEQ ID NO: 39815 - DNA, 120 bp, Artificial Sequence
  ENSG00000058272_25 (sequence is synthesized)
ggaaatggaaaaaagggaacgaagagctctagaaagaagaatatctgaaatggaagaagagctcaaaatgttaccagacctaaaagcagacaaccagaggctaaaggatgaaaatggggc

SEQ ID NO: 39816 - DNA, 120 bp, Artificial Sequence
  ENSG00000058272_26 (sequence is synthesized)
cttgatcagagttataagcaaactttccaaataaaaaaaaaaaaagcagcaagtaatggaattgcacatattagtaacccagtggaccataattggcagtcactggaagtctgggaagaa

SEQ ID NO: 39817 - DNA, 120 bp, Artificial Sequence
  ENSG00000058272_27 (sequence is synthesized)
tccttggagactgtcattttcggatatcctgccaaatgccctcttatctagaatttttgtttcattttgtttaattttctggggtgtttttgttgttgttggtttgttttttgttttttt

SEQ ID NO: 39818 - DNA, 120 bp, Artificial Sequence
  ENSG00000058272_28 (sequence is synthesized)
tttttaatcaagaccattgtttcatgttaatgcagctgctgagaagatttttttttaatgactgagaaaacttgtttacagctccagcatataaggaaagtgttcaaggccagatatgcc

SEQ ID NO: 39819 - DNA, 120 bp, Artificial Sequence
  ENSG00000058272_29 (sequence is synthesized)
tcagatatttaaccagtaagccttagttgtacataaatacttttgtgtcaacaaaaactttcagctctcacagaagacagttactcaacattttttgatgtgccacagtttcgagttttt

SEQ ID NO: 39820 - DNA, 120 bp, Artificial Sequence
  ENSG00000058272_30 (sequence is synthesized)
cgatatttaaattttttggcttttcatctaagtttgggtttgtattttttccttctaaactcttcatgtggcagagtcttctatgttttcacagctttttcattacagaaaagaacactt

SEQ ID NO: 39821 - DNA, 120 bp, Artificial Sequence
  ENSG00000058272_31 (sequence is synthesized)
gctcttctgtgattattgtcatgtattaggctaatgctgtgttgtctcccacctggaactgaattgcttggtggaacatatgctttcactgtttgtgcaatatgcatttatttcttatat

SEQ ID NO: 39822 - DNA, 120 bp, Artificial Sequence
  ENSG00000058272_32 (sequence is synthesized)
gaatgctttaaagtcatttgaggttagatcttttaattcctattttctgcttcattggtcactttttttttattgtagtataagatgttagattctgtaatcttcacattcattttagca

SEQ ID NO: 39823 - DNA, 120 bp, Artificial Sequence
  ENSG00000058272_33 (sequence is synthesized)
ggtactgagtgatgctgtatatacaaataagtgtattgttttgatttttagaccaccacatggcatgcttgactatttcttatttcaaatgtctgctaatgcagagtaggctactccatg

SEQ ID NO: 39824 - DNA, 120 bp, Artificial Sequence
  ENSG00000058272_34 (sequence is synthesized)
atagtgttaaaaaacaaaatttgctaacaatgtgatataaagactttaaaagttacacattatgtggagccctatctttacaaaagtttcctactgtaaagtgcttttattttcagtttt

SEQ ID NO: 39825 - DNA, 120 bp, Artificial Sequence
  ENSG00000058272_35 (sequence is synthesized)
cacttgatagtactcaaccataattaaagttgcataagataattgctttacatttcacatacctatatttatctgagtgctgtctaaaactgttgtgctagccaaagtaatgctatgaaa

SEQ ID NO: 39826 - DNA, 120 bp, Artificial Sequence
  ENSG00000058272_36 (sequence is synthesized)
tcatttgcagaattaacccgtgagttaatgttaaatgcactgttattgccatgtgaagaggcatcgactttgataccaccatcatgttcagaccattttatacatttcagtggccttttt

SEQ ID NO: 39827 - DNA, 120 bp, Artificial Sequence
  ENSG00000058272_37 (sequence is synthesized)
ttttttttaaggaaaaaaaagcgcaaaaccaagtacatagtgacgatggcttttatttggacaaatagcttttatattttcattaaaccatgcaaaaaatactacatctttctggcacat

SEQ ID NO: 39828 - DNA, 120 bp, Artificial Sequence
  ENSG00000058272_38 (sequence is synthesized)
aactgtctccttaaccactgaacagttcagccatttgaataaattgtacattgtaaagcttatagtagctgattgtattattgattgtattgtatactatattaaatgtgaatttgtacc

SEQ ID NO: 39829 - DNA, 120 bp, Artificial Sequence
  ENSG00000058272_39 (sequence is synthesized)
ccttcattttaaaaggtcattgtgttctactgcctattttagattactttggggttggggaagggtgttttggtaagcaggattttaagtcctctctctctcgattggttttatgaagat

SEQ ID NO: 39830 - DNA, 120 bp, Artificial Sequence
  ENSG00000058272_40 (sequence is synthesized)
ataaggttatgctcttactaccaagctcaggattcttgattttaaaggtacaaggatagttgtgggagttttatttttggttatatttgaactgtatgaatggtaggtctgaatattgag

SEQ ID NO: 39831 - DNA, 120 bp, Artificial Sequence
  ENSG00000058272_41 (sequence is synthesized)
aatttccatggtcttatgtggaggtaaaatatacagataactgatcagtttgagtgactgcaacatgttctggttgcacaacagttaggcatgctatggtttatatttgtgaagtttgga

SEQ ID NO: 39832 - DNA, 120 bp, Artificial Sequence
  ENSG00000058272_42 (sequence is synthesized)
tgcctgtgaagaatgattaaatacatgtttctaatattttagtgttttgtatttaggttatttattctttgtatctaaaactgaacagctactgtgctatattgattttattggtagtat

SEQ ID NO: 39833 - DNA, 120 bp, Artificial Sequence
  ENSG00000058272_43 (sequence is synthesized)
tgagcagaccttgtttctgcatgaaactagttgcaaaacccactattttggaaataaaaatgtattttgacatatacaaataaaatgaataaaactattttaaatgtgtgaacttttaat

SEQ ID NO: 39834 - DNA, 120 bp, Artificial Sequence
  ENSG00000058272_44 (sequence is synthesized)
gaagacattttaaattttgttctgagatatttaaattctgcatgggtattttttcactaattgctttacttggataccaatttgaataatttctgaaattgtaatattgtgataatttgc

SEQ ID NO: 39835 - DNA, 120 bp, Artificial Sequence
  ENSG00000058272_45 (sequence is synthesized)
acagcattgtacatgcacatctgtaaatgcaatcttaattgccatatttatgcaatctgtgtaccaatttggacaaatgtttatatattttacataaagctgtctgtatgcagaatctga

SEQ ID NO: 39836 - DNA, 120 bp, Artificial Sequence
  ENSG00000058272_46 (sequence is synthesized)
agtgctctgtgggatactggaagtctcgagcgtcggctccgggttcccagccctcctctggcccgcactcatagaaacattcacacaccccctgcctcccctctcttccctctccgcctc

SEQ ID NO: 39837 - DNA, 120 bp, Artificial Sequence
  ENSG00000058272_47 (sequence is synthesized)
cctgataatgaaggctggataccactacatgcagcagcttcctgtggatatcttgatattgcagagtgtcaacaggcagaggtgggaactgaacccgaagtctgcagagcataaaagttt

SEQ ID NO: 39838 - DNA, 120 bp, Artificial Sequence
  ENSG00000058272_48 (sequence is synthesized)
aaaagtatgatttcattgctcctatcatgcctgtggtggaatcagtagatcctgcatcatggaggcagggcttgcgcaaaactggcattgttcttgtgcccagtaagggtgaaaaatcta

SEQ ID NO: 39839 - DNA, 120 bp, Artificial Sequence
  ENSG00000058272_49 (sequence is synthesized)
gtagaagtataatgataaatacagctggtactccgtctcatttttgggaatgcaagagagagtgatgggcagaaaatctcacggactccaaataaagatcacagtgactccttagcccta

SEQ ID NO: 39840 - DNA, 120 bp, Artificial Sequence
  ENSG00000058272_50 (sequence is synthesized)
gctgcagttgctgtgcaggtatgtggtccctctttatcagataactgaatcttttttaagataacctgaaaagtccaatttttctgtgaagtcttgatttttgaatactggaactaattt

SEQ ID NO: 39841 - DNA, 120 bp, Artificial Sequence
  ENSG00000058272_51 (sequence is synthesized)
taagactttatatgggacaaacacacttgcataacgaacagtctctgctttgcaaccatgaaggattttttaaatgtatcctttatagctcatatgctacattaagctgttttaatattg

SEQ ID NO: 39842 - DNA, 120 bp, Artificial Sequence
  ENSG00000058272_52 (sequence is synthesized)
gaggcaatttgtttggagccctcagtttaacatcattttaaacaaatatgtgtttttattaaatacgagtttttgttgtttaaaacttactctaaacacaggatatatatttaaagatag

SEQ ID NO: 39843 - DNA, 120 bp, Artificial Sequence
  ENSG00000058272_53 (sequence is synthesized)
gtgataatttgttatgcctattatataattaagcttcaaatattatgaaatgttttttggattgttacatatttaaaaggaactcctttagaaggaactccttgactagaacaacttaaa

SEQ ID NO: 39844 - DNA, 120 bp, Artificial Sequence
  ENSG00000058272_54 (sequence is synthesized)
caggccagtgtcttaatggatctagttgtcattgttgatctggaaagatttggcttgccctagaactcagagctatggaaatgccttcagttggaatgttggtagtatcatattgaagag

SEQ ID NO: 39845 - DNA, 120 bp, Artificial Sequence
  ENSG00000058272_55 (sequence is synthesized)
aaatgagtattttgaaataacttattttcagttttcggcaagtgatggttaagtagaatgtaaatagctgtttgtttattaaagggaagagaaagtcatccaagatgattttacatttaa

SEQ ID NO: 39846 - DNA, 120 bp, Artificial Sequence
  ENSG00000058272_56 (sequence is synthesized)
gtatctcaagtcattgctatgattgagctggaaaggagcgttcaataaatgggtgcacacaaatgtatacacactttgtttcttgttactaggaagcagccaaacagagaagatggcttt

SEQ ID NO: 39847 - DNA, 120 bp, Artificial Sequence
  ENSG00000058272_57 (sequence is synthesized)
tcctaagataatatattggtagtttttcataggtaactgaaaaacttggggcagctcaagtgctattaaggattgaagtaattaatgaataaatcgcagaaactatatcttcttattttg

SEQ ID NO: 39848 - DNA, 120 bp, Artificial Sequence
  ENSG00000058272_58 (sequence is synthesized)
tgcttatagtaaacataaagtctgttggagaaggagaaagcttatggcatttgtacatgtccccagttatctggcagctatttgaattacatacttttttaaaagccaagttaggggaac

SEQ ID NO: 39849 - DNA, 120 bp, Artificial Sequence
  ENSG00000058272_59 (sequence is synthesized)
gggtgagggagagaatcattttacattatgagtaagattcatcatttattcaataaagaactgaactatgctaagtagagagattctactcatgggtaaatggagatgaagatactatct

SEQ ID NO: 39850 - DNA, 120 bp, Artificial Sequence
  ENSG00000058272_60 (sequence is synthesized)
tgctcttgtgggcattttccatgtagtggagagagaccttattacacagtcatactaatgactgtataataaataatggagacagttaacttgaagtagaaaagcaattttataaaagta

SEQ ID NO: 39851 - DNA, 120 bp, Artificial Sequence
  ENSG00000058272_61 (sequence is synthesized)
ttgcactccagcctgggcaacaagaggaaaactgttatctcaaaaaaaaagaaagtggattgatttccaaaggaagtgtggtttcagccaaaaacggaaggattactaatagttaacggg

SEQ ID NO: 39852 - DNA, 120 bp, Artificial Sequence
  ENSG00000058272_62 (sequence is synthesized)
caaaaacggaaggattactaatagttaacgggcaaaaatgggtgagaaaattattccaaatagagtggaattacaagcacatagacctggtggggggagaatacatgatgcattggaata

SEQ ID NO: 39853 - DNA, 120 bp, Artificial Sequence
  ENSG00000058272_63 (sequence is synthesized)
ctgagaccagatcatgcagtgccttataggccattgtaagatttttcgtatgctaagaacactgggaagccattcaagagtttttaatttgtgggtggaaatggaatggttggcctatga

SEQ ID NO: 39854 - DNA, 120 bp, Artificial Sequence
  ENSG00000058272_64 (sequence is synthesized)
aaattatgagattttcattttgaaaagttaattttagctcctatatataaaacagattagagggtgatcagggaattagaatagtttagataagagatgatcatagccagaattatggtg

SEQ ID NO: 39855 - DNA, 120 bp, Artificial Sequence
  ENSG00000058272_65 (sequence is synthesized)
gaagtagtaaagcagggataaggaagaaggagtgttaagaaagacgaaaagcattagaaaaggggaaggtcttggattttatcctggatttgaaatatttcaggaaatacgtcatttgcc

SEQ ID NO: 39856 - DNA, 120 bp, Artificial Sequence
  ENSG00000058272_66 (sequence is synthesized)
tttacagctcatcaattactgctgcttgctttttgcataacaccccagaatgcttatcatttaagggagaataaaacagtacactgcaataatgtgttgtgtgttggctttgcctgtcac

SEQ ID NO: 39857 - DNA, 120 bp, Artificial Sequence
  ENSG00000058272_67 (sequence is synthesized)
tctttgaaacaagtttaaaataaacgctgcagttgcttttctattacattcactgcattaatgctacacataatgtcaacctaaatacaaagctataaagtcagttggataaataatggc

SEQ ID NO: 39858 - DNA, 120 bp, Artificial Sequence
  ENSG00000058272_68 (sequence is synthesized)
tagtacacattgtgagtggaggaaatgagcttctcttacattcctctgaaattgcaaagtacacatattttaggcatgtttgcttcttgcttttctgcttctgtcactgtaatatgattg

SEQ ID NO: 39859 - DNA, 120 bp, Artificial Sequence
  ENSG00000058272_69 (sequence is synthesized)
catctttgtgtgagttttgtttttcttctctgtacagtcttcagtcttgagtattgattcactctaagttttacatgaactcaaaaagtagtttgaatatgttatgtagcatcttcccag

SEQ ID NO: 39860 - DNA, 120 bp, Artificial Sequence
  ENSG00000058272_70 (sequence is synthesized)
aaagtcaaagctttaaattaagagcttgtactctaaggataaagatcttcatatttatttttgtcaaattttggaaagctctttacatatcactggcatcacatcttttctacactgctc

SEQ ID NO: 39861 - DNA, 120 bp, Artificial Sequence
  ENSG00000058272_71 (sequence is synthesized)
agtctcaaaaggttataaggattacattatataattatatttttattaactgtataaaacattttttcagccaactgacttactaattaatggtttaagtcttttcagctaccgtatgag

SEQ ID NO: 39862 - DNA, 120 bp, Artificial Sequence
  ENSG00000058272_72 (sequence is synthesized)
aagatagctgtgggagaagataaaaaggccagtttactggtctggctgcatggatacagagtcattcaacctgctgatgaatatatttcaatcaaggtcctggaatctgaccattctgat

SEQ ID NO: 39863 - DNA, 120 bp, Artificial Sequence
  ENSG00000058272_73 (sequence is synthesized)
tagccactcctgatggtgtaggaaaggaaagaatttgagcttcagaaggaaagctacagtttttttttgtttttcttccacatactcactcaccctcacgcccaactaaactatgaaagt

SEQ ID NO: 39864 - DNA, 120 bp, Artificial Sequence
  ENSG00000058272_74 (sequence is synthesized)
ttattattttaatacaaatcctgttttctctttgctttactcacgaacctgtgttttactccacttgaatattgtgatttaatacctattaaaagagaattactgtggtcacccctgaac

SEQ ID NO: 39865 - DNA, 120 bp, Artificial Sequence
  ENSG00000058272_75 (sequence is synthesized)
attatatcctgttagaatatttaactgttactgaattttatctccaggataggcagaaataataaaatcagttctctgttatactaacggttgagatgaaaggcatggataacaaactgt

SEQ ID NO: 39866 - DNA, 120 bp, Artificial Sequence
  ENSG00000058272_76 (sequence is synthesized)
aatacaatcacaattttaaatatttaatttttcttatgaaagtaatatgtttattacagaaactttaacaaaagaagacaatattaaattatctgtaatctgtcatgcagagatagctga

SEQ ID NO: 39867 - DNA, 120 bp, Artificial Sequence
  ENSG00000058272_77 (sequence is synthesized)
aatctgtcatgcagagatagctgatattttgatactttttttttctaacatacacatgatgcagacacattcatactctgacaagctcacctaacctcctttttctgcttgtcaaatgca

SEQ ID NO: 39868 - DNA, 120 bp, Artificial Sequence
  ENSG00000058272_78 (sequence is synthesized)
gataaattacaaagtagctaatccactctctataatcatggtattaatagtaactgctaacatttattcatcattctctgtatatcaagcaggcacaaaattaaacactttacatgcatt

SEQ ID NO: 39869 - DNA, 90 bp, Artificial Sequence
  ENSG00000058272_79 (sequence is synthesized)
tatatcaagcaggcacaaaattaaacactttacatgcattttctctaaaccatattttttttccttgtgaaagagacagaatattgctct

SEQ ID NO: 39870 - DNA, 120 bp, Artificial Sequence
  ENSG00000058272_80 (sequence is synthesized)
tgcatcctccagttcctgggttcaagcaatcctcctgcatcagcctccagaatagctggcactacaggtgcatgtctccacacccaactatttttttaatttctttttggagacaaggtc

SEQ ID NO: 39871 - DNA, 89 bp, Artificial Sequence
  ENSG00000058272_81 (sequence is synthesized)
cacccaactatttttttaatttctttttggagacaaggtctcactttgttgccaaggctggtcttgaactcttggctttatgcatcctt

SEQ ID NO: 39872 - DNA, 120 bp, Artificial Sequence
  ENSG00000058272_82 (sequence is synthesized)
gttaatatgtttgtcaaacataagaaatttcatatcattttacagatgtcaatttcattgagctaatagaatcaggcagttgggtgtagttttcttgtcttactttaccactaatttaaa

SEQ ID NO: 39873 - DNA, 120 bp, Artificial Sequence
  ENSG00000058272_83 (sequence is synthesized)
atcttgaagacacctaataaaattgaggctcatagggagattacctctcagaagaaatattctatttctgatattttgcaaagtggtaaagatcaaatatgacactttatgtgctagtat

SEQ ID NO: 39874 - DNA, 120 bp, Artificial Sequence
  ENSG00000058272_84 (sequence is synthesized)
ttggaataacatggtacttaaaagacgatcagtaggattctgtctactttttaaaatcacataccctaaaaacattaacatttacagtaaatgtactgcttgactaaatatcagcattat

SEQ ID NO: 39875 - DNA, 120 bp, Artificial Sequence
  ENSG00000058272_85 (sequence is synthesized)
ttattaatctgggaaagagtgtcttggaaatagtttcagtgtgattaaactaaatttaaatggtttgtatctgaaaggtgaccggcaagagtcagtatcttctgggcggtatgacctaac

SEQ ID NO: 39876 - DNA, 120 bp, Artificial Sequence
  ENSG00000058335_0 (sequence is synthesized)
cggcaccggaggagggtcgggcggcatcttccgggtactggggctctgcggagcggagaagaggttccagcggggaatggtatatctggattcaagaagccgcggctcggcgccagatcc

SEQ ID NO: 39877 - DNA, 120 bp, Artificial Sequence
  ENSG00000058335_1 (sequence is synthesized)
tggagtgtagatatttggggggaggggagagctagagggagcgagcgagcgagcgccagagagaggcagcgcgcagcgcgcacggacggggggctgctgcgcggagaagatgtaagcgcg

SEQ ID NO: 39878 - DNA, 120 bp, Artificial Sequence
  ENSG00000058335_2 (sequence is synthesized)
tggggtctcgctggcctctgagcaccatgcagaaggggatccggctgaatgatggccacgtcgcgtccctgggactgctggcgcgcaaggacggcacgcgcaaaggctacctgagcaagc

SEQ ID NO: 39879 - DNA, 120 bp, Artificial Sequence
  ENSG00000058335_3 (sequence is synthesized)
ggagttcggacaacacaaaatggcaaaccaagtggttcgcgctgctgcagaacctgctcttctacttcgagagcgactcgagctcgcggccctcggggctttacctgctggagggctgcg

SEQ ID NO: 39880 - DNA, 120 bp, Artificial Sequence
  ENSG00000058335_4 (sequence is synthesized)
tctgcgaccgcgcgccctcccccaagccggcgctgtcggccaaggagccgctggagaaacagcattacttcacggtgaacttcagccatgagaaccagaaagccttggagctgaggacag

SEQ ID NO: 39881 - DNA, 120 bp, Artificial Sequence
  ENSG00000058335_5 (sequence is synthesized)
aggacgcaaaagattgtgacgaatgggtggcagccattgcacatgccagctacaggaccctcgccacagagcatgaggcattaatgcagaaatacctgcacctgctgcagatcgtggaga

SEQ ID NO: 39882 - DNA, 120 bp, Artificial Sequence
  ENSG00000058335_6 (sequence is synthesized)
cagagaagaccgtggccaagcagcttcggcagcagatcgaggatggggagatcgagatcgagcggctgaaggcagagatcacatccctgctcaaggacaatgagcgcatccagtccaccc

SEQ ID NO: 39883 - DNA, 120 bp, Artificial Sequence
  ENSG00000058335_7 (sequence is synthesized)
agactgtcgcccccaacgatgaagacagcgacatcaagaaaattaagaaggtgcagagcttcctgcggggctggctgtgccggcggaagtggaagaccatcatccaggactacatccggt

SEQ ID NO: 39884 - DNA, 120 bp, Artificial Sequence
  ENSG00000058335_8 (sequence is synthesized)
caccccatgctgacagcatgcgcaagaggaaccaggtggtgttcagcatgctggaggctgaggctgagtacgtgcagcagctgcacatccttgtcaacaatttcctgcgcccgctgcgga

SEQ ID NO: 39885 - DNA, 120 bp, Artificial Sequence
  ENSG00000058335_9 (sequence is synthesized)
tggccgccagctccaagaagcctcccatcacacacgacgacgtcagcagcatcttcctgaacagcgaaaccatcatgtttttacatcagatcttttaccaaggcctgaaggcccgcatct

SEQ ID NO: 39886 - DNA, 120 bp, Artificial Sequence
  ENSG00000058335_10 (sequence is synthesized)
ccagctggcccacgctggtcctggctgacctatttgacatcctgctgcccatgctcaacatctaccaagagttcgtccgcaaccaccagtacagcctgcagatcctggcccactgcaagc

SEQ ID NO: 39887 - DNA, 120 bp, Artificial Sequence
  ENSG00000058335_11 (sequence is synthesized)
agaaccgtgacttcgacaagctgctgaagcactacgaggccaagcctgactgcgaggagaggacgctggagaccttcctcacctaccccatgttccagatccccaggtacatcctgaccc

SEQ ID NO: 39888 - DNA, 120 bp, Artificial Sequence
  ENSG00000058335_12 (sequence is synthesized)
tccatgagctcctggcccacacgcctcatgagcacgttgagcgcaacagcctggactacgccaagtccaaactggaggagctgtccagaataatgcacgatgaagtaagtgagacggaga

SEQ ID NO: 39889 - DNA, 120 bp, Artificial Sequence
  ENSG00000058335_13 (sequence is synthesized)
acatccggaaaaacctggccatcgagcgcatgatcatcgaaggctgtgagatcctcctggacaccagccagacctttgtgagacaaggttccctcattcaggtgcccatgtctgaaaagg

SEQ ID NO: 39890 - DNA, 120 bp, Artificial Sequence
  ENSG00000058335_14 (sequence is synthesized)
gcaagatcaccagggggcgcctggggtctctctccctaaagaaagagggcgagcgacagtgcttcctgttttctaagcatctgattatctgtaccagaggctctggagggaagcttcact

SEQ ID NO: 39891 - DNA, 120 bp, Artificial Sequence
  ENSG00000058335_15 (sequence is synthesized)
tgaccaagaatggagtcatatccctcattgactgcactttattggaggagccagaaagcacggaggaggaagccaaaggatccggccaagacatagatcacttggattttaaaatcgggg

SEQ ID NO: 39892 - DNA, 120 bp, Artificial Sequence
  ENSG00000058335_16 (sequence is synthesized)
tggagccaaaggattccccgccctttacagtcatcctagtggcctcgtccagacaggagaaggcagcgtggaccagtgacatcagccagtgtgtggataacatccgatgcaatgggctca

SEQ ID NO: 39893 - DNA, 120 bp, Artificial Sequence
  ENSG00000058335_17 (sequence is synthesized)
tgatgaacgcatttgaagaaaattccaaggtcactgtgccgcagatgatcaagtccgacgcctccttatattgtgatgatgttgacattcgcttcagcaaaaccatgaactcctgcaaag

SEQ ID NO: 39894 - DNA, 120 bp, Artificial Sequence
  ENSG00000058335_18 (sequence is synthesized)
tgctgcagatccgctacgccagtgtggagcggctgctggagaggctgacggacctgcgcttcctgagcatcgacttcctcaacaccttcctgcactcctaccgcgtcttcaccaccgcca

SEQ ID NO: 39895 - DNA, 120 bp, Artificial Sequence
  ENSG00000058335_19 (sequence is synthesized)
tcgtggtcctggacaagctcattaccatctacaagaagcctatcagtgccattcctgccaggtcgctggagctcctgtttgccagtggccagaacaataagctcctgtacggtgaacccc

SEQ ID NO: 39896 - DNA, 120 bp, Artificial Sequence
  ENSG00000058335_20 (sequence is synthesized)
ccaagtccccgcgcgccacccgcaagttctcctcgccgccacctctgtccatcaccaagacatcgtcaccgagccgccggcggaagctctccctgaacatccccatcatcactggcggca

SEQ ID NO: 39897 - DNA, 120 bp, Artificial Sequence
  ENSG00000058335_21 (sequence is synthesized)
aggccctggacctggccgccctcagctgcaactccaatggctacaccagcatgtactcggccatgtcacccttcagcaaggccacgctggacaccagcaagctctatgtgtccagcagct

SEQ ID NO: 39898 - DNA, 120 bp, Artificial Sequence
  ENSG00000058335_22 (sequence is synthesized)
tcaccaacaagattccagatgagggcgatacgacccctgagaagcccgaagacccttcagcgctcagcaagcagagctcagaagtctccatgagagaggagtcagatattgatcaaaacc

SEQ ID NO: 39899 - DNA, 120 bp, Artificial Sequence
  ENSG00000058335_23 (sequence is synthesized)
agagtgatgatggtgatactgaaacatcaccaactaaatctccaacaacacccaaatcagtcaaaaacaaaaattcttcagagttcccactcttttcctataacaatggagtcgtcatga

SEQ ID NO: 39900 - DNA, 120 bp, Artificial Sequence
  ENSG00000058335_24 (sequence is synthesized)
cctcctgtcgtgaactggacaataaccgcagtgccttgtcggccgcctctgcctttgccatagcaaccgccggggccaacgagggcaccccaaacaaggagaagtaccggaggatgtcct

SEQ ID NO: 39901 - DNA, 120 bp, Artificial Sequence
  ENSG00000058335_25 (sequence is synthesized)
aggactttgagaccaacgatgagctcaaatgcaaggtgatcggcttcctggaagaagtcatgcacgacccggagctcctgacccaggagcggaaggctgcagccaacatcatcaggactc

SEQ ID NO: 39902 - DNA, 120 bp, Artificial Sequence
  ENSG00000058335_26 (sequence is synthesized)
tgacccaggaggacccaggtgacaaccagatcacgctggaggagatcacgcagatggctgaaggcgtgaaggctgagccctttgaaaaccactcagccctggagatcgcggagcagctga

SEQ ID NO: 39903 - DNA, 120 bp, Artificial Sequence
  ENSG00000058335_27 (sequence is synthesized)
ccctgctagatcacctcgtcttcaagaagattccttatgaggagttcttcggacaaggatggatgaaactggaaaagaatgaaaggaccccttatatcatgaaaaccactaagcacttca

SEQ ID NO: 39904 - DNA, 120 bp, Artificial Sequence
  ENSG00000058335_28 (sequence is synthesized)
atgacatcagtaacttgattgcttcagaaatcatccgcaatgaggacatcaacgccagggtgagcgccatcgagaagtgggtggccgtagctgacatatgccgctgcctccacaactaca

SEQ ID NO: 39905 - DNA, 120 bp, Artificial Sequence
  ENSG00000058335_29 (sequence is synthesized)
atgccgtactggagatcacctcgtccatgaaccgcagtgcaatcttccggctcaaaaagacgtggctcaaagtctctaagcagactaaagctttgattgataagctccaaaagcttgtgt

SEQ ID NO: 39906 - DNA, 120 bp, Artificial Sequence
  ENSG00000058335_30 (sequence is synthesized)
catctgagggcagatttaagaatctcagagaagctctgaaaaattgtgacccaccctgtgtcccttacctggggatgtacctcaccgacctggccttcatcgaggaggggacgcccaatt

SEQ ID NO: 39907 - DNA, 120 bp, Artificial Sequence
  ENSG00000058335_31 (sequence is synthesized)
acacggaagacggcctggtcaacttctccaagatgaggatgatatcccatattatccgagagattcgccagtttcaacaaactgcctacaaaatagagcaccaagcaaaggtaacgcaat

SEQ ID NO: 39908 - DNA, 120 bp, Artificial Sequence
  ENSG00000058335_32 (sequence is synthesized)
atttactggaccaatcttttgtaatggatgaagaaagcctctacgagtcttctctccgaatagaaccaaaactccccacctgaagctgagcccagcccagacccagctgctcccggggac

SEQ ID NO: 39909 - DNA, 120 bp, Artificial Sequence
  ENSG00000058335_33 (sequence is synthesized)
atgtgctagatgatactgtacatattcgtttggtttcactggattttcttcttcagtatgtgcttctccaagaatacaaatcgtccttgttcttagattcctgtagaaccggaatatgaa

SEQ ID NO: 39910 - DNA, 120 bp, Artificial Sequence
  ENSG00000058335_34 (sequence is synthesized)
tttctgcaccgtttcagacttcgcccacccatccctcccctcgtctcctgcagtgcctgtttcttttaaacagctgtactcttggtccctcttccctagactcctcactcttctcagagg

SEQ ID NO: 39911 - DNA, 120 bp, Artificial Sequence
  ENSG00000058335_35 (sequence is synthesized)
ggaaacagcacccttgcatacaagaatcttagactccagtcctgcttccgtccctccccagcccaggctcctgggttgaggtggccacccaggcatcctcccagcatgttccatgtagtt

SEQ ID NO: 39912 - DNA, 120 bp, Artificial Sequence
  ENSG00000058335_36 (sequence is synthesized)
tggggggtggggggcggcgggagggggaaaccataccctgaagtccagtcattgacaaatcttcccgctgatggtgatgtcaatttccaaagcagcttctccagccaaaatcgcaggtct

SEQ ID NO: 39913 - DNA, 120 bp, Artificial Sequence
  ENSG00000058335_37 (sequence is synthesized)
aatcgcaggtctcaaaactccccatgtgtctcccagtaacctggacggaagggagtcctctctgctcagaaccacacccctcgtaccaatgctgccatctcgttcaggccccacgtcgct

SEQ ID NO: 39914 - DNA, 120 bp, Artificial Sequence
  ENSG00000058335_38 (sequence is synthesized)
ccttgctctaggattaacaccagatagcatgaatagcagtctcaatacaactggatgaggccctagacttcccgaggaaatggagtcacaaacaccaagccacgtcgactcttgccgacc

SEQ ID NO: 39915 - DNA, 120 bp, Artificial Sequence
  ENSG00000058335_39 (sequence is synthesized)
actggcccagcatccactgaaagtcgggaacacaaaaatgtcacttttcctctttaagctgcctaacggtcactacaagcttacattgagatgctctaagtctgtataccttgtgataat

SEQ ID NO: 39916 - DNA, 120 bp, Artificial Sequence
  ENSG00000058335_40 (sequence is synthesized)
tagtaccacactgtagaattaggaaatcaataaccaagtgtttttattgcatatactgtagtcctgtctaaatgccttctagcaggaatatagtaatgtagtgcttattctgtgaatatt

SEQ ID NO: 39917 - DNA, 120 bp, Artificial Sequence
  ENSG00000058335_41 (sequence is synthesized)
accatgtattttttacactgtacagtatagaaaacacaggttaactccgaagtggcaggcatgctccactacaacagacagacaacttttgctgtaagcaatacctagtggtatgagaat

SEQ ID NO: 39918 - DNA, 120 bp, Artificial Sequence
  ENSG00000058335_42 (sequence is synthesized)
tctatttcaagtcctaaaatatttcaacttacagcttgtttggaaaaaaatttccatttttgtaaaaatatatgtttcctgattacctcttgctaataaatctattctatctcagggtga

SEQ ID NO: 39919 - DNA, 120 bp, Artificial Sequence
  ENSG00000058335_43 (sequence is synthesized)
acagcgagttttgatgggtttcattcgttcagtcaaggaatatttgatgagcacttgctccttacccagcccagcctgggaccggagatccagagtgtcaaggacaccatacctgctttt

SEQ ID NO: 39920 - DNA, 120 bp, Artificial Sequence
  ENSG00000058335_44 (sequence is synthesized)
taggcaccaacagtttggtggggaagactgtttcagttgcctattgcaccaagaacaagccactccaaaacataatggcttaaaaccatttttgttacctttcacagttctatgggttga

SEQ ID NO: 39921 - DNA, 120 bp, Artificial Sequence
  ENSG00000058335_45 (sequence is synthesized)
ctgggtccagctgtcagttcttatttggagtctctcatgaagtttcagtcactcagcaactgggactggagtcatctgaaggctcaactggaccgggtggtgctctagttggtgcaccaa

SEQ ID NO: 39922 - DNA, 120 bp, Artificial Sequence
  ENSG00000058335_46 (sequence is synthesized)
gatggcgctgtcacatggctggatgttgatgtctgctgggctgcactggggctgttcatgggagcatccacacgtggcctctctgtgtggcttgggctcctcacagtccggaagctgggt

SEQ ID NO: 39923 - DNA, 120 bp, Artificial Sequence
  ENSG00000058335_47 (sequence is synthesized)
tccaagagcgactgttccagcagcctcaggcagaagctacaaggctgcccagatgccatcctgcccagatgtgtcctcactgtcacccaggaagggaagccccggaacaccaccctcagt

SEQ ID NO: 39924 - DNA, 120 bp, Artificial Sequence
  ENSG00000058335_48 (sequence is synthesized)
cacaggcatggggcccactgcaaggcacaacccactccagagctcccaaggccgcctcccctgggacctgcagccagctggctccataactgcttttccgtttcctccaggcattttcat

SEQ ID NO: 39925 - DNA, 120 bp, Artificial Sequence
  ENSG00000058335_49 (sequence is synthesized)
cctagccctactttgtgctgggatctgagggggatagcaagcggagaaagaagggatctagagggagaagattctagatccttcttttgactgccagctgattttgattgccagctttac

SEQ ID NO: 39926 - DNA, 120 bp, Artificial Sequence
  ENSG00000058335_50 (sequence is synthesized)
ctgcttcatgagctcagccaagtcacttaacctctcagagcttcactgttctcatctgaaaaatggggatgaaaatggtatctcattacagagtagaattaaatgaattattataattaa

SEQ ID NO: 39927 - DNA, 120 bp, Artificial Sequence
  ENSG00000058335_51 (sequence is synthesized)
ctgattatcacaaacaaggaatctgtgcctagctgatgtggcagcaggcactttgcaaaacagctagattgattgcaagagtcgttgttggtcccatggacactctggtaattggagatg

SEQ ID NO: 39928 - DNA, 120 bp, Artificial Sequence
  ENSG00000058335_52 (sequence is synthesized)
agagaagctctgaaaaaatgttgcacccatctgtgctgtccagccgtctctcttctgcctgggctcccgagagcccctgtggactgtgcttgtggggagctgccccctccgtgcattcac

SEQ ID NO: 39929 - DNA, 120 bp, Artificial Sequence
  ENSG00000058335_53 (sequence is synthesized)
caacttgtccgtccgtccgcccccggggcaccactccatccacctcctcacatggctggcttcctcgtctgccgccgccaccaccgctgcctccactgcctctggggccccccattctgt

SEQ ID NO: 39930 - DNA, 120 bp, Artificial Sequence
  ENSG00000058335_54 (sequence is synthesized)
ctgagtccccaccctgaccgtcttccctctttcaggtggcctgtgggcccgtgtaagtgtctctcccacattcccctgctccctgcagcacagggcagaggtggcctgcgggcctctgga

SEQ ID NO: 39931 - DNA, 120 bp, Artificial Sequence
  ENSG00000058335_55 (sequence is synthesized)
agctaagagctttatgcaaaccaggttctggacttgcagagacataggcagggcacacagaggagggagggactggggaaacctggggcaaatgcttcccgcaccccctctcctgaggct

SEQ ID NO: 39932 - DNA, 120 bp, Artificial Sequence
  ENSG00000058335_56 (sequence is synthesized)
ctaaggttttcacaaagagcggtgttgcatgaatactgagcgtctgtttcactaggcaggggacgggggcaagagtagcgaggtggcagtccatgggcatagccaatgacctccccagag

SEQ ID NO: 39933 - DNA, 120 bp, Artificial Sequence
  ENSG00000058335_57 (sequence is synthesized)
aaggagtcctgctatgggcctcaccatgttggtctgcagcccattcatacgtcccaggcatctttttttagcttttcattaagatatccaattcgggctaggcacagtggctcatgccta

SEQ ID NO: 39934 - DNA, 120 bp, Artificial Sequence
  ENSG00000058335_58 (sequence is synthesized)
cttgaagagcacacacagatctcttcctgtcagaatggagacttagattgtccttctcagtagacaaatttctcagcagaaatctgaccccaagattgggcgtgtgcttggcctccgggg

SEQ ID NO: 39935 - DNA, 120 bp, Artificial Sequence
  ENSG00000058335_59 (sequence is synthesized)
cctgtgtcccctccaggctgactagggctctggtggcgtgacgtaccgctgtgctcccgcggtttctcagccacattctgaatcttgaggaacagagctgcaaaggaagtctctaaccta

SEQ ID NO: 39936 - DNA, 120 bp, Artificial Sequence
  ENSG00000058335_60 (sequence is synthesized)
tctcaccattttatcaatgagggagctgaggacccctgagggaaagggccttccctcgggctacacagggaaaggtgcacaaagccaggcttgacccggggtgctccatgggtcagacaa

SEQ ID NO: 39937 - DNA, 120 bp, Artificial Sequence
  ENSG00000058335_61 (sequence is synthesized)
actccagccaccgaaactctgctccagcctgatgtgtgcgctgggcctggcgaggtcgcttggcaaagccctttgctgtggagcttcctcttctccagccaggccttttcttttctgatg

SEQ ID NO: 39938 - DNA, 120 bp, Artificial Sequence
  ENSG00000058335_62 (sequence is synthesized)
atcagttcgtctcccatcttttttcttgatccttaaatttgggtggcatttctggtgtgaaaaggggaacgtgtgaaatgacggtcacatcctttgggtctagttcatgagaaagatcag

SEQ ID NO: 39939 - DNA, 120 bp, Artificial Sequence
  ENSG00000058335_63 (sequence is synthesized)
gaaaatgaaaaatctgccatttcctgctctgagcgcaggctcctgggagtcacccactaagtccttctaaactgcccaggtctcgggatcctgcagcatttccaagggccaaatccacac

SEQ ID NO: 39940 - DNA, 120 bp, Artificial Sequence
  ENSG00000058335_64 (sequence is synthesized)
tgaggagttcaggggcaaggtgcccaaacacaggaggcccccagatcccaagggaaggcaattctggagccctgttgggcagcatgttggagtgtgggcctgatccccgggcctcgggga

SEQ ID NO: 39941 - DNA, 120 bp, Artificial Sequence
  ENSG00000058335_65 (sequence is synthesized)
tcacagcgtgtgctgtgtgttagtaaatgcttctgcttccttctagactaaagctttgattgataagctccaaaagcttgtgtcatctgagggcagatttaagaatctcagagaagctct

SEQ ID NO: 39942 - DNA, 120 bp, Artificial Sequence
  ENSG00000058335_66 (sequence is synthesized)
gaaaaagtaagtgtgtgtcgttttgtcgctgttatttttaaaatcatagacctgcattgcagaggcattcacgtgccgcccccagccagagcaggaggtctttctgtctgtctgttcgtc

SEQ ID NO: 39943 - DNA, 120 bp, Artificial Sequence
  ENSG00000058335_67 (sequence is synthesized)
tgtctacccacaagacccctagatttcctggaccccaatggtggagtcctccatggtctgccagagaaactccagagtttgctagcatttcctgagagaagcacaggaatactgctggga

SEQ ID NO: 39944 - DNA, 120 bp, Artificial Sequence
  ENSG00000058335_68 (sequence is synthesized)
tccctgaaagcatagtagctgtgatgataatagtagtggtgccagatttctcgattctaaaatgcacgttttcttttcacattttaataattctgacatcaggagacgtcttaacgtcag

SEQ ID NO: 39945 - DNA, 120 bp, Artificial Sequence
  ENSG00000058335_69 (sequence is synthesized)
ttttgtttatttaacacaattgtgtttcctttttcactccagaattcatcatcaaaatgtttgcattttataaacaatggcatccgggaattaaaaaaatacagttttacaataatcata

SEQ ID NO: 39946 - DNA, 120 bp, Artificial Sequence
  ENSG00000058335_70 (sequence is synthesized)
ggagccctttttggcctacttggggtgagtcaacataaggagtgcaggccaccttagcctttgcttctcaaaagtcatggggcaatgaaggacttggccaaggctgtccagcagtaggcc

SEQ ID NO: 39947 - DNA, 120 bp, Artificial Sequence
  ENSG00000058335_71 (sequence is synthesized)
aagttcagggattggctcaggcccctaatggacttcactgcatccaggaatggtaggtgattatcttttccgagaggccacctacccagatcccagttgtggacagcccatcccagccct

SEQ ID NO: 39948 - DNA, 120 bp, Artificial Sequence
  ENSG00000058335_72 (sequence is synthesized)
cagaggctcagaggctctctgagtgccctgccccaaaacaccctaggcaagacattatgccagagcctcagctctagggctgcctggagcagagctcctgaatcacactggctccccagg

SEQ ID NO: 39949 - DNA, 120 bp, Artificial Sequence
  ENSG00000058335_73 (sequence is synthesized)
gctccccaggaacctcaccattcctcccccaatccacacctctgctgccagagcaacgcaacgacccagaatacacccgttccctcttctgttccctcctcctgcccccacctcaggcct

SEQ ID NO: 39950 - DNA, 120 bp, Artificial Sequence
  ENSG00000058335_74 (sequence is synthesized)
cactggggcagggtacatcttgcctctctgccctgaacttctgaaacctcaatgatcagattcccagggctctgagaaaacagaagcaaacatcccatccaggatggatttaccccctaa

SEQ ID NO: 39951 - DNA, 120 bp, Artificial Sequence
  ENSG00000058335_75 (sequence is synthesized)
aagtcactgagatcattcccaggggcccagcagacagtgtccttcctttcccagcagcagtgccctgcagaacaaagaggctggttcagagccagctctcagccctatggccttggctga

SEQ ID NO: 39952 - DNA, 120 bp, Artificial Sequence
  ENSG00000058335_76 (sequence is synthesized)
gtcccttaacctttctgagactcagtttcctacctgtgacattcctgcagttatcctgtaggaataagagtgcctacgtcctggggcaacagtgagggttaaaagatcaatcctatcctg

SEQ ID NO: 39953 - DNA, 120 bp, Artificial Sequence
  ENSG00000058335_77 (sequence is synthesized)
tgtgcaacgtggagcagacagcctcgatgagacaagctatggtttgcaatgttctggatgtataacctgtttccagcctggcctgaggtggaaccctgtcatgaggatggtcgctggagc

SEQ ID NO: 39954 - DNA, 120 bp, Artificial Sequence
  ENSG00000058335_78 (sequence is synthesized)
ctcagaactgcctgctgggacaggagccctgccttctgcctccatgtgggctggtcagaggcccgggaggtgaagagcgcccttgtcaaggacagccccaagtaggagtgctggggtaga

SEQ ID NO: 39955 - DNA, 120 bp, Artificial Sequence
  ENSG00000058404_0 (sequence is synthesized)
gtgcccgcgagcgggagccggagtcgccgccgcccgagcgcagccgagcgcacgccgagcccgtccgccgccgccatggccaccacggtgacctgcacccgcttcaccgacgagtaccag

SEQ ID NO: 39956 - DNA, 120 bp, Artificial Sequence
  ENSG00000058404_1 (sequence is synthesized)
ctctacgaggatattggcaagggggctttctctgtggtccgacgctgtgtcaagctctgcaccggccatgagtatgcagccaagatcatcaacaccaagaagctgtcagccagagatcac

SEQ ID NO: 39957 - DNA, 120 bp, Artificial Sequence
  ENSG00000058404_2 (sequence is synthesized)
cagaagctggagagagaggctcggatctgccgccttctgaagcattccaacatcgtgcgtctccacgacagcatctccgaggagggcttccactacctggtcttcgatctggtcactggt

SEQ ID NO: 39958 - DNA, 120 bp, Artificial Sequence
  ENSG00000058404_3 (sequence is synthesized)
ggggagctctttgaagacattgtggcgagagagtactacagcgaggctgatgccagtcactgtatccagcagatcctggaggccgttctccattgtcaccaaatgggggtcgtccacaga

SEQ ID NO: 39959 - DNA, 120 bp, Artificial Sequence
  ENSG00000058404_4 (sequence is synthesized)
gacctcaagccggagaacctgcttctggccagcaagtgcaaaggggctgcagtgaagctggcagacttcggcctagctatcgaggtgcagggggaccagcaggcatggtttggtttcgct

SEQ ID NO: 39960 - DNA, 120 bp, Artificial Sequence
  ENSG00000058404_5 (sequence is synthesized)
ggcacaccaggctacctgtcccctgaggtccttcgcaaagaggcgtatggcaagcctgtggacatctgggcatgtggggtgatcctgtacatcctgctcgtgggctacccacccttctgg

SEQ ID NO: 39961 - DNA, 120 bp, Artificial Sequence
  ENSG00000058404_6 (sequence is synthesized)
gacgaggaccagcacaagctgtaccagcagatcaaggctggtgcctatgacttcccgtcccctgagtgggacaccgtcactcctgaagccaaaaacctcatcaaccagatgctgaccatc

SEQ ID NO: 39962 - DNA, 120 bp, Artificial Sequence
  ENSG00000058404_7 (sequence is synthesized)
aaccctgccaagcgcatcacagcccatgaggccctgaagcacccgtgggtctgccaacgctccacggtagcatccatgatgcacagacaggagactgtggagtgtctgaaaaagttcaat

SEQ ID NO: 39963 - DNA, 120 bp, Artificial Sequence
  ENSG00000058404_8 (sequence is synthesized)
gccaggagaaagctcaagggagccatcctcaccaccatgctggccacacggaatttctcagtgggcagacagaccaccgctccggccacaatgtccaccgcggcctccggcaccaccatg

SEQ ID NO: 39964 - DNA, 120 bp, Artificial Sequence
  ENSG00000058404_9 (sequence is synthesized)
caagccaagagtttactcaacaagaaagcagatggagtcaagccccagacgaatagcaccaaaaacagtgcagccgccaccagccccaaagggacgcttcctcctgccgccctggagcct

SEQ ID NO: 39965 - DNA, 120 bp, Artificial Sequence
  ENSG00000058404_10 (sequence is synthesized)
caaaccaccgtcatccataacccagtggacgggattaaggagtcttctgacagtgccaataccaccatagaggatgaagacgctaaagcccggaagcaggagatcattaagaccacggag

SEQ ID NO: 39966 - DNA, 120 bp, Artificial Sequence
  ENSG00000058404_11 (sequence is synthesized)
cagctcatcgaggccgtcaacaacggtgactttgaggcctacgcgaaaatctgtgacccagggctgacctcgtttgagcctgaagcactgggcaacctggttgaagggatggacttccac

SEQ ID NO: 39967 - DNA, 120 bp, Artificial Sequence
  ENSG00000058404_12 (sequence is synthesized)
agattctacttcgagaacctgctggccaagaacagcaagccgatccacacgaccatcctgaacccacacgtgcacgtcattggagaggatgccgcctgcatcgcttacatccggctcacg

SEQ ID NO: 39968 - DNA, 120 bp, Artificial Sequence
  ENSG00000058404_13 (sequence is synthesized)
cagtacattgacgggcagggccggccccgcaccagccagtctgaggagacccgcgtgtggcaccgccgcgacggcaagtggcagaacgtgcacttccactgctcgggcgcgcctgtggcc

SEQ ID NO: 39969 - DNA, 120 bp, Artificial Sequence
  ENSG00000058404_14 (sequence is synthesized)
ccgctgcagtgaagccaagggaggggcacagaatggggaacaggacacaggatcctaaactccaaggggactgtccaccgatgaacactcagagtggacaccatcttccgtccacgctgt

SEQ ID NO: 39970 - DNA, 120 bp, Artificial Sequence
  ENSG00000058404_15 (sequence is synthesized)
gcccaggacagctgtccccatccatgaacacagggtaaacatctgccgggctccgcaccagtggctccctgggccatgggacagcggcagggctcaccacggacagcacgtggcccagca

SEQ ID NO: 39971 - DNA, 120 bp, Artificial Sequence
  ENSG00000058404_16 (sequence is synthesized)
gccggccaccctggcgtcctggggcctcctcccctcctctccctctcaccttgtcacctccacggagctgcctgtctgggataatttggggattttttttctgggggataattcttttgc

SEQ ID NO: 39972 - DNA, 120 bp, Artificial Sequence
  ENSG00000058404_17 (sequence is synthesized)
atgacccctaaagagcaagccacaccggtctgctagctaggtgtccgcggtgtggtggtggcggccgctggccagcgctgcaaggggtcggctgcccacggtgctggctggcctcccctc

SEQ ID NO: 39973 - DNA, 120 bp, Artificial Sequence
  ENSG00000058404_18 (sequence is synthesized)
ctctctctttttgctgagtttcattgtcttttctttctgagccttgtaagtgtacaaaaattattcttattttgttctgtctcgggaaactgcaaataaaagaaaaacaggacaaactgc

SEQ ID NO: 39974 - DNA, 80 bp, Artificial Sequence
  ENSG00000058404_19 (sequence is synthesized)
gcggcgcccgcgcctccccgcgcgtaggtgtgcggcgcgctcctggcgaggacggagcgagcagatctcgcgtgcgctcg

SEQ ID NO: 39975 - DNA, 120 bp, Artificial Sequence
  ENSG00000058404_20 (sequence is synthesized)
gcagtgaagagctgcgccctggtttcgccggacagagttggtgtttggagcccgactgccctcgggcacacggcctgcctgtcgcatgtttgtgtctgcctcgttccctcccctggtgcc

SEQ ID NO: 39976 - DNA, 78 bp, Artificial Sequence
  ENSG00000058404_21 (sequence is synthesized)
gtcgcatgtttgtgtctgcctcgttccctcccctggtgcctgtgtctgcagaaaaacaagaccagatgtgattcgacg

SEQ ID NO: 39977 - DNA, 120 bp, Artificial Sequence
  ENSG00000058404_22 (sequence is synthesized)
tggcctctgggggaccagctgggacatgaacttgtctgccaggcccccgtcgcgtgctgaacggtgttagtttgtaggtaacgcacacaccccacacctaaggtgtctgcatcctcctgc

SEQ ID NO: 39978 - DNA, 120 bp, Artificial Sequence
  ENSG00000058404_23 (sequence is synthesized)
caacgcatgggctccacgtggtgtgctcgctggctgtcgtgactgtcagctgtctcttgggaggggctgtgggggcccgctgggctgcctcctttcccgctagttgtgcctgagagttgc

SEQ ID NO: 39979 - DNA, 120 bp, Artificial Sequence
  ENSG00000058404_24 (sequence is synthesized)
tgttgttcctgctttcccttcccttcctttcatcccctgaagggctaggtgtgggttttccgtgcccggtatccccacacacccagcacggacaacccttcggcagagcccaggccggcc

SEQ ID NO: 39980 - DNA, 120 bp, Artificial Sequence
  ENSG00000058404_25 (sequence is synthesized)
cctcaccccctggagtattgaaactggagtcccgtccccaaggccttcagagatgcccctacacacccagggctccagctctggtccttctgggggagtaaagtgcaaagaggggcacag

SEQ ID NO: 39981 - DNA, 120 bp, Artificial Sequence
  ENSG00000058404_26 (sequence is synthesized)
cttagttttgggcctctcgccgagcaagagacagcactgctggctacagctccaacacagccagctgtggcaagaggactctgcctgggctggcccccctcctgtgtgaggtgtctgtcc

SEQ ID NO: 39982 - DNA, 120 bp, Artificial Sequence
  ENSG00000058404_27 (sequence is synthesized)
cttctctgctggccagcagcagatgcactggcagctcccaaccctgtttccgcccctcggccctcccccagcctgttcggcttctctgcagcccgcaagggggagcagacttttgacaaa

SEQ ID NO: 39983 - DNA, 120 bp, Artificial Sequence
  ENSG00000058404_28 (sequence is synthesized)
ggactgcgggcctcgctcaagtccctgagcccccagctgaagctgggaggggaggccaggctttgtgtctgggcatattcgtctgctgatggggtttggggaagcctggggcttggggtt

SEQ ID NO: 39984 - DNA, 120 bp, Artificial Sequence
  ENSG00000058404_29 (sequence is synthesized)
tggtcgggtggtgcagctagtggcagagcgggatcagaggtggtggctgcccagcttctgggctgagacaagggtctgtgcaggggtttactgaagtgggagtgcctttggaatctgggc

SEQ ID NO: 39985 - DNA, 120 bp, Artificial Sequence
  ENSG00000058404_30 (sequence is synthesized)
cgggagcagaagggagcaaaagctacagtgggagccagcctagggcacatgggaggcgtgagggcagtgctgcccgtgcagtgtcaggtgtgccagtgccttggcgggctgcagtgcgtg

SEQ ID NO: 39986 - DNA, 120 bp, Artificial Sequence
  ENSG00000058404_31 (sequence is synthesized)
tgagggcaccttctaggtgggccagggatgcagctatggagataaggcgggctggggacagaaacaggtgggcacagggcccaggacaccagcggatggagggcagggtctagccctgtg

SEQ ID NO: 39987 - DNA, 120 bp, Artificial Sequence
  ENSG00000058404_32 (sequence is synthesized)
ctcctgagcgtcggctgcctgggttcgaggcggtgggtccccggccccttgtgatggtgtgtaccatgggggagctcggggacagggcaagcccgagcatggtggggctgcagggtgggt

SEQ ID NO: 39988 - DNA, 120 bp, Artificial Sequence
  ENSG00000058404_33 (sequence is synthesized)
ctgaagccaggttgggtgggggtggtcacaagccctgactgcagagggtcaggggctcctgccccagtgcctgcccactttcaattcacattgttttcaacaaggattttctttatcttc

SEQ ID NO: 39989 - DNA, 80 bp, Artificial Sequence
  ENSG00000058404_34 (sequence is synthesized)
ctgcctgacctcagcgcgcgcggccctgcccagctctgcccagcgcggctgccgggccggggctccgggctcgcgacttg

SEQ ID NO: 39990 - DNA, 120 bp, Artificial Sequence
  ENSG00000058404_35 (sequence is synthesized)
ctggtgcccaaaaagggtcagccactctgccagtttaggggagaaaacttctcacctgtccaaagcatagccttgctcctgcccggcctacccagctatgacactgtccctgagcagaga

SEQ ID NO: 39991 - DNA, 120 bp, Artificial Sequence
  ENSG00000058404_36 (sequence is synthesized)
tgagcacaggactttgggccctggatgccggagagtgggtgtttgtgtgattcccctgcagtctggaacaggccccaaaggcaacagcatgaaggctgtccagaggttctccatcaccct

SEQ ID NO: 39992 - DNA, 120 bp, Artificial Sequence
  ENSG00000058404_37 (sequence is synthesized)
cagccgagtggggtgctgagcagtgagggaggggacctgggaggggggcccagcctggatcctgcaggggagaagagaagacagccagaagccagcagctgtggctcagatctgagcccg

SEQ ID NO: 39993 - DNA, 120 bp, Artificial Sequence
  ENSG00000058404_38 (sequence is synthesized)
agcagcctctcgaggtggaggcagacaccccccaccccaccccgtgcagaaagaagccttgccagcctgccctgaggctggtacagagtccaggcaggctcagtggccatcatgccccta

SEQ ID NO: 39994 - DNA, 120 bp, Artificial Sequence
  ENSG00000058404_39 (sequence is synthesized)
cgatgactgtcactccctctccgtgcgcctggcctctgctggctctggccaggggtggtcacagcactagggtggcagggtggcctctgactctgcgccagcctgcactggcctgtgctg

SEQ ID NO: 39995 - DNA, 120 bp, Artificial Sequence
  ENSG00000058404_40 (sequence is synthesized)
ccctggcctctgctggctctggctctggcaccggtcccgtgttggctccttcagccttcacatacctgctgcggccaccacaggcccaggacccccacaggtggccaccccacctccacc

SEQ ID NO: 39996 - DNA, 120 bp, Artificial Sequence
  ENSG00000058404_41 (sequence is synthesized)
ccaggagccccaggtatccagctgtcaccccctccctccctcctggcctccccctgtccttctccagttgccttcttttcctgcgggcgcaccacccacctgcctgcctcacctgttccg

SEQ ID NO: 39997 - DNA, 120 bp, Artificial Sequence
  ENSG00000058404_42 (sequence is synthesized)
cctcagcccccagggtccccgacatcctgagctcagtgaggaggggctcgggagccccagaagccgaggggcccctgccctgcccatctccggctccctttagccccctgccagccccat

SEQ ID NO: 39998 - DNA, 120 bp, Artificial Sequence
  ENSG00000058404_43 (sequence is synthesized)
gtaagtagcctgggtcctgctgctgtgggggtcatgttggagggctggcaaccccctagaggggccactccagagccgagggcaggctgagcgtggaccctggctccagcctcatcaccc

SEQ ID NO: 39999 - DNA, 120 bp, Artificial Sequence
  ENSG00000058404_44 (sequence is synthesized)
gctcaaggccactgggcaggatgggaggccctggaggctcgggcctcaattccagtcttcagggtcggtgcaggcctcactccacctcagcttgcgggcgggggggctccctgctattga

SEQ ID NO: 40000 - DNA, 120 bp, Artificial Sequence
  ENSG00000058404_45 (sequence is synthesized)
ggcaggctctgattcagggcctgatcccagggcccaaggggtctagaacacgggacccctcccactggcctcctccgccttgccgccgcctcgtgtgtctgtctgcctcatgttcacgtc

SEQ ID NO: 40001 - DNA, 120 bp, Artificial Sequence
  ENSG00000058404_46 (sequence is synthesized)
tcatctgttccaccccagcccccaggatctctgacatcctgaactctgtgagaaggggttcaggaaccccagaagccgagggccccctctcagcggggcccccgccctgcctgtctccgg

SEQ ID NO: 40002 - DNA, 120 bp, Artificial Sequence
  ENSG00000058404_47 (sequence is synthesized)
ctctcctaggccccctgtcctccccgtcccccaggatctctgacatcctgaactctgtgaggaggggctcagggaccccagaagccgagggcccctcgccagtggggcccccgccctgcc

SEQ ID NO: 40003 - DNA, 120 bp, Artificial Sequence
  ENSG00000058404_48 (sequence is synthesized)
gggctgtgcaggacaaggatgtgggacccttgggggggcctgctcagagtcaggggtccacggggcccctcctcacttggatttggcccccaggaaaatctgtgacccagggctgacctc

SEQ ID NO: 40004 - DNA, 120 bp, Artificial Sequence
  ENSG00000058404_49 (sequence is synthesized)
gggagcttggggcctccacccactcacgttggcaaaatcaccatgtccagtggcctgtggattggtgctcggtggacacggatgcgtgtgccccagcaggctgggacccccaaggtgacg

SEQ ID NO: 40005 - DNA, 120 bp, Artificial Sequence
  ENSG00000058404_50 (sequence is synthesized)
cacatgcggctgtgcccaccgactgcctagtttcgacctttgtgtaaataagagcacactatcaccagaagctggagagagaggctcggatctgccgccttctgaagcattccaacatcg

SEQ ID NO: 40006 - DNA, 120 bp, Artificial Sequence
  ENSG00000058404_51 (sequence is synthesized)
ctgctgtaagatgagctcagcgtggctgtgcagggctcggctgggggtgcttctcttccctgtctttcagtggcccccagcctgcctgtgcctcagcacttggccctacctgttgtgcgg

SEQ ID NO: 40007 - DNA, 120 bp, Artificial Sequence
  ENSG00000058404_52 (sequence is synthesized)
acctcgggggacacccagaggttgttcttagactcctttaggaaaactcagcatcacagggaactgcagttcccggagccagtgtgcacgtagaggtgccgtgagcctgagcctgagcct

SEQ ID NO: 40008 - DNA, 120 bp, Artificial Sequence
  ENSG00000058404_53 (sequence is synthesized)
gctgagacctcgagggagagggcgagcccagcccccttcatgcggatccctgagtgggtggctggctccccggtcttcacccctcagatgcaccgatctacccccgtctgtcctcttggc

SEQ ID NO: 40009 - DNA, 120 bp, Artificial Sequence
  ENSG00000058404_54 (sequence is synthesized)
gtttgcatcatcttgacccctgtgcaattagaacaagtggtttattgccgcccccaggcctggccaggacctggggtagggggaggcatgctggcatagagccggtgatagcagaccttg

SEQ ID NO: 40010 - DNA, 120 bp, Artificial Sequence
  ENSG00000058404_55 (sequence is synthesized)
gatgccagcggcctcctacctccttccctactgctgtttgtcttcaggcaagttacttaaccattcagggccccagtgtcctcatttgcaaagtgctgctggtaataacgtgtctggcat

SEQ ID NO: 40011 - DNA, 120 bp, Artificial Sequence
  ENSG00000058404_56 (sequence is synthesized)
ctgtctcttcctgcacttggctgtgggcaccttgaggtggcccctgccctgtcaccttcatggtggtgggtgccagctgccaacccaccagcacagtaacagcttggaggagcccccact

SEQ ID NO: 40012 - DNA, 120 bp, Artificial Sequence
  ENSG00000058404_57 (sequence is synthesized)
gtcatgggaagttgtgcaaggaggaaggagggaatgatggtggtccatcctgctgaccatgccagctctggaattggagctcagggcccaaaattttggatgatgttgcatcaggcaggg

SEQ ID NO: 40013 - DNA, 120 bp, Artificial Sequence
  ENSG00000058404_58 (sequence is synthesized)
accctgccaccagcctgtgctggcaggacacagcggagacacagagcctgaaggcagaaggcagccctgggaagacccaggtgcgtctccacgacagcatctccgaggagggcttccact

SEQ ID NO: 40014 - DNA, 120 bp, Artificial Sequence
  ENSG00000058404_59 (sequence is synthesized)
ctacccgcagtatcacttacagggatggatgacatcccagggctgctgccacccccacctgtggggagacaccagactgggggtggtgtggagatactcttagagaagaggctgctgggc

SEQ ID NO: 40015 - DNA, 120 bp, Artificial Sequence
  ENSG00000058404_60 (sequence is synthesized)
gatggagactgggcagaagggatctggcagcatctcttcctgagggtgtgaggaatgagtcctgtggagggcagcacatgagccctctacctccatgtgggccccagtcccctcctgctg

SEQ ID NO: 40016 - DNA, 120 bp, Artificial Sequence
  ENSG00000058404_61 (sequence is synthesized)
tcaggctaggtgggccttcgagagagagagaggaggctgcgttcattatgtgcactcttctgtgttatgtgagagcgaggggtcggcagcagcaagtggcctgcgtgcgcgaggggggct

SEQ ID NO: 40017 - DNA, 120 bp, Artificial Sequence
  ENSG00000058453_0 (sequence is synthesized)
acagcatcctggctgtggcgcgtgctgactgagctagtcttggggtcctggagaagggggctggaggcatgcccacagcctcccccccatgagcttggggctggcgggggcacaggaggt

SEQ ID NO: 40018 - DNA, 120 bp, Artificial Sequence
  ENSG00000058453_1 (sequence is synthesized)
ggagctgacactagagacggttatccagacactggagagcagcgtcctgtgccaggagaaaggcttgggcgcgcgggacctggcccaggacgctcagatcaccagcctgcctgcccttat

SEQ ID NO: 40019 - DNA, 120 bp, Artificial Sequence
  ENSG00000058453_2 (sequence is synthesized)
cagggagattgtcacccgcaacctctcccagcctgagagcccagtcctgctgccggccacagagatggcatcgctgctgtcgctgcaggaggagaaccagctgctgcagcaggagctgtc

SEQ ID NO: 40020 - DNA, 120 bp, Artificial Sequence
  ENSG00000058453_3 (sequence is synthesized)
ccgcgtggaggacctgctggcccagagccgtgccgagcgcgatgagctcgccattaagtacaatgcggtcagcgagaggctggagcaggctctgcggctggagcctggggagctggagac

SEQ ID NO: 40021 - DNA, 120 bp, Artificial Sequence
  ENSG00000058453_4 (sequence is synthesized)
gcaggagcccagggggctggtacggcagagcgtggagttgcggaggcagctgcaggaggagcaggcctcctaccggcgcaagctgcaggcctaccaggagggccagcagcggcaggccca

SEQ ID NO: 40022 - DNA, 120 bp, Artificial Sequence
  ENSG00000058453_5 (sequence is synthesized)
gcttgtgcagcggctgcagggcaagattctccagtacaagaagaggtgctcggagctggagcagcagctgctggagagatccggagagctggagcagcagcggctgagggacacagagca

SEQ ID NO: 40023 - DNA, 120 bp, Artificial Sequence
  ENSG00000058453_6 (sequence is synthesized)
cagccaagacctggaaagcgccctcatccggctggaggaggagcagcagaggagtgccagcctggcccaggtgaatgccatgctccgagaacagctggaccaggcaggctcggccaacca

SEQ ID NO: 40024 - DNA, 120 bp, Artificial Sequence
  ENSG00000058453_7 (sequence is synthesized)
ggctctgagtgaggacatacgaaaggtgaccaatgactggacacgctgccgcaaggagctggagcaccgggaggcggcgtggaggcgcgaggaggagtccttcaacgcctacttcagcaa

SEQ ID NO: 40025 - DNA, 120 bp, Artificial Sequence
  ENSG00000058453_8 (sequence is synthesized)
cgagcacagtcgcctgctcctcctctggaggcaggtggtggggttccggcggctggtcagcgaggtgaagatgttcactgagagggacctgctgcagctgggaggggagctggcccggac

SEQ ID NO: 40026 - DNA, 120 bp, Artificial Sequence
  ENSG00000058453_9 (sequence is synthesized)
atcacgagctgtccaggaggcgggcctgggactgagcacgggcctacggctggcagagagccgggccgaggcagccctggagaaacaggccctgctgcaggcccagctggaggagcagct

SEQ ID NO: 40027 - DNA, 120 bp, Artificial Sequence
  ENSG00000058453_10 (sequence is synthesized)
gcgggacaaggtgctccgcgagaaggacctggcgcagcagcagatgcaaagcgacctggacaaggctgacctcagtgccagagtgacagagctgggcctggcagtgaagcgtcttgagaa

SEQ ID NO: 40028 - DNA, 120 bp, Artificial Sequence
  ENSG00000058453_11 (sequence is synthesized)
gcagaatctggagaaggatcaggtcaacaaggacctcactgagaagcttgaggccctggaatccctgcggctacaggagcaggcggccctggagacagaggatggagaggggctacagca

SEQ ID NO: 40029 - DNA, 120 bp, Artificial Sequence
  ENSG00000058453_12 (sequence is synthesized)
gaccctaagggacctggcacaggccgtcttgtcagactctgagagcggcgtccagctgagcggctctgagcgcaccgcggatgcttccaacggcagcctgcgggggctctcgggccagcg

SEQ ID NO: 40030 - DNA, 120 bp, Artificial Sequence
  ENSG00000058453_13 (sequence is synthesized)
gaccccgtccccaccgcggcgctcctcgcccggccgaggccgttcaccccgccgaggcccctccccggcctgctcagactcctccacgctcgccctgatccactccgccctgcacaagcg

SEQ ID NO: 40031 - DNA, 120 bp, Artificial Sequence
  ENSG00000058453_14 (sequence is synthesized)
ccagctgcaggtccaggacatgcgtgggcgctatgaggcaagccaggacctactgggcaccctgcggaagcagcttagcgacagcgagagcgagcggcgggccctagaggaacagctgca

SEQ ID NO: 40032 - DNA, 120 bp, Artificial Sequence
  ENSG00000058453_15 (sequence is synthesized)
gcgcctgcgggacaagaccgacggcgccatgcaggcccacgaggacgcccagcgcgaggtgcagcggctgcggagcgccaacgagctcctgagcagggagaagagcaacctggcccacag

SEQ ID NO: 40033 - DNA, 120 bp, Artificial Sequence
  ENSG00000058453_16 (sequence is synthesized)
cctgcaggtggcccagcagcaggccgaggagctgcggcaggagcgggagaagctgcaggctgcccaggaggagctgcggcgccagcgggaccggctggaggaagagcaggaggacgcagt

SEQ ID NO: 40034 - DNA, 120 bp, Artificial Sequence
  ENSG00000058453_17 (sequence is synthesized)
gcaggatggcgcgcgggtgcgccgggagcttgagcgcagccatagacaactagagcagctggaagggaagcgctcagtcctggccaaggagctggtggaggtgagggaggcgctgagccg

SEQ ID NO: 40035 - DNA, 120 bp, Artificial Sequence
  ENSG00000058453_18 (sequence is synthesized)
cgccacactgcaacgggacatgctgcaggccgagaaggccgaggtggccgaggcgctgaccaaggctgaggctggccgcgtggagctcgagctctccatgaccaagctgagggcagagga

SEQ ID NO: 40036 - DNA, 120 bp, Artificial Sequence
  ENSG00000058453_19 (sequence is synthesized)
ggcctccctgcaggactccctgtccaagctgagcgccctcaacgagagccttgctcaggacaagttggatctgaaccgccttgtcgcccagctggaggaagaaaagtccgccctgcaggg

SEQ ID NO: 40037 - DNA, 120 bp, Artificial Sequence
  ENSG00000058453_20 (sequence is synthesized)
ccggcaacggcaggcagagcaggaggccacagtggcgcgggaagagcaggaacggctagaggagctgcggttggagcaggaggtggcgcggcagggcctggagggctccctacgagtggc

SEQ ID NO: 40038 - DNA, 120 bp, Artificial Sequence
  ENSG00000058453_21 (sequence is synthesized)
ggagcaggcccaggaggcattggagcagcagctccccacgctgcgccatgagcgcagccagctgcaggagcagctagcgcagctctcccggcagctgagcgggcgggagcaggagctgga

SEQ ID NO: 40039 - DNA, 120 bp, Artificial Sequence
  ENSG00000058453_22 (sequence is synthesized)
gcaggcccggcgggaggcccagcggcaagtggaggcgctggagcgagcggcccgtgagaaggaggcgctagccaaggagcacgctggcctggctgtgcagctggtggctgcggagcgtga

SEQ ID NO: 40040 - DNA, 120 bp, Artificial Sequence
  ENSG00000058453_23 (sequence is synthesized)
aggcaggaccctgtcagaggaggccacacgcctgcgcttggagaaggaagccctggagggcagcctgtttgaggtgcaacggcagctggcccagcttgaggcccgccgggagcagctgga

SEQ ID NO: 40041 - DNA, 120 bp, Artificial Sequence
  ENSG00000058453_24 (sequence is synthesized)
agccgaggggcaggccctgctgctggccaaggagaccctgactggggagttggcgggcctgcggcagcaaataatagctacacaggagaaagccagtctagacaaggagctgatggccca

SEQ ID NO: 40042 - DNA, 120 bp, Artificial Sequence
  ENSG00000058453_25 (sequence is synthesized)
gaagctggtgcaggctgagcgggaggcccaggcctctctgcgggagcagcgggcagctcacgaggaggacttacagcgactccagcgtgaaaaggaggcagcatggcgggagctggaggc

SEQ ID NO: 40043 - DNA, 120 bp, Artificial Sequence
  ENSG00000058453_26 (sequence is synthesized)
cgagcgggcccagctgcagagtcagctgcagcgtgagcaggaggagctgctggcccggctggaggctgagaaggaagagctgagtgaggagattgctgccctgcagcaggagcgcgacga

SEQ ID NO: 40044 - DNA, 120 bp, Artificial Sequence
  ENSG00000058453_27 (sequence is synthesized)
gacggcgctgtcagagaagttgatgggtacacggcacagcctggccaccatctccctggagatggagcggcagaaacgagatgcccagagccggcaggagcaggaccggagcaccgtgaa

SEQ ID NO: 40045 - DNA, 120 bp, Artificial Sequence
  ENSG00000058453_28 (sequence is synthesized)
cgctctgacgtctgagctgcgggacctacgggcccagcgggaggaggctgctgcggcccacgcccaggaggtgaggaggctgcaagagcaggcccgagacctgggcaagcagcgggactc

SEQ ID NO: 40046 - DNA, 120 bp, Artificial Sequence
  ENSG00000058453_29 (sequence is synthesized)
ctgtcttcgcgaggcagaagagcttcggacccagctgcgtctgctggaggatgcccgtgacgggctgcggcgggagctgctggaggcccagcgcaagctgcgtgagagccaggagggccg

SEQ ID NO: 40047 - DNA, 120 bp, Artificial Sequence
  ENSG00000058453_30 (sequence is synthesized)
ggaggtgcagcgccaggaggcaggcgagctgcgacgcagcctgggcgagggtgccaaggagcgcgaggccctgcggcgttccaatgaggagcttcggtctgctgtgaagaaggcagagag

SEQ ID NO: 40048 - DNA, 120 bp, Artificial Sequence
  ENSG00000058453_31 (sequence is synthesized)
cgagcgcatcagcctgaagcttgccaatgaggacaaggagcagaagctggcactcctagaggaggcacggacagctgtgggcaaggaggccggggagctgcgaactgggctgcaggaggt

SEQ ID NO: 40049 - DNA, 120 bp, Artificial Sequence
  ENSG00000058453_32 (sequence is synthesized)
ggagcgctcacggctggaggctcggcgggagctgcaggagctccggcgtcagatgaagatgctggacagtgagaacaccagactgggccgggagctggcggagctgcagggccgcctggc

SEQ ID NO: 40050 - DNA, 120 bp, Artificial Sequence
  ENSG00000058453_33 (sequence is synthesized)
gctgggcgagcgggcagagaaggagagcaggcgggagaccctgggcctccggcagaggctgctgaagggcgaggccagcctggaggtgatgcggcaggagctccaggtagcccagcggaa

SEQ ID NO: 40051 - DNA, 120 bp, Artificial Sequence
  ENSG00000058453_34 (sequence is synthesized)
gctgcaggaacaagaaggcgagttccggacccgcgagcgacgcctgctgggctccctggaggaggcgcgtggcactgaaaagcagcagctggaccacgcccgcggcctggagctgaagct

SEQ ID NO: 40052 - DNA, 120 bp, Artificial Sequence
  ENSG00000058453_35 (sequence is synthesized)
ggagctgaagctggaggcggcgcgggccgaggctgcagagctgggcctgcggctgagcgcagccgagggccgggcacaaggcctggaggccgagctggcccgcgtggaggtgcagcggcg

SEQ ID NO: 40053 - DNA, 120 bp, Artificial Sequence
  ENSG00000058453_36 (sequence is synthesized)
cgccggggcctcggcctcggtcgcgcgcccagcccagccccgcggccagtgcccggttcccctgcccgggacgcacccgcagaaggaagcggggaagggctcaacagccccagcacctta

SEQ ID NO: 40054 - DNA, 120 bp, Artificial Sequence
  ENSG00000058453_37 (sequence is synthesized)
ggaagggctcaacagccccagcaccttagaatgcagccctgggtcccagccaccatctccaggacctgccacctccccagcctctccagacctggacccggaggcagtgcgcggggccct

SEQ ID NO: 40055 - DNA, 120 bp, Artificial Sequence
  ENSG00000058453_38 (sequence is synthesized)
ccgggaattcctgcaagagctgcggagtgcccagagagaacgggacgaacttcggacccagaccagtgccctgaatcgccagctggccgagatggaggctgagagggacagcgcaacctc

SEQ ID NO: 40056 - DNA, 120 bp, Artificial Sequence
  ENSG00000058453_39 (sequence is synthesized)
gagggccaggcagctgcagaaggcggtggctgagagtgaggaagcccggcgcagtgtggatgggcggctgagcggggtccaggcggagctggcgctgcaggaggagagtgtgcggcgcag

SEQ ID NO: 40057 - DNA, 120 bp, Artificial Sequence
  ENSG00000058453_40 (sequence is synthesized)
tgagcgggagcgccgggccacgctggaccaggtggccacactggagaggagcctgcaggccaccgagagcgagctccgggccagccaggagaagatcagcaagatgaaggccaatgagac

SEQ ID NO: 40058 - DNA, 120 bp, Artificial Sequence
  ENSG00000058453_41 (sequence is synthesized)
aaagctggagggcgacaagcggcgcctgaaggaggttctggacgcctccgagagccgcactgtcaagctggagctgcagcggcgctcgcttgagggggagctgcagcgcagccgcctggg

SEQ ID NO: 40059 - DNA, 120 bp, Artificial Sequence
  ENSG00000058453_42 (sequence is synthesized)
cctcagtgaccgcgaggcccaagcccaggccctccaggatcgggtggattccctgcagagacaggtggccgacagcgaggtgaaggcagggaccctgcagctgaccgtggagcggctgaa

SEQ ID NO: 40060 - DNA, 120 bp, Artificial Sequence
  ENSG00000058453_43 (sequence is synthesized)
tggggccctggctaaggtggaggaaagcgagggggccctgcgggacaaggtgcggggcctgacagaggccctggcccagagcagtgccagcctcaacagcacccgggacaagaacctgca

SEQ ID NO: 40061 - DNA, 120 bp, Artificial Sequence
  ENSG00000058453_44 (sequence is synthesized)
tctgcagaaggctctgaccgcctgtgaacatgaccgccaagtactccaggaacggctggatgccgcccggcaggcattatctgaggcacggaagcagagcagctccctgggcgagcaggt

SEQ ID NO: 40062 - DNA, 120 bp, Artificial Sequence
  ENSG00000058453_45 (sequence is synthesized)
gcagacgttgcgaggcgaggtggctgacctggaactgcagcgggtggaggccgagggccagctacaacagctacgggaggtgctgcggcagcggcaggagggtgaggctgcagccctgaa

SEQ ID NO: 40063 - DNA, 120 bp, Artificial Sequence
  ENSG00000058453_46 (sequence is synthesized)
caccgtccagaagctgcaagacgagcggcggctgctgcaggagcgcctgggaagcctgcagcgcgccctggctcagctggaagctgagaagcgggaggtggagcgctcagccctgcggct

SEQ ID NO: 40064 - DNA, 120 bp, Artificial Sequence
  ENSG00000058453_47 (sequence is synthesized)
ggagaaggaccgtgtagccctcaggaggacgctggacaaggtggagcgggagaagcttcgtagccatgaggacacagtgcggctgagcgcagagaagggccgcctggaccgcaccctcac

SEQ ID NO: 40065 - DNA, 120 bp, Artificial Sequence
  ENSG00000058453_48 (sequence is synthesized)
gggggctgagctggagctggcagaggcgcagaggcagatccagcagctggaggcgcaggtggtggtgctggagcagagccacagcccggcccagctggaggtggatgcgcagcagcagca

SEQ ID NO: 40066 - DNA, 120 bp, Artificial Sequence
  ENSG00000058453_49 (sequence is synthesized)
gctggagctgcagcaggaggtggagcggctgcgcagcgcccaggcgcagactgagcgcaccctggaggctcgggagcgggcccaccgccagagggtgcgtgggctggaggagcaggtgtc

SEQ ID NO: 40067 - DNA, 120 bp, Artificial Sequence
  ENSG00000058453_50 (sequence is synthesized)
cacactgaagggccagctgcagcaggagcttcgaaggagctcagcacccttctccccaccctccggccccccagagaaatgagctcctgctggcatctggagaacacccctgtgcctggg

SEQ ID NO: 40068 - DNA, 120 bp, Artificial Sequence
  ENSG00000058453_51 (sequence is synthesized)
acaggggaggacccttcttttggacagcccccccacccagagcccggtcccttgggggcctcaagctggggtgggatgaggaggcgctctgctggcagtgctgaggacgggtactccagc

SEQ ID NO: 40069 - DNA, 120 bp, Artificial Sequence
  ENSG00000058453_52 (sequence is synthesized)
tccaggcctggagaggcttcccagcaacacctgcagtccagcccccctcttctaggatgagccactgtagatcattaaagttcctccttgagaggctgagccgtagccaggattggggag

SEQ ID NO: 40070 - DNA, 120 bp, Artificial Sequence
  ENSG00000058453_53 (sequence is synthesized)
agcccttgtctctggtcagccctggagcatgggatcgtgggaaagaggagggggaccaggcccagggcaggggtcagaggcccaggccctgacttcggcttcccagagatctctccgcct

SEQ ID NO: 40071 - DNA, 120 bp, Artificial Sequence
  ENSG00000058453_54 (sequence is synthesized)
tagttaagagcatgtgtcgggaaattcctcagagtgctcagagtccctgtatttttatacctttttacaatgttaactgttcagaactgttttttgtaacaaaaccttgtttttaaaaaa

SEQ ID NO: 40072 - DNA, 120 bp, Artificial Sequence
  ENSG00000058453_55 (sequence is synthesized)
gcccttatcactcccttgtatttacctggtcaccctccatctctgagggtatgggggccagatggctcttgctgccctgatgttttggggggtctgcctgggccccctcctggtgtgtca

SEQ ID NO: 40073 - DNA, 120 bp, Artificial Sequence
  ENSG00000058453_56 (sequence is synthesized)
gacatcacggacagggcgacttctatgtagatgaggcagcgcagaggctgctgcttcgccacttgctgcttcgccacgaaggagttcccgtgccctgggagcgggttcaggaccgcggat

SEQ ID NO: 40074 - DNA, 120 bp, Artificial Sequence
  ENSG00000058453_57 (sequence is synthesized)
tcccacctctacctcccaactgcccctagttgggggcctgggcctggcctggggaaggatatgggaccgaagcctgagagttaggtttccactcccttcctctgtgccctcaccaccctc

SEQ ID NO: 40075 - DNA, 120 bp, Artificial Sequence
  ENSG00000058453_58 (sequence is synthesized)
tgccctcaccaccctctgagccctcacctccctgggttcctgggcaactctgatctcagcctcgaggatagtagacaagccgccaacatttctaaattttttgtagagatgggggtctca

SEQ ID NO: 40076 - DNA, 74 bp, Artificial Sequence
  ENSG00000058453_59 (sequence is synthesized)
ctattaaaatttaattaaaatttttaaaaagtgaaaattcaggctgggtgtggtggctcacacccagcttgctg

SEQ ID NO: 40077 - DNA, 77 bp, Artificial Sequence
  ENSG00000058453_60 (sequence is synthesized)
ctggctctattaaaatttaattaaaatttttaaaaagtgaaaattcaggctgggtgtggtggctcacacccagcttg

SEQ ID NO: 40078 - DNA, 64 bp, Artificial Sequence
  ENSG00000058453_61 (sequence is synthesized)
atgagccaggatcgtgccactgcactccaggctgggagatagagcgagactccatctcaaaaaa

SEQ ID NO: 40079 - DNA, 120 bp, Artificial Sequence
  ENSG00000058453_62 (sequence is synthesized)
ccccaggccagcccactgctgctccttggcactttcacggccctggcgtgtccccgtcatagcccttatcactcccttgtatttacctggtcaccctccatctctgagggtatgggggcc

SEQ ID NO: 40080 - DNA, 120 bp, Artificial Sequence
  ENSG00000058453_63 (sequence is synthesized)
agctgctccagttctggggccgggccctgctctgccacttggcagctaggagccctggggcaggccactgccctcttgggggcctcagtttccttacctgcaggaggggaggattagaag

SEQ ID NO: 40081 - DNA, 120 bp, Artificial Sequence
  ENSG00000058453_64 (sequence is synthesized)
ggggttcgtgaggctttgctgtgctccatgcctggcacacagtgagcacttactgagtgacagtgacagtcgtgacaccaggaaagctgttccatattctcccatgcctcgtcccacccc

SEQ ID NO: 40082 - DNA, 120 bp, Artificial Sequence
  ENSG00000058453_65 (sequence is synthesized)
acgctgggcatggatcctcatggctgccttctgagcagtccccacgatgcccacaggcatcagctgacgtgtccccccaaataacaaatccctaactttcctataatgtaacggagacag

SEQ ID NO: 40083 - DNA, 120 bp, Artificial Sequence
  ENSG00000058453_66 (sequence is synthesized)
ggcagactgtgcccatctcctctcctcaccagctgtgtacctgggcgagtcactttacctccttgagcctcagtttcctcatctgtaagatgggtagaaagaaagactctgcagtcaggg

SEQ ID NO: 40084 - DNA, 120 bp, Artificial Sequence
  ENSG00000058453_67 (sequence is synthesized)
tgctgtggcgggttagtgagctctatgagtggtatccacgtccgggattcttgtgactgccgttgtgcccttttccagggctgcatgtctgccctgggtccacctgcagtggcacactca

SEQ ID NO: 40085 - DNA, 120 bp, Artificial Sequence
  ENSG00000058453_68 (sequence is synthesized)
ggcctctaagcccccagtgggcacatttcctaggcagcaagaagcctgagcatgcccccaggaccagcccatcccccaagccctttgtcccctgcctctgcccaggccttgtctctgaag

SEQ ID NO: 40086 - DNA, 120 bp, Artificial Sequence
  ENSG00000058453_69 (sequence is synthesized)
ggagctggcagaggcgcagaggcagatccagcagctggaggtctgaccccacccagtccgggaccccaacttcatccctagtatgagtgctcagcaattccagtggagctgatggcccag

SEQ ID NO: 40087 - DNA, 120 bp, Artificial Sequence
  ENSG00000058453_70 (sequence is synthesized)
ccagcccagggcccataaccccctcccccaggagccctgagccttccagtgacccagcgggccatggagggatgggttctccctaaggtgtacagaaaagacacgaaaggcctgtttgca

SEQ ID NO: 40088 - DNA, 120 bp, Artificial Sequence
  ENSG00000058453_71 (sequence is synthesized)
ttacagcgactccagcgtgaaaaggttcaggcagctggggaggggtgggcaggactctgagccagtgtttcatcatcgttcttgctctgcctcggtctctacatctgtgaaatgggactt

SEQ ID NO: 40089 - DNA, 120 bp, Artificial Sequence
  ENSG00000058453_72 (sequence is synthesized)
cctctctgttgtggaggtcctggggacagctaggaggactggggggatggggaggttgtggttcttattagacatgcagattcccaggtcccaaatctggtccagccctggtaatcctga

SEQ ID NO: 40090 - DNA, 120 bp, Artificial Sequence
  ENSG00000058453_73 (sequence is synthesized)
aggcgctgaccaaggctgagggcagaggaggcctccctgcaggactccctgtccaagctgagcgccctcaacgagagccttgctcaggacaagttggatctgaaccgccttgtcgcccag

SEQ ID NO: 40091 - DNA, 120 bp, Artificial Sequence
  ENSG00000058600_0 (sequence is synthesized)
acgtgtccgccggagtttctccaccagcaacatggccgccgcctgagaggagagccgggccgccgccgtctctgcagcccgcgggtaactgggccgttgccgccgtccgcgctcggcccc

SEQ ID NO: 40092 - DNA, 120 bp, Artificial Sequence
  ENSG00000058600_1 (sequence is synthesized)
cgcggagagatcgagctgaaggactgcgcggctggctctcctctagtatggccaatgaagaggatgacccagttgtacaggagatcgatgtgtacttggccaagagtctggcggaaaagc

SEQ ID NO: 40093 - DNA, 120 bp, Artificial Sequence
  ENSG00000058600_2 (sequence is synthesized)
tgtatctatttcagtaccctgtgcgtccagcctcgatgacctacgatgacattccgcacctctcagccaagatcaagcccaagcagcagaaggtagagcttgagatggccatcgacaccc

SEQ ID NO: 40094 - DNA, 120 bp, Artificial Sequence
  ENSG00000058600_3 (sequence is synthesized)
tgaaccccaactattgccgcagcaaaggggagcagattgcgctgaacgtggacggggcctgcgccgacgagaccagcacgtattcctcgaagctgatggacaagcagaccttctgctctt

SEQ ID NO: 40095 - DNA, 120 bp, Artificial Sequence
  ENSG00000058600_4 (sequence is synthesized)
cccagaccaccagtaacacatcccgttatgccgctgcactctacaggcaaggtgagctccacctgacacctttacatggcatcctgcagctgcggcccagcttctcctacctggataagg

SEQ ID NO: 40096 - DNA, 120 bp, Artificial Sequence
  ENSG00000058600_5 (sequence is synthesized)
ctgacgccaagcaccgggagagggaggcggccaacgaggcaggggactcttcacaggatgaggcggaagacgatgttaagcagatcacggtgcggttctcccggccggagtcagagcagg

SEQ ID NO: 40097 - DNA, 120 bp, Artificial Sequence
  ENSG00000058600_6 (sequence is synthesized)
cccgccagcgccgtgtgcagtcctatgagttcctgcagaagaagcacgcagaggagccctgggtccacctgcattactatggcctgagggacagtcgctctgagcatgagcgtcagtacc

SEQ ID NO: 40098 - DNA, 120 bp, Artificial Sequence
  ENSG00000058600_7 (sequence is synthesized)
tgctgtgccccggctcaagcggggtggagaacacggagctcgtcaagtcacccagtgagtacctgatgatgctgatgccacccagccaggaggaggagaaagacaagcctgtggccccca

SEQ ID NO: 40099 - DNA, 120 bp, Artificial Sequence
  ENSG00000058600_8 (sequence is synthesized)
gcaacgtcctgtcgatggcccagctgcgcacgctgcccctggccgatcagatcaagatcctgatgaagaatgtgaaggtcatgccttttgccaacttgatgagcctcctgggcccctcca

SEQ ID NO: 40100 - DNA, 120 bp, Artificial Sequence
  ENSG00000058600_9 (sequence is synthesized)
tcgattccgtggctgttctgcggggcatccagaaggtggcgatgttggtccaagggaactgggtggtgaagagtgacatcctataccccaaggactcgtccagccctcacagcggcgtgc

SEQ ID NO: 40101 - DNA, 120 bp, Artificial Sequence
  ENSG00000058600_10 (sequence is synthesized)
ctgctgaggtgctctgcaggggccgagacttcgttatgtggaagttcacgcagagccgctgggtggttaggaaagaggtggcaaccgtgaccaaactctgcgccgaggatgtgaaggact

SEQ ID NO: 40102 - DNA, 120 bp, Artificial Sequence
  ENSG00000058600_11 (sequence is synthesized)
tcctggagcacatggccgtggtgaggatcaacaaaggctgggagttcattctgccttatgatggggagttcatcaagaagcacccggatgtggtccagcggcagcacatgctgtggacgg

SEQ ID NO: 40103 - DNA, 120 bp, Artificial Sequence
  ENSG00000058600_12 (sequence is synthesized)
gtatccaggccaaactggaaaaagtctataatcttgtaaaggaaaccatgccaaagaagccggatgcacaatcagggcctgccgggctggtctgtggggaccagcggatccaagtagcca

SEQ ID NO: 40104 - DNA, 120 bp, Artificial Sequence
  ENSG00000058600_13 (sequence is synthesized)
aaaccaaggcccagcagaaccacgcgttgctggagcgggagctgcagcggcggaaggagcagctgcgggtgcctgcggtcccgcccggtgtgcggatcaaggaggagcccgtgagcgagg

SEQ ID NO: 40105 - DNA, 120 bp, Artificial Sequence
  ENSG00000058600_14 (sequence is synthesized)
agggcgaggaggacgaggagcaggaggcggaggaggagcccatggacacttcccccagcggcctccacagcaagctggccaacgggctgcctctcgggcgggctgcgggcacagacagct

SEQ ID NO: 40106 - DNA, 120 bp, Artificial Sequence
  ENSG00000058600_15 (sequence is synthesized)
tgctcacgctgagcgaactcaagcgcctcttcaatctgcacttggccagcctgccccccggccacacactcttcagcggcatctcggaccgcatgctacaggacacggtgctggccgccg

SEQ ID NO: 40107 - DNA, 120 bp, Artificial Sequence
  ENSG00000058600_16 (sequence is synthesized)
gttgcaagcagatactggtgccttttcccccccagactgctgcttccccggatgagcagaaggtgtttgccctctgggagtctggagacatgagtgatcagcatcgacaggttttgcttg

SEQ ID NO: 40108 - DNA, 120 bp, Artificial Sequence
  ENSG00000058600_17 (sequence is synthesized)
aaattttttccaaaaattaccgggtacgccgaaacatgatccagtctcggttgactcaagagtgtggagaagatctcagtaaacaggaggtggataaagtactaaaggactgctgtgtaa

SEQ ID NO: 40109 - DNA, 120 bp, Artificial Sequence
  ENSG00000058600_18 (sequence is synthesized)
gctatggtggcatgtggtaccttaaagggacagtacagtcttgacaatagtagcaaactactaacccagcaaatctaagcccaaggaagaagggcggaaccagaagtagggcctcgactt

SEQ ID NO: 40110 - DNA, 120 bp, Artificial Sequence
  ENSG00000058600_19 (sequence is synthesized)
gcttcagacgacacagagcaagaggaactgaccatctcatgacctgtggcattgcacggtgcagtggacagaagggattatcctcagccagtcgcagggtcagcttaagttagttagatc

SEQ ID NO: 40111 - DNA, 120 bp, Artificial Sequence
  ENSG00000058600_20 (sequence is synthesized)
actcccagaagagaccagctgggaccttctttgcagtacaatttgaaattcctgatgtattttgcttattatttggtttcattctcataataaagagagtgtatactgacatgggcagga

SEQ ID NO: 40112 - DNA, 120 bp, Artificial Sequence
  ENSG00000058600_21 (sequence is synthesized)
tgataaaaatcatggtttaatattttcttttgtaaacttaatgccaacaaggtctaagttatgtttacaacatgaagaaaacctcaaagttcttaatttttaaaatgcctagaagacaat

SEQ ID NO: 40113 - DNA, 120 bp, Artificial Sequence
  ENSG00000058600_22 (sequence is synthesized)
atttagtcttggattatctatctgctaagacctccaccaatttcattaaaccaaattgaattattctattcttgggattctgtggccacttcacctttgacaacaacctactttatgtag

SEQ ID NO: 40114 - DNA, 120 bp, Artificial Sequence
  ENSG00000058600_23 (sequence is synthesized)
cagtctcaactgtttacatgaaccatagcaaaaaaatcagaatcaaatccatctccttttaatgtttgcagaaagatgcaaacaaaaccaggtaagtatggaacaatgtgtaagtgaggt

SEQ ID NO: 40115 - DNA, 120 bp, Artificial Sequence
  ENSG00000058600_24 (sequence is synthesized)
tatcacactttgatgtaaaaatttctattttgtgtatttttaaaataaatgcaaacactaaactagcatcatggtgctatcttcaaatggttacaggaaggcgatcttgttgggctcagc

SEQ ID NO: 40116 - DNA, 120 bp, Artificial Sequence
  ENSG00000058600_25 (sequence is synthesized)
gttacgtgtatctagagggaacggagctaatggaggaagacagagcagcactgtccactagaaagaggcgagtcacgtacataattttgaaagtttctagcaaccacattagtttaaaaa

SEQ ID NO: 40117 - DNA, 120 bp, Artificial Sequence
  ENSG00000058600_26 (sequence is synthesized)
ggtcatgttagcatattatttagctcaaaatatctaaaacatcaacataaggtaaaagtcttcaaaatctggcattttacactttcctcaacactcagtttggactagccacatcataag

SEQ ID NO: 40118 - DNA, 120 bp, Artificial Sequence
  ENSG00000058600_27 (sequence is synthesized)
tgctccgatgccacatggggctatttgcgacagtattggatagcacagccctagaaactgatggaaaaaataagagtaagctaggttggatgacatgtgaattttggtatctagataagg

SEQ ID NO: 40119 - DNA, 120 bp, Artificial Sequence
  ENSG00000058600_28 (sequence is synthesized)
ctttcgccatcttttttgtacaacacagtcactaattgtctgaaggtttaaatgacggtctatgctatttccccactccccccaaaataaaacatctaatattttagctatagaatcact

SEQ ID NO: 40120 - DNA, 120 bp, Artificial Sequence
  ENSG00000058600_29 (sequence is synthesized)
aaggcattgatcaaggatgtactttgccaaataagtatttggtaacatcacttaacaagttgatcgtgtattgattctgttaacatatgtgaacctgaaaagtaaagttaccaaaagcga

SEQ ID NO: 40121 - DNA, 120 bp, Artificial Sequence
  ENSG00000058600_30 (sequence is synthesized)
ggagtttctccaccagcaacatggccgccgcctgagaggagagccgggccgccgccgtctctgcagcccgcgggtaactgggccgttgccgccgtccgcgctcggcccccgcggagagtt

SEQ ID NO: 40122 - DNA, 120 bp, Artificial Sequence
  ENSG00000058600_31 (sequence is synthesized)
tgtagaaagaaggtcagttggttggttgtgggctccccctcccagtgcagggcctgttgcagaataggcacaaggaaatgttggttgaacgactgatggtcccagtctctcgccctcctt

SEQ ID NO: 40123 - DNA, 120 bp, Artificial Sequence
  ENSG00000058600_32 (sequence is synthesized)
agggcagttggggccgaaagagagggtgatgagggtgggagctggtggaggcgagaagctcagagaaggagtcattggagaagtaggagaaccagcaactcccaggcccttgaaagctga

SEQ ID NO: 40124 - DNA, 120 bp, Artificial Sequence
  ENSG00000058600_33 (sequence is synthesized)
agaaggaaagtgtccagaaagacagggatgggcagctccagagaggccagggacgcatgaggctgatgaatgagagaatggggccagatgtgagcttaggttcccaggataagacgaggg

SEQ ID NO: 40125 - DNA, 120 bp, Artificial Sequence
  ENSG00000058600_34 (sequence is synthesized)
tcagctgtgccctggtgcgggtcattattgtactagacaattgagttcttataaaatcctgtgagttgttacttttttttgtttttttcagaattcttatgacagatattagacatactg

SEQ ID NO: 40126 - DNA, 120 bp, Artificial Sequence
  ENSG00000058600_35 (sequence is synthesized)
aatccaatcttttccatttttattttggggtgtaacgtattttacggcatcctgtttcatggatgcagtggcatgtttgtgcattaagacttcacaccaattttgacaccctcttctcat

SEQ ID NO: 40127 - DNA, 120 bp, Artificial Sequence
  ENSG00000058600_36 (sequence is synthesized)
ctccgtgcagcttagattgtcgcttcacctgcttgctaagtccgatgcacgcctgcattttaccatgcagaaatatgttcaagccactcatcctctcatgtctcttcaccagttcttttg

SEQ ID NO: 40128 - DNA, 120 bp, Artificial Sequence
  ENSG00000058600_37 (sequence is synthesized)
ttatgctggcatatacctttgtttttatttatattcaagtttccagacatagcattaatgcctttacttttgtgtttttatttctgtacactgtcttgctgggtctctagagatgacttg

SEQ ID NO: 40129 - DNA, 120 bp, Artificial Sequence
  ENSG00000058600_38 (sequence is synthesized)
gctcatctttaaccagaggtgctgcgtgagggtttttatcagagactgcaacacaaagtcaggtgcatggcttgggtgtcttgtttggggatgtttctctttttagatcactgtttccca

SEQ ID NO: 40130 - DNA, 120 bp, Artificial Sequence
  ENSG00000058600_39 (sequence is synthesized)
tgccaaagaagccggatgcacaatcaggtgtgtgaggggctttgggctgggaggccccggctcctacactgtggctccggaagggctgctgtgctagagcttgtcaggcccggacctgga

SEQ ID NO: 40131 - DNA, 120 bp, Artificial Sequence
  ENSG00000058600_40 (sequence is synthesized)
ctcctccccatggtgaggtgagaggcacaggtttgtggctgcccaaggccctcagagatggtgagtagcagaagctgggattggaacccatgttcctgcatctgggctggggcagacagg

SEQ ID NO: 40132 - DNA, 120 bp, Artificial Sequence
  ENSG00000058600_41 (sequence is synthesized)
gtcagcttgaaaatcaaatatcagagagctttggactgtctgtcttcctgttcaacttctggctcctctttaaagcgtccccagggccctcagttctccagtgttttaatcatggctggg

SEQ ID NO: 40133 - DNA, 120 bp, Artificial Sequence
  ENSG00000058600_42 (sequence is synthesized)
accagccaacctctatccttctgtctggcagtgaattctctgtgagcagagaagaaaccattaaagccagtcatttgcctttccccgcaggtgcagcccacacttgttggcttggtctac

SEQ ID NO: 40134 - DNA, 120 bp, Artificial Sequence
  ENSG00000058600_43 (sequence is synthesized)
accttaaagacattgaccccctttgccccgtcactgggctccccaccagtgtcccagcctttggagggctgggcctgtctcagactctgccctcctgaactagctggtcccagagctcct

SEQ ID NO: 40135 - DNA, 120 bp, Artificial Sequence
  ENSG00000058600_44 (sequence is synthesized)
ctacaaacaaggccatgggttttctcatccccaggctgccctcctgagacccgcgtaggctgccctgcggccttggtccctggctgtggcacttcagaaagtgtctagggggtggggtgc

SEQ ID NO: 40136 - DNA, 120 bp, Artificial Sequence
  ENSG00000058600_45 (sequence is synthesized)
gctgtggccacaggccctggctcggagctgccttcccctgtgacgttgcttctccctgtgctccaggaagctgatggacaagcagaccttctgctcttcccagaccaccagtaacacatc

SEQ ID NO: 40137 - DNA, 120 bp, Artificial Sequence
  ENSG00000058600_46 (sequence is synthesized)
ccgttatgccgctgcactctacaggcaaggtacccggggctgggtgtcccgcggtggggacatggcattggggggggctgggcagggagagtacctccccagcctggtgtccatctccca

SEQ ID NO: 40138 - DNA, 120 bp, Artificial Sequence
  ENSG00000058600_47 (sequence is synthesized)
cctgccctgaaagctagacacctgtgggggccgggcaggtgtggaaataacagaaatgacacattgtcaggggactggaagtggccacctttgtggactgctggctggacactgcctgac

SEQ ID NO: 40139 - DNA, 120 bp, Artificial Sequence
  ENSG00000058600_48 (sequence is synthesized)
cagatggggtggggctccaagttcatttgtcctcccgggacacagatacatacaagtagctaacataagtttagggacagaattttgtctttaaatatgaagcttatgacagagcaattc

SEQ ID NO: 40140 - DNA, 120 bp, Artificial Sequence
  ENSG00000058600_49 (sequence is synthesized)
cattcctaggcagcatctatccaaaagaaatgaaaacatgtgtccacacaaaaccatacacagttgttcacagtagcatcttcatgatagccaaaaagtggaaacaacccagatgcccat

SEQ ID NO: 40141 - DNA, 120 bp, Artificial Sequence
  ENSG00000058600_50 (sequence is synthesized)
ccgctggattcatggagaaacagaatgtggtccattcacgcaatgggatgttatttgaccatggaaaagaatgaagcagtgatgctaccacgcagatgagccttgagaacattgtgctaa

SEQ ID NO: 40142 - DNA, 120 bp, Artificial Sequence
  ENSG00000058600_51 (sequence is synthesized)
gtgaaagaagccacatgcttcttcactcgcagctacgcgctgtgtgattacgtctcagtcagcgaccgaccacatactcaacggtggtcccataacattataatggagctgaagaattgg

SEQ ID NO: 40143 - DNA, 120 bp, Artificial Sequence
  ENSG00000058600_52 (sequence is synthesized)
agaattggcttacctagtgatgtcttaatgagcctgaccctgtgtaagcctaggctaactcgtatgtttgtgtcttaggtttttgcttgttcgtttgttttgttttgttttgagacagag

SEQ ID NO: 40144 - DNA, 120 bp, Artificial Sequence
  ENSG00000058600_53 (sequence is synthesized)
agctgttgggaggccacgtggggacacgggaggccatgcttggtgagcatctgctctcacgtgggcctaggtgtgacatgggcaagtcagcctctctgaggctctattctcatgaaatgg

SEQ ID NO: 40145 - DNA, 120 bp, Artificial Sequence
  ENSG00000058600_54 (sequence is synthesized)
gatcatgttgggttttatgtcacaggactgtggtaggggctaaatacggtgtctgaaggcccggcctattgcctggcctgcagcagggcctagtgaaacagggcccctgcctggtttctc

SEQ ID NO: 40146 - DNA, 120 bp, Artificial Sequence
  ENSG00000058600_55 (sequence is synthesized)
accctgtcccccaccaagaacacctgtttcctactagctttgccattgtttggaatgatttaacttctaagatcgtttgatcttctttgcaatctgcagatgaagaaactgaggctccaa

SEQ ID NO: 40147 - DNA, 120 bp, Artificial Sequence
  ENSG00000058600_56 (sequence is synthesized)
ggaatgaaatgtacgtttaaaggtcactacctaggaggtagtagagctggaatttggacctcagtatagtggcctggagttttgaatcctttctgctcagctaagatgagctgcttcccc

SEQ ID NO: 40148 - DNA, 120 bp, Artificial Sequence
  ENSG00000058600_57 (sequence is synthesized)
acagctgcgccacgccccagcttgggcctgggtcctggcggcctccctgtgcatcagaagcaagctgaccagctcagcgctgtgctctcagcacttccagtgccaggccttgagtgtggt

SEQ ID NO: 40149 - DNA, 120 bp, Artificial Sequence
  ENSG00000058600_58 (sequence is synthesized)
attgcaagcctcctgccccttccccctgggctgcttttctgtcactgggaggggccctgacgggggagcagagtgcttgctggggaccgtttccctgcgctgaggatagagagcgccagg

SEQ ID NO: 40150 - DNA, 120 bp, Artificial Sequence
  ENSG00000058600_59 (sequence is synthesized)
tgctgcctgaggcacgcctttcccgtgctccttttccacaaggctctgcccagacctggcagcaaaatggggtgaggtggggctgtggtggtctctaagaaagcattgatgttttcattg

SEQ ID NO: 40151 - DNA, 120 bp, Artificial Sequence
  ENSG00000058600_60 (sequence is synthesized)
ccaaggtcaggagcgggcctgcagccttgggtgatgatctgaggccaaggcccatccctgtgtatgaggaatagaaactaggacaggaggccttgtggagcctaggctgtctcaggggat

SEQ ID NO: 40152 - DNA, 120 bp, Artificial Sequence
  ENSG00000058600_61 (sequence is synthesized)
cggccctgctggcaggcagccccctgtgggaggtactggcagagttcggagctcctgcccacccagcacatgggtctgggtctccacaagctcacctttcttcatgagctgggccaggac

SEQ ID NO: 40153 - DNA, 120 bp, Artificial Sequence
  ENSG00000058600_62 (sequence is synthesized)
aggcaggacacctgcctgacattagttgttttgggccgctggagtggacagaggtgaggggtgggacatggccaccctcagacaccctcacccctccttccggaccccctctgtccatgt

SEQ ID NO: 40154 - DNA, 120 bp, Artificial Sequence
  ENSG00000058600_63 (sequence is synthesized)
tgctttggggtggggccagcgtctccaggagacaccatggccctaactgtaatgctctccttgccatcctgacaaggagactgtattgtagtcacatccaagacgtaagagacctccgat

SEQ ID NO: 40155 - DNA, 120 bp, Artificial Sequence
  ENSG00000058600_64 (sequence is synthesized)
cccagccacctctgtgttgtacatgagggagctgaggtccagggcaagtgaatagatcgagaacttgacttgaactcctggttctgctgcttattagctgtgtgaccatggacagtgagc

SEQ ID NO: 40156 - DNA, 120 bp, Artificial Sequence
  ENSG00000058600_65 (sequence is synthesized)
aaacctctctgagcttacttttccccatgtactacctccccagtttctaatgctcaaatgcaaatgtgtattggaggcctcacagggcttttactggtagtaaccattattgctacttgt

SEQ ID NO: 40157 - DNA, 120 bp, Artificial Sequence
  ENSG00000058600_66 (sequence is synthesized)
gtgatggaaccaggactggaaactaccatcccagatgccccctcccctgtccccttctctccaggacccaggcctgtgtcacacttgtcctggtctacctttggaccaagtggcctggat

SEQ ID NO: 40158 - DNA, 120 bp, Artificial Sequence
  ENSG00000058600_67 (sequence is synthesized)
tgcttgggagtcaggcagtgcctctaacccacactgacatggtacatgtgggaagcagttgaaaagaacccccagggtaccccaagagttatggggaagggggcgcccctccatcagggt

SEQ ID NO: 40159 - DNA, 120 bp, Artificial Sequence
  ENSG00000058600_68 (sequence is synthesized)
tggcatcttcaggagggaggactctgggtgttaaagcacagttgagttggtgccaggctgatgggaaacagacgcagcttccccactgtacggaggatatctgcagactcgaagccgggc

SEQ ID NO: 40160 - DNA, 120 bp, Artificial Sequence
  ENSG00000058600_69 (sequence is synthesized)
tcccgaagagccaggggggtttcctgcagcgttggaggccttgggggacatgtgcacccaaagtgcagccacacatttcagattttctggcacactcggttttaaatatcctgctccaac

SEQ ID NO: 40161 - DNA, 120 bp, Artificial Sequence
  ENSG00000058600_70 (sequence is synthesized)
tctgtacgctaacaaaataagctgtatgtgccaatagtttgaacctaaaccagtggttcccagatgccagtctgtgagccagctccatcagaatcatcttttaaaaaatacaggctgggc

SEQ ID NO: 40162 - DNA, 73 bp, Artificial Sequence
  ENSG00000058600_71 (sequence is synthesized)
ggtgaaaccccatctctactaaaaatgcccatagtcgtgggaggctgagacagaattgcttgaacctgggaga

SEQ ID NO: 40163 - DNA, 120 bp, Artificial Sequence
  ENSG00000058600_72 (sequence is synthesized)
aggcagctctgggagggacacggttggaacggaatttaaacgacctgtgctaggaaaggaagggagagtggaaaacccctatacggagttctctggtcttctggcaggggctgagacggc

SEQ ID NO: 40164 - DNA, 120 bp, Artificial Sequence
  ENSG00000058600_73 (sequence is synthesized)
cccgttatgccgctgcactctacaggcagcatctatccaaaagaaatgaaaacatgtgtccacacaaaaccatacacagttgttcacagtagcatcttcatgatagccaaaaagtggaaa

SEQ ID NO: 40165 - DNA, 120 bp, Artificial Sequence
  ENSG00000058668_0 (sequence is synthesized)
caccctcacccctcctccacccctactcagctttctattcaacaagtgagagcaagggcggggaagaaagccgacaggggagaggattgcttccctttcttttcccattcccccttaaga

SEQ ID NO: 40166 - DNA, 120 bp, Artificial Sequence
  ENSG00000058668_1 (sequence is synthesized)
cgaaccaggaagtaaccgcaagaatcgggccaccttaacagtagagtaatggtttggcctcgcgccaagtcccacctctgttccagctcctgctcctcccctctctcttcccgcactgct

SEQ ID NO: 40167 - DNA, 120 bp, Artificial Sequence
  ENSG00000058668_2 (sequence is synthesized)
tggggagagctggtgagcaagagtctggcccgagttagctagagctgttgccatgacaagcattttcttaagaaagctctgctgttgagatcgtccaaagctgggggctgggaggggggg

SEQ ID NO: 40168 - DNA, 120 bp, Artificial Sequence
  ENSG00000058668_3 (sequence is synthesized)
cacgaacttcgtggggcaccatccctccgaagagagcaagatcagagacacccgcccagctctcctgcaccctttttctttcaggaacctgagaggtccttcccattggaggggcagggg

SEQ ID NO: 40169 - DNA, 120 bp, Artificial Sequence
  ENSG00000058668_4 (sequence is synthesized)
gaggagacccagcccactccccggccttagccagaaaggcaagagagcaaagccagcgtctctagcttggttgccacactggggagactggtgggtggtcaccccaccctaccctcatcc

SEQ ID NO: 40170 - DNA, 120 bp, Artificial Sequence
  ENSG00000058668_5 (sequence is synthesized)
atggaaacccggagggagagtcccgcctgaagaaacctggatctttgctagaaagagagagatccagttgtcatcggtatccaggaagctctcctcttcctcctcctgacgtctactact

SEQ ID NO: 40171 - DNA, 120 bp, Artificial Sequence
  ENSG00000058668_6 (sequence is synthesized)
acagttgctggttgttgctaaggttgctgccatggtaacatgcacatcctgtttacaccttcatctgggcaagttggtctaagctaggaacctacctaccctggacaactactatcatca

SEQ ID NO: 40172 - DNA, 120 bp, Artificial Sequence
  ENSG00000058668_7 (sequence is synthesized)
ccacctggggacaccaatcatcgtgacacggagtccaccttccactcagttcccccatcctcttcctcctctcgctgccagacttcatacggaagaaaggatctagacttcggacggcta

SEQ ID NO: 40173 - DNA, 120 bp, Artificial Sequence
  ENSG00000058668_8 (sequence is synthesized)
ctcgggagcttattgcacaagatatattcaatctattccctcactgggcccccagagaagcaagaagtaggaagaagttgagacagggaggcaggagacactggtcagttgaagggaaac

SEQ ID NO: 40174 - DNA, 120 bp, Artificial Sequence
  ENSG00000058668_9 (sequence is synthesized)
gctacatcttctctggttgaggggcttggtaacagcaggcaaaatgacgaacccatcagaccgtgtcttgcctgccaactcgatggccgagagccgtgaaggggactttggctgcacagt

SEQ ID NO: 40175 - DNA, 120 bp, Artificial Sequence
  ENSG00000058668_10 (sequence is synthesized)
aatggaactgaggaagctcatggagctgcgttcaagggatgcactgacccagattaatgtccactatggaggtgtacagaatctctgcagtagactgaaaacctcccctgtggaaggtct

SEQ ID NO: 40176 - DNA, 120 bp, Artificial Sequence
  ENSG00000058668_11 (sequence is synthesized)
gtctgggaaccctgcagatctggagaaacgtaggcaggtgtttggacacaacgtgatcccccccaaaaagcccaagactttcttagaattagtgtgggaagctcttcaagatgtcacgct

SEQ ID NO: 40177 - DNA, 120 bp, Artificial Sequence
  ENSG00000058668_12 (sequence is synthesized)
tatcatcctggagattgcagccatcatctccctggtcctgtccttttatcgccctgctggtgaagaaaatgaactgtgtggtcaagtcgcaactaccccagaagatgaaaatgaggcaca

SEQ ID NO: 40178 - DNA, 120 bp, Artificial Sequence
  ENSG00000058668_13 (sequence is synthesized)
agctggctggattgagggggcagccatccttttctcagtgatcatcgtggtgttagtgactgcctttaatgattggagcaaagagaagcaattccgggggctgcagtgccgcattgaaca

SEQ ID NO: 40179 - DNA, 120 bp, Artificial Sequence
  ENSG00000058668_14 (sequence is synthesized)
ggagcaaaagttctccatcatccgaaacggtcaactcatccagctccctgtggctgagattgtggttggtgatattgcccaagtcaaatacggtgatctgctgcctgcagatggaatcct

SEQ ID NO: 40180 - DNA, 120 bp, Artificial Sequence
  ENSG00000058668_15 (sequence is synthesized)
gatccaagggaatgatctgaagattgatgagagctctctgacaggggaatctgaccatgtcaagaagtccctggacaaagaccccatgttgctctcagggacccatgtcatggaaggttc

SEQ ID NO: 40181 - DNA, 120 bp, Artificial Sequence
  ENSG00000058668_16 (sequence is synthesized)
tggccggatggtggtgacagctgttggtgtcaactctcagactggaatcatccttactctcttgggggtcaatgaggatgacgaaggggagaaaaagaagaaaggtaaaaaacaaggagt

SEQ ID NO: 40182 - DNA, 120 bp, Artificial Sequence
  ENSG00000058668_17 (sequence is synthesized)
ccctgaaaatcgcaacaaagcaaagacccaagacggagtggccctggaaatccagccactcaacagccaggagggaatcgacaatgaggaaaaggacaagaaggcagtcaaggtgcctaa

SEQ ID NO: 40183 - DNA, 120 bp, Artificial Sequence
  ENSG00000058668_18 (sequence is synthesized)
aaaggagaagtcagtgctgcagggcaagctgactcgcctggctgttcagattgggaaagccggtctgctcatgtctgctctcacggttttcatcctgattctatactttgtgattgacaa

SEQ ID NO: 40184 - DNA, 120 bp, Artificial Sequence
  ENSG00000058668_19 (sequence is synthesized)
ctttgtgataaatcgcagaccatggctccctgagtgtactcccatctacatccagtactttgtcaagttcttcatcatcggcatcactgtactggtggtggctgtgccagaggggctgcc

SEQ ID NO: 40185 - DNA, 120 bp, Artificial Sequence
  ENSG00000058668_20 (sequence is synthesized)
tctggctgtcaccatctcactggcctactctgtgaagaaaatgatgaaagacaataacctagtacggcacttggatgcttgtgagaccatgggcaacgccaccgccatctgctctgataa

SEQ ID NO: 40186 - DNA, 120 bp, Artificial Sequence
  ENSG00000058668_21 (sequence is synthesized)
gacaggcacgttgaccatgaaccgcatgactgtggtacaagcttatattgggggcatccattaccgtcaaatcccaagccctgatgtcttcctgcccaaagtcctggacctcattgtcaa

SEQ ID NO: 40187 - DNA, 120 bp, Artificial Sequence
  ENSG00000058668_22 (sequence is synthesized)
tggcatttctatcaacagtgcttatacctccaagattctgcctccagagaaggagggaggcctgcctcggcaggtgggcaacaagaccgagtgtgctctgctaggctttgtcacagatct

SEQ ID NO: 40188 - DNA, 120 bp, Artificial Sequence
  ENSG00000058668_23 (sequence is synthesized)
gaagcaggattatcaggctgtgcgtaatgaagtgcccgaggagaagctctacaaggtgtacacctttaactcagtgcgcaagtcaatgagcaccgtcatcaggaatcccaacggtggctt

SEQ ID NO: 40189 - DNA, 120 bp, Artificial Sequence
  ENSG00000058668_24 (sequence is synthesized)
ccgtatgtacagcaagggcgcctctgagatcatcttgcgcaagtgtaatcgaatcctggaccggaaaggggaagcagtgccattcaagaataaagacagagatgatatggtacgcactgt

SEQ ID NO: 40190 - DNA, 120 bp, Artificial Sequence
  ENSG00000058668_25 (sequence is synthesized)
catcgagcccatggcctgtgatggactccggactatctgcatagcttaccgggacttcgatgacacagagccctcttgggacaatgagaatgagatcctcaccgaactgacctgtatcgc

SEQ ID NO: 40191 - DNA, 120 bp, Artificial Sequence
  ENSG00000058668_26 (sequence is synthesized)
ggtggtgggcattgaggaccctgtgcgcccagaggtgccagatgctattgccaaatgcaaacaagctggcattactgtcagaatggtgacaggtgacaacatcaacacagcccgggccat

SEQ ID NO: 40192 - DNA, 120 bp, Artificial Sequence
  ENSG00000058668_27 (sequence is synthesized)
tgccaccaaatgtggcattctgacacctggggatgacttcctgtgcttagaaggcaaagaattcaaccggctcatccgcaacgagaaaggcgaggtagagcaagaaaagctggacaagat

SEQ ID NO: 40193 - DNA, 120 bp, Artificial Sequence
  ENSG00000058668_28 (sequence is synthesized)
ctggcctaagcttcgggtcctggcgcgatcttctcccactgacaagcacaccctggtgaaaggcataattgacagcactgttggggaacaccggcaggtcgtggctgtcactggtgatgg

SEQ ID NO: 40194 - DNA, 120 bp, Artificial Sequence
  ENSG00000058668_29 (sequence is synthesized)
cacaaatgacgggcctgctctgaagaaagcggatgttggttttgccatgggcatcgcaggcacagatgtagcaaaggaggcttcagacatcatcctaacagatgacaacttcaccagcat

SEQ ID NO: 40195 - DNA, 120 bp, Artificial Sequence
  ENSG00000058668_30 (sequence is synthesized)
tgtgaaggcagtgatgtggggacgaaatgtctatgacagcatctccaagttcctgcagttccagctcactgtcaatgtggtggccgtgattgtagccttcactggagcctgtatcactca

SEQ ID NO: 40196 - DNA, 120 bp, Artificial Sequence
  ENSG00000058668_31 (sequence is synthesized)
ggattccccattgaaagctgtgcagatgttgtgggttaatctgatcatggacacttttgcttcattggccctggccacagagccccctacggaatctctgttgaagcggcgcccctatgg

SEQ ID NO: 40197 - DNA, 120 bp, Artificial Sequence
  ENSG00000058668_32 (sequence is synthesized)
ccgaaataagcctctgatctcacgcactatgatgaagaacatcttgggccatgcattctatcagctcattgtcatctttatccttgtctttgcgggtgagaaattctttgatattgatag

SEQ ID NO: 40198 - DNA, 120 bp, Artificial Sequence
  ENSG00000058668_33 (sequence is synthesized)
tgggaggaaggcacctctacattcaccacccagccagcactataccattgtttttaacaccttcgtgctgatgcagctcttcaatgaaatcaactcccgaaagatccatggagagaagaa

SEQ ID NO: 40199 - DNA, 120 bp, Artificial Sequence
  ENSG00000058668_34 (sequence is synthesized)
cgtcttttcaggcatctaccgcaacattatcttctgctctgtagtcttgggcacattcatctgccagattttcatcgtggaatttgggggtaaacccttcagttgtacaagcctcagcct

SEQ ID NO: 40200 - DNA, 120 bp, Artificial Sequence
  ENSG00000058668_35 (sequence is synthesized)
gtctcagtggctgtggtgtctcttcattgggattggagaacttctgtggggccagttcatctccgcaatacctacccgatccctgaagttcctgaaggaggctgggcatggcaccaccaa

SEQ ID NO: 40201 - DNA, 120 bp, Artificial Sequence
  ENSG00000058668_36 (sequence is synthesized)
agaggagatcaccaaggatgccgagggactggatgagattgaccatgctgagatggagctgcgccgaggccagatcctctggttccggggcctgaaccgtatccagactcagatcaaagt

SEQ ID NO: 40202 - DNA, 120 bp, Artificial Sequence
  ENSG00000058668_37 (sequence is synthesized)
ttcgccatagaggaggagttgccacgaacaccactcctggatgaggaagaggaggaaaatcctgacaaggcttctaagtttgggactagggtgctcctgttggatggtgaggtcactcca

SEQ ID NO: 40203 - DNA, 120 bp, Artificial Sequence
  ENSG00000058668_38 (sequence is synthesized)
tatgccaatacaaacaacaatgcggtggattgcaaccaagtgcagctcccccagtcggacagctctctacagagcctagagacatcagtttgaattttctttctctgactctcatcccta

SEQ ID NO: 40204 - DNA, 120 bp, Artificial Sequence
  ENSG00000058668_39 (sequence is synthesized)
ttttacctatttccattttcgtctatcccatctatgaggtgatgatgggacttttcattgtcacgtcagctgctgtgttaacagcagtgtgtgtgaagtgaacctctacctgaccatgaa

SEQ ID NO: 40205 - DNA, 120 bp, Artificial Sequence
  ENSG00000058668_40 (sequence is synthesized)
gaggcaagagcacagacttacaaggatttcaacttaagcttgacttggggtttgtagcgggacccagtcaaaccccattcaggtcatggtagaatctactccttggtagtcacttgtcat

SEQ ID NO: 40206 - DNA, 120 bp, Artificial Sequence
  ENSG00000058668_41 (sequence is synthesized)
ttttaaagaaatgatgacaatcctcttggcatcaccccaccccacattctccccgatgttcctctcctgaattctggattttgtcctacaagtctgtgccatttataagctaagttgagg

SEQ ID NO: 40207 - DNA, 120 bp, Artificial Sequence
  ENSG00000058668_42 (sequence is synthesized)
gttcagagggagacaaatatccccaagtgaaatatgttgcggtagagatggaatgtataaaatccgccagtagtgtgattgtttttcaatttttcccactttgaaaacttacacctaaag

SEQ ID NO: 40208 - DNA, 120 bp, Artificial Sequence
  ENSG00000058668_43 (sequence is synthesized)
gcctgtaggcctctaactctttctgccctttcattcaaacctctccaaagttctttgtcttttgtcttcccttcctttccttttttttttttttttttatgatgattaagaaaatggaaa

SEQ ID NO: 40209 - DNA, 120 bp, Artificial Sequence
  ENSG00000058668_44 (sequence is synthesized)
ggatatggatgaattgtgtaaacttagatccttctcccttttggcccaaaagaacccttgatttagttccagaatccaaccagtttctttgttaaaagggtccttttgaagcaattaagt

SEQ ID NO: 40210 - DNA, 120 bp, Artificial Sequence
  ENSG00000058668_45 (sequence is synthesized)
gctggtaagaatatttctctgttgttgccaggttaccttctgcttttaaattgccatcttgtaaagtgtatgtggttcttaagtgccagggagatcagccttgcccatgaaggttgcata

SEQ ID NO: 40211 - DNA, 120 bp, Artificial Sequence
  ENSG00000058668_46 (sequence is synthesized)
tgtgtggtatacagtttttacctgaaagcctgagctttctcttattcctaaagtggtggcaaaagaatgaactgggtatgaccctgcccccttactgggcttggatattgaggaccagac

SEQ ID NO: 40212 - DNA, 120 bp, Artificial Sequence
  ENSG00000058668_47 (sequence is synthesized)
gctgccaaatctaggacaagacagaccatcaaagcagacttttgtgggctcctctttggggtgaccactgctttcaaagccatctgccaaggctctccagggcaggacctgactggtggg

SEQ ID NO: 40213 - DNA, 120 bp, Artificial Sequence
  ENSG00000058668_48 (sequence is synthesized)
gaatgagtgttcagaagccttgggagaggccaaagagccattctagcatgatctgagaaaaccttcctgcagaggccagaaaccttgagcttaggtgcctggggaccagcttcgacattc

SEQ ID NO: 40214 - DNA, 120 bp, Artificial Sequence
  ENSG00000058668_49 (sequence is synthesized)
tctccagtttctgattctaatttttgccacgtgtcacaacttttccagtctctgagaaggtcccagcctttctcaaatattctgattttgaaaatatgtatccaaagtgggaggcccctg

SEQ ID NO: 40215 - DNA, 120 bp, Artificial Sequence
  ENSG00000058668_50 (sequence is synthesized)
tgacattttgccaacttaaacgagaaaaagaccccccgcacccggcacactcccccttcctccagccccgcttcagccacatgctccagctgctgcccagtaaagccctgtgcctttttt

SEQ ID NO: 40216 - DNA, 120 bp, Artificial Sequence
  ENSG00000058668_51 (sequence is synthesized)
tcccctgaatactgcccaaagcatccccttcccatctgcctctcaggagttggggactttgctaggagattttttaagtgttccttactgggacaacgtggagccacgtttgcaggagct

SEQ ID NO: 40217 - DNA, 120 bp, Artificial Sequence
  ENSG00000058668_52 (sequence is synthesized)
ccatttgtatccctgctggtgttgacttctgtgtaggggccagttcatgtccctgactctcacctcccattagataaatgaagcccacccccctttctagagtgatgagagtcaagaaga

SEQ ID NO: 40218 - DNA, 120 bp, Artificial Sequence
  ENSG00000058668_53 (sequence is synthesized)
ggggatgtatgaacggccaaattcccatgtgagaggaagatgacctgatccacctagccttttcttctggatctgtcctccctcacccctttcacctgagctgtccacagtaggaaacat

SEQ ID NO: 40219 - DNA, 120 bp, Artificial Sequence
  ENSG00000058668_54 (sequence is synthesized)
aaagaaacaatgtcccctacatatccccatgactacataatccatcatcgtaggaaataggaaagcaaatttgattttggttttgtaaaacgtacatgcttcaataattcttttttgtgt

SEQ ID NO: 40220 - DNA, 120 bp, Artificial Sequence
  ENSG00000058668_55 (sequence is synthesized)
cttaaatactcataggggaaaaaaacagctcacccaaggtgttaggtttcacatatatattcatcaactattttagaagatttaattctatcaaatcttgtattacctcagatcatttta

SEQ ID NO: 40221 - DNA, 120 bp, Artificial Sequence
  ENSG00000058668_56 (sequence is synthesized)
aatagcaagccaataacgagctttgaaggctattttaccattcctgttcacaaaaggttctcatggtgcctgacaggttacccttgagggcttgtgtctactttttaaaagtcaatggtt

SEQ ID NO: 40222 - DNA, 120 bp, Artificial Sequence
  ENSG00000058668_57 (sequence is synthesized)
ttttttcttgtgttctagtttccataataggagagaaaatatagaaatatatgcaaaaattatagttttctttagatcagaaactgatatttttgggtcagccatatgtattttgtttaa

SEQ ID NO: 40223 - DNA, 120 bp, Artificial Sequence
  ENSG00000058668_58 (sequence is synthesized)
aggatttaaaataaagtgccgtcatgtagccctgtggaagggagcacataaccagctgtttggcatgacaggtgacttagtatatttgtaattggttttaaaaccaatacaccatacttt

SEQ ID NO: 40224 - DNA, 120 bp, Artificial Sequence
  ENSG00000058668_59 (sequence is synthesized)
ctttctgcaaacagccatctttatacttagggaagaaaaattgttgggttctagacttttttaatataaattttgttgatatggaattaggtaagtttaagtgtctatgtgcatatgttt

SEQ ID NO: 40225 - DNA, 120 bp, Artificial Sequence
  ENSG00000058668_60 (sequence is synthesized)
tttatataagttttttctattcagtttcactgatccaactggcagtgggtaaatatggcataagttaataacacttttccccaaaatggtgctttggatttgaaaagggtctgatgggga

SEQ ID NO: 40226 - DNA, 120 bp, Artificial Sequence
  ENSG00000058668_61 (sequence is synthesized)
gaaggagaacgtatcatcctagcttcctctcttaataaacctagaaaaacgggtagtaaactgtggatagtcaggaaaacacccagcaagggacacagctgtcaggaaatgaatcttccc

SEQ ID NO: 40227 - DNA, 120 bp, Artificial Sequence
  ENSG00000058668_62 (sequence is synthesized)
cccaacccccaccatgcagatggatagacagaatctttcctgactagtcattaggatcaggggcctctgttggatttgtgtttcttgaagaatagctggcagagtggtataaaagacacg

SEQ ID NO: 40228 - DNA, 120 bp, Artificial Sequence
  ENSG00000058668_63 (sequence is synthesized)
aatatctcctggtctataaggatactctgatttggggtttgcatttttcatggtttttatttcctgttccccctggagttttccattagtgagtttttgtgcaaggatcttatttgtgat

SEQ ID NO: 40229 - DNA, 120 bp, Artificial Sequence
  ENSG00000058668_64 (sequence is synthesized)
gccttccctcccctagaaagattttgtgcaatatattaaatggggacagaattctaaatggataaaacaatggctggttctagccctgagtgacagtcttaaggctagatccttcccata

SEQ ID NO: 40230 - DNA, 120 bp, Artificial Sequence
  ENSG00000058668_65 (sequence is synthesized)
gtatcatctgtcctctggaatgactctcctgtccctaaaggggttaagagagagatcacctagaaatccctctggacacttgtgggttctttagggtttgagtttcttcttccccttgag

SEQ ID NO: 40231 - DNA, 120 bp, Artificial Sequence
  ENSG00000058668_66 (sequence is synthesized)
cttcagagaggagagttggcatggttaaatctgaatggttacctcactgctgaaaacccagaggggcgtggcacactcgcttgtgtggaaaagcctctaaatgcatcccttcctttcttt

SEQ ID NO: 40232 - DNA, 120 bp, Artificial Sequence
  ENSG00000058668_67 (sequence is synthesized)
cctgcttcctttgccttacaattgaagcagcccgtggtaccatcacagtatgcagagacttcctcacctttcatatctagggaccacccccgatgcattggtgagggtgggcacttataa

SEQ ID NO: 40233 - DNA, 120 bp, Artificial Sequence
  ENSG00000058668_68 (sequence is synthesized)
atgcctgctattgttaagccattccagcctcttcctctgaatagaccagacgccctttcacttagttcagtgccagtccttttgccttcccaaccctgctgttaggcctgctgttccctt

SEQ ID NO: 40234 - DNA, 120 bp, Artificial Sequence
  ENSG00000058668_69 (sequence is synthesized)
tgctcttgattaggagagatggaaggagatgagctcccataactgaattggcctttggttcatgttttctccccatatgtatatatgccatatgtgaatatgccatatatatgtgccaac

SEQ ID NO: 40235 - DNA, 120 bp, Artificial Sequence
  ENSG00000058668_70 (sequence is synthesized)
aaatctatctacgttgttcttttcaaattagcacgcagataggaattttgagtttcttcttcttttagtaactagtataacaagcactggtatttttgtacaaaaaagaaaaacaaaaga

SEQ ID NO: 40236 - DNA, 120 bp, Artificial Sequence
  ENSG00000058668_71 (sequence is synthesized)
ttgactattgtggtctgcatgacataaacaaacaaatggtgatatcaaagcaacgtataccccagtccagtgtgtgttgccataatttgcaattcagcttaacagtgcacccaatctata

SEQ ID NO: 40237 - DNA, 120 bp, Artificial Sequence
  ENSG00000058668_72 (sequence is synthesized)
tttgcattttgatattatttaagctctatgtacaaggttttgcatgtatttatatggttcttagggaaaaaaaatgctataaactgcaaatctgaaattcaaatgtgttgttccactgag

SEQ ID NO: 40238 - DNA, 120 bp, Artificial Sequence
  ENSG00000058668_73 (sequence is synthesized)
accagaagaagaagaggagttttaaaagggataatttgttggagccaataaagctttttgctgatgaacagaaaccaatactgctgtgcactgagaataaaaactcatgcccacttgtaa

SEQ ID NO: 40239 - DNA, 120 bp, Artificial Sequence
  ENSG00000058668_74 (sequence is synthesized)
cagttgcaccagtcaaatcttcccccaccacttctgttcctgctgtttcatctcctcctatgggcaatcaaagtggtcaaagcgttccatagttccctccacgaaagcattcagaaaccc

SEQ ID NO: 40240 - DNA, 120 bp, Artificial Sequence
  ENSG00000058668_75 (sequence is synthesized)
gagggtagcagttcttgtcggccagcatctcttcccttccaaaggctcactactgatgggcagccctagatcctcagcttcaggacagacacgcaaaaggatctgtgtggggtcctctga

SEQ ID NO: 40241 - DNA, 120 bp, Artificial Sequence
  ENSG00000058668_76 (sequence is synthesized)
tatgggcagtgagtgatagtctattatgatgcatgatttgctaaaatgaccacaagagagcacgtggcatccactttaaccaaccatggttatcttttccttttggtttttccctttgat

SEQ ID NO: 40242 - DNA, 120 bp, Artificial Sequence
  ENSG00000058668_77 (sequence is synthesized)
attttgacttaagggaagaaaaagacaaaaatcctactctaaaaccagactgtgtgcccttgtattttatttttgtaatgtagaaaagctattaaaccttaactgttttaaagacaataa

SEQ ID NO: 40243 - DNA, 120 bp, Artificial Sequence
  ENSG00000058668_78 (sequence is synthesized)
aagcaataatttcttcaagcctcttcccttcttgcaatttctgaaatgggatagaagccacccctgctgctcttatgtcccctgtctatagccccacaataacttttattttttccactt

SEQ ID NO: 40244 - DNA, 120 bp, Artificial Sequence
  ENSG00000058673_0 (sequence is synthesized)
ggacggcagcggccaagcaagaagaaagacgtggcagcaagcgggagtcggggatagtgtcatcggttcggtaaagtttctgttctctgggtcccggtactttggagcttgtctcaaact

SEQ ID NO: 40245 - DNA, 120 bp, Artificial Sequence
  ENSG00000058673_1 (sequence is synthesized)
ccacatacagaaagccaccgaccttattccggtatcctacacccattccccactctcattacactcccacccctggccctcagcgtcggagtcaagagcaacagggacacttccgttctc

SEQ ID NO: 40246 - DNA, 120 bp, Artificial Sequence
  ENSG00000058673_2 (sequence is synthesized)
cttgtaggactggtgaaaccgtaatgaagaacacccctaaactcccataatcgatttggggatattccctgcccaaaaaattcctggaaaattgactagtattaagtctatggaagatgg

SEQ ID NO: 40247 - DNA, 87 bp, Artificial Sequence
  ENSG00000058673_3 (sequence is synthesized)
ttcctggaaaattgactagtattaagtctatggaagatggagttttttttcatgatcctttaactctcaagttcatctttaaatgaa

SEQ ID NO: 40248 - DNA, 120 bp, Artificial Sequence
  ENSG00000058673_4 (sequence is synthesized)
gtctgacaaaggttatttgaatggacttaatctcccagtagttgggagatgttttaaaaacacatgctgtgtttgaattgtggctgagaggttttcttggcaatgtgaggaggaaatttt

SEQ ID NO: 40249 - DNA, 120 bp, Artificial Sequence
  ENSG00000058673_5 (sequence is synthesized)
tttctgcctcattattattaattcatggattgagtgttggttcgacctacaggcgtaatagattggaactcagtgaagacacagatgttcctgttcagagcaaccagctaatgattacag

SEQ ID NO: 40250 - DNA, 120 bp, Artificial Sequence
  ENSG00000058673_6 (sequence is synthesized)
tttaaagacaatttctgtgatcaagttgtcatttggaagattaaacccatttcacgaggacttggagcctggtccttgctttgaggaagcagtggcttgtttcaagaagccacttctgat

SEQ ID NO: 40251 - DNA, 120 bp, Artificial Sequence
  ENSG00000058673_7 (sequence is synthesized)
ctaagaatctacccagcatgcctaatcaaggagaagactgctatttttttttctattccacatgtaccaaaggtgacagctgcccattccgtcactgtgaagctgcaataggaaatgaaa

SEQ ID NO: 40252 - DNA, 120 bp, Artificial Sequence
  ENSG00000058673_8 (sequence is synthesized)
ctgtttgcacattatggcaagaagggcgctgttttcgacaggtgtgcaggtttcggcacatggagattgataaaaaacgcagtgaaattccttgttattgggaaaatcagccaacaggat

SEQ ID NO: 40253 - DNA, 120 bp, Artificial Sequence
  ENSG00000058673_9 (sequence is synthesized)
gtcaaaaattaaactgcgctttccatcacaatagaggacgatatgttgatggccttttcctacctccgagcaaaactgtgttgcccactgtgcctgagtcaccagaagaggaagtgaagg

SEQ ID NO: 40254 - DNA, 120 bp, Artificial Sequence
  ENSG00000058673_10 (sequence is synthesized)
ctagccaactttcagttcagcagaacaaattgtctgtccagtccaatccttcccctcagctgcggagcgttatgaaagtagaaagttccgaaaatgttcctagccccacgcatccaccag

SEQ ID NO: 40255 - DNA, 120 bp, Artificial Sequence
  ENSG00000058673_11 (sequence is synthesized)
ttgtaattaatgctgcagatgatgatgaagatgatgatgatcagttttctgaggaaggtgatgaaaccaaaacacctaccctgcaaccaactcctgaagttcacaatggattacgagtga

SEQ ID NO: 40256 - DNA, 120 bp, Artificial Sequence
  ENSG00000058673_12 (sequence is synthesized)
cttctgtccggaaacctgcagtcaatataaagcaaggtgaatgtttgaattttggaataaaaactcttgaggaaattaagtcaaagaaaatgaaggaaaaatctaagaagcaaggtgagg

SEQ ID NO: 40257 - DNA, 120 bp, Artificial Sequence
  ENSG00000058673_13 (sequence is synthesized)
gttcttcaggagtttccagtcttttactccaccctgagcccgttccaggtcctgaaaaagaaaatgtcaggactgtggtgaggacagtaactctctccaccaaacaaggagaagaaccct

SEQ ID NO: 40258 - DNA, 120 bp, Artificial Sequence
  ENSG00000058673_14 (sequence is synthesized)
tggttagattgagtcttactgagagactggggaaacgaaaattttcagcaggcggtgacagtgatcctccattaaagcgtagcctggcacagaggctagggaagaaagttgaagctccag

SEQ ID NO: 40259 - DNA, 120 bp, Artificial Sequence
  ENSG00000058673_15 (sequence is synthesized)
aaactaacattgacaaaacaccaaagaaagctcaagtttccaagtctcttaaggagcgattaggcatgtcagctgatccagataatgaggatgcaacagataaagttaataaagttggtg

SEQ ID NO: 40260 - DNA, 120 bp, Artificial Sequence
  ENSG00000058673_16 (sequence is synthesized)
agatccatgtgaagacattagaagaaattcttcttgaaagagccagtcagaaacgtggagaattgcaaactaaactcaagacagaaggaccttcaaaaactgatgattctacttcaggag

SEQ ID NO: 40261 - DNA, 120 bp, Artificial Sequence
  ENSG00000058673_17 (sequence is synthesized)
caagaagctcctccactatccgtatcaaaaccttctctgaggtcctggctgaaaaaaaacatcggcagcaggaagcagagagacaaaaaagcaaaaaggatacaacttgcatcaagctaa

SEQ ID NO: 40262 - DNA, 120 bp, Artificial Sequence
  ENSG00000058673_18 (sequence is synthesized)
agattgatagtgaaattaaaaaaacagtagttttgccacccattgttgccagcagaggacaatcagaggagcctgcaggtaaaacaaagtctatgcaggaggtgcacatcaagacgctgg

SEQ ID NO: 40263 - DNA, 120 bp, Artificial Sequence
  ENSG00000058673_19 (sequence is synthesized)
aagaaattaaactggagaaggcactgagggtgcagcagagctctgagagcagcaccagctccccgtctcaacacgaggccactccaggggcaaggcggctgctgcgaatcaccaaaagaa

SEQ ID NO: 40264 - DNA, 120 bp, Artificial Sequence
  ENSG00000058673_20 (sequence is synthesized)
acaggagttgacatcactaaaattcaagtcaagagatgtgagaccatgagagagaagcacatgcagaaacagcaggagagggaaaaatcagtcttgacacctcttcggggagatgtagcc

SEQ ID NO: 40265 - DNA, 120 bp, Artificial Sequence
  ENSG00000058673_21 (sequence is synthesized)
tcttgcaatacccaagtggcagagaaaccagtgctcactgctgtgccaggaatcacacggcacctgaccaagcggcttcccacaaagtcatcccagaaggtggaggtagaaacctcaggg

SEQ ID NO: 40266 - DNA, 120 bp, Artificial Sequence
  ENSG00000058673_22 (sequence is synthesized)
attggagactcattattgaatgtgaaatgtgcagcacagaccttggaaaaaaggggtaaagctaaacccaaagtgaacgtgaagccatctgtggttaaagttgtgtcatcccccaaattg

SEQ ID NO: 40267 - DNA, 120 bp, Artificial Sequence
  ENSG00000058673_23 (sequence is synthesized)
gccccaaaacgtaaggcagtggagatgcacgctgctgtcattgccgctgtgaagccactcagctccagcagtgtcctacaggaacccccagccaaaaaggcagctgtggctgttgtcccg

SEQ ID NO: 40268 - DNA, 120 bp, Artificial Sequence
  ENSG00000058673_24 (sequence is synthesized)
cttgtctctgaggacaaatcagtcactgtgcctgaagcagaaaatcctagagacagtcttgtgctgcctccaacccagtcctcttcagattcctcacccccggaggtgtctggcccttcc

SEQ ID NO: 40269 - DNA, 120 bp, Artificial Sequence
  ENSG00000058673_25 (sequence is synthesized)
tcatcccaaatgagcatgaaaactcgccgactcagctctgcctcaacaggaaagcccccactctctgtggaggatgattttgagaaactaatatgggagatttcaggaggcaaattggaa

SEQ ID NO: 40270 - DNA, 120 bp, Artificial Sequence
  ENSG00000058673_26 (sequence is synthesized)
gctgagattgacctggatcctgggaaagatgaagatgaccttctgcttgagctatcagaaatgattgatagctgaaggtggtagtgaggacactttaaaaaaaaaatcgccaaaaaactg

SEQ ID NO: 40271 - DNA, 120 bp, Artificial Sequence
  ENSG00000058673_27 (sequence is synthesized)
gacttagtttcatctattgtaacatttacctgagatgatcatttctttagtctagaatttgccccaaatcagaagtatacctctgaattatctgtatgtgtcctggattccttggggtca

SEQ ID NO: 40272 - DNA, 120 bp, Artificial Sequence
  ENSG00000058673_28 (sequence is synthesized)
gatttttaaagttactttataaccattttgtccatttgatgccattgtttatcatcttttgagaaaaaagttctgtcatacccttctctccacaaaaaagagactgagagggagatcaag

SEQ ID NO: 40273 - DNA, 120 bp, Artificial Sequence
  ENSG00000058673_29 (sequence is synthesized)
tgaaagggtgcaagcgaacttagtgactccttgaggtgtttgtcagttttggcttttttcttctttgttgtattctttatgtattgtcttgatgtacttaatattacctgagtttgaaat

SEQ ID NO: 40274 - DNA, 120 bp, Artificial Sequence
  ENSG00000058673_30 (sequence is synthesized)
ggatgaagacagctgctaccattaaggaccaaattttatgctaccactaaacaaaaatacccactcagtctgtgttaaattgtatgtctttttaaaggtatttaaagattcaactaagct

SEQ ID NO: 40275 - DNA, 120 bp, Artificial Sequence
  ENSG00000058673_31 (sequence is synthesized)
ttaaagagggctgagcagctcaggaagcctgtaatgtgggcataactctttggacctgatcttgatgcttctgctgctctgttagcctctgaagagcaatatctaatttattattactgt

SEQ ID NO: 40276 - DNA, 120 bp, Artificial Sequence
  ENSG00000058673_32 (sequence is synthesized)
aattttttaaaaggctttaaagtgcctcaggggtcccctgaaactaattttctatttctgggattccctggattcattatatgagatggtgacatgattagaggaattcttttttagtat

SEQ ID NO: 40277 - DNA, 120 bp, Artificial Sequence
  ENSG00000058673_33 (sequence is synthesized)
gaaaattgtcctttttcttcttcagtacttgcctccttgctggcattgaattaacacagggacaaaatttggttaattttttatttctaactctcccaacaaacccctgttgcccagtat

SEQ ID NO: 40278 - DNA, 120 bp, Artificial Sequence
  ENSG00000058673_34 (sequence is synthesized)
ttgtttggtggcctttaaccacctgagggaaaaaatgagcttattcaagctgccaatatttatctatgggctgtagcagtacactgaattgtactgtgccagggatattgagatgctctg

SEQ ID NO: 40279 - DNA, 120 bp, Artificial Sequence
  ENSG00000058673_35 (sequence is synthesized)
ggggtgtattgtatacctgccagttttcttcatttctgaattgagttttcttttcttgatgttggtttccttcatatcacctcaaggtttagatttgtgaaggaataagcatgatggaaa

SEQ ID NO: 40280 - DNA, 120 bp, Artificial Sequence
  ENSG00000058673_36 (sequence is synthesized)
taatagtcttgaaaggagatatgttgtatataatcaggaggaagaggaaggaaggacttacccattttgatattttgctgtaggtggccagttttgtttctcatagggaaatctgaccca

SEQ ID NO: 40281 - DNA, 120 bp, Artificial Sequence
  ENSG00000058673_37 (sequence is synthesized)
cctgtcatgttggctcctaaggaactgctgttgtaagcggctcatcaagagttgaacttcacgtagccttgttgggaatatggaaaaggaagaaagccacaggactgcccattcagtctt

SEQ ID NO: 40282 - DNA, 120 bp, Artificial Sequence
  ENSG00000058673_38 (sequence is synthesized)
gggaagattgggatgattctgcacaagcaaaaatgactgaagtttatgtatagacacacctctaccaatccatcttcagctgactgaatgttgtatgatagcccttctccaaagcagagg

SEQ ID NO: 40283 - DNA, 120 bp, Artificial Sequence
  ENSG00000058673_39 (sequence is synthesized)
tagaatgttcaggtttcaccatggattttctacttatttcgtttttggaatcagcttacagattccaggtcccttttgtatatattctttattcttttgcttttttaaaaaataattttg

SEQ ID NO: 40284 - DNA, 120 bp, Artificial Sequence
  ENSG00000058673_40 (sequence is synthesized)
tttcatatttaaagcacttgtattagtcaatgtttcgtgttccgcattatttgaaccatttgcccttacagaaagagaaatacttgtttgtgttttaaataaaactgatgtaggaaagtc

SEQ ID NO: 40285 - DNA, 120 bp, Artificial Sequence
  ENSG00000058673_41 (sequence is synthesized)
ggatagtatttggcaagatttagcctagaaattatgtagtatttattacataagaatcaaaattgctttgttactgggctggtttcaaagtttagaactcatttctatgtatcaaaatcg

SEQ ID NO: 40286 - DNA, 120 bp, Artificial Sequence
  ENSG00000058673_42 (sequence is synthesized)
ttttttggttttgattttttttttttttaaattcttaaatggtaaatatgccattgtgaaatgaaatctcaactccaaaagtttacccttttactaactggagtaaatgtatacttacaa

SEQ ID NO: 40287 - DNA, 120 bp, Artificial Sequence
  ENSG00000058673_43 (sequence is synthesized)
acaaagtctttagctgtagccattagtagtaaagaatttggacctaggctgcgtaagcaagcctttccagggccactatttaatggcaaaccagtgatactggtgttgatacaaaataag

SEQ ID NO: 40288 - DNA, 120 bp, Artificial Sequence
  ENSG00000058673_44 (sequence is synthesized)
aaataaattttcccttagataaagctttctgtgttttgacagtgccagtttagaatggctataatgctgctctgccttctacagcttgctgcaccactctgtagttactctattaccata

SEQ ID NO: 40289 - DNA, 120 bp, Artificial Sequence
  ENSG00000058673_45 (sequence is synthesized)
cgtttctatcttttttggttaaacactccctgatgacgatgatggatatatatacatacatccatattatacataatgatatatgtgtaaggatttaccttcgtctttattttgtgggct

SEQ ID NO: 40290 - DNA, 120 bp, Artificial Sequence
  ENSG00000058673_46 (sequence is synthesized)
gggcaaaatttagtgtaacaataacttcatgatactttggtataagagtaagttctttatttttataatgaacccaaatctaaagtcttttatagtgcattttaaaaggggaaacttatc

SEQ ID NO: 40291 - DNA, 120 bp, Artificial Sequence
  ENSG00000058673_47 (sequence is synthesized)
gggaaacttatccaaatgttatatttctatacatttttgtgtatatgtgtgtgtgtataagccagttagtatatatctgtatgtatattatatacataaaacactatatttttacataca

SEQ ID NO: 40292 - DNA, 120 bp, Artificial Sequence
  ENSG00000058673_48 (sequence is synthesized)
ttatacagataataaagatgggggaaggtttctgtttttttcttaataggtgaagaaatcttgaagaccagaaattggatcttactgaaaaactgatgtttttttgttttttttttaaat

SEQ ID NO: 40293 - DNA, 120 bp, Artificial Sequence
  ENSG00000058673_49 (sequence is synthesized)
tgacatcttccaggccttggttctggaccttgagaaagaggctgtggaactagagatagcgatgctttttaggatttggggatattccctgcccaaaaaattcctggaaaattgactagt

SEQ ID NO: 40294 - DNA, 120 bp, Artificial Sequence
  ENSG00000058673_50 (sequence is synthesized)
atgtaggtattgggggaaggggagggatcaatcgaaaaatggaagtggtttaaagttcatatttcactttttgctatctctatagcgtacaacttgtgagttacttacaggctgtaaaag

SEQ ID NO: 40295 - DNA, 120 bp, Artificial Sequence
  ENSG00000058673_51 (sequence is synthesized)
cttctcaagtctaaaaatatctgaaaactaaacttgaattaactcttaatacaaacagtactttgaaaatgcagcatttaaccttgttttaaaatttttttctcaaagcatttttttcca

SEQ ID NO: 40296 - DNA, 120 bp, Artificial Sequence
  ENSG00000058673_52 (sequence is synthesized)
gccactcacattttaaaaggttgtattacttttagttagaactgaaagggctcaactagcatttgctgtgaccagtatgcggagtctgtgttggctttccagaattgactttttgggttg

SEQ ID NO: 40297 - DNA, 120 bp, Artificial Sequence
  ENSG00000058673_53 (sequence is synthesized)
tattggcaaatcacagtcctaaatgatgaatgttgaatgatgcactatgtttttgtttaaatgagatttcctgaaaatagttaatttcagaattaagggaaattgatgtcgctatcatga

SEQ ID NO: 40298 - DNA, 120 bp, Artificial Sequence
  ENSG00000058673_54 (sequence is synthesized)
ggcatcataaaaatatgtattttacaaggtgaaggcatttcaagtagatatagttcttgatgaagcaggaagaacatggatctgggatttggaagacctggcttctagctgctactaacc

SEQ ID NO: 40299 - DNA, 120 bp, Artificial Sequence
  ENSG00000058673_55 (sequence is synthesized)
aactctgtgactctgggaaagggggactcagttcttacttctgtaacatgaggacactggactatttgaattcagaacttagaaaattggaagggaccttaaagccctctaagaaagagt

SEQ ID NO: 40300 - DNA, 120 bp, Artificial Sequence
  ENSG00000058673_56 (sequence is synthesized)
tcgggaatgttctccattgctgtcagttttcctccaaaaataacctggcttggaagttattggtccagtgggaatttgattccccatagaaactggagaaaaggtaatgcaagtagagag

SEQ ID NO: 40301 - DNA, 120 bp, Artificial Sequence
  ENSG00000058673_57 (sequence is synthesized)
gaacagctgtatttctgcttgagtaataaacccactaacagattctggtacgaattgtggagacataaagagaatgagtgtatgtactctaagtgtaccagtttcttcactctctcctgg

SEQ ID NO: 40302 - DNA, 120 bp, Artificial Sequence
  ENSG00000058673_58 (sequence is synthesized)
cagaagatgcaacacttttagtgattctgggattctgggatgtgttcctattaattctaatacagatgaagaagatgtggtagaggaaaagatggtagcagaaggagtgaataaagaggc

SEQ ID NO: 40303 - DNA, 120 bp, Artificial Sequence
  ENSG00000058673_59 (sequence is synthesized)
aaaacagcctgctaaaaagaaaagaaagaagggtttgcgaattaaggggaaaaggcgtcgaaaaaaattgattcttgccaaaaagtttagtaaggatttgggatctgggaggcctgttgc

SEQ ID NO: 40304 - DNA, 120 bp, Artificial Sequence
  ENSG00000058673_60 (sequence is synthesized)
agatgcccctgctttgttagcttccaatgaccctgagcaggatgaagaaagtctttttgagagcaatatagaaaaacagatctatctacctagtactagagccaagacctccattgtgtg

SEQ ID NO: 40305 - DNA, 120 bp, Artificial Sequence
  ENSG00000058673_61 (sequence is synthesized)
gcacttctttcatgttgacccccagtacacctggcgggccatttgtaacctctgtgagaaaagcgtcagcaggggtaaaccaggtagccatcttggtacatctactcttcaacgacatct

SEQ ID NO: 40306 - DNA, 120 bp, Artificial Sequence
  ENSG00000058673_62 (sequence is synthesized)
gcaagcaaggcattcacctcattggaccagggccaacaagtttggagttgctagtggagaggaggactttaccttggatgtgtctttatctccctcttctggaagcaatggaagctttga

SEQ ID NO: 40307 - DNA, 120 bp, Artificial Sequence
  ENSG00000058673_63 (sequence is synthesized)
atatattcctactgatccattagatgataatagaatgggcaagaagcatgataaatcagcatctgatgccctaagggcagaaagagggagatttctcatcaaaagtaacattgtcaagca

SEQ ID NO: 40308 - DNA, 120 bp, Artificial Sequence
  ENSG00000058673_64 (sequence is synthesized)
tgctttaattcctggaactagagccaagacatctgccgtttggaattttttttacactgatcctcagcacatctcaagagctgtgtgtaatatatgtaaaagaagtgtgagccggggtag

SEQ ID NO: 40309 - DNA, 120 bp, Artificial Sequence
  ENSG00000058673_65 (sequence is synthesized)
gccagggtcccacttagggacttcaacacttcaacgacacctgcaagccacacatcctatccattgggctgttgccaacaaagacagtggtgctgttgcaaatggattagatgaagctga

SEQ ID NO: 40310 - DNA, 120 bp, Artificial Sequence
  ENSG00000058673_66 (sequence is synthesized)
gactgagagaagtgatctcttgagtgataccttgcatggagaaaagtctacaggcagccaagatttaacagctgaggaccttagtgactctgattcagatgaacctatgttagaggttga

SEQ ID NO: 40311 - DNA, 120 bp, Artificial Sequence
  ENSG00000058673_67 (sequence is synthesized)
aaacagatctgaaagtcctattcccgttgcagagcaaggcactctgatgcgtgcgcaggagagagaaacaacatgttgtggaaatccagtctcaagtcacataagtcaggcaattatcca

SEQ ID NO: 40312 - DNA, 120 bp, Artificial Sequence
  ENSG00000058673_68 (sequence is synthesized)
aatgattgtggaggatatgcatccttacaactatttctcaaccccagcctttcagaggttcatgcagattgtggcccctgattataggttgccatcagagacttactttttcactaaggc

SEQ ID NO: 40313 - DNA, 120 bp, Artificial Sequence
  ENSG00000058673_69 (sequence is synthesized)
tgtacctcagttatatgattgtgtcagagaaaaaattttcttaactttagagaatgttcaaagccaaaagatacacctgactgttgacatatggacccatgacccatccactgactattt

SEQ ID NO: 40314 - DNA, 120 bp, Artificial Sequence
  ENSG00000058673_70 (sequence is synthesized)
tattgtgactgtacactgggtttctttggaaactgcgtcttttctcaataatggcaggatccccgattttagaaagtgggcagtgctttgtgttacaggtttggctaaagactgtttgat

SEQ ID NO: 40315 - DNA, 120 bp, Artificial Sequence
  ENSG00000058673_71 (sequence is synthesized)
aaccaatattttacaagaattaaatgaccagattggtctgtggctttctccaaatttccttatccctagcttcattgtttctgacaattcctctaatgtggtacatgcaatcaaagatgg

SEQ ID NO: 40316 - DNA, 120 bp, Artificial Sequence
  ENSG00000058673_72 (sequence is synthesized)
tggttttacccatgtgccatgcttcctgcattgtttaaatatggtcattcaggactttttctgcgagcacaaaagcattgagaatatgttagtggctgccaggaaaacttgtcatcattt

SEQ ID NO: 40317 - DNA, 120 bp, Artificial Sequence
  ENSG00000058673_73 (sequence is synthesized)
tagtcattcggtcaaggcccgtcagatactgcaagagttccaaaatgatcaccaacttccatggaagaatttgaagcaggacgaaactggccattggatttctactttttatatgttaaa

SEQ ID NO: 40318 - DNA, 120 bp, Artificial Sequence
  ENSG00000058673_74 (sequence is synthesized)
atggctcttggagcattgctactcagttcaccatagtcttggtagagccagtggagttgtgctcacctcccttcagtggactctaatgacttatgtttgtgatattcttaagccatttga

SEQ ID NO: 40319 - DNA, 120 bp, Artificial Sequence
  ENSG00000058673_75 (sequence is synthesized)
ggaggctacccagaaagtgagcgtgaagaccgcaggattgaatcaggtgctacccctaatccatcatctactcctttccctgcagaaactcagagaagattttcaagtcagaggtattac

SEQ ID NO: 40320 - DNA, 120 bp, Artificial Sequence
  ENSG00000058673_76 (sequence is synthesized)
tcaggccctcaatctggtggatagtttatctctgaaacttgaaacagataccctactaagtgccatgcttaaatccaagccctgtatcttggctactttgttagatccttgctttaaaaa

SEQ ID NO: 40321 - DNA, 120 bp, Artificial Sequence
  ENSG00000058673_77 (sequence is synthesized)
cagtttggaagacttttttcctcaaggtgctgatttagaaacttataagcagttccttgcagaagaggtctgtaattatatggaatcttcaccagagatctgccaaattccaacttcaga

SEQ ID NO: 40322 - DNA, 120 bp, Artificial Sequence
  ENSG00000058673_78 (sequence is synthesized)
agcttcttgtccctcagttacagtgggagctgattcatttacctcatctctaaaagaaggcacctccagttcaggttctgttgatagctcagctgtagacaatgttgcccttggaagcaa

SEQ ID NO: 40323 - DNA, 120 bp, Artificial Sequence
  ENSG00000058673_79 (sequence is synthesized)
aagcttcatgttcccttctgctgtagcagttgtggatgagtacttcaaagagaagtattcagagttctcaggaggtgatgaccctttaatttactggcagaggaagataagcatatggcc

SEQ ID NO: 40324 - DNA, 120 bp, Artificial Sequence
  ENSG00000058673_80 (sequence is synthesized)
ggctttgacccaggttgccatccagtatctaagttgccccatgtgtagttggcaatctgaatgtatctttactaaaaatagccactttcatccaaaacagatcatgagcctggactttga

SEQ ID NO: 40325 - DNA, 120 bp, Artificial Sequence
  ENSG00000058673_81 (sequence is synthesized)
caatatagaacaactgatgtttctgaaaatgaacttgaaaaatgttaactacgattattctacgttggttctgagctgggatcctgagcagaatgaagttgttcaaagcagtgaaaaaga

SEQ ID NO: 40326 - DNA, 120 bp, Artificial Sequence
  ENSG00000058673_82 (sequence is synthesized)
aatactgccttaatttctttttctccatttaaaatgggcaactttttgctgtgttactgtatcttaatagctgtagttgttaaatataatcattatctttataaacacatctggggaaac

SEQ ID NO: 40327 - DNA, 120 bp, Artificial Sequence
  ENSG00000058673_83 (sequence is synthesized)
ctgaaatcacacaagggctgaaaattcctcagaggcaatataattttgataaaatgaagattaaagatttcatagctataactgtggcgctagcacttgaaaattttgcttataccaatg

SEQ ID NO: 40328 - DNA, 120 bp, Artificial Sequence
  ENSG00000058673_84 (sequence is synthesized)
agagagaagatatttttaattaaaaaaaatatagtgcagcattgaaaggccttaggctttcttcctggtagattgaactagtaattggttttaagtaaaacttcccccaccatgggaaat

SEQ ID NO: 40329 - DNA, 120 bp, Artificial Sequence
  ENSG00000058673_85 (sequence is synthesized)
tttattgctctgaaatcaacgaaatgagaaaaaagtacactggctggcattcctcctgcccctgtttttctgtttccttaaaaaccctgatgcttaattacaacttggcaaaaagaaaac

SEQ ID NO: 40330 - DNA, 120 bp, Artificial Sequence
  ENSG00000058673_86 (sequence is synthesized)
ccgtgaaattgttttatatttggaaatttctaattgcctcctcatactggtcagctttataatttcaaattgttgagtgtgatagtgttaccctttagaattggatcttatataaaaggg

SEQ ID NO: 40331 - DNA, 120 bp, Artificial Sequence
  ENSG00000058673_87 (sequence is synthesized)
agggaaatattagaaaacaattaggaaaatatacttttagtctttgaaatgcctgttttaacctttataaaatattataaaaatagattgtgtaggtactttcaaataatttatgggtaa

SEQ ID NO: 40332 - DNA, 120 bp, Artificial Sequence
  ENSG00000058673_88 (sequence is synthesized)
agactaaaatgtttgcaagaattggaaaaggttgaatgggaattgtaatgagagccctttgaacatgcttggaaaaacccagtagacatttcccaaagattgtttctgtaattttaggta

SEQ ID NO: 40333 - DNA, 120 bp, Artificial Sequence
  ENSG00000058673_89 (sequence is synthesized)
atctttttaaaaacatacttaatgacccattatactgtattaactgtgcggttgttttggccactgaattcttaatgaaaactaagcagtcggtatttttatgtgttaggaatcattggt

SEQ ID NO: 40334 - DNA, 120 bp, Artificial Sequence
  ENSG00000058673_90 (sequence is synthesized)
gaaatgagtgaattgatctcattttaagatccctttctactctgaaagtatgtttctgagattgagtaggaggccagaaaatgatgacttttagtaaaagtctattaaaagtttcagact

SEQ ID NO: 40335 - DNA, 120 bp, Artificial Sequence
  ENSG00000058673_91 (sequence is synthesized)
gaataactaatgtgagatcccaatttttcctttttttcattttagatttggggatattccctgcccaaaaaattcctggaaaattgactagtattaagtgtgagtaaaaggtgtccactt

SEQ ID NO: 40336 - DNA, 120 bp, Artificial Sequence
  ENSG00000058673_92 (sequence is synthesized)
atcagcctgggatccatcttgacaagagaccccagacagaatgctattggcctttcgtgtaagtgcccgaatttcagttattatttggcttagaaacctttcatctggatatattgccaa

SEQ ID NO: 40337 - DNA, 120 bp, Artificial Sequence
  ENSG00000058673_93 (sequence is synthesized)
atttacaagtgtgctcaattttagctgcatatgctttaggtaagaatttatattattataatgtgaggattttttttctgacacggatacttactccttagtgttgtaactcaagcaatg

SEQ ID NO: 40338 - DNA, 120 bp, Artificial Sequence
  ENSG00000058673_94 (sequence is synthesized)
ccattaagtttttaaaaggagggagggtttaaaagtgatcttagggagtctctctgggcctactctggctcaagaggctgataaaaaataaataaatgaataaacttgatctttagagtc

SEQ ID NO: 40339 - DNA, 120 bp, Artificial Sequence
  ENSG00000058673_95 (sequence is synthesized)
aacgatttagaattttcaagcatgaaggtgcagcagataagaaatttaatttatagaagtccaggtttcttaatatgtgtgccaatttttaaaattgtaggaaagtatatgtttgttagc

SEQ ID NO: 40340 - DNA, 120 bp, Artificial Sequence
  ENSG00000058673_96 (sequence is synthesized)
taccaaagaacatagatttttcctattagtctaaaagtcgtcccaacaagttgaatcaacttttcacaaaaagcaaaagactatagttttgaatgatagtttttcattttaacagtaaga

SEQ ID NO: 40341 - DNA, 120 bp, Artificial Sequence
  ENSG00000058673_97 (sequence is synthesized)
aaagggcccaaatattccagtttggttatagccagaaataagatagttttatgtttcatatattttatctcaagataataattcctaaagttctagccttaaccctaaatctcagtggtt

SEQ ID NO: 40342 - DNA, 120 bp, Artificial Sequence
  ENSG00000058673_98 (sequence is synthesized)
cttctttaaagctagaacatagtgtgttttcatcttgatcagtatttgaaagatgagactgatgtttactaattacaattgcagtaacaaagcttgatctattaatatattgatcagagt

SEQ ID NO: 40343 - DNA, 120 bp, Artificial Sequence
  ENSG00000058673_99 (sequence is synthesized)
tacagaggcaaaacgagatgaattcttttctcagaatttaaaattgctatttaaaaagctttgtgtaaaactttctatggtgcatctttcctctggtattgaataaaaacaaggaataga

SEQ ID NO: 40344 - DNA, 120 bp, Artificial Sequence
  ENSG00000058673_100 (sequence is synthesized)
ggaatggtaacaaatttaagtggtattgtatctacatggtgaccacctgtagtgaccaccatgtgaccacaaattgcctttgaatcgttttcagtctctttttaaatgaattatttgtgg

SEQ ID NO: 40345 - DNA, 120 bp, Artificial Sequence
  ENSG00000058673_101 (sequence is synthesized)
agagttaattaggtaaaagcacatcttttccctccctgggactttagaacttaaatgaggaaatttagtataaatgctcataagacaaatacactatagttttcataggtggtcaggaat

SEQ ID NO: 40346 - DNA, 120 bp, Artificial Sequence
  ENSG00000058673_102 (sequence is synthesized)
ttattggtgcccctgtattggctgaaagcacttataaattcctcatgttttcatgagtgcattataccttttattgaagatacagagatttaaagtgttacaattgaactagattatgac

SEQ ID NO: 40347 - DNA, 120 bp, Artificial Sequence
  ENSG00000058729_0 (sequence is synthesized)
gccttacgctttgcggctgtcgtcggagaggcatctgggttcggactggggccgccatggggaaagtgaatgtggccaagttgcgttacatgagccgagatgacttcagggtcttgaccg

SEQ ID NO: 40348 - DNA, 120 bp, Artificial Sequence
  ENSG00000058729_1 (sequence is synthesized)
cggttgaaatgggcatgaagaaccatgaaattgttcccggcagtttgattgcttctatagccagccttaaacatggtggctgtaataaagttttaagagaattagtgaaacataaactca

SEQ ID NO: 40349 - DNA, 120 bp, Artificial Sequence
  ENSG00000058729_2 (sequence is synthesized)
tagcttgggagcgtaccaaaactgtccagggctatcggttgacaaatgcaggatatgattacctagctttgaaaacactttcttctaggcaagtagttgagtctgttggaaaccagatgg

SEQ ID NO: 40350 - DNA, 120 bp, Artificial Sequence
  ENSG00000058729_3 (sequence is synthesized)
gtgttggcaaagaatcagatatttacattgttgcaaatgaagaaggacaacaatttgcattaaagcttcacagactaggaagaacctcgtttcgaaatttgaaaaacaaacgcgattatc

SEQ ID NO: 40351 - DNA, 120 bp, Artificial Sequence
  ENSG00000058729_4 (sequence is synthesized)
ataaacataggcacaatgtgtcatggctatatttatctcgtctctctgccatgaaggaatttgcctatatgaaggcattgtatgagaggaaatttccagttccaaagccaattgattaca

SEQ ID NO: 40352 - DNA, 120 bp, Artificial Sequence
  ENSG00000058729_5 (sequence is synthesized)
atcgtcatgcagtggtcatggaactcataaatggttatccactatgtcagatacaccatgttgaagatcctgcatcagtatatgatgaagctatggaactaattgtcaaacttgcaaatc

SEQ ID NO: 40353 - DNA, 120 bp, Artificial Sequence
  ENSG00000058729_6 (sequence is synthesized)
atgggctgattcatggagattttaatgaatttaatctcattttggatgaaagtgaccatatcaccatgattgattttccacagatggtttcaacttctcatcccaatgctgagtggtatt

SEQ ID NO: 40354 - DNA, 120 bp, Artificial Sequence
  ENSG00000058729_7 (sequence is synthesized)
ttgacagagatgttaaatgcattaaagatttctttatgaaacgtttcagctacgaaagtgagctttttccaacttttaaggatatcaggagagaagacactcttgatgtggaggtttctg

SEQ ID NO: 40355 - DNA, 120 bp, Artificial Sequence
  ENSG00000058729_8 (sequence is synthesized)
ccagtggctacacaaaggaaatgcaggcagatgatgaactgcttcatccattaggtccagatgataaaaatattgaaacaaaagagggatctgaattctcattttcagatggagaagtgg

SEQ ID NO: 40356 - DNA, 120 bp, Artificial Sequence
  ENSG00000058729_9 (sequence is synthesized)
cagaaaaagcagaggtttacgggtcagaaaatgaaagtgaacggaactgtctagaagaatcagagggctgctattgcagatcatctggagaccctgaacaaataaaggaagacagtttat

SEQ ID NO: 40357 - DNA, 120 bp, Artificial Sequence
  ENSG00000058729_10 (sequence is synthesized)
cagaagagagtgctgatgcacggagttttgaaatgactgaattcaatcaagctttagaagaaataaaagggcaggttgttgaaaacaactctgtaactgaattttctgaggagaaaaaca

SEQ ID NO: 40358 - DNA, 120 bp, Artificial Sequence
  ENSG00000058729_11 (sequence is synthesized)
gaactgaaaattacaacaggcaagatggtcagagagttcaaggaggagtccctgctggctctgacgagtatgaagatgaatgccctcatctaattgccttgtcgtcattaaatagagaat

SEQ ID NO: 40359 - DNA, 120 bp, Artificial Sequence
  ENSG00000058729_12 (sequence is synthesized)
tcaggcctttcagagatgaagaaaatgtgggagctatgaatcagtatagaacaagaactctgagtatcacttcttcaggcagtgctgtaagctgttcaacaattcctccagaactggtga

SEQ ID NO: 40360 - DNA, 120 bp, Artificial Sequence
  ENSG00000058729_13 (sequence is synthesized)
aacagaaggtgaaacgtcagttgacaaaacagcaaaaatcagctgtcagacgtcgattgcagaaaggagaagcaaatatatttaccaagcaacgtagggaaaacatgcaaaatatcaaat

SEQ ID NO: 40361 - DNA, 120 bp, Artificial Sequence
  ENSG00000058729_14 (sequence is synthesized)
caagtttggaagcagccagcttttggggagaataatatatttaggatcttggatatgtttaatatattttttaaagttactgtaattcctttttgagccctcatttgtcttttttgagcc

SEQ ID NO: 40362 - DNA, 120 bp, Artificial Sequence
  ENSG00000058729_15 (sequence is synthesized)
aaggctatcatatattaataaataaaccctctttcatctataaatttggtcattcagtatgtgtcttgcaaagaataattacctgccaaagcagtccatttttttcaaagtaatttgggt

SEQ ID NO: 40363 - DNA, 120 bp, Artificial Sequence
  ENSG00000058729_16 (sequence is synthesized)
tttctgtttgttgaggatgatatgctacaatgcacataaagcaattagaacaatgtttagcacattcttaagcattcaataaaacatggctattagaatcataatgattctgaaattctg

SEQ ID NO: 40364 - DNA, 120 bp, Artificial Sequence
  ENSG00000058729_17 (sequence is synthesized)
ctgacaatttggttgcattttatttggcaactggaggacttcactgtcttatttttctttagaagtaaagataagcctttggaagtaaagataagccagtgatgcacaatttgcttaatt

SEQ ID NO: 40365 - DNA, 120 bp, Artificial Sequence
  ENSG00000058729_18 (sequence is synthesized)
aattgattaataatctgttttgtgccacttacattggtaatgtggtcatgagaatggaaacttacttgagatagtctaccacaatttttacagttggcagcttgtaagcaggcctgagta

SEQ ID NO: 40366 - DNA, 120 bp, Artificial Sequence
  ENSG00000058729_19 (sequence is synthesized)
gcagaagagttaggggttggggaaggtggagtagaatgaggaatgaaatgttctttctcatatgcttattatataagtgggtccggaacatgttctcacctcaaggttaacaaataccta

SEQ ID NO: 40367 - DNA, 120 bp, Artificial Sequence
  ENSG00000058729_20 (sequence is synthesized)
atgcaggaaagaaaatacatagccatggtcccttcctcaaggactttataattcagtgagatgtaaagatgagtgcttaagtgtatgcacctgattattgtctcttcattgccgcataag

SEQ ID NO: 40368 - DNA, 120 bp, Artificial Sequence
  ENSG00000058729_21 (sequence is synthesized)
tcggaaaaggggatcacttgcagcgaaaaatggccactagatggcaatatcaccccatagtcaccaaacaggattacttgcatccctaattatgttctaccagagggaatatagtacaga

SEQ ID NO: 40369 - DNA, 120 bp, Artificial Sequence
  ENSG00000058729_22 (sequence is synthesized)
cttttccaagattgataaagacagcagattccctttcacctttgccaaattaactctactagctatttgcaagacctgtaattatctaataaattggcttaaatatatagaagctagaaa

SEQ ID NO: 40370 - DNA, 120 bp, Artificial Sequence
  ENSG00000058729_23 (sequence is synthesized)
atgccaattcctcttccctcaaaagttacctgacattcaaatatttaaatacccttgctttgcattttagatatatctttgaattcaggtattcattttgtataatctctcaacttttaa

SEQ ID NO: 40371 - DNA, 120 bp, Artificial Sequence
  ENSG00000058729_24 (sequence is synthesized)
gcatttttataatgtaaagttgaaaacagcttaatagaaccacagaatgtttattttggagtcattttcttatattcagagctatgaaagcaaattgggaataaagccttatcctgctca

SEQ ID NO: 40372 - DNA, 120 bp, Artificial Sequence
  ENSG00000058729_25 (sequence is synthesized)
gctttacctagttgactcagttgacttttgagtatctactacataaaaagcccattactattaagaaactcaagacaaacatgatttttacctttaatagcctaagatttcttgtgggcc

SEQ ID NO: 40373 - DNA, 120 bp, Artificial Sequence
  ENSG00000058729_26 (sequence is synthesized)
aaggaattaattattccaatcagaaatggaggccttacctcatttgggcaaagattagtgctagttattgaagatttactaataaatgatctgttaaggaatttagttttttttggatat

SEQ ID NO: 40374 - DNA, 120 bp, Artificial Sequence
  ENSG00000058729_27 (sequence is synthesized)
gttgttttggttgttgaaaactaaggtataattataatagttattttttgaagatatgtttggctagccatcaattagaagttagagagtttgtcctaacagataagctataaccctcac

SEQ ID NO: 40375 - DNA, 120 bp, Artificial Sequence
  ENSG00000058729_28 (sequence is synthesized)
attttaaaacatgcatagtgaacaatgaacaaaaacaaattcaaaattttactaatgtaaagctgtatattgtgattgttaaaacacttttttttgcctaggagttccagatttaaatcc

SEQ ID NO: 40376 - DNA, 120 bp, Artificial Sequence
  ENSG00000058729_29 (sequence is synthesized)
tggttctacacttcccaaacctcaggtaccttctgtggcctctctaacctcaatttttttacttgtaaaatggggacatttaatagtatacctcagtgtcgtgaagactaaatgaagtac

SEQ ID NO: 40377 - DNA, 120 bp, Artificial Sequence
  ENSG00000058729_30 (sequence is synthesized)
cacttgtaaagagtttattacagtgcctgacatatactgtatggttagtactgctaaaatgacttcttaaggttaccaaaaggaaaattccacaagctgaccacctttcctattgtgatg

SEQ ID NO: 40378 - DNA, 120 bp, Artificial Sequence
  ENSG00000058729_31 (sequence is synthesized)
gtcactggtatttcagctatgatcctttgttgtgtatttatccagactgaaagatgtttttctagtaaccatcttgcatcgtcttagtctccccattaaataaacttttcctacaaacta

SEQ ID NO: 40379 - DNA, 120 bp, Artificial Sequence
  ENSG00000058729_32 (sequence is synthesized)
acgctttgcggctgtcgtcggagaggcatctgggttcggactggggccgccatggggaaagtgaatgtggccaagttgcgttacatgagccgagatgacttcagggtcttgaccgcggta

SEQ ID NO: 40380 - DNA, 120 bp, Artificial Sequence
  ENSG00000058729_33 (sequence is synthesized)
agaaacccgccgttcctgttctcccttccccttaacactgtgtgacctcttcctgttcctgcaagttttctgggatctgagcaggcacactctgggacccgggacgtggcagaagctggg

SEQ ID NO: 40381 - DNA, 120 bp, Artificial Sequence
  ENSG00000058729_34 (sequence is synthesized)
gcattcagaaagtcggatttttaaaaaggttttgtttgggagcttaccttcccccagatagagcaaaggtcccgtcttctaataattgttttcttttctgctgctattcgctttgcgctg

SEQ ID NO: 40382 - DNA, 120 bp, Artificial Sequence
  ENSG00000058729_35 (sequence is synthesized)
aagagaaacgcttgcatctctgtggcctggaaacttctctgatcctgagcttccgaccagctgtgaaaggttgaaatgggcatgaagaaccatgaaattgttcccggcagtttgattgct

SEQ ID NO: 40383 - DNA, 120 bp, Artificial Sequence
  ENSG00000058729_36 (sequence is synthesized)
tatagacttctgtcgattgctttttaactttagtcttgagactgatactttgttagattctagtaaaagaatgtttttttcaaatgatgtgacaaaattgtattctgccaccttgatgta

SEQ ID NO: 40384 - DNA, 120 bp, Artificial Sequence
  ENSG00000058729_37 (sequence is synthesized)
taaaatgaaagccaaataattttttgttgttaaaaactcaaaatagcttccttttcaattgacctgattctaggcagcctattgactaaatttcaagtaattctgccttaaaatacaaac

SEQ ID NO: 40385 - DNA, 87 bp, Artificial Sequence
  ENSG00000058729_38 (sequence is synthesized)
attgactaaatttcaagtaattctgccttaaaatacaaactgatggctgggcacagtggctcgctcatgcctgtaatctcagcactt

SEQ ID NO: 40386 - DNA, 120 bp, Artificial Sequence
  ENSG00000058729_39 (sequence is synthesized)
taccactgcactccagcctgggtgacgagcaaaaaactccgtctcaaaaatatatatatatatacaaactgatgattttaaaattattgcaggtctctggatacattgatcaggttttag

SEQ ID NO: 40387 - DNA, 120 bp, Artificial Sequence
  ENSG00000058729_40 (sequence is synthesized)
ggttttagatggatgagttattcctcatatattttcctaattacacatctgatgtgtgtttgagttatgtaaaggcatgtaaatattaaaacatgcaataaatgtactttctatatgaaa

SEQ ID NO: 40388 - DNA, 120 bp, Artificial Sequence
  ENSG00000058729_41 (sequence is synthesized)
agatggtcagagagttcaaggaggagtccctgctggctctgacgagtatgaagatgaatgccctcatctaattgccttgtcgtcattaaatagagaattcaggcctttcagctgtgtatc

SEQ ID NO: 40389 - DNA, 120 bp, Artificial Sequence
  ENSG00000058729_42 (sequence is synthesized)
atatgaaggtatttattttattttgtagtcatgcattttttagccaaataatacatgtgtctcaaaggccttaatgacaagtgtgattctgttgtccccacatctctctaaccttagact

SEQ ID NO: 40390 - DNA, 120 bp, Artificial Sequence
  ENSG00000058729_43 (sequence is synthesized)
gggagcgtaccaaaagtaagtattttgaggcaccatttgtgatttttcaggtaattggtttccaccagagcaagtgttccaaaagtcaagaagtagaagttgccagactagtaaagcatt

SEQ ID NO: 40391 - DNA, 120 bp, Artificial Sequence
  ENSG00000058729_44 (sequence is synthesized)
agacgaagaactgacagaacacacttcggccatatcctattagtcaaaataatcacagggcacacccagatcaaaggaggtgaaaaaagaatagtagtaagaacatgtaggtactgcaga

SEQ ID NO: 40392 - DNA, 120 bp, Artificial Sequence
  ENSG00000058799_0 (sequence is synthesized)
ccggcaactgggctggaccgaaaccggcgcggagcaactgaggcccgagccttctcgggacccgggggacgcctaaccccgcgagatgaggaaactgaggccgcgaggagcgcgcataca

SEQ ID NO: 40393 - DNA, 120 bp, Artificial Sequence
  ENSG00000058799_1 (sequence is synthesized)
gcagagaagcagcagaatcgggaatcaaacccagctctgtctgaccccagagcctgtgcctttaaccactggctaggctgaactgcctttgttcttcactgtccccatcacctctttcaa

SEQ ID NO: 40394 - DNA, 120 bp, Artificial Sequence
  ENSG00000058799_2 (sequence is synthesized)
acctcagcctctccttcctcatcgttacatctctaggctgcacctgctctctaaacattcacacaaaccctgcaaattttcttcctcataattgggagaagactcactggccgaatggca

SEQ ID NO: 40395 - DNA, 120 bp, Artificial Sequence
  ENSG00000058799_3 (sequence is synthesized)
gcagtagatgacttgcaatttgaagaatttggcaatgcagccacttctctgacagcaaacccagatgccaccacagtaaacattgaggatcctggtgaaaccccaaaacatcagccagga

SEQ ID NO: 40396 - DNA, 120 bp, Artificial Sequence
  ENSG00000058799_4 (sequence is synthesized)
tccccaagaggctcaggaagagaagaagatgatgagttactgggaaatgatgactctgacaaaactgagttacttgctggacagaagaaaagctcccccttctggacatttgaatactac

SEQ ID NO: 40397 - DNA, 120 bp, Artificial Sequence
  ENSG00000058799_5 (sequence is synthesized)
caaacattctttgatgtggacacctaccaggtctttgacagaattaaaggatctcttttgccaatacccgggaaaaactttgtgaggttatatatccgcagcaatccagatctctatggc

SEQ ID NO: 40398 - DNA, 120 bp, Artificial Sequence
  ENSG00000058799_6 (sequence is synthesized)
cccttttggatatgtgccacgttggtctttgccatagcaattagtgggaatctttccaacttcttgatccatctgggagagaagacgtaccattatgtgcccgaattccgaaaagtgtcc

SEQ ID NO: 40399 - DNA, 120 bp, Artificial Sequence
  ENSG00000058799_7 (sequence is synthesized)
gcctatgcctggctggttcctcttgcactctggggtttcctcatgtggagaaacagcaaagttatgaacatcgtctcctattcatttctggagattgtgtgtgtctatggatattccctc

SEQ ID NO: 40400 - DNA, 120 bp, Artificial Sequence
  ENSG00000058799_8 (sequence is synthesized)
ttcatttatatccccaccgcaatactgtggattatcccccagaaagctgttcgttggattctagtcatgattgccctgggcatctcaggatctctcttggcaatgacattttggccagct

SEQ ID NO: 40401 - DNA, 120 bp, Artificial Sequence
  ENSG00000058799_9 (sequence is synthesized)
gttcgtgaggataaccgacgcgttgcattggccacaattgtgacaattgtgttgctccatatgctgctttctgtgggctgcttggcatacttttttgatgcaccagagatggaccatctc

SEQ ID NO: 40402 - DNA, 120 bp, Artificial Sequence
  ENSG00000058799_10 (sequence is synthesized)
ccaacaactacagctactccaaaccaaacagttgctgcagccaagtccagctaatgaggaaattctcttttgttttttggagcatggttctttgggaagtggcatccactgcaggaaagc

SEQ ID NO: 40403 - DNA, 120 bp, Artificial Sequence
  ENSG00000058799_11 (sequence is synthesized)
agaatgagcagagccagcagaactgatggagtggcacaaattcccagtgtctggatggtgccacactggcgcctaatcacccgtttaacaagcagaaattaaatgttgctcagcacatgt

SEQ ID NO: 40404 - DNA, 120 bp, Artificial Sequence
  ENSG00000058799_12 (sequence is synthesized)
gtctttcagctcttccttttcacccatggatgatcattgcgagcatgcgctgattggactgaaatgccagggaataggttaggcatgctcagtgccgtccctttgccaccacagtcaaat

SEQ ID NO: 40405 - DNA, 120 bp, Artificial Sequence
  ENSG00000058799_13 (sequence is synthesized)
gacatgcttcactgtggtaccttaatacctgaaatagaaccatggaaaattctgatgtcctctctctgaattatgtacagactacctgggggatcctcttctctccaaatgttagccatc

SEQ ID NO: 40406 - DNA, 120 bp, Artificial Sequence
  ENSG00000058799_14 (sequence is synthesized)
ctgaagtagccgaacagtagaaactttggtggggattaaccgggagcttgaaaatttgtctttggtaacctgatactggacagctgaactgaatggctgcaaaataaatacctcacatga

SEQ ID NO: 40407 - DNA, 120 bp, Artificial Sequence
  ENSG00000058799_15 (sequence is synthesized)
tccggcaactgggctggaccgaaaccggcgcggagcaactgaggcccgagccttctcgggacccgggggacgcctaaccccgcgaggattgggagaacacttgtgttccagatcacggat

SEQ ID NO: 40408 - DNA, 120 bp, Artificial Sequence
  ENSG00000058799_16 (sequence is synthesized)
ccgaaaccggcgcggagcaactgaggcccgagccttctcgggacccgggggacgcctaaccccgcgagaaccctgcaaattttcttcctcataattgggagaagactcactggccgaatg

SEQ ID NO: 40409 - DNA, 120 bp, Artificial Sequence
  ENSG00000058799_17 (sequence is synthesized)
ggcaatgacagctcagaggtaaatgacacatggcctcttccttggtgggggaaacaggcaaacagaccattactttccttacttgctggacagaagaaaagctcccccttctggacattt

SEQ ID NO: 40410 - DNA, 120 bp, Artificial Sequence
  ENSG00000058804_0 (sequence is synthesized)
ctcctgtacgccctagactaggggccgccatctccatggccacggccgtgagccggccctgcgccggcaggtcgcgggacatactgtggcgcgttttgggctggaggatagttgcaagta

SEQ ID NO: 40411 - DNA, 120 bp, Artificial Sequence
  ENSG00000058804_1 (sequence is synthesized)
ttgtttggtcagtgctatttctacccatctgcaccacagtatttataattttcagcaggattgatttgtttcatcctatacagtggctgtctgattctttcagtgacctgtatagttcct

SEQ ID NO: 40412 - DNA, 120 bp, Artificial Sequence
  ENSG00000058804_2 (sequence is synthesized)
atgtaatcttttacttcctgctgctgtcagtggtaataataataataagtattttcaatgtggagttctatgcagttgtgccttctattccttgctccagactagctctgatagggaaga

SEQ ID NO: 40413 - DNA, 120 bp, Artificial Sequence
  ENSG00000058804_3 (sequence is synthesized)
tcattcatcctcagcaactcatgcactcatttattcatgctgcaatgggaatggtgatggcctggtgtgctgcagtgataacccagggccagtacagctttcttgtggttccctgcactg

SEQ ID NO: 40414 - DNA, 120 bp, Artificial Sequence
  ENSG00000058804_4 (sequence is synthesized)
gtactaacagctttggtagccctgctgcgcaaacctgcttaaatgaatatcatctttttttcctactgactggagcatttatgggctatagctatagcctcctgtattttgttaacaaca

SEQ ID NO: 40415 - DNA, 120 bp, Artificial Sequence
  ENSG00000058804_5 (sequence is synthesized)
tgaactatcttccatttcccatcatacagcaatacaagttcttgcgttttaggagatctctgctcttattagttaaacacagttgtgtggaatcactgttcctggttagaaatttctgca

SEQ ID NO: 40416 - DNA, 120 bp, Artificial Sequence
  ENSG00000058804_6 (sequence is synthesized)
ttttatattattttcttggctatattcccaaagcttggattagcactgctatgaaccttcacatagatgagcaggttcataggccacttgacacagtgagtggcctcttaaatctctcgt

SEQ ID NO: 40417 - DNA, 120 bp, Artificial Sequence
  ENSG00000058804_7 (sequence is synthesized)
tactctaccatgtctggctgtgtggtgtctttctcctgacgacttggtatgtctcatggatactcttcaaaatctatgccacagaggctcatgtgtttcctgttcaaccaccatttgcag

SEQ ID NO: 40418 - DNA, 120 bp, Artificial Sequence
  ENSG00000058804_8 (sequence is synthesized)
aagggtcagatgagtgccttccaaaagtgttaaatagcaatcctccccccatcataaagtatttagccttgcaggacctgatgttgctttctcaatattctccttcacgaagacaagaag

SEQ ID NO: 40419 - DNA, 120 bp, Artificial Sequence
  ENSG00000058804_9 (sequence is synthesized)
ttttcagcctcagccaaccaggtggacatccccacaattggacagccatttcaagggagtgtttgaatcttttaaatggtatgactcagaaactgattctctatcaagaagctgctgcta

SEQ ID NO: 40420 - DNA, 120 bp, Artificial Sequence
  ENSG00000058804_10 (sequence is synthesized)
cgaatgggagagtgtcttcatcttacccagtggaacctaagaaattaaattctccagaagaaactgcttttcagacaccaaaatctagccagatgcctcggccttcagtgccaccattag

SEQ ID NO: 40421 - DNA, 120 bp, Artificial Sequence
  ENSG00000058804_11 (sequence is synthesized)
ttaaaacatcactgttttcttcaaaattatctacacctgatgttgtgagcccatttgggaccccatttggctctagtgtaatgaatcggatggctggaatttttgatgtaaacacctgct

SEQ ID NO: 40422 - DNA, 120 bp, Artificial Sequence
  ENSG00000058804_12 (sequence is synthesized)
atgggtcaccgcaaagtcctcagctaataagaagggggccaagattgtggacatcagcttctgatcagcaaatgactgaattttctaatccttctccatctacctctattagtgctgagg

SEQ ID NO: 40423 - DNA, 120 bp, Artificial Sequence
  ENSG00000058804_13 (sequence is synthesized)
gtaagacaatgagacaacccagtgtgatttattcatggattcagaataaacgtgaacagattaagaatttcttgtcaaaacgggtgctgataatgtattttttcagtaagcacccagagg

SEQ ID NO: 40424 - DNA, 120 bp, Artificial Sequence
  ENSG00000058804_14 (sequence is synthesized)
cctccattcaggctgttttttcagatgcccaaatgcatatttgggcattagaaggtctgtcgcacttagtagcagcatcatttacagaggatagatttggagttgtccagacgacactac

SEQ ID NO: 40425 - DNA, 120 bp, Artificial Sequence
  ENSG00000058804_15 (sequence is synthesized)
cagctatccttaatactttgttgacactgcaagaggcagtcgacaagtactttaagcttcctcatgcttccagtaaaccaccccggatttcaggaagccttgtggacacttcatataaaa

SEQ ID NO: 40426 - DNA, 120 bp, Artificial Sequence
  ENSG00000058804_16 (sequence is synthesized)
cattaagatttgcattcagagcatcactgaaaactgccatctatcgaataactactacatttggtgaacatctgaatgctgtgcaagcatctgcagaacatcagaaaagacttcaacagt

SEQ ID NO: 40427 - DNA, 120 bp, Artificial Sequence
  ENSG00000058804_17 (sequence is synthesized)
tcttggagttcaaagaatagttaagtaatataaactgtgttcattacactgctgatacaactacagatgggacagtaaatgttcagcattcttggatcagaagaaaacggactaattaga

SEQ ID NO: 40428 - DNA, 120 bp, Artificial Sequence
  ENSG00000058804_18 (sequence is synthesized)
ttgtgtgtgtggtataataaaatctttattcaattttacagaagcattgatggcagtcgaaatgtctctagctcatataacttaatagtaataactaaaaaacttttagaatttactttt

SEQ ID NO: 40429 - DNA, 120 bp, Artificial Sequence
  ENSG00000058804_19 (sequence is synthesized)
gaaaggagggaagccagttctgaaatgagtataggttgatttcatagtcttcttaattaagagtttagctctttgtaaactcaaaatacataaactttttaagtgtagtttcatttactg

SEQ ID NO: 40430 - DNA, 120 bp, Artificial Sequence
  ENSG00000058804_20 (sequence is synthesized)
aaggataaaaatggtaacagtgcagcaatattcacaaaaaatattgtctaacggacatattttgttaatctgttaggttgggtttttgtttccagggacaaattaaatttgtatgattac

SEQ ID NO: 40431 - DNA, 120 bp, Artificial Sequence
  ENSG00000058804_21 (sequence is synthesized)
ccaaaaaagggtctcagtttacagatgctaactctatataaaggaatgtggaaaaactcagttcttaagttacaagattaaaaattcacatttggtctttaagaaacaattgactgacat

SEQ ID NO: 40432 - DNA, 120 bp, Artificial Sequence
  ENSG00000058804_22 (sequence is synthesized)
ctatgaatttattttgtatcatgctagtaaacacgaagtattaatgtatgggtattttcccagctagttttgctttctttttctggagcaaaacattaagtgattgcagagtttttcaag

SEQ ID NO: 40433 - DNA, 120 bp, Artificial Sequence
  ENSG00000058804_23 (sequence is synthesized)
caagagaaaaaggtttgcaaaaaaacccaggaaatgttcccttttttccccaccattcatcttcattagatcaaattctgtgaaacttgtctggtctctcaaagggagcagcctctgtag

SEQ ID NO: 40434 - DNA, 120 bp, Artificial Sequence
  ENSG00000058804_24 (sequence is synthesized)
tgttaaatggctaattaaaataggaagatctttatagccagaaacaacttagtcatcaaatagcaagtgaaaccaaaacgtcagagggattactgtacttggaagtatgttgtgtgtccc

SEQ ID NO: 40435 - DNA, 120 bp, Artificial Sequence
  ENSG00000058804_25 (sequence is synthesized)
aaatgtgaacgaagtattgttagaatttattagatcagcttctttggagatcaaagattggaaatcctagtcatagatattcactggactggctttggactgaaatgctcctttgtaatt

SEQ ID NO: 40436 - DNA, 120 bp, Artificial Sequence
  ENSG00000058804_26 (sequence is synthesized)
cttttcctattgtcttttccttctagtgtcccaaaatattttctttaaagtcagcacagtactgtatatgaatctttaatgtggtatcatatatgtctacttttgtctgattcatcgatg

SEQ ID NO: 40437 - DNA, 120 bp, Artificial Sequence
  ENSG00000058804_27 (sequence is synthesized)
tattatatctttataattgaatattttagctccgggtcctgttgccccttcaagcagtacatgccaaattataaataggtgctactggccttgagcatatcactgtgggacagttcccca

SEQ ID NO: 40438 - DNA, 120 bp, Artificial Sequence
  ENSG00000058804_28 (sequence is synthesized)
attgtcaagtgtttagatatgtagactattgccatttgtttttttgttttggttttgctttgtgtctgaagctgaattgatttcttttttttgaatgtgaaagttgaatttcaaacgtag

SEQ ID NO: 40439 - DNA, 120 bp, Artificial Sequence
  ENSG00000058804_29 (sequence is synthesized)
tcatttcttacagatggccaagacagaaaattgtggctaggttgactgagaactgttgtcttccatgtattaacacaattaagctttttatattccactctctgtgctgaccctggctga

SEQ ID NO: 40440 - DNA, 120 bp, Artificial Sequence
  ENSG00000058804_30 (sequence is synthesized)
ggcattttgggagacaaggactctgaatcttctgcttccattaaagaagaactgtgatattcaacattggatttctgagaataaagataggatgattcctttgaactttgacttacttgt

SEQ ID NO: 40441 - DNA, 120 bp, Artificial Sequence
  ENSG00000058804_31 (sequence is synthesized)
ataaaatgtccagctaggttaggtttttgccatttcctatatactttgggtaaagctacatttgatgagcaatgtgaatgtttctgagaatgttcattcctgttttctcttaagagaatg

SEQ ID NO: 40442 - DNA, 120 bp, Artificial Sequence
  ENSG00000058804_32 (sequence is synthesized)
tgctgtgtactaaatacaggccacatagtgtctgcctgttgaagatctggaaactgcctccccagatctgtattgtatttggtaggtaagggggtcagtttctttttctcattgtgtgtt

SEQ ID NO: 40443 - DNA, 120 bp, Artificial Sequence
  ENSG00000058804_33 (sequence is synthesized)
gataatctacacaccatctgttggaaccagggtgttattatggggaactcctcctgtgtactaggaggaggaccttagggagaccaagaggagagaagcatttcctttgatgaagtcaca

SEQ ID NO: 40444 - DNA, 120 bp, Artificial Sequence
  ENSG00000058804_34 (sequence is synthesized)
tcctgtctatgagcccactaatgctgtaacattggcctgaaagagagtgttctttaaaagcctttctcggctgttagtataaaaacatgatggtatcagctcttagcatgtttgcttgac

SEQ ID NO: 40445 - DNA, 120 bp, Artificial Sequence
  ENSG00000058804_35 (sequence is synthesized)
ccttatggaaggtataaatccacagaacttccttcccagagaactgggaaattgtcctagaaataaaccttgtacagttgagtggacatggataagcaacaatttgttactttgcaggat

SEQ ID NO: 40446 - DNA, 120 bp, Artificial Sequence
  ENSG00000058804_36 (sequence is synthesized)
ttgttccttggtaattgtttggtgtgtcatcctgtaaatattcatgatagtctgtttatatccttttgtatatcgttgatactggattgggtagaaaaataaattggcaatttaaaaaaa

SEQ ID NO: 40447 - DNA, 120 bp, Artificial Sequence
  ENSG00000058804_37 (sequence is synthesized)
cgtgtctgcgcggcagtcctggcctgttgagcttgtccagacgaagcctcgcagggatgggttggagcctgggccgggcttcgctcaggcagcgtttgaggcagacccagcagggtcctc

SEQ ID NO: 40448 - DNA, 120 bp, Artificial Sequence
  ENSG00000058804_38 (sequence is synthesized)
ctggggccttcctgcctttgaactgcggtggcgggcgggcgcacggtctcctgtacgccctagactaggggccgccatctccatggccacggccgtgagccggccctgcgccggcaggtc

SEQ ID NO: 40449 - DNA, 120 bp, Artificial Sequence
  ENSG00000058866_0 (sequence is synthesized)
gcagtgccgtagtagcgggccacggagatagacagctttggagctgctgaactccgagcacagggtgaagaccccggcgctaccaaccacagcctggcagcctggtctccgcggcaccca

SEQ ID NO: 40450 - DNA, 120 bp, Artificial Sequence
  ENSG00000058866_1 (sequence is synthesized)
ctggggctgcatccccctcccccgagagggctgcgcaggcgggaagacgcccagaggccagcttcggtcccccttctgtctctcggttcctctttcctcccaagtaagggaataaaccgc

SEQ ID NO: 40451 - DNA, 120 bp, Artificial Sequence
  ENSG00000058866_2 (sequence is synthesized)
gaagaaggagcgccccgggccaccgcgcaaccaagtgttgcctggtgaggaagagccaggacttctgaatttaccttgaatacagacaggaggatgttgcctaaggaatagcagagatct

SEQ ID NO: 40452 - DNA, 120 bp, Artificial Sequence
  ENSG00000058866_3 (sequence is synthesized)
tgtctcatcttctgagaggtgcctgctgctgctgtatacacttgagtgctcccagaagtctcctgaaaggcttacatcgcaaacctgcaatgagccaggccctgggctgggcctccactt

SEQ ID NO: 40453 - DNA, 120 bp, Artificial Sequence
  ENSG00000058866_4 (sequence is synthesized)
cagcctagtgaacaaaactccatcactgccctttagccactcacataaagtttaaaaatgggtgaagaacggtgggtctccctcactccagaagaatttgaccaactccagaaatattca

SEQ ID NO: 40454 - DNA, 120 bp, Artificial Sequence
  ENSG00000058866_5 (sequence is synthesized)
gaatattcctccaagaagataaaagatgccttgactgaatttaatgagggtgggagcctcaaacaatatgacccacatgagccgattagctatgatgtcttcaagctgttcatgagggcg

SEQ ID NO: 40455 - DNA, 120 bp, Artificial Sequence
  ENSG00000058866_6 (sequence is synthesized)
tacctggaggtggaccttccccagccactgagcactcacctcttcctggccttcagccagaagcccagacacgagacctctgaccacccgacggagggagccagcaacagtgaggccaac

SEQ ID NO: 40456 - DNA, 120 bp, Artificial Sequence
  ENSG00000058866_7 (sequence is synthesized)
agcgcagatactaatatacagaatgcagataatgccaccaaagcagacgaggcctgtgcccctgatactgaatcaaatatggctgagaagcaagcaccagctgaagaccaagtggctgcg

SEQ ID NO: 40457 - DNA, 120 bp, Artificial Sequence
  ENSG00000058866_8 (sequence is synthesized)
acccccctggaaccccccgtccctcggtcttcaagctcggaatccccagtggtatacctgaaggatgttgtgtgctacctgtccctgctggagacggggaggcctcaggataagctggag

SEQ ID NO: 40458 - DNA, 120 bp, Artificial Sequence
  ENSG00000058866_9 (sequence is synthesized)
ttcatgtttcgcctctatgattcagatgagaacggtctcctggaccaagcggagatggattgcattgtcaaccaaatgctgcatattgcccagtacctggagtgggatcccacagagctg

SEQ ID NO: 40459 - DNA, 120 bp, Artificial Sequence
  ENSG00000058866_10 (sequence is synthesized)
aggcctatattgaaggagatgctgcaagggatggactacgaccgggacggctttgtgtctctacaggaatgggtccatggagggatgaccaccatcccattgctggtcctcctggggatg

SEQ ID NO: 40460 - DNA, 120 bp, Artificial Sequence
  ENSG00000058866_11 (sequence is synthesized)
gatgactctggctccaagggggatgggcggcacgcctggaccatgaagcacttcaagaaaccaacctactgcaacttctgccatatcatgctcatgggcgtccgcaagcaaggcctgtgc

SEQ ID NO: 40461 - DNA, 120 bp, Artificial Sequence
  ENSG00000058866_12 (sequence is synthesized)
tgcacttactgtaaatacactgtccacgaacgctgtgtgtccagaaacattcctggttgtgtcaaaacgtactcaaaagccaaaaggagtggtgaggtgatgcagcacgcatgggtggaa

SEQ ID NO: 40462 - DNA, 120 bp, Artificial Sequence
  ENSG00000058866_13 (sequence is synthesized)
gggaactcctccgtcaagtgtgaccggtgccacaaaagtatcaagtgctaccagagtgtcaccgcgcggcactgcgtgtggtgccggatgacgtttcaccgcaaatgtgaattatcaacg

SEQ ID NO: 40463 - DNA, 120 bp, Artificial Sequence
  ENSG00000058866_14 (sequence is synthesized)
ttgtgtgacggtggggaactcagagaccacatcttactgcccacctccatatgccccatcacccgggacaggccaggtgagaagtctgatggctgcgtgtccgccaagggcgaacttgtc

SEQ ID NO: 40464 - DNA, 120 bp, Artificial Sequence
  ENSG00000058866_15 (sequence is synthesized)
atgcagtataagatcatccccaccccgggtacccaccccctgctggtcttggtgaaccccaagagtggagggagacaaggagaaagaattcttcggaaattccactatctgctcaacccc

SEQ ID NO: 40465 - DNA, 120 bp, Artificial Sequence
  ENSG00000058866_16 (sequence is synthesized)
aaacaagttttcaacctggacaatggggggcctactccagggttgaactttttccgtgatactccagacttccgtgttttggcctgtggtggagatgggacagttggctggattttggat

SEQ ID NO: 40466 - DNA, 120 bp, Artificial Sequence
  ENSG00000058866_17 (sequence is synthesized)
tgcattgataaggccaactttgcaaagcatccaccagtggctgtcctgcctcttggaacaggaaatgaccttgcccgttgtctccgctggggaggaggttatgaagggggcagcttgaca

SEQ ID NO: 40467 - DNA, 120 bp, Artificial Sequence
  ENSG00000058866_18 (sequence is synthesized)
aaaatcctgaaagacattgagcagagccccttggtgatgctggaccgctggcatctggaagtcatccccagagaggaagtggaaaacggggaccaggtcccatacagcatcatgaacaac

SEQ ID NO: 40468 - DNA, 120 bp, Artificial Sequence
  ENSG00000058866_19 (sequence is synthesized)
tatttctccattggtgtggacgcttccattgcacacagattccatgtgatgagagagaaacatcctgaaaaattcaacagcaggatgaagaacaagctgtggtactttgaatttggcacc

SEQ ID NO: 40469 - DNA, 120 bp, Artificial Sequence
  ENSG00000058866_20 (sequence is synthesized)
tcggagacttttgcagcgacctgcaagaaactccacgaccacattgagttggagtgtgatggggttggggtggacctgagcaacatcttcctggaaggcattgccattctcaacattccc

SEQ ID NO: 40470 - DNA, 120 bp, Artificial Sequence
  ENSG00000058866_21 (sequence is synthesized)
agcatgtacggaggcaccaatctctggggagaaaacaagaagaaccgggctgtgatccgggaaagcaggaagggtgtcactgaccccaaagaactgaaattctgcgttcaagacctcagt

SEQ ID NO: 40471 - DNA, 120 bp, Artificial Sequence
  ENSG00000058866_22 (sequence is synthesized)
gaccagctccttgaagtggtggggctagaaggagccatggagatggggcagatctacaccggcctgaagagtgcaggcaggaggctggcccagtgcgcctctgtcaccatcaggacaaac

SEQ ID NO: 40472 - DNA, 120 bp, Artificial Sequence
  ENSG00000058866_23 (sequence is synthesized)
aagctgctgccaatgcaagtggatggagaaccctggatgcagccatgttgcacgattaaaattactcacaagaaccaagcgcccatgatgatggggcctccccagaagagcagcttcttc

SEQ ID NO: 40473 - DNA, 120 bp, Artificial Sequence
  ENSG00000058866_24 (sequence is synthesized)
caaacaccagctaaaccaagagagaaagcaagaaactataatgcacactcacacacaatttatgtgcacactcacacatgcacacacacacacacatacacactcttctctaaccagtgg

SEQ ID NO: 40474 - DNA, 120 bp, Artificial Sequence
  ENSG00000058866_25 (sequence is synthesized)
aagcaaagccacccttcgggaagaaaacgtcaccttgccatacattctgtttcaacagtgggtacacccctaacagagccagtgccaacaaaacattttgaatggacttagggcccatga

SEQ ID NO: 40475 - DNA, 120 bp, Artificial Sequence
  ENSG00000058866_26 (sequence is synthesized)
ggttgtggctggcttaggcagcaacctccacattcccacaggccttgagcagaattttctgagactgaagggaaatccccctttctttctaccagccctgcaagtttcctcatggacgct

SEQ ID NO: 40476 - DNA, 120 bp, Artificial Sequence
  ENSG00000058866_27 (sequence is synthesized)
cgcgaggagcaggctgcaggtttcctgcctatggtgagatcagatgtggccaagggaaggagctctggttccagagaatttgcacaaagttccctctgtacagagacaaaacggcctccg

SEQ ID NO: 40477 - DNA, 120 bp, Artificial Sequence
  ENSG00000058866_28 (sequence is synthesized)
gctctcagagcataatccttggcagggctcagcaggcgcacgttggtttcttggtcgtcctttgagtgacaacttctccgtgaacctgctgaagaggcagaaaggctgtggaaagctgta

SEQ ID NO: 40478 - DNA, 120 bp, Artificial Sequence
  ENSG00000058866_29 (sequence is synthesized)
tttccattcttgggtttctgcgccgtcggtgggcacttgttattttccaggaaccttctcctggtgtctacatgtttgcttagaggcggctccaagagcccccagagctgcctgcatagc

SEQ ID NO: 40479 - DNA, 120 bp, Artificial Sequence
  ENSG00000058866_30 (sequence is synthesized)
acaccttagatgtggtatttattttcttagttctgtgaacacctgggagggagagcggagaaactgggatttatttttcaaattggtgtcataatattgtgtaaaaagggaaggaaaaaa

SEQ ID NO: 40480 - DNA, 120 bp, Artificial Sequence
  ENSG00000058866_31 (sequence is synthesized)
aaaaccacccccagcttctttctttttcaagccaaagcgtgtttcctgtttgagttccaagccctggtggcagactattcctgaaggcagaaaagatgggaaggaaggaactttgctggg

SEQ ID NO: 40481 - DNA, 120 bp, Artificial Sequence
  ENSG00000058866_32 (sequence is synthesized)
gaaaccaggagacggttccctcctgcttctttgcactcaccactcccagagtatgacctgaaggaccttctgatggtcttaacgtgtgtgcgcgcgtgtgtgtgtgtgtgtgcgtgtata

SEQ ID NO: 40482 - DNA, 120 bp, Artificial Sequence
  ENSG00000058866_33 (sequence is synthesized)
tttagcctatatatttatatatatatatatataaatatttatttactgatggacttttcctcattggaaaaaaaaaacataggtagtatgagacagaaagtggtaaggaaaaagaaggtt

SEQ ID NO: 40483 - DNA, 120 bp, Artificial Sequence
  ENSG00000058866_34 (sequence is synthesized)
agaaggttctcactcccccactccaccgtttcattgtcaggacgcatctccctgtggtgatcacaagggttaaggggaatgaaagtagctccctattatgaacgaagagaccgagaactc

SEQ ID NO: 40484 - DNA, 120 bp, Artificial Sequence
  ENSG00000058866_35 (sequence is synthesized)
ctattctggatcctcaaaacaagcatgaaagacctgctgggctggatttactctcccatttgtcagataagaaaattgagtctcagaaaagttcagagacttttccatggtgtcttggct

SEQ ID NO: 40485 - DNA, 120 bp, Artificial Sequence
  ENSG00000058866_36 (sequence is synthesized)
aatgcagcttgagagtaggtgccgttacaaagatatttaatggagaaaagaacccacacatctcagagtagggtcatttctggtcactgaaaagtgagtccacttggatccaggttgcca

SEQ ID NO: 40486 - DNA, 120 bp, Artificial Sequence
  ENSG00000058866_37 (sequence is synthesized)
gggaggaacaaacgtacagcacatgcgtggatgggatatccccacacaagaaaacgagcgcctcatgctgcttcccagaggttctctctgacctgaatggaaaagaagttggtctgagat

SEQ ID NO: 40487 - DNA, 120 bp, Artificial Sequence
  ENSG00000058866_38 (sequence is synthesized)
cgaaggtactaaacagatcatcagactgaactctccacatgtcacctcatcatggtcatcatagtctcttagtttggaaacaaccttggctgcagggatgacctcagtggagagtcacaa

SEQ ID NO: 40488 - DNA, 120 bp, Artificial Sequence
  ENSG00000058866_39 (sequence is synthesized)
gaaggactgaggcgtcttctgcaagatactgccagccaggacagaggggtctcagcagagctcagtgggcttcattcagcaagtgccagcattaccatcctttcccaagggcaaggccat

SEQ ID NO: 40489 - DNA, 120 bp, Artificial Sequence
  ENSG00000058866_40 (sequence is synthesized)
gcagagcttcattgggcctccatccctctctgagatttatcagtggaaacttggacccacttgatatcgttccactgagctgcctctaatcttgcattggacaggagctttggacaaaga

SEQ ID NO: 40490 - DNA, 120 bp, Artificial Sequence
  ENSG00000058866_41 (sequence is synthesized)
agggaatattaagattgtgtgtacaaatggcacttaactgtgaaggaccacctaggagcaagatcttggaccattctgctcaacctaacagtgcagaatgctaagtaaggggaaaaccag

SEQ ID NO: 40491 - DNA, 120 bp, Artificial Sequence
  ENSG00000058866_42 (sequence is synthesized)
gccacctgaagaatatctttaatgatggtattcttggtgatgggaccaacaagctccagaattactacaggtactatcttggaagccacttgtttctgaaactgaggcaggttcaggttt

SEQ ID NO: 40492 - DNA, 120 bp, Artificial Sequence
  ENSG00000058866_43 (sequence is synthesized)
ggggtcactgattctaagacatttacagaagttcgtgcatgtgtttcagccatgatccccaagattgaggctattgagacatggcactatcaacaggtgaaattgattctcagagactca

SEQ ID NO: 40493 - DNA, 120 bp, Artificial Sequence
  ENSG00000058866_44 (sequence is synthesized)
caggtctcatgaaggggcagtgcagaaaatggcccttacctgctgcaccctagtgcacaggacttgcaatgttgcttgagagacatatcccaagtccttcttagaggcatggagtataac

SEQ ID NO: 40494 - DNA, 120 bp, Artificial Sequence
  ENSG00000058866_45 (sequence is synthesized)
aacttcagtggaattgcacttccagtttggtaaccttagtaaatcttgtgttgttgtttaatcgtgccttgcaaatcatcctttaaacactatgactgtggtttcttgtggtggagtccc

SEQ ID NO: 40495 - DNA, 120 bp, Artificial Sequence
  ENSG00000058866_46 (sequence is synthesized)
tcatcatagtgaccctcatagcaacctctgaggttagcagagaaggtattattatctcgatctcaatgaggagaacaaggcttaatgaggtttagtgacttctcaaagccacatggttag

SEQ ID NO: 40496 - DNA, 120 bp, Artificial Sequence
  ENSG00000058866_47 (sequence is synthesized)
tcaggggagaacctaatcccttatttcttatcttattctgattctggccatgctacaaacatgttctcacctgccccccatgcttctaccccaacagcaataaaaactgtaaagcaggaa

SEQ ID NO: 40497 - DNA, 120 bp, Artificial Sequence
  ENSG00000058866_48 (sequence is synthesized)
caaagtggtattagagacgctgaaagcaccatggacgggttttatgatcagcaagtcccttttatggtcccagggaaatctcgatctgaggaatgcagagggcggcctgtgattgacaga

SEQ ID NO: 40498 - DNA, 120 bp, Artificial Sequence
  ENSG00000058866_49 (sequence is synthesized)
gaaacagaggagataacaaaaggaatcaaaatcatggtacctgagctgagacacacacagtaaccctccatgcaagagaaactggcctcgagctgagagatggatcccaagttgctacag

SEQ ID NO: 40499 - DNA, 120 bp, Artificial Sequence
  ENSG00000058866_50 (sequence is synthesized)
gactctgtaagtcaacaagctggagttcagagatctcttgccattcaggaacattgggcttcatgttaatatcaacatatcactttggcttctgctccagactgcccaacagacgtgcca

SEQ ID NO: 40500 - DNA, 120 bp, Artificial Sequence
  ENSG00000058866_51 (sequence is synthesized)
ccagccccaaagtcctctctatttacattattttgtatccattagtgcctgaagtatattcatttgacagacatttactacattattactactttaaaaatactgttctgcatgctgtga

SEQ ID NO: 40501 - DNA, 120 bp, Artificial Sequence
  ENSG00000058866_52 (sequence is synthesized)
gggaatacagacacattatctgcctgcaagaaccttatactcaaccaggcaaagggccacaaacttcaaagaagaattctgtcttttcaacaaattaggtttaaaaatgctaagagaatt

SEQ ID NO: 40502 - DNA, 120 bp, Artificial Sequence
  ENSG00000058866_53 (sequence is synthesized)
ggggaaggaagggtgagaggaaagaacgaagggagagaggaaaaaatacggatctgttgtgggggtggcttccattagtggtatcttatttaataatcaaaacaaccagataaggtaaat

SEQ ID NO: 40503 - DNA, 120 bp, Artificial Sequence
  ENSG00000058866_54 (sequence is synthesized)
atttttatcccaatttatacagatggaaaactgaggttctgaccctaaggagcaaaaggaggagtgaggatttgtctctgacaccaaagatgttgcactttgtaatatcccacacatgag

SEQ ID NO: 40504 - DNA, 120 bp, Artificial Sequence
  ENSG00000058866_55 (sequence is synthesized)
agttaggccagtgggaagaaaccttggaaggtgttgacttgtccctgaagaatgcatgagattttgatgtcccattcttgagaataaagagcaggtggccttaaagacctagagagagtt

SEQ ID NO: 40505 - DNA, 120 bp, Artificial Sequence
  ENSG00000058866_56 (sequence is synthesized)
ggagactccgcttgccttgaagaacttgctcctcagcatgtttcctcttaagtctcaagtgagccatttgtgctacctggcattatatgtttcccaagcccatacactcattccactgtc

SEQ ID NO: 40506 - DNA, 120 bp, Artificial Sequence
  ENSG00000058866_57 (sequence is synthesized)
acgaccacattgagttggagtggtgctaagtgcctcatggaatctgcaaagcagccctaagtggcaggtgtcataatcacctttccagagaagggggacacaggctgagagaagtgtgat

SEQ ID NO: 40507 - DNA, 120 bp, Artificial Sequence
  ENSG00000058866_58 (sequence is synthesized)
cttgccaatctttgagatggggatgagaagccttatttttgagcccttttgggcactgacttaatatgaaatcactgaatctcagagtcacagggactgtggaagattatctagtgcaac

SEQ ID NO: 40508 - DNA, 120 bp, Artificial Sequence
  ENSG00000058866_59 (sequence is synthesized)
ccctcttccactttattatccatccactcatttacctggcaactcttaatgaaaacctgctatatgccagacactgtgaagcgccggtcacaaaattgaatgagacatagaaccaacttc

SEQ ID NO: 40509 - DNA, 120 bp, Artificial Sequence
  ENSG00000058866_60 (sequence is synthesized)
gaggagttcacagttctagtcagtgaattctgagacttcatctactgtatcctggacagcctcagcttgaatcatgtcaatggcaaggaatttactacctcaaaaggaagactgttctgc

SEQ ID NO: 40510 - DNA, 120 bp, Artificial Sequence
  ENSG00000058866_61 (sequence is synthesized)
ttacctagaatttggtagggtagcgcctttgactgctggagctcccgggagaaaattcctcgcagagcacagacatgcctcccagtcggtgcacccaaagccctgataacctacttgaaa

SEQ ID NO: 40511 - DNA, 120 bp, Artificial Sequence
  ENSG00000058866_62 (sequence is synthesized)
attccactgaatgagtcaccacgcaggttatctattttgtttatggcactgtcacccagaacgtagaacagtgcctggtttgtaatagttgcacaataatacatgtcaaatgatgaataa

SEQ ID NO: 40512 - DNA, 120 bp, Artificial Sequence
  ENSG00000058866_63 (sequence is synthesized)
aagactgaacaaatgaactaacaaaaatagactatctccattcccagacttaccatatccgttagctctccctttagcactaggacaggagccatgcatccttccttcttagtttgtcct

SEQ ID NO: 40513 - DNA, 120 bp, Artificial Sequence
  ENSG00000058866_64 (sequence is synthesized)
cagttagaaatgcagctagaatctcgtggtgaagagcaatcgtcgtcctggttttcagggcctctgctgggatactacatgcgtaataccctcaataagattgcagctatgcaaatttca

SEQ ID NO: 40514 - DNA, 120 bp, Artificial Sequence
  ENSG00000058866_65 (sequence is synthesized)
aaagacaaaagtggagtttctaagcttcctcactctagtggagtattcagatactttgatcacctgctattttgagccctccagaacatcaaattgtcttctactaaaggaaggtttcca

SEQ ID NO: 40515 - DNA, 120 bp, Artificial Sequence
  ENSG00000058866_66 (sequence is synthesized)
tgaacctgctgagaaaaggtagcatcttctataaaggttatcaaaaacagaaatttctctgcaaaaatcttacctcaatcttatgaagaccaagaaaaaaatgaaaacacactatatcaa

SEQ ID NO: 40516 - DNA, 120 bp, Artificial Sequence
  ENSG00000058866_67 (sequence is synthesized)
ataatagctttccaccttgctggagttaggacgcatagagggaatttctactatttatcatttgatggaactgagttgagaagaatctatccaagttccttttatctccaacccccctac

SEQ ID NO: 40517 - DNA, 120 bp, Artificial Sequence
  ENSG00000058866_68 (sequence is synthesized)
aaaaaaaaaggtggaagaaatcaaaccctctcctacctggttcagtcctagctgaaaactggattgctattcctataaattcaagcactggattttgaaatagccaaatgcttctcccta

SEQ ID NO: 40518 - DNA, 120 bp, Artificial Sequence
  ENSG00000058866_69 (sequence is synthesized)
tgcccacacccacccttcctccataccaccctttagagattacaactcactatgaaaaaatttgtgaaccaatgatttcatagtgtgaggcccagaaatccgtatgtaaaggtatattcg

SEQ ID NO: 40519 - DNA, 78 bp, Artificial Sequence
  ENSG00000058866_70 (sequence is synthesized)
tagtgtgaggcccagaaatccgtatgtaaaggtatattcgtctgctttgagtgccataatagaataccacagactgac

SEQ ID NO: 40520 - DNA, 120 bp, Artificial Sequence
  ENSG00000058866_71 (sequence is synthesized)
gggaggcctctcttcctaacttccaacggctgccttcttgttgtatcctcacatggcttttcctctgtgtttgtacactcttttctcttcttataaggacaccagttctaagggattatg

SEQ ID NO: 40521 - DNA, 120 bp, Artificial Sequence
  ENSG00000058866_72 (sequence is synthesized)
gcccccccgccccttgtgacctcatttatccgttattacctccttaaaggccctacctacaaatatagtcacactgggggttaggaattcaacatatgaatttgggggggacacaattta

SEQ ID NO: 40522 - DNA, 120 bp, Artificial Sequence
  ENSG00000058866_73 (sequence is synthesized)
ttccataacagaaggtaacagaaaatcattcttaaacttgcaagggttaaaacccatgtaccccttgttgaaacatcttcttgaaggtatacaccaactaagaagtgattcaaaattaaa

SEQ ID NO: 40523 - DNA, 120 bp, Artificial Sequence
  ENSG00000058866_74 (sequence is synthesized)
gccttaagaatggactatcacagcccaaaagaacttttggtaaaaatggaaaccagtgaaattagaatgaagtttccaaaaacctgctaaatatgtttatgcaataaatgcaaatggcaa

SEQ ID NO: 40524 - DNA, 120 bp, Artificial Sequence
  ENSG00000058866_75 (sequence is synthesized)
aaaatcattctttgaaagagaagacatatcatgtaaatattaataacctgtatcccaaacctgagattatattaacaaaggccaaaaacatgcaggagacactgctgaaggaatagtaaa

SEQ ID NO: 40525 - DNA, 120 bp, Artificial Sequence
  ENSG00000058866_76 (sequence is synthesized)
gatatgtgaagtttctcattgtctctcttcactttgatgacaaaacgtataaatcagaagataattttaataggtagacaatcactagcgaaactaaaaatagggtgcacacctttcaaa

SEQ ID NO: 40526 - DNA, 120 bp, Artificial Sequence
  ENSG00000058866_77 (sequence is synthesized)
tctggaagaatttaaaatatataaaccctattaatgtagcacaggatagaaagcaaaaaataagccaacatttaaaaattttttgaagcaagttgaatgatgttaagactgtatatatat

SEQ ID NO: 40527 - DNA, 120 bp, Artificial Sequence
  ENSG00000058866_78 (sequence is synthesized)
tataaaagaaaaatagatgagttaaaattccctattaaaagatcaatactctcatattgagttaaaaatgaaaatccaaatatatgcttcttacaaaagatacatctaaaatgaaaggtt

SEQ ID NO: 40528 - DNA, 120 bp, Artificial Sequence
  ENSG00000058866_79 (sequence is synthesized)
atacatacgtatatataatatatatcttattttatcctttatcaggtataaagaaattaaaaggaagacatagtaatgttaattatgctaattttaggcaaactaacctttccatgtgcc

SEQ ID NO: 40529 - DNA, 120 bp, Artificial Sequence
  ENSG00000058866_80 (sequence is synthesized)
catgtgcctaaagcataaagcagaataagtaaacacattttttatttgataaaaagtacattcaattatgagatatagtggtcataaaatgttagatatttaataacagaatcaaaatat

SEQ ID NO: 40530 - DNA, 120 bp, Artificial Sequence
  ENSG00000058866_81 (sequence is synthesized)
ataaaaaactatcaatacatattctgagaaaaggttgatatagaattgacagacagatattgagaagcttgaaaatatttgtttccatctttgaggttaagtagcaaaaaaataaatgct

SEQ ID NO: 40531 - DNA, 120 bp, Artificial Sequence
  ENSG00000058866_82 (sequence is synthesized)
tggatgaaataactctataactcataaagaaattaaatatcatatttgttcaggcattcatatttattaaactagatcataaactagtttacaaggcaaaaagctccataaaatccagtt

SEQ ID NO: 40532 - DNA, 120 bp, Artificial Sequence
  ENSG00000058866_83 (sequence is synthesized)
gcagaaattataaaggtcattttctttgaccacaaagtaataaagctagaaattactaatagaagattaagtgaataaacaaaatttagtcacttggagacttaaaaattctcctaaaca

SEQ ID NO: 40533 - DNA, 120 bp, Artificial Sequence
  ENSG00000058866_84 (sequence is synthesized)
acaagagatttatgaggagatcaaagccaccatggtagattactcaaaaaattacaaaaataagaaggctccagtttaaaaattatagaatatagcctaaactatatttggaagtaaatt

SEQ ID NO: 40534 - DNA, 120 bp, Artificial Sequence
  ENSG00000058866_85 (sequence is synthesized)
aaaagcctcataatcttccatcatataaaaaagaagtaaaatgtaatgaataatactaaaattagaagagcaataataaaacaatcttaggagaagcagaaggaagaaaataataaagat

SEQ ID NO: 40535 - DNA, 120 bp, Artificial Sequence
  ENSG00000058866_86 (sequence is synthesized)
agaccacatcttactgcccacctccatatgccccatcacccgggtaagtgctcctgccccggcgagggctgtagcttctccgggttctggtttcagatgtaggcagctttcagacattca

SEQ ID NO: 40536 - DNA, 120 bp, Artificial Sequence
  ENSG00000058866_87 (sequence is synthesized)
cattcaaactggagacacttagctacttagcccctccgaaaattcagccagtggaaaaacacctgactgcctgccctcctgcttctcatctgcctctccgaagctgtcttggcttcaact

SEQ ID NO: 40537 - DNA, 120 bp, Artificial Sequence
  ENSG00000059122_0 (sequence is synthesized)
gtcggggctgggagctggtgcccgggtcggggtggcggcggcggcctgggtcgcggggtcgacgctcgctgctgcagcggcagaggctgaaggatccgccgcggcgctgtcgcgggagag

SEQ ID NO: 40538 - DNA, 120 bp, Artificial Sequence
  ENSG00000059122_1 (sequence is synthesized)
cgctgtcgcgggagagggagggccccgctgccgtcggtgaaaccagcccagagaagttacgggatttgcccccggggctcctgcccagcaagccagcgccgtgacccaggtgtgggggat

SEQ ID NO: 40539 - DNA, 120 bp, Artificial Sequence
  ENSG00000059122_2 (sequence is synthesized)
gatggtgacgcttctcactcacgtgtgaaggacggaaccactgcactccaggttccttgctgggtgctgagcgtggcctgagggacaggccctgggtcccgggatgcccctgcccgagcc

SEQ ID NO: 40540 - DNA, 120 bp, Artificial Sequence
  ENSG00000059122_3 (sequence is synthesized)
cagcgagcaggagggcgagagtgtgaaggccggccaggagccatcccccaagccaggcacggacgtcatcccggcagcccccaggaagcccagggagttctccaaactggtgctgctcac

SEQ ID NO: 40541 - DNA, 120 bp, Artificial Sequence
  ENSG00000059122_4 (sequence is synthesized)
agcctccgaccaagatgaggatggggtgggatccaagccccaggaagtgcactgcgtcctgtccctggagatggctggccccgccaccctcgccagcaccttgcagatcctgccagttga

SEQ ID NO: 40542 - DNA, 120 bp, Artificial Sequence
  ENSG00000059122_5 (sequence is synthesized)
ggagcagggaggggtggtccagccagccctagagatgcctgaacagaagtgcagcaagctggatgcagcccctcagtccctggagttcctgaggacaccattcgggggccgcctcctggt

SEQ ID NO: 40543 - DNA, 120 bp, Artificial Sequence
  ENSG00000059122_6 (sequence is synthesized)
gctggagtccttcctgtacaagcaggagaaggcagtgggggacaaggtgtactggaagtgccgccaacatgctgagctgggctgccggggccgggccatcacccgaggcctgcgggccac

SEQ ID NO: 40544 - DNA, 120 bp, Artificial Sequence
  ENSG00000059122_7 (sequence is synthesized)
agtgatgcggggccactgccacgcgcccgatgagcaaggcctggaggcccggcgccagagggagaaactgcccagcctggccctgccagagggcttgggagagccccagggtcctgaggg

SEQ ID NO: 40545 - DNA, 120 bp, Artificial Sequence
  ENSG00000059122_8 (sequence is synthesized)
ccctggaggccgagtggaggagcccctggagggggtgggcccgtggcagtgccctgaggagcccgagcccactcctgggctggtgctgagcaagccggccctggaggaggaggaggcacc

SEQ ID NO: 40546 - DNA, 120 bp, Artificial Sequence
  ENSG00000059122_9 (sequence is synthesized)
ccgagccctgtcactgctgagcctgccgcccaagaagcgctcgatcctggggctgggacaggcccggcccctcgagttcctgaggacgtgctacgggggcagcttcctggtacacgagtc

SEQ ID NO: 40547 - DNA, 120 bp, Artificial Sequence
  ENSG00000059122_10 (sequence is synthesized)
gttcctctacaagcgggagaaggctgtcggggacaaggtgtattggacctgccgggaccacgcgctgcacggctgccggagccgggccatcacccagggacagcgggtgactgtgatgcg

SEQ ID NO: 40548 - DNA, 120 bp, Artificial Sequence
  ENSG00000059122_11 (sequence is synthesized)
tgggcactgccaccagcccgatatggagggcctggaagcccggcggcagcaggagaaggccgtggagacgctgcaggctgggcaggacggccctgggagccaagtggacacgctgctccg

SEQ ID NO: 40549 - DNA, 120 bp, Artificial Sequence
  ENSG00000059122_12 (sequence is synthesized)
aggcgtggatagtttgctctaccgcaggggtccgggtcccctgactctcaccaggcctcggcccagaaagcgagcaaaggtcgaagaccaggagctgccaacccagcccgaggccccaga

SEQ ID NO: 40550 - DNA, 120 bp, Artificial Sequence
  ENSG00000059122_13 (sequence is synthesized)
cgagcaccaggacatggacgcagacccgggaggccctgagttcctgaagacgcccctggggggcagcttcctggtgtacgagtccttcctctaccggcgggagaaggcggctggggagaa

SEQ ID NO: 40551 - DNA, 120 bp, Artificial Sequence
  ENSG00000059122_14 (sequence is synthesized)
ggtgtattggacctgccgggaccaggcccgcatgggctgccgcagccgcgccatcacccagggccgacgggtgactgtcatgcgtggtcactgccacccgcccgacctgggaggcctgga

SEQ ID NO: 40552 - DNA, 120 bp, Artificial Sequence
  ENSG00000059122_15 (sequence is synthesized)
ggccctgaggcagcgggagaaacgccccaacacggcgcagcgggggagcccaggaggccccgagttcctgaagacgcccctggggggcagcttcctggtgtacgagtccttcctctaccg

SEQ ID NO: 40553 - DNA, 120 bp, Artificial Sequence
  ENSG00000059122_16 (sequence is synthesized)
gcgggagaaggcggccggggagaaggtgtattggacctgccgggaccaggcccgcatgggctgccgcagccgcgccatcacccagggccggcgggtcatggtcatgcgcaggcactgcca

SEQ ID NO: 40554 - DNA, 120 bp, Artificial Sequence
  ENSG00000059122_17 (sequence is synthesized)
cccaccggacctgggcggcctggaggccctgcggcagcgggagcacttccccaacctggcgcagtgggacagcccagatcctctccggcccctggagttcctgaggacttccctgggggg

SEQ ID NO: 40555 - DNA, 120 bp, Artificial Sequence
  ENSG00000059122_18 (sequence is synthesized)
caggttcctggtgcacgagtccttcctctacaggaaggagaaggcggctggggagaaggtgtactggatgtgccgggaccaggctcggctgggctgccgcagccgcgccataacccaggg

SEQ ID NO: 40556 - DNA, 120 bp, Artificial Sequence
  ENSG00000059122_19 (sequence is synthesized)
ccaccgcatcatggtcatgcgcagccactgccatcagcctgacctggcaggcctggaggccttgaggcaacgggagcggctccccaccacggcccagcaggaggacccagaaaagattca

SEQ ID NO: 40557 - DNA, 120 bp, Artificial Sequence
  ENSG00000059122_20 (sequence is synthesized)
atttatggggacatcaaagacgtcagactggatggcgagtcccagtgaggcgatgtgggcagaggagctccgagccgcccacccaaggtggcttcacatccacacaggcacttcccatcc

SEQ ID NO: 40558 - DNA, 120 bp, Artificial Sequence
  ENSG00000059122_21 (sequence is synthesized)
acctaggtttggcttagcagaaacttcttttcattcttccaaagcatcgatggtcttcgcgtctcctcaggaggtctcccaggaggaattcttggatggtgtcctcatgtcggcggagaa

SEQ ID NO: 40559 - DNA, 120 bp, Artificial Sequence
  ENSG00000059122_22 (sequence is synthesized)
cagtgctcagagctggcgcttgcagacgcagctgtcgtggggcagggcggtggcgccttcctgacctttggaagacatgacaaagctgcctggacacggacgcccctgctgtacggccac

SEQ ID NO: 40560 - DNA, 120 bp, Artificial Sequence
  ENSG00000059122_23 (sequence is synthesized)
agcacccctgggtttgcagagcacgcagccttcctagggctttccacctggcgaggccccgctctgctcagcacggtgcaaagtgaatgctgctgtcttggagcctgggcacgtttgggg

SEQ ID NO: 40561 - DNA, 120 bp, Artificial Sequence
  ENSG00000059122_24 (sequence is synthesized)
aagttcctgcttcaaactgagctgccccgcataggccaggtcaacccacaccaatctcttctggacaggtgctgggtaggccttcctggtctctggccgcctgctgccagggtgtggcca

SEQ ID NO: 40562 - DNA, 120 bp, Artificial Sequence
  ENSG00000059122_25 (sequence is synthesized)
tccccagcaaccggagctggccaaaccagaggcctcgctccgcactccacactttcctttctgtgctccttccaagttaaattaaaccccctctccacgattcccacggcaggcgtcatt

SEQ ID NO: 40563 - DNA, 120 bp, Artificial Sequence
  ENSG00000059122_26 (sequence is synthesized)
cccgagatgggagccagtccaggggtcagcaggagccagcgctgggcacacgtgccctggctgaggccagcggcatcctgggtggcccaggtccatcctgggcagcaaaggcgtgtcccc

SEQ ID NO: 40564 - DNA, 120 bp, Artificial Sequence
  ENSG00000059122_27 (sequence is synthesized)
ttctgtcagacagcttcacagagtgtggcttcaccagtcagagggagcagtccggagaggcaagatgaccccaccgggactgcagagcctcctccttactaacaaggacctgtccgcagc

SEQ ID NO: 40565 - DNA, 120 bp, Artificial Sequence
  ENSG00000059122_28 (sequence is synthesized)
cgcgaggtccttcactcccaccctgtaattgtggggggagtgccagcaacaggcctgtcccctggcaagttggccacggaacccaccatgcactgcaaggctgtgacagcctgggcaccc

SEQ ID NO: 40566 - DNA, 120 bp, Artificial Sequence
  ENSG00000059122_29 (sequence is synthesized)
ctgcttctcctctgcttgtacggttcccccaataaatcctattttccatctcaccgtgtggagctggtacttgttcacatccctcttgcagcaacagttggccgccgtgaaaccacactc

SEQ ID NO: 40567 - DNA, 120 bp, Artificial Sequence
  ENSG00000059122_30 (sequence is synthesized)
cgtcacatctccatgccagtgcccagggggagacccctccccatgcctgggctgttacagtcacctggcccagacgtaacctggaccaagagtggacggagacacctggggttggggcct

SEQ ID NO: 40568 - DNA, 120 bp, Artificial Sequence
  ENSG00000059122_31 (sequence is synthesized)
ctggaagggctgctggggggccagctgcagcctgtggcctctcccaggcccggatatggcaggacatttgcgtcgtgttgctggaagaggcaggatgctctgttctcgccattagcctgc

SEQ ID NO: 40569 - DNA, 120 bp, Artificial Sequence
  ENSG00000059122_32 (sequence is synthesized)
gttacgcctagactcatctgcataagcctgggcaagtggcacccctgggccaagggcagacttgcccacccgtccatcctttgcctatggcagaggacacacaacacagtggctgcgctt

SEQ ID NO: 40570 - DNA, 120 bp, Artificial Sequence
  ENSG00000059122_33 (sequence is synthesized)
tgggcactgttctcggccctgaagcatcctgccccgaggctgacctaactgcccccagctggactcatggccaaggctacagacccagtactccaatcccgactcccactgtgtggtcca

SEQ ID NO: 40571 - DNA, 120 bp, Artificial Sequence
  ENSG00000059122_34 (sequence is synthesized)
aatgtgtacgcccacaggaggcagccatgcccgaggaaggtacttgctgaaagatggtccagttcatgccgccaccagctggacctctgatcaggccccctgcagaaggggaagctctcc

SEQ ID NO: 40572 - DNA, 120 bp, Artificial Sequence
  ENSG00000059122_35 (sequence is synthesized)
acatgcccaagatacgagagaaacgcccgggtcacagcagcctgagtcactgcagcctctgctacctgccaagcctgcgccctccacctgtgggctccttgcctctgtgatggggcctcc

SEQ ID NO: 40573 - DNA, 120 bp, Artificial Sequence
  ENSG00000059122_36 (sequence is synthesized)
acggccagcatcttcccgccatggtcacatgatgccatgccctgctctgggcacccctaagcgggtatgaggcgaatcagaggaagaatatcggcttctcttcccttttggatatttgcg

SEQ ID NO: 40574 - DNA, 120 bp, Artificial Sequence
  ENSG00000059122_37 (sequence is synthesized)
tcattgaccgggactggcccactcttcctctgcctcacgcctgctttgaccttagaagacagacggcagctcgcgttgctgggctgagattctccaatggacgtgaatttagatgatgct

SEQ ID NO: 40575 - DNA, 120 bp, Artificial Sequence
  ENSG00000059122_38 (sequence is synthesized)
gttgccttgggtggcttcatggccaccaacccgcaccctggtggccactcagccatgacaagggcctgacagccactaagtgagcttcagagccttccccttgcaaagttccagggccac

SEQ ID NO: 40576 - DNA, 120 bp, Artificial Sequence
  ENSG00000059122_39 (sequence is synthesized)
cagatgtcgcctgcccagtcactgtcacagagttaaagcgtgcgggtgaacgctggccgcggagcgtgcagcccggcagcagctcagcggggcagctcctgcttccagccctgcctctgc

SEQ ID NO: 40577 - DNA, 120 bp, Artificial Sequence
  ENSG00000059122_40 (sequence is synthesized)
tggtgcttcgcccacaaaccctgctgtatgacatttgcaccacatggtgtgtgtccgtgccctttgacatgacagtgccaacaacatctcatgaaatttaaaataaatccccaaggcatc

SEQ ID NO: 40578 - DNA, 120 bp, Artificial Sequence
  ENSG00000059122_41 (sequence is synthesized)
ttcagctgtgcttcaagacgtgttctcctgaaagccagcagatttatgggtaattgtatttgttatctaatggtgcatgaccaattacaacaaaacgtagtgggcttaaaacaacaaata

SEQ ID NO: 40579 - DNA, 120 bp, Artificial Sequence
  ENSG00000059122_42 (sequence is synthesized)
gctcttccggatcctgcagcttttgggtcatgctcctgtgctgctgtgcccctcagggtcctcctgcctcccgagcctccctgctccacatggcccctgcccagccctctccatccctct

SEQ ID NO: 40580 - DNA, 120 bp, Artificial Sequence
  ENSG00000059122_43 (sequence is synthesized)
cacgatgccccaggccacctccccacctctgtggcccctgagcctgcacggaggaaagggtatcctctgggcaaggcacagccacccgccaggtcctccctctcaccacatccaggacag

SEQ ID NO: 40581 - DNA, 120 bp, Artificial Sequence
  ENSG00000059122_44 (sequence is synthesized)
tggacgctgctccctgcctcttcctcagagtcctggggtcacacctctacctgcgcggctctcgggggccacccctctcagccccatccggctcctgagcagctttgtccccagagggcc

SEQ ID NO: 40582 - DNA, 120 bp, Artificial Sequence
  ENSG00000059122_45 (sequence is synthesized)
ccgggtcattcctctgaccaaccaggcacggcgcaccctgcatgcaagcctgggcgggtgctggggacggacgagtgacgcagcagacactgcctccctgaaggcatggcaaggtgggac

SEQ ID NO: 40583 - DNA, 120 bp, Artificial Sequence
  ENSG00000059122_46 (sequence is synthesized)
gcttggccgccacctgcaggggcctcacctgaccagtccccagcctcaggaggcggaccccagcagctggagccccagcagagttggggggatggtggcatctgtgtcctgggctccggg

SEQ ID NO: 40584 - DNA, 120 bp, Artificial Sequence
  ENSG00000059122_47 (sequence is synthesized)
gccacctcactgtgaggaggaggtgtgggcgttgtgggaggtctcatctcggggccatgctgatctgggctctgagagctggtgtccgctgctcctcccctcccatttctcaacaggagg

SEQ ID NO: 40585 - DNA, 83 bp, Artificial Sequence
  ENSG00000059122_48 (sequence is synthesized)
gctccaccttactggctaacgctgctctccctgagcctcgatgttgaagtgtccaggtcagcggttcacattcattgttcatc

SEQ ID NO: 40586 - DNA, 120 bp, Artificial Sequence
  ENSG00000059122_49 (sequence is synthesized)
tccatctccagaaccttttcatcttccccaacggctgctctgtgcccatgaaacactccctcctcatcctcctgcccctggcacccccattctactttctgtccccataagtttgactgc

SEQ ID NO: 40587 - DNA, 120 bp, Artificial Sequence
  ENSG00000059122_50 (sequence is synthesized)
cctggggacctcatacaagtggaatcagacagtgtttgtccccttgtgcctggcatgtcgtatgttgcagatttttttatggtgaaaagatatacatatatttagaattagccagccgga

SEQ ID NO: 40588 - DNA, 120 bp, Artificial Sequence
  ENSG00000059122_51 (sequence is synthesized)
gcctagaaacctgctcgcggctgactggggggtgctctgtggtcccatcttcctaacacagctctgtcttctctgtggggtggcagctgctgcgtttgtttgcctgcttttgtgtgtcca

SEQ ID NO: 40589 - DNA, 120 bp, Artificial Sequence
  ENSG00000059122_52 (sequence is synthesized)
ggtcgaccccacctggatccgatcatccacaaccgcaggttgctggaacctcccagtgcagcctggcctgggggcagaggccgggcccagctgtccctcggggttcactgtgctgactcc

SEQ ID NO: 40590 - DNA, 120 bp, Artificial Sequence
  ENSG00000059122_53 (sequence is synthesized)
ctgcttctgggcctgcctttctctttcttggttttctttataattttgtggtttggagaagtcctgcctcccgtcgtttcctgggccggtcccgggaggtagcacgttgaggcctttcat

SEQ ID NO: 40591 - DNA, 120 bp, Artificial Sequence
  ENSG00000059122_54 (sequence is synthesized)
gtctgaaatgtctgtcgcttccctccgccggaggggcagcctggcctccgtggtgtcacaggtgcagagcctgcccttgaacgtccctgccgcttttgcgtgactgatcctctgtgtgcc

SEQ ID NO: 40592 - DNA, 120 bp, Artificial Sequence
  ENSG00000059122_55 (sequence is synthesized)
gtcagctttgcttgaggttttagggtctttgctccctcccagctgtacctggctgtgctgggggcctttttaggctttgggcttgtgtccttcatcgtggggtcatcctctcgtgctctt

SEQ ID NO: 40593 - DNA, 120 bp, Artificial Sequence
  ENSG00000059122_56 (sequence is synthesized)
ggtcatcctctcgtgctctttgttaacttccccatcatcatccctttctgttgctcctgttaatcagatgttgatcctcccagatgagggcgtcttttttttttttttgagacagtttca

SEQ ID NO: 40594 - DNA, 120 bp, Artificial Sequence
  ENSG00000059122_57 (sequence is synthesized)
gtgcgcagccccttgctggatattttcatccgtgtggaaggggataaagcgtgccccatggtcacaccaccccctcccgtggcctggcgtccccaccttcgtcctgacctcttctgtctc

SEQ ID NO: 40595 - DNA, 120 bp, Artificial Sequence
  ENSG00000059122_58 (sequence is synthesized)
gtggtccccaggctcctgtgctgctgtgcccctcagggtcctcctgcctcccgagcctccctgctccacatggcccctgcccagccctctccatccctcttgaaggtagttccacagcca

SEQ ID NO: 40596 - DNA, 120 bp, Artificial Sequence
  ENSG00000059122_59 (sequence is synthesized)
ttcagctgtgcttcaagacgtgttctcctgaaagccagcagatttatggtaaatcccagccactagtatgatggtaggctaagtcctgtgagtccctcaagtgcagtcaccaagcctagt

SEQ ID NO: 40597 - DNA, 120 bp, Artificial Sequence
  ENSG00000059122_60 (sequence is synthesized)
gtgtgatggggatgcctgcataccagatcagtagagaaaaggacaaaaaccgtgtgatcactgaatagacacaaaacatttgacaacctccaacacgctttcatgataaaaacattcaac

SEQ ID NO: 40598 - DNA, 120 bp, Artificial Sequence
  ENSG00000059122_61 (sequence is synthesized)
cgggagagggagggccccgctgccgtcgtgctactggcgggacgtgtggaaggaacaaggctgaggttggggctagattgcggagtgtttatgacgcccagctgatgatgcactaaggct

SEQ ID NO: 40599 - DNA, 120 bp, Artificial Sequence
  ENSG00000059122_62 (sequence is synthesized)
ggagatggagatgatttaattggggagagacatgctgaaagttaagctttaggaagagtgacctgtcagcaccctatgtggagaattggagtggctgcttgccaaagctggcaagatcgt

SEQ ID NO: 40600 - DNA, 120 bp, Artificial Sequence
  ENSG00000059145_0 (sequence is synthesized)
atgccgtcggtttcgaaagcggcggcagcggcgctgagcgggtcccccccgcagactgagaagccgacccactacaggtacctgaaggagttcaggacggagcagtgccccctgttttca

SEQ ID NO: 40601 - DNA, 120 bp, Artificial Sequence
  ENSG00000059145_1 (sequence is synthesized)
cagcacaagtgcgcgcagcaccggccgttcacctgcttccactggcacttcctcaaccagcggcgccgcaggcccctccgcaggcgcgacggcaccttcaactacagccccgacgtgtac

SEQ ID NO: 40602 - DNA, 120 bp, Artificial Sequence
  ENSG00000059145_2 (sequence is synthesized)
tgctccaagtacaacgaagccaccggcgtgtgccccgacggcgacgagtgtccctacctgcaccggacgacgggggacacagaacgcaagtaccacctgcgttactacaaaacaggaacc

SEQ ID NO: 40603 - DNA, 120 bp, Artificial Sequence
  ENSG00000059145_3 (sequence is synthesized)
tgcatccacgagacagacgcacgtggccactgcgtgaagaatgggctgcactgtgccttcgcgcacggccccctggacctgcggccgcccgtgtgtgacgtcagggagctgcaggcccag

SEQ ID NO: 40604 - DNA, 120 bp, Artificial Sequence
  ENSG00000059145_4 (sequence is synthesized)
gaagccttgcagaacggccagctgggcggcggggaaggggtcccggatctgcagcctggggtcttggccagccaggccatgattgagaagatcctgagcgaggacccccggtggcaagat

SEQ ID NO: 40605 - DNA, 120 bp, Artificial Sequence
  ENSG00000059145_5 (sequence is synthesized)
gccaacttcgtgctgggcagctacaagacggagcagtgcccgaagccgccacgcctgtgccgccagggctatgcgtgcccacactaccacaatagccgggacaggcggcgcaacccccgg

SEQ ID NO: 40606 - DNA, 120 bp, Artificial Sequence
  ENSG00000059145_6 (sequence is synthesized)
cggttccagtacaggtccacgccctgccccagtgtgaagcacggggatgagtggggggaaccctcacgctgcgatggcggcgacggctgccagtattgccactcccgcacggagcagcag

SEQ ID NO: 40607 - DNA, 120 bp, Artificial Sequence
  ENSG00000059145_7 (sequence is synthesized)
ttccatcccgagatctacaaatctacaaaatgcaacgacatgcgccaaaccgggtactgcccgcgcggccccttctgtgcctttgcacacgttgagaagagcctggggatggtgaatgaa

SEQ ID NO: 40608 - DNA, 120 bp, Artificial Sequence
  ENSG00000059145_8 (sequence is synthesized)
tggggctgtcacgacctccacctcacgagtccttcctccacgggcagcggccagccgggaaatgccaagcggagagactcgccggccgagggtggccctaggggcagcgagcaagacagc

SEQ ID NO: 40609 - DNA, 120 bp, Artificial Sequence
  ENSG00000059145_9 (sequence is synthesized)
aagcagaaccacctggccgtgtttgcagcggtccacccgccggcccccagcgtgagctccagcgtggcgtccagcctggcgtccagcgccggctccggcagctcctcccccactgcgctg

SEQ ID NO: 40610 - DNA, 120 bp, Artificial Sequence
  ENSG00000059145_10 (sequence is synthesized)
cccgcgccccccgcccgtgccctcccgctcggccccgccagcagcactgtggaggccgtcctcggttctgcgttagacctgcatcttagcaatgtgaatattgcatccctagagaaggac

SEQ ID NO: 40611 - DNA, 120 bp, Artificial Sequence
  ENSG00000059145_11 (sequence is synthesized)
ctggaagagcaagacggccacgacctgggagcagcaggtcccaggtcgctggccggctctgcacctgtcgccatccccggctccctgcccagagcaccatcgctacactcgccatcctct

SEQ ID NO: 40612 - DNA, 120 bp, Artificial Sequence
  ENSG00000059145_12 (sequence is synthesized)
gcgtccacctcgccgctcggttcgctgtcccagcccctcccagggccggtgggctcctcagccatgacgcctccccagcagccgccacccctgcgttcagagccgggcacactgggctct

SEQ ID NO: 40613 - DNA, 120 bp, Artificial Sequence
  ENSG00000059145_13 (sequence is synthesized)
gcagcctcatcctacagccccctaggtttgaacggtgtccccgggagcatctgggactttgtttccggcagcttctcccccagcccctcccccatcctgagtgccggccccccatcctct

SEQ ID NO: 40614 - DNA, 120 bp, Artificial Sequence
  ENSG00000059145_14 (sequence is synthesized)
tccggcagtgggaggagtcctggcagcaggtgaagcaggtctgcgatgcctggcagcgagaggcgcaggaggccaaggagcgtgcccgtgtggccgatagcgaccggcagctggcgctgc

SEQ ID NO: 40615 - DNA, 120 bp, Artificial Sequence
  ENSG00000059145_15 (sequence is synthesized)
agaagaaggaggaggtggaggcacaggtgaagcagctgcaggaggagctggagggcctgggcgtagcctccacactgccggggctgcggggctgtggggacatcggcaccattcccctgc

SEQ ID NO: 40616 - DNA, 120 bp, Artificial Sequence
  ENSG00000059145_16 (sequence is synthesized)
cgaagctgcactcgctgcagagtcagctgcgcctggacctggaggcggtggacggcgtgatcttccagctccgcgccaagcagtgtgtggcctgccgggagcgggcccacggtgctgtcc

SEQ ID NO: 40617 - DNA, 120 bp, Artificial Sequence
  ENSG00000059145_17 (sequence is synthesized)
tgcggccctgtcagcaccacatcctctgtgagccgtgtgcggccaccgcacctgagtgcccctactgcaagggccagcccctgcagtggtgacctcagcggggacagccacctcctgctg

SEQ ID NO: 40618 - DNA, 120 bp, Artificial Sequence
  ENSG00000059145_18 (sequence is synthesized)
ggcaccctggctccagcgctcctcctgaccacggacatgtcgtcactcgcttctggtgccaccgacgtgaggaccgaggctgggagcccttcctgttacacgttatcatgaggctgggag

SEQ ID NO: 40619 - DNA, 120 bp, Artificial Sequence
  ENSG00000059145_19 (sequence is synthesized)
ccccgcctgcgcttggcctgacagcctttcctgtcacacgttgtcacctatctagtcctaccgacggtttcaaggtattttcctcaaaaaccttaaatgcaaacccacagaacccgcctg

SEQ ID NO: 40620 - DNA, 120 bp, Artificial Sequence
  ENSG00000059145_20 (sequence is synthesized)
cctgtccctgaggggcctggtgcctccgggatccacgcggcgctgtgatcacagcagtttgtggtcctgacactactgtgactaggccactgggagctggggtctttcaaagcactttgt

SEQ ID NO: 40621 - DNA, 120 bp, Artificial Sequence
  ENSG00000059145_21 (sequence is synthesized)
aaaccgaggaatttagttagaggttataaattgctctaagctgctttctgtttttttttaatatgcgataatatgaagctttatatgtgtactgtgaacttaaatatttcatatcagttt

SEQ ID NO: 40622 - DNA, 120 bp, Artificial Sequence
  ENSG00000059145_22 (sequence is synthesized)
attgtcaattcatagtatgctaaatatattagatttcatattctgaaactagtacttatgaaatgagtgtttatctagtagtaagacctaggatttttacattttccaattaagtgcaaa

SEQ ID NO: 40623 - DNA, 120 bp, Artificial Sequence
  ENSG00000059145_23 (sequence is synthesized)
tagtatttataagcagagtgattatggattgagatgtttttaacttgatggaaggagctagttttcctgagcctgtgtgtgcaccaggcactggggctgatgttccagcctcgtggcgtg

SEQ ID NO: 40624 - DNA, 120 bp, Artificial Sequence
  ENSG00000059145_24 (sequence is synthesized)
ggagcaggagagctccgtcctgcatttctgtggtccgtggccgctgtttctgtgcgcctgcgcctcggagagcaagtgaaggagcatcatgggttttgttttctcccttaaccctctgaa

SEQ ID NO: 40625 - DNA, 120 bp, Artificial Sequence
  ENSG00000059145_25 (sequence is synthesized)
cctctgaaagacagtttgatactaacaaaaaacgcagcagaggggatccgacgtcagagcttttagaattacttttttaagcagctgtcttctggctgggtgcggtggctcatgcctgtg

SEQ ID NO: 40626 - DNA, 120 bp, Artificial Sequence
  ENSG00000059145_26 (sequence is synthesized)
aaaaaaaaaagctgttttctgattactcagagctgtcctaggcaatggtgctttgtagctccttggagatgtcgctgggcgtcctggcaggggtcaggcagtgaactgggagagtggttg

SEQ ID NO: 40627 - DNA, 120 bp, Artificial Sequence
  ENSG00000059145_27 (sequence is synthesized)
cctccccagcacccgtgaccaccctggtcctgctcgtgtgggagatgctcgggccgtgtgtgcgccagggtccggggtgccgggtgtatgtggcagtcacctgacccgcgctgccagtta

SEQ ID NO: 40628 - DNA, 120 bp, Artificial Sequence
  ENSG00000059145_28 (sequence is synthesized)
tcatcggagctcatccatgtggccagtgaggtcacaggagaggacccggccacagcctctcagtggcctggagcacacgggggaagcgaccccccccaggtcccggctctgctgtggtcc

SEQ ID NO: 40629 - DNA, 120 bp, Artificial Sequence
  ENSG00000059145_29 (sequence is synthesized)
cctgtcccgtctgcccctggagcgacagtgtggtttcggccgcagcagaaacgtgactgagaacgcatccccgcgatgacctgacccttctgctcagggctgggactgtccctaggagtt

SEQ ID NO: 40630 - DNA, 120 bp, Artificial Sequence
  ENSG00000059145_30 (sequence is synthesized)
gagcaggaacaggcatctgtggtttacggcgacctggctctccgcgggccacgtgggtggtgagggcacacgagtgggaagcggcaccgacgtgtttctccccgaccgtggctttgccaa

SEQ ID NO: 40631 - DNA, 120 bp, Artificial Sequence
  ENSG00000059145_31 (sequence is synthesized)
agacttttaatagcattttttaagtgcaaaacgtctaggtaaaaatctttatcatcagtgaccaaattagaatgtatttaatatagtaggtggtttaagaactgttttaacgtaagacaa

SEQ ID NO: 40632 - DNA, 120 bp, Artificial Sequence
  ENSG00000059145_32 (sequence is synthesized)
actgatagcaacattctgttgttttaaaggaagtgggtccgtgacattctgcagctagtccactactccaaggtaactatcgacttggtttcagtgaatctattttgtttttaactacag

SEQ ID NO: 40633 - DNA, 120 bp, Artificial Sequence
  ENSG00000059145_33 (sequence is synthesized)
tgatttattagctcagtatctagaaattacgtatattttgtgctactgtcatcgatgtgtaaactctgtttttatttgtatttatgcacttggttcccatttggagcctctggtcttttc

SEQ ID NO: 40634 - DNA, 120 bp, Artificial Sequence
  ENSG00000059145_34 (sequence is synthesized)
tgggataagtggtgtctgccgagacatctcccggttgtcagtggtcaggagcagctgagctctagtctgccagctgctctgctctttctgggaaggaggtggcgcccgcccctcagggtg

SEQ ID NO: 40635 - DNA, 120 bp, Artificial Sequence
  ENSG00000059145_35 (sequence is synthesized)
tctccagggctcagcttccggggtggtagagctggggagccccaggggtggggggacagctgggagatggaggtggcacctgctcccctagatcagtactggctctgaggacaggtgagc

SEQ ID NO: 40636 - DNA, 120 bp, Artificial Sequence
  ENSG00000059145_36 (sequence is synthesized)
agtgggaagaccaaagaatggctggcagcgctgccagggttggaaatgggggcaagatcctggggctgtgtgccctggggcctccctcacctgtcttggtggccatggcctcagggatgg

SEQ ID NO: 40637 - DNA, 120 bp, Artificial Sequence
  ENSG00000059145_37 (sequence is synthesized)
ctcctaggtggctgaggcacagcagtggctggaaggtgccccgtggaggctgaggtggaggcgcgcccagcagctcccccctgtggccatggcgggcacggggcgtaggagctggctggc

SEQ ID NO: 40638 - DNA, 120 bp, Artificial Sequence
  ENSG00000059145_38 (sequence is synthesized)
ggccggctctgcatgttcttgttgcctgtcgtctgtaactctagtgttcgacattcgccgtgatacagtggtgtcacgacgtgtgtaactgtggtcagcagaccttgttccgcgtggacg

SEQ ID NO: 40639 - DNA, 120 bp, Artificial Sequence
  ENSG00000059145_39 (sequence is synthesized)
cctcaagtggattaatttctggaagcctcaatctgtatgtttgagtatttacatgagaatgttatttgaatggaattttcttaacccagaaggtagtatttataatcatttacttgtagc

SEQ ID NO: 40640 - DNA, 120 bp, Artificial Sequence
  ENSG00000059145_40 (sequence is synthesized)
gaactgtttaaagttaacacttgtttaaatttttttacactatagcatttatgcaatggtttacagaattcatggagttatttttatcagtatgggaattaattaaaaccttgaatcttt

SEQ ID NO: 40641 - DNA, 120 bp, Artificial Sequence
  ENSG00000059145_41 (sequence is synthesized)
gtgagtcagcattggcggcggccccagcgcgtggcagccgtgcgccgccaaggtgcgggtctcgttactcggcggtcaggagcgggccctcccttaggtgcgccccccgccaggttctgc

SEQ ID NO: 40642 - DNA, 120 bp, Artificial Sequence
  ENSG00000059145_42 (sequence is synthesized)
ggggctccctcccagatgccgtcctgactgaggggcctcacacggaaccttgtgccctatctgtggtggcaaaccacatgacctgctgctcacaggttcccccacgccgcagaccgagtc

SEQ ID NO: 40643 - DNA, 60 bp, Artificial Sequence
  ENSG00000059145_43 (sequence is synthesized)
tagtaaaaatacaaaaattggcctggcgtgagagcgggcacctgtagtcccagctactcg

SEQ ID NO: 40644 - DNA, 120 bp, Artificial Sequence
  ENSG00000059145_44 (sequence is synthesized)
agggccaacaacccaagggtcgccctgcccagggtgcacacaggaccttcctccaccgcctgagccccagctgtcccctgggtctggcttgtgggtttggcacctcgcagcctgcttgcc

SEQ ID NO: 40645 - DNA, 120 bp, Artificial Sequence
  ENSG00000059145_45 (sequence is synthesized)
tctgaagcccctttctcctccttgctccagcccggccttctggttgtgcctggcctggcttgcctcctgtctgcagtttgcacctgagaggggggtgggggggtgcagaccccacagggt

SEQ ID NO: 40646 - DNA, 120 bp, Artificial Sequence
  ENSG00000059145_46 (sequence is synthesized)
gtctggatgcctgggccatggccttggcctccctgaggccctgtctgtgtccagctcttcctttgagcagagagccaccctcgcctcttttgaatgacctggtgctgcctcgcatgcccc

SEQ ID NO: 40647 - DNA, 120 bp, Artificial Sequence
  ENSG00000059145_47 (sequence is synthesized)
ggagagcacctgtgcttcctttgggaaggacgccccactccttgttgttatgccacgttcagtctccctctgagcagcttccgagtaaaggacctgaacggctgtagaacaaaccacaaa

SEQ ID NO: 40648 - DNA, 120 bp, Artificial Sequence
  ENSG00000059145_48 (sequence is synthesized)
ttagtgtctgagattttgtcatcgcccgtcatggaaagaaaataaaaattattttttcaacaggcacttaatgtgtcccataaatacaaatcagttacaataaagcagctagagattcca

SEQ ID NO: 40649 - DNA, 120 bp, Artificial Sequence
  ENSG00000059145_49 (sequence is synthesized)
accccccaggcgtaggggtcgctggaaggtcccagagaagctgtggggttcacagcgtggttatcacacagaaggaacagtgattaactttggccgagggctggcacaggtcgggaagcc

SEQ ID NO: 40650 - DNA, 120 bp, Artificial Sequence
  ENSG00000059145_50 (sequence is synthesized)
gcagtctgtagcttgtcctcgcgtgtccctgaccccgggggaccgcggcgccttgaatgtgctgtgtcacggcagagccgggctgtgtcgcggtgactcagcggggccggtggtttccta

SEQ ID NO: 40651 - DNA, 120 bp, Artificial Sequence
  ENSG00000059145_51 (sequence is synthesized)
acgcccggggctgaggcagcctggcctgacccagctgtactcgcttaggtgaccagcctcacctagattttgcctctgcacaagggtcagctctttctttgagaatgtttcagaagatct

SEQ ID NO: 40652 - DNA, 120 bp, Artificial Sequence
  ENSG00000059145_52 (sequence is synthesized)
actgtgcattctgtgtccctacctgcaccggacgacgggggacacagaacgcaagtaccacctgcgttactacaaaacaggaacctgcatccacgagacagacgcacgtggccactgcgt

SEQ ID NO: 40653 - DNA, 120 bp, Artificial Sequence
  ENSG00000059145_53 (sequence is synthesized)
gaatccccggcggcggcgcggggcggccgcggaccgtgagtcagcattggcggcggccccagcgcgtggcagccgtgcgccgccaaggttctgcgttagacctgcatcttagcaatgtga

SEQ ID NO: 40654 - DNA, 120 bp, Artificial Sequence
  ENSG00000059145_54 (sequence is synthesized)
gtacaggtgagcctgcgggaccgtgctcagaggactccggctggtgggcgtccttcccggcccgtggctcgcgttgcccaccccggggttctaatgggagggctgcccttgtggcaccat

SEQ ID NO: 40655 - DNA, 120 bp, Artificial Sequence
  ENSG00000059145_55 (sequence is synthesized)
catccccgggaggggagggcatctccaagcacagtggctgtgggaggtgccatggaggcccacgcgtctgtcctggggatgggcctccccacctacgctcagtgtctcccatgcagtccc

SEQ ID NO: 40656 - DNA, 120 bp, Artificial Sequence
  ENSG00000059145_56 (sequence is synthesized)
cacgttgtcacctatctagtcctaccgacggtttcaaggaagtgggtccgtgacattctgcagctagtccactactccaaggtaactatcgacttggtttcagtgaatctattttgtttt

SEQ ID NO: 40657 - DNA, 120 bp, Artificial Sequence
  ENSG00000059145_57 (sequence is synthesized)
gggttcctgggagtggagtctgagaaccactgcccctcccacctcatggtgtggtcccaggaacttgaatttaattcctctctgtttagactcctcaggtggccaggaaggcgtagatct

SEQ ID NO: 40658 - DNA, 120 bp, Artificial Sequence
  ENSG00000059145_58 (sequence is synthesized)
ggtggggagaccggccggggcaggtgtcactgtcagcgcctcttcctgagcctggtggggtccaggagtggggcaaggggcaggcgtggctgcacccctgctgccagggcaggtgagccc

SEQ ID NO: 40659 - DNA, 120 bp, Artificial Sequence
  ENSG00000059145_59 (sequence is synthesized)
cagagggtgcccacgtagcggtggggcctggggcatagcacccaccaatcccaccaggccgcgagcacagcagggctgggccgtcatcgaccgtttcacactcaggtttgaacggtgtcc

SEQ ID NO: 40660 - DNA, 120 bp, Artificial Sequence
  ENSG00000059145_60 (sequence is synthesized)
atggggaaaccgaggctcgtggagtccaataccaagccctccccaacagggggtgggtgccgagtgggatttgggcccaggcgccttcccccgcacctgctctgaatctctgcggcaact

SEQ ID NO: 40661 - DNA, 120 bp, Artificial Sequence
  ENSG00000059377_0 (sequence is synthesized)
gagggccggcctggacccggcgggcgcacggctccgagcccagcgcagccgagccggtctgcagaggggcccccagaactttgtgtgtgtgtgtgcacgcgcgcgcgtgtgtgcccaggt

SEQ ID NO: 40662 - DNA, 120 bp, Artificial Sequence
  ENSG00000059377_1 (sequence is synthesized)
gcgagggttcgcgcgtgtgctggcggggagggaaccgacccgaaagagagccccacgctggcaaagtggctcgcccatctcacagccggttggcgctcgcggaggctcacagaacatttc

SEQ ID NO: 40663 - DNA, 120 bp, Artificial Sequence
  ENSG00000059377_2 (sequence is synthesized)
ctgcctgttgctcacactctgttgtccacagcatacccgcaccctagatggctgactcttgtcttctgtctctttattttccatgtgtgagcctgtgcctgtggtttatctctggaggat

SEQ ID NO: 40664 - DNA, 120 bp, Artificial Sequence
  ENSG00000059377_3 (sequence is synthesized)
gtgcctgagggaggagacatatactgcctggactgcctggctgatgtgagctagtttgtctggttgagttggatgtttaaatagaaggcagaacaacaacagagcacggttcccataagg

SEQ ID NO: 40665 - DNA, 120 bp, Artificial Sequence
  ENSG00000059377_4 (sequence is synthesized)
gcggcgagatcagcctcctgtctcatctggaagaccaccactctggggtctcagaggaatgatggaagccttggggtttctaaaattggaagtgaatggccccatggtgacggtggccct

SEQ ID NO: 40666 - DNA, 120 bp, Artificial Sequence
  ENSG00000059377_5 (sequence is synthesized)
gtcagtggctctcttggccctcctgaaatggtactccacatcagcattctcaagactggagaagttaggcctcagacatcccaagccttctcctttcattggaaacttgacatttttccg

SEQ ID NO: 40667 - DNA, 120 bp, Artificial Sequence
  ENSG00000059377_6 (sequence is synthesized)
ccagggtttttgggaaagccaaatggagctcagaaagctgtatggacctctgtgtgggtactatcttggtcgtcggatgtttattgttatttctgagccagacatgatcaagcaggtgtt

SEQ ID NO: 40668 - DNA, 120 bp, Artificial Sequence
  ENSG00000059377_7 (sequence is synthesized)
ggttgagaacttcagtaactttaccaacagaatggcgtcgggtttggagttcaagtcggtagccgacagcgttctgtttttacgtgacaaaagatgggaagaggtcagaggtgccctgat

SEQ ID NO: 40669 - DNA, 120 bp, Artificial Sequence
  ENSG00000059377_8 (sequence is synthesized)
gtctgctttcagtcctgaaaagctgaacgagatggttcccctcatcagccaagcctgcgaccttctcctggctcatttaaaacgctatgcggaatctggggacgcatttgacatccagag

SEQ ID NO: 40670 - DNA, 120 bp, Artificial Sequence
  ENSG00000059377_9 (sequence is synthesized)
tgtgaaacactgcaagcgtttcttcgaattctgcatccccagacctatcctggttttactcttatcatttccatccataatggtcccactggcccggattttgcccaataagaaccgaga

SEQ ID NO: 40671 - DNA, 120 bp, Artificial Sequence
  ENSG00000059377_10 (sequence is synthesized)
cgaactgaatggcttttttaacaaactcattaggaatgtgattgccttgcgggaccagcaagctgccgaagagaggcggagagacttcctccaaatggtcctggatgcccgacattctgc

SEQ ID NO: 40672 - DNA, 120 bp, Artificial Sequence
  ENSG00000059377_11 (sequence is synthesized)
aagtcccatgggcgtgcaagactttgacatcgtcagagacgttttctcctctactgggtgcaagccgaacccttcccggcaacaccagcccagccctatggccaggcctttgactgtgga

SEQ ID NO: 40673 - DNA, 120 bp, Artificial Sequence
  ENSG00000059377_12 (sequence is synthesized)
tgagattgtgggccaggccttcatcttcctcatcgctggctatgaaatcatcaccaacacactttcttttgccacctacctactggccaccaaccctgactgccaagagaagcttctgag

SEQ ID NO: 40674 - DNA, 120 bp, Artificial Sequence
  ENSG00000059377_13 (sequence is synthesized)
agaggtagacgtttttaaggagaaacacatggcccctgagttctgcagcctcgaggaaggcctgccctatctggacatggtgattgcagagacgctgaggatgtacccgccagctttcag

SEQ ID NO: 40675 - DNA, 120 bp, Artificial Sequence
  ENSG00000059377_14 (sequence is synthesized)
attcacacgggaggcagctcaggactgcgaggtgctggggcagcgcatccccgcaggcgctgtgctagagatggccgtgggtgccctgcaccatgaccctgagcactggccaagcccgga

SEQ ID NO: 40676 - DNA, 120 bp, Artificial Sequence
  ENSG00000059377_15 (sequence is synthesized)
gaccttcaaccctgaaaggttcacggctgaggcccggcagcagcaccggcccttcacgtacctgcccttcggggccggcccacggagctgcctcggggtgcgtctagggctgcttgaggt

SEQ ID NO: 40677 - DNA, 120 bp, Artificial Sequence
  ENSG00000059377_16 (sequence is synthesized)
caagttgacactgctccacgtgctgcacaagttccggttccaagcctgccctgagacccaggtaccgctgcagctagaatccaaatctgccctaggtccaaaaaatggtgtctatatcaa

SEQ ID NO: 40678 - DNA, 120 bp, Artificial Sequence
  ENSG00000059377_17 (sequence is synthesized)
gatcgtatcccgctgacacagaaggctgccgggtggggggagggcacccccaaattcaaagaaaaccctaagtgtggatgttcagaattttggaaaaatgtcactgaagtgattgaaaga

SEQ ID NO: 40679 - DNA, 120 bp, Artificial Sequence
  ENSG00000059377_18 (sequence is synthesized)
gtgcctggcatgcaaggataagaggttctttacataacatttcctaaatgcttaataaacgtttgttgcacttggttttgacattgccaatggggtttgaaccagtgctctctctaaatg

SEQ ID NO: 40680 - DNA, 120 bp, Artificial Sequence
  ENSG00000059377_19 (sequence is synthesized)
gtctgctttcagtcctgaaaagctgaacgagcttggccttttaatcatgcaagagagaataaaaggtcacatgggtggccagcaggctccacaaagaattccacccacccgtttgtcgaa

SEQ ID NO: 40681 - DNA, 120 bp, Artificial Sequence
  ENSG00000059377_20 (sequence is synthesized)
ggctcgcggagaataaaggagcgtggggtgggcgcggaaagaaatgggaaggggcgcggggcggagagcgaagtggaaaggaggtgctccgaaaggagacatatactgcctggactgcct

SEQ ID NO: 40682 - DNA, 120 bp, Artificial Sequence
  ENSG00000059377_21 (sequence is synthesized)
aatgattatttggagccacagaaaatcattttagggagcagtgggtccaggttcagtgttgtgtgttcaactcggaaagaacacagttgggtggctgaccgggttacttctcccctgtgg

SEQ ID NO: 40683 - DNA, 120 bp, Artificial Sequence
  ENSG00000059377_22 (sequence is synthesized)
ctctgcttgcattggtcattgaggtcaggcaggggtttggccacagtgttagccattggccctgcattgatcctcacatagtaacatcttgtttggttattaaagtgactgaattgttgg

SEQ ID NO: 40684 - DNA, 120 bp, Artificial Sequence
  ENSG00000059377_23 (sequence is synthesized)
aaggaataaagttgctgattcattcctttacactgaaaccctttgttgtgccctcctcttccttcctctttatagggagacactctgagaaagagcacattgtgggggcccactccatgt

SEQ ID NO: 40685 - DNA, 120 bp, Artificial Sequence
  ENSG00000059377_24 (sequence is synthesized)
cattcattcaagccaggacatgggatacaggattgtatttcaggtctgcactggaaagtaacggaacatcatttcctttttaaaaaacgggcatctatgccaaaacaacagcttcagctg

SEQ ID NO: 40686 - DNA, 120 bp, Artificial Sequence
  ENSG00000059377_25 (sequence is synthesized)
atgtctccatgaatctaaattcacgtgatccactggttgacctgggtccccgccttccaccacctggctttggttcattgtctcctttcatttctgggctctgtgattggaaacatctga

SEQ ID NO: 40687 - DNA, 120 bp, Artificial Sequence
  ENSG00000059377_26 (sequence is synthesized)
gcaggcggcccacactctggtcctcatcagaaccagtcaatatcctgtgtgtgtgatctggcaagggaagggctggcccggcaccagttgtgttttcacctttcatggctccaactgagt

SEQ ID NO: 40688 - DNA, 120 bp, Artificial Sequence
  ENSG00000059377_27 (sequence is synthesized)
cacattctaagcttataagatgaaatagggtcattgcttggcttctcctgctctccgggttagcaagcgaaatgaaatgttgagaacaataaccacaacaaaaagacaaattgtgtgtgc

SEQ ID NO: 40689 - DNA, 120 bp, Artificial Sequence
  ENSG00000059377_28 (sequence is synthesized)
accttcactgtctggggtagtccatgaagccaggcctggctcgaggaagctgtggaagcccaggaaggtgtcaggcccaaagggcagggatggggaaggagtcatggcttcccaatatct

SEQ ID NO: 40690 - DNA, 120 bp, Artificial Sequence
  ENSG00000059377_29 (sequence is synthesized)
gacttggagctgccacacggagggaggcaggtgtgagccagaaaggagagccaagatagaaggcaggagtggacaaaaggacaggccaagctgaagctggactgaagactggaagctgag

SEQ ID NO: 40691 - DNA, 120 bp, Artificial Sequence
  ENSG00000059377_30 (sequence is synthesized)
gaggaggctcacaaatggaataagggaagatggggcccgtcagcgcccaggccagcttcagggcattttcttctagatgaggcccctcttgatcgtttatagcagatataacgagggtgc

SEQ ID NO: 40692 - DNA, 120 bp, Artificial Sequence
  ENSG00000059377_31 (sequence is synthesized)
tgagcaaggctactttatcacctcattttttcttctagatgcttgtgtgtgtataactttgactcatgagttgtcaaagagattcatttttaaaatctgtactttaaaaggaagaccacc

SEQ ID NO: 40693 - DNA, 120 bp, Artificial Sequence
  ENSG00000059377_32 (sequence is synthesized)
acagtggaatcctttctgttacattctgatatgattgctattacattcaccattttgaaaggtggtctgttctgttactggaaccattaaaaaatgtttcatacaatgaactgaaaacca

SEQ ID NO: 40694 - DNA, 120 bp, Artificial Sequence
  ENSG00000059377_33 (sequence is synthesized)
attgttctgcctggctctgacatggacttttcatctctctcctctctccccacctagccccgtgcattccgattccacagcccccccaaaatcggaggctcgcggagaataaaggagcgt

SEQ ID NO: 40695 - DNA, 120 bp, Artificial Sequence
  ENSG00000059377_34 (sequence is synthesized)
ggggtgggcgcggaaagaaatgggaaggggcgcggggcggagagcgaagtggaaaggaggtgctccgaaagctctttattttccatgtgtgagcctgtgcctgtggtttatctctggagg

SEQ ID NO: 40696 - DNA, 88 bp, Artificial Sequence
  ENSG00000059377_35 (sequence is synthesized)
cccaggctggagtgcacttgcagtagcataatcacaatttcttcctgcctcagcccccaaagtagctgggactacaggcatgcaccac

SEQ ID NO: 40697 - DNA, 120 bp, Artificial Sequence
  ENSG00000059377_36 (sequence is synthesized)
gctgggactacaggcatgcaccaccatggctggctaagttttaaaacttttttgtagagacatggtctctctgtgttgcccaggctggtctaggactcctgggctcaagcaatcctccca

SEQ ID NO: 40698 - DNA, 120 bp, Artificial Sequence
  ENSG00000059377_37 (sequence is synthesized)
tcccaaagtgctgagattacaggtgcaaactatctcacccagcctttaatctttttattagtgagatatctgacccaacggctaggatctgatggtctttttagtatggcctcaaatcac

SEQ ID NO: 40699 - DNA, 120 bp, Artificial Sequence
  ENSG00000059377_38 (sequence is synthesized)
aggccgaaccgaagggctcacagaacatttcctgcctgttgctcacactctgttgtccacagcatacccgcaccctagatggctgactcttgtcttctgtttgtgaaactgcacaacatc

SEQ ID NO: 40700 - DNA, 120 bp, Artificial Sequence
  ENSG00000059377_39 (sequence is synthesized)
caatatcttcaaggccacaggatagagataaccctctttttggtgtatgcatttagctctttattttccatgtgtgagcctgtgcctgtggtttatctctggaggatgtgcctgagggag

SEQ ID NO: 40701 - DNA, 120 bp, Artificial Sequence
  ENSG00000059377_40 (sequence is synthesized)
tcatgcccaactccagacatcacgtggcctctagagggatgtggcctggagggaggcggctggcctgctacctccatcccttcaggatggccgaaggaattgcagaagtttaactgcttc

SEQ ID NO: 40702 - DNA, 120 bp, Artificial Sequence
  ENSG00000059377_41 (sequence is synthesized)
gttgctccatcagcctcagcaaggagtgctgattaaagaagttggagaagccaataagtcaaagtgcacggaccaccaagccacatcctggcaagcagtaaaggtactcccaggagcctg

SEQ ID NO: 40703 - DNA, 120 bp, Artificial Sequence
  ENSG00000059377_42 (sequence is synthesized)
tcatagcacttgagactgtctgagcccctaagccatgagacggcacttgccaactggtgtctccatatttcctcccatgataccaggacatgtgaccctgagagctgacctagaagaggt

SEQ ID NO: 40704 - DNA, 120 bp, Artificial Sequence
  ENSG00000059377_43 (sequence is synthesized)
caatgatttggcctgctaggggcagacatactcaatgcacatgtccaagcaaggaggacacaataatattgccctcagctttgatcaatttatcctccaagccatttgtctgccgtttct

SEQ ID NO: 40705 - DNA, 120 bp, Artificial Sequence
  ENSG00000059377_44 (sequence is synthesized)
aatttctttcaccatcccctcacccacccctccacgcagactaggtccagtgccccaaactccagagtagagttccaattttcgtcctcttccactcagcacaggattaagccttcagga

SEQ ID NO: 40706 - DNA, 120 bp, Artificial Sequence
  ENSG00000059377_45 (sequence is synthesized)
ctaagttcaagttccctagacgatatttaagggcccttgtgtcttagatccattgtgtgtgctccaccctgtctctcactgctccccaatacaaatcgtcactccagcctctccctgctc

SEQ ID NO: 40707 - DNA, 120 bp, Artificial Sequence
  ENSG00000059377_46 (sequence is synthesized)
accctcacctgctctggagagacctgacctctgccttgctcacgctgacactgcctcagaattgaaggcagtgtaacagtggggctcatattgattatgacgtgagcttgagcacatatc

SEQ ID NO: 40708 - DNA, 66 bp, Artificial Sequence
  ENSG00000059377_47 (sequence is synthesized)
gccaaatggagctcagaaagctgtatggacctctgtgtggtctgtagtgcagtggcttgatcttgg

SEQ ID NO: 40709 - DNA, 120 bp, Artificial Sequence
  ENSG00000059377_48 (sequence is synthesized)
aacgtttctattatgtacgatattttctattatgtacgatattttgattttcacgtgttgaactgatatagaagaaatgccaagattaggaatgttgtatgtgtttctatttttcaaagg

SEQ ID NO: 40710 - DNA, 120 bp, Artificial Sequence
  ENSG00000059377_49 (sequence is synthesized)
gcccacaaagagggagtcctgcagtacagacaaggcttctagagaagaccctggggttgcccacggggggactctgctggcctgaaagagtaccactttccagcctttgcagccttgctg

SEQ ID NO: 40711 - DNA, 120 bp, Artificial Sequence
  ENSG00000059378_0 (sequence is synthesized)
attcctggattacctcctcaaagggctctaacaactcgcattgctctcagcgtgtgagagggtcctttgctctgaagggtcttctaaaatatttgttcaatcgttacttagcaggggctg

SEQ ID NO: 40712 - DNA, 82 bp, Artificial Sequence
  ENSG00000059378_1 (sequence is synthesized)
gcgcaatctcggctcacggatttgctcttttaaaggacatacccttttatgtttaaatgaaggaactcattgatgcaccgag

SEQ ID NO: 40713 - DNA, 120 bp, Artificial Sequence
  ENSG00000059378_2 (sequence is synthesized)
ccttttatgtttaaatgaaggaactcattgatgcaccgaggcgaaaggaacctttaattaagtgcgtcttctatgcggagtgatcgcttttgtcacttgttcgaggggtgagagctcccg

SEQ ID NO: 40714 - DNA, 120 bp, Artificial Sequence
  ENSG00000059378_3 (sequence is synthesized)
tcagttgtccctgtttctgtgagccgtctacgaagcccgggcttggcctgggcgacgctgagcggctttaaccggcggcgtccagccggctccgccagcgctgccgccgccctcgaggct

SEQ ID NO: 40715 - DNA, 120 bp, Artificial Sequence
  ENSG00000059378_4 (sequence is synthesized)
ccctctgactgaaggcgcgctgagcatcgcggcattaggggctcctggtccctcaaacatccagggaagccattttcagggactaggtactgacccccgcgagccgccacagccacagcc

SEQ ID NO: 40716 - DNA, 120 bp, Artificial Sequence
  ENSG00000059378_5 (sequence is synthesized)
cgcgctccgggccgaacgcccgagctcaagagctcccgagcttccgtcgggcggcggcctcacagctgggggccctgaggcggaaggcgcagccgctcagctgcggaccgggggcgtggc

SEQ ID NO: 40717 - DNA, 120 bp, Artificial Sequence
  ENSG00000059378_6 (sequence is synthesized)
gagggcgcacaggttctgtttttcgccggcccggggccgctttcggtttcgtttcccgccggcgtctccaccctgcgagagccgcccgccagccagcgtccgccgccgtccgcgtcgcgc

SEQ ID NO: 40718 - DNA, 120 bp, Artificial Sequence
  ENSG00000059378_7 (sequence is synthesized)
ggagcaggcccagcggccatggcccaggccggcgtcgtcggtgaggtcacccaggtgctgtgcgcggccgggggcgccctggagttgcccgagctgcggcgccgcttgcggatgggcttg

SEQ ID NO: 40719 - DNA, 80 bp, Artificial Sequence
  ENSG00000059378_8 (sequence is synthesized)
cttgcggatgggcttgagcgccgacgcgctggagcggctgctgcggcagcgtgggcgcttcgtggtggcggtgcgggcgg

SEQ ID NO: 40720 - DNA, 120 bp, Artificial Sequence
  ENSG00000059378_9 (sequence is synthesized)
ctcgccgctgcgcctgtgtcgcgcgcaccagggctccaagccgggctgcgtggggctctgcgcgcagctccacctctgcaggttcatggtctacggcgcctgcaagttcctgagagccgg

SEQ ID NO: 40721 - DNA, 120 bp, Artificial Sequence
  ENSG00000059378_10 (sequence is synthesized)
gaagaactgtaggaatagtcacagcttgacaaccgaacacaacctgagtgtgctgagaactcatggcgttgaccacctgagctataatgagctatgccaactcttgtttcagaacgaccc

SEQ ID NO: 40722 - DNA, 120 bp, Artificial Sequence
  ENSG00000059378_11 (sequence is synthesized)
ctggcttttgccagaaatttgccaacattacaacaaaggagatggaccccacggctcttgtgcctttcaaaagcagtgcatcaagctccatatctgccagtattttttacagggggaatg

SEQ ID NO: 40723 - DNA, 120 bp, Artificial Sequence
  ENSG00000059378_12 (sequence is synthesized)
caagtttggcactagctgtaagagatcccatgatttctctaattctgagaatctggaaaaattggagaagttgggtatgagctcagacctggtgagcaggctgcctaccatttatagaaa

SEQ ID NO: 40724 - DNA, 120 bp, Artificial Sequence
  ENSG00000059378_13 (sequence is synthesized)
tgcacatgacatcaagaataagagctctgcccccagcagagtgcctcctctttttgtcccacaggggacttctgaaagaaaagacagttcaggttctgtgtccccaaacactcttagcca

SEQ ID NO: 40725 - DNA, 120 bp, Artificial Sequence
  ENSG00000059378_14 (sequence is synthesized)
ggaggagggtgatcagatctgtttgtaccatatccggaaaagttgtagctttcaagataagtgccatagagttcatttccatttgccgtatcgatggcaattcttggatagaggcaaatg

SEQ ID NO: 40726 - DNA, 120 bp, Artificial Sequence
  ENSG00000059378_15 (sequence is synthesized)
tcagccagtacctttcactctcattgtctgaactttaacgccatgacttacggtgctacccaggctcgccgcctctccacggcctcctctgtcaccaaacctccacacttcatcctcacc

SEQ ID NO: 40727 - DNA, 120 bp, Artificial Sequence
  ENSG00000059378_16 (sequence is synthesized)
actgactggatttggtactggagtgatgagtttggttcttggcaggaatatggaagacagggcacggtgcaccctgtgaccactgtcagcagtagcgacgtggagaaggcctacctggcc

SEQ ID NO: 40728 - DNA, 120 bp, Artificial Sequence
  ENSG00000059378_17 (sequence is synthesized)
tactgtacaccggggtctgacggccaggcagccaccttgaagttccaggccggaaagcacaactacgagttagatttcaaagccttcgttcagaaaaacctggtctatggcacaactaaa

SEQ ID NO: 40729 - DNA, 120 bp, Artificial Sequence
  ENSG00000059378_18 (sequence is synthesized)
aaggtttgccgcagacccaaatacgtgtctccccaggatgtgacgaccatgcaaacctgcaataccaagtttccaggcccgaagagcatcccagactattgggactcctctgccctgcca

SEQ ID NO: 40730 - DNA, 120 bp, Artificial Sequence
  ENSG00000059378_19 (sequence is synthesized)
gacccaggctttcagaagatcacccttagttcttcctcggaagagtatcagaaggtctggaacctctttaaccgcacgctgcctttctactttgttcagaagattgagcgagtacagaac

SEQ ID NO: 40731 - DNA, 120 bp, Artificial Sequence
  ENSG00000059378_20 (sequence is synthesized)
ctggccctctgggaagtctaccagtggcaaaaaggacagatgcagaagcagaacggagggaaggccgtggacgagcggcagctgttccacggcaccagcgccatttttgtggacgccatc

SEQ ID NO: 40732 - DNA, 120 bp, Artificial Sequence
  ENSG00000059378_21 (sequence is synthesized)
tgccagcagaactttgactggcgggtctgtggtgttcatggcacttcctacggcaaggggagctactttgcccgagatgctgcatattcccaccactacagcaaatccgacacgcagacc

SEQ ID NO: 40733 - DNA, 120 bp, Artificial Sequence
  ENSG00000059378_22 (sequence is synthesized)
cacacgatgttcctggcccgggtgctggtgggcgagttcgtcaggggcaatgcctcctttgtccgtccgccggccaaggagggctggagcaacgccttctatgatagctgcgtgaacagt

SEQ ID NO: 40734 - DNA, 120 bp, Artificial Sequence
  ENSG00000059378_23 (sequence is synthesized)
gtgtccgacccctccatctttgtgatctttgagaaacaccaggtctacccagagtatgtcatccagtacaccacctcctccaagccctcggtcacaccctccatcctgctggccttgggc

SEQ ID NO: 40735 - DNA, 120 bp, Artificial Sequence
  ENSG00000059378_24 (sequence is synthesized)
tccctgttcagcagccgacagtgagcgcacaggagtgttccaggcctttcacctgctctgccttgaaatggctatttgggcctttccttttctttttaaacagaaacttttaatgaactg

SEQ ID NO: 40736 - DNA, 120 bp, Artificial Sequence
  ENSG00000059378_25 (sequence is synthesized)
ttctcttaacattgacctctcaatgaagttatgttcttaatctcttgctaataatgatttttacttttaagtcacttttgggttcactagtggattaaccagaagtgattgtagttgagt

SEQ ID NO: 40737 - DNA, 120 bp, Artificial Sequence
  ENSG00000059378_26 (sequence is synthesized)
ccagttttgctttttaataatgtgttgaagttttagtttttactctttgttgactttgctgcttattggcaccagggacagagtttctagatacaattttatggattggttttaattttt

SEQ ID NO: 40738 - DNA, 120 bp, Artificial Sequence
  ENSG00000059378_27 (sequence is synthesized)
atgagtttgtctctgcagtgattcggtttctcagagtctcatggcatcatagtttttccagaatgacacagtagccaccggtggatgacagcccacgggcggcacagtcacttctgcctg

SEQ ID NO: 40739 - DNA, 120 bp, Artificial Sequence
  ENSG00000059378_28 (sequence is synthesized)
ttgctctgacaccaacccaggcagctctgctgtggcttctcctgggctctggcattagttggtctgtgtcacattgtcagaacaggtggctgctgtgtggtgccatcgagtccctgctgg

SEQ ID NO: 40740 - DNA, 120 bp, Artificial Sequence
  ENSG00000059378_29 (sequence is synthesized)
ttccccttgtcctgggagggtcacccattgcccaaggaagtgcatccacctggcaggtgacctggaggagtagcttccccgaggacccccaggcttggcctgtgattgcgcaaacccaca

SEQ ID NO: 40741 - DNA, 120 bp, Artificial Sequence
  ENSG00000059378_30 (sequence is synthesized)
tttcctaagcacactggacacccttcgagtgtgggttttaacatccctgtgagattgaatacttgtgccacacatgtcacaaaagagtatggaaataaaagaaaatttatccgaagtgga

SEQ ID NO: 40742 - DNA, 120 bp, Artificial Sequence
  ENSG00000059378_31 (sequence is synthesized)
ctgcccagcagtccatgttccgggtccatcagttctttgttagtcagtttccgtctgaggcagcgatggcaaggggtcaagatggacagcagccagtggtagacttgtggatttaaatgt

SEQ ID NO: 40743 - DNA, 120 bp, Artificial Sequence
  ENSG00000059378_32 (sequence is synthesized)
acaggtgacagcttctaactcagatttccatttgacaaggctcataattctatacattgggctgccagagtctacagactgcttccgtatatgggatctcattcattttccatgccaacc

SEQ ID NO: 40744 - DNA, 120 bp, Artificial Sequence
  ENSG00000059378_33 (sequence is synthesized)
ttttatgtttttcaaaaaatgttttatttcatattttctcctgcttttcctgagctgtataaaaagttttaaaatgtcaattatacctcatcgaggccttaaaaaaatgtctttagagct

SEQ ID NO: 40745 - DNA, 120 bp, Artificial Sequence
  ENSG00000059378_34 (sequence is synthesized)
cttagaatttcagaattgtggataaaggtttatggctgtgtgtgtgctcctttaaccatgtactccatcccttttatcccttttgtgtggtagttgggacacaggcgagaaatagatctc

SEQ ID NO: 40746 - DNA, 120 bp, Artificial Sequence
  ENSG00000059378_35 (sequence is synthesized)
tcaggactgtttggagtttggctacataggcaaagataaaagtgctctcatgttgtgaatatcgtgctaacattcttccttgccttctacctgctcttgaaatatgatgtgctgagactc

SEQ ID NO: 40747 - DNA, 120 bp, Artificial Sequence
  ENSG00000059378_36 (sequence is synthesized)
ccgtcatctagagtgagggatgtaatagctgtgttctgtgtggatgatggaatcacagcttgtgaagcccctttctcaccagtggactggccactggggaggtggtgtcgtgtgagacct

SEQ ID NO: 40748 - DNA, 120 bp, Artificial Sequence
  ENSG00000059378_37 (sequence is synthesized)
tgagcctctcagtgtgctccattgagaaatgaaagggtggtatttggccttctctaagatgctttaagccctcagagcctctttgactttgaattgtagaaaagagagctcagagaaaac

SEQ ID NO: 40749 - DNA, 120 bp, Artificial Sequence
  ENSG00000059378_38 (sequence is synthesized)
tggggcttggggaagggagagttgatgagtcagtgtgggaagagtataggtagattgtagaggtccttaggatgtagccatttgatttgcattgtctcatgtgaaaggagcagctctagt

SEQ ID NO: 40750 - DNA, 120 bp, Artificial Sequence
  ENSG00000059378_39 (sequence is synthesized)
gaaaccaatttcccatatgctaactgacataaacaagaggtttgttgttttacttaaaattgcagtttccaagaacctatcaatgacatttcatgaggaccgattgtctcctgtgcctgg

SEQ ID NO: 40751 - DNA, 120 bp, Artificial Sequence
  ENSG00000059378_40 (sequence is synthesized)
agaaaccacaggagaatgtggtcactgctctctgggcttttgtgcttctgcggttctagtgtttacaagaagctttgggaagggactgatttatattctgcacgttgatggtaatgcatt

SEQ ID NO: 40752 - DNA, 120 bp, Artificial Sequence
  ENSG00000059378_41 (sequence is synthesized)
tgttttgtcctgaggatctgtaagagaggagccaaataagagcccccatattgttgccaggggcatccttgagagagctgaggatccccaggtgccagtgtggctcacttgctttgggag

SEQ ID NO: 40753 - DNA, 120 bp, Artificial Sequence
  ENSG00000059378_42 (sequence is synthesized)
aattatggcaaaactagataagttggaatttatttgtatgagctttcatctttgaagagcttccatctgttggctcatgagaactgaatgacaaatttgtagtgagatcaagtttcttca

SEQ ID NO: 40754 - DNA, 120 bp, Artificial Sequence
  ENSG00000059378_43 (sequence is synthesized)
ttggaccagagtgggaattaccctgtgggtagaagcttcgtgatgcataattagaaggctgcctgttgtgatctgcgatgattctctggagaagacagactctgaaggcgagtctagact

SEQ ID NO: 40755 - DNA, 120 bp, Artificial Sequence
  ENSG00000059378_44 (sequence is synthesized)
tgaagccaacccatccgtttgtcttttctgtggaatcattgagtcatagacttgaattttttaaatgttgaaataatgaaataatgatggaattacaccaataaaaactcatgtatttta

SEQ ID NO: 40756 - DNA, 120 bp, Artificial Sequence
  ENSG00000059378_45 (sequence is synthesized)
aaagaaaagacagttcaggttctgtgtccccaaacactcttagccaggaggagggtgatcagatctgtttgtaccatatccggaaaagttgtagctttcaagggcacggtgcaccctgtg

SEQ ID NO: 40757 - DNA, 120 bp, Artificial Sequence
  ENSG00000059378_46 (sequence is synthesized)
caaagtcataaaacttacattaactctgaatcccactaactcaagacatggtagtttgatctcaggctgggctgaggcttttttatatccaagctgggaaaaattgccaagcaaaataat

SEQ ID NO: 40758 - DNA, 120 bp, Artificial Sequence
  ENSG00000059378_47 (sequence is synthesized)
ggtttaaacaagattggaaggaacaatttaaaagcactcatgtgtaattgatatgtcaattactaatcattcctctattcattaaacccagtctcctaaggatacctattttctttatga

SEQ ID NO: 40759 - DNA, 120 bp, Artificial Sequence
  ENSG00000059573_0 (sequence is synthesized)
atcgtgcgggacgtggacggaagaaaaaagagagtgagcgagcgccggaatcagcccggcgtggagtgcggacccgcggtagtgccagggggcgaaggcggcggtggtgaggaagatact

SEQ ID NO: 40760 - DNA, 120 bp, Artificial Sequence
  ENSG00000059573_1 (sequence is synthesized)
ttggttagtgaccacatcgcagcatgttgagtcaagtttaccgctgtgggttccagcccttcaaccaacatcttctgccctgggtcaagtgtacaaccgtcttcagatctcattgtatcc

SEQ ID NO: 40761 - DNA, 120 bp, Artificial Sequence
  ENSG00000059573_2 (sequence is synthesized)
agccttcagtcatcagacatgttcgttcttggagcaacatcccgtttatcactgtacccctcagtcgtacacatggcaagtccttcgcccaccgcagtgagctgaagcatgccaagagaa

SEQ ID NO: 40762 - DNA, 120 bp, Artificial Sequence
  ENSG00000059573_3 (sequence is synthesized)
tcgtggtgaagctcggcagtgccgtggtgacccgaggggatgaatgtggcctggccctggggcgcttggcatctattgttgagcaggtatcagtgctgcagaatcagggcagagagatga

SEQ ID NO: 40763 - DNA, 120 bp, Artificial Sequence
  ENSG00000059573_4 (sequence is synthesized)
tgctggtgaccagtggagccgtagcctttggcaaacaacgcttgcgccatgagatccttctgtctcagagcgtgcggcaggccctccactcggggcagaaccagctgaaagaaatggcaa

SEQ ID NO: 40764 - DNA, 120 bp, Artificial Sequence
  ENSG00000059573_5 (sequence is synthesized)
ttccagtcttagaggcacgagcctgtgcagctgccggacagagtgggctgatggccttgtatgaggctatgtttacccagtacagcatctgtgctgcccagattttggtgaccaatttgg

SEQ ID NO: 40765 - DNA, 120 bp, Artificial Sequence
  ENSG00000059573_6 (sequence is synthesized)
atttccatgatgagcagaagcgccggaacctcaatggaacacttcatgaactccttagaatgaacattgtccccattgtcaacacaaatgatgctgttgtccccccagctgagcccaaca

SEQ ID NO: 40766 - DNA, 120 bp, Artificial Sequence
  ENSG00000059573_7 (sequence is synthesized)
gtgacctgcagggggtaaatgttattagtgttaaagataatgatagcctggctgcccgactggctgtggaaatgaaaactgatctcttgattgttctttcagatgtagaaggcctttttg

SEQ ID NO: 40767 - DNA, 120 bp, Artificial Sequence
  ENSG00000059573_8 (sequence is synthesized)
acagccccccaggttcagatgatgcaaagcttattgatatattttatcccggagatcagcagtctgtgacatttggaaccaagtctagagtgggaatgggtggcatggaagccaaggtga

SEQ ID NO: 40768 - DNA, 120 bp, Artificial Sequence
  ENSG00000059573_9 (sequence is synthesized)
aagcagccctctgggctttgcaaggtggcacttctgttgttattgccaatggaacccacccaaaggtgtctgggcacgtcatcacagacattgtggaggggaagaaagttggtaccttct

SEQ ID NO: 40769 - DNA, 120 bp, Artificial Sequence
  ENSG00000059573_10 (sequence is synthesized)
tttcagaagtaaagcctgcaggccctactgttgagcagcagggagaaatggcgcgatctggaggaaggatgttggccaccttggaacctgagcagagagcagaaattatccatcatctgg

SEQ ID NO: 40770 - DNA, 120 bp, Artificial Sequence
  ENSG00000059573_11 (sequence is synthesized)
ctgatctgttgacggaccagcgtgatgagatcctgttagccaacaaaaaagacttggaggaggcagaggggagacttgcagctcctctgctgaaacgtttaagcctctccacatccaaat

SEQ ID NO: 40771 - DNA, 120 bp, Artificial Sequence
  ENSG00000059573_12 (sequence is synthesized)
tgaacagcctggccatcggtctgcgacagatcgcagcctcctcccaggacagcgtgggacgtgttttgcgccgcacccgaatcgccaaaaacttggaactggaacaagtgactgtcccaa

SEQ ID NO: 40772 - DNA, 120 bp, Artificial Sequence
  ENSG00000059573_13 (sequence is synthesized)
acacagcaaccggattctccacctcctgacccaggaggctctctcaatccatggagtcaaggaggccgtgcaactggtgaataccagagaagaagttgaagatctttgccgcctagacaa

SEQ ID NO: 40773 - DNA, 120 bp, Artificial Sequence
  ENSG00000059573_14 (sequence is synthesized)
aatgatagatctgatcattccacgtggctcttcccagctggtcagagacatccagaaagctgctaaggggattccagtgatggggcacagcgaagggatctgtcacatgtatgtggattc

SEQ ID NO: 40774 - DNA, 120 bp, Artificial Sequence
  ENSG00000059573_15 (sequence is synthesized)
cgaggccagtgttgataaggtcaccaggctagtcagagactctaaatgtgaatatccagctgcctgtaatgctttggagactttgttaatccaccgggatctgctcaggacaccattatt

SEQ ID NO: 40775 - DNA, 120 bp, Artificial Sequence
  ENSG00000059573_16 (sequence is synthesized)
tgaccagatcattgatatgctgagagtggaacaggtaaaaattcatgcaggccccaaatttgcctcctatctgaccttcagcccctccgaagtgaagtcactccgaactgagtatgggga

SEQ ID NO: 40776 - DNA, 120 bp, Artificial Sequence
  ENSG00000059573_17 (sequence is synthesized)
cctggaattatgcattgaagtagtggacaacgttcaggatgccattgaccacatccacaagtatggcagctcccacacggatgtcatcgtcacagaggacgaaaacacagcggagttctt

SEQ ID NO: 40777 - DNA, 120 bp, Artificial Sequence
  ENSG00000059573_18 (sequence is synthesized)
cctgcagcacgtagacagtgcctgtgtgttctggaatgccagcactcgcttttctgatggttaccgctttggactgggagctgaagtgggaatcagtacatcgagaatccacgcccgggg

SEQ ID NO: 40778 - DNA, 120 bp, Artificial Sequence
  ENSG00000059573_19 (sequence is synthesized)
accagtaggacttgagggactgcttactactaagtggctgctgcgagggaaggaccacgtggtctcagatttctcagagcatggaagtttaaaatatcttcatgagaacctccctattcc

SEQ ID NO: 40779 - DNA, 120 bp, Artificial Sequence
  ENSG00000059573_20 (sequence is synthesized)
tcagagaaacaccaactgaaaagagccaggaaaacccgggaattttccaaaaggtcttcacgttaaacttgtcttatctcaggagagagcccgctcttgtctcccagttcctggtagggt

SEQ ID NO: 40780 - DNA, 120 bp, Artificial Sequence
  ENSG00000059573_21 (sequence is synthesized)
ctgcctgttggaaagtgtacctggatgcttctgggctccgtttggcaatagcagtcttggctgatgtgcacagtctggctcccagctcaccctttttttttaaagtaagaaaatagttgc

SEQ ID NO: 40781 - DNA, 120 bp, Artificial Sequence
  ENSG00000059573_22 (sequence is synthesized)
taccgatagggactttgccaagtccaattatcttctaggattgaaaggtgcattttccccataaaaaaggcgaggaaaacccatggctgctttgtgtcacctcagtgacttacagtcccc

SEQ ID NO: 40782 - DNA, 120 bp, Artificial Sequence
  ENSG00000059573_23 (sequence is synthesized)
cttggcatttagttggtactagagccagtcatccttaacaaatcttttcacattttatttctttcacatgtagtcatcttcaaaaaggaaagatttggaattttagaaaaggggcaactc

SEQ ID NO: 40783 - DNA, 120 bp, Artificial Sequence
  ENSG00000059573_24 (sequence is synthesized)
ttctttttagcattctcatcagaaagtcacaaaaatcgatggaatcatttccactgggaagattgaccttttgtatttatttgtggggtaaattaataagcattccagatgcttgcagct

SEQ ID NO: 40784 - DNA, 120 bp, Artificial Sequence
  ENSG00000059573_25 (sequence is synthesized)
tcctgcatccaggagatgctgtgttccccgtgatgcagctggaacccaagctgcagcaggagatgcaagtttcaggatgttccccactgagctggaggaatatctacagcagtgatgctt

SEQ ID NO: 40785 - DNA, 120 bp, Artificial Sequence
  ENSG00000059573_26 (sequence is synthesized)
gaaatttttgtatgaattattttgtcgtcctacccttttcctccaaaacaaaaattagaggattattttaatactttggattcttcccccttttttgagaaataaagttttttatgaaaa

SEQ ID NO: 40786 - DNA, 120 bp, Artificial Sequence
  ENSG00000059573_27 (sequence is synthesized)
ggtggtgaggaaggtacgcggcgagcggcggggatggctaggcgcccgcgtctctgcggaagctgttgcgcgcccaggctcaagcgcgaggggcgtgagcgccgggccgctggagcgggg

SEQ ID NO: 40787 - DNA, 120 bp, Artificial Sequence
  ENSG00000059573_28 (sequence is synthesized)
gaaggagtgcttgtgaatgctaacatcactgttgctattactgtttgtctcctttgatccactgctctccctttgatctgcaggtggcagctttggctatcgcaagtggcaatggcttgt

SEQ ID NO: 40788 - DNA, 120 bp, Artificial Sequence
  ENSG00000059573_29 (sequence is synthesized)
ccttctttttcagttctgtccttaaagcacagcatcataagtagcaatggcagaattaaggacaccttgccaggaatatgggcagggctaataaatgttgtgctgaggatatggccatga

SEQ ID NO: 40789 - DNA, 120 bp, Artificial Sequence
  ENSG00000059588_0 (sequence is synthesized)
cggtcctgtgcgcacgcatcgcacacgccggcgccttcctttgggagcccgggccggtggcgcgggcgctcggcaaatggagtgggtgctcgcggaagcgctgctctcgcagagccggga

SEQ ID NO: 40790 - DNA, 120 bp, Artificial Sequence
  ENSG00000059588_1 (sequence is synthesized)
cccccgggccctgcttggggcgctgtgccaaggggaggcatccgcggagcgcgtggagacgctgcgcttccttctgcagcggctcgaggacgaggaggcgcgcggcagcgggggcgcagg

SEQ ID NO: 40791 - DNA, 80 bp, Artificial Sequence
  ENSG00000059588_2 (sequence is synthesized)
cgcgctcccggaggcggcgcgcgaggtggctgcagggtacctcgtgccactgctgcggagcctgcgcggacgccccgcgg

SEQ ID NO: 40792 - DNA, 120 bp, Artificial Sequence
  ENSG00000059588_3 (sequence is synthesized)
cgtgcgtccgcctggccgggcgtccgcagctggcggccgcgctggctgaggaggcgctgcgcgatctgctcgccgggtggcgcgcgcctggcgccgaggctgccgtggaagtgctagcag

SEQ ID NO: 40793 - DNA, 120 bp, Artificial Sequence
  ENSG00000059588_4 (sequence is synthesized)
cgcctggcgccgaggctgccgtggaagtgctagcagccgtcgggccatgtttgcggccccgcgaggacgggccgctactggagcgcgtggcggggaccgccgtcgccctggcgctgggcg

SEQ ID NO: 40794 - DNA, 80 bp, Artificial Sequence
  ENSG00000059588_5 (sequence is synthesized)
cggggacggggatgaggccgggcctgccgaggacgcggcggcgctggtggccgggcgactgctgccagtgctggtccaat

SEQ ID NO: 40795 - DNA, 120 bp, Artificial Sequence
  ENSG00000059588_6 (sequence is synthesized)
gccgtgtggggcgggctggccgcgcctggggcgtccctggggtccggccgcgtagaggagaagctgctggtcctgagcgccctggccgagaagctgttgcccgagcccggcggcgaccgc

SEQ ID NO: 40796 - DNA, 120 bp, Artificial Sequence
  ENSG00000059588_7 (sequence is synthesized)
gggcccggacgcccggcgctgctggcgcttctggaggacggtgcaggcggggctgggccaggcggacgccctgacgcgcaagcgagcgcgctacctgctgcagagggcggtggaggtgtc

SEQ ID NO: 40797 - DNA, 120 bp, Artificial Sequence
  ENSG00000059588_8 (sequence is synthesized)
ggcggagctgggggccgactgcacctgcgggccccaggaaggaaacggcccaagtctgttttggtggtctgagaggaaaaaagatgagcttctaaagttttgggaaaattatattttaat

SEQ ID NO: 40798 - DNA, 120 bp, Artificial Sequence
  ENSG00000059588_9 (sequence is synthesized)
tatggagactttagaaggaaatcagatacatgttataaagccagttttaccaaagctaaacaatctgtttgaatatgcggtgtcagaggaaaatggatgttggctctttcacccatcctg

SEQ ID NO: 40799 - DNA, 120 bp, Artificial Sequence
  ENSG00000059588_10 (sequence is synthesized)
gcatatgtgtatttataaaagaatgtttgaaagtgaaaacaaaatcctgtccaaagaaggtgttatccattttttggagctgtatgaaacaaagattcttccattttcaccagaattttc

SEQ ID NO: 40800 - DNA, 120 bp, Artificial Sequence
  ENSG00000059588_11 (sequence is synthesized)
tgagtttattattggaccattaatggatgcgctttcagagagctctctgtatagcaggtccccaggccagccaataggaagctgttctccattgggactgaaattacagaagtttttagt

SEQ ID NO: 40801 - DNA, 120 bp, Artificial Sequence
  ENSG00000059588_12 (sequence is synthesized)
cacttatatttctcttcttccagaagaaataaagagtagcttcctattgaagtttattcggaagatgacaagtaggcattggtgtgctgttcccattttgtttctatctaaggctttggc

SEQ ID NO: 40802 - DNA, 120 bp, Artificial Sequence
  ENSG00000059588_13 (sequence is synthesized)
aaatgtcccaagacataaggccctgggtatagatgggcttcttgctctcagggatgttattcattgcactatgatcacacatcagattctcctgagaggggcagcccaatgctaccttct

SEQ ID NO: 40803 - DNA, 120 bp, Artificial Sequence
  ENSG00000059588_14 (sequence is synthesized)
tcaaacagctatgaatttgctagatgtggagaaagtgtcactttctgatgtctcaacttttctcatgtctctgagacaagaggaatccttaggacgaggaacttcattgtggacagagct

SEQ ID NO: 40804 - DNA, 120 bp, Artificial Sequence
  ENSG00000059588_15 (sequence is synthesized)
gtgtgactggctacgtgttaatgaaagctattttaagccatcccctacgtgtagctccattggacttcacaagacatctttaaatgcttatgtaaagagcattgttcaagagtatgttaa

SEQ ID NO: 40805 - DNA, 120 bp, Artificial Sequence
  ENSG00000059588_16 (sequence is synthesized)
gtcatctgcttgggaaacaggagaaaactgctttatgcctgattggtttgaagccaagcttgtttctctgatggtcttgctggctgtggatgtggaaggaatgaagactcagtatagcgg

SEQ ID NO: 40806 - DNA, 120 bp, Artificial Sequence
  ENSG00000059588_17 (sequence is synthesized)
aaagcagagaacagagaatgtattgcggatattcttagaccctcttctggatgtgcttatgaagtttagtaccaatgcctacatgcccttgctgaagactgacagatgcctccagctgct

SEQ ID NO: 40807 - DNA, 120 bp, Artificial Sequence
  ENSG00000059588_18 (sequence is synthesized)
gttgaagctgttgaacacatgcaggttgaaaggttccagtgcccaagatgatgaggtgtctactgttcttcagaactttttcatgtctactacagagagcatttctgaatttattctcag

SEQ ID NO: 40808 - DNA, 120 bp, Artificial Sequence
  ENSG00000059588_19 (sequence is synthesized)
aagacttactatgaatgagctaaatagtgtttcagatctggatcgttgccatttatacctgatggtgttaactgagcttataaatctgcatttgaaggttgggtggaaaaggggtaaccc

SEQ ID NO: 40809 - DNA, 120 bp, Artificial Sequence
  ENSG00000059588_20 (sequence is synthesized)
tatctggagagttatttctcttttgaaaaatgcatccattcagcatcttcaagagatggacagtggacaggagccaacagttggaagtcagattcagagagtagtgagcatggctgcctt

SEQ ID NO: 40810 - DNA, 120 bp, Artificial Sequence
  ENSG00000059588_21 (sequence is synthesized)
gactctctccatgctgggcccctggaaagcttcctttcctctcttcagctcaatcagacgctgcagaagccccacgcagaggagcagagcagttatgctcaccccttggagtgcagcagt

SEQ ID NO: 40811 - DNA, 120 bp, Artificial Sequence
  ENSG00000059588_22 (sequence is synthesized)
gttttggaagaatcgtcatcttcccaaggatggggaaaaatagttgcacaatatattcatgatcaatgggtgtgcctctctttcctgttgaaaaaatatcacacccttataccaaccaca

SEQ ID NO: 40812 - DNA, 120 bp, Artificial Sequence
  ENSG00000059588_23 (sequence is synthesized)
gggagtgaaattctggaaccgtttctacctgccgttcagatgccaataaggactttgcagtctgcactagaagccctcacagttctttcttctgatcaagttttaccagtgttccattgc

SEQ ID NO: 40813 - DNA, 120 bp, Artificial Sequence
  ENSG00000059588_24 (sequence is synthesized)
ttgaaagtgttggttcccaagcttctgacttcctctgaatcactctgcatagagtcttttgacatggcgtggaaaattatatcttctttaagcaacactcagctgatattctgggctaat

SEQ ID NO: 40814 - DNA, 120 bp, Artificial Sequence
  ENSG00000059588_25 (sequence is synthesized)
ttaaaagcttttgttcagtttgtttttgataacaaagttcttaccattgctgccaaaatcaagggccaggcatatttcaaaataaaagagattatgtacaagataattgaaatgtctgct

SEQ ID NO: 40815 - DNA, 120 bp, Artificial Sequence
  ENSG00000059588_26 (sequence is synthesized)
ataaagactggagtcttcaatacactgataagttactgctgtcagtcttggatagtgtctgcttcaaatgtgtcccaaggatctttatcaagtgctaaaaattatagcgaacttatcctt

SEQ ID NO: 40816 - DNA, 120 bp, Artificial Sequence
  ENSG00000059588_27 (sequence is synthesized)
gaggcttgtatatttggaactgtgtttaggcgtgatcaaagacttgttcaggatgtacagaccttcatagaaaaccttggacatgactgtgcggcaaatattgttatggaaaatactaag

SEQ ID NO: 40817 - DNA, 120 bp, Artificial Sequence
  ENSG00000059588_28 (sequence is synthesized)
agagaagaccattatgtgagaatttgtgctgtcaaattcctgtgtttattagatggctccaatatgtcccacaagttgtttattgaggatcttgcaatcaagctattagataaagatgaa

SEQ ID NO: 40818 - DNA, 120 bp, Artificial Sequence
  ENSG00000059588_29 (sequence is synthesized)
ttagtgtccaagtccaaaaaacgctactatgtgaattctctacagcacagagtgaaaaaccgagtgtggcagactctgctggtacttttccctagacttgaccagaatttcttgaatgga

SEQ ID NO: 40819 - DNA, 120 bp, Artificial Sequence
  ENSG00000059588_30 (sequence is synthesized)
attattgacaggattttccaggctggtttcaccaacaatcaagcatccataaaatattttatagaatggattattatattgattcttcataaattccctcaatttcttccaaagttctgg

SEQ ID NO: 40820 - DNA, 120 bp, Artificial Sequence
  ENSG00000059588_31 (sequence is synthesized)
gattgtttttcttatggtgaagaaaatcttaaaacaagcatttgtacgtttttagcagttttatcacatttagacattattactcaaaatattccagaaaagaaactaattctgaagcaa

SEQ ID NO: 40821 - DNA, 120 bp, Artificial Sequence
  ENSG00000059588_32 (sequence is synthesized)
gcccttatagttgtgctgcagtggtgtttcaatcacaattttagtgttcgactgtatgctttagttgctcttaagaaactctggactgtgtgtaaagtgttaagtgttgaagaatttgat

SEQ ID NO: 40822 - DNA, 120 bp, Artificial Sequence
  ENSG00000059588_33 (sequence is synthesized)
gccctgactcctgtgattgaatccagcctccatcaagtggaaagcatgcacggagcagggaatgccaagaagaattggcaacgcattcaggagcatttcttttttgcaacatttcaccca

SEQ ID NO: 40823 - DNA, 120 bp, Artificial Sequence
  ENSG00000059588_34 (sequence is synthesized)
ctcaaggattattgtctagagaccatattttacatccttccacgcctttcaggccttattgaagatgaatggatcaccattgataaatttaccagattcactgatgttcctttagctgcg

SEQ ID NO: 40824 - DNA, 120 bp, Artificial Sequence
  ENSG00000059588_35 (sequence is synthesized)
ggatttcagtggtacctttctcaaactcaacttagtaaactaaaaccaggtgactggtctcagcaagacataggtactaatttggtcgaagcagataaccaagcggagtggaccgacgtt

SEQ ID NO: 40825 - DNA, 120 bp, Artificial Sequence
  ENSG00000059588_36 (sequence is synthesized)
cagaagaagattatcccgtggaacagtcgtgtttccgacttagacctggagctcctgtttcaggatcgtgctgccagacttggaaagtcaattagtagactcatcgttgtggcctcgctc

SEQ ID NO: 40826 - DNA, 120 bp, Artificial Sequence
  ENSG00000059588_37 (sequence is synthesized)
atcgacaaaccgaccaatttaggaggactgtgcaggacctgtgaggtatttggggcttcagtgctcgttgttggcagccttcagtgtatcagcgacaaacagtttcagcacctcagtgtc

SEQ ID NO: 40827 - DNA, 120 bp, Artificial Sequence
  ENSG00000059588_38 (sequence is synthesized)
tctgcagaacagtggcttcctctagtggaggtaaaaccacctcagctaattgattatctgcagcagaagaaaacagaaggttataccatcattggagtggaacaaactgccaaaagttta

SEQ ID NO: 40828 - DNA, 120 bp, Artificial Sequence
  ENSG00000059588_39 (sequence is synthesized)
gacctaacccaatattgctttcctgagaaatctctgctcttgttgggaaatgaacgtgagggaattccagcaaatctgatccaacagttggacgtttgtgtggaaattcctcaacagggc

SEQ ID NO: 40829 - DNA, 120 bp, Artificial Sequence
  ENSG00000059588_40 (sequence is synthesized)
attatccgctccctgaatgtccatgtgagtggagccctgctgatctgggagtacaccaggcagcagctgctctcgcacggagataccaagccatgatgtgccttccttagtgaactgctg

SEQ ID NO: 40830 - DNA, 120 bp, Artificial Sequence
  ENSG00000059588_41 (sequence is synthesized)
ctgctgttcagacttttttaaaaaaaactatttggactaaagaaacagattctgaaatttattgtgataatttgtatttcttttttcttgcaatttaatgccaaaagtttgccatgtgcc

SEQ ID NO: 40831 - DNA, 120 bp, Artificial Sequence
  ENSG00000059588_42 (sequence is synthesized)
tgccttaaacatattactatatattttcccctttaataaacactttttgttaaattgtattcttcctttaataaaatattttaagcaattgtggaaataaaacaatggattttttaagag

SEQ ID NO: 40832 - DNA, 120 bp, Artificial Sequence
  ENSG00000059588_43 (sequence is synthesized)
aactaaaaccaggtgactggtctcagcaagacataggtaaaaaataattttcattttattttttccccttgttgatctggttagatttttttgatttaagttactaaggacaggtagtta

SEQ ID NO: 40833 - DNA, 120 bp, Artificial Sequence
  ENSG00000059588_44 (sequence is synthesized)
ataataatatcactttcattgacatggtgacctctgcctttccacttagggaaaagacagtgaaaaagtgtggtataactttgactaacacttttagtgaaacttagctttaaagctatt

SEQ ID NO: 40834 - DNA, 120 bp, Artificial Sequence
  ENSG00000059588_45 (sequence is synthesized)
atacctagctccaagatcttggttgctaacaccattctccaataaaacgaaccagggatcgctggagaaatagctgattctaaaactagggcagaaagtatacaagatgagcctggagca

SEQ ID NO: 40835 - DNA, 120 bp, Artificial Sequence
  ENSG00000059588_46 (sequence is synthesized)
tcttgtagagtcagagagcaaggcagaactttatacatacagtgatgtgagatgggcatgcagagggaagatgttcccagtggctgaagctgaaacagtgtgagcaacaaaataaagcag

SEQ ID NO: 40836 - DNA, 120 bp, Artificial Sequence
  ENSG00000059588_47 (sequence is synthesized)
tgttggatcacaacccaaagaataaaataaatatcctcgagcccacaccgatataaataaatgattgaatcaataaatgagtccaggcactgtggctcatgcctgtaatcctgcactttg

SEQ ID NO: 40837 - DNA, 63 bp, Artificial Sequence
  ENSG00000059588_48 (sequence is synthesized)
gagaatcacttgaacccgggaggcagaaattgcaatgagccaagattgcagatggacaagaca

SEQ ID NO: 40838 - DNA, 120 bp, Artificial Sequence
  ENSG00000059588_49 (sequence is synthesized)
aaaaaaaaaaaaaaggatggacaagacaaatctcttgtaaaaaaaattacaagtaatttttatagaagctctgccctgagggagggggagcgtgacttctcactccttcagtgtgggctg

SEQ ID NO: 40839 - DNA, 120 bp, Artificial Sequence
  ENSG00000059588_50 (sequence is synthesized)
cacaagtgacttccttccatatgggatcgttataacaaaagactgtaacaagggctatgggagttataagacaggaattgtggacaaaaaccagtgtatatcataacatcacaccttgta

SEQ ID NO: 40840 - DNA, 120 bp, Artificial Sequence
  ENSG00000059588_51 (sequence is synthesized)
atgttggcagtacagtcactgacctttgataaatgttgatgacatgttgagtaaaggaatgagagaaagaggattgtttatctctgtttttatccttctcagagaaacttagagtaacaa

SEQ ID NO: 40841 - DNA, 120 bp, Artificial Sequence
  ENSG00000059588_52 (sequence is synthesized)
gtgtgttatcagccatgctgatgcctttggtaaactattgtgtgaatatggttgttttgaattggtcagtagaaactgggctgccaggcgcagccggtaagcatttccatgtgagcctta

SEQ ID NO: 40842 - DNA, 120 bp, Artificial Sequence
  ENSG00000059588_53 (sequence is synthesized)
ggggagaagtgcatttggtaggagcatcaaaatagcttctgatatttcattaaaagtttgggtccgtctggttccttcattagtatatgtcacttcctttgaccttcagtgtctgttgaa

SEQ ID NO: 40843 - DNA, 120 bp, Artificial Sequence
  ENSG00000059588_54 (sequence is synthesized)
ccatgtgattttagaaagcaagggattgcttgacatctccaggctgtgaagactaaagttcacaggaaaagactacaaggaaatttaaacagttttattattttccccctcatttcttaa

SEQ ID NO: 40844 - DNA, 120 bp, Artificial Sequence
  ENSG00000059588_55 (sequence is synthesized)
ttttcctgccactactcagtactgtgtgggtccaggatcaccattagggaagacagagtagctcagaaatcagtagtgaggaggaggacagcactttgtgtggtatcttgctctaggagc

SEQ ID NO: 40845 - DNA, 120 bp, Artificial Sequence
  ENSG00000059588_56 (sequence is synthesized)
tccatttgaaaaacattttggttgtataatggttagcataaaacatacttttttcaagttaactcaggtactagagtatggggggcggggggaaatgtactgcagcattaatgaaaacta

SEQ ID NO: 40846 - DNA, 120 bp, Artificial Sequence
  ENSG00000059588_57 (sequence is synthesized)
gagctgggagaatgtgtttttccttgagtaaattgcaaatgcctgtgcaccgcatttgaccaggagggaagaatgagaggccctggtagcaaagccagtggaagaagttttactaggagc

SEQ ID NO: 40847 - DNA, 120 bp, Artificial Sequence
  ENSG00000059588_58 (sequence is synthesized)
ttattgtctagaggcagtgtctggcttgtaaacaatggaagggaatatttaactctaaacagaaatctgttctgacattaaaaggaaatgagtgagaacatttgtgcaggtactaatttg

SEQ ID NO: 40848 - DNA, 120 bp, Artificial Sequence
  ENSG00000059588_59 (sequence is synthesized)
aaaaaaaaaaagaaattgatgtcatgttgggagagttcttttttataatgtataattctctcctttttcttttaaagagttaagtttaggttaatacgttttttaactctaatttactcc

SEQ ID NO: 40849 - DNA, 120 bp, Artificial Sequence
  ENSG00000059588_60 (sequence is synthesized)
tgtgtaaagtgttaagtgttgaagaatttgatgccctgactcctgtgattgaatccagcctccatcaagtggaaagcatgcacggagcaggacaaaatcatacatggaagctcagtatca

SEQ ID NO: 40850 - DNA, 120 bp, Artificial Sequence
  ENSG00000059588_61 (sequence is synthesized)
agcaagtgacgtggatggggtgagggagcggtgcaggacccagtgtctgtgaagcccccacggtggttcccatgtctgcctctctttccccgcacctgtcacggtgcagaagcaggctgc

SEQ ID NO: 40851 - DNA, 120 bp, Artificial Sequence
  ENSG00000059691_0 (sequence is synthesized)
acctgaccaagaccctggagttacaatggcggcgcccatgctgcgctggggctgccgtggaagacgttgggctttcgcccgggttgacggtggttcttgccaccgaagaggggctccgac

SEQ ID NO: 40852 - DNA, 120 bp, Artificial Sequence
  ENSG00000059691_1 (sequence is synthesized)
tgggtccacatccaaccagattaggggagagagctcagtggctcagcagcccctccacacggcccagaagacgaggaaaggtgaacacaaatgggctgctgtggtaggtttggaaattca

SEQ ID NO: 40853 - DNA, 120 bp, Artificial Sequence
  ENSG00000059691_2 (sequence is synthesized)
tgcccagatttcctccaactctaaactcttctctggatctcaagttcgcttttcagcacctccaaattctttggtttctttttttgatgcatctctacctggaactttgccggttctcaa

SEQ ID NO: 40854 - DNA, 120 bp, Artificial Sequence
  ENSG00000059691_3 (sequence is synthesized)
caggaggtgtgtagaagcggcggtgatgacaggcctggctctgaactgccacataaacaagaagtccttgtttgacaggaagcactacttctatgcagacctccctgcaggctaccaaat

SEQ ID NO: 40855 - DNA, 120 bp, Artificial Sequence
  ENSG00000059691_4 (sequence is synthesized)
tacccagcagaggctcccaattgctgtgaatgggagcttgatatatggcgtctgtgcagggaagaagcagagtcaggtgatccccaagacggtgaggatcaagcagatccagttggagca

SEQ ID NO: 40856 - DNA, 120 bp, Artificial Sequence
  ENSG00000059691_5 (sequence is synthesized)
agacagtggcaaaagcctccacgacaacctgaggtctcagacgctcattgatttgaacagggcaggagtgggccttctggaggtggtcctggagcccgacatgtcctgtggagaagaggc

SEQ ID NO: 40857 - DNA, 120 bp, Artificial Sequence
  ENSG00000059691_6 (sequence is synthesized)
ggcaacagctgtcagggagctgcagctgatccttcaagccctggggaccagccaggcgaacatggcagagggccagttgagagtggatgccaatatatccgtgcatcaccctggggagcc

SEQ ID NO: 40858 - DNA, 120 bp, Artificial Sequence
  ENSG00000059691_7 (sequence is synthesized)
tttgggcgttcgaacggaagtgaagaatctcaacagcatcaggttcctggccaaagccatagactatgaaattcagaggcaaatcaatgaacttgagaatggaggtgaaattctgaacga

SEQ ID NO: 40859 - DNA, 120 bp, Artificial Sequence
  ENSG00000059691_8 (sequence is synthesized)
aacacgctcatttcatcacaagctggggtgcaccatgtcaatgagagacaaagaaggaaaacaggactacaggttcatgccagaacccaacctgcctcccctggtgctctacgacgccac

SEQ ID NO: 40860 - DNA, 120 bp, Artificial Sequence
  ENSG00000059691_9 (sequence is synthesized)
agaagcttgtccaacagtatgggatgctgctggaacacagcttcactttgctgaacgaagtcggcctactggagttcttccaaaatgtgataaaagaaactagggcagagccaaaaaagg

SEQ ID NO: 40861 - DNA, 120 bp, Artificial Sequence
  ENSG00000059691_10 (sequence is synthesized)
tgactagttgggtcctcaacacttttctgggctatttaaagcaacagaacctcgctgtcagtgagagtcctgtcacaccctctgcactcgctgagcttcttgacctgctggacagcagaa

SEQ ID NO: 40862 - DNA, 120 bp, Artificial Sequence
  ENSG00000059691_11 (sequence is synthesized)
caatttcttcatcagcagctaaacaggtgtttgaggaactgtggaagagggaaggcaagactccagggcagattgtttcagaaaagcagcttgaactgatgcaggaccagggggcactgg

SEQ ID NO: 40863 - DNA, 120 bp, Artificial Sequence
  ENSG00000059691_12 (sequence is synthesized)
agcagctctgccactctgtgatggaggcccatcctcaagtggtaatggatgtgaagaacagaaaccccagagctataaataaactgattgggttggtccggaaagcgactcaaagccgag

SEQ ID NO: 40864 - DNA, 120 bp, Artificial Sequence
  ENSG00000059691_13 (sequence is synthesized)
cagatccagtcatgataaaggagatcctggagaagaagctgtcattgtgagatgtttgggatccccttgcccaagggacaacaacaaacagtgcagcctgactgggaacaggatcctgtg

SEQ ID NO: 40865 - DNA, 120 bp, Artificial Sequence
  ENSG00000059691_14 (sequence is synthesized)
aaagctgatgcccatgtgccctgagagctgcctctcaatccctgtcccaagccacagctatggcattaatgtcaccagtgttctcaccctctaggccctgtgcctggaggtgcctccaca

SEQ ID NO: 40866 - DNA, 120 bp, Artificial Sequence
  ENSG00000059691_15 (sequence is synthesized)
gccgaccagcagccaccccgcctgcttcatccacatcaggagggtccggtgaggctgcagcagtggttaaggagtaacaccttcttgtattaaggaattttaaactaaataaaatgtatg

SEQ ID NO: 40867 - DNA, 120 bp, Artificial Sequence
  ENSG00000059691_16 (sequence is synthesized)
ttggagatactgttacccattctaagaaaacttttcattctgcagttccttcaacaaatatttttgagcaactcctaagggccagccattgtaggtgatgggcattagcagtggtcaaga

SEQ ID NO: 40868 - DNA, 120 bp, Artificial Sequence
  ENSG00000059691_17 (sequence is synthesized)
gagactgtaatttggatgtattgttttcagacctaaacacaggttaacaaagatgaaaatacaaccaaataaactggcacagtataaacacatttgtttgtttaaggaggtctcaagagg

SEQ ID NO: 40869 - DNA, 120 bp, Artificial Sequence
  ENSG00000059691_18 (sequence is synthesized)
gtggggaaggaggatattattagaattaatcaacctatcgactgagtagaagtgatattgcctgttaaactccctccccatcccagaaggcacagtctgagaataaatgaattaaaaaaa

SEQ ID NO: 40870 - DNA, 120 bp, Artificial Sequence
  ENSG00000059691_19 (sequence is synthesized)
aaccactctgagagtccttcagtaaggcagggttttcctgaaacttaggcctaatttttctgttggtgaaattggagagctgcagtgaggctgactctgcccctctttggtaggagtggg

SEQ ID NO: 40871 - DNA, 120 bp, Artificial Sequence
  ENSG00000059691_20 (sequence is synthesized)
aacataatgatcctgaacaatttttagaaaccactttttgtcattgttgtaacatgatgggacatctagacttcctctttgatatgcataccgagagaagtactagtttcttgatttggt

SEQ ID NO: 40872 - DNA, 120 bp, Artificial Sequence
  ENSG00000059691_21 (sequence is synthesized)
agcctcagatctggtgccttgtttgactgattcagcttttggaagaacttgttcatccactgctgtgtcaaagttgtcatagttgagctaggaggatggctgtagaggttggggcctagg

SEQ ID NO: 40873 - DNA, 120 bp, Artificial Sequence
  ENSG00000059691_22 (sequence is synthesized)
ctgttcttattctaatgttcagtaactgattcagtaatacgctgaatgaagctccttgagaagaaatgagaaaagagatgttgatagcgtatgttgatggtagttcccttgaacctcata

SEQ ID NO: 40874 - DNA, 120 bp, Artificial Sequence
  ENSG00000059691_23 (sequence is synthesized)
tgatgctatttcatgataaattaagttgaactacttaatatgagacccacaaataaagcaaatgctaagaacaggcataagataattgaaacttttatttttttctcattgagtttagca

SEQ ID NO: 40875 - DNA, 120 bp, Artificial Sequence
  ENSG00000059691_24 (sequence is synthesized)
ggttgaagttttaagcaacaaagttgtgagatcggccacctttcctttgtgaagggcagaaagatgcaaatgtagctattatcaatgaggatcaaaatttgcatgtttatgtgggaaaga

SEQ ID NO: 40876 - DNA, 120 bp, Artificial Sequence
  ENSG00000059691_25 (sequence is synthesized)
gaatcaaagcacaggcagccttgaagctggtggctacagtcagtgacaggggtgctctgagaggggaagaaggtagcagctaagctaagacctgaggagaggatgagcagggacaggcca

SEQ ID NO: 40877 - DNA, 120 bp, Artificial Sequence
  ENSG00000059691_26 (sequence is synthesized)
ttctgtatcctatcctcagaacatgctgacctggacttccatctgtcacaagcagcttgactaagatcctaggaaattcctttttttcttggcattcttctaactgacactctctgttta

SEQ ID NO: 40878 - DNA, 120 bp, Artificial Sequence
  ENSG00000059691_27 (sequence is synthesized)
ctgggccctctgtgcatctgtaacgtgtgatgactgatgcttataattctgaccttgaagtacttcatggcttctaaatcatcaaaaaaagattaaagcatattctcagtatcactgtaa

SEQ ID NO: 40879 - DNA, 120 bp, Artificial Sequence
  ENSG00000059691_28 (sequence is synthesized)
aattcgtgttgtttattgcatcgttatcaggggtggaggatttggggagggtgaaggggtgatggcaggggcagaagagaccaggctcaatgatggctgcaatgcagcaactaatttttt

SEQ ID NO: 40880 - DNA, 120 bp, Artificial Sequence
  ENSG00000059691_29 (sequence is synthesized)
tctccttttcctttttttcttgttgtttttgctttaagtaggcctgtcgttgtgtgacattgtaaaagggatagtaaactggatcccagcttttatgtgtggaccagtgactatgtttac

SEQ ID NO: 40881 - DNA, 120 bp, Artificial Sequence
  ENSG00000059691_30 (sequence is synthesized)
gtgtaaattcagtcctcagggaaccaaaggccgagtctctgccccatgtgtcagagccggctccagtgtctgtgtgtgatggggagttcccagcttgcattacccagtactcctggtcgg

SEQ ID NO: 40882 - DNA, 120 bp, Artificial Sequence
  ENSG00000059691_31 (sequence is synthesized)
ccatttattaacacagaggaccagcactgtgctagaaattccttgttacatctgtttgtcttgggtaggcagcagcagggcctgggagctgcgctcctggctggaaacagttgcacttgg

SEQ ID NO: 40883 - DNA, 120 bp, Artificial Sequence
  ENSG00000059691_32 (sequence is synthesized)
atatcacttctcagggtgggattaaacacagacaaaagctgaggatttatgctgcagcacagggctcggcagccacagaggccactctgtgagcgtcaagagggccaggagcaggagagt

SEQ ID NO: 40884 - DNA, 120 bp, Artificial Sequence
  ENSG00000059691_33 (sequence is synthesized)
ctggcctggagacagggccgctccactaccacccagtggctcccaccctcctggactccagccaggagtgcacaatcctcgtcttaaataggattgagcaaaggatgggacaaccggcgt

SEQ ID NO: 40885 - DNA, 120 bp, Artificial Sequence
  ENSG00000059691_34 (sequence is synthesized)
ctgttgtataagcctaggggactggggactgggggcctcgactgtcatggccactgcactaatttgtggagttaactaacattatgtattctaactctgggaggaaaggacatttcagcc

SEQ ID NO: 40886 - DNA, 120 bp, Artificial Sequence
  ENSG00000059691_35 (sequence is synthesized)
accgggctcccatgtgttccaggaggctgctgaatgatgtttctctagcggcactgcttggtaccaccccgcctggccctccttctcggggagcagccagcctcttcgtttgaaggcatc

SEQ ID NO: 40887 - DNA, 120 bp, Artificial Sequence
  ENSG00000059691_36 (sequence is synthesized)
tgtcctagaggtgcactgcttctccttctgaatggtgtgattggaagtgatccccaagcactctgccactcttccgcttattttggcccaggcaaatccagccaacattcgagctgtggg

SEQ ID NO: 40888 - DNA, 120 bp, Artificial Sequence
  ENSG00000059691_37 (sequence is synthesized)
tcccgtcagaaagaggctggctcactggccagcctgctcagggtctgccgtgtgcttcccaccgcagcagctaccacaggcgctgagaaatcgctccctggtctgtgtctgcagacgcag

SEQ ID NO: 40889 - DNA, 120 bp, Artificial Sequence
  ENSG00000059691_38 (sequence is synthesized)
acccaggaggggccccgcctacttccaggcacaggctgctcgtccgcctggttttcctggagggaactgctgcgtagatttttcacgagcaagtccttacaggtggtttctgttttgagc

SEQ ID NO: 40890 - DNA, 120 bp, Artificial Sequence
  ENSG00000059691_39 (sequence is synthesized)
caggttttcagctaggagcttttttgggagtctgtgcagatgaacaaaatcaacactggtcaaagtctagatatctacgaggaggggataaattatgataaatacatctgatggatacta

SEQ ID NO: 40891 - DNA, 120 bp, Artificial Sequence
  ENSG00000059691_40 (sequence is synthesized)
gctagatctttttattaagaaagtacttctgtgctaaatgaaagaaagcaggacacaaactgaatatacgttatgatcccaagtatgttacaaaacagaaagaaaaagatgggaagaaaa

SEQ ID NO: 40892 - DNA, 120 bp, Artificial Sequence
  ENSG00000059691_41 (sequence is synthesized)
aacaccaaaatattaacattggttttcttgagaaaatgggaattccggtgatctcttttgatctctcctgtatttccttatattttctgcagtgaatgtgtattaacttttattattaga

SEQ ID NO: 40893 - DNA, 120 bp, Artificial Sequence
  ENSG00000059691_42 (sequence is synthesized)
aaatgatttttaaaatttaagtcctagttcaaaaaataaacgtgtcagagaaagggggcagatggactcctccgacttacagggcagctccatggaacgccatccaggtccccagtgctt

SEQ ID NO: 40894 - DNA, 120 bp, Artificial Sequence
  ENSG00000059691_43 (sequence is synthesized)
ctgctggcagcactccactgataagcatgttgagagtgaggaagtttcttcccgcttctgtgccccctttctcccaatggtttcctcattgtcaggccacgtacatatctgctgaattga

SEQ ID NO: 40895 - DNA, 120 bp, Artificial Sequence
  ENSG00000059691_44 (sequence is synthesized)
gttggaggcacgtgcattctgtatttttctaagagtagggccaggcttttcctgagcagtcgggcagcggcagaggggtgccctgtagggagcttacccaggacctgccaagcacacctc

SEQ ID NO: 40896 - DNA, 120 bp, Artificial Sequence
  ENSG00000059691_45 (sequence is synthesized)
ctgaggcaccaggctgaaggcgcagtgcctgtcccagcagtgataagtatttgtggtttgtttttgaatcagactggggaagactttgagccctgctgagactcagagcatctccctttt

SEQ ID NO: 40897 - DNA, 120 bp, Artificial Sequence
  ENSG00000059691_46 (sequence is synthesized)
atttgctttgctgttcgtgctaattatggaagagctctgtttttccaggaggaatggctcctggttggcccgttctcggccaccaaggtaacagggaaagttgggtgttcagtcatgact

SEQ ID NO: 40898 - DNA, 120 bp, Artificial Sequence
  ENSG00000059691_47 (sequence is synthesized)
gtggactggacggaggtggcaccggtgggagaccaacagaggaagccctcctcccggctcccaattctggctttcgctagaagacaagagaaatgaggaaaacagctaccctaggaaata

SEQ ID NO: 40899 - DNA, 120 bp, Artificial Sequence
  ENSG00000059691_48 (sequence is synthesized)
gccttccttgaaaatggtttcctttttctcaggtttgatgaatttggggatttgttgttgtcattttttaagtaaaaaaaaaatgccccaaacattagcgttcattatcctagtctgatt

SEQ ID NO: 40900 - DNA, 120 bp, Artificial Sequence
  ENSG00000059691_49 (sequence is synthesized)
tgggtccggctctacctgtaggagatgaatgtggtaggccagggggcccctgtggattctaatttatgttttcagttgtttgccattttgtatcttcattacggggctactttcctgcct

SEQ ID NO: 40901 - DNA, 120 bp, Artificial Sequence
  ENSG00000059691_50 (sequence is synthesized)
ccctaaagtcatctttcccagcatgctgtttctggactttatttagtaccgtggttacctcctgcaggctgtgtggccccatccttcaccaaaatgtcacctcaattaattcggcggcca

SEQ ID NO: 40902 - DNA, 120 bp, Artificial Sequence
  ENSG00000059691_51 (sequence is synthesized)
tgagacagatccatcagtggcccgccgactcccgtcagcaggcgcccatgagtgatgggcacctccacgcctcccgcggcccccccccgccatgtggagtcagccgggcaggactcacca

SEQ ID NO: 40903 - DNA, 120 bp, Artificial Sequence
  ENSG00000059691_52 (sequence is synthesized)
tccctctgggcacgagggcatctggctggcccgagtcctctcacaccttatgctgagggagacttcagcctcaggaggagaccccaggtgcattcactccacctagctggccttgttccc

SEQ ID NO: 40904 - DNA, 120 bp, Artificial Sequence
  ENSG00000059691_53 (sequence is synthesized)
cagccctgcactcagggatgcctcaggagagccaacgctctggcagggcagccaggtgccctttccctttgggccaggcccaggcagtggggacttaattgaatctgctcattcccaccc

SEQ ID NO: 40905 - DNA, 120 bp, Artificial Sequence
  ENSG00000059691_54 (sequence is synthesized)
ggagagggccagagccagccccaggacatgcccaagagcctcgccatcgctccctgtggcagcccagaggctcttcctaagaatggctgacccagtttcatcaataattccctcactgtc

SEQ ID NO: 40906 - DNA, 120 bp, Artificial Sequence
  ENSG00000059691_55 (sequence is synthesized)
ggactgggaagcagtgaaaaggattttaagcagaggaattacatgaacagatttatccttcaaaaaggtcaccttaggagaggtgtggaagagagactagagggctgaaaatggaggcag

SEQ ID NO: 40907 - DNA, 120 bp, Artificial Sequence
  ENSG00000059691_56 (sequence is synthesized)
agaaacctcctggccaggtggtgagtggcagaagtcctggtgggagtgggtggtgtttaaacaaagacctgaattaaaactgaaggcaagaggaggaggggaaaaatcaagaaatgttaa

SEQ ID NO: 40908 - DNA, 120 bp, Artificial Sequence
  ENSG00000059691_57 (sequence is synthesized)
gaaagtagaatgtgtagaacttggtgatttgtttgaaagtgttgggagttgttgttaaatgatggtctcagagatcatggaatatttgtctggtttagctaaataaatgttaaaactaga

SEQ ID NO: 40909 - DNA, 120 bp, Artificial Sequence
  ENSG00000059691_58 (sequence is synthesized)
agcctgtttctcaaattggggtcgctgtgtccccttagaggtctcatgcaaactctgagttgtttatgctgccttatgagctagatgtatcttaggtttcaaacaattatgattgcagca

SEQ ID NO: 40910 - DNA, 120 bp, Artificial Sequence
  ENSG00000059691_59 (sequence is synthesized)
ctactcaggtcttacaataagccagacaagcaattctttattaaaaatcatttgctactcccaccacccaccaccccaagatctttttcctggccattatgtgccttatctctctctact

SEQ ID NO: 40911 - DNA, 120 bp, Artificial Sequence
  ENSG00000059691_60 (sequence is synthesized)
agtcataaaatttgttggccacccactgtgtatttatctcatctcctacctctacccatcacagctttctcatcttctgattaaatagaagaattagcctcttatttgataaatcattgt

SEQ ID NO: 40912 - DNA, 120 bp, Artificial Sequence
  ENSG00000059691_61 (sequence is synthesized)
atgggtgcctgtgtctaagggtttctgaagtctagcaatagaacatcctctgctcgttgagaaaacatgtagggtcacccatcaccaagcactccacatgccagagactgcactgaaaga

SEQ ID NO: 40913 - DNA, 120 bp, Artificial Sequence
  ENSG00000059691_62 (sequence is synthesized)
acactcaattctttcatgtagttaaaagaacacaatgcttgccctctgagagttcaacatctggaaacaaatctaaagagggagaaactggcaagaagaaacacattagaaatagcatct

SEQ ID NO: 40914 - DNA, 120 bp, Artificial Sequence
  ENSG00000059691_63 (sequence is synthesized)
gccttaaatgatgtacagtaggatttgggttgaggtgctgctctggagttatggcctgctgttagtagtcttgatagctaaaactaacatgcttttttcttgtaagatttcagattgaat

SEQ ID NO: 40915 - DNA, 120 bp, Artificial Sequence
  ENSG00000059691_64 (sequence is synthesized)
atagtggttgagagcctggattctgggatctgacttcctggctctgccacttccatgtgtcaccctgaccaaactgtgtcatctctatgcttcccttcattgtaagatgaggatcataat

SEQ ID NO: 40916 - DNA, 120 bp, Artificial Sequence
  ENSG00000059691_65 (sequence is synthesized)
agtatttaccctaggaatgagaggattcaatggcatgtgtgtgtgatgtgcagcacacctcctgacacagtgtcagtgcacaataaatactcgctgctgacccttcctgaagccaaaaag

SEQ ID NO: 40917 - DNA, 120 bp, Artificial Sequence
  ENSG00000059691_66 (sequence is synthesized)
aagcctctgaaggctcagctgagaaaggtgtgctgcgtgagtaccaaaaattactgccttctttccaaacgagagctgctatggctaaccctgagatcctttgtagtcatttaattacag

SEQ ID NO: 40918 - DNA, 120 bp, Artificial Sequence
  ENSG00000059691_67 (sequence is synthesized)
agaaattctggaacatactttcttcaagccaagttagtctttttagtttttaaattacatcttgatcgtatcacacacaatcagttgtcacttcagggcacttccagaaacaagtttgca

SEQ ID NO: 40919 - DNA, 120 bp, Artificial Sequence
  ENSG00000059691_68 (sequence is synthesized)
ggccagcatgtggcaggtaacaccttagaggagactggggcatcactgcctctctgaaatcgtccattgatatcatcccctccctcctcctttgagctcagcacacattaatcaaatacc

SEQ ID NO: 40920 - DNA, 120 bp, Artificial Sequence
  ENSG00000059691_69 (sequence is synthesized)
acaatttttcaggttctgtattaggctccagggatacaagggtgaacagacaattcccgtcctcatgaaatgtgcaattgtgtggaactacatgtgaacaaattcaatccactgtgatgg

SEQ ID NO: 40921 - DNA, 120 bp, Artificial Sequence
  ENSG00000059691_70 (sequence is synthesized)
aagccccaatgggagtgtgtagaaggtcagaagaggtacacagaaaggacaacaaggaaggcttcacagaagtggtgacgtcccactaggattttgaagggaataagaatggggagaatc

SEQ ID NO: 40922 - DNA, 120 bp, Artificial Sequence
  ENSG00000059691_71 (sequence is synthesized)
agaagatcagcacggtttgcacagaggaactacagcagaggtgttgtggggggacatggtggtagatgaaattgaagatgtaggcaggagtttgatcatgtaagagcttggcctttgtcg

SEQ ID NO: 40923 - DNA, 120 bp, Artificial Sequence
  ENSG00000059691_72 (sequence is synthesized)
tgggaacatcaggggccattgagggacttcaggtaacagaatgccacagatccacaattttagcaggatcaccctagtatgaaagacaaacttgaaaagggtttgcagatgctggcaggt

SEQ ID NO: 40924 - DNA, 120 bp, Artificial Sequence
  ENSG00000059691_73 (sequence is synthesized)
tcatgtcaccactgcggattcattgagggcagagacagagtcctatttatctatgtacccctaaagtttagtgctttatagacatttaagaattttttttttcagagtgaagacagccca

SEQ ID NO: 40925 - DNA, 120 bp, Artificial Sequence
  ENSG00000059691_74 (sequence is synthesized)
tcttctcccacagggaggctatggtgcgtgcttgaaaataaacaaacaaaataacctgggttctcttcatgcctagcaggaggaagcagcttggtcccaggggcaaagaagcttgaaatg

SEQ ID NO: 40926 - DNA, 120 bp, Artificial Sequence
  ENSG00000059691_75 (sequence is synthesized)
agagcgaaagcagtggttaggaaagcagagggaatgatgaggcagaactggtgcagaccaggagtcaggcagtttacgagccagccctggctgactgcattctgaccccaggaagagcaa

SEQ ID NO: 40927 - DNA, 120 bp, Artificial Sequence
  ENSG00000059691_76 (sequence is synthesized)
agcccagggtcgggactgcagcttcatgttctgtgtgcctggacccgaatcatcaggcttggatttggcgggattctccaccagctatgtttgtatctcagtaacaaccgctcagtaaaa

SEQ ID NO: 40928 - DNA, 120 bp, Artificial Sequence
  ENSG00000059691_77 (sequence is synthesized)
tgccagacattaggcaagtgaaaacatcaataattagagcctcctgttccccacacatcttttcttgaaaacctttattgctgcagagctgacattattaggcacagaatgaagaactcc

SEQ ID NO: 40929 - DNA, 120 bp, Artificial Sequence
  ENSG00000059691_78 (sequence is synthesized)
ctccaaatagaaactgtgaaatggctccatcttataacctgagtcctgaaaaataagggtgtgatgttgtcactaggcgggagatttgtttaggttttctttttttcttttctttttcct

SEQ ID NO: 40930 - DNA, 65 bp, Artificial Sequence
  ENSG00000059691_79 (sequence is synthesized)
gtttgggttttctttggggaccgtatattgcagtaaatagaaatgccccttccattttgttgtag

SEQ ID NO: 40931 - DNA, 120 bp, Artificial Sequence
  ENSG00000059691_80 (sequence is synthesized)
tattgcagtaaatagaaatgccccttccattttgttgtagaaatttgtttttaaaatctgtgtttggtctacactcgtcatcccagcctaaagagccagtccctgaaccacagaagttct

SEQ ID NO: 40932 - DNA, 120 bp, Artificial Sequence
  ENSG00000059691_81 (sequence is synthesized)
gtttgccgcctctcagccacggcatgtgtgggctttacaggcagctttaccacttgccagttctgtgaatttgggcaaatgttttagactctttgggtcttagttttgtttttttaatct

SEQ ID NO: 40933 - DNA, 120 bp, Artificial Sequence
  ENSG00000059691_82 (sequence is synthesized)
gaaatattggaataatgcagattccttattttacagcgttgctgtgaggctgaaataaaatggtggatgtggaaatgctcaactagaaggccctatctatatcaataatagtatattaaa

SEQ ID NO: 40934 - DNA, 120 bp, Artificial Sequence
  ENSG00000059691_83 (sequence is synthesized)
tatactaaagaacatcataaatatcctaacaaaaatagaaatatatttcatctgcaaacatgacatcctccaaaattgtcccaaagtagagtagggaaatgaactatttattgaatctct

SEQ ID NO: 40935 - DNA, 120 bp, Artificial Sequence
  ENSG00000059691_84 (sequence is synthesized)
accttaggggaggtgttccagctatcactttatctgttctgcaaagtagatcttaaatcccacttttagacacaaggaaactgagactcctagtcacagcagaagtgggatttgaacctg

SEQ ID NO: 40936 - DNA, 120 bp, Artificial Sequence
  ENSG00000059691_85 (sequence is synthesized)
actcgagaacttaatgctccttctccttggctacattatctcgttgtctagttccagacccccagtgttcttaaaagctttgacattctttggtgctgggaagtgtgccagccatttctt

SEQ ID NO: 40937 - DNA, 120 bp, Artificial Sequence
  ENSG00000059691_86 (sequence is synthesized)
ggtcattcactcctgtaagtgggacagggtggcacccagagggaactggagcaccaggtgcccccagagagaccagcagcacggagtcgtccagtgtgtgggacaggccctccgttggcg

SEQ ID NO: 40938 - DNA, 120 bp, Artificial Sequence
  ENSG00000059691_87 (sequence is synthesized)
ttccacttttagggagttggcctggcatggacagaaagccaggcaacagctgtgccacatttcctagcccttgagaaaatggctacggccctgtcgttttcagaagttcattctttttct

SEQ ID NO: 40939 - DNA, 120 bp, Artificial Sequence
  ENSG00000059691_88 (sequence is synthesized)
gtcaaagtgaagccacccttcctcaggactcctctcagcaatcagtgcctcttgtgtattctgaccggccccttattctgtttgtagagggagtgagattagatttattctatgtagtaa

SEQ ID NO: 40940 - DNA, 120 bp, Artificial Sequence
  ENSG00000059691_89 (sequence is synthesized)
ccactccgctaagcttttctgcgactcttcctgttagctttgatgccgggcactgggggaaagggttcccgatgtggcagttccttaagtgcccggtgggacccactgctgcatacattt

SEQ ID NO: 40941 - DNA, 120 bp, Artificial Sequence
  ENSG00000059691_90 (sequence is synthesized)
tcttctttatatccttccctgattcccaggcaaacagactcggcttgtgaactggagctgcccacccagagaaccagagataatgcctgttgaagggccaagttgcatattcagcgagga

SEQ ID NO: 40942 - DNA, 120 bp, Artificial Sequence
  ENSG00000059728_0 (sequence is synthesized)
gctctgctccgggttctgtcactgtgtcggcggtgcccagctcactggccccctccctctcttgtcgagcgtggttgccagagaggctccctcagccctgctccgcggggtccacagcgg

SEQ ID NO: 40943 - DNA, 120 bp, Artificial Sequence
  ENSG00000059728_1 (sequence is synthesized)
gctccacagcgggctccatagcgggctccacagcggtccggcggcggcagcgagcccgtgggcagtgggggttggtcccgtggctccggcccccggtgcagaatggcggcggcggttcgg

SEQ ID NO: 40944 - DNA, 120 bp, Artificial Sequence
  ENSG00000059728_2 (sequence is synthesized)
atgaacatccagatgctgctggaggcggccgactatctggagcggcgggagagagaagctgaacatggttatgcctccatgttaccatacaataacaaggacagagatgccttaaaacgg

SEQ ID NO: 40945 - DNA, 120 bp, Artificial Sequence
  ENSG00000059728_3 (sequence is synthesized)
aggaacaaatccaaaaagaataacagcagtagcagatcaactcacaatgaaatggagaagaatagacgggctcatcttcgcttgtgcctggagaagttgaaggggctggtgccacttgga

SEQ ID NO: 40946 - DNA, 120 bp, Artificial Sequence
  ENSG00000059728_4 (sequence is synthesized)
cccgaatcaagtcgacacactacgttgagtttattaacaaaagccaaattgcacataaagaaacttgaagattgtgacagaaaagccgttcaccaaatcgaccagcttcagcgagagcag

SEQ ID NO: 40947 - DNA, 120 bp, Artificial Sequence
  ENSG00000059728_5 (sequence is synthesized)
cgacacctgaagaggcagctggagaagctgggcattgagaggatccggatggacagcatcggctccaccgtctcctcggagcgctccgactccgacagggaagaaatcgacgttgacgtg

SEQ ID NO: 40948 - DNA, 120 bp, Artificial Sequence
  ENSG00000059728_6 (sequence is synthesized)
gagagcacggactatctcacaggtgatctggactggagcagcagcagtgtgagcgactctgacgagcggggcagcatgcagagcctcggcagtgatgagggctattccagcaccagcatc

SEQ ID NO: 40949 - DNA, 120 bp, Artificial Sequence
  ENSG00000059728_7 (sequence is synthesized)
aagagaataaagctgcaggacagtcacaaggcgtgtcttggtctctaagagagtgggcactgcggctgtctccttgaaggttctccctgttggttctgattaggtaacgtattggacctg

SEQ ID NO: 40950 - DNA, 120 bp, Artificial Sequence
  ENSG00000059728_8 (sequence is synthesized)
cccacaactcccttgcacgtaaacttcagtgtcccaccttgaccaaaatcagctttgtaactgttttcaaggaggtgcttaggattgtgggtttctgattgcatccactagcttctcttt

SEQ ID NO: 40951 - DNA, 120 bp, Artificial Sequence
  ENSG00000059728_9 (sequence is synthesized)
ttctcgccataaaaatttgtctctgagagactatacattccaatcaatttgaagcatccaagaattcttagaccgaataagcaatgtccacatctcagcaatccccctctttgctctcct

SEQ ID NO: 40952 - DNA, 120 bp, Artificial Sequence
  ENSG00000059728_10 (sequence is synthesized)
cgtgtcctctcccagacctttcttccagttttctggcttactgtgttacttgcctaggaggaatgtccaagtgtgtcttgtacttaggaaactgaaggaaacaaacttttgaaattgaga

SEQ ID NO: 40953 - DNA, 120 bp, Artificial Sequence
  ENSG00000059728_11 (sequence is synthesized)
tcctgatctcagaactccaaagtaagctttgaaagcagcatttaagagcacttaaccatggacctcaccaccagtgaggaagtcaggaatacctctagaaaacacgcccttcacaccgcg

SEQ ID NO: 40954 - DNA, 120 bp, Artificial Sequence
  ENSG00000059728_12 (sequence is synthesized)
catgctcattcccccgacgcgccgcgtgtggatgggagcagtatttctcactttaaaatggacaccttgatagtgtgtctctggggttgcacagctcatcaaagttccaaattgtttgtt

SEQ ID NO: 40955 - DNA, 120 bp, Artificial Sequence
  ENSG00000059728_13 (sequence is synthesized)
ctcacaaacaaaacggtacaatctatttttgtgcgatgttcttgggacctcgctgtgttctgctatctcgaggcacattctcccctccaactttgttaatgctacttgtctctggaacat

SEQ ID NO: 40956 - DNA, 120 bp, Artificial Sequence
  ENSG00000059728_14 (sequence is synthesized)
ttttttttcctacctcagagataaatgagatctccatttcccacttaacacagtgattatccttttttccccccccaaaatagtgacatttggtccaattataatctattttcctattga

SEQ ID NO: 40957 - DNA, 120 bp, Artificial Sequence
  ENSG00000059728_15 (sequence is synthesized)
actttcagcaataactgagctgtggcactagcagagctagtagccattatcagtgaaagaaaaagtccacatttctactctctgttgcaggtgaacaggagaggatggtacactgttact

SEQ ID NO: 40958 - DNA, 120 bp, Artificial Sequence
  ENSG00000059728_16 (sequence is synthesized)
agaactcctctccttattgattatttttggacacacccagaaacttctttatggaggcttttgggttgatagtttaaaaggctgatttttctttttggttatgatttctcccttaagtgg

SEQ ID NO: 40959 - DNA, 120 bp, Artificial Sequence
  ENSG00000059728_17 (sequence is synthesized)
tctccgactttgtagcatttttatttaagctaaaacagagcacatgtatatgtacataagacacattaaatctataaatactatttattcattttatataaactaatgtaatggaaaaca

SEQ ID NO: 40960 - DNA, 120 bp, Artificial Sequence
  ENSG00000059728_18 (sequence is synthesized)
aattcttatgactttgtggttttatagatgttctagaaactttgtatgtaggtatctacaaaattagttcattcccctgaatatttttgcattcatatttttgaggtcttgatgttttca

SEQ ID NO: 40961 - DNA, 120 bp, Artificial Sequence
  ENSG00000059728_19 (sequence is synthesized)
gcctctggcgaatctttttcattgaatttgaaccatttgtaaaatctgtgatgctgaagcagagtgtgtcacaaagtgatgagaacattactaaaatccacggacgcactgcgacctaag

SEQ ID NO: 40962 - DNA, 120 bp, Artificial Sequence
  ENSG00000059728_20 (sequence is synthesized)
ggctcaacggctgactcggcagcgggcagccaccccacgctcccctgcggtcactcgcacaccacagcctgaagctcccccagcgcctgcacctcgcacacagctaaggtcaaagttcaa

SEQ ID NO: 40963 - DNA, 120 bp, Artificial Sequence
  ENSG00000059728_21 (sequence is synthesized)
acgcactccacacggaagctcattctatacccgaagagcagtctcagaaagcaagattacttttgtgttttttaaaaaatgattctttaatgtatttttctaaacattctgattggaagt

SEQ ID NO: 40964 - DNA, 120 bp, Artificial Sequence
  ENSG00000059728_22 (sequence is synthesized)
agtggattcctaaatgattccaaagtcacctgtaattcttctgtttttgttttgttctgtcttttcttcattttggctttgggtggggggaggggcaggtgacacaaaggattttttttt

SEQ ID NO: 40965 - DNA, 120 bp, Artificial Sequence
  ENSG00000059728_23 (sequence is synthesized)
ataaccagctaaagatttgcactgaaatacaacttgtatgccttttgcatttttaaagcctgcttcctggatttaagcagagtgatagtgttcaaagagccagttcagcctgtaacatat

SEQ ID NO: 40966 - DNA, 120 bp, Artificial Sequence
  ENSG00000059728_24 (sequence is synthesized)
ttgaaaaagatatgtctgcactttgaggtcccttttgaatgccattcactagacctctcaagcattttgtttcattgctacatccaagcgcctcacaagtccacaatgcgggacagcatc

SEQ ID NO: 40967 - DNA, 120 bp, Artificial Sequence
  ENSG00000059728_25 (sequence is synthesized)
aaaagctcaagactttggaaaaagcttgtgggcttgcactgggggagggaagggaacaaaatttgtgtacttctttgtttaatttagaaataaggcatccaagagatgccattattttct

SEQ ID NO: 40968 - DNA, 120 bp, Artificial Sequence
  ENSG00000059728_26 (sequence is synthesized)
gtgtttcaattgttgtgcctttgagttaaactgcatttttgtcttttggttgaaatctgaaatgtactgtcccaatataaaacagtaattatttgacctttgcactgtttgtctggtcct

SEQ ID NO: 40969 - DNA, 120 bp, Artificial Sequence
  ENSG00000059728_27 (sequence is synthesized)
tttcagtttgattgcatataaatgtggaacttgatagatctctatatttttaatgcacttgtgataaactggcagcagggttagacattactttcaaagcttgaggtagaccgagtcagc

SEQ ID NO: 40970 - DNA, 120 bp, Artificial Sequence
  ENSG00000059728_28 (sequence is synthesized)
atgctagacaggcttctctctctaaccaaaactgtaatcttcaggaccagcaaactcagcccaaggcagctaatccccccaaccccatcctccgcgccccgtgcggctgatcggcagccc

SEQ ID NO: 40971 - DNA, 120 bp, Artificial Sequence
  ENSG00000059728_29 (sequence is synthesized)
tgattcgccaatttgtcctctctcattcactgatccaccagcctgactgctaagagctatagtctttttagttgttttgtctttttaagcaagatgaaaacctttctattagggattttg

SEQ ID NO: 40972 - DNA, 120 bp, Artificial Sequence
  ENSG00000059728_30 (sequence is synthesized)
gggttgggaggggatgggcagagatataaaccccagcctttaagactttgacaattgtacgtaaatacagatgtgtataaatataggcacatgcatatttttatgtgaaagttgatttta

SEQ ID NO: 40973 - DNA, 120 bp, Artificial Sequence
  ENSG00000059728_31 (sequence is synthesized)
aaaaactaaaaaaatctaaactgcactcttattgataccatcataacgcaagtgggaaaaataagagtacgcagtctaatttaatttcatgcagtgggaaaatatatatgtgtgcttctg

SEQ ID NO: 40974 - DNA, 120 bp, Artificial Sequence
  ENSG00000059728_32 (sequence is synthesized)
taacatcctgaaaacatagctttccatcccctgttggctttgaatggtgggccgagcacccaggtcgtctgtattttggttttcttttgctaagcagagatcttgaattcttcaaggtgc

SEQ ID NO: 40975 - DNA, 120 bp, Artificial Sequence
  ENSG00000059728_33 (sequence is synthesized)
tgatagcaactgctggctcctttctgtagtcacacacctaatgctagtttagtgattcaaaatgcatcacatttttaggcaggacctagattttccctgtcaacctaagatgaaaataat

SEQ ID NO: 40976 - DNA, 120 bp, Artificial Sequence
  ENSG00000059728_34 (sequence is synthesized)
ttcagtgttgattcagaactgaacattaagtaggccctcgtcctgcagttggccacttgagtgttttgttttgtttttattttttaaggtgggcattttcctttaacctctactttttca

SEQ ID NO: 40977 - DNA, 120 bp, Artificial Sequence
  ENSG00000059728_35 (sequence is synthesized)
aaagcaacaaaggggcctcaacctgagtttcctatgggcctctcttctgcatccccaaagcggccaagagcaaatcctgggggataagaaaaaagtgtaaactaggtaggattgtgatgc

SEQ ID NO: 40978 - DNA, 120 bp, Artificial Sequence
  ENSG00000059728_36 (sequence is synthesized)
tcaaaataaccatctagcaatatcttggagcttgagaatagattttgtgggcttatttcttcttgcctcttccccatcctttcaagagagaacttatttttgaaaagtatctatatatac

SEQ ID NO: 40979 - DNA, 120 bp, Artificial Sequence
  ENSG00000059728_37 (sequence is synthesized)
acacacacacacacacacacatattattatttaggtttttataccatactgtattggcgagaataccactatcattgtcctttacagtctatttcttcccccaagtcttggtcttttttt

SEQ ID NO: 40980 - DNA, 120 bp, Artificial Sequence
  ENSG00000059728_38 (sequence is synthesized)
attttctattttttcatgaaccacacaggagactttaacatcctggtcttttctgtttcttctttgtttccccaagtttgtctgtccccctttgccttccctgagtgttgaacatcaggt

SEQ ID NO: 40981 - DNA, 120 bp, Artificial Sequence
  ENSG00000059728_39 (sequence is synthesized)
agtaaaaggctaaacgcaatttcttgcatgtcaatctattctttttctatgtttgactctgatgcagtgtgtttagcgtgtctagtagctggctactcctatttaaaaactcttcctggt

SEQ ID NO: 40982 - DNA, 120 bp, Artificial Sequence
  ENSG00000059728_40 (sequence is synthesized)
agaagacaacccaaagacccttttcgatgaggtggtttctcattctacatcctctgatctctatagactgtaggatgctttgctttcaaagataactgggttagagggtggggtgtgcaa

SEQ ID NO: 40983 - DNA, 120 bp, Artificial Sequence
  ENSG00000059728_41 (sequence is synthesized)
taggtgatttatcatggtttttttcattatcaatattacatggatgattttctcagattcttctgaaagaagaaattgacaggcactgctagattcagctattgaatggctgaagagatt

SEQ ID NO: 40984 - DNA, 120 bp, Artificial Sequence
  ENSG00000059728_42 (sequence is synthesized)
gagtatttgaccttctctcaaaatcataaagtgagaattcataaggcacccaatgttaagatttatccagatttttacattttgatttcttctctctgtggggtggcaagttgagggagc

SEQ ID NO: 40985 - DNA, 120 bp, Artificial Sequence
  ENSG00000059728_43 (sequence is synthesized)
attcttcattttagcttttacctgacaaccaaacttgcctttaccccatccctagaattggtgctcttggaatattgctgttaccatcatttttggggggccatcttcctaatgctacac

SEQ ID NO: 40986 - DNA, 120 bp, Artificial Sequence
  ENSG00000059728_44 (sequence is synthesized)
acagcctgacaggggagcagcagatgaaagggtatgctattctgtttccagatgtttctttatgtaaatatgacgccaatgtaaatcctgtgtcaagatcatagagaatggtgcttttta

SEQ ID NO: 40987 - DNA, 120 bp, Artificial Sequence
  ENSG00000059728_45 (sequence is synthesized)
ctacagttagcacatgcatttttagaaactactacatgttttagagaatctttgctgtgtatatgtaaactgtattgttcaactgttaacaaataataaattatttcattattaaagaaa

SEQ ID NO: 40988 - DNA, 120 bp, Artificial Sequence
  ENSG00000059728_46 (sequence is synthesized)
aacagcagtagcaggtaatttggtaaatacttctttctgtcttttagattatattgtaggtgacacaaactgctgaatgtaagttttctgttgtgattataaccctataaaattacattg

SEQ ID NO: 40989 - DNA, 120 bp, Artificial Sequence
  ENSG00000059728_47 (sequence is synthesized)
tggccgtcatgattcagtaatgtacacatggacttaagccattgcaggaagctgtttctgtttgggttgagggaactgaaaagaaaaatagaaatgttttacatttctttatgaacttta

SEQ ID NO: 40990 - DNA, 120 bp, Artificial Sequence
  ENSG00000059728_48 (sequence is synthesized)
aaagaagaggaagaagattatttcaggtagagggaagagctcatgaaaatgccatggtaagaaggtggatggctctgtaaatgcctatgccataaatgtctctcagaagaggaagtacag

SEQ ID NO: 40991 - DNA, 120 bp, Artificial Sequence
  ENSG00000059728_49 (sequence is synthesized)
gcagtacatgaatcgaaaaggtggattcaacagacctttggatttcattgcatgagaattgaagtgttgaaggatgattttttttcccctcatcttggtcagagagtggattttgtattt

SEQ ID NO: 40992 - DNA, 120 bp, Artificial Sequence
  ENSG00000059728_50 (sequence is synthesized)
acataaaggacaagtacccccagcactggcgatgctgaagagtcagacgaagccaggagtcactggccagtcgacttcctgtctcagggagaagcttgatgagtggcaccgaaaggcgtc

SEQ ID NO: 40993 - DNA, 120 bp, Artificial Sequence
  ENSG00000059728_51 (sequence is synthesized)
tgaggaagtgtggcgcattccactgctagaagggaagatgcgggggccattgcccatttagagatctccctgtggggcccaacaactacccctttgacttgcagaaacttgaagattgtg

SEQ ID NO: 40994 - DNA, 120 bp, Artificial Sequence
  ENSG00000059758_0 (sequence is synthesized)
aatccgcagccgccgagtgtgaaagcgacgcacacgcaaggagcgaacgcggccgcccgcagtctcctgagctccccgcgggccgccgcagagccgcggagaaggagccagcgcccggcc

SEQ ID NO: 40995 - DNA, 120 bp, Artificial Sequence
  ENSG00000059758_1 (sequence is synthesized)
agacagtctcagcccgccgtcggcgcccgccgcgctcgcgcccggctgctccgaggggattagtgggccgtccgcgcggctcgtcggcgcgggagccatgttgaccgagggacttggcaa

SEQ ID NO: 40996 - DNA, 120 bp, Artificial Sequence
  ENSG00000059758_2 (sequence is synthesized)
cgcgtgagacacccgcggcccctcccgaggctccggacccgcggcgagagccggaaggcggctgtggcggcggaggcctgcgctcggaagcgcctcacgtctgccggccgctgagacccg

SEQ ID NO: 40997 - DNA, 120 bp, Artificial Sequence
  ENSG00000059758_3 (sequence is synthesized)
gacttgcatccggtcgccgcgggcgtccgcggagcagcttccccccgcgcctctcttcgcctcgcctcgggacccgcggtccccgctcttgctggatttttcaagccacattcaattgat

SEQ ID NO: 40998 - DNA, 120 bp, Artificial Sequence
  ENSG00000059758_4 (sequence is synthesized)
aggatgaaaaaatttaagagaaggctatccctcacactccgaggaagtcagactattgatgaatcattgtctgaattggctgaacaaatgactattgaagaaaacagcagcaaggataat

SEQ ID NO: 40999 - DNA, 120 bp, Artificial Sequence
  ENSG00000059758_5 (sequence is synthesized)
gagcctattgtgaagaatggcaggcctccaacgtctcacagtatgcattccttcctccaccagtacacaggatctttcaagaagcccccattgcggagaccacacagtgttattggaggg

SEQ ID NO: 41000 - DNA, 120 bp, Artificial Sequence
  ENSG00000059758_6 (sequence is synthesized)
agccttggctccttcatggcaatgcccagaaatggaagcagattagatattgttcatgaaaatctaaaaatgggatcagatggtgagagtgaccaagcttctgggacatcatctgatgaa

SEQ ID NO: 41001 - DNA, 120 bp, Artificial Sequence
  ENSG00000059758_7 (sequence is synthesized)
gtccagtcacctacaggtgtttgtctcagaaatcgtatacatagacggatctcaatggaggatttaaataagcggttatcactgcctgcagacatcagaatacctgatggatatcttgaa

SEQ ID NO: 41002 - DNA, 120 bp, Artificial Sequence
  ENSG00000059758_8 (sequence is synthesized)
aagttgcagataaacagtccaccatttgaccaaccaatgagtcgaaggtctcgtagagcttccttatcagaaattggctttggaaaaatggaaacctacatcaaattggaaaagcttgga

SEQ ID NO: 41003 - DNA, 120 bp, Artificial Sequence
  ENSG00000059758_9 (sequence is synthesized)
gagggtacatatgcaacagtatataaaggaagaagtaaattgacagagaatttggtggcattaaaagagatccgattggaacatgaagaaggtgcaccctgcacagctataagagaagtt

SEQ ID NO: 41004 - DNA, 120 bp, Artificial Sequence
  ENSG00000059758_10 (sequence is synthesized)
tcactattaaaggatttaaaacatgcaaatatagtaaccttacatgacattgttcacacagataaatccttgactttggtgtttgagtatctggataaagacctgaaacagtacatggat

SEQ ID NO: 41005 - DNA, 120 bp, Artificial Sequence
  ENSG00000059758_11 (sequence is synthesized)
gactgtggaaacatcatgagtatgcacaacgtaaagctgtttctgtaccaaattctacgtggtttggcatattgccatagaagaaaggtattgcatcgagacttgaaaccacagaacctc

SEQ ID NO: 41006 - DNA, 120 bp, Artificial Sequence
  ENSG00000059758_12 (sequence is synthesized)
ctcattaatgagaaaggagaattaaagctagcagattttggactagcccgagccaagtcagttcccacaaagacctactcaaatgaagttgtcacactatggtaccggccacctgatgtg

SEQ ID NO: 41007 - DNA, 120 bp, Artificial Sequence
  ENSG00000059758_13 (sequence is synthesized)
cttcttggttcctcggagtactcaacacagattgacatgtggggtgttggttgcattttctttgaaatggcttctggaagacctttatttccaggatcaaccgtggaagatgaactgcac

SEQ ID NO: 41008 - DNA, 120 bp, Artificial Sequence
  ENSG00000059758_14 (sequence is synthesized)
ttaattttccgactgctaggaactccatctcaggaaacttggccaggtatttcttcaaatgaggagttcaagaactacaactttccaaaatataaaccacagcctctaattaaccacgca

SEQ ID NO: 41009 - DNA, 120 bp, Artificial Sequence
  ENSG00000059758_15 (sequence is synthesized)
cccaggttagactctgaaggaattgagttgataacaaaatttcttcagtatgaatctaagaaaagggtttcagctgaagaggccatgaaacatgtgtactttcgaagtctgggaccaaga

SEQ ID NO: 41010 - DNA, 120 bp, Artificial Sequence
  ENSG00000059758_16 (sequence is synthesized)
attcttcttatccagagacaggacatgggaagaacagaagacagagcatgctcttttaagtctgataacatggtttcaagcccagcccccagcctttcttaccaatcaaggactcagaac

SEQ ID NO: 41011 - DNA, 120 bp, Artificial Sequence
  ENSG00000059758_17 (sequence is synthesized)
tgaaggcaattatttcttttggtggacttggaatctccgtttgtctacactgtcctcttcacagtggagtctttttatttcagacctacagattgtttttatatttgttgtcacagtgtg

SEQ ID NO: 41012 - DNA, 120 bp, Artificial Sequence
  ENSG00000059758_18 (sequence is synthesized)
acaattttttgtacagtcggttttaaggtcttctctgccattagagccagtaggttacagctattgatgtaactatagctgcaatttttgtgcaggactgagaaacacagtgcattattt

SEQ ID NO: 41013 - DNA, 120 bp, Artificial Sequence
  ENSG00000059758_19 (sequence is synthesized)
attgcggaatcattgctgctaaataactactgtctgtttatttaacacaacaattgaatgcctgaagaagttgcagtggctttattatatgtgaatgcatctgtttctcctcacgaattg

SEQ ID NO: 41014 - DNA, 120 bp, Artificial Sequence
  ENSG00000059758_20 (sequence is synthesized)
ttttactgctgcattttttgtttttaaaattaaactgcagtgtttcctggaatgtaaatttagctttgcttaatagtaaaataagtgagccatcttgaacactttaagtttatactatat

SEQ ID NO: 41015 - DNA, 120 bp, Artificial Sequence
  ENSG00000059758_21 (sequence is synthesized)
aatttcttaatgaacattggcaaatagagtagctaagagattgacaagcacattacgtttagataagcatgtgatgcagaagttgattcaagcaagtgaatccctgacattttgaggatc

SEQ ID NO: 41016 - DNA, 120 bp, Artificial Sequence
  ENSG00000059758_22 (sequence is synthesized)
tcacattagacaccaacaaattaaagctccaaaattatttattttttatgtgttcctcactttagaaacgtctactgcatattactggatatttgtatactaatacacttacctatttta

SEQ ID NO: 41017 - DNA, 120 bp, Artificial Sequence
  ENSG00000059758_23 (sequence is synthesized)
cattgtgttttaaatttagttaaaacttaaccgtagaagtctgttcaaacgcgaaaggtcttgctttgtttgttttaaatacatttattttattagaaaggatgatatttcattggggaa

SEQ ID NO: 41018 - DNA, 120 bp, Artificial Sequence
  ENSG00000059758_24 (sequence is synthesized)
tagtttctttcatttgggggctatgtgtttcaataacattcacttggaatcagctgaaagctgtaatatgtctttgaaatgagccatgataaattacaaacaagagaaatgagaacttac

SEQ ID NO: 41019 - DNA, 120 bp, Artificial Sequence
  ENSG00000059758_25 (sequence is synthesized)
aggattgcttgaaattattgtgggtattatctgtttaccagagatactaaatattagttttaattatgcatctctttgaacatcataaacacactttggtgttggtaacagtattttaag

SEQ ID NO: 41020 - DNA, 120 bp, Artificial Sequence
  ENSG00000059758_26 (sequence is synthesized)
catttttgttcacttttaaggactatttgtttagtgcatcttacaaactataaatcttaattggtatattttgaaatggtcgtgtaaatttttgccttatatatcatgaaaatagtcata

SEQ ID NO: 41021 - DNA, 120 bp, Artificial Sequence
  ENSG00000059758_27 (sequence is synthesized)
acttaatttcttttcctgaaattcactgtaaaacattcaggggtcctaccatttctgttcaggaaatcttgtagtttattgttgttatttaacagtattaagtggatttttgtatatttc

SEQ ID NO: 41022 - DNA, 120 bp, Artificial Sequence
  ENSG00000059758_28 (sequence is synthesized)
attttaactttatttgtgaatagtgattgtggcatgtttggggtgttattttaatatttcacgatactaaaattttaattttaaaaaattctggaagaaacagattcatgtgtaatggtg

SEQ ID NO: 41023 - DNA, 120 bp, Artificial Sequence
  ENSG00000059758_29 (sequence is synthesized)
aatattggaccactactgcttttcacatttgtaaattggttttatgttaaaccttgtagcctaacaaactgctgttctttctaactgacagacatgtattaatattgtactttgaaggtt

SEQ ID NO: 41024 - DNA, 120 bp, Artificial Sequence
  ENSG00000059758_30 (sequence is synthesized)
ataaatatgtggaaattccttcattttgttttgaaatttataataacaaaatctccatgttgttaaaatgtggttttattgagtcacagttctttcttggggatgaaggctgtgccgagt

SEQ ID NO: 41025 - DNA, 120 bp, Artificial Sequence
  ENSG00000059758_31 (sequence is synthesized)
ggggtccttttcttttatgggtcgttcttaagataatgaagtctcactgtgctagaggtgttattgttttctgtttgtgccaatcatttgcttagtaatttctgctgggttttttttata

SEQ ID NO: 41026 - DNA, 120 bp, Artificial Sequence
  ENSG00000059758_32 (sequence is synthesized)
gcactctcaattataaagtatcaaatttgtcacttcatagaatgtatatttgatttgttgcaaatttgacattatagcttttcataggcttaattcttgcgtataaaagatgaaaatata

SEQ ID NO: 41027 - DNA, 120 bp, Artificial Sequence
  ENSG00000059758_33 (sequence is synthesized)
aaggattcaggaaaaaatacataatacacataacccttacgtattttaggatcttatttaattttgaactgtatatgttttagaattctagagtttatgtagttacttttcccagaaaga

SEQ ID NO: 41028 - DNA, 120 bp, Artificial Sequence
  ENSG00000059758_34 (sequence is synthesized)
agacattgattaatgccttattccgtaccacagagattatgatgaaattcctgttttgctttctacagaattattctgtatttacttaacaaaaacctaagaaagggttatgtaagtaaa

SEQ ID NO: 41029 - DNA, 120 bp, Artificial Sequence
  ENSG00000059758_35 (sequence is synthesized)
aatgattgatatttatgttatggaacctaagcatcaaaataatattgatattttactataatggtttttaaaatacacattttaagaaaatttccaatccttctaaacttatttgtgatg

SEQ ID NO: 41030 - DNA, 120 bp, Artificial Sequence
  ENSG00000059758_36 (sequence is synthesized)
tcaactgttactgctaggaggaagttactttttaaaaaatatttccatagatactgttagactaaaagaaataggtagatgcttcaaatagaataataaactattaaattcagaaagcca

SEQ ID NO: 41031 - DNA, 120 bp, Artificial Sequence
  ENSG00000059758_37 (sequence is synthesized)
ctatatataaaaggaaaaagacattgtacttaagtatgcaattactttctttttcctgttacaatgttctaggccagctgcttttctgcttaccatcatttatgcttatactaaagcatg

SEQ ID NO: 41032 - DNA, 120 bp, Artificial Sequence
  ENSG00000059758_38 (sequence is synthesized)
agtcattatatctattgttaatcttgttgtgttcagcaaataaaaatgcaagcaaaattttctaaaaattttatttaaagattcatcagaaattggctttggaaaaatggaaacctacat

SEQ ID NO: 41033 - DNA, 120 bp, Artificial Sequence
  ENSG00000059758_39 (sequence is synthesized)
aagtaagagaaatcctaaagtgttttccctgctttatttttatttgtccaaggttagggtctggggtgattggggagatggctattgatttttaagcctaagattctagtcttctctata

SEQ ID NO: 41034 - DNA, 120 bp, Artificial Sequence
  ENSG00000059758_40 (sequence is synthesized)
gttagattagaatttcttgaagggaggtgtgtgtcttatttccctatgattcagttatttcttgtaacactgagcacattgtcactcctctgtaggaaaccaatagtacttaggcaagga

SEQ ID NO: 41035 - DNA, 120 bp, Artificial Sequence
  ENSG00000059758_41 (sequence is synthesized)
gtccctaggcccaatctagcttcgatttagcgttgttaaaagtgaatttcaaacaaaaactaatgaagcataaccgaaacataaattgttttcttgtgaaaatacattttttcttaagat

SEQ ID NO: 41036 - DNA, 120 bp, Artificial Sequence
  ENSG00000059758_42 (sequence is synthesized)
acaaagatgattttcctttattgtggtcacactgactttactatccccatgacagcagtgagcatattgtcaaagtcactgtaatagcagatttcccatgcctgaataacattgatttta

SEQ ID NO: 41037 - DNA, 120 bp, Artificial Sequence
  ENSG00000059758_43 (sequence is synthesized)
ctcttaacattctatttttagattaccacagtattttactttaaaatagagtaaggtgagtggggaattagaagaatgtttgggaactaagctgccaaaagctttcattaatttcctatt

SEQ ID NO: 41038 - DNA, 120 bp, Artificial Sequence
  ENSG00000059758_44 (sequence is synthesized)
ctcatttattagacaatattgattcatcaaagcttgtgtagcagtcagtgacaaagctaattggaataaaaaatccttaatacttttcacttcaactttactggatatatttaaatgaaa

SEQ ID NO: 41039 - DNA, 120 bp, Artificial Sequence
  ENSG00000059758_45 (sequence is synthesized)
agtgttggtcaagagcggaggtagagggaaggtgggaaacccagcaaaccgatggggaggggaaaatggggggaggagggtgcctagtgctgtctccgtcgcagttgcttttctcagcat

SEQ ID NO: 41040 - DNA, 120 bp, Artificial Sequence
  ENSG00000059758_46 (sequence is synthesized)
ttttgtgcccgatgctatgcccgatgcttttgctccccaactcagctggatagctccagattccctccctcctgtcacccccacactgccacattgactctcctgtggtttttccctcgt

SEQ ID NO: 41041 - DNA, 120 bp, Artificial Sequence
  ENSG00000059758_47 (sequence is synthesized)
tacatgctttaccagaaagtgtatcaatattcagtttgaaagagattcagttgcaaaaggacccgggttttcgaaattcttcttatccagagacaggtgtgtttgtcataaaccatttca

SEQ ID NO: 41042 - DNA, 120 bp, Artificial Sequence
  ENSG00000059758_48 (sequence is synthesized)
cgtgtcgatcatgaatttttgcgtggaaccaagcttttggtttataaattgatcagtaaaattattgatgtaaaaaccaatgtacagtgcattccacaactgtttatgtttagcattgca

SEQ ID NO: 41043 - DNA, 120 bp, Artificial Sequence
  ENSG00000059758_49 (sequence is synthesized)
cgtactcacttttctgtatgatgtgggcagctcagtaaatcttcagagaaaaatctgactcagtcaagtcagggatcctgaaagctgcagatggcacaaagaccttttacaagtgacctg

SEQ ID NO: 41044 - DNA, 120 bp, Artificial Sequence
  ENSG00000059758_50 (sequence is synthesized)
gcttgatcactgcacacgccatccctggtacctgaggcagaagacacatcttgtgcttccctagtcatcaggttcatcacttcgaagcatagaagctgtagactgaccccgtcaacagaa

SEQ ID NO: 41045 - DNA, 120 bp, Artificial Sequence
  ENSG00000059769_0 (sequence is synthesized)
agacgggactagccgggcgcgcggctgagtgctgcagaatcgctggggtggcagagccgccagcgaggctggggatgggggcgccgctgctctctcccggctggggagccggggctgccg

SEQ ID NO: 41046 - DNA, 120 bp, Artificial Sequence
  ENSG00000059769_1 (sequence is synthesized)
gcgctggtggatgctgctggcgcccctgctgccggcgctgctgctggtgcggcccgcgggggccctggtggaggggctctactgcggcacgcgggactgctacgaggtgctgggcgtgag

SEQ ID NO: 41047 - DNA, 120 bp, Artificial Sequence
  ENSG00000059769_2 (sequence is synthesized)
tacgaggtgctgggcgtgagccgctcggcgggcaaggcggagatcgcgcgggcctaccgccagctggcccggcgctaccaccctgaccgctaccggccccagcccggagacgagggcccc

SEQ ID NO: 41048 - DNA, 120 bp, Artificial Sequence
  ENSG00000059769_3 (sequence is synthesized)
gcgccgaggaggctttcctgctggtggcaaccgcctacgagacactcaaggatgaagaaacacgaaaagattatgattacatgctggatcatccagaagagtactacagccattactacc

SEQ ID NO: 41049 - DNA, 120 bp, Artificial Sequence
  ENSG00000059769_4 (sequence is synthesized)
actactatagcaggcgcttggcccctaaggtggatgttagagtagtgattttggtcagcgtgtgtgctatttcggtgtttcagtttttcagctggtggaatagctacaataaggcaatca

SEQ ID NO: 41050 - DNA, 120 bp, Artificial Sequence
  ENSG00000059769_5 (sequence is synthesized)
gctacctagccacagtgcccaagtaccgtatccaagctacagagattgccaagcagcagggactgctcaaaaaagccaaagaaaaaggcaaaaacaaaaagtccaaagaagaaattcgtg

SEQ ID NO: 41051 - DNA, 120 bp, Artificial Sequence
  ENSG00000059769_6 (sequence is synthesized)
acgaggaggagaacatcataaagaacattataaaaagtaaaatagatataaaggggggctatcagaaaccccaaatctgtgatcttctcctgtttcaaattatcttagctccttttcacc

SEQ ID NO: 41052 - DNA, 120 bp, Artificial Sequence
  ENSG00000059769_7 (sequence is synthesized)
tatgctcatatatagtttggtattgtcggtggatctataattttaacatcaaaggcaaagaatatggagaggaagagagattatacattatacgtaaatctatgaagatgtcaaagtctc

SEQ ID NO: 41053 - DNA, 120 bp, Artificial Sequence
  ENSG00000059769_8 (sequence is synthesized)
aatttgatagtctagaagatcatcagaaagaaacttttcttaaacgagagctctggatcaaggagaattatgaggtctacaagcaagaacaagaggaagaattaaagaaaaagttggcaa

SEQ ID NO: 41054 - DNA, 120 bp, Artificial Sequence
  ENSG00000059769_9 (sequence is synthesized)
atgaccccagatggaagagatacaggagatggatgaagaatgaagggcctgggcggttaacatttgtggatgactgaagattgatggaatgctactatgccaaaccttaattgtgatatt

SEQ ID NO: 41055 - DNA, 120 bp, Artificial Sequence
  ENSG00000059769_10 (sequence is synthesized)
attttcataactgaattattttagaaatgtatcaattgactgctgctcagcagtaactaaaattcctcaagtatttgattaaacagaataatgtcaaaatttaaaccttcccttaaaact

SEQ ID NO: 41056 - DNA, 120 bp, Artificial Sequence
  ENSG00000059769_11 (sequence is synthesized)
aagacatttatgattgttcaatttttataatctatttgtggattttgttaaaagatttcacatgaagatttattagttgccatttaaaatttttatatgtttagttaaaagatttgacat

SEQ ID NO: 41057 - DNA, 120 bp, Artificial Sequence
  ENSG00000059769_12 (sequence is synthesized)
tttgacatgaaaatttattagataccatttaaaaattttatgtgttatgtgtttattctttgagaatgttaccttactgtttgtaatagtgctacatttttctgctttcatggcctctgt

SEQ ID NO: 41058 - DNA, 120 bp, Artificial Sequence
  ENSG00000059769_13 (sequence is synthesized)
attttcacaaaacaccaaaaacagcatttaattatattatcatgagtgtgtttctggacacaaacttctgcagtagaatgacctaacatgtcgttttcattgcagtcattataggattga

SEQ ID NO: 41059 - DNA, 120 bp, Artificial Sequence
  ENSG00000059769_14 (sequence is synthesized)
aatacgttcaaaataacctctctaggaaagtcttctgctagaatttctcccctctattcattataatattctttgtttttaaagccagtcaaatataatagtcttaataagatcagaaac

SEQ ID NO: 41060 - DNA, 120 bp, Artificial Sequence
  ENSG00000059769_15 (sequence is synthesized)
tctccaggagagtgagtctaccctcacgtccttgtaggatgatcttgattatagtcttattataggactataactgtattctcaacatttctccagaaaggaccttgtaaaaaggtcttt

SEQ ID NO: 41061 - DNA, 120 bp, Artificial Sequence
  ENSG00000059769_16 (sequence is synthesized)
tgtaccacagtattggttttttcccctctctcttcacttaaaaaaaaaaatagcaaggcagaaatagtgtattgaaaagttgttcatctattatgaagtccttgagtggtgaaaaatccg

SEQ ID NO: 41062 - DNA, 120 bp, Artificial Sequence
  ENSG00000059769_17 (sequence is synthesized)
ttgtacatgagaacatttctatgcatttaagccagaaacgaggtacatggctgtgtgctcttctgtcaaccaatgaaatgtgttttcacatgtgtggcagtgcaagtaaataacacatta

SEQ ID NO: 41063 - DNA, 120 bp, Artificial Sequence
  ENSG00000059769_18 (sequence is synthesized)
tttgactgaatcaggcatgatactgcaccaaagtgttggtacatattcacggtagtaaatcagtacccctgttaaaggatttatcccattgcttcatattaataaaatggttacaatata

SEQ ID NO: 41064 - DNA, 120 bp, Artificial Sequence
  ENSG00000059769_19 (sequence is synthesized)
gcaaccgcctacgagacactcaagatattggttatgttccagtcctcctgcatatgcccaagaggattgggagtggaatggacaccagcagaagcaccacagttattcctgtagagatta

SEQ ID NO: 41065 - DNA, 120 bp, Artificial Sequence
  ENSG00000059769_20 (sequence is synthesized)
gaaacaaggagcttattgccctgcttgtcaaggctcaggacagacaggaggaagaaacaagtataaaggttttggttttggaaagaagttggaatctccagaccctgggaccttaagatc

SEQ ID NO: 41066 - DNA, 120 bp, Artificial Sequence
  ENSG00000059769_21 (sequence is synthesized)
cacaaaattgctgaaagaaaaagtactaccttattgaaagattataaactaaggccatttaatggactgtcctatgaagttggatatcttgtcattttacaggatgaagaaacacgaaaa

SEQ ID NO: 41067 - DNA, 120 bp, Artificial Sequence
  ENSG00000059804_0 (sequence is synthesized)
agagatgctgtaatggtaagactttggatccttcctgaggacgtggagaaaacttgctgctgagaaggacattttgaaggttttgttggctgaaaaagctgtttctggaatcacccctag

SEQ ID NO: 41068 - DNA, 120 bp, Artificial Sequence
  ENSG00000059804_1 (sequence is synthesized)
atctttcttgaagacttgaattagattacagcgatggggacacagaaggtcaccccagctctgatatttgccatcacagttgctacaatcggctctttccaatttggctacaacactggg

SEQ ID NO: 41069 - DNA, 120 bp, Artificial Sequence
  ENSG00000059804_2 (sequence is synthesized)
gtcatcaatgctcctgagaagatcataaaggaatttatcaataaaactttgacggacaagggaaatgccccaccctctgaggtgctgctcacgtctctctggtccttgtctgtggccata

SEQ ID NO: 41070 - DNA, 120 bp, Artificial Sequence
  ENSG00000059804_3 (sequence is synthesized)
ttttccgtcgggggtatgatcggctccttttccgtcggactcttcgtcaaccgctttggcaggcgcaattcaatgctgattgtcaacctgttggctgtcactggtggctgctttatggga

SEQ ID NO: 41071 - DNA, 120 bp, Artificial Sequence
  ENSG00000059804_4 (sequence is synthesized)
ctgtgtaaagtagctaagtcggttgaaatgctgatcctgggtcgcttggttattggcctcttctgcggactctgcacaggttttgtgcccatgtacattggagagatctcgcctactgcc

SEQ ID NO: 41072 - DNA, 120 bp, Artificial Sequence
  ENSG00000059804_5 (sequence is synthesized)
ctgcggggtgcctttggcactctcaaccagctgggcatcgttgttggaattctggtggcccagatctttggtctggaattcatccttgggtctgaagagctatggccgctgctactgggt

SEQ ID NO: 41073 - DNA, 120 bp, Artificial Sequence
  ENSG00000059804_6 (sequence is synthesized)
tttaccatccttcctgctatcctacaaagtgcagcccttccattttgccctgaaagtcccagatttttgctcattaacagaaaagaagaggagaatgctaagcagatcctccagcggttg

SEQ ID NO: 41074 - DNA, 120 bp, Artificial Sequence
  ENSG00000059804_7 (sequence is synthesized)
tggggcacccaggatgtatcccaagacatccaggagatgaaagatgagagtgcaaggatgtcacaagaaaagcaagtcaccgtgctagagctctttagagtgtccagctaccgacagccc

SEQ ID NO: 41075 - DNA, 120 bp, Artificial Sequence
  ENSG00000059804_8 (sequence is synthesized)
atcatcatttccattgtgctccagctctctcagcagctctctgggatcaatgctgtgttctattactcaacaggaatcttcaaggatgcaggtgttcaagagcccatctatgccaccatc

SEQ ID NO: 41076 - DNA, 120 bp, Artificial Sequence
  ENSG00000059804_9 (sequence is synthesized)
ggcgcgggtgtggttaatactatcttcactgtagtttctctatttctggtggaaagggcaggaagaaggactctgcatatgataggccttggagggatggctttttgttccacgctcatg

SEQ ID NO: 41077 - DNA, 120 bp, Artificial Sequence
  ENSG00000059804_10 (sequence is synthesized)
actgtttctttgttattaaaggataactataatgggatgagctttgtctgtattggggctatcttggtctttgtagccttctttgaaattggaccaggccccattccctggtttattgtg

SEQ ID NO: 41078 - DNA, 120 bp, Artificial Sequence
  ENSG00000059804_11 (sequence is synthesized)
gccgaactcttcagccagggcccccgcccagctgcgatggcagtggccggctgctccaactggacctccaacttcctagtcggattgctcttcccctccgctgctcactatttaggagcc

SEQ ID NO: 41079 - DNA, 120 bp, Artificial Sequence
  ENSG00000059804_12 (sequence is synthesized)
tacgtttttattatcttcaccggcttcctcattaccttcttggcttttaccttcttcaaagtccctgagacccgtggcaggacttttgaggatatcacacgggcctttgaagggcaggca

SEQ ID NO: 41080 - DNA, 120 bp, Artificial Sequence
  ENSG00000059804_13 (sequence is synthesized)
cacggtgcagatagatctggaaaggacggcgtcatggagatgaacagcatcgagcctgctaaggagaccaccaccaatgtctaagtcgtgcctccttccacctccctcccggcatgggaa

SEQ ID NO: 41081 - DNA, 120 bp, Artificial Sequence
  ENSG00000059804_14 (sequence is synthesized)
agccacctctccctcaacaagggagagacctcatcaggatgaacccaggacgcttctgaatgctgctacttaattcctttctcatcccacgcactccatgagcaccccaaggctgcggtt

SEQ ID NO: 41082 - DNA, 120 bp, Artificial Sequence
  ENSG00000059804_15 (sequence is synthesized)
acatgacaactttgccagcttttcctcccttgggttctgatattgccgcactaggggatataggagaggaaaagtaaggtgcagttcccccaacctcagacttaccaggaagcagataca

SEQ ID NO: 41083 - DNA, 120 bp, Artificial Sequence
  ENSG00000059804_16 (sequence is synthesized)
tatgagtgtggaagccggagggtgtttatgtaagagcaccttcctcacttccatacagctctacgtggcaaattaacttgagttttatttattttatcctctggtttaattacataattt

SEQ ID NO: 41084 - DNA, 120 bp, Artificial Sequence
  ENSG00000059804_17 (sequence is synthesized)
tttttttttaactttaagtttcaggatacatgtgccgaatgtgcaggtttgttacataggtatatatatgccatgatggaaatatttatttttttaagcgtaattttgccaaataataaa

SEQ ID NO: 41085 - DNA, 120 bp, Artificial Sequence
  ENSG00000059804_18 (sequence is synthesized)
aacagaaggaaattgagattagagggaggtgtttaaagagaggttatagagtagaagatttgatgctggagaggttaaggtgcaataagaatttagggagaaatgttgttcattattgga

SEQ ID NO: 41086 - DNA, 120 bp, Artificial Sequence
  ENSG00000059804_19 (sequence is synthesized)
gggtaaatgatgtggtgcctgaggtctgtacgttacctcttaacaatttctgtccttcagatggaaactctttaacttctcgtaaaagtcatatacctatataataaagctactgatttc

SEQ ID NO: 41087 - DNA, 120 bp, Artificial Sequence
  ENSG00000059804_20 (sequence is synthesized)
ctttggagcttttttctttaagataatagtttacatgtagtagtacttgaaatctaggattattaactaatatgggcattgtagttaatgatggttgatgggttctaattttggatggag

SEQ ID NO: 41088 - DNA, 120 bp, Artificial Sequence
  ENSG00000059804_21 (sequence is synthesized)
tccagggaagagaaagtgatttctagaaagcctgttcccctcactggatgaaataactccttcttgtagtagtctcattacttttgaagtaatcccgccacctatctcgtgggagagcca

SEQ ID NO: 41089 - DNA, 120 bp, Artificial Sequence
  ENSG00000059804_22 (sequence is synthesized)
tccaaataagaaacctaaaataattggttcttggtagagattcattatttttccactttgttctttaggagattttaggtgttgattttctgttgtattttaactcatacctttaaagga

SEQ ID NO: 41090 - DNA, 120 bp, Artificial Sequence
  ENSG00000059804_23 (sequence is synthesized)
attccccaaagaatgtttatagcaaacttggaatttgtaacctcagctctgggagaggatttttttctgagcgattattatctaaagtgtgttgttgctttaggctcacggcacgcttgc

SEQ ID NO: 41091 - DNA, 120 bp, Artificial Sequence
  ENSG00000059804_24 (sequence is synthesized)
gtatgtctgttaccatgtcactgtggtcctatgccgaatgccctcaggggacttgaatctttccaataaaccaggtttagacagtatgagtcaatgtgcagtgtagcccacacttgagag

SEQ ID NO: 41092 - DNA, 120 bp, Artificial Sequence
  ENSG00000059804_25 (sequence is synthesized)
gatgaatgtatgtgcactgtcactttgctctgggtggaagtacgttattgttgacttattttctctgtgtttgttcctacagcccctttttcatatgttgctcagtctccctttcccttc

SEQ ID NO: 41093 - DNA, 120 bp, Artificial Sequence
  ENSG00000059804_26 (sequence is synthesized)
ttggtgcttacacatctcagaccctttagccaaacccttgtcagtgacagtattttggttcttagttctcactgttccctctgctcctggagcctttgaataaaaatgcacgtagctgag

SEQ ID NO: 41094 - DNA, 120 bp, Artificial Sequence
  ENSG00000059804_27 (sequence is synthesized)
gctacttgggaagctgaggcgggagaatcatgtgaacccgggacgcaggggttgcagtgagcggagatcgcatcattgcactctagcctgggccacagggcgagactccgtctcaaaaaa

SEQ ID NO: 41095 - DNA, 120 bp, Artificial Sequence
  ENSG00000059804_28 (sequence is synthesized)
cgagactccgtctcaaaaaaaaaaaaatgcacatagctatcaagtgtgctttagcttgaaaaggtgaccttgcaacttcatgtcaacttctggctcctcaaacagtaggttggcagtaag

SEQ ID NO: 41096 - DNA, 120 bp, Artificial Sequence
  ENSG00000059804_29 (sequence is synthesized)
gtaggttggcagtaaggcagggtcccatttctcactgagaagattgtgaatatttccatatggattttctattgttactctggttctttgttttaaaataaaaattctgaatgtacacga

SEQ ID NO: 41097 - DNA, 120 bp, Artificial Sequence
  ENSG00000059804_30 (sequence is synthesized)
gtggcatctgcctggagtcccagctactcctgaggctgaggcttaaagatcacttgagtccaggagttaaacaccatcctgagcaacacagttagtgagggtccctccccaaactagggg

SEQ ID NO: 41098 - DNA, 120 bp, Artificial Sequence
  ENSG00000059804_31 (sequence is synthesized)
attttaagacaaactttgtatctatcctgtccaagactgaagatggagacaatattggtggggaaaattagtggggtcatctaatcgaagcacaaagctcacttactcccggaacgctgg

SEQ ID NO: 41099 - DNA, 120 bp, Artificial Sequence
  ENSG00000059804_32 (sequence is synthesized)
tcgtcaaccgctttggcaggtattgactagaaactgggcaaggaagtgggctctaccagccacattgaggacaagtgtggagagttagggcagggaggtgatgatgcctttgaataagaa

SEQ ID NO: 41100 - DNA, 120 bp, Artificial Sequence
  ENSG00000059804_33 (sequence is synthesized)
caccttgaattctaatcaagggaaacctagtccaactggccccgaatatgactgcccttgcttggagctctactaccctggagagctcccacccagctgtgcaagagatgaactgtgagt

SEQ ID NO: 41101 - DNA, 120 bp, Artificial Sequence
  ENSG00000059804_34 (sequence is synthesized)
gattggcctttgcagtccagctagggatagttcagaattattccctagtaaactcaactatggggtttctagaaacatacttaatttacaaggtccgaagttgtttacttgtattataaa

SEQ ID NO: 41102 - DNA, 73 bp, Artificial Sequence
  ENSG00000059804_35 (sequence is synthesized)
tcatgtgaacccgggacgcaggggttgcagtgagcggagatcgcatcattgcactctagcctgggccacaggg

SEQ ID NO: 41103 - DNA, 120 bp, Artificial Sequence
  ENSG00000059804_36 (sequence is synthesized)
ggctgaggtgggaggattgcttatgcccaggagatcgatgatgcagtgagctattgtagtgccactgccctccagcatgggcaacagagtaagaccctgtctcaaaaaataaaaataaaa

SEQ ID NO: 41104 - DNA, 120 bp, Artificial Sequence
  ENSG00000059804_37 (sequence is synthesized)
ataaatccaagccttttgactccacagccactctttgtattgtacgtcagggacaggaggagcttgccgttaattgcttctgggaacctagatactaggttacactgtctttaaatttaa

SEQ ID NO: 41105 - DNA, 120 bp, Artificial Sequence
  ENSG00000059804_38 (sequence is synthesized)
atggttgtggtttgttttagggatgattgtactggacctactttctgttacactctttccctgcctctcagaatccaagtgaggagggttctgattactcctgagtaaaattttcagccc

SEQ ID NO: 41106 - DNA, 120 bp, Artificial Sequence
  ENSG00000059804_39 (sequence is synthesized)
ctaaagaatgaggtgaaaaggcgggtttaggaatggatgctatcaggcagggtgtgatggctcatgcctgtaatccagcattataagaggccgaggcgggtcacctgaggtcaggagttc

SEQ ID NO: 41107 - DNA, 63 bp, Artificial Sequence
  ENSG00000059804_40 (sequence is synthesized)
gaatggatgctacccatcacctcacctcgtgcggccctttcctggctgccttacaggaagaat

SEQ ID NO: 41108 - DNA, 120 bp, Artificial Sequence
  ENSG00000059804_41 (sequence is synthesized)
tggatggtttggtaattttgaggggagaaaagaatccttgctacagatgttcaaagatggattgcatgaccctaccatcatttagttacctttttgttgcttaattttcctttgggaaaa

SEQ ID NO: 41109 - DNA, 120 bp, Artificial Sequence
  ENSG00000059804_42 (sequence is synthesized)
agagataaatttaatgttggatgtagtcttcactcttcaagcaaatatgggatggatgggaaaggagggagtatagaagggactatatagtatgctttgaacttggaattggaggaaagg

SEQ ID NO: 41110 - DNA, 120 bp, Artificial Sequence
  ENSG00000059804_43 (sequence is synthesized)
tgcttggaaaaactctcaagctctgttactccactgtttttacactaaaacaacaataatcaacagaagttatctgtgatccccagaatatgtgagaatttttccccgtgaggtgtgcaa

SEQ ID NO: 41111 - DNA, 120 bp, Artificial Sequence
  ENSG00000059804_44 (sequence is synthesized)
tcagttccgtagtggacaccatctaggtgtcctgcgattttttaattatgacactgtctacctggagatagcatcagatctcacaggttggtggcccagttcccaagactgccccccact

SEQ ID NO: 41112 - DNA, 86 bp, Artificial Sequence
  ENSG00000059804_45 (sequence is synthesized)
tggtggcggtgtgcagaggatcacttgagctcaggagtttcaggttgcagtgagctataattatgccactgcattccagcctggga

SEQ ID NO: 41113 - DNA, 120 bp, Artificial Sequence
  ENSG00000059915_0 (sequence is synthesized)
aaacgggagccgcgctgccttcacagctcagctgggcccagcctctcctctgtctctcctcggtctcagctctgggcgagcagcggcctgtctgaagagcatgcagcccccttactcccc

SEQ ID NO: 41114 - DNA, 120 bp, Artificial Sequence
  ENSG00000059915_1 (sequence is synthesized)
gcctggcctcgccatccctgcccccccagcctgacccccggccccagcatggcccagggtgccatgcgcttctgctcggaaggcgactgtgccatctccccaccacgatgcccacgccgc

SEQ ID NO: 41115 - DNA, 120 bp, Artificial Sequence
  ENSG00000059915_2 (sequence is synthesized)
tggctccccgaaggcccggtgccccagagccccccagccagcatgtatggcagcacaggctccttgctacggcgagtggcaggtccaggtcctcgaggccgggaactgggacgtgtgaca

SEQ ID NO: 41116 - DNA, 120 bp, Artificial Sequence
  ENSG00000059915_3 (sequence is synthesized)
gcaccctgtacacctctgcgtggccccccctcaccccgtgttgctccctcaccctgggcaccctcttcacccactgggcagcccccacccggggcccagagctctgtggtcatcttccgc

SEQ ID NO: 41117 - DNA, 120 bp, Artificial Sequence
  ENSG00000059915_4 (sequence is synthesized)
tttgtggagaaggccagtgtgaggccactgaatgggctacctgctccagggggcttgagtcggagctgggatctgggtggggtttctcctcccaggcccaccccagcccttgggcctggc

SEQ ID NO: 41118 - DNA, 120 bp, Artificial Sequence
  ENSG00000059915_5 (sequence is synthesized)
tccaaccggaagttacggctggaagcatccacatcagacccactccccgccagaggaggctcggccctacctggcagccggaaccttgtacatgggccgccagccccaccccaggttgga

SEQ ID NO: 41119 - DNA, 120 bp, Artificial Sequence
  ENSG00000059915_6 (sequence is synthesized)
gcagatggcctttactcctctctccccaatgggctggggggcccccctgagcgcctggccacactcttcggaggacctgctgacactggattcctgaaccagggggatacctggtcctcc

SEQ ID NO: 41120 - DNA, 120 bp, Artificial Sequence
  ENSG00000059915_7 (sequence is synthesized)
ccccgggaagtctcctctcatgcccagagaatcgctagagccaaatgggaattcttctatggctccttggacccccccagctcaggtgctaagcccccagagcaggcccccccatctcca

SEQ ID NO: 41121 - DNA, 120 bp, Artificial Sequence
  ENSG00000059915_8 (sequence is synthesized)
cctggggtgggctcaaggcagggctctggggtggctgtggggcgagcagccaagtactccgagacagacctggacacggtgcccctgaggtgctaccgcgagactgacatcgatgaggtg

SEQ ID NO: 41122 - DNA, 120 bp, Artificial Sequence
  ENSG00000059915_9 (sequence is synthesized)
ctggctgagcgggaggaggccgactcggccatcgaaagtcagcccagctctgagggcccaccaggcactgcctacccacctgccccacggcccggcccactccctggccctcatcccagc

SEQ ID NO: 41123 - DNA, 120 bp, Artificial Sequence
  ENSG00000059915_10 (sequence is synthesized)
ctcggcagtggcaatgaggatgaggacgacgatgaggcaggtggggaagaagatgtggacgacgaggtgtttgaggcctctgaaggggcccggccagggagccggatgcctctcaagtca

SEQ ID NO: 41124 - DNA, 120 bp, Artificial Sequence
  ENSG00000059915_11 (sequence is synthesized)
cctgtgccctttctacctgggacgagcccctcggctgatgggcctgactctttcagttgtgtgttcgaagccatcctggagtcacaccgggccaaaggcacctcctataccagcctcgcc

SEQ ID NO: 41125 - DNA, 120 bp, Artificial Sequence
  ENSG00000059915_12 (sequence is synthesized)
tcgctggaggccttggcctcacctggcccaacccagagccccttcttcacctttgagctgcctccccaaccccctgcaccccggcccgacccaccagctcccgccccacttgcccctctt

SEQ ID NO: 41126 - DNA, 120 bp, Artificial Sequence
  ENSG00000059915_13 (sequence is synthesized)
gaaccggattctggtaccagctctgctgctgatggtccttggacacagagaggggaggaggaggaggcagaggccagagccaagctggccccagggagggagccccctagtccctgccac

SEQ ID NO: 41127 - DNA, 120 bp, Artificial Sequence
  ENSG00000059915_14 (sequence is synthesized)
tcagaggacagccttgggctgggggcagcaccccttggcagcgaaccacccctgagccagctggtgtccgactcagactcagagctggacagcacagagcggctggccctgggaagcaca

SEQ ID NO: 41128 - DNA, 120 bp, Artificial Sequence
  ENSG00000059915_15 (sequence is synthesized)
cctgggcaagaacaatgacttcagcaaactggtggctggggagtacctcaagttctttgtcttcacgggcatgactctggaccaagctctcagggtgtttctgaaggagctggccttaat

SEQ ID NO: 41129 - DNA, 120 bp, Artificial Sequence
  ENSG00000059915_16 (sequence is synthesized)
gggtgagacccaggaacgagagcgcgtgctggcccacttctcccagcgatacttccagtgcaatcctgaagccctgtcctcagaggacggcgcccacacgctgacctgtgcgctcatgct

SEQ ID NO: 41130 - DNA, 120 bp, Artificial Sequence
  ENSG00000059915_17 (sequence is synthesized)
gctcaacacggatctccacggccataacatcgggaagcgcatgacctgcggggacttcatcgggaacctggagggcctcaatgatggcggcgacttccctagggagctgctcaaggcctt

SEQ ID NO: 41131 - DNA, 120 bp, Artificial Sequence
  ENSG00000059915_18 (sequence is synthesized)
gtacagctccatcaagaatgagaagctgcagtgggccatagacgaggaggagctgagacgctctctgtctgagttggccgaccccaaccccaaggtcatcaagcggatcagcgggggcag

SEQ ID NO: 41132 - DNA, 120 bp, Artificial Sequence
  ENSG00000059915_19 (sequence is synthesized)
tggcagtggctccagccctttcctggacctgactcccgagcctggggctgccgtctacaagcacggggccctggtgcgaaaggtgcacgcagaccctgactgcaggaagacacctcgggg

SEQ ID NO: 41133 - DNA, 120 bp, Artificial Sequence
  ENSG00000059915_20 (sequence is synthesized)
caagcggggctggaagagcttccacgggatcctcaagggcatgatcctctacctgcagaaggaggagtacaagcctgggaaggccctttcagagacggagctcaagaatgccatcagcat

SEQ ID NO: 41134 - DNA, 120 bp, Artificial Sequence
  ENSG00000059915_21 (sequence is synthesized)
ccaccatgccctggccactcgtgccagtgactacagcaagaggccccacgtcttctacctgcgcacagctgactggcgggtcttcctcttccaggccccgagcctggagcagatgcagtc

SEQ ID NO: 41135 - DNA, 120 bp, Artificial Sequence
  ENSG00000059915_22 (sequence is synthesized)
ctggatcactcgcatcaatgtagtagccgctatgttctctgcgccccccttcccagctgctgttagctcccaaaagaagttcagccgccctctcctgcccagcgctgccacccgcctctc

SEQ ID NO: 41136 - DNA, 120 bp, Artificial Sequence
  ENSG00000059915_23 (sequence is synthesized)
ccaggaggagcaggtgcggacccacgaggccaagctgaaggccatggcaagtgagctgcgggagcaccgggccgcccagctgggcaagaagggccggggcaaggaggctgaagagcagcg

SEQ ID NO: 41137 - DNA, 120 bp, Artificial Sequence
  ENSG00000059915_24 (sequence is synthesized)
gcagaaggaggcctacctggagtttgagaaatcccgctacagcacctatgcagcgctgcttcgggtcaagctgaaggcaggcagtgaggagctggatgcagtggaggcagcactggccca

SEQ ID NO: 41138 - DNA, 120 bp, Artificial Sequence
  ENSG00000059915_25 (sequence is synthesized)
ggccgggagcacagaggatggactccctccttctcactccagtccctccctgcagcccaaaccctccagccagccccgggctcagcgtcacagctcagagcctcggccaggggcaggcag

SEQ ID NO: 41139 - DNA, 120 bp, Artificial Sequence
  ENSG00000059915_26 (sequence is synthesized)
tgggcggcggaagccctgagatgaggtttagggtggggagtgcctgctgggcacctgaaggatgacatggccctgcctgagcccgggccggcctcgggccacccacgagggcctcccggc

SEQ ID NO: 41140 - DNA, 120 bp, Artificial Sequence
  ENSG00000059915_27 (sequence is synthesized)
ctagggcccgaccgcgccggacgcggtgtccggggcagggcagggctggggcctgggcctcaggagcctaggctaggggcacctccgagagcccctttttgtgataatgttttgcacttt

SEQ ID NO: 41141 - DNA, 120 bp, Artificial Sequence
  ENSG00000059915_28 (sequence is synthesized)
ttcgtacagggtgggcgggggcgggaggggctagcgcccctgaacttttgatgctttttttttgtgtgggagaggcctgatgccgtttctgctttctgctgagaccacccccaccctgac

SEQ ID NO: 41142 - DNA, 120 bp, Artificial Sequence
  ENSG00000059915_29 (sequence is synthesized)
accatcagtccccctctgtcctggggcctggcttggacagagaccaggatttggggctgagctggtttcccctccttcctccccaagggcttactctttctcttgctggaggtggaggaa

SEQ ID NO: 41143 - DNA, 120 bp, Artificial Sequence
  ENSG00000059915_30 (sequence is synthesized)
gggcgtccatgccaaggccccatacctgggccgggggcagcacggcctggctttcccccgcttcagtgggccttgccctttgtacagcctccacccccattaaaactgctctggacttgc

SEQ ID NO: 41144 - DNA, 120 bp, Artificial Sequence
  ENSG00000059915_31 (sequence is synthesized)
caagggaggcaggcctagctgggacggagaaaaacactgttgggggagatgcagtgtaggctccatatgggaagtaacagggaactaccacaggttcttgagcaagggagtgacaagata

SEQ ID NO: 41145 - DNA, 120 bp, Artificial Sequence
  ENSG00000059915_32 (sequence is synthesized)
gaatccgaaattttgtatctgactgagcctgtagaccaggatgtatggggttggggtgggggcggcactaggaaactacttcttccatctgctaccatttagcccacaaaccgtgagcaa

SEQ ID NO: 41146 - DNA, 120 bp, Artificial Sequence
  ENSG00000059915_33 (sequence is synthesized)
agcctggggctggatgtggttgagccagcggaggcaggcccggggctgtcctggtggagaagggtgtgagggctgcaggtgtgcagcaatggagaggatagtgctggccctacttgctgg

SEQ ID NO: 41147 - DNA, 120 bp, Artificial Sequence
  ENSG00000059915_34 (sequence is synthesized)
gaggaagggacagtggtggctctaggctggggagctctgagggaggtgccctgctctgaggaggcacagctacacattgtggaggcctgatctgagacgggagacatggcaggaccctca

SEQ ID NO: 41148 - DNA, 120 bp, Artificial Sequence
  ENSG00000059915_35 (sequence is synthesized)
aaacactgggggagcttttccagggcgagcagaggccagaactgaagcgggggccgcggctccatggccagccccctctgaggtgatcacacctgcagagacgaggaggagctgagacgc

SEQ ID NO: 41149 - DNA, 80 bp, Artificial Sequence
  ENSG00000059915_36 (sequence is synthesized)
ctagccaagccgcagagcagacagcgccgccgccgccgccgcgcactccgtgcgtccgtgagagccgggccggctcgggc

SEQ ID NO: 41150 - DNA, 80 bp, Artificial Sequence
  ENSG00000059915_37 (sequence is synthesized)
ggcatggccgggggccgcggcgcgccggccgggccagcatgatcggcgtcaacagcatccacagcagcgccgggcggctg

SEQ ID NO: 41151 - DNA, 120 bp, Artificial Sequence
  ENSG00000059915_38 (sequence is synthesized)
cgggcgcacccaccgcggcgcggagaccctgtgctacggctggccgcagcgctcgcgcagcctcaagcccgtgctctacaccgacctggtggtcagccgcctgcagagccgcaagaagaa

SEQ ID NO: 41152 - DNA, 120 bp, Artificial Sequence
  ENSG00000059915_39 (sequence is synthesized)
aggcaggggcggggcttcagcccccggctcacctgcgcggcatcgaagcgacgcagcccggccaggtgaagctgcaccagcgaccggaaggcccggctaacgcgctgcagccggagcagc

SEQ ID NO: 41153 - DNA, 120 bp, Artificial Sequence
  ENSG00000059915_40 (sequence is synthesized)
tggcgcagcgggacccggttcaggacgtgtgggagcagcacgtcttcccagggcaggtccaggaacctgcgagtaaaggggcgttggcactggcgtcccggggccactattacctgcgag

SEQ ID NO: 41154 - DNA, 120 bp, Artificial Sequence
  ENSG00000059915_41 (sequence is synthesized)
tccgcctccgttatgttcctgcgccccagctcccaagagcggcccccagacccagccccggctcggctcccctccctcaggttcctcttccctctcggcccctccggtgctcggtacctg

SEQ ID NO: 41155 - DNA, 120 bp, Artificial Sequence
  ENSG00000059915_42 (sequence is synthesized)
acggctccgggctcttgctcccctccggacggctccatcggtggctccatcggctgtctattgcgcgtgcgcagtaagattttctcgctttggccttggagtggccgcaccaaacccgcc

SEQ ID NO: 41156 - DNA, 120 bp, Artificial Sequence
  ENSG00000059915_43 (sequence is synthesized)
tccttggcctgtagagacagacctatttaatcgagtgccgtctcaccgaggatccgatctgaaagcttttcgggtggaccccgaaacggaggcggaacagaccggtggtgtaacattagg

SEQ ID NO: 41157 - DNA, 120 bp, Artificial Sequence
  ENSG00000059915_44 (sequence is synthesized)
ttctcggctacagggcttgaggcctgaagctggagaatgcggtcccagtcccaggatccgcttcggggaaccccaggagtagtgccttcccccatcatccacgggatgggtgtgggggga

SEQ ID NO: 41158 - DNA, 120 bp, Artificial Sequence
  ENSG00000059915_45 (sequence is synthesized)
tgtgaaggacgcgagagccactgcaccgctgacggtctggcgctccggtgcaaccgcttcagctggctcatcacaacgaaaaccacttctcatctgttatctcgtcaaggcttcgggcac

SEQ ID NO: 41159 - DNA, 120 bp, Artificial Sequence
  ENSG00000059915_46 (sequence is synthesized)
tcctgcccatcccggaccccttcccccacctcccatcctgctcccctccctgtccctggattttttcattccttctcaggccacacttgagccaggactggcatcctgggacagaaaccc

SEQ ID NO: 41160 - DNA, 120 bp, Artificial Sequence
  ENSG00000059915_47 (sequence is synthesized)
tgggcccaggtcccaaagggctgtgctttctccccaggagcctggagcagatgcagtcctggatcactcgcatcaatgtagtagccgctatgttctctgcgccccccttcccagctgctg

SEQ ID NO: 41161 - DNA, 120 bp, Artificial Sequence
  ENSG00000060069_0 (sequence is synthesized)
ggaagtcggcgcgggctaggcgacgggtggaagccggtaccgagaggaactacagcgtcgccgcctgggttgtgtcgccgcggtaggcgctgcgctctgagcgcagcgcaggccccgtac

SEQ ID NO: 41162 - DNA, 80 bp, Artificial Sequence
  ENSG00000060069_1 (sequence is synthesized)
cgaccgcccgcccgccctctgtccgcgatggaggtgccggccgcgggtcgcgttcctgccgagggcgccccgacggcggc

SEQ ID NO: 41163 - DNA, 120 bp, Artificial Sequence
  ENSG00000060069_2 (sequence is synthesized)
ctgctggagtggagggtggcggcgggcgcggccgtgcgcatcggctcggtgctggccgtgttcgaggccgccgcctccgcgcagtcctccggggcctctcagtcccgtgtagcctccggg

SEQ ID NO: 41164 - DNA, 120 bp, Artificial Sequence
  ENSG00000060069_3 (sequence is synthesized)
ggctgcgtgcgccccgcgcggccggaacgcaggctgaggtcggagcgcgcgggcgtggtgcgggagctgtgcgcgcagccgggccaggtggtcgccccaggagcggttctggtgaggttg

SEQ ID NO: 41165 - DNA, 120 bp, Artificial Sequence
  ENSG00000060069_4 (sequence is synthesized)
gaaggatgcagccacccggttgtcatgaaaggcctgtgtgctgaatgtggccaagacctcacccagttgcagagtaagaacgggaagcagcaggtgccgctgtccacggcgaccgtgtcc

SEQ ID NO: 41166 - DNA, 120 bp, Artificial Sequence
  ENSG00000060069_5 (sequence is synthesized)
atggtgcacagcgtgccggagttgatggtgagctccgagcaagctgaacagctgggaagagaagaccagcagcgactgcaccgaaaccggaagctggtgctcatggtggacttggaccag

SEQ ID NO: 41167 - DNA, 120 bp, Artificial Sequence
  ENSG00000060069_6 (sequence is synthesized)
acgttgattcacacaaccgagcagcactgtcagcagatgtcgaataaaggcatctttcacttccagctgggccggggtgagcccatgctgcacacgcgcctgcgtccacactgcaaggac

SEQ ID NO: 41168 - DNA, 120 bp, Artificial Sequence
  ENSG00000060069_7 (sequence is synthesized)
ttcctggagaagatcgccaagctgtacgagctgcacgtcttcaccttcggcagccggctgtacgcacacaccatcgcaggctttttagaccccgagaagaagcttttttctcaccgaata

SEQ ID NO: 41169 - DNA, 120 bp, Artificial Sequence
  ENSG00000060069_8 (sequence is synthesized)
ttatcaagggatgaatgtattgacccattttctaaaacgggaaaccttagaaatctctttccttgtggagactcaatggtttgcattattgatgatcgagaagatgtctggaagtttgcc

SEQ ID NO: 41170 - DNA, 120 bp, Artificial Sequence
  ENSG00000060069_9 (sequence is synthesized)
cccaatctgataactgtgaagaaatatgtatacttccagggcacgggtgatatgaatgcgccccctgggtcccgagaatctcagacgagaaagaaagtaaatcattctcgaggcactgag

SEQ ID NO: 41171 - DNA, 120 bp, Artificial Sequence
  ENSG00000060069_10 (sequence is synthesized)
gtctcagagccatctccgcccgtgagagaccctgagggggtaacgcaggcccctggagtggagcccagcaatggcctggagaagcctgcacgggagctgaacggcagcgaggccgccacc

SEQ ID NO: 41172 - DNA, 120 bp, Artificial Sequence
  ENSG00000060069_11 (sequence is synthesized)
ccgcgggactcaccccgccccgggaagccagacgagagggacatctggccccctgcccaggcccccaccagcagccaagagctggcaggcgctcctgagccccagggatcctgtgcgcag

SEQ ID NO: 41173 - DNA, 120 bp, Artificial Sequence
  ENSG00000060069_12 (sequence is synthesized)
ggtggccgggtggcaccgggacagcggcctgcccagggtgccacgggcactgacctggactttgacttatccagcgacagcgagagcagcagtgagtccgagggcacgaagtcctcctcc

SEQ ID NO: 41174 - DNA, 120 bp, Artificial Sequence
  ENSG00000060069_13 (sequence is synthesized)
tccgcctctgatggcgaaagcgaggggaaaagaggccggcagaagccgaaggctgccccagagggagccggggcgctggcacagggcagttccctggagccggggcggcctgcagcaccg

SEQ ID NO: 41175 - DNA, 120 bp, Artificial Sequence
  ENSG00000060069_14 (sequence is synthesized)
agtctccccggagaggccgagcctggcgcgcatgccccggacaaggagcctgagctgggtgggcaggaggagggcgagcgggatggcctctgcggcctgggcaacggctgtgccgacagg

SEQ ID NO: 41176 - DNA, 120 bp, Artificial Sequence
  ENSG00000060069_15 (sequence is synthesized)
aaggaggcggagaccgagtcacagaacagcgagctgtcgggggtcactgcgggtgagtccctggaccagagcatggaggaggaggaggaggaggacacggatgaggatgaccacctcatc

SEQ ID NO: 41177 - DNA, 120 bp, Artificial Sequence
  ENSG00000060069_16 (sequence is synthesized)
tacctggaggagatcctggtccgtgtacacactgactactatgccaagtatgaccgctacctcaacaaggagatcgaggaggcgccggacatccgcaagatcgtgccggagctcaagagc

SEQ ID NO: 41178 - DNA, 120 bp, Artificial Sequence
  ENSG00000060069_17 (sequence is synthesized)
aaggtgctggcagacgtggccataattttcagtgggctacacccgacaaacttcccgatagagaagacgcgggagcattaccacgccacggcgctgggagcgaagatcctcactcggctg

SEQ ID NO: 41179 - DNA, 120 bp, Artificial Sequence
  ENSG00000060069_18 (sequence is synthesized)
gtgctgagccccgacgcccctgacagggccacgcacctgatcgccgcgcgagctggcacagagaaggtgctgcaggcacaggagtgcggacacctgcacgtggtcaaccctgactggctg

SEQ ID NO: 41180 - DNA, 120 bp, Artificial Sequence
  ENSG00000060069_19 (sequence is synthesized)
tggagctgcctggagcgctgggacaaggtggaggagcagctcttcccgctcagggacgatcacaccaaggcacagagggagaacagccctgcggcctttcccgaccgggagggtgtgccc

SEQ ID NO: 41181 - DNA, 120 bp, Artificial Sequence
  ENSG00000060069_20 (sequence is synthesized)
cccaccgccttgttccacccgatgccggttcttcccaaggcccagcctggccccgaggttcggatctacgactccaacacggggaagctcatcaggacgggcgcccgggggcccccagca

SEQ ID NO: 41182 - DNA, 120 bp, Artificial Sequence
  ENSG00000060069_21 (sequence is synthesized)
ccctccagctccctacccatccgccaggagccctcttccttcagagcggttccgccaccccagccgcagatgtttggtgaagagctgcctgacgctcaggacggagagcagcctggccct

SEQ ID NO: 41183 - DNA, 120 bp, Artificial Sequence
  ENSG00000060069_22 (sequence is synthesized)
tctagaagaaagcgacagcccagtatgtctgagacaatgccgctgtacactctttgtaaggaggatttagagagtatggacaaagaggtggacgacatccttggagaaggcagcgacgac

SEQ ID NO: 41184 - DNA, 120 bp, Artificial Sequence
  ENSG00000060069_23 (sequence is synthesized)
agcgacagcgagaagaggaggcctgaggagcaggaggaggagccccagccccggaagccagggacccgcagggagcggacgctcggggcacctgcgtccagcgagaggagcgcggcaggg

SEQ ID NO: 41185 - DNA, 120 bp, Artificial Sequence
  ENSG00000060069_24 (sequence is synthesized)
acgagatggccaaggcgctggaggcggagctcaacgacctcatgtgagcgcgggcagcgggcagggactgaagcctgaccgacctccagcagcactcggacgtccccggaccagccctca

SEQ ID NO: 41186 - DNA, 120 bp, Artificial Sequence
  ENSG00000060069_25 (sequence is synthesized)
gtctcggtccacgctgctttcttcccaaaggacatgtatatttgcagagctccacatacagaaacacattattttgcagaaataggtgtttttaagaagttttactacaggaatgtctac

SEQ ID NO: 41187 - DNA, 120 bp, Artificial Sequence
  ENSG00000060069_26 (sequence is synthesized)
ttttgtaagtgacaggtgttaaaggcccaggtgtgctgtgccaaagagctcagcagaggctcacgtggcccaggctggtgcgcccgctgtctcggtaaggggcgggttggtgtgttttcc

SEQ ID NO: 41188 - DNA, 120 bp, Artificial Sequence
  ENSG00000060069_27 (sequence is synthesized)
ccttgtgtaccagagcacattccttaggggacggctttgggggtcccacgagacatggactaggagtttaagcaggacagtgtgcgtgcacgagctccgagcccagcacagacatgcctg

SEQ ID NO: 41189 - DNA, 120 bp, Artificial Sequence
  ENSG00000060069_28 (sequence is synthesized)
gaacccccgccgcctgctgctccctcctagggaacccatttccggggaacgccgtgactgtcgggcagcctggagcttcctgcagcctcctacgcagggtccacgccacgtggcctgggc

SEQ ID NO: 41190 - DNA, 120 bp, Artificial Sequence
  ENSG00000060069_29 (sequence is synthesized)
tgccatcctgccgtcctcccactggcatcctggcaagggggcgttgcttttcctgggcggccttttatgtcttggagacacctgatgtaaagtttctgtaaatctatttcatatctgacc

SEQ ID NO: 41191 - DNA, 120 bp, Artificial Sequence
  ENSG00000060069_30 (sequence is synthesized)
caccaaacagatttctctttaataaaaatcctttttgtaagttctcttctcgtgggtgtgtggcagcggtgagcacccgcctcctccctcgctgggatccagctccttagctgtgaaaca

SEQ ID NO: 41192 - DNA, 120 bp, Artificial Sequence
  ENSG00000060069_31 (sequence is synthesized)
gaaacgaaaaaattcccacggacaggaccgtgtggaacggcagaaatggaaaccgcagaactgcgagcgtgatgatctcagggtttcgcctctgagcataagaaccaggcttgtagctgg

SEQ ID NO: 41193 - DNA, 120 bp, Artificial Sequence
  ENSG00000060069_32 (sequence is synthesized)
tattttaaaacggttaagtgtgaagaattactctcttgcattattttcatccttcccttttgtttgtttgggatgcgggggcccgagagctacaggtaggtgctgggctatggccgccgc

SEQ ID NO: 41194 - DNA, 120 bp, Artificial Sequence
  ENSG00000060069_33 (sequence is synthesized)
caggacccctcccggccagcagcctcggctcacgtcccctcctcctcccagcatcagtcccgcagcgtggcggtgggaggctgcacctcgaggccacggcccttctccaaaagcacacac

SEQ ID NO: 41195 - DNA, 120 bp, Artificial Sequence
  ENSG00000060069_34 (sequence is synthesized)
tcctgctttccgacggcaccctcccctgaccacagctcgggaggtggcacgtgtgagaactctccatccacaggatgtggctctcgcgggacctccaggctcaggctgtctccgctgggt

SEQ ID NO: 41196 - DNA, 120 bp, Artificial Sequence
  ENSG00000060069_35 (sequence is synthesized)
gtgggacctttcctgtggggttttcgatggaggttggctggggagggaggcatcctcagtgggtagaggaccccagggtcctggtgctgctgtcgtcaagatgcggcgacatggtggcag

SEQ ID NO: 41197 - DNA, 120 bp, Artificial Sequence
  ENSG00000060069_36 (sequence is synthesized)
aggaaaggcaccgttacccagcagcacgccagccccgggtgactgtttcctgtactaactaggttatttgcagcgccgagtgaagaggcagcttcaccacccaacccacctgtgggttct

SEQ ID NO: 41198 - DNA, 120 bp, Artificial Sequence
  ENSG00000060069_37 (sequence is synthesized)
ccggggtctgcagtctgaggaggctgcaggatgaccagacgccggtcagggagttcctcctgtccagagaagcaggaggtgaactgggcccacctcaggtccgatttcgccacgagcaag

SEQ ID NO: 41199 - DNA, 120 bp, Artificial Sequence
  ENSG00000060069_38 (sequence is synthesized)
aatgtaagatgaattggacagaaaacaaaaatagatgtacaagttgatacccaaagaaagcagaagattctacagtttatagggaggggcacaaaacgtgcagggagtaatgtgccgggg

SEQ ID NO: 41200 - DNA, 120 bp, Artificial Sequence
  ENSG00000060069_39 (sequence is synthesized)
ggtgggggcaggggccgatgaacgaggccttgatgctgtgtggagacctctgggaaaggctgggagaccttccctccttccacagtggtttctccctgaaggcgattctgcgtgtggttg

SEQ ID NO: 41201 - DNA, 120 bp, Artificial Sequence
  ENSG00000060069_40 (sequence is synthesized)
gtcctgctgggaccaaggtggccccttgttctgctcttggccgagtcccctctggcttcatgggggtgttaatgaggctctgcaaggcctccttaaacacagtgtggaaatacaggtggt

SEQ ID NO: 41202 - DNA, 120 bp, Artificial Sequence
  ENSG00000060069_41 (sequence is synthesized)
gctgcaggggcagcgagaacggggacctctgctgctgggtctggcctaggggtgaagaggacgggaggagggtggcgtggtagctggctgcgcggggcctggtgacgggaggggccggac

SEQ ID NO: 41203 - DNA, 120 bp, Artificial Sequence
  ENSG00000060069_42 (sequence is synthesized)
cgcatgcagcattcaggaccagcgtggccctgggtgttcgcctgttctgaccgtgtggtcgagtgaacagagcatgcaggggagatgcagcaggttctccccgacgcggaagagcaaggg

SEQ ID NO: 41204 - DNA, 120 bp, Artificial Sequence
  ENSG00000060069_43 (sequence is synthesized)
gtccccggttcctggaggagcagcgggattgccccaggctctgggatcgcccacgggggcagcgggccagcacccccagccgcatctctgcacagccgtgctgcacaccttctccgtcac

SEQ ID NO: 41205 - DNA, 120 bp, Artificial Sequence
  ENSG00000060069_44 (sequence is synthesized)
gtgttggaggtgggtctcagcaccagcacatccacattgatagcttaaaatgggacttttctcccgcctgtctcactgttggcccgcccccatgcagcggtggggaccccactgcaggga

SEQ ID NO: 41206 - DNA, 120 bp, Artificial Sequence
  ENSG00000060069_45 (sequence is synthesized)
ctccaagagccccatcctgtcctcggctccagcctccatcagcaccagccgtgtccttgcagccctgactggagcaactcccaaactctgctgcccggcaggtcttctgaccctgcccgc

SEQ ID NO: 41207 - DNA, 120 bp, Artificial Sequence
  ENSG00000060069_46 (sequence is synthesized)
ggtgatggcaccctctggaaggctggcccaggacggcacctccatgctggcagcccctgagtgtagtgtgtgttctacacaaaagagccaggaagtcatctgtgatcattgtttaaggga

SEQ ID NO: 41208 - DNA, 120 bp, Artificial Sequence
  ENSG00000060069_47 (sequence is synthesized)
ctgtgattaacgtttatgaaatgttctgtgctatgcgaagaaaccactgaatgttagggaaaatattaaatactgaataattatacaactgttccaaataaagtcttaagaagaaacttg

SEQ ID NO: 41209 - DNA, 120 bp, Artificial Sequence
  ENSG00000060069_48 (sequence is synthesized)
agatgactgatgaatttgttaattgccaaaagcttgttgctgtagcaaccggaggccagactcgtggccctgacagcgtcgttagtgtcagcagagactggaaataaaggaaactcgtgt

SEQ ID NO: 41210 - DNA, 120 bp, Artificial Sequence
  ENSG00000060069_49 (sequence is synthesized)
tactgaggtttcattctgttcctctgattgtacagaaagggctgctttggcctagacagctccgcggttctcttctgcggtgtcccaccacttggaggctggaaggtgaagacatcaggg

SEQ ID NO: 41211 - DNA, 120 bp, Artificial Sequence
  ENSG00000060069_50 (sequence is synthesized)
ctcacagggaggtatttaaatcgccacagaaaggggaaggtacctaaaatgatctgggagcctgcagtgactggtgagaactaacaggcggaggccgtgtgcgagggttgatgacgtctg

SEQ ID NO: 41212 - DNA, 120 bp, Artificial Sequence
  ENSG00000060069_51 (sequence is synthesized)
acagactgtacctgtgcctttagcgtgtccacaggaagggcatctgcattcaccagcgcagggtgtgagagtgccacagagaagcagaaaaacattgctgaataaaatgaagatcattcc

SEQ ID NO: 41213 - DNA, 120 bp, Artificial Sequence
  ENSG00000060069_52 (sequence is synthesized)
gagttcacctcccggcactgggctcagcctctcccgccgccacatcgaggcactgacggtacccacctcccgcctgctgaggttcggggaggctgaggtttggatgcggtactcccatca

SEQ ID NO: 41214 - DNA, 120 bp, Artificial Sequence
  ENSG00000060069_53 (sequence is synthesized)
cctgctcacttgcctgccgcctctgttgccactcccgtccgcgtcacacgtgtcaggcgtggggccggctgagctcaccccaggtgttcaggagtcgccctctctgcatgtttcccaaat

SEQ ID NO: 41215 - DNA, 120 bp, Artificial Sequence
  ENSG00000060069_54 (sequence is synthesized)
tggaggcgtgcccagagcgagcgggtggacatcttagcgagcgtccctgtggcacggccacgtctccacccccaggtggctgctctcccagattccaggatgggaaggactgggacgcct

SEQ ID NO: 41216 - DNA, 120 bp, Artificial Sequence
  ENSG00000060069_55 (sequence is synthesized)
ccctgaaagccctgccactcaggagtcttgctgtgaatctcattgatcttgaaaatttcaagcaaatattctgattattcaccataaaatccaacagtgcaccaggaataaagtccctgt

SEQ ID NO: 41217 - DNA, 120 bp, Artificial Sequence
  ENSG00000060069_56 (sequence is synthesized)
tcacataagggacagaaggaatttaaacccaatctttgcctgcgaaccgactgggtttgctctgtggatttccaagcgtcttttgcccggggctttgttaaggattggttgagtttcaag

SEQ ID NO: 41218 - DNA, 120 bp, Artificial Sequence
  ENSG00000060069_57 (sequence is synthesized)
ccccagggctcaggtagaaagcagagtgctacctccagcccccaccctgctgcactcagagccctggactctgccgggagaagcctgttgcggaggaacggggcccgggaaggaggtctg

SEQ ID NO: 41219 - DNA, 120 bp, Artificial Sequence
  ENSG00000060069_58 (sequence is synthesized)
tcagtagctgtgctctgaccccagaaggggatatgtttccgtagcaccgaagtgtccagccatgtttgaatctacccttgtgttctgggatgggcgggcaagtggacacgcgtgtgcgcc

SEQ ID NO: 41220 - DNA, 120 bp, Artificial Sequence
  ENSG00000060138_0 (sequence is synthesized)
agtaagatcgagcgaggagcccaagagagagcgcgcagcacgaagctcgagccgcctccgccgcgcgaccccacctcggccgccgccgcctgcgccgcgagatccgccccggcctccccg

SEQ ID NO: 41221 - DNA, 120 bp, Artificial Sequence
  ENSG00000060138_1 (sequence is synthesized)
agagcgagccccggccgccgcgaccaccagccgcgctaaccgccgaccaaccgccaccgaggcgcctgagcgagagcagaggaggaggaggcatgagtgaggcgggcgaggccaccacca

SEQ ID NO: 41222 - DNA, 120 bp, Artificial Sequence
  ENSG00000060138_2 (sequence is synthesized)
gaggaggcatgagtgaggcgggcgaggccaccaccaccaccaccaccaccctcccgcaggctccgacggaggcggccgccgcggctccccaggaccccgcgcccaagagcccggtgggca

SEQ ID NO: 41223 - DNA, 120 bp, Artificial Sequence
  ENSG00000060138_3 (sequence is synthesized)
cccacgtcgcaggaaaccccggtggggacgcggcccccgcagccacgggcaccgcggccgccgcctctttagccaccgccgccggcagcgaagacgcggagaaaaaagttctcgccacca

SEQ ID NO: 41224 - DNA, 120 bp, Artificial Sequence
  ENSG00000060138_4 (sequence is synthesized)
aagtccttggcactgtcaaatggttcaacgtcagaaatggatatggatttataaatcgaaatgacaccaaagaagatgtatttgtacatcagactgccatcaagaagaataacccacgga

SEQ ID NO: 41225 - DNA, 120 bp, Artificial Sequence
  ENSG00000060138_5 (sequence is synthesized)
aatatctgcgcagtgtaggagatggagaaactgtagagtttgatgtggttgaaggagagaagggtgcagaagctgccaatgtgactggcccggatggagttcctgtggaagggagtcgtt

SEQ ID NO: 41226 - DNA, 120 bp, Artificial Sequence
  ENSG00000060138_6 (sequence is synthesized)
acgctgcagatcggcgccgttacagacgtggctactatggaaggcgccgtggccctccccggaattacgctggggaggaggaggaggaagggagcggcagcagtgaaggatttgaccccc

SEQ ID NO: 41227 - DNA, 120 bp, Artificial Sequence
  ENSG00000060138_7 (sequence is synthesized)
ctgccactgataggcagttctctggggcccggaatcagctgcgccgcccccagtatcgccctcagtaccggcagcggcggttcccgccttaccacgtgggacagacctttgaccgtcgct

SEQ ID NO: 41228 - DNA, 120 bp, Artificial Sequence
  ENSG00000060138_8 (sequence is synthesized)
ccccatcccaacagaatacaggctggtgagattggagagatgaaggatggagtcccagagggagcacaacttcagggaccggttcatcgaaatccaacttaccgcccaaggtaccgtagc

SEQ ID NO: 41229 - DNA, 120 bp, Artificial Sequence
  ENSG00000060138_9 (sequence is synthesized)
aggggacctcctcgcccacgacctgccccagcagttggagaggctgaagataaagaaaatcagcaagccaccagtggtccaaaccagccgtctgttcgccgtggataccggcgtccctac

SEQ ID NO: 41230 - DNA, 120 bp, Artificial Sequence
  ENSG00000060138_10 (sequence is synthesized)
aattaccggcgtcgcccgcgtcctcctaacgctccttcacaagatggcaaagaggccaaggcaggtgaagcaccaactgagaaccctgctccacccacccagcagagcagtgctgagtaa

SEQ ID NO: 41231 - DNA, 120 bp, Artificial Sequence
  ENSG00000060138_11 (sequence is synthesized)
caccaggctcctcaggcaccttcaccatcggcaggtgacctaaagaattaatgaccattcagaaataaagcaaaaagcaggccacaaccttaaccaacaccaaagaaacatccaagcaat

SEQ ID NO: 41232 - DNA, 120 bp, Artificial Sequence
  ENSG00000060138_12 (sequence is synthesized)
aaagtggaagactaaccaagatttggacattggaatgtttactgttattctttaagaaacaactacaaaaagaaaatgtcaacaaatttttccagcaagctgagaacctgggaattcctg

SEQ ID NO: 41233 - DNA, 120 bp, Artificial Sequence
  ENSG00000060138_13 (sequence is synthesized)
cacggaagacaagagagtagcctctccagtttcagcaaccgctaggtttctattttttttcctggtttttactgttttggtaatatatatattgaaacaagaaatattaataccacatgg

SEQ ID NO: 41234 - DNA, 120 bp, Artificial Sequence
  ENSG00000060138_14 (sequence is synthesized)
ggagaaccccaaccaaagaaatctgaaatatatagtaaatgcttttttttccgtttttgttcattttggatgctggtgctaaacctccaagtgtcatgatttaaaaaaaaaaaaaattta

SEQ ID NO: 41235 - DNA, 120 bp, Artificial Sequence
  ENSG00000060138_15 (sequence is synthesized)
tgtccttcttatttatttctaggatgaggggaggataacatttttgctttcttatgtgactctctttgaaaatgtgcagtaagaaattcctcaaaaataaaatttttacccttcagagga

SEQ ID NO: 41236 - DNA, 120 bp, Artificial Sequence
  ENSG00000060138_16 (sequence is synthesized)
gaaaggggaaaatgatggaaaattaagatttttttttcgtgaaacctctattccatttgttgcattgacctgcgaataattctagcaataagtactcatcacttgacttttttttttttt

SEQ ID NO: 41237 - DNA, 78 bp, Artificial Sequence
  ENSG00000060138_17 (sequence is synthesized)
tctccctctgtcacccaggctggagtgtgccaatctcgggttgctgcaacctctgcctcatggattcaagcaattctt

SEQ ID NO: 41238 - DNA, 120 bp, Artificial Sequence
  ENSG00000060138_18 (sequence is synthesized)
ccctccccggaatgtacgttgtctctgttacttaaccagtgattgagaaattgttcatgcatggaattaagtgtatgtacttggagcagataaatgccttgtcttctcctggagacaaat

SEQ ID NO: 41239 - DNA, 120 bp, Artificial Sequence
  ENSG00000060138_19 (sequence is synthesized)
gatttaagtgatttttattttttctttagaggaaatttttatcttattttttaaaatgtgtattattgatttccataggtttttgggaaaccggtggtgattagttacatgaataagttc

SEQ ID NO: 41240 - DNA, 120 bp, Artificial Sequence
  ENSG00000060138_20 (sequence is synthesized)
ttctgagattttggtgcacccatcactggagcagtatacacggtactcttaaggggaaattttagcgctcagaacttttccagagccgctggtctcattagacacttgccattcagaagt

SEQ ID NO: 41241 - DNA, 120 bp, Artificial Sequence
  ENSG00000060138_21 (sequence is synthesized)
ccattcagaagttgtatcagttaggatatatttggctacaagtaatagacatttaattatcttttaacaggaagacttaagggagacagtgctgaggttttttttaacaaggtttctctt

SEQ ID NO: 41242 - DNA, 120 bp, Artificial Sequence
  ENSG00000060138_22 (sequence is synthesized)
catttggctcttttttctggccagaacctagtcacagacattcactggcaaaggggaatggatttccatcattgacttaaccttgttgttcattctttggtgccgacactgttgacctct

SEQ ID NO: 41243 - DNA, 120 bp, Artificial Sequence
  ENSG00000060138_23 (sequence is synthesized)
aagaaaatcaaaatttggttggtgaaagagtgagaaataacttgtgaacaggcaataaaagtacaggccacagaactattaacgaatttgccttggttaagaggctgttttatttagcat

SEQ ID NO: 41244 - DNA, 120 bp, Artificial Sequence
  ENSG00000060138_24 (sequence is synthesized)
agcatttttccattatttcaaagtaaagaagcaataagtgattctgtggatttttagttctttaggttggtttcaatgcaggggaaagagtttgtcacaaatctggctggagctttcttg

SEQ ID NO: 41245 - DNA, 120 bp, Artificial Sequence
  ENSG00000060138_25 (sequence is synthesized)
ggaggctcagtttataggagtattctcaaggcacccaaaacggacccagtatatttgtggtcatgagaaacttactagatttgaatcattcttggtgtttctagaattagaaccaggtat

SEQ ID NO: 41246 - DNA, 120 bp, Artificial Sequence
  ENSG00000060138_26 (sequence is synthesized)
tggcacattgaagaaaactccgaatgtttgtcagcacaggattgtgactgcctgtctcatccaaagaaaaactcatcagaattaaatatctgcagattgagaatgacctatctttatgtt

SEQ ID NO: 41247 - DNA, 120 bp, Artificial Sequence
  ENSG00000060138_27 (sequence is synthesized)
ttgatagctttatatctttctgtttacctaaatgcttttcctccttattctgccatcatcacatcctgcccaaattaattctgtcagattccttaggacttcccacttgtttctttgttt

SEQ ID NO: 41248 - DNA, 120 bp, Artificial Sequence
  ENSG00000060138_28 (sequence is synthesized)
ttgcttatcttatttggtttttaataagctatgagggggatagctaggaatgagctgctgtagcatttcctacatcatgttctctttgaagttcatcagagtcacagagcgctaactgtg

SEQ ID NO: 41249 - DNA, 120 bp, Artificial Sequence
  ENSG00000060138_29 (sequence is synthesized)
attattttgactcccaggttaattcaaaagcaaaagtggtagaaaaacattcagtgaaaaatttttcttaaagacttttcctgtccaaaacctgaaaattccaaagtcatgcatataaaa

SEQ ID NO: 41250 - DNA, 120 bp, Artificial Sequence
  ENSG00000060138_30 (sequence is synthesized)
gatatttagaaacaaaattgttaaaacgcttaagaaacaaaattgttaaaactcttaaagtatacataaatgagcttttttgttgtaatatctaagtcccaacaacttgttcagtatctc

SEQ ID NO: 41251 - DNA, 120 bp, Artificial Sequence
  ENSG00000060138_31 (sequence is synthesized)
tcaaaagagtgtgttcagcattgctggtgccattattatgctttgtaaaactcttaaagatttgattgtgtgaaatgcaaaagaggaagataagcccaagaagaaaaacagtttatgttg

SEQ ID NO: 41252 - DNA, 120 bp, Artificial Sequence
  ENSG00000060138_32 (sequence is synthesized)
tctcacacttaatattttggtaagcattttctgtgcaaataaacgtttacataattgtgaatctcatctttggtagaggttttatgaagagtagaatgacttgattttttttgaagttag

SEQ ID NO: 41253 - DNA, 120 bp, Artificial Sequence
  ENSG00000060138_33 (sequence is synthesized)
actagttgaggcttttttggagggggagtttggttgcacatgtggacttgttctggaagggtccaaagcttaaatacactcctgtaaaaaaaagtaatgggtcattattttgcttttttt

SEQ ID NO: 41254 - DNA, 120 bp, Artificial Sequence
  ENSG00000060138_34 (sequence is synthesized)
atttattcatttttaaaaactagttacttcccattaaagacatttgcatatcccctttaaagtaagacttgaaatcacagtctttgtaggatgtttggttttttaaaatgtaaaatggta

SEQ ID NO: 41255 - DNA, 120 bp, Artificial Sequence
  ENSG00000060138_35 (sequence is synthesized)
gtatatgatataatttaaatagaagaaaaatataaaatgaatcggtaaattcctttgtgaatattaataagatctattatttagaaacctccaggattagggcttactaccatcaaagta

SEQ ID NO: 41256 - DNA, 120 bp, Artificial Sequence
  ENSG00000060138_36 (sequence is synthesized)
tgattaaagctttactcctaaacatataaagggagtcatgccttaggtcagtggttctcaaacttcctgattttgggatctgtttatatgcttacatgttattgaggattctagagtttt

SEQ ID NO: 41257 - DNA, 120 bp, Artificial Sequence
  ENSG00000060138_37 (sequence is synthesized)
attgaaaagagtggtattgctttatacttttgcagatctctgatgtatggtttaatagaagatagctggattctcacatctgtttctgcattcagtctgctgagagaccacatgtcattg

SEQ ID NO: 41258 - DNA, 120 bp, Artificial Sequence
  ENSG00000060138_38 (sequence is synthesized)
tagcctttgggagaccccaccatatacttctgagagaatgcctgggaaaggcaaatagcatcttagtaatattatggcaatagtttgacctcgctgaccccctggaagttttcagaaatc

SEQ ID NO: 41259 - DNA, 120 bp, Artificial Sequence
  ENSG00000060138_39 (sequence is synthesized)
ccatccacactttacagacttgtaggaagaataccacttgggtcaaatatgttggtaacatcataaaatgtattcttttttggcttttccctgacattgcctcagtggatggtaaatgct

SEQ ID NO: 41260 - DNA, 120 bp, Artificial Sequence
  ENSG00000060138_40 (sequence is synthesized)
aaccttgcagatactcttcgggtggttggttagctgatacgagttctaatgagatgactattaaattgattgtagattgattgctcttgcttttctgcttcttggtattttatctgcaca

SEQ ID NO: 41261 - DNA, 120 bp, Artificial Sequence
  ENSG00000060138_41 (sequence is synthesized)
gatctactctaatcttaatgtagtttatcccaggcaatcacatgataatctgggttaaatgcattttgtctgtataatggaaaggattatattgctttggggagattttattttggtgat

SEQ ID NO: 41262 - DNA, 120 bp, Artificial Sequence
  ENSG00000060138_42 (sequence is synthesized)
attcatcctaaatggtgttctttggttctttccttgctaaaacttcttctgaatctctgtttctttgcttcgctagtacgctggggaggaggaggaggaagggagcggcagcagtgaagg

SEQ ID NO: 41263 - DNA, 120 bp, Artificial Sequence
  ENSG00000060138_43 (sequence is synthesized)
agaagatgtgaatgctttgactacatgccagagttttcaggtggtggtgtgacatttcccacctacttaatactagaatttttagttatctctgcgccaaagcgtcattttgtattctgg

SEQ ID NO: 41264 - DNA, 120 bp, Artificial Sequence
  ENSG00000060138_44 (sequence is synthesized)
aattataataagatgtaaattaatacttaatttttatcaaaataaatcagataaattattggtgggcaattctgtggtaatgctgcagatggaggaagaattgagtgtcagaggatattt

SEQ ID NO: 41265 - DNA, 120 bp, Artificial Sequence
  ENSG00000060138_45 (sequence is synthesized)
gggatagtgactgttaatcactgaggcagtccagtagaggggttaaatcagggtatgatcaaatcgcctgaatttatcttcctactctacagttcattagatgtatgttcttggactgca

SEQ ID NO: 41266 - DNA, 120 bp, Artificial Sequence
  ENSG00000060138_46 (sequence is synthesized)
ttccagcctgcgcaacagagtgagaccctgtctgaaaacaaagagatattctatagttggggattaaaggtactaatgcagctaagataattagtgtggtacctgataaagtaaaggcct

SEQ ID NO: 41267 - DNA, 120 bp, Artificial Sequence
  ENSG00000060138_47 (sequence is synthesized)
cactatgtattagatattattaccaccattgaggttaatattagtgaacgctgggttattctatttgtgctttattcctttggaagactgaattaggctagactccttccataagatccc

SEQ ID NO: 41268 - DNA, 120 bp, Artificial Sequence
  ENSG00000060138_48 (sequence is synthesized)
tttgaagcattttataatataagcctgcccattcttttatcttaccctttgtggtaagtggaaaagctacaacttcttcctgaatgatgtttatgctaccttgaaatttgtcagtatggc

SEQ ID NO: 41269 - DNA, 120 bp, Artificial Sequence
  ENSG00000060138_49 (sequence is synthesized)
tttattgaaggataaaaagtatattatattgggaaaggattccaccaatataattgtaaaaggatcgtatcctttttcttcacaaggttccctccagctttaggcataatcactaatgat

SEQ ID NO: 41270 - DNA, 120 bp, Artificial Sequence
  ENSG00000060138_50 (sequence is synthesized)
taagtactagggactttgaaaataaaagagacggcatagaaatgtcttactggaacaaaaaggattcagtagcgtgtgaggctcagctttgtcagtccctggatatgtgatcttggaaag

SEQ ID NO: 41271 - DNA, 120 bp, Artificial Sequence
  ENSG00000060138_51 (sequence is synthesized)
tcatatttgaccttttttaacctataaaagcagcacttttatatagctcagccgtatactttatcatgtaaacctcttggttttcttgttataaatctcatccacagaattaccattcaa

SEQ ID NO: 41272 - DNA, 120 bp, Artificial Sequence
  ENSG00000060138_52 (sequence is synthesized)
attaaatatttaattttaaaaccgactagcacaggctctggcacataataatgtttcttctcatgtttaattcccttagtctctgctaaattctgttcatggaaggcagataccagacta

SEQ ID NO: 41273 - DNA, 120 bp, Artificial Sequence
  ENSG00000060138_53 (sequence is synthesized)
tgggattacaggggtgagccatcatgcctggccctgatcacttgactttttaatttttaaaaataaataaaaccttattttctggagaagccctgtcctgttggcacctgttctattttc

SEQ ID NO: 41274 - DNA, 120 bp, Artificial Sequence
  ENSG00000060138_54 (sequence is synthesized)
tcctccggagattcagagaatctctgaagcttaatggtttgaggtaattaatacatctgatatgatcaggtgatcagcctgtaacagtagtgtgtagtcactgcacacactgcagttata

SEQ ID NO: 41275 - DNA, 120 bp, Artificial Sequence
  ENSG00000060138_55 (sequence is synthesized)
gaaaaaacatgttctgtttaatccacctgtcaagatgaatagcacaaatcaaggaagtaatgtggaatatagttttatagtgctttcttgttgttgtgttggagatccaacttagtggga

SEQ ID NO: 41276 - DNA, 120 bp, Artificial Sequence
  ENSG00000060138_56 (sequence is synthesized)
gaatggtggaaaaataagaatcggtcaacagtttcttcaagttcactctggtgtacttgaaagcagtgaaatctgtggccaatattgaaatatacatcgaataaaattttctgttctctt

SEQ ID NO: 41277 - DNA, 120 bp, Artificial Sequence
  ENSG00000060138_57 (sequence is synthesized)
tttgcctggagccaatctggcttctgcctggactgccatcaagaagaataacccacggaaatatctgcgcagtgtaggagatggagaaactgtagagtttgatgtggttgaaggagagaa

SEQ ID NO: 41278 - DNA, 120 bp, Artificial Sequence
  ENSG00000060138_58 (sequence is synthesized)
agggtgtgtaatcttctgtcagccctttcccaaaagtaagtcctatggattattattttaatctaaactctttctgtgatttattttgcaacaggagttcagttccacattttaagattg

SEQ ID NO: 41279 - DNA, 120 bp, Artificial Sequence
  ENSG00000060138_59 (sequence is synthesized)
gcaaataagttcttctaccccatcatattaactgttttcaaatagttttatttttgcagttgtataaagtgatatttggttagaccactttctaatttttaaagcctttgagtccttagc

SEQ ID NO: 41280 - DNA, 120 bp, Artificial Sequence
  ENSG00000060138_60 (sequence is synthesized)
gagatgaatgaaatgtatccgatttcaaaatgttaaattgataggcgaaaataaagttaggtgctctgggactaagcaaatgagtattctagtcagactaggtttgtcttccttttcagt

SEQ ID NO: 41281 - DNA, 120 bp, Artificial Sequence
  ENSG00000060138_61 (sequence is synthesized)
cgttcacgaagatttactcataaatagtttgtgttgcaactgagagtgcctaattttgtaatgaagcattttgttttttacttctaaaaaaaattctgaacatagctgtatgcactgtat

SEQ ID NO: 41282 - DNA, 120 bp, Artificial Sequence
  ENSG00000060138_62 (sequence is synthesized)
caccaaagaagatgtatttgtacatcaggtaagagggattataaatactacatttgctatgtgaggagagggtgtgtaatcttctgtcagccctttcccaaaaactgccatcaagaagaa

SEQ ID NO: 41283 - DNA, 120 bp, Artificial Sequence
  ENSG00000060138_63 (sequence is synthesized)
ggaggaaaatctgaggctctgattacacaccatgtgattcagaaagagacagaggaacgggatgtttctaaatgacaccaaagaagatgtatttgtacatcagactgccatcaagaagaa

SEQ ID NO: 41284 - DNA, 120 bp, Artificial Sequence
  ENSG00000060138_64 (sequence is synthesized)
tttcctttggggaagaggagggcgctagaaggagacggggagggaaagatagaaaagcttcttgccaggaagggtcaggtgtctgtccctgacgcccttcccacatgggcatgggaaaga

SEQ ID NO: 41285 - DNA, 120 bp, Artificial Sequence
  ENSG00000060138_65 (sequence is synthesized)
cgccatgctcctgttggccacatgccagcaaagagatgttgcaatcgtctccgggaaacttgggtcttagtcccacgtcttcctccccctctctgtgcccacggctgcaaacagccattc

SEQ ID NO: 41286 - DNA, 120 bp, Artificial Sequence
  ENSG00000060138_66 (sequence is synthesized)
aaaaactttgtcggaagtgggggtatgactgtatatgaagtgggtttatggtttaaagcaagacgtgggaatgaatttgatcataagaagtccttggagaagtatttgcggaattacgaa

SEQ ID NO: 41287 - DNA, 120 bp, Artificial Sequence
  ENSG00000060138_67 (sequence is synthesized)
attgttaccttggcacttgtaacgtaggaagggaaacaggaagatgaaatgttgagatttgggggggcagtggatggaaagggtttctgtgatggttgttggtttagtcacataacaagc

SEQ ID NO: 41288 - DNA, 120 bp, Artificial Sequence
  ENSG00000060140_0 (sequence is synthesized)
acaccttgccctacccaaccctgtcattatttcccctccgactgggccggtgccatcggaaaccggagtgaccagaggagggacacgcatccaatttcactgggctgcaagatatcaata

SEQ ID NO: 41289 - DNA, 120 bp, Artificial Sequence
  ENSG00000060140_1 (sequence is synthesized)
agccttgcctctttaaactacttatgtacaaataaaagtgatggtgagaacctggctcaggaaatgcagtagcaggccatattgcatccaaaggaattactcacagctgtgctgtgtgca

SEQ ID NO: 41290 - DNA, 120 bp, Artificial Sequence
  ENSG00000060140_2 (sequence is synthesized)
ttctctgtgggcctagcagggaaggggacagccctgtggcaatgggcatgacacggatgctcctggaatgcagtctcagtgacaagttgtgtgtcatccaggagaagcagtatgaagtga

SEQ ID NO: 41291 - DNA, 120 bp, Artificial Sequence
  ENSG00000060140_3 (sequence is synthesized)
ttatcgtcccaactttgttggttactatcttcctcatccttcttggggtcatcctgtggctttttatcagagaacaaagaactcaacagcagcgttctggacctcaaggcattgcccctg

SEQ ID NO: 41292 - DNA, 120 bp, Artificial Sequence
  ENSG00000060140_4 (sequence is synthesized)
ttcctccacctagggacctaagctgggaagcaggacatggaggaaatgtggctttgccacttaaggagacatccgtggaaaactttctgggagctaccacacctgccctggctaagctgc

SEQ ID NO: 41293 - DNA, 120 bp, Artificial Sequence
  ENSG00000060140_5 (sequence is synthesized)
aggtgccgcgggagcaactctctgaagttctggagcagatttgcagtggtagctgtgggcccatctttcgagccaatatgaacactggggacccttctaagcccaagagtgttattctca

SEQ ID NO: 41294 - DNA, 120 bp, Artificial Sequence
  ENSG00000060140_6 (sequence is synthesized)
aggctttaaaagaaccagctgggctccatgaggtacaagatttcttagggcgaatccaattccatcaatacctggggaaacacaaaaacctggtgcagctggaaggctgctgcactgaaa

SEQ ID NO: 41295 - DNA, 120 bp, Artificial Sequence
  ENSG00000060140_7 (sequence is synthesized)
agctgccactctatatggtgttggaggatgtggcccagggggacctgctcagctttctctggacctgtcggcgggatgtgatgactatggatggtcttctctatgatctcacagaaaaac

SEQ ID NO: 41296 - DNA, 120 bp, Artificial Sequence
  ENSG00000060140_8 (sequence is synthesized)
aagtatatcacatcggaaagcaggtccttttggcgctggaattcctgcaggagaagcatttgttccatggggatgtggcagccaggaatattctgatgcaaagtgatctcactgctaagc

SEQ ID NO: 41297 - DNA, 120 bp, Artificial Sequence
  ENSG00000060140_9 (sequence is synthesized)
tctgtggattaggcctggcttatgaagtttacacccgaggggccatctcctctactcaaaccatacctctcaagtggcttgccccagaacggcttctcctgagacctgctagcatcagag

SEQ ID NO: 41298 - DNA, 120 bp, Artificial Sequence
  ENSG00000060140_10 (sequence is synthesized)
cagatgtctggtcttttgggatcctgctctatgagatggtgactctaggagcaccaccgtatcctgaagtccctcctaccagcatcctagagcatctccaaagaaggaaaatcatgaaga

SEQ ID NO: 41299 - DNA, 120 bp, Artificial Sequence
  ENSG00000060140_11 (sequence is synthesized)
tgcacacataccatgtacagtatcatgaagtcctgctggcgctggcgtgaggctgaccgcccctcacctagagagctgcgcttgcgcctagaagctgccattaaaactgcagatgacgag

SEQ ID NO: 41300 - DNA, 120 bp, Artificial Sequence
  ENSG00000060140_12 (sequence is synthesized)
gctgtgttacaagtaccagagttggtggtacctgaactgtatgcagctgtggccggcatcagagtggagagcctcttctacaactatagcatgctttgaagagtctcgggcaagaaacat

SEQ ID NO: 41301 - DNA, 120 bp, Artificial Sequence
  ENSG00000060140_13 (sequence is synthesized)
tcatgcatgagtatatgttcttggaatcaattcctctaagaacagagaatggtctttcccagggacacaaagggagaaatgggacatggattcttgatcttcctttacacatttctcggg

SEQ ID NO: 41302 - DNA, 120 bp, Artificial Sequence
  ENSG00000060140_14 (sequence is synthesized)
aaatctgaaatgatgctggatgggactctacacatcctgagctaagacatactgtcagtctcacttctgctgtcccagtcctagaaatcctgggtagaagtggtggacctgtgcaaagga

SEQ ID NO: 41303 - DNA, 120 bp, Artificial Sequence
  ENSG00000060140_15 (sequence is synthesized)
ggttttagaactctgcagtatttgttggggcatggcacaaataagctcatccctcccgtccgaggctagtttcctctggaaccacatttttatctagatgaaaatttggaatgaaatgaa

SEQ ID NO: 41304 - DNA, 120 bp, Artificial Sequence
  ENSG00000060140_16 (sequence is synthesized)
ggaatagaaatccaataaaagagttgaagggaaagaaaatttaaggttcttcttgctcaggattacagatatggaccaacacctccttcaagaaaaggtggtaggacacaaagttcttca

SEQ ID NO: 41305 - DNA, 120 bp, Artificial Sequence
  ENSG00000060140_17 (sequence is synthesized)
gtcctgagccctacatgtggggttggaggagaactataacggaaaaacctctgagtttcaccttaggtatagataaaagaaagatggtccccttttatctgattctgagacaggtaaatt

SEQ ID NO: 41306 - DNA, 120 bp, Artificial Sequence
  ENSG00000060140_18 (sequence is synthesized)
ctgtttgttactacgtttaattagaaggtggaggagtcatttcatgattaagaacattcaacatgtattgttcattaagctagcttcctagttccgattagactaaggagactaagccta

SEQ ID NO: 41307 - DNA, 120 bp, Artificial Sequence
  ENSG00000060140_19 (sequence is synthesized)
gagagtcaatgttagaacagtgaaaagaattctgtgtgtgtgtgtgtgtgtgtgcacaataaataggaaatgtagaaaccaagcaagaaggcttagtagctcagtctttaacaagggcta

SEQ ID NO: 41308 - DNA, 120 bp, Artificial Sequence
  ENSG00000060140_20 (sequence is synthesized)
gaaaagaatgtaatctgatatggaaggatagcagcttctaattttcaatcatctgttgatatactgtgaaacttattttattaaattaatatttattaaatggaaatatgcttttctggt

SEQ ID NO: 41309 - DNA, 120 bp, Artificial Sequence
  ENSG00000060140_21 (sequence is synthesized)
ttataactactaaaaatatcatagggaggataaaagtaaataagtgaaagttaatgccaatagaaaaattcaagagataatgtacaatgtcagaaaagggattctttatgtgtaaatggg

SEQ ID NO: 41310 - DNA, 120 bp, Artificial Sequence
  ENSG00000060140_22 (sequence is synthesized)
gataatacctatttcacaaggttgttctgaggattgatacgttttgagtatgtatttgtacactatctggcacatatgcgctcaataaacgtgtttctccttttcttttgcccttcctaa

SEQ ID NO: 41311 - DNA, 120 bp, Artificial Sequence
  ENSG00000060140_23 (sequence is synthesized)
tctggacctgtcggcgggtgagcagtagggcagaggatgtgatgactatggatggtcttctctatgatctcacagaaaaacaagtatatcacatcggaaagcaggtccttttggcgctgg

SEQ ID NO: 41312 - DNA, 120 bp, Artificial Sequence
  ENSG00000060140_24 (sequence is synthesized)
accttgccctacccaaccctgtcattatttcccctccgactgggccggtgccatcggaaaccggagtgaccagaggagggacacgagacagggtcttgctgaagaccctggctaaccagg

SEQ ID NO: 41313 - DNA, 120 bp, Artificial Sequence
  ENSG00000060140_25 (sequence is synthesized)
ctggcctggaactcctggcctcaagtgatcctcatgccttcatcttccaaagtgctgggattacagaagtcagccacggaggtcagctgacagctaattcttaacaattgacatggtcag

SEQ ID NO: 41314 - DNA, 120 bp, Artificial Sequence
  ENSG00000060140_26 (sequence is synthesized)
atcgtgactccgttttcacctggactggagtcaccgtgatacctgacatctagcaatcactagagtaggaaatgagtatagatcagcaacaagtccagcctttacagttgcagcagaggt

SEQ ID NO: 41315 - DNA, 120 bp, Artificial Sequence
  ENSG00000060140_27 (sequence is synthesized)
ttcctgtggctcgagtgtggcgagtcccggaaacctcggagcccgcagacttcccttcgcgggagcccgcccgaactccatcctttgccggcagccacgccccgcagtgggaaggaggga

SEQ ID NO: 41316 - DNA, 120 bp, Artificial Sequence
  ENSG00000060140_28 (sequence is synthesized)
gtcattatttcccctccgactgggccggtgccatcggaaaccggagtgaccagaggagggacacggaatctctggagacaggtaaaaatagaagcaagaaaaactgatagccctcagatt

SEQ ID NO: 41317 - DNA, 120 bp, Artificial Sequence
  ENSG00000060140_29 (sequence is synthesized)
attcctggagagggggccatcaggagagggggaagggaaagaatgaggttacaggaattacttgtcagaggactgcatagcctttcagaccatggaatcgttgctttcagcttcggcttc

SEQ ID NO: 41318 - DNA, 120 bp, Artificial Sequence
  ENSG00000060237_0 (sequence is synthesized)
agactcccggcgccatttagcgcggagagtttcccgggtggacgcggctcctctctcggccactccgcacccccatcttcggtgacagaaggcgcctggtgggggtggctgctcttttct

SEQ ID NO: 41319 - DNA, 120 bp, Artificial Sequence
  ENSG00000060237_1 (sequence is synthesized)
ctccctgttccccctcacccagtcctctaggtctcctctcctcttgcctcagagaagcagcggagctcgggccccgcggtgagcggccctcccctccccgccgttccctcctccgtcagc

SEQ ID NO: 41320 - DNA, 120 bp, Artificial Sequence
  ENSG00000060237_2 (sequence is synthesized)
gagacgggtttgccaggcctggggcgggcggggaggcctcggggaagggggggcccgctcctcaggcgccgaggctccgaggctccggcccttcgcctctgggcgatgggcgacctgtga

SEQ ID NO: 41321 - DNA, 120 bp, Artificial Sequence
  ENSG00000060237_3 (sequence is synthesized)
ccgaggctccggcccttcgcctctgggcgatgggcgacctgtgaggccggtccccatcgctgggggcgcgtgtgggaggaggcggccgcccgagtgaccgggagccgggccgcggccttc

SEQ ID NO: 41322 - DNA, 80 bp, Artificial Sequence
  ENSG00000060237_4 (sequence is synthesized)
ctcctctgccccggggccgccaccgcccgggcgtcggacctggtcccgtgctcgcggtgccgccgccctctgggcctagc

SEQ ID NO: 41323 - DNA, 120 bp, Artificial Sequence
  ENSG00000060237_5 (sequence is synthesized)
catccgcctcgactcggtgccggcccctggccctcccctcatgactgcggcgcctctgctgccaccgcccgcccggccgccgctcgccgcaggatggatgcggaccgtgcggcgctaacc

SEQ ID NO: 41324 - DNA, 120 bp, Artificial Sequence
  ENSG00000060237_6 (sequence is synthesized)
aacccccgtggctcagctcccgaatcgcccgccttcgagccctcctcgtgagccgcagcagcctcggtgccagcccccgccgcagctgggcccagcggtccgcctgtccctcgttgcggc

SEQ ID NO: 41325 - DNA, 120 bp, Artificial Sequence
  ENSG00000060237_7 (sequence is synthesized)
ttgtcggtgctgagtgaggcgtcgtccgggtcggcgcgaacccgcccggccgcggttccctgcagacctctgcgcgggcggctcggcccttcacgcccttttcgttcacgaatccgagcc

SEQ ID NO: 41326 - DNA, 120 bp, Artificial Sequence
  ENSG00000060237_8 (sequence is synthesized)
cgctcgcctctctccagcgaaccgaccatgtctggcggcgccgcagagaagcagagcagcactcccggttccctgttcctctcgccgccggctcctgcccccaagaatggctccagctcc

SEQ ID NO: 41327 - DNA, 120 bp, Artificial Sequence
  ENSG00000060237_9 (sequence is synthesized)
gattcctccgtgggggagaaactgggagccgcggccgccgacgctgtgaccggcaggaccgaggagtacaggcgccgccgccacactatggacaaggacagccgtggggcggccgcgacc

SEQ ID NO: 41328 - DNA, 120 bp, Artificial Sequence
  ENSG00000060237_10 (sequence is synthesized)
actaccaccactgagcaccgcttcttccgccggagcgtcatctgtgactccaatgccactgcactggagcttcccggccttcctctttccctgccccagcccagcatccccgcggctgtc

SEQ ID NO: 41329 - DNA, 120 bp, Artificial Sequence
  ENSG00000060237_11 (sequence is synthesized)
ccgcagagtgctccaccggagccccaccgggaagagaccgtgaccgccaccgccacttcccaggtagcccagcagcctccagccgctgccgcccctggggaacaggccgtcgcgggccct

SEQ ID NO: 41330 - DNA, 120 bp, Artificial Sequence
  ENSG00000060237_12 (sequence is synthesized)
gccccctcgactgtccccagcagtaccagcaaagaccgcccagtgtcccagcctagccttgtggggagcaaagaggagccgccgccggcgagaagtggcagcggcggcggcagcgccaag

SEQ ID NO: 41331 - DNA, 120 bp, Artificial Sequence
  ENSG00000060237_13 (sequence is synthesized)
gagccacaggaggaacggagccagcagcaggatgatatcgaagagctggagaccaaggccgtgggaatgtctaacgatggccgctttctcaagtttgacatcgaaatcggcagaggctcc

SEQ ID NO: 41332 - DNA, 120 bp, Artificial Sequence
  ENSG00000060237_14 (sequence is synthesized)
tttaagacggtctacaaaggtctggacactgaaaccaccgtggaagtcgcctggtgtgaactgcaggatcgaaaattaacaaagtctgagaggcagagatttaaagaagaagctgaaatg

SEQ ID NO: 41333 - DNA, 120 bp, Artificial Sequence
  ENSG00000060237_15 (sequence is synthesized)
ttaaaaggtcttcagcatcccaatattgttagattttatgattcctgggaatccacagtaaaaggaaagaagtgcattgttttggtgactgaacttatgacgtctggaacacttaaaacg

SEQ ID NO: 41334 - DNA, 120 bp, Artificial Sequence
  ENSG00000060237_16 (sequence is synthesized)
tatctgaaaaggtttaaagtgatgaagatcaaagttctaagaagctggtgccgtcagatccttaaaggtcttcagtttcttcatactcgaactccacctatcattcaccgcgatcttaaa

SEQ ID NO: 41335 - DNA, 120 bp, Artificial Sequence
  ENSG00000060237_17 (sequence is synthesized)
tgtgacaacatctttatcaccggccctactggctcagtcaagattggagacctcggtctggcaaccctgaagcgggcttcttttgccaagagtgtgataggtaccccagagttcatggcc

SEQ ID NO: 41336 - DNA, 120 bp, Artificial Sequence
  ENSG00000060237_18 (sequence is synthesized)
cctgagatgtatgaggagaaatatgatgaatccgttgacgtttatgcttttgggatgtgcatgcttgagatggctacatctgaatatccttactcggagtgccaaaatgctgcacagatc

SEQ ID NO: 41337 - DNA, 120 bp, Artificial Sequence
  ENSG00000060237_19 (sequence is synthesized)
taccgtcgcgtgaccagtggggtgaagccagccagttttgacaaagtagcaattcctgaagtgaaggaaattattgaaggatgcatacgacaaaacaaagatgaaagatattccatcaaa

SEQ ID NO: 41338 - DNA, 120 bp, Artificial Sequence
  ENSG00000060237_20 (sequence is synthesized)
gaccttttgaaccatgccttcttccaagaggaaacaggagtacgggtagaattagcagaagaagatgatggagaaaaaatagccataaaattatggctacgtattgaagatattaagaaa

SEQ ID NO: 41339 - DNA, 120 bp, Artificial Sequence
  ENSG00000060237_21 (sequence is synthesized)
ttaaagggaaaatacaaagataatgaagctattgagttttcttttgatttagagagagatgtcccagaagatgttgcacaagaaatggtagagtctgggtatgtctgtgaaggtgatcac

SEQ ID NO: 41340 - DNA, 120 bp, Artificial Sequence
  ENSG00000060237_22 (sequence is synthesized)
aagaccatggctaaagctatcaaagacagagtatcattaattaagaggaaacgagagcagcggcagttggtacgggaggagcaagaaaaaaaaaagcaggaagagagcagtctcaaacag

SEQ ID NO: 41341 - DNA, 120 bp, Artificial Sequence
  ENSG00000060237_23 (sequence is synthesized)
caggtagaacaatccagtgcttcccagacaggaatcaagcagctcccttctgctagcaccggcatacctactgcttctaccacttcagcttcagtttctacacaagtagaacctgaagaa

SEQ ID NO: 41342 - DNA, 120 bp, Artificial Sequence
  ENSG00000060237_24 (sequence is synthesized)
cctgaggcagatcaacatcaacaactacagtaccagcaacccagtatatctgtgttatctgatgggacggttgacagtggtcagggatcctctgtcttcacagaatctcgagtgagcagc

SEQ ID NO: 41343 - DNA, 120 bp, Artificial Sequence
  ENSG00000060237_25 (sequence is synthesized)
caacagacagtttcatatggttcccaacatgaacaggcacattctacaggcacagtcccagggcatataccttctactgtccaagcacagtctcagccccatggggtatatccaccctca

SEQ ID NO: 41344 - DNA, 120 bp, Artificial Sequence
  ENSG00000060237_26 (sequence is synthesized)
agtgtggcacaggggcagagccagggtcagccatcctcaagtagcttaacaggggtttcatcttcccaacccatacaacatcctcagcagcagcagggaatacagcagacagcccctcct

SEQ ID NO: 41345 - DNA, 120 bp, Artificial Sequence
  ENSG00000060237_27 (sequence is synthesized)
caacagacagtgcagtattcactttcacagacatcaacctccagtgaggccactactgcacagccagtgagtcagcctcaagctccacaagtcttgcctcaagtatcagctggaaaacag

SEQ ID NO: 41346 - DNA, 120 bp, Artificial Sequence
  ENSG00000060237_28 (sequence is synthesized)
cttccagtttcccagccagtaccaactatccaaggcgaacctcagatcccagttgcgacacaaccctcggttgttccagtccactctggtgctcatttccttccagtgggacagccgctc

SEQ ID NO: 41347 - DNA, 120 bp, Artificial Sequence
  ENSG00000060237_29 (sequence is synthesized)
cctactcccttgctccctcagtaccctgtctctcagattcccatatcaactcctcatgtgtctacggctcagacaggtttctcatcccttcccatcacaatggcagctggcattactcag

SEQ ID NO: 41348 - DNA, 120 bp, Artificial Sequence
  ENSG00000060237_30 (sequence is synthesized)
cctctgctcacgttggcttcatctgctacaacagctgcgatcccgggggtatcaactgtggttcctagtcagcttccaacccttctgcagcctgtgactcagctgccaagtcaggttcac

SEQ ID NO: 41349 - DNA, 120 bp, Artificial Sequence
  ENSG00000060237_31 (sequence is synthesized)
ccacagctcctacaaccagcagttcagtccatgggaataccagctaaccttggacaagctgctgaggttccactttcctctggagatgttctgtaccagggcttcccacctcgactgcca

SEQ ID NO: 41350 - DNA, 120 bp, Artificial Sequence
  ENSG00000060237_32 (sequence is synthesized)
ccacagtacccaggagattcaaatattgctccctcttccaacgtggcttctgtttgcatccattctacagtcctatcccctcccatgccgacagaagtactggctacacctgggtacttt

SEQ ID NO: 41351 - DNA, 120 bp, Artificial Sequence
  ENSG00000060237_33 (sequence is synthesized)
cccacagtggtgcagccttatgtggaatcaaatcttttagttcctatgggtggtgtaggaggacaggttcaagtgtcccagccaggagggagtttagcacaagcccccactacatcctcc

SEQ ID NO: 41352 - DNA, 120 bp, Artificial Sequence
  ENSG00000060237_34 (sequence is synthesized)
cagcaagcagttttggagagtactcagggagtctctcaggttgctcctgcagagccagttgcagtagcacagacccaagctacccagccgaccactttggcttcctctgtagacagtgca

SEQ ID NO: 41353 - DNA, 120 bp, Artificial Sequence
  ENSG00000060237_35 (sequence is synthesized)
cattcagatgttgcttcaggtatgagtgatggcaatgagaacgtcccatcttccagtggaaggcatgaaggaagaactacaaaacggcattaccgaaaatctgtaaggagtcgctctcga

SEQ ID NO: 41354 - DNA, 120 bp, Artificial Sequence
  ENSG00000060237_36 (sequence is synthesized)
catgaaaaaacttcacgcccaaaattaagaattttgaatgtttcaaataaaggagaccgagtagtagaatgtcaattagagactcataataggaaaatggttacattcaaatttgaccta

SEQ ID NO: 41355 - DNA, 120 bp, Artificial Sequence
  ENSG00000060237_37 (sequence is synthesized)
gatggtgacaaccccgaggagatagcaacaattatggtgaacaatgactttattctagcaatagagagagagtcgtttgtggatcaagtgcgagaaattattgaaaaagctgatgaaatg

SEQ ID NO: 41356 - DNA, 120 bp, Artificial Sequence
  ENSG00000060237_38 (sequence is synthesized)
ctcagtgaggatgtcagtgtggaaccagagggtgatcagggattggagagtctacaaggaaaggatgactatggcttttcaggttctcagaaattggaaggagagttcaaacaaccaatt

SEQ ID NO: 41357 - DNA, 120 bp, Artificial Sequence
  ENSG00000060237_39 (sequence is synthesized)
cctgcgtcttccatgccacagcaaataggcattcctaccagttctttaactcaagttgttcattctgcgggaaggcggtttatagtgagtcctgtgccagaaagccgattacgagaatca

SEQ ID NO: 41358 - DNA, 120 bp, Artificial Sequence
  ENSG00000060237_40 (sequence is synthesized)
aaagttttccccagtgaaataacagatacagttgctgcctctacagctcagagccctggaatgaacttgtctcactctgcatcatcccttagtctacaacaggccttttctgaacttaga

SEQ ID NO: 41359 - DNA, 120 bp, Artificial Sequence
  ENSG00000060237_41 (sequence is synthesized)
cgtgcccaaatgacagaaggacccaacacagcacctccaaactttagtcatacaggaccaacatttccagtagtacctcctttcttaagtagcattgctggagtcccaaccacagcagca

SEQ ID NO: 41360 - DNA, 120 bp, Artificial Sequence
  ENSG00000060237_42 (sequence is synthesized)
gccacagcaccagtccctgcaacaagcagccctcctaatgacatttccacatcagtaattcagtctgaggttacagtgcccactgaagaggggattgctggagttgccaccagcacaggt

SEQ ID NO: 41361 - DNA, 120 bp, Artificial Sequence
  ENSG00000060237_43 (sequence is synthesized)
gtggtaacttcaggtggtctccccataccacctgtgtctgaatcaccagtactttccagcgtagtttcaagtatcacaatacctgcagttgtctcaatatctactacatccccgtcactt

SEQ ID NO: 41362 - DNA, 120 bp, Artificial Sequence
  ENSG00000060237_44 (sequence is synthesized)
gcctccagctgtagtatctcagcaggcagcaggcagcactactgtgggagccacattaacatcagtttctaccaccacttcattcccaagcacagcttcacagctgtgcattcagcttag

SEQ ID NO: 41363 - DNA, 120 bp, Artificial Sequence
  ENSG00000060237_45 (sequence is synthesized)
cagcagtacttctactcctactttagctgaaaccgtggtagttagcgcacactcactagataagacatctcatagcagtacaactggattggctttctccctctctgcaccatcttcctc

SEQ ID NO: 41364 - DNA, 120 bp, Artificial Sequence
  ENSG00000060237_46 (sequence is synthesized)
ttcctctcctggagcaggagtgtctagttatatttctcagcctggtgggctgcatcctttggtcattccatcagtgatagcttctactcctattcttccccaagcagcaggacctacttc

SEQ ID NO: 41365 - DNA, 120 bp, Artificial Sequence
  ENSG00000060237_47 (sequence is synthesized)
tacacctttattaccccaagtacctagtatcccacccttggtacagcctgttgccaatgtgcctgctgtacagcagacactaattcatagtcagcctcaaccagctttgcttcccaacca

SEQ ID NO: 41366 - DNA, 120 bp, Artificial Sequence
  ENSG00000060237_48 (sequence is synthesized)
gccccatactcattgtcctgaagtagattctgatacacaacccaaagctcctggaattgatgacataaagactctagaagaaaagctgcggtctctgttcagtgaacacagctcatctgg

SEQ ID NO: 41367 - DNA, 120 bp, Artificial Sequence
  ENSG00000060237_49 (sequence is synthesized)
agctcagcatgcctctgtctcactggagacctcactagtcatagagagcactgtcacaccaggcatcccaactactgctgttgcaccaagcaaactcctgacttctaccacaagtacttg

SEQ ID NO: 41368 - DNA, 120 bp, Artificial Sequence
  ENSG00000060237_50 (sequence is synthesized)
cttaccaccaaccaatttaccactaggaacagttgctttgccagttacaccagtggtcacacctgggcaagtttctaccccagtcagcactactacatcaggagtgaaacctggaactgc

SEQ ID NO: 41369 - DNA, 120 bp, Artificial Sequence
  ENSG00000060237_51 (sequence is synthesized)
tccctccaagccacctctaactaaggctccggtgctgccagtgggtactgaacttccagcaggtactctacccagcgagcagctgccaccttttccaggaccttctctaacccagtccca

SEQ ID NO: 41370 - DNA, 120 bp, Artificial Sequence
  ENSG00000060237_52 (sequence is synthesized)
gcaacctctagaggatcttgatgctcaattgagaagaacacttagtccagagatgatcacagtgacttctgcggttggtcctgtgtccatggcggctccaacagcaatcacagaagcagg

SEQ ID NO: 41371 - DNA, 120 bp, Artificial Sequence
  ENSG00000060237_53 (sequence is synthesized)
aacacagcctcagaagggtgtttctcaagtcaaagaaggccctgtcctagcaactagttcaggagctggtgtttttaagatgggacgatttcaggtttctgttgcagcagacggtgccca

SEQ ID NO: 41372 - DNA, 120 bp, Artificial Sequence
  ENSG00000060237_54 (sequence is synthesized)
gaaagagggtaaaaataagtcagaagatgcaaagtctgttcattttgaatccagcacctcagagtcctcagtgctatcaagtagtagtccagagagtaccttggtgaaaccagagccgaa

SEQ ID NO: 41373 - DNA, 120 bp, Artificial Sequence
  ENSG00000060237_55 (sequence is synthesized)
tggcataaccatccctggtatctcttcagatgtgccagagagtgcccacaaaactactgcctcagaggcaaagtcagacactgggcagcctaccaaggttggacgttttcaggtgacaac

SEQ ID NO: 41374 - DNA, 120 bp, Artificial Sequence
  ENSG00000060237_56 (sequence is synthesized)
tacagcaaacaaagtgggtcgtttctctgtatcaaaaactgaggacaagatcactgacacaaagaaagaaggaccagtggcatctcctccttttatggatttggaacaagctgttcttcc

SEQ ID NO: 41375 - DNA, 120 bp, Artificial Sequence
  ENSG00000060237_57 (sequence is synthesized)
tgctgtgataccaaagaaagagaagcctgaactgtcagagccttcacatctaaatgggccgtcttctgacccggaggccgcttttttaagtagggatgtggatgatggttccggtagtcc

SEQ ID NO: 41376 - DNA, 120 bp, Artificial Sequence
  ENSG00000060237_58 (sequence is synthesized)
acactcgccccatcagctgagctcaaagagccttcctagccagaatctaagtcaaagccttagtaattcatttaactcctcttacatgagtagcgacaatgagtcagatatcgaagatga

SEQ ID NO: 41377 - DNA, 120 bp, Artificial Sequence
  ENSG00000060237_59 (sequence is synthesized)
agacttaaagttagagctgcgacgactacgagataaacatctcaaagagattcaggacctgcagagtcgccagaagcatgaaattgaatctttgtataccaaactgggcaaggtgccccc

SEQ ID NO: 41378 - DNA, 120 bp, Artificial Sequence
  ENSG00000060237_60 (sequence is synthesized)
tgctgttattattcccccagctgctcccctttcagggagaagacgacgacccactaaaagcaaaggcagcaaatctagtcgaagcagttccttggggaataaaagcccccagctttcagg

SEQ ID NO: 41379 - DNA, 120 bp, Artificial Sequence
  ENSG00000060237_61 (sequence is synthesized)
taacctgtctggtcagagtgcagcttcagtcttgcacccccagcagaccctccaccctcctggcaacatcccagagtccgggcagaatcagctgttacagccccttaagccatctccctc

SEQ ID NO: 41380 - DNA, 120 bp, Artificial Sequence
  ENSG00000060237_62 (sequence is synthesized)
cagtgacaacctctattcagccttcaccagtgatggtgccatttcagtaccaagcctttctgctccaggtcaaggaaccagcagcacaaacactgttggggcaacagtgaacagccaagc

SEQ ID NO: 41381 - DNA, 120 bp, Artificial Sequence
  ENSG00000060237_63 (sequence is synthesized)
cgcccaagctcagcctcctgccatgacgtccagcaggaagggcacattcacagatgacttgcacaagttggtagacaattgggcccgagatgccatgaatctctcaggcaggagaggaag

SEQ ID NO: 41382 - DNA, 120 bp, Artificial Sequence
  ENSG00000060237_64 (sequence is synthesized)
caaagggcacatgaattacgagggccctggaatggcaaggaagttctctgcacctgggcaactgtgcatctccatgacctcgaacctgggtggctctgcccccatctctgcagcatcagc

SEQ ID NO: 41383 - DNA, 120 bp, Artificial Sequence
  ENSG00000060237_65 (sequence is synthesized)
tacctctctaggtcacttcaccaagtctatgtgccccccacagcagtatggctttccagctaccccatttggcgctcaatggagtgggacgggtggcccagcaccacagccacttggcca

SEQ ID NO: 41384 - DNA, 120 bp, Artificial Sequence
  ENSG00000060237_66 (sequence is synthesized)
gttccaacctgtgggaactgcctccttgcagaatttcaacatcagcaatttgcagaaatccatcagcaaccccccaggctccaacctgcggaccacttagacctagagacattaactgaa

SEQ ID NO: 41385 - DNA, 120 bp, Artificial Sequence
  ENSG00000060237_67 (sequence is synthesized)
tagatctgggggcaggagatggaatgctgagggggtgggtgggggtgggaagtagcctatatactaactactagtgctgcatttaactggttatttcttgccagaggggaatgtttttaa

SEQ ID NO: 41386 - DNA, 120 bp, Artificial Sequence
  ENSG00000060237_68 (sequence is synthesized)
tactgcattgagccctcagaatggagagtctcccccgctccagttattggaatgggagaggaaggaaagaacagcttttttgtcaaggggcagcttcagaccatgctttcctgtttatct

SEQ ID NO: 41387 - DNA, 120 bp, Artificial Sequence
  ENSG00000060237_69 (sequence is synthesized)
atactcagtaatgaggatgagggctaggaaagtcttgttcataaggaagctggagaactcaatgtaaaatcaaacccatctgtaatttcgagtgggtggagctcttgcttttggtacatg

SEQ ID NO: 41388 - DNA, 120 bp, Artificial Sequence
  ENSG00000060237_70 (sequence is synthesized)
ccctgaatccctcactccctcaagaatccgaaccacaggacaaaaaccacctactgggctctctcctaccctgccctcctcccttttttttacccctctcttttttattttttctttgct

SEQ ID NO: 41389 - DNA, 120 bp, Artificial Sequence
  ENSG00000060237_71 (sequence is synthesized)
ctttagaacccagtgaaaaataccagggtactggggtgcaactctttcttatgataggtcattagtgctttaagcaaaagatattagcagctttgactgcagcattagcaattaggaaaa

SEQ ID NO: 41390 - DNA, 120 bp, Artificial Sequence
  ENSG00000060237_72 (sequence is synthesized)
aaaaaaaattaagttccctgcggacatgtaactttgccatcagttttgatgtggaaacactgtgatatataaaatgttgttggacaacagtagttttaagagtaaaatatgaaacgttta

SEQ ID NO: 41391 - DNA, 120 bp, Artificial Sequence
  ENSG00000060237_73 (sequence is synthesized)
aaaagttccaaaaaaagctagctctgtcctttacttattgagacactttaactttttcctttgtatttccattgtattagataaataaatgtgaatgtaaaattgtataaattactgtac

SEQ ID NO: 41392 - DNA, 120 bp, Artificial Sequence
  ENSG00000060237_74 (sequence is synthesized)
ttgaatacttctgtttcccagtgttgcttgctggacattttagtgccttggacttctattgcttctgccattagcatcaacttaccagaccccagatcaataaagggcatgtggaaggaa

SEQ ID NO: 41393 - DNA, 120 bp, Artificial Sequence
  ENSG00000060237_75 (sequence is synthesized)
atcgtaggtccatgtgaccccagcagtccagcagtggttatgccaaagggaaattgaaaaagtatttttttaagtcattcaacaactttgtctagagcaggtgtaagatgagtagggtgg

SEQ ID NO: 41394 - DNA, 120 bp, Artificial Sequence
  ENSG00000060237_76 (sequence is synthesized)
gaagttaggttggcatcagtggttaaaaacagaaagttctgtttcgggaatagtgaggagggggtgttgtaacaaaattggacaacttaaaagaatggtgtgtgctgggtgaaagacaaa

SEQ ID NO: 41395 - DNA, 120 bp, Artificial Sequence
  ENSG00000060237_77 (sequence is synthesized)
gactaaagaatgaggaaacaaacgtgatgcctggccagtgactgtcatataaacctttcttatttgagctaggcttgaacagacgtgacctagaagaaactgaacataaagagaaggggg

SEQ ID NO: 41396 - DNA, 120 bp, Artificial Sequence
  ENSG00000060237_78 (sequence is synthesized)
tggggggctagttttcaagttggggaacctgatagtgaaaagtcacagatggagaaaattgctctcagaaaaactgtttggattgctttcctcttgttgcacatgtaccatgcatttctc

SEQ ID NO: 41397 - DNA, 120 bp, Artificial Sequence
  ENSG00000060237_79 (sequence is synthesized)
agcttggggtactacattttgtggaaagttaatctatctatctttccacatctgaattaatcattctaggaaagaatacttattcctactcatttcctttatgatgtccaaatggttgca

SEQ ID NO: 41398 - DNA, 120 bp, Artificial Sequence
  ENSG00000060237_80 (sequence is synthesized)
ggatcataatctattgtgccacctttatttctagaagtacaactaatatgttcacattttcaaataaataatactccccgtaagtaataactgcaaccaatcagtgttattcagtgctat

SEQ ID NO: 41399 - DNA, 120 bp, Artificial Sequence
  ENSG00000060237_81 (sequence is synthesized)
gcctccttgtaatgggtagttattaattattttcagagctttccggaaatactgtcctaactggctatgtttaggatctttgttatctctgaagacaaagaaagaagctaggactcttaa

SEQ ID NO: 41400 - DNA, 120 bp, Artificial Sequence
  ENSG00000060237_82 (sequence is synthesized)
ttttggggtgcttcttgactcttagttgggaaactgaaaatatttccaaccttttacccacgtcaatggcatattctgggaatcaccaccaccaccaccactaccacagaaagaggctgg

SEQ ID NO: 41401 - DNA, 120 bp, Artificial Sequence
  ENSG00000060237_83 (sequence is synthesized)
aggctcctgtaccctgttcattccttaagggccctgcttcccttagtaagtaagtaagttggtctacggccctaaatatgcaaatgagagctgaaggtttttaaaaggtagaaaggaaaa

SEQ ID NO: 41402 - DNA, 120 bp, Artificial Sequence
  ENSG00000060237_84 (sequence is synthesized)
gggcaagggcttccacccctgctttaaaatgatttatttattctctgcttgtatttcttgtggagagagtaaggatagaaccaacaaggggctgagtagctgagaaaggggccacccaag

SEQ ID NO: 41403 - DNA, 120 bp, Artificial Sequence
  ENSG00000060237_85 (sequence is synthesized)
agtgaaacatactttataccagaggagcagtggagcctcatgcagcacattatcatttgttatttgggtttaataataattttgacatcttttcactcatacacaaaaaaagtcagaact

SEQ ID NO: 41404 - DNA, 120 bp, Artificial Sequence
  ENSG00000060237_86 (sequence is synthesized)
ggtgttatttactgttgatttcatcctcctgtgtatgaaataacaagcctagaggaatgaactagtgctactgaactgtttaaattatttttgtgttaatagtacactttgagtatcttt

SEQ ID NO: 41405 - DNA, 120 bp, Artificial Sequence
  ENSG00000060237_87 (sequence is synthesized)
ttccacattaaaaactttctgaattataaatgttttccttacattatttaacaatgtacactgttaaaaataaaaataaaaattcaaactttgggggtttctcagcagccgttaattgta

SEQ ID NO: 41406 - DNA, 120 bp, Artificial Sequence
  ENSG00000060237_88 (sequence is synthesized)
cattttgcactaactctgggtgttgcgcttcttgtaagattgcgctttgtgcttcagtttgttacctttgtagacttatttaatgaaaccattcaaataaaccaaacttgcttttgttga

SEQ ID NO: 41407 - DNA, 120 bp, Artificial Sequence
  ENSG00000060237_89 (sequence is synthesized)
tactgtctgcacctctttctccttccctcctccggactgccccgaggaaacttttgccgaaaagctttctaaagcattggagagtgtcctgcctatgcactctgcctctcagcgcaagca

SEQ ID NO: 41408 - DNA, 120 bp, Artificial Sequence
  ENSG00000060237_90 (sequence is synthesized)
ccgacgctccagcctgccttccctctttgtcagtactcctcagtccatggcgcatccgtgtggggggaccccaacatacccagaatcacagatatttttcccaactattcatgaacgtcc

SEQ ID NO: 41409 - DNA, 120 bp, Artificial Sequence
  ENSG00000060237_91 (sequence is synthesized)
agtttctttttcaccacctcccacctgcccaccgaaagtagccatttcccagcggcgtaagagcacctccttcctggaagcccaaactcaccacttccaacccctgctgaggactgttgg

SEQ ID NO: 41410 - DNA, 120 bp, Artificial Sequence
  ENSG00000060237_92 (sequence is synthesized)
ccaaagtcttcttccacctggtggcagcccaactaactggacaccagaggccgtagttatgttgggtactacagccagtagagtaactggagagtcatgtgagatacaggtccatcctat

SEQ ID NO: 41411 - DNA, 120 bp, Artificial Sequence
  ENSG00000060237_93 (sequence is synthesized)
gtttgaaccatctcaagtttacagtgactatagacctggactagtacttccagaagaagctcactattttattcctcaggaagcagtgtatgtagctggggtacattaccaggcccgggt

SEQ ID NO: 41412 - DNA, 120 bp, Artificial Sequence
  ENSG00000060237_94 (sequence is synthesized)
ggcagaacagtatgagggcattccatacaactcatcagtactgtcaagtcctatgaaacagatacctgaacagaagccagtacaagggggccctacttcaagttctgtctttgaatttcc

SEQ ID NO: 41413 - DNA, 120 bp, Artificial Sequence
  ENSG00000060237_95 (sequence is synthesized)
atctggacaggctttcctggtaggacaccttcagaatctaagattagattctggattgggtccgggatctcccctctctagtatttctgcacctatcagtacagatgctacacgtttgaa

SEQ ID NO: 41414 - DNA, 120 bp, Artificial Sequence
  ENSG00000060237_96 (sequence is synthesized)
atttcaccctgtctttgttcctcattctgcgcctgctgtgttaactcataacaatgagagcagaagcaactgtgtatttgaatttcatgttcacacaccaagctcctcttcaggagaagg

SEQ ID NO: 41415 - DNA, 120 bp, Artificial Sequence
  ENSG00000060237_97 (sequence is synthesized)
aggtggaattttacctcagcgtgtttaccgaaatcggcaggttgcagtggacttgaatcaagaagaactgcctcctcaatcagttggattacatggctacttgcagcctgtgactgaaga

SEQ ID NO: 41416 - DNA, 120 bp, Artificial Sequence
  ENSG00000060237_98 (sequence is synthesized)
aaagcataattaccatgccccagaattgaccgtttctgtggtagagcctatcggacagaactggccaataggaagcccagaatattccagtgattcctcacaaatcacttcttcagaccc

SEQ ID NO: 41417 - DNA, 120 bp, Artificial Sequence
  ENSG00000060237_99 (sequence is synthesized)
cagtgattttcagtcacctccccctacagggggagcagctgcaccttttggctctgacgtctcaatgccctttatccatctgcctcagacagtgttacaagaatccccacttttcttctg

SEQ ID NO: 41418 - DNA, 120 bp, Artificial Sequence
  ENSG00000060237_100 (sequence is synthesized)
tcaaacctggtggcaggaggacccgatttctgaggaagatggtgaaaaaagtctgtccttgcaaccagctctgtagaaccagcagcacaaacactgttggggcaacagtgaacagccaag

SEQ ID NO: 41419 - DNA, 120 bp, Artificial Sequence
  ENSG00000060237_101 (sequence is synthesized)
gacctcataccatgcagtctataccagagactagctttagcaacttcctttggaattttaagaccattatctctagatgctgaatattgagaatttactagtaaatttagtgcttctagg

SEQ ID NO: 41420 - DNA, 120 bp, Artificial Sequence
  ENSG00000060237_102 (sequence is synthesized)
attactgttggcagagaagcagaaggaatattaacagaatagttttcctgctgttgggcatgcagttttgtccatctagaataaatctgttgttggctgagtagagcaaattcctgtctg

SEQ ID NO: 41421 - DNA, 120 bp, Artificial Sequence
  ENSG00000060237_103 (sequence is synthesized)
agagttggggaagcatggctagtgttaaacaagaaactgtgtttcagtctgactttgatgtctgccttccttatgctgtgggctgatgtacatcagagacattttttccttcattttcct

SEQ ID NO: 41422 - DNA, 120 bp, Artificial Sequence
  ENSG00000060237_104 (sequence is synthesized)
tcttcaggaggatctgcacttcatccacaggttataggaaaacttccacaattattttaaactaccctactttgcaccataacatttaaattttctattccttatttccctgaatcatgg

SEQ ID NO: 41423 - DNA, 120 bp, Artificial Sequence
  ENSG00000060237_105 (sequence is synthesized)
cctggtggcaccatcacaaagaacatcagagggaaaacaaatatataatggaaattgatgaatttgggtttgtgcatgtcttgattactaaaatcatcattatttacagacactgaaggc

SEQ ID NO: 41424 - DNA, 120 bp, Artificial Sequence
  ENSG00000060237_106 (sequence is synthesized)
gcatggcttcccagttcatcctcttctcattctgtggcttgccattcatcatcccgtgaagttttccctcttcctgaaattgtaacctaggcttcttttaatgctcgtattctgttgctt

SEQ ID NO: 41425 - DNA, 120 bp, Artificial Sequence
  ENSG00000060237_107 (sequence is synthesized)
aaggtgatagaaacaactaagctgctgcttaacgtcttacgccacgaccttcttcaattttaatactttagaaaaacaaggcaaaaatcccccaggtacccttttatttttccttccctg

SEQ ID NO: 41426 - DNA, 120 bp, Artificial Sequence
  ENSG00000060237_108 (sequence is synthesized)
gttgccatacctgggacaaaagcctgttaaggcgggttgggagactagctgaccagaacacagcctgtgtgttgtacactgaagaatctgggtgaaaagggaagtggagtgataatgaga

SEQ ID NO: 41427 - DNA, 120 bp, Artificial Sequence
  ENSG00000060237_109 (sequence is synthesized)
atcggtgggctcactgctcccattaggtgaaattactttttttcaaggaattacagtgaaaagttacatctgtgtggcctatatgacttgctcatttgggatttggaacttaggctttaa

SEQ ID NO: 41428 - DNA, 120 bp, Artificial Sequence
  ENSG00000060237_110 (sequence is synthesized)
tattaggctgagatttcctggatgaaattctaaggtgttttagcagtttctgaagctaatacattttcttagccattgtagaattttgttacttttaagtatgggagtggcatactaaaa

SEQ ID NO: 41429 - DNA, 120 bp, Artificial Sequence
  ENSG00000060237_111 (sequence is synthesized)
aagtttaactgtgcatctgaacaggtgacattcaaacctggtggcaggaggacccgatttctgagtacgccctgcttggctctttggaagatggtgaaaaaagtctgtccttgcaaccag

SEQ ID NO: 41430 - DNA, 120 bp, Artificial Sequence
  ENSG00000060237_112 (sequence is synthesized)
ggtatgtttcaggtgtaccttggagcctgactggctttctcacattccttttatttagaatcctggctctgtcagagttttaagtgatataaaccttaagaaattcatagcttgaactca

SEQ ID NO: 41431 - DNA, 120 bp, Artificial Sequence
  ENSG00000060237_113 (sequence is synthesized)
ggaggtgatccattgtacttatgagatataggattctctatatttgtgcttcttggaatcatcttagagactattggtaacattacgttacaagaaataaagtgaactttgttgataaaa

SEQ ID NO: 41432 - DNA, 120 bp, Artificial Sequence
  ENSG00000060339_0 (sequence is synthesized)
gacgggtttgaaatggcttcgatgttagccgggacccgactcagatcgatgctatagaagacaaacaagggaaggttttttttccttttgcatcatggctcaatttggaggacagaagaa

SEQ ID NO: 41433 - DNA, 120 bp, Artificial Sequence
  ENSG00000060339_1 (sequence is synthesized)
tccgccatgggctactcagtttacagccactgcagtatcacagccagctgcactgggtgttcaacagccatcactccttggagcatctcctaccatttatacacagcaaactgcattggc

SEQ ID NO: 41434 - DNA, 120 bp, Artificial Sequence
  ENSG00000060339_2 (sequence is synthesized)
agcagcaggccttaccacacaaactccagcaaactatcagttaacacaaactgctgcattgcagcaacaagccgcagctgcagcagctgcattacaacagcaatattcacaacctcagca

SEQ ID NO: 41435 - DNA, 120 bp, Artificial Sequence
  ENSG00000060339_3 (sequence is synthesized)
ggccctgtatagtgtgcaacaacagttacagcaaccccagcaaaccctcttaacacagccagctgttgcactgcctacaagccttagcctgtctactcctcagccaacagcacaaataac

SEQ ID NO: 41436 - DNA, 120 bp, Artificial Sequence
  ENSG00000060339_4 (sequence is synthesized)
tgtatcatatccaacaccaaggtccagtcaacagcaaacccagcctcagaagcagcgtgttttcacaggggtggttacaaaactacatgatacgtttggatttgtggatgaagatgtatt

SEQ ID NO: 41437 - DNA, 120 bp, Artificial Sequence
  ENSG00000060339_5 (sequence is synthesized)
ctttcagcttagtgctgtcaaagggaaaaccccccaagtaggtgacagagtattggttgaagctacttataatcctaatatgccttttaaatggaatgcacagagaattcaaacactacc

SEQ ID NO: 41438 - DNA, 120 bp, Artificial Sequence
  ENSG00000060339_6 (sequence is synthesized)
aaatcagaatcagtcgcaaacccagccattactgaagactcctcctgctgtacttcagccaattgcaccacagacaacatttggtgttcagactcagccccagccccagtcactgctgca

SEQ ID NO: 41439 - DNA, 120 bp, Artificial Sequence
  ENSG00000060339_7 (sequence is synthesized)
ggcacagatttcagcagcttctattacaccactattgcagactcaaccacagcccttattacagcagcctcagcaaaaagctggtttattgcagcctcctgttcgtatagtttcacagcc

SEQ ID NO: 41440 - DNA, 120 bp, Artificial Sequence
  ENSG00000060339_8 (sequence is synthesized)
acaaccggcacgacgattagatcccccatcccgattttcaggaagaaatgacagaggggatcaagtgcctaacagaaaagatgatcgaagtcgtgagagagagagagaaagacgtagatc

SEQ ID NO: 41441 - DNA, 120 bp, Artificial Sequence
  ENSG00000060339_9 (sequence is synthesized)
gagagaaagatcacctcagaggaaacgttcccgggaaagatctccacgaagagagcgagagcgatcacctcggagagttcgacgtgttgttccacgttacacagttcagttttcaaagtt

SEQ ID NO: 41442 - DNA, 120 bp, Artificial Sequence
  ENSG00000060339_10 (sequence is synthesized)
ttctttagattgtcccagttgtgacatgatggaactaaggcgccgttatcaaaatttgtatatacctagtgacttttttgatgctcaatttacatgggtggatgctttccctttgtcaag

SEQ ID NO: 41443 - DNA, 120 bp, Artificial Sequence
  ENSG00000060339_11 (sequence is synthesized)
accatttcagctgggaaattactgcaatttttatgtaatgcacagagaagtagagtccttagaaaaaaatatggccattcttgatccaccagatgctgaccacttatacagtgcaaaggt

SEQ ID NO: 41444 - DNA, 120 bp, Artificial Sequence
  ENSG00000060339_12 (sequence is synthesized)
aatgctgatggctagccctagtatggaagatttatatcataagtcatgtgctcttgctgaggacccacaagaacttcgagatggattccaacatcctgctagacttgttaagtttttagt

SEQ ID NO: 41445 - DNA, 120 bp, Artificial Sequence
  ENSG00000060339_13 (sequence is synthesized)
gggcatgaaaggcaaggatgaagctatggccattggaggccactggtctccttcgttggatggaccagacccagaaaaagatccctctgtgttgattaagactgctattcgttgttgtaa

SEQ ID NO: 41446 - DNA, 120 bp, Artificial Sequence
  ENSG00000060339_14 (sequence is synthesized)
ggctctgacaggcattgatctaagtgtgtgcacacaatggtaccgttttgcagagattcgctaccatcgccctgaggagacccacaaggggcgtacagttccagctcatgtggagacagt

SEQ ID NO: 41447 - DNA, 120 bp, Artificial Sequence
  ENSG00000060339_15 (sequence is synthesized)
ggttttatttttcccggatgtttggcattgccttcccacccgctcagagtgggaaaccctctcccgaggatacaagcagcagctggtcgagaagcttcagggtgaacgcaaggaggctga

SEQ ID NO: 41448 - DNA, 120 bp, Artificial Sequence
  ENSG00000060339_16 (sequence is synthesized)
tggagaacaggatgaagaagagaaggatgatggtgaagctaaagaaatttctacacctacccattggtctaaacttgatccaaagacaatgaaggtaaatgacctccgaaaagaattaga

SEQ ID NO: 41449 - DNA, 120 bp, Artificial Sequence
  ENSG00000060339_17 (sequence is synthesized)
aagtcgagctcttagttccaaaggattaaaatcccagttaatagcccgattgacaaaacagcttaaagtagaggaacaaaaagaagaacagaaggagttagagaaatctgaaaaagaaga

SEQ ID NO: 41450 - DNA, 120 bp, Artificial Sequence
  ENSG00000060339_18 (sequence is synthesized)
ggatgaggatgatgataggaaatctgaagacgataaagaggaagaagaaaggaaacgtcaagaggaaatagaacgccagcgtcgagaaagaagatatattttgcctgatgaaccggccat

SEQ ID NO: 41451 - DNA, 120 bp, Artificial Sequence
  ENSG00000060339_19 (sequence is synthesized)
aacattcatttgaggtttcattgtttgcggaacttttcaacgaaatgcttcaaagagattttggtgtccgtatatacaaatcattactgtctcttcctgagaaagaggacaaaaaagaaa

SEQ ID NO: 41452 - DNA, 120 bp, Artificial Sequence
  ENSG00000060339_20 (sequence is synthesized)
aggataaaaaaagcaaaaaagatgagagaaaagataaaaaagaagaaagagatgatgaaactgatgaaccaaaacccaaacggagaaaatcaggcgatgataaagataaaaaagaagata

SEQ ID NO: 41453 - DNA, 120 bp, Artificial Sequence
  ENSG00000060339_21 (sequence is synthesized)
gagatgaaaggaagaaagaagataaaagaaaagatgattctaaagatgatgatgaaactgaagaagataacaatcaagatgaatatgaccctatggaagcagaagaagctgaggatgaag

SEQ ID NO: 41454 - DNA, 120 bp, Artificial Sequence
  ENSG00000060339_22 (sequence is synthesized)
aagatgatagggatgaggaagaaatgaccaaacgagatgacaaaagagatatcaacagatactgcaaggagaggccctctaaagataaggaaaaagaaaagactcaaatgatcacaatta

SEQ ID NO: 41455 - DNA, 120 bp, Artificial Sequence
  ENSG00000060339_23 (sequence is synthesized)
acagagatctgttaatggcttttgtttattttgatcaaagtcattgtggttaccttcttgaaaaggatttggaagaaatactttatactcttggactacatctttctcgggctcaggtaa

SEQ ID NO: 41456 - DNA, 120 bp, Artificial Sequence
  ENSG00000060339_24 (sequence is synthesized)
agaagcttcttaataaagtagtgctccgtgaatcttgcttttaccggaaattaacagacacctcaaaagatgaagagaaccatgaagagtctgagtcattgcaggaagatatgctaggaa

SEQ ID NO: 41457 - DNA, 120 bp, Artificial Sequence
  ENSG00000060339_25 (sequence is synthesized)
acagattattacttccaacaccaacagtaaagcaggaatcaaaggatgtggaagaaaatgttggcctcattgtgtacaatggtgcaatggtagatgtaggaagcctcttgcaaaaattgg

SEQ ID NO: 41458 - DNA, 120 bp, Artificial Sequence
  ENSG00000060339_26 (sequence is synthesized)
aaaagagcgaaaaagtaagagctgaggtagaacagaagctgcagttactagaagaaaaaacagatgaagatgaaaaaaccatattaaatttggagaattccaacaaaagcctctctggtg

SEQ ID NO: 41459 - DNA, 120 bp, Artificial Sequence
  ENSG00000060339_27 (sequence is synthesized)
aactcagagaagttaaaaaggaccttagtcagttacaagaaaacttaaagatttcggaaaacatgaatttacaatttgaaaaccaaatgaataagacaatcagaaacttatctacggtaa

SEQ ID NO: 41460 - DNA, 120 bp, Artificial Sequence
  ENSG00000060339_28 (sequence is synthesized)
tggatgaaatccacactgttctcaagaaggataatgtaaagaatgaagacaaagatcaaaaatccaaggagaatggtgccagtgtatgataaaatccatgtagtgatgaggaatggtgtt

SEQ ID NO: 41461 - DNA, 120 bp, Artificial Sequence
  ENSG00000060339_29 (sequence is synthesized)
aatgtaatatataaaaatcatgatataagaatgtttgaaggtgatgcatgtttgattttagtagtataaatgtattttagttcaaatgatgtataaagttttatgaatgtgagtttctgc

SEQ ID NO: 41462 - DNA, 120 bp, Artificial Sequence
  ENSG00000060339_30 (sequence is synthesized)
ctgcttttgaaaattgcttgtaattcctagccttcaaattattaaacactccttgagtgaaataattttgcattgcaaagtgttttaggatgaactttgttatagttttaactccaataa

SEQ ID NO: 41463 - DNA, 120 bp, Artificial Sequence
  ENSG00000060339_31 (sequence is synthesized)
tgttttaggatgaactttgttatagttttaactccaataaagttcatcagtttaattgactgtagtatttaattaccaaatttcttttattaaaatgcctagaaatttttaatttataga

SEQ ID NO: 41464 - DNA, 120 bp, Artificial Sequence
  ENSG00000060339_32 (sequence is synthesized)
tcagtcaaaatcataaaatagcatgatgcttaatttttgcaagttttttgaaactttttgttttttttactcatcaccaaaaaatcccctcttgatcagtctctaaaagcattcattaaa

SEQ ID NO: 41465 - DNA, 90 bp, Artificial Sequence
  ENSG00000060339_33 (sequence is synthesized)
tgaatcagtttatttgaaagacagtatatcagaaagaaagaagcaatagagaactagtattgttctttatgggttagactttacataata

SEQ ID NO: 41466 - DNA, 120 bp, Artificial Sequence
  ENSG00000060339_34 (sequence is synthesized)
gaactagtattgttctttatgggttagactttacataatattagttgtcctgatgtcaatgttactgctttcaattaatttttctactttcccagaatagcatctatattccttttaatt

SEQ ID NO: 41467 - DNA, 120 bp, Artificial Sequence
  ENSG00000060339_35 (sequence is synthesized)
ttgagggtttaaaaaaaaatgcagtgtatgtcaaatttacagtttagtaccaagccagtagatgtcagtatgatgccttaaattaagtcttctttaattaaagatatttttttaaattaa

SEQ ID NO: 41468 - DNA, 120 bp, Artificial Sequence
  ENSG00000060339_36 (sequence is synthesized)
cttcagagcaagcgcaagacatatagccccgctcattgttaagcgaggccaaggcaacccttaggcgcgctctatttcccctttcgtagcgaaagggccaggcgtattgagcggtcaggg

SEQ ID NO: 41469 - DNA, 120 bp, Artificial Sequence
  ENSG00000060339_37 (sequence is synthesized)
tggcttcgatgttagccgggacccgactcaggtgaaggtctggtccccgtagttggagcagtgggcggccaagccgggtctcttaacatcttgtcgaatctgtggaagggccgggagcga

SEQ ID NO: 41470 - DNA, 120 bp, Artificial Sequence
  ENSG00000060339_38 (sequence is synthesized)
tcttttgggtagcccggcggccccgggcggcgacggtggggctcttgtgggactgggacgggagggacgcggtcccttttgtgcgggtcggagcaggcccggcgcggccagccccacccc

SEQ ID NO: 41471 - DNA, 120 bp, Artificial Sequence
  ENSG00000060339_39 (sequence is synthesized)
ggttttaccctcctggccccccggcccgggacatcgtggcggctcccggcggcgtgggtcttggggaatagaggctttctccatcgatgctatagaagacaaacaagggaaggttttttt

SEQ ID NO: 41472 - DNA, 120 bp, Artificial Sequence
  ENSG00000060339_40 (sequence is synthesized)
atttaaaaggaaaacattttttaaaagttacctttccagtgaaaagttaatagaacctctgttgactttttgatatattaaagcaatataagggccaggcgtggtggctcacacctataa

SEQ ID NO: 41473 - DNA, 84 bp, Artificial Sequence
  ENSG00000060339_41 (sequence is synthesized)
ataatcccagcaggttgggaggctgaggcgggcagatcagttgaggccaggagtttaagaccagcttggccaacatggcgtagc

SEQ ID NO: 41474 - DNA, 120 bp, Artificial Sequence
  ENSG00000060339_42 (sequence is synthesized)
agactgctattcgttgttgtaaggctctgacaggcattgatctaagtgtgtgcacacaatggcacaggaacacaggcacaaatgcacaccacacactacataataaacacacatggagga

SEQ ID NO: 41475 - DNA, 76 bp, Artificial Sequence
  ENSG00000060339_43 (sequence is synthesized)
tttggctctgttaattgttaattgtagctagtttgtttcctatttcaatatccgctgccccccgccccccgccacc

SEQ ID NO: 41476 - DNA, 120 bp, Artificial Sequence
  ENSG00000060491_0 (sequence is synthesized)
agcgcgagccccgccgccgccgagcatggacgaccccgactgcgactccacctgggaggaggacgaggaggatgcggaggacgcggaggacgaggactgcgaggacggcgaggccgccgg

SEQ ID NO: 41477 - DNA, 120 bp, Artificial Sequence
  ENSG00000060491_1 (sequence is synthesized)
cgcgagggacgcggacgcaggggacgaggacgaggagtcggaggagccgcgggcggcgcggcccagctcgttccagtccagaatgacagggtccagaaactggcgagccacgagggacat

SEQ ID NO: 41478 - DNA, 120 bp, Artificial Sequence
  ENSG00000060491_2 (sequence is synthesized)
gtgtaggtatcggcacaactatccggatctggtggaacgagactgcaatggggacacgccaaacctgagtttctacagaaatgagatccgcttcctgcccaacggctgtttcattgagga

SEQ ID NO: 41479 - DNA, 120 bp, Artificial Sequence
  ENSG00000060491_3 (sequence is synthesized)
cattcttcagaactggacggacaactatgacctccttgaggacaatcactcctacatccagtggctgtttcctctgcgagaaccaggagtgaactggcatgccaagcccctcacgctcag

SEQ ID NO: 41480 - DNA, 120 bp, Artificial Sequence
  ENSG00000060491_4 (sequence is synthesized)
ggaggtcgaggtgtttaaaagctcccaggagatccaggagcggcttgtccgggcctacgagctcatgctgggcttctacgggatccggctggaggaccgaggcacgggcacggtgggccg

SEQ ID NO: 41481 - DNA, 120 bp, Artificial Sequence
  ENSG00000060491_5 (sequence is synthesized)
agcacagaactaccagaagcgcttccagaacctgaactggcgcagccacaacaacctccgcatcacacgcatcctcaagtcgctgggtgagctgggcctcgagcacttccaggcgccgct

SEQ ID NO: 41482 - DNA, 120 bp, Artificial Sequence
  ENSG00000060491_6 (sequence is synthesized)
ggtccgcttcttcctggaggagacgctggtgcggcgggagctgccgggggtgcggcagagtgccctggactacttcatgttcgccgtgcgctgccgacaccagcgccgccagctggtgca

SEQ ID NO: 41483 - DNA, 120 bp, Artificial Sequence
  ENSG00000060491_7 (sequence is synthesized)
cttcgcctgggagcacttccggccccgctgcaagttcgtctgggggccccaagacaagctgcggaggttcaagcccagctctctgccccatccgctcgagggctccaggaaggtggagga

SEQ ID NO: 41484 - DNA, 120 bp, Artificial Sequence
  ENSG00000060491_8 (sequence is synthesized)
ggaaggaagccccggggaccccgaccacgaggccagcacccagggtcggacctgtgggccagagcatagcaagggtgggggcagggtggacgaggggccccagccacggagcgtggagcc

SEQ ID NO: 41485 - DNA, 120 bp, Artificial Sequence
  ENSG00000060491_9 (sequence is synthesized)
ccaggatgcgggacccctggagaggagccagggggatgaggcagggggccacggggaagataggccggagcccttaagccccaaagagagcaagaagaggaagctggagctgagccggcg

SEQ ID NO: 41486 - DNA, 120 bp, Artificial Sequence
  ENSG00000060491_10 (sequence is synthesized)
cccacagagccaggccctcagagtgcctcagaggtggagaagatcgctctgaatttggaggggtgtgccctcagccagggcagcctcaggacggggacccaggaagtgggcggtcaggac

SEQ ID NO: 41487 - DNA, 120 bp, Artificial Sequence
  ENSG00000060491_11 (sequence is synthesized)
cctggggaggcagtgcagccctgccgccaacccctgggagccagggtggccgacaaggtgaggaagcggaggaaggtggatgagggtgctggggacagtgctgcggtggccagtggtggt

SEQ ID NO: 41488 - DNA, 120 bp, Artificial Sequence
  ENSG00000060491_12 (sequence is synthesized)
gcccagaccttggcccttgccgggtcccctgccccatcggggcaccccaaggctggacacagtgagaacggggttgaggaggacacagaaggtcgaacggggcccaaagaaggtacccct

SEQ ID NO: 41489 - DNA, 120 bp, Artificial Sequence
  ENSG00000060491_13 (sequence is synthesized)
gggagcccatcggagaccccaggccccagcccagcaggacctgcaggggacgagccagccgagagcccatcggagaccccaggcccccgcccagcaggacctgcaggggacgagccagcc

SEQ ID NO: 41490 - DNA, 120 bp, Artificial Sequence
  ENSG00000060491_14 (sequence is synthesized)
gagagcccatcggagaccccaggcccccgcccggcaggacctgcaggggacgagccagccgagagcccatcggagaccccaggccccagcccggcaggacctacaagggatgagccagcc

SEQ ID NO: 41491 - DNA, 120 bp, Artificial Sequence
  ENSG00000060491_15 (sequence is synthesized)
gagagcccatcggagaccccaggcccccgcccggcaggacctgcaggggacgagccagccgagagcccatcggagaccccaggcccccgcccggcaggacctgcaggggacgagccagcc

SEQ ID NO: 41492 - DNA, 120 bp, Artificial Sequence
  ENSG00000060491_16 (sequence is synthesized)
gagagcccatcggagaccccaggccccagcccggcaggacctacaagggatgagccagccaaggcgggggaggcagcagagttgcaggacgcagaggtggagtcttctgccaagtctggg

SEQ ID NO: 41493 - DNA, 120 bp, Artificial Sequence
  ENSG00000060491_17 (sequence is synthesized)
aagccttaaggaaaggagtgcccgtcggcgtcttggtcctcctgtccctgctgcaggggctggggcctccggagctgctgcgggctcccctcaggctctgcttcgtgacccgtgacccat

SEQ ID NO: 41494 - DNA, 120 bp, Artificial Sequence
  ENSG00000060491_18 (sequence is synthesized)
gacccacagtgctggcctcctgtggggccactatagcagccaccagaagccgcgaggccctcagggaagcccaaggcctgcagaagcctcctggcctggctgtgtcttccccacccagct

SEQ ID NO: 41495 - DNA, 120 bp, Artificial Sequence
  ENSG00000060491_19 (sequence is synthesized)
ctcccctgcgcccctgtctttgtaaattgacccttctggagtggggggcggcgggcagggctgcttttcttagtctgataccaagcaaggccttttctgaataaattcatttgactttga

SEQ ID NO: 41496 - DNA, 120 bp, Artificial Sequence
  ENSG00000060491_20 (sequence is synthesized)
actggagttcctcaggccgctctcctgaagcggtgctcagaggccctgaccatcctgccaggcgcccgtgacccctgacctcttccctctgcctcctgctgtggcttctgtccacaagcc

SEQ ID NO: 41497 - DNA, 120 bp, Artificial Sequence
  ENSG00000060491_21 (sequence is synthesized)
cctccccttcccctttggacccctcaggcctccccagctgcctgcgctggaccctggcggggctgtttcactttttcctgggcagtgtcatgtatgcacctgtgggctgactgtgtggcc

SEQ ID NO: 41498 - DNA, 120 bp, Artificial Sequence
  ENSG00000060491_22 (sequence is synthesized)
acatccagtcaggacccagcctccagaactgacccagggaggctcccgctggccccaggaaggagaagtagaaactgatgatcaggcggggcgagagaaccacaccagcggccctgttga

SEQ ID NO: 41499 - DNA, 120 bp, Artificial Sequence
  ENSG00000060491_23 (sequence is synthesized)
ggctcaggcctgtaatcccagcactttcggaggcctgggcagtcggatcaccagaggtcaggagtccaagattagcctggccaacatggtgaaactgttgtctctactaaaaatacaaca

SEQ ID NO: 41500 - DNA, 120 bp, Artificial Sequence
  ENSG00000060491_24 (sequence is synthesized)
ctggccaacatggtgaaactgttgtctctactaaaaatacaacattagccaggcgtgatgggcacctgtaatcccagttcctccagagattgaagcaggagaatcgcttaaacctgggag

SEQ ID NO: 41501 - DNA, 120 bp, Artificial Sequence
  ENSG00000060491_25 (sequence is synthesized)
aggtggaggttgcagtgagtggagattgcctgggaggtggagattgcatgaagctccatctcgaggggaaaaaaataagaaagaaaaatcaggcagagaggcaacgccaggtcccagctg

SEQ ID NO: 41502 - DNA, 120 bp, Artificial Sequence
  ENSG00000060491_26 (sequence is synthesized)
cgccaggtcccagctggagctcagcggggagccaggggatacagtggctgaccgggcctcctaaccccccttctagcactcccccaggatcctgggtcccaattgttgccctggacaaat

SEQ ID NO: 41503 - DNA, 120 bp, Artificial Sequence
  ENSG00000060491_27 (sequence is synthesized)
acgcccattcctgccctacccaccgagtgaggctcagccccaggccccccaccctcatcacaaggtcagggctgtgtcccaccatcctcatcactaggtacttccggccctttgctcagc

SEQ ID NO: 41504 - DNA, 120 bp, Artificial Sequence
  ENSG00000060491_28 (sequence is synthesized)
cccatgatgcttggcctgcagagatgggggctgaagggcttggggcatcaaggggacctgacatcttgctgagaagccatcactagacagggctggaggctggagactcagggcctgccc

SEQ ID NO: 41505 - DNA, 120 bp, Artificial Sequence
  ENSG00000060491_29 (sequence is synthesized)
tcaccgtggccagtgaggcgtggggttgggcagggaaggggcattcattcattagaccctgccagaagcacctgggtccccttctggggctacaggtggtgaggccactgcccccaagaa

SEQ ID NO: 41506 - DNA, 120 bp, Artificial Sequence
  ENSG00000060491_30 (sequence is synthesized)
cacagcctggtgactttagtgtacaaagcagggggagtctccaggggcacagaacagaggctaaagccagggtggaggtggccagcaggcctaggaggaggagagggtcagggccacacc

SEQ ID NO: 41507 - DNA, 120 bp, Artificial Sequence
  ENSG00000060491_31 (sequence is synthesized)
ccaggggaggtgcatgtcagccaggggccaccctaaggtggaagccaggagtcccaaaggggcctagagaaggagcagccccccacctggctaccgcagccctctctggttctgtgcagg

SEQ ID NO: 41508 - DNA, 120 bp, Artificial Sequence
  ENSG00000060491_32 (sequence is synthesized)
gtattgggatgcgttactgaggcccaaatctgccccactgggaacccccaaaaaagagccagggcaggagaatgagagggaggagccatgaaacccccgccctttaaagacagctctgtg

SEQ ID NO: 41509 - DNA, 120 bp, Artificial Sequence
  ENSG00000060491_33 (sequence is synthesized)
gcagctggcccaggccctgcagccctcaccacgttgggactcacttgggggtctcccatgggggtcctaatcccatctcttttcttcccagtccagaatgacagggtccagaaactggcg

SEQ ID NO: 41510 - DNA, 120 bp, Artificial Sequence
  ENSG00000060491_34 (sequence is synthesized)
agccacgagggacatgtgtaggtatcggcacaactatccggtacgtacctgcccctgccccgggacacagaaccctcccgccagctgctcttctcaggcagaatgtcccaggttctactg

SEQ ID NO: 41511 - DNA, 120 bp, Artificial Sequence
  ENSG00000060491_35 (sequence is synthesized)
gaaggctggcctggcttgctgtgccagggccacagttctgggcaggaccctgcctggggcacagcctggtatagattcagagccctgcccttcccctctcgcgggagaccgggggcatcc

SEQ ID NO: 41512 - DNA, 120 bp, Artificial Sequence
  ENSG00000060491_36 (sequence is synthesized)
ccctacttttctgagcttcagcacaccgtcgccttgcaaacatggccatagtgccagcctcgtgatgcacacgtgtggggtccgtgataccgcccacacagcaccccacccccatgccag

SEQ ID NO: 41513 - DNA, 120 bp, Artificial Sequence
  ENSG00000060491_37 (sequence is synthesized)
ccctgtctcctgcaggttgtcctcagccattaccctccacacccctgaatcacggaaacccctgtgctgccttcagggtgctgaggaggggacctgccaggcctggcctggctggcgaaa

SEQ ID NO: 41514 - DNA, 120 bp, Artificial Sequence
  ENSG00000060491_38 (sequence is synthesized)
tgaggagccaggcgggctcttggggtattgggccagcctggaggtttgcagatgcgcctccccgaaagacacggagggccccagggcagcttgtgtctgatggatccctgctgtcccctt

SEQ ID NO: 41515 - DNA, 120 bp, Artificial Sequence
  ENSG00000060491_39 (sequence is synthesized)
aggggacgagccagccgagagcccatcggagaccccaggccccagcccggcaggacctacaagggatgagccagccaaggcgggggaggcagaagcctccggcctggctgtgtcttccca

SEQ ID NO: 41516 - DNA, 120 bp, Artificial Sequence
  ENSG00000060491_40 (sequence is synthesized)
cccagctctcccctgcgcccctgtctttgtaaatcccttctggagtggggggcggcgggcagggctgcttcttagtctgataccaagcaaggccttttctgaataaattcatttgacttt

SEQ ID NO: 41517 - DNA, 120 bp, Artificial Sequence
  ENSG00000060558_0 (sequence is synthesized)
agaaggaggaagaagggccctgctggtcacacaggacccagtctgcggtgggggttttcccgccaccgccccgccctccctggggcccccacctcaccctctcctggcacccttcaccgt

SEQ ID NO: 41518 - DNA, 120 bp, Artificial Sequence
  ENSG00000060558_1 (sequence is synthesized)
caacctgtcgggccgggtctgagcaggtctggaggtgggcggggagccctggcctccccacctcctcccgtccccaccctgttcccagcactcaagccttgccaccgccgagccgggctt

SEQ ID NO: 41519 - DNA, 120 bp, Artificial Sequence
  ENSG00000060558_2 (sequence is synthesized)
cctgggtgtttcaggcaaggaagtctaggtccctggggggtgacccccaaggaaaaggcagcctccctgcgcacccggttgcccggagccctctccagggccggctgggctgggggttgc

SEQ ID NO: 41520 - DNA, 120 bp, Artificial Sequence
  ENSG00000060558_3 (sequence is synthesized)
cctggccagcaggggcccgggggcgatgccacccggtgccgactgaggccaccgcaccatggcccgctcgctgacctggcgctgctgcccctggtgcctgacggaggatgagaaggccgc

SEQ ID NO: 41521 - DNA, 120 bp, Artificial Sequence
  ENSG00000060558_4 (sequence is synthesized)
cgcccgggtggaccaggagatcaacaggatcctcttggagcagaagaagcaggaccgcggggagctgaagctgctgcttttgggcccaggcgagagcgggaagagcaccttcatcaagca

SEQ ID NO: 41522 - DNA, 120 bp, Artificial Sequence
  ENSG00000060558_5 (sequence is synthesized)
gatgcggatcatccacggcgccggctactcggaggaggagcgcaagggcttccggcccctggtctaccagaacatcttcgtgtccatgcgggccatgatcgaggccatggagcggctgca

SEQ ID NO: 41523 - DNA, 120 bp, Artificial Sequence
  ENSG00000060558_6 (sequence is synthesized)
gattccattcagcaggcccgagagcaagcaccacgctagcctggtcatgagccaggacccctataaagtgaccacgtttgagaagcgctacgctgcggccatgcagtggctgtggaggga

SEQ ID NO: 41524 - DNA, 120 bp, Artificial Sequence
  ENSG00000060558_7 (sequence is synthesized)
tgccggcatccgggcctgctatgagcgtcggcgggaattccacctgctcgattcagccgtgtactacctgtcccacctggagcgcatcaccgaggagggctacgtccccacagctcagga

SEQ ID NO: 41525 - DNA, 120 bp, Artificial Sequence
  ENSG00000060558_8 (sequence is synthesized)
cgtgctccgcagccgcatgcccaccactggcatcaacgagtactgcttctccgtgcagaaaaccaacctgcggatcgtggacgtcgggggccagaagtcagagcgtaagaaatggatcca

SEQ ID NO: 41526 - DNA, 120 bp, Artificial Sequence
  ENSG00000060558_9 (sequence is synthesized)
ggactatcctggaactaccctggttcaaaagcacatccgtcatcctctttctcaacaaaaccgacatcctggaggagaaaatccccacctcccacctggctacctatttccccagtttcc

SEQ ID NO: 41527 - DNA, 120 bp, Artificial Sequence
  ENSG00000060558_10 (sequence is synthesized)
agggccctaagcaggatgctgaggcagccaagaggttcatcctggacatgtacacgaggatgtacaccgggtgcgtggacggccccgagggcagcaagaagggcgcacgatcccgacgcc

SEQ ID NO: 41528 - DNA, 120 bp, Artificial Sequence
  ENSG00000060558_11 (sequence is synthesized)
tcttcagccactacacatgtgccacagacacacagaacatccgcaaggtcttcaaggacgtgcgggactcggtgctcgcccgctacctggacgagatcaacctgctgtgacccaggcccc

SEQ ID NO: 41529 - DNA, 120 bp, Artificial Sequence
  ENSG00000060558_12 (sequence is synthesized)
acctggggcaggcggcaccggcgggcgggtgggaggtgggagtggctgcagggacccctagtgtccctggtctatctctccagcctcggcccacacgcaagggagtcgggggacggacgg

SEQ ID NO: 41530 - DNA, 120 bp, Artificial Sequence
  ENSG00000060558_13 (sequence is synthesized)
cccgctgctggccgctctcttctctgcctctcaccaggacagccgccccccagggtactcctgcccttgcttgactcagtttccctcctttgaaagggaaggagcaaaacggccatttgg

SEQ ID NO: 41531 - DNA, 120 bp, Artificial Sequence
  ENSG00000060558_14 (sequence is synthesized)
gatgccagggtggatgaaaaggtgaagaaatcaggggattgaggacttgggtgggtgggcatctctcaggagccccatctccgggcgtgtcacctcctgggcagggttctgggaccctct

SEQ ID NO: 41532 - DNA, 120 bp, Artificial Sequence
  ENSG00000060558_15 (sequence is synthesized)
gtgggtgacgcacaccctgggatggggctagtagagccttcaggcgccttcgggcgtggactctggcgcactctagtggacaggagaaggaacgccttccaggaacctgtggactagggg

SEQ ID NO: 41533 - DNA, 120 bp, Artificial Sequence
  ENSG00000060558_16 (sequence is synthesized)
tgcagggacttccctttgcaaggggtaacagaccgctggaaaacactgtcactttcagagctcggtggctcacagcgtgtcctgccccggtttgcggacgagagaaatcgcggcccacaa

SEQ ID NO: 41534 - DNA, 120 bp, Artificial Sequence
  ENSG00000060558_17 (sequence is synthesized)
gcatccccccatcccttgcaggctgggggctgggcatgctgcatcttaaccttttgtatttattccctcaccttctgcagggctccgtgcgggctgaaattaaagatttcttagaggctg

SEQ ID NO: 41535 - DNA, 120 bp, Artificial Sequence
  ENSG00000060558_18 (sequence is synthesized)
gtaaagagcggggctgggtgccatgctccccctgagcctgggctcgcccgagcacatgtgccctctgcagcccctcatgtggtggtctgtgcttttccctctggggatccatgcaagaac

SEQ ID NO: 41536 - DNA, 120 bp, Artificial Sequence
  ENSG00000060558_19 (sequence is synthesized)
agacggaggacaaatcagaagtgtgcgggggggtcgggagctctggggaagaaggagagcagtgggaagagagcgtgtttcagggagggacgtgggggcttgcagagatgcctgcggagg

SEQ ID NO: 41537 - DNA, 120 bp, Artificial Sequence
  ENSG00000060558_20 (sequence is synthesized)
caggaccgcggggagctgaagctgctgcttttggtcccaggctcttgaagactccagcatcagtatcccggacccagggccggtttggcaggtgcgcgaactgggctgtcccagagggtt

SEQ ID NO: 41538 - DNA, 120 bp, Artificial Sequence
  ENSG00000060558_21 (sequence is synthesized)
ccaggctcagaagagcctgaagtttcagcttgcacccagccccagaaaatctgtggctggccctgcaaggaccctgccagattttgtaccatctgtcagcaaggcccaggcgagagcggg

SEQ ID NO: 41539 - DNA, 120 bp, Artificial Sequence
  ENSG00000060566_0 (sequence is synthesized)
gacagagccacagagggctgtgagcttgcccggccccaggtaacgctggcggtgggtgggcctccagcttggagcagagaccccccgaggcatctgcagacagaactggatggacccatg

SEQ ID NO: 41540 - DNA, 120 bp, Artificial Sequence
  ENSG00000060566_1 (sequence is synthesized)
aatacggatttagctgctggaaagatggcttctgctgcctgctccatggaccccatcgacagctttgagctcctggatctcctgtttgaccggcaggacggcatcctgagacacgtggag

SEQ ID NO: 41541 - DNA, 120 bp, Artificial Sequence
  ENSG00000060566_2 (sequence is synthesized)
ctgggcgagggctggggtcacgtcaaggaccagcaggtcctgccaaaccccgactctgacgacttcctcagctccatcctgggctctggagactcactgcccagctccccactctggtcc

SEQ ID NO: 41542 - DNA, 120 bp, Artificial Sequence
  ENSG00000060566_3 (sequence is synthesized)
cccgaaggcagtgatagtggcatctccgaagacctcccctccgacccccaggacacccctccacgcagcggaccagccacctcccccgccggctgccatcctgcccagcctggcaagggg

SEQ ID NO: 41543 - DNA, 120 bp, Artificial Sequence
  ENSG00000060566_4 (sequence is synthesized)
ccctgcctctcctatcatcctggcaactcttgctccaccacaaccccagggccagtgatccaagtacctgaagcctctgtgaccatagacctggaaatgtggagcccaggaggaaggatc

SEQ ID NO: 41544 - DNA, 120 bp, Artificial Sequence
  ENSG00000060566_5 (sequence is synthesized)
tgtgctgagaagccggctgatccggtggacctgtccccacgatgcaatctcaccgtgaaagacctcctcctttcgggcagcagtggggacctgcaacagcatcacctgggggcctcctac

SEQ ID NO: 41545 - DNA, 120 bp, Artificial Sequence
  ENSG00000060566_6 (sequence is synthesized)
ctcctgcgacctggggctgggcactgtcaggagctggtgctcaccgaggatgagaagaagctgctggctaaagaaggcatcaccctgcccactcagctgcccctcactaagtacgaggag

SEQ ID NO: 41546 - DNA, 120 bp, Artificial Sequence
  ENSG00000060566_7 (sequence is synthesized)
cgagtgctgaaaaaaatccgccggaaaatccggaacaagcagtcggcgcaagaaagcaggaagaagaagaaggaatatatcgatggcctggagactcggatgtcagcttgcactgctcag

SEQ ID NO: 41547 - DNA, 120 bp, Artificial Sequence
  ENSG00000060566_8 (sequence is synthesized)
aatcaggagttacagaggaaagtcttgcatctcgagaagcaaaacctgtccctcttggagcaactgaagaaactccaggccattgtggtgcagtccaccagcaagtcagcccagacaggc

SEQ ID NO: 41548 - DNA, 120 bp, Artificial Sequence
  ENSG00000060566_9 (sequence is synthesized)
acctgtgtcgcagtcctgttgctgtcctttgccctcatcatcctcccctccatcagcccttttggccccaacaaaaccgagagccctggggactttgcgcctgtacgagtgttctccaga

SEQ ID NO: 41549 - DNA, 120 bp, Artificial Sequence
  ENSG00000060566_10 (sequence is synthesized)
ccgacccgaggctgacacaacccgagaagagtctccaggaagccccggggcagactggggcttccaggacaccgcgaacctgaccaattcgacggaggagctggacaacgccaccctggt

SEQ ID NO: 41550 - DNA, 120 bp, Artificial Sequence
  ENSG00000060566_11 (sequence is synthesized)
cctgaggaatgcaacagaggggctgggccaggtcgccctgctggactgggtggcgcctgggccgagcactggctcaggacgtgcagggctggaggcggcgggagacgagctgtgagcccc

SEQ ID NO: 41551 - DNA, 120 bp, Artificial Sequence
  ENSG00000060566_12 (sequence is synthesized)
gccaggactatgctcccaggcccctctgcccaggggtgccttggggatgctgcactgggcagctacccacctggggatgggacgtgaggccaagaccccagcagagatgccagaatgggg

SEQ ID NO: 41552 - DNA, 120 bp, Artificial Sequence
  ENSG00000060566_13 (sequence is synthesized)
gaggcacagctcatagccacacacccagggcctgactgaggcccacgcaggaaccgacactcagacacaaggcaaagagggccacaggacccgggaaatacacacagagccaggagcaga

SEQ ID NO: 41553 - DNA, 120 bp, Artificial Sequence
  ENSG00000060566_14 (sequence is synthesized)
agcaaagagcagacacacatacagcctgaaacagacctggacagacagacacagcctgaaacagacccggacagacagacacagcctgaaacagacccagacaaacagacagacagacac

SEQ ID NO: 41554 - DNA, 120 bp, Artificial Sequence
  ENSG00000060566_15 (sequence is synthesized)
agcctgaaacagacccagacagacagacagacagcctgaaacagacccagacacagcctgaaacagatccggacagacagacagaaacagcctgaaacagacccagacagacagacagac

SEQ ID NO: 41555 - DNA, 120 bp, Artificial Sequence
  ENSG00000060566_16 (sequence is synthesized)
acagcctgaaacagacccggacagacagacagacacagcctgaaacagacccggacagacagacagacacagcctgaaacagacccggacagacagacagacacagcctgaaacagacct

SEQ ID NO: 41556 - DNA, 120 bp, Artificial Sequence
  ENSG00000060566_17 (sequence is synthesized)
agacagacagacacagattgaaacagacccagacaaacagacagacacagcctgaaacagacccagacacagcctgaaacagacccggacagacagacagacacagcctgaaacagaccc

SEQ ID NO: 41557 - DNA, 120 bp, Artificial Sequence
  ENSG00000060566_18 (sequence is synthesized)
agacagacagacagacacagcctgaaacagacccagacagacagaccgacgcagcctgaaagagacccagacagagagacaggcagacacagcctaaaacagacctggacagacaggcag

SEQ ID NO: 41558 - DNA, 120 bp, Artificial Sequence
  ENSG00000060566_19 (sequence is synthesized)
acgtagtctgaaacagacctgaacagacagacagacgcacacacacaacagatgcgcagcaactccccgcccagggacccctcccggcctccctcgcacactgggaggaggaagccgccg

SEQ ID NO: 41559 - DNA, 120 bp, Artificial Sequence
  ENSG00000060566_20 (sequence is synthesized)
agactgcagggagcctggccccggagccccgggtgcgccctggtctttggagcagccacggcccacaatcaccccccttttctaagactgcctgatccgaaataaagtattttgacagaa

SEQ ID NO: 41560 - DNA, 120 bp, Artificial Sequence
  ENSG00000060642_0 (sequence is synthesized)
gtccccgccggggaggtcgggacgggcaggggctgaggaccccgcgccagcttgggagccctggagttctggcgggagggaagctgtcaaatggaagccggtagaaatgagacagacgcc

SEQ ID NO: 41561 - DNA, 120 bp, Artificial Sequence
  ENSG00000060642_1 (sequence is synthesized)
cggagaagcggggagccccgcccctccgccatagcagcctcgggcgccgcctcttcctttccagcctcccgccctcgtctgcttccggccctgtggcctggtggggctctgcaggctccc

SEQ ID NO: 41562 - DNA, 120 bp, Artificial Sequence
  ENSG00000060642_2 (sequence is synthesized)
tcgggagtggtccttgggccgtggcccctctgggaggcctgagggagctcaatcctggtagcaacacccctgaattcctggtggtgaaaggatgtggccccaggacccatcccggaagga

SEQ ID NO: 41563 - DNA, 120 bp, Artificial Sequence
  ENSG00000060642_3 (sequence is synthesized)
ggtgctgaggtttgcagtcagctgccgtatcctgactctgatgctgcaggccctcttcaatgccatcatcccagatcaccatgcagaagccttctctcctcctcgcctggccccctcagg

SEQ ID NO: 41564 - DNA, 120 bp, Artificial Sequence
  ENSG00000060642_4 (sequence is synthesized)
ctttgtggaccaactcgtggaaggtcttctgggcggcctgtctcactgggatgctgaacacttcttgttcattgctgagcatggctacctgtatgagcacaactttgccttctttcctgg

SEQ ID NO: 41565 - DNA, 120 bp, Artificial Sequence
  ENSG00000060642_5 (sequence is synthesized)
tttccccttggccctgctggtggggactgaactgttgagacccttacgggggttactgagtctacgcagttgcctgctgatttcggtagcatcactcaatttcttgttcttcatgttggc

SEQ ID NO: 41566 - DNA, 120 bp, Artificial Sequence
  ENSG00000060642_6 (sequence is synthesized)
tgcagttgcacttcatgacctgggttgtctggttttgcactgtccccaccagtccttttatgcagctctgcttttctgtctcagccctgccaatgtcttcctggcagctggttactcaga

SEQ ID NO: 41567 - DNA, 120 bp, Artificial Sequence
  ENSG00000060642_7 (sequence is synthesized)
agctttgtttgccctcctgacattcagtgccatggggcagctggagaggggccgagtctggactagtgtactcctctttgcctttgccactggggtacgctccaacgggctggtcagtgt

SEQ ID NO: 41568 - DNA, 120 bp, Artificial Sequence
  ENSG00000060642_8 (sequence is synthesized)
tggcttcctcatgcattctcaatgccaaggctttttctcttctctaacgatgctgaatcctctgagacagctctttaagctgatggcctctctgtttctgtcggtgttcacacttggcct

SEQ ID NO: 41569 - DNA, 120 bp, Artificial Sequence
  ENSG00000060642_9 (sequence is synthesized)
agctgtagacaagggctaccggattgcagagggaaatgaaccgccttggtgcttctgggatgttccactaatatacagctatatccaggatgtctactggaatgttggctttttgaaata

SEQ ID NO: 41570 - DNA, 120 bp, Artificial Sequence
  ENSG00000060642_10 (sequence is synthesized)
ctatgagctcaagcaggtgcccaattttctactggctgcaccagtggctatactggttgcctgggcaacttggacatacgtgaccactcacccttggctctgccttacacttgggctgca

SEQ ID NO: 41571 - DNA, 120 bp, Artificial Sequence
  ENSG00000060642_11 (sequence is synthesized)
aaggagcaagaacaataagaccctagagaagcccgatcttggattcctcagtcctcaggtgtttgtgtacgtggtccacgctgcagtgctgctgctgtttggaggtctgtgcatgcatgt

SEQ ID NO: 41572 - DNA, 120 bp, Artificial Sequence
  ENSG00000060642_12 (sequence is synthesized)
tcaggttctcaccaggtttttgggctcctccactcctattatgtactggtttccagctcacttgcttcaggatcaagagccgctgttgagatccttaaagactgtgccttggaagcctct

SEQ ID NO: 41573 - DNA, 120 bp, Artificial Sequence
  ENSG00000060642_13 (sequence is synthesized)
tgcagaggactccccaccaggacaaaaggtccccagaaatcctatcatgggacttttgtatcactggaaaacctgttctccagtcacacgatacattctaggctacttcctgacttactg

SEQ ID NO: 41574 - DNA, 120 bp, Artificial Sequence
  ENSG00000060642_14 (sequence is synthesized)
gctcctgggactactcctacattgcaacttcctgccttggacatgacctggactctccagggacaggttggaagccaacttaacccaggggtctgaaagtaaaaatacacattggaactg

SEQ ID NO: 41575 - DNA, 120 bp, Artificial Sequence
  ENSG00000060642_15 (sequence is synthesized)
cctctgctgccctgggatcattactgtgtccattataatctttctctttctctttgaaagctggtcaggaatgggagaagtgtcagacactagagagccccttctggtcctggctagggc

SEQ ID NO: 41576 - DNA, 120 bp, Artificial Sequence
  ENSG00000060642_16 (sequence is synthesized)
aaattttagacaactattttctctgtaagtgaagattgtcgtattccaagtctaaaatacacctggatctgtctagtcaatcaacatagcagagacagtcttaaacctaccattgacctg

SEQ ID NO: 41577 - DNA, 120 bp, Artificial Sequence
  ENSG00000060642_17 (sequence is synthesized)
tgtgtaaatttaaatgtcaatttattgaagtgtaaatttcatcaaaggcattagctgacaggctggtaacagtccacacaagatggtataggcctgaacagtgtagtggcagtaataaag

SEQ ID NO: 41578 - DNA, 120 bp, Artificial Sequence
  ENSG00000060642_18 (sequence is synthesized)
tgggaccattttttccaaatgcgacattgtttctgatgtttttttttatgatttgtgcatgtatttttatatgaaaaaaacttacaaagatatgcaaattaaacttctttcagttataca

SEQ ID NO: 41579 - DNA, 120 bp, Artificial Sequence
  ENSG00000060642_19 (sequence is synthesized)
gccggccagaaacgggttgcggacacggctgggctgacagaaggcagcccccacgaggcctttggctctgaggaccctgggtcagagcgacttctccagcctgcgcagggggtgttagtc

SEQ ID NO: 41580 - DNA, 120 bp, Artificial Sequence
  ENSG00000060642_20 (sequence is synthesized)
ttacccagagggtccagagctgccgttcaacaggatgtcccagattctcagatagggcccaactaccctaagcatacctagcaagggcaggctgcggcatggaagtactgggctaggcgt

SEQ ID NO: 41581 - DNA, 120 bp, Artificial Sequence
  ENSG00000060642_21 (sequence is synthesized)
ttgggtgacctgggtcataatcctggctcggaaagggcgcgtaccctttggcgagggatgcgggctggtaccgtgaggtttaagaagcagaaaacatgacagcctctttaagtagccctg

SEQ ID NO: 41582 - DNA, 120 bp, Artificial Sequence
  ENSG00000060642_22 (sequence is synthesized)
ggtacgtcacttgaccccagtgagcctcagtttccatatccataaaatggcgatggtaattatactagcctcacagtgtctgatgagatctctggagcctatttatctcacgggaaaatt

SEQ ID NO: 41583 - DNA, 120 bp, Artificial Sequence
  ENSG00000060642_23 (sequence is synthesized)
ttacctgtaagcaaagtgtgggctacacacatctgtagtcgctgaggctagagcttgactcgagagaggaaaggaagaatgcaagcatggtcaagtggcagagaggcctgagggagctca

SEQ ID NO: 41584 - DNA, 120 bp, Artificial Sequence
  ENSG00000060642_24 (sequence is synthesized)
acacccaggacgcagggtgccgctgccggccacagaaaccccaagaatgtttttctttggctattcagaggacatctattgtgtgtcaggccctgtgctgagctgttgttgcctgacagc

SEQ ID NO: 41585 - DNA, 120 bp, Artificial Sequence
  ENSG00000060642_25 (sequence is synthesized)
aggaagagcgcggctctggtttctgtgaagaggctgcgggtcagcctccgactacaagagcctcggcccacaccgggaactcagtgaacgtcagcgggagctggggcaagagcactgact

SEQ ID NO: 41586 - DNA, 120 bp, Artificial Sequence
  ENSG00000060656_0 (sequence is synthesized)
gctccaaccatggcccgtgcccaggcgctcgtgctggcactcaccttccagctctgcgcgccggagaccgagactccggcagctggctgcaccttcgaggaggcaagtgacccagcagtg

SEQ ID NO: 41587 - DNA, 120 bp, Artificial Sequence
  ENSG00000060656_1 (sequence is synthesized)
ccctgcgagtacagccaggcccagtacgatgacttccagtgggagcaagtgcgaatccaccctggcacccgggcacctgcggacctgccccacggctcctacttgatggtcaacacttcc

SEQ ID NO: 41588 - DNA, 120 bp, Artificial Sequence
  ENSG00000060656_2 (sequence is synthesized)
cagcatgccccaggccagcgagcccatgtcatcttccagagcctgagcgagaatgatacccactgtgtgcagttcagctacttcctgtacagccgggacgggcacagcccgggcaccctg

SEQ ID NO: 41589 - DNA, 120 bp, Artificial Sequence
  ENSG00000060656_3 (sequence is synthesized)
ggcgtctacgtgcgcgttaatgggggccccctgggcagtgctgtgtggaatatgactggatcccacggccgtcagtggcaccaggctgagctggctgtcagcactttctggcccaatgaa

SEQ ID NO: 41590 - DNA, 120 bp, Artificial Sequence
  ENSG00000060656_4 (sequence is synthesized)
tatcaggtgctgtttgaggccctcatctccccagaccgcaggggctacatgggcctagatgacatcctgcttctcagctacccctgcgcaaaggccccacacttctcccgcctgggcgac

SEQ ID NO: 41591 - DNA, 120 bp, Artificial Sequence
  ENSG00000060656_5 (sequence is synthesized)
gtggaggtcaacgcgggccagaacgcgtcgttccagtgcatggccgcgggcagagcggccgaggccgaacgcttcctcttgcaacggcagagcggggcgctggtgccggcggcgggcgtg

SEQ ID NO: 41592 - DNA, 120 bp, Artificial Sequence
  ENSG00000060656_6 (sequence is synthesized)
cggcacatcagccaccggcgcttcctggccactttcccgctggctgccgtgagccgcgccgagcaggacctgtaccgctgtgtgtcccaggccccgcgcggcgcgggcgtctctaacttc

SEQ ID NO: 41593 - DNA, 120 bp, Artificial Sequence
  ENSG00000060656_7 (sequence is synthesized)
gcggagctcatcgtcaaggagcccccaactcccatcgcgcccccacagctgctgcgtgctggccccacctacctcatcatccagctcaacaccaactccatcattggcgacgggccgatc

SEQ ID NO: 41594 - DNA, 120 bp, Artificial Sequence
  ENSG00000060656_8 (sequence is synthesized)
gtgcgcaaggagattgagtaccgcatggcgcgcgggccctgggctgaggtgcacgccgtcagcctgcagacctacaagctgtggcacctcgaccccgacacagagtatgagatcagcgtg

SEQ ID NO: 41595 - DNA, 120 bp, Artificial Sequence
  ENSG00000060656_9 (sequence is synthesized)
ctgctcacgcgtcccggagacggcggcactggccgccctgggccacccctcatcagccgcaccaaatgcgcagagcccatgagggcccccaaaggcctggcttttgctgagatccaggcc

SEQ ID NO: 41596 - DNA, 120 bp, Artificial Sequence
  ENSG00000060656_10 (sequence is synthesized)
cgtcagctgaccctgcagtgggaaccactgggctacaacgtgacgcgttgccacacctatactgtgtcgctgtgctatcactacaccctgggcagcagccacaaccagaccatccgagag

SEQ ID NO: 41597 - DNA, 120 bp, Artificial Sequence
  ENSG00000060656_11 (sequence is synthesized)
tgtgtgaagacagagcaaggtgtcagccgctacaccatcaagaacctgctgccctatcggaacgttcacgtgaggcttgtcctcactaaccctgaggggcgcaaagagggcaaggaggtc

SEQ ID NO: 41598 - DNA, 120 bp, Artificial Sequence
  ENSG00000060656_12 (sequence is synthesized)
actttccagacggatgaggatgtgcccagtgggattgcagccgagtccctgaccttcactccactggaggacatgatcttcctcaagtgggaggagccccaggagcccaatggtctcatc

SEQ ID NO: 41599 - DNA, 120 bp, Artificial Sequence
  ENSG00000060656_13 (sequence is synthesized)
acccagtatgagatcagctaccagagcatcgagtcatcagacccggcagtgaacgtgccaggcccacgacgtaccatctccaagctccgcaatgagacctaccatgtcttctccaacctg

SEQ ID NO: 41600 - DNA, 120 bp, Artificial Sequence
  ENSG00000060656_14 (sequence is synthesized)
cacccaggcaccacctacctgttctccgtgcgggcccgcacaggcaaaggcttcggccaggcggcactcactgagataaccactaacatctctgctcccagctttgattatgccgacatg

SEQ ID NO: 41601 - DNA, 120 bp, Artificial Sequence
  ENSG00000060656_15 (sequence is synthesized)
ccgtcacccctgggcgagtctgagaacaccatcaccgtgctgctgaggccggcacagggccgcggtgcgcccatcagtgtgtaccaggtgattgtggaggaggagcgggcgcggaggctg

SEQ ID NO: 41602 - DNA, 120 bp, Artificial Sequence
  ENSG00000060656_16 (sequence is synthesized)
cggcgggagccaggtggacaggactgcttcccagtgccattgaccttcgaggcggcgctggcccgaggcctggtgcactacttcggggccgaactggcggccagcagtctacctgaggcc

SEQ ID NO: 41603 - DNA, 120 bp, Artificial Sequence
  ENSG00000060656_17 (sequence is synthesized)
taccgaggcttctggaacccaccacttgagcctaggaaggcctatctcatctacttccaggcagcaagccacctgaagggggagacccggctgaattgcatccgcattgccaggaaagct

SEQ ID NO: 41604 - DNA, 120 bp, Artificial Sequence
  ENSG00000060656_18 (sequence is synthesized)
gcctgcaaggaaagcaagcggcccctggaggtgtcccagagatcggaggagatggggcttatcctgggcatctgtgcaggggggcttgctgtcctcatccttctcctgggtgccatcatt

SEQ ID NO: 41605 - DNA, 120 bp, Artificial Sequence
  ENSG00000060656_19 (sequence is synthesized)
gtcatcatccgcaaagggagagaccactatgcctactcctactacccgaagccggtgaacatgaccaaggccaccgtcaactaccgccaggagaagacacacatgatgagcgccgtggac

SEQ ID NO: 41606 - DNA, 120 bp, Artificial Sequence
  ENSG00000060656_20 (sequence is synthesized)
cgcagcttcacagaccagagcaccctgcaggaggacgagcggctgggcctgtccttcatggacacccatggctacagcacccggggagaccagcgcagcggtggggtcactgaggccagc

SEQ ID NO: 41607 - DNA, 120 bp, Artificial Sequence
  ENSG00000060656_21 (sequence is synthesized)
agcctcctggggggctccccgaggcgtccctgtggccggaagggctccccataccacacggggcagctgcaccctgcggtgcgtgtcgcagaccttctgcagcacatcaaccagatgaag

SEQ ID NO: 41608 - DNA, 120 bp, Artificial Sequence
  ENSG00000060656_22 (sequence is synthesized)
acggccgagggttacggcttcaagcaggagtatgagagcttctttgaaggctgggacgccacaaagaagaaagacaaggtcaagggcagccggcaggagccaatgcctgcctatgatcgg

SEQ ID NO: 41609 - DNA, 120 bp, Artificial Sequence
  ENSG00000060656_23 (sequence is synthesized)
caccgagtgaaactgcacccgatgctgggagaccccaatgccgactacattaatgccaactacatagatggttaccacaggtcaaaccacttcatagccactcaagggccgaagcctgag

SEQ ID NO: 41610 - DNA, 120 bp, Artificial Sequence
  ENSG00000060656_24 (sequence is synthesized)
atggtctatgacttctggcgtatggtgtggcaggagcactgttccagcatcgtcatgatcaccaagctggtcgaggtgggcagggtgaaatgctcacggtactggccggaggactcagac

SEQ ID NO: 41611 - DNA, 120 bp, Artificial Sequence
  ENSG00000060656_25 (sequence is synthesized)
acctacggggacatcaagattatgctggtgaagacagagaccctggctgagtatgtcgtgcgcacttttgccctggagcggagaggctactctgcccggcacgaggtccgccagttccac

SEQ ID NO: 41612 - DNA, 120 bp, Artificial Sequence
  ENSG00000060656_26 (sequence is synthesized)
ttcacagcgtggccagagcatggcgtcccctaccatgccacggggctgctggctttcatccggcgcgtgaaggcctccaccccacctgatgccgggcccattgtcatccactgcagcgcg

SEQ ID NO: 41613 - DNA, 120 bp, Artificial Sequence
  ENSG00000060656_27 (sequence is synthesized)
ggcaccggccgcacaggttgctatatcgtcctggatgtgatgctggacatggcagagtgtgagggcgtcgtggacatttacaactgtgtgaagactctctgctcccggcgtgtcaacatg

SEQ ID NO: 41614 - DNA, 120 bp, Artificial Sequence
  ENSG00000060656_28 (sequence is synthesized)
atccagactgaggagcagtacatcttcattcatgatgcaatcctggaggcctgcctgtgtggggagaccaccatccctgtcagtgagttcaaggccacctacaaggagatgatccgcatt

SEQ ID NO: 41615 - DNA, 120 bp, Artificial Sequence
  ENSG00000060656_29 (sequence is synthesized)
gatcctcagagtaattcctcccagctgcgggaagagttccagacgctgaactcggtcaccccgccgctggacgtggaggagtgcagcatcgccctgttgccccggaaccgcgacaagaac

SEQ ID NO: 41616 - DNA, 120 bp, Artificial Sequence
  ENSG00000060656_30 (sequence is synthesized)
cgcagcatggacgtcctgccgcccgaccgctgcctgcccttcctcatctccactgatggggactccaacaactacattaatgcagccctgactgacagctacacacggagtgcggccttc

SEQ ID NO: 41617 - DNA, 120 bp, Artificial Sequence
  ENSG00000060656_31 (sequence is synthesized)
atcgtgaccctgcacccgctgcagagcaccacgcccgacttctggcggctggtctacgattacgggtgcacctccatcgtcatgctcaaccagctgaaccagtccaactccgcctggccc

SEQ ID NO: 41618 - DNA, 120 bp, Artificial Sequence
  ENSG00000060656_32 (sequence is synthesized)
tgcctgcagtactggccagagccaggccggcagcaatatggcctcatggaggtggagtttatgtcgggcacagctgatgaagacttagtggctcgagtcttccgggtgcagaacatctct

SEQ ID NO: 41619 - DNA, 120 bp, Artificial Sequence
  ENSG00000060656_33 (sequence is synthesized)
cggttgcaggaggggcacctgctggtgcggcacttccagttcctgcgctggtctgcataccgggacacacctgactccaagaaggccttcttgcacctgctggctgaggtggacaagtgg

SEQ ID NO: 41620 - DNA, 120 bp, Artificial Sequence
  ENSG00000060656_34 (sequence is synthesized)
caggccgagagtggggatgggcgcaccatcgtgcactgcctaaacgggggaggacgcagcggcaccttctgcgcctgcgccacggtcctggagatgatccgctgccacaacttggtggac

SEQ ID NO: 41621 - DNA, 120 bp, Artificial Sequence
  ENSG00000060656_35 (sequence is synthesized)
gttttctttgctgccaaaaccctccggaactacaaacccaacatggtggagaccatggatcagtaccacttttgctacgatgtggccctggagtacttggaggggctggagtcaagatag

SEQ ID NO: 41622 - DNA, 120 bp, Artificial Sequence
  ENSG00000060656_36 (sequence is synthesized)
ggcgaggaagatcagtgcctcctgctctgcccaaacacactcccatggggcaagcactggagtggatgctgggctatcttgctcccccttccactgtgggcagggcctttcgcttgtccc

SEQ ID NO: 41623 - DNA, 120 bp, Artificial Sequence
  ENSG00000060656_37 (sequence is synthesized)
atgggcgggtggtgggccaaggaggagcttagcaagtctgcagcccagccccacctccatagggtcctgcaggcctgtgctgagaggcctggtgctgcctggcagagtgacaaaggctca

SEQ ID NO: 41624 - DNA, 120 bp, Artificial Sequence
  ENSG00000060656_38 (sequence is synthesized)
ggacggctggctctgggggactcaggccaagccccttggcaccatcctggcttttggcagggatgagtgaggccctgcagagagcatcccaggccaaggttcccactcagcctgccccct

SEQ ID NO: 41625 - DNA, 120 bp, Artificial Sequence
  ENSG00000060656_39 (sequence is synthesized)
ctgcatgtgggtagaggatgtactgggacttggcatttaggattccatctggcccagcccctgaaggtcctggggaagcaggtctcaattctgaatagccagtggggcacactgactgtc

SEQ ID NO: 41626 - DNA, 120 bp, Artificial Sequence
  ENSG00000060656_40 (sequence is synthesized)
ctccccaggggaactgcagcgccctcctccccactgccccctgcagcccctgagatattttgctcactatccctccccacttgcttccctgatatgtgctctgagcttccctgaaccagg

SEQ ID NO: 41627 - DNA, 120 bp, Artificial Sequence
  ENSG00000060656_41 (sequence is synthesized)
atctgcctattactgctgtgccccatggggggctccttccctgcctgacccactgttgcagaatgaagtcacctcgcccccctcttcctttaatcttcaggcctcactggcctgtcctgc

SEQ ID NO: 41628 - DNA, 120 bp, Artificial Sequence
  ENSG00000060656_42 (sequence is synthesized)
tcagcttgggccagtgacaatctgcaaggctgaacaacagcccctggggttgaggcccctgtggctcctggtcaggctgcccgttgtggggaggggcagtgttagagcagggctggtcat

SEQ ID NO: 41629 - DNA, 120 bp, Artificial Sequence
  ENSG00000060656_43 (sequence is synthesized)
accctctggagttcagaggaagaggtaggaccagtgcttttttgtttcttttgttatttttggttgggtgggtgggaaggtctctttaaaatggggcaggccacacccccattccgtgcc

SEQ ID NO: 41630 - DNA, 120 bp, Artificial Sequence
  ENSG00000060656_44 (sequence is synthesized)
tcaatttccccatctgtaaactgtagatatgactactgacctacctcgcagggggctgtggggaggcataagctgatgtttgtaaagcgctttgtaaataaacgtgctctctgaatgcca

SEQ ID NO: 41631 - DNA, 120 bp, Artificial Sequence
  ENSG00000060656_45 (sequence is synthesized)
gatctcatccccctttcctaaggcactgcaggtgcctcccctctaggccccgctctcaagggtccccccaggcctgccttcgggtggggtgtcccttgatgccatcagcacaagacaaag

SEQ ID NO: 41632 - DNA, 120 bp, Artificial Sequence
  ENSG00000060656_46 (sequence is synthesized)
ccctgaacaggcccaagaaacgctgtctgaggttcccaccctggggagggagaggtcggggcttcagcaacgctgagacccccatctgtgcctccaggagacccggctgaattgcatccg

SEQ ID NO: 41633 - DNA, 120 bp, Artificial Sequence
  ENSG00000060656_47 (sequence is synthesized)
gggctcaggaggcctcctggcctggggtgtggtgctggatggtgctggatgtgctgacctggggtggagaccttgtctcagggacaggcaccctctgcctgcatccccagggccgaagcc

SEQ ID NO: 41634 - DNA, 120 bp, Artificial Sequence
  ENSG00000060656_48 (sequence is synthesized)
gggggagctgctgaaggtgagtctggagtgagtgggtgggccagggttcgtgggagccacagggcaagtgtggagcccttggggtgggcatggctgtggggtgagccccggccaggctct

SEQ ID NO: 41635 - DNA, 120 bp, Artificial Sequence
  ENSG00000060656_49 (sequence is synthesized)
atttggggtgtgtgtggggctatttttgatgaggtggtgggggagggcttctttgaggaggtgataagtaaagaccagaaggaagtgagggagacagccatatagacatttgggaaattt

SEQ ID NO: 41636 - DNA, 120 bp, Artificial Sequence
  ENSG00000060656_50 (sequence is synthesized)
ggcctaggcagccaaaatagcagatgccgaagcgcggaggcagggagtaagctcggccagcctctgccttgagctcagcctcatgcccaagctcccctcgccatacctttggaaactttt

SEQ ID NO: 41637 - DNA, 120 bp, Artificial Sequence
  ENSG00000060656_51 (sequence is synthesized)
gctgtttagttctggggggtcatgggcttggtccccagaggcctgggcccaccctgtcaacccaggcctcagtgtgccaaccaacatcagaaatggcccactggaggcagcctggtcctg

SEQ ID NO: 41638 - DNA, 120 bp, Artificial Sequence
  ENSG00000060656_52 (sequence is synthesized)
tggggcacaaccgtccaactcagggtgggcagtgcgggaagacagcctggggcagaggctcagcccaggccaggggccgggaacagggccctgctgagttccggtttccctgcagagcta

SEQ ID NO: 41639 - DNA, 120 bp, Artificial Sequence
  ENSG00000060688_0 (sequence is synthesized)
gcggtcagtggcggcgctgaagagaccggttgccgccatgatagaacagcagaagcgtaagggcccagagttgccgctggttccagtcaagcggcagcggcatgagttgctgttgggagc

SEQ ID NO: 41640 - DNA, 120 bp, Artificial Sequence
  ENSG00000060688_1 (sequence is synthesized)
ggggtctggcccaggagccgggcagcagcaggcgacgccgggagccttgctgcaagcgggacctccaagatgttcctcccttcaagccccaatcatgctgctctctggacatgaagggga

SEQ ID NO: 41641 - DNA, 120 bp, Artificial Sequence
  ENSG00000060688_2 (sequence is synthesized)
agtctactgctgcaagttccaccccaacggatccaccttagcatctgcaggatttgaccgactgatattactgtggaatgtctatggtgactgtgataactatgccacactgaagggaca

SEQ ID NO: 41642 - DNA, 120 bp, Artificial Sequence
  ENSG00000060688_3 (sequence is synthesized)
cagtggagcagtgatggaattgcattacaacacagatggcagtatgcttttctcagcatccacagataaaaccgtggctgtgtgggatagtgaaacaggtgagagggttaaaaggctaaa

SEQ ID NO: 41643 - DNA, 120 bp, Artificial Sequence
  ENSG00000060688_4 (sequence is synthesized)
gggacatacttcctttgtgaattcctgttatccagccaggagaggccctcagcttgtctgcactggcagtgacgatggcacagttaagctttgggacatccggaagaaagcagccatcca

SEQ ID NO: 41644 - DNA, 120 bp, Artificial Sequence
  ENSG00000060688_5 (sequence is synthesized)
gacatttcagaacacgtaccaggtgttagctgtgaccttcaatgacacaagtgatcagattatttctggtggaatagacaatgatatcaaggtctgggacctgcgccagaacaagctaac

SEQ ID NO: 41645 - DNA, 120 bp, Artificial Sequence
  ENSG00000060688_6 (sequence is synthesized)
ggctcttatcttttgtccaatgcaatggacaatacagttcgtgtctgggatgtccggccatttgcccccaaagagagatgtgtaaagatatttcaaggaaatgtgcacaactttgaaaag

SEQ ID NO: 41646 - DNA, 120 bp, Artificial Sequence
  ENSG00000060688_7 (sequence is synthesized)
aaccttctgagatgttcttggtcacctgatggaagcaaaatagcagctggctcagccgacaggtttgtttatgtgtgggataccacaagcaggagaatattgtataagctgcccggccat

SEQ ID NO: 41647 - DNA, 120 bp, Artificial Sequence
  ENSG00000060688_8 (sequence is synthesized)
gctggctccatcaatgaagtggctttccaccctgatgagcccatcattatctcagcatcgagtgacaagagactgtatatgggagagattcagtgaagatatggactggaagactccaag

SEQ ID NO: 41648 - DNA, 120 bp, Artificial Sequence
  ENSG00000060688_9 (sequence is synthesized)
gccgcttgtctttgagacctcagactgcataagtgatgccaaatgttggatgtccaggctagcaccctcccttcagatgaccattgctagcaagaaacaggaggcggtggccatattcca

SEQ ID NO: 41649 - DNA, 120 bp, Artificial Sequence
  ENSG00000060688_10 (sequence is synthesized)
atattccaaaaaccacttctgtcccatttcaccaggatgactaaggcaagctccctgtggcctctaaaaaccacctgccagatttcagggactgtttttttttttctttttcttttttcc

SEQ ID NO: 41650 - DNA, 120 bp, Artificial Sequence
  ENSG00000060688_11 (sequence is synthesized)
aatgcaggcccaatgtgacaaatttgttggttgggattttttttttttttttgtaactggcttgtatgatattttctttctgtatttctctatatcattttgtattaaaagccaaataga

SEQ ID NO: 41651 - DNA, 120 bp, Artificial Sequence
  ENSG00000060688_12 (sequence is synthesized)
tgcctttttacaagagccatgtggattggatttattgctgtcttttttttgaggcttgattgctataaatcagaatagagcatgatgtggccacagaatacaattcatttaaacttccaa

SEQ ID NO: 41652 - DNA, 120 bp, Artificial Sequence
  ENSG00000060688_13 (sequence is synthesized)
catagatagatagatagccaggaatatgtcggtgcttttcgaagctcttattccccaaattgtctccttccccagcccttcctcccaaggtttttggtttgtatttttgccccaactgtt

SEQ ID NO: 41653 - DNA, 120 bp, Artificial Sequence
  ENSG00000060688_14 (sequence is synthesized)
tttccttgcccccaggaaccagaggctaataatgtcctttcctttaaatgttttcaagggaagttccaagttaggcaaaataaatgtaagtcctttgggctcatccttcagagagccacc

SEQ ID NO: 41654 - DNA, 120 bp, Artificial Sequence
  ENSG00000060688_15 (sequence is synthesized)
agacaggtaaaaataaacaatttttattgtttattctttgacaataagaaataggccccctttgcttcctcagtactaggaaaccatactgggaatatgggttatcttcaaagctgttgc

SEQ ID NO: 41655 - DNA, 120 bp, Artificial Sequence
  ENSG00000060688_16 (sequence is synthesized)
tgagcaggagacagagccagcacaagttaaaacactacaaagcccttttactgggactcagggagttttttgtttcctttttcctcattaagggtttgccgggttactataaacttttga

SEQ ID NO: 41656 - DNA, 120 bp, Artificial Sequence
  ENSG00000060688_17 (sequence is synthesized)
ttagttttgagagttccaacagttgattctgacagattttgctggttaatttgctgctttcgtggagggacaagcttttgtcattgtttattatactattttcactgacataccctctat

SEQ ID NO: 41657 - DNA, 120 bp, Artificial Sequence
  ENSG00000060688_18 (sequence is synthesized)
ttttttaaatgtgggttgcagcctactaatgaattagtctctacggtttgaaaaaattgtctgatatccttgttgttctaaaaaatatatgaactaagtagttaggggaattccattcta

SEQ ID NO: 41658 - DNA, 120 bp, Artificial Sequence
  ENSG00000060688_19 (sequence is synthesized)
agagtatgttgatttaactctgttcacttcaacaaagaagtctgaaaatataaccgaagttttgtttcaccagccttcaaatgtcttggcaaaattgagcacactgcttaccatgtgtgt

SEQ ID NO: 41659 - DNA, 120 bp, Artificial Sequence
  ENSG00000060688_20 (sequence is synthesized)
tattaggatatccaggagttagtgatataggatcccaattatagatgtgttcatgtccacaaagtcctcgtacttaagggatatttgtactgtgcaattgcttcttagaatgatgttgct

SEQ ID NO: 41660 - DNA, 120 bp, Artificial Sequence
  ENSG00000060688_21 (sequence is synthesized)
agggaaattaggaaagggcgatgtaagtttggcttttataagttcattgtcacagtagttcctggtatttagtttgtcacattgaagctttgctggatgtgactaagctggcagagaaat

SEQ ID NO: 41661 - DNA, 120 bp, Artificial Sequence
  ENSG00000060688_22 (sequence is synthesized)
cttgcaaaatatctttttgaaattagtatcacacccaactgcattctgttgcaaattaccaacattgtgtgtgacatttttccttcctgccccctcagctagccccagttattgggattt

SEQ ID NO: 41662 - DNA, 120 bp, Artificial Sequence
  ENSG00000060688_23 (sequence is synthesized)
agatgtgttttcctgcttgaaaaagaaaagagccttaacaggtagcagtatgtcaagttggactttgcccaccgaggaaacagcatctgccattgattgacatgatactaatttcagctg

SEQ ID NO: 41663 - DNA, 120 bp, Artificial Sequence
  ENSG00000060688_24 (sequence is synthesized)
tgaatctggaataatttttcctgccagatagtgatttttttttttaaatcttgggtgccacagaaggtatcactctatgttggcaacataacaggctgcatggctaatatgctaaaattg

SEQ ID NO: 41664 - DNA, 120 bp, Artificial Sequence
  ENSG00000060688_25 (sequence is synthesized)
gggcatgaacatgctgaatgatcttgggtgtagaacttggagtccatggggtaaatacagaagccattattttactagttggaaagtgagttgttctggtttgagaatgtcttcctcata

SEQ ID NO: 41665 - DNA, 120 bp, Artificial Sequence
  ENSG00000060688_26 (sequence is synthesized)
gaggcaaatctccagctaatttaccaaggcacttagcaatctagacataacaggttaatggcagtaatgaggagagaaataacttttattttcccaaaggtataaggtcctcttaattca

SEQ ID NO: 41666 - DNA, 120 bp, Artificial Sequence
  ENSG00000060688_27 (sequence is synthesized)
ccccattgctcaagaggtgagtccatgtcttattcaaactctgtgttcctagtttctaaaagccagaacatggttcagtaaatgtaaggtaagtaaataattgttgcttccatttccttt

SEQ ID NO: 41667 - DNA, 120 bp, Artificial Sequence
  ENSG00000060688_28 (sequence is synthesized)
aaaaagccatgcctctgtcctacccccagctctaagaggacttacccttgcttttcatgataccttacaggtttgtttatgtgtgggataccacaagcaggagaatattgtataagctgc

SEQ ID NO: 41668 - DNA, 120 bp, Artificial Sequence
  ENSG00000060688_29 (sequence is synthesized)
attcagtgactggcctgagtttaagttctgaaggctcttatcttttgtccaatgcaatggacaatacaggtaactttggaaaggaaatctctcccaggatccaaggaaaaagtcaaagat

SEQ ID NO: 41669 - DNA, 120 bp, Artificial Sequence
  ENSG00000060688_30 (sequence is synthesized)
tgctcacagattccatcagacgattagaatgtgttgtaatggggaaagctttaggtgagatagtcaagaatctaggactgtagtctcagatctctgtcttgtccctgaacaactttgcac

SEQ ID NO: 41670 - DNA, 120 bp, Artificial Sequence
  ENSG00000060688_31 (sequence is synthesized)
tgagccactgtgcccagctgcaaacagtctttatgtgggtatcaatgtcagtctcaccattgctcataagtggtgagagtaagagcaatgctccattttcttcttgatctcaaagggaag

SEQ ID NO: 41671 - DNA, 120 bp, Artificial Sequence
  ENSG00000060709_0 (sequence is synthesized)
atgcaggccttcccacaagggcccggcagcatgacaaggtgaaggcagagtatgtgcatctcaaccatccgctcaccctcgtgaccagagagcgcgatttggccgtgaaggagaaacacc

SEQ ID NO: 41672 - DNA, 120 bp, Artificial Sequence
  ENSG00000060709_1 (sequence is synthesized)
agctccaagccaagctggagaacctagaacaggtcctgaagcatatgcgagaggcggctgaacggcggcagcagctgcagttggagcatgaccaggccctggctgttctcagtgccaagc

SEQ ID NO: 41673 - DNA, 120 bp, Artificial Sequence
  ENSG00000060709_2 (sequence is synthesized)
agcaggaaattgaccttctgcagaagtccaaggttcgagagctggaagagaaatgccggactcaaagtgagcagttcaacctgctgtcccgggacctggagaagttccggcagcacgctg

SEQ ID NO: 41674 - DNA, 120 bp, Artificial Sequence
  ENSG00000060709_3 (sequence is synthesized)
gcaagattgacctgctgggtggcagcgcggtggcccccctggacatctccacggcccccagcaagcctttcccacagttcatgaatggcctagccacctccctcggcaaaggtcaggaga

SEQ ID NO: 41675 - DNA, 120 bp, Artificial Sequence
  ENSG00000060709_4 (sequence is synthesized)
gcgctattggaggcagctctgcgatcggtgaatatatccggccccttccgcagcctggtgacaggccggagcctctgtccgccaagcccaccttcctgtcgagatccggtagcgcaagat

SEQ ID NO: 41676 - DNA, 120 bp, Artificial Sequence
  ENSG00000060709_5 (sequence is synthesized)
gcagatctgagtcagacatggagaatgaacggaattccaatacctccaagcagagatactcggggaaggtccacctctgtgttgcccgctatagttacaaccccttcgatggaccgaacg

SEQ ID NO: 41677 - DNA, 120 bp, Artificial Sequence
  ENSG00000060709_6 (sequence is synthesized)
agaaccccgaagctgagctgcccctcacggcgggaaaatacctctacgtctatggagacatggatgaggatgggttctatgaaggagagctcctcgatggccagaggggtctggtgccct

SEQ ID NO: 41678 - DNA, 120 bp, Artificial Sequence
  ENSG00000060709_7 (sequence is synthesized)
ccaacttcgtggactttgtgcaggacaacgagtcgcggttggcaagcacgctggggaacgagcaggatcagaacttcatcaaccattccggcatcggcctggagggagagcacatcctgg

SEQ ID NO: 41679 - DNA, 120 bp, Artificial Sequence
  ENSG00000060709_8 (sequence is synthesized)
acctccactccccaacccacatagatgcgggcatcaccgacaacagtgccgggaccctggacgtgaacatcgacgacatcggagaagacatcgtgccttaccctagaaaaatcaccctca

SEQ ID NO: 41680 - DNA, 120 bp, Artificial Sequence
  ENSG00000060709_9 (sequence is synthesized)
tcaaacaactcgccaaaagtgttattgtgggctgggagcccccggcggtgccaccaggatggggaacggtgagcagctacaacgtcctggtggacaaggagacacgcatgaacctcacgc

SEQ ID NO: 41681 - DNA, 120 bp, Artificial Sequence
  ENSG00000060709_10 (sequence is synthesized)
tggggagcagaactaaagccctcatcgagaagctcaacatggcagcctgcacctaccgcatctccgtgcagtgcgtcaccagcaggggcagctcggatgagctgcagtgcacgctgctgg

SEQ ID NO: 41682 - DNA, 120 bp, Artificial Sequence
  ENSG00000060709_11 (sequence is synthesized)
tgggcaaggacgtggtggtggccccctcccacctgcgggtggacaacatcacgcagatctccgcccagctctcctggctacccaccaacagcaactacagccacgtcatcttcctcaacg

SEQ ID NO: 41683 - DNA, 120 bp, Artificial Sequence
  ENSG00000060709_12 (sequence is synthesized)
aggaggagttcgacatcgtcaaggccgccaggtacaagtaccagttcttcaatctcaggcccaacatggcctataaggtgaaggttctggccaaaccccaccagatgccgtggcagctcc

SEQ ID NO: 41684 - DNA, 120 bp, Artificial Sequence
  ENSG00000060709_13 (sequence is synthesized)
cgctggagcaaagggagaagaaggaggcctttgtggagttctccacgttgcctgcaggacccccagcacccccacaagatgttaccgtccaggctggggtgacccccgccaccatccggg

SEQ ID NO: 41685 - DNA, 120 bp, Artificial Sequence
  ENSG00000060709_14 (sequence is synthesized)
tctcctggagaccacctgtgctgacgcccaccgggctgtccaatggcgcaaacgttaccggctacggcgtgtatgccaaagggcagagggtggctgaagtcatcttccccacggcagaca

SEQ ID NO: 41686 - DNA, 120 bp, Artificial Sequence
  ENSG00000060709_15 (sequence is synthesized)
gcacggccgtggagcttgtgcggctgcggagcctggaggccaagggcgtgaccgtgcggaccctctccgcccagggcgagtccgtggactctgcagttgctgccgttccccccgagctcc

SEQ ID NO: 41687 - DNA, 120 bp, Artificial Sequence
  ENSG00000060709_16 (sequence is synthesized)
tggtgcctcctaccccccacccgagacctgcaccccaatcaaagccattagcaagttctggagtccccgaaaccaaagacgagcacctgggtccccacgccaggatggatgaggcctggg

SEQ ID NO: 41688 - DNA, 120 bp, Artificial Sequence
  ENSG00000060709_17 (sequence is synthesized)
agcagagccgtgcacctggccctgtgcatgggcacatgctggagccgcccgtgggccccggaaggcggtcgccctcacccagccgcatcctgccacagccacagggcaccccggtgtcca

SEQ ID NO: 41689 - DNA, 120 bp, Artificial Sequence
  ENSG00000060709_18 (sequence is synthesized)
ccaccgtcgccaaggccatggcccgggaggccgcgcagagggtggccgagagcagcaggttagagaaaaggagcgtcttcctagagagaagcagcgcggggcagtacgccgcctcagacg

SEQ ID NO: 41690 - DNA, 120 bp, Artificial Sequence
  ENSG00000060709_19 (sequence is synthesized)
aggaggacgcctatgactctccagacttcaagaggaggggcgcctcggtggacgacttcctgaaaggctctgaacttggcaagcagccgcactgttgccatggagacgagtaccacacag

SEQ ID NO: 41691 - DNA, 120 bp, Artificial Sequence
  ENSG00000060709_20 (sequence is synthesized)
agagcagccgggggtctgacctctcagacatcatggaggaggacgaggaggagctgtattctgaaatgcagctggaagatgggggaaggaggcggcccagcggcacgtcccacaatgccc

SEQ ID NO: 41692 - DNA, 120 bp, Artificial Sequence
  ENSG00000060709_21 (sequence is synthesized)
tcaagattttagggaacccagcctctgcaggacgggtggatcacatgggccggaggtttccccgtggcagcgctggtcctcagaggtcccggcccgtgacagtcccatccatcgacgatt

SEQ ID NO: 41693 - DNA, 120 bp, Artificial Sequence
  ENSG00000060709_22 (sequence is synthesized)
acgggcgagaccgcctttctccagacttctatgaagagtcagaaactgaccctggtgccgaagagctcccggcccggatctttgtggctctctttgactacgacccgctcaccatgtccc

SEQ ID NO: 41694 - DNA, 120 bp, Artificial Sequence
  ENSG00000060709_23 (sequence is synthesized)
caaacccagatgctgcagaggaggagcttccctttaaagaaggccagatcatcaaggtttatggtgataaagacgctgatggattctaccgtggggaaacctgtgcccggcttggcctta

SEQ ID NO: 41695 - DNA, 120 bp, Artificial Sequence
  ENSG00000060709_24 (sequence is synthesized)
ttccttgtaacatggtctctgagatacaagcagatgatgaggagatgatggatcagcttcttagacagggctttctccctctgaatacacctgtggagaaaatagagagaagcaggagaa

SEQ ID NO: 41696 - DNA, 120 bp, Artificial Sequence
  ENSG00000060709_25 (sequence is synthesized)
gtggcaggcgtcattcggtatcgacgcggagaatggtggccctgtatgactacgaccccagagaaagctcgcccaacgtcgatgtcgaggccgaacttacattttgcacaggagatatta

SEQ ID NO: 41697 - DNA, 120 bp, Artificial Sequence
  ENSG00000060709_26 (sequence is synthesized)
tcttggaagaagtgcctgatgacgtagaagtctatctttctgatgctccatcccactactctcaagatacgccaatgcgctcaaaggcaaaaaggaagaagagtgttcatttcacacctt

SEQ ID NO: 41698 - DNA, 120 bp, Artificial Sequence
  ENSG00000060709_27 (sequence is synthesized)
aatcaggcaatgtagccttcacgtaagtgagcaactgaagataccgataaagataccaacttaagctaccttaaccgggccagtgtggtagacttaaggcttcattgtggggttaaaaaa

SEQ ID NO: 41699 - DNA, 120 bp, Artificial Sequence
  ENSG00000060709_28 (sequence is synthesized)
aaaaaaagatacaaagaaatatgtctcaaaaaactattggacctaaataattagaatattacttggtctcagttgtaaagcaactgaatttatagtgaagcaaatcatctttaataatca

SEQ ID NO: 41700 - DNA, 120 bp, Artificial Sequence
  ENSG00000060709_29 (sequence is synthesized)
tttcctactatttgcattaagaatatttgaaaggccaacattgggaacatatttcttaacaagctaactgtgtgtttacatagagagagctgcatattgcattgttagccactcttggaa

SEQ ID NO: 41701 - DNA, 120 bp, Artificial Sequence
  ENSG00000060709_30 (sequence is synthesized)
aaagcacaacctaacaaacatgtttactataggaagctttactttagaaacttaacccaaggtcaagcagatgagtagtgaacacaggtgatcgagtgttggctctgaacactccaaaca

SEQ ID NO: 41702 - DNA, 120 bp, Artificial Sequence
  ENSG00000060709_31 (sequence is synthesized)
ctggctcgagtggccagaacgtgttttccttaagtaaccctgcctctaccttacgagagagctatgctcctcctcaaagcacaatcatcctgtgacagaagttgctgcaacacgcgtttg

SEQ ID NO: 41703 - DNA, 120 bp, Artificial Sequence
  ENSG00000060709_32 (sequence is synthesized)
ttgttggtataccaatgcaatactaagttgatgaagcacgcagctcaaatgatcacattagatggaatagatggtatcttcaggtgtactttgggatgctttactaggtgttttccatta

SEQ ID NO: 41704 - DNA, 120 bp, Artificial Sequence
  ENSG00000060709_33 (sequence is synthesized)
gaattagaccttgattttaaatccaagcaagcttgaagccccttggcttacagcatttgcctgctgaatactaaacactcacatggcaagagttgctctggagaggtagggccagaggaa

SEQ ID NO: 41705 - DNA, 120 bp, Artificial Sequence
  ENSG00000060709_34 (sequence is synthesized)
tgctgctgcactgccaactcaggcacatgcttagctgtaaagggaagcgaggtgaagtcgtcctgcagcgtattagagtaaaagtctacccctctgaagcactattaagcgcttaacgta

SEQ ID NO: 41706 - DNA, 120 bp, Artificial Sequence
  ENSG00000060709_35 (sequence is synthesized)
tatttaaatactaccatgtgctatctactgaggaagattcatgttcaattatttggaaataatgcaagcatccactaagggcctttaagctttctttgattataattaaggttcatttta

SEQ ID NO: 41707 - DNA, 120 bp, Artificial Sequence
  ENSG00000060709_36 (sequence is synthesized)
gtttttttttttctttcaaccagtgtgccatctccaatatttctatagtataccaaccaccccaggaatgcactttaacaatatcaggattttatataaccaaatagtttcaaatacaac

SEQ ID NO: 41708 - DNA, 120 bp, Artificial Sequence
  ENSG00000060709_37 (sequence is synthesized)
aaaattccctttatgaactttcgctttttaagactactgatgggtactcggccaactttactatcaacctaatttcagatcatgtctcccctgcccttagtcttcatttatgaagtgaat

SEQ ID NO: 41709 - DNA, 120 bp, Artificial Sequence
  ENSG00000060709_38 (sequence is synthesized)
tattacctgccttagctttgccaaagcaacggccaccccgcactccctcgagacagagaaacggaacccacacatttatgtctggggcctctctctggcgtgctgtgggagaggaccttt

SEQ ID NO: 41710 - DNA, 120 bp, Artificial Sequence
  ENSG00000060709_39 (sequence is synthesized)
gcttctcatggcatacttcaacaactgaaagaacaaatgaacccccctgacctttcctggtgggaaacggggacagtacgatgttaccaagtgaattctgttgttggcgctcacacactc

SEQ ID NO: 41711 - DNA, 120 bp, Artificial Sequence
  ENSG00000060709_40 (sequence is synthesized)
aataaactgtaacactgtacctactaggttcctcctgagggttcaggtacagcaaggagagctccatcccccacagtccatctccattcggggtcacctacgtcatctatgggttctggt

SEQ ID NO: 41712 - DNA, 120 bp, Artificial Sequence
  ENSG00000060709_41 (sequence is synthesized)
agtcctgggagaggcagggaaatgtcctcgaaaaagaaaaaggggctgctttccaaaggcaagaaactgctgaaaaagctgggtgcagtgaaatgattcatgtgcttccggacaactgcc

SEQ ID NO: 41713 - DNA, 120 bp, Artificial Sequence
  ENSG00000060709_42 (sequence is synthesized)
aaatctatgtaattttctttaattccaaactagggctttcatgactcaagtacttcctaaaaaaacccaatcttctcccctgacaccagtagagaaatgcacttttgcactaccaaccac

SEQ ID NO: 41714 - DNA, 120 bp, Artificial Sequence
  ENSG00000060709_43 (sequence is synthesized)
tttaaaccaaccacgagaacaaagaggagcggttgctctctgtcaccgctggcagtctgctctcattgtccaagctctgatttgggaggtgggaggggacgtcttattaacaaacggggg

SEQ ID NO: 41715 - DNA, 120 bp, Artificial Sequence
  ENSG00000060709_44 (sequence is synthesized)
cgcatagctatcacctgtagctccctccctacctgtaattccagtctttgtgcatttgtcatctgcccttaaaggaatgattttcaacctttctcccttctcaaaatgcttgcctcataa

SEQ ID NO: 41716 - DNA, 120 bp, Artificial Sequence
  ENSG00000060709_45 (sequence is synthesized)
tgcataactttcactttgactctggtcttgaaattcctagtttaattcgccttgatgttctgccttataaatgcacaatgatttgtactgtctaataaaaacagtgtatactttgtatgt

SEQ ID NO: 41717 - DNA, 120 bp, Artificial Sequence
  ENSG00000060709_46 (sequence is synthesized)
gtcgtgcattcagtggtcttcatcctgacacagtggtttgagatcaagttgtacaggctgtgcattttaagatactagtttcagtctttcaaagccagccaggctacacacagaaaatgt

SEQ ID NO: 41718 - DNA, 120 bp, Artificial Sequence
  ENSG00000060709_47 (sequence is synthesized)
ttactcaatcattcaaaaaagagaaaaggagagaaagtaactttgtttggtaaagcaccagtactccaaccttccagaaagccgattatcttcattgcttttaatgttctattctgtggc

SEQ ID NO: 41719 - DNA, 120 bp, Artificial Sequence
  ENSG00000060709_48 (sequence is synthesized)
atatggttttctgttactttcgttgtcaaaatgccatacccaaatacacagcaatgaatggcacacaagtaatccacataatgcataagccacaccaaaaccagactcaatttaaatctg

SEQ ID NO: 41720 - DNA, 120 bp, Artificial Sequence
  ENSG00000060709_49 (sequence is synthesized)
ctccaaatgagtccatacccatcttcatcattggcatttgaacaaaagacttacttacaaagttgctggcagatgtatttgatggttactcttttgtaattcttgtccacttgtaaattg

SEQ ID NO: 41721 - DNA, 120 bp, Artificial Sequence
  ENSG00000060709_50 (sequence is synthesized)
tttttactctttatacatacttttcagactgcctttcttttgtaatttatggacggtttataaatgaatgacaaagctttccccattgtgtcttcaaaaacgctattataaattgtaata

SEQ ID NO: 41722 - DNA, 120 bp, Artificial Sequence
  ENSG00000060709_51 (sequence is synthesized)
taatagtatgtggtagatttattattaaaggaaatccatgtgtggttaagctctgtgtgggtgtgtgcatgtgcacagttagtgtaaaatattttctagaaataaaatttgttattttat

SEQ ID NO: 41723 - DNA, 120 bp, Artificial Sequence
  ENSG00000060709_52 (sequence is synthesized)
gtacactgcagttgtctccgaggtgaacctccggagccttggcacagctcgcttctaaagcttggaaatgacccgccacacctgaagcctgcaggtgctgaggccacattcgatcagacc

SEQ ID NO: 41724 - DNA, 120 bp, Artificial Sequence
  ENSG00000060709_53 (sequence is synthesized)
ggaagaggacggagagtgctgtgggctgctacacaagcagggtgcagggccgtcccccagggccaggacggggctggccagagagcccaggcccggcaggccctacaggggcgacgaggc

SEQ ID NO: 41725 - DNA, 120 bp, Artificial Sequence
  ENSG00000060709_54 (sequence is synthesized)
ccctcggggctcctggttcccggtgaagcacaggggctcgggggccgtcccccacgtggaggacttccttctggaagacaggggctgtcggttcagccgctcggccacccggagcccgga

SEQ ID NO: 41726 - DNA, 120 bp, Artificial Sequence
  ENSG00000060709_55 (sequence is synthesized)
cagcggcctggactgtgggagtgaagaggacgagtcgcggtttggcttcggaaacaccgtggccgcgtgcagcccaggccctggtcactgtccctgcaggaggggcccgaggccgctgct

SEQ ID NO: 41727 - DNA, 120 bp, Artificial Sequence
  ENSG00000060709_56 (sequence is synthesized)
ggcccggcggcggacgctgacccggcagagcagcgtggaggaggactttggggagcaggtgggccctggtggcctcctcaggaacgacgacccccagcccggcccggagaggccgccccc

SEQ ID NO: 41728 - DNA, 120 bp, Artificial Sequence
  ENSG00000060709_57 (sequence is synthesized)
caggaagcacggctggggcgagcccaccgagcaccaagattttcggggtgtctggaagaaaagcataaccatgcccgacagtagggcagctgccccccacgcaaagccacctcccagagt

SEQ ID NO: 41729 - DNA, 120 bp, Artificial Sequence
  ENSG00000060709_58 (sequence is synthesized)
ctttgactaacatacaaacattttaaacgtgggctgtgcttagctttccattttgcagagtgtgtgggtcctgggaaggctccccagcatgggccatcctgcccctggcacggccgcagc

SEQ ID NO: 41730 - DNA, 120 bp, Artificial Sequence
  ENSG00000060709_59 (sequence is synthesized)
ccctgccccagcctgtgctctctgaggaggcccccgaggcccagccctgtctcaatgctttcacatgcagtgtggccaggtacagagtgtggctgtggttatgtgcttctccaattcatc

SEQ ID NO: 41731 - DNA, 120 bp, Artificial Sequence
  ENSG00000060709_60 (sequence is synthesized)
tgacctagacctcccgatctatttccacctacatgttaagacacaaaaaagacaaaagtcaaggaaccgctgccatcctcactgctttccaaagctgcatttcccgtgcacgctcctcag

SEQ ID NO: 41732 - DNA, 120 bp, Artificial Sequence
  ENSG00000060709_61 (sequence is synthesized)
gcaggtattctagagaatagcatcttccctgcccggcgtgcttggcgatgcttttcccgtgagtggacgcggccatgagtcctgggcctgctctgacctgcctctgcttcctgaactgca

SEQ ID NO: 41733 - DNA, 120 bp, Artificial Sequence
  ENSG00000060709_62 (sequence is synthesized)
cccatgctttcacagttgacgatgacgttcgttagcactcttggtttcaagcgacagaaaacccaaacaggaaattgtttttgtgcccatcactgaaaatgtggcttcagacatggctag

SEQ ID NO: 41734 - DNA, 120 bp, Artificial Sequence
  ENSG00000060709_63 (sequence is synthesized)
atccagggctcaaatctgctggcctcagacccagtagaatccaaggcctccccgacatcaccaggacttggctgctctctgccctcctctggatcagcttcagccttggtttccctgtgg

SEQ ID NO: 41735 - DNA, 120 bp, Artificial Sequence
  ENSG00000060709_64 (sequence is synthesized)
agacccccagccactccagccctgaccctcctggtggcaaagtggctgcagcctcacctcctcccaagccaaagtccaatagaaaggggcttccctctcccgcagcattctcaggcagag

SEQ ID NO: 41736 - DNA, 120 bp, Artificial Sequence
  ENSG00000060709_65 (sequence is synthesized)
gcccattgccctccgtaggccccacaccacccaggtcaccagtcgctgagggttcagactgtgcttggcacaggggaggtccagaccccagccagtccagaggttcttcccaggagagga

SEQ ID NO: 41737 - DNA, 120 bp, Artificial Sequence
  ENSG00000060709_66 (sequence is synthesized)
gctcctgacgctggaggaagaggcctgaggaacaggcctgttacccagaggatccgctatccaggaggctcaggttgaggctaagaaggagcatgaaggcgcagtgcggctgctagagtc

SEQ ID NO: 41738 - DNA, 120 bp, Artificial Sequence
  ENSG00000060709_67 (sequence is synthesized)
attgaaccgaggcctgaagaagacctgtttccacgcctttccccatgtgccacgttctcctcacctatccaggagtgaatcatcaccttccctgcaatctgctcagattacaaacccgga

SEQ ID NO: 41739 - DNA, 120 bp, Artificial Sequence
  ENSG00000060709_68 (sequence is synthesized)
ggaaaggctggagcacttgttctctgggtgaaggacccatacccccactggtttttgagatcggcattcagcgctgtcttatggcagccacagccccaggtggccccagagcccttgaca

SEQ ID NO: 41740 - DNA, 120 bp, Artificial Sequence
  ENSG00000060709_69 (sequence is synthesized)
tgtggccacctggggctgagtgtgactgaggccctgaatttttacttctataaaattagttccagattagtttacattctaattagtttacatgtaaacagccacacgtggctggtggcc

SEQ ID NO: 41741 - DNA, 120 bp, Artificial Sequence
  ENSG00000060709_70 (sequence is synthesized)
accagtgctgacgcccagctctggatgaccacacctgctacaagagatgacttttctagagaagagtagaaacacagcggcagaaacacagctctgcacttccgagggcctcccactcct

SEQ ID NO: 41742 - DNA, 120 bp, Artificial Sequence
  ENSG00000060709_71 (sequence is synthesized)
tctgatgagactgcagaggaagtctgtttggccaagcatgctattaacacgttttcctgcttgttttgttttttaacagagcaaacaggtctgtttctattaaaatttaaaaagcgttaa

SEQ ID NO: 41743 - DNA, 120 bp, Artificial Sequence
  ENSG00000060709_72 (sequence is synthesized)
gctttgggagaccgctggggaaatttcccacttcctctcctgagaccaggaactcagcagagaaactttgtggaaaatgaactgaaggatgccacccagggagagtatctcctgagatcc

SEQ ID NO: 41744 - DNA, 120 bp, Artificial Sequence
  ENSG00000060709_73 (sequence is synthesized)
gctaagaaggagcatgaaggcgcagtgcggctgctagaggtaaggagcgtgcccctgctttctgcccgggggtgggggacgttggggagagttgccctgatgcctgctagaaataataga

SEQ ID NO: 41745 - DNA, 120 bp, Artificial Sequence
  ENSG00000060709_74 (sequence is synthesized)
tgtcttctcatgtcatcctcacaagcaaccagtactacaggtgccaggaccaggtccgttcttacagggaaactgaggcacagagaggttaagcagctttcccttggccacacatccaga

SEQ ID NO: 41746 - DNA, 120 bp, Artificial Sequence
  ENSG00000060709_75 (sequence is synthesized)
cccagaactgtgtgtctcagatgtggtctgctgtcctctggtggctcctcttgggtggaaagtgagggggcgtggctcactcgcttgcttgtgaattaatttccccaggggtaaaggccg

SEQ ID NO: 41747 - DNA, 120 bp, Artificial Sequence
  ENSG00000060709_76 (sequence is synthesized)
gtggaccttccggaggccatcctggtctctgatgaactgccttggggtacctttttaaggtatgacacccatcctggggaggcatttgtaggatcagagaaaggagggcctggggaatca

SEQ ID NO: 41748 - DNA, 120 bp, Artificial Sequence
  ENSG00000060718_0 (sequence is synthesized)
actgacggcatgaagcctttaggggcacacagtactctcagcttgttggtggaagcccctcatctgccttcattctgaaggcagggcccggcagaggaaggatcagagggtcgcggccgg

SEQ ID NO: 41749 - DNA, 120 bp, Artificial Sequence
  ENSG00000060718_1 (sequence is synthesized)
agggtcccggccggtggggccaactcagagggagaggaaagggctagagacacgaagaacgcaaaccatcaaatttagaagaaaaagccctttgactttttccccctctccctccccaat

SEQ ID NO: 41750 - DNA, 120 bp, Artificial Sequence
  ENSG00000060718_2 (sequence is synthesized)
ggctgtgtagcaaacatccctggcgataccttggaaaggacgaagttggtctgcagtcgcaatttcgtgggttgagttcacagttgtgagtgcggggctcggagatggagccgtggtcct

SEQ ID NO: 41751 - DNA, 120 bp, Artificial Sequence
  ENSG00000060718_3 (sequence is synthesized)
ctaggtggaaaacgaaacggtggctctgggatttcaccgtaacaaccctcgcattgaccttcctcttccaagctagagaggtcagaggagctgctccagttgatgtactaaaagcactag

SEQ ID NO: 41752 - DNA, 120 bp, Artificial Sequence
  ENSG00000060718_4 (sequence is synthesized)
attttcacaattctccagagggaatatcaaaaacaacgggattttgcacaaacagaaagaattctaaaggctcagatactgcttacagagtttcaaagcaagcacaactcagtgccccaa

SEQ ID NO: 41753 - DNA, 120 bp, Artificial Sequence
  ENSG00000060718_5 (sequence is synthesized)
caaaacagttatttccaggtggaactttcccagaagacttttcaatactatttacagtaaaaccaaaaaaaggaattcagtctttccttttatctatatataatgagcatggtattcagc

SEQ ID NO: 41754 - DNA, 120 bp, Artificial Sequence
  ENSG00000060718_6 (sequence is synthesized)
aaattggtgttgaggttgggagatcacctgtttttctgtttgaagaccacactggaaaacctgccccagaagactatcccctcttcagaactgttaacatcgctgacgggaagtggcatc

SEQ ID NO: 41755 - DNA, 120 bp, Artificial Sequence
  ENSG00000060718_7 (sequence is synthesized)
gggtagcaatcagcgtggagaagaaaactgtgacaatgattgttgattgtaagaagaaaaccacgaaaccacttgatagaagtgagagagcaattgttgataccaatggaatcacggttt

SEQ ID NO: 41756 - DNA, 120 bp, Artificial Sequence
  ENSG00000060718_8 (sequence is synthesized)
ttggaacaaggattttggatgaagaagtttttgagggggacattcagcagtttttgatcacaggtgatcccaaggcagcatatgactactgtgagcattatagtccagactgtgactctt

SEQ ID NO: 41757 - DNA, 120 bp, Artificial Sequence
  ENSG00000060718_9 (sequence is synthesized)
cagcacccaaggctgctcaagctcaggaacctcagatagatgagtatgcaccagaggatataatcgaatatgactatgagtatggggaagcagagtataaagaggctgaaagtgtaacag

SEQ ID NO: 41758 - DNA, 120 bp, Artificial Sequence
  ENSG00000060718_10 (sequence is synthesized)
agggacccactgtaactgaggagacaatagcacagacggaggcaaacatcgttgatgattttcaagaatacaactatggaacaatggaaagttaccagacagaagctcctaggcatgttt

SEQ ID NO: 41759 - DNA, 120 bp, Artificial Sequence
  ENSG00000060718_11 (sequence is synthesized)
ctgggacaaatgagccaaatccagttgaagaaatatttactgaagaatatctaacgggagaggattatgattcccagaggaaaaattctgaggatacactatatgaaaacaaagaaatag

SEQ ID NO: 41760 - DNA, 120 bp, Artificial Sequence
  ENSG00000060718_12 (sequence is synthesized)
acggcagggattctgatcttctggtagatggagatttaggcgaatatgatttttatgaatataaagaatatgaagataaaccaacaagcccccctaatgaagaatttggtccaggtgtac

SEQ ID NO: 41761 - DNA, 120 bp, Artificial Sequence
  ENSG00000060718_13 (sequence is synthesized)
cagcagaaactgatattacagaaacaagcataaatggccatggtgcatatggagagaaaggacagaaaggagaaccagcagtggttgagcctggtatgcttgtcgaaggaccaccaggac

SEQ ID NO: 41762 - DNA, 120 bp, Artificial Sequence
  ENSG00000060718_14 (sequence is synthesized)
cagcaggacctgcaggtattatgggtcctccaggtctacaaggccccactggaccccctggtgaccctggcgataggggccccccaggacgtcctggcttaccaggggctgatggtctac

SEQ ID NO: 41763 - DNA, 120 bp, Artificial Sequence
  ENSG00000060718_15 (sequence is synthesized)
ctggtcctcctggtactatgttgatgttaccgttccgttatggtggtgatggttccaaaggaccaaccatctctgctcaggaagctcaggctcaagctattcttcagcaggctcggattg

SEQ ID NO: 41764 - DNA, 120 bp, Artificial Sequence
  ENSG00000060718_16 (sequence is synthesized)
ctctgagaggcccacctggcccaatgggtctaactggaagaccaggtcctgtgggggggcctggttcatctggggccaaaggtgagagtggtgatccaggtcctcagggccctcgaggcg

SEQ ID NO: 41765 - DNA, 120 bp, Artificial Sequence
  ENSG00000060718_17 (sequence is synthesized)
tccagggtccccctggtccaacgggaaaacctggaaaaaggggtcgtccaggtgcagatggaggaagaggaatgccaggagaacctggggcaaagggagatcgagggtttgatggacttc

SEQ ID NO: 41766 - DNA, 120 bp, Artificial Sequence
  ENSG00000060718_18 (sequence is synthesized)
cgggtctgccaggtgacaaaggtcacaggggtgaacgaggtcctcaaggtcctccaggtcctcctggtgatgatggaatgaggggagaagatggagaaattggaccaagaggtcttccag

SEQ ID NO: 41767 - DNA, 120 bp, Artificial Sequence
  ENSG00000060718_19 (sequence is synthesized)
gtgaagctggcccacgaggtttgctgggtccaaggggaactccaggagctccagggcagcctggtatggcaggtgtagatggccccccaggaccaaaagggaacatgggtccccaagggg

SEQ ID NO: 41768 - DNA, 120 bp, Artificial Sequence
  ENSG00000060718_20 (sequence is synthesized)
agcctgggcctccaggtcaacaagggaatccaggacctcagggtcttcctggtccacaaggtccaattggtcctcctggtgaaaaaggaccacaaggaaaaccaggacttgctggacttc

SEQ ID NO: 41769 - DNA, 120 bp, Artificial Sequence
  ENSG00000060718_21 (sequence is synthesized)
ctggtgctgatgggcctcctggtcatcctgggaaagaaggccagtctggagaaaagggggctctgggtccccctggtccacaaggtcctattggatacccgggcccccggggagtaaagg

SEQ ID NO: 41770 - DNA, 120 bp, Artificial Sequence
  ENSG00000060718_22 (sequence is synthesized)
gagcagatggtgtcagaggtctcaagggatctaaaggtgaaaagggtgaagatggttttccaggattcaaaggtgacatgggtctaaaaggtgacagaggagaagttggtcaaattggcc

SEQ ID NO: 41771 - DNA, 120 bp, Artificial Sequence
  ENSG00000060718_23 (sequence is synthesized)
caagaggggaagatggccctgaaggacccaaaggtcgagcaggcccaactggagacccaggtccttcaggtcaagcaggagaaaagggaaaacttggagttccaggattaccaggatatc

SEQ ID NO: 41772 - DNA, 120 bp, Artificial Sequence
  ENSG00000060718_24 (sequence is synthesized)
caggaagacaaggtccaaagggttccactggattccctgggtttccaggtgccaatggagagaaaggtgcacggggagtagctggcaaaccaggccctcggggtcagcgtggtccaacgg

SEQ ID NO: 41773 - DNA, 120 bp, Artificial Sequence
  ENSG00000060718_25 (sequence is synthesized)
gtcctcgaggttcaagaggtgcaagaggtcccactgggaaacctgggccaaagggcacttcaggtggcgatggccctcctggccctccaggtgaaagaggtcctcaaggacctcagggtc

SEQ ID NO: 41774 - DNA, 120 bp, Artificial Sequence
  ENSG00000060718_26 (sequence is synthesized)
cagttggattccctggaccaaaaggccctcctggaccacctgggaaggatgggctgccaggacaccctgggcaacgtggggagactggatttcaaggcaagaccggccctcctgggccag

SEQ ID NO: 41775 - DNA, 120 bp, Artificial Sequence
  ENSG00000060718_27 (sequence is synthesized)
ggggagtggttggaccacagggaccaaccggtgagactggtccaataggggaacgtgggcatcctggccctcctggccctcctggtgagcaaggtcttcctggtgctgcaggaaaagaag

SEQ ID NO: 41776 - DNA, 120 bp, Artificial Sequence
  ENSG00000060718_28 (sequence is synthesized)
gtgcaaagggtgatccaggtcctcaaggtatctcagggaaagatggaccagcaggattacgtggtttcccaggggaaagaggtcttcctggagctcagggtgcacctggactgaaaggag

SEQ ID NO: 41777 - DNA, 120 bp, Artificial Sequence
  ENSG00000060718_29 (sequence is synthesized)
gggaaggtccccagggcccaccaggtccagttggctcaccaggagaacgtgggtcagcaggtacagctggcccaattggtttaccagggcgcccgggacctcagggtcctcctggtccag

SEQ ID NO: 41778 - DNA, 120 bp, Artificial Sequence
  ENSG00000060718_30 (sequence is synthesized)
gggaagacggagacaagggtgaaattggtgagccgggacaaaaaggcagcaagggtgacaagggagaaaatggccctcccggtcccccaggtcttcaaggaccagttggtgcccctggaa

SEQ ID NO: 41779 - DNA, 120 bp, Artificial Sequence
  ENSG00000060718_31 (sequence is synthesized)
ttgctggaggtgatggtgaaccaggtcctagaggacagcaggggatgtttgggcaaaaaggtgatgagggtgccagaggcttccctggacctcctggtccaataggtcttcagggtctgc

SEQ ID NO: 41780 - DNA, 120 bp, Artificial Sequence
  ENSG00000060718_32 (sequence is synthesized)
caggcccacctggtgaaaaaggtgaaaatggggatgttggtcccatggggccacctggtcctccaggcccaagaggccctcaaggtcccaatggagctgatggaccacaaggacccccag

SEQ ID NO: 41781 - DNA, 120 bp, Artificial Sequence
  ENSG00000060718_33 (sequence is synthesized)
ggtctgttggttcagttggtggtgttggagaaaagggtgaacctggagaagcagggaacccagggcctcctggggaagcaggtgtaggcggtcccaaaggagaaagaggagagaaagggg

SEQ ID NO: 41782 - DNA, 120 bp, Artificial Sequence
  ENSG00000060718_34 (sequence is synthesized)
aagctggtccacctggagctgctggacctccaggtgccaaggggccaccaggtgatgatggccctaagggtaacccgggtcctgttggttttcctggagatcctggtcctcctggggaac

SEQ ID NO: 41783 - DNA, 120 bp, Artificial Sequence
  ENSG00000060718_35 (sequence is synthesized)
ctggccctgcaggtcaagatggtgttggtggtgacaagggtgaagatggagatcctggtcaaccgggtcctcctggcccatctggtgaggctggcccaccaggtcctcctggaaaacgag

SEQ ID NO: 41784 - DNA, 120 bp, Artificial Sequence
  ENSG00000060718_36 (sequence is synthesized)
gtcctcctggagctgcaggtgcagagggaagacaaggtgaaaaaggtgctaagggggaagcaggtgcagaaggtcctcctggaaaaaccggcccagtcggtcctcagggacctgcaggaa

SEQ ID NO: 41785 - DNA, 120 bp, Artificial Sequence
  ENSG00000060718_37 (sequence is synthesized)
agcctggtccagaaggtcttcggggcatccctggtcctgtgggagaacaaggtctccctggagctgcaggccaagatggaccacctggtcctatgggacctcctggcttacctggtctca

SEQ ID NO: 41786 - DNA, 120 bp, Artificial Sequence
  ENSG00000060718_38 (sequence is synthesized)
aaggtgaccctggctccaagggtgaaaagggacatcctggtttaattggcctgattggtcctccaggagaacaaggggaaaaaggtgaccgagggctccctggaactcaaggatctccag

SEQ ID NO: 41787 - DNA, 120 bp, Artificial Sequence
  ENSG00000060718_39 (sequence is synthesized)
gagcaaaaggggatgggggaattcctggtcctgctggtcccttaggtccacctggtcctccaggtttaccaggtcctcaaggcccaaagggtaacaaaggctctactggacccgctggcc

SEQ ID NO: 41788 - DNA, 120 bp, Artificial Sequence
  ENSG00000060718_40 (sequence is synthesized)
agaaaggtgacagtggtcttccagggcctcctgggtctccaggtccacctggtgaagtcattcagcctttaccaatcttgtcctccaaaaaaacgagaagacatactgaaggcatgcaag

SEQ ID NO: 41789 - DNA, 120 bp, Artificial Sequence
  ENSG00000060718_41 (sequence is synthesized)
cagatgcagatgataatattcttgattactcggatggaatggaagaaatatttggttccctcaattccctgaaacaagacattgagcatatgaaatttccaatgggtactcagaccaatc

SEQ ID NO: 41790 - DNA, 120 bp, Artificial Sequence
  ENSG00000060718_42 (sequence is synthesized)
cagcccgaacttgtaaagacctgcaactcagccatcctgacttcccagatggtgaatattggattgatcctaaccaaggttgctcaggagattccttcaaagtttactgtaatttcacat

SEQ ID NO: 41791 - DNA, 120 bp, Artificial Sequence
  ENSG00000060718_43 (sequence is synthesized)
ctggtggtgagacttgcatttatccagacaaaaaatctgagggagtaagaatttcatcatggccaaaggagaaaccaggaagttggtttagtgaatttaagaggggaaaactgctttcat

SEQ ID NO: 41792 - DNA, 120 bp, Artificial Sequence
  ENSG00000060718_44 (sequence is synthesized)
acttagatgttgaaggaaattccatcaatatggtgcaaatgacattcctgaaacttctgactgcctctgctcggcaaaatttcacctaccactgtcatcagtcagcagcctggtatgatg

SEQ ID NO: 41793 - DNA, 120 bp, Artificial Sequence
  ENSG00000060718_45 (sequence is synthesized)
tgtcatcaggaagttatgacaaagcacttcgcttcctgggatcaaatgatgaggagatgtcctatgacaataatccttttatcaaaacactgtatgatggttgtgcgtccagaaaaggct

SEQ ID NO: 41794 - DNA, 120 bp, Artificial Sequence
  ENSG00000060718_46 (sequence is synthesized)
atgaaaagactgtcattgaaatcaatacaccaaaaattgatcaagtacctattgttgatgtcatgatcaatgactttggtgatcagaatcagaagttcggatttgaagttggtcctgttt

SEQ ID NO: 41795 - DNA, 120 bp, Artificial Sequence
  ENSG00000060718_47 (sequence is synthesized)
gttttcttggctaagattaagacaaagaacatatcaaatcaacagaaaatataccttggtgccaccaacccattttgtgccacatgcaagttttgaataaggatggtatagaaaacaacg

SEQ ID NO: 41796 - DNA, 120 bp, Artificial Sequence
  ENSG00000060718_48 (sequence is synthesized)
ctgcatatacaggtaccatttaggaaataccgatgcctttgtgggggcagaatcacatggcaaaagctttgaaaatcataaagatataagttggtgtggctaagatggaaacagggctga

SEQ ID NO: 41797 - DNA, 120 bp, Artificial Sequence
  ENSG00000060718_49 (sequence is synthesized)
ttcttgattcccaattctcaactctccttttcctatttgaatttctttggtgctgtagaaaacaaaaaaagaaaaatatatattcataaaaaatatggtgctcattctcatccatccagg

SEQ ID NO: 41798 - DNA, 120 bp, Artificial Sequence
  ENSG00000060718_50 (sequence is synthesized)
atgtactaaaacagtgtgtttaataaattgtaattattttgtgtacagttctatactgttatctgtgtccatttccaaaacttgcacgtgtccctgaattccatctgactctaattttat

SEQ ID NO: 41799 - DNA, 120 bp, Artificial Sequence
  ENSG00000060718_51 (sequence is synthesized)
gagaattgcagaactctgatggcaataaatatatgtattatgaaaaaataaagttgtaatttctgatgactctaagtccctttctttggttaataataaaatgcctttgtatatattgat

SEQ ID NO: 41800 - DNA, 120 bp, Artificial Sequence
  ENSG00000060718_52 (sequence is synthesized)
gttgaagagttcaattatttgatgtcgccaacaaaattctcagagggcaaaaatctggaagacttttggaagcacactctgatcaactcttctctgccgacagtcattttgctgaatttc

SEQ ID NO: 41801 - DNA, 120 bp, Artificial Sequence
  ENSG00000060718_53 (sequence is synthesized)
agccaaaaatattatgcattttgatgctttattcaaggctatacctcaaactttttcttctcagaatccaggatttcacaggatacttgtatatatggaaaacaagcaagtttatatttt

SEQ ID NO: 41802 - DNA, 120 bp, Artificial Sequence
  ENSG00000060718_54 (sequence is synthesized)
tggacagggaaatgtgtgtaagaaagtatattaacaaatcaatgcctccgtcaagcaaacaatcatatgtatactttttttctacgttatctcatctccttgttttcagtgtgcttcaat

SEQ ID NO: 41803 - DNA, 120 bp, Artificial Sequence
  ENSG00000060718_55 (sequence is synthesized)
aatgcaggttaatattaaagatggaaattaagcaattatttatgaatttgtgcaatgttagattttcttatcaatcaagttcttgaatttgattctaagttgcatattataacagtctcg

SEQ ID NO: 41804 - DNA, 120 bp, Artificial Sequence
  ENSG00000060718_56 (sequence is synthesized)
aaaattattttacttgcccaacaaatattacttttttcctttcaagataattttataaatcatttgacctacctaattgctaaatgaataacatatggtggactgttattaagagtattt

SEQ ID NO: 41805 - DNA, 120 bp, Artificial Sequence
  ENSG00000060718_57 (sequence is synthesized)
gttttaagtcattcaggaaaatctaaacttttttttccactaaggtatttactttaaggtagcttgaaatagcaatacaatttaaaaattaaaaactgaattttgtatctattttaagta

SEQ ID NO: 41806 - DNA, 120 bp, Artificial Sequence
  ENSG00000060718_58 (sequence is synthesized)
atatatgtaagacttgaaaataaatgttttatttcttatataaagtgttaaattaattgataccagatttcactggaacagtttcaactgataatttatgacaaaagaacatacctgtaa

SEQ ID NO: 41807 - DNA, 120 bp, Artificial Sequence
  ENSG00000060718_59 (sequence is synthesized)
tattgaaattaaaaagtgaaatttgtcataaagaatttcttttatttttgaaatcgagtttgtaaatgtccttttaagaagggagatatgaatccaataaataaactcaagtcttggcta

SEQ ID NO: 41808 - DNA, 120 bp, Artificial Sequence
  ENSG00000060718_60 (sequence is synthesized)
gaacctcagatagatgagaaaaagaaatccaatttcaaaaagaagatgaggacagtggctactaaatcaaaggaaaaatccaaaaagtttacaccccccaaatctgaaaaattttcatcc

SEQ ID NO: 41809 - DNA, 120 bp, Artificial Sequence
  ENSG00000060718_61 (sequence is synthesized)
tgctgcaatctaagtttcggaatacttataccactccagaaataatcctcgtgttaatattcagtccatgtttccaccccctcagacctagctaacaattaatttgctttctgtctctgt

SEQ ID NO: 41810 - DNA, 120 bp, Artificial Sequence
  ENSG00000060718_62 (sequence is synthesized)
taagtatgatgataataaatagccagacaatcatggttgtgaattacagctcttctttcattactctcatgctgtgattccacagtgtgtgggagagaaaataaacacatgtcaatcaaa

SEQ ID NO: 41811 - DNA, 120 bp, Artificial Sequence
  ENSG00000060718_63 (sequence is synthesized)
aggaaggttatttaccagttaaactccaaccatttgcatcttagtgcacatgcttgagcccagtagcccacctcctgagatcgtataaagaagctgctggtcaccagtttcaggtgtttt

SEQ ID NO: 41812 - DNA, 120 bp, Artificial Sequence
  ENSG00000060718_64 (sequence is synthesized)
ctatgaggaacaggaagactgccattccctggcaccagctgcaaccaattgttttagcaagacagtttaacaactgcctgaccttcatctgatggtcgcctgacattcctggtgaatatt

SEQ ID NO: 41813 - DNA, 120 bp, Artificial Sequence
  ENSG00000060718_65 (sequence is synthesized)
ataaggtctgccttctgtttttgttaagatatctagatagctcagcacataaggaattaatctggagtcgacatggaaatatagtgtggggagatttcattcatgtgttcttaaactgag

SEQ ID NO: 41814 - DNA, 120 bp, Artificial Sequence
  ENSG00000060718_66 (sequence is synthesized)
aatgataaaacttcagttaccatttaaacagcttccaaatgtggcattctcagctatgttaatttcaggaacataacggtatgagtgaatattttctctttattttaggtctccttttct

SEQ ID NO: 41815 - DNA, 120 bp, Artificial Sequence
  ENSG00000060718_67 (sequence is synthesized)
ttctcattattttacaaaaaagtaattaagtttgcttgtgacaaaagatttgtaggaagacatgatgaaaggaaagttgtgaagttgtcattgccattatatctcatatatgaatagcaa

SEQ ID NO: 41816 - DNA, 120 bp, Artificial Sequence
  ENSG00000060718_68 (sequence is synthesized)
atgatgttcttgttaataactcaatgtctggatcaaaacaagaataaatctataattaaacacatgtctttttccctgatctccactgtgagattccttgagtaatattttgtcccctgt

SEQ ID NO: 41817 - DNA, 120 bp, Artificial Sequence
  ENSG00000060718_69 (sequence is synthesized)
agtcatagcacatttctatctggctctttccaacaccttttttctttcattatttttgttgatttctacaaacatattaattaaaaaaaactaatagctttatcgaagtgtaatttaaat

SEQ ID NO: 41818 - DNA, 120 bp, Artificial Sequence
  ENSG00000060718_70 (sequence is synthesized)
agctcaggaacctcagatagatgaggtgaggagcacaagaccagagaaggtcttcgtatttcagtgatatggacatcgcagtgcagtttttgaacttatacttatttattccattttaat

SEQ ID NO: 41819 - DNA, 120 bp, Artificial Sequence
  ENSG00000060718_71 (sequence is synthesized)
taagctatgctttgtattttaattgtgttgtaatatttccaggaaaaagtgacttgaatatatttggtacttgttttcttgctgtttaagcatttgattacataaatttattagcaataa

SEQ ID NO: 41820 - DNA, 120 bp, Artificial Sequence
  ENSG00000060749_0 (sequence is synthesized)
tacgaaccccgagccgccgccgccgccgccagcagcagctgcagcagtggcagctgcagtagcggcagcagccccagcctcaaggccagtttaagctatgaagaaggacatccctcacac

SEQ ID NO: 41821 - DNA, 120 bp, Artificial Sequence
  ENSG00000060749_1 (sequence is synthesized)
tctgaaacagatctccttcagagacagagttttgcagcctctcatcagcttcctggatatgctcccacacctcagcctactggtctttctggaatatttgatactagtgtgaacagtgcc

SEQ ID NO: 41822 - DNA, 120 bp, Artificial Sequence
  ENSG00000060749_2 (sequence is synthesized)
agcagtaacactaaagagtcttcagtgatgaattttctgtctactgctgaatcccgaactgctcaggctgctgcttcaggaactactctcttaccacaattcagggctccatcctggcag

SEQ ID NO: 41823 - DNA, 120 bp, Artificial Sequence
  ENSG00000060749_3 (sequence is synthesized)
acaggcatgcattcctcagcagcaactgagctgtttgctactggacctttgccaagcactggaacacttccaccatctctctctgcttatcagcatcccaccaccttcagcaatagaaac

SEQ ID NO: 41824 - DNA, 120 bp, Artificial Sequence
  ENSG00000060749_4 (sequence is synthesized)
tttgctaccacttcacctttggtgcttcaggattcaacttttaacactacatcaaatggaattttaagtcatcatgaccctttgctacaaatcaagacttcccagggaactgttccaact

SEQ ID NO: 41825 - DNA, 120 bp, Artificial Sequence
  ENSG00000060749_5 (sequence is synthesized)
gctttggcatttgagcgcctgggcagttctgtattaagtaacagcataccacctcagtcttcaacataccgctcagctcaagagtctgcaccccatcttttacaacctcaatttagtttg

SEQ ID NO: 41826 - DNA, 120 bp, Artificial Sequence
  ENSG00000060749_6 (sequence is synthesized)
ttgccttcagcacttgggggatcccagcagactcctcaagcctacagttcaactctctttactagttctactgcttccattgaaagagctcttcttcgagaatgtagtgttattaaacac

SEQ ID NO: 41827 - DNA, 120 bp, Artificial Sequence
  ENSG00000060749_7 (sequence is synthesized)
catcagcggccttcaggtacccagtcaattcaggcacaactgactggttcacagcactccttacatagttatctatcaaattcaagtgtagttaattttcaggaaacaaccaggcagtca

SEQ ID NO: 41828 - DNA, 120 bp, Artificial Sequence
  ENSG00000060749_8 (sequence is synthesized)
tctttatcctgtagcccaattggagattccactcaggtgagcaacggaggattacaacagaagacctcccaggtctcagtggaacttgctcagtcttactcatctgcgattccatcatca

SEQ ID NO: 41829 - DNA, 120 bp, Artificial Sequence
  ENSG00000060749_9 (sequence is synthesized)
gggtatcctccttctactacaaaaataaaaagctgttctacagaacaaccactgacatcaaccaagacccctaaacctcaaagtataattcctcctgtgcaaacactaagctattccaaa

SEQ ID NO: 41830 - DNA, 120 bp, Artificial Sequence
  ENSG00000060749_10 (sequence is synthesized)
cctttacataatcagagttctgtaatatcgggccaagcacaaatttattctacagcgcagctaccaagccttttatcagttagtcagtcccaaaattacggtttagtacagccacataat

SEQ ID NO: 41831 - DNA, 120 bp, Artificial Sequence
  ENSG00000060749_11 (sequence is synthesized)
gtgccatctattgttcattcacaggtttataggtccagcaaggttgagaaattgccacccttgtataaaacattgactttttctgggtcatctcagactgtaactcctgaaaatcagacg

SEQ ID NO: 41832 - DNA, 120 bp, Artificial Sequence
  ENSG00000060749_12 (sequence is synthesized)
cttaattattcatctaatcagcaagaggtattgtcttcagttacaaatgagaattaccctgctcaaacaagagatctgtcttcagtaagtcagtctcaaagttactcatctggtcactct

SEQ ID NO: 41833 - DNA, 120 bp, Artificial Sequence
  ENSG00000060749_13 (sequence is synthesized)
cagggtttatcaccagttagccagacacaggttagctattcatctcaatcacaagttttgtcagttgttagtctttcagaaagctatgcttcaggggagtccctaacattaacagcccct

SEQ ID NO: 41834 - DNA, 120 bp, Artificial Sequence
  ENSG00000060749_14 (sequence is synthesized)
tctctttcttattcttctgcctctcgggctcagaatttgccagactctagcccgacccagaattatatttctatgcattcttcccaaaatgttcagactcaagagtcatcatctccccag

SEQ ID NO: 41835 - DNA, 120 bp, Artificial Sequence
  ENSG00000060749_15 (sequence is synthesized)
tcccagaagtttttgcctgctgtccagtcatcatcttttgcatcctctactcattgtcagacattacaaaataacataacttcccctgacccaaagtcttatgctgaaagaaagcttgac

SEQ ID NO: 41836 - DNA, 120 bp, Artificial Sequence
  ENSG00000060749_16 (sequence is synthesized)
tcagatgtgtatccatcttcaaagcaagaagatggttttccaatgcaagagttacaggtgttgcagccacaagcatctcttgagtcatcaacccaaaggctatctgatggagaaattaat

SEQ ID NO: 41837 - DNA, 120 bp, Artificial Sequence
  ENSG00000060749_17 (sequence is synthesized)
gctcaagaatcaacttataaggtgtcaaaggcagatgacagatattctcagagtgtaatcagaagtaattcccgtcttgaagatcaagttattggggttgctctgcaagcatcaaaaaaa

SEQ ID NO: 41838 - DNA, 120 bp, Artificial Sequence
  ENSG00000060749_18 (sequence is synthesized)
gaagaaagtgttgttggttcagtgacacaacttaaccaacaaattggccaagtcaataatgcagctacccttgatcttaagaactcaactaatttaatacagactccacaaataaggttg

SEQ ID NO: 41839 - DNA, 120 bp, Artificial Sequence
  ENSG00000060749_19 (sequence is synthesized)
aatactaaagacttaaagcagcaacatcctctcatacttaaggtgcatgagtccaaggtccaggaacagcacgatcaaataattaatgcttcatctcagattcaaattccaaatcatgct

SEQ ID NO: 41840 - DNA, 120 bp, Artificial Sequence
  ENSG00000060749_20 (sequence is synthesized)
ttagggcatggccatcaggcatctcttcctaatacacaggtccttttagattctgcctgtgatttacaaattcttcagcagtcaatactgcaggcaggtttaggtcaagtaaaggcatct

SEQ ID NO: 41841 - DNA, 120 bp, Artificial Sequence
  ENSG00000060749_21 (sequence is synthesized)
ttacaagcacagcgtgttcaaagccctcaacaaatagtacatcccttccttcagatggaaggtcatgttattcaaagcaatggtgatcattctcagcagcaactccatcctcaaaattct

SEQ ID NO: 41842 - DNA, 120 bp, Artificial Sequence
  ENSG00000060749_22 (sequence is synthesized)
gaagttatgaaaatggacctctctgagtcttcaaaaccattacaacaacatctaacaacaaagggccattttagtgaaacaaatcaacatgattcaaagaatcagtttgtttctcttgga

SEQ ID NO: 41843 - DNA, 120 bp, Artificial Sequence
  ENSG00000060749_23 (sequence is synthesized)
tcgatgtgtttcccagaggcagtgcttcttagtgatgaaagaaatattttatcaaatgtagatgatatcttagcagctacagcagcagcttgtggagttacacctactgatttttccaag

SEQ ID NO: 41844 - DNA, 120 bp, Artificial Sequence
  ENSG00000060749_24 (sequence is synthesized)
tcaacttcaaatgaaaccatgcaggctgttgaagatggtgattctaaatctcattttcagcagtcattagatgtcaggcatgtgacttcagattttaactctatgacagctacagtagga

SEQ ID NO: 41845 - DNA, 120 bp, Artificial Sequence
  ENSG00000060749_25 (sequence is synthesized)
aagccacagaatataaatgatacttccttaaatggaaatcaggttactgtgaacctttcaccagtacctgcccttcagtcaaaaatgactcttgatcaacagcacattgaaacacctggt

SEQ ID NO: 41846 - DNA, 120 bp, Artificial Sequence
  ENSG00000060749_26 (sequence is synthesized)
caaaatataccaactaaagtaacttcagcagtggttggaccaagtcatgaagtccaggagcaaagttctggcccattcaagaaacagtctgctaccaatcttgaatctgaagaagacagt

SEQ ID NO: 41847 - DNA, 120 bp, Artificial Sequence
  ENSG00000060749_27 (sequence is synthesized)
gaagctcctgttgatagtacattaaataataacagaaaccaagagtttgtttctagtagtagaagtataagtggagagaatgctacatcagagagtgaatttaccttagggggtgacgac

SEQ ID NO: 41848 - DNA, 120 bp, Artificial Sequence
  ENSG00000060749_28 (sequence is synthesized)
agtggtgtgtcaatgaacccagctaggagtgcacttgcactgttggccatggcccaatctggggatgcagtcagtgtcaagattgaagaagaaaaccaagatttaatgcattttaacctt

SEQ ID NO: 41849 - DNA, 120 bp, Artificial Sequence
  ENSG00000060749_29 (sequence is synthesized)
caaaagaaaagagctaaaggaaaagggcaagttaaagaggaagacaacagtaatcagaaacagctgaaaagacctgcccaaggcaaacgccagaatccaaggggaacagatatttactta

SEQ ID NO: 41850 - DNA, 120 bp, Artificial Sequence
  ENSG00000060749_30 (sequence is synthesized)
ccgtatactcctccttcctcagaaagctgccatgatggttatcagcatcaagaaaaaatgagacagaagatcaaagaggtggaggaaaaacaaccagaagtcaaaacaggatttattgct

SEQ ID NO: 41851 - DNA, 120 bp, Artificial Sequence
  ENSG00000060749_31 (sequence is synthesized)
tctttcttagattttctgaaatccgggcccaagcagcagttttccactcttgctgtacgaatgcctaacaggactagacggccagggacccagatggttcgtacattttgtcccccacca

SEQ ID NO: 41852 - DNA, 120 bp, Artificial Sequence
  ENSG00000060749_32 (sequence is synthesized)
cttcccaagccttcatctacaacacccacacctttagtgtctgaaactggcggtaacagtccatcagataaagttgataatgaacttaaaaacttggaacatttatcttcattttcttct

SEQ ID NO: 41853 - DNA, 120 bp, Artificial Sequence
  ENSG00000060749_33 (sequence is synthesized)
gatgaagatgatcctggatatagtcaagatgcttataaaagcgtctctactcccttaactactttggatgctacttctgataaaaagaagaaaacagaagccctacaggtggcaactact

SEQ ID NO: 41854 - DNA, 120 bp, Artificial Sequence
  ENSG00000060749_34 (sequence is synthesized)
agcccaactgccaatactactggtactgctactacttcctcaaccactgtgggtgcagttaagcaagaacctctccactctacttcatatgcagtaaatattctggaaaatataagctct

SEQ ID NO: 41855 - DNA, 120 bp, Artificial Sequence
  ENSG00000060749_35 (sequence is synthesized)
tcagaatcctcaaagcccattgaacttgatggtcttccttcagaccagtttgcaaaaggacaggacactgttgccatagaaggttttacagatgaggaggacacagaaagcggaggagaa

SEQ ID NO: 41856 - DNA, 120 bp, Artificial Sequence
  ENSG00000060749_36 (sequence is synthesized)
ggccaatacagagagcgtgatgaatttgtggtaaagatagaagacatagagacttttaaggaggctttaaaaacaggaaaagaacctccagctatttggaaagtacaaaaagctttatta

SEQ ID NO: 41857 - DNA, 120 bp, Artificial Sequence
  ENSG00000060749_37 (sequence is synthesized)
cagaaatttgttcctgaaattcgagatggtcaaagagaatttgctgctacaaatagttatcttggatattttggagatgcaaagagtaaatacaaaagaatatatgtgaagttcattgaa

SEQ ID NO: 41858 - DNA, 120 bp, Artificial Sequence
  ENSG00000060749_38 (sequence is synthesized)
gttctaaaaagccaagaaataaaccttcacaaactatcagaactgttcaagctaagccaagtagtagcagtaaaacttctgatcctctagcatcaaaaactacaactacaaaagcccctt

SEQ ID NO: 41859 - DNA, 120 bp, Artificial Sequence
  ENSG00000060749_39 (sequence is synthesized)
ccgtgaaacccaaagttaaacagccaaaagtaaaggctgagccaccaccaaagaaacggaaaaaatggaaagaagaattttcatcatcccaatctgactcatctcctgagatccatacta

SEQ ID NO: 41860 - DNA, 120 bp, Artificial Sequence
  ENSG00000060749_40 (sequence is synthesized)
gtagtagtgacgatgaggaatttgaacctcccgctccctttgtcactcgctttttgaacacaagagcaatgaaggaaacctttaagagctacatggaattgcttgttagcattgccttgg

SEQ ID NO: 41861 - DNA, 120 bp, Artificial Sequence
  ENSG00000060749_41 (sequence is synthesized)
accctgacacaatgcaagccttagagaagagcaatgatgagctacttttacctcatatgaaaaaaatagatggcatgctaaatgataaccgaaagagacttcttttgaatcttcatttgg

SEQ ID NO: 41862 - DNA, 120 bp, Artificial Sequence
  ENSG00000060749_42 (sequence is synthesized)
atcaatcattcaagaatgctttggaaagttttcctgaactaacaataattactcgagattctaaagcaaagagtggaggaactgctatttctaaaatcaaaatgaatggcaaagcctata

SEQ ID NO: 41863 - DNA, 120 bp, Artificial Sequence
  ENSG00000060749_43 (sequence is synthesized)
ataagaaaactctaaggacttctaaaacaaccaccaaatctgcacaagagtttgctgtcgatccagagaaaatacagttgtattctttgtatcattcactccatcattataagtaccatg

SEQ ID NO: 41864 - DNA, 120 bp, Artificial Sequence
  ENSG00000060749_44 (sequence is synthesized)
tttatctgatatgtaaggatgagatttcttcggtgcagaaaaaaaatgaagatttaggacaggaggaaattgttcaactttgtatgaaaaatgtaaaatgggtggaggacctctttgaaa

SEQ ID NO: 41865 - DNA, 120 bp, Artificial Sequence
  ENSG00000060749_45 (sequence is synthesized)
aatttggagaacttctaaatcatgtacagcagaaatgttcctgacttttccacaaaaatcccatctttttatagcactaatgaaatggcagatatggggtggtcaaagataatcagatgt

SEQ ID NO: 41866 - DNA, 120 bp, Artificial Sequence
  ENSG00000060749_46 (sequence is synthesized)
caagtagtggccttctgcaggccggccgcttccatcatggaactgtcattaccacctctgctgaaggacagtggtgcggcctttaggaacgaagttagtcctctggaaatggacctaaat

SEQ ID NO: 41867 - DNA, 120 bp, Artificial Sequence
  ENSG00000060749_47 (sequence is synthesized)
cccaccacatttttaccctaatgaatgatttttctattttgtaaaccattgggtaacttgagtcatattttcagaaacattttttgacaaatgatgaagcatgcactaagtataattttt

SEQ ID NO: 41868 - DNA, 120 bp, Artificial Sequence
  ENSG00000060749_48 (sequence is synthesized)
ttttattgctagagaagtaacacttaaagtaacgattttttttttctgactccggctaaacaccagaatgacagagaagtggcagaaaccatatgtttgtactcacatctggccacaaaa

SEQ ID NO: 41869 - DNA, 120 bp, Artificial Sequence
  ENSG00000060749_49 (sequence is synthesized)
ccagaaatactgtacattatgtaaagaggtctggtgtggtgtgacatcctgtataagaatatcatcaatttaaaatataaaatttggaaactattctgctttacagactccttttactct

SEQ ID NO: 41870 - DNA, 120 bp, Artificial Sequence
  ENSG00000060749_50 (sequence is synthesized)
taacatgttcaggaaactggatgtggaattggtgcaattctctgactgctttttgtgtcaaattatattgtgataaaaaaacaatgacatactattttccctatcgcaaagaaaagtatt

SEQ ID NO: 41871 - DNA, 120 bp, Artificial Sequence
  ENSG00000060749_51 (sequence is synthesized)
ttcgtttatactgttttttcctttggaaaattttcaattgtacattttatttcactgatagttgtatttttcacaaggaaaatgttgtggttataattacgtttgatatatctctacaac

SEQ ID NO: 41872 - DNA, 120 bp, Artificial Sequence
  ENSG00000060749_52 (sequence is synthesized)
accttttgttattttcagtaaatcttagttatatgttgaatttctaatgtgaattctatcttgaggtaaccatttttttcatacagatttgcttcagtgttatccagaatatgcattcag

SEQ ID NO: 41873 - DNA, 120 bp, Artificial Sequence
  ENSG00000060749_53 (sequence is synthesized)
tactagaattagtttagctttataaatagggctgtgttagacactgcagtaattttctaattcataaaataaacttcttactaaactagcacttgattaacttgttgaggtaaaaatcta

SEQ ID NO: 41874 - DNA, 120 bp, Artificial Sequence
  ENSG00000060749_54 (sequence is synthesized)
actacatttacattttgaagaataaaactgataattagactatttgcagtgttaaacacagcttccttaactcttagaactggaagttgtagagctctccttttggtgcctttccagcct

SEQ ID NO: 41875 - DNA, 120 bp, Artificial Sequence
  ENSG00000060749_55 (sequence is synthesized)
ttatacacactattgtagctttcttaggtttgataggtagcgtttcaagtagtttagctgagacagtgaatgtattaggttcaacatgaccttgtgttttatttgtgtttgccaacagga

SEQ ID NO: 41876 - DNA, 120 bp, Artificial Sequence
  ENSG00000060749_56 (sequence is synthesized)
tgccttatttgtttgagaaaaagatgtactagtgtcattctaaactatctccttttttaggattctaaagaagttaatcatcatccttttgtttattttaccaccatttagtgccttaaa

SEQ ID NO: 41877 - DNA, 120 bp, Artificial Sequence
  ENSG00000060749_57 (sequence is synthesized)
tcctatcaagaaagcagtgttactgctcaatgcccaaataagacacgcggatattgctattgtcttgcttttgagttaacaggccaactttttatacttaaaacctcagtaaactggcaa

SEQ ID NO: 41878 - DNA, 120 bp, Artificial Sequence
  ENSG00000060749_58 (sequence is synthesized)
agaattgaaggtaatgtgatttgatttgagaataaaacattgtagcattgggtgaaaaatgagtatttgagttaagcttacatatttatttctgatggttatcttattaaaagcaataat

SEQ ID NO: 41879 - DNA, 120 bp, Artificial Sequence
  ENSG00000060749_59 (sequence is synthesized)
ccttaatactgtacttgccattagactaggtactcagtaatggaagtttctctcaagggttaaatgttccatttttgaaagttttaaaaaacctgtttgggtggtttattttgaaaacaa

SEQ ID NO: 41880 - DNA, 120 bp, Artificial Sequence
  ENSG00000060749_60 (sequence is synthesized)
aagtaacctattagattcattttgcctaactcatatgagagatgcagagtatcaacagtgggagcatcataaaatgaattttccaagtggagaggagtaggaagcagccatatgatagta

SEQ ID NO: 41881 - DNA, 120 bp, Artificial Sequence
  ENSG00000060749_61 (sequence is synthesized)
ttgactctggacagaattgatgtctttcgtttccaaagtgcagagtagggaactacatttcctaatgtggcattgtaaatatacatctttatattactcttccagcctacgttcctaaat

SEQ ID NO: 41882 - DNA, 120 bp, Artificial Sequence
  ENSG00000060749_62 (sequence is synthesized)
cattgataatttaaatattttttaaagccaccttaatttaggtagctcttggaatcgatgtttgaattcactagccacattttcttcatgatatgcctcgtggcaaacaaagatgtttcc

SEQ ID NO: 41883 - DNA, 120 bp, Artificial Sequence
  ENSG00000060749_63 (sequence is synthesized)
ttaagatgaatcttacatttcccatagaaaataacccatttcctttggcactgcagttgccctcaaactgcttgcagttgtattcattttagtacaacaaaggttttcataatatgggag

SEQ ID NO: 41884 - DNA, 120 bp, Artificial Sequence
  ENSG00000060749_64 (sequence is synthesized)
gccaagtctatgatactgcctcaaagagaccctattgtgtagatgcatcatcttctctcatttgatccatagagcataggcaaagatgtcaacctcaggccttagagaaaagtggaaatg

SEQ ID NO: 41885 - DNA, 120 bp, Artificial Sequence
  ENSG00000060749_65 (sequence is synthesized)
ttattatgacagccgtccatgagttatcgctttgtatgaagttaaatacagtcatgcgttgcttaacagcagggatacattctgagaaatgcattgttaggcaattccgttgtgcgaaca

SEQ ID NO: 41886 - DNA, 120 bp, Artificial Sequence
  ENSG00000060749_66 (sequence is synthesized)
atgcattgttaggcaattccgttgtgcgaacatcctagtgtacttacacaaacctaggtggcatagcccacaacgtacccaggctatatggtaaacctgtacagcatgttactgtactga

SEQ ID NO: 41887 - DNA, 120 bp, Artificial Sequence
  ENSG00000060749_67 (sequence is synthesized)
gtgtatctagacatagaaaacatacagtaagaatatggtattataatcttacgggaccactgtcaaatacgcggtctgtctttgaaaagttgtaatgcggcgcatgactataaataccta

SEQ ID NO: 41888 - DNA, 120 bp, Artificial Sequence
  ENSG00000060749_68 (sequence is synthesized)
gctggttagcatttacattccttgccagggagtttgaaatttatactatagaaataactttaggttttaggtagagttaaagaggtaaagcacatgttgccacaacccaggaaagtattt

SEQ ID NO: 41889 - DNA, 120 bp, Artificial Sequence
  ENSG00000060749_69 (sequence is synthesized)
ttaagaaagattggattttcctacctttagagatctaaaaaaaatttaatataaaaaatcattttgtgttggtgtttattactagttcagatgagtggctgctgaaggggcccccttgtc

SEQ ID NO: 41890 - DNA, 120 bp, Artificial Sequence
  ENSG00000060749_70 (sequence is synthesized)
attttcattataacccaatttccacttatttgaactcttaagtcataaatgtataatgacttatgaattagcacagttaagttgacactagaaactgcccatttctgtattacactatca

SEQ ID NO: 41891 - DNA, 120 bp, Artificial Sequence
  ENSG00000060749_71 (sequence is synthesized)
aataggaaacattggaaagatggggaaaaaaatcttattttaaaatggcttagaaagttttcagattactttgaaaattctaaacttctttctgtttccaaaacttgaaaatatgtagat

SEQ ID NO: 41892 - DNA, 120 bp, Artificial Sequence
  ENSG00000060749_72 (sequence is synthesized)
ggactcatgcattaagactgttttcaaagctttcctcacatttttaaagtgtgattttccttttaatatacatatttattttctttaaagcagctatatcccaacccatgactttggaga

SEQ ID NO: 41893 - DNA, 120 bp, Artificial Sequence
  ENSG00000060749_73 (sequence is synthesized)
tatacctataaaaccaatataacagcagggttattgaagcagctttctcaaatgttgcttcagatgtgcaagttgcaaattttattgtatttgtagaatacaatttttgttttaaactgt

SEQ ID NO: 41894 - DNA, 120 bp, Artificial Sequence
  ENSG00000060749_74 (sequence is synthesized)
atttcaatctatttctccaagatgcttttcatatagagtgaaatatcccaggataactgcttctgtgtcagtcgcatttgacgcataactgcacaaatgaacagtgtatactcttggttg

SEQ ID NO: 41895 - DNA, 120 bp, Artificial Sequence
  ENSG00000060749_75 (sequence is synthesized)
tgcattaacttacatgtataatttttggcatctgtgttcacaaatgcatgtgttagcaaatcacctttatttataagtgacaataattgaagttaaggatataaagaaacctgcatttgt

SEQ ID NO: 41896 - DNA, 120 bp, Artificial Sequence
  ENSG00000060749_76 (sequence is synthesized)
agtccagcgttttcatttggtccataacacaatgtatggaaatgtgaaagacaattttgtacatttgtttgttactaactcagatcattaaaatgaaaacaatttttttaaacaagaaaa

SEQ ID NO: 41897 - DNA, 80 bp, Artificial Sequence
  ENSG00000060749_77 (sequence is synthesized)
aatccaccaacatggggcgcagcggccgccgccgccgccgccgtcgccgcgagtcccggccgcgggtgcctccgcttccc

SEQ ID NO: 41898 - DNA, 120 bp, Artificial Sequence
  ENSG00000060749_78 (sequence is synthesized)
tctttgcggcccagactcgccagcgcgcccttctcccgcctgctcgccggggccatgtgagggggcagctccctccaccgccgccgccccctcttcctcccccgccccctctccctgccc

SEQ ID NO: 41899 - DNA, 120 bp, Artificial Sequence
  ENSG00000060749_79 (sequence is synthesized)
gcccccgtcacacggagccctggaggatcccccgctgctgcccgccctccctacgccacccccacgatggacaggaactacgcgacctcgggcttcaccgagccgccgccgccgccgccg

SEQ ID NO: 41900 - DNA, 120 bp, Artificial Sequence
  ENSG00000060749_80 (sequence is synthesized)
gattgcttgagcccaggagttggaggctacaataagctatgatccagctgctgcactctagcttgggtgacagagaccctgtcttcttaagacaaatccagaatttgggacatcttataa

SEQ ID NO: 41901 - DNA, 120 bp, Artificial Sequence
  ENSG00000060749_81 (sequence is synthesized)
aaaaatttggagaacttctaaatcataccggaatgttgggagaaatgcaaagcgtctcagttagcagcaccagaagatcagagcagcagaatattctagaggctgggaagtccaagatca

SEQ ID NO: 41902 - DNA, 120 bp, Artificial Sequence
  ENSG00000060749_82 (sequence is synthesized)
ctggtgactgttgagagccttcttgctgtgccttagaatgaaagaaggtggagggcaaggtgatatgaacaatgtgcctttacatggcaaaagaatgaaagaaagtaaacctattcccac

SEQ ID NO: 41903 - DNA, 120 bp, Artificial Sequence
  ENSG00000060749_83 (sequence is synthesized)
ggagactctagccatagtattttggagtgttttaaagagagttgtgaaatacatgtgtgtatgtattttgtctatgtattctgtaaataatgacttgatttattgttctgagtctctctg

SEQ ID NO: 41904 - DNA, 120 bp, Artificial Sequence
  ENSG00000060749_84 (sequence is synthesized)
ctatgttttgtgctcagatttacccgagcctcaccacctcttgtaggagctataattggtaatgttttgaagctgttggtgcttgctttacatcgccataataaatgatgttttattgca

SEQ ID NO: 41905 - DNA, 120 bp, Artificial Sequence
  ENSG00000060749_85 (sequence is synthesized)
attccatagaatactataattagagaggttatggaggttatttcatctggtcctttttttatacagatgaaattagtccaacaataattgagtcccttatttaaattacactgtaagcca

SEQ ID NO: 41906 - DNA, 120 bp, Artificial Sequence
  ENSG00000060749_86 (sequence is synthesized)
gaagtagagcctgtacaatgaattcacctctctgttgtccaggatattactttttcttctgtaccacattacctctcccagtaaaaagactcttgtttgaggtagaattgaattaaagaa

SEQ ID NO: 41907 - DNA, 120 bp, Artificial Sequence
  ENSG00000060749_87 (sequence is synthesized)
aatactgtgtattatttttcttactaatgcatcttaaatatatttcctccattgtgatagtattgtcagactgtgtttgatccacgaatctataggtcaggaaattggtcaaaggtttct

SEQ ID NO: 41908 - DNA, 120 bp, Artificial Sequence
  ENSG00000060762_0 (sequence is synthesized)
gtcattggctctgggaagcggcagcagaggcagggaccactcggggtctggtgtcggcacagccatggcgggcgcgttggtgcggaaagcggcggactatgtccgaagcaaggatttccg

SEQ ID NO: 41909 - DNA, 120 bp, Artificial Sequence
  ENSG00000060762_1 (sequence is synthesized)
ggactacctcatgagtacgcacttctggggcccagtagccaactggggtcttcccattgctgccatcaatgatatgaaaaagtctccagagattatcagtgggcggatgacatttgccct

SEQ ID NO: 41910 - DNA, 120 bp, Artificial Sequence
  ENSG00000060762_2 (sequence is synthesized)
ctgttgctattctttgacattcatgagatttgcctacaaggtacagcctcggaactggcttctgtttgcatgccacgcaacaaatgaagtagcccagctcatccagggagggcggcttat

SEQ ID NO: 41911 - DNA, 120 bp, Artificial Sequence
  ENSG00000060762_3 (sequence is synthesized)
ggacagcattgccagctgctgctgagtcacagatttcattataaatagcctccctaaggaaaatacactgaatgctatttttactaaccattctatttttatagaaatagctgagagttt

SEQ ID NO: 41912 - DNA, 120 bp, Artificial Sequence
  ENSG00000060762_4 (sequence is synthesized)
ctaaaccaactctctgctgccttacaagtattaaatattttacttctttccataaagagtagctcaaaatatgcaattaatttaataatttctgatgatggttttatctgcagtaatatg

SEQ ID NO: 41913 - DNA, 120 bp, Artificial Sequence
  ENSG00000060762_5 (sequence is synthesized)
tatatcatctattagaatttacttaatgaaaaactgaagagaacaaaatttgtaaccactagcacttaagtactcctgattcttaacattgtctttaatgaccacaagacaaccaacagc

SEQ ID NO: 41914 - DNA, 120 bp, Artificial Sequence
  ENSG00000060762_6 (sequence is synthesized)
tggccacgtacttaaaattttgtccccactgtttaaaaatgttacctgtgtatttccatgcagtgtatatattgagatgctgtaacttaatggcaataaatgatttaaatatttgttaaa

SEQ ID NO: 41915 - DNA, 120 bp, Artificial Sequence
  ENSG00000060762_7 (sequence is synthesized)
ctggtgtcggcacagccatggcgggcgcgttggtgcggaaagcggcggactatgtccgaagcaaggatttccgggactacctcatgagtacggacaatcagagatgacttggttgtagtg

SEQ ID NO: 41916 - DNA, 120 bp, Artificial Sequence
  ENSG00000060762_8 (sequence is synthesized)
tggaaaccagtagggaccttgggaagctgccaaaccctttctagctctgggctcagctgtaagaactgctgattcctacaggaacacttggacaatccaatacctaaatgttaaccatca

SEQ ID NO: 41917 - DNA, 120 bp, Artificial Sequence
  ENSG00000060762_9 (sequence is synthesized)
gggcgcgttggtgcggaaagcggcggactatgtccgaagcaaggatttccgggactacctcatgagtacgaataactcttcaggctctgtttatagccctgggttcatgcatgataaagt

SEQ ID NO: 41918 - DNA, 120 bp, Artificial Sequence
  ENSG00000060762_10 (sequence is synthesized)
agacagcaacaccaccatacagtgcagaggagtggcaagagagtaaacggaaaaggagatgaaaatagaccaagtggagaaaggcctggtcaaaaaaggaggaaaaggaagatcactatg

SEQ ID NO: 41919 - DNA, 120 bp, Artificial Sequence
  ENSG00000060762_11 (sequence is synthesized)
tttgaatacaggtgtgaggttgcagtaacctaataagaccaaaatcatttgatttttgtttcttttttttccatgtctgtcctgtctgaacttcggtgactcttcacaaaatagtacgca

SEQ ID NO: 41920 - DNA, 120 bp, Artificial Sequence
  ENSG00000060971_0 (sequence is synthesized)
gagatgtggttctgcgcgtgtgcggacggctgtctgttaactccgcggtcagttcccggactggtggctggtctgcagggttgacctgcgcaatgcagaggctgcaggtagtgctgggcc

SEQ ID NO: 41921 - DNA, 120 bp, Artificial Sequence
  ENSG00000060971_1 (sequence is synthesized)
acctgaggggtccggccgattccggctggatgccgcaggccgcgccttgcctgagcggtgccccgcaggcctcggccgcggacgtggtggtggtgcacgggcggcgcacggccatctgcc

SEQ ID NO: 41922 - DNA, 120 bp, Artificial Sequence
  ENSG00000060971_2 (sequence is synthesized)
gggcgggccgcggcggcttcaaggacaccacccccgacgagcttctctcggcagtcatgaccgcggttctcaaggacgtgaatctgaggccggaacagctgggggacatctgtgtcggaa

SEQ ID NO: 41923 - DNA, 120 bp, Artificial Sequence
  ENSG00000060971_3 (sequence is synthesized)
atgtgctgcagcctggggccggggcaatcatggcccgaatcgcccagtttctgagtgacatcccggagactgtgcctttgtccactgtcaatagacagtgttcgtcggggctacaggcag

SEQ ID NO: 41924 - DNA, 120 bp, Artificial Sequence
  ENSG00000060971_4 (sequence is synthesized)
tggccagcatagcaggtggcatcagaaatgggtcttatgacattggcatggcctgtggggtggagtccatgtccctggctgacagagggaaccctggaaatattacttcgcgcttgatgg

SEQ ID NO: 41925 - DNA, 120 bp, Artificial Sequence
  ENSG00000060971_5 (sequence is synthesized)
agaaggagaaggccagagattgcctgattcctatggggataacctctgagaatgtggctgagcggtttggcatttcacgggagaagcaggatacctttgccctggcttcccagcagaagg

SEQ ID NO: 41926 - DNA, 120 bp, Artificial Sequence
  ENSG00000060971_6 (sequence is synthesized)
cagcaagagcccagagcaagggctgtttccaagctgagattgtgcctgtgaccaccacggtccatgatgacaagggcaccaagaggagcatcactgtgacccaggatgagggtatccgcc

SEQ ID NO: 41927 - DNA, 120 bp, Artificial Sequence
  ENSG00000060971_7 (sequence is synthesized)
cctggccaaactgaagcctgccttcaagaaagatggttctaccacagctggaaactctagccaggtgagtgatggggcagctgccatcctgctggcccggaggtccaaggcagaagagtt

SEQ ID NO: 41928 - DNA, 120 bp, Artificial Sequence
  ENSG00000060971_8 (sequence is synthesized)
gggccttcccatccttggggtcctgaggtcttatgcagtggttggggtcccacctgacatcatgggcattggacctgcctatgccatcccagtagctttgcaaaaagcagggctgacagt

SEQ ID NO: 41929 - DNA, 120 bp, Artificial Sequence
  ENSG00000060971_9 (sequence is synthesized)
gagtgacgtggacatcttcgagatcaatgaggcctttgcaagccaggctgcctactgtgtggagaagctacgactcccccctgagaaggtgaaccccctggggggtgcagtggccttagg

SEQ ID NO: 41930 - DNA, 120 bp, Artificial Sequence
  ENSG00000060971_10 (sequence is synthesized)
gcacccactgggctgcactggggcacgacaggtcatcacgctgctcaatgagctgaagcgccgtgggaagagggcatacggagtggtgtccatgtgcatcgggactggaatgggagccgc

SEQ ID NO: 41931 - DNA, 120 bp, Artificial Sequence
  ENSG00000060971_11 (sequence is synthesized)
tgccgtctttgaataccctgggaactgagtgaggtcccaggctggaggcgctacgcagacagtcctgctgctctagcagcaaggcagtaacaccacaaaagcaaaaccacatgggaaaac

SEQ ID NO: 41932 - DNA, 120 bp, Artificial Sequence
  ENSG00000060971_12 (sequence is synthesized)
tcagcactggtggtggtggcagtggacagatcaaggcacttcaactcatttggaaaatgtgaacactgatgacatggtataggagtgggtggggtgttgagccacccatcagaccctctt

SEQ ID NO: 41933 - DNA, 120 bp, Artificial Sequence
  ENSG00000060971_13 (sequence is synthesized)
tagctgtgcaagataaaagcagcctgggtcacccaggccacaaggccatggttaattcttaaggcaaggcaaatccatggatgagaagtgcaatgggcatagtaaaagtgcatgaattta

SEQ ID NO: 41934 - DNA, 120 bp, Artificial Sequence
  ENSG00000060971_14 (sequence is synthesized)
atacccacaggtgtggaggggcaggccctcttcaggcaaaacggggtgaacagggtgatggtggggagaaggtcagcaggaaaacatatcaacatggagtttcttatgtcttccttttct

SEQ ID NO: 41935 - DNA, 120 bp, Artificial Sequence
  ENSG00000060971_15 (sequence is synthesized)
acacacggtaacaatctgatctttcttttccccacaatcttcagtccagccctctattccacccctcaccttgaaatacagcaatatgatatggcaagagtcttatccagcggatgccac

SEQ ID NO: 41936 - DNA, 120 bp, Artificial Sequence
  ENSG00000060971_16 (sequence is synthesized)
cccaggccccaggaaactcagtgtgcaggttggggaggataaggttggacaccagaatgaggcaacgagagtccttggctccctgctcttgtggactcaacctctcccctactttgaagt

SEQ ID NO: 41937 - DNA, 120 bp, Artificial Sequence
  ENSG00000060971_17 (sequence is synthesized)
ggagagtgaggttttgagtctatctaagtggtctgaagtggcaccatttcgtggttactgctgggcagtgagtgctttccaggccttgtgccacccaggttgggggtgggaagtaggaag

SEQ ID NO: 41938 - DNA, 120 bp, Artificial Sequence
  ENSG00000060971_18 (sequence is synthesized)
ccactagcagagactttgggatagggcagaaccatggggaaggaggaccctcaggaggagacctggtcaactttcctttaagcgcctgcaggtgacatcccggagactgtgcctttgtcc

SEQ ID NO: 41939 - DNA, 120 bp, Artificial Sequence
  ENSG00000060971_19 (sequence is synthesized)
gggtaggggtatgagaaagcaggccatggccatgctgggtgctgtactctgggaacctggaatagaccaggcccctctgcaaagtagaagtgggagggctgggatctcctcatccccacc

SEQ ID NO: 41940 - DNA, 120 bp, Artificial Sequence
  ENSG00000060971_20 (sequence is synthesized)
tgctgttgccaggggcatgagggtggtcctgtgggtgctgcagagtggaggtggggcaggctagtgtcccatacttcaagcccttcctgaccccacagctgggattggctcacccttctg

SEQ ID NO: 41941 - DNA, 120 bp, Artificial Sequence
  ENSG00000060971_21 (sequence is synthesized)
gccctctattccacccctcaccttgaaatacagcaatatgatatggcaagagtcttatccagcggatgccacccctaggtcggcaatcactgttccacctctctggggtgacagcagggc

SEQ ID NO: 41942 - DNA, 120 bp, Artificial Sequence
  ENSG00000060971_22 (sequence is synthesized)
tcacaggaggatacctggggagatgtgcattttcagaaactcccatttcacttttaagggcagacaacctgcccatctgtgctgatttggaaaagctgggtgcatgggcaagtgagcgtg

SEQ ID NO: 41943 - DNA, 120 bp, Artificial Sequence
  ENSG00000060971_23 (sequence is synthesized)
tctccctgccccaaaccctgatgttccagagttgcaagtgagcctgccaagggctagtgtcccgaagaaagatctggaatgcctcatctctggttttcacagctatactttagtgcccag

SEQ ID NO: 41944 - DNA, 120 bp, Artificial Sequence
  ENSG00000060971_24 (sequence is synthesized)
caccaccatcgtggactcgtacagctcactactcctgtggggagcatgtgggggctgaggcctccctattccttgagacacaacaatattgaaattagaccaactgataaccctacaata

SEQ ID NO: 41945 - DNA, 120 bp, Artificial Sequence
  ENSG00000060971_25 (sequence is synthesized)
gcctctaagtcttcaagtgaaaagaagagtcgtacgtatctcactttaaatcaaaatgattaagctaaaaaatgattaagcttagtgaggaaggcacattcaaagctgacacaggcagaa

SEQ ID NO: 41946 - DNA, 120 bp, Artificial Sequence
  ENSG00000060971_26 (sequence is synthesized)
agctttgtgccaaacagacaaattgtgaatgcaaagaaatgtaatatctagcaaatgccctatttgtgaaaattttgaagtaaaagataataaagcaaataaaatgttatgcaaacaagg

SEQ ID NO: 41947 - DNA, 120 bp, Artificial Sequence
  ENSG00000060971_27 (sequence is synthesized)
aaaagaaaataggagaaagaaataatgtgatcaggttaactgataaaacagaggagaacaaaactgctgcttgaaatccctgcacaggttacgtgcaatgcaatccttaatgatggaatg

SEQ ID NO: 41948 - DNA, 120 bp, Artificial Sequence
  ENSG00000060971_28 (sequence is synthesized)
agggcatcaaagggcgggggagctgagcaaagcactgctgaagatccattggcttagccaggtcagggctccagccccagagctcagagcaacacatggaagagtgggctgccccaggca

SEQ ID NO: 41949 - DNA, 120 bp, Artificial Sequence
  ENSG00000060971_29 (sequence is synthesized)
cagaagtcaaatatcacatgatctcactcaagtgggtgctaaaaacgtgtacatatggacatagagattggaatgatagacaacggagactcggaagggtgagggcataggagggaaatg

SEQ ID NO: 41950 - DNA, 120 bp, Artificial Sequence
  ENSG00000060971_30 (sequence is synthesized)
atatgatgcccatcagagtgcttcgtctaggtgggatcaggctttcaagagtccatgggaacatgcagggttagctatatgattactggtaaggccgagtggtccctggcctcagacttt

SEQ ID NO: 41951 - DNA, 120 bp, Artificial Sequence
  ENSG00000060971_31 (sequence is synthesized)
aggcatttcttttgctctggtgctctgtcccagcagcagttccttttctctgttttttgggggaaacagagatacacagttttcatttctgaatcttcaaagggagagagagagaaggat

SEQ ID NO: 41952 - DNA, 120 bp, Artificial Sequence
  ENSG00000060971_32 (sequence is synthesized)
ccctgtggcccaaacaggcttcccttgcctttgggctgtgcttggtctttgattgaagattctcataggagtagaagggaatgtgcttgtggggccctggggagcaagtgcctgcagaga

SEQ ID NO: 41953 - DNA, 120 bp, Artificial Sequence
  ENSG00000060971_33 (sequence is synthesized)
tggggtctgcccagtagctgctcacccccattccatggatctggcctggcatgggagcagagctgctgggtttgttcccctgccctttacatcccttgaggggggcagttagaagcatag

SEQ ID NO: 41954 - DNA, 120 bp, Artificial Sequence
  ENSG00000060971_34 (sequence is synthesized)
ggcacctgaagggcaggggatagaggtaggtgggctttggatcataatctcgacagacacagtcctgagcaccataatcccaaatgttgaaatcccaaaagatcaaagtccctaaggtct

SEQ ID NO: 41955 - DNA, 120 bp, Artificial Sequence
  ENSG00000060971_35 (sequence is synthesized)
tggctggtccagaggtagtgagttatcttgattgttcagttacagatcaaactccatgttctactctttacccccttcttacttctacacttgactagtcaaggagaaaaatccttactg

SEQ ID NO: 41956 - DNA, 120 bp, Artificial Sequence
  ENSG00000060971_36 (sequence is synthesized)
tctaaaatcccaaaaatcacaatctcaaaagattaaaatcctgaatgttgaaatcctaatgttgaattcatgttatgaattctagggaagggattagtgcattttccgctgtatgcagga

SEQ ID NO: 41957 - DNA, 120 bp, Artificial Sequence
  ENSG00000060971_37 (sequence is synthesized)
caaccattaccttgttattgtctttatttgaattaagtatggtttaaggagatgtgaatgggtgctaagttgacaaggaatggacttaattttgggaatacctagaaacctgacaaagca

SEQ ID NO: 41958 - DNA, 120 bp, Artificial Sequence
  ENSG00000060971_38 (sequence is synthesized)
ttgctttgggtgtgtctgtgacggtgtttgcagaggaggttagtgtgtgcatctgagtggaccaggtggggaagatccgccctcagtgttggcaggcatcagctaattgcctggggccct

SEQ ID NO: 41959 - DNA, 120 bp, Artificial Sequence
  ENSG00000060971_39 (sequence is synthesized)
ggagagaacaaatacagaaggtgaactgtctctctcagagccgggacacactttttttctgccttggacatcagaaatttgattccatgaaagtgcattatcacattgactttgtaagcc

SEQ ID NO: 41960 - DNA, 120 bp, Artificial Sequence
  ENSG00000060971_40 (sequence is synthesized)
ttgtgcatgtacataaaaatgttgaaacttcctcagtaaaagaggtgtgctatttgtgcacctgcgtttgtgaaagataaaatttctcaagatcttggttctttggttgactacttgtgc

SEQ ID NO: 41961 - DNA, 120 bp, Artificial Sequence
  ENSG00000060971_41 (sequence is synthesized)
ctttggttgactacttgtgcagtggtgacccatcacaggttggtttgttgagacagggtcttactcaggcgcccaggctggagtggagtggctccatcttggctcactgcaacctctgct

SEQ ID NO: 41962 - DNA, 71 bp, Artificial Sequence
  ENSG00000060971_42 (sequence is synthesized)
cctctgcttccccgtgggtgccaccacacccagctaatttttcgtattttttgtagagacagggttttgct

SEQ ID NO: 41963 - DNA, 89 bp, Artificial Sequence
  ENSG00000060971_43 (sequence is synthesized)
ctatcagtttttgatcaatctcatcaaaagacgtaggttgtccatcatggtattcatatgactgcagttataaagctgggtgcacatga

SEQ ID NO: 41964 - DNA, 120 bp, Artificial Sequence
  ENSG00000060971_44 (sequence is synthesized)
gtattcatatgactgcagttataaagctgggtgcacatgattaccagcaatttatacagtttgcttttaacctatttatgaatacagtttgtctgtttataattgttataatcctgtgac

SEQ ID NO: 41965 - DNA, 120 bp, Artificial Sequence
  ENSG00000060971_45 (sequence is synthesized)
tattgttagcatacctgagtgtttatgcttgcagaaatttgtaattattttctattttattgtgtaaagtagcctgtgaagtgttctgttgtttttgtttctcaaataaatcccctttta

SEQ ID NO: 41966 - DNA, 120 bp, Artificial Sequence
  ENSG00000060971_46 (sequence is synthesized)
gtgttctgttgtttttgtttctcaaataaatccccttttaaaaatgtacatttttttttttttttgacatggaatctcactccgttgtccaggctggctggagtgcagtggtgtgatctc

SEQ ID NO: 41967 - DNA, 120 bp, Artificial Sequence
  ENSG00000060971_47 (sequence is synthesized)
gcctcccaaagtgttgggattacaggtttgagccaccacacctggcctaaaaatgtaaatatcttttaaatcaatcttttaaaaaagtttttttctaagatggggtcttgctatattgcc

SEQ ID NO: 41968 - DNA, 120 bp, Artificial Sequence
  ENSG00000060971_48 (sequence is synthesized)
ttctaagatggggtcttgctatattgcctaggctggtcttgaactcctaggcacaagtgatcctcttgcctcagcctgctgaatagctgggactacaagtagatgccaccaggccaggct

SEQ ID NO: 41969 - DNA, 120 bp, Artificial Sequence
  ENSG00000060971_49 (sequence is synthesized)
tccaaattattttttccagaattatattttcaggattttgatcttttaggattgtgattttcaggattttagactttagggattttgttcttccaggatttcaacatttgggatgattgt

SEQ ID NO: 41970 - DNA, 120 bp, Artificial Sequence
  ENSG00000060971_50 (sequence is synthesized)
gtttgggattgtgtcttttgggattatgatcgatccctggggaggggaacatgcacacagaaacaccctgaacttaggatgtaggggcatgatccctgttttccttaagggccagccttg

SEQ ID NO: 41971 - DNA, 120 bp, Artificial Sequence
  ENSG00000060971_51 (sequence is synthesized)
aaagggatactagcctgcagtgggcatctgtcaccgtgtgtgtgcccaagtgggaggccagggtaccgcttgcccacagatctggtctgatggttttgcatcctacttgtccatgacgtc

SEQ ID NO: 41972 - DNA, 120 bp, Artificial Sequence
  ENSG00000060971_52 (sequence is synthesized)
cttctgggtcagcctggtctggaggtaatttggtgggtgcctttgcccagccaattaagttttgttttcacagggcatacggagtggtgtccatgtgcatcgggactggaatgggagccg

SEQ ID NO: 41973 - DNA, 120 bp, Artificial Sequence
  ENSG00000060982_0 (sequence is synthesized)
gcaatccagcccgccacgtgtactcgccgccgcctcgggcactgccccaggtcttgctgcagccgggaccgcgctctgcagccgcagacccggtccacacggccaggggctacgaccctt

SEQ ID NO: 41974 - DNA, 120 bp, Artificial Sequence
  ENSG00000060982_1 (sequence is synthesized)
gggatctgccctccgctcagctcgagcttccctcgtggccgacggaacaatgaaggattgcagtaacggatgctccgcagagtgtaccggagaaggaggatcaaaagaggtggtggggac

SEQ ID NO: 41975 - DNA, 120 bp, Artificial Sequence
  ENSG00000060982_2 (sequence is synthesized)
ttttaaggctaaagacctaatagtcacaccagctaccattttaaaggaaaaaccagaccccaataatctggtttttggaactgtgttcacggatcatatgctgacggtggagtggtcctc

SEQ ID NO: 41976 - DNA, 120 bp, Artificial Sequence
  ENSG00000060982_3 (sequence is synthesized)
agagtttggatgggagaaacctcatatcaagcctcttcagaacctgtcattgcaccctggctcatcagctttgcactatgcagtggaattatttgaaggattgaaggcatttcgaggagt

SEQ ID NO: 41977 - DNA, 120 bp, Artificial Sequence
  ENSG00000060982_4 (sequence is synthesized)
agataataaaattcgactgtttcagccaaacctcaacatggatagaatgtatcgctctgctgtgagggcaactctgccggtatttgacaaagaagagctcttagagtgtattcaacagct

SEQ ID NO: 41978 - DNA, 120 bp, Artificial Sequence
  ENSG00000060982_5 (sequence is synthesized)
tgtgaaattggatcaagaatgggtcccatattcaacatctgctagtctgtatattcgtcctacattcattggaactgagccttctcttggagtcaagaagcctaccaaagccctgctctt

SEQ ID NO: 41979 - DNA, 120 bp, Artificial Sequence
  ENSG00000060982_6 (sequence is synthesized)
tgtactcttgagcccagtgggaccttatttttcaagtggaacctttaatccagtgtccctgtgggccaatcccaagtatgtaagagcctggaaaggtggaactggggactgcaagatggg

SEQ ID NO: 41980 - DNA, 120 bp, Artificial Sequence
  ENSG00000060982_7 (sequence is synthesized)
agggaattacggctcatctctttttgcccaatgtgaagcagtagataatgggtgtcagcaggtcctgtggctctatggagaggaccatcagatcactgaagtgggaactatgaatctttt

SEQ ID NO: 41981 - DNA, 120 bp, Artificial Sequence
  ENSG00000060982_8 (sequence is synthesized)
tctttactggataaatgaagatggagaagaagaactggcaactcctccactagatggcatcattcttccaggagtgacaaggcggtgcattctggacctggcacatcagtggggtgaatt

SEQ ID NO: 41982 - DNA, 120 bp, Artificial Sequence
  ENSG00000060982_9 (sequence is synthesized)
taaggtgtcagagagatacctcaccatggatgacttgacaacagccctggaggggaacagagtgagagagatgtttggctctggtacagcctgtgttgtttgcccagtttctgatatact

SEQ ID NO: 41983 - DNA, 120 bp, Artificial Sequence
  ENSG00000060982_10 (sequence is synthesized)
gtacaaaggcgagacaatacacattccaactatggagaatggtcctaagctggcaagccgcatcttgagcaaattaactgatatccagtatggaagagaagagagcgactggacaattgt

SEQ ID NO: 41984 - DNA, 120 bp, Artificial Sequence
  ENSG00000060982_11 (sequence is synthesized)
gctatcctgaatggaaaatagaggatacaatggaaaatagaggataccaactgtatgctactgggacagactgttgcatttgaattgtgatagatttctttggctacctgtgcataatgt

SEQ ID NO: 41985 - DNA, 120 bp, Artificial Sequence
  ENSG00000060982_12 (sequence is synthesized)
agtttgtagtatcaatgtgttacaagagtgattgtttcttcatgccagagaaaatgaattgcaatcatcaaatggtgtttcataacttggtagtagtaacttaccttaccttacctagaa

SEQ ID NO: 41986 - DNA, 120 bp, Artificial Sequence
  ENSG00000060982_13 (sequence is synthesized)
aaacattaatgtaagccatataacatgggattttcctcaatgattttagtgcctccttttgtacttcactcagatactaaatagtagtttattctttaatataagttacattctgctcct

SEQ ID NO: 41987 - DNA, 120 bp, Artificial Sequence
  ENSG00000060982_14 (sequence is synthesized)
caaacaaatgcaattttttgtgtgtgtttgaaagctaatttgagaaaatttcataggttacatttcctgcagcctatctttatccacagaaagtgttttcttttttttaaatcaagactt

SEQ ID NO: 41988 - DNA, 120 bp, Artificial Sequence
  ENSG00000060982_15 (sequence is synthesized)
ttaaaactggatttcctcccatcactgttttttgaaggtcctccaagtccgtgttaaggtaaatatctgttttcttcctgatgtcacagcctgagcatactctgtgcattaggaagacct

SEQ ID NO: 41989 - DNA, 120 bp, Artificial Sequence
  ENSG00000060982_16 (sequence is synthesized)
gagtgcatttcccaccattgtcctttccacattatgttgtagctggctggctgtcaggcgactacaagactgagggtcttgtgccttatagatctttgtatcccccatggctgacatata

SEQ ID NO: 41990 - DNA, 120 bp, Artificial Sequence
  ENSG00000060982_17 (sequence is synthesized)
gtaggtactcagtaaatggttttataatgaatcagtgaacattttgcttctatagaagtgtaccttctttgtttctatattatgaaacctctttattagaatttgtgattgattctgaca

SEQ ID NO: 41991 - DNA, 120 bp, Artificial Sequence
  ENSG00000060982_18 (sequence is synthesized)
gtgtatagatttaccttatattgtctttattttccatgagctactaagtcattagagatactctgaagcatagttagtttaggaaatcacttcatattgattgtattagaattatcttgg

SEQ ID NO: 41992 - DNA, 120 bp, Artificial Sequence
  ENSG00000060982_19 (sequence is synthesized)
aattgaagatatatccctagagcaggggaccccaacccccaggccatgggccacacagcaggaagaggtgagtggtgggccattgaggagcttcatctgtatttatggctacttcccatc

SEQ ID NO: 41993 - DNA, 120 bp, Artificial Sequence
  ENSG00000060982_20 (sequence is synthesized)
actcgaattaccacctgaactccacctcttgtcagctcagtggcagcattagattctcataggagcacaaatcctattgtgaactctgcatgcaagggatctaggctatgcgctccttat

SEQ ID NO: 41994 - DNA, 120 bp, Artificial Sequence
  ENSG00000060982_21 (sequence is synthesized)
caagggatctaggctatgcgctccttatgagaatctaatgcttgatgacctgaggtgtaacagtttcatcctgaaaccacccttcaccctgcagtctgtggaaaaattgtcttccacaaa

SEQ ID NO: 41995 - DNA, 120 bp, Artificial Sequence
  ENSG00000060982_22 (sequence is synthesized)
gaccactgctctagagagaggtcatgatatcataccaaccaaatggaaatgacaaatgttttatgtcaagtgttaattgcagaaataaatcttttttttttttttttggtagaaaacaaa

SEQ ID NO: 41996 - DNA, 120 bp, Artificial Sequence
  ENSG00000060982_23 (sequence is synthesized)
gaggcatactctgatttttatactctgtttttgcaggtgctcttttctttgaatggagatttgatgagcaagtggttaggatgcagggagagctactatgggtgatattttccttgttta

SEQ ID NO: 41997 - DNA, 120 bp, Artificial Sequence
  ENSG00000060982_24 (sequence is synthesized)
ggagctgtgagttaaaattgtatcctttgtggtttatctaaggaaagtcaaatcttgacagaaaacatttttccttggaaggtcaactctcagacattgtattttggtttccctcagtcc

SEQ ID NO: 41998 - DNA, 120 bp, Artificial Sequence
  ENSG00000060982_25 (sequence is synthesized)
tcataacttccttcttgctgaacatattttattctcttttcagagaaggaaaataaaaaggattctaaaagtttgatgcattggaaaaatttccttgaggcatttagcaacacatagaaa

SEQ ID NO: 41999 - DNA, 120 bp, Artificial Sequence
  ENSG00000060982_26 (sequence is synthesized)
atgggctttgattcttttccaaaacttttagccatagggtcttttatagacagggatagtaaaatgaaaattgagaaatataagatgaaaaggaatgataaaaatatcttttagggggct

SEQ ID NO: 42000 - DNA, 120 bp, Artificial Sequence
  ENSG00000060982_27 (sequence is synthesized)
tttaattggtgatctgaaatcttgggagaagctgttcttttcaggcctgaggtgctcttgactgtcgcctgcgcactgtgtaccccgagcaacattctaagggtgtgctttcgccttggc

SEQ ID NO: 42001 - DNA, 120 bp, Artificial Sequence
  ENSG00000060982_28 (sequence is synthesized)
taactcctttgacctcattcttcatatagtagtctaggaaaaagttgcaggtaatttaaactgtctagtggtacatagtaactaaatttctattcctatgagaaatgagaattatttatt

SEQ ID NO: 42002 - DNA, 120 bp, Artificial Sequence
  ENSG00000060982_29 (sequence is synthesized)
tgccatcaacacattttatactttgcatctccaaatttattgtggcgagacttgtccattgtgaaagttagagaacattatgtttgtatcatttctttcataaaacctcaagagcatttt

SEQ ID NO: 42003 - DNA, 120 bp, Artificial Sequence
  ENSG00000060982_30 (sequence is synthesized)
taagcccttttcatcagacccagtgaaaactaaggatagatgtttaaaaactggaggtctcctgataaggagaacacaatccaccattgtcatttaagtaataagacaggaaattgacct

SEQ ID NO: 42004 - DNA, 120 bp, Artificial Sequence
  ENSG00000060982_31 (sequence is synthesized)
tgacgctttcttgttaaatagatttaacaggaacatctgcacatcttttttccttgtgcactatttgtttaattgcagtggattaatacagcaagagtgccacattataactaggcaatt

SEQ ID NO: 42005 - DNA, 120 bp, Artificial Sequence
  ENSG00000060982_32 (sequence is synthesized)
atccattcttcaagacttagttattgtcacactaattgatcgtttaaggcataagatggtctagcattaggaacatgtgaagctaatctgctcaaaaagatcaacaaattaatattgttg

SEQ ID NO: 42006 - DNA, 120 bp, Artificial Sequence
  ENSG00000060982_33 (sequence is synthesized)
ctgatatttgcataattggctgcaattatttaatgtttaattgggttgatcaaatgagattcagcaattcacaagtgcattaatataaacagaactggtggcacttaaaatgataatgat

SEQ ID NO: 42007 - DNA, 120 bp, Artificial Sequence
  ENSG00000060982_34 (sequence is synthesized)
taacttatattgcatgttctcttcctttcacttttttcagtttctacatttcagaccgagcttgtcagcttttttgaaaacacatcagtagaaaccaagattttaaaatgaagtgtcaag

SEQ ID NO: 42008 - DNA, 120 bp, Artificial Sequence
  ENSG00000060982_35 (sequence is synthesized)
acaaaggcaaaacctgagcagttcctaaaaagatttgctgttagaaattttctttgtggcagtcatttattaaggattcaactcgtgatacaccaaaagaagagttgacttcagagatgt

SEQ ID NO: 42009 - DNA, 120 bp, Artificial Sequence
  ENSG00000060982_36 (sequence is synthesized)
gttccatgctctctagcacaggaatgaataaatttataacacctgctttagcctttgttttcaaaagcacaaaggaaaagtgaaagggaaagagaaacaagtgactgagaagtcttgtta

SEQ ID NO: 42010 - DNA, 120 bp, Artificial Sequence
  ENSG00000060982_37 (sequence is synthesized)
agaaacaagtgactgagaagtcttgttaaggaatcaggttttttctacctggtaaacattctctattcttttctcaaaagattgctgtaagaaaaaatgtaagacaaaaaaaaaaaaaaa

SEQ ID NO: 42011 - DNA, 120 bp, Artificial Sequence
  ENSG00000060982_38 (sequence is synthesized)
agttacaccttgggttaaaattcttcaccatattagttttgttgcttcataaaatttacctaagcaagtggtcttgcttgcctcaaatccaagcagtcttgaacacttggaggcaattaa

SEQ ID NO: 42012 - DNA, 120 bp, Artificial Sequence
  ENSG00000060982_39 (sequence is synthesized)
tgagtatatcttagtcaaaagaattgttggagctttttattaaagctacagtttcagttctgcttttggggaattgtgctatgaaagcagctgccaaaataagctcatttattttcttca

SEQ ID NO: 42013 - DNA, 120 bp, Artificial Sequence
  ENSG00000060982_40 (sequence is synthesized)
atcccactcagtgctcagtcactatattctgtttcctttttttttttcaagttgcatatttggtttccccttatgattgggaaagatgaattttcagcagaaaacattgtttgttcactt

SEQ ID NO: 42014 - DNA, 120 bp, Artificial Sequence
  ENSG00000060982_41 (sequence is synthesized)
tcaaagagtgatagtttctaaaacatttagagcaataaatattcatcagaggtaccaagtaagccggcagaagagttaagggttagagaaatcccttatttcatgtcttgactctaaaat

SEQ ID NO: 42015 - DNA, 120 bp, Artificial Sequence
  ENSG00000060982_42 (sequence is synthesized)
tatcaaagtacttttccttgtaatgtggatttcttcttatgcggatatgcaaaaacttcagttatacgtagtaatgctagcaggtaattttagtagacattttataacaactgtcacttt

SEQ ID NO: 42016 - DNA, 120 bp, Artificial Sequence
  ENSG00000060982_43 (sequence is synthesized)
gtttcgccacatgtagagtttgttcagctattttccagatatctccccacaaaaggaggcaaagggtaccagcttttcaatgagcattacctattacttggcaaagatgatgaagactct

SEQ ID NO: 42017 - DNA, 120 bp, Artificial Sequence
  ENSG00000060982_44 (sequence is synthesized)
attaatagttcatttgataaatgttgacataaccaacaatagagattaggaagttagttttaagaaatcaatggcatatagacattaccctcatggagtttgtattctactacttgaact

SEQ ID NO: 42018 - DNA, 120 bp, Artificial Sequence
  ENSG00000060982_45 (sequence is synthesized)
gattgtagctataaaagcatagttagatagctgaatagttagatcataagcaaagaaggccagaacacatctcttatcaagaaatcaatgaatagtttatctcatttttaaagcaacttt

SEQ ID NO: 42019 - DNA, 120 bp, Artificial Sequence
  ENSG00000060982_46 (sequence is synthesized)
atccttctttaattccttcctttcttctagtgcaaaactacttaataaggttggtgtttaggttagtgttcacaccattcctcatctggtgtgaattaccttctctttctttactattta

SEQ ID NO: 42020 - DNA, 120 bp, Artificial Sequence
  ENSG00000060982_47 (sequence is synthesized)
ctaccaacctagtacatgtgttgactgaattcttttcaaacaatgttgagttatcatggtgcacctaataaattaacaccacagattacagcatccttgctgattttctcagcaaagcca

SEQ ID NO: 42021 - DNA, 120 bp, Artificial Sequence
  ENSG00000060982_48 (sequence is synthesized)
gattagatggaaataaacaaagaaaatgatcctagagtgaatttttctagaaaatatctattatgaaccatgctgtttaaagtattagcttgaaggtgatggatccagctattcagaaaa

SEQ ID NO: 42022 - DNA, 120 bp, Artificial Sequence
  ENSG00000060982_49 (sequence is synthesized)
taactttcatataaccatgattttgcacagtatgaggtcttaaatgtgtggaaagagataaattttttatcattaccacaaaccccttttaaagattcaaaggtggaagaaagtgattta

SEQ ID NO: 42023 - DNA, 120 bp, Artificial Sequence
  ENSG00000060982_50 (sequence is synthesized)
ttttttctcttcagcatacatatataaaagacttgtcagatgtttaatttggggaggttgataatgaaacatatcaacagagtatagtagttatagtagtgtttgtgggtaaataatttc

SEQ ID NO: 42024 - DNA, 120 bp, Artificial Sequence
  ENSG00000060982_51 (sequence is synthesized)
ctggggtcagacatatataaacatatttgcttcaaaatgataaaggcatgaaatcagtcttaaaaattgaaatgggggtgatgggggagaaaaagaagaacaaatttgaagtgccctttc

SEQ ID NO: 42025 - DNA, 120 bp, Artificial Sequence
  ENSG00000060982_52 (sequence is synthesized)
aaatctgctggatacaagtattgaagttttaagtcatcttattctgtctgaaagtgtatttttcattctacaatagacccaatcaacaagacgtataacttgagttgcatgatgttcagt

SEQ ID NO: 42026 - DNA, 120 bp, Artificial Sequence
  ENSG00000060982_53 (sequence is synthesized)
ttatgtaatctactgttgggatggtaagaattgatgtaggctgtggtgtaagaatgaattaaaatatagtttcactggcttttctctacatatccactatcacaatggctaggtttcctg

SEQ ID NO: 42027 - DNA, 120 bp, Artificial Sequence
  ENSG00000060982_54 (sequence is synthesized)
ttgctcactattggattctggagaaaaatttaatgaaagatgatatcagaggaagaataagtggaggtagagaagaaaggaatgatagaggaggggaaaaaaacaaaacatatttttgtg

SEQ ID NO: 42028 - DNA, 120 bp, Artificial Sequence
  ENSG00000060982_55 (sequence is synthesized)
ttatccaaaggagctttttccttattctgtcaagcattgagatcttcttcagctttcaatgtagttgctaaatacaaataatgctactaggtagtgactaaatatagcaaacacttcatc

SEQ ID NO: 42029 - DNA, 120 bp, Artificial Sequence
  ENSG00000060982_56 (sequence is synthesized)
agatattagaattaggtcacactattgaggttataatctgaaggttgtgttacatagaaaccactttagattattatcaacttggactaggctttattttataatagcatagtaagtaat

SEQ ID NO: 42030 - DNA, 120 bp, Artificial Sequence
  ENSG00000060982_57 (sequence is synthesized)
atctattgtgtcatttcttcaaccattttattctaagatccatgaagcttcttgaggccaaataaaataataagtttagacaagaagtagattgtgacttttttcccttagagatactat

SEQ ID NO: 42031 - DNA, 120 bp, Artificial Sequence
  ENSG00000060982_58 (sequence is synthesized)
ttactatctcctatcctgataggtggaaggtttactgaattggaaattggttgactattagtttttaactaaaatgtgcaataacacattgcagtttcctcaaactagtttcctatgatc

SEQ ID NO: 42032 - DNA, 120 bp, Artificial Sequence
  ENSG00000060982_59 (sequence is synthesized)
attaaactcattctcagggttaagaaaggaatgtaaatttctgcctcaatttgtacttcatcaataagtttttgaagagtgcagatttttagtcaggtcttaaaaataaactcacaaatc

SEQ ID NO: 42033 - DNA, 120 bp, Artificial Sequence
  ENSG00000060982_60 (sequence is synthesized)
tggatgcatttctaaattctgcaaatgtttcctggggtgacttaacaaggaataatcccacaatatacctagctacctaatacatggagctggggctcaacccactgtttttaaggattt

SEQ ID NO: 42034 - DNA, 120 bp, Artificial Sequence
  ENSG00000060982_61 (sequence is synthesized)
gcgcttacttgtggctgaggaaaaataagtagttcgaggaagtagtttttaaatgtgagcttatagatagaaacagaatatcaacttaattatgaaattgttagaacctgttctcttgta

SEQ ID NO: 42035 - DNA, 120 bp, Artificial Sequence
  ENSG00000060982_62 (sequence is synthesized)
tctgaatctgattgcaattactattgtactgatagactccagccattgcaagtctcagatatcttagctgtgtagtgattcttgaaattctttttaagaaaaattgagtagaaagaaata

SEQ ID NO: 42036 - DNA, 120 bp, Artificial Sequence
  ENSG00000060982_63 (sequence is synthesized)
aaccctttgtaaatgaggcttggcttttgtgaaagatcatccgcaggctatgttaaaaggattttagctcactaaaagtgtaataatggaaatgtggaaaatatcgtaggtaaaggaaac

SEQ ID NO: 42037 - DNA, 120 bp, Artificial Sequence
  ENSG00000060982_64 (sequence is synthesized)
tacctcatgctctgaaggttttgtagaagcacaattaaacatctaaaatggctttgttacaccagagccatctggtgtgaagaactctatatttgtatgttgagagggcatggaataatt

SEQ ID NO: 42038 - DNA, 120 bp, Artificial Sequence
  ENSG00000060982_65 (sequence is synthesized)
gtattttgctggcaatagacacattctttattatttgcagattcctcatcaaatctgtaattatgcacagtttctgttatcaataaaacaaaagaatcctgtttgtgtggtttcatgaaa

SEQ ID NO: 42039 - DNA, 120 bp, Artificial Sequence
  ENSG00000060982_66 (sequence is synthesized)
tcagcattgttgaatgcatgaagtaataatgctaaattaacatttttatgatgtctcaaggtttctggtcaagggaagtaaatgtaggatagtatttttacaccaaaatgacacagagag

SEQ ID NO: 42040 - DNA, 120 bp, Artificial Sequence
  ENSG00000060982_67 (sequence is synthesized)
aattgagcacaccagaaagaccagaaaccacaccactggatagagattcaatatgtttctttttcaaacatttggacaagaaaaaaatgggcatttaaaaattcttccttcccctggtta

SEQ ID NO: 42041 - DNA, 120 bp, Artificial Sequence
  ENSG00000060982_68 (sequence is synthesized)
tggatttatctgtagtaaaacttagctttgtcgtttgagatttgcacagaatggggggagtagattacctcttcccattcattgtcataatggatctacatcactgataaacaccatact

SEQ ID NO: 42042 - DNA, 120 bp, Artificial Sequence
  ENSG00000060982_69 (sequence is synthesized)
tctatatgtggttaactagctttagaataaaagacactttaaaaagtaaaaggcctagagatcttcaatgaagtgtcccttttagccaaaccaggccttgcagaaattgtcctcaaaagc

SEQ ID NO: 42043 - DNA, 120 bp, Artificial Sequence
  ENSG00000060982_70 (sequence is synthesized)
accaagggagaacaaagccaagtgcagaattacccaagggtcacacattttgtattcattttcttataatttgcccaaatgatttgaagtacagcaaaacctgaagttttgcaaagagtt

SEQ ID NO: 42044 - DNA, 120 bp, Artificial Sequence
  ENSG00000060982_71 (sequence is synthesized)
actgtaaactgaacttaaaaatgtcagagtgctcggtgacccacttctccagaccctgtcaacctgtgaaaatattggcctttattcagatctctcaagaagttacgcgcagagtttgga

SEQ ID NO: 42045 - DNA, 120 bp, Artificial Sequence
  ENSG00000060982_72 (sequence is synthesized)
aggtctaggcaaaggttattagtcaagtgttcttacagtgtcaacgctcaattcccacaagcgtgagaaagagagacctgtcattcctgagggtgatgacatacatttactggagcttat

SEQ ID NO: 42046 - DNA, 120 bp, Artificial Sequence
  ENSG00000060982_73 (sequence is synthesized)
ataatttatcagataagacagcagtttccttcagggtagaaagtgtgttttctacattgatttagtacaaaacaaaaagaaaaggggatatttcaaattttataattatttttctgctaa

SEQ ID NO: 42047 - DNA, 120 bp, Artificial Sequence
  ENSG00000060982_74 (sequence is synthesized)
gctgattcagtgtgatttaagcatatttttcaaatcatgaatctgattccatatacatatgtgccttatattgtgataatttatttttaagtgaaatatgctatcatagcctgactttat

SEQ ID NO: 42048 - DNA, 120 bp, Artificial Sequence
  ENSG00000060982_75 (sequence is synthesized)
gtatagtggtgacaacttgcaggatcgcatttctgtaaccaaacggccgacagctgaggtgtagatgcttcctatggtctgtagaataatcactgggcttgttctctagctatgtctgta

SEQ ID NO: 42049 - DNA, 120 bp, Artificial Sequence
  ENSG00000060982_76 (sequence is synthesized)
tgcaatcgcgacagtgttgatcaaaacccatgatcattctctccaaaggtctttgtcactaagccactagggattctgaaaagttcgtgagctgaaacaaataaattgagttggaagatt

SEQ ID NO: 42050 - DNA, 120 bp, Artificial Sequence
  ENSG00000060982_77 (sequence is synthesized)
tgattgacaagaccacgaggctgagcgcgccctggagatttttctataaatggcttaacaccccagtctagactatttgctcggatataagggagacaattgtttttttgttctttgccg

SEQ ID NO: 42051 - DNA, 120 bp, Artificial Sequence
  ENSG00000060982_78 (sequence is synthesized)
gcgaaccctggctctgtagggctgacctggaatttaaccagtcttccctgagccggcggaggaggacaaaaaccgccgcgaccccggcagggtgggaagtgcagggcagcgctcccaaga

SEQ ID NO: 42052 - DNA, 120 bp, Artificial Sequence
  ENSG00000060982_79 (sequence is synthesized)
cacgcttgttggaggttcgggcctgggtgcttggttgtctgagcctccttttttgtgtttgcctgggtcctggagaggagcgcacggtatcatggattgcagtaacggatgctccgcaga

SEQ ID NO: 42053 - DNA, 120 bp, Artificial Sequence
  ENSG00000060982_80 (sequence is synthesized)
attttctgcagttcatttacttttgaacaacataattgcaattgtagactgagagaaattgaaactttcaaagagccatatttctattgcagatatattttcctgctcttccaaatctac

SEQ ID NO: 42054 - DNA, 120 bp, Artificial Sequence
  ENSG00000060982_81 (sequence is synthesized)
ttacagcatgagttcttcttttaaatattcaaatattttgaatattgccaagagctttgatttccatttttatctcttgtgggtttataaattaagaaaaaatactcatcttattttttt

SEQ ID NO: 42055 - DNA, 120 bp, Artificial Sequence
  ENSG00000060982_82 (sequence is synthesized)
aaacctctctatttttattgccctttattcaaataacttgttgacaaactttgaacttgaaccactgaggtaaaagaacaagaattaaacagatagtttaaacacatagcttaaaaggat

SEQ ID NO: 42056 - DNA, 120 bp, Artificial Sequence
  ENSG00000060982_83 (sequence is synthesized)
ctttttcccatttcctatccttgagcaaagaatatattcaaacactttggcagaagtcaatgaggttataccactaattccatgatgaaaatcaactgaatgtgatactgaaagagaagg

SEQ ID NO: 42057 - DNA, 120 bp, Artificial Sequence
  ENSG00000060982_84 (sequence is synthesized)
aagagaattgtcactgtaaagtcaactgttagtcatattaggaaaaaaaatacatacaatacaatttctcaaataaagtccaaatatacattcaacgtttaaaaataatgagtatttcag

SEQ ID NO: 42058 - DNA, 120 bp, Artificial Sequence
  ENSG00000060982_85 (sequence is synthesized)
tatttcagatatttgaactcagtctgttctttattccataaaagatataggtaagccgtgcacagtggctcacaactataatcccagcactttggcactttgggaggctgaggtgggagg

SEQ ID NO: 42059 - DNA, 120 bp, Artificial Sequence
  ENSG00000060982_86 (sequence is synthesized)
agcccagcctgggcaacatagggagacccctatctttacaaaataaaatataaaatataaaacctagttgggcatggcagcatacacctgtagtcccaggtgctcaggagactgagacag

SEQ ID NO: 42060 - DNA, 120 bp, Artificial Sequence
  ENSG00000060982_87 (sequence is synthesized)
catacacctgtagtcccaggtgctcaggagactgagacaggaggatcacttgggcctgggaggtcgaggctgcaatgagccaagattatgccactgcattccagcctgggtgacagggca

SEQ ID NO: 42061 - DNA, 120 bp, Artificial Sequence
  ENSG00000060982_88 (sequence is synthesized)
ccctccgctcagctcgagcttccctcgtggccgacggaacaatgaagaatctcactgtgttgttcaggctggagtgccgcagagtgatctctactcactgcaacctctgcctcctaggtt

SEQ ID NO: 42062 - DNA, 72 bp, Artificial Sequence
  ENSG00000060982_89 (sequence is synthesized)
gaactcctggcctcaagctatcattctttttgagcacaggaggaaactatggctgatctgctcattttactg

SEQ ID NO: 42063 - DNA, 120 bp, Artificial Sequence
  ENSG00000060982_90 (sequence is synthesized)
agcacaggaggaaactatggctgatctgctcattttactgtcaaaaatataggcagcttttgtattgtaacattatccccttaacagctgtccaactggtctatacatttcacctaacat

SEQ ID NO: 42064 - DNA, 120 bp, Artificial Sequence
  ENSG00000060982_91 (sequence is synthesized)
gcttggccacaccgcctgctttcgcttccagccgcgcgctccgtgccactgccgctctctgcagccccgcgtccccgcagcctccccatggccagcccgcttcgctccgctgcggccctt

SEQ ID NO: 42065 - DNA, 120 bp, Artificial Sequence
  ENSG00000061273_0 (sequence is synthesized)
cttcctctcgccgtctcacagtcgctctgcagcctccggcgactggggggatgtgaggccggcgccccagccccccgccccgccatgagccccccgctctgagggccccggcccctggat

SEQ ID NO: 42066 - DNA, 120 bp, Artificial Sequence
  ENSG00000061273_1 (sequence is synthesized)
gcacagccccggcgctgatgggacccaggtgagcccgggtgcccactactgcagccccactggcgcaggctgccccaggccctgtgcagacacaccaggccctcagccgcagcccatgga

SEQ ID NO: 42067 - DNA, 120 bp, Artificial Sequence
  ENSG00000061273_2 (sequence is synthesized)
cctgcgggtgggccagcggcccccagtggagcccccaccagagcccacattgctggccctgcagcgtccccagcgcctgcaccaccacctcttcctagcaggcctgcagcagcagcgctc

SEQ ID NO: 42068 - DNA, 120 bp, Artificial Sequence
  ENSG00000061273_3 (sequence is synthesized)
ggtggagcccatgaggctctccatggacacgccgatgcccgagttgcaggtgggaccccaggaacaagagctgcggcagcttctccacaaggacaagagcaagcgaagtgctgtagccag

SEQ ID NO: 42069 - DNA, 120 bp, Artificial Sequence
  ENSG00000061273_4 (sequence is synthesized)
cagcgtggtcaagcagaagctagcggaggtgattctgaaaaaacagcaggcggccctagaaagaacagtccatcccaacagccccggcattccctacagaaccctggagcccctggagac

SEQ ID NO: 42070 - DNA, 120 bp, Artificial Sequence
  ENSG00000061273_5 (sequence is synthesized)
ggaaggagccacccgctccatgctcagcagctttttgcctcctgttcccagcctgcccagtgaccccccagagcacttccctctgcgcaagacagtctctgagcccaacctgaagctgcg

SEQ ID NO: 42071 - DNA, 120 bp, Artificial Sequence
  ENSG00000061273_6 (sequence is synthesized)
ctataagcccaagaagtccctggagcggaggaagaatccactgctccgaaaggagagtgcgccccccagcctccggcggcggcccgcagagaccctcggagactcctccccaagtagtag

SEQ ID NO: 42072 - DNA, 120 bp, Artificial Sequence
  ENSG00000061273_7 (sequence is synthesized)
cagcacgcccgcatcagggtgcagctcccccaatgacagcgagcacggccccaatcccatcctgggctcggaggcgctcttgggccagcggctgcggctgcaggagacttctgtggcccc

SEQ ID NO: 42073 - DNA, 120 bp, Artificial Sequence
  ENSG00000061273_8 (sequence is synthesized)
gttcgccttgccgacagtgtccttgctgcccgcaatcactctggggctgcccgcccctgccagggctgacagtgaccgcaggacccatccgactctgggccctcgggggccaatcctggg

SEQ ID NO: 42074 - DNA, 120 bp, Artificial Sequence
  ENSG00000061273_9 (sequence is synthesized)
gagcccccacactcccctcttcctgccccatggcttggagcccgaggctgggggcaccttgccctctcgcctgcagcccattctcctcctggacccctcaggctctcatgccccgctgct

SEQ ID NO: 42075 - DNA, 120 bp, Artificial Sequence
  ENSG00000061273_10 (sequence is synthesized)
gactgtgcccgggcttgggcccttgcccttccactttgcccagtccttaatgaccaccgagcggctctctgggtcaggcctccactggccactgagccggactcgctcagagcccctgcc

SEQ ID NO: 42076 - DNA, 120 bp, Artificial Sequence
  ENSG00000061273_11 (sequence is synthesized)
ccccagtgccaccgctcccccaccgccgggccccatgcagccccgcctggagcagctcaaaactcacgtccaggtgatcaagaggtcagccaagccgagtgagaagccccggctgcggca

SEQ ID NO: 42077 - DNA, 120 bp, Artificial Sequence
  ENSG00000061273_12 (sequence is synthesized)
gataccctcggctgaagacctggagacagatggcgggggaccgggccaggtggtggacgatggcctggagcacagggagctgggccatgggcagcctgaggccagaggccccgctcctct

SEQ ID NO: 42078 - DNA, 120 bp, Artificial Sequence
  ENSG00000061273_13 (sequence is synthesized)
ccagcagcaccctcaggtgttgctctgggaacagcagcgactggctgggcggctcccccggggcagcaccggggacactgtgctgcttcctctggcccagggtgggcaccggcctctgtc

SEQ ID NO: 42079 - DNA, 120 bp, Artificial Sequence
  ENSG00000061273_14 (sequence is synthesized)
ccgggctcagtcttccccagccgcacctgcctcactgtcagccccagagcctgccagccaggcccgagtcctctccagctcagagacccctgccaggaccctgcccttcaccacagggct

SEQ ID NO: 42080 - DNA, 120 bp, Artificial Sequence
  ENSG00000061273_15 (sequence is synthesized)
gatctatgactcggtcatgctgaagcaccagtgctcctgcggtgacaacagcaggcacccggagcacgccggccgcatccagagcatctggtcccggctgcaggagcgggggctccggag

SEQ ID NO: 42081 - DNA, 120 bp, Artificial Sequence
  ENSG00000061273_16 (sequence is synthesized)
ccagtgtgagtgtctccgaggccggaaggcctccctggaagagctgcagtcggtccactctgagcggcacgtgctcctctacggcaccaacccgctcagccgcctcaaactggacaacgg

SEQ ID NO: 42082 - DNA, 120 bp, Artificial Sequence
  ENSG00000061273_17 (sequence is synthesized)
ctcctggcacagcggatgtttgtgatgctgccctgtggtggggttggggtggacactgacaccatctggaatgagcttcattcctccaatgcagcccgctgggccgctggcagtgtcact

SEQ ID NO: 42083 - DNA, 120 bp, Artificial Sequence
  ENSG00000061273_18 (sequence is synthesized)
gacctcgccttcaaagtggcttctcgtgagctaaagaatggtttcgctgtggtgcggcccccaggacaccatgcagatcattcaacagccatgggcttctgcttcttcaactcagtggcc

SEQ ID NO: 42084 - DNA, 120 bp, Artificial Sequence
  ENSG00000061273_19 (sequence is synthesized)
atcgcctgccggcagctgcaacagcagagcaaggccagcaagatcctcattgtagactgggacgtgcaccatggcaacggcacccagcaaaccttctaccaagaccccagtgtgctctac

SEQ ID NO: 42085 - DNA, 120 bp, Artificial Sequence
  ENSG00000061273_20 (sequence is synthesized)
atctccctgcatcgccatgacgacggcaacttcttcccggggagtggggctgtggatgaggtaggggctggcagcggtgagggcttcaatgtcaatgtggcctgggctggaggtctggac

SEQ ID NO: 42086 - DNA, 120 bp, Artificial Sequence
  ENSG00000061273_21 (sequence is synthesized)
ccccccatgggggatcctgagtacctggctgctttcaggatagtcgtgatgcccatcgcccgagagttctctccagacctagtcctggtgtctgctggatttgatgctgctgagggtcac

SEQ ID NO: 42087 - DNA, 120 bp, Artificial Sequence
  ENSG00000061273_22 (sequence is synthesized)
ccggccccactgggtggctaccatgtttctgccaaatgttttggatacatgacgcagcaactgatgaacctggcaggaggcgcagtggtgctggccttggagggtggccatgacctcaca

SEQ ID NO: 42088 - DNA, 120 bp, Artificial Sequence
  ENSG00000061273_23 (sequence is synthesized)
gccatctgtgacgcctctgaggcctgtgtggctgctcttctgggtaacagggtggatcccctttcagaagaaggctggaaacagaaacccaacctcaatgccatccgctctctggaggcc

SEQ ID NO: 42089 - DNA, 120 bp, Artificial Sequence
  ENSG00000061273_24 (sequence is synthesized)
gtgatccgggtgcacagtaaatactggggctgcatgcagcgcctggcctcctgtccagactcctgggtgcctagagtgccaggggctgacaaagaagaagtggaggcagtgaccgcactg

SEQ ID NO: 42090 - DNA, 120 bp, Artificial Sequence
  ENSG00000061273_25 (sequence is synthesized)
gcgtccctctctgtgggcatcctggctgaagataggccctcggagcagctggtggaggaggaagaacctatgaatctctaaggctctggaaccatctgcccgcccaccatgcccttggga

SEQ ID NO: 42091 - DNA, 120 bp, Artificial Sequence
  ENSG00000061273_26 (sequence is synthesized)
cctggttctcttctaacccctggcaatagcccccattcctgggtctttagagatcctgtgggcaagtagttggaaccagagaacagcctgcctgctttgacagttatcccagggagcgtg

SEQ ID NO: 42092 - DNA, 120 bp, Artificial Sequence
  ENSG00000061273_27 (sequence is synthesized)
agaaaatccctgggtctagaatgggaactggagaggaccctgagaggagacgggctgggcggcgacccccacagggctctcgagaacagattctcccctccagtatgggccctggctgtg

SEQ ID NO: 42093 - DNA, 120 bp, Artificial Sequence
  ENSG00000061273_28 (sequence is synthesized)
gcccccattcctcaggactgcacagaggaggactggctccggctccgtcgggctcacccttaaccactattcctggctctgcaaaccccagactttgcacacagcctcaggctccacaca

SEQ ID NO: 42094 - DNA, 120 bp, Artificial Sequence
  ENSG00000061273_29 (sequence is synthesized)
gaaatgtgaacttggcctcagacaggctggcccttcctaggctctaggggctaggggggagtggggagccaagaggtcccatattcctgagtgcaggggtagtccctctcacctgcttcc

SEQ ID NO: 42095 - DNA, 120 bp, Artificial Sequence
  ENSG00000061273_30 (sequence is synthesized)
tcagacgactctggaagcttccctctaccactgggcactgagacgaagctccctgacagccgagactggcagccctccatctggtccgtaccctcgccagaggcccccctacatcaacct

SEQ ID NO: 42096 - DNA, 120 bp, Artificial Sequence
  ENSG00000061273_31 (sequence is synthesized)
cctggcgatgccctggtggagcagatgggtgctctgggagtcctgtgcttcctgatccaatggtgccaaacccttcatctccccaagaagcgcagcatacccctgggacccctcggccac

SEQ ID NO: 42097 - DNA, 120 bp, Artificial Sequence
  ENSG00000061273_32 (sequence is synthesized)
tgcccactcggggagccttctctgtttctggggcctcccccaccatagctctgattcccaccccacataggagtagcctgactgagggggaaggggtgggagagaagatacagacatgga

SEQ ID NO: 42098 - DNA, 120 bp, Artificial Sequence
  ENSG00000061273_33 (sequence is synthesized)
ggaggggaggctgctctggcaaagtcttcaaggcttttgggggtccaggcctggggtcaagaaggaaaatgtgtgtgagcatgtgtgtgagtgaggcgtgtgtgtgagcgtgtgtgtgag

SEQ ID NO: 42099 - DNA, 120 bp, Artificial Sequence
  ENSG00000061273_34 (sequence is synthesized)
tgaggcgtgtgtgtgtgtctttcctaggacccaccataccctgtgtatgtatgcatgtttttgtaaaaaggaagaaaatggaaaaaaatctgaacaataaatgttttatttgctttaaaa

SEQ ID NO: 42100 - DNA, 120 bp, Artificial Sequence
  ENSG00000061273_35 (sequence is synthesized)
atgtttgtgatgctgccctgtggtggggttgggcctcttgcgactctctctgccttcctcgcctctcttggtctgcctcgccctccccatctccccatcatgccccccggcccctcccta

SEQ ID NO: 42101 - DNA, 120 bp, Artificial Sequence
  ENSG00000061273_36 (sequence is synthesized)
cttttcttgctgcctcaccccatcatcttcattgttctctgctggaatcttcttccccgtgacttctcccgcctctcccccaggctgacagtgaccgcaggacccatccgactctgggcc

SEQ ID NO: 42102 - DNA, 120 bp, Artificial Sequence
  ENSG00000061273_37 (sequence is synthesized)
atgaggtaaccgcatgtcagggccacatcttccagcctcattgacctcctcctgacacttactctgcctctgtcatgacgagctgtgtgatcctgggcagactgctgagcctctctgatc

SEQ ID NO: 42103 - DNA, 120 bp, Artificial Sequence
  ENSG00000061273_38 (sequence is synthesized)
ctaaacttccccacctggaaatggggaggctggatgagctgggctggcagctctaacaaactggtgttccccttctgggactctgctgtcctcatgtctctcttgcctcctgttttccag

SEQ ID NO: 42104 - DNA, 120 bp, Artificial Sequence
  ENSG00000061273_39 (sequence is synthesized)
tacccaaggagcaggcagatgggatgggacagggtgggagtggccaagcctgaaacaaggtaggcgaagcggaagcctctgttccaagttaggtccaggcagcatctcctggcctaggta

SEQ ID NO: 42105 - DNA, 120 bp, Artificial Sequence
  ENSG00000061273_40 (sequence is synthesized)
gagtgtgcttgtggctagaaggctggggcccctggggtgggagtgagctgggcctgtgggtccctgagagactggtggctgatgtactgttttctataggtggatcccctttcagaagaa

SEQ ID NO: 42106 - DNA, 120 bp, Artificial Sequence
  ENSG00000061273_41 (sequence is synthesized)
atgccccgctgctgactggtgagtctgctgcttcttcagggaaggggctgggtccctgcaccctgctaagagccaagcttgggatggacccatccttcctccccatctctgtccccctgt

SEQ ID NO: 42107 - DNA, 120 bp, Artificial Sequence
  ENSG00000061273_42 (sequence is synthesized)
cccctgggtcccgggagtgagtcacggcggagacgctgaggaggtgctggcgcagcaccccacccccaccgggcgaggggctgagcgcaggcctcgccccccagattccagcgctgaagg

SEQ ID NO: 42108 - DNA, 120 bp, Artificial Sequence
  ENSG00000061273_43 (sequence is synthesized)
ttgttaggcccacgtagtacccatggagcacatggaacagctggttattgcatttggccgatgaggaccaaggctcacgaaatctaaggtgacaagcctgtggtcaaatagcaagtggta

SEQ ID NO: 42109 - DNA, 120 bp, Artificial Sequence
  ENSG00000061273_44 (sequence is synthesized)
gtcaagccaggataagaattccagtctcctgccaatgcactcagcccttttaaaaaatgatatttattactgttgctctgcttgtaaaaagagctcagaagtattttagacattttgaag

SEQ ID NO: 42110 - DNA, 120 bp, Artificial Sequence
  ENSG00000061273_45 (sequence is synthesized)
agtacagaaaaacctaagaagaaaagaaaaatcaccaaccagtatcccaccacccagaagtaaaccctctgaaattctgctgtatttcagtccaggctttgttctggccatatgtacatg

SEQ ID NO: 42111 - DNA, 120 bp, Artificial Sequence
  ENSG00000061273_46 (sequence is synthesized)
tacagatgccatgaacacatgaactacgttttgtatcctgctttacttagttaacatattatgaatccttcttggcataattagtctttaaaactgagagtctcatagtatttcattaat

SEQ ID NO: 42112 - DNA, 120 bp, Artificial Sequence
  ENSG00000061273_47 (sequence is synthesized)
gtatttcatttttactgagggatcccttatcagttagacatttagattatagcttatttgaatttccttatgcataaatctttcctcatgcttgggattatttcccaaggttcactctaa

SEQ ID NO: 42113 - DNA, 120 bp, Artificial Sequence
  ENSG00000061273_48 (sequence is synthesized)
agaagtagcattcctgggtcacatggtgtgagcattttgagagtcgttggtgtcctagacgcacagaaattgaccctcccacccgcaatgagcaggaccctcctctgaagacttcccacg

SEQ ID NO: 42114 - DNA, 120 bp, Artificial Sequence
  ENSG00000061273_49 (sequence is synthesized)
ggtcagactgaaatagtcacttctccaaagctggatttgtctatcacatggtccagtgtcatcgtgggcttcttagctcccggtttgggggtttcctaggaattcttttccctcctgctg

SEQ ID NO: 42115 - DNA, 120 bp, Artificial Sequence
  ENSG00000061273_50 (sequence is synthesized)
ccccttggtagcctctctgggttcatgacacgtgtgtgagatgctgtacgttaggcctcatgctttgctctgagcacttgagggcctggtgctgggccctcgagtcctgggccacccagc

SEQ ID NO: 42116 - DNA, 120 bp, Artificial Sequence
  ENSG00000061273_51 (sequence is synthesized)
agtcgtgtccgcatgtgggaaggccgtggctctgtggcagccatgttggctggagctgtgttgatgtgttggctgctgccacctggggaagtgtctgggcgtgtgtggacaggtgtgagg

SEQ ID NO: 42117 - DNA, 120 bp, Artificial Sequence
  ENSG00000061273_52 (sequence is synthesized)
ggctggggctggggtaggggcaggatgaaatgcaggcctgtgtgggtgtgaggggtgtgtacccgcccggctccatgtgggtgcctgctgtggcggtgctggcgtgttctctgcagccaa

SEQ ID NO: 42118 - DNA, 120 bp, Artificial Sequence
  ENSG00000061273_53 (sequence is synthesized)
taagtgtgcccaggggtctcaggggggcgttgccagggctctcagctctcctccctgtggttctcccaggcccagcccctgcagaacctctgcttgttgtggttctgccagacagggtga

SEQ ID NO: 42119 - DNA, 120 bp, Artificial Sequence
  ENSG00000061273_54 (sequence is synthesized)
gccagggacttcctgaggtgccccctgcagcaggaagctccttttggacaggcgtgtctcggacccacagtctcccccgaatgcggagtccagcctaagccttcccctagaaggtgtctg

SEQ ID NO: 42120 - DNA, 120 bp, Artificial Sequence
  ENSG00000061273_55 (sequence is synthesized)
gtagatgttgagtgaggtttcaggagcagggccaaggctggggcttaggatcatctctcccttcaaagacccccatgactgggcattggccgccaggctgctctgtctgctcttaagtgg

SEQ ID NO: 42121 - DNA, 120 bp, Artificial Sequence
  ENSG00000061273_56 (sequence is synthesized)
caagttggggtacctcagcctggtccccagaccttgggctgcctggtgtgacatcacggtggtgcttccggtgtccttggcgatcccagcactccccactccgggacatagccccaaact

SEQ ID NO: 42122 - DNA, 120 bp, Artificial Sequence
  ENSG00000061273_57 (sequence is synthesized)
ccgctcgcgagctttgcttcctaagtcctcacccctttgtgaagggagcttcccgctccctccggctcagctctcctcgcctaacactatccctgcagtagtttctcaagcaaggtgtgt

SEQ ID NO: 42123 - DNA, 120 bp, Artificial Sequence
  ENSG00000061273_58 (sequence is synthesized)
agaggcaggggatggaggcctcattccggagggaaagtgggagctgtagctggtgggggactttgggagccagtcagtgccctattcacaacttcccatttcttgccactttctggtttt

SEQ ID NO: 42124 - DNA, 120 bp, Artificial Sequence
  ENSG00000061273_59 (sequence is synthesized)
tccaactgttgttgcttctgttttctcctccctcctctccctctctgtctttctctctctctctctttctccagcctcttgcgactctctctgccttcctcgcctctcttggtctgcctc

SEQ ID NO: 42125 - DNA, 120 bp, Artificial Sequence
  ENSG00000061273_60 (sequence is synthesized)
gccctccccatctccccatcatgccccccggcccctccctagccttgaggcccagggactgggtttggggggcctcccagcctgggctaggggccctgagtggaagacagtggtgcagac

SEQ ID NO: 42126 - DNA, 120 bp, Artificial Sequence
  ENSG00000061273_61 (sequence is synthesized)
ggcccctccagctccgaccgtcccgcagggcctgagcagagtcagctggggcttaaaaccccctcccggcccaaaccccaagtcccgcccaggtaacgccatgccccctcccctgaccgg

SEQ ID NO: 42127 - DNA, 120 bp, Artificial Sequence
  ENSG00000061273_62 (sequence is synthesized)
ggaggcaggcgtgatgctgccagcagagtgctggccagataatgggctggtgctgggacttaagctgggaaaaagtcatgctgggattgggggacacaggaggccttgcctttgggcggt

SEQ ID NO: 42128 - DNA, 120 bp, Artificial Sequence
  ENSG00000061273_63 (sequence is synthesized)
ggggcactggggaggcagcactgtctgcccagctccctgcccctggggtcctggccgtggggtggggaccacccccttgggccctggctcctgtgtgaagccttggatgatgcgggccct

SEQ ID NO: 42129 - DNA, 120 bp, Artificial Sequence
  ENSG00000061273_64 (sequence is synthesized)
gccagatcctagggcttccggtgccagccaggtgacctgctgttggtctggagtaagattcctgtgagtgacccaggcagcaatggtgagcaccccccagtgaggggttatcctctgagc

SEQ ID NO: 42130 - DNA, 120 bp, Artificial Sequence
  ENSG00000061273_65 (sequence is synthesized)
ccccccgatggagccagcagggcctaccagacagtggcccctcaaggtagggactggcctccatctctagcgacagccctagaccagggccaggtcaagagcaacactcaggccttgttt

SEQ ID NO: 42131 - DNA, 120 bp, Artificial Sequence
  ENSG00000061273_66 (sequence is synthesized)
gccaaaaggcctggttcccatccctcccctcagtcctggccacaggcgtctcaggagctctgctggcttgggggctgcgtcttgggataacccccacatttgtaaagtactttaaatttt

SEQ ID NO: 42132 - DNA, 120 bp, Artificial Sequence
  ENSG00000061273_67 (sequence is synthesized)
caacttcaactcaacatctattgagcatcttatgtcaagacccataatctatactagggataaaaatgagtaaaatagattcccatatcaagggctgggtaggggagccgtgatgtcttt

SEQ ID NO: 42133 - DNA, 120 bp, Artificial Sequence
  ENSG00000061273_68 (sequence is synthesized)
acataatggtaaagacatggctgattcctcttacggtgggtgccctcacactgagccagattccaggacatggttcctcacagcagcaggcaggaggagcattctcctggcctgggcacc

SEQ ID NO: 42134 - DNA, 120 bp, Artificial Sequence
  ENSG00000061273_69 (sequence is synthesized)
catgcagagcggccgtggtgatggtcagttctcccatgttgtgttcgtcccacctcccaggccctcctttcctgagtgctgggctgagcactggtgggggctgtgtttaagtgggaggcc

SEQ ID NO: 42135 - DNA, 120 bp, Artificial Sequence
  ENSG00000061273_70 (sequence is synthesized)
cgagcttggggctctgggaggtcactgtgacacagaccctgtctgcaggcaagcaggctctcctgatgctctcaggagccccgcacctgtggggaatgagtcaaaggtggccttgcagcc

SEQ ID NO: 42136 - DNA, 120 bp, Artificial Sequence
  ENSG00000061273_71 (sequence is synthesized)
acaggggatgagagaaaggctgggcacctgctaggactccctcacagccatgttgaacccactctgtgtaccctgtcaggctgtgcgggagtgggagcgaagtgaggagaggggcaggtg

SEQ ID NO: 42137 - DNA, 120 bp, Artificial Sequence
  ENSG00000061273_72 (sequence is synthesized)
ggagagccgaccctaagtggaggacaggcccgctcctccggggccctgggcctgagacaccaacctcaatatccggtctaggacgcagtgtggaggggcttgctttctccaaccctttct

SEQ ID NO: 42138 - DNA, 120 bp, Artificial Sequence
  ENSG00000061273_73 (sequence is synthesized)
attccaaggagcctagctctggctcctgaggtgaccccagcccagaagtcccattcccctctaccccaacccccagaatggcaggaggagcagggcagtctgggagtgacagatgggacc

SEQ ID NO: 42139 - DNA, 120 bp, Artificial Sequence
  ENSG00000061273_74 (sequence is synthesized)
ggatgtgaggccggcgccccagccccccgccccgccatgagccccccgctctgagggccccggcccctggatgcacagccccggcgctgctctccatggacacgccgatgcccgagttgc

SEQ ID NO: 42140 - DNA, 120 bp, Artificial Sequence
  ENSG00000061273_75 (sequence is synthesized)
atcccgtggagccgggcagggccctactcagatccttcggcggggaaagaggtcccttggaggggtctctggctgggaggtttctctgagcattgccccccatccttgctcacccatcag

SEQ ID NO: 42141 - DNA, 120 bp, Artificial Sequence
  ENSG00000061273_76 (sequence is synthesized)
tgccggcagctgcaacagcagagcaaggccagcaagatcctcattgtagactgggtagtgatgataagaataatagcagataacatcagtacaccactaatcacatccagacactgatgg

SEQ ID NO: 42142 - DNA, 120 bp, Artificial Sequence
  ENSG00000061273_77 (sequence is synthesized)
ttttacacatgatggatttaatcctgactataacccactttacagatgaaagacgtgcaccatggcaacggcacccagcaaaccttctaccaagaccccagtgtgctctacatctccctg

SEQ ID NO: 42143 - DNA, 120 bp, Artificial Sequence
  ENSG00000061273_78 (sequence is synthesized)
ataatacctaccttgcaggaccacgacaggattaagtgaggaaaaacccccatgagagtgttttgccattgtcaagtgagcctgagggaggctgaggggggatcaggctgtatcatgccc

SEQ ID NO: 42144 - DNA, 120 bp, Artificial Sequence
  ENSG00000061273_79 (sequence is synthesized)
cgttcccctcagcaggcatggtgtgtgtgtgggggtgccagtgggggagggctgggcagtgattcaaatcagatcctggaactttcctgaggctgccccaggccctgtgcagacacacca

SEQ ID NO: 42145 - DNA, 120 bp, Artificial Sequence
  ENSG00000061337_0 (sequence is synthesized)
tgagggctttgctatgacctcagtcccctcacggagccacgactgccccttgctgccacagcctttccaagaccctgcccggccctgccccatcctcagccccgagtcaccatgggcagc

SEQ ID NO: 42146 - DNA, 120 bp, Artificial Sequence
  ENSG00000061337_1 (sequence is synthesized)
gtcagtagcctcatctccggccacagcttccacagcaagcactgccgggcttcgcagtacaagctgcgcaagtcctcccacctcaagaagctcaaccggtattccgacgggctgctgagg

SEQ ID NO: 42147 - DNA, 120 bp, Artificial Sequence
  ENSG00000061337_2 (sequence is synthesized)
tttggcttctcccaggactccggtcacggcaagtccagctccaaaatgggcaagagcgaagacttcttctacatcaaggtcagccagaaagcccggggctcccatcacccagattacacg

SEQ ID NO: 42148 - DNA, 120 bp, Artificial Sequence
  ENSG00000061337_3 (sequence is synthesized)
gcactgtccagcggggatttagggggccaggctggggtggactttgacccgtccacaccccccaagctcatgcccttctccaatcagctagaaatgggctccgagaagggtgcagtgagg

SEQ ID NO: 42149 - DNA, 120 bp, Artificial Sequence
  ENSG00000061337_4 (sequence is synthesized)
cccacagccttcaagcctgtgctgccacggtcaggagccatcctgcactcctccccggagagtgccagccaccagctgcaccccgcccctccagacaagcccaaggagcaggagctgaag

SEQ ID NO: 42150 - DNA, 120 bp, Artificial Sequence
  ENSG00000061337_5 (sequence is synthesized)
cctggcctgtgctctggggcgctgtcagactccggccggaactccatgtccagcctgcccacacacagcaccagcagcagctaccagctggacccgctggtcacacccgtgggacccaca

SEQ ID NO: 42151 - DNA, 120 bp, Artificial Sequence
  ENSG00000061337_6 (sequence is synthesized)
agccgttttgggggctccgcccacaacatcacccagggcatcgtcctccaggacagcaacatgatgagcctgaaggctctgtccttctccgacggaggtagcaagctgggccactcgaac

SEQ ID NO: 42152 - DNA, 120 bp, Artificial Sequence
  ENSG00000061337_7 (sequence is synthesized)
aaggcagacaagggcccctcgtgtgtccgctcccccatctccacggacgagtgcagcatccaggagctggagcagaagctgttggagagggagggcgccctccagaagctgcagcgcagc

SEQ ID NO: 42153 - DNA, 120 bp, Artificial Sequence
  ENSG00000061337_8 (sequence is synthesized)
tttgaggagaaggagcttgcctccagcctggcctacgaggagcggccgcggcgctgcagggacgagctggagggcccggagcccaaaggcggcaacaagctcaagcaggcctcgcagaag

SEQ ID NO: 42154 - DNA, 120 bp, Artificial Sequence
  ENSG00000061337_9 (sequence is synthesized)
agccagcgcgcgcagcaggtcctgcacctgcaggtactgcagcttcagcaggagaagcggcagctccggcaggagctcgagagcctcatgaaggagcaggacctgctggagaccaagctc

SEQ ID NO: 42155 - DNA, 120 bp, Artificial Sequence
  ENSG00000061337_10 (sequence is synthesized)
aggtcctacgagagggagaagaccagcttcggccccgcgctggaggagacccagtgggaggtgtgccagaagtcaggcgagatctccctcctgaagcagcagctgaaggagtcccagacg

SEQ ID NO: 42156 - DNA, 120 bp, Artificial Sequence
  ENSG00000061337_11 (sequence is synthesized)
gaggtgaacgccaaggctagcgagatcctgggtctcaaggcacagctgaaggacacgcggggcaagctggagggcctggagctgaggacccaggacctggagggcgccctgcgcaccaag

SEQ ID NO: 42157 - DNA, 120 bp, Artificial Sequence
  ENSG00000061337_12 (sequence is synthesized)
ggcctggagctggaggtctgtgagaatgagctgcagcgcaagaagaacgaggcggagctgctgcgggagaaggtgaacctgctggagcaggagctgcaggagctgcgggcccaggccgcc

SEQ ID NO: 42158 - DNA, 120 bp, Artificial Sequence
  ENSG00000061337_13 (sequence is synthesized)
ctggcccgcgacatggggccgcccaccttccccgaggacgtccctgccctgcagcgggagctggagcggctgcgggccgagctgcgggaggagcggcaaggccatgaccagatgtcctcg

SEQ ID NO: 42159 - DNA, 120 bp, Artificial Sequence
  ENSG00000061337_14 (sequence is synthesized)
ggcttccagcatgagcggctcgtgtggaaggaggagaaggagaaggtgattcagtaccagaaacagctgcagcagagctacgtggccatgtaccagcggaaccagcgcctggagaaggcc

SEQ ID NO: 42160 - DNA, 120 bp, Artificial Sequence
  ENSG00000061337_15 (sequence is synthesized)
ctgcagcagctggcacgtggggacagcgccggggagcccttggaggttgacctggaaggggctgacatcccctacgaggacatcatagccactgagatctgaggggctgcctgggaaggc

SEQ ID NO: 42161 - DNA, 120 bp, Artificial Sequence
  ENSG00000061337_16 (sequence is synthesized)
gagtctggggacctggcactgggaggcagggctctcccgtgcatcccccctgctcagcaattcagacccctctgagagacgccactccctgggacacagacccaggacccccgaggggag

SEQ ID NO: 42162 - DNA, 120 bp, Artificial Sequence
  ENSG00000061337_17 (sequence is synthesized)
ggcaggatggcctttccttccctctctgatgtcccagtgctcaccagccctgcagcccaccagacgtcaggccctgactcctctggctttcccaggagatgggtccaggggtctgtctgc

SEQ ID NO: 42163 - DNA, 120 bp, Artificial Sequence
  ENSG00000061337_18 (sequence is synthesized)
tttggttaagggctccctaaactttggcctttgttcgaaatagatatcctctccccctcctccagggaaggtggccacagcaagtacagcggctcccctctgcttctcatcccaacctct

SEQ ID NO: 42164 - DNA, 120 bp, Artificial Sequence
  ENSG00000061337_19 (sequence is synthesized)
ttttcctcctggacacattggaatgccttggaaatagaaagaagccatatatgaccagaagccttggaaccagccccatcagaacctgagctattttcctctggccgcagaggtgtaggg

SEQ ID NO: 42165 - DNA, 120 bp, Artificial Sequence
  ENSG00000061337_20 (sequence is synthesized)
gtggaatgagccgcggggaagctggctttgaaacctcagggctgtcccagccccggcaagccacaggaaggaggggagagacaggcagcccagcagtgtggagaccctgccacagccaga

SEQ ID NO: 42166 - DNA, 120 bp, Artificial Sequence
  ENSG00000061337_21 (sequence is synthesized)
ggagggcagagggagaatccaagggttgagagccagtggcgggtgatggccagcccctggggcccagcccctgtttactggttcttgcaaatgggagctgagcagcctctggacagccag

SEQ ID NO: 42167 - DNA, 120 bp, Artificial Sequence
  ENSG00000061337_22 (sequence is synthesized)
ggtgctgggaagggagggttgaaaccaccgtgaaccagagggtgtggctttccaggcaccctcagggagcctccccatctgtccagctggggccagaggctgggagtccctacctgcttc

SEQ ID NO: 42168 - DNA, 120 bp, Artificial Sequence
  ENSG00000061337_23 (sequence is synthesized)
acgttggccggcggctactctggaatgtttttccctccccagaatcaagcttttgcttgatccagaagagcccatatcactaagatggcatatatgtgatctgggcattttcctcctctg

SEQ ID NO: 42169 - DNA, 120 bp, Artificial Sequence
  ENSG00000061337_24 (sequence is synthesized)
cctacagccaggtttagcggcaaacctttcccccttagcaccttcagggctgagttctgggtttctagaggtcaggacggctcctcagagcgccaggaagccagagccccaagcaggacg

SEQ ID NO: 42170 - DNA, 120 bp, Artificial Sequence
  ENSG00000061337_25 (sequence is synthesized)
aaaaagaggcatacacacagcagtgtgaatagcctggccaccagccatcctccctccacctcaagacccccatttgtcccagactaaaggatccagagagcagctccctttctcaggagc

SEQ ID NO: 42171 - DNA, 120 bp, Artificial Sequence
  ENSG00000061337_26 (sequence is synthesized)
ttgggcagtgccccagggagtccagggtttctctgcagatgtgcggagcgggaggcggtggtagagagagataaaaggtggagtttctctgttgtttggttcagggattttatttttaat

SEQ ID NO: 42172 - DNA, 120 bp, Artificial Sequence
  ENSG00000061337_27 (sequence is synthesized)
gggactacaggtgcgcgccaccgtgcctggctaacttttcattttttttgtagggacggggtctcgttttgttgccaaagctggtctcaaacttgtggcctcaagcaatccacctgcctt

SEQ ID NO: 42173 - DNA, 120 bp, Artificial Sequence
  ENSG00000061337_28 (sequence is synthesized)
ggcctcccaaagtgctgagattgcagatgtgagccaccgtgcctggccagatttttcttttattcttctttctttttcttttttgctttcttgtcttttcagaagcaagccagacctagc

SEQ ID NO: 42174 - DNA, 120 bp, Artificial Sequence
  ENSG00000061337_29 (sequence is synthesized)
aggctgttccatgttctatttttgactgtagccacagctgctgttctcaggacagcatcccttcccacatgcctgcgcctgctgcctgctgagatgaggaggggagcgtctgggaacttg

SEQ ID NO: 42175 - DNA, 120 bp, Artificial Sequence
  ENSG00000061337_30 (sequence is synthesized)
cgagtccaaggccagtccccatttctgcctcgctcaccgctggcccttagagaccccgaggtaggggtggggagatgcttctctccttgccccccgccctcatgggtcctagcccttccc

SEQ ID NO: 42176 - DNA, 120 bp, Artificial Sequence
  ENSG00000061337_31 (sequence is synthesized)
tgagtgcgggctgaggccagagtcaccttttctgtggctggctctaccttcctgtccctgaggttaaacggtgcccatcctgccatcctcaaacgacagaggagcttttctggaatttca

SEQ ID NO: 42177 - DNA, 120 bp, Artificial Sequence
  ENSG00000061337_32 (sequence is synthesized)
aaccattgctcttagtcccaagctaggcttaaacctggaatctacaagccaaaagtccctccctgcctgagggcagtaccctccattgggcacagtccagacccaagtcaaagatgcccc

SEQ ID NO: 42178 - DNA, 120 bp, Artificial Sequence
  ENSG00000061337_33 (sequence is synthesized)
attccttgcgcctcagccctcagttccttcatttccaccaggccgtgccttgtttgagtttttcctcccagtgagactgccccacggagacagaggaaagggctggctccccctccccag

SEQ ID NO: 42179 - DNA, 120 bp, Artificial Sequence
  ENSG00000061337_34 (sequence is synthesized)
gctggagacccccccccaactccaggaaagagcagtcagagtccagtgctctgcctcagacgttgcctgagaagaagtggctgccacacccaggggaaggccctgaggcggaggctgtgc

SEQ ID NO: 42180 - DNA, 120 bp, Artificial Sequence
  ENSG00000061337_35 (sequence is synthesized)
tccgccatggtgtcccggtaccttccatacacagaggagtgcagccttctccatatctccatggccctgtcccaggccggcccagatgtgtcccccccaggccttgtcctacgtccaagg

SEQ ID NO: 42181 - DNA, 120 bp, Artificial Sequence
  ENSG00000061337_36 (sequence is synthesized)
tggcagatgtcttccctgggctgccaccagcccccgccccagagtggcccaccgtggcactagaatgcaagtatcctgcgaccttgcaacctcaccttcctgtgggtgttctttcctgcc

SEQ ID NO: 42182 - DNA, 120 bp, Artificial Sequence
  ENSG00000061337_37 (sequence is synthesized)
ctgtccaaaagcgccctcactattcttggaccatgccagattctgcctctctggaaagaggctctggacagcagaagcctccaagcacagagcctggccccaggccccagacagggtggg

SEQ ID NO: 42183 - DNA, 120 bp, Artificial Sequence
  ENSG00000061337_38 (sequence is synthesized)
cttcctgcccttccctctgggcacgcctgctggccgacccactgacccactcggatggaccaacctgctctgtccccaaaggacgcctgcaggagagagcagcactccgcatcacctcac

SEQ ID NO: 42184 - DNA, 120 bp, Artificial Sequence
  ENSG00000061337_39 (sequence is synthesized)
caaggatcggactctgcccctggacctgggaacgactggactgtcacggggttccctcctagctctcccagtgaactcctgccaggcacacacagcccctatagcactgagctcacatgg

SEQ ID NO: 42185 - DNA, 120 bp, Artificial Sequence
  ENSG00000061337_40 (sequence is synthesized)
gactgggatatgggggcatctcttccccagagaggcactcagtgagcctcctgtgcctggccccagcctgggccatctcttaggtgagacagttgcccgaaactaagccaggcctggctg

SEQ ID NO: 42186 - DNA, 120 bp, Artificial Sequence
  ENSG00000061337_41 (sequence is synthesized)
gaggagcagcagcttggggagagggatttccctgcagacctcaagccatcatgcggtgggtgctgccatgacagaggctgcacccctgggccagcggggctgctcacccacctcttgtgc

SEQ ID NO: 42187 - DNA, 120 bp, Artificial Sequence
  ENSG00000061337_42 (sequence is synthesized)
aaggtggcctttgtgctgcgcctgcaggcagagctggagcccccagcagaggcaggctgggacggaccagcatctggaagatgtacatagttatttttctctttgtggtttcttgtttgg

SEQ ID NO: 42188 - DNA, 120 bp, Artificial Sequence
  ENSG00000061337_43 (sequence is synthesized)
tttggtttgcttttgacagcttcattttatttttgacgtcactttttggccatgtaaactatttgtggcaattttatgtttttatttatgaataaagaatgccatttctcacgccctcta

SEQ ID NO: 42189 - DNA, 120 bp, Artificial Sequence
  ENSG00000061337_44 (sequence is synthesized)
gcagaggccggcgcgcctggagctggcgggttggcagcggccgggcggggaggccgaaagtttctctgcccgcctcggccagtgagtgggagccgggagctgcatcccgcgcagtgggac

SEQ ID NO: 42190 - DNA, 120 bp, Artificial Sequence
  ENSG00000061337_45 (sequence is synthesized)
cggcccggcccgctcagcagctctggaaaaagagagacgggaacacaccgggaaacactgggaaaaaaaaaaagtctcaagtgcgcccgaggcgcagggggcaggtctacggctctcgca

SEQ ID NO: 42191 - DNA, 120 bp, Artificial Sequence
  ENSG00000061455_0 (sequence is synthesized)
gccagagcgtggaaccaaggagccaggacgcggcagcggccaagcgcagcagcccacggcggttgagtcgggcgcccaggtccgtccgcactctcgcgccctccgcgggcctcccaattt

SEQ ID NO: 42192 - DNA, 120 bp, Artificial Sequence
  ENSG00000061455_1 (sequence is synthesized)
tctcgcttgcaggtcgggaggtttccgggcggcacaatctctaggactctcctcccgcgctgctcaggggcatgtagcgcacgcagggcgcacactctcgcgcacccgcacgctcaccga

SEQ ID NO: 42193 - DNA, 120 bp, Artificial Sequence
  ENSG00000061455_2 (sequence is synthesized)
gacacccgcacgcacccaccggcagcaccgagttttcagttcgaggcgccggacatgctgaagcccggagaccccggcggttcggccttcctcaaagtggacccagcctacctgcagcac

SEQ ID NO: 42194 - DNA, 120 bp, Artificial Sequence
  ENSG00000061455_3 (sequence is synthesized)
tacctgcagcactggcagcaactcttccctcacggaggcgcaggcccgctcaagggcagcggcgccgcgggtctcctgagcgcgccgcagcctcttcagccgccgccgccgcccccgccc

SEQ ID NO: 42195 - DNA, 120 bp, Artificial Sequence
  ENSG00000061455_4 (sequence is synthesized)
gagcctccgccggacagcctgcgcccgcggcccgcctctctctcctccgcctcgtccacgccggcttcctcttccacctccgcctcctccgcctcctcctgcgctgctgcggccgctgcc

SEQ ID NO: 42196 - DNA, 120 bp, Artificial Sequence
  ENSG00000061455_5 (sequence is synthesized)
gccgcgctggctggtctctcggccctgccggtgtcgcagctgccggtgttcgcgcctctagccgccgctgccgtcgccgccgagccgctgccccccaaggaactgtgcctcggcgccacc

SEQ ID NO: 42197 - DNA, 120 bp, Artificial Sequence
  ENSG00000061455_6 (sequence is synthesized)
tccggccccgggcccgtcaagtgcggtggtggtggcggcggcggcggggagggtcgcggcgccccgcgcttccgctgcagcgcagaggagctggactattacctgtatggccagcagcgc

SEQ ID NO: 42198 - DNA, 120 bp, Artificial Sequence
  ENSG00000061455_7 (sequence is synthesized)
atggagatcatcccgctcaaccagcacaccagcgaccccaacaaccgttgcgacatgtgcgcggacaaccgcaacggcgagtgccctatgcatgggccactgcactcgctgcgccggctt

SEQ ID NO: 42199 - DNA, 120 bp, Artificial Sequence
  ENSG00000061455_8 (sequence is synthesized)
gtgggcaccagcagcgctgcggccgccgcgcccccgccggagctgccggagtggctgcgggacctgcctcgcgaggtgtgcctctgcaccagtactgtgcccggcctggcctacggcatc

SEQ ID NO: 42200 - DNA, 120 bp, Artificial Sequence
  ENSG00000061455_9 (sequence is synthesized)
tgcgcggcgcagaggatccagcaaggcacctggattggacctttccaaggcgtgcttctgcccccagagaaggtgcaggcaggcgccgtgaggaacacgcagcatctctgggagatatat

SEQ ID NO: 42201 - DNA, 120 bp, Artificial Sequence
  ENSG00000061455_10 (sequence is synthesized)
gaccaggatgggacactacagcactttattgatggtggggaacctagtaagtcgagctggatgaggtatatccgatgtgcaaggcactgcggagaacagaatctaacagtagttcagtac

SEQ ID NO: 42202 - DNA, 120 bp, Artificial Sequence
  ENSG00000061455_11 (sequence is synthesized)
aggtcgaatatattctaccgagcctgtatagatatccctaggggcaccgagcttctggtgtggtacaatgacagctatacgtctttctttgggatccccttacaatgcattgcccaggat

SEQ ID NO: 42203 - DNA, 120 bp, Artificial Sequence
  ENSG00000061455_12 (sequence is synthesized)
gaaaacttaaatgtcccttcaacggtaatggaagccatgtgcagacaagacgccctgcagcccttcaacaaaagcagcaaactcgcccctaccacccagcagcgctccgttgttttcccc

SEQ ID NO: 42204 - DNA, 120 bp, Artificial Sequence
  ENSG00000061455_13 (sequence is synthesized)
cagactccgtgcagcaggaacttctctcttctggataagtctgggcccattgaatcaggatttaatcaaatcaacgtgaaaaaccagcgagtcctggcaagcccaacttccacaagccag

SEQ ID NO: 42205 - DNA, 120 bp, Artificial Sequence
  ENSG00000061455_14 (sequence is synthesized)
ctccactcggagttcagtgactggcatctttggaaatgtgggcagtgctttaagactttcacccagcggatcctcttacagatgcacgtgtgcacgcagaaccccgacagaccctaccaa

SEQ ID NO: 42206 - DNA, 120 bp, Artificial Sequence
  ENSG00000061455_15 (sequence is synthesized)
tgcggccactgctcccagtccttttcccagccttcagaactgaggaaccacgtggtcactcactctagtgaccggcctttcaagtgcggctactgtggtcgtgcctttgccggggccacc

SEQ ID NO: 42207 - DNA, 120 bp, Artificial Sequence
  ENSG00000061455_16 (sequence is synthesized)
accctcaacaaccacatccgaacccacactggagaaaagcccttcaagtgcgagaggtgtgagaggagcttcacgcaggccacccagctgagccgacaccagcggatgcccaatgagtgc

SEQ ID NO: 42208 - DNA, 120 bp, Artificial Sequence
  ENSG00000061455_17 (sequence is synthesized)
aagccaataactgagagcccagaatcaatcgaagtggattaacggattgactggttggaattaaactgcaaggaaagtcatgattaaatgtcacggacacttaagcaaaaccaaagattt

SEQ ID NO: 42209 - DNA, 120 bp, Artificial Sequence
  ENSG00000061455_18 (sequence is synthesized)
cctctgagcaactttcaatcagtcccagaaaaccaaaagcagtaataaaataagtaagatgttaagagatattgatcctggcatggaagtcagaccaggaaagagattatttatttatga

SEQ ID NO: 42210 - DNA, 120 bp, Artificial Sequence
  ENSG00000061455_19 (sequence is synthesized)
cttagggatgagacttatttcagtggacaactaacctgggatggttaacatttccagtcccaccatgtattttgctttgtttctaaaaagctttttaaaaactgttatttaataccaaag

SEQ ID NO: 42211 - DNA, 120 bp, Artificial Sequence
  ENSG00000061455_20 (sequence is synthesized)
ggaggaatcgtatgggttcttctgcccaccgttgtgactaagaatgcacagggacttggttctcgttgcacctttttttagtaacatgtttcatggggacccactgtacagcccttcatt

SEQ ID NO: 42212 - DNA, 120 bp, Artificial Sequence
  ENSG00000061455_21 (sequence is synthesized)
ctgctgtgtcagtttggcctggcctgacactggctgccccagcggggaccacggaagcagagtgagagccttcgctgagtcaatgctaccttcagccccagacgcatcccatttccatgt

SEQ ID NO: 42213 - DNA, 120 bp, Artificial Sequence
  ENSG00000061455_22 (sequence is synthesized)
cttccatgctcactgctcatgcactttttacacggtttcttccaaacagcccggtcttgatgcaggagagtctggaaaaggaagaaaatggtttcagtttcaaaattcaaaggaaaaagt

SEQ ID NO: 42214 - DNA, 120 bp, Artificial Sequence
  ENSG00000061455_23 (sequence is synthesized)
tgaggacttattttgtcctgtcaagattgcaagaacatgtaaaatgtacggagcttcataatacgttatattgttccgaagcagctcgttgagaaacatttgttttcaataacattttag

SEQ ID NO: 42215 - DNA, 120 bp, Artificial Sequence
  ENSG00000061455_24 (sequence is synthesized)
cttaaaaaaaaaaaaagaaaatgaaaataaagttctttggtttaaggctggagataaggtgttaggcttcattgtaatttttttagttgtttctgtgaaagtgttgaacatgtgaacaaa

SEQ ID NO: 42216 - DNA, 120 bp, Artificial Sequence
  ENSG00000061455_25 (sequence is synthesized)
aatagtgccaaaccccatcgtcaaggcccttttagcaattttatctttcttcctcttgcagatgaaccccaggagccccctttcctctctcctgagtgtgggaggagcatgtctacaaac

SEQ ID NO: 42217 - DNA, 120 bp, Artificial Sequence
  ENSG00000061455_26 (sequence is synthesized)
acaagtgaaaatagcccagacaaggagactttgagaggaggaaccatggagaaggttgtggttagaacagatagcccaggagcagctaattttatcaataggattactttgtcttttctt

SEQ ID NO: 42218 - DNA, 120 bp, Artificial Sequence
  ENSG00000061455_27 (sequence is synthesized)
gagattgattaattgaaagagaaggaattctccacacaatttcactattctttgagtgctgagaatgtgagtttaatttcagctagcctgttggtggttcaacagtggtgctcaatgaaa

SEQ ID NO: 42219 - DNA, 120 bp, Artificial Sequence
  ENSG00000061455_28 (sequence is synthesized)
ttgggtcacatttaatgaaatgatctagttttgggaagagctgatagctcccagcagcatctcagcgactgtctaccttgatggccagtttagataaaaactgttcagttttatctagag

SEQ ID NO: 42220 - DNA, 120 bp, Artificial Sequence
  ENSG00000061455_29 (sequence is synthesized)
tgtttaataacaacagtttctgtttgtaaatttcatcatcacctgatatcaggacacagtcttttaaggaactccttgtctttgagctttcccattgtcttccctcaataaaaatgagac

SEQ ID NO: 42221 - DNA, 120 bp, Artificial Sequence
  ENSG00000061455_30 (sequence is synthesized)
acataactgaactcactactaaaaggcaaggatactgtgtggtttagtttaatctattattatgtatctggctctgagaaaatctctcttcccttttaattttgcttctctattccttag

SEQ ID NO: 42222 - DNA, 120 bp, Artificial Sequence
  ENSG00000061455_31 (sequence is synthesized)
caccccagctaccacattttaaatggaattcaacagggtctaattaataagtgtttacagttattatttatatacgtatatatacatatatacacataataataatctctagaaccctgg

SEQ ID NO: 42223 - DNA, 120 bp, Artificial Sequence
  ENSG00000061455_32 (sequence is synthesized)
gccataaagaaaaaaatggctaattctgacctctgttgcccaatctcaagccattcacctagaattttcctccagttcttactatctcctggtcatgaaagtagtaaggaatctatgctg

SEQ ID NO: 42224 - DNA, 120 bp, Artificial Sequence
  ENSG00000061455_33 (sequence is synthesized)
ctgtataacagtagctgattgaaactattctctctggtagttaggaatgtgttctgattttacaattccctgccctaagtgatggatacgtttgcaaacaatgtgcgtcactgggaagtg

SEQ ID NO: 42225 - DNA, 120 bp, Artificial Sequence
  ENSG00000061455_34 (sequence is synthesized)
tgaatgaaatgtagccatattaacctgaaacctgcaagaaaaggacagatcagcttcacagatgagtaagctgttccatttgttaaggttgaaagatttactcaaactttttgaaaacaa

SEQ ID NO: 42226 - DNA, 120 bp, Artificial Sequence
  ENSG00000061455_35 (sequence is synthesized)
cagtagggaatcacctgtatatttctaattttttttttcatttgaaaaatcagctcagccatttgccacatttcacagtggaacaccatgtactactcagttctcatgagcttcagaacg

SEQ ID NO: 42227 - DNA, 120 bp, Artificial Sequence
  ENSG00000061455_36 (sequence is synthesized)
tgggagaatgagaaggcttccctcctcccttgatgtctggcatgggaaggttttccttaacaatgatctctctgccaccctgatagctttgctagctgatcccaaacttccactgaatgt

SEQ ID NO: 42228 - DNA, 120 bp, Artificial Sequence
  ENSG00000061455_37 (sequence is synthesized)
ggcagtaacctgtactccaaaacactcttctagtgttctgctccatttaaatctatttttatcctctattattaagagaaattgttggcatatatattccaccaaatttggtcagaaaat

SEQ ID NO: 42229 - DNA, 120 bp, Artificial Sequence
  ENSG00000061455_38 (sequence is synthesized)
gatactctaattttccaggcatgtgggcacattcacaatttttacattgctgtcctattgccagcttctagcagaccagcctaggctgtctgtccacaaagacaggcttacacctggaca

SEQ ID NO: 42230 - DNA, 120 bp, Artificial Sequence
  ENSG00000061455_39 (sequence is synthesized)
ttgacttggaaccctgaagcaggtactgagatcatttgggtccaaaatgattttaatctaagtgtatgctggggaggaggtttctctttgaaacttcctaacaattgctttagccttttc

SEQ ID NO: 42231 - DNA, 120 bp, Artificial Sequence
  ENSG00000061455_40 (sequence is synthesized)
tatttaaagtggacacacagtcccctgggatacagcaaatgggtggtagaaattgcagtcgtaaaatttgccagtttttcttattagtaacttcctaattagtagtgctataaagagagt

SEQ ID NO: 42232 - DNA, 120 bp, Artificial Sequence
  ENSG00000061455_41 (sequence is synthesized)
aaatgctctgaatcactggggaaaggatatttaagataagaaaggtagtctgtcagagctgaatcagggtttggctcttgaagcaatccttctttactcttttctttcaatggggataaa

SEQ ID NO: 42233 - DNA, 120 bp, Artificial Sequence
  ENSG00000061455_42 (sequence is synthesized)
ataataataattttttcagaataagacttttcatcctagcgtatgttcctttatttagcagagtctaagacgaaaggtaatgccagggaaaagtcagggtgcaataggatgagagatgga

SEQ ID NO: 42234 - DNA, 120 bp, Artificial Sequence
  ENSG00000061455_43 (sequence is synthesized)
gctgcagacctttgcatttctagaaaaatctcaatatcccaaggcaaagttgtattttccccaggatatgtgcatacatttttcatagataagcttttcatttttgttttgtttttatct

SEQ ID NO: 42235 - DNA, 120 bp, Artificial Sequence
  ENSG00000061455_44 (sequence is synthesized)
ttaaaaatgacttttttggaggagatatacttctaaaaagttattgtatggctaattaaagctatgaaacttaatctcatataatttatataatttgattcagttggtacattttttatt

SEQ ID NO: 42236 - DNA, 120 bp, Artificial Sequence
  ENSG00000061455_45 (sequence is synthesized)
gtgttcatttaaatgtagccttcttgggaaactatgtataacaggaaaagatcatgacatcattgtgtcctcatagggctcataattgaattttaccttgtaaaaatttcattctggttc

SEQ ID NO: 42237 - DNA, 120 bp, Artificial Sequence
  ENSG00000061455_46 (sequence is synthesized)
aggtatgcaaagatttatacgaacatttagcagttcatcaatttttaaatcagatgttcattgtttcattcatttattcaacaagtatttattgaactcttattttatataaagacccca

SEQ ID NO: 42238 - DNA, 120 bp, Artificial Sequence
  ENSG00000061455_47 (sequence is synthesized)
ttttatgtgttcaccataagcagcattatttaagtgactattcatgataaaataatattctcctcctaagtggctgctagtaaaatgggtattttagtcctttagaccattgtctcagtg

SEQ ID NO: 42239 - DNA, 120 bp, Artificial Sequence
  ENSG00000061455_48 (sequence is synthesized)
aagttaaagattttgttccaactgggaaaatctgagagaggtaaattcatctggggaccagaaaatagcatattgcaaaacaagttaagatgcacaacttggttgtctttgcttaactca

SEQ ID NO: 42240 - DNA, 120 bp, Artificial Sequence
  ENSG00000061455_49 (sequence is synthesized)
ctgggctattggttgttagcagcagtatcaagagaccaggattagggcctgggtcttgggtttttatgaccccccctttcaatgataaggcaacaagttgggtacaaggctggagttgct

SEQ ID NO: 42241 - DNA, 120 bp, Artificial Sequence
  ENSG00000061455_50 (sequence is synthesized)
cagggaaggagatctgcgaccctgaatgggtcagagttgcctcattagtggtaagcgttggcagtgtagtccctttccccggtgtgcagaagtaacattatttgttttgcactaatttaa

SEQ ID NO: 42242 - DNA, 120 bp, Artificial Sequence
  ENSG00000061455_51 (sequence is synthesized)
aatttaaaatgcaagtatctattgagttgtttaaaatgggaatcatggcacgtctcacaaagagggcatttccagaacagcagggttaacgggtccctctgagtgtacccagcagcctgc

SEQ ID NO: 42243 - DNA, 120 bp, Artificial Sequence
  ENSG00000061455_52 (sequence is synthesized)
gtttaggagcaaattcattgctctcatattaaggctatgcatgcctacagaaaccaggccaggaataagaaataaataatcacatttcctgaaatgtttatctgtttcttccttgacatg

SEQ ID NO: 42244 - DNA, 120 bp, Artificial Sequence
  ENSG00000061455_53 (sequence is synthesized)
aatttaatttttatttcccagagtctttactagatcctgacatcagattttaaaagatactgagatatatgcttctttaaatgataactgtaagttccagaaatgttattcacttgtcag

SEQ ID NO: 42245 - DNA, 120 bp, Artificial Sequence
  ENSG00000061455_54 (sequence is synthesized)
gatccttttaaggtgaagagctttggaaaattttatgcgctaactagatacctgggtgatcatcaacccaaagtttaaagttctcccctcactagcatttatctgaactaccacaaaaca

SEQ ID NO: 42246 - DNA, 120 bp, Artificial Sequence
  ENSG00000061455_55 (sequence is synthesized)
acaacgcaggttactaggaaggcacctatttcagccctccccaagattgcattctacaaacccagagatcagctgtcaggtacaactggccagacagagccaaactgaaaagaatattgc

SEQ ID NO: 42247 - DNA, 120 bp, Artificial Sequence
  ENSG00000061455_56 (sequence is synthesized)
tttatctgtggaaaccttgccacagatgtttaacctgtagtccatggctgtgtttgacatttaaaatatttatttagtttcttcctttaaataataaatgccagatgtttcatcagatca

SEQ ID NO: 42248 - DNA, 120 bp, Artificial Sequence
  ENSG00000061455_57 (sequence is synthesized)
atatgtaaaacgataacaaaaaatatgtcggaaacaggtcaaagtcatgaaacatttgaattgtctttcctatagactgaatatgccaccactgcacttagaaaacctatggaggaaatt

SEQ ID NO: 42249 - DNA, 120 bp, Artificial Sequence
  ENSG00000061455_58 (sequence is synthesized)
ttaatggaaaaataaggacattctgcgcttattcccacagaggttgatgggaatgatgatgattataaattatattgtgcaattactgccatgccttgttctaatgcttaatgtggatta

SEQ ID NO: 42250 - DNA, 120 bp, Artificial Sequence
  ENSG00000061455_59 (sequence is synthesized)
tctcttttaatccttagtaactctataacaaagatactatcattatccccttctcatatatgcttaacagttttagctttgtagcttctttagtttttttcctccttcaaagccataaac

SEQ ID NO: 42251 - DNA, 120 bp, Artificial Sequence
  ENSG00000061455_60 (sequence is synthesized)
aggcaattgttaaaagaggaaaatacttctctatgtaaagcttttttttgagaacaagagcttttaaaaattaataaacacaagtataatttatttataaaatgtgtttgtggaaacaat

SEQ ID NO: 42252 - DNA, 120 bp, Artificial Sequence
  ENSG00000061455_61 (sequence is synthesized)
actgaagtgctattaaaacacgtatcattatagatgctgattttgtcatgcccaaatctcattgctggacagaatttcaactattccattgctgtcaggcattgtttttgtttttctaag

SEQ ID NO: 42253 - DNA, 120 bp, Artificial Sequence
  ENSG00000061455_62 (sequence is synthesized)
caggaatctaaaattccacattgaaagaaaaaaaaataaccctctcaagtgtgatatacattaggacaaatggcaacaggcaggaagggcaggttgtgttggagggtggccagaagagaa

SEQ ID NO: 42254 - DNA, 120 bp, Artificial Sequence
  ENSG00000061455_63 (sequence is synthesized)
taaggttcgaacactatcgacaggtaaaaacacatcctcaacggggctaagtgaaatctcgttttctttctttgttctgactgaatgctaagtgagttactttccaggcatcaatggagt

SEQ ID NO: 42255 - DNA, 120 bp, Artificial Sequence
  ENSG00000061455_64 (sequence is synthesized)
cattacgcagttgtgtgcattaagaatatgggcttatgttgttagcctgttggtttaaagcagtgcagcagaaagactggagtcattataggtttggtttgtcaaaggcacagatagtgt

SEQ ID NO: 42256 - DNA, 120 bp, Artificial Sequence
  ENSG00000061455_65 (sequence is synthesized)
agttacatgcatgaggtactcaaggaaccagttcaagttctggggcacaatctagatgaaactgtgaggtttgttcaaaaagtaagtgtacaaaatttcatcatgaactggctttattac

SEQ ID NO: 42257 - DNA, 120 bp, Artificial Sequence
  ENSG00000061455_66 (sequence is synthesized)
aactctttaccgtggtttattgaaaccacaatgtatactactttcctccagattctgattctaatgggcacatttgtttgttgaaatgataaatatattttccttgtcaaacatggtggg

SEQ ID NO: 42258 - DNA, 120 bp, Artificial Sequence
  ENSG00000061455_67 (sequence is synthesized)
tcctggttgatatctcctgtttcctgccttgaaaaacatccttgttggtgcctttctcccactttggtacatcactcccaactgaaaacagtctagatataaactttaacaagctggaga

SEQ ID NO: 42259 - DNA, 120 bp, Artificial Sequence
  ENSG00000061455_68 (sequence is synthesized)
tctatttctacagcacaactctttcatgtttaaaagcaattatgccgtatcaggtgattgccacatgttggggaaagcagccatcttagagcaaaagtctgccaacccacagtccctgtt

SEQ ID NO: 42260 - DNA, 120 bp, Artificial Sequence
  ENSG00000061455_69 (sequence is synthesized)
gatccacatgtgggcattgtctaatgttaacaaaatcagcacttgtagacttactttctctgaacaatctagtacacttctctagtttctcccaacctggagaaaatgtatagcaaaagc

SEQ ID NO: 42261 - DNA, 120 bp, Artificial Sequence
  ENSG00000061455_70 (sequence is synthesized)
cagaggcaaaattattctccttagcagttctaagtatttcatgaaaaagccttcccccagtttaaatgcagaggctaaggtgatgactaacgaattaaggaaaactttggctcagatcag

SEQ ID NO: 42262 - DNA, 120 bp, Artificial Sequence
  ENSG00000061455_71 (sequence is synthesized)
caaaattattttggaaacttaatgtcccaagttaattattttttttatatcaaggggaagacatccagttctgtaggatgctaatagaagtgtgatatttagatgctattaggacattgt

SEQ ID NO: 42263 - DNA, 120 bp, Artificial Sequence
  ENSG00000061455_72 (sequence is synthesized)
atacatttctttaatgtggttattttaagtttaggactgtaaatgttccctactggaatagaaatatgtctctctccaactttccaccaaataaaatggttagagtgaatgcccagtttc

SEQ ID NO: 42264 - DNA, 120 bp, Artificial Sequence
  ENSG00000061455_73 (sequence is synthesized)
acatctgccttttggagtttggaaagcttaaacaagtcagttaagagaatgagaagaatctcactgtgggtgataaggagtgtgtagtttgctgtaagggccactgatatgacaagaatg

SEQ ID NO: 42265 - DNA, 120 bp, Artificial Sequence
  ENSG00000061455_74 (sequence is synthesized)
attatcccacagtaagaatgggtaaaacttaataaagttttctaactttattaaactcacattatttaatgaaaaaataactgcaaaggaccaatgagatcatgcatgctgctgtattct

SEQ ID NO: 42266 - DNA, 120 bp, Artificial Sequence
  ENSG00000061455_75 (sequence is synthesized)
tgtgatggaatctaccaggattaagttgtatttaaatgaaaaaacaggtacacatttagagatcattgaccaagaaatgtaaatatatttgattaataaaacgtttttatgatgactcga

SEQ ID NO: 42267 - DNA, 120 bp, Artificial Sequence
  ENSG00000061492_0 (sequence is synthesized)
gggcgatggggaacctgtttatgctctgggcagctctgggcatatgctgtgctgcattcagtgcctctgcctggtcagtgaacaatttcctgataacaggtcccaaggcctatctgacct

SEQ ID NO: 42268 - DNA, 120 bp, Artificial Sequence
  ENSG00000061492_1 (sequence is synthesized)
acacgactagtgtggccttgggtgcccagagtggcatcgaggagtgcaagttccagtttgcttgggaacgctggaactgccctgaaaatgctcttcagctctccacccacaacaggctga

SEQ ID NO: 42269 - DNA, 120 bp, Artificial Sequence
  ENSG00000061492_2 (sequence is synthesized)
gaagtgctaccagagagacttccttcatacatgctatcagctctgctggagtcatgtacatcatcaccaagaactgtagcatgggtgacttcgaaaactgtggctgtgatgggtcaaaca

SEQ ID NO: 42270 - DNA, 120 bp, Artificial Sequence
  ENSG00000061492_3 (sequence is synthesized)
atggaaaaacaggaggccatggctggatctggggaggctgcagcgacaatgtggaatttggggaaaggatctccaaactctttgtggacagtttggagaaggggaaggatgccagagccc

SEQ ID NO: 42271 - DNA, 120 bp, Artificial Sequence
  ENSG00000061492_4 (sequence is synthesized)
tgatgaatcttcacaacaacagggccggcagactggcagtgagagccaccatgaaaaggacatgcaaatgtcatggcatctctgggagctgcagcatacagacatgctggctgcagctgg

SEQ ID NO: 42272 - DNA, 120 bp, Artificial Sequence
  ENSG00000061492_5 (sequence is synthesized)
ctgaattccgggagatgggagactacctaaaggccaagtatgaccaggcgctgaaaattgaaatggataagcggcagctgagagctgggaacagcgccgagggccactgggtgcccgctg

SEQ ID NO: 42273 - DNA, 120 bp, Artificial Sequence
  ENSG00000061492_6 (sequence is synthesized)
ctgtacctgcaattccagcctgggcatctatggcacagagggtcgtgagtgcctacagaacagccacaacacatccaggtgggagcgacgtagctgtgggcgcctgtgcactgagtgtgg

SEQ ID NO: 42274 - DNA, 120 bp, Artificial Sequence
  ENSG00000061492_7 (sequence is synthesized)
gctgcaggtggaagagaggaaaactgaggtcataagcagctgtaactgcaaattccagtggtgctgtacggtcaagtgtgaccagtgtaggcatgtggtgagcaagtattactgcgcacg

SEQ ID NO: 42275 - DNA, 120 bp, Artificial Sequence
  ENSG00000061492_8 (sequence is synthesized)
ctccccaggcagtgcccagtccctgggtaagggcagtgcctgataataccccacacaagttcacttgattaattgcatcagtggaaggggacatagcttctctcttagagagaacagatt

SEQ ID NO: 42276 - DNA, 120 bp, Artificial Sequence
  ENSG00000061492_9 (sequence is synthesized)
ggaaagcaatcggaaaattgcagttttggtctgtagtcctcatgatatctgctatcagtggggaaaatggaggcccaagattctacagcatattcctggcggggctgaaattggaacctg

SEQ ID NO: 42277 - DNA, 120 bp, Artificial Sequence
  ENSG00000061492_10 (sequence is synthesized)
ggcctcctgactttggcagacccccatttcatctttcctgcaaactactttcccatctttgtgcctgtacttatgcagctttctacagggagagtttggtttggggtctatatctagagg

SEQ ID NO: 42278 - DNA, 120 bp, Artificial Sequence
  ENSG00000061492_11 (sequence is synthesized)
gaccttcaaagtatttgttcctttaaatttcagaccatgtccaacccagctgtgctgctgggaatcaggagaatagaagcaaaaaacgaaagagttctgttcagacttctgaagagcagc

SEQ ID NO: 42279 - DNA, 120 bp, Artificial Sequence
  ENSG00000061492_12 (sequence is synthesized)
gcctggtaagtcctttcccaaccctcactccttgccaaggaggcccccattgtctcatccccattcacctctgcctcactttttctctttttggtaggtcagtgaacaatttcctgataa

SEQ ID NO: 42280 - DNA, 120 bp, Artificial Sequence
  ENSG00000061492_13 (sequence is synthesized)
ctaagatatatccagctgggacttctattactccctttggaaaccttaagatcaaaaagggaataagaaacccttcttctgtatcccaataatccaccaggataaaggagaaactagaaa

SEQ ID NO: 42281 - DNA, 120 bp, Artificial Sequence
  ENSG00000061492_14 (sequence is synthesized)
tatgcaactcccttgatttcagtgtttggcaggtaacaaaaaattgagacccagacactggtcaacaggaaaacaatacagactcccagaattagaaagtgttattttaatgcaacctag

SEQ ID NO: 42282 - DNA, 120 bp, Artificial Sequence
  ENSG00000061656_0 (sequence is synthesized)
agggcaggtgcggccgcggggcctgccgacttcacgcagggtccgtggggtccccgcggcgcgcagcggctgaaggaggccccagggccttggcgaccgcagcggcggctttagcgtcag

SEQ ID NO: 42283 - DNA, 120 bp, Artificial Sequence
  ENSG00000061656_1 (sequence is synthesized)
cttggcgaccgcagcggcggctttagcgtcagtgactaggcagcagggggtcaggatgcggcgaagctcccgcccgggctcggcctcgtcctcgcgcaagcacacgcccaactttttcag

SEQ ID NO: 42284 - DNA, 120 bp, Artificial Sequence
  ENSG00000061656_2 (sequence is synthesized)
cgagaacagctcaatgagcatcacctcggaggacagcaaagggctccggtcagcggagcccgggcctggggagcccgagggcagaagagcccggggcccgagctgcggtgagcccgcctt

SEQ ID NO: 42285 - DNA, 120 bp, Artificial Sequence
  ENSG00000061656_3 (sequence is synthesized)
gagcgcgggagtgcccggaggaaccacatgggcaggaagctctcagcagaagccagcgcctcggagccacaactggcagacagcctgtggcgcggcaaccgtgaggggcggggcctcgga

SEQ ID NO: 42286 - DNA, 120 bp, Artificial Sequence
  ENSG00000061656_4 (sequence is synthesized)
accgactgggtctccagtagtctctgaggagccgctcgaccttctcccgaccctggatctgaggcaggagatgcctcccccgcgggtgttcaagagctttctgagcctgctcttccaggg

SEQ ID NO: 42287 - DNA, 120 bp, Artificial Sequence
  ENSG00000061656_5 (sequence is synthesized)
gctgagcgtgttgttatccctggcaggagacgtgctggtcagcatgtacagggaggtctgttccatccgcttcctgttcacggctgtgtcgctgctgagcctctttctgtcagcattctg

SEQ ID NO: 42288 - DNA, 120 bp, Artificial Sequence
  ENSG00000061656_6 (sequence is synthesized)
ctggggcttctgtacctggtctctcctttggagaatgaacctaaggagatgctgactctaagtgagtaccacgagcgcgtgcgctcccaggggcagcagctgcagcagctccaggccgag

SEQ ID NO: 42289 - DNA, 120 bp, Artificial Sequence
  ENSG00000061656_7 (sequence is synthesized)
ctggataaactccacaaggaggtgtccactgttcgggcagccaacagcgagagagtggccaagctcgtgttccagaggctgaatgaggattttgtgcggaagcccgactatgctttgagc

SEQ ID NO: 42290 - DNA, 120 bp, Artificial Sequence
  ENSG00000061656_8 (sequence is synthesized)
tctgtgggagcctccatcgacctgcagaagacatcccacgattacgcagacaggaacactgcctacttctggaatcgcttcagcttctggaactacgcacggccgcccacggttatcctg

SEQ ID NO: 42291 - DNA, 120 bp, Artificial Sequence
  ENSG00000061656_9 (sequence is synthesized)
gagccccacgtgttccctgggaattgctgggcttttgaaggcgaccaaggccaggtggtgatccaactgccgggccgagtgcagctgagcgacatcactctgcagcatccaccgcccagc

SEQ ID NO: 42292 - DNA, 120 bp, Artificial Sequence
  ENSG00000061656_10 (sequence is synthesized)
gtggagcacaccggaggagccaacagcgccccccgcgatttcgcggtctttggcctccaggtttatgatgaaactgaagtttccttggggaaattcaccttcgatgttgagaaatcggag

SEQ ID NO: 42293 - DNA, 120 bp, Artificial Sequence
  ENSG00000061656_11 (sequence is synthesized)
attcagactttccacctgcagaatgaccccccagctgcctttcccaaggtgaagatccagattctaagcaactggggccacccccgtttcacgtgcttgtatcgagtccgtgcccacggt

SEQ ID NO: 42294 - DNA, 120 bp, Artificial Sequence
  ENSG00000061656_12 (sequence is synthesized)
gtgcgaacctcagagggggcagagggcagtgcacaggggccccattaaacatgctgatttttggagtagaattgagttctgctgaaggatactggatcagtgctttcgggggctctgttg

SEQ ID NO: 42295 - DNA, 120 bp, Artificial Sequence
  ENSG00000061656_13 (sequence is synthesized)
gcgtgagccaccgcgcccggccaggagaccaactcttgacggagcctccctgaggggcggggcttcagagggcggagctggagccgggatagggctgcggtgggaccaaagcctgtgaga

SEQ ID NO: 42296 - DNA, 120 bp, Artificial Sequence
  ENSG00000061656_14 (sequence is synthesized)
ggctgcggtgggaccaaagcctgtgagagacttcccagctgtctggcttgtggactgagcaatctgcggcccggtctcgaggggaaaataggtctgtggtccgcaaggccccagtggagc

SEQ ID NO: 42297 - DNA, 120 bp, Artificial Sequence
  ENSG00000061656_15 (sequence is synthesized)
gaaggcgtgggggcctttgggaggtgtccagggggacagggagccaaccccacggcgcccacctcccacctccagtgagtaccacgagcgcgtgcgctcccaggggcagcagctgcagca

SEQ ID NO: 42298 - DNA, 120 bp, Artificial Sequence
  ENSG00000061656_16 (sequence is synthesized)
gctccaggccgagctggataaactccacaaggaggtgtccactgttcgggcagccaacagcgaggtgagccccggcccaccttggaaacccctgatggatccctgctcccagggtcctga

SEQ ID NO: 42299 - DNA, 120 bp, Artificial Sequence
  ENSG00000061656_17 (sequence is synthesized)
gacttaagctccgcccagagccctgcgggatttctcccggtgcccacgaagtccatcccaaagcaaccagctcccagaggtcccgtccacctgtaaaagcagcccgcaagcctcgcccct

SEQ ID NO: 42300 - DNA, 120 bp, Artificial Sequence
  ENSG00000061656_18 (sequence is synthesized)
gtcatgttggcaagagctgggtctaggaccctggggtggggactggagggttgagcaggtcggggcctcagcctccctccggttccccagggaggtctgttccatccgcttcctgttcac

SEQ ID NO: 42301 - DNA, 120 bp, Artificial Sequence
  ENSG00000061656_19 (sequence is synthesized)
acgtgctggtcagcatgtacaggtcagaggaagggacgctggcgccccaggaacagctctttggagggggtggggagcagggccggaaccttgctggcgcttgagccgattcagatctga

SEQ ID NO: 42302 - DNA, 120 bp, Artificial Sequence
  ENSG00000061656_20 (sequence is synthesized)
atccctggcaggagacgtgctggtcagcatgtacagggtcctgagacttaagctccgcccagagccctgcgggatttctcccggtgcccacgaagtccatcccaaagcaaccagctccca

SEQ ID NO: 42303 - DNA, 120 bp, Artificial Sequence
  ENSG00000061676_0 (sequence is synthesized)
gcggcgagcgcctgtcaagcagtgggaggaaaaagcgcttggagccaccagcccactcttaagcgaaactcgcctggaaaacaccccgcctcccagcagagtttctgccggtttctttag

SEQ ID NO: 42304 - DNA, 120 bp, Artificial Sequence
  ENSG00000061676_1 (sequence is synthesized)
aagggtggtgcggaaaagcaacttttgggaacttgaaggagtggggtgtggggcgaagtggaaagagcacacaacgcgaccccactcagtccccgcttgggactcccatcccggcatcag

SEQ ID NO: 42305 - DNA, 120 bp, Artificial Sequence
  ENSG00000061676_2 (sequence is synthesized)
gtccccgcttgggactcccatcccggcatcaggcgtagtgggcggtccgggccagggccagggccagagcggcggcggcgaggccatgccgagggcccgtcggccgcagttccccgtccg

SEQ ID NO: 42306 - DNA, 120 bp, Artificial Sequence
  ENSG00000061676_3 (sequence is synthesized)
caggtgaccgagggcccgtccggggctgcgggaagcggcctcgttctcagccgccggagacgccgccgccgccgccgccgccgccacacctagtggagcagccggggaaggcggctcgtt

SEQ ID NO: 42307 - DNA, 80 bp, Artificial Sequence
  ENSG00000061676_4 (sequence is synthesized)
cgggcggaaggcaggaggctgccggggcgcgggctgctgcgggagaaggggctccgaggagtccgccgcggctcgctctg

SEQ ID NO: 42308 - DNA, 120 bp, Artificial Sequence
  ENSG00000061676_5 (sequence is synthesized)
tcgccggcgcgggattggggcgcgagggccatgggcgcgctctcctaaggcggaggtcgcgggcgggaggggaggaggcccgagagaggctgctgcgaaggccgcgggcccgtgactggg

SEQ ID NO: 42309 - DNA, 120 bp, Artificial Sequence
  ENSG00000061676_6 (sequence is synthesized)
cgcgaggcggccggcggcggcggcggcaccagcaccaccatgtcgcgctcagtgctgcagcccagtcagcagaagctggcggagaagctcaccatcctcaacgaccggggcgtcggcatg

SEQ ID NO: 42310 - DNA, 120 bp, Artificial Sequence
  ENSG00000061676_7 (sequence is synthesized)
ctcacccgcctctacaacatcaagaagcaaggacaagtttggaaggcatgtggagaccccaaggcaaaaccatcctatcttatcgacaaaaacctggaatctgctgtgaaattcatagtc

SEQ ID NO: 42311 - DNA, 120 bp, Artificial Sequence
  ENSG00000061676_8 (sequence is synthesized)
agaaaattccctgctgtagaaacccgcaacaacaatcaacagcttgcacaactacagaaagaaaaatcagagattctgaaaaatctggcattatattacttcacatttgtagatgttatg

SEQ ID NO: 42312 - DNA, 120 bp, Artificial Sequence
  ENSG00000061676_9 (sequence is synthesized)
gaatttaaggaccatgtttgtgaattgctgaatactattgacgtttgccaagtcttctttgatattactgtaaactttgatttaacaaagaactacttagatttaattataacctataca

SEQ ID NO: 42313 - DNA, 120 bp, Artificial Sequence
  ENSG00000061676_10 (sequence is synthesized)
acactaatgatactgctgtctcgaattgaagaaaggaaggcaatcattggattatacaactatgcccatgaaatgactcatggagcaagtgacagagaatacccacgccttggccagatg

SEQ ID NO: 42314 - DNA, 120 bp, Artificial Sequence
  ENSG00000061676_11 (sequence is synthesized)
attgtggattatgaaaaccctttaaagaagatgatggaagaatttgtaccccatagcaagtctctttcagatgcactaatttctcttcaaatggtatatcctcgaaggaatctttcagct

SEQ ID NO: 42315 - DNA, 120 bp, Artificial Sequence
  ENSG00000061676_12 (sequence is synthesized)
gaccagtggagaaatgcccagttattgagcctcatcagtgcacctagtacaatgcttaatccagcacagtccgacactatgccttgtgaatacctctctttggatgcaatggaaaagtgg

SEQ ID NO: 42316 - DNA, 120 bp, Artificial Sequence
  ENSG00000061676_13 (sequence is synthesized)
attatctttggctttattttgtgccatgggatcctaaatactgacgctacagcactgaacctttggaaactagctcttcaaagtagctcttgcctctctctctttcgggatgaagttttc

SEQ ID NO: 42317 - DNA, 120 bp, Artificial Sequence
  ENSG00000061676_14 (sequence is synthesized)
cacattcacaaagctgcagaagacttatttgtaaacatacgaggctataataaacgtattaatgacataagagaatgcaaggaggcagccgtgtcacatgctggttcaatgcacagagaa

SEQ ID NO: 42318 - DNA, 120 bp, Artificial Sequence
  ENSG00000061676_15 (sequence is synthesized)
agacgcaagtttttaagatctgcactgaaggaattggctactgtcctctctgatcaacctggattgctaggtcccaaggcactttttgtttttatggcattatcctttgcccgtgatgaa

SEQ ID NO: 42319 - DNA, 120 bp, Artificial Sequence
  ENSG00000061676_16 (sequence is synthesized)
atcatctggctacttcgtcatgcagataacatgccaaagaagagtgcagacgactttatagataagcacattgctgaattaatattttacatggaagaacttagagcacatgtgaggaaa

SEQ ID NO: 42320 - DNA, 120 bp, Artificial Sequence
  ENSG00000061676_17 (sequence is synthesized)
tacggacctgtaatgcagaggtattacgtgcagtacctttctggctttgatgctgttgtcctcaatgaactcgtgcagaatctttctgtttgccctgaagatgaatcaatcatcatgtcc

SEQ ID NO: 42321 - DNA, 120 bp, Artificial Sequence
  ENSG00000061676_18 (sequence is synthesized)
tcttttgttaacactatgacttccctaagtgtaaaacaagttgaagatggggaagtatttgatttcagaggaatgagattagattggtttaggttacaggcatatactagtgtctcaaag

SEQ ID NO: 42322 - DNA, 120 bp, Artificial Sequence
  ENSG00000061676_19 (sequence is synthesized)
gcttcacttggccttgcagatcacagagaacttggaaagatgatgaatacaataatttttcatacaaaaatggtagattccttggtggaaatgttggtggaaacatcagatctctccata

SEQ ID NO: 42323 - DNA, 120 bp, Artificial Sequence
  ENSG00000061676_20 (sequence is synthesized)
tactcaattgcatttccactactttgcactcattttatgagttgcacgcatgaactatgtccagaagagcgacatcatattggagatcgcagtctttccttatgtaatatgttcctagat

SEQ ID NO: 42324 - DNA, 120 bp, Artificial Sequence
  ENSG00000061676_21 (sequence is synthesized)
gaaatggccaaacaagctcgaaatctcatcactgatatttgcacagaacagtgtacccttagtgaccagttgctacccaagcattgtgccaaaactatcagtcaagcagtgaataagaaa

SEQ ID NO: 42325 - DNA, 120 bp, Artificial Sequence
  ENSG00000061676_22 (sequence is synthesized)
tcaaaaaagcagactggtaagaaaggggaacctgaaagggagaaaccaggtgttgagagcatgaggaaaaacaggctggttgtgaccaaccttgataaattgcacactgcactttctgag

SEQ ID NO: 42326 - DNA, 120 bp, Artificial Sequence
  ENSG00000061676_23 (sequence is synthesized)
ttatgcttctctataaattatgtaccaaacatggtggtatgggaacatacctttaccccacgagaatatttgacttctcatctggaaatacgctttaccaagtcaattgttgggatgact

SEQ ID NO: 42327 - DNA, 120 bp, Artificial Sequence
  ENSG00000061676_24 (sequence is synthesized)
atgtataatcaagccacacaggaaattgcaaaaccttcagaacttctaacaagtgtaagagcatacatgaccgtactccagtcaatagaaaactatgtgcagattgatattacaagagta

SEQ ID NO: 42328 - DNA, 120 bp, Artificial Sequence
  ENSG00000061676_25 (sequence is synthesized)
tttaataatgtgcttcttcaacaaacacaacatttagacagtcatggagagccaaccattacaagtctatacacaaattggtatttggaaactttgttacgacaagtcagcaatggccat

SEQ ID NO: 42329 - DNA, 120 bp, Artificial Sequence
  ENSG00000061676_26 (sequence is synthesized)
atagcatattttcctgcaatgaaagcgtttgtgaacttacctacagaaaatgaattaacattcaatgcagaggaatattctgacatatcagaaatgaggtcattatcagaactactaggc

SEQ ID NO: 42330 - DNA, 120 bp, Artificial Sequence
  ENSG00000061676_27 (sequence is synthesized)
ccatatggtatgaagtttctaagtgaaagccttatgtggcatatttcatcacaagttgctgaacttaagaaacttgtggtggagaatgttgatgtgttaacacaaatgaggaccagcttt

SEQ ID NO: 42331 - DNA, 120 bp, Artificial Sequence
  ENSG00000061676_28 (sequence is synthesized)
gacaaaccagaccagatggctgcactgtttaaaagattatcatctgttgacagtgtcttgaagaggatgacaataattggtgtaattttatccttccgatcattggcacaagaagcactt

SEQ ID NO: 42332 - DNA, 120 bp, Artificial Sequence
  ENSG00000061676_29 (sequence is synthesized)
agagatgtcttatcctaccacattccttttcttgtaagttcaattgaagattttaaggatcacattccaagggaaactgatatgaaggttgcaatgaatgtgtatgagttatcatcagct

SEQ ID NO: 42333 - DNA, 120 bp, Artificial Sequence
  ENSG00000061676_30 (sequence is synthesized)
gccggattaccttgtgagattgatcctgcattggtcgtagctctttcttcacaaaaatcggaaaacattagtccagaagaagagtataaaattgcctgccttctcatggtgtttgtggca

SEQ ID NO: 42334 - DNA, 120 bp, Artificial Sequence
  ENSG00000061676_31 (sequence is synthesized)
gtttctttgccaacactggccagtaatgtgatgtctcagtacagccctgctatagaagggcattgcaacaacatacattgcttggccaaagccatcaaccagattgctgcagctttgttt

SEQ ID NO: 42335 - DNA, 120 bp, Artificial Sequence
  ENSG00000061676_32 (sequence is synthesized)
acaattcacaaaggaagcattgaagaccgtcttaaagaatttctggcgcttgcatcctccagtctactgaaaattggccaggagacagataaaactacaacaagaaatagagaatctgtt

SEQ ID NO: 42336 - DNA, 120 bp, Artificial Sequence
  ENSG00000061676_33 (sequence is synthesized)
tatttactgctagatatgattgtacaagaatctccattccttacaatggatcttttggaatcttgttttccttatgtcttgctgagaaatgcataccatgctgtctacaaacaaagtgtt

SEQ ID NO: 42337 - DNA, 120 bp, Artificial Sequence
  ENSG00000061676_34 (sequence is synthesized)
acatcttctgcataaaattacctacttaatcaagataagcacgcatttttgttgccttggttttacctgtagactgtggaactattttaccttaagacctgaaaaagttttgtggattat

SEQ ID NO: 42338 - DNA, 120 bp, Artificial Sequence
  ENSG00000061676_35 (sequence is synthesized)
aaatttctttcatacggttgtattttctgatcattggtttcttaatatggttgtactacagtatacttggttgatttaggttgcacattcactgaattcactgagattattcctataatt

SEQ ID NO: 42339 - DNA, 120 bp, Artificial Sequence
  ENSG00000061676_36 (sequence is synthesized)
agtatcatttatttgaaaaacatacattatcaacatgtttttgatatttgataatgaaaaaaatctttgcttgtttatttctgaaaaagaactgtatttagtgattattttagatagtga

SEQ ID NO: 42340 - DNA, 120 bp, Artificial Sequence
  ENSG00000061676_37 (sequence is synthesized)
gtgatattatagtattcatctgtgtgtaaattatttcatatagggaagagttctgatctgtacctatggttcttattgaaaacaacattggatgtgcatttctgtgatgttatgaataca

SEQ ID NO: 42341 - DNA, 120 bp, Artificial Sequence
  ENSG00000061676_38 (sequence is synthesized)
tttctactttattttgaaacatttgccaaactaaatactgtaacactgtataacatttaaaaatgttaaagaactgcttagtattagaagcagatcatttcccaaaattctaagagcagc

SEQ ID NO: 42342 - DNA, 120 bp, Artificial Sequence
  ENSG00000061676_39 (sequence is synthesized)
agcatatgttgttgcttgtataaagcctagcgataatttttagactaacttccatggtgccctgttggcattagcactaccattgtaccctgctgtataataaacaatcttagacattta

SEQ ID NO: 42343 - DNA, 120 bp, Artificial Sequence
  ENSG00000061676_40 (sequence is synthesized)
tcaactgttgatacaaatgttagtccctaaccactttttatatatgttttaaatttttgaaattcaagtgtacctgccataacataaaataaacactagactgtatcacacttcgattga

SEQ ID NO: 42344 - DNA, 120 bp, Artificial Sequence
  ENSG00000061676_41 (sequence is synthesized)
cagcattcgataccaggtcagctattatatgatttgtttaaatgttttaaaaaacattttattgaaaaaaataccaaaattagaaaataaaattacacaatacttcttaaaaattaagaa

SEQ ID NO: 42345 - DNA, 120 bp, Artificial Sequence
  ENSG00000061676_42 (sequence is synthesized)
ttgtatgctgtcaacttgctcattttatctgtaaccaaatagagttatttaaaagaatagggaaaaaaaattgagtgatcatgggactagtgagaatgttgagaactgctgcattagtca

SEQ ID NO: 42346 - DNA, 120 bp, Artificial Sequence
  ENSG00000061676_43 (sequence is synthesized)
gtaatgaatgggaaagacataaaagggcctattgcttaatagttggcatggagggcaaagcagctcatttagtttgaaaactaacccaatgttttgctctttgattggcattgttgaggc

SEQ ID NO: 42347 - DNA, 120 bp, Artificial Sequence
  ENSG00000061676_44 (sequence is synthesized)
tgtttctcagcagctttgtatatgaatatcataaagagcttctgttcacagcttcttatgtatacactggtaacttgtgttaagataaaagaaggctgctgtgaactcagttataatgtt

SEQ ID NO: 42348 - DNA, 120 bp, Artificial Sequence
  ENSG00000061676_45 (sequence is synthesized)
tttctttcttcaaacatagagagtagaatgaaattgaagtactatgagattatgctattattttgtgtatgatttgtccagcctatatttaaagtagggagtagttgtcactatctgtcg

SEQ ID NO: 42349 - DNA, 120 bp, Artificial Sequence
  ENSG00000061676_46 (sequence is synthesized)
aaaaattgtacttgttccataaagattttttaaaaagggaaattttaaaatggcatagttcagacctgaaatagtctgatttacacagtgagcagtcaaaactaagatttaatgccgttt

SEQ ID NO: 42350 - DNA, 120 bp, Artificial Sequence
  ENSG00000061676_47 (sequence is synthesized)
gttttgaaatattaggatcttagagaggtaataactttgttggcagtgatctctggagaggtaaagtaggaatttggatatgtacactttggaatcatatgtgaaagggcataaggatga

SEQ ID NO: 42351 - DNA, 120 bp, Artificial Sequence
  ENSG00000061676_48 (sequence is synthesized)
aaataaggcattctctaccactgctaggctgagaaaaaaatcgctcctcatagtcacctgaagtttttgtccaaattttttctcatacagcaaaggcgggggaggaggcgtggcaaaggt

SEQ ID NO: 42352 - DNA, 120 bp, Artificial Sequence
  ENSG00000061676_49 (sequence is synthesized)
aacttggaggaaaaagttaaaagtaaattgacaactactatttttaatatcttgtttgttttattttcttctaaacttacacaacaacatactatttttgttgttttctctacattaatg

SEQ ID NO: 42353 - DNA, 120 bp, Artificial Sequence
  ENSG00000061676_50 (sequence is synthesized)
tgatcataccatacatactggcctgtaatctgcttatttcactcagtagtagaaaaaatgtctttaatattctttttaatacctttatagataccataactaatttaacaatttcatggc

SEQ ID NO: 42354 - DNA, 64 bp, Artificial Sequence
  ENSG00000061676_51 (sequence is synthesized)
acctttatagataccataactaatttaacaatttcatggccaggcgtagtggcacacgcctatt

SEQ ID NO: 42355 - DNA, 120 bp, Artificial Sequence
  ENSG00000061676_52 (sequence is synthesized)
aaatacaaaaattacccaggtatgatggtgcacacctatcatcctggctacatgggaggctgaggtggaagaattgtttgaacccggaaggaggaggttgctgtgagctgagatcacacc

SEQ ID NO: 42356 - DNA, 120 bp, Artificial Sequence
  ENSG00000061676_53 (sequence is synthesized)
acagaatgagactgtctcaaaaaaaaaaagaaaatactcatttggatagattggatagatttttagacaatttcttttcattattataaatgtatatctatatcttggtaaagttgacct

SEQ ID NO: 42357 - DNA, 120 bp, Artificial Sequence
  ENSG00000061676_54 (sequence is synthesized)
ttggtaaagttgacctgttatttttttagaataatttttcagaagtaaaattgcttcctttctgctgctttttcattcacttatttaagcaagtatttttagatgcctgcatgtaatggt

SEQ ID NO: 42358 - DNA, 120 bp, Artificial Sequence
  ENSG00000061676_55 (sequence is synthesized)
agatgcctgcatgtaatggtgagcaaaaaggtgacccttttatagttgagcttggattttagtgatggtatacaataaacaaaccagcttcttgagacggagtttcactcttgttgccca

SEQ ID NO: 42359 - DNA, 120 bp, Artificial Sequence
  ENSG00000061676_56 (sequence is synthesized)
gcaaacttctgatggtgactggaaagtatacaggataatgtggggaggcagtggtgaaactactttagaagaaagtgttagaagaaagtgtcatctgtgtaagagaaaacatttgagctg

SEQ ID NO: 42360 - DNA, 120 bp, Artificial Sequence
  ENSG00000061676_57 (sequence is synthesized)
gtacgtgaaggattagaaggaaccacaagtgggctgaggggaggaataataaaggcaaagacccagaaggcaagcacaaacttggcatgtttgagaagttagaagtgtgtcatctgtgtc

SEQ ID NO: 42361 - DNA, 120 bp, Artificial Sequence
  ENSG00000061676_58 (sequence is synthesized)
tctgtcatgaggagtgctcaagttccctctaggagccttatgggctatctagctctttttctcttctgatcatgtgcttgcttgctttcttctttgcttatatagcagagttcacaaatt

SEQ ID NO: 42362 - DNA, 120 bp, Artificial Sequence
  ENSG00000061676_59 (sequence is synthesized)
aaatctaatgtaggctggttaataaaggaaatgaacatgaattcactgataggctcttgcattaatgtgaaaatgtaaagtctgttgtacaccatcaggccttctaaatgaagcccaaat

SEQ ID NO: 42363 - DNA, 120 bp, Artificial Sequence
  ENSG00000061676_60 (sequence is synthesized)
tctgtaaggtagtgaattgtaacctactgattagtacatgatccatgcccattctgttataaggacttgcctttctgagacttcacctgtattattcctaagacttttgtgaataatcct

SEQ ID NO: 42364 - DNA, 120 bp, Artificial Sequence
  ENSG00000061676_61 (sequence is synthesized)
taaagtagtgactccttacatctttctttcatttcttctttgtagtcacttgaaatgacagcatgaaccatcatttcatttgaaggcctgagcctgaattttcaaatagacaaaatgctc

SEQ ID NO: 42365 - DNA, 120 bp, Artificial Sequence
  ENSG00000061676_62 (sequence is synthesized)
tctttctccgaagatttgccatgacctctgcctttgggaaaaaatatttgagattttaaaatttttattctgtagtacaaaaattatgtttttcgttaattggtcctgtggaattggaag

SEQ ID NO: 42366 - DNA, 120 bp, Artificial Sequence
  ENSG00000061676_63 (sequence is synthesized)
gaaatttaatatttattgactctactttggtattattttcagagtgagaagtaactttaagtgtattaaaatttcattcatttttgcatgaaccaaactttccctacacatcgctgtcct

SEQ ID NO: 42367 - DNA, 120 bp, Artificial Sequence
  ENSG00000061676_64 (sequence is synthesized)
tgactgtccagagtaaacatgtctaactctggaatgtttcatttccaataaaagtattcagcctgtcattttgggcctaagtaaaatgggataaattagcaatctgaagttaggatccta

SEQ ID NO: 42368 - DNA, 120 bp, Artificial Sequence
  ENSG00000061676_65 (sequence is synthesized)
gccacagagggccatgtctcatttctggtttaagtgcacccctcatccccagcccttaccttcttctttctcttaaggattgagacaatcctcttggtgctcttggtgcaggtgcatctt

SEQ ID NO: 42369 - DNA, 120 bp, Artificial Sequence
  ENSG00000061676_66 (sequence is synthesized)
ggtcacctcttacatgagggccacaaacttggtaaatgggtggcctggagatggggttgtactaggtatgtgaccttggtgattgccttgtctcagttgtagtatatggctgagtcacat

SEQ ID NO: 42370 - DNA, 120 bp, Artificial Sequence
  ENSG00000061676_67 (sequence is synthesized)
tcatagtacactacatacacatactgaccaaatgccaatggctaaggcttgaaattatttcaccaagacctaaactgaagattaccatcataaaataagcttctagaatccatgaataag

SEQ ID NO: 42371 - DNA, 120 bp, Artificial Sequence
  ENSG00000061676_68 (sequence is synthesized)
taggaaatcatatttaaaatttactgtaattttattaaagctcattttttaaatttaatgcagtgcagagtcattaatttctcagcagtatcaggtgctaaattgctcactcattaaact

SEQ ID NO: 42372 - DNA, 120 bp, Artificial Sequence
  ENSG00000061676_69 (sequence is synthesized)
actaatttaagatagttattttaaattatagaacaggaagcaacttacgaggttgcaaccaaattatatttattttttctccattagtaactgactaaaagtgttttcttcaactctggg

SEQ ID NO: 42373 - DNA, 120 bp, Artificial Sequence
  ENSG00000061676_70 (sequence is synthesized)
atttgaagattttgtggtcagtggtgatataatttcactgaagcgtgctcacagactaaaactgtgcactactcagtgatgcgtcctgaatgttttcagagacaaacctaagataatgtt

SEQ ID NO: 42374 - DNA, 120 bp, Artificial Sequence
  ENSG00000061676_71 (sequence is synthesized)
gcccttgtttactttcattatttctgattttttttttatgcatgtgtttgctgcatcacacaattacttaagaagttgtccctaacctttgtgctgtggtctgaatgtttgtgtccccct

SEQ ID NO: 42375 - DNA, 120 bp, Artificial Sequence
  ENSG00000061676_72 (sequence is synthesized)
ggccacaaaattcatatgttgaaatctgatcatcagtgtgacaggatgtggggcctttgggaggtgattaggtcatgagagtggagccttcatgaatgggattaatgccctcgtaaaagg

SEQ ID NO: 42376 - DNA, 120 bp, Artificial Sequence
  ENSG00000061676_73 (sequence is synthesized)
ggccccagacagccgacttgccccaaccaccacgtgaggacaaagcaagaagccactgttcatgaaccagaaagcagaccctccacaaacaccaaatatgccagcacactgattggcttc

SEQ ID NO: 42377 - DNA, 120 bp, Artificial Sequence
  ENSG00000061676_74 (sequence is synthesized)
ccagcctccagaactataagcaagaagtttttttatagtaacaaatttattgttcacagttcttgcttataaactttataaaccagactaaggcatttcgttatagcagcccacacggac

SEQ ID NO: 42378 - DNA, 120 bp, Artificial Sequence
  ENSG00000061676_75 (sequence is synthesized)
tcatattttggttctagaaatgtgacactggaatgatgtggctctcaagatgacagtgttgcttctgaatgtctatgttcatgtcatctttaattgcatgaacaccagttttagcatctt

SEQ ID NO: 42379 - DNA, 120 bp, Artificial Sequence
  ENSG00000061676_76 (sequence is synthesized)
atgtcatctttaattgcatgaacaccagttttagcatcttcccttgagtagaaagagattctctacagcaagtattacgtaagaagtactggtggccaggcacagtggttcacgcctgta

SEQ ID NO: 42380 - DNA, 120 bp, Artificial Sequence
  ENSG00000061676_77 (sequence is synthesized)
ccccatctctacaaaaaaaatacaaaaatgaaaaagccgggtgtgattgtgtacacctgtagtcccagcaacttgagaagctgaggtggcaggattgcttgagcccaaggggagggttgg

SEQ ID NO: 42381 - DNA, 120 bp, Artificial Sequence
  ENSG00000061676_78 (sequence is synthesized)
ctgaggtggcaggattgcttgagcccaaggggagggttggcggcagtgggtggttcgaggctgcagtgagccatgattataccagtgcgctccagcctaggtgacagagcaagagccggt

SEQ ID NO: 42382 - DNA, 76 bp, Artificial Sequence
  ENSG00000061676_79 (sequence is synthesized)
accagtgcgctccagcctaggtgacagagcaagagccggtctcgataataattaaggccagacgcggtggctcact

SEQ ID NO: 42383 - DNA, 89 bp, Artificial Sequence
  ENSG00000061676_80 (sequence is synthesized)
ttataatacattaaaaaaaaaaagcacttgcattctgaaggcatattcacccttgaactgatagcattcaatgtataaaacacatgagt

SEQ ID NO: 42384 - DNA, 120 bp, Artificial Sequence
  ENSG00000061676_81 (sequence is synthesized)
cccttgaactgatagcattcaatgtataaaacacatgagtttcactccaagttacatatagaatgtttatctttatttgagaggaaatatccagttaataatcagaatgtcatactaatt

SEQ ID NO: 42385 - DNA, 120 bp, Artificial Sequence
  ENSG00000061676_82 (sequence is synthesized)
aggtatgaccataacttacgttagtcacatggtcattgattgcatgcagattctggctgccagaaagcacattgaagtaggtagtcatttaaccatttaactgttagatcttgcaaaggt

SEQ ID NO: 42386 - DNA, 120 bp, Artificial Sequence
  ENSG00000061676_83 (sequence is synthesized)
atgtcagttcattctgaattcttaccttcagccaaaaggtacaagggtctttgcagtctgaagcaaggcccagatggcagaacttgtgatggctaggaggggaaaatttgaccttaactg

SEQ ID NO: 42387 - DNA, 120 bp, Artificial Sequence
  ENSG00000061676_84 (sequence is synthesized)
gtagttgtggttttatcaagccaaaaatgctgactagaataataatgagagctaatgtttattgaaagcccattgtgtaccagatactctgttttctctaattcaaacctctaaatattg

SEQ ID NO: 42388 - DNA, 120 bp, Artificial Sequence
  ENSG00000061676_85 (sequence is synthesized)
ctcttttagtcttcacagtaatcctatatcatgatgacccccatttattgatatggaaactgaagctcaggaaagacaaagcaatttttacaaactcacactacaaggaagtagcagagg

SEQ ID NO: 42389 - DNA, 120 bp, Artificial Sequence
  ENSG00000061676_86 (sequence is synthesized)
ccaacatttaaatctggccccagagttgtgttcttctcattaaactgtgtctcagatctctcaaatgtgagtgtggacttttctaaccaatagcattttttaattaatgttttaaaaatt

SEQ ID NO: 42390 - DNA, 120 bp, Artificial Sequence
  ENSG00000061676_87 (sequence is synthesized)
tgaatagcttttagggtacagtgggtttttgtttacatggatgaatcatacattggtgaagtctgaggttttagtgtacctgtcacccaggtagtatgcattgtacccaatgtgtagttt

SEQ ID NO: 42391 - DNA, 120 bp, Artificial Sequence
  ENSG00000061676_88 (sequence is synthesized)
aatgtgtagttttttatccctagacccgttcccatcctcccacttctgagtctccaaagtccatgatatcactctgtatgcctttgcatacacatagcttagctcccacttacaagtgag

SEQ ID NO: 42392 - DNA, 120 bp, Artificial Sequence
  ENSG00000061676_89 (sequence is synthesized)
ttggttttctgttcctgagttactttgcttagaataatggcctctggctccatcatagttgctgcaaaaagacattgtttctttttttatggctgaacagtattccgtggtgtgtatata

SEQ ID NO: 42393 - DNA, 120 bp, Artificial Sequence
  ENSG00000061676_90 (sequence is synthesized)
taccacactttctttgtccactcattggtcagtgggcacttaggttggttccatatctttgcagttatgaattgtgctgcaataaatatacacatgcagattttttttgatatattgact

SEQ ID NO: 42394 - DNA, 120 bp, Artificial Sequence
  ENSG00000061676_91 (sequence is synthesized)
tcctttgggtagatacccagtagtaggattgctggatcaaattctatccagtagcatttgaaactgctttacattaacaatgagggacaaaaaaaataacaatgagggcttacattatgc

SEQ ID NO: 42395 - DNA, 120 bp, Artificial Sequence
  ENSG00000061676_92 (sequence is synthesized)
tactcttgatactagacattttcatatccattacttcatttaaactccacaaccaaattactcaatagggattgttttctttatttttgtaaatgaatgtggaaaccagctcataaaact

SEQ ID NO: 42396 - DNA, 120 bp, Artificial Sequence
  ENSG00000061676_93 (sequence is synthesized)
ttaaattccttgccccagtgtcataaaattactgagtttgagtggcagtgctgagattaaaacctaaggctctaggatttccagcccatattttttctactgtatcatgttctttcccaa

SEQ ID NO: 42397 - DNA, 120 bp, Artificial Sequence
  ENSG00000061676_94 (sequence is synthesized)
agcactaaaaaacatttcctgggtaaatgactgtgggcttggggacactatgcccactttctggccttcatgggtctaagttgcttctttgcttcttcactttttctctctgatcctgct

SEQ ID NO: 42398 - DNA, 120 bp, Artificial Sequence
  ENSG00000061676_95 (sequence is synthesized)
cagattaatctctagtaaatcagatttctttcctaggctgtcttatcccacatatatagtagataatatgtcacatatttgtgaatgttaaaaatatttgttttagttttaaatctcaag

SEQ ID NO: 42399 - DNA, 120 bp, Artificial Sequence
  ENSG00000061676_96 (sequence is synthesized)
ctcacacagtacttactctctatgttaacaaaaatggtttttactattttctgaaggtaacgcagctgttgaagtgagatcctacactggaacatacaacacttggtctaatattaaagt

SEQ ID NO: 42400 - DNA, 120 bp, Artificial Sequence
  ENSG00000061676_97 (sequence is synthesized)
tcgtgccaagagctctctaaatgtgattgatggattaattctgcctttatgaaagatgaacttattttcaagataatagctaattcttgaatgggcaacctattatgtatcaatgattgt

SEQ ID NO: 42401 - DNA, 120 bp, Artificial Sequence
  ENSG00000061676_98 (sequence is synthesized)
aatgatggagcattttagtcatttgtagctggaagagccttagagattatctggttcaacctattcaagagttaggtaatttaaccaaattaacatatgtggcgatgtgctcatatagtg

SEQ ID NO: 42402 - DNA, 120 bp, Artificial Sequence
  ENSG00000061676_99 (sequence is synthesized)
ttccttccactgtgctgtgttgccgcatatatgctgatcttatgtttatgcagtaatagtcttcataatgataaacagctactggttcctggtaggattttggacgtggatatgacttga

SEQ ID NO: 42403 - DNA, 120 bp, Artificial Sequence
  ENSG00000061676_100 (sequence is synthesized)
agtatgatgccacagcctcaaacaaatctggggtttgaatcccagctctgtcacttatggacaaattacttaacttctccaagtttgtttccctaagtgtagaatgtggataatatctac

SEQ ID NO: 42404 - DNA, 120 bp, Artificial Sequence
  ENSG00000061676_101 (sequence is synthesized)
tttaaagggctattgtaagcattaaaataagatcatgcgtataaattgatgagatggtggggaagaagaggctaccacaaagtaggcattcagtgtaaatggtggtagtttctccagtat

SEQ ID NO: 42405 - DNA, 120 bp, Artificial Sequence
  ENSG00000061676_102 (sequence is synthesized)
tattaggctatttggtttcacttataaaattgccttcaaagagttttttcatggcttttatgagtattataatatcagaacttccactcatgcaaatgtaacatttgtgtgttagtctat

SEQ ID NO: 42406 - DNA, 120 bp, Artificial Sequence
  ENSG00000061676_103 (sequence is synthesized)
tctatagctctgatcggagtctttatcttaaatgggaaagattattttccctgtcatgtaactttaacagaaaacgatgctaaaattaattttaagactgctctatactatatgtatgtt

SEQ ID NO: 42407 - DNA, 120 bp, Artificial Sequence
  ENSG00000061676_104 (sequence is synthesized)
atactatatttttatatactatacacaaaaatgtataagatgtaaagcttgtattttcaaatgttattgcagtatccagaacaattgcgacaattgctcttggaagcttctgtgcttttc

SEQ ID NO: 42408 - DNA, 120 bp, Artificial Sequence
  ENSG00000061676_105 (sequence is synthesized)
cacatgctgttccctgtctctggaatggaatgttctcttattctggctggcaaactcctgaacataatgtaaacagtaagctcaaacatcacttgccctttccttaccatgccatcctgt

SEQ ID NO: 42409 - DNA, 120 bp, Artificial Sequence
  ENSG00000061676_106 (sequence is synthesized)
ttcttctaaaccttataaatgcctttattatagtacatattgaatcataatgtaattattatttatctctgactcctttgattctgggactgccttgaggtcacggtctaggtttatttc

SEQ ID NO: 42410 - DNA, 120 bp, Artificial Sequence
  ENSG00000061676_107 (sequence is synthesized)
atctttctgtctgtttagtcaaatttcctaccctgtgtaactctcagaatcttactttaagttaggaaaggccagtggctggacagatgctacagacctccattggtacagatgccctta

SEQ ID NO: 42411 - DNA, 120 bp, Artificial Sequence
  ENSG00000061676_108 (sequence is synthesized)
gcttcatgttgggaacaagtggttctgtttctttttgttcctgtggagaagcatcagagatacaggcagctggggatttctacacctgtaatagcagcagctcagtgatgacacagagac

SEQ ID NO: 42412 - DNA, 120 bp, Artificial Sequence
  ENSG00000061676_109 (sequence is synthesized)
atgttttttttttttttttttttttgacagaaggcgaaggggaagcaaggtacttcttacatggcagagggaaaaggagagttggagtgggggagggggagagggaggagcaggagcagg

SEQ ID NO: 42413 - DNA, 120 bp, Artificial Sequence
  ENSG00000061676_110 (sequence is synthesized)
gagacggggagggagaggaaactgccccgaagacatggtttctaagatttctcccaatgagacaaatcacttgtctgggatgtcagggggagaagatgcagaatctgagccccttgtata

SEQ ID NO: 42414 - DNA, 120 bp, Artificial Sequence
  ENSG00000061676_111 (sequence is synthesized)
aatagacaaaaggtgaaagcattggcaatagatcaaaaaggcattccacgtagcaaaaaaattatttttaaatctgaaaatttaagtgaaatgccaagagcaaagaagagaggccatcag

SEQ ID NO: 42415 - DNA, 120 bp, Artificial Sequence
  ENSG00000061676_112 (sequence is synthesized)
aaaaatttcaaagtgactactcaggtcattgtcctgaaataaatgatcattttattctggtgactcacccctagctagagtcagtacttcatagaaaagacaggagctgtgagacactta

SEQ ID NO: 42416 - DNA, 120 bp, Artificial Sequence
  ENSG00000061676_113 (sequence is synthesized)
actgtaatcttacccctttacagaaatgcctcctatagtcaagctggtctgatgatctcatgtcatcatgcacaaggattagcaagccttgaaattttatcctgtcagtgtaactcctca

SEQ ID NO: 42417 - DNA, 120 bp, Artificial Sequence
  ENSG00000061676_114 (sequence is synthesized)
tctagtctcaagattgcactggcagttctttcgcagctgatcgtacagggaggaccaataaggctcatagaacacccttggagaatgaatgcctctgctgctggaggtcacagcacccag

SEQ ID NO: 42418 - DNA, 120 bp, Artificial Sequence
  ENSG00000061676_115 (sequence is synthesized)
aaagtgactagagggagcagctgatacctgctctagtgagttgtgctattcctgtcacatccttgcagaggtccaagggttgctggcaagtgaaggaatatcatgcctgtagtttgaagg

SEQ ID NO: 42419 - DNA, 120 bp, Artificial Sequence
  ENSG00000061676_116 (sequence is synthesized)
atagatcactcaactctcaactattctctcttcagctgtgaaccatacaacgtttttgaaaagcaaagtctgaacatttgcattctatacagaatattacagttggaaaataggtgtggt

SEQ ID NO: 42420 - DNA, 120 bp, Artificial Sequence
  ENSG00000061676_117 (sequence is synthesized)
gtctagagaaatgcttctaaatgctgcaagccaccctatgtgaagcctagtctagaaatctgctttgcttcatttattaacttcattgtatctttggaagtagaagttcttaaaagtgtg

SEQ ID NO: 42421 - DNA, 120 bp, Artificial Sequence
  ENSG00000061676_118 (sequence is synthesized)
tacagaagatgagtcctcagcatgagtttcactgcctgtctgtgtgagaggaagtgaccttgagagcagctgtagccctagggggacacccaggtagaggtgctcacaacatgctctgac

SEQ ID NO: 42422 - DNA, 120 bp, Artificial Sequence
  ENSG00000061676_119 (sequence is synthesized)
acccggtatggctgcattcccagcttaaatgatcacatctgctcttggttttttcactgtttacaaaatctgatttctttaaagggaagggatggaaaaggtagtcaatgctcctctgag

SEQ ID NO: 42423 - DNA, 120 bp, Artificial Sequence
  ENSG00000061676_120 (sequence is synthesized)
cacccaaagcatccctccacaagaacaaagaggaaaaatcattacttgctcccaacattacacaaagcgcatctctaccaatggaactctgcagtgtcggtctagccatcagcctttccc

SEQ ID NO: 42424 - DNA, 120 bp, Artificial Sequence
  ENSG00000061676_121 (sequence is synthesized)
acctcacagcatattttctgtgggggtaatttattagaggggaatttgttcctttttactctttttactcttcaaattagtaatagaacccctcatgtcattctaagtgacttaagtttt

SEQ ID NO: 42425 - DNA, 120 bp, Artificial Sequence
  ENSG00000061676_122 (sequence is synthesized)
aaagggaaccagaaaaggagagaatatgctattgtggcacttctaaaatgcagagtgtcctcaaagatggttatagtgggtaatgggtttcatataaattgcatactagagtatctccat

SEQ ID NO: 42426 - DNA, 120 bp, Artificial Sequence
  ENSG00000061676_123 (sequence is synthesized)
ttcctcttttaattttttaattggttttttaaagcttgatatgctgagttagttttcatttaaaaacaatgcttgagtaggaaagttaaagaaatagaaattgcctgttttaatctattc

SEQ ID NO: 42427 - DNA, 120 bp, Artificial Sequence
  ENSG00000061676_124 (sequence is synthesized)
atcctggcagcaggtatgtattgtatctgtccagagtccaaaacgtcagctccctccacttgccttccccatttcacataaactataaaagttagaaataatatattatgtcatatccta

SEQ ID NO: 42428 - DNA, 120 bp, Artificial Sequence
  ENSG00000061676_125 (sequence is synthesized)
acatcagttcaatgaatatagtttttaaaatacctactatgtgctagatactgaggacagaatgataaaatacaaaacaaagctaactaaaaacacagtttaactagtcttgtctacgat

SEQ ID NO: 42429 - DNA, 120 bp, Artificial Sequence
  ENSG00000061676_126 (sequence is synthesized)
tacctgccctaactataacttcatttaaggggagatactgctaaagggagttccttctgtgactgcacactctgataccaatatgtgacttctccctggctacaactgattaaatgaggg

SEQ ID NO: 42430 - DNA, 120 bp, Artificial Sequence
  ENSG00000061676_127 (sequence is synthesized)
aagaaaactgatccaaggggagttagtccaatagcttgtaaatggtgggttcttatcagagttttctcactaagttagaaccaagaggctgagggttgtgggggctacttaagcagaaag

SEQ ID NO: 42431 - DNA, 120 bp, Artificial Sequence
  ENSG00000061676_128 (sequence is synthesized)
tttcatggagtatggactgtgcaccattgtgaagtttcctgtatttccacaggctgtgggggcagagagcatcagagtgctgatcaggaaaaaagaatgaggcagatgcagacagagaag

SEQ ID NO: 42432 - DNA, 120 bp, Artificial Sequence
  ENSG00000061676_129 (sequence is synthesized)
caaagaagcatgagaggatgagaattaggaagtagactcttttttcattttaattaatttgactagattatatttcttgcaatcaaaagggccctgtgcagagaaggtccttatcttcgt

SEQ ID NO: 42433 - DNA, 120 bp, Artificial Sequence
  ENSG00000061676_130 (sequence is synthesized)
tcattttttgttgctatagctgaatacccgagactgggtaatttataaagtaaagaaatttattgcttaccattttagatgctgggaagtacaaggtcaagggttctcatctagtgaggg

SEQ ID NO: 42434 - DNA, 120 bp, Artificial Sequence
  ENSG00000061676_131 (sequence is synthesized)
ccttcttgctagtggggtctctgtagagtcctgaggtaacacagagcatcacatggtgtgggggtgggattcaccagagagagccaaactgacttttataacagactcacttttgtggta

SEQ ID NO: 42435 - DNA, 120 bp, Artificial Sequence
  ENSG00000061676_132 (sequence is synthesized)
actaacccactcccttgatagcccatcaatccattaatctagaaataaattcattcactcatgagggcagagctcttgtgaaccaatcacctcccagaagtcccacctctcaacactgct

SEQ ID NO: 42436 - DNA, 120 bp, Artificial Sequence
  ENSG00000061676_133 (sequence is synthesized)
gcactggggaccaaatttccaacacatgaacttttcggggacacattcaagccacaacagtcctcaataaatatttgttgaatcaataaatacacaggacatagtgtcctaaatgcttgg

SEQ ID NO: 42437 - DNA, 120 bp, Artificial Sequence
  ENSG00000061676_134 (sequence is synthesized)
catgtacatgaaccagatttggtccttgatgtcacagagcttataatatagtggaggagacagactttacatgtttgatcttgactgtaaaactagggtcactactcatcatctgatgaa

SEQ ID NO: 42438 - DNA, 120 bp, Artificial Sequence
  ENSG00000061676_135 (sequence is synthesized)
ggaggcagacagtaaaacaaataacaactattcaacatggtaacgtcaaaactgaacagaggctcaagtgaaagtttcaatgatagtaaccatggccaatggataggtgaatgcattgga

SEQ ID NO: 42439 - DNA, 120 bp, Artificial Sequence
  ENSG00000061676_136 (sequence is synthesized)
accatggccaatggataggtgaatgcattggaaaattagtatgatgccattagcaaaaacataaattgcacttaactaaagttcatctggctgaattctttccttccttccttccttcct

SEQ ID NO: 42440 - DNA, 120 bp, Artificial Sequence
  ENSG00000061676_137 (sequence is synthesized)
ctttggttttgagatctgtctatagtattgtgctagtgcacatattttaatttggtgcaaggcatgcttaacagagtaagtgaaaagctataaaggttagagcgtgtattagtttcaatg

SEQ ID NO: 42441 - DNA, 120 bp, Artificial Sequence
  ENSG00000061676_138 (sequence is synthesized)
acgaaggagtaataaatcattttgtcaggttgcactctaacattcaaattccatttttattatggctaactagccaagcatttataattctgaactccacagaatggggaaaaagtgtat

SEQ ID NO: 42442 - DNA, 120 bp, Artificial Sequence
  ENSG00000061676_139 (sequence is synthesized)
taacttataatagatcattgagcttgttaaatgtacctttcctaattcgtactttttcccttttgctgagaaaaatgcctttctgaatatataatttttacaggtcattggaaaggagta

SEQ ID NO: 42443 - DNA, 120 bp, Artificial Sequence
  ENSG00000061676_140 (sequence is synthesized)
ctgcacaacaggattattataatgtgctaaaagatggcacttgtatctcattgccacatagagagctcatgtgaaaactctttgatctttgctggctttttagctgaaaagatttggaaa

SEQ ID NO: 42444 - DNA, 120 bp, Artificial Sequence
  ENSG00000061676_141 (sequence is synthesized)
tctttttggcactggcaaaaacagaactgtggtaactgtttatagttggttgatttttagcaatgggtaagaatgtctttgttgaatccagtttattaatacgtaatgggcaacatgttg

SEQ ID NO: 42445 - DNA, 120 bp, Artificial Sequence
  ENSG00000061676_142 (sequence is synthesized)
ccttaaaggcaaaagcatatttttctcatatcaaaaagctccctaaatttttgccaatatccaaagatattttaagatggtcttcattttctttttcagtctgtcctatgctgagaaaaa

SEQ ID NO: 42446 - DNA, 120 bp, Artificial Sequence
  ENSG00000061676_143 (sequence is synthesized)
aaaattacaacctctgaacttcagcagttttttaggtaaaaggaatttttcatgatgtgattgatataactactcagctggacataagctttcaagggctaagtccatttgccgatttgt

SEQ ID NO: 42447 - DNA, 120 bp, Artificial Sequence
  ENSG00000061676_144 (sequence is synthesized)
ttgcatttcctactccaactaaaataattcaaagacatgaagtgtctattgtggaaaatgcatgaataatgcaaaagtcattctcaagtgacctatcagaaaggcctaccagaaatgcag

SEQ ID NO: 42448 - DNA, 120 bp, Artificial Sequence
  ENSG00000061676_145 (sequence is synthesized)
ttactgctttctaataaaatcatgaaaaacttttttaaaaagtataaccatcttgaatttgttgaggcaattataagagagtatataagggcaagtttctccaaaagcggttctgtttgt

SEQ ID NO: 42449 - DNA, 120 bp, Artificial Sequence
  ENSG00000061676_146 (sequence is synthesized)
tttgtttttttttaataattcccatcaacagcaatctgttttctcattgtagtagtataggtgttaacataaaagctcaaacagcttgggagaaaaaaaaggatatagcaaacctaactg

SEQ ID NO: 42450 - DNA, 120 bp, Artificial Sequence
  ENSG00000061676_147 (sequence is synthesized)
ataactttgctagtttcaaatcattatgatggccattcatagatgactgaaatatttaacatttgaagtaacagaattttgacttatgttttcatggtttaagagtttatatttcaaatt

SEQ ID NO: 42451 - DNA, 120 bp, Artificial Sequence
  ENSG00000061676_148 (sequence is synthesized)
ttttcacatagtctgtttataacagtatataaaacatgtattaactatataagttaataaagtcatgaactgatggccattttttggtcttattcatatagtataggctgttttgtgaat

SEQ ID NO: 42452 - DNA, 120 bp, Artificial Sequence
  ENSG00000061676_149 (sequence is synthesized)
taatccccttcccatgtgtttgaattccccactatgtaaggcttagtggtgttagcatgatccaagggtgggattttcagccctctgacatcaaaaggtgaagcagaggacacaaaaacc

SEQ ID NO: 42453 - DNA, 120 bp, Artificial Sequence
  ENSG00000061676_150 (sequence is synthesized)
ctcactgcatcttccctagactggccagaaccactccatggtcagtggactcccttaataggaaggaatgctggtcagttgtcaaagagcaaaaagggaggggtagtcatgaggttggtt

SEQ ID NO: 42454 - DNA, 120 bp, Artificial Sequence
  ENSG00000061676_151 (sequence is synthesized)
gtaatcagaggtgcaacaggtctttccaaagggctggtttctgtttaactcttaggaaagaacacctaatggtagttagtgaggagggggtataatgagatgtgcccaacctcccatccc

SEQ ID NO: 42455 - DNA, 120 bp, Artificial Sequence
  ENSG00000061676_152 (sequence is synthesized)
atcatggccgggaactcagtttttaaggtttccctgaagtcctcttggccaggagagggtctgtttagtcaaatgtggggggggagcttaggattttatttttatttccaagttataatg

SEQ ID NO: 42456 - DNA, 120 bp, Artificial Sequence
  ENSG00000061676_153 (sequence is synthesized)
ttggaccatcagagcatgaatacaggttgagtctttaatctgtaaatacttagcaatcaccttcttctcagtaactttctctgaaggttgctgataagccagtgttcttgatgtttgccc

SEQ ID NO: 42457 - DNA, 120 bp, Artificial Sequence
  ENSG00000061676_154 (sequence is synthesized)
acttacccctcaagatgaggagtgaagaaattagattgcattgccaggaatttcctagaagaaaaggttttgaggatgcatgacctatgagggtgctgaggacccctttccaccaaacat

SEQ ID NO: 42458 - DNA, 120 bp, Artificial Sequence
  ENSG00000061676_155 (sequence is synthesized)
ggactaacttctgggttgctctttcacatctattgtcttgttcgacgtacacagaagtgcagagcacagccgcagccctcacagcatcatctatctaggttctgaatcctgaatggtctg

SEQ ID NO: 42459 - DNA, 120 bp, Artificial Sequence
  ENSG00000061676_156 (sequence is synthesized)
aggctctcctagagctgagattctcctttgcagttccagtggagaaaagcactttctttgccgaggcagtgtaacttccttgttcccaaggctccaactgttgtgggcacatatgagtat

SEQ ID NO: 42460 - DNA, 120 bp, Artificial Sequence
  ENSG00000061676_157 (sequence is synthesized)
acattaacatccatgcccaatttataatcactgttttccccacatgtgtactcagacctccaagcttctgaaaaatatttcctctcatctctcaaagaattttagtacatttgcctggat

SEQ ID NO: 42461 - DNA, 120 bp, Artificial Sequence
  ENSG00000061676_158 (sequence is synthesized)
gcagaaacacaaatcatgctggctttcctactcaatcaaaaactgtagcttgagtggggtggcaagggttgtcccacagcaggtttacttggactccaaaatgatgtagagtttagtgag

SEQ ID NO: 42462 - DNA, 120 bp, Artificial Sequence
  ENSG00000061676_159 (sequence is synthesized)
gcagctccttgagtttgaacttagagcccttttggctaccagggcacctgcagtcctccaagatagtagagtctgaaccagttaaagagccagctaccacagctttgcagaaaccactgt

SEQ ID NO: 42463 - DNA, 120 bp, Artificial Sequence
  ENSG00000061676_160 (sequence is synthesized)
ttctccttaactctagggctcagcggttgaactccttagaataaaactttctgtctgcgaccctatcattttcttttgtattttggccttcactgaattcccaccccatccattccaaca

SEQ ID NO: 42464 - DNA, 120 bp, Artificial Sequence
  ENSG00000061676_161 (sequence is synthesized)
gacttggttatacgtgtctgaacaccaaatgtgacagaatttgtggccttggatcaggaggctatttggcccttatctaaatcggtggctgagaatggattccagggaagtgtttttctt

SEQ ID NO: 42465 - DNA, 120 bp, Artificial Sequence
  ENSG00000061676_162 (sequence is synthesized)
aggagtacccaagaagctcagctcaggttgggctccctgttctattctgagaactacaaatcaaattcaaaatggagcacagaaaattctcatttctagttgacttatttgtattttggt

SEQ ID NO: 42466 - DNA, 120 bp, Artificial Sequence
  ENSG00000061676_163 (sequence is synthesized)
gtcctgtgccctaaatatcttctcaaggaaaccttggctttaaaagtgattgtttacttaaacaaataaaacaacaacatacaagaaaaggcagtaaatccgagcgtccatcaacaaatg

SEQ ID NO: 42467 - DNA, 120 bp, Artificial Sequence
  ENSG00000061676_164 (sequence is synthesized)
aatcaaaaaacaaatgagatatatatgtacggtggcatattattcagccttaaaaaggaaagaaattttgacacatgagacaatatgaatgaaccttgaagacattaattatgctgagtg

SEQ ID NO: 42468 - DNA, 120 bp, Artificial Sequence
  ENSG00000061676_165 (sequence is synthesized)
aaataagccagccacaaaagaacagatattgtataattcctcttatattaggtacctaaaatagtcaaattgatagaaagtagaatgttggttggcaggggctggcaaggagagggaaat

SEQ ID NO: 42469 - DNA, 120 bp, Artificial Sequence
  ENSG00000061676_166 (sequence is synthesized)
gaagagaaggtgtatgaagggaacagagtttcagttggggaagacgaaaaagttctgacagtggatgatggtggttgttgcacagcaacatgaatgtacttaatgccacagaactgtatg

SEQ ID NO: 42470 - DNA, 120 bp, Artificial Sequence
  ENSG00000061676_167 (sequence is synthesized)
cttaaaaatggttgaaacggtaaatttgatataatgtgtattgaacctatttccagatcaaaacagagagatctacattccttttggtggtgtcaaaataaaccattatcttgaaatagc

SEQ ID NO: 42471 - DNA, 120 bp, Artificial Sequence
  ENSG00000061676_168 (sequence is synthesized)
gcagaagctaacacagatcttctctggagaaagatatcctcatcctaggcttcagatgattcctgcaaataattcatcaagcacatgaccttcagctggagagtggaagtcttttggaga

SEQ ID NO: 42472 - DNA, 120 bp, Artificial Sequence
  ENSG00000061676_169 (sequence is synthesized)
cagtgtgaaactgtcttcttccttgggaactaagaaatatagtcagtatagataatgggatgggataagagaaaataatttgaatcattttaaaaagcagacttgttctgaaaaaatcag

SEQ ID NO: 42473 - DNA, 120 bp, Artificial Sequence
  ENSG00000061676_170 (sequence is synthesized)
ttttaaagaccaataagaatatttgattacatttattatgttagtgtctctttgtgccttaattactctctaaattactgcttgaatgtaggctatctaagctcatcttatttaattgct

SEQ ID NO: 42474 - DNA, 120 bp, Artificial Sequence
  ENSG00000061676_171 (sequence is synthesized)
tttagcactgaatgattgaaatgtgttggaagttgaaacatacctaaaataagtaaccgatgaaccttttattaacaaactcactttatgtgtatgtatacttttaagcttgcatcctcc

SEQ ID NO: 42475 - DNA, 120 bp, Artificial Sequence
  ENSG00000061676_172 (sequence is synthesized)
tgaggaaatgctaataattgtatattcttcattttccagccattttaaaaaatatttctgagcttaattaacctgttagttgcttatttcatctcaaaatacagattttggcctttagaa

SEQ ID NO: 42476 - DNA, 120 bp, Artificial Sequence
  ENSG00000061676_173 (sequence is synthesized)
tggcctttagaagaaaatatatgtaatagttgatatttgtctttttatactaagtactgaaggccaattatatgtttaaaaaattttgtgtgttacattataagcaatctgtaattttta

SEQ ID NO: 42477 - DNA, 120 bp, Artificial Sequence
  ENSG00000061676_174 (sequence is synthesized)
cagggatctttgcttgcttcattgtttggaggggaggtgtaggtgggtaataattcggtaaatattttttgtttaaagtatagttcctactttcttgctaaattgagcaagccattgccc

SEQ ID NO: 42478 - DNA, 120 bp, Artificial Sequence
  ENSG00000061676_175 (sequence is synthesized)
ttttatagacaactttccttctctcataacagaaagtacttcaggaattgggcgtgattatctttatgagtgcagaataagctctacctttgtatattaagtcagtatattcattactac

SEQ ID NO: 42479 - DNA, 120 bp, Artificial Sequence
  ENSG00000061676_176 (sequence is synthesized)
aatgacgccatctttagaatattgctcttatgtgttagttataaccttaaagattttgaactttctcagtttaggagaataaaaagtcgaattctctaagcattatctccaaataaggtt

SEQ ID NO: 42480 - DNA, 120 bp, Artificial Sequence
  ENSG00000061676_177 (sequence is synthesized)
tactgttaattgtgccttttatcatgggaattttattactttaataaatttagatttttttccaagtttaagaaagaatccagttcacacttttttattctcttctccttctgtttcttt

SEQ ID NO: 42481 - DNA, 120 bp, Artificial Sequence
  ENSG00000061676_178 (sequence is synthesized)
tgatatgaaggtaataatataatttatagttggggtttacagtctctaaagcgaaatatttaaattacatatgcaagaaaatgtaataaatcctaaactactgtaaggtttctagtttag

SEQ ID NO: 42482 - DNA, 120 bp, Artificial Sequence
  ENSG00000061676_179 (sequence is synthesized)
agtggttagttagcatgcttgcctttgtaattgaatctttgagagctcagcaccaaaatactacctaggcattttgaaagtcagtcttctttgatcacctatagcaatgcaaaattgact

SEQ ID NO: 42483 - DNA, 120 bp, Artificial Sequence
  ENSG00000061676_180 (sequence is synthesized)
atagcaatgcaaaattgactaaaaatagattttttttttccttaaatggatagctgtttatacatggtgataaagaaaattaagaaagatgaggtggccaggcacggtggctcacgcctg

SEQ ID NO: 42484 - DNA, 120 bp, Artificial Sequence
  ENSG00000061794_0 (sequence is synthesized)
gtcctcgcagccatggcggccgccgcgctcccagcatggctgtctctgcagtcgagggcaaggactctgcgtgcattctccactgccgtctactcggccactccggtcccgacacctagc

SEQ ID NO: 42485 - DNA, 120 bp, Artificial Sequence
  ENSG00000061794_1 (sequence is synthesized)
ctgccggaaagaacacccggaaatgaaaggccaccaagaagaaaggcactacctcctaggacagagaaaatggctgttgaccaggactggcctagtgtttacccagttgcagcaccattt

SEQ ID NO: 42486 - DNA, 120 bp, Artificial Sequence
  ENSG00000061794_2 (sequence is synthesized)
aaaccctctgcagtacctcttcctgttcgaatgggttatccagtaaaaaagggcgtgcccatggcaaaggagggaaatctagaacttttaaagattcccaattttctgcatttgactcct

SEQ ID NO: 42487 - DNA, 120 bp, Artificial Sequence
  ENSG00000061794_3 (sequence is synthesized)
gtagcaattaaaaagcactgtgaagcccttaaagatttttgcactgagtggccagccgcactggacagtgacgagaaatgtgagaagcattttccaattgaaattgacagcactgattat

SEQ ID NO: 42488 - DNA, 120 bp, Artificial Sequence
  ENSG00000061794_4 (sequence is synthesized)
gtttcatcaggaccatctgttcggaaccccagagcacgagtagtagtcttaagagtaaagctttccagtttgaatttagatgatcacgcaaagaagaaattaattaaacttgtaggagag

SEQ ID NO: 42489 - DNA, 120 bp, Artificial Sequence
  ENSG00000061794_5 (sequence is synthesized)
cgatactgcaagaccacagatgtgcttaccatcaaaacagataggtgccctttaaggaggcagaattacgattatgcagtgtatctactaacagtgttataccatgagtcttggaatact

SEQ ID NO: 42490 - DNA, 120 bp, Artificial Sequence
  ENSG00000061794_6 (sequence is synthesized)
gaagaatgggaaaaaagtaagactgaagcagacatggaagagtatatatgggaaaatagctcatcagaaagaaatatcctggaaacgcttctccagatgaaagctgctgagaaaaatatg

SEQ ID NO: 42491 - DNA, 120 bp, Artificial Sequence
  ENSG00000061794_7 (sequence is synthesized)
taaagaaattgaagagtacaaaaagtctgttgttagtcttaaaaatgaggaggaaaatgaaaattccatttctcagtacaaagaatccgtgaagagactattaaatgtgacatgaattat

SEQ ID NO: 42492 - DNA, 120 bp, Artificial Sequence
  ENSG00000061794_8 (sequence is synthesized)
gacatgaattatggagtagaaaaatctgcttgatttattaattttatgatatatgtgatcagtatctaatttgatataaaattgaaaatgttaaaaaatcattttttttcctcagagtta

SEQ ID NO: 42493 - DNA, 120 bp, Artificial Sequence
  ENSG00000061794_9 (sequence is synthesized)
tcatactaatgcttaatggcaatgattactccagagttttttaatttttacactggggcaatagactaggaggtctctgatttcttcttggtctaaagtgttttgattttatttctacat

SEQ ID NO: 42494 - DNA, 120 bp, Artificial Sequence
  ENSG00000061794_10 (sequence is synthesized)
aatagctttggtattcatgtatatacatgcatttaattgtgattttatcacctttcccatttctttccccacaagctggcatttcagtagttgcttttgaataatggttttggttacctg

SEQ ID NO: 42495 - DNA, 120 bp, Artificial Sequence
  ENSG00000061794_11 (sequence is synthesized)
ggaaggcaggcccagaacccatttccttgacttgcagttccgggctgtgttcacatgactgctgtctagctgatgcatttttcacatttgtcaactctggttagaaacaggtcctcagga

SEQ ID NO: 42496 - DNA, 120 bp, Artificial Sequence
  ENSG00000061794_12 (sequence is synthesized)
gtattctctaacctgatattttctaaaaagatatgttgattcaactttgtttagcatcctactttctagattgtggggctcattttgccagggccaagctaccagaaaagtagaagtgga

SEQ ID NO: 42497 - DNA, 120 bp, Artificial Sequence
  ENSG00000061794_13 (sequence is synthesized)
gattacctggtatgtatctctctgggtgccccagttagagctgccacagctcaggaaaaagatgaggcataacgaccttgaatgtaattggagtaagtgacaaaataagaactaccctgg

SEQ ID NO: 42498 - DNA, 120 bp, Artificial Sequence
  ENSG00000061794_14 (sequence is synthesized)
gaaaccctgcattcaatgtagctgtcaattcagtatttttaagtacacctgtcagctgtttcttaccacttcgatggttgtgattaatttaaaatcaaaataaaggaattactgagttta

SEQ ID NO: 42499 - DNA, 120 bp, Artificial Sequence
  ENSG00000061918_0 (sequence is synthesized)
gtagccgctgccgcctctgcctgggtcccttcggccgtacctctgcgtgggggctgcctccccggctcccggtgcagacaccatgtacggatttgtgaatcacgccctggagttgctggt

SEQ ID NO: 42500 - DNA, 120 bp, Artificial Sequence
  ENSG00000061918_1 (sequence is synthesized)
gatccgcaattacggccccgaggtgtgggaagacatcaaaaaagaggcacagttagatgaagaaggacagtttcttgtcagaataatatatgatgactccaaaacttatgatttggttgc

SEQ ID NO: 42501 - DNA, 120 bp, Artificial Sequence
  ENSG00000061918_2 (sequence is synthesized)
tgctgcaagcaaagtcctcaatctcaatgctggagaaatcctccaaatgtttgggaagatgtttttcgtcttttgccaagaatctggttatgatacaatcttgcgtgtcctgggctctaa

SEQ ID NO: 42502 - DNA, 120 bp, Artificial Sequence
  ENSG00000061918_3 (sequence is synthesized)
tgtcagagaatttctacagaaccttgatgctctgcacgaccaccttgctaccatctacccaggaatgcgtgcaccttcctttaggtgcactgatgcagaaaagggcaaaggactcatttt

SEQ ID NO: 42503 - DNA, 120 bp, Artificial Sequence
  ENSG00000061918_4 (sequence is synthesized)
gcactactactcagagagagaaggacttcaggatattgtcattggaatcatcaaaacagtggcacaacaaatccatggcactgaaatagacatgaaggttattcagcaaagaaatgaaga

SEQ ID NO: 42504 - DNA, 120 bp, Artificial Sequence
  ENSG00000061918_5 (sequence is synthesized)
atgtgatcatactcaatttttaattgaagaaaaagagtcaaaagaagaggatttttatgaagatcttgacagatttgaagaaaatggtacccaggaatcacgcatcagcccatatacatt

SEQ ID NO: 42505 - DNA, 120 bp, Artificial Sequence
  ENSG00000061918_6 (sequence is synthesized)
ctgcaaagcttttccttttcatataatatttgaccgggacctagtggtcactcagtgtggcaatgctatatacagagttctcccccagctccagcctgggaattgcagccttctgtctgt

SEQ ID NO: 42506 - DNA, 120 bp, Artificial Sequence
  ENSG00000061918_7 (sequence is synthesized)
cttctcgctggttcgtcctcatattgatattagtttccatgggatcctttctcacatcaatactgtttttgtattgagaagcaaggaaggattgttggatgtggagaaattagaatgtga

SEQ ID NO: 42507 - DNA, 120 bp, Artificial Sequence
  ENSG00000061918_8 (sequence is synthesized)
ggatgaactgactgggactgagatcagctgcttacgtctcaagggtcaaatgatctacttacctgaagcagatagcatactttttctatgttcaccaagtgtcatgaacctggacgattt

SEQ ID NO: 42508 - DNA, 120 bp, Artificial Sequence
  ENSG00000061918_9 (sequence is synthesized)
gacaaggagagggctgtatctaagtgacatccctctgcatgatgccacgcgcgatcttgttcttttgggagaacaatttagagaggaatacaaactcacccaagaactggaaatcctcac

SEQ ID NO: 42509 - DNA, 120 bp, Artificial Sequence
  ENSG00000061918_10 (sequence is synthesized)
tgacaggctacagctcacgttaagagccctggaagatgaaaagaaaaagacagacacattgctgtattctgtccttcctccgtctgttgccaatgagctgcggcacaagcgtccagtgcc

SEQ ID NO: 42510 - DNA, 120 bp, Artificial Sequence
  ENSG00000061918_11 (sequence is synthesized)
tgccaaaagatatgacaatgtgaccatcctctttagtggcattgtgggcttcaatgctttctgtagcaagcatgcatctggagaaggagccatgaagatcgtcaacctcctcaacgacct

SEQ ID NO: 42511 - DNA, 120 bp, Artificial Sequence
  ENSG00000061918_12 (sequence is synthesized)
ctacaccagatttgacacactgactgattcccggaaaaacccatttgtttataaggtggagactgttggtgacaagtatatgacagtgagtggtttaccagagccatgcattcaccatgc

SEQ ID NO: 42512 - DNA, 120 bp, Artificial Sequence
  ENSG00000061918_13 (sequence is synthesized)
tccatctgccacctggccttggacatgatggaaattgctggccaggttcaagtagatggtgaatctgttcagataacaatagggatacacactggagaggtagttacaggtgtcatagga

SEQ ID NO: 42513 - DNA, 120 bp, Artificial Sequence
  ENSG00000061918_14 (sequence is synthesized)
cagcggatgcctcgatactgtctttttgggaatactgtcaacctcacaagccgaacagaaaccacaggagaaaagggaaaaataaatgtgtctgaatatacatacagatgtcttatgtct

SEQ ID NO: 42514 - DNA, 120 bp, Artificial Sequence
  ENSG00000061918_15 (sequence is synthesized)
ccagaaaattcagatccacaattccacttggagcacagaggcccagtgtccatgaagggcaaaaaagaaccaatgcaagtttggtttctatccagaaaaaatacaggaacagaggaaaca

SEQ ID NO: 42515 - DNA, 120 bp, Artificial Sequence
  ENSG00000061918_16 (sequence is synthesized)
aagcaggatgatgactgaatcttggattatggggtgaagaggagtacagactaggttccagttttctcctaacacgtgccaagcccaggagcagttcttccctatggatacagattttct

SEQ ID NO: 42516 - DNA, 120 bp, Artificial Sequence
  ENSG00000061918_17 (sequence is synthesized)
tttgtccttgtccattaccccaagactttcttctagatatatctctcactatccgttattcaaccttagctctgctttctattactttttaggctttagtatattatctaaagtttggct

SEQ ID NO: 42517 - DNA, 120 bp, Artificial Sequence
  ENSG00000061918_18 (sequence is synthesized)
tttgatgtggatgatgtgagcttcatgtgtcttaaaatctactacaagcattacctaacatggtgatctgcaagtagtaggcacccaataaatatttgttgaatttagttaaatgaaact

SEQ ID NO: 42518 - DNA, 120 bp, Artificial Sequence
  ENSG00000061918_19 (sequence is synthesized)
gaacagtgtttggccatgtgtatatttatatcatgtttaccaaatctgtttagtgttccacatatatgtatatgtatattttaatgactataatgtaataaagtttatatcatgttggtg

SEQ ID NO: 42519 - DNA, 120 bp, Artificial Sequence
  ENSG00000061918_20 (sequence is synthesized)
tatatcattatagaaatcattttctaaaggagtgaattctaagttttaggggaaaaaatgcaatttattttcagactcccaaagtaagaattaacatatcatgctaagaaaatagtgact

SEQ ID NO: 42520 - DNA, 120 bp, Artificial Sequence
  ENSG00000061918_21 (sequence is synthesized)
attttgaagtatgctacttccctttcagaaatatagaatacacgtttctgttattaaagtatttgattactaattcaaatcatatggcaattataattcttctaaaatgctatcatttgt

SEQ ID NO: 42521 - DNA, 120 bp, Artificial Sequence
  ENSG00000061918_22 (sequence is synthesized)
aactgtatcccctgtattaaatctcattaaccacaggcagctgttacagaaagctgcattgtttcacattgagctgttacattagttcaggctaaatgttgggagctccaaccacatcca

SEQ ID NO: 42522 - DNA, 120 bp, Artificial Sequence
  ENSG00000061918_23 (sequence is synthesized)
agaataaatctggaaacacactgctgggatactgctgttagagcccttcttggccttgtattcccagaaatgagctccctttccttagcttagaagaatgtgattatatccaggacatca

SEQ ID NO: 42523 - DNA, 120 bp, Artificial Sequence
  ENSG00000061918_24 (sequence is synthesized)
tgttcagaaaacttagtttactttcagcatagaatgcattactgttggaataattggcctctagctcttaaatgtctctgataacttattaatatctatctttataaaatagagtgcaac

SEQ ID NO: 42524 - DNA, 120 bp, Artificial Sequence
  ENSG00000061918_25 (sequence is synthesized)
tacttttgtgtaaaaatgtttgcctttaaatttagtatttcatatcagcacatcgatatatgtataaatgttccatgttaatgtgtaaaagagtctgtaataaattatttttttcacgtg

SEQ ID NO: 42525 - DNA, 120 bp, Artificial Sequence
  ENSG00000061918_26 (sequence is synthesized)
agtgctgggataacaggcatgagccaacctgcccagccagaaaagagagattttaatgcttatgtgctttataaaagaggcacagttagatgaagaaggacagtttcttgtcagaataat

SEQ ID NO: 42526 - DNA, 120 bp, Artificial Sequence
  ENSG00000061918_27 (sequence is synthesized)
gatgctgcctccccggcccggttgcgctgtagccgctgccgcctctgcctgggtcccttcggccgtacctctgcgtgggggctgcctccccggctcccggtgcagacaccatggcgggtt

SEQ ID NO: 42527 - DNA, 120 bp, Artificial Sequence
  ENSG00000061918_28 (sequence is synthesized)
tgccgctccacaccgcagcttcctgagctcgggaaggggaggtgcggcggaggcgtggggtcttcccggctctggccggccccaccagtgtgggaggctgagcgccagcggaagggaagg

SEQ ID NO: 42528 - DNA, 120 bp, Artificial Sequence
  ENSG00000061918_29 (sequence is synthesized)
cgacactgatgctgtgtgaaaaggacagcagaagcactaaaggctttcccagtatttcttacagtggctttctgctgatcccactgaacagattgctgtattctgtccttcctccgtctg

SEQ ID NO: 42529 - DNA, 120 bp, Artificial Sequence
  ENSG00000061918_30 (sequence is synthesized)
attttgtaaatacattttacaattttgcctatttgctaccattataaattttcactgactcctcatagacagcatattcttaaatgctatatttctttttaataccaacagagtgacagg

SEQ ID NO: 42530 - DNA, 120 bp, Artificial Sequence
  ENSG00000061936_0 (sequence is synthesized)
cattttgtggcccgctatggcggcggtgttgaggttgggtacgggatgcggggtctttgactgaaggggtaggccaagtggaggtatcagggacgtcgcgcggcacagaagaggaccagc

SEQ ID NO: 42531 - DNA, 120 bp, Artificial Sequence
  ENSG00000061936_1 (sequence is synthesized)
ctggacgccggggacgctgtcatgtacggcgcgagcgggggccgcgccaaacccgagaggaaaagcggcgcgaaggaggaggccgggccaggcggtgccggcggtgggggcagccgagtg

SEQ ID NO: 42532 - DNA, 120 bp, Artificial Sequence
  ENSG00000061936_2 (sequence is synthesized)
gagctcttggttttcggctatgcctgcaagctgttccgggacgacgagcgggccctggctcaggaacagggacagcacctcatcccctggatgggggaccacaagatcctcatcgacaga

SEQ ID NO: 42533 - DNA, 120 bp, Artificial Sequence
  ENSG00000061936_3 (sequence is synthesized)
tatgatggacgtggtcacctgcatgacctttctgagtacgatgctgagtattccacgtggaacagagattatcagctgtctgaagaggaggcgcgaatagaggccctgtgtgatgaagag

SEQ ID NO: 42534 - DNA, 120 bp, Artificial Sequence
  ENSG00000061936_4 (sequence is synthesized)
aggtatttagccttgcatacggacttgcttgaggaggaggcaaggcaagaggaagaatacaagcgattgagtgaagcactagcagaggatgggagctacaatgccgtggggttcacttac

SEQ ID NO: 42535 - DNA, 120 bp, Artificial Sequence
  ENSG00000061936_5 (sequence is synthesized)
ggtagcgactattacgacccgtcagagccgacggaggaggaggagccttccaaacagagagaaaaaaatgaggccgaaaatttagaggaaaatgaagagcccttcgttgcccccttagga

SEQ ID NO: 42536 - DNA, 120 bp, Artificial Sequence
  ENSG00000061936_6 (sequence is synthesized)
ttgagcgtcccgtctgacgtggagttgccaccaaccgctaaaatgcacgccatcatcgagcgcacggccagcttcgtgtgcaggcagggagcacagtttgagatcatgctgaaggccaag

SEQ ID NO: 42537 - DNA, 120 bp, Artificial Sequence
  ENSG00000061936_7 (sequence is synthesized)
caggcccggaactcccagtttgactttctgcgcttcgaccactacctcaacccctactataagttcatccagaaagccatgaaagagggacgctacactgtcctggcagaaaacaaaagt

SEQ ID NO: 42538 - DNA, 120 bp, Artificial Sequence
  ENSG00000061936_8 (sequence is synthesized)
gacgagaaaaaaaaatcaggagtcagctctgacaatgaagatgatgatgatgaagaagatgggaattaccttcatccctctctctttgcctccaagaagtgtaaccgccttgaagagctg

SEQ ID NO: 42539 - DNA, 120 bp, Artificial Sequence
  ENSG00000061936_9 (sequence is synthesized)
atgaagcccttgaaggtagtggacccagatcatcccctcgcagcacttgttcgtaaggcacaggctgacagttccactcccaccccacacaacgcagacggtgcgcctgtgcagccctcc

SEQ ID NO: 42540 - DNA, 120 bp, Artificial Sequence
  ENSG00000061936_10 (sequence is synthesized)
caggtggagtacacggcagactcgaccgtggcagccatgtattacagctactacatgctaccggacggcacttactgcctggcgccgccccctcccggaatcgacgtgactacttactac

SEQ ID NO: 42541 - DNA, 120 bp, Artificial Sequence
  ENSG00000061936_11 (sequence is synthesized)
agcacccttcctgctggcgtgaccgtgtctaactcccctggagtgacgaccaccgccccaccacctcctgggaccacaccactaccgcccccaaccacagcagagactagcagcggggcc

SEQ ID NO: 42542 - DNA, 120 bp, Artificial Sequence
  ENSG00000061936_12 (sequence is synthesized)
acctccacaaccaccaccacaagtgcacttgcccccgtggccgccatcatccccccgccccccgacgtccagcccgtgattgacaagctggccgagtatgtcgccaggaacggcctgaag

SEQ ID NO: 42543 - DNA, 120 bp, Artificial Sequence
  ENSG00000061936_13 (sequence is synthesized)
accagtgttcgtgccaagaatgatcaaagatttgagttcctgcagccgtggcaccagtataatgcttattatgagtttaagaagcagttcttcctccagaaagaagggggcgatagcatg

SEQ ID NO: 42544 - DNA, 120 bp, Artificial Sequence
  ENSG00000061936_14 (sequence is synthesized)
caggctgtgtctgcaccagaagaggctcccacagactctgctcccgagaagccaagtgatgctggggaggatggcgcgcctgaagacgcagccgaggtgggagcacgggcaggctcaggc

SEQ ID NO: 42545 - DNA, 120 bp, Artificial Sequence
  ENSG00000061936_15 (sequence is synthesized)
gggaagaaggaggcatcgtccagtaagaccgtcccggacgggaagctggtgaaagcttcctttgctccaataagctttgcaatcaaggccaaagaaaatgatctgcttcccctggaaaaa

SEQ ID NO: 42546 - DNA, 120 bp, Artificial Sequence
  ENSG00000061936_16 (sequence is synthesized)
aatcgtgttaagctagatgatgacagtgatgatgatgaagaaagcaaagaaggccaagaaagttctagtagtgctgcaaacactaacccagcagttgccccaccctgtgtagttgttgag

SEQ ID NO: 42547 - DNA, 120 bp, Artificial Sequence
  ENSG00000061936_17 (sequence is synthesized)
gagaagaagcctcaacttacccaggaggagctagaagcaaagcaagcaaagcaaaagctggaagatcgcctcgcagctgctgcccgggaaaagctggcccaggcgtctaaggagtcaaaa

SEQ ID NO: 42548 - DNA, 120 bp, Artificial Sequence
  ENSG00000061936_18 (sequence is synthesized)
gagaaacagcttcaagcagaacgtaaaaggaaagcggcgttatttttacagaccctcaaaaatcctctgccggaagcagaagctgggaaaattgaggagagtcctttcagtgtcgaggaa

SEQ ID NO: 42549 - DNA, 120 bp, Artificial Sequence
  ENSG00000061936_19 (sequence is synthesized)
tccagcactacgccctgccctctactgactggaggcaggcctctgcctactttagaagttaaaccacccgataggccttcgagcaaaagcaaagatccaccgagagaagaagagaaagaa

SEQ ID NO: 42550 - DNA, 120 bp, Artificial Sequence
  ENSG00000061936_20 (sequence is synthesized)
aagaaaaagaaaaagcacaaaaaaagatctcgaacaagatcacgttctcccaagtaccattcgtcatccaagtccaggtctagatcacactcaaaagcaaagcattctcttcccagtgcc

SEQ ID NO: 42551 - DNA, 120 bp, Artificial Sequence
  ENSG00000061936_21 (sequence is synthesized)
tatcggacagtgcggcggtcgaggtcccgctcccggtcccctcggaggagagcccactcccctgagagacggagggaagagaggagtgtgcccactgcctaccgcgtgagccgcagccct

SEQ ID NO: 42552 - DNA, 120 bp, Artificial Sequence
  ENSG00000061936_22 (sequence is synthesized)
ggggccagtaggaagcggacccgctccagaagtccccacgagaagaagaagaagaggcggtcccggtcgcggaccaagtccaaggccaggtctcagtcggtgtcacccagcaagcaggca

SEQ ID NO: 42553 - DNA, 120 bp, Artificial Sequence
  ENSG00000061936_23 (sequence is synthesized)
gcgccccggcccgcggcccccgcggcccactcggcgcactcagccagcgtctcccctgtggagagtcggggctccagccaggagcgctccaggggagtctctcaggaaaaagaagcccag

SEQ ID NO: 42554 - DNA, 120 bp, Artificial Sequence
  ENSG00000061936_24 (sequence is synthesized)
atctcttcagcaatcgtttcttccgtgcagagcaaaatcactcaggatctcatggccaaagtcagagcgatgcttgcagcttccaaaaacctgcaaaccagcgcttcctgagacggggcc

SEQ ID NO: 42555 - DNA, 120 bp, Artificial Sequence
  ENSG00000061936_25 (sequence is synthesized)
agcggaggcagagccgggaggctgcgtgggcttctgggcaggctcacgcagacgccggccacaccatccacctggccgcctccatggacccttggtggcttttgtaaattaatttttgat

SEQ ID NO: 42556 - DNA, 120 bp, Artificial Sequence
  ENSG00000061936_26 (sequence is synthesized)
gacattttgagttttaagatttctgaccagcagtctcttacctgtatatttgtaaatatatcatgtttctgtgaaaatgtattatgaaataaaatgggaggaaacaccttttctagctag

SEQ ID NO: 42557 - DNA, 120 bp, Artificial Sequence
  ENSG00000061936_27 (sequence is synthesized)
agagtcacagcctccccagggacgctgcgcgcggagccctgtcagagcagcgcgtcagtgacagcggcagccgagccaggaagttatcaggcagcctcgaccaccaccagatttgactcc

SEQ ID NO: 42558 - DNA, 120 bp, Artificial Sequence
  ENSG00000061936_28 (sequence is synthesized)
gcagcgtccaccgctgcctgctgtgtgagtcactcagcactgcagtcactggggccgtctgtgtctccatggggggcttgtaatctagatcatatacaggggtccccattgtctgagtag

SEQ ID NO: 42559 - DNA, 120 bp, Artificial Sequence
  ENSG00000061936_29 (sequence is synthesized)
aacttacttcagcaacaaactttttaaaatttttaagtatttaaaaatttactcccattcatttttttatactcactctttctgatattatcttgacagtacccagtggattggaaaaac

SEQ ID NO: 42560 - DNA, 120 bp, Artificial Sequence
  ENSG00000061936_30 (sequence is synthesized)
aggagtctttgcgttctgagaggacctcaggatagtttatatatagagccacaaagaattttcccagcttttgagggcagactgggatttgaaaaaaacaaaaaccaaactctttaactg

SEQ ID NO: 42561 - DNA, 120 bp, Artificial Sequence
  ENSG00000061936_31 (sequence is synthesized)
gggggacaccccctcccctgtccccacctcctcctggtgttctggtggggagggggacggtgaaacctgccctaaggcactggctggaattgcgtgccgcgtccgtctccggagggatcg

SEQ ID NO: 42562 - DNA, 120 bp, Artificial Sequence
  ENSG00000061936_32 (sequence is synthesized)
tctctggtcccgcagcccctctcgacccctcaccctgtcgctgggctgcagttggcgattccgcgcggtgaaagcagccagtgcccagggtcttttcctgagtgcacctgggcctgccgc

SEQ ID NO: 42563 - DNA, 120 bp, Artificial Sequence
  ENSG00000061936_33 (sequence is synthesized)
ccggcgatgccatggggtcgtgcgctgcttttctacttgccgcgctctcactgctcggtgtactgggagggtaccctgggaggcgtgcctttattcttccgaaccgccgctcactgagac

SEQ ID NO: 42564 - DNA, 120 bp, Artificial Sequence
  ENSG00000061936_34 (sequence is synthesized)
agtggctagaagtgtctcttggacctgtgagttagccttaacctgttatgcccccagagccctcagtggagcgcccgtactttgccggcatgacgtttgatttcccggtgataatccgac

SEQ ID NO: 42565 - DNA, 120 bp, Artificial Sequence
  ENSG00000061936_35 (sequence is synthesized)
gagtttgacagattgaggtagtgagcaaagttgcccgtcagttggtggccacttgacttcgtgcggaccctggccttgctcttggaagagatagtgttcttagggctggtttcactgtct

SEQ ID NO: 42566 - DNA, 120 bp, Artificial Sequence
  ENSG00000061936_36 (sequence is synthesized)
cttaagactgaagggtggagctgggatatagatgtgttgtttcttttcaaatcaaacctgctttaggtcgtcactcgagggtgtctagcgattatgggcagtgggggcctgggattaggg

SEQ ID NO: 42567 - DNA, 120 bp, Artificial Sequence
  ENSG00000061936_37 (sequence is synthesized)
atttctaaaggcgtttgatttgaaaaggataacattacatgatgtaggtggtttgctcccctctttcttcccattttttcaatcccccttcccctcgtctctgggttttggggttgttgt

SEQ ID NO: 42568 - DNA, 120 bp, Artificial Sequence
  ENSG00000061936_38 (sequence is synthesized)
ggggtggttttttttcttttttgcctgttcggctacttctggggcccggactgaaaagctaaccatgaccaaccattaaactgtggaatagtctctccacgtgaagaaagcccatcgttt

SEQ ID NO: 42569 - DNA, 120 bp, Artificial Sequence
  ENSG00000061936_39 (sequence is synthesized)
gagaccattaaaactggattcttcatagccctggagcatgactgtagggatgacctctgagctggccagaatggacacattaatgaccaaataggcctttttccatccctgacgtttcct

SEQ ID NO: 42570 - DNA, 120 bp, Artificial Sequence
  ENSG00000061936_40 (sequence is synthesized)
tttggaattagagctcgaaaacgagaactggtgaagggagggccgcggaatcagatcatgtctggatctgatggctccgtgctgtgctcaagcgtgctgtgccttcacaccatggtttat

SEQ ID NO: 42571 - DNA, 120 bp, Artificial Sequence
  ENSG00000061936_41 (sequence is synthesized)
tttatcattaaagtttggtaagcaatgaagtctgagctctttgtacagttttcctatcattctgtacatgatttgagttaggtcttccaaaactggtggggagcaaacgccgcacatgta

SEQ ID NO: 42572 - DNA, 120 bp, Artificial Sequence
  ENSG00000061936_42 (sequence is synthesized)
catgtataatatttttaataataatctacatttgtaagttaaggaggtttacatcaaaatccaattaattttgaaatttaatgaaatgcagtaacttgactaccttggaattttgggcct

SEQ ID NO: 42573 - DNA, 120 bp, Artificial Sequence
  ENSG00000061936_43 (sequence is synthesized)
ttttcctgtaaatgtcttttttggtctacattaatatttttggttcccattacaaaagtcagcattaaaaaaataagcagacttttgtttgtttctctacatttgtttttgaaaccctaa

SEQ ID NO: 42574 - DNA, 120 bp, Artificial Sequence
  ENSG00000061936_44 (sequence is synthesized)
acctgagtgttttaagtaaagttcactaactcattcatttattatctgacagttacacgttgacagcatcctcattgaatcctttatgttaaaagcatagcagaaagtgctcccattact

SEQ ID NO: 42575 - DNA, 120 bp, Artificial Sequence
  ENSG00000061936_45 (sequence is synthesized)
tatttggccaaactactgtttggtccatgcaagagaaacatggaagtgtcttcatgtatgttatttccttgagggtataaagttcagaaggaaatattgataccatatcttctaatagtt

SEQ ID NO: 42576 - DNA, 120 bp, Artificial Sequence
  ENSG00000061936_46 (sequence is synthesized)
ttgctctgttcccagtgaacctccttaaactgcatgtatatgtcactgttccaatgtatgtgtgtctctctatcacgtaacccagcacttatttcctcagccaagtggctagggggcgag

SEQ ID NO: 42577 - DNA, 120 bp, Artificial Sequence
  ENSG00000061936_47 (sequence is synthesized)
cctagccaagattttacctccaatggacgcaagtttctttggtgaagatctctcctgagagttcgggactagcagaaagaagcgaggaaatttcgaccgtttggttcttacggataggta

SEQ ID NO: 42578 - DNA, 120 bp, Artificial Sequence
  ENSG00000061936_48 (sequence is synthesized)
tttatgtatttggtttgtgtgaatgtaagctatgatatttaacttttcagaaaaaaataataattttttgcaagtggcattgaatggttgaccaaaccataatggtaagaactgccagtg

SEQ ID NO: 42579 - DNA, 120 bp, Artificial Sequence
  ENSG00000061936_49 (sequence is synthesized)
aagtgggtaccatttttgctattaatggattgtttgcctttagttataaatgttatcttactgtggaaaggaatttagagtttgttaagataacttgagtttaaaagtaggtgagatatg

SEQ ID NO: 42580 - DNA, 120 bp, Artificial Sequence
  ENSG00000061936_50 (sequence is synthesized)
tccaaattaaatataaatctgggaagagtttttatacttgttttaatatttttgtttattttaatcggtaagtatgtgtgtgtatatatatatacatatataaaacatcacacacgcaca

SEQ ID NO: 42581 - DNA, 120 bp, Artificial Sequence
  ENSG00000061936_51 (sequence is synthesized)
ccaagaaacactgtactcagggccagaagcgcaggctgcagcgtctgttacagacgaattctgaaagaagatgccaggtagggcacctcagggcctggagggcctcacaggaagggctca

SEQ ID NO: 42582 - DNA, 120 bp, Artificial Sequence
  ENSG00000061936_52 (sequence is synthesized)
ggcctgtctgcctttaccaagtacatgttcactctcttaggtgtttgtaggggagtggccaagacagccacgtggctcaggtgtggaatgaagctagaccaggtggaagccgaagggtcg

SEQ ID NO: 42583 - DNA, 120 bp, Artificial Sequence
  ENSG00000061936_53 (sequence is synthesized)
gcctctccaggcaggagagaaggatgatctaagggcaggtgcaggccagaatgtctggaaagcatttctggtgcgggattgccagtttggtgacgtggactctgggaagcaaggggacag
